United States Patent Application Publication US 2018/0305689 A1 - sequence listing, part 95

SEQ ID NO: 1350707 - RNA, 19 nt, Artificial Sequence
  Description of Artificial Sequence: Synthetic oligonucleotide
  Antisense strand to SEQ ID NO: 1350706
aauugcacccagguuuaaa

SEQ ID NO: 1350708 - RNA, 19 nt, Artificial Sequence
  Description of Artificial Sequence: Synthetic oligonucleotide
  Sense strand starting at position 296 of SEQ ID NO: 1242479
ugcagaaccugucucuauu

SEQ ID NO: 1350709 - RNA, 19 nt, Artificial Sequence
  Description of Artificial Sequence: Synthetic oligonucleotide
  Antisense strand to SEQ ID NO: 1350708
aauagagacagguucugca

SEQ ID NO: 1350710 - RNA, 19 nt, Artificial Sequence
  Description of Artificial Sequence: Synthetic oligonucleotide
  Sense strand starting at position 327 of SEQ ID NO: 1242479
ggagaaauaucuuuacgua

SEQ ID NO: 1350711 - RNA, 19 nt, Artificial Sequence
  Description of Artificial Sequence: Synthetic oligonucleotide
  Antisense strand to SEQ ID NO: 1350710
uacguaaagauauuucucc

SEQ ID NO: 1350712 - RNA, 19 nt, Artificial Sequence
  Description of Artificial Sequence: Synthetic oligonucleotide
  Sense strand starting at position 328 of SEQ ID NO: 1242479
gagaaauaucuuuacguau

SEQ ID NO: 1350713 - RNA, 19 nt, Artificial Sequence
  Description of Artificial Sequence: Synthetic oligonucleotide
  Antisense strand to SEQ ID NO: 1350712
auacguaaagauauuucuc

SEQ ID NO: 1350714 - RNA, 19 nt, Artificial Sequence
  Description of Artificial Sequence: Synthetic oligonucleotide
  Sense strand starting at position 357 of SEQ ID NO: 1242479
cuauuauuucuguguguca

SEQ ID NO: 1350715 - RNA, 19 nt, Artificial Sequence
  Description of Artificial Sequence: Synthetic oligonucleotide
  Antisense strand to SEQ ID NO: 1350714
ugacacacagaaauaauag

SEQ ID NO: 1350716 - RNA, 19 nt, Artificial Sequence
  Description of Artificial Sequence: Synthetic oligonucleotide
  Sense strand starting at position 627 of SEQ ID NO: 1242479
gguccugccuccuuaaaga

SEQ ID NO: 1350717 - RNA, 19 nt, Artificial Sequence
  Description of Artificial Sequence: Synthetic oligonucleotide
  Antisense strand to SEQ ID NO: 1350716
ucuuuaaggaggcaggacc

SEQ ID NO: 1350718 - RNA, 19 nt, Artificial Sequence
  Description of Artificial Sequence: Synthetic oligonucleotide
  Sense strand starting at position 659 of SEQ ID NO: 1242479
cuuguaaacgacuguuaau

SEQ ID NO: 1350719 - RNA, 19 nt, Artificial Sequence
  Description of Artificial Sequence: Synthetic oligonucleotide
  Antisense strand to SEQ ID NO: 1350718
auuaacagucguuuacaag

SEQ ID NO: 1350720 - RNA, 19 nt, Artificial Sequence
  Description of Artificial Sequence: Synthetic oligonucleotide
  Sense strand starting at position 778 of SEQ ID NO: 1242479
gccugccugcuccauuuau

SEQ ID NO: 1350721 - RNA, 19 nt, Artificial Sequence
  Description of Artificial Sequence: Synthetic oligonucleotide
  Antisense strand to SEQ ID NO: 1350720
auaaauggagcaggcaggc

SEQ ID NO: 1350722 - RNA, 19 nt, Artificial Sequence
  Description of Artificial Sequence: Synthetic oligonucleotide
  Sense strand starting at position 787 of SEQ ID NO: 1242479
cuccauuuauacgugccaa

SEQ ID NO: 1350723 - RNA, 19 nt, Artificial Sequence
  Description of Artificial Sequence: Synthetic oligonucleotide
  Antisense strand to SEQ ID NO: 1350722
uuggcacguauaaauggag

SEQ ID NO: 1350724 - RNA, 19 nt, Artificial Sequence
  Description of Artificial Sequence: Synthetic oligonucleotide
  Sense strand starting at position 900 of SEQ ID NO: 1242479
ugggacuaguuacugauau

SEQ ID NO: 1350725 - RNA, 19 nt, Artificial Sequence
  Description of Artificial Sequence: Synthetic oligonucleotide
  Antisense strand to SEQ ID NO: 1350724
auaucaguaacuaguccca

SEQ ID NO: 1350726 - RNA, 19 nt, Artificial Sequence
  Description of Artificial Sequence: Synthetic oligonucleotide
  Sense strand starting at position 911 of SEQ ID NO: 1242479
acugauaugcacugagaua

SEQ ID NO: 1350727 - RNA, 19 nt, Artificial Sequence
  Description of Artificial Sequence: Synthetic oligonucleotide
  Antisense strand to SEQ ID NO: 1350726
uaucucagugcauaucagu

SEQ ID NO: 1350728 - RNA, 19 nt, Artificial Sequence
  Description of Artificial Sequence: Synthetic oligonucleotide
  Sense strand starting at position 923 of SEQ ID NO: 1242479
ugagauaaaggguguuugu

SEQ ID NO: 1350729 - RNA, 19 nt, Artificial Sequence
  Description of Artificial Sequence: Synthetic oligonucleotide
  Antisense strand to SEQ ID NO: 1350728
acaaacacccuuuaucuca

SEQ ID NO: 1350730 - RNA, 19 nt, Artificial Sequence
  Description of Artificial Sequence: Synthetic oligonucleotide
  Sense strand starting at position 926 of SEQ ID NO: 1242479
gauaaaggguguuuguauu

SEQ ID NO: 1350731 - RNA, 19 nt, Artificial Sequence
  Description of Artificial Sequence: Synthetic oligonucleotide
  Antisense strand to SEQ ID NO: 1350730
aauacaaacacccuuuauc

SEQ ID NO: 1350732 - RNA, 19 nt, Artificial Sequence
  Description of Artificial Sequence: Synthetic oligonucleotide
  Sense strand starting at position 938 of SEQ ID NO: 1242479
uuguauuugcucgguuuga

SEQ ID NO: 1350733 - RNA, 19 nt, Artificial Sequence
  Description of Artificial Sequence: Synthetic oligonucleotide
  Antisense strand to SEQ ID NO: 1350732
ucaaaccgagcaaauacaa

SEQ ID NO: 1350734 - RNA, 19 nt, Artificial Sequence
  Description of Artificial Sequence: Synthetic oligonucleotide
  Sense strand starting at position 939 of SEQ ID NO: 1242479
uguauuugcucgguuugag

SEQ ID NO: 1350735 - RNA, 19 nt, Artificial Sequence
  Description of Artificial Sequence: Synthetic oligonucleotide
  Antisense strand to SEQ ID NO: 1350734
cucaaaccgagcaaauaca

SEQ ID NO: 1350736 - RNA, 19 nt, Artificial Sequence
  Description of Artificial Sequence: Synthetic oligonucleotide
  Sense strand starting at position 942 of SEQ ID NO: 1242479
auuugcucgguuugaggua

SEQ ID NO: 1350737 - RNA, 19 nt, Artificial Sequence
  Description of Artificial Sequence: Synthetic oligonucleotide
  Antisense strand to SEQ ID NO: 1350736
uaccucaaaccgagcaaau

SEQ ID NO: 1350738 - RNA, 19 nt, Artificial Sequence
  Description of Artificial Sequence: Synthetic oligonucleotide
  Sense strand starting at position 949 of SEQ ID NO: 1242479
cgguuugagguauacuguu

SEQ ID NO: 1350739 - RNA, 19 nt, Artificial Sequence
  Description of Artificial Sequence: Synthetic oligonucleotide
  Antisense strand to SEQ ID NO: 1350738
aacaguauaccucaaaccg

SEQ ID NO: 1350740 - RNA, 19 nt, Artificial Sequence
  Description of Artificial Sequence: Synthetic oligonucleotide
  Sense strand starting at position 957 of SEQ ID NO: 1242479
gguauacuguuauuagaag

SEQ ID NO: 1350741 - RNA, 19 nt, Artificial Sequence
  Description of Artificial Sequence: Synthetic oligonucleotide
  Antisense strand to SEQ ID NO: 1350740
cuucuaauaacaguauacc

SEQ ID NO: 1350742 - RNA, 19 nt, Artificial Sequence
  Description of Artificial Sequence: Synthetic oligonucleotide
  Sense strand starting at position 977 of SEQ ID NO: 1242479
gugacaauaccagguaguu

SEQ ID NO: 1350743 - RNA, 19 nt, Artificial Sequence
  Description of Artificial Sequence: Synthetic oligonucleotide
  Antisense strand to SEQ ID NO: 1350742
aacuaccugguauugucac

SEQ ID NO: 1350744 - RNA, 19 nt, Artificial Sequence
  Description of Artificial Sequence: Synthetic oligonucleotide
  Sense strand starting at position 1022 of SEQ ID NO: 1242479
uagcuaaacugguuugacu

SEQ ID NO: 1350745 - RNA, 19 nt, Artificial Sequence
  Description of Artificial Sequence: Synthetic oligonucleotide
  Antisense strand to SEQ ID NO: 1350744
agucaaaccaguuuagcua

SEQ ID NO: 1350746 - RNA, 19 nt, Artificial Sequence
  Description of Artificial Sequence: Synthetic oligonucleotide
  Sense strand starting at position 1301 of SEQ ID NO: 1242479
guucuugaaguuuaaucuu

SEQ ID NO: 1350747 - RNA, 19 nt, Artificial Sequence
  Description of Artificial Sequence: Synthetic oligonucleotide
  Antisense strand to SEQ ID NO: 1350746
aagauuaaacuucaagaac

SEQ ID NO: 1350748 - RNA, 19 nt, Artificial Sequence
  Description of Artificial Sequence: Synthetic oligonucleotide
  Sense strand starting at position 1325 of SEQ ID NO: 1242479
ggcagaacaucacauuucu

SEQ ID NO: 1350749 - RNA, 19 nt, Artificial Sequence
  Description of Artificial Sequence: Synthetic oligonucleotide
  Antisense strand to SEQ ID NO: 1350748
agaaaugugauguucugcc

SEQ ID NO: 1350750 - RNA, 19 nt, Artificial Sequence
  Description of Artificial Sequence: Synthetic oligonucleotide
  Sense strand starting at position 1893 of SEQ ID NO: 1242479
cgauacauuugcuaaagaa

SEQ ID NO: 1350751 - RNA, 19 nt, Artificial Sequence
  Description of Artificial Sequence: Synthetic oligonucleotide
  Antisense strand to SEQ ID NO: 1350750
uucuuuagcaaauguaucg

SEQ ID NO: 1350752 - RNA, 19 nt, Artificial Sequence
  Description of Artificial Sequence: Synthetic oligonucleotide
  Sense strand starting at position 1945 of SEQ ID NO: 1242479
cgguuuaagagcugacaag

SEQ ID NO: 1350753 - RNA, 19 nt, Artificial Sequence
  Description of Artificial Sequence: Synthetic oligonucleotide
  Antisense strand to SEQ ID NO: 1350752
cuugucagcucuuaaaccg

SEQ ID NO: 1350754 - RNA, 19 nt, Artificial Sequence
  Description of Artificial Sequence: Synthetic oligonucleotide
  Sense strand starting at position 1965 of SEQ ID NO: 1242479
gcgagcguuccucucaucu

SEQ ID NO: 1350755 - RNA, 19 nt, Artificial Sequence
  Description of Artificial Sequence: Synthetic oligonucleotide
  Antisense strand to SEQ ID NO: 1350754
agaugagaggaacgcucgc

SEQ ID NO: 1350756 - RNA, 19 nt, Artificial Sequence
  Description of Artificial Sequence: Synthetic oligonucleotide
  Sense strand starting at position 1980 of SEQ ID NO: 1242479
aucucaacagaacguuaua

SEQ ID NO: 1350757 - RNA, 19 nt, Artificial Sequence
  Description of Artificial Sequence: Synthetic oligonucleotide
  Antisense strand to SEQ ID NO: 1350756
uauaacguucuguugagau

SEQ ID NO: 1350758 - RNA, 19 nt, Artificial Sequence
  Description of Artificial Sequence: Synthetic oligonucleotide
  Sense strand starting at position 2086 of SEQ ID NO: 1242479
agggaaucguguguacacu

SEQ ID NO: 1350759 - RNA, 19 nt, Artificial Sequence
  Description of Artificial Sequence: Synthetic oligonucleotide
  Antisense strand to SEQ ID NO: 1350758
aguguacacacgauucccu

SEQ ID NO: 1350760 - RNA, 19 nt, Artificial Sequence
  Description of Artificial Sequence: Synthetic oligonucleotide
  Sense strand starting at position 2108 of SEQ ID NO: 1242479
acccucuuguccucugaga

SEQ ID NO: 1350761 - RNA, 19 nt, Artificial Sequence
  Description of Artificial Sequence: Synthetic oligonucleotide
  Antisense strand to SEQ ID NO: 1350760
ucucagaggacaagagggu

SEQ ID NO: 1350762 - RNA, 19 nt, Artificial Sequence
  Description of Artificial Sequence: Synthetic oligonucleotide
  Sense strand starting at position 2129 of SEQ ID NO: 1242479
uauuuagcacugugucgaa

SEQ ID NO: 1350763 - RNA, 19 nt, Artificial Sequence
  Description of Artificial Sequence: Synthetic oligonucleotide
  Antisense strand to SEQ ID NO: 1350762
uucgacacagugcuaaaua

SEQ ID NO: 1350764 - RNA, 19 nt, Artificial Sequence
  Description of Artificial Sequence: Synthetic oligonucleotide
  Sense strand starting at position 2146 of SEQ ID NO: 1242479
aaggccucuuauguggaaa

SEQ ID NO: 1350765 - RNA, 19 nt, Artificial Sequence
  Description of Artificial Sequence: Synthetic oligonucleotide
  Antisense strand to SEQ ID NO: 1350764
uuuccacauaagaggccuu

SEQ ID NO: 1350766 - RNA, 19 nt, Artificial Sequence
  Description of Artificial Sequence: Synthetic oligonucleotide
  Sense strand starting at position 2147 of SEQ ID NO: 1242479
aggccucuuauguggaaag

SEQ ID NO: 1350767 - RNA, 19 nt, Artificial Sequence
  Description of Artificial Sequence: Synthetic oligonucleotide
  Antisense strand to SEQ ID NO: 1350766
cuuuccacauaagaggccu

SEQ ID NO: 1350768 - RNA, 19 nt, Artificial Sequence
  Description of Artificial Sequence: Synthetic oligonucleotide
  Sense strand starting at position 2149 of SEQ ID NO: 1242479
gccucuuauguggaaagca

SEQ ID NO: 1350769 - RNA, 19 nt, Artificial Sequence
  Description of Artificial Sequence: Synthetic oligonucleotide
  Antisense strand to SEQ ID NO: 1350768
ugcuuuccacauaagaggc

SEQ ID NO: 1350770 - RNA, 19 nt, Artificial Sequence
  Description of Artificial Sequence: Synthetic oligonucleotide
  Sense strand starting at position 2536 of SEQ ID NO: 1242479
acauaaagauaguacagaa

SEQ ID NO: 1350771 - RNA, 19 nt, Artificial Sequence
  Description of Artificial Sequence: Synthetic oligonucleotide
  Antisense strand to SEQ ID NO: 1350770
uucuguacuaucuuuaugu

SEQ ID NO: 1350772 - RNA, 19 nt, Artificial Sequence
  Description of Artificial Sequence: Synthetic oligonucleotide
  Sense strand starting at position 3047 of SEQ ID NO: 1242479
gaaacuucccgcgagccaa

SEQ ID NO: 1350773 - RNA, 19 nt, Artificial Sequence
  Description of Artificial Sequence: Synthetic oligonucleotide
  Antisense strand to SEQ ID NO: 1350772
uuggcucgcgggaaguuuc

SEQ ID NO: 1350774 - RNA, 19 nt, Artificial Sequence
  Description of Artificial Sequence: Synthetic oligonucleotide
  Sense strand starting at position 3066 of SEQ ID NO: 1242479
aggacuuaucacggcagca

SEQ ID NO: 1350775 - RNA, 19 nt, Artificial Sequence
  Description of Artificial Sequence: Synthetic oligonucleotide
  Antisense strand to SEQ ID NO: 1350774
ugcugccgugauaaguccu

SEQ ID NO: 1350776 - RNA, 19 nt, Artificial Sequence
  Description of Artificial Sequence: Synthetic oligonucleotide
  Sense strand starting at position 3401 of SEQ ID NO: 1242479
ggaauucgucuuugauccu

SEQ ID NO: 1350777 - RNA, 19 nt, Artificial Sequence
  Description of Artificial Sequence: Synthetic oligonucleotide
  Antisense strand to SEQ ID NO: 1350776
aggaucaaagacgaauucc

SEQ ID NO: 1350778 - RNA, 19 nt, Artificial Sequence
  Description of Artificial Sequence: Synthetic oligonucleotide
  Sense strand starting at position 3426 of SEQ ID NO: 1242479
agacucagccaccgugaau

SEQ ID NO: 1350779 - RNA, 19 nt, Artificial Sequence
  Description of Artificial Sequence: Synthetic oligonucleotide
  Antisense strand to SEQ ID NO: 1350778
auucacgguggcugagucu

SEQ ID NO: 1350780 - RNA, 19 nt, Artificial Sequence
  Description of Artificial Sequence: Synthetic oligonucleotide
  Sense strand starting at position 3940 of SEQ ID NO: 1242479
uuuacccugccaugauaga

SEQ ID NO: 1350781 - RNA, 19 nt, Artificial Sequence
  Description of Artificial Sequence: Synthetic oligonucleotide
  Antisense strand to SEQ ID NO: 1350780
ucuaucauggcaggguaaa

SEQ ID NO: 1350782 - RNA, 19 nt, Artificial Sequence
  Description of Artificial Sequence: Synthetic oligonucleotide
  Sense strand starting at position 3941 of SEQ ID NO: 1242479
uuacccugccaugauagau

SEQ ID NO: 1350783 - RNA, 19 nt, Artificial Sequence
  Description of Artificial Sequence: Synthetic oligonucleotide
  Antisense strand to SEQ ID NO: 1350782
aucuaucauggcaggguaa

SEQ ID NO: 1350784 - RNA, 19 nt, Artificial Sequence
  Description of Artificial Sequence: Synthetic oligonucleotide
  Sense strand starting at position 3975 of SEQ ID NO: 1242479
guugcaauuacucaccgga

SEQ ID NO: 1350785 - RNA, 19 nt, Artificial Sequence
  Description of Artificial Sequence: Synthetic oligonucleotide
  Antisense strand to SEQ ID NO: 1350784
uccggugaguaauugcaac

SEQ ID NO: 1350786 - RNA, 19 nt, Artificial Sequence
  Description of Artificial Sequence: Synthetic oligonucleotide
  Sense strand starting at position 93 of SEQ ID NO: 1242480
uaaaguuagggauguagca

SEQ ID NO: 1350787 - RNA, 19 nt, Artificial Sequence
  Description of Artificial Sequence: Synthetic oligonucleotide
  Antisense strand to SEQ ID NO: 1350786
ugcuacaucccuaacuuua

SEQ ID NO: 1350788 - RNA, 19 nt, Artificial Sequence
  Description of Artificial Sequence: Synthetic oligonucleotide
  Sense strand starting at position 958 of SEQ ID NO: 1242480
uggcuugcugcagccauaa

SEQ ID NO: 1350789 - RNA, 19 nt, Artificial Sequence
  Description of Artificial Sequence: Synthetic oligonucleotide
  Antisense strand to SEQ ID NO: 1350788
uuauggcugcagcaagcca

SEQ ID NO: 1350790 - RNA, 19 nt, Artificial Sequence
  Description of Artificial Sequence: Synthetic oligonucleotide
  Sense strand starting at position 973 of SEQ ID NO: 1242480
auaaacuccuggguugaaa

SEQ ID NO: 1350791 - RNA, 19 nt, Artificial Sequence
  Description of Artificial Sequence: Synthetic oligonucleotide
  Antisense strand to SEQ ID NO: 1350790
uuucaacccaggaguuuau

SEQ ID NO: 1350792 - RNA, 19 nt, Artificial Sequence
  Description of Artificial Sequence: Synthetic oligonucleotide
  Sense strand starting at position 992 of SEQ ID NO: 1242480
cuacuuuccugcccugaga

SEQ ID NO: 1350793 - RNA, 19 nt, Artificial Sequence
  Description of Artificial Sequence: Synthetic oligonucleotide
  Antisense strand to SEQ ID NO: 1350792
ucucagggcaggaaaguag

SEQ ID NO: 1350794 - RNA, 19 nt, Artificial Sequence
  Description of Artificial Sequence: Synthetic oligonucleotide
  Sense strand starting at position 1222 of SEQ ID NO: 1242480
cuuacugauuuggaaggga

SEQ ID NO: 1350795 - RNA, 19 nt, Artificial Sequence
  Description of Artificial Sequence: Synthetic oligonucleotide
  Antisense strand to SEQ ID NO: 1350794
ucccuuccaaaucaguaag

SEQ ID NO: 1350796 - RNA, 19 nt, Artificial Sequence
  Description of Artificial Sequence: Synthetic oligonucleotide
  Sense strand starting at position 1280 of SEQ ID NO: 1242480
aagacaaauugagagaaga

SEQ ID NO: 1350797 - RNA, 19 nt, Artificial Sequence
  Description of Artificial Sequence: Synthetic oligonucleotide
  Antisense strand to SEQ ID NO: 1350796
ucuucucucaauuugucuu

SEQ ID NO: 1350798 - RNA, 19 nt, Artificial Sequence
  Description of Artificial Sequence: Synthetic oligonucleotide
  Sense strand starting at position 1432 of SEQ ID NO: 1242480
uuuauaaagucccugucaa

SEQ ID NO: 1350799 - RNA, 19 nt, Artificial Sequence
  Description of Artificial Sequence: Synthetic oligonucleotide
  Antisense strand to SEQ ID NO: 1350798
uugacagggacuuuauaaa

SEQ ID NO: 1350800 - RNA, 19 nt, Artificial Sequence
  Description of Artificial Sequence: Synthetic oligonucleotide
  Sense strand starting at position 1433 of SEQ ID NO: 1242480
uuauaaagucccugucaaa

SEQ ID NO: 1350801 - RNA, 19 nt, Artificial Sequence
  Description of Artificial Sequence: Synthetic oligonucleotide
  Antisense strand to SEQ ID NO: 1350800
uuugacagggacuuuauaa

SEQ ID NO: 1350802 - RNA, 19 nt, Artificial Sequence
  Description of Artificial Sequence: Synthetic oligonucleotide
  Sense strand starting at position 1561 of SEQ ID NO: 1242480
uugcacuuucuugggacaa

SEQ ID NO: 1350803 - RNA, 19 nt, Artificial Sequence
  Description of Artificial Sequence: Synthetic oligonucleotide
  Antisense strand to SEQ ID NO: 1350802
uugucccaagaaagugcaa

SEQ ID NO: 1350804 - RNA, 19 nt, Artificial Sequence
  Description of Artificial Sequence: Synthetic oligonucleotide
  Sense strand starting at position 1571 of SEQ ID NO: 1242480
uugggacaaugagaugaua

SEQ ID NO: 1350805 - RNA, 19 nt, Artificial Sequence
  Description of Artificial Sequence: Synthetic oligonucleotide
  Antisense strand to SEQ ID NO: 1350804
uaucaucucauugucccaa

SEQ ID NO: 1350806 - RNA, 19 nt, Artificial Sequence
  Description of Artificial Sequence: Synthetic oligonucleotide
  Sense strand starting at position 1591 of SEQ ID NO: 1242480
augagaaugugaucuguaa

SEQ ID NO: 1350807 - RNA, 19 nt, Artificial Sequence
  Description of Artificial Sequence: Synthetic oligonucleotide
  Antisense strand to SEQ ID NO: 1350806
uuacagaucacauucucau

SEQ ID NO: 1350808 - RNA, 19 nt, Artificial Sequence
  Description of Artificial Sequence: Synthetic oligonucleotide
  Sense strand starting at position 1595 of SEQ ID NO: 1242480
gaaugugaucuguaaaccg

SEQ ID NO: 1350809 - RNA, 19 nt, Artificial Sequence
  Description of Artificial Sequence: Synthetic oligonucleotide
  Antisense strand to SEQ ID NO: 1350808
cgguuuacagaucacauuc

SEQ ID NO: 1350810 - RNA, 19 nt, Artificial Sequence
  Description of Artificial Sequence: Synthetic oligonucleotide
  Sense strand starting at position 1615 of SEQ ID NO: 1242480
agagcauaauccucaugca

SEQ ID NO: 1350811 - RNA, 19 nt, Artificial Sequence
  Description of Artificial Sequence: Synthetic oligonucleotide
  Antisense strand to SEQ ID NO: 1350810
ugcaugaggauuaugcucu

SEQ ID NO: 1350812 - RNA, 19 nt, Artificial Sequence
  Description of Artificial Sequence: Synthetic oligonucleotide
  Sense strand starting at position 1680 of SEQ ID NO: 1242480
ugggcauggucacuguaau

SEQ ID NO: 1350813 - RNA, 19 nt, Artificial Sequence
  Description of Artificial Sequence: Synthetic oligonucleotide
  Antisense strand to SEQ ID NO: 1350812
auuacagugaccaugccca

SEQ ID NO: 1350814 - RNA, 19 nt, Artificial Sequence
  Description of Artificial Sequence: Synthetic oligonucleotide
  Sense strand starting at position 1721 of SEQ ID NO: 1242480
gguagugucugaucuaaga

SEQ ID NO: 1350815 - RNA, 19 nt, Artificial Sequence
  Description of Artificial Sequence: Synthetic oligonucleotide
  Antisense strand to SEQ ID NO: 1350814
ucuuagaucagacacuacc

SEQ ID NO: 1350816 - RNA, 19 nt, Artificial Sequence
  Description of Artificial Sequence: Synthetic oligonucleotide
  Sense strand starting at position 2016 of SEQ ID NO: 1242480
uggacagucucacuuagaa

SEQ ID NO: 1350817 - RNA, 19 nt, Artificial Sequence
  Description of Artificial Sequence: Synthetic oligonucleotide
  Antisense strand to SEQ ID NO: 1350816
uucuaagugagacugucca

SEQ ID NO: 1350818 - RNA, 19 nt, Artificial Sequence
  Description of Artificial Sequence: Synthetic oligonucleotide
  Sense strand starting at position 2026 of SEQ ID NO: 1242480
cacuuagaaugucuggaaa

SEQ ID NO: 1350819 - RNA, 19 nt, Artificial Sequence
  Description of Artificial Sequence: Synthetic oligonucleotide
  Antisense strand to SEQ ID NO: 1350818
uuuccagacauucuaagug

SEQ ID NO: 1350820 - RNA, 19 nt, Artificial Sequence
  Description of Artificial Sequence: Synthetic oligonucleotide
  Sense strand starting at position 2051 of SEQ ID NO: 1242480
agagacaaacccugauguu

SEQ ID NO: 1350821 - RNA, 19 nt, Artificial Sequence
  Description of Artificial Sequence: Synthetic oligonucleotide
  Antisense strand to SEQ ID NO: 1350820
aacaucaggguuugucucu

SEQ ID NO: 1350822 - RNA, 19 nt, Artificial Sequence
  Description of Artificial Sequence: Synthetic oligonucleotide
  Sense strand starting at position 2167 of SEQ ID NO: 1242480
aguacacuuuagguacaaa

SEQ ID NO: 1350823 - RNA, 19 nt, Artificial Sequence
  Description of Artificial Sequence: Synthetic oligonucleotide
  Antisense strand to SEQ ID NO: 1350822
uuuguaccuaaaguguacu

SEQ ID NO: 1350824 - RNA, 19 nt, Artificial Sequence
  Description of Artificial Sequence: Synthetic oligonucleotide
  Sense strand starting at position 2241 of SEQ ID NO: 1242480
ggcuaagaguuauuacuac

SEQ ID NO: 1350825 - RNA, 19 nt, Artificial Sequence
  Description of Artificial Sequence: Synthetic oligonucleotide
  Antisense strand to SEQ ID NO: 1350824
guaguaauaacucuuagcc

SEQ ID NO: 1350826 - RNA, 19 nt, Artificial Sequence
  Description of Artificial Sequence: Synthetic oligonucleotide
  Sense strand starting at position 2353 of SEQ ID NO: 1242480
agguccuaggaguggaauu

SEQ ID NO: 1350827 - RNA, 19 nt, Artificial Sequence
  Description of Artificial Sequence: Synthetic oligonucleotide
  Antisense strand to SEQ ID NO: 1350826
aauuccacuccuaggaccu

SEQ ID NO: 1350828 - RNA, 19 nt, Artificial Sequence
  Description of Artificial Sequence: Synthetic oligonucleotide
  Sense strand starting at position 2365 of SEQ ID NO: 1242480
uggaauuucuaggguuaau

SEQ ID NO: 1350829 - RNA, 19 nt, Artificial Sequence
  Description of Artificial Sequence: Synthetic oligonucleotide
  Antisense strand to SEQ ID NO: 1350828
auuaacccuagaaauucca

SEQ ID NO: 1350830 - RNA, 19 nt, Artificial Sequence
  Description of Artificial Sequence: Synthetic oligonucleotide
  Sense strand starting at position 2374 of SEQ ID NO: 1242480
uaggguuaauguccucaag

SEQ ID NO: 1350831 - RNA, 19 nt, Artificial Sequence
  Description of Artificial Sequence: Synthetic oligonucleotide
  Antisense strand to SEQ ID NO: 1350830
cuugaggacauuaacccua

SEQ ID NO: 1350832 - RNA, 19 nt, Artificial Sequence
  Description of Artificial Sequence: Synthetic oligonucleotide
  Sense strand starting at position 2377 of SEQ ID NO: 1242480
gguuaauguccucaaggca

SEQ ID NO: 1350833 - RNA, 19 nt, Artificial Sequence
  Description of Artificial Sequence: Synthetic oligonucleotide
  Antisense strand to SEQ ID NO: 1350832
ugccuugaggacauuaacc

SEQ ID NO: 1350834 - RNA, 19 nt, Artificial Sequence
  Description of Artificial Sequence: Synthetic oligonucleotide
  Sense strand starting at position 2416 of SEQ ID NO: 1242480
accuaugacuggguccuaa

SEQ ID NO: 1350835 - RNA, 19 nt, Artificial Sequence
  Description of Artificial Sequence: Synthetic oligonucleotide
  Antisense strand to SEQ ID NO: 1350834
uuaggacccagucauaggu

SEQ ID NO: 1350836 - RNA, 19 nt, Artificial Sequence
  Description of Artificial Sequence: Synthetic oligonucleotide
  Sense strand starting at position 3182 of SEQ ID NO: 1242480
acagguuuagguuaaguuu

SEQ ID NO: 1350837 - RNA, 19 nt, Artificial Sequence
  Description of Artificial Sequence: Synthetic oligonucleotide
  Antisense strand to SEQ ID NO: 1350836
aaacuuaaccuaaaccugu

SEQ ID NO: 1350838 - RNA, 19 nt, Artificial Sequence
  Description of Artificial Sequence: Synthetic oligonucleotide
  Sense strand starting at position 3185 of SEQ ID NO: 1242480
gguuuagguuaaguuugaa

SEQ ID NO: 1350839 - RNA, 19 nt, Artificial Sequence
  Description of Artificial Sequence: Synthetic oligonucleotide
  Antisense strand to SEQ ID NO: 1350838
uucaaacuuaaccuaaacc

SEQ ID NO: 1350840 - RNA, 19 nt, Artificial Sequence
  Description of Artificial Sequence: Synthetic oligonucleotide
  Sense strand starting at position 3188 of SEQ ID NO: 1242480
uuagguuaaguuugaacuu

SEQ ID NO: 1350841 - RNA, 19 nt, Artificial Sequence
  Description of Artificial Sequence: Synthetic oligonucleotide
  Antisense strand to SEQ ID NO: 1350840
aaguucaaacuuaaccuaa

SEQ ID NO: 1350842 - RNA, 19 nt, Artificial Sequence
  Description of Artificial Sequence: Synthetic oligonucleotide
  Sense strand starting at position 3197 of SEQ ID NO: 1242480
guuugaacuugcucauaaa

SEQ ID NO: 1350843 - RNA, 19 nt, Artificial Sequence
  Description of Artificial Sequence: Synthetic oligonucleotide
  Antisense strand to SEQ ID NO: 1350842
uuuaugagcaaguucaaac

SEQ ID NO: 1350844 - RNA, 19 nt, Artificial Sequence
  Description of Artificial Sequence: Synthetic oligonucleotide
  Sense strand starting at position 3268 of SEQ ID NO: 1242480
gguggcucacgguguauuu

SEQ ID NO: 1350845 - RNA, 19 nt, Artificial Sequence
  Description of Artificial Sequence: Synthetic oligonucleotide
  Antisense strand to SEQ ID NO: 1350844
aaauacaccgugagccacc

SEQ ID NO: 1350846 - RNA, 19 nt, Artificial Sequence
  Description of Artificial Sequence: Synthetic oligonucleotide
  Sense strand starting at position 3286 of SEQ ID NO: 1242480
uccagugccugcucuauuu

SEQ ID NO: 1350847 - RNA, 19 nt, Artificial Sequence
  Description of Artificial Sequence: Synthetic oligonucleotide
  Antisense strand to SEQ ID NO: 1350846
aaauagagcaggcacugga

SEQ ID NO: 1350848 - RNA, 19 nt, Artificial Sequence
  Description of Artificial Sequence: Synthetic oligonucleotide
  Sense strand starting at position 3411 of SEQ ID NO: 1242480
uuucuuugugccugaagaa

SEQ ID NO: 1350849 - RNA, 19 nt, Artificial Sequence
  Description of Artificial Sequence: Synthetic oligonucleotide
  Antisense strand to SEQ ID NO: 1350848
uucuucaggcacaaagaaa

SEQ ID NO: 1350850 - RNA, 19 nt, Artificial Sequence
  Description of Artificial Sequence: Synthetic oligonucleotide
  Sense strand starting at position 3571 of SEQ ID NO: 1242480
guaguaaaccuggacucca

SEQ ID NO: 1350851 - RNA, 19 nt, Artificial Sequence
  Description of Artificial Sequence: Synthetic oligonucleotide
  Antisense strand to SEQ ID NO: 1350850
uggaguccagguuuacuac

SEQ ID NO: 1350852 - RNA, 19 nt, Artificial Sequence
  Description of Artificial Sequence: Synthetic oligonucleotide
  Sense strand starting at position 3589 of SEQ ID NO: 1242480
agcuucuucccacggaaga

SEQ ID NO: 1350853 - RNA, 19 nt, Artificial Sequence
  Description of Artificial Sequence: Synthetic oligonucleotide
  Antisense strand to SEQ ID NO: 1350852
ucuuccgugggaagaagcu

SEQ ID NO: 1350854 - RNA, 19 nt, Artificial Sequence
  Description of Artificial Sequence: Synthetic oligonucleotide
  Sense strand starting at position 3590 of SEQ ID NO: 1242480
gcuucuucccacggaagaa

SEQ ID NO: 1350855 - RNA, 19 nt, Artificial Sequence
  Description of Artificial Sequence: Synthetic oligonucleotide
  Antisense strand to SEQ ID NO: 1350854
uucuuccgugggaagaagc

SEQ ID NO: 1350856 - RNA, 19 nt, Artificial Sequence
  Description of Artificial Sequence: Synthetic oligonucleotide
  Sense strand starting at position 3899 of SEQ ID NO: 1242480
uugugaaacuauuccuuag

SEQ ID NO: 1350857 - RNA, 19 nt, Artificial Sequence
  Description of Artificial Sequence: Synthetic oligonucleotide
  Antisense strand to SEQ ID NO: 1350856
cuaaggaauaguuucacaa

SEQ ID NO: 1350858 - RNA, 19 nt, Artificial Sequence
  Description of Artificial Sequence: Synthetic oligonucleotide
  Sense strand starting at position 3901 of SEQ ID NO: 1242480
gugaaacuauuccuuaguu

SEQ ID NO: 1350859 - RNA, 19 nt, Artificial Sequence
  Description of Artificial Sequence: Synthetic oligonucleotide
  Antisense strand to SEQ ID NO: 1350858
aacuaaggaauaguuucac

SEQ ID NO: 1350860 - RNA, 19 nt, Artificial Sequence
  Description of Artificial Sequence: Synthetic oligonucleotide
  Sense strand starting at position 3954 of SEQ ID NO: 1242480
agcaguguucacugggaau

SEQ ID NO: 1350861 - RNA, 19 nt, Artificial Sequence
  Description of Artificial Sequence: Synthetic oligonucleotide
  Antisense strand to SEQ ID NO: 1350860
auucccagugaacacugcu

SEQ ID NO: 1350862 - RNA, 19 nt, Artificial Sequence
  Description of Artificial Sequence: Synthetic oligonucleotide
  Sense strand starting at position 3965 of SEQ ID NO: 1242480
cugggaaucugccugaaac

SEQ ID NO: 1350863 - RNA, 19 nt, Artificial Sequence
  Description of Artificial Sequence: Synthetic oligonucleotide
  Antisense strand to SEQ ID NO: 1350862
guuucaggcagauucccag

SEQ ID NO: 1350864 - RNA, 19 nt, Artificial Sequence
  Description of Artificial Sequence: Synthetic oligonucleotide
  Sense strand starting at position 3966 of SEQ ID NO: 1242480
ugggaaucugccugaaacu

SEQ ID NO: 1350865 - RNA, 19 nt, Artificial Sequence
  Description of Artificial Sequence: Synthetic oligonucleotide
  Antisense strand to SEQ ID NO: 1350864
aguuucaggcagauuccca

SEQ ID NO: 1350866 - RNA, 19 nt, Artificial Sequence
  Description of Artificial Sequence: Synthetic oligonucleotide
  Sense strand starting at position 138 of SEQ ID NO: 1242481
agaggaagucuguggcaaa

SEQ ID NO: 1350867 - RNA, 19 nt, Artificial Sequence
  Description of Artificial Sequence: Synthetic oligonucleotide
  Antisense strand to SEQ ID NO: 1350866
uuugccacagacuuccucu

SEQ ID NO: 1350868 - RNA, 19 nt, Artificial Sequence
  Description of Artificial Sequence: Synthetic oligonucleotide
  Sense strand starting at position 276 of SEQ ID NO: 1242481
ucacacugguacuucgaua

SEQ ID NO: 1350869 - RNA, 19 nt, Artificial Sequence
  Description of Artificial Sequence: Synthetic oligonucleotide
  Antisense strand to SEQ ID NO: 1350868
uaucgaaguaccaguguga

SEQ ID NO: 1350870 - RNA, 19 nt, Artificial Sequence
  Description of Artificial Sequence: Synthetic oligonucleotide
  Sense strand starting at position 281 of SEQ ID NO: 1242481
cugguacuucgauaagcca

SEQ ID NO: 1350871 - RNA, 19 nt, Artificial Sequence
  Description of Artificial Sequence: Synthetic oligonucleotide
  Antisense strand to SEQ ID NO: 1350870
uggcuuaucgaaguaccag

SEQ ID NO: 1350872 - RNA, 19 nt, Artificial Sequence
  Description of Artificial Sequence: Synthetic oligonucleotide
  Sense strand starting at position 397 of SEQ ID NO: 1242481
caaccuaaugagugugcaa

SEQ ID NO: 1350873 - RNA, 19 nt, Artificial Sequence
  Description of Artificial Sequence: Synthetic oligonucleotide
  Antisense strand to SEQ ID NO: 1350872
uugcacacucauuagguug

SEQ ID NO: 1350874 - RNA, 19 nt, Artificial Sequence
  Description of Artificial Sequence: Synthetic oligonucleotide
  Sense strand starting at position 399 of SEQ ID NO: 1242481
accuaaugagugugcaaug

SEQ ID NO: 1350875 - RNA, 19 nt, Artificial Sequence
  Description of Artificial Sequence: Synthetic oligonucleotide
  Antisense strand to SEQ ID NO: 1350874
cauugcacacucauuaggu

SEQ ID NO: 1350876 - RNA, 19 nt, Artificial Sequence
  Description of Artificial Sequence: Synthetic oligonucleotide
  Sense strand starting at position 404 of SEQ ID NO: 1242481
augagugugcaauguauuu

SEQ ID NO: 1350877 - RNA, 19 nt, Artificial Sequence
  Description of Artificial Sequence: Synthetic oligonucleotide
  Antisense strand to SEQ ID NO: 1350876
aaauacauugcacacucau

SEQ ID NO: 1350878 - RNA, 19 nt, Artificial Sequence
  Description of Artificial Sequence: Synthetic oligonucleotide
  Sense strand starting at position 627 of SEQ ID NO: 1242481
augaaauuauagucagagc

SEQ ID NO: 1350879 - RNA, 19 nt, Artificial Sequence
  Description of Artificial Sequence: Synthetic oligonucleotide
  Antisense strand to SEQ ID NO: 1350878
gcucugacuauaauuucau

SEQ ID NO: 1350880 - RNA, 19 nt, Artificial Sequence
  Description of Artificial Sequence: Synthetic oligonucleotide
  Sense strand starting at position 788 of SEQ ID NO: 1242481
augacuuuaggucgucaga

SEQ ID NO: 1350881 - RNA, 19 nt, Artificial Sequence
  Description of Artificial Sequence: Synthetic oligonucleotide
  Antisense strand to SEQ ID NO: 1350880
ucugacgaccuaaagucau

SEQ ID NO: 1350882 - RNA, 19 nt, Artificial Sequence
  Description of Artificial Sequence: Synthetic oligonucleotide
  Sense strand starting at position 863 of SEQ ID NO: 1242481
ucaagaucccaguagcaaa

SEQ ID NO: 1350883 - RNA, 19 nt, Artificial Sequence
  Description of Artificial Sequence: Synthetic oligonucleotide
  Antisense strand to SEQ ID NO: 1350882
uuugcuacugggaucuuga

SEQ ID NO: 1350884 - RNA, 19 nt, Artificial Sequence
  Description of Artificial Sequence: Synthetic oligonucleotide
  Sense strand starting at position 1060 of SEQ ID NO: 1242481
gaaauaaggugacaaauga

SEQ ID NO: 1350885 - RNA, 19 nt, Artificial Sequence
  Description of Artificial Sequence: Synthetic oligonucleotide
  Antisense strand to SEQ ID NO: 1350884
ucauuugucaccuuauuuc

SEQ ID NO: 1350886 - RNA, 19 nt, Artificial Sequence
  Description of Artificial Sequence: Synthetic oligonucleotide
  Sense strand starting at position 1070 of SEQ ID NO: 1242481
gacaaaugagcgugggauu

SEQ ID NO: 1350887 - RNA, 19 nt, Artificial Sequence
  Description of Artificial Sequence: Synthetic oligonucleotide
  Antisense strand to SEQ ID NO: 1350886
aaucccacgcucauuuguc

SEQ ID NO: 1350888 - RNA, 19 nt, Artificial Sequence
  Description of Artificial Sequence: Synthetic oligonucleotide
  Sense strand starting at position 1152 of SEQ ID NO: 1242481
cuguguaucuacccuuaau

SEQ ID NO: 1350889 - RNA, 19 nt, Artificial Sequence
  Description of Artificial Sequence: Synthetic oligonucleotide
  Antisense strand to SEQ ID NO: 1350888
auuaaggguagauacacag

SEQ ID NO: 1350890 - RNA, 19 nt, Artificial Sequence
  Description of Artificial Sequence: Synthetic oligonucleotide
  Sense strand starting at position 1203 of SEQ ID NO: 1242481
aauggaaagugacuucgua

SEQ ID NO: 1350891 - RNA, 19 nt, Artificial Sequence
  Description of Artificial Sequence: Synthetic oligonucleotide
  Antisense strand to SEQ ID NO: 1350890
uacgaagucacuuuccauu

SEQ ID NO: 1350892 - RNA, 19 nt, Artificial Sequence
  Description of Artificial Sequence: Synthetic oligonucleotide
  Sense strand starting at position 1207 of SEQ ID NO: 1242481
gaaagugacuucguauacu

SEQ ID NO: 1350893 - RNA, 19 nt, Artificial Sequence
  Description of Artificial Sequence: Synthetic oligonucleotide
  Antisense strand to SEQ ID NO: 1350892
aguauacgaagucacuuuc

SEQ ID NO: 1350894 - RNA, 19 nt, Artificial Sequence
  Description of Artificial Sequence: Synthetic oligonucleotide
  Sense strand starting at position 1210 of SEQ ID NO: 1242481
agugacuucguauacuaaa

SEQ ID NO: 1350895 - RNA, 19 nt, Artificial Sequence
  Description of Artificial Sequence: Synthetic oligonucleotide
  Antisense strand to SEQ ID NO: 1350894
uuuaguauacgaagucacu

SEQ ID NO: 1350896 - RNA, 19 nt, Artificial Sequence
  Description of Artificial Sequence: Synthetic oligonucleotide
  Sense strand starting at position 1217 of SEQ ID NO: 1242481
ucguauacuaaagggaauu

SEQ ID NO: 1350897 - RNA, 19 nt, Artificial Sequence
  Description of Artificial Sequence: Synthetic oligonucleotide
  Antisense strand to SEQ ID NO: 1350896
aauucccuuuaguauacga

SEQ ID NO: 1350898 - RNA, 19 nt, Artificial Sequence
  Description of Artificial Sequence: Synthetic oligonucleotide
  Sense strand starting at position 1314 of SEQ ID NO: 1242481
ugggaacuacugugaaugu

SEQ ID NO: 1350899 - RNA, 19 nt, Artificial Sequence
  Description of Artificial Sequence: Synthetic oligonucleotide
  Antisense strand to SEQ ID NO: 1350898
acauucacaguaguuccca

SEQ ID NO: 1350900 - RNA, 19 nt, Artificial Sequence
  Description of Artificial Sequence: Synthetic oligonucleotide
  Sense strand starting at position 1349 of SEQ ID NO: 1242481
uccuuuauugacugagcca

SEQ ID NO: 1350901 - RNA, 19 nt, Artificial Sequence
  Description of Artificial Sequence: Synthetic oligonucleotide
  Antisense strand to SEQ ID NO: 1350900
uggcucagucaauaaagga

SEQ ID NO: 1350902 - RNA, 19 nt, Artificial Sequence
  Description of Artificial Sequence: Synthetic oligonucleotide
  Sense strand starting at position 1368 of SEQ ID NO: 1242481
gcgccugcgauugcucuaa

SEQ ID NO: 1350903 - RNA, 19 nt, Artificial Sequence
  Description of Artificial Sequence: Synthetic oligonucleotide
  Antisense strand to SEQ ID NO: 1350902
uuagagcaaucgcaggcgc

SEQ ID NO: 1350904 - RNA, 19 nt, Artificial Sequence
  Description of Artificial Sequence: Synthetic oligonucleotide
  Sense strand starting at position 1372 of SEQ ID NO: 1242481
cugcgauugcucuaaauuu

SEQ ID NO: 1350905 - RNA, 19 nt, Artificial Sequence
  Description of Artificial Sequence: Synthetic oligonucleotide
  Antisense strand to SEQ ID NO: 1350904
aaauuuagagcaaucgcag

SEQ ID NO: 1350906 - RNA, 19 nt, Artificial Sequence
  Description of Artificial Sequence: Synthetic oligonucleotide
  Sense strand starting at position 1387 of SEQ ID NO: 1242481
auuuaaggaucguacaauu

SEQ ID NO: 1350907 - RNA, 19 nt, Artificial Sequence
  Description of Artificial Sequence: Synthetic oligonucleotide
  Antisense strand to SEQ ID NO: 1350906
aauuguacgauccuuaaau

SEQ ID NO: 1350908 - RNA, 19 nt, Artificial Sequence
  Description of Artificial Sequence: Synthetic oligonucleotide
  Sense strand starting at position 1412 of SEQ ID NO: 1242481
acacguuaucccgggacaa

SEQ ID NO: 1350909 - RNA, 19 nt, Artificial Sequence
  Description of Artificial Sequence: Synthetic oligonucleotide
  Antisense strand to SEQ ID NO: 1350908
uugucccgggauaacgugu

SEQ ID NO: 1350910 - RNA, 19 nt, Artificial Sequence
  Description of Artificial Sequence: Synthetic oligonucleotide
  Sense strand starting at position 1413 of SEQ ID NO: 1242481
cacguuaucccgggacaag

SEQ ID NO: 1350911 - RNA, 19 nt, Artificial Sequence
  Description of Artificial Sequence: Synthetic oligonucleotide
  Antisense strand to SEQ ID NO: 1350910
cuugucccgggauaacgug

SEQ ID NO: 1350912 - RNA, 19 nt, Artificial Sequence
  Description of Artificial Sequence: Synthetic oligonucleotide
  Sense strand starting at position 1414 of SEQ ID NO: 1242481
acguuaucccgggacaaga

SEQ ID NO: 1350913 - RNA, 19 nt, Artificial Sequence
  Description of Artificial Sequence: Synthetic oligonucleotide
  Antisense strand to SEQ ID NO: 1350912
ucuugucccgggauaacgu

SEQ ID NO: 1350914 - RNA, 19 nt, Artificial Sequence
  Description of Artificial Sequence: Synthetic oligonucleotide
  Sense strand starting at position 1475 of SEQ ID NO: 1242481
ccaauaagcugcucaugaa

SEQ ID NO: 1350915 - RNA, 19 nt, Artificial Sequence
  Description of Artificial Sequence: Synthetic oligonucleotide
  Antisense strand to SEQ ID NO: 1350914
uucaugagcagcuuauugg

SEQ ID NO: 1350916 - RNA, 19 nt, Artificial Sequence
  Description of Artificial Sequence: Synthetic oligonucleotide
  Sense strand starting at position 1534 of SEQ ID NO: 1242481
acgaaacgucaacagagua

SEQ ID NO: 1350917 - RNA, 19 nt, Artificial Sequence
  Description of Artificial Sequence: Synthetic oligonucleotide
  Antisense strand to SEQ ID NO: 1350916
uacucuguugacguuucgu

SEQ ID NO: 1350918 - RNA, 19 nt, Artificial Sequence
  Description of Artificial Sequence: Synthetic oligonucleotide
  Sense strand starting at position 2511 of SEQ ID NO: 1242481
gcagcacuuccagaaaguu

SEQ ID NO: 1350919 - RNA, 19 nt, Artificial Sequence
  Description of Artificial Sequence: Synthetic oligonucleotide
  Antisense strand to SEQ ID NO: 1350918
aacuuucuggaagugcugc

SEQ ID NO: 1350920 - RNA, 19 nt, Artificial Sequence
  Description of Artificial Sequence: Synthetic oligonucleotide
  Sense strand starting at position 2529 of SEQ ID NO: 1242481
uccucucaggccuggagaa

SEQ ID NO: 1350921 - RNA, 19 nt, Artificial Sequence
  Description of Artificial Sequence: Synthetic oligonucleotide
  Antisense strand to SEQ ID NO: 1350920
uucuccaggccugagagga

SEQ ID NO: 1350922 - RNA, 19 nt, Artificial Sequence
  Description of Artificial Sequence: Synthetic oligonucleotide
  Sense strand starting at position 2688 of SEQ ID NO: 1242481
ggagaaagcgcuggugaca

SEQ ID NO: 1350923 - RNA, 19 nt, Artificial Sequence
  Description of Artificial Sequence: Synthetic oligonucleotide
  Antisense strand to SEQ ID NO: 1350922
ugucaccagcgcuuucucc

SEQ ID NO: 1350924 - RNA, 19 nt, Artificial Sequence
  Description of Artificial Sequence: Synthetic oligonucleotide
  Sense strand starting at position 2824 of SEQ ID NO: 1242481
gcacauaagcccugaaugu

SEQ ID NO: 1350925 - RNA, 19 nt, Artificial Sequence
  Description of Artificial Sequence: Synthetic oligonucleotide
  Antisense strand to SEQ ID NO: 1350924
acauucagggcuuaugugc

SEQ ID NO: 1350926 - RNA, 19 nt, Artificial Sequence
  Description of Artificial Sequence: Synthetic oligonucleotide
  Sense strand starting at position 2834 of SEQ ID NO: 1242481
ccugaauguuagcuuuaaa

SEQ ID NO: 1350927 - RNA, 19 nt, Artificial Sequence
  Description of Artificial Sequence: Synthetic oligonucleotide
  Antisense strand to SEQ ID NO: 1350926
uuuaaagcuaacauucagg

SEQ ID NO: 1350928 - RNA, 19 nt, Artificial Sequence
  Description of Artificial Sequence: Synthetic oligonucleotide
  Sense strand starting at position 3358 of SEQ ID NO: 1242481
agcugaauucucuauugac

SEQ ID NO: 1350929 - RNA, 19 nt, Artificial Sequence
  Description of Artificial Sequence: Synthetic oligonucleotide
  Antisense strand to SEQ ID NO: 1350928
gucaauagagaauucagcu

SEQ ID NO: 1350930 - RNA, 19 nt, Artificial Sequence
  Description of Artificial Sequence: Synthetic oligonucleotide
  Sense strand starting at position 3661 of SEQ ID NO: 1242481
acugaauuccuuugucagu

SEQ ID NO: 1350931 - RNA, 19 nt, Artificial Sequence
  Description of Artificial Sequence: Synthetic oligonucleotide
  Antisense strand to SEQ ID NO: 1350930
acugacaaaggaauucagu

SEQ ID NO: 1350932 - RNA, 19 nt, Artificial Sequence
  Description of Artificial Sequence: Synthetic oligonucleotide
  Sense strand starting at position 3662 of SEQ ID NO: 1242481
cugaauuccuuugucagua

SEQ ID NO: 1350933 - RNA, 19 nt, Artificial Sequence
  Description of Artificial Sequence: Synthetic oligonucleotide
  Antisense strand to SEQ ID NO: 1350932
uacugacaaaggaauucag

SEQ ID NO: 1350934 - RNA, 19 nt, Artificial Sequence
  Description of Artificial Sequence: Synthetic oligonucleotide
  Sense strand starting at position 3663 of SEQ ID NO: 1242481
ugaauuccuuugucaguaa

SEQ ID NO: 1350935 - RNA, 19 nt, Artificial Sequence
  Description of Artificial Sequence: Synthetic oligonucleotide
  Antisense strand to SEQ ID NO: 1350934
uuacugacaaaggaauuca

SEQ ID NO: 1350936 - RNA, 19 nt, Artificial Sequence
  Description of Artificial Sequence: Synthetic oligonucleotide
  Sense strand starting at position 3667 of SEQ ID NO: 1242481
uuccuuugucaguaaucca

SEQ ID NO: 1350937 - RNA, 19 nt, Artificial Sequence
  Description of Artificial Sequence: Synthetic oligonucleotide
  Antisense strand to SEQ ID NO: 1350936
uggauuacugacaaaggaa

SEQ ID NO: 1350938 - RNA, 19 nt, Artificial Sequence
  Description of Artificial Sequence: Synthetic oligonucleotide
  Sense strand starting at position 3670 of SEQ ID NO: 1242481
cuuugucaguaauccaaua

SEQ ID NO: 1350939 - RNA, 19 nt, Artificial Sequence
  Description of Artificial Sequence: Synthetic oligonucleotide
  Antisense strand to SEQ ID NO: 1350938
uauuggauuacugacaaag

SEQ ID NO: 1350940 - RNA, 19 nt, Artificial Sequence
  Description of Artificial Sequence: Synthetic oligonucleotide
  Sense strand starting at position 3919 of SEQ ID NO: 1242481
ucacuuucucgaugaauaa

SEQ ID NO: 1350941 - RNA, 19 nt, Artificial Sequence
  Description of Artificial Sequence: Synthetic oligonucleotide
  Antisense strand to SEQ ID NO: 1350940
uuauucaucgagaaaguga

SEQ ID NO: 1350942 - RNA, 19 nt, Artificial Sequence
  Description of Artificial Sequence: Synthetic oligonucleotide
  Sense strand starting at position 3947 of SEQ ID NO: 1242481
auuuaaguuucucaaggca

SEQ ID NO: 1350943 - RNA, 19 nt, Artificial Sequence
  Description of Artificial Sequence: Synthetic oligonucleotide
  Antisense strand to SEQ ID NO: 1350942
ugccuugagaaacuuaaau

SEQ ID NO: 1350944 - RNA, 19 nt, Artificial Sequence
  Description of Artificial Sequence: Synthetic oligonucleotide
  Sense strand starting at position 3961 of SEQ ID NO: 1242481
aggcauugauugcuggaaa

SEQ ID NO: 1350945 - RNA, 19 nt, Artificial Sequence
  Description of Artificial Sequence: Synthetic oligonucleotide
  Antisense strand to SEQ ID NO: 1350944
uuuccagcaaucaaugccu

SEQ ID NO: 1350946 - RNA, 19 nt, Artificial Sequence
  Description of Artificial Sequence: Synthetic oligonucleotide
  Sense strand starting at position 355 of SEQ ID NO: 1242482
aguguuaccuccuccuaga

SEQ ID NO: 1350947 - RNA, 19 nt, Artificial Sequence
  Description of Artificial Sequence: Synthetic oligonucleotide
  Antisense strand to SEQ ID NO: 1350946
ucuaggaggagguaacacu

SEQ ID NO: 1350948 - RNA, 19 nt, Artificial Sequence
  Description of Artificial Sequence: Synthetic oligonucleotide
  Sense strand starting at position 426 of SEQ ID NO: 1242482
auagcaugucacuaucgau

SEQ ID NO: 1350949 - RNA, 19 nt, Artificial Sequence
  Description of Artificial Sequence: Synthetic oligonucleotide
  Antisense strand to SEQ ID NO: 1350948
aucgauagugacaugcuau

SEQ ID NO: 1350950 - RNA, 19 nt, Artificial Sequence
  Description of Artificial Sequence: Synthetic oligonucleotide
  Sense strand starting at position 432 of SEQ ID NO: 1242482
ugucacuaucgauguauua

SEQ ID NO: 1350951 - RNA, 19 nt, Artificial Sequence
  Description of Artificial Sequence: Synthetic oligonucleotide
  Antisense strand to SEQ ID NO: 1350950
uaauacaucgauagugaca

SEQ ID NO: 1350952 - RNA, 19 nt, Artificial Sequence
  Description of Artificial Sequence: Synthetic oligonucleotide
  Sense strand starting at position 445 of SEQ ID NO: 1242482
guauuaauguuuguugaug

SEQ ID NO: 1350953 - RNA, 19 nt, Artificial Sequence
  Description of Artificial Sequence: Synthetic oligonucleotide
  Antisense strand to SEQ ID NO: 1350952
caucaacaaacauuaauac

SEQ ID NO: 1350954 - RNA, 19 nt, Artificial Sequence
  Description of Artificial Sequence: Synthetic oligonucleotide
  Sense strand starting at position 454 of SEQ ID NO: 1242482
uuuguugaugucuaucuca

SEQ ID NO: 1350955 - RNA, 19 nt, Artificial Sequence
  Description of Artificial Sequence: Synthetic oligonucleotide
  Antisense strand to SEQ ID NO: 1350954
ugagauagacaucaacaaa

SEQ ID NO: 1350956 - RNA, 19 nt, Artificial Sequence
  Description of Artificial Sequence: Synthetic oligonucleotide
  Sense strand starting at position 547 of SEQ ID NO: 1242482
guaggcacucaguauaucu

SEQ ID NO: 1350957 - RNA, 19 nt, Artificial Sequence
  Description of Artificial Sequence: Synthetic oligonucleotide
  Antisense strand to SEQ ID NO: 1350956
agauauacugagugccuac

SEQ ID NO: 1350958 - RNA, 19 nt, Artificial Sequence
  Description of Artificial Sequence: Synthetic oligonucleotide
  Sense strand starting at position 614 of SEQ ID NO: 1242482
gcacuauauugacaggcau

SEQ ID NO: 1350959 - RNA, 19 nt, Artificial Sequence
  Description of Artificial Sequence: Synthetic oligonucleotide
  Antisense strand to SEQ ID NO: 1350958
augccugucaauauagugc

SEQ ID NO: 1350960 - RNA, 19 nt, Artificial Sequence
  Description of Artificial Sequence: Synthetic oligonucleotide
  Sense strand starting at position 620 of SEQ ID NO: 1242482
uauugacaggcauguaaua

SEQ ID NO: 1350961 - RNA, 19 nt, Artificial Sequence
  Description of Artificial Sequence: Synthetic oligonucleotide
  Antisense strand to SEQ ID NO: 1350960
uauuacaugccugucaaua

SEQ ID NO: 1350962 - RNA, 19 nt, Artificial Sequence
  Description of Artificial Sequence: Synthetic oligonucleotide
  Sense strand starting at position 632 of SEQ ID NO: 1242482
uguaauauucgguggccca

SEQ ID NO: 1350963 - RNA, 19 nt, Artificial Sequence
  Description of Artificial Sequence: Synthetic oligonucleotide
  Antisense strand to SEQ ID NO: 1350962
ugggccaccgaauauuaca

SEQ ID NO: 1350964 - RNA, 19 nt, Artificial Sequence
  Description of Artificial Sequence: Synthetic oligonucleotide
  Sense strand starting at position 732 of SEQ ID NO: 1242482
gugggugcugccuguauca

SEQ ID NO: 1350965 - RNA, 19 nt, Artificial Sequence
  Description of Artificial Sequence: Synthetic oligonucleotide
  Antisense strand to SEQ ID NO: 1350964
ugauacaggcagcacccac

SEQ ID NO: 1350966 - RNA, 19 nt, Artificial Sequence
  Description of Artificial Sequence: Synthetic oligonucleotide
  Sense strand starting at position 995 of SEQ ID NO: 1242482
ccgugaucccugcagugga

SEQ ID NO: 1350967 - RNA, 19 nt, Artificial Sequence
  Description of Artificial Sequence: Synthetic oligonucleotide
  Antisense strand to SEQ ID NO: 1350966
uccacugcagggaucacgg

SEQ ID NO: 1350968 - RNA, 19 nt, Artificial Sequence
  Description of Artificial Sequence: Synthetic oligonucleotide
  Sense strand starting at position 1165 of SEQ ID NO: 1242482
caaagaggucucgguggaa

SEQ ID NO: 1350969 - RNA, 19 nt, Artificial Sequence
  Description of Artificial Sequence: Synthetic oligonucleotide
  Antisense strand to SEQ ID NO: 1350968
uuccaccgagaccucuuug

SEQ ID NO: 1350970 - RNA, 19 nt, Artificial Sequence
  Description of Artificial Sequence: Synthetic oligonucleotide
  Sense strand starting at position 1324 of SEQ ID NO: 1242482
ggcuauuucugcuagucau

SEQ ID NO: 1350971 - RNA, 19 nt, Artificial Sequence
  Description of Artificial Sequence: Synthetic oligonucleotide
  Antisense strand to SEQ ID NO: 1350970
augacuagcagaaauagcc

SEQ ID NO: 1350972 - RNA, 19 nt, Artificial Sequence
  Description of Artificial Sequence: Synthetic oligonucleotide
  Sense strand starting at position 1369 of SEQ ID NO: 1242482
aaaugauaaguaugcgaaa

SEQ ID NO: 1350973 - RNA, 19 nt, Artificial Sequence
  Description of Artificial Sequence: Synthetic oligonucleotide
  Antisense strand to SEQ ID NO: 1350972
uuucgcauacuuaucauuu

SEQ ID NO: 1350974 - RNA, 19 nt, Artificial Sequence
  Description of Artificial Sequence: Synthetic oligonucleotide
  Sense strand starting at position 1371 of SEQ ID NO: 1242482
augauaaguaugcgaaagu

SEQ ID NO: 1350975 - RNA, 19 nt, Artificial Sequence
  Description of Artificial Sequence: Synthetic oligonucleotide
  Antisense strand to SEQ ID NO: 1350974
acuuucgcauacuuaucau

SEQ ID NO: 1350976 - RNA, 19 nt, Artificial Sequence
  Description of Artificial Sequence: Synthetic oligonucleotide
  Sense strand starting at position 1458 of SEQ ID NO: 1242482
cguaguguccguguuuguu

SEQ ID NO: 1350977 - RNA, 19 nt, Artificial Sequence
  Description of Artificial Sequence: Synthetic oligonucleotide
  Antisense strand to SEQ ID NO: 1350976
aacaaacacggacacuacg

SEQ ID NO: 1350978 - RNA, 19 nt, Artificial Sequence
  Description of Artificial Sequence: Synthetic oligonucleotide
  Sense strand starting at position 1520 of SEQ ID NO: 1242482
gccguauugacgccuguga

SEQ ID NO: 1350979 - RNA, 19 nt, Artificial Sequence
  Description of Artificial Sequence: Synthetic oligonucleotide
  Antisense strand to SEQ ID NO: 1350978
ucacaggcgucaauacggc

SEQ ID NO: 1350980 - RNA, 19 nt, Artificial Sequence
  Description of Artificial Sequence: Synthetic oligonucleotide
  Sense strand starting at position 2516 of SEQ ID NO: 1242482
agcuguugacuuuggucaa

SEQ ID NO: 1350981 - RNA, 19 nt, Artificial Sequence
  Description of Artificial Sequence: Synthetic oligonucleotide
  Antisense strand to SEQ ID NO: 1350980
uugaccaaagucaacagcu

SEQ ID NO: 1350982 - RNA, 19 nt, Artificial Sequence
  Description of Artificial Sequence: Synthetic oligonucleotide
  Sense strand starting at position 2519 of SEQ ID NO: 1242482
uguugacuuuggucaaauu

SEQ ID NO: 1350983 - RNA, 19 nt, Artificial Sequence
  Description of Artificial Sequence: Synthetic oligonucleotide
  Antisense strand to SEQ ID NO: 1350982
aauuugaccaaagucaaca

SEQ ID NO: 1350984 - RNA, 19 nt, Artificial Sequence
  Description of Artificial Sequence: Synthetic oligonucleotide
  Sense strand starting at position 2520 of SEQ ID NO: 1242482
guugacuuuggucaaauua

SEQ ID NO: 1350985 - RNA, 19 nt, Artificial Sequence
  Description of Artificial Sequence: Synthetic oligonucleotide
  Antisense strand to SEQ ID NO: 1350984
uaauuugaccaaagucaac

SEQ ID NO: 1350986 - RNA, 19 nt, Artificial Sequence
  Description of Artificial Sequence: Synthetic oligonucleotide
  Sense strand starting at position 2555 of SEQ ID NO: 1242482
uuucccuuaucugggaaau

SEQ ID NO: 1350987 - RNA, 19 nt, Artificial Sequence
  Description of Artificial Sequence: Synthetic oligonucleotide
  Antisense strand to SEQ ID NO: 1350986
auuucccagauaagggaaa

SEQ ID NO: 1350988 - RNA, 19 nt, Artificial Sequence
  Description of Artificial Sequence: Synthetic oligonucleotide
  Sense strand starting at position 2556 of SEQ ID NO: 1242482
uucccuuaucugggaaaug

SEQ ID NO: 1350989 - RNA, 19 nt, Artificial Sequence
  Description of Artificial Sequence: Synthetic oligonucleotide
  Antisense strand to SEQ ID NO: 1350988
cauuucccagauaagggaa

SEQ ID NO: 1350990 - RNA, 19 nt, Artificial Sequence
  Description of Artificial Sequence: Synthetic oligonucleotide
  Sense strand starting at position 2701 of SEQ ID NO: 1242482
ggacauaaaugcugagacu

SEQ ID NO: 1350991 - RNA, 19 nt, Artificial Sequence
  Description of Artificial Sequence: Synthetic oligonucleotide
  Antisense strand to SEQ ID NO: 1350990
agucucagcauuuaugucc

SEQ ID NO: 1350992 - RNA, 19 nt, Artificial Sequence
  Description of Artificial Sequence: Synthetic oligonucleotide
  Sense strand starting at position 2712 of SEQ ID NO: 1242482
cugagacucuaagagacua

SEQ ID NO: 1350993 - RNA, 19 nt, Artificial Sequence
  Description of Artificial Sequence: Synthetic oligonucleotide
  Antisense strand to SEQ ID NO: 1350992
uagucucuuagagucucag

SEQ ID NO: 1350994 - RNA, 19 nt, Artificial Sequence
  Description of Artificial Sequence: Synthetic oligonucleotide
  Sense strand starting at position 2829 of SEQ ID NO: 1242482
agccucuuccucugaauga

SEQ ID NO: 1350995 - RNA, 19 nt, Artificial Sequence
  Description of Artificial Sequence: Synthetic oligonucleotide
  Antisense strand to SEQ ID NO: 1350994
ucauucagaggaagaggcu

SEQ ID NO: 1350996 - RNA, 19 nt, Artificial Sequence
  Description of Artificial Sequence: Synthetic oligonucleotide
  Sense strand starting at position 2833 of SEQ ID NO: 1242482
ucuuccucugaaugauaga

SEQ ID NO: 1350997 - RNA, 19 nt, Artificial Sequence
  Description of Artificial Sequence: Synthetic oligonucleotide
  Antisense strand to SEQ ID NO: 1350996
ucuaucauucagaggaaga

SEQ ID NO: 1350998 - RNA, 19 nt, Artificial Sequence
  Description of Artificial Sequence: Synthetic oligonucleotide
  Sense strand starting at position 2846 of SEQ ID NO: 1242482
gauagaugccuacggguau

SEQ ID NO: 1350999 - RNA, 19 nt, Artificial Sequence
  Description of Artificial Sequence: Synthetic oligonucleotide
  Antisense strand to SEQ ID NO: 1350998
auacccguaggcaucuauc

SEQ ID NO: 1351000 - RNA, 19 nt, Artificial Sequence
  Description of Artificial Sequence: Synthetic oligonucleotide
  Sense strand starting at position 2877 of SEQ ID NO: 1242482
gugucaaguguuguggcua

SEQ ID NO: 1351001 - RNA, 19 nt, Artificial Sequence
  Description of Artificial Sequence: Synthetic oligonucleotide
  Antisense strand to SEQ ID NO: 1351000
uagccacaacacuugacac

SEQ ID NO: 1351002 - RNA, 19 nt, Artificial Sequence
  Description of Artificial Sequence: Synthetic oligonucleotide
  Sense strand starting at position 2882 of SEQ ID NO: 1242482
aaguguuguggcuaucuga

SEQ ID NO: 1351003 - RNA, 19 nt, Artificial Sequence
  Description of Artificial Sequence: Synthetic oligonucleotide
  Antisense strand to SEQ ID NO: 1351002
ucagauagccacaacacuu

SEQ ID NO: 1351004 - RNA, 19 nt, Artificial Sequence
  Description of Artificial Sequence: Synthetic oligonucleotide
  Sense strand starting at position 2903 of SEQ ID NO: 1242482
ggcagugaguuccaggaga

SEQ ID NO: 1351005 - RNA, 19 nt, Artificial Sequence
  Description of Artificial Sequence: Synthetic oligonucleotide
  Antisense strand to SEQ ID NO: 1351004
ucuccuggaacucacugcc

SEQ ID NO: 1351006 - RNA, 19 nt, Artificial Sequence
  Description of Artificial Sequence: Synthetic oligonucleotide
  Sense strand starting at position 2905 of SEQ ID NO: 1242482
cagugaguuccaggagaac

SEQ ID NO: 1351007 - RNA, 19 nt, Artificial Sequence
  Description of Artificial Sequence: Synthetic oligonucleotide
  Antisense strand to SEQ ID NO: 1351006
guucuccuggaacucacug

SEQ ID NO: 1351008 - RNA, 19 nt, Artificial Sequence
  Description of Artificial Sequence: Synthetic oligonucleotide
  Sense strand starting at position 2953 of SEQ ID NO: 1242482
uguacuuacugucuuuaca

SEQ ID NO: 1351009 - RNA, 19 nt, Artificial Sequence
  Description of Artificial Sequence: Synthetic oligonucleotide
  Antisense strand to SEQ ID NO: 1351008
uguaaagacaguaaguaca

SEQ ID NO: 1351010 - RNA, 19 nt, Artificial Sequence
  Description of Artificial Sequence: Synthetic oligonucleotide
  Sense strand starting at position 2967 of SEQ ID NO: 1242482
uuacaacuuccagggaauu

SEQ ID NO: 1351011 - RNA, 19 nt, Artificial Sequence
  Description of Artificial Sequence: Synthetic oligonucleotide
  Antisense strand to SEQ ID NO: 1351010
aauucccuggaaguuguaa

SEQ ID NO: 1351012 - RNA, 19 nt, Artificial Sequence
  Description of Artificial Sequence: Synthetic oligonucleotide
  Sense strand starting at position 3475 of SEQ ID NO: 1242482
uccuuagcuccugggacua

SEQ ID NO: 1351013 - RNA, 19 nt, Artificial Sequence
  Description of Artificial Sequence: Synthetic oligonucleotide
  Antisense strand to SEQ ID NO: 1351012
uagucccaggagcuaagga

SEQ ID NO: 1351014 - RNA, 19 nt, Artificial Sequence
  Description of Artificial Sequence: Synthetic oligonucleotide
  Sense strand starting at position 3500 of SEQ ID NO: 1242482
cgcaccacuucuuuguaga

SEQ ID NO: 1351015 - RNA, 19 nt, Artificial Sequence
  Description of Artificial Sequence: Synthetic oligonucleotide
  Antisense strand to SEQ ID NO: 1351014
ucuacaaagaaguggugcg

SEQ ID NO: 1351016 - RNA, 19 nt, Artificial Sequence
  Description of Artificial Sequence: Synthetic oligonucleotide
  Sense strand starting at position 3501 of SEQ ID NO: 1242482
gcaccacuucuuuguagag

SEQ ID NO: 1351017 - RNA, 19 nt, Artificial Sequence
  Description of Artificial Sequence: Synthetic oligonucleotide
  Antisense strand to SEQ ID NO: 1351016
cucuacaaagaaguggugc

SEQ ID NO: 1351018 - RNA, 19 nt, Artificial Sequence
  Description of Artificial Sequence: Synthetic oligonucleotide
  Sense strand starting at position 3682 of SEQ ID NO: 1242482
ggagguauggccugcucca

SEQ ID NO: 1351019 - RNA, 19 nt, Artificial Sequence
  Description of Artificial Sequence: Synthetic oligonucleotide
  Antisense strand to SEQ ID NO: 1351018
uggagcaggccauaccucc

SEQ ID NO: 1351020 - RNA, 19 nt, Artificial Sequence
  Description of Artificial Sequence: Synthetic oligonucleotide
  Sense strand starting at position 3766 of SEQ ID NO: 1242482
uccagcucugagugcauaa

SEQ ID NO: 1351021 - RNA, 19 nt, Artificial Sequence
  Description of Artificial Sequence: Synthetic oligonucleotide
  Antisense strand to SEQ ID NO: 1351020
uuaugcacucagagcugga

SEQ ID NO: 1351022 - RNA, 19 nt, Artificial Sequence
  Description of Artificial Sequence: Synthetic oligonucleotide
  Sense strand starting at position 3815 of SEQ ID NO: 1242482
uccaaaguuucuccaagag

SEQ ID NO: 1351023 - RNA, 19 nt, Artificial Sequence
  Description of Artificial Sequence: Synthetic oligonucleotide
  Antisense strand to SEQ ID NO: 1351022
cucuuggagaaacuuugga

SEQ ID NO: 1351024 - RNA, 19 nt, Artificial Sequence
  Description of Artificial Sequence: Synthetic oligonucleotide
  Sense strand starting at position 3819 of SEQ ID NO: 1242482
aaguuucuccaagaggugu

SEQ ID NO: 1351025 - RNA, 19 nt, Artificial Sequence
  Description of Artificial Sequence: Synthetic oligonucleotide
  Antisense strand to SEQ ID NO: 1351024
acaccucuuggagaaacuu

SEQ ID NO: 1351026 - RNA, 19 nt, Artificial Sequence
  Description of Artificial Sequence: Synthetic oligonucleotide
  Sense strand starting at position 55 of SEQ ID NO: 1242483
uacccagagggugguaaua

SEQ ID NO: 1351027 - RNA, 19 nt, Artificial Sequence
  Description of Artificial Sequence: Synthetic oligonucleotide
  Antisense strand to SEQ ID NO: 1351026
uauuaccacccucugggua

SEQ ID NO: 1351028 - RNA, 19 nt, Artificial Sequence
  Description of Artificial Sequence: Synthetic oligonucleotide
  Sense strand starting at position 165 of SEQ ID NO: 1242483
aguguuuagaaaggaggua

SEQ ID NO: 1351029 - RNA, 19 nt, Artificial Sequence
  Description of Artificial Sequence: Synthetic oligonucleotide
  Antisense strand to SEQ ID NO: 1351028
uaccuccuuucuaaacacu

SEQ ID NO: 1351030 - RNA, 19 nt, Artificial Sequence
  Description of Artificial Sequence: Synthetic oligonucleotide
  Sense strand starting at position 394 of SEQ ID NO: 1242483
ucaagagugacugagccau

SEQ ID NO: 1351031 - RNA, 19 nt, Artificial Sequence
  Description of Artificial Sequence: Synthetic oligonucleotide
  Antisense strand to SEQ ID NO: 1351030
auggcucagucacucuuga

SEQ ID NO: 1351032 - RNA, 19 nt, Artificial Sequence
  Description of Artificial Sequence: Synthetic oligonucleotide
  Sense strand starting at position 454 of SEQ ID NO: 1242483
caaggugguuuaucggaaa

SEQ ID NO: 1351033 - RNA, 19 nt, Artificial Sequence
  Description of Artificial Sequence: Synthetic oligonucleotide
  Antisense strand to SEQ ID NO: 1351032
uuuccgauaaaccaccuug

SEQ ID NO: 1351034 - RNA, 19 nt, Artificial Sequence
  Description of Artificial Sequence: Synthetic oligonucleotide
  Sense strand starting at position 477 of SEQ ID NO: 1242483
gcuuguaaugaucaauaau

SEQ ID NO: 1351035 - RNA, 19 nt, Artificial Sequence
  Description of Artificial Sequence: Synthetic oligonucleotide
  Antisense strand to SEQ ID NO: 1351034
auuauugaucauuacaagc

SEQ ID NO: 1351036 - RNA, 19 nt, Artificial Sequence
  Description of Artificial Sequence: Synthetic oligonucleotide
  Sense strand starting at position 546 of SEQ ID NO: 1242483
gggucugcagcgaauguuu

SEQ ID NO: 1351037 - RNA, 19 nt, Artificial Sequence
  Description of Artificial Sequence: Synthetic oligonucleotide
  Antisense strand to SEQ ID NO: 1351036
aaacauucgcugcagaccc

SEQ ID NO: 1351038 - RNA, 19 nt, Artificial Sequence
  Description of Artificial Sequence: Synthetic oligonucleotide
  Sense strand starting at position 558 of SEQ ID NO: 1242483
aauguuugccaugagaucu

SEQ ID NO: 1351039 - RNA, 19 nt, Artificial Sequence
  Description of Artificial Sequence: Synthetic oligonucleotide
  Antisense strand to SEQ ID NO: 1351038
agaucucauggcaaacauu

SEQ ID NO: 1351040 - RNA, 19 nt, Artificial Sequence
  Description of Artificial Sequence: Synthetic oligonucleotide
  Sense strand starting at position 581 of SEQ ID NO: 1242483
ggaacuguauauucuggaa

SEQ ID NO: 1351041 - RNA, 19 nt, Artificial Sequence
  Description of Artificial Sequence: Synthetic oligonucleotide
  Antisense strand to SEQ ID NO: 1351040
uuccagaauauacaguucc

SEQ ID NO: 1351042 - RNA, 19 nt, Artificial Sequence
  Description of Artificial Sequence: Synthetic oligonucleotide
  Sense strand starting at position 651 of SEQ ID NO: 1242483
auccaaguugcugaaugau

SEQ ID NO: 1351043 - RNA, 19 nt, Artificial Sequence
  Description of Artificial Sequence: Synthetic oligonucleotide
  Antisense strand to SEQ ID NO: 1351042
aucauucagcaacuuggau

SEQ ID NO: 1351044 - RNA, 19 nt, Artificial Sequence
  Description of Artificial Sequence: Synthetic oligonucleotide
  Sense strand starting at position 661 of SEQ ID NO: 1242483
cugaaugaucagggcauua

SEQ ID NO: 1351045 - RNA, 19 nt, Artificial Sequence
  Description of Artificial Sequence: Synthetic oligonucleotide
  Antisense strand to SEQ ID NO: 1351044
uaaugcccugaucauucag

SEQ ID NO: 1351046 - RNA, 19 nt, Artificial Sequence
  Description of Artificial Sequence: Synthetic oligonucleotide
  Sense strand starting at position 760 of SEQ ID NO: 1242483
gggucaucuguaugaaaug

SEQ ID NO: 1351047 - RNA, 19 nt, Artificial Sequence
  Description of Artificial Sequence: Synthetic oligonucleotide
  Antisense strand to SEQ ID NO: 1351046
cauuucauacagaugaccc

SEQ ID NO: 1351048 - RNA, 19 nt, Artificial Sequence
  Description of Artificial Sequence: Synthetic oligonucleotide
  Sense strand starting at position 846 of SEQ ID NO: 1242483
auaauuugccagugucagu

SEQ ID NO: 1351049 - RNA, 19 nt, Artificial Sequence
  Description of Artificial Sequence: Synthetic oligonucleotide
  Antisense strand to SEQ ID NO: 1351048
acugacacuggcaaauuau

SEQ ID NO: 1351050 - RNA, 19 nt, Artificial Sequence
  Description of Artificial Sequence: Synthetic oligonucleotide
  Sense strand starting at position 926 of SEQ ID NO: 1242483
uuucucagggugcaugaua

SEQ ID NO: 1351051 - RNA, 19 nt, Artificial Sequence
  Description of Artificial Sequence: Synthetic oligonucleotide
  Antisense strand to SEQ ID NO: 1351050
uaucaugcacccugagaaa

SEQ ID NO: 1351052 - RNA, 19 nt, Artificial Sequence
  Description of Artificial Sequence: Synthetic oligonucleotide
  Sense strand starting at position 975 of SEQ ID NO: 1242483
guauuuacguacucuugga

SEQ ID NO: 1351053 - RNA, 19 nt, Artificial Sequence
  Description of Artificial Sequence: Synthetic oligonucleotide
  Antisense strand to SEQ ID NO: 1351052
uccaagaguacguaaauac

SEQ ID NO: 1351054 - RNA, 19 nt, Artificial Sequence
  Description of Artificial Sequence: Synthetic oligonucleotide
  Sense strand starting at position 1083 of SEQ ID NO: 1242483
auguuacuugaagguaaca

SEQ ID NO: 1351055 - RNA, 19 nt, Artificial Sequence
  Description of Artificial Sequence: Synthetic oligonucleotide
  Antisense strand to SEQ ID NO: 1351054
uguuaccuucaaguaacau

SEQ ID NO: 1351056 - RNA, 19 nt, Artificial Sequence
  Description of Artificial Sequence: Synthetic oligonucleotide
  Sense strand starting at position 1192 of SEQ ID NO: 1242483
aagcaauuucuacgagcga

SEQ ID NO: 1351057 - RNA, 19 nt, Artificial Sequence
  Description of Artificial Sequence: Synthetic oligonucleotide
  Antisense strand to SEQ ID NO: 1351056
ucgcucguagaaauugcuu

SEQ ID NO: 1351058 - RNA, 19 nt, Artificial Sequence
  Description of Artificial Sequence: Synthetic oligonucleotide
  Sense strand starting at position 1384 of SEQ ID NO: 1242483
aagauuucguuuguuauuc

SEQ ID NO: 1351059 - RNA, 19 nt, Artificial Sequence
  Description of Artificial Sequence: Synthetic oligonucleotide
  Antisense strand to SEQ ID NO: 1351058
gaauaacaaacgaaaucuu

SEQ ID NO: 1351060 - RNA, 19 nt, Artificial Sequence
  Description of Artificial Sequence: Synthetic oligonucleotide
  Sense strand starting at position 1385 of SEQ ID NO: 1242483
agauuucguuuguuauucu

SEQ ID NO: 1351061 - RNA, 19 nt, Artificial Sequence
  Description of Artificial Sequence: Synthetic oligonucleotide
  Antisense strand to SEQ ID NO: 1351060
agaauaacaaacgaaaucu

SEQ ID NO: 1351062 - RNA, 19 nt, Artificial Sequence
  Description of Artificial Sequence: Synthetic oligonucleotide
  Sense strand starting at position 1419 of SEQ ID NO: 1242483
uuuacucauuuagaggaga

SEQ ID NO: 1351063 - RNA, 19 nt, Artificial Sequence
  Description of Artificial Sequence: Synthetic oligonucleotide
  Antisense strand to SEQ ID NO: 1351062
ucuccucuaaaugaguaaa

SEQ ID NO: 1351064 - RNA, 19 nt, Artificial Sequence
  Description of Artificial Sequence: Synthetic oligonucleotide
  Sense strand starting at position 1598 of SEQ ID NO: 1242483
auugcugauugagugaaca

SEQ ID NO: 1351065 - RNA, 19 nt, Artificial Sequence
  Description of Artificial Sequence: Synthetic oligonucleotide
  Antisense strand to SEQ ID NO: 1351064
uguucacucaaucagcaau

SEQ ID NO: 1351066 - RNA, 19 nt, Artificial Sequence
  Description of Artificial Sequence: Synthetic oligonucleotide
  Sense strand starting at position 1600 of SEQ ID NO: 1242483
ugcugauugagugaacaua

SEQ ID NO: 1351067 - RNA, 19 nt, Artificial Sequence
  Description of Artificial Sequence: Synthetic oligonucleotide
  Antisense strand to SEQ ID NO: 1351066
uauguucacucaaucagca

SEQ ID NO: 1351068 - RNA, 19 nt, Artificial Sequence
  Description of Artificial Sequence: Synthetic oligonucleotide
  Sense strand starting at position 1628 of SEQ ID NO: 1242483
gggaaacauaucugugggu

SEQ ID NO: 1351069 - RNA, 19 nt, Artificial Sequence
  Description of Artificial Sequence: Synthetic oligonucleotide
  Antisense strand to SEQ ID NO: 1351068
acccacagauauguuuccc

SEQ ID NO: 1351070 - RNA, 19 nt, Artificial Sequence
  Description of Artificial Sequence: Synthetic oligonucleotide
  Sense strand starting at position 1629 of SEQ ID NO: 1242483
ggaaacauaucuguggguu

SEQ ID NO: 1351071 - RNA, 19 nt, Artificial Sequence
  Description of Artificial Sequence: Synthetic oligonucleotide
  Antisense strand to SEQ ID NO: 1351070
aacccacagauauguuucc

SEQ ID NO: 1351072 - RNA, 19 nt, Artificial Sequence
  Description of Artificial Sequence: Synthetic oligonucleotide
  Sense strand starting at position 1690 of SEQ ID NO: 1242483
cugaccuccuggucaagaa

SEQ ID NO: 1351073 - RNA, 19 nt, Artificial Sequence
  Description of Artificial Sequence: Synthetic oligonucleotide
  Antisense strand to SEQ ID NO: 1351072
uucuugaccaggaggucag

SEQ ID NO: 1351074 - RNA, 19 nt, Artificial Sequence
  Description of Artificial Sequence: Synthetic oligonucleotide
  Sense strand starting at position 1950 of SEQ ID NO: 1242483
ggcauuucuccggaugccu

SEQ ID NO: 1351075 - RNA, 19 nt, Artificial Sequence
  Description of Artificial Sequence: Synthetic oligonucleotide
  Antisense strand to SEQ ID NO: 1351074
aggcauccggagaaaugcc

SEQ ID NO: 1351076 - RNA, 19 nt, Artificial Sequence
  Description of Artificial Sequence: Synthetic oligonucleotide
  Sense strand starting at position 2073 of SEQ ID NO: 1242483
gagguuucugaauggaagc

SEQ ID NO: 1351077 - RNA, 19 nt, Artificial Sequence
  Description of Artificial Sequence: Synthetic oligonucleotide
  Antisense strand to SEQ ID NO: 1351076
gcuuccauucagaaaccuc

SEQ ID NO: 1351078 - RNA, 19 nt, Artificial Sequence
  Description of Artificial Sequence: Synthetic oligonucleotide
  Sense strand starting at position 2096 of SEQ ID NO: 1242483
gaguuugcucugcccgcua

SEQ ID NO: 1351079 - RNA, 19 nt, Artificial Sequence
  Description of Artificial Sequence: Synthetic oligonucleotide
  Antisense strand to SEQ ID NO: 1351078
uagcgggcagagcaaacuc

SEQ ID NO: 1351080 - RNA, 19 nt, Artificial Sequence
  Description of Artificial Sequence: Synthetic oligonucleotide
  Sense strand starting at position 2215 of SEQ ID NO: 1242483
acagauuggcuggagucua

SEQ ID NO: 1351081 - RNA, 19 nt, Artificial Sequence
  Description of Artificial Sequence: Synthetic oligonucleotide
  Antisense strand to SEQ ID NO: 1351080
uagacuccagccaaucugu

SEQ ID NO: 1351082 - RNA, 19 nt, Artificial Sequence
  Description of Artificial Sequence: Synthetic oligonucleotide
  Sense strand starting at position 2267 of SEQ ID NO: 1242483
ucgcuuggugcuguacaaa

SEQ ID NO: 1351083 - RNA, 19 nt, Artificial Sequence
  Description of Artificial Sequence: Synthetic oligonucleotide
  Antisense strand to SEQ ID NO: 1351082
uuuguacagcaccaagcga

SEQ ID NO: 1351084 - RNA, 19 nt, Artificial Sequence
  Description of Artificial Sequence: Synthetic oligonucleotide
  Sense strand starting at position 2313 of SEQ ID NO: 1242483
cugacaguccuggaugguu

SEQ ID NO: 1351085 - RNA, 19 nt, Artificial Sequence
  Description of Artificial Sequence: Synthetic oligonucleotide
  Antisense strand to SEQ ID NO: 1351084
aaccauccaggacugucag

SEQ ID NO: 1351086 - RNA, 19 nt, Artificial Sequence
  Description of Artificial Sequence: Synthetic oligonucleotide
  Sense strand starting at position 2588 of SEQ ID NO: 1242483
ccaggaauaucuguacacu

SEQ ID NO: 1351087 - RNA, 19 nt, Artificial Sequence
  Description of Artificial Sequence: Synthetic oligonucleotide
  Antisense strand to SEQ ID NO: 1351086
aguguacagauauuccugg

SEQ ID NO: 1351088 - RNA, 19 nt, Artificial Sequence
  Description of Artificial Sequence: Synthetic oligonucleotide
  Sense strand starting at position 2591 of SEQ ID NO: 1242483
ggaauaucuguacacucuu

SEQ ID NO: 1351089 - RNA, 19 nt, Artificial Sequence
  Description of Artificial Sequence: Synthetic oligonucleotide
  Antisense strand to SEQ ID NO: 1351088
aagaguguacagauauucc

SEQ ID NO: 1351090 - RNA, 19 nt, Artificial Sequence
  Description of Artificial Sequence: Synthetic oligonucleotide
  Sense strand starting at position 2648 of SEQ ID NO: 1242483
cuuuauuucugucuguauc

SEQ ID NO: 1351091 - RNA, 19 nt, Artificial Sequence
  Description of Artificial Sequence: Synthetic oligonucleotide
  Antisense strand to SEQ ID NO: 1351090
gauacagacagaaauaaag

SEQ ID NO: 1351092 - RNA, 19 nt, Artificial Sequence
  Description of Artificial Sequence: Synthetic oligonucleotide
  Sense strand starting at position 2687 of SEQ ID NO: 1242483
uugaaaguagauugcagaa

SEQ ID NO: 1351093 - RNA, 19 nt, Artificial Sequence
  Description of Artificial Sequence: Synthetic oligonucleotide
  Antisense strand to SEQ ID NO: 1351092
uucugcaaucuacuuucaa

SEQ ID NO: 1351094 - RNA, 19 nt, Artificial Sequence
  Description of Artificial Sequence: Synthetic oligonucleotide
  Sense strand starting at position 2807 of SEQ ID NO: 1242483
gcacuaugacucugagacu

SEQ ID NO: 1351095 - RNA, 19 nt, Artificial Sequence
  Description of Artificial Sequence: Synthetic oligonucleotide
  Antisense strand to SEQ ID NO: 1351094
agucucagagucauagugc

SEQ ID NO: 1351096 - RNA, 19 nt, Artificial Sequence
  Description of Artificial Sequence: Synthetic oligonucleotide
  Sense strand starting at position 2843 of SEQ ID NO: 1242483
agagacuuccuauagcauu

SEQ ID NO: 1351097 - RNA, 19 nt, Artificial Sequence
  Description of Artificial Sequence: Synthetic oligonucleotide
  Antisense strand to SEQ ID NO: 1351096
aaugcuauaggaagucucu

SEQ ID NO: 1351098 - RNA, 19 nt, Artificial Sequence
  Description of Artificial Sequence: Synthetic oligonucleotide
  Sense strand starting at position 2856 of SEQ ID NO: 1242483
agcauuugguaagaaagga

SEQ ID NO: 1351099 - RNA, 19 nt, Artificial Sequence
  Description of Artificial Sequence: Synthetic oligonucleotide
  Antisense strand to SEQ ID NO: 1351098
uccuuucuuaccaaaugcu

SEQ ID NO: 1351100 - RNA, 19 nt, Artificial Sequence
  Description of Artificial Sequence: Synthetic oligonucleotide
  Sense strand starting at position 3061 of SEQ ID NO: 1242483
uugggauucuguuccaaga

SEQ ID NO: 1351101 - RNA, 19 nt, Artificial Sequence
  Description of Artificial Sequence: Synthetic oligonucleotide
  Antisense strand to SEQ ID NO: 1351100
ucuuggaacagaaucccaa

SEQ ID NO: 1351102 - RNA, 19 nt, Artificial Sequence
  Description of Artificial Sequence: Synthetic oligonucleotide
  Sense strand starting at position 3345 of SEQ ID NO: 1242483
gggcuucggagagaaacuu

SEQ ID NO: 1351103 - RNA, 19 nt, Artificial Sequence
  Description of Artificial Sequence: Synthetic oligonucleotide
  Antisense strand to SEQ ID NO: 1351102
aaguuucucuccgaagccc

SEQ ID NO: 1351104 - RNA, 19 nt, Artificial Sequence
  Description of Artificial Sequence: Synthetic oligonucleotide
  Sense strand starting at position 3543 of SEQ ID NO: 1242483
cuggccuugggucagagau

SEQ ID NO: 1351105 - RNA, 19 nt, Artificial Sequence
  Description of Artificial Sequence: Synthetic oligonucleotide
  Antisense strand to SEQ ID NO: 1351104
aucucugacccaaggccag

SEQ ID NO: 1351106 - RNA, 19 nt, Artificial Sequence
  Description of Artificial Sequence: Synthetic oligonucleotide
  Sense strand starting at position 30 of SEQ ID NO: 1242484
uaaugucauguguauauug

SEQ ID NO: 1351107 - RNA, 19 nt, Artificial Sequence
  Description of Artificial Sequence: Synthetic oligonucleotide
  Antisense strand to SEQ ID NO: 1351106
caauauacacaugacauua

SEQ ID NO: 1351108 - RNA, 19 nt, Artificial Sequence
  Description of Artificial Sequence: Synthetic oligonucleotide
  Sense strand starting at position 32 of SEQ ID NO: 1242484
augucauguguauauugaa

SEQ ID NO: 1351109 - RNA, 19 nt, Artificial Sequence
  Description of Artificial Sequence: Synthetic oligonucleotide
  Antisense strand to SEQ ID NO: 1351108
uucaauauacacaugacau

SEQ ID NO: 1351110 - RNA, 19 nt, Artificial Sequence
  Description of Artificial Sequence: Synthetic oligonucleotide
  Sense strand starting at position 94 of SEQ ID NO: 1242484
agggcuucccaaugauuaa

SEQ ID NO: 1351111 - RNA, 19 nt, Artificial Sequence
  Description of Artificial Sequence: Synthetic oligonucleotide
  Antisense strand to SEQ ID NO: 1351110
uuaaucauugggaagcccu

SEQ ID NO: 1351112 - RNA, 19 nt, Artificial Sequence
  Description of Artificial Sequence: Synthetic oligonucleotide
  Sense strand starting at position 206 of SEQ ID NO: 1242484
agacaagcuuaucugauaa

SEQ ID NO: 1351113 - RNA, 19 nt, Artificial Sequence
  Description of Artificial Sequence: Synthetic oligonucleotide
  Antisense strand to SEQ ID NO: 1351112
uuaucagauaagcuugucu

SEQ ID NO: 1351114 - RNA, 19 nt, Artificial Sequence
  Description of Artificial Sequence: Synthetic oligonucleotide
  Sense strand starting at position 559 of SEQ ID NO: 1242484
agaccugccugauuccuaa

SEQ ID NO: 1351115 - RNA, 19 nt, Artificial Sequence
  Description of Artificial Sequence: Synthetic oligonucleotide
  Antisense strand to SEQ ID NO: 1351114
uuaggaaucaggcaggucu

SEQ ID NO: 1351116 - RNA, 19 nt, Artificial Sequence
  Description of Artificial Sequence: Synthetic oligonucleotide
  Sense strand starting at position 614 of SEQ ID NO: 1242484
aggaaucuauuugaaacuu

SEQ ID NO: 1351117 - RNA, 19 nt, Artificial Sequence
  Description of Artificial Sequence: Synthetic oligonucleotide
  Antisense strand to SEQ ID NO: 1351116
aaguuucaaauagauuccu

SEQ ID NO: 1351118 - RNA, 19 nt, Artificial Sequence
  Description of Artificial Sequence: Synthetic oligonucleotide
  Sense strand starting at position 760 of SEQ ID NO: 1242484
uugggaacuucccucauga

SEQ ID NO: 1351119 - RNA, 19 nt, Artificial Sequence
  Description of Artificial Sequence: Synthetic oligonucleotide
  Antisense strand to SEQ ID NO: 1351118
ucaugagggaaguucccaa

SEQ ID NO: 1351120 - RNA, 19 nt, Artificial Sequence
  Description of Artificial Sequence: Synthetic oligonucleotide
  Sense strand starting at position 971 of SEQ ID NO: 1242484
agggccaguuaucucaaga

SEQ ID NO: 1351121 - RNA, 19 nt, Artificial Sequence
  Description of Artificial Sequence: Synthetic oligonucleotide
  Antisense strand to SEQ ID NO: 1351120
ucuugagauaacuggcccu

SEQ ID NO: 1351122 - RNA, 19 nt, Artificial Sequence
  Description of Artificial Sequence: Synthetic oligonucleotide
  Sense strand starting at position 1115 of SEQ ID NO: 1242484
cgauaauucgcagcucagu

SEQ ID NO: 1351123 - RNA, 19 nt, Artificial Sequence
  Description of Artificial Sequence: Synthetic oligonucleotide
  Antisense strand to SEQ ID NO: 1351122
acugagcugcgaauuaucg

SEQ ID NO: 1351124 - RNA, 19 nt, Artificial Sequence
  Description of Artificial Sequence: Synthetic oligonucleotide
  Sense strand starting at position 1152 of SEQ ID NO: 1242484
ggcuuucuccuccaaagug

SEQ ID NO: 1351125 - RNA, 19 nt, Artificial Sequence
  Description of Artificial Sequence: Synthetic oligonucleotide
  Antisense strand to SEQ ID NO: 1351124
cacuuuggaggagaaagcc

SEQ ID NO: 1351126 - RNA, 19 nt, Artificial Sequence
  Description of Artificial Sequence: Synthetic oligonucleotide
  Sense strand starting at position 1191 of SEQ ID NO: 1242484
ucacucugguuucuugaga

SEQ ID NO: 1351127 - RNA, 19 nt, Artificial Sequence
  Description of Artificial Sequence: Synthetic oligonucleotide
  Antisense strand to SEQ ID NO: 1351126
ucucaagaaaccagaguga

SEQ ID NO: 1351128 - RNA, 19 nt, Artificial Sequence
  Description of Artificial Sequence: Synthetic oligonucleotide
  Sense strand starting at position 1192 of SEQ ID NO: 1242484
cacucugguuucuugagaa

SEQ ID NO: 1351129 - RNA, 19 nt, Artificial Sequence
  Description of Artificial Sequence: Synthetic oligonucleotide
  Antisense strand to SEQ ID NO: 1351128
uucucaagaaaccagagug

SEQ ID NO: 1351130 - RNA, 19 nt, Artificial Sequence
  Description of Artificial Sequence: Synthetic oligonucleotide
  Sense strand starting at position 1386 of SEQ ID NO: 1242484
gguuuccaccagcaugaua

SEQ ID NO: 1351131 - RNA, 19 nt, Artificial Sequence
  Description of Artificial Sequence: Synthetic oligonucleotide
  Antisense strand to SEQ ID NO: 1351130
uaucaugcugguggaaacc

SEQ ID NO: 1351132 - RNA, 19 nt, Artificial Sequence
  Description of Artificial Sequence: Synthetic oligonucleotide
  Sense strand starting at position 1459 of SEQ ID NO: 1242484
ugcuacaaaguuugaaauu

SEQ ID NO: 1351133 - RNA, 19 nt, Artificial Sequence
  Description of Artificial Sequence: Synthetic oligonucleotide
  Antisense strand to SEQ ID NO: 1351132
aauuucaaacuuuguagca

SEQ ID NO: 1351134 - RNA, 19 nt, Artificial Sequence
  Description of Artificial Sequence: Synthetic oligonucleotide
  Sense strand starting at position 1482 of SEQ ID NO: 1242484
ccaugagaguaauuccauu

SEQ ID NO: 1351135 - RNA, 19 nt, Artificial Sequence
  Description of Artificial Sequence: Synthetic oligonucleotide
  Antisense strand to SEQ ID NO: 1351134
aauggaauuacucucaugg

SEQ ID NO: 1351136 - RNA, 19 nt, Artificial Sequence
  Description of Artificial Sequence: Synthetic oligonucleotide
  Sense strand starting at position 1488 of SEQ ID NO: 1242484
gaguaauuccauugagcac

SEQ ID NO: 1351137 - RNA, 19 nt, Artificial Sequence
  Description of Artificial Sequence: Synthetic oligonucleotide
  Antisense strand to SEQ ID NO: 1351136
gugcucaauggaauuacuc

SEQ ID NO: 1351138 - RNA, 19 nt, Artificial Sequence
  Description of Artificial Sequence: Synthetic oligonucleotide
  Sense strand starting at position 1577 of SEQ ID NO: 1242484
augguaacucuagaguauu

SEQ ID NO: 1351139 - RNA, 19 nt, Artificial Sequence
  Description of Artificial Sequence: Synthetic oligonucleotide
  Antisense strand to SEQ ID NO: 1351138
aauacucuagaguuaccau

SEQ ID NO: 1351140 - RNA, 19 nt, Artificial Sequence
  Description of Artificial Sequence: Synthetic oligonucleotide
  Sense strand starting at position 1743 of SEQ ID NO: 1242484
uuggaaaguuaaguccuau

SEQ ID NO: 1351141 - RNA, 19 nt, Artificial Sequence
  Description of Artificial Sequence: Synthetic oligonucleotide
  Antisense strand to SEQ ID NO: 1351140
auaggacuuaacuuuccaa

SEQ ID NO: 1351142 - RNA, 19 nt, Artificial Sequence
  Description of Artificial Sequence: Synthetic oligonucleotide
  Sense strand starting at position 1844 of SEQ ID NO: 1242484
guugcauaacaggaguaga

SEQ ID NO: 1351143 - RNA, 19 nt, Artificial Sequence
  Description of Artificial Sequence: Synthetic oligonucleotide
  Antisense strand to SEQ ID NO: 1351142
ucuacuccuguuaugcaac

SEQ ID NO: 1351144 - RNA, 19 nt, Artificial Sequence
  Description of Artificial Sequence: Synthetic oligonucleotide
  Sense strand starting at position 2249 of SEQ ID NO: 1242484
auagucagagaugguuuau

SEQ ID NO: 1351145 - RNA, 19 nt, Artificial Sequence
  Description of Artificial Sequence: Synthetic oligonucleotide
  Antisense strand to SEQ ID NO: 1351144
auaaaccaucucugacuau

SEQ ID NO: 1351146 - RNA, 19 nt, Artificial Sequence
  Description of Artificial Sequence: Synthetic oligonucleotide
  Sense strand starting at position 2255 of SEQ ID NO: 1242484
agagaugguuuaucaacau

SEQ ID NO: 1351147 - RNA, 19 nt, Artificial Sequence
  Description of Artificial Sequence: Synthetic oligonucleotide
  Antisense strand to SEQ ID NO: 1351146
auguugauaaaccaucucu

SEQ ID NO: 1351148 - RNA, 19 nt, Artificial Sequence
  Description of Artificial Sequence: Synthetic oligonucleotide
  Sense strand starting at position 2385 of SEQ ID NO: 1242484
gguuuacaauaucccugaa

SEQ ID NO: 1351149 - RNA, 19 nt, Artificial Sequence
  Description of Artificial Sequence: Synthetic oligonucleotide
  Antisense strand to SEQ ID NO: 1351148
uucagggauauuguaaacc

SEQ ID NO: 1351150 - RNA, 19 nt, Artificial Sequence
  Description of Artificial Sequence: Synthetic oligonucleotide
  Sense strand starting at position 2609 of SEQ ID NO: 1242484
uuagcuucugaggagucua

SEQ ID NO: 1351151 - RNA, 19 nt, Artificial Sequence
  Description of Artificial Sequence: Synthetic oligonucleotide
  Antisense strand to SEQ ID NO: 1351150
uagacuccucagaagcuaa

SEQ ID NO: 1351152 - RNA, 19 nt, Artificial Sequence
  Description of Artificial Sequence: Synthetic oligonucleotide
  Sense strand starting at position 2614 of SEQ ID NO: 1242484
uucugaggagucuaaucuu

SEQ ID NO: 1351153 - RNA, 19 nt, Artificial Sequence
  Description of Artificial Sequence: Synthetic oligonucleotide
  Antisense strand to SEQ ID NO: 1351152
aagauuagacuccucagaa

SEQ ID NO: 1351154 - RNA, 19 nt, Artificial Sequence
  Description of Artificial Sequence: Synthetic oligonucleotide
  Sense strand starting at position 2617 of SEQ ID NO: 1242484
ugaggagucuaaucuuucu

SEQ ID NO: 1351155 - RNA, 19 nt, Artificial Sequence
  Description of Artificial Sequence: Synthetic oligonucleotide
  Antisense strand to SEQ ID NO: 1351154
agaaagauuagacuccuca

SEQ ID NO: 1351156 - RNA, 19 nt, Artificial Sequence
  Description of Artificial Sequence: Synthetic oligonucleotide
  Sense strand starting at position 2620 of SEQ ID NO: 1242484
ggagucuaaucuuucucca

SEQ ID NO: 1351157 - RNA, 19 nt, Artificial Sequence
  Description of Artificial Sequence: Synthetic oligonucleotide
  Antisense strand to SEQ ID NO: 1351156
uggagaaagauuagacucc

SEQ ID NO: 1351158 - RNA, 19 nt, Artificial Sequence
  Description of Artificial Sequence: Synthetic oligonucleotide
  Sense strand starting at position 2729 of SEQ ID NO: 1242484
gguuucucaucauuugugu

SEQ ID NO: 1351159 - RNA, 19 nt, Artificial Sequence
  Description of Artificial Sequence: Synthetic oligonucleotide
  Antisense strand to SEQ ID NO: 1351158
acacaaaugaugagaaacc

SEQ ID NO: 1351160 - RNA, 19 nt, Artificial Sequence
  Description of Artificial Sequence: Synthetic oligonucleotide
  Sense strand starting at position 2734 of SEQ ID NO: 1242484
cucaucauuuguguagagu

SEQ ID NO: 1351161 - RNA, 19 nt, Artificial Sequence
  Description of Artificial Sequence: Synthetic oligonucleotide
  Antisense strand to SEQ ID NO: 1351160
acucuacacaaaugaugag

SEQ ID NO: 1351162 - RNA, 19 nt, Artificial Sequence
  Description of Artificial Sequence: Synthetic oligonucleotide
  Sense strand starting at position 2785 of SEQ ID NO: 1242484
ccaagucuucccuggauag

SEQ ID NO: 1351163 - RNA, 19 nt, Artificial Sequence
  Description of Artificial Sequence: Synthetic oligonucleotide
  Antisense strand to SEQ ID NO: 1351162
cuauccagggaagacuugg

SEQ ID NO: 1351164 - RNA, 19 nt, Artificial Sequence
  Description of Artificial Sequence: Synthetic oligonucleotide
  Sense strand starting at position 2787 of SEQ ID NO: 1242484
aagucuucccuggauagca

SEQ ID NO: 1351165 - RNA, 19 nt, Artificial Sequence
  Description of Artificial Sequence: Synthetic oligonucleotide
  Antisense strand to SEQ ID NO: 1351164
ugcuauccagggaagacuu

SEQ ID NO: 1351166 - RNA, 19 nt, Artificial Sequence
  Description of Artificial Sequence: Synthetic oligonucleotide
  Sense strand starting at position 2822 of SEQ ID NO: 1242484
ugauuucugggcuguuuga

SEQ ID NO: 1351167 - RNA, 19 nt, Artificial Sequence
  Description of Artificial Sequence: Synthetic oligonucleotide
  Antisense strand to SEQ ID NO: 1351166
ucaaacagcccagaaauca

SEQ ID NO: 1351168 - RNA, 19 nt, Artificial Sequence
  Description of Artificial Sequence: Synthetic oligonucleotide
  Sense strand starting at position 2907 of SEQ ID NO: 1242484
auggaaagucuaggucuuu

SEQ ID NO: 1351169 - RNA, 19 nt, Artificial Sequence
  Description of Artificial Sequence: Synthetic oligonucleotide
  Antisense strand to SEQ ID NO: 1351168
aaagaccuagacuuuccau

SEQ ID NO: 1351170 - RNA, 19 nt, Artificial Sequence
  Description of Artificial Sequence: Synthetic oligonucleotide
  Sense strand starting at position 2994 of SEQ ID NO: 1242484
gaaugaacacgauguguau

SEQ ID NO: 1351171 - RNA, 19 nt, Artificial Sequence
  Description of Artificial Sequence: Synthetic oligonucleotide
  Antisense strand to SEQ ID NO: 1351170
auacacaucguguucauuc

SEQ ID NO: 1351172 - RNA, 19 nt, Artificial Sequence
  Description of Artificial Sequence: Synthetic oligonucleotide
  Sense strand starting at position 3069 of SEQ ID NO: 1242484
ccuugaccucaugaaguuu

SEQ ID NO: 1351173 - RNA, 19 nt, Artificial Sequence
  Description of Artificial Sequence: Synthetic oligonucleotide
  Antisense strand to SEQ ID NO: 1351172
aaacuucaugaggucaagg

SEQ ID NO: 1351174 - RNA, 19 nt, Artificial Sequence
  Description of Artificial Sequence: Synthetic oligonucleotide
  Sense strand starting at position 3326 of SEQ ID NO: 1242484
cucccucuauuugagagau

SEQ ID NO: 1351175 - RNA, 19 nt, Artificial Sequence
  Description of Artificial Sequence: Synthetic oligonucleotide
  Antisense strand to SEQ ID NO: 1351174
aucucucaaauagagggag

SEQ ID NO: 1351176 - RNA, 19 nt, Artificial Sequence
  Description of Artificial Sequence: Synthetic oligonucleotide
  Sense strand starting at position 3404 of SEQ ID NO: 1242484
gcagaacaagcuuacugau

SEQ ID NO: 1351177 - RNA, 19 nt, Artificial Sequence
  Description of Artificial Sequence: Synthetic oligonucleotide
  Antisense strand to SEQ ID NO: 1351176
aucaguaagcuuguucugc

SEQ ID NO: 1351178 - RNA, 19 nt, Artificial Sequence
  Description of Artificial Sequence: Synthetic oligonucleotide
  Sense strand starting at position 3498 of SEQ ID NO: 1242484
ugaagagauaaucgugcau

SEQ ID NO: 1351179 - RNA, 19 nt, Artificial Sequence
  Description of Artificial Sequence: Synthetic oligonucleotide
  Antisense strand to SEQ ID NO: 1351178
augcacgauuaucucuuca

SEQ ID NO: 1351180 - RNA, 19 nt, Artificial Sequence
  Description of Artificial Sequence: Synthetic oligonucleotide
  Sense strand starting at position 3547 of SEQ ID NO: 1242484
uucuaccagucauuugcua

SEQ ID NO: 1351181 - RNA, 19 nt, Artificial Sequence
  Description of Artificial Sequence: Synthetic oligonucleotide
  Antisense strand to SEQ ID NO: 1351180
uagcaaaugacugguagaa

SEQ ID NO: 1351182 - RNA, 19 nt, Artificial Sequence
  Description of Artificial Sequence: Synthetic oligonucleotide
  Sense strand starting at position 3755 of SEQ ID NO: 1242484
guaacacugccaugaggaa

SEQ ID NO: 1351183 - RNA, 19 nt, Artificial Sequence
  Description of Artificial Sequence: Synthetic oligonucleotide
  Antisense strand to SEQ ID NO: 1351182
uuccucauggcaguguuac

SEQ ID NO: 1351184 - RNA, 19 nt, Artificial Sequence
  Description of Artificial Sequence: Synthetic oligonucleotide
  Sense strand starting at position 3836 of SEQ ID NO: 1242484
gaagaagcgacugagcauu

SEQ ID NO: 1351185 - RNA, 19 nt, Artificial Sequence
  Description of Artificial Sequence: Synthetic oligonucleotide
  Antisense strand to SEQ ID NO: 1351184
aaugcucagucgcuucuuc

SEQ ID NO: 1351186 - RNA, 19 nt, Artificial Sequence
  Description of Artificial Sequence: Synthetic oligonucleotide
  Sense strand starting at position 17 of SEQ ID NO: 1242485
cacgguguccaacauaaau

SEQ ID NO: 1351187 - RNA, 19 nt, Artificial Sequence
  Description of Artificial Sequence: Synthetic oligonucleotide
  Antisense strand to SEQ ID NO: 1351186
auuuauguuggacaccgug

SEQ ID NO: 1351188 - RNA, 19 nt, Artificial Sequence
  Description of Artificial Sequence: Synthetic oligonucleotide
  Sense strand starting at position 67 of SEQ ID NO: 1242485
acuggacaaucgucagacu

SEQ ID NO: 1351189 - RNA, 19 nt, Artificial Sequence
  Description of Artificial Sequence: Synthetic oligonucleotide
  Antisense strand to SEQ ID NO: 1351188
agucugacgauuguccagu

SEQ ID NO: 1351190 - RNA, 19 nt, Artificial Sequence
  Description of Artificial Sequence: Synthetic oligonucleotide
  Sense strand starting at position 239 of SEQ ID NO: 1242485
ugggucaaguagcuauuaa

SEQ ID NO: 1351191 - RNA, 19 nt, Artificial Sequence
  Description of Artificial Sequence: Synthetic oligonucleotide
  Antisense strand to SEQ ID NO: 1351190
uuaauagcuacuugaccca

SEQ ID NO: 1351192 - RNA, 19 nt, Artificial Sequence
  Description of Artificial Sequence: Synthetic oligonucleotide
  Sense strand starting at position 240 of SEQ ID NO: 1242485
gggucaaguagcuauuaac

SEQ ID NO: 1351193 - RNA, 19 nt, Artificial Sequence
  Description of Artificial Sequence: Synthetic oligonucleotide
  Antisense strand to SEQ ID NO: 1351192
guuaauagcuacuugaccc

SEQ ID NO: 1351194 - RNA, 19 nt, Artificial Sequence
  Description of Artificial Sequence: Synthetic oligonucleotide
  Sense strand starting at position 313 of SEQ ID NO: 1242485
cauggaauuucugaguguc

SEQ ID NO: 1351195 - RNA, 19 nt, Artificial Sequence
  Description of Artificial Sequence: Synthetic oligonucleotide
  Antisense strand to SEQ ID NO: 1351194
gacacucagaaauuccaug

SEQ ID NO: 1351196 - RNA, 19 nt, Artificial Sequence
  Description of Artificial Sequence: Synthetic oligonucleotide
  Sense strand starting at position 316 of SEQ ID NO: 1242485
ggaauuucugagugucagc

SEQ ID NO: 1351197 - RNA, 19 nt, Artificial Sequence
  Description of Artificial Sequence: Synthetic oligonucleotide
  Antisense strand to SEQ ID NO: 1351196
gcugacacucagaaauucc

SEQ ID NO: 1351198 - RNA, 19 nt, Artificial Sequence
  Description of Artificial Sequence: Synthetic oligonucleotide
  Sense strand starting at position 336 of SEQ ID NO: 1242485
guggaagagucuuugggaa

SEQ ID NO: 1351199 - RNA, 19 nt, Artificial Sequence
  Description of Artificial Sequence: Synthetic oligonucleotide
  Antisense strand to SEQ ID NO: 1351198
uucccaaagacucuuccac

SEQ ID NO: 1351200 - RNA, 19 nt, Artificial Sequence
  Description of Artificial Sequence: Synthetic oligonucleotide
  Sense strand starting at position 423 of SEQ ID NO: 1242485
aggcaauggcuauaaccaa

SEQ ID NO: 1351201 - RNA, 19 nt, Artificial Sequence
  Description of Artificial Sequence: Synthetic oligonucleotide
  Antisense strand to SEQ ID NO: 1351200
uugguuauagccauugccu

SEQ ID NO: 1351202 - RNA, 19 nt, Artificial Sequence
  Description of Artificial Sequence: Synthetic oligonucleotide
  Sense strand starting at position 716 of SEQ ID NO: 1242485
gcauguuguccacaaagac

SEQ ID NO: 1351203 - RNA, 19 nt, Artificial Sequence
  Description of Artificial Sequence: Synthetic oligonucleotide
  Antisense strand to SEQ ID NO: 1351202
gucuuuguggacaacaugc

SEQ ID NO: 1351204 - RNA, 19 nt, Artificial Sequence
  Description of Artificial Sequence: Synthetic oligonucleotide
  Sense strand starting at position 746 of SEQ ID NO: 1242485
caaaucagugacugagacu

SEQ ID NO: 1351205 - RNA, 19 nt, Artificial Sequence
  Description of Artificial Sequence: Synthetic oligonucleotide
  Antisense strand to SEQ ID NO: 1351204
agucucagucacugauuug

SEQ ID NO: 1351206 - RNA, 19 nt, Artificial Sequence
  Description of Artificial Sequence: Synthetic oligonucleotide
  Sense strand starting at position 902 of SEQ ID NO: 1242485
cagauagcugucugaguau

SEQ ID NO: 1351207 - RNA, 19 nt, Artificial Sequence
  Description of Artificial Sequence: Synthetic oligonucleotide
  Antisense strand to SEQ ID NO: 1351206
auacucagacagcuaucug

SEQ ID NO: 1351208 - RNA, 19 nt, Artificial Sequence
  Description of Artificial Sequence: Synthetic oligonucleotide
  Sense strand starting at position 905 of SEQ ID NO: 1242485
auagcugucugaguaugau

SEQ ID NO: 1351209 - RNA, 19 nt, Artificial Sequence
  Description of Artificial Sequence: Synthetic oligonucleotide
  Antisense strand to SEQ ID NO: 1351208
aucauacucagacagcuau

SEQ ID NO: 1351210 - RNA, 19 nt, Artificial Sequence
  Description of Artificial Sequence: Synthetic oligonucleotide
  Sense strand starting at position 968 of SEQ ID NO: 1242485
gcagacuacucacucaaga

SEQ ID NO: 1351211 - RNA, 19 nt, Artificial Sequence
  Description of Artificial Sequence: Synthetic oligonucleotide
  Antisense strand to SEQ ID NO: 1351210
ucuugagugaguagucugc

SEQ ID NO: 1351212 - RNA, 19 nt, Artificial Sequence
  Description of Artificial Sequence: Synthetic oligonucleotide
  Sense strand starting at position 1265 of SEQ ID NO: 1242485
ggcacaagguggucuaaga

SEQ ID NO: 1351213 - RNA, 19 nt, Artificial Sequence
  Description of Artificial Sequence: Synthetic oligonucleotide
  Antisense strand to SEQ ID NO: 1351212
ucuuagaccaccuugugcc

SEQ ID NO: 1351214 - RNA, 19 nt, Artificial Sequence
  Description of Artificial Sequence: Synthetic oligonucleotide
  Sense strand starting at position 2281 of SEQ ID NO: 1242485
uugacaggcucuguaacuu

SEQ ID NO: 1351215 - RNA, 19 nt, Artificial Sequence
  Description of Artificial Sequence: Synthetic oligonucleotide
  Antisense strand to SEQ ID NO: 1351214
aaguuacagagccugucaa

SEQ ID NO: 1351216 - RNA, 19 nt, Artificial Sequence
  Description of Artificial Sequence: Synthetic oligonucleotide
  Sense strand starting at position 2305 of SEQ ID NO: 1242485
ucacacuucccucgagaac

SEQ ID NO: 1351217 - RNA, 19 nt, Artificial Sequence
  Description of Artificial Sequence: Synthetic oligonucleotide
  Antisense strand to SEQ ID NO: 1351216
guucucgagggaaguguga

SEQ ID NO: 1351218 - RNA, 19 nt, Artificial Sequence
  Description of Artificial Sequence: Synthetic oligonucleotide
  Sense strand starting at position 2323 of SEQ ID NO: 1242485
ccagucuccuugucuugaa

SEQ ID NO: 1351219 - RNA, 19 nt, Artificial Sequence
  Description of Artificial Sequence: Synthetic oligonucleotide
  Antisense strand to SEQ ID NO: 1351218
uucaagacaaggagacugg

SEQ ID NO: 1351220 - RNA, 19 nt, Artificial Sequence
  Description of Artificial Sequence: Synthetic oligonucleotide
  Sense strand starting at position 2338 of SEQ ID NO: 1242485
ugaaaugggugugcccaaa

SEQ ID NO: 1351221 - RNA, 19 nt, Artificial Sequence
  Description of Artificial Sequence: Synthetic oligonucleotide
  Antisense strand to SEQ ID NO: 1351220
uuugggcacacccauuuca

SEQ ID NO: 1351222 - RNA, 19 nt, Artificial Sequence
  Description of Artificial Sequence: Synthetic oligonucleotide
  Sense strand starting at position 2508 of SEQ ID NO: 1242485
uuacaccugcucugggaaa

SEQ ID NO: 1351223 - RNA, 19 nt, Artificial Sequence
  Description of Artificial Sequence: Synthetic oligonucleotide
  Antisense strand to SEQ ID NO: 1351222
uuucccagagcagguguaa

SEQ ID NO: 1351224 - RNA, 19 nt, Artificial Sequence
  Description of Artificial Sequence: Synthetic oligonucleotide
  Sense strand starting at position 2571 of SEQ ID NO: 1242485
uaaagucucgcagcgacuu

SEQ ID NO: 1351225 - RNA, 19 nt, Artificial Sequence
  Description of Artificial Sequence: Synthetic oligonucleotide
  Antisense strand to SEQ ID NO: 1351224
aagucgcugcgagacuuua

SEQ ID NO: 1351226 - RNA, 19 nt, Artificial Sequence
  Description of Artificial Sequence: Synthetic oligonucleotide
  Sense strand starting at position 2678 of SEQ ID NO: 1242485
gcagauaaauugguuuacu

SEQ ID NO: 1351227 - RNA, 19 nt, Artificial Sequence
  Description of Artificial Sequence: Synthetic oligonucleotide
  Antisense strand to SEQ ID NO: 1351226
aguaaaccaauuuaucugc

SEQ ID NO: 1351228 - RNA, 19 nt, Artificial Sequence
  Description of Artificial Sequence: Synthetic oligonucleotide
  Sense strand starting at position 2679 of SEQ ID NO: 1242485
cagauaaauugguuuacug

SEQ ID NO: 1351229 - RNA, 19 nt, Artificial Sequence
  Description of Artificial Sequence: Synthetic oligonucleotide
  Antisense strand to SEQ ID NO: 1351228
caguaaaccaauuuaucug

SEQ ID NO: 1351230 - RNA, 19 nt, Artificial Sequence
  Description of Artificial Sequence: Synthetic oligonucleotide
  Sense strand starting at position 2681 of SEQ ID NO: 1242485
gauaaauugguuuacuguc

SEQ ID NO: 1351231 - RNA, 19 nt, Artificial Sequence
  Description of Artificial Sequence: Synthetic oligonucleotide
  Antisense strand to SEQ ID NO: 1351230
gacaguaaaccaauuuauc

SEQ ID NO: 1351232 - RNA, 19 nt, Artificial Sequence
  Description of Artificial Sequence: Synthetic oligonucleotide
  Sense strand starting at position 2737 of SEQ ID NO: 1242485
ucguaacuauagguauagu

SEQ ID NO: 1351233 - RNA, 19 nt, Artificial Sequence
  Description of Artificial Sequence: Synthetic oligonucleotide
  Antisense strand to SEQ ID NO: 1351232
acuauaccuauaguuacga

SEQ ID NO: 1351234 - RNA, 19 nt, Artificial Sequence
  Description of Artificial Sequence: Synthetic oligonucleotide
  Sense strand starting at position 2738 of SEQ ID NO: 1242485
cguaacuauagguauaguu

SEQ ID NO: 1351235 - RNA, 19 nt, Artificial Sequence
  Description of Artificial Sequence: Synthetic oligonucleotide
  Antisense strand to SEQ ID NO: 1351234
aacuauaccuauaguuacg

SEQ ID NO: 1351236 - RNA, 19 nt, Artificial Sequence
  Description of Artificial Sequence: Synthetic oligonucleotide
  Sense strand starting at position 2798 of SEQ ID NO: 1242485
gauugugaugucgauacuc

SEQ ID NO: 1351237 - RNA, 19 nt, Artificial Sequence
  Description of Artificial Sequence: Synthetic oligonucleotide
  Antisense strand to SEQ ID NO: 1351236
gaguaucgacaucacaauc

SEQ ID NO: 1351238 - RNA, 19 nt, Artificial Sequence
  Description of Artificial Sequence: Synthetic oligonucleotide
  Sense strand starting at position 2800 of SEQ ID NO: 1242485
uugugaugucgauacucaa

SEQ ID NO: 1351239 - RNA, 19 nt, Artificial Sequence
  Description of Artificial Sequence: Synthetic oligonucleotide
  Antisense strand to SEQ ID NO: 1351238
uugaguaucgacaucacaa

SEQ ID NO: 1351240 - RNA, 19 nt, Artificial Sequence
  Description of Artificial Sequence: Synthetic oligonucleotide
  Sense strand starting at position 2803 of SEQ ID NO: 1242485
ugaugucgauacucaauaa

SEQ ID NO: 1351241 - RNA, 19 nt, Artificial Sequence
  Description of Artificial Sequence: Synthetic oligonucleotide
  Antisense strand to SEQ ID NO: 1351240
uuauugaguaucgacauca

SEQ ID NO: 1351242 - RNA, 19 nt, Artificial Sequence
  Description of Artificial Sequence: Synthetic oligonucleotide
  Sense strand starting at position 2838 of SEQ ID NO: 1242485
agcauuacuagacguggua

SEQ ID NO: 1351243 - RNA, 19 nt, Artificial Sequence
  Description of Artificial Sequence: Synthetic oligonucleotide
  Antisense strand to SEQ ID NO: 1351242
uaccacgucuaguaaugcu

SEQ ID NO: 1351244 - RNA, 19 nt, Artificial Sequence
  Description of Artificial Sequence: Synthetic oligonucleotide
  Sense strand starting at position 2841 of SEQ ID NO: 1242485
auuacuagacgugguauau

SEQ ID NO: 1351245 - RNA, 19 nt, Artificial Sequence
  Description of Artificial Sequence: Synthetic oligonucleotide
  Antisense strand to SEQ ID NO: 1351244
auauaccacgucuaguaau

SEQ ID NO: 1351246 - RNA, 19 nt, Artificial Sequence
  Description of Artificial Sequence: Synthetic oligonucleotide
  Sense strand starting at position 2871 of SEQ ID NO: 1242485
gaaagaauguuacugccca

SEQ ID NO: 1351247 - RNA, 19 nt, Artificial Sequence
  Description of Artificial Sequence: Synthetic oligonucleotide
  Antisense strand to SEQ ID NO: 1351246
ugggcaguaacauucuuuc

SEQ ID NO: 1351248 - RNA, 19 nt, Artificial Sequence
  Description of Artificial Sequence: Synthetic oligonucleotide
  Sense strand starting at position 2878 of SEQ ID NO: 1242485
uguuacugcccauauagau

SEQ ID NO: 1351249 - RNA, 19 nt, Artificial Sequence
  Description of Artificial Sequence: Synthetic oligonucleotide
  Antisense strand to SEQ ID NO: 1351248
aucuauaugggcaguaaca

SEQ ID NO: 1351250 - RNA, 19 nt, Artificial Sequence
  Description of Artificial Sequence: Synthetic oligonucleotide
  Sense strand starting at position 2892 of SEQ ID NO: 1242485
uagauuuccgcuggccaca

SEQ ID NO: 1351251 - RNA, 19 nt, Artificial Sequence
  Description of Artificial Sequence: Synthetic oligonucleotide
  Antisense strand to SEQ ID NO: 1351250
uguggccagcggaaaucua

SEQ ID NO: 1351252 - RNA, 19 nt, Artificial Sequence
  Description of Artificial Sequence: Synthetic oligonucleotide
  Sense strand starting at position 2939 of SEQ ID NO: 1242485
gaaagcaaucuguaggcuu

SEQ ID NO: 1351253 - RNA, 19 nt, Artificial Sequence
  Description of Artificial Sequence: Synthetic oligonucleotide
  Antisense strand to SEQ ID NO: 1351252
aagccuacagauugcuuuc

SEQ ID NO: 1351254 - RNA, 19 nt, Artificial Sequence
  Description of Artificial Sequence: Synthetic oligonucleotide
  Sense strand starting at position 2946 of SEQ ID NO: 1242485
aucuguaggcuuggaaaua

SEQ ID NO: 1351255 - RNA, 19 nt, Artificial Sequence
  Description of Artificial Sequence: Synthetic oligonucleotide
  Antisense strand to SEQ ID NO: 1351254
uauuuccaagccuacagau

SEQ ID NO: 1351256 - RNA, 19 nt, Artificial Sequence
  Description of Artificial Sequence: Synthetic oligonucleotide
  Sense strand starting at position 3016 of SEQ ID NO: 1242485
ggaagagguguuuaguagu

SEQ ID NO: 1351257 - RNA, 19 nt, Artificial Sequence
  Description of Artificial Sequence: Synthetic oligonucleotide
  Antisense strand to SEQ ID NO: 1351256
acuacuaaacaccucuucc

SEQ ID NO: 1351258 - RNA, 19 nt, Artificial Sequence
  Description of Artificial Sequence: Synthetic oligonucleotide
  Sense strand starting at position 3029 of SEQ ID NO: 1242485
aguagugucccuuaagcuu

SEQ ID NO: 1351259 - RNA, 19 nt, Artificial Sequence
  Description of Artificial Sequence: Synthetic oligonucleotide
  Antisense strand to SEQ ID NO: 1351258
aagcuuaagggacacuacu

SEQ ID NO: 1351260 - RNA, 19 nt, Artificial Sequence
  Description of Artificial Sequence: Synthetic oligonucleotide
  Sense strand starting at position 3947 of SEQ ID NO: 1242485
ucgguucuccuccaagcau

SEQ ID NO: 1351261 - RNA, 19 nt, Artificial Sequence
  Description of Artificial Sequence: Synthetic oligonucleotide
  Antisense strand to SEQ ID NO: 1351260
augcuuggaggagaaccga

SEQ ID NO: 1351262 - RNA, 19 nt, Artificial Sequence
  Description of Artificial Sequence: Synthetic oligonucleotide
  Sense strand starting at position 3975 of SEQ ID NO: 1242485
ucuaauaggcuagauuacu

SEQ ID NO: 1351263 - RNA, 19 nt, Artificial Sequence
  Description of Artificial Sequence: Synthetic oligonucleotide
  Antisense strand to SEQ ID NO: 1351262
aguaaucuagccuauuaga

SEQ ID NO: 1351264 - RNA, 19 nt, Artificial Sequence
  Description of Artificial Sequence: Synthetic oligonucleotide
  Sense strand starting at position 3981 of SEQ ID NO: 1242485
aggcuagauuacuuccuua

SEQ ID NO: 1351265 - RNA, 19 nt, Artificial Sequence
  Description of Artificial Sequence: Synthetic oligonucleotide
  Antisense strand to SEQ ID NO: 1351264
uaaggaaguaaucuagccu

SEQ ID NO: 1351266 - RNA, 19 nt, Artificial Sequence
  Description of Artificial Sequence: Synthetic oligonucleotide
  Sense strand starting at position 39 of SEQ ID NO: 1242486
uucuuuaaugauugagguu

SEQ ID NO: 1351267 - RNA, 19 nt, Artificial Sequence
  Description of Artificial Sequence: Synthetic oligonucleotide
  Antisense strand to SEQ ID NO: 1351266
aaccucaaucauuaaagaa

SEQ ID NO: 1351268 - RNA, 19 nt, Artificial Sequence
  Description of Artificial Sequence: Synthetic oligonucleotide
  Sense strand starting at position 148 of SEQ ID NO: 1242486
uuguaauacuuuguguauc

SEQ ID NO: 1351269 - RNA, 19 nt, Artificial Sequence
  Description of Artificial Sequence: Synthetic oligonucleotide
  Antisense strand to SEQ ID NO: 1351268
gauacacaaaguauuacaa

SEQ ID NO: 1351270 - RNA, 19 nt, Artificial Sequence
  Description of Artificial Sequence: Synthetic oligonucleotide
  Sense strand starting at position 150 of SEQ ID NO: 1242486
guaauacuuuguguauccu

SEQ ID NO: 1351271 - RNA, 19 nt, Artificial Sequence
  Description of Artificial Sequence: Synthetic oligonucleotide
  Antisense strand to SEQ ID NO: 1351270
aggauacacaaaguauuac

SEQ ID NO: 1351272 - RNA, 19 nt, Artificial Sequence
  Description of Artificial Sequence: Synthetic oligonucleotide
  Sense strand starting at position 273 of SEQ ID NO: 1242486
guuucuucucaagaucaug

SEQ ID NO: 1351273 - RNA, 19 nt, Artificial Sequence
  Description of Artificial Sequence: Synthetic oligonucleotide
  Antisense strand to SEQ ID NO: 1351272
caugaucuugagaagaaac

SEQ ID NO: 1351274 - RNA, 19 nt, Artificial Sequence
  Description of Artificial Sequence: Synthetic oligonucleotide
  Sense strand starting at position 291 of SEQ ID NO: 1242486
gcaggauacugucccuuaa

SEQ ID NO: 1351275 - RNA, 19 nt, Artificial Sequence
  Description of Artificial Sequence: Synthetic oligonucleotide
  Antisense strand to SEQ ID NO: 1351274
uuaagggacaguauccugc

SEQ ID NO: 1351276 - RNA, 19 nt, Artificial Sequence
  Description of Artificial Sequence: Synthetic oligonucleotide
  Sense strand starting at position 293 of SEQ ID NO: 1242486
aggauacugucccuuaaua

SEQ ID NO: 1351277 - RNA, 19 nt, Artificial Sequence
  Description of Artificial Sequence: Synthetic oligonucleotide
  Antisense strand to SEQ ID NO: 1351276
uauuaagggacaguauccu

SEQ ID NO: 1351278 - RNA, 19 nt, Artificial Sequence
  Description of Artificial Sequence: Synthetic oligonucleotide
  Sense strand starting at position 342 of SEQ ID NO: 1242486
gaugcuguaccucagaguu

SEQ ID NO: 1351279 - RNA, 19 nt, Artificial Sequence
  Description of Artificial Sequence: Synthetic oligonucleotide
  Antisense strand to SEQ ID NO: 1351278
aacucugagguacagcauc

SEQ ID NO: 1351280 - RNA, 19 nt, Artificial Sequence
  Description of Artificial Sequence: Synthetic oligonucleotide
  Sense strand starting at position 411 of SEQ ID NO: 1242486
ugcuuaugugaugagaaua

SEQ ID NO: 1351281 - RNA, 19 nt, Artificial Sequence
  Description of Artificial Sequence: Synthetic oligonucleotide
  Antisense strand to SEQ ID NO: 1351280
uauucucaucacauaagca

SEQ ID NO: 1351282 - RNA, 19 nt, Artificial Sequence
  Description of Artificial Sequence: Synthetic oligonucleotide
  Sense strand starting at position 461 of SEQ ID NO: 1242486
auacccacuucuuugugua

SEQ ID NO: 1351283 - RNA, 19 nt, Artificial Sequence
  Description of Artificial Sequence: Synthetic oligonucleotide
  Antisense strand to SEQ ID NO: 1351282
uacacaaagaaguggguau

SEQ ID NO: 1351284 - RNA, 19 nt, Artificial Sequence
  Description of Artificial Sequence: Synthetic oligonucleotide
  Sense strand starting at position 463 of SEQ ID NO: 1242486
acccacuucuuuguguaaa

SEQ ID NO: 1351285 - RNA, 19 nt, Artificial Sequence
  Description of Artificial Sequence: Synthetic oligonucleotide
  Antisense strand to SEQ ID NO: 1351284
uuuacacaaagaagugggu

SEQ ID NO: 1351286 - RNA, 19 nt, Artificial Sequence
  Description of Artificial Sequence: Synthetic oligonucleotide
  Sense strand starting at position 465 of SEQ ID NO: 1242486
ccacuucuuuguguaaaug

SEQ ID NO: 1351287 - RNA, 19 nt, Artificial Sequence
  Description of Artificial Sequence: Synthetic oligonucleotide
  Antisense strand to SEQ ID NO: 1351286
cauuuacacaaagaagugg

SEQ ID NO: 1351288 - RNA, 19 nt, Artificial Sequence
  Description of Artificial Sequence: Synthetic oligonucleotide
  Sense strand starting at position 514 of SEQ ID NO: 1242486
guguaaugauaucuuuccu

SEQ ID NO: 1351289 - RNA, 19 nt, Artificial Sequence
  Description of Artificial Sequence: Synthetic oligonucleotide
  Antisense strand to SEQ ID NO: 1351288
aggaaagauaucauuacac

SEQ ID NO: 1351290 - RNA, 19 nt, Artificial Sequence
  Description of Artificial Sequence: Synthetic oligonucleotide
  Sense strand starting at position 735 of SEQ ID NO: 1242486
acaagcugaccuugaaagu

SEQ ID NO: 1351291 - RNA, 19 nt, Artificial Sequence
  Description of Artificial Sequence: Synthetic oligonucleotide
  Antisense strand to SEQ ID NO: 1351290
acuuucaaggucagcuugu

SEQ ID NO: 1351292 - RNA, 19 nt, Artificial Sequence
  Description of Artificial Sequence: Synthetic oligonucleotide
  Sense strand starting at position 736 of SEQ ID NO: 1242486
caagcugaccuugaaaguu

SEQ ID NO: 1351293 - RNA, 19 nt, Artificial Sequence
  Description of Artificial Sequence: Synthetic oligonucleotide
  Antisense strand to SEQ ID NO: 1351292
aacuuucaaggucagcuug

SEQ ID NO: 1351294 - RNA, 19 nt, Artificial Sequence
  Description of Artificial Sequence: Synthetic oligonucleotide
  Sense strand starting at position 845 of SEQ ID NO: 1242486
ucacauugcuuagcaguaa

SEQ ID NO: 1351295 - RNA, 19 nt, Artificial Sequence
  Description of Artificial Sequence: Synthetic oligonucleotide
  Antisense strand to SEQ ID NO: 1351294
uuacugcuaagcaauguga

SEQ ID NO: 1351296 - RNA, 19 nt, Artificial Sequence
  Description of Artificial Sequence: Synthetic oligonucleotide
  Sense strand starting at position 857 of SEQ ID NO: 1242486
gcaguaacaccuuguaaau

SEQ ID NO: 1351297 - RNA, 19 nt, Artificial Sequence
  Description of Artificial Sequence: Synthetic oligonucleotide
  Antisense strand to SEQ ID NO: 1351296
auuuacaagguguuacugc

SEQ ID NO: 1351298 - RNA, 19 nt, Artificial Sequence
  Description of Artificial Sequence: Synthetic oligonucleotide
  Sense strand starting at position 866 of SEQ ID NO: 1242486
ccuuguaaaugaguuauuc

SEQ ID NO: 1351299 - RNA, 19 nt, Artificial Sequence
  Description of Artificial Sequence: Synthetic oligonucleotide
  Antisense strand to SEQ ID NO: 1351298
gaauaacucauuuacaagg

SEQ ID NO: 1351300 - RNA, 19 nt, Artificial Sequence
  Description of Artificial Sequence: Synthetic oligonucleotide
  Sense strand starting at position 870 of SEQ ID NO: 1242486
guaaaugaguuauuccuag

SEQ ID NO: 1351301 - RNA, 19 nt, Artificial Sequence
  Description of Artificial Sequence: Synthetic oligonucleotide
  Antisense strand to SEQ ID NO: 1351300
cuaggaauaacucauuuac

SEQ ID NO: 1351302 - RNA, 19 nt, Artificial Sequence
  Description of Artificial Sequence: Synthetic oligonucleotide
  Sense strand starting at position 876 of SEQ ID NO: 1242486
gaguuauuccuagggcagg

SEQ ID NO: 1351303 - RNA, 19 nt, Artificial Sequence
  Description of Artificial Sequence: Synthetic oligonucleotide
  Antisense strand to SEQ ID NO: 1351302
ccugcccuaggaauaacuc

SEQ ID NO: 1351304 - RNA, 19 nt, Artificial Sequence
  Description of Artificial Sequence: Synthetic oligonucleotide
  Sense strand starting at position 965 of SEQ ID NO: 1242486
ugggaaauauaaugagaac

SEQ ID NO: 1351305 - RNA, 19 nt, Artificial Sequence
  Description of Artificial Sequence: Synthetic oligonucleotide
  Antisense strand to SEQ ID NO: 1351304
guucucauuauauuuccca

SEQ ID NO: 1351306 - RNA, 19 nt, Artificial Sequence
  Description of Artificial Sequence: Synthetic oligonucleotide
  Sense strand starting at position 1111 of SEQ ID NO: 1242486
ugcagugagcaaugauagu

SEQ ID NO: 1351307 - RNA, 19 nt, Artificial Sequence
  Description of Artificial Sequence: Synthetic oligonucleotide
  Antisense strand to SEQ ID NO: 1351306
acuaucauugcucacugca

SEQ ID NO: 1351308 - RNA, 19 nt, Artificial Sequence
  Description of Artificial Sequence: Synthetic oligonucleotide
  Sense strand starting at position 1222 of SEQ ID NO: 1242486
cccauuauuuaggacagga

SEQ ID NO: 1351309 - RNA, 19 nt, Artificial Sequence
  Description of Artificial Sequence: Synthetic oligonucleotide
  Antisense strand to SEQ ID NO: 1351308
uccuguccuaaauaauggg

SEQ ID NO: 1351310 - RNA, 19 nt, Artificial Sequence
  Description of Artificial Sequence: Synthetic oligonucleotide
  Sense strand starting at position 1349 of SEQ ID NO: 1242486
gggccaauuugugugagca

SEQ ID NO: 1351311 - RNA, 19 nt, Artificial Sequence
  Description of Artificial Sequence: Synthetic oligonucleotide
  Antisense strand to SEQ ID NO: 1351310
ugcucacacaaauuggccc

SEQ ID NO: 1351312 - RNA, 19 nt, Artificial Sequence
  Description of Artificial Sequence: Synthetic oligonucleotide
  Sense strand starting at position 1350 of SEQ ID NO: 1242486
ggccaauuugugugagcag

SEQ ID NO: 1351313 - RNA, 19 nt, Artificial Sequence
  Description of Artificial Sequence: Synthetic oligonucleotide
  Antisense strand to SEQ ID NO: 1351312
cugcucacacaaauuggcc

SEQ ID NO: 1351314 - RNA, 19 nt, Artificial Sequence
  Description of Artificial Sequence: Synthetic oligonucleotide
  Sense strand starting at position 1364 of SEQ ID NO: 1242486
agcagaaagcucugcaauu

SEQ ID NO: 1351315 - RNA, 19 nt, Artificial Sequence
  Description of Artificial Sequence: Synthetic oligonucleotide
  Antisense strand to SEQ ID NO: 1351314
aauugcagagcuuucugcu

SEQ ID NO: 1351316 - RNA, 19 nt, Artificial Sequence
  Description of Artificial Sequence: Synthetic oligonucleotide
  Sense strand starting at position 1365 of SEQ ID NO: 1242486
gcagaaagcucugcaauug

SEQ ID NO: 1351317 - RNA, 19 nt, Artificial Sequence
  Description of Artificial Sequence: Synthetic oligonucleotide
  Antisense strand to SEQ ID NO: 1351316
caauugcagagcuuucugc

SEQ ID NO: 1351318 - RNA, 19 nt, Artificial Sequence
  Description of Artificial Sequence: Synthetic oligonucleotide
  Sense strand starting at position 1366 of SEQ ID NO: 1242486
cagaaagcucugcaauugu

SEQ ID NO: 1351319 - RNA, 19 nt, Artificial Sequence
  Description of Artificial Sequence: Synthetic oligonucleotide
  Antisense strand to SEQ ID NO: 1351318
acaauugcagagcuuucug

SEQ ID NO: 1351320 - RNA, 19 nt, Artificial Sequence
  Description of Artificial Sequence: Synthetic oligonucleotide
  Sense strand starting at position 1398 of SEQ ID NO: 1242486
cauuuaauucgguggcacu

SEQ ID NO: 1351321 - RNA, 19 nt, Artificial Sequence
  Description of Artificial Sequence: Synthetic oligonucleotide
  Antisense strand to SEQ ID NO: 1351320
agugccaccgaauuaaaug

SEQ ID NO: 1351322 - RNA, 19 nt, Artificial Sequence
  Description of Artificial Sequence: Synthetic oligonucleotide
  Sense strand starting at position 1689 of SEQ ID NO: 1242486
ggaaauauugccuacccga

SEQ ID NO: 1351323 - RNA, 19 nt, Artificial Sequence
  Description of Artificial Sequence: Synthetic oligonucleotide
  Antisense strand to SEQ ID NO: 1351322
ucggguaggcaauauuucc

SEQ ID NO: 1351324 - RNA, 19 nt, Artificial Sequence
  Description of Artificial Sequence: Synthetic oligonucleotide
  Sense strand starting at position 1759 of SEQ ID NO: 1242486
ucccauguguguuugauuu

SEQ ID NO: 1351325 - RNA, 19 nt, Artificial Sequence
  Description of Artificial Sequence: Synthetic oligonucleotide
  Antisense strand to SEQ ID NO: 1351324
aaaucaaacacacauggga

SEQ ID NO: 1351326 - RNA, 19 nt, Artificial Sequence
  Description of Artificial Sequence: Synthetic oligonucleotide
  Sense strand starting at position 1855 of SEQ ID NO: 1242486
uguguagcccugccuuuaa

SEQ ID NO: 1351327 - RNA, 19 nt, Artificial Sequence
  Description of Artificial Sequence: Synthetic oligonucleotide
  Antisense strand to SEQ ID NO: 1351326
uuaaaggcagggcuacaca

SEQ ID NO: 1351328 - RNA, 19 nt, Artificial Sequence
  Description of Artificial Sequence: Synthetic oligonucleotide
  Sense strand starting at position 2005 of SEQ ID NO: 1242486
ggcaguuaguucucuaacu

SEQ ID NO: 1351329 - RNA, 19 nt, Artificial Sequence
  Description of Artificial Sequence: Synthetic oligonucleotide
  Antisense strand to SEQ ID NO: 1351328
aguuagagaacuaacugcc

SEQ ID NO: 1351330 - RNA, 19 nt, Artificial Sequence
  Description of Artificial Sequence: Synthetic oligonucleotide
  Sense strand starting at position 2006 of SEQ ID NO: 1242486
gcaguuaguucucuaacug

SEQ ID NO: 1351331 - RNA, 19 nt, Artificial Sequence
  Description of Artificial Sequence: Synthetic oligonucleotide
  Antisense strand to SEQ ID NO: 1351330
caguuagagaacuaacugc

SEQ ID NO: 1351332 - RNA, 19 nt, Artificial Sequence
  Description of Artificial Sequence: Synthetic oligonucleotide
  Sense strand starting at position 2016 of SEQ ID NO: 1242486
cucuaacugccacggaauu

SEQ ID NO: 1351333 - RNA, 19 nt, Artificial Sequence
  Description of Artificial Sequence: Synthetic oligonucleotide
  Antisense strand to SEQ ID NO: 1351332
aauuccguggcaguuagag

SEQ ID NO: 1351334 - RNA, 19 nt, Artificial Sequence
  Description of Artificial Sequence: Synthetic oligonucleotide
  Sense strand starting at position 2026 of SEQ ID NO: 1242486
cacggaauuugucucugca

SEQ ID NO: 1351335 - RNA, 19 nt, Artificial Sequence
  Description of Artificial Sequence: Synthetic oligonucleotide
  Antisense strand to SEQ ID NO: 1351334
ugcagagacaaauuccgug

SEQ ID NO: 1351336 - RNA, 19 nt, Artificial Sequence
  Description of Artificial Sequence: Synthetic oligonucleotide
  Sense strand starting at position 2028 of SEQ ID NO: 1242486
cggaauuugucucugcauc

SEQ ID NO: 1351337 - RNA, 19 nt, Artificial Sequence
  Description of Artificial Sequence: Synthetic oligonucleotide
  Antisense strand to SEQ ID NO: 1351336
gaugcagagacaaauuccg

SEQ ID NO: 1351338 - RNA, 19 nt, Artificial Sequence
  Description of Artificial Sequence: Synthetic oligonucleotide
  Sense strand starting at position 2029 of SEQ ID NO: 1242486
ggaauuugucucugcaucu

SEQ ID NO: 1351339 - RNA, 19 nt, Artificial Sequence
  Description of Artificial Sequence: Synthetic oligonucleotide
  Antisense strand to SEQ ID NO: 1351338
agaugcagagacaaauucc

SEQ ID NO: 1351340 - RNA, 19 nt, Artificial Sequence
  Description of Artificial Sequence: Synthetic oligonucleotide
  Sense strand starting at position 3918 of SEQ ID NO: 1242486
ccucacuuccuagguguga

SEQ ID NO: 1351341 - RNA, 19 nt, Artificial Sequence
  Description of Artificial Sequence: Synthetic oligonucleotide
  Antisense strand to SEQ ID NO: 1351340
ucacaccuaggaagugagg

SEQ ID NO: 1351342 - RNA, 19 nt, Artificial Sequence
  Description of Artificial Sequence: Synthetic oligonucleotide
  Sense strand starting at position 3919 of SEQ ID NO: 1242486
cucacuuccuaggugugau

SEQ ID NO: 1351343 - RNA, 19 nt, Artificial Sequence
  Description of Artificial Sequence: Synthetic oligonucleotide
  Antisense strand to SEQ ID NO: 1351342
aucacaccuaggaagugag

SEQ ID NO: 1351344 - RNA, 19 nt, Artificial Sequence
  Description of Artificial Sequence: Synthetic oligonucleotide
  Sense strand starting at position 3920 of SEQ ID NO: 1242486
ucacuuccuaggugugaug

SEQ ID NO: 1351345 - RNA, 19 nt, Artificial Sequence
  Description of Artificial Sequence: Synthetic oligonucleotide
  Antisense strand to SEQ ID NO: 1351344
caucacaccuaggaaguga

SEQ ID NO: 1351346 - RNA, 19 nt, Artificial Sequence
  Description of Artificial Sequence: Synthetic oligonucleotide
  Sense strand starting at position 5 of SEQ ID NO: 1242487
ucaggucuccuguagguuu

SEQ ID NO: 1351347 - RNA, 19 nt, Artificial Sequence
  Description of Artificial Sequence: Synthetic oligonucleotide
  Antisense strand to SEQ ID NO: 1351346
aaaccuacaggagaccuga

SEQ ID NO: 1351348 - RNA, 19 nt, Artificial Sequence
  Description of Artificial Sequence: Synthetic oligonucleotide
  Sense strand starting at position 29 of SEQ ID NO: 1242487
agaauugaaucacaaugca

SEQ ID NO: 1351349 - RNA, 19 nt, Artificial Sequence
  Description of Artificial Sequence: Synthetic oligonucleotide
  Antisense strand to SEQ ID NO: 1351348
ugcauugugauucaauucu

SEQ ID NO: 1351350 - RNA, 19 nt, Artificial Sequence
  Description of Artificial Sequence: Synthetic oligonucleotide
  Sense strand starting at position 128 of SEQ ID NO: 1242487
agcauaacugcucacgaga

SEQ ID NO: 1351351 - RNA, 19 nt, Artificial Sequence
  Description of Artificial Sequence: Synthetic oligonucleotide
  Antisense strand to SEQ ID NO: 1351350
ucucgugagcaguuaugcu

SEQ ID NO: 1351352 - RNA, 19 nt, Artificial Sequence
  Description of Artificial Sequence: Synthetic oligonucleotide
  Sense strand starting at position 205 of SEQ ID NO: 1242487
uuucuuauagguuagcaaa

SEQ ID NO: 1351353 - RNA, 19 nt, Artificial Sequence
  Description of Artificial Sequence: Synthetic oligonucleotide
  Antisense strand to SEQ ID NO: 1351352
uuugcuaaccuauaagaaa

SEQ ID NO: 1351354 - RNA, 19 nt, Artificial Sequence
  Description of Artificial Sequence: Synthetic oligonucleotide
  Sense strand starting at position 237 of SEQ ID NO: 1242487
uccugugauauucgaaaug

SEQ ID NO: 1351355 - RNA, 19 nt, Artificial Sequence
  Description of Artificial Sequence: Synthetic oligonucleotide
  Antisense strand to SEQ ID NO: 1351354
cauuucgaauaucacagga

SEQ ID NO: 1351356 - RNA, 19 nt, Artificial Sequence
  Description of Artificial Sequence: Synthetic oligonucleotide
  Sense strand starting at position 247 of SEQ ID NO: 1242487
uucgaaauggguuguuaaa

SEQ ID NO: 1351357 - RNA, 19 nt, Artificial Sequence
  Description of Artificial Sequence: Synthetic oligonucleotide
  Antisense strand to SEQ ID NO: 1351356
uuuaacaacccauuucgaa

SEQ ID NO: 1351358 - RNA, 19 nt, Artificial Sequence
  Description of Artificial Sequence: Synthetic oligonucleotide
  Sense strand starting at position 346 of SEQ ID NO: 1242487
cugaguggcugccuaauau

SEQ ID NO: 1351359 - RNA, 19 nt, Artificial Sequence
  Description of Artificial Sequence: Synthetic oligonucleotide
  Antisense strand to SEQ ID NO: 1351358
auauuaggcagccacucag

SEQ ID NO: 1351360 - RNA, 19 nt, Artificial Sequence
  Description of Artificial Sequence: Synthetic oligonucleotide
  Sense strand starting at position 356 of SEQ ID NO: 1242487
gccuaauaucuauggcaac

SEQ ID NO: 1351361 - RNA, 19 nt, Artificial Sequence
  Description of Artificial Sequence: Synthetic oligonucleotide
  Antisense strand to SEQ ID NO: 1351360
guugccauagauauuaggc

SEQ ID NO: 1351362 - RNA, 19 nt, Artificial Sequence
  Description of Artificial Sequence: Synthetic oligonucleotide
  Sense strand starting at position 395 of SEQ ID NO: 1242487
aucagaauaugugauuuga

SEQ ID NO: 1351363 - RNA, 19 nt, Artificial Sequence
  Description of Artificial Sequence: Synthetic oligonucleotide
  Antisense strand to SEQ ID NO: 1351362
ucaaaucacauauucugau

SEQ ID NO: 1351364 - RNA, 19 nt, Artificial Sequence
  Description of Artificial Sequence: Synthetic oligonucleotide
  Sense strand starting at position 440 of SEQ ID NO: 1242487
caauguggcagguggaauu

SEQ ID NO: 1351365 - RNA, 19 nt, Artificial Sequence
  Description of Artificial Sequence: Synthetic oligonucleotide
  Antisense strand to SEQ ID NO: 1351364
aauuccaccugccacauug

SEQ ID NO: 1351366 - RNA, 19 nt, Artificial Sequence
  Description of Artificial Sequence: Synthetic oligonucleotide
  Sense strand starting at position 506 of SEQ ID NO: 1242487
uauggaggcucauccauua

SEQ ID NO: 1351367 - RNA, 19 nt, Artificial Sequence
  Description of Artificial Sequence: Synthetic oligonucleotide
  Antisense strand to SEQ ID NO: 1351366
uaauggaugagccuccaua

SEQ ID NO: 1351368 - RNA, 19 nt, Artificial Sequence
  Description of Artificial Sequence: Synthetic oligonucleotide
  Sense strand starting at position 571 of SEQ ID NO: 1242487
guggaugagugaugaauuc

SEQ ID NO: 1351369 - RNA, 19 nt, Artificial Sequence
  Description of Artificial Sequence: Synthetic oligonucleotide
  Antisense strand to SEQ ID NO: 1351368
gaauucaucacucauccac

SEQ ID NO: 1351370 - RNA, 19 nt, Artificial Sequence
  Description of Artificial Sequence: Synthetic oligonucleotide
  Sense strand starting at position 603 of SEQ ID NO: 1242487
auagauagaugcuccuuua

SEQ ID NO: 1351371 - RNA, 19 nt, Artificial Sequence
  Description of Artificial Sequence: Synthetic oligonucleotide
  Antisense strand to SEQ ID NO: 1351370
uaaaggagcaucuaucuau

SEQ ID NO: 1351372 - RNA, 19 nt, Artificial Sequence
  Description of Artificial Sequence: Synthetic oligonucleotide
  Sense strand starting at position 633 of SEQ ID NO: 1242487
ccauuacaguuugaaagca

SEQ ID NO: 1351373 - RNA, 19 nt, Artificial Sequence
  Description of Artificial Sequence: Synthetic oligonucleotide
  Antisense strand to SEQ ID NO: 1351372
ugcuuucaaacuguaaugg

SEQ ID NO: 1351374 - RNA, 19 nt, Artificial Sequence
  Description of Artificial Sequence: Synthetic oligonucleotide
  Sense strand starting at position 652 of SEQ ID NO: 1242487
aauaaaguguuugaagagu

SEQ ID NO: 1351375 - RNA, 19 nt, Artificial Sequence
  Description of Artificial Sequence: Synthetic oligonucleotide
  Antisense strand to SEQ ID NO: 1351374
acucuucaaacacuuuauu

SEQ ID NO: 1351376 - RNA, 19 nt, Artificial Sequence
  Description of Artificial Sequence: Synthetic oligonucleotide
  Sense strand starting at position 794 of SEQ ID NO: 1242487
aagagaacuucugauucgu

SEQ ID NO: 1351377 - RNA, 19 nt, Artificial Sequence
  Description of Artificial Sequence: Synthetic oligonucleotide
  Antisense strand to SEQ ID NO: 1351376
acgaaucagaaguucucuu

SEQ ID NO: 1351378 - RNA, 19 nt, Artificial Sequence
  Description of Artificial Sequence: Synthetic oligonucleotide
  Sense strand starting at position 798 of SEQ ID NO: 1242487
gaacuucugauucgugguu

SEQ ID NO: 1351379 - RNA, 19 nt, Artificial Sequence
  Description of Artificial Sequence: Synthetic oligonucleotide
  Antisense strand to SEQ ID NO: 1351378
aaccacgaaucagaaguuc

SEQ ID NO: 1351380 - RNA, 19 nt, Artificial Sequence
  Description of Artificial Sequence: Synthetic oligonucleotide
  Sense strand starting at position 799 of SEQ ID NO: 1242487
aacuucugauucgugguua

SEQ ID NO: 1351381 - RNA, 19 nt, Artificial Sequence
  Description of Artificial Sequence: Synthetic oligonucleotide
  Antisense strand to SEQ ID NO: 1351380
uaaccacgaaucagaaguu

SEQ ID NO: 1351382 - RNA, 19 nt, Artificial Sequence
  Description of Artificial Sequence: Synthetic oligonucleotide
  Sense strand starting at position 921 of SEQ ID NO: 1242487
ugcuucuacugcuuugaca

SEQ ID NO: 1351383 - RNA, 19 nt, Artificial Sequence
  Description of Artificial Sequence: Synthetic oligonucleotide
  Antisense strand to SEQ ID NO: 1351382
ugucaaagcaguagaagca

SEQ ID NO: 1351384 - RNA, 19 nt, Artificial Sequence
  Description of Artificial Sequence: Synthetic oligonucleotide
  Sense strand starting at position 1003 of SEQ ID NO: 1242487
ggguuagaauguccaaucu

SEQ ID NO: 1351385 - RNA, 19 nt, Artificial Sequence
  Description of Artificial Sequence: Synthetic oligonucleotide
  Antisense strand to SEQ ID NO: 1351384
agauuggacauucuaaccc

SEQ ID NO: 1351386 - RNA, 19 nt, Artificial Sequence
  Description of Artificial Sequence: Synthetic oligonucleotide
  Sense strand starting at position 1097 of SEQ ID NO: 1242487
uggcuagaguucuaccaug

SEQ ID NO: 1351387 - RNA, 19 nt, Artificial Sequence
  Description of Artificial Sequence: Synthetic oligonucleotide
  Antisense strand to SEQ ID NO: 1351386
caugguagaacucuagcca

SEQ ID NO: 1351388 - RNA, 19 nt, Artificial Sequence
  Description of Artificial Sequence: Synthetic oligonucleotide
  Sense strand starting at position 1413 of SEQ ID NO: 1242487
uagacagagccucgaguua

SEQ ID NO: 1351389 - RNA, 19 nt, Artificial Sequence
  Description of Artificial Sequence: Synthetic oligonucleotide
  Antisense strand to SEQ ID NO: 1351388
uaacucgaggcucugucua

SEQ ID NO: 1351390 - RNA, 19 nt, Artificial Sequence
  Description of Artificial Sequence: Synthetic oligonucleotide
  Sense strand starting at position 1425 of SEQ ID NO: 1242487
cgaguuacaaucugacuga

SEQ ID NO: 1351391 - RNA, 19 nt, Artificial Sequence
  Description of Artificial Sequence: Synthetic oligonucleotide
  Antisense strand to SEQ ID NO: 1351390
ucagucagauuguaacucg

SEQ ID NO: 1351392 - RNA, 19 nt, Artificial Sequence
  Description of Artificial Sequence: Synthetic oligonucleotide
  Sense strand starting at position 1428 of SEQ ID NO: 1242487
guuacaaucugacugaggu

SEQ ID NO: 1351393 - RNA, 19 nt, Artificial Sequence
  Description of Artificial Sequence: Synthetic oligonucleotide
  Antisense strand to SEQ ID NO: 1351392
accucagucagauuguaac

SEQ ID NO: 1351394 - RNA, 19 nt, Artificial Sequence
  Description of Artificial Sequence: Synthetic oligonucleotide
  Sense strand starting at position 2108 of SEQ ID NO: 1242487
ggucgaucuccuuaccugu

SEQ ID NO: 1351395 - RNA, 19 nt, Artificial Sequence
  Description of Artificial Sequence: Synthetic oligonucleotide
  Antisense strand to SEQ ID NO: 1351394
acagguaaggagaucgacc

SEQ ID NO: 1351396 - RNA, 19 nt, Artificial Sequence
  Description of Artificial Sequence: Synthetic oligonucleotide
  Sense strand starting at position 2110 of SEQ ID NO: 1242487
ucgaucuccuuaccuguaa

SEQ ID NO: 1351397 - RNA, 19 nt, Artificial Sequence
  Description of Artificial Sequence: Synthetic oligonucleotide
  Antisense strand to SEQ ID NO: 1351396
uuacagguaaggagaucga

SEQ ID NO: 1351398 - RNA, 19 nt, Artificial Sequence
  Description of Artificial Sequence: Synthetic oligonucleotide
  Sense strand starting at position 2111 of SEQ ID NO: 1242487
cgaucuccuuaccuguaaa

SEQ ID NO: 1351399 - RNA, 19 nt, Artificial Sequence
  Description of Artificial Sequence: Synthetic oligonucleotide
  Antisense strand to SEQ ID NO: 1351398
uuuacagguaaggagaucg

SEQ ID NO: 1351400 - RNA, 19 nt, Artificial Sequence
  Description of Artificial Sequence: Synthetic oligonucleotide
  Sense strand starting at position 2170 of SEQ ID NO: 1242487
guuguaucaaagugagaau

SEQ ID NO: 1351401 - RNA, 19 nt, Artificial Sequence
  Description of Artificial Sequence: Synthetic oligonucleotide
  Antisense strand to SEQ ID NO: 1351400
auucucacuuugauacaac

SEQ ID NO: 1351402 - RNA, 19 nt, Artificial Sequence
  Description of Artificial Sequence: Synthetic oligonucleotide
  Sense strand starting at position 2173 of SEQ ID NO: 1242487
guaucaaagugagaaugua

SEQ ID NO: 1351403 - RNA, 19 nt, Artificial Sequence
  Description of Artificial Sequence: Synthetic oligonucleotide
  Antisense strand to SEQ ID NO: 1351402
uacauucucacuuugauac

SEQ ID NO: 1351404 - RNA, 19 nt, Artificial Sequence
  Description of Artificial Sequence: Synthetic oligonucleotide
  Sense strand starting at position 2258 of SEQ ID NO: 1242487
aacguaccuccauagguuu

SEQ ID NO: 1351405 - RNA, 19 nt, Artificial Sequence
  Description of Artificial Sequence: Synthetic oligonucleotide
  Antisense strand to SEQ ID NO: 1351404
aaaccuauggagguacguu

SEQ ID NO: 1351406 - RNA, 19 nt, Artificial Sequence
  Description of Artificial Sequence: Synthetic oligonucleotide
  Sense strand starting at position 2474 of SEQ ID NO: 1242487
cugggaucugucuguguug

SEQ ID NO: 1351407 - RNA, 19 nt, Artificial Sequence
  Description of Artificial Sequence: Synthetic oligonucleotide
  Antisense strand to SEQ ID NO: 1351406
caacacagacagaucccag

SEQ ID NO: 1351408 - RNA, 19 nt, Artificial Sequence
  Description of Artificial Sequence: Synthetic oligonucleotide
  Sense strand starting at position 2602 of SEQ ID NO: 1242487
agauguaauuccuauguuu

SEQ ID NO: 1351409 - RNA, 19 nt, Artificial Sequence
  Description of Artificial Sequence: Synthetic oligonucleotide
  Antisense strand to SEQ ID NO: 1351408
aaacauaggaauuacaucu

SEQ ID NO: 1351410 - RNA, 19 nt, Artificial Sequence
  Description of Artificial Sequence: Synthetic oligonucleotide
  Sense strand starting at position 2651 of SEQ ID NO: 1242487
ucacaugcaccugaguaaa

SEQ ID NO: 1351411 - RNA, 19 nt, Artificial Sequence
  Description of Artificial Sequence: Synthetic oligonucleotide
  Antisense strand to SEQ ID NO: 1351410
uuuacucaggugcauguga

SEQ ID NO: 1351412 - RNA, 19 nt, Artificial Sequence
  Description of Artificial Sequence: Synthetic oligonucleotide
  Sense strand starting at position 2653 of SEQ ID NO: 1242487
acaugcaccugaguaaaua

SEQ ID NO: 1351413 - RNA, 19 nt, Artificial Sequence
  Description of Artificial Sequence: Synthetic oligonucleotide
  Antisense strand to SEQ ID NO: 1351412
uauuuacucaggugcaugu

SEQ ID NO: 1351414 - RNA, 19 nt, Artificial Sequence
  Description of Artificial Sequence: Synthetic oligonucleotide
  Sense strand starting at position 2669 of SEQ ID NO: 1242487
auaauauugcaacacggua

SEQ ID NO: 1351415 - RNA, 19 nt, Artificial Sequence
  Description of Artificial Sequence: Synthetic oligonucleotide
  Antisense strand to SEQ ID NO: 1351414
uaccguguugcaauauuau

SEQ ID NO: 1351416 - RNA, 19 nt, Artificial Sequence
  Description of Artificial Sequence: Synthetic oligonucleotide
  Sense strand starting at position 2809 of SEQ ID NO: 1242487
auauauugcuguucugagu

SEQ ID NO: 1351417 - RNA, 19 nt, Artificial Sequence
  Description of Artificial Sequence: Synthetic oligonucleotide
  Antisense strand to SEQ ID NO: 1351416
acucagaacagcaauauau

SEQ ID NO: 1351418 - RNA, 19 nt, Artificial Sequence
  Description of Artificial Sequence: Synthetic oligonucleotide
  Sense strand starting at position 2838 of SEQ ID NO: 1242487
acgucuucccuuuauugaa

SEQ ID NO: 1351419 - RNA, 19 nt, Artificial Sequence
  Description of Artificial Sequence: Synthetic oligonucleotide
  Antisense strand to SEQ ID NO: 1351418
uucaauaaagggaagacgu

SEQ ID NO: 1351420 - RNA, 19 nt, Artificial Sequence
  Description of Artificial Sequence: Synthetic oligonucleotide
  Sense strand starting at position 3123 of SEQ ID NO: 1242487
ggaaauacauguggaaaua

SEQ ID NO: 1351421 - RNA, 19 nt, Artificial Sequence
  Description of Artificial Sequence: Synthetic oligonucleotide
  Antisense strand to SEQ ID NO: 1351420
uauuuccacauguauuucc

SEQ ID NO: 1351422 - RNA, 19 nt, Artificial Sequence
  Description of Artificial Sequence: Synthetic oligonucleotide
  Sense strand starting at position 3240 of SEQ ID NO: 1242487
aaggaaagucuguacagcu

SEQ ID NO: 1351423 - RNA, 19 nt, Artificial Sequence
  Description of Artificial Sequence: Synthetic oligonucleotide
  Antisense strand to SEQ ID NO: 1351422
agcuguacagacuuuccuu

SEQ ID NO: 1351424 - RNA, 19 nt, Artificial Sequence
  Description of Artificial Sequence: Synthetic oligonucleotide
  Sense strand starting at position 3934 of SEQ ID NO: 1242487
agcaauggacuuggugaau

SEQ ID NO: 1351425 - RNA, 19 nt, Artificial Sequence
  Description of Artificial Sequence: Synthetic oligonucleotide
  Antisense strand to SEQ ID NO: 1351424
auucaccaaguccauugcu

SEQ ID NO: 1351426 - RNA, 19 nt, Artificial Sequence
  Description of Artificial Sequence: Synthetic oligonucleotide
  Sense strand starting at position 63 of SEQ ID NO: 1242488
cguguagugccauccaguu

SEQ ID NO: 1351427 - RNA, 19 nt, Artificial Sequence
  Description of Artificial Sequence: Synthetic oligonucleotide
  Antisense strand to SEQ ID NO: 1351426
aacuggauggcacuacacg

SEQ ID NO: 1351428 - RNA, 19 nt, Artificial Sequence
  Description of Artificial Sequence: Synthetic oligonucleotide
  Sense strand starting at position 153 of SEQ ID NO: 1242488
guaaauguaauucgacuga

SEQ ID NO: 1351429 - RNA, 19 nt, Artificial Sequence
  Description of Artificial Sequence: Synthetic oligonucleotide
  Antisense strand to SEQ ID NO: 1351428
ucagucgaauuacauuuac

SEQ ID NO: 1351430 - RNA, 19 nt, Artificial Sequence
  Description of Artificial Sequence: Synthetic oligonucleotide
  Sense strand starting at position 157 of SEQ ID NO: 1242488
auguaauucgacugagaug

SEQ ID NO: 1351431 - RNA, 19 nt, Artificial Sequence
  Description of Artificial Sequence: Synthetic oligonucleotide
  Antisense strand to SEQ ID NO: 1351430
caucucagucgaauuacau

SEQ ID NO: 1351432 - RNA, 19 nt, Artificial Sequence
  Description of Artificial Sequence: Synthetic oligonucleotide
  Sense strand starting at position 158 of SEQ ID NO: 1242488
uguaauucgacugagaugu

SEQ ID NO: 1351433 - RNA, 19 nt, Artificial Sequence
  Description of Artificial Sequence: Synthetic oligonucleotide
  Antisense strand to SEQ ID NO: 1351432
acaucucagucgaauuaca

SEQ ID NO: 1351434 - RNA, 19 nt, Artificial Sequence
  Description of Artificial Sequence: Synthetic oligonucleotide
  Sense strand starting at position 162 of SEQ ID NO: 1242488
auucgacugagaugugacu

SEQ ID NO: 1351435 - RNA, 19 nt, Artificial Sequence
  Description of Artificial Sequence: Synthetic oligonucleotide
  Antisense strand to SEQ ID NO: 1351434
agucacaucucagucgaau

SEQ ID NO: 1351436 - RNA, 19 nt, Artificial Sequence
  Description of Artificial Sequence: Synthetic oligonucleotide
  Sense strand starting at position 168 of SEQ ID NO: 1242488
cugagaugugacugaauau

SEQ ID NO: 1351437 - RNA, 19 nt, Artificial Sequence
  Description of Artificial Sequence: Synthetic oligonucleotide
  Antisense strand to SEQ ID NO: 1351436
auauucagucacaucucag

SEQ ID NO: 1351438 - RNA, 19 nt, Artificial Sequence
  Description of Artificial Sequence: Synthetic oligonucleotide
  Sense strand starting at position 239 of SEQ ID NO: 1242488
auauaaugucuacauagug

SEQ ID NO: 1351439 - RNA, 19 nt, Artificial Sequence
  Description of Artificial Sequence: Synthetic oligonucleotide
  Antisense strand to SEQ ID NO: 1351438
cacuauguagacauuauau

SEQ ID NO: 1351440 - RNA, 19 nt, Artificial Sequence
  Description of Artificial Sequence: Synthetic oligonucleotide
  Sense strand starting at position 246 of SEQ ID NO: 1242488
gucuacauaguguauauau

SEQ ID NO: 1351441 - RNA, 19 nt, Artificial Sequence
  Description of Artificial Sequence: Synthetic oligonucleotide
  Antisense strand to SEQ ID NO: 1351440
auauauacacuauguagac

SEQ ID NO: 1351442 - RNA, 19 nt, Artificial Sequence
  Description of Artificial Sequence: Synthetic oligonucleotide
  Sense strand starting at position 254 of SEQ ID NO: 1242488
aguguauauaugcaaugua

SEQ ID NO: 1351443 - RNA, 19 nt, Artificial Sequence
  Description of Artificial Sequence: Synthetic oligonucleotide
  Antisense strand to SEQ ID NO: 1351442
uacauugcauauauacacu

SEQ ID NO: 1351444 - RNA, 19 nt, Artificial Sequence
  Description of Artificial Sequence: Synthetic oligonucleotide
  Sense strand starting at position 257 of SEQ ID NO: 1242488
guauauaugcaauguaaac

SEQ ID NO: 1351445 - RNA, 19 nt, Artificial Sequence
  Description of Artificial Sequence: Synthetic oligonucleotide
  Antisense strand to SEQ ID NO: 1351444
guuuacauugcauauauac

SEQ ID NO: 1351446 - RNA, 19 nt, Artificial Sequence
  Description of Artificial Sequence: Synthetic oligonucleotide
  Sense strand starting at position 307 of SEQ ID NO: 1242488
acacgaguacuuugaagau

SEQ ID NO: 1351447 - RNA, 19 nt, Artificial Sequence
  Description of Artificial Sequence: Synthetic oligonucleotide
  Antisense strand to SEQ ID NO: 1351446
aucuucaaaguacucgugu

SEQ ID NO: 1351448 - RNA, 19 nt, Artificial Sequence
  Description of Artificial Sequence: Synthetic oligonucleotide
  Sense strand starting at position 375 of SEQ ID NO: 1242488
augccagacuauuagauuu

SEQ ID NO: 1351449 - RNA, 19 nt, Artificial Sequence
  Description of Artificial Sequence: Synthetic oligonucleotide
  Antisense strand to SEQ ID NO: 1351448
aaaucuaauagucuggcau

SEQ ID NO: 1351450 - RNA, 19 nt, Artificial Sequence
  Description of Artificial Sequence: Synthetic oligonucleotide
  Sense strand starting at position 485 of SEQ ID NO: 1242488
ggaagauagugguauuucu

SEQ ID NO: 1351451 - RNA, 19 nt, Artificial Sequence
  Description of Artificial Sequence: Synthetic oligonucleotide
  Antisense strand to SEQ ID NO: 1351450
agaaauaccacuaucuucc

SEQ ID NO: 1351452 - RNA, 19 nt, Artificial Sequence
  Description of Artificial Sequence: Synthetic oligonucleotide
  Sense strand starting at position 492 of SEQ ID NO: 1242488
agugguauuucugaagagg

SEQ ID NO: 1351453 - RNA, 19 nt, Artificial Sequence
  Description of Artificial Sequence: Synthetic oligonucleotide
  Antisense strand to SEQ ID NO: 1351452
ccucuucagaaauaccacu

SEQ ID NO: 1351454 - RNA, 19 nt, Artificial Sequence
  Description of Artificial Sequence: Synthetic oligonucleotide
  Sense strand starting at position 601 of SEQ ID NO: 1242488
acuaucuaagacugcuaga

SEQ ID NO: 1351455 - RNA, 19 nt, Artificial Sequence
  Description of Artificial Sequence: Synthetic oligonucleotide
  Antisense strand to SEQ ID NO: 1351454
ucuagcagucuuagauagu

SEQ ID NO: 1351456 - RNA, 19 nt, Artificial Sequence
  Description of Artificial Sequence: Synthetic oligonucleotide
  Sense strand starting at position 724 of SEQ ID NO: 1242488
cuauucugugugcaaauaa

SEQ ID NO: 1351457 - RNA, 19 nt, Artificial Sequence
  Description of Artificial Sequence: Synthetic oligonucleotide
  Antisense strand to SEQ ID NO: 1351456
uuauuugcacacagaauag

SEQ ID NO: 1351458 - RNA, 19 nt, Artificial Sequence
  Description of Artificial Sequence: Synthetic oligonucleotide
  Sense strand starting at position 844 of SEQ ID NO: 1242488
agguauaacguuuaccaua

SEQ ID NO: 1351459 - RNA, 19 nt, Artificial Sequence
  Description of Artificial Sequence: Synthetic oligonucleotide
  Antisense strand to SEQ ID NO: 1351458
uaugguaaacguuauaccu

SEQ ID NO: 1351460 - RNA, 19 nt, Artificial Sequence
  Description of Artificial Sequence: Synthetic oligonucleotide
  Sense strand starting at position 846 of SEQ ID NO: 1242488
guauaacguuuaccauaau

SEQ ID NO: 1351461 - RNA, 19 nt, Artificial Sequence
  Description of Artificial Sequence: Synthetic oligonucleotide
  Antisense strand to SEQ ID NO: 1351460
auuaugguaaacguuauac

SEQ ID NO: 1351462 - RNA, 19 nt, Artificial Sequence
  Description of Artificial Sequence: Synthetic oligonucleotide
  Sense strand starting at position 985 of SEQ ID NO: 1242488
gucugcucacaggacuaua

SEQ ID NO: 1351463 - RNA, 19 nt, Artificial Sequence
  Description of Artificial Sequence: Synthetic oligonucleotide
  Antisense strand to SEQ ID NO: 1351462
uauaguccugugagcagac

SEQ ID NO: 1351464 - RNA, 19 nt, Artificial Sequence
  Description of Artificial Sequence: Synthetic oligonucleotide
  Sense strand starting at position 1045 of SEQ ID NO: 1242488
agggucaacccauguaguu

SEQ ID NO: 1351465 - RNA, 19 nt, Artificial Sequence
  Description of Artificial Sequence: Synthetic oligonucleotide
  Antisense strand to SEQ ID NO: 1351464
aacuacauggguugacccu

SEQ ID NO: 1351466 - RNA, 19 nt, Artificial Sequence
  Description of Artificial Sequence: Synthetic oligonucleotide
  Sense strand starting at position 1054 of SEQ ID NO: 1242488
ccauguaguuaauuaucca

SEQ ID NO: 1351467 - RNA, 19 nt, Artificial Sequence
  Description of Artificial Sequence: Synthetic oligonucleotide
  Antisense strand to SEQ ID NO: 1351466
uggauaauuaacuacaugg

SEQ ID NO: 1351468 - RNA, 19 nt, Artificial Sequence
  Description of Artificial Sequence: Synthetic oligonucleotide
  Sense strand starting at position 1058 of SEQ ID NO: 1242488
guaguuaauuauccaaaug

SEQ ID NO: 1351469 - RNA, 19 nt, Artificial Sequence
  Description of Artificial Sequence: Synthetic oligonucleotide
  Antisense strand to SEQ ID NO: 1351468
cauuuggauaauuaacuac

SEQ ID NO: 1351470 - RNA, 19 nt, Artificial Sequence
  Description of Artificial Sequence: Synthetic oligonucleotide
  Sense strand starting at position 1223 of SEQ ID NO: 1242488
accaucucguaagcagaau

SEQ ID NO: 1351471 - RNA, 19 nt, Artificial Sequence
  Description of Artificial Sequence: Synthetic oligonucleotide
  Antisense strand to SEQ ID NO: 1351470
auucugcuuacgagauggu

SEQ ID NO: 1351472 - RNA, 19 nt, Artificial Sequence
  Description of Artificial Sequence: Synthetic oligonucleotide
  Sense strand starting at position 1640 of SEQ ID NO: 1242488
agguucagacguuagugaa

SEQ ID NO: 1351473 - RNA, 19 nt, Artificial Sequence
  Description of Artificial Sequence: Synthetic oligonucleotide
  Antisense strand to SEQ ID NO: 1351472
uucacuaacgucugaaccu

SEQ ID NO: 1351474 - RNA, 19 nt, Artificial Sequence
  Description of Artificial Sequence: Synthetic oligonucleotide
  Sense strand starting at position 1648 of SEQ ID NO: 1242488
acguuagugaagugaauac

SEQ ID NO: 1351475 - RNA, 19 nt, Artificial Sequence
  Description of Artificial Sequence: Synthetic oligonucleotide
  Antisense strand to SEQ ID NO: 1351474
guauucacuucacuaacgu

SEQ ID NO: 1351476 - RNA, 19 nt, Artificial Sequence
  Description of Artificial Sequence: Synthetic oligonucleotide
  Sense strand starting at position 1655 of SEQ ID NO: 1242488
ugaagugaauacucaccga

SEQ ID NO: 1351477 - RNA, 19 nt, Artificial Sequence
  Description of Artificial Sequence: Synthetic oligonucleotide
  Antisense strand to SEQ ID NO: 1351476
ucggugaguauucacuuca

SEQ ID NO: 1351478 - RNA, 19 nt, Artificial Sequence
  Description of Artificial Sequence: Synthetic oligonucleotide
  Sense strand starting at position 1660 of SEQ ID NO: 1242488
ugaauacucaccgacggua

SEQ ID NO: 1351479 - RNA, 19 nt, Artificial Sequence
  Description of Artificial Sequence: Synthetic oligonucleotide
  Antisense strand to SEQ ID NO: 1351478
uaccgucggugaguauuca

SEQ ID NO: 1351480 - RNA, 19 nt, Artificial Sequence
  Description of Artificial Sequence: Synthetic oligonucleotide
  Sense strand starting at position 2041 of SEQ ID NO: 1242488
gagagaucgcuacaugcca

SEQ ID NO: 1351481 - RNA, 19 nt, Artificial Sequence
  Description of Artificial Sequence: Synthetic oligonucleotide
  Antisense strand to SEQ ID NO: 1351480
uggcauguagcgaucucuc

SEQ ID NO: 1351482 - RNA, 19 nt, Artificial Sequence
  Description of Artificial Sequence: Synthetic oligonucleotide
  Sense strand starting at position 2496 of SEQ ID NO: 1242488
ugagauagaucugcagaug

SEQ ID NO: 1351483 - RNA, 19 nt, Artificial Sequence
  Description of Artificial Sequence: Synthetic oligonucleotide
  Antisense strand to SEQ ID NO: 1351482
caucugcagaucuaucuca

SEQ ID NO: 1351484 - RNA, 19 nt, Artificial Sequence
  Description of Artificial Sequence: Synthetic oligonucleotide
  Sense strand starting at position 2499 of SEQ ID NO: 1242488
gauagaucugcagaugcuu

SEQ ID NO: 1351485 - RNA, 19 nt, Artificial Sequence
  Description of Artificial Sequence: Synthetic oligonucleotide
  Antisense strand to SEQ ID NO: 1351484
aagcaucugcagaucuauc

SEQ ID NO: 1351486 - RNA, 19 nt, Artificial Sequence
  Description of Artificial Sequence: Synthetic oligonucleotide
  Sense strand starting at position 3016 of SEQ ID NO: 1242488
gguauuugcugaccuuuau

SEQ ID NO: 1351487 - RNA, 19 nt, Artificial Sequence
  Description of Artificial Sequence: Synthetic oligonucleotide
  Antisense strand to SEQ ID NO: 1351486
auaaaggucagcaaauacc

SEQ ID NO: 1351488 - RNA, 19 nt, Artificial Sequence
  Description of Artificial Sequence: Synthetic oligonucleotide
  Sense strand starting at position 3042 of SEQ ID NO: 1242488
cucaauucgcgggaaguua

SEQ ID NO: 1351489 - RNA, 19 nt, Artificial Sequence
  Description of Artificial Sequence: Synthetic oligonucleotide
  Antisense strand to SEQ ID NO: 1351488
uaacuucccgcgaauugag

SEQ ID NO: 1351490 - RNA, 19 nt, Artificial Sequence
  Description of Artificial Sequence: Synthetic oligonucleotide
  Sense strand starting at position 3051 of SEQ ID NO: 1242488
cgggaaguuaguugauauu

SEQ ID NO: 1351491 - RNA, 19 nt, Artificial Sequence
  Description of Artificial Sequence: Synthetic oligonucleotide
  Antisense strand to SEQ ID NO: 1351490
aauaucaacuaacuucccg

SEQ ID NO: 1351492 - RNA, 19 nt, Artificial Sequence
  Description of Artificial Sequence: Synthetic oligonucleotide
  Sense strand starting at position 3437 of SEQ ID NO: 1242488
cagaguuaauucuucgaag

SEQ ID NO: 1351493 - RNA, 19 nt, Artificial Sequence
  Description of Artificial Sequence: Synthetic oligonucleotide
  Antisense strand to SEQ ID NO: 1351492
cuucgaagaauuaacucug

SEQ ID NO: 1351494 - RNA, 19 nt, Artificial Sequence
  Description of Artificial Sequence: Synthetic oligonucleotide
  Sense strand starting at position 3896 of SEQ ID NO: 1242488
auaauauuucgacguuugu

SEQ ID NO: 1351495 - RNA, 19 nt, Artificial Sequence
  Description of Artificial Sequence: Synthetic oligonucleotide
  Antisense strand to SEQ ID NO: 1351494
acaaacgucgaaauauuau

SEQ ID NO: 1351496 - RNA, 19 nt, Artificial Sequence
  Description of Artificial Sequence: Synthetic oligonucleotide
  Sense strand starting at position 3909 of SEQ ID NO: 1242488
guuuguguucagucauagc

SEQ ID NO: 1351497 - RNA, 19 nt, Artificial Sequence
  Description of Artificial Sequence: Synthetic oligonucleotide
  Antisense strand to SEQ ID NO: 1351496
gcuaugacugaacacaaac

SEQ ID NO: 1351498 - RNA, 19 nt, Artificial Sequence
  Description of Artificial Sequence: Synthetic oligonucleotide
  Sense strand starting at position 3919 of SEQ ID NO: 1242488
agucauagcuuucuacaua

SEQ ID NO: 1351499 - RNA, 19 nt, Artificial Sequence
  Description of Artificial Sequence: Synthetic oligonucleotide
  Antisense strand to SEQ ID NO: 1351498
uauguagaaagcuaugacu

SEQ ID NO: 1351500 - RNA, 19 nt, Artificial Sequence
  Description of Artificial Sequence: Synthetic oligonucleotide
  Sense strand starting at position 3942 of SEQ ID NO: 1242488
uggacaugcugacuacaga

SEQ ID NO: 1351501 - RNA, 19 nt, Artificial Sequence
  Description of Artificial Sequence: Synthetic oligonucleotide
  Antisense strand to SEQ ID NO: 1351500
ucuguagucagcaugucca

SEQ ID NO: 1351502 - RNA, 19 nt, Artificial Sequence
  Description of Artificial Sequence: Synthetic oligonucleotide
  Sense strand starting at position 3959 of SEQ ID NO: 1242488
gaugcauucggccacacua

SEQ ID NO: 1351503 - RNA, 19 nt, Artificial Sequence
  Description of Artificial Sequence: Synthetic oligonucleotide
  Antisense strand to SEQ ID NO: 1351502
uaguguggccgaaugcauc

SEQ ID NO: 1351504 - RNA, 19 nt, Artificial Sequence
  Description of Artificial Sequence: Synthetic oligonucleotide
  Sense strand starting at position 3969 of SEQ ID NO: 1242488
gccacacuagugcaugaaa

SEQ ID NO: 1351505 - RNA, 19 nt, Artificial Sequence
  Description of Artificial Sequence: Synthetic oligonucleotide
  Antisense strand to SEQ ID NO: 1351504
uuucaugcacuaguguggc

SEQ ID NO: 1351506 - RNA, 19 nt, Artificial Sequence
  Description of Artificial Sequence: Synthetic oligonucleotide
  Sense strand starting at position 50 of SEQ ID NO: 1242489
acuauuguaucacuugagu

SEQ ID NO: 1351507 - RNA, 19 nt, Artificial Sequence
  Description of Artificial Sequence: Synthetic oligonucleotide
  Antisense strand to SEQ ID NO: 1351506
acucaagugauacaauagu

SEQ ID NO: 1351508 - RNA, 19 nt, Artificial Sequence
  Description of Artificial Sequence: Synthetic oligonucleotide
  Sense strand starting at position 53 of SEQ ID NO: 1242489
auuguaucacuugaguauu

SEQ ID NO: 1351509 - RNA, 19 nt, Artificial Sequence
  Description of Artificial Sequence: Synthetic oligonucleotide
  Antisense strand to SEQ ID NO: 1351508
aauacucaagugauacaau

SEQ ID NO: 1351510 - RNA, 19 nt, Artificial Sequence
  Description of Artificial Sequence: Synthetic oligonucleotide
  Sense strand starting at position 191 of SEQ ID NO: 1242489
cugcuaaacuuggucauuu

SEQ ID NO: 1351511 - RNA, 19 nt, Artificial Sequence
  Description of Artificial Sequence: Synthetic oligonucleotide
  Antisense strand to SEQ ID NO: 1351510
aaaugaccaaguuuagcag

SEQ ID NO: 1351512 - RNA, 19 nt, Artificial Sequence
  Description of Artificial Sequence: Synthetic oligonucleotide
  Sense strand starting at position 558 of SEQ ID NO: 1242489
gggagccacuaauccuuua

SEQ ID NO: 1351513 - RNA, 19 nt, Artificial Sequence
  Description of Artificial Sequence: Synthetic oligonucleotide
  Antisense strand to SEQ ID NO: 1351512
uaaaggauuaguggcuccc

SEQ ID NO: 1351514 - RNA, 19 nt, Artificial Sequence
  Description of Artificial Sequence: Synthetic oligonucleotide
  Sense strand starting at position 675 of SEQ ID NO: 1242489
augauugcaaugcguauuu

SEQ ID NO: 1351515 - RNA, 19 nt, Artificial Sequence
  Description of Artificial Sequence: Synthetic oligonucleotide
  Antisense strand to SEQ ID NO: 1351514
aaauacgcauugcaaucau

SEQ ID NO: 1351516 - RNA, 19 nt, Artificial Sequence
  Description of Artificial Sequence: Synthetic oligonucleotide
  Sense strand starting at position 677 of SEQ ID NO: 1242489
gauugcaaugcguauuuau

SEQ ID NO: 1351517 - RNA, 19 nt, Artificial Sequence
  Description of Artificial Sequence: Synthetic oligonucleotide
  Antisense strand to SEQ ID NO: 1351516
auaaauacgcauugcaauc

SEQ ID NO: 1351518 - RNA, 19 nt, Artificial Sequence
  Description of Artificial Sequence: Synthetic oligonucleotide
  Sense strand starting at position 697 of SEQ ID NO: 1242489
ggguuagacugaagagagu

SEQ ID NO: 1351519 - RNA, 19 nt, Artificial Sequence
  Description of Artificial Sequence: Synthetic oligonucleotide
  Antisense strand to SEQ ID NO: 1351518
acucucuucagucuaaccc

SEQ ID NO: 1351520 - RNA, 19 nt, Artificial Sequence
  Description of Artificial Sequence: Synthetic oligonucleotide
  Sense strand starting at position 708 of SEQ ID NO: 1242489
aagagagucgaucgagaaa

SEQ ID NO: 1351521 - RNA, 19 nt, Artificial Sequence
  Description of Artificial Sequence: Synthetic oligonucleotide
  Antisense strand to SEQ ID NO: 1351520
uuucucgaucgacucucuu

SEQ ID NO: 1351522 - RNA, 19 nt, Artificial Sequence
  Description of Artificial Sequence: Synthetic oligonucleotide
  Sense strand starting at position 874 of SEQ ID NO: 1242489
gggagaaucuuggaagaac

SEQ ID NO: 1351523 - RNA, 19 nt, Artificial Sequence
  Description of Artificial Sequence: Synthetic oligonucleotide
  Antisense strand to SEQ ID NO: 1351522
guucuuccaagauucuccc

SEQ ID NO: 1351524 - RNA, 19 nt, Artificial Sequence
  Description of Artificial Sequence: Synthetic oligonucleotide
  Sense strand starting at position 1299 of SEQ ID NO: 1242489
auaauaagguucucgagga

SEQ ID NO: 1351525 - RNA, 19 nt, Artificial Sequence
  Description of Artificial Sequence: Synthetic oligonucleotide
  Antisense strand to SEQ ID NO: 1351524
uccucgagaaccuuauuau

SEQ ID NO: 1351526 - RNA, 19 nt, Artificial Sequence
  Description of Artificial Sequence: Synthetic oligonucleotide
  Sense strand starting at position 2393 of SEQ ID NO: 1242489
ggaaguuagcaaggcucua

SEQ ID NO: 1351527 - RNA, 19 nt, Artificial Sequence
  Description of Artificial Sequence: Synthetic oligonucleotide
  Antisense strand to SEQ ID NO: 1351526
uagagccuugcuaacuucc

SEQ ID NO: 1351528 - RNA, 19 nt, Artificial Sequence
  Description of Artificial Sequence: Synthetic oligonucleotide
  Sense strand starting at position 2474 of SEQ ID NO: 1242489
gacaacuuagccugucuga

SEQ ID NO: 1351529 - RNA, 19 nt, Artificial Sequence
  Description of Artificial Sequence: Synthetic oligonucleotide
  Antisense strand to SEQ ID NO: 1351528
ucagacaggcuaaguuguc

SEQ ID NO: 1351530 - RNA, 19 nt, Artificial Sequence
  Description of Artificial Sequence: Synthetic oligonucleotide
  Sense strand starting at position 2497 of SEQ ID NO: 1242489
ucgcguccucaucuguaaa

SEQ ID NO: 1351531 - RNA, 19 nt, Artificial Sequence
  Description of Artificial Sequence: Synthetic oligonucleotide
  Antisense strand to SEQ ID NO: 1351530
uuuacagaugaggacgcga

SEQ ID NO: 1351532 - RNA, 19 nt, Artificial Sequence
  Description of Artificial Sequence: Synthetic oligonucleotide
  Sense strand starting at position 2535 of SEQ ID NO: 1242489
aaguguugugaggauuaag

SEQ ID NO: 1351533 - RNA, 19 nt, Artificial Sequence
  Description of Artificial Sequence: Synthetic oligonucleotide
  Antisense strand to SEQ ID NO: 1351532
cuuaauccucacaacacuu

SEQ ID NO: 1351534 - RNA, 19 nt, Artificial Sequence
  Description of Artificial Sequence: Synthetic oligonucleotide
  Sense strand starting at position 2538 of SEQ ID NO: 1242489
uguugugaggauuaagcga

SEQ ID NO: 1351535 - RNA, 19 nt, Artificial Sequence
  Description of Artificial Sequence: Synthetic oligonucleotide
  Antisense strand to SEQ ID NO: 1351534
ucgcuuaauccucacaaca

SEQ ID NO: 1351536 - RNA, 19 nt, Artificial Sequence
  Description of Artificial Sequence: Synthetic oligonucleotide
  Sense strand starting at position 2543 of SEQ ID NO: 1242489
ugaggauuaagcgacccau

SEQ ID NO: 1351537 - RNA, 19 nt, Artificial Sequence
  Description of Artificial Sequence: Synthetic oligonucleotide
  Antisense strand to SEQ ID NO: 1351536
augggucgcuuaauccuca

SEQ ID NO: 1351538 - RNA, 19 nt, Artificial Sequence
  Description of Artificial Sequence: Synthetic oligonucleotide
  Sense strand starting at position 2583 of SEQ ID NO: 1242489
agugcauacucagugaaag

SEQ ID NO: 1351539 - RNA, 19 nt, Artificial Sequence
  Description of Artificial Sequence: Synthetic oligonucleotide
  Antisense strand to SEQ ID NO: 1351538
cuuucacugaguaugcacu

SEQ ID NO: 1351540 - RNA, 19 nt, Artificial Sequence
  Description of Artificial Sequence: Synthetic oligonucleotide
  Sense strand starting at position 2594 of SEQ ID NO: 1242489
agugaaaguuccuuccuug

SEQ ID NO: 1351541 - RNA, 19 nt, Artificial Sequence
  Description of Artificial Sequence: Synthetic oligonucleotide
  Antisense strand to SEQ ID NO: 1351540
caaggaaggaacuuucacu

SEQ ID NO: 1351542 - RNA, 19 nt, Artificial Sequence
  Description of Artificial Sequence: Synthetic oligonucleotide
  Sense strand starting at position 2625 of SEQ ID NO: 1242489
gaguucuugggccgggaaa

SEQ ID NO: 1351543 - RNA, 19 nt, Artificial Sequence
  Description of Artificial Sequence: Synthetic oligonucleotide
  Antisense strand to SEQ ID NO: 1351542
uuucccggcccaagaacuc

SEQ ID NO: 1351544 - RNA, 19 nt, Artificial Sequence
  Description of Artificial Sequence: Synthetic oligonucleotide
  Sense strand starting at position 2638 of SEQ ID NO: 1242489
gggaaaguccuauaugucg

SEQ ID NO: 1351545 - RNA, 19 nt, Artificial Sequence
  Description of Artificial Sequence: Synthetic oligonucleotide
  Antisense strand to SEQ ID NO: 1351544
cgacauauaggacuuuccc

SEQ ID NO: 1351546 - RNA, 19 nt, Artificial Sequence
  Description of Artificial Sequence: Synthetic oligonucleotide
  Sense strand starting at position 2644 of SEQ ID NO: 1242489
guccuauaugucgugcuaa

SEQ ID NO: 1351547 - RNA, 19 nt, Artificial Sequence
  Description of Artificial Sequence: Synthetic oligonucleotide
  Antisense strand to SEQ ID NO: 1351546
uuagcacgacauauaggac

SEQ ID NO: 1351548 - RNA, 19 nt, Artificial Sequence
  Description of Artificial Sequence: Synthetic oligonucleotide
  Sense strand starting at position 2966 of SEQ ID NO: 1242489
auaaccuuugcuuauggga

SEQ ID NO: 1351549 - RNA, 19 nt, Artificial Sequence
  Description of Artificial Sequence: Synthetic oligonucleotide
  Antisense strand to SEQ ID NO: 1351548
ucccauaagcaaagguuau

SEQ ID NO: 1351550 - RNA, 19 nt, Artificial Sequence
  Description of Artificial Sequence: Synthetic oligonucleotide
  Sense strand starting at position 2975 of SEQ ID NO: 1242489
gcuuaugggacuuaucuug

SEQ ID NO: 1351551 - RNA, 19 nt, Artificial Sequence
  Description of Artificial Sequence: Synthetic oligonucleotide
  Antisense strand to SEQ ID NO: 1351550
caagauaagucccauaagc

SEQ ID NO: 1351552 - RNA, 19 nt, Artificial Sequence
  Description of Artificial Sequence: Synthetic oligonucleotide
  Sense strand starting at position 3065 of SEQ ID NO: 1242489
cacagauguaguggaggaa

SEQ ID NO: 1351553 - RNA, 19 nt, Artificial Sequence
  Description of Artificial Sequence: Synthetic oligonucleotide
  Antisense strand to SEQ ID NO: 1351552
uuccuccacuacaucugug

SEQ ID NO: 1351554 - RNA, 19 nt, Artificial Sequence
  Description of Artificial Sequence: Synthetic oligonucleotide
  Sense strand starting at position 3114 of SEQ ID NO: 1242489
ugguguaaucucuauauga

SEQ ID NO: 1351555 - RNA, 19 nt, Artificial Sequence
  Description of Artificial Sequence: Synthetic oligonucleotide
  Antisense strand to SEQ ID NO: 1351554
ucauauagagauuacacca

SEQ ID NO: 1351556 - RNA, 19 nt, Artificial Sequence
  Description of Artificial Sequence: Synthetic oligonucleotide
  Sense strand starting at position 3116 of SEQ ID NO: 1242489
guguaaucucuauaugaaa

SEQ ID NO: 1351557 - RNA, 19 nt, Artificial Sequence
  Description of Artificial Sequence: Synthetic oligonucleotide
  Antisense strand to SEQ ID NO: 1351556
uuucauauagagauuacac

SEQ ID NO: 1351558 - RNA, 19 nt, Artificial Sequence
  Description of Artificial Sequence: Synthetic oligonucleotide
  Sense strand starting at position 3158 of SEQ ID NO: 1242489
gugaaacagcuuuauaguc

SEQ ID NO: 1351559 - RNA, 19 nt, Artificial Sequence
  Description of Artificial Sequence: Synthetic oligonucleotide
  Antisense strand to SEQ ID NO: 1351558
gacuauaaagcuguuucac

SEQ ID NO: 1351560 - RNA, 19 nt, Artificial Sequence
  Description of Artificial Sequence: Synthetic oligonucleotide
  Sense strand starting at position 3193 of SEQ ID NO: 1242489
ugcaguaaucguguggcca

SEQ ID NO: 1351561 - RNA, 19 nt, Artificial Sequence
  Description of Artificial Sequence: Synthetic oligonucleotide
  Antisense strand to SEQ ID NO: 1351560
uggccacacgauuacugca

SEQ ID NO: 1351562 - RNA, 19 nt, Artificial Sequence
  Description of Artificial Sequence: Synthetic oligonucleotide
  Sense strand starting at position 3249 of SEQ ID NO: 1242489
ugauaacacugguuugcau

SEQ ID NO: 1351563 - RNA, 19 nt, Artificial Sequence
  Description of Artificial Sequence: Synthetic oligonucleotide
  Antisense strand to SEQ ID NO: 1351562
augcaaaccaguguuauca

SEQ ID NO: 1351564 - RNA, 19 nt, Artificial Sequence
  Description of Artificial Sequence: Synthetic oligonucleotide
  Sense strand starting at position 3276 of SEQ ID NO: 1242489
auacuuuccuauuuguguu

SEQ ID NO: 1351565 - RNA, 19 nt, Artificial Sequence
  Description of Artificial Sequence: Synthetic oligonucleotide
  Antisense strand to SEQ ID NO: 1351564
aacacaaauaggaaaguau

SEQ ID NO: 1351566 - RNA, 19 nt, Artificial Sequence
  Description of Artificial Sequence: Synthetic oligonucleotide
  Sense strand starting at position 3280 of SEQ ID NO: 1242489
uuuccuauuuguguucuca

SEQ ID NO: 1351567 - RNA, 19 nt, Artificial Sequence
  Description of Artificial Sequence: Synthetic oligonucleotide
  Antisense strand to SEQ ID NO: 1351566
ugagaacacaaauaggaaa

SEQ ID NO: 1351568 - RNA, 19 nt, Artificial Sequence
  Description of Artificial Sequence: Synthetic oligonucleotide
  Sense strand starting at position 3603 of SEQ ID NO: 1242489
uuguuucuaugaucaauug

SEQ ID NO: 1351569 - RNA, 19 nt, Artificial Sequence
  Description of Artificial Sequence: Synthetic oligonucleotide
  Antisense strand to SEQ ID NO: 1351568
caauugaucauagaaacaa

SEQ ID NO: 1351570 - RNA, 19 nt, Artificial Sequence
  Description of Artificial Sequence: Synthetic oligonucleotide
  Sense strand starting at position 3604 of SEQ ID NO: 1242489
uguuucuaugaucaauugu

SEQ ID NO: 1351571 - RNA, 19 nt, Artificial Sequence
  Description of Artificial Sequence: Synthetic oligonucleotide
  Antisense strand to SEQ ID NO: 1351570
acaauugaucauagaaaca

SEQ ID NO: 1351572 - RNA, 19 nt, Artificial Sequence
  Description of Artificial Sequence: Synthetic oligonucleotide
  Sense strand starting at position 3621 of SEQ ID NO: 1242489
gugguaauggacuauaucu

SEQ ID NO: 1351573 - RNA, 19 nt, Artificial Sequence
  Description of Artificial Sequence: Synthetic oligonucleotide
  Antisense strand to SEQ ID NO: 1351572
agauauaguccauuaccac

SEQ ID NO: 1351574 - RNA, 19 nt, Artificial Sequence
  Description of Artificial Sequence: Synthetic oligonucleotide
  Sense strand starting at position 3736 of SEQ ID NO: 1242489
guacauuuguuauuccgaa

SEQ ID NO: 1351575 - RNA, 19 nt, Artificial Sequence
  Description of Artificial Sequence: Synthetic oligonucleotide
  Antisense strand to SEQ ID NO: 1351574
uucggaauaacaaauguac

SEQ ID NO: 1351576 - RNA, 19 nt, Artificial Sequence
  Description of Artificial Sequence: Synthetic oligonucleotide
  Sense strand starting at position 3752 of SEQ ID NO: 1242489
gaauguccuguguaaccga

SEQ ID NO: 1351577 - RNA, 19 nt, Artificial Sequence
  Description of Artificial Sequence: Synthetic oligonucleotide
  Antisense strand to SEQ ID NO: 1351576
ucgguuacacaggacauuc

SEQ ID NO: 1351578 - RNA, 19 nt, Artificial Sequence
  Description of Artificial Sequence: Synthetic oligonucleotide
  Sense strand starting at position 3770 of SEQ ID NO: 1242489
acaggaugccuuugacuuu

SEQ ID NO: 1351579 - RNA, 19 nt, Artificial Sequence
  Description of Artificial Sequence: Synthetic oligonucleotide
  Antisense strand to SEQ ID NO: 1351578
aaagucaaaggcauccugu

SEQ ID NO: 1351580 - RNA, 19 nt, Artificial Sequence
  Description of Artificial Sequence: Synthetic oligonucleotide
  Sense strand starting at position 3868 of SEQ ID NO: 1242489
cccagagaaagcugauagu

SEQ ID NO: 1351581 - RNA, 19 nt, Artificial Sequence
  Description of Artificial Sequence: Synthetic oligonucleotide
  Antisense strand to SEQ ID NO: 1351580
acuaucagcuuucucuggg

SEQ ID NO: 1351582 - RNA, 19 nt, Artificial Sequence
  Description of Artificial Sequence: Synthetic oligonucleotide
  Sense strand starting at position 3949 of SEQ ID NO: 1242489
cucaguaguguacaguauu

SEQ ID NO: 1351583 - RNA, 19 nt, Artificial Sequence
  Description of Artificial Sequence: Synthetic oligonucleotide
  Antisense strand to SEQ ID NO: 1351582
aauacuguacacuacugag

SEQ ID NO: 1351584 - RNA, 19 nt, Artificial Sequence
  Description of Artificial Sequence: Synthetic oligonucleotide
  Sense strand starting at position 3983 of SEQ ID NO: 1242489
gugguucugcacgaggaaa

SEQ ID NO: 1351585 - RNA, 19 nt, Artificial Sequence
  Description of Artificial Sequence: Synthetic oligonucleotide
  Antisense strand to SEQ ID NO: 1351584
uuuccucgugcagaaccac

SEQ ID NO: 1351586 - RNA, 19 nt, Artificial Sequence
  Description of Artificial Sequence: Synthetic oligonucleotide
  Sense strand starting at position 30 of SEQ ID NO: 1242490
aucaguuaucaguaccagu

SEQ ID NO: 1351587 - RNA, 19 nt, Artificial Sequence
  Description of Artificial Sequence: Synthetic oligonucleotide
  Antisense strand to SEQ ID NO: 1351586
acugguacugauaacugau

SEQ ID NO: 1351588 - RNA, 19 nt, Artificial Sequence
  Description of Artificial Sequence: Synthetic oligonucleotide
  Sense strand starting at position 113 of SEQ ID NO: 1242490
aaaguauggucucugacag

SEQ ID NO: 1351589 - RNA, 19 nt, Artificial Sequence
  Description of Artificial Sequence: Synthetic oligonucleotide
  Antisense strand to SEQ ID NO: 1351588
cugucagagaccauacuuu

SEQ ID NO: 1351590 - RNA, 19 nt, Artificial Sequence
  Description of Artificial Sequence: Synthetic oligonucleotide
  Sense strand starting at position 188 of SEQ ID NO: 1242490
augaauuaugcaugcuaaa

SEQ ID NO: 1351591 - RNA, 19 nt, Artificial Sequence
  Description of Artificial Sequence: Synthetic oligonucleotide
  Antisense strand to SEQ ID NO: 1351590
uuuagcaugcauaauucau

SEQ ID NO: 1351592 - RNA, 19 nt, Artificial Sequence
  Description of Artificial Sequence: Synthetic oligonucleotide
  Sense strand starting at position 619 of SEQ ID NO: 1242490
acuacaauuucugagaguu

SEQ ID NO: 1351593 - RNA, 19 nt, Artificial Sequence
  Description of Artificial Sequence: Synthetic oligonucleotide
  Antisense strand to SEQ ID NO: 1351592
aacucucagaaauuguagu

SEQ ID NO: 1351594 - RNA, 19 nt, Artificial Sequence
  Description of Artificial Sequence: Synthetic oligonucleotide
  Sense strand starting at position 701 of SEQ ID NO: 1242490
uucguaggaauguguaaga

SEQ ID NO: 1351595 - RNA, 19 nt, Artificial Sequence
  Description of Artificial Sequence: Synthetic oligonucleotide
  Antisense strand to SEQ ID NO: 1351594
ucuuacacauuccuacgaa

SEQ ID NO: 1351596 - RNA, 19 nt, Artificial Sequence
  Description of Artificial Sequence: Synthetic oligonucleotide
  Sense strand starting at position 879 of SEQ ID NO: 1242490
aucugaagguuucucagaa

SEQ ID NO: 1351597 - RNA, 19 nt, Artificial Sequence
  Description of Artificial Sequence: Synthetic oligonucleotide
  Antisense strand to SEQ ID NO: 1351596
uucugagaaaccuucagau

SEQ ID NO: 1351598 - RNA, 19 nt, Artificial Sequence
  Description of Artificial Sequence: Synthetic oligonucleotide
  Sense strand starting at position 880 of SEQ ID NO: 1242490
ucugaagguuucucagaaa

SEQ ID NO: 1351599 - RNA, 19 nt, Artificial Sequence
  Description of Artificial Sequence: Synthetic oligonucleotide
  Antisense strand to SEQ ID NO: 1351598
uuucugagaaaccuucaga

SEQ ID NO: 1351600 - RNA, 19 nt, Artificial Sequence
  Description of Artificial Sequence: Synthetic oligonucleotide
  Sense strand starting at position 972 of SEQ ID NO: 1242490
caggcuuauuuccuguuga

SEQ ID NO: 1351601 - RNA, 19 nt, Artificial Sequence
  Description of Artificial Sequence: Synthetic oligonucleotide
  Antisense strand to SEQ ID NO: 1351600
ucaacaggaaauaagccug

SEQ ID NO: 1351602 - RNA, 19 nt, Artificial Sequence
  Description of Artificial Sequence: Synthetic oligonucleotide
  Sense strand starting at position 1077 of SEQ ID NO: 1242490
ugcgauucuuaacuaaaca

SEQ ID NO: 1351603 - RNA, 19 nt, Artificial Sequence
  Description of Artificial Sequence: Synthetic oligonucleotide
  Antisense strand to SEQ ID NO: 1351602
uguuuaguuaagaaucgca

SEQ ID NO: 1351604 - RNA, 19 nt, Artificial Sequence
  Description of Artificial Sequence: Synthetic oligonucleotide
  Sense strand starting at position 1124 of SEQ ID NO: 1242490
uuucccauuucuguuugua

SEQ ID NO: 1351605 - RNA, 19 nt, Artificial Sequence
  Description of Artificial Sequence: Synthetic oligonucleotide
  Antisense strand to SEQ ID NO: 1351604
uacaaacagaaaugggaaa

SEQ ID NO: 1351606 - RNA, 19 nt, Artificial Sequence
  Description of Artificial Sequence: Synthetic oligonucleotide
  Sense strand starting at position 1126 of SEQ ID NO: 1242490
ucccauuucuguuuguaau

SEQ ID NO: 1351607 - RNA, 19 nt, Artificial Sequence
  Description of Artificial Sequence: Synthetic oligonucleotide
  Antisense strand to SEQ ID NO: 1351606
auuacaaacagaaauggga

SEQ ID NO: 1351608 - RNA, 19 nt, Artificial Sequence
  Description of Artificial Sequence: Synthetic oligonucleotide
  Sense strand starting at position 1127 of SEQ ID NO: 1242490
cccauuucuguuuguaauc

SEQ ID NO: 1351609 - RNA, 19 nt, Artificial Sequence
  Description of Artificial Sequence: Synthetic oligonucleotide
  Antisense strand to SEQ ID NO: 1351608
gauuacaaacagaaauggg

SEQ ID NO: 1351610 - RNA, 19 nt, Artificial Sequence
  Description of Artificial Sequence: Synthetic oligonucleotide
  Sense strand starting at position 1132 of SEQ ID NO: 1242490
uucuguuuguaaucagaau

SEQ ID NO: 1351611 - RNA, 19 nt, Artificial Sequence
  Description of Artificial Sequence: Synthetic oligonucleotide
  Antisense strand to SEQ ID NO: 1351610
auucugauuacaaacagaa

SEQ ID NO: 1351612 - RNA, 19 nt, Artificial Sequence
  Description of Artificial Sequence: Synthetic oligonucleotide
  Sense strand starting at position 1294 of SEQ ID NO: 1242490
acagaucaaaccggugaau

SEQ ID NO: 1351613 - RNA, 19 nt, Artificial Sequence
  Description of Artificial Sequence: Synthetic oligonucleotide
  Antisense strand to SEQ ID NO: 1351612
auucaccgguuugaucugu

SEQ ID NO: 1351614 - RNA, 19 nt, Artificial Sequence
  Description of Artificial Sequence: Synthetic oligonucleotide
  Sense strand starting at position 1393 of SEQ ID NO: 1242490
agccgaagccuuugaagga

SEQ ID NO: 1351615 - RNA, 19 nt, Artificial Sequence
  Description of Artificial Sequence: Synthetic oligonucleotide
  Antisense strand to SEQ ID NO: 1351614
uccuucaaaggcuucggcu

SEQ ID NO: 1351616 - RNA, 19 nt, Artificial Sequence
  Description of Artificial Sequence: Synthetic oligonucleotide
  Sense strand starting at position 1532 of SEQ ID NO: 1242490
gcgggugauucacugggaa

SEQ ID NO: 1351617 - RNA, 19 nt, Artificial Sequence
  Description of Artificial Sequence: Synthetic oligonucleotide
  Antisense strand to SEQ ID NO: 1351616
uucccagugaaucacccgc

SEQ ID NO: 1351618 - RNA, 19 nt, Artificial Sequence
  Description of Artificial Sequence: Synthetic oligonucleotide
  Sense strand starting at position 1534 of SEQ ID NO: 1242490
gggugauucacugggaacg

SEQ ID NO: 1351619 - RNA, 19 nt, Artificial Sequence
  Description of Artificial Sequence: Synthetic oligonucleotide
  Antisense strand to SEQ ID NO: 1351618
cguucccagugaaucaccc

SEQ ID NO: 1351620 - RNA, 19 nt, Artificial Sequence
  Description of Artificial Sequence: Synthetic oligonucleotide
  Sense strand starting at position 2058 of SEQ ID NO: 1242490
ugacccuggucuuuacaau

SEQ ID NO: 1351621 - RNA, 19 nt, Artificial Sequence
  Description of Artificial Sequence: Synthetic oligonucleotide
  Antisense strand to SEQ ID NO: 1351620
auuguaaagaccaggguca

SEQ ID NO: 1351622 - RNA, 19 nt, Artificial Sequence
  Description of Artificial Sequence: Synthetic oligonucleotide
  Sense strand starting at position 2065 of SEQ ID NO: 1242490
ggucuuuacaaugggcaga

SEQ ID NO: 1351623 - RNA, 19 nt, Artificial Sequence
  Description of Artificial Sequence: Synthetic oligonucleotide
  Antisense strand to SEQ ID NO: 1351622
ucugcccauuguaaagacc

SEQ ID NO: 1351624 - RNA, 19 nt, Artificial Sequence
  Description of Artificial Sequence: Synthetic oligonucleotide
  Sense strand starting at position 2066 of SEQ ID NO: 1242490
gucuuuacaaugggcagaa

SEQ ID NO: 1351625 - RNA, 19 nt, Artificial Sequence
  Description of Artificial Sequence: Synthetic oligonucleotide
  Antisense strand to SEQ ID NO: 1351624
uucugcccauuguaaagac

SEQ ID NO: 1351626 - RNA, 19 nt, Artificial Sequence
  Description of Artificial Sequence: Synthetic oligonucleotide
  Sense strand starting at position 2128 of SEQ ID NO: 1242490
gauaauguucucuacccgu

SEQ ID NO: 1351627 - RNA, 19 nt, Artificial Sequence
  Description of Artificial Sequence: Synthetic oligonucleotide
  Antisense strand to SEQ ID NO: 1351626
acggguagagaacauuauc

SEQ ID NO: 1351628 - RNA, 19 nt, Artificial Sequence
  Description of Artificial Sequence: Synthetic oligonucleotide
  Sense strand starting at position 2191 of SEQ ID NO: 1242490
agaggcucuuugguauaga

SEQ ID NO: 1351629 - RNA, 19 nt, Artificial Sequence
  Description of Artificial Sequence: Synthetic oligonucleotide
  Antisense strand to SEQ ID NO: 1351628
ucuauaccaaagagccucu

SEQ ID NO: 1351630 - RNA, 19 nt, Artificial Sequence
  Description of Artificial Sequence: Synthetic oligonucleotide
  Sense strand starting at position 2274 of SEQ ID NO: 1242490
uuguuaaugcgaggacaug

SEQ ID NO: 1351631 - RNA, 19 nt, Artificial Sequence
  Description of Artificial Sequence: Synthetic oligonucleotide
  Antisense strand to SEQ ID NO: 1351630
cauguccucgcauuaacaa

SEQ ID NO: 1351632 - RNA, 19 nt, Artificial Sequence
  Description of Artificial Sequence: Synthetic oligonucleotide
  Sense strand starting at position 2275 of SEQ ID NO: 1242490
uguuaaugcgaggacauga

SEQ ID NO: 1351633 - RNA, 19 nt, Artificial Sequence
  Description of Artificial Sequence: Synthetic oligonucleotide
  Antisense strand to SEQ ID NO: 1351632
ucauguccucgcauuaaca

SEQ ID NO: 1351634 - RNA, 19 nt, Artificial Sequence
  Description of Artificial Sequence: Synthetic oligonucleotide
  Sense strand starting at position 2299 of SEQ ID NO: 1242490
gggccuuuaaacuggucau

SEQ ID NO: 1351635 - RNA, 19 nt, Artificial Sequence
  Description of Artificial Sequence: Synthetic oligonucleotide
  Antisense strand to SEQ ID NO: 1351634
augaccaguuuaaaggccc

SEQ ID NO: 1351636 - RNA, 19 nt, Artificial Sequence
  Description of Artificial Sequence: Synthetic oligonucleotide
  Sense strand starting at position 2302 of SEQ ID NO: 1242490
ccuuuaaacuggucaugac

SEQ ID NO: 1351637 - RNA, 19 nt, Artificial Sequence
  Description of Artificial Sequence: Synthetic oligonucleotide
  Antisense strand to SEQ ID NO: 1351636
gucaugaccaguuuaaagg

SEQ ID NO: 1351638 - RNA, 19 nt, Artificial Sequence
  Description of Artificial Sequence: Synthetic oligonucleotide
  Sense strand starting at position 2310 of SEQ ID NO: 1242490
cuggucaugacagaguuau

SEQ ID NO: 1351639 - RNA, 19 nt, Artificial Sequence
  Description of Artificial Sequence: Synthetic oligonucleotide
  Antisense strand to SEQ ID NO: 1351638
auaacucugucaugaccag

SEQ ID NO: 1351640 - RNA, 19 nt, Artificial Sequence
  Description of Artificial Sequence: Synthetic oligonucleotide
  Sense strand starting at position 2396 of SEQ ID NO: 1242490
uguggugaccuuagugguu

SEQ ID NO: 1351641 - RNA, 19 nt, Artificial Sequence
  Description of Artificial Sequence: Synthetic oligonucleotide
  Antisense strand to SEQ ID NO: 1351640
aaccacuaaggucaccaca

SEQ ID NO: 1351642 - RNA, 19 nt, Artificial Sequence
  Description of Artificial Sequence: Synthetic oligonucleotide
  Sense strand starting at position 2435 of SEQ ID NO: 1242490
ggaugauguagcuauugca

SEQ ID NO: 1351643 - RNA, 19 nt, Artificial Sequence
  Description of Artificial Sequence: Synthetic oligonucleotide
  Antisense strand to SEQ ID NO: 1351642
ugcaauagcuacaucaucc

SEQ ID NO: 1351644 - RNA, 19 nt, Artificial Sequence
  Description of Artificial Sequence: Synthetic oligonucleotide
  Sense strand starting at position 2576 of SEQ ID NO: 1242490
uggguagucuagagggaag

SEQ ID NO: 1351645 - RNA, 19 nt, Artificial Sequence
  Description of Artificial Sequence: Synthetic oligonucleotide
  Antisense strand to SEQ ID NO: 1351644
cuucccucuagacuaccca

SEQ ID NO: 1351646 - RNA, 19 nt, Artificial Sequence
  Description of Artificial Sequence: Synthetic oligonucleotide
  Sense strand starting at position 2612 of SEQ ID NO: 1242490
cucucagaggacuguuuga

SEQ ID NO: 1351647 - RNA, 19 nt, Artificial Sequence
  Description of Artificial Sequence: Synthetic oligonucleotide
  Antisense strand to SEQ ID NO: 1351646
ucaaacaguccucugagag

SEQ ID NO: 1351648 - RNA, 19 nt, Artificial Sequence
  Description of Artificial Sequence: Synthetic oligonucleotide
  Sense strand starting at position 2627 of SEQ ID NO: 1242490
uugacaguggccuauguaa

SEQ ID NO: 1351649 - RNA, 19 nt, Artificial Sequence
  Description of Artificial Sequence: Synthetic oligonucleotide
  Antisense strand to SEQ ID NO: 1351648
uuacauaggccacugucaa

SEQ ID NO: 1351650 - RNA, 19 nt, Artificial Sequence
  Description of Artificial Sequence: Synthetic oligonucleotide
  Sense strand starting at position 2629 of SEQ ID NO: 1242490
gacaguggccuauguaaug

SEQ ID NO: 1351651 - RNA, 19 nt, Artificial Sequence
  Description of Artificial Sequence: Synthetic oligonucleotide
  Antisense strand to SEQ ID NO: 1351650
cauuacauaggccacuguc

SEQ ID NO: 1351652 - RNA, 19 nt, Artificial Sequence
  Description of Artificial Sequence: Synthetic oligonucleotide
  Sense strand starting at position 2638 of SEQ ID NO: 1242490
cuauguaauggcuaccuuu

SEQ ID NO: 1351653 - RNA, 19 nt, Artificial Sequence
  Description of Artificial Sequence: Synthetic oligonucleotide
  Antisense strand to SEQ ID NO: 1351652
aaagguagccauuacauag

SEQ ID NO: 1351654 - RNA, 19 nt, Artificial Sequence
  Description of Artificial Sequence: Synthetic oligonucleotide
  Sense strand starting at position 3407 of SEQ ID NO: 1242490
ggucaaucucuuggagaua

SEQ ID NO: 1351655 - RNA, 19 nt, Artificial Sequence
  Description of Artificial Sequence: Synthetic oligonucleotide
  Antisense strand to SEQ ID NO: 1351654
uaucuccaagagauugacc

SEQ ID NO: 1351656 - RNA, 19 nt, Artificial Sequence
  Description of Artificial Sequence: Synthetic oligonucleotide
  Sense strand starting at position 3437 of SEQ ID NO: 1242490
agagcaauuuccuacagaa

SEQ ID NO: 1351657 - RNA, 19 nt, Artificial Sequence
  Description of Artificial Sequence: Synthetic oligonucleotide
  Antisense strand to SEQ ID NO: 1351656
uucuguaggaaauugcucu

SEQ ID NO: 1351658 - RNA, 19 nt, Artificial Sequence
  Description of Artificial Sequence: Synthetic oligonucleotide
  Sense strand starting at position 3648 of SEQ ID NO: 1242490
agagccaguaauuggagau

SEQ ID NO: 1351659 - RNA, 19 nt, Artificial Sequence
  Description of Artificial Sequence: Synthetic oligonucleotide
  Antisense strand to SEQ ID NO: 1351658
aucuccaauuacuggcucu

SEQ ID NO: 1351660 - RNA, 19 nt, Artificial Sequence
  Description of Artificial Sequence: Synthetic oligonucleotide
  Sense strand starting at position 3676 of SEQ ID NO: 1242490
agacacaguucucuugagu

SEQ ID NO: 1351661 - RNA, 19 nt, Artificial Sequence
  Description of Artificial Sequence: Synthetic oligonucleotide
  Antisense strand to SEQ ID NO: 1351660
acucaagagaacugugucu

SEQ ID NO: 1351662 - RNA, 19 nt, Artificial Sequence
  Description of Artificial Sequence: Synthetic oligonucleotide
  Sense strand starting at position 3705 of SEQ ID NO: 1242490
ugugauuuccacugcugau

SEQ ID NO: 1351663 - RNA, 19 nt, Artificial Sequence
  Description of Artificial Sequence: Synthetic oligonucleotide
  Antisense strand to SEQ ID NO: 1351662
aucagcaguggaaaucaca

SEQ ID NO: 1351664 - RNA, 19 nt, Artificial Sequence
  Description of Artificial Sequence: Synthetic oligonucleotide
  Sense strand starting at position 3727 of SEQ ID NO: 1242490
acugaugugucuccuaaau

SEQ ID NO: 1351665 - RNA, 19 nt, Artificial Sequence
  Description of Artificial Sequence: Synthetic oligonucleotide
  Antisense strand to SEQ ID NO: 1351664
auuuaggagacacaucagu

SEQ ID NO: 1351666 - RNA, 19 nt, Artificial Sequence
  Description of Artificial Sequence: Synthetic oligonucleotide
  Sense strand starting at position 146 of SEQ ID NO: 1242491
gacaucaucccaugagagu

SEQ ID NO: 1351667 - RNA, 19 nt, Artificial Sequence
  Description of Artificial Sequence: Synthetic oligonucleotide
  Antisense strand to SEQ ID NO: 1351666
acucucaugggaugauguc

SEQ ID NO: 1351668 - RNA, 19 nt, Artificial Sequence
  Description of Artificial Sequence: Synthetic oligonucleotide
  Sense strand starting at position 229 of SEQ ID NO: 1242491
ugccaaauuuguguuaucu

SEQ ID NO: 1351669 - RNA, 19 nt, Artificial Sequence
  Description of Artificial Sequence: Synthetic oligonucleotide
  Antisense strand to SEQ ID NO: 1351668
agauaacacaaauuuggca

SEQ ID NO: 1351670 - RNA, 19 nt, Artificial Sequence
  Description of Artificial Sequence: Synthetic oligonucleotide
  Sense strand starting at position 237 of SEQ ID NO: 1242491
uuguguuaucuagacauuc

SEQ ID NO: 1351671 - RNA, 19 nt, Artificial Sequence
  Description of Artificial Sequence: Synthetic oligonucleotide
  Antisense strand to SEQ ID NO: 1351670
gaaugucuagauaacacaa

SEQ ID NO: 1351672 - RNA, 19 nt, Artificial Sequence
  Description of Artificial Sequence: Synthetic oligonucleotide
  Sense strand starting at position 311 of SEQ ID NO: 1242491
gagucacagugaccucauu

SEQ ID NO: 1351673 - RNA, 19 nt, Artificial Sequence
  Description of Artificial Sequence: Synthetic oligonucleotide
  Antisense strand to SEQ ID NO: 1351672
aaugaggucacugugacuc

SEQ ID NO: 1351674 - RNA, 19 nt, Artificial Sequence
  Description of Artificial Sequence: Synthetic oligonucleotide
  Sense strand starting at position 565 of SEQ ID NO: 1242491
gguucuguccuaggaaaca

SEQ ID NO: 1351675 - RNA, 19 nt, Artificial Sequence
  Description of Artificial Sequence: Synthetic oligonucleotide
  Antisense strand to SEQ ID NO: 1351674
uguuuccuaggacagaacc

SEQ ID NO: 1351676 - RNA, 19 nt, Artificial Sequence
  Description of Artificial Sequence: Synthetic oligonucleotide
  Sense strand starting at position 607 of SEQ ID NO: 1242491
uccuuaguauaggugauau

SEQ ID NO: 1351677 - RNA, 19 nt, Artificial Sequence
  Description of Artificial Sequence: Synthetic oligonucleotide
  Antisense strand to SEQ ID NO: 1351676
auaucaccuauacuaagga

SEQ ID NO: 1351678 - RNA, 19 nt, Artificial Sequence
  Description of Artificial Sequence: Synthetic oligonucleotide
  Sense strand starting at position 650 of SEQ ID NO: 1242491
gaguuacuggcaggaaaga

SEQ ID NO: 1351679 - RNA, 19 nt, Artificial Sequence
  Description of Artificial Sequence: Synthetic oligonucleotide
  Antisense strand to SEQ ID NO: 1351678
ucuuuccugccaguaacuc

SEQ ID NO: 1351680 - RNA, 19 nt, Artificial Sequence
  Description of Artificial Sequence: Synthetic oligonucleotide
  Sense strand starting at position 1514 of SEQ ID NO: 1242491
ugaguaauuucugcugugu

SEQ ID NO: 1351681 - RNA, 19 nt, Artificial Sequence
  Description of Artificial Sequence: Synthetic oligonucleotide
  Antisense strand to SEQ ID NO: 1351680
acacagcagaaauuacuca

SEQ ID NO: 1351682 - RNA, 19 nt, Artificial Sequence
  Description of Artificial Sequence: Synthetic oligonucleotide
  Sense strand starting at position 1518 of SEQ ID NO: 1242491
uaauuucugcuguguugga

SEQ ID NO: 1351683 - RNA, 19 nt, Artificial Sequence
  Description of Artificial Sequence: Synthetic oligonucleotide
  Antisense strand to SEQ ID NO: 1351682
uccaacacagcagaaauua

SEQ ID NO: 1351684 - RNA, 19 nt, Artificial Sequence
  Description of Artificial Sequence: Synthetic oligonucleotide
  Sense strand starting at position 1527 of SEQ ID NO: 1242491
cuguguuggagugaagaca

SEQ ID NO: 1351685 - RNA, 19 nt, Artificial Sequence
  Description of Artificial Sequence: Synthetic oligonucleotide
  Antisense strand to SEQ ID NO: 1351684
ugucuucacuccaacacag

SEQ ID NO: 1351686 - RNA, 19 nt, Artificial Sequence
  Description of Artificial Sequence: Synthetic oligonucleotide
  Sense strand starting at position 1971 of SEQ ID NO: 1242491
uucccauuacuugagguaa

SEQ ID NO: 1351687 - RNA, 19 nt, Artificial Sequence
  Description of Artificial Sequence: Synthetic oligonucleotide
  Antisense strand to SEQ ID NO: 1351686
uuaccucaaguaaugggaa

SEQ ID NO: 1351688 - RNA, 19 nt, Artificial Sequence
  Description of Artificial Sequence: Synthetic oligonucleotide
  Sense strand starting at position 2273 of SEQ ID NO: 1242491
uucuaucagguaugggaau

SEQ ID NO: 1351689 - RNA, 19 nt, Artificial Sequence
  Description of Artificial Sequence: Synthetic oligonucleotide
  Antisense strand to SEQ ID NO: 1351688
auucccauaccugauagaa

SEQ ID NO: 1351690 - RNA, 19 nt, Artificial Sequence
  Description of Artificial Sequence: Synthetic oligonucleotide
  Sense strand starting at position 2407 of SEQ ID NO: 1242491
gugguucuuagagaacgau

SEQ ID NO: 1351691 - RNA, 19 nt, Artificial Sequence
  Description of Artificial Sequence: Synthetic oligonucleotide
  Antisense strand to SEQ ID NO: 1351690
aucguucucuaagaaccac

SEQ ID NO: 1351692 - RNA, 19 nt, Artificial Sequence
  Description of Artificial Sequence: Synthetic oligonucleotide
  Sense strand starting at position 2426 of SEQ ID NO: 1242491
gggcaagauuuggagauga

SEQ ID NO: 1351693 - RNA, 19 nt, Artificial Sequence
  Description of Artificial Sequence: Synthetic oligonucleotide
  Antisense strand to SEQ ID NO: 1351692
ucaucuccaaaucuugccc

SEQ ID NO: 1351694 - RNA, 19 nt, Artificial Sequence
  Description of Artificial Sequence: Synthetic oligonucleotide
  Sense strand starting at position 2439 of SEQ ID NO: 1242491
agaugaaaucuagguuccu

SEQ ID NO: 1351695 - RNA, 19 nt, Artificial Sequence
  Description of Artificial Sequence: Synthetic oligonucleotide
  Antisense strand to SEQ ID NO: 1351694
aggaaccuagauuucaucu

SEQ ID NO: 1351696 - RNA, 19 nt, Artificial Sequence
  Description of Artificial Sequence: Synthetic oligonucleotide
  Sense strand starting at position 2440 of SEQ ID NO: 1242491
gaugaaaucuagguuccug

SEQ ID NO: 1351697 - RNA, 19 nt, Artificial Sequence
  Description of Artificial Sequence: Synthetic oligonucleotide
  Antisense strand to SEQ ID NO: 1351696
caggaaccuagauuucauc

SEQ ID NO: 1351698 - RNA, 19 nt, Artificial Sequence
  Description of Artificial Sequence: Synthetic oligonucleotide
  Sense strand starting at position 2782 of SEQ ID NO: 1242491
ggauauguggcauaguuuc

SEQ ID NO: 1351699 - RNA, 19 nt, Artificial Sequence
  Description of Artificial Sequence: Synthetic oligonucleotide
  Antisense strand to SEQ ID NO: 1351698
gaaacuaugccacauaucc

SEQ ID NO: 1351700 - RNA, 19 nt, Artificial Sequence
  Description of Artificial Sequence: Synthetic oligonucleotide
  Sense strand starting at position 2862 of SEQ ID NO: 1242491
caggaauaaguacgauauu

SEQ ID NO: 1351701 - RNA, 19 nt, Artificial Sequence
  Description of Artificial Sequence: Synthetic oligonucleotide
  Antisense strand to SEQ ID NO: 1351700
aauaucguacuuauuccug

SEQ ID NO: 1351702 - RNA, 19 nt, Artificial Sequence
  Description of Artificial Sequence: Synthetic oligonucleotide
  Sense strand starting at position 2863 of SEQ ID NO: 1242491
aggaauaaguacgauauuu

SEQ ID NO: 1351703 - RNA, 19 nt, Artificial Sequence
  Description of Artificial Sequence: Synthetic oligonucleotide
  Antisense strand to SEQ ID NO: 1351702
aaauaucguacuuauuccu

SEQ ID NO: 1351704 - RNA, 19 nt, Artificial Sequence
  Description of Artificial Sequence: Synthetic oligonucleotide
  Sense strand starting at position 2904 of SEQ ID NO: 1242491
gugaacauagguugugaua

SEQ ID NO: 1351705 - RNA, 19 nt, Artificial Sequence
  Description of Artificial Sequence: Synthetic oligonucleotide
  Antisense strand to SEQ ID NO: 1351704
uaucacaaccuauguucac

SEQ ID NO: 1351706 - RNA, 19 nt, Artificial Sequence
  Description of Artificial Sequence: Synthetic oligonucleotide
  Sense strand starting at position 2939 of SEQ ID NO: 1242491
guuggcuaucuagaaucuu

SEQ ID NO: 1351707 - RNA, 19 nt, Artificial Sequence
  Description of Artificial Sequence: Synthetic oligonucleotide
  Antisense strand to SEQ ID NO: 1351706
aagauucuagauagccaac

SEQ ID NO: 1351708 - RNA, 19 nt, Artificial Sequence
  Description of Artificial Sequence: Synthetic oligonucleotide
  Sense strand starting at position 2952 of SEQ ID NO: 1242491
aaucuugaguuuccgaaug

SEQ ID NO: 1351709 - RNA, 19 nt, Artificial Sequence
  Description of Artificial Sequence: Synthetic oligonucleotide
  Antisense strand to SEQ ID NO: 1351708
cauucggaaacucaagauu

SEQ ID NO: 1351710 - RNA, 19 nt, Artificial Sequence
  Description of Artificial Sequence: Synthetic oligonucleotide
  Sense strand starting at position 3118 of SEQ ID NO: 1242491
ucuccuguugcauaaugga

SEQ ID NO: 1351711 - RNA, 19 nt, Artificial Sequence
  Description of Artificial Sequence: Synthetic oligonucleotide
  Antisense strand to SEQ ID NO: 1351710
uccauuaugcaacaggaga

SEQ ID NO: 1351712 - RNA, 19 nt, Artificial Sequence
  Description of Artificial Sequence: Synthetic oligonucleotide
  Sense strand starting at position 3362 of SEQ ID NO: 1242491
ucauccagauguuugauau

SEQ ID NO: 1351713 - RNA, 19 nt, Artificial Sequence
  Description of Artificial Sequence: Synthetic oligonucleotide
  Antisense strand to SEQ ID NO: 1351712
auaucaaacaucuggauga

SEQ ID NO: 1351714 - RNA, 19 nt, Artificial Sequence
  Description of Artificial Sequence: Synthetic oligonucleotide
  Sense strand starting at position 3384 of SEQ ID NO: 1242491
guaaacacagcuugaaagu

SEQ ID NO: 1351715 - RNA, 19 nt, Artificial Sequence
  Description of Artificial Sequence: Synthetic oligonucleotide
  Antisense strand to SEQ ID NO: 1351714
acuuucaagcuguguuuac

SEQ ID NO: 1351716 - RNA, 19 nt, Artificial Sequence
  Description of Artificial Sequence: Synthetic oligonucleotide
  Sense strand starting at position 3395 of SEQ ID NO: 1242491
uugaaaguguuccugaacu

SEQ ID NO: 1351717 - RNA, 19 nt, Artificial Sequence
  Description of Artificial Sequence: Synthetic oligonucleotide
  Antisense strand to SEQ ID NO: 1351716
aguucaggaacacuuucaa

SEQ ID NO: 1351718 - RNA, 19 nt, Artificial Sequence
  Description of Artificial Sequence: Synthetic oligonucleotide
  Sense strand starting at position 3397 of SEQ ID NO: 1242491
gaaaguguuccugaacugc

SEQ ID NO: 1351719 - RNA, 19 nt, Artificial Sequence
  Description of Artificial Sequence: Synthetic oligonucleotide
  Antisense strand to SEQ ID NO: 1351718
gcaguucaggaacacuuuc

SEQ ID NO: 1351720 - RNA, 19 nt, Artificial Sequence
  Description of Artificial Sequence: Synthetic oligonucleotide
  Sense strand starting at position 3405 of SEQ ID NO: 1242491
uccugaacugcuuacagau

SEQ ID NO: 1351721 - RNA, 19 nt, Artificial Sequence
  Description of Artificial Sequence: Synthetic oligonucleotide
  Antisense strand to SEQ ID NO: 1351720
aucuguaagcaguucagga

SEQ ID NO: 1351722 - RNA, 19 nt, Artificial Sequence
  Description of Artificial Sequence: Synthetic oligonucleotide
  Sense strand starting at position 3453 of SEQ ID NO: 1242491
auauaaugauucucugggu

SEQ ID NO: 1351723 - RNA, 19 nt, Artificial Sequence
  Description of Artificial Sequence: Synthetic oligonucleotide
  Antisense strand to SEQ ID NO: 1351722
acccagagaaucauuauau

SEQ ID NO: 1351724 - RNA, 19 nt, Artificial Sequence
  Description of Artificial Sequence: Synthetic oligonucleotide
  Sense strand starting at position 3457 of SEQ ID NO: 1242491
aaugauucucugggucuau

SEQ ID NO: 1351725 - RNA, 19 nt, Artificial Sequence
  Description of Artificial Sequence: Synthetic oligonucleotide
  Antisense strand to SEQ ID NO: 1351724
auagacccagagaaucauu

SEQ ID NO: 1351726 - RNA, 19 nt, Artificial Sequence
  Description of Artificial Sequence: Synthetic oligonucleotide
  Sense strand starting at position 3458 of SEQ ID NO: 1242491
augauucucugggucuauu

SEQ ID NO: 1351727 - RNA, 19 nt, Artificial Sequence
  Description of Artificial Sequence: Synthetic oligonucleotide
  Antisense strand to SEQ ID NO: 1351726
aauagacccagagaaucau

SEQ ID NO: 1351728 - RNA, 19 nt, Artificial Sequence
  Description of Artificial Sequence: Synthetic oligonucleotide
  Sense strand starting at position 3490 of SEQ ID NO: 1242491
uagucucuggcuugaauuu

SEQ ID NO: 1351729 - RNA, 19 nt, Artificial Sequence
  Description of Artificial Sequence: Synthetic oligonucleotide
  Antisense strand to SEQ ID NO: 1351728
aaauucaagccagagacua

SEQ ID NO: 1351730 - RNA, 19 nt, Artificial Sequence
  Description of Artificial Sequence: Synthetic oligonucleotide
  Sense strand starting at position 3554 of SEQ ID NO: 1242491
ggguaaguuguccacuuga

SEQ ID NO: 1351731 - RNA, 19 nt, Artificial Sequence
  Description of Artificial Sequence: Synthetic oligonucleotide
  Antisense strand to SEQ ID NO: 1351730
ucaaguggacaacuuaccc

SEQ ID NO: 1351732 - RNA, 19 nt, Artificial Sequence
  Description of Artificial Sequence: Synthetic oligonucleotide
  Sense strand starting at position 3559 of SEQ ID NO: 1242491
aguuguccacuugauuaaa

SEQ ID NO: 1351733 - RNA, 19 nt, Artificial Sequence
  Description of Artificial Sequence: Synthetic oligonucleotide
  Antisense strand to SEQ ID NO: 1351732
uuuaaucaaguggacaacu

SEQ ID NO: 1351734 - RNA, 19 nt, Artificial Sequence
  Description of Artificial Sequence: Synthetic oligonucleotide
  Sense strand starting at position 3630 of SEQ ID NO: 1242491
cugacaugucuguaaccau

SEQ ID NO: 1351735 - RNA, 19 nt, Artificial Sequence
  Description of Artificial Sequence: Synthetic oligonucleotide
  Antisense strand to SEQ ID NO: 1351734
augguuacagacaugucag

SEQ ID NO: 1351736 - RNA, 19 nt, Artificial Sequence
  Description of Artificial Sequence: Synthetic oligonucleotide
  Sense strand starting at position 3633 of SEQ ID NO: 1242491
acaugucuguaaccaugau

SEQ ID NO: 1351737 - RNA, 19 nt, Artificial Sequence
  Description of Artificial Sequence: Synthetic oligonucleotide
  Antisense strand to SEQ ID NO: 1351736
aucaugguuacagacaugu

SEQ ID NO: 1351738 - RNA, 19 nt, Artificial Sequence
  Description of Artificial Sequence: Synthetic oligonucleotide
  Sense strand starting at position 3637 of SEQ ID NO: 1242491
gucuguaaccaugauguua

SEQ ID NO: 1351739 - RNA, 19 nt, Artificial Sequence
  Description of Artificial Sequence: Synthetic oligonucleotide
  Antisense strand to SEQ ID NO: 1351738
uaacaucaugguuacagac

SEQ ID NO: 1351740 - RNA, 19 nt, Artificial Sequence
  Description of Artificial Sequence: Synthetic oligonucleotide
  Sense strand starting at position 3650 of SEQ ID NO: 1242491
auguuaugccuggauauuc

SEQ ID NO: 1351741 - RNA, 19 nt, Artificial Sequence
  Description of Artificial Sequence: Synthetic oligonucleotide
  Antisense strand to SEQ ID NO: 1351740
gaauauccaggcauaacau

SEQ ID NO: 1351742 - RNA, 19 nt, Artificial Sequence
  Description of Artificial Sequence: Synthetic oligonucleotide
  Sense strand starting at position 3840 of SEQ ID NO: 1242491
caagaaaggucagcugagu

SEQ ID NO: 1351743 - RNA, 19 nt, Artificial Sequence
  Description of Artificial Sequence: Synthetic oligonucleotide
  Antisense strand to SEQ ID NO: 1351742
acucagcugaccuuucuug

SEQ ID NO: 1351744 - RNA, 19 nt, Artificial Sequence
  Description of Artificial Sequence: Synthetic oligonucleotide
  Sense strand starting at position 3892 of SEQ ID NO: 1242491
gguaaagccucaccagaaa

SEQ ID NO: 1351745 - RNA, 19 nt, Artificial Sequence
  Description of Artificial Sequence: Synthetic oligonucleotide
  Antisense strand to SEQ ID NO: 1351744
uuucuggugaggcuuuacc

SEQ ID NO: 1351746 - RNA, 19 nt, Artificial Sequence
  Description of Artificial Sequence: Synthetic oligonucleotide
  Sense strand starting at position 346 of SEQ ID NO: 1242492
uccagcuaucaguacuauu

SEQ ID NO: 1351747 - RNA, 19 nt, Artificial Sequence
  Description of Artificial Sequence: Synthetic oligonucleotide
  Antisense strand to SEQ ID NO: 1351746
aauaguacugauagcugga

SEQ ID NO: 1351748 - RNA, 19 nt, Artificial Sequence
  Description of Artificial Sequence: Synthetic oligonucleotide
  Sense strand starting at position 520 of SEQ ID NO: 1242492
uccuguuuggcugagguaa

SEQ ID NO: 1351749 - RNA, 19 nt, Artificial Sequence
  Description of Artificial Sequence: Synthetic oligonucleotide
  Antisense strand to SEQ ID NO: 1351748
uuaccucagccaaacagga

SEQ ID NO: 1351750 - RNA, 19 nt, Artificial Sequence
  Description of Artificial Sequence: Synthetic oligonucleotide
  Sense strand starting at position 531 of SEQ ID NO: 1242492
ugagguaacugcucaauga

SEQ ID NO: 1351751 - RNA, 19 nt, Artificial Sequence
  Description of Artificial Sequence: Synthetic oligonucleotide
  Antisense strand to SEQ ID NO: 1351750
ucauugagcaguuaccuca

SEQ ID NO: 1351752 - RNA, 19 nt, Artificial Sequence
  Description of Artificial Sequence: Synthetic oligonucleotide
  Sense strand starting at position 532 of SEQ ID NO: 1242492
gagguaacugcucaaugac

SEQ ID NO: 1351753 - RNA, 19 nt, Artificial Sequence
  Description of Artificial Sequence: Synthetic oligonucleotide
  Antisense strand to SEQ ID NO: 1351752
gucauugagcaguuaccuc

SEQ ID NO: 1351754 - RNA, 19 nt, Artificial Sequence
  Description of Artificial Sequence: Synthetic oligonucleotide
  Sense strand starting at position 541 of SEQ ID NO: 1242492
gcucaaugaccugacugau

SEQ ID NO: 1351755 - RNA, 19 nt, Artificial Sequence
  Description of Artificial Sequence: Synthetic oligonucleotide
  Antisense strand to SEQ ID NO: 1351754
aucagucaggucauugagc

SEQ ID NO: 1351756 - RNA, 19 nt, Artificial Sequence
  Description of Artificial Sequence: Synthetic oligonucleotide
  Sense strand starting at position 563 of SEQ ID NO: 1242492
accacauguguccaaguua

SEQ ID NO: 1351757 - RNA, 19 nt, Artificial Sequence
  Description of Artificial Sequence: Synthetic oligonucleotide
  Antisense strand to SEQ ID NO: 1351756
uaacuuggacacauguggu

SEQ ID NO: 1351758 - RNA, 19 nt, Artificial Sequence
  Description of Artificial Sequence: Synthetic oligonucleotide
  Sense strand starting at position 568 of SEQ ID NO: 1242492
auguguccaaguuagaaga

SEQ ID NO: 1351759 - RNA, 19 nt, Artificial Sequence
  Description of Artificial Sequence: Synthetic oligonucleotide
  Antisense strand to SEQ ID NO: 1351758
ucuucuaacuuggacacau

SEQ ID NO: 1351760 - RNA, 19 nt, Artificial Sequence
  Description of Artificial Sequence: Synthetic oligonucleotide
  Sense strand starting at position 712 of SEQ ID NO: 1242492
agugacuacuacgcagaua

SEQ ID NO: 1351761 - RNA, 19 nt, Artificial Sequence
  Description of Artificial Sequence: Synthetic oligonucleotide
  Antisense strand to SEQ ID NO: 1351760
uaucugcguaguagucacu

SEQ ID NO: 1351762 - RNA, 19 nt, Artificial Sequence
  Description of Artificial Sequence: Synthetic oligonucleotide
  Sense strand starting at position 912 of SEQ ID NO: 1242492
cuguuuguucaggauugga

SEQ ID NO: 1351763 - RNA, 19 nt, Artificial Sequence
  Description of Artificial Sequence: Synthetic oligonucleotide
  Antisense strand to SEQ ID NO: 1351762
uccaauccugaacaaacag

SEQ ID NO: 1351764 - RNA, 19 nt, Artificial Sequence
  Description of Artificial Sequence: Synthetic oligonucleotide
  Sense strand starting at position 1027 of SEQ ID NO: 1242492
cuuuauugagaagguaaug

SEQ ID NO: 1351765 - RNA, 19 nt, Artificial Sequence
  Description of Artificial Sequence: Synthetic oligonucleotide
  Antisense strand to SEQ ID NO: 1351764
cauuaccuucucaauaaag

SEQ ID NO: 1351766 - RNA, 19 nt, Artificial Sequence
  Description of Artificial Sequence: Synthetic oligonucleotide
  Sense strand starting at position 1038 of SEQ ID NO: 1242492
agguaaugaucuucuaaau

SEQ ID NO: 1351767 - RNA, 19 nt, Artificial Sequence
  Description of Artificial Sequence: Synthetic oligonucleotide
  Antisense strand to SEQ ID NO: 1351766
auuuagaagaucauuaccu

SEQ ID NO: 1351768 - RNA, 19 nt, Artificial Sequence
  Description of Artificial Sequence: Synthetic oligonucleotide
  Sense strand starting at position 1162 of SEQ ID NO: 1242492
ggaaggugucgagauagca

SEQ ID NO: 1351769 - RNA, 19 nt, Artificial Sequence
  Description of Artificial Sequence: Synthetic oligonucleotide
  Antisense strand to SEQ ID NO: 1351768
ugcuaucucgacaccuucc

SEQ ID NO: 1351770 - RNA, 19 nt, Artificial Sequence
  Description of Artificial Sequence: Synthetic oligonucleotide
  Sense strand starting at position 1251 of SEQ ID NO: 1242492
aggaguaucuugcugagag

SEQ ID NO: 1351771 - RNA, 19 nt, Artificial Sequence
  Description of Artificial Sequence: Synthetic oligonucleotide
  Antisense strand to SEQ ID NO: 1351770
cucucagcaagauacuccu

SEQ ID NO: 1351772 - RNA, 19 nt, Artificial Sequence
  Description of Artificial Sequence: Synthetic oligonucleotide
  Sense strand starting at position 2061 of SEQ ID NO: 1242492
caagaaaucccguggauga

SEQ ID NO: 1351773 - RNA, 19 nt, Artificial Sequence
  Description of Artificial Sequence: Synthetic oligonucleotide
  Antisense strand to SEQ ID NO: 1351772
ucauccacgggauuucuug

SEQ ID NO: 1351774 - RNA, 19 nt, Artificial Sequence
  Description of Artificial Sequence: Synthetic oligonucleotide
  Sense strand starting at position 2062 of SEQ ID NO: 1242492
aagaaaucccguggaugau

SEQ ID NO: 1351775 - RNA, 19 nt, Artificial Sequence
  Description of Artificial Sequence: Synthetic oligonucleotide
  Antisense strand to SEQ ID NO: 1351774
aucauccacgggauuucuu

SEQ ID NO: 1351776 - RNA, 19 nt, Artificial Sequence
  Description of Artificial Sequence: Synthetic oligonucleotide
  Sense strand starting at position 2172 of SEQ ID NO: 1242492
uuuaguagagccggagaau

SEQ ID NO: 1351777 - RNA, 19 nt, Artificial Sequence
  Description of Artificial Sequence: Synthetic oligonucleotide
  Antisense strand to SEQ ID NO: 1351776
auucuccggcucuacuaaa

SEQ ID NO: 1351778 - RNA, 19 nt, Artificial Sequence
  Description of Artificial Sequence: Synthetic oligonucleotide
  Sense strand starting at position 2184 of SEQ ID NO: 1242492
ggagaaugacgguauccuu

SEQ ID NO: 1351779 - RNA, 19 nt, Artificial Sequence
  Description of Artificial Sequence: Synthetic oligonucleotide
  Antisense strand to SEQ ID NO: 1351778
aaggauaccgucauucucc

SEQ ID NO: 1351780 - RNA, 19 nt, Artificial Sequence
  Description of Artificial Sequence: Synthetic oligonucleotide
  Sense strand starting at position 2187 of SEQ ID NO: 1242492
gaaugacgguauccuugaa

SEQ ID NO: 1351781 - RNA, 19 nt, Artificial Sequence
  Description of Artificial Sequence: Synthetic oligonucleotide
  Antisense strand to SEQ ID NO: 1351780
uucaaggauaccgucauuc

SEQ ID NO: 1351782 - RNA, 19 nt, Artificial Sequence
  Description of Artificial Sequence: Synthetic oligonucleotide
  Sense strand starting at position 2191 of SEQ ID NO: 1242492
gacgguauccuugaaccga

SEQ ID NO: 1351783 - RNA, 19 nt, Artificial Sequence
  Description of Artificial Sequence: Synthetic oligonucleotide
  Antisense strand to SEQ ID NO: 1351782
ucgguucaaggauaccguc

SEQ ID NO: 1351784 - RNA, 19 nt, Artificial Sequence
  Description of Artificial Sequence: Synthetic oligonucleotide
  Sense strand starting at position 2240 of SEQ ID NO: 1242492
cccugcuuccaggacgauu

SEQ ID NO: 1351785 - RNA, 19 nt, Artificial Sequence
  Description of Artificial Sequence: Synthetic oligonucleotide
  Antisense strand to SEQ ID NO: 1351784
aaucguccuggaagcaggg

SEQ ID NO: 1351786 - RNA, 19 nt, Artificial Sequence
  Description of Artificial Sequence: Synthetic oligonucleotide
  Sense strand starting at position 2438 of SEQ ID NO: 1242492
agaagagacucuuucuucu

SEQ ID NO: 1351787 - RNA, 19 nt, Artificial Sequence
  Description of Artificial Sequence: Synthetic oligonucleotide
  Antisense strand to SEQ ID NO: 1351786
agaagaaagagucucuucu

SEQ ID NO: 1351788 - RNA, 19 nt, Artificial Sequence
  Description of Artificial Sequence: Synthetic oligonucleotide
  Sense strand starting at position 2575 of SEQ ID NO: 1242492
guauaagggcuccaguaag

SEQ ID NO: 1351789 - RNA, 19 nt, Artificial Sequence
  Description of Artificial Sequence: Synthetic oligonucleotide
  Antisense strand to SEQ ID NO: 1351788
cuuacuggagcccuuauac

SEQ ID NO: 1351790 - RNA, 19 nt, Artificial Sequence
  Description of Artificial Sequence: Synthetic oligonucleotide
  Sense strand starting at position 2648 of SEQ ID NO: 1242492
uuguuuaucguugccuuau

SEQ ID NO: 1351791 - RNA, 19 nt, Artificial Sequence
  Description of Artificial Sequence: Synthetic oligonucleotide
  Antisense strand to SEQ ID NO: 1351790
auaaggcaacgauaaacaa

SEQ ID NO: 1351792 - RNA, 19 nt, Artificial Sequence
  Description of Artificial Sequence: Synthetic oligonucleotide
  Sense strand starting at position 2711 of SEQ ID NO: 1242492
ugcaccucccauugagaga

SEQ ID NO: 1351793 - RNA, 19 nt, Artificial Sequence
  Description of Artificial Sequence: Synthetic oligonucleotide
  Antisense strand to SEQ ID NO: 1351792
ucucucaaugggaggugca

SEQ ID NO: 1351794 - RNA, 19 nt, Artificial Sequence
  Description of Artificial Sequence: Synthetic oligonucleotide
  Sense strand starting at position 2902 of SEQ ID NO: 1242492
guggcauauguguuuguuu

SEQ ID NO: 1351795 - RNA, 19 nt, Artificial Sequence
  Description of Artificial Sequence: Synthetic oligonucleotide
  Antisense strand to SEQ ID NO: 1351794
aaacaaacacauaugccac

SEQ ID NO: 1351796 - RNA, 19 nt, Artificial Sequence
  Description of Artificial Sequence: Synthetic oligonucleotide
  Sense strand starting at position 2963 of SEQ ID NO: 1242492
ggcaguuggauccaggaua

SEQ ID NO: 1351797 - RNA, 19 nt, Artificial Sequence
  Description of Artificial Sequence: Synthetic oligonucleotide
  Antisense strand to SEQ ID NO: 1351796
uauccuggauccaacugcc

SEQ ID NO: 1351798 - RNA, 19 nt, Artificial Sequence
  Description of Artificial Sequence: Synthetic oligonucleotide
  Sense strand starting at position 2995 of SEQ ID NO: 1242492
agcagcugucaauagggaa

SEQ ID NO: 1351799 - RNA, 19 nt, Artificial Sequence
  Description of Artificial Sequence: Synthetic oligonucleotide
  Antisense strand to SEQ ID NO: 1351798
uucccuauugacagcugcu

SEQ ID NO: 1351800 - RNA, 19 nt, Artificial Sequence
  Description of Artificial Sequence: Synthetic oligonucleotide
  Sense strand starting at position 3088 of SEQ ID NO: 1242492
ucagauuuauuucggcaca

SEQ ID NO: 1351801 - RNA, 19 nt, Artificial Sequence
  Description of Artificial Sequence: Synthetic oligonucleotide
  Antisense strand to SEQ ID NO: 1351800
ugugccgaaauaaaucuga

SEQ ID NO: 1351802 - RNA, 19 nt, Artificial Sequence
  Description of Artificial Sequence: Synthetic oligonucleotide
  Sense strand starting at position 3089 of SEQ ID NO: 1242492
cagauuuauuucggcacag

SEQ ID NO: 1351803 - RNA, 19 nt, Artificial Sequence
  Description of Artificial Sequence: Synthetic oligonucleotide
  Antisense strand to SEQ ID NO: 1351802
cugugccgaaauaaaucug

SEQ ID NO: 1351804 - RNA, 19 nt, Artificial Sequence
  Description of Artificial Sequence: Synthetic oligonucleotide
  Sense strand starting at position 3149 of SEQ ID NO: 1242492
acgugauauaggcaaagcu

SEQ ID NO: 1351805 - RNA, 19 nt, Artificial Sequence
  Description of Artificial Sequence: Synthetic oligonucleotide
  Antisense strand to SEQ ID NO: 1351804
agcuuugccuauaucacgu

SEQ ID NO: 1351806 - RNA, 19 nt, Artificial Sequence
  Description of Artificial Sequence: Synthetic oligonucleotide
  Sense strand starting at position 3240 of SEQ ID NO: 1242492
aaagcauguugucugaaua

SEQ ID NO: 1351807 - RNA, 19 nt, Artificial Sequence
  Description of Artificial Sequence: Synthetic oligonucleotide
  Antisense strand to SEQ ID NO: 1351806
uauucagacaacaugcuuu

SEQ ID NO: 1351808 - RNA, 19 nt, Artificial Sequence
  Description of Artificial Sequence: Synthetic oligonucleotide
  Sense strand starting at position 3252 of SEQ ID NO: 1242492
cugaauacacguuacuuau

SEQ ID NO: 1351809 - RNA, 19 nt, Artificial Sequence
  Description of Artificial Sequence: Synthetic oligonucleotide
  Antisense strand to SEQ ID NO: 1351808
auaaguaacguguauucag

SEQ ID NO: 1351810 - RNA, 19 nt, Artificial Sequence
  Description of Artificial Sequence: Synthetic oligonucleotide
  Sense strand starting at position 3260 of SEQ ID NO: 1242492
acguuacuuaugggaacaa

SEQ ID NO: 1351811 - RNA, 19 nt, Artificial Sequence
  Description of Artificial Sequence: Synthetic oligonucleotide
  Antisense strand to SEQ ID NO: 1351810
uuguucccauaaguaacgu

SEQ ID NO: 1351812 - RNA, 19 nt, Artificial Sequence
  Description of Artificial Sequence: Synthetic oligonucleotide
  Sense strand starting at position 3290 of SEQ ID NO: 1242492
ccuugaaacuguccugaaa

SEQ ID NO: 1351813 - RNA, 19 nt, Artificial Sequence
  Description of Artificial Sequence: Synthetic oligonucleotide
  Antisense strand to SEQ ID NO: 1351812
uuucaggacaguuucaagg

SEQ ID NO: 1351814 - RNA, 19 nt, Artificial Sequence
  Description of Artificial Sequence: Synthetic oligonucleotide
  Sense strand starting at position 3587 of SEQ ID NO: 1242492
uccuguuaugaguaaauca

SEQ ID NO: 1351815 - RNA, 19 nt, Artificial Sequence
  Description of Artificial Sequence: Synthetic oligonucleotide
  Antisense strand to SEQ ID NO: 1351814
ugauuuacucauaacagga

SEQ ID NO: 1351816 - RNA, 19 nt, Artificial Sequence
  Description of Artificial Sequence: Synthetic oligonucleotide
  Sense strand starting at position 3699 of SEQ ID NO: 1242492
auaaacagaucuguuugau

SEQ ID NO: 1351817 - RNA, 19 nt, Artificial Sequence
  Description of Artificial Sequence: Synthetic oligonucleotide
  Antisense strand to SEQ ID NO: 1351816
aucaaacagaucuguuuau

SEQ ID NO: 1351818 - RNA, 19 nt, Artificial Sequence
  Description of Artificial Sequence: Synthetic oligonucleotide
  Sense strand starting at position 3708 of SEQ ID NO: 1242492
ucuguuugauuacuugaca

SEQ ID NO: 1351819 - RNA, 19 nt, Artificial Sequence
  Description of Artificial Sequence: Synthetic oligonucleotide
  Antisense strand to SEQ ID NO: 1351818
ugucaaguaaucaaacaga

SEQ ID NO: 1351820 - RNA, 19 nt, Artificial Sequence
  Description of Artificial Sequence: Synthetic oligonucleotide
  Sense strand starting at position 3709 of SEQ ID NO: 1242492
cuguuugauuacuugacaa

SEQ ID NO: 1351821 - RNA, 19 nt, Artificial Sequence
  Description of Artificial Sequence: Synthetic oligonucleotide
  Antisense strand to SEQ ID NO: 1351820
uugucaaguaaucaaacag

SEQ ID NO: 1351822 - RNA, 19 nt, Artificial Sequence
  Description of Artificial Sequence: Synthetic oligonucleotide
  Sense strand starting at position 3711 of SEQ ID NO: 1242492
guuugauuacuugacaagu

SEQ ID NO: 1351823 - RNA, 19 nt, Artificial Sequence
  Description of Artificial Sequence: Synthetic oligonucleotide
  Antisense strand to SEQ ID NO: 1351822
acuugucaaguaaucaaac

SEQ ID NO: 1351824 - RNA, 19 nt, Artificial Sequence
  Description of Artificial Sequence: Synthetic oligonucleotide
  Sense strand starting at position 3940 of SEQ ID NO: 1242492
gugagagcaucuccugaac

SEQ ID NO: 1351825 - RNA, 19 nt, Artificial Sequence
  Description of Artificial Sequence: Synthetic oligonucleotide
  Antisense strand to SEQ ID NO: 1351824
guucaggagaugcucucac

SEQ ID NO: 1351826 - RNA, 19 nt, Artificial Sequence
  Description of Artificial Sequence: Synthetic oligonucleotide
  Sense strand starting at position 176 of SEQ ID NO: 1242493
guggaauggcuggaauacu

SEQ ID NO: 1351827 - RNA, 19 nt, Artificial Sequence
  Description of Artificial Sequence: Synthetic oligonucleotide
  Antisense strand to SEQ ID NO: 1351826
aguauuccagccauuccac

SEQ ID NO: 1351828 - RNA, 19 nt, Artificial Sequence
  Description of Artificial Sequence: Synthetic oligonucleotide
  Sense strand starting at position 372 of SEQ ID NO: 1242493
agaucacaaggcugaguuu

SEQ ID NO: 1351829 - RNA, 19 nt, Artificial Sequence
  Description of Artificial Sequence: Synthetic oligonucleotide
  Antisense strand to SEQ ID NO: 1351828
aaacucagccuugugaucu

SEQ ID NO: 1351830 - RNA, 19 nt, Artificial Sequence
  Description of Artificial Sequence: Synthetic oligonucleotide
  Sense strand starting at position 415 of SEQ ID NO: 1242493
gugauccuucccuauacca

SEQ ID NO: 1351831 - RNA, 19 nt, Artificial Sequence
  Description of Artificial Sequence: Synthetic oligonucleotide
  Antisense strand to SEQ ID NO: 1351830
ugguauagggaaggaucac

SEQ ID NO: 1351832 - RNA, 19 nt, Artificial Sequence
  Description of Artificial Sequence: Synthetic oligonucleotide
  Sense strand starting at position 455 of SEQ ID NO: 1242493
cuuugugagacuugaugaa

SEQ ID NO: 1351833 - RNA, 19 nt, Artificial Sequence
  Description of Artificial Sequence: Synthetic oligonucleotide
  Antisense strand to SEQ ID NO: 1351832
uucaucaagucucacaaag

SEQ ID NO: 1351834 - RNA, 19 nt, Artificial Sequence
  Description of Artificial Sequence: Synthetic oligonucleotide
  Sense strand starting at position 472 of SEQ ID NO: 1242493
aaagcagaaucuuugguua

SEQ ID NO: 1351835 - RNA, 19 nt, Artificial Sequence
  Description of Artificial Sequence: Synthetic oligonucleotide
  Antisense strand to SEQ ID NO: 1351834
uaaccaaagauucugcuuu

SEQ ID NO: 1351836 - RNA, 19 nt, Artificial Sequence
  Description of Artificial Sequence: Synthetic oligonucleotide
  Sense strand starting at position 475 of SEQ ID NO: 1242493
gcagaaucuuugguuaacu

SEQ ID NO: 1351837 - RNA, 19 nt, Artificial Sequence
  Description of Artificial Sequence: Synthetic oligonucleotide
  Antisense strand to SEQ ID NO: 1351836
aguuaaccaaagauucugc

SEQ ID NO: 1351838 - RNA, 19 nt, Artificial Sequence
  Description of Artificial Sequence: Synthetic oligonucleotide
  Sense strand starting at position 609 of SEQ ID NO: 1242493
acucuuacugauugcagaa

SEQ ID NO: 1351839 - RNA, 19 nt, Artificial Sequence
  Description of Artificial Sequence: Synthetic oligonucleotide
  Antisense strand to SEQ ID NO: 1351838
uucugcaaucaguaagagu

SEQ ID NO: 1351840 - RNA, 19 nt, Artificial Sequence
  Description of Artificial Sequence: Synthetic oligonucleotide
  Sense strand starting at position 712 of SEQ ID NO: 1242493
ccgucucaugugucauagu

SEQ ID NO: 1351841 - RNA, 19 nt, Artificial Sequence
  Description of Artificial Sequence: Synthetic oligonucleotide
  Antisense strand to SEQ ID NO: 1351840
acuaugacacaugagacgg

SEQ ID NO: 1351842 - RNA, 19 nt, Artificial Sequence
  Description of Artificial Sequence: Synthetic oligonucleotide
  Sense strand starting at position 719 of SEQ ID NO: 1242493
augugucauagucaugaga

SEQ ID NO: 1351843 - RNA, 19 nt, Artificial Sequence
  Description of Artificial Sequence: Synthetic oligonucleotide
  Antisense strand to SEQ ID NO: 1351842
ucucaugacuaugacacau

SEQ ID NO: 1351844 - RNA, 19 nt, Artificial Sequence
  Description of Artificial Sequence: Synthetic oligonucleotide
  Sense strand starting at position 722 of SEQ ID NO: 1242493
ugucauagucaugagacua

SEQ ID NO: 1351845 - RNA, 19 nt, Artificial Sequence
  Description of Artificial Sequence: Synthetic oligonucleotide
  Antisense strand to SEQ ID NO: 1351844
uagucucaugacuaugaca

SEQ ID NO: 1351846 - RNA, 19 nt, Artificial Sequence
  Description of Artificial Sequence: Synthetic oligonucleotide
  Sense strand starting at position 882 of SEQ ID NO: 1242493
ggaccaggauugcuguaaa

SEQ ID NO: 1351847 - RNA, 19 nt, Artificial Sequence
  Description of Artificial Sequence: Synthetic oligonucleotide
  Antisense strand to SEQ ID NO: 1351846
uuuacagcaauccuggucc

SEQ ID NO: 1351848 - RNA, 19 nt, Artificial Sequence
  Description of Artificial Sequence: Synthetic oligonucleotide
  Sense strand starting at position 885 of SEQ ID NO: 1242493
ccaggauugcuguaaaguu

SEQ ID NO: 1351849 - RNA, 19 nt, Artificial Sequence
  Description of Artificial Sequence: Synthetic oligonucleotide
  Antisense strand to SEQ ID NO: 1351848
aacuuuacagcaauccugg

SEQ ID NO: 1351850 - RNA, 19 nt, Artificial Sequence
  Description of Artificial Sequence: Synthetic oligonucleotide
  Sense strand starting at position 1197 of SEQ ID NO: 1242493
gccgcugugaaguauuuaa

SEQ ID NO: 1351851 - RNA, 19 nt, Artificial Sequence
  Description of Artificial Sequence: Synthetic oligonucleotide
  Antisense strand to SEQ ID NO: 1351850
uuaaauacuucacagcggc

SEQ ID NO: 1351852 - RNA, 19 nt, Artificial Sequence
  Description of Artificial Sequence: Synthetic oligonucleotide
  Sense strand starting at position 1425 of SEQ ID NO: 1242493
uguacagaaugauucggua

SEQ ID NO: 1351853 - RNA, 19 nt, Artificial Sequence
  Description of Artificial Sequence: Synthetic oligonucleotide
  Antisense strand to SEQ ID NO: 1351852
uaccgaaucauucuguaca

SEQ ID NO: 1351854 - RNA, 19 nt, Artificial Sequence
  Description of Artificial Sequence: Synthetic oligonucleotide
  Sense strand starting at position 1429 of SEQ ID NO: 1242493
cagaaugauucgguauccu

SEQ ID NO: 1351855 - RNA, 19 nt, Artificial Sequence
  Description of Artificial Sequence: Synthetic oligonucleotide
  Antisense strand to SEQ ID NO: 1351854
aggauaccgaaucauucug

SEQ ID NO: 1351856 - RNA, 19 nt, Artificial Sequence
  Description of Artificial Sequence: Synthetic oligonucleotide
  Sense strand starting at position 1532 of SEQ ID NO: 1242493
agauguuccagucagucau

SEQ ID NO: 1351857 - RNA, 19 nt, Artificial Sequence
  Description of Artificial Sequence: Synthetic oligonucleotide
  Antisense strand to SEQ ID NO: 1351856
augacugacuggaacaucu

SEQ ID NO: 1351858 - RNA, 19 nt, Artificial Sequence
  Description of Artificial Sequence: Synthetic oligonucleotide
  Sense strand starting at position 2121 of SEQ ID NO: 1242493
gcggaauugccagacagua

SEQ ID NO: 1351859 - RNA, 19 nt, Artificial Sequence
  Description of Artificial Sequence: Synthetic oligonucleotide
  Antisense strand to SEQ ID NO: 1351858
uacugucuggcaauuccgc

SEQ ID NO: 1351860 - RNA, 19 nt, Artificial Sequence
  Description of Artificial Sequence: Synthetic oligonucleotide
  Sense strand starting at position 2123 of SEQ ID NO: 1242493
ggaauugccagacaguacu

SEQ ID NO: 1351861 - RNA, 19 nt, Artificial Sequence
  Description of Artificial Sequence: Synthetic oligonucleotide
  Antisense strand to SEQ ID NO: 1351860
aguacugucuggcaauucc

SEQ ID NO: 1351862 - RNA, 19 nt, Artificial Sequence
  Description of Artificial Sequence: Synthetic oligonucleotide
  Sense strand starting at position 2136 of SEQ ID NO: 1242493
aguacuuaucagggauaca

SEQ ID NO: 1351863 - RNA, 19 nt, Artificial Sequence
  Description of Artificial Sequence: Synthetic oligonucleotide
  Antisense strand to SEQ ID NO: 1351862
uguaucccugauaaguacu

SEQ ID NO: 1351864 - RNA, 19 nt, Artificial Sequence
  Description of Artificial Sequence: Synthetic oligonucleotide
  Sense strand starting at position 2470 of SEQ ID NO: 1242493
ggguguuuccauggagacc

SEQ ID NO: 1351865 - RNA, 19 nt, Artificial Sequence
  Description of Artificial Sequence: Synthetic oligonucleotide
  Antisense strand to SEQ ID NO: 1351864
ggucuccauggaaacaccc

SEQ ID NO: 1351866 - RNA, 19 nt, Artificial Sequence
  Description of Artificial Sequence: Synthetic oligonucleotide
  Sense strand starting at position 2664 of SEQ ID NO: 1242493
gcgauaucgguacagagag

SEQ ID NO: 1351867 - RNA, 19 nt, Artificial Sequence
  Description of Artificial Sequence: Synthetic oligonucleotide
  Antisense strand to SEQ ID NO: 1351866
cucucuguaccgauaucgc

SEQ ID NO: 1351868 - RNA, 19 nt, Artificial Sequence
  Description of Artificial Sequence: Synthetic oligonucleotide
  Sense strand starting at position 2818 of SEQ ID NO: 1242493
ugugcacuuccugagaucu

SEQ ID NO: 1351869 - RNA, 19 nt, Artificial Sequence
  Description of Artificial Sequence: Synthetic oligonucleotide
  Antisense strand to SEQ ID NO: 1351868
agaucucaggaagugcaca

SEQ ID NO: 1351870 - RNA, 19 nt, Artificial Sequence
  Description of Artificial Sequence: Synthetic oligonucleotide
  Sense strand starting at position 3010 of SEQ ID NO: 1242493
uggaccagguguccugaaa

SEQ ID NO: 1351871 - RNA, 19 nt, Artificial Sequence
  Description of Artificial Sequence: Synthetic oligonucleotide
  Antisense strand to SEQ ID NO: 1351870
uuucaggacaccuggucca

SEQ ID NO: 1351872 - RNA, 19 nt, Artificial Sequence
  Description of Artificial Sequence: Synthetic oligonucleotide
  Sense strand starting at position 3032 of SEQ ID NO: 1242493
cucaccaucccuggagaau

SEQ ID NO: 1351873 - RNA, 19 nt, Artificial Sequence
  Description of Artificial Sequence: Synthetic oligonucleotide
  Antisense strand to SEQ ID NO: 1351872
auucuccagggauggugag

SEQ ID NO: 1351874 - RNA, 19 nt, Artificial Sequence
  Description of Artificial Sequence: Synthetic oligonucleotide
  Sense strand starting at position 3076 of SEQ ID NO: 1242493
cuuuauggucccugaacca

SEQ ID NO: 1351875 - RNA, 19 nt, Artificial Sequence
  Description of Artificial Sequence: Synthetic oligonucleotide
  Antisense strand to SEQ ID NO: 1351874
ugguucagggaccauaaag

SEQ ID NO: 1351876 - RNA, 19 nt, Artificial Sequence
  Description of Artificial Sequence: Synthetic oligonucleotide
  Sense strand starting at position 3315 of SEQ ID NO: 1242493
ccuacuuagcuguaaaugu

SEQ ID NO: 1351877 - RNA, 19 nt, Artificial Sequence
  Description of Artificial Sequence: Synthetic oligonucleotide
  Antisense strand to SEQ ID NO: 1351876
acauuuacagcuaaguagg

SEQ ID NO: 1351878 - RNA, 19 nt, Artificial Sequence
  Description of Artificial Sequence: Synthetic oligonucleotide
  Sense strand starting at position 3425 of SEQ ID NO: 1242493
acucauuaaugaccgaguu

SEQ ID NO: 1351879 - RNA, 19 nt, Artificial Sequence
  Description of Artificial Sequence: Synthetic oligonucleotide
  Antisense strand to SEQ ID NO: 1351878
aacucggucauuaaugagu

SEQ ID NO: 1351880 - RNA, 19 nt, Artificial Sequence
  Description of Artificial Sequence: Synthetic oligonucleotide
  Sense strand starting at position 3426 of SEQ ID NO: 1242493
cucauuaaugaccgaguuu

SEQ ID NO: 1351881 - RNA, 19 nt, Artificial Sequence
  Description of Artificial Sequence: Synthetic oligonucleotide
  Antisense strand to SEQ ID NO: 1351880
aaacucggucauuaaugag

SEQ ID NO: 1351882 - RNA, 19 nt, Artificial Sequence
  Description of Artificial Sequence: Synthetic oligonucleotide
  Sense strand starting at position 3435 of SEQ ID NO: 1242493
gaccgaguuuagucuaaac

SEQ ID NO: 1351883 - RNA, 19 nt, Artificial Sequence
  Description of Artificial Sequence: Synthetic oligonucleotide
  Antisense strand to SEQ ID NO: 1351882
guuuagacuaaacucgguc

SEQ ID NO: 1351884 - RNA, 19 nt, Artificial Sequence
  Description of Artificial Sequence: Synthetic oligonucleotide
  Sense strand starting at position 3437 of SEQ ID NO: 1242493
ccgaguuuagucuaaacuc

SEQ ID NO: 1351885 - RNA, 19 nt, Artificial Sequence
  Description of Artificial Sequence: Synthetic oligonucleotide
  Antisense strand to SEQ ID NO: 1351884
gaguuuagacuaaacucgg

SEQ ID NO: 1351886 - RNA, 19 nt, Artificial Sequence
  Description of Artificial Sequence: Synthetic oligonucleotide
  Sense strand starting at position 3492 of SEQ ID NO: 1242493
agcuguaaacugggagaaa

SEQ ID NO: 1351887 - RNA, 19 nt, Artificial Sequence
  Description of Artificial Sequence: Synthetic oligonucleotide
  Antisense strand to SEQ ID NO: 1351886
uuucucccaguuuacagcu

SEQ ID NO: 1351888 - RNA, 19 nt, Artificial Sequence
  Description of Artificial Sequence: Synthetic oligonucleotide
  Sense strand starting at position 3524 of SEQ ID NO: 1242493
gccaccuuucuuugagaca

SEQ ID NO: 1351889 - RNA, 19 nt, Artificial Sequence
  Description of Artificial Sequence: Synthetic oligonucleotide
  Antisense strand to SEQ ID NO: 1351888
ugucucaaagaaagguggc

SEQ ID NO: 1351890 - RNA, 19 nt, Artificial Sequence
  Description of Artificial Sequence: Synthetic oligonucleotide
  Sense strand starting at position 3535 of SEQ ID NO: 1242493
uugagacaucacugaggcu

SEQ ID NO: 1351891 - RNA, 19 nt, Artificial Sequence
  Description of Artificial Sequence: Synthetic oligonucleotide
  Antisense strand to SEQ ID NO: 1351890
agccucagugaugucucaa

SEQ ID NO: 1351892 - RNA, 19 nt, Artificial Sequence
  Description of Artificial Sequence: Synthetic oligonucleotide
  Sense strand starting at position 3678 of SEQ ID NO: 1242493
cagggauucucuccuggaa

SEQ ID NO: 1351893 - RNA, 19 nt, Artificial Sequence
  Description of Artificial Sequence: Synthetic oligonucleotide
  Antisense strand to SEQ ID NO: 1351892
uuccaggagagaaucccug

SEQ ID NO: 1351894 - RNA, 19 nt, Artificial Sequence
  Description of Artificial Sequence: Synthetic oligonucleotide
  Sense strand starting at position 3864 of SEQ ID NO: 1242493
gggagguuugaguggagga

SEQ ID NO: 1351895 - RNA, 19 nt, Artificial Sequence
  Description of Artificial Sequence: Synthetic oligonucleotide
  Antisense strand to SEQ ID NO: 1351894
uccuccacucaaaccuccc

SEQ ID NO: 1351896 - RNA, 19 nt, Artificial Sequence
  Description of Artificial Sequence: Synthetic oligonucleotide
  Sense strand starting at position 3867 of SEQ ID NO: 1242493
agguuugaguggaggagaa

SEQ ID NO: 1351897 - RNA, 19 nt, Artificial Sequence
  Description of Artificial Sequence: Synthetic oligonucleotide
  Antisense strand to SEQ ID NO: 1351896
uucuccuccacucaaaccu

SEQ ID NO: 1351898 - RNA, 19 nt, Artificial Sequence
  Description of Artificial Sequence: Synthetic oligonucleotide
  Sense strand starting at position 3913 of SEQ ID NO: 1242493
cauggaauuccauagcugu

SEQ ID NO: 1351899 - RNA, 19 nt, Artificial Sequence
  Description of Artificial Sequence: Synthetic oligonucleotide
  Antisense strand to SEQ ID NO: 1351898
acagcuauggaauuccaug

SEQ ID NO: 1351900 - RNA, 19 nt, Artificial Sequence
  Description of Artificial Sequence: Synthetic oligonucleotide
  Sense strand starting at position 3954 of SEQ ID NO: 1242493
gcagacaugguuugauacu

SEQ ID NO: 1351901 - RNA, 19 nt, Artificial Sequence
  Description of Artificial Sequence: Synthetic oligonucleotide
  Antisense strand to SEQ ID NO: 1351900
aguaucaaaccaugucugc

SEQ ID NO: 1351902 - RNA, 19 nt, Artificial Sequence
  Description of Artificial Sequence: Synthetic oligonucleotide
  Sense strand starting at position 3961 of SEQ ID NO: 1242493
ugguuugauacuggaggga

SEQ ID NO: 1351903 - RNA, 19 nt, Artificial Sequence
  Description of Artificial Sequence: Synthetic oligonucleotide
  Antisense strand to SEQ ID NO: 1351902
ucccuccaguaucaaacca

SEQ ID NO: 1351904 - RNA, 19 nt, Artificial Sequence
  Description of Artificial Sequence: Synthetic oligonucleotide
  Sense strand starting at position 3963 of SEQ ID NO: 1242493
guuugauacuggagggaga

SEQ ID NO: 1351905 - RNA, 19 nt, Artificial Sequence
  Description of Artificial Sequence: Synthetic oligonucleotide
  Antisense strand to SEQ ID NO: 1351904
ucucccuccaguaucaaac

SEQ ID NO: 1351906 - RNA, 19 nt, Artificial Sequence
  Description of Artificial Sequence: Synthetic oligonucleotide
  Sense strand starting at position 13 of SEQ ID NO: 1242494
accgcugugucauuucuuu

SEQ ID NO: 1351907 - RNA, 19 nt, Artificial Sequence
  Description of Artificial Sequence: Synthetic oligonucleotide
  Antisense strand to SEQ ID NO: 1351906
aaagaaaugacacagcggu

SEQ ID NO: 1351908 - RNA, 19 nt, Artificial Sequence
  Description of Artificial Sequence: Synthetic oligonucleotide
  Sense strand starting at position 144 of SEQ ID NO: 1242494
acacaaaccuuggugauga

SEQ ID NO: 1351909 - RNA, 19 nt, Artificial Sequence
  Description of Artificial Sequence: Synthetic oligonucleotide
  Antisense strand to SEQ ID NO: 1351908
ucaucaccaagguuugugu

SEQ ID NO: 1351910 - RNA, 19 nt, Artificial Sequence
  Description of Artificial Sequence: Synthetic oligonucleotide
  Sense strand starting at position 314 of SEQ ID NO: 1242494
gaaugugugcaguagcagu

SEQ ID NO: 1351911 - RNA, 19 nt, Artificial Sequence
  Description of Artificial Sequence: Synthetic oligonucleotide
  Antisense strand to SEQ ID NO: 1351910
acugcuacugcacacauuc

SEQ ID NO: 1351912 - RNA, 19 nt, Artificial Sequence
  Description of Artificial Sequence: Synthetic oligonucleotide
  Sense strand starting at position 375 of SEQ ID NO: 1242494
gcagguguccagcaggaaa

SEQ ID NO: 1351913 - RNA, 19 nt, Artificial Sequence
  Description of Artificial Sequence: Synthetic oligonucleotide
  Antisense strand to SEQ ID NO: 1351912
uuuccugcuggacaccugc

SEQ ID NO: 1351914 - RNA, 19 nt, Artificial Sequence
  Description of Artificial Sequence: Synthetic oligonucleotide
  Sense strand starting at position 468 of SEQ ID NO: 1242494
cagugugagcgugcacuua

SEQ ID NO: 1351915 - RNA, 19 nt, Artificial Sequence
  Description of Artificial Sequence: Synthetic oligonucleotide
  Antisense strand to SEQ ID NO: 1351914
uaagugcacgcucacacug

SEQ ID NO: 1351916 - RNA, 19 nt, Artificial Sequence
  Description of Artificial Sequence: Synthetic oligonucleotide
  Sense strand starting at position 603 of SEQ ID NO: 1242494
ucaucuuccagcugggagu

SEQ ID NO: 1351917 - RNA, 19 nt, Artificial Sequence
  Description of Artificial Sequence: Synthetic oligonucleotide
  Antisense strand to SEQ ID NO: 1351916
acucccagcuggaagauga

SEQ ID NO: 1351918 - RNA, 19 nt, Artificial Sequence
  Description of Artificial Sequence: Synthetic oligonucleotide
  Sense strand starting at position 760 of SEQ ID NO: 1242494
gaaagaguuagccauucgu

SEQ ID NO: 1351919 - RNA, 19 nt, Artificial Sequence
  Description of Artificial Sequence: Synthetic oligonucleotide
  Antisense strand to SEQ ID NO: 1351918
acgaauggcuaacucuuuc

SEQ ID NO: 1351920 - RNA, 19 nt, Artificial Sequence
  Description of Artificial Sequence: Synthetic oligonucleotide
  Sense strand starting at position 1064 of SEQ ID NO: 1242494
cgagguaacuuccucuuua

SEQ ID NO: 1351921 - RNA, 19 nt, Artificial Sequence
  Description of Artificial Sequence: Synthetic oligonucleotide
  Antisense strand to SEQ ID NO: 1351920
uaaagaggaaguuaccucg

SEQ ID NO: 1351922 - RNA, 19 nt, Artificial Sequence
  Description of Artificial Sequence: Synthetic oligonucleotide
  Sense strand starting at position 1237 of SEQ ID NO: 1242494
ccaucuuuguucuuaggua

SEQ ID NO: 1351923 - RNA, 19 nt, Artificial Sequence
  Description of Artificial Sequence: Synthetic oligonucleotide
  Antisense strand to SEQ ID NO: 1351922
uaccuaagaacaaagaugg

SEQ ID NO: 1351924 - RNA, 19 nt, Artificial Sequence
  Description of Artificial Sequence: Synthetic oligonucleotide
  Sense strand starting at position 1241 of SEQ ID NO: 1242494
cuuuguucuuagguaacaa

SEQ ID NO: 1351925 - RNA, 19 nt, Artificial Sequence
  Description of Artificial Sequence: Synthetic oligonucleotide
  Antisense strand to SEQ ID NO: 1351924
uuguuaccuaagaacaaag

SEQ ID NO: 1351926 - RNA, 19 nt, Artificial Sequence
  Description of Artificial Sequence: Synthetic oligonucleotide
  Sense strand starting at position 1453 of SEQ ID NO: 1242494
acuugauuucgcgggccau

SEQ ID NO: 1351927 - RNA, 19 nt, Artificial Sequence
  Description of Artificial Sequence: Synthetic oligonucleotide
  Antisense strand to SEQ ID NO: 1351926
auggcccgcgaaaucaagu

SEQ ID NO: 1351928 - RNA, 19 nt, Artificial Sequence
  Description of Artificial Sequence: Synthetic oligonucleotide
  Sense strand starting at position 2083 of SEQ ID NO: 1242494
cccaguugacgguggauau

SEQ ID NO: 1351929 - RNA, 19 nt, Artificial Sequence
  Description of Artificial Sequence: Synthetic oligonucleotide
  Antisense strand to SEQ ID NO: 1351928
auauccaccgucaacuggg

SEQ ID NO: 1351930 - RNA, 19 nt, Artificial Sequence
  Description of Artificial Sequence: Synthetic oligonucleotide
  Sense strand starting at position 2090 of SEQ ID NO: 1242494
gacgguggauaugacuaua

SEQ ID NO: 1351931 - RNA, 19 nt, Artificial Sequence
  Description of Artificial Sequence: Synthetic oligonucleotide
  Antisense strand to SEQ ID NO: 1351930
uauagucauauccaccguc

SEQ ID NO: 1351932 - RNA, 19 nt, Artificial Sequence
  Description of Artificial Sequence: Synthetic oligonucleotide
  Sense strand starting at position 2768 of SEQ ID NO: 1242494
ugaguuuagacucaggcaa

SEQ ID NO: 1351933 - RNA, 19 nt, Artificial Sequence
  Description of Artificial Sequence: Synthetic oligonucleotide
  Antisense strand to SEQ ID NO: 1351932
uugccugagucuaaacuca

SEQ ID NO: 1351934 - RNA, 19 nt, Artificial Sequence
  Description of Artificial Sequence: Synthetic oligonucleotide
  Sense strand starting at position 2857 of SEQ ID NO: 1242494
uuuaaauccagcggguaga

SEQ ID NO: 1351935 - RNA, 19 nt, Artificial Sequence
  Description of Artificial Sequence: Synthetic oligonucleotide
  Antisense strand to SEQ ID NO: 1351934
ucuacccgcuggauuuaaa

SEQ ID NO: 1351936 - RNA, 19 nt, Artificial Sequence
  Description of Artificial Sequence: Synthetic oligonucleotide
  Sense strand starting at position 2937 of SEQ ID NO: 1242494
gucggccuuccauguuaga

SEQ ID NO: 1351937 - RNA, 19 nt, Artificial Sequence
  Description of Artificial Sequence: Synthetic oligonucleotide
  Antisense strand to SEQ ID NO: 1351936
ucuaacauggaaggccgac

SEQ ID NO: 1351938 - RNA, 19 nt, Artificial Sequence
  Description of Artificial Sequence: Synthetic oligonucleotide
  Sense strand starting at position 3050 of SEQ ID NO: 1242494
ugagcugugcuuggaagga

SEQ ID NO: 1351939 - RNA, 19 nt, Artificial Sequence
  Description of Artificial Sequence: Synthetic oligonucleotide
  Antisense strand to SEQ ID NO: 1351938
uccuuccaagcacagcuca

SEQ ID NO: 1351940 - RNA, 19 nt, Artificial Sequence
  Description of Artificial Sequence: Synthetic oligonucleotide
  Sense strand starting at position 3255 of SEQ ID NO: 1242494
acugcaugguuaccaaaua

SEQ ID NO: 1351941 - RNA, 19 nt, Artificial Sequence
  Description of Artificial Sequence: Synthetic oligonucleotide
  Antisense strand to SEQ ID NO: 1351940
uauuugguaaccaugcagu

SEQ ID NO: 1351942 - RNA, 19 nt, Artificial Sequence
  Description of Artificial Sequence: Synthetic oligonucleotide
  Sense strand starting at position 3281 of SEQ ID NO: 1242494
gacgguaucugagcagauu

SEQ ID NO: 1351943 - RNA, 19 nt, Artificial Sequence
  Description of Artificial Sequence: Synthetic oligonucleotide
  Antisense strand to SEQ ID NO: 1351942
aaucugcucagauaccguc

SEQ ID NO: 1351944 - RNA, 19 nt, Artificial Sequence
  Description of Artificial Sequence: Synthetic oligonucleotide
  Sense strand starting at position 3282 of SEQ ID NO: 1242494
acgguaucugagcagauua

SEQ ID NO: 1351945 - RNA, 19 nt, Artificial Sequence
  Description of Artificial Sequence: Synthetic oligonucleotide
  Antisense strand to SEQ ID NO: 1351944
uaaucugcucagauaccgu

SEQ ID NO: 1351946 - RNA, 19 nt, Artificial Sequence
  Description of Artificial Sequence: Synthetic oligonucleotide
  Sense strand starting at position 3293 of SEQ ID NO: 1242494
gcagauuaggcaggccaaa

SEQ ID NO: 1351947 - RNA, 19 nt, Artificial Sequence
  Description of Artificial Sequence: Synthetic oligonucleotide
  Antisense strand to SEQ ID NO: 1351946
uuuggccugccuaaucugc

SEQ ID NO: 1351948 - RNA, 19 nt, Artificial Sequence
  Description of Artificial Sequence: Synthetic oligonucleotide
  Sense strand starting at position 3410 of SEQ ID NO: 1242494
accuaauggucagaacauu

SEQ ID NO: 1351949 - RNA, 19 nt, Artificial Sequence
  Description of Artificial Sequence: Synthetic oligonucleotide
  Antisense strand to SEQ ID NO: 1351948
aauguucugaccauuaggu

SEQ ID NO: 1351950 - RNA, 19 nt, Artificial Sequence
  Description of Artificial Sequence: Synthetic oligonucleotide
  Sense strand starting at position 3418 of SEQ ID NO: 1242494
gucagaacauuagaucuga

SEQ ID NO: 1351951 - RNA, 19 nt, Artificial Sequence
  Description of Artificial Sequence: Synthetic oligonucleotide
  Antisense strand to SEQ ID NO: 1351950
ucagaucuaauguucugac

SEQ ID NO: 1351952 - RNA, 19 nt, Artificial Sequence
  Description of Artificial Sequence: Synthetic oligonucleotide
  Sense strand starting at position 3450 of SEQ ID NO: 1242494
ggcugcguggcacagaaau

SEQ ID NO: 1351953 - RNA, 19 nt, Artificial Sequence
  Description of Artificial Sequence: Synthetic oligonucleotide
  Antisense strand to SEQ ID NO: 1351952
auuucugugccacgcagcc

SEQ ID NO: 1351954 - RNA, 19 nt, Artificial Sequence
  Description of Artificial Sequence: Synthetic oligonucleotide
  Sense strand starting at position 3478 of SEQ ID NO: 1242494
cccuuuaaucacggugugu

SEQ ID NO: 1351955 - RNA, 19 nt, Artificial Sequence
  Description of Artificial Sequence: Synthetic oligonucleotide
  Antisense strand to SEQ ID NO: 1351954
acacaccgugauuaaaggg

SEQ ID NO: 1351956 - RNA, 19 nt, Artificial Sequence
  Description of Artificial Sequence: Synthetic oligonucleotide
  Sense strand starting at position 3480 of SEQ ID NO: 1242494
cuuuaaucacgguguguca

SEQ ID NO: 1351957 - RNA, 19 nt, Artificial Sequence
  Description of Artificial Sequence: Synthetic oligonucleotide
  Antisense strand to SEQ ID NO: 1351956
ugacacaccgugauuaaag

SEQ ID NO: 1351958 - RNA, 19 nt, Artificial Sequence
  Description of Artificial Sequence: Synthetic oligonucleotide
  Sense strand starting at position 3518 of SEQ ID NO: 1242494
gacaaaguuccaggcaugu

SEQ ID NO: 1351959 - RNA, 19 nt, Artificial Sequence
  Description of Artificial Sequence: Synthetic oligonucleotide
  Antisense strand to SEQ ID NO: 1351958
acaugccuggaacuuuguc

SEQ ID NO: 1351960 - RNA, 19 nt, Artificial Sequence
  Description of Artificial Sequence: Synthetic oligonucleotide
  Sense strand starting at position 3537 of SEQ ID NO: 1242494
ggacgauauccagaugcgu

SEQ ID NO: 1351961 - RNA, 19 nt, Artificial Sequence
  Description of Artificial Sequence: Synthetic oligonucleotide
  Antisense strand to SEQ ID NO: 1351960
acgcaucuggauaucgucc

SEQ ID NO: 1351962 - RNA, 19 nt, Artificial Sequence
  Description of Artificial Sequence: Synthetic oligonucleotide
  Sense strand starting at position 3617 of SEQ ID NO: 1242494
aggagucaguuccagggau

SEQ ID NO: 1351963 - RNA, 19 nt, Artificial Sequence
  Description of Artificial Sequence: Synthetic oligonucleotide
  Antisense strand to SEQ ID NO: 1351962
aucccuggaacugacuccu

SEQ ID NO: 1351964 - RNA, 19 nt, Artificial Sequence
  Description of Artificial Sequence: Synthetic oligonucleotide
  Sense strand starting at position 3667 of SEQ ID NO: 1242494
ugaccuuagccauguuaca

SEQ ID NO: 1351965 - RNA, 19 nt, Artificial Sequence
  Description of Artificial Sequence: Synthetic oligonucleotide
  Antisense strand to SEQ ID NO: 1351964
uguaacauggcuaagguca

SEQ ID NO: 1351966 - RNA, 19 nt, Artificial Sequence
  Description of Artificial Sequence: Synthetic oligonucleotide
  Sense strand starting at position 3733 of SEQ ID NO: 1242494
agagaaacuccuugcggga

SEQ ID NO: 1351967 - RNA, 19 nt, Artificial Sequence
  Description of Artificial Sequence: Synthetic oligonucleotide
  Antisense strand to SEQ ID NO: 1351966
ucccgcaaggaguuucucu

SEQ ID NO: 1351968 - RNA, 19 nt, Artificial Sequence
  Description of Artificial Sequence: Synthetic oligonucleotide
  Sense strand starting at position 3784 of SEQ ID NO: 1242494
gccauauguagccgaggga

SEQ ID NO: 1351969 - RNA, 19 nt, Artificial Sequence
  Description of Artificial Sequence: Synthetic oligonucleotide
  Antisense strand to SEQ ID NO: 1351968
ucccucggcuacauauggc

SEQ ID NO: 1351970 - RNA, 19 nt, Artificial Sequence
  Description of Artificial Sequence: Synthetic oligonucleotide
  Sense strand starting at position 3872 of SEQ ID NO: 1242494
gcuauauacuaggcaggua

SEQ ID NO: 1351971 - RNA, 19 nt, Artificial Sequence
  Description of Artificial Sequence: Synthetic oligonucleotide
  Antisense strand to SEQ ID NO: 1351970
uaccugccuaguauauagc

SEQ ID NO: 1351972 - RNA, 19 nt, Artificial Sequence
  Description of Artificial Sequence: Synthetic oligonucleotide
  Sense strand starting at position 3912 of SEQ ID NO: 1242494
augaguagcacaggucuau

SEQ ID NO: 1351973 - RNA, 19 nt, Artificial Sequence
  Description of Artificial Sequence: Synthetic oligonucleotide
  Antisense strand to SEQ ID NO: 1351972
auagaccugugcuacucau

SEQ ID NO: 1351974 - RNA, 19 nt, Artificial Sequence
  Description of Artificial Sequence: Synthetic oligonucleotide
  Sense strand starting at position 3927 of SEQ ID NO: 1242494
cuauguccuccagguguuu

SEQ ID NO: 1351975 - RNA, 19 nt, Artificial Sequence
  Description of Artificial Sequence: Synthetic oligonucleotide
  Antisense strand to SEQ ID NO: 1351974
aaacaccuggaggacauag

SEQ ID NO: 1351976 - RNA, 19 nt, Artificial Sequence
  Description of Artificial Sequence: Synthetic oligonucleotide
  Sense strand starting at position 3938 of SEQ ID NO: 1242494
agguguuuggcaugagaaa

SEQ ID NO: 1351977 - RNA, 19 nt, Artificial Sequence
  Description of Artificial Sequence: Synthetic oligonucleotide
  Antisense strand to SEQ ID NO: 1351976
uuucucaugccaaacaccu

SEQ ID NO: 1351978 - RNA, 19 nt, Artificial Sequence
  Description of Artificial Sequence: Synthetic oligonucleotide
  Sense strand starting at position 3939 of SEQ ID NO: 1242494
gguguuuggcaugagaaag

SEQ ID NO: 1351979 - RNA, 19 nt, Artificial Sequence
  Description of Artificial Sequence: Synthetic oligonucleotide
  Antisense strand to SEQ ID NO: 1351978
cuuucucaugccaaacacc

SEQ ID NO: 1351980 - RNA, 19 nt, Artificial Sequence
  Description of Artificial Sequence: Synthetic oligonucleotide
  Sense strand starting at position 3945 of SEQ ID NO: 1242494
uggcaugagaaagguguua

SEQ ID NO: 1351981 - RNA, 19 nt, Artificial Sequence
  Description of Artificial Sequence: Synthetic oligonucleotide
  Antisense strand to SEQ ID NO: 1351980
uaacaccuuucucaugcca

SEQ ID NO: 1351982 - RNA, 19 nt, Artificial Sequence
  Description of Artificial Sequence: Synthetic oligonucleotide
  Sense strand starting at position 3947 of SEQ ID NO: 1242494
gcaugagaaagguguuaag

SEQ ID NO: 1351983 - RNA, 19 nt, Artificial Sequence
  Description of Artificial Sequence: Synthetic oligonucleotide
  Antisense strand to SEQ ID NO: 1351982
cuuaacaccuuucucaugc

SEQ ID NO: 1351984 - RNA, 19 nt, Artificial Sequence
  Description of Artificial Sequence: Synthetic oligonucleotide
  Sense strand starting at position 3950 of SEQ ID NO: 1242494
ugagaaagguguuaagaau

SEQ ID NO: 1351985 - RNA, 19 nt, Artificial Sequence
  Description of Artificial Sequence: Synthetic oligonucleotide
  Antisense strand to SEQ ID NO: 1351984
auucuuaacaccuuucuca

SEQ ID NO: 1351986 - RNA, 19 nt, Artificial Sequence
  Description of Artificial Sequence: Synthetic oligonucleotide
  Sense strand starting at position 316 of SEQ ID NO: 1242495
guguacugucuuuacauag

SEQ ID NO: 1351987 - RNA, 19 nt, Artificial Sequence
  Description of Artificial Sequence: Synthetic oligonucleotide
  Antisense strand to SEQ ID NO: 1351986
cuauguaaagacaguacac

SEQ ID NO: 1351988 - RNA, 19 nt, Artificial Sequence
  Description of Artificial Sequence: Synthetic oligonucleotide
  Sense strand starting at position 341 of SEQ ID NO: 1242495
cuuuaaccgacagguagau

SEQ ID NO: 1351989 - RNA, 19 nt, Artificial Sequence
  Description of Artificial Sequence: Synthetic oligonucleotide
  Antisense strand to SEQ ID NO: 1351988
aucuaccugucgguuaaag

SEQ ID NO: 1351990 - RNA, 19 nt, Artificial Sequence
  Description of Artificial Sequence: Synthetic oligonucleotide
  Sense strand starting at position 534 of SEQ ID NO: 1242495
gaguaagggagucggaauu

SEQ ID NO: 1351991 - RNA, 19 nt, Artificial Sequence
  Description of Artificial Sequence: Synthetic oligonucleotide
  Antisense strand to SEQ ID NO: 1351990
aauuccgacucccuuacuc

SEQ ID NO: 1351992 - RNA, 19 nt, Artificial Sequence
  Description of Artificial Sequence: Synthetic oligonucleotide
  Sense strand starting at position 540 of SEQ ID NO: 1242495
gggagucggaauuaguuua

SEQ ID NO: 1351993 - RNA, 19 nt, Artificial Sequence
  Description of Artificial Sequence: Synthetic oligonucleotide
  Antisense strand to SEQ ID NO: 1351992
uaaacuaauuccgacuccc

SEQ ID NO: 1351994 - RNA, 19 nt, Artificial Sequence
  Description of Artificial Sequence: Synthetic oligonucleotide
  Sense strand starting at position 547 of SEQ ID NO: 1242495
ggaauuaguuuaccaccca

SEQ ID NO: 1351995 - RNA, 19 nt, Artificial Sequence
  Description of Artificial Sequence: Synthetic oligonucleotide
  Antisense strand to SEQ ID NO: 1351994
ugggugguaaacuaauucc

SEQ ID NO: 1351996 - RNA, 19 nt, Artificial Sequence
  Description of Artificial Sequence: Synthetic oligonucleotide
  Sense strand starting at position 598 of SEQ ID NO: 1242495
ugacucguccuauaaagca

SEQ ID NO: 1351997 - RNA, 19 nt, Artificial Sequence
  Description of Artificial Sequence: Synthetic oligonucleotide
  Antisense strand to SEQ ID NO: 1351996
ugcuuuauaggacgaguca

SEQ ID NO: 1351998 - RNA, 19 nt, Artificial Sequence
  Description of Artificial Sequence: Synthetic oligonucleotide
  Sense strand starting at position 650 of SEQ ID NO: 1242495
cuuauuccugcuuguauuu

SEQ ID NO: 1351999 - RNA, 19 nt, Artificial Sequence
  Description of Artificial Sequence: Synthetic oligonucleotide
  Antisense strand to SEQ ID NO: 1351998
aaauacaagcaggaauaag

SEQ ID NO: 1352000 - RNA, 19 nt, Artificial Sequence
  Description of Artificial Sequence: Synthetic oligonucleotide
  Sense strand starting at position 672 of SEQ ID NO: 1242495
cugaaacuuucucuaguug

SEQ ID NO: 1352001 - RNA, 19 nt, Artificial Sequence
  Description of Artificial Sequence: Synthetic oligonucleotide
  Antisense strand to SEQ ID NO: 1352000
caacuagagaaaguuucag

SEQ ID NO: 1352002 - RNA, 19 nt, Artificial Sequence
  Description of Artificial Sequence: Synthetic oligonucleotide
  Sense strand starting at position 673 of SEQ ID NO: 1242495
ugaaacuuucucuaguuga

SEQ ID NO: 1352003 - RNA, 19 nt, Artificial Sequence
  Description of Artificial Sequence: Synthetic oligonucleotide
  Antisense strand to SEQ ID NO: 1352002
ucaacuagagaaaguuuca

SEQ ID NO: 1352004 - RNA, 19 nt, Artificial Sequence
  Description of Artificial Sequence: Synthetic oligonucleotide
  Sense strand starting at position 689 of SEQ ID NO: 1242495
ugagcuuuccucugaagag

SEQ ID NO: 1352005 - RNA, 19 nt, Artificial Sequence
  Description of Artificial Sequence: Synthetic oligonucleotide
  Antisense strand to SEQ ID NO: 1352004
cucuucagaggaaagcuca

SEQ ID NO: 1352006 - RNA, 19 nt, Artificial Sequence
  Description of Artificial Sequence: Synthetic oligonucleotide
  Sense strand starting at position 950 of SEQ ID NO: 1242495
acauuugccuuagaagaaa

SEQ ID NO: 1352007 - RNA, 19 nt, Artificial Sequence
  Description of Artificial Sequence: Synthetic oligonucleotide
  Antisense strand to SEQ ID NO: 1352006
uuucuucuaaggcaaaugu

SEQ ID NO: 1352008 - RNA, 19 nt, Artificial Sequence
  Description of Artificial Sequence: Synthetic oligonucleotide
  Sense strand starting at position 1036 of SEQ ID NO: 1242495
uguugacauuucgccaacu

SEQ ID NO: 1352009 - RNA, 19 nt, Artificial Sequence
  Description of Artificial Sequence: Synthetic oligonucleotide
  Antisense strand to SEQ ID NO: 1352008
aguuggcgaaaugucaaca

SEQ ID NO: 1352010 - RNA, 19 nt, Artificial Sequence
  Description of Artificial Sequence: Synthetic oligonucleotide
  Sense strand starting at position 1037 of SEQ ID NO: 1242495
guugacauuucgccaacuu

SEQ ID NO: 1352011 - RNA, 19 nt, Artificial Sequence
  Description of Artificial Sequence: Synthetic oligonucleotide
  Antisense strand to SEQ ID NO: 1352010
aaguuggcgaaaugucaac

SEQ ID NO: 1352012 - RNA, 19 nt, Artificial Sequence
  Description of Artificial Sequence: Synthetic oligonucleotide
  Sense strand starting at position 1056 of SEQ ID NO: 1242495
uuuccaagacuugguaaca

SEQ ID NO: 1352013 - RNA, 19 nt, Artificial Sequence
  Description of Artificial Sequence: Synthetic oligonucleotide
  Antisense strand to SEQ ID NO: 1352012
uguuaccaagucuuggaaa

SEQ ID NO: 1352014 - RNA, 19 nt, Artificial Sequence
  Description of Artificial Sequence: Synthetic oligonucleotide
  Sense strand starting at position 1057 of SEQ ID NO: 1242495
uuccaagacuugguaacaa

SEQ ID NO: 1352015 - RNA, 19 nt, Artificial Sequence
  Description of Artificial Sequence: Synthetic oligonucleotide
  Antisense strand to SEQ ID NO: 1352014
uuguuaccaagucuuggaa

SEQ ID NO: 1352016 - RNA, 19 nt, Artificial Sequence
  Description of Artificial Sequence: Synthetic oligonucleotide
  Sense strand starting at position 1076 of SEQ ID NO: 1242495
agcauuaucuaucuguaug

SEQ ID NO: 1352017 - RNA, 19 nt, Artificial Sequence
  Description of Artificial Sequence: Synthetic oligonucleotide
  Antisense strand to SEQ ID NO: 1352016
cauacagauagauaaugcu

SEQ ID NO: 1352018 - RNA, 19 nt, Artificial Sequence
  Description of Artificial Sequence: Synthetic oligonucleotide
  Sense strand starting at position 1179 of SEQ ID NO: 1242495
gcugucaagcugucaaugu

SEQ ID NO: 1352019 - RNA, 19 nt, Artificial Sequence
  Description of Artificial Sequence: Synthetic oligonucleotide
  Antisense strand to SEQ ID NO: 1352018
acauugacagcuugacagc

SEQ ID NO: 1352020 - RNA, 19 nt, Artificial Sequence
  Description of Artificial Sequence: Synthetic oligonucleotide
  Sense strand starting at position 1515 of SEQ ID NO: 1242495
uacuuuggaucagcgagau

SEQ ID NO: 1352021 - RNA, 19 nt, Artificial Sequence
  Description of Artificial Sequence: Synthetic oligonucleotide
  Antisense strand to SEQ ID NO: 1352020
aucucgcugauccaaagua

SEQ ID NO: 1352022 - RNA, 19 nt, Artificial Sequence
  Description of Artificial Sequence: Synthetic oligonucleotide
  Sense strand starting at position 2403 of SEQ ID NO: 1242495
ucccaaccgcaagauuaua

SEQ ID NO: 1352023 - RNA, 19 nt, Artificial Sequence
  Description of Artificial Sequence: Synthetic oligonucleotide
  Antisense strand to SEQ ID NO: 1352022
uauaaucuugcgguuggga

SEQ ID NO: 1352024 - RNA, 19 nt, Artificial Sequence
  Description of Artificial Sequence: Synthetic oligonucleotide
  Sense strand starting at position 2551 of SEQ ID NO: 1242495
cgugacuucggacacauua

SEQ ID NO: 1352025 - RNA, 19 nt, Artificial Sequence
  Description of Artificial Sequence: Synthetic oligonucleotide
  Antisense strand to SEQ ID NO: 1352024
uaauguguccgaagucacg

SEQ ID NO: 1352026 - RNA, 19 nt, Artificial Sequence
  Description of Artificial Sequence: Synthetic oligonucleotide
  Sense strand starting at position 2694 of SEQ ID NO: 1242495
cucaaaugauagcuacgau

SEQ ID NO: 1352027 - RNA, 19 nt, Artificial Sequence
  Description of Artificial Sequence: Synthetic oligonucleotide
  Antisense strand to SEQ ID NO: 1352026
aucguagcuaucauuugag

SEQ ID NO: 1352028 - RNA, 19 nt, Artificial Sequence
  Description of Artificial Sequence: Synthetic oligonucleotide
  Sense strand starting at position 2866 of SEQ ID NO: 1242495
cugagaucuccuggaaucc

SEQ ID NO: 1352029 - RNA, 19 nt, Artificial Sequence
  Description of Artificial Sequence: Synthetic oligonucleotide
  Antisense strand to SEQ ID NO: 1352028
ggauuccaggagaucucag

SEQ ID NO: 1352030 - RNA, 19 nt, Artificial Sequence
  Description of Artificial Sequence: Synthetic oligonucleotide
  Sense strand starting at position 3014 of SEQ ID NO: 1242495
ugagcuguauucuuaaaug

SEQ ID NO: 1352031 - RNA, 19 nt, Artificial Sequence
  Description of Artificial Sequence: Synthetic oligonucleotide
  Antisense strand to SEQ ID NO: 1352030
cauuuaagaauacagcuca

SEQ ID NO: 1352032 - RNA, 19 nt, Artificial Sequence
  Description of Artificial Sequence: Synthetic oligonucleotide
  Sense strand starting at position 3057 of SEQ ID NO: 1242495
uccucagguuugucacaga

SEQ ID NO: 1352033 - RNA, 19 nt, Artificial Sequence
  Description of Artificial Sequence: Synthetic oligonucleotide
  Antisense strand to SEQ ID NO: 1352032
ucugugacaaaccugagga

SEQ ID NO: 1352034 - RNA, 19 nt, Artificial Sequence
  Description of Artificial Sequence: Synthetic oligonucleotide
  Sense strand starting at position 3062 of SEQ ID NO: 1242495
agguuugucacagaaagcu

SEQ ID NO: 1352035 - RNA, 19 nt, Artificial Sequence
  Description of Artificial Sequence: Synthetic oligonucleotide
  Antisense strand to SEQ ID NO: 1352034
agcuuucugugacaaaccu

SEQ ID NO: 1352036 - RNA, 19 nt, Artificial Sequence
  Description of Artificial Sequence: Synthetic oligonucleotide
  Sense strand starting at position 3092 of SEQ ID NO: 1242495
cucccuuaugugugggaau

SEQ ID NO: 1352037 - RNA, 19 nt, Artificial Sequence
  Description of Artificial Sequence: Synthetic oligonucleotide
  Antisense strand to SEQ ID NO: 1352036
auucccacacauaagggag

SEQ ID NO: 1352038 - RNA, 19 nt, Artificial Sequence
  Description of Artificial Sequence: Synthetic oligonucleotide
  Sense strand starting at position 3094 of SEQ ID NO: 1242495
cccuuaugugugggaauaa

SEQ ID NO: 1352039 - RNA, 19 nt, Artificial Sequence
  Description of Artificial Sequence: Synthetic oligonucleotide
  Antisense strand to SEQ ID NO: 1352038
uuauucccacacauaaggg

SEQ ID NO: 1352040 - RNA, 19 nt, Artificial Sequence
  Description of Artificial Sequence: Synthetic oligonucleotide
  Sense strand starting at position 3258 of SEQ ID NO: 1242495
ggagcuucucgcuuuguuu

SEQ ID NO: 1352041 - RNA, 19 nt, Artificial Sequence
  Description of Artificial Sequence: Synthetic oligonucleotide
  Antisense strand to SEQ ID NO: 1352040
aaacaaagcgagaagcucc

SEQ ID NO: 1352042 - RNA, 19 nt, Artificial Sequence
  Description of Artificial Sequence: Synthetic oligonucleotide
  Sense strand starting at position 3339 of SEQ ID NO: 1242495
ggccuccaacauugagaau

SEQ ID NO: 1352043 - RNA, 19 nt, Artificial Sequence
  Description of Artificial Sequence: Synthetic oligonucleotide
  Antisense strand to SEQ ID NO: 1352042
auucucaauguuggaggcc

SEQ ID NO: 1352044 - RNA, 19 nt, Artificial Sequence
  Description of Artificial Sequence: Synthetic oligonucleotide
  Sense strand starting at position 3438 of SEQ ID NO: 1242495
gugacuuaauguccuggga

SEQ ID NO: 1352045 - RNA, 19 nt, Artificial Sequence
  Description of Artificial Sequence: Synthetic oligonucleotide
  Antisense strand to SEQ ID NO: 1352044
ucccaggacauuaagucac

SEQ ID NO: 1352046 - RNA, 19 nt, Artificial Sequence
  Description of Artificial Sequence: Synthetic oligonucleotide
  Sense strand starting at position 3442 of SEQ ID NO: 1242495
cuuaauguccugggaaggu

SEQ ID NO: 1352047 - RNA, 19 nt, Artificial Sequence
  Description of Artificial Sequence: Synthetic oligonucleotide
  Antisense strand to SEQ ID NO: 1352046
accuucccaggacauuaag

SEQ ID NO: 1352048 - RNA, 19 nt, Artificial Sequence
  Description of Artificial Sequence: Synthetic oligonucleotide
  Sense strand starting at position 3485 of SEQ ID NO: 1242495
ugccgaugucauuauacaa

SEQ ID NO: 1352049 - RNA, 19 nt, Artificial Sequence
  Description of Artificial Sequence: Synthetic oligonucleotide
  Antisense strand to SEQ ID NO: 1352048
uuguauaaugacaucggca

SEQ ID NO: 1352050 - RNA, 19 nt, Artificial Sequence
  Description of Artificial Sequence: Synthetic oligonucleotide
  Sense strand starting at position 3492 of SEQ ID NO: 1242495
gucauuauacaagaguuua

SEQ ID NO: 1352051 - RNA, 19 nt, Artificial Sequence
  Description of Artificial Sequence: Synthetic oligonucleotide
  Antisense strand to SEQ ID NO: 1352050
uaaacucuuguauaaugac

SEQ ID NO: 1352052 - RNA, 19 nt, Artificial Sequence
  Description of Artificial Sequence: Synthetic oligonucleotide
  Sense strand starting at position 3538 of SEQ ID NO: 1242495
guuggaaucacuuggguau

SEQ ID NO: 1352053 - RNA, 19 nt, Artificial Sequence
  Description of Artificial Sequence: Synthetic oligonucleotide
  Antisense strand to SEQ ID NO: 1352052
auacccaagugauuccaac

SEQ ID NO: 1352054 - RNA, 19 nt, Artificial Sequence
  Description of Artificial Sequence: Synthetic oligonucleotide
  Sense strand starting at position 3539 of SEQ ID NO: 1242495
uuggaaucacuuggguauu

SEQ ID NO: 1352055 - RNA, 19 nt, Artificial Sequence
  Description of Artificial Sequence: Synthetic oligonucleotide
  Antisense strand to SEQ ID NO: 1352054
aauacccaagugauuccaa

SEQ ID NO: 1352056 - RNA, 19 nt, Artificial Sequence
  Description of Artificial Sequence: Synthetic oligonucleotide
  Sense strand starting at position 3642 of SEQ ID NO: 1242495
cucccuaagugauuauguu

SEQ ID NO: 1352057 - RNA, 19 nt, Artificial Sequence
  Description of Artificial Sequence: Synthetic oligonucleotide
  Antisense strand to SEQ ID NO: 1352056
aacauaaucacuuagggag

SEQ ID NO: 1352058 - RNA, 19 nt, Artificial Sequence
  Description of Artificial Sequence: Synthetic oligonucleotide
  Sense strand starting at position 3643 of SEQ ID NO: 1242495
ucccuaagugauuauguuu

SEQ ID NO: 1352059 - RNA, 19 nt, Artificial Sequence
  Description of Artificial Sequence: Synthetic oligonucleotide
  Antisense strand to SEQ ID NO: 1352058
aaacauaaucacuuaggga

SEQ ID NO: 1352060 - RNA, 19 nt, Artificial Sequence
  Description of Artificial Sequence: Synthetic oligonucleotide
  Sense strand starting at position 3646 of SEQ ID NO: 1242495
cuaagugauuauguuuaga

SEQ ID NO: 1352061 - RNA, 19 nt, Artificial Sequence
  Description of Artificial Sequence: Synthetic oligonucleotide
  Antisense strand to SEQ ID NO: 1352060
ucuaaacauaaucacuuag

SEQ ID NO: 1352062 - RNA, 19 nt, Artificial Sequence
  Description of Artificial Sequence: Synthetic oligonucleotide
  Sense strand starting at position 3648 of SEQ ID NO: 1242495
aagugauuauguuuagaga

SEQ ID NO: 1352063 - RNA, 19 nt, Artificial Sequence
  Description of Artificial Sequence: Synthetic oligonucleotide
  Antisense strand to SEQ ID NO: 1352062
ucucuaaacauaaucacuu

SEQ ID NO: 1352064 - RNA, 19 nt, Artificial Sequence
  Description of Artificial Sequence: Synthetic oligonucleotide
  Sense strand starting at position 3668 of SEQ ID NO: 1242495
gguugagaaucccuaaguu

SEQ ID NO: 1352065 - RNA, 19 nt, Artificial Sequence
  Description of Artificial Sequence: Synthetic oligonucleotide
  Antisense strand to SEQ ID NO: 1352064
aacuuagggauucucaacc

SEQ ID NO: 1352066 - RNA, 19 nt, Artificial Sequence
  Description of Artificial Sequence: Synthetic oligonucleotide
  Sense strand starting at position 3 of SEQ ID NO: 1242496
ggcccaggccuguaaucuu

SEQ ID NO: 1352067 - RNA, 19 nt, Artificial Sequence
  Description of Artificial Sequence: Synthetic oligonucleotide
  Antisense strand to SEQ ID NO: 1352066
aagauuacaggccugggcc

SEQ ID NO: 1352068 - RNA, 19 nt, Artificial Sequence
  Description of Artificial Sequence: Synthetic oligonucleotide
  Sense strand starting at position 346 of SEQ ID NO: 1242496
cugugcacauucucaaaga

SEQ ID NO: 1352069 - RNA, 19 nt, Artificial Sequence
  Description of Artificial Sequence: Synthetic oligonucleotide
  Antisense strand to SEQ ID NO: 1352068
ucuuugagaaugugcacag

SEQ ID NO: 1352070 - RNA, 19 nt, Artificial Sequence
  Description of Artificial Sequence: Synthetic oligonucleotide
  Sense strand starting at position 375 of SEQ ID NO: 1242496
ggcaaagagcuaugaaguc

SEQ ID NO: 1352071 - RNA, 19 nt, Artificial Sequence
  Description of Artificial Sequence: Synthetic oligonucleotide
  Antisense strand to SEQ ID NO: 1352070
gacuucauagcucuuugcc

SEQ ID NO: 1352072 - RNA, 19 nt, Artificial Sequence
  Description of Artificial Sequence: Synthetic oligonucleotide
  Sense strand starting at position 711 of SEQ ID NO: 1242496
uucugacuucuuggagcuu

SEQ ID NO: 1352073 - RNA, 19 nt, Artificial Sequence
  Description of Artificial Sequence: Synthetic oligonucleotide
  Antisense strand to SEQ ID NO: 1352072
aagcuccaagaagucagaa

SEQ ID NO: 1352074 - RNA, 19 nt, Artificial Sequence
  Description of Artificial Sequence: Synthetic oligonucleotide
  Sense strand starting at position 722 of SEQ ID NO: 1242496
uggagcuucccagaguuga

SEQ ID NO: 1352075 - RNA, 19 nt, Artificial Sequence
  Description of Artificial Sequence: Synthetic oligonucleotide
  Antisense strand to SEQ ID NO: 1352074
ucaacucugggaagcucca

SEQ ID NO: 1352076 - RNA, 19 nt, Artificial Sequence
  Description of Artificial Sequence: Synthetic oligonucleotide
  Sense strand starting at position 726 of SEQ ID NO: 1242496
gcuucccagaguugaaaga

SEQ ID NO: 1352077 - RNA, 19 nt, Artificial Sequence
  Description of Artificial Sequence: Synthetic oligonucleotide
  Antisense strand to SEQ ID NO: 1352076
ucuuucaacucugggaagc

SEQ ID NO: 1352078 - RNA, 19 nt, Artificial Sequence
  Description of Artificial Sequence: Synthetic oligonucleotide
  Sense strand starting at position 861 of SEQ ID NO: 1242496
cugacuuggccuuaaagua

SEQ ID NO: 1352079 - RNA, 19 nt, Artificial Sequence
  Description of Artificial Sequence: Synthetic oligonucleotide
  Antisense strand to SEQ ID NO: 1352078
uacuuuaaggccaagucag

SEQ ID NO: 1352080 - RNA, 19 nt, Artificial Sequence
  Description of Artificial Sequence: Synthetic oligonucleotide
  Sense strand starting at position 893 of SEQ ID NO: 1242496
agguuuaggcaauaguguu

SEQ ID NO: 1352081 - RNA, 19 nt, Artificial Sequence
  Description of Artificial Sequence: Synthetic oligonucleotide
  Antisense strand to SEQ ID NO: 1352080
aacacuauugccuaaaccu

SEQ ID NO: 1352082 - RNA, 19 nt, Artificial Sequence
  Description of Artificial Sequence: Synthetic oligonucleotide
  Sense strand starting at position 1022 of SEQ ID NO: 1242496
agaaacugaucuuaaugau

SEQ ID NO: 1352083 - RNA, 19 nt, Artificial Sequence
  Description of Artificial Sequence: Synthetic oligonucleotide
  Antisense strand to SEQ ID NO: 1352082
aucauuaagaucaguuucu

SEQ ID NO: 1352084 - RNA, 19 nt, Artificial Sequence
  Description of Artificial Sequence: Synthetic oligonucleotide
  Sense strand starting at position 1082 of SEQ ID NO: 1242496
ggaaauggaugauaacuca

SEQ ID NO: 1352085 - RNA, 19 nt, Artificial Sequence
  Description of Artificial Sequence: Synthetic oligonucleotide
  Antisense strand to SEQ ID NO: 1352084
ugaguuaucauccauuucc

SEQ ID NO: 1352086 - RNA, 19 nt, Artificial Sequence
  Description of Artificial Sequence: Synthetic oligonucleotide
  Sense strand starting at position 1456 of SEQ ID NO: 1242496
cuaccagcuucucuaguau

SEQ ID NO: 1352087 - RNA, 19 nt, Artificial Sequence
  Description of Artificial Sequence: Synthetic oligonucleotide
  Antisense strand to SEQ ID NO: 1352086
auacuagagaagcugguag

SEQ ID NO: 1352088 - RNA, 19 nt, Artificial Sequence
  Description of Artificial Sequence: Synthetic oligonucleotide
  Sense strand starting at position 2009 of SEQ ID NO: 1242496
gacuaaggaugcucuauga

SEQ ID NO: 1352089 - RNA, 19 nt, Artificial Sequence
  Description of Artificial Sequence: Synthetic oligonucleotide
  Antisense strand to SEQ ID NO: 1352088
ucauagagcauccuuaguc

SEQ ID NO: 1352090 - RNA, 19 nt, Artificial Sequence
  Description of Artificial Sequence: Synthetic oligonucleotide
  Sense strand starting at position 2125 of SEQ ID NO: 1242496
ccagcugaguggcuuuaau

SEQ ID NO: 1352091 - RNA, 19 nt, Artificial Sequence
  Description of Artificial Sequence: Synthetic oligonucleotide
  Antisense strand to SEQ ID NO: 1352090
auuaaagccacucagcugg

SEQ ID NO: 1352092 - RNA, 19 nt, Artificial Sequence
  Description of Artificial Sequence: Synthetic oligonucleotide
  Sense strand starting at position 2135 of SEQ ID NO: 1242496
ggcuuuaauagagagcuag

SEQ ID NO: 1352093 - RNA, 19 nt, Artificial Sequence
  Description of Artificial Sequence: Synthetic oligonucleotide
  Antisense strand to SEQ ID NO: 1352092
cuagcucucuauuaaagcc

SEQ ID NO: 1352094 - RNA, 19 nt, Artificial Sequence
  Description of Artificial Sequence: Synthetic oligonucleotide
  Sense strand starting at position 2312 of SEQ ID NO: 1242496
gugcuccugagugacuuau

SEQ ID NO: 1352095 - RNA, 19 nt, Artificial Sequence
  Description of Artificial Sequence: Synthetic oligonucleotide
  Antisense strand to SEQ ID NO: 1352094
auaagucacucaggagcac

SEQ ID NO: 1352096 - RNA, 19 nt, Artificial Sequence
  Description of Artificial Sequence: Synthetic oligonucleotide
  Sense strand starting at position 2314 of SEQ ID NO: 1242496
gcuccugagugacuuauaa

SEQ ID NO: 1352097 - RNA, 19 nt, Artificial Sequence
  Description of Artificial Sequence: Synthetic oligonucleotide
  Antisense strand to SEQ ID NO: 1352096
uuauaagucacucaggagc

SEQ ID NO: 1352098 - RNA, 19 nt, Artificial Sequence
  Description of Artificial Sequence: Synthetic oligonucleotide
  Sense strand starting at position 2412 of SEQ ID NO: 1242496
ccuagcuguccagacuuaa

SEQ ID NO: 1352099 - RNA, 19 nt, Artificial Sequence
  Description of Artificial Sequence: Synthetic oligonucleotide
  Antisense strand to SEQ ID NO: 1352098
uuaagucuggacagcuagg

SEQ ID NO: 1352100 - RNA, 19 nt, Artificial Sequence
  Description of Artificial Sequence: Synthetic oligonucleotide
  Sense strand starting at position 2478 of SEQ ID NO: 1242496
gcuucugcagcuuuguaua

SEQ ID NO: 1352101 - RNA, 19 nt, Artificial Sequence
  Description of Artificial Sequence: Synthetic oligonucleotide
  Antisense strand to SEQ ID NO: 1352100
uauacaaagcugcagaagc

SEQ ID NO: 1352102 - RNA, 19 nt, Artificial Sequence
  Description of Artificial Sequence: Synthetic oligonucleotide
  Sense strand starting at position 2608 of SEQ ID NO: 1242496
cugucucuuguagaagaua

SEQ ID NO: 1352103 - RNA, 19 nt, Artificial Sequence
  Description of Artificial Sequence: Synthetic oligonucleotide
  Antisense strand to SEQ ID NO: 1352102
uaucuucuacaagagacag

SEQ ID NO: 1352104 - RNA, 19 nt, Artificial Sequence
  Description of Artificial Sequence: Synthetic oligonucleotide
  Sense strand starting at position 2634 of SEQ ID NO: 1242496
ggcucuauaccagagguua

SEQ ID NO: 1352105 - RNA, 19 nt, Artificial Sequence
  Description of Artificial Sequence: Synthetic oligonucleotide
  Antisense strand to SEQ ID NO: 1352104
uaaccucugguauagagcc

SEQ ID NO: 1352106 - RNA, 19 nt, Artificial Sequence
  Description of Artificial Sequence: Synthetic oligonucleotide
  Sense strand starting at position 3172 of SEQ ID NO: 1242496
cuaggcugaucucaaauuu

SEQ ID NO: 1352107 - RNA, 19 nt, Artificial Sequence
  Description of Artificial Sequence: Synthetic oligonucleotide
  Antisense strand to SEQ ID NO: 1352106
aaauuugagaucagccuag

SEQ ID NO: 1352108 - RNA, 19 nt, Artificial Sequence
  Description of Artificial Sequence: Synthetic oligonucleotide
  Sense strand starting at position 3289 of SEQ ID NO: 1242496
acccuagaucuuuguacac

SEQ ID NO: 1352109 - RNA, 19 nt, Artificial Sequence
  Description of Artificial Sequence: Synthetic oligonucleotide
  Antisense strand to SEQ ID NO: 1352108
guguacaaagaucuagggu

SEQ ID NO: 1352110 - RNA, 19 nt, Artificial Sequence
  Description of Artificial Sequence: Synthetic oligonucleotide
  Sense strand starting at position 3308 of SEQ ID NO: 1242496
guggcuuuaacagagugua

SEQ ID NO: 1352111 - RNA, 19 nt, Artificial Sequence
  Description of Artificial Sequence: Synthetic oligonucleotide
  Antisense strand to SEQ ID NO: 1352110
uacacucuguuaaagccac

SEQ ID NO: 1352112 - RNA, 19 nt, Artificial Sequence
  Description of Artificial Sequence: Synthetic oligonucleotide
  Sense strand starting at position 3311 of SEQ ID NO: 1242496
gcuuuaacagaguguauuc

SEQ ID NO: 1352113 - RNA, 19 nt, Artificial Sequence
  Description of Artificial Sequence: Synthetic oligonucleotide
  Antisense strand to SEQ ID NO: 1352112
gaauacacucuguuaaagc

SEQ ID NO: 1352114 - RNA, 19 nt, Artificial Sequence
  Description of Artificial Sequence: Synthetic oligonucleotide
  Sense strand starting at position 3313 of SEQ ID NO: 1242496
uuuaacagaguguauucua

SEQ ID NO: 1352115 - RNA, 19 nt, Artificial Sequence
  Description of Artificial Sequence: Synthetic oligonucleotide
  Antisense strand to SEQ ID NO: 1352114
uagaauacacucuguuaaa

SEQ ID NO: 1352116 - RNA, 19 nt, Artificial Sequence
  Description of Artificial Sequence: Synthetic oligonucleotide
  Sense strand starting at position 3321 of SEQ ID NO: 1242496
aguguauucuaauuguuug

SEQ ID NO: 1352117 - RNA, 19 nt, Artificial Sequence
  Description of Artificial Sequence: Synthetic oligonucleotide
  Antisense strand to SEQ ID NO: 1352116
caaacaauuagaauacacu

SEQ ID NO: 1352118 - RNA, 19 nt, Artificial Sequence
  Description of Artificial Sequence: Synthetic oligonucleotide
  Sense strand starting at position 3322 of SEQ ID NO: 1242496
guguauucuaauuguuuga

SEQ ID NO: 1352119 - RNA, 19 nt, Artificial Sequence
  Description of Artificial Sequence: Synthetic oligonucleotide
  Antisense strand to SEQ ID NO: 1352118
ucaaacaauuagaauacac

SEQ ID NO: 1352120 - RNA, 19 nt, Artificial Sequence
  Description of Artificial Sequence: Synthetic oligonucleotide
  Sense strand starting at position 3399 of SEQ ID NO: 1242496
cuugcucaccuuggcaaua

SEQ ID NO: 1352121 - RNA, 19 nt, Artificial Sequence
  Description of Artificial Sequence: Synthetic oligonucleotide
  Antisense strand to SEQ ID NO: 1352120
uauugccaaggugagcaag

SEQ ID NO: 1352122 - RNA, 19 nt, Artificial Sequence
  Description of Artificial Sequence: Synthetic oligonucleotide
  Sense strand starting at position 3418 of SEQ ID NO: 1242496
cauggcauuuguuagauca

SEQ ID NO: 1352123 - RNA, 19 nt, Artificial Sequence
  Description of Artificial Sequence: Synthetic oligonucleotide
  Antisense strand to SEQ ID NO: 1352122
ugaucuaacaaaugccaug

SEQ ID NO: 1352124 - RNA, 19 nt, Artificial Sequence
  Description of Artificial Sequence: Synthetic oligonucleotide
  Sense strand starting at position 3420 of SEQ ID NO: 1242496
uggcauuuguuagaucaaa

SEQ ID NO: 1352125 - RNA, 19 nt, Artificial Sequence
  Description of Artificial Sequence: Synthetic oligonucleotide
  Antisense strand to SEQ ID NO: 1352124
uuugaucuaacaaaugcca

SEQ ID NO: 1352126 - RNA, 19 nt, Artificial Sequence
  Description of Artificial Sequence: Synthetic oligonucleotide
  Sense strand starting at position 3458 of SEQ ID NO: 1242496
cuaugaaaugcuggugauc

SEQ ID NO: 1352127 - RNA, 19 nt, Artificial Sequence
  Description of Artificial Sequence: Synthetic oligonucleotide
  Antisense strand to SEQ ID NO: 1352126
gaucaccagcauuucauag

SEQ ID NO: 1352128 - RNA, 19 nt, Artificial Sequence
  Description of Artificial Sequence: Synthetic oligonucleotide
  Sense strand starting at position 3461 of SEQ ID NO: 1242496
ugaaaugcuggugaucacu

SEQ ID NO: 1352129 - RNA, 19 nt, Artificial Sequence
  Description of Artificial Sequence: Synthetic oligonucleotide
  Antisense strand to SEQ ID NO: 1352128
agugaucaccagcauuuca

SEQ ID NO: 1352130 - RNA, 19 nt, Artificial Sequence
  Description of Artificial Sequence: Synthetic oligonucleotide
  Sense strand starting at position 3463 of SEQ ID NO: 1242496
aaaugcuggugaucacuua

SEQ ID NO: 1352131 - RNA, 19 nt, Artificial Sequence
  Description of Artificial Sequence: Synthetic oligonucleotide
  Antisense strand to SEQ ID NO: 1352130
uaagugaucaccagcauuu

SEQ ID NO: 1352132 - RNA, 19 nt, Artificial Sequence
  Description of Artificial Sequence: Synthetic oligonucleotide
  Sense strand starting at position 3535 of SEQ ID NO: 1242496
uuugacaaugcuuaguaua

SEQ ID NO: 1352133 - RNA, 19 nt, Artificial Sequence
  Description of Artificial Sequence: Synthetic oligonucleotide
  Antisense strand to SEQ ID NO: 1352132
uauacuaagcauugucaaa

SEQ ID NO: 1352134 - RNA, 19 nt, Artificial Sequence
  Description of Artificial Sequence: Synthetic oligonucleotide
  Sense strand starting at position 3543 of SEQ ID NO: 1242496
ugcuuaguauagcugauuu

SEQ ID NO: 1352135 - RNA, 19 nt, Artificial Sequence
  Description of Artificial Sequence: Synthetic oligonucleotide
  Antisense strand to SEQ ID NO: 1352134
aaaucagcuauacuaagca

SEQ ID NO: 1352136 - RNA, 19 nt, Artificial Sequence
  Description of Artificial Sequence: Synthetic oligonucleotide
  Sense strand starting at position 3656 of SEQ ID NO: 1242496
acugaauagccuuagcuaa

SEQ ID NO: 1352137 - RNA, 19 nt, Artificial Sequence
  Description of Artificial Sequence: Synthetic oligonucleotide
  Antisense strand to SEQ ID NO: 1352136
uuagcuaaggcuauucagu

SEQ ID NO: 1352138 - RNA, 19 nt, Artificial Sequence
  Description of Artificial Sequence: Synthetic oligonucleotide
  Sense strand starting at position 3658 of SEQ ID NO: 1242496
ugaauagccuuagcuaaga

SEQ ID NO: 1352139 - RNA, 19 nt, Artificial Sequence
  Description of Artificial Sequence: Synthetic oligonucleotide
  Antisense strand to SEQ ID NO: 1352138
ucuuagcuaaggcuauuca

SEQ ID NO: 1352140 - RNA, 19 nt, Artificial Sequence
  Description of Artificial Sequence: Synthetic oligonucleotide
  Sense strand starting at position 3663 of SEQ ID NO: 1242496
agccuuagcuaagacauuu

SEQ ID NO: 1352141 - RNA, 19 nt, Artificial Sequence
  Description of Artificial Sequence: Synthetic oligonucleotide
  Antisense strand to SEQ ID NO: 1352140
aaaugucuuagcuaaggcu

SEQ ID NO: 1352142 - RNA, 19 nt, Artificial Sequence
  Description of Artificial Sequence: Synthetic oligonucleotide
  Sense strand starting at position 3676 of SEQ ID NO: 1242496
acauuuaacuccuaugggu

SEQ ID NO: 1352143 - RNA, 19 nt, Artificial Sequence
  Description of Artificial Sequence: Synthetic oligonucleotide
  Antisense strand to SEQ ID NO: 1352142
acccauaggaguuaaaugu

SEQ ID NO: 1352144 - RNA, 19 nt, Artificial Sequence
  Description of Artificial Sequence: Synthetic oligonucleotide
  Sense strand starting at position 3742 of SEQ ID NO: 1242496
ucucuagaagccugugauu

SEQ ID NO: 1352145 - RNA, 19 nt, Artificial Sequence
  Description of Artificial Sequence: Synthetic oligonucleotide
  Antisense strand to SEQ ID NO: 1352144
aaucacaggcuucuagaga

SEQ ID NO: 1352146 - RNA, 19 nt, Artificial Sequence
  Description of Artificial Sequence: Synthetic oligonucleotide
  Sense strand starting at position 253 of SEQ ID NO: 1242497
ccauaagauuucgcuguuu

SEQ ID NO: 1352147 - RNA, 19 nt, Artificial Sequence
  Description of Artificial Sequence: Synthetic oligonucleotide
  Antisense strand to SEQ ID NO: 1352146
aaacagcgaaaucuuaugg

SEQ ID NO: 1352148 - RNA, 19 nt, Artificial Sequence
  Description of Artificial Sequence: Synthetic oligonucleotide
  Sense strand starting at position 425 of SEQ ID NO: 1242497
ggaauaagggcuugagcca

SEQ ID NO: 1352149 - RNA, 19 nt, Artificial Sequence
  Description of Artificial Sequence: Synthetic oligonucleotide
  Antisense strand to SEQ ID NO: 1352148
uggcucaagcccuuauucc

SEQ ID NO: 1352150 - RNA, 19 nt, Artificial Sequence
  Description of Artificial Sequence: Synthetic oligonucleotide
  Sense strand starting at position 426 of SEQ ID NO: 1242497
gaauaagggcuugagccau

SEQ ID NO: 1352151 - RNA, 19 nt, Artificial Sequence
  Description of Artificial Sequence: Synthetic oligonucleotide
  Antisense strand to SEQ ID NO: 1352150
auggcucaagcccuuauuc

SEQ ID NO: 1352152 - RNA, 19 nt, Artificial Sequence
  Description of Artificial Sequence: Synthetic oligonucleotide
  Sense strand starting at position 680 of SEQ ID NO: 1242497
cugucuauuccuuaguucu

SEQ ID NO: 1352153 - RNA, 19 nt, Artificial Sequence
  Description of Artificial Sequence: Synthetic oligonucleotide
  Antisense strand to SEQ ID NO: 1352152
agaacuaaggaauagacag

SEQ ID NO: 1352154 - RNA, 19 nt, Artificial Sequence
  Description of Artificial Sequence: Synthetic oligonucleotide
  Sense strand starting at position 692 of SEQ ID NO: 1242497
uaguucucgggugaaaguu

SEQ ID NO: 1352155 - RNA, 19 nt, Artificial Sequence
  Description of Artificial Sequence: Synthetic oligonucleotide
  Antisense strand to SEQ ID NO: 1352154
aacuuucacccgagaacua

SEQ ID NO: 1352156 - RNA, 19 nt, Artificial Sequence
  Description of Artificial Sequence: Synthetic oligonucleotide
  Sense strand starting at position 698 of SEQ ID NO: 1242497
ucgggugaaaguuauccuu

SEQ ID NO: 1352157 - RNA, 19 nt, Artificial Sequence
  Description of Artificial Sequence: Synthetic oligonucleotide
  Antisense strand to SEQ ID NO: 1352156
aaggauaacuuucacccga

SEQ ID NO: 1352158 - RNA, 19 nt, Artificial Sequence
  Description of Artificial Sequence: Synthetic oligonucleotide
  Sense strand starting at position 700 of SEQ ID NO: 1242497
gggugaaaguuauccuuuc

SEQ ID NO: 1352159 - RNA, 19 nt, Artificial Sequence
  Description of Artificial Sequence: Synthetic oligonucleotide
  Antisense strand to SEQ ID NO: 1352158
gaaaggauaacuuucaccc

SEQ ID NO: 1352160 - RNA, 19 nt, Artificial Sequence
  Description of Artificial Sequence: Synthetic oligonucleotide
  Sense strand starting at position 899 of SEQ ID NO: 1242497
aguagauauuaagucaugu

SEQ ID NO: 1352161 - RNA, 19 nt, Artificial Sequence
  Description of Artificial Sequence: Synthetic oligonucleotide
  Antisense strand to SEQ ID NO: 1352160
acaugacuuaauaucuacu

SEQ ID NO: 1352162 - RNA, 19 nt, Artificial Sequence
  Description of Artificial Sequence: Synthetic oligonucleotide
  Sense strand starting at position 939 of SEQ ID NO: 1242497
agucauaaagcaugauaag

SEQ ID NO: 1352163 - RNA, 19 nt, Artificial Sequence
  Description of Artificial Sequence: Synthetic oligonucleotide
  Antisense strand to SEQ ID NO: 1352162
cuuaucaugcuuuaugacu

SEQ ID NO: 1352164 - RNA, 19 nt, Artificial Sequence
  Description of Artificial Sequence: Synthetic oligonucleotide
  Sense strand starting at position 1074 of SEQ ID NO: 1242497
gucagaagcuauuuguacu

SEQ ID NO: 1352165 - RNA, 19 nt, Artificial Sequence
  Description of Artificial Sequence: Synthetic oligonucleotide
  Antisense strand to SEQ ID NO: 1352164
aguacaaauagcuucugac

SEQ ID NO: 1352166 - RNA, 19 nt, Artificial Sequence
  Description of Artificial Sequence: Synthetic oligonucleotide
  Sense strand starting at position 1164 of SEQ ID NO: 1242497
cucagauugggccgacuaa

SEQ ID NO: 1352167 - RNA, 19 nt, Artificial Sequence
  Description of Artificial Sequence: Synthetic oligonucleotide
  Antisense strand to SEQ ID NO: 1352166
uuagucggcccaaucugag

SEQ ID NO: 1352168 - RNA, 19 nt, Artificial Sequence
  Description of Artificial Sequence: Synthetic oligonucleotide
  Sense strand starting at position 1165 of SEQ ID NO: 1242497
ucagauugggccgacuaaa

SEQ ID NO: 1352169 - RNA, 19 nt, Artificial Sequence
  Description of Artificial Sequence: Synthetic oligonucleotide
  Antisense strand to SEQ ID NO: 1352168
uuuagucggcccaaucuga

SEQ ID NO: 1352170 - RNA, 19 nt, Artificial Sequence
  Description of Artificial Sequence: Synthetic oligonucleotide
  Sense strand starting at position 1578 of SEQ ID NO: 1242497
cugggacagccuugcauuu

SEQ ID NO: 1352171 - RNA, 19 nt, Artificial Sequence
  Description of Artificial Sequence: Synthetic oligonucleotide
  Antisense strand to SEQ ID NO: 1352170
aaaugcaaggcugucccag

SEQ ID NO: 1352172 - RNA, 19 nt, Artificial Sequence
  Description of Artificial Sequence: Synthetic oligonucleotide
  Sense strand starting at position 1825 of SEQ ID NO: 1242497
cccgaacuguucucacuga

SEQ ID NO: 1352173 - RNA, 19 nt, Artificial Sequence
  Description of Artificial Sequence: Synthetic oligonucleotide
  Antisense strand to SEQ ID NO: 1352172
ucagugagaacaguucggg

SEQ ID NO: 1352174 - RNA, 19 nt, Artificial Sequence
  Description of Artificial Sequence: Synthetic oligonucleotide
  Sense strand starting at position 2153 of SEQ ID NO: 1242497
cugucagugcaugauucuu

SEQ ID NO: 1352175 - RNA, 19 nt, Artificial Sequence
  Description of Artificial Sequence: Synthetic oligonucleotide
  Antisense strand to SEQ ID NO: 1352174
aagaaucaugcacugacag

SEQ ID NO: 1352176 - RNA, 19 nt, Artificial Sequence
  Description of Artificial Sequence: Synthetic oligonucleotide
  Sense strand starting at position 2182 of SEQ ID NO: 1242497
aaacguaggacucgaggaa

SEQ ID NO: 1352177 - RNA, 19 nt, Artificial Sequence
  Description of Artificial Sequence: Synthetic oligonucleotide
  Antisense strand to SEQ ID NO: 1352176
uuccucgaguccuacguuu

SEQ ID NO: 1352178 - RNA, 19 nt, Artificial Sequence
  Description of Artificial Sequence: Synthetic oligonucleotide
  Sense strand starting at position 2195 of SEQ ID NO: 1242497
gaggaaggccauuggcaau

SEQ ID NO: 1352179 - RNA, 19 nt, Artificial Sequence
  Description of Artificial Sequence: Synthetic oligonucleotide
  Antisense strand to SEQ ID NO: 1352178
auugccaauggccuuccuc

SEQ ID NO: 1352180 - RNA, 19 nt, Artificial Sequence
  Description of Artificial Sequence: Synthetic oligonucleotide
  Sense strand starting at position 2334 of SEQ ID NO: 1242497
gcacguggaagguauugua

SEQ ID NO: 1352181 - RNA, 19 nt, Artificial Sequence
  Description of Artificial Sequence: Synthetic oligonucleotide
  Antisense strand to SEQ ID NO: 1352180
uacaauaccuuccacgugc

SEQ ID NO: 1352182 - RNA, 19 nt, Artificial Sequence
  Description of Artificial Sequence: Synthetic oligonucleotide
  Sense strand starting at position 2344 of SEQ ID NO: 1242497
gguauuguaagcgcuguaa

SEQ ID NO: 1352183 - RNA, 19 nt, Artificial Sequence
  Description of Artificial Sequence: Synthetic oligonucleotide
  Antisense strand to SEQ ID NO: 1352182
uuacagcgcuuacaauacc

SEQ ID NO: 1352184 - RNA, 19 nt, Artificial Sequence
  Description of Artificial Sequence: Synthetic oligonucleotide
  Sense strand starting at position 2347 of SEQ ID NO: 1242497
auuguaagcgcuguaaguu

SEQ ID NO: 1352185 - RNA, 19 nt, Artificial Sequence
  Description of Artificial Sequence: Synthetic oligonucleotide
  Antisense strand to SEQ ID NO: 1352184
aacuuacagcgcuuacaau

SEQ ID NO: 1352186 - RNA, 19 nt, Artificial Sequence
  Description of Artificial Sequence: Synthetic oligonucleotide
  Sense strand starting at position 2606 of SEQ ID NO: 1242497
acguguuaaccgggaugga

SEQ ID NO: 1352187 - RNA, 19 nt, Artificial Sequence
  Description of Artificial Sequence: Synthetic oligonucleotide
  Antisense strand to SEQ ID NO: 1352186
uccaucccgguuaacacgu

SEQ ID NO: 1352188 - RNA, 19 nt, Artificial Sequence
  Description of Artificial Sequence: Synthetic oligonucleotide
  Sense strand starting at position 2644 of SEQ ID NO: 1242497
ccuguagucgacuacuaga

SEQ ID NO: 1352189 - RNA, 19 nt, Artificial Sequence
  Description of Artificial Sequence: Synthetic oligonucleotide
  Antisense strand to SEQ ID NO: 1352188
ucuaguagucgacuacagg

SEQ ID NO: 1352190 - RNA, 19 nt, Artificial Sequence
  Description of Artificial Sequence: Synthetic oligonucleotide
  Sense strand starting at position 2729 of SEQ ID NO: 1242497
cagcaagcucgaggguaaa

SEQ ID NO: 1352191 - RNA, 19 nt, Artificial Sequence
  Description of Artificial Sequence: Synthetic oligonucleotide
  Antisense strand to SEQ ID NO: 1352190
uuuacccucgagcuugcug

SEQ ID NO: 1352192 - RNA, 19 nt, Artificial Sequence
  Description of Artificial Sequence: Synthetic oligonucleotide
  Sense strand starting at position 2768 of SEQ ID NO: 1242497
gaauuuggcuuugaggacu

SEQ ID NO: 1352193 - RNA, 19 nt, Artificial Sequence
  Description of Artificial Sequence: Synthetic oligonucleotide
  Antisense strand to SEQ ID NO: 1352192
aguccucaaagccaaauuc

SEQ ID NO: 1352194 - RNA, 19 nt, Artificial Sequence
  Description of Artificial Sequence: Synthetic oligonucleotide
  Sense strand starting at position 2928 of SEQ ID NO: 1242497
guugcauuugcagguuaaa

SEQ ID NO: 1352195 - RNA, 19 nt, Artificial Sequence
  Description of Artificial Sequence: Synthetic oligonucleotide
  Antisense strand to SEQ ID NO: 1352194
uuuaaccugcaaaugcaac

SEQ ID NO: 1352196 - RNA, 19 nt, Artificial Sequence
  Description of Artificial Sequence: Synthetic oligonucleotide
  Sense strand starting at position 2972 of SEQ ID NO: 1242497
uagacuaaguggucacauu

SEQ ID NO: 1352197 - RNA, 19 nt, Artificial Sequence
  Description of Artificial Sequence: Synthetic oligonucleotide
  Antisense strand to SEQ ID NO: 1352196
aaugugaccacuuagucua

SEQ ID NO: 1352198 - RNA, 19 nt, Artificial Sequence
  Description of Artificial Sequence: Synthetic oligonucleotide
  Sense strand starting at position 3481 of SEQ ID NO: 1242497
accucauaaguguauugau

SEQ ID NO: 1352199 - RNA, 19 nt, Artificial Sequence
  Description of Artificial Sequence: Synthetic oligonucleotide
  Antisense strand to SEQ ID NO: 1352198
aucaauacacuuaugaggu

SEQ ID NO: 1352200 - RNA, 19 nt, Artificial Sequence
  Description of Artificial Sequence: Synthetic oligonucleotide
  Sense strand starting at position 3505 of SEQ ID NO: 1242497
uuccauuuagauugucgua

SEQ ID NO: 1352201 - RNA, 19 nt, Artificial Sequence
  Description of Artificial Sequence: Synthetic oligonucleotide
  Antisense strand to SEQ ID NO: 1352200
uacgacaaucuaaauggaa

SEQ ID NO: 1352202 - RNA, 19 nt, Artificial Sequence
  Description of Artificial Sequence: Synthetic oligonucleotide
  Sense strand starting at position 3512 of SEQ ID NO: 1242497
uagauugucguagauauca

SEQ ID NO: 1352203 - RNA, 19 nt, Artificial Sequence
  Description of Artificial Sequence: Synthetic oligonucleotide
  Antisense strand to SEQ ID NO: 1352202
ugauaucuacgacaaucua

SEQ ID NO: 1352204 - RNA, 19 nt, Artificial Sequence
  Description of Artificial Sequence: Synthetic oligonucleotide
  Sense strand starting at position 3527 of SEQ ID NO: 1242497
aucauuaauuuggaaagca

SEQ ID NO: 1352205 - RNA, 19 nt, Artificial Sequence
  Description of Artificial Sequence: Synthetic oligonucleotide
  Antisense strand to SEQ ID NO: 1352204
ugcuuuccaaauuaaugau

SEQ ID NO: 1352206 - RNA, 19 nt, Artificial Sequence
  Description of Artificial Sequence: Synthetic oligonucleotide
  Sense strand starting at position 3586 of SEQ ID NO: 1242497
auacucugugaauguuuau

SEQ ID NO: 1352207 - RNA, 19 nt, Artificial Sequence
  Description of Artificial Sequence: Synthetic oligonucleotide
  Antisense strand to SEQ ID NO: 1352206
auaaacauucacagaguau

SEQ ID NO: 1352208 - RNA, 19 nt, Artificial Sequence
  Description of Artificial Sequence: Synthetic oligonucleotide
  Sense strand starting at position 3589 of SEQ ID NO: 1242497
cucugugaauguuuauuaa

SEQ ID NO: 1352209 - RNA, 19 nt, Artificial Sequence
  Description of Artificial Sequence: Synthetic oligonucleotide
  Antisense strand to SEQ ID NO: 1352208
uuaauaaacauucacagag

SEQ ID NO: 1352210 - RNA, 19 nt, Artificial Sequence
  Description of Artificial Sequence: Synthetic oligonucleotide
  Sense strand starting at position 3601 of SEQ ID NO: 1242497
uuauuaauuguggguacaa

SEQ ID NO: 1352211 - RNA, 19 nt, Artificial Sequence
  Description of Artificial Sequence: Synthetic oligonucleotide
  Antisense strand to SEQ ID NO: 1352210
uuguacccacaauuaauaa

SEQ ID NO: 1352212 - RNA, 19 nt, Artificial Sequence
  Description of Artificial Sequence: Synthetic oligonucleotide
  Sense strand starting at position 3602 of SEQ ID NO: 1242497
uauuaauuguggguacaag

SEQ ID NO: 1352213 - RNA, 19 nt, Artificial Sequence
  Description of Artificial Sequence: Synthetic oligonucleotide
  Antisense strand to SEQ ID NO: 1352212
cuuguacccacaauuaaua

SEQ ID NO: 1352214 - RNA, 19 nt, Artificial Sequence
  Description of Artificial Sequence: Synthetic oligonucleotide
  Sense strand starting at position 3603 of SEQ ID NO: 1242497
auuaauuguggguacaagu

SEQ ID NO: 1352215 - RNA, 19 nt, Artificial Sequence
  Description of Artificial Sequence: Synthetic oligonucleotide
  Antisense strand to SEQ ID NO: 1352214
acuuguacccacaauuaau

SEQ ID NO: 1352216 - RNA, 19 nt, Artificial Sequence
  Description of Artificial Sequence: Synthetic oligonucleotide
  Sense strand starting at position 3773 of SEQ ID NO: 1242497
ggagauuuauuagggaauu

SEQ ID NO: 1352217 - RNA, 19 nt, Artificial Sequence
  Description of Artificial Sequence: Synthetic oligonucleotide
  Antisense strand to SEQ ID NO: 1352216
aauucccuaauaaaucucc

SEQ ID NO: 1352218 - RNA, 19 nt, Artificial Sequence
  Description of Artificial Sequence: Synthetic oligonucleotide
  Sense strand starting at position 3774 of SEQ ID NO: 1242497
gagauuuauuagggaauug

SEQ ID NO: 1352219 - RNA, 19 nt, Artificial Sequence
  Description of Artificial Sequence: Synthetic oligonucleotide
  Antisense strand to SEQ ID NO: 1352218
caauucccuaauaaaucuc

SEQ ID NO: 1352220 - RNA, 19 nt, Artificial Sequence
  Description of Artificial Sequence: Synthetic oligonucleotide
  Sense strand starting at position 3932 of SEQ ID NO: 1242497
ggagcagaagucugagaag

SEQ ID NO: 1352221 - RNA, 19 nt, Artificial Sequence
  Description of Artificial Sequence: Synthetic oligonucleotide
  Antisense strand to SEQ ID NO: 1352220
cuucucagacuucugcucc

SEQ ID NO: 1352222 - RNA, 19 nt, Artificial Sequence
  Description of Artificial Sequence: Synthetic oligonucleotide
  Sense strand starting at position 3941 of SEQ ID NO: 1242497
gucugagaagagugucuca

SEQ ID NO: 1352223 - RNA, 19 nt, Artificial Sequence
  Description of Artificial Sequence: Synthetic oligonucleotide
  Antisense strand to SEQ ID NO: 1352222
ugagacacucuucucagac

SEQ ID NO: 1352224 - RNA, 19 nt, Artificial Sequence
  Description of Artificial Sequence: Synthetic oligonucleotide
  Sense strand starting at position 3954 of SEQ ID NO: 1242497
gucucagcuccagaaggaa

SEQ ID NO: 1352225 - RNA, 19 nt, Artificial Sequence
  Description of Artificial Sequence: Synthetic oligonucleotide
  Antisense strand to SEQ ID NO: 1352224
uuccuucuggagcugagac

SEQ ID NO: 1352226 - RNA, 19 nt, Artificial Sequence
  Description of Artificial Sequence: Synthetic oligonucleotide
  Sense strand starting at position 37 of SEQ ID NO: 1242498
gugaacaggugacaucaaa

SEQ ID NO: 1352227 - RNA, 19 nt, Artificial Sequence
  Description of Artificial Sequence: Synthetic oligonucleotide
  Antisense strand to SEQ ID NO: 1352226
uuugaugucaccuguucac

SEQ ID NO: 1352228 - RNA, 19 nt, Artificial Sequence
  Description of Artificial Sequence: Synthetic oligonucleotide
  Sense strand starting at position 86 of SEQ ID NO: 1242498
agagcuuaucagcaagaac

SEQ ID NO: 1352229 - RNA, 19 nt, Artificial Sequence
  Description of Artificial Sequence: Synthetic oligonucleotide
  Antisense strand to SEQ ID NO: 1352228
guucuugcugauaagcucu

SEQ ID NO: 1352230 - RNA, 19 nt, Artificial Sequence
  Description of Artificial Sequence: Synthetic oligonucleotide
  Sense strand starting at position 89 of SEQ ID NO: 1242498
gcuuaucagcaagaacagu

SEQ ID NO: 1352231 - RNA, 19 nt, Artificial Sequence
  Description of Artificial Sequence: Synthetic oligonucleotide
  Antisense strand to SEQ ID NO: 1352230
acuguucuugcugauaagc

SEQ ID NO: 1352232 - RNA, 19 nt, Artificial Sequence
  Description of Artificial Sequence: Synthetic oligonucleotide
  Sense strand starting at position 173 of SEQ ID NO: 1242498
aguggcaugucucuuguuu

SEQ ID NO: 1352233 - RNA, 19 nt, Artificial Sequence
  Description of Artificial Sequence: Synthetic oligonucleotide
  Antisense strand to SEQ ID NO: 1352232
aaacaagagacaugccacu

SEQ ID NO: 1352234 - RNA, 19 nt, Artificial Sequence
  Description of Artificial Sequence: Synthetic oligonucleotide
  Sense strand starting at position 208 of SEQ ID NO: 1242498
ugcauuugcgaaugugaac

SEQ ID NO: 1352235 - RNA, 19 nt, Artificial Sequence
  Description of Artificial Sequence: Synthetic oligonucleotide
  Antisense strand to SEQ ID NO: 1352234
guucacauucgcaaaugca

SEQ ID NO: 1352236 - RNA, 19 nt, Artificial Sequence
  Description of Artificial Sequence: Synthetic oligonucleotide
  Sense strand starting at position 506 of SEQ ID NO: 1242498
uggugagcuggguauggau

SEQ ID NO: 1352237 - RNA, 19 nt, Artificial Sequence
  Description of Artificial Sequence: Synthetic oligonucleotide
  Antisense strand to SEQ ID NO: 1352236
auccauacccagcucacca

SEQ ID NO: 1352238 - RNA, 19 nt, Artificial Sequence
  Description of Artificial Sequence: Synthetic oligonucleotide
  Sense strand starting at position 921 of SEQ ID NO: 1242498
gggcucaagugguccuuua

SEQ ID NO: 1352239 - RNA, 19 nt, Artificial Sequence
  Description of Artificial Sequence: Synthetic oligonucleotide
  Antisense strand to SEQ ID NO: 1352238
uaaaggaccacuugagccc

SEQ ID NO: 1352240 - RNA, 19 nt, Artificial Sequence
  Description of Artificial Sequence: Synthetic oligonucleotide
  Sense strand starting at position 1152 of SEQ ID NO: 1242498
ccugcuuuccucugccaga

SEQ ID NO: 1352241 - RNA, 19 nt, Artificial Sequence
  Description of Artificial Sequence: Synthetic oligonucleotide
  Antisense strand to SEQ ID NO: 1352240
ucuggcagaggaaagcagg

SEQ ID NO: 1352242 - RNA, 19 nt, Artificial Sequence
  Description of Artificial Sequence: Synthetic oligonucleotide
  Sense strand starting at position 1229 of SEQ ID NO: 1242498
acaaacaucugaugcagaa

SEQ ID NO: 1352243 - RNA, 19 nt, Artificial Sequence
  Description of Artificial Sequence: Synthetic oligonucleotide
  Antisense strand to SEQ ID NO: 1352242
uucugcaucagauguuugu

SEQ ID NO: 1352244 - RNA, 19 nt, Artificial Sequence
  Description of Artificial Sequence: Synthetic oligonucleotide
  Sense strand starting at position 1332 of SEQ ID NO: 1242498
cugacucuggaauggugaa

SEQ ID NO: 1352245 - RNA, 19 nt, Artificial Sequence
  Description of Artificial Sequence: Synthetic oligonucleotide
  Antisense strand to SEQ ID NO: 1352244
uucaccauuccagagucag

SEQ ID NO: 1352246 - RNA, 19 nt, Artificial Sequence
  Description of Artificial Sequence: Synthetic oligonucleotide
  Sense strand starting at position 1451 of SEQ ID NO: 1242498
ggcaccuucugagaaggga

SEQ ID NO: 1352247 - RNA, 19 nt, Artificial Sequence
  Description of Artificial Sequence: Synthetic oligonucleotide
  Antisense strand to SEQ ID NO: 1352246
ucccuucucagaaggugcc

SEQ ID NO: 1352248 - RNA, 19 nt, Artificial Sequence
  Description of Artificial Sequence: Synthetic oligonucleotide
  Sense strand starting at position 1475 of SEQ ID NO: 1242498
acgugagagcucugaacac

SEQ ID NO: 1352249 - RNA, 19 nt, Artificial Sequence
  Description of Artificial Sequence: Synthetic oligonucleotide
  Antisense strand to SEQ ID NO: 1352248
guguucagagcucucacgu

SEQ ID NO: 1352250 - RNA, 19 nt, Artificial Sequence
  Description of Artificial Sequence: Synthetic oligonucleotide
  Sense strand starting at position 1545 of SEQ ID NO: 1242498
ccagcacucugagaugaca

SEQ ID NO: 1352251 - RNA, 19 nt, Artificial Sequence
  Description of Artificial Sequence: Synthetic oligonucleotide
  Antisense strand to SEQ ID NO: 1352250
ugucaucucagagugcugg

SEQ ID NO: 1352252 - RNA, 19 nt, Artificial Sequence
  Description of Artificial Sequence: Synthetic oligonucleotide
  Sense strand starting at position 1547 of SEQ ID NO: 1242498
agcacucugagaugacaga

SEQ ID NO: 1352253 - RNA, 19 nt, Artificial Sequence
  Description of Artificial Sequence: Synthetic oligonucleotide
  Antisense strand to SEQ ID NO: 1352252
ucugucaucucagagugcu

SEQ ID NO: 1352254 - RNA, 19 nt, Artificial Sequence
  Description of Artificial Sequence: Synthetic oligonucleotide
  Sense strand starting at position 2000 of SEQ ID NO: 1242498
gcaaauggagauugaaagu

SEQ ID NO: 1352255 - RNA, 19 nt, Artificial Sequence
  Description of Artificial Sequence: Synthetic oligonucleotide
  Antisense strand to SEQ ID NO: 1352254
acuuucaaucuccauuugc

SEQ ID NO: 1352256 - RNA, 19 nt, Artificial Sequence
  Description of Artificial Sequence: Synthetic oligonucleotide
  Sense strand starting at position 2020 of SEQ ID NO: 1242498
aaucuacuuugagaaagug

SEQ ID NO: 1352257 - RNA, 19 nt, Artificial Sequence
  Description of Artificial Sequence: Synthetic oligonucleotide
  Antisense strand to SEQ ID NO: 1352256
cacuuucucaaaguagauu

SEQ ID NO: 1352258 - RNA, 19 nt, Artificial Sequence
  Description of Artificial Sequence: Synthetic oligonucleotide
  Sense strand starting at position 2042 of SEQ ID NO: 1242498
gcugcaaaggguggucaaa

SEQ ID NO: 1352259 - RNA, 19 nt, Artificial Sequence
  Description of Artificial Sequence: Synthetic oligonucleotide
  Antisense strand to SEQ ID NO: 1352258
uuugaccacccuuugcagc

SEQ ID NO: 1352260 - RNA, 19 nt, Artificial Sequence
  Description of Artificial Sequence: Synthetic oligonucleotide
  Sense strand starting at position 2044 of SEQ ID NO: 1242498
ugcaaaggguggucaaaug

SEQ ID NO: 1352261 - RNA, 19 nt, Artificial Sequence
  Description of Artificial Sequence: Synthetic oligonucleotide
  Antisense strand to SEQ ID NO: 1352260
cauuugaccacccuuugca

SEQ ID NO: 1352262 - RNA, 19 nt, Artificial Sequence
  Description of Artificial Sequence: Synthetic oligonucleotide
  Sense strand starting at position 2185 of SEQ ID NO: 1242498
gccugagucucagagaaga

SEQ ID NO: 1352263 - RNA, 19 nt, Artificial Sequence
  Description of Artificial Sequence: Synthetic oligonucleotide
  Antisense strand to SEQ ID NO: 1352262
ucuucucugagacucaggc

SEQ ID NO: 1352264 - RNA, 19 nt, Artificial Sequence
  Description of Artificial Sequence: Synthetic oligonucleotide
  Sense strand starting at position 2270 of SEQ ID NO: 1242498
cccguuaaucuggcagcga

SEQ ID NO: 1352265 - RNA, 19 nt, Artificial Sequence
  Description of Artificial Sequence: Synthetic oligonucleotide
  Antisense strand to SEQ ID NO: 1352264
ucgcugccagauuaacggg

SEQ ID NO: 1352266 - RNA, 19 nt, Artificial Sequence
  Description of Artificial Sequence: Synthetic oligonucleotide
  Sense strand starting at position 2359 of SEQ ID NO: 1242498
cucucugugucauuucuga

SEQ ID NO: 1352267 - RNA, 19 nt, Artificial Sequence
  Description of Artificial Sequence: Synthetic oligonucleotide
  Antisense strand to SEQ ID NO: 1352266
ucagaaaugacacagagag

SEQ ID NO: 1352268 - RNA, 19 nt, Artificial Sequence
  Description of Artificial Sequence: Synthetic oligonucleotide
  Sense strand starting at position 2554 of SEQ ID NO: 1242498
auguauucccaucgucuua

SEQ ID NO: 1352269 - RNA, 19 nt, Artificial Sequence
  Description of Artificial Sequence: Synthetic oligonucleotide
  Antisense strand to SEQ ID NO: 1352268
uaagacgaugggaauacau

SEQ ID NO: 1352270 - RNA, 19 nt, Artificial Sequence
  Description of Artificial Sequence: Synthetic oligonucleotide
  Sense strand starting at position 2556 of SEQ ID NO: 1242498
guauucccaucgucuuaga

SEQ ID NO: 1352271 - RNA, 19 nt, Artificial Sequence
  Description of Artificial Sequence: Synthetic oligonucleotide
  Antisense strand to SEQ ID NO: 1352270
ucuaagacgaugggaauac

SEQ ID NO: 1352272 - RNA, 19 nt, Artificial Sequence
  Description of Artificial Sequence: Synthetic oligonucleotide
  Sense strand starting at position 2830 of SEQ ID NO: 1242498
gguacuaugggccacauau

SEQ ID NO: 1352273 - RNA, 19 nt, Artificial Sequence
  Description of Artificial Sequence: Synthetic oligonucleotide
  Antisense strand to SEQ ID NO: 1352272
auauguggcccauaguacc

SEQ ID NO: 1352274 - RNA, 19 nt, Artificial Sequence
  Description of Artificial Sequence: Synthetic oligonucleotide
  Sense strand starting at position 2857 of SEQ ID NO: 1242498
ucaagugcuagggauacau

SEQ ID NO: 1352275 - RNA, 19 nt, Artificial Sequence
  Description of Artificial Sequence: Synthetic oligonucleotide
  Antisense strand to SEQ ID NO: 1352274
auguaucccuagcacuuga

SEQ ID NO: 1352276 - RNA, 19 nt, Artificial Sequence
  Description of Artificial Sequence: Synthetic oligonucleotide
  Sense strand starting at position 2931 of SEQ ID NO: 1242498
ggcagaugccucgagcaau

SEQ ID NO: 1352277 - RNA, 19 nt, Artificial Sequence
  Description of Artificial Sequence: Synthetic oligonucleotide
  Antisense strand to SEQ ID NO: 1352276
auugcucgaggcaucugcc

SEQ ID NO: 1352278 - RNA, 19 nt, Artificial Sequence
  Description of Artificial Sequence: Synthetic oligonucleotide
  Sense strand starting at position 2934 of SEQ ID NO: 1242498
agaugccucgagcaauaaa

SEQ ID NO: 1352279 - RNA, 19 nt, Artificial Sequence
  Description of Artificial Sequence: Synthetic oligonucleotide
  Antisense strand to SEQ ID NO: 1352278
uuuauugcucgaggcaucu

SEQ ID NO: 1352280 - RNA, 19 nt, Artificial Sequence
  Description of Artificial Sequence: Synthetic oligonucleotide
  Sense strand starting at position 2937 of SEQ ID NO: 1242498
ugccucgagcaauaaacua

SEQ ID NO: 1352281 - RNA, 19 nt, Artificial Sequence
  Description of Artificial Sequence: Synthetic oligonucleotide
  Antisense strand to SEQ ID NO: 1352280
uaguuuauugcucgaggca

SEQ ID NO: 1352282 - RNA, 19 nt, Artificial Sequence
  Description of Artificial Sequence: Synthetic oligonucleotide
  Sense strand starting at position 3043 of SEQ ID NO: 1242498
aaaggucucugaggaccau

SEQ ID NO: 1352283 - RNA, 19 nt, Artificial Sequence
  Description of Artificial Sequence: Synthetic oligonucleotide
  Antisense strand to SEQ ID NO: 1352282
augguccucagagaccuuu

SEQ ID NO: 1352284 - RNA, 19 nt, Artificial Sequence
  Description of Artificial Sequence: Synthetic oligonucleotide
  Sense strand starting at position 3279 of SEQ ID NO: 1242498
aaaggucucugagaagaug

SEQ ID NO: 1352285 - RNA, 19 nt, Artificial Sequence
  Description of Artificial Sequence: Synthetic oligonucleotide
  Antisense strand to SEQ ID NO: 1352284
caucuucucagagaccuuu

SEQ ID NO: 1352286 - RNA, 19 nt, Artificial Sequence
  Description of Artificial Sequence: Synthetic oligonucleotide
  Sense strand starting at position 3529 of SEQ ID NO: 1242498
guucguuucugauuaugau

SEQ ID NO: 1352287 - RNA, 19 nt, Artificial Sequence
  Description of Artificial Sequence: Synthetic oligonucleotide
  Antisense strand to SEQ ID NO: 1352286
aucauaaucagaaacgaac

SEQ ID NO: 1352288 - RNA, 19 nt, Artificial Sequence
  Description of Artificial Sequence: Synthetic oligonucleotide
  Sense strand starting at position 3530 of SEQ ID NO: 1242498
uucguuucugauuaugauc

SEQ ID NO: 1352289 - RNA, 19 nt, Artificial Sequence
  Description of Artificial Sequence: Synthetic oligonucleotide
  Antisense strand to SEQ ID NO: 1352288
gaucauaaucagaaacgaa

SEQ ID NO: 1352290 - RNA, 19 nt, Artificial Sequence
  Description of Artificial Sequence: Synthetic oligonucleotide
  Sense strand starting at position 3533 of SEQ ID NO: 1242498
guuucugauuaugaucuga

SEQ ID NO: 1352291 - RNA, 19 nt, Artificial Sequence
  Description of Artificial Sequence: Synthetic oligonucleotide
  Antisense strand to SEQ ID NO: 1352290
ucagaucauaaucagaaac

SEQ ID NO: 1352292 - RNA, 19 nt, Artificial Sequence
  Description of Artificial Sequence: Synthetic oligonucleotide
  Sense strand starting at position 3535 of SEQ ID NO: 1242498
uucugauuaugaucugaug

SEQ ID NO: 1352293 - RNA, 19 nt, Artificial Sequence
  Description of Artificial Sequence: Synthetic oligonucleotide
  Antisense strand to SEQ ID NO: 1352292
caucagaucauaaucagaa

SEQ ID NO: 1352294 - RNA, 19 nt, Artificial Sequence
  Description of Artificial Sequence: Synthetic oligonucleotide
  Sense strand starting at position 3537 of SEQ ID NO: 1242498
cugauuaugaucugaugug

SEQ ID NO: 1352295 - RNA, 19 nt, Artificial Sequence
  Description of Artificial Sequence: Synthetic oligonucleotide
  Antisense strand to SEQ ID NO: 1352294
cacaucagaucauaaucag

SEQ ID NO: 1352296 - RNA, 19 nt, Artificial Sequence
  Description of Artificial Sequence: Synthetic oligonucleotide
  Sense strand starting at position 3673 of SEQ ID NO: 1242498
gacucuugagaguguugga

SEQ ID NO: 1352297 - RNA, 19 nt, Artificial Sequence
  Description of Artificial Sequence: Synthetic oligonucleotide
  Antisense strand to SEQ ID NO: 1352296
uccaacacucucaagaguc

SEQ ID NO: 1352298 - RNA, 19 nt, Artificial Sequence
  Description of Artificial Sequence: Synthetic oligonucleotide
  Sense strand starting at position 3775 of SEQ ID NO: 1242498
ccgggacugcccgaaagau

SEQ ID NO: 1352299 - RNA, 19 nt, Artificial Sequence
  Description of Artificial Sequence: Synthetic oligonucleotide
  Antisense strand to SEQ ID NO: 1352298
aucuuucgggcagucccgg

SEQ ID NO: 1352300 - RNA, 19 nt, Artificial Sequence
  Description of Artificial Sequence: Synthetic oligonucleotide
  Sense strand starting at position 3853 of SEQ ID NO: 1242498
acgccuucuguguugcuaa

SEQ ID NO: 1352301 - RNA, 19 nt, Artificial Sequence
  Description of Artificial Sequence: Synthetic oligonucleotide
  Antisense strand to SEQ ID NO: 1352300
uuagcaacacagaaggcgu

SEQ ID NO: 1352302 - RNA, 19 nt, Artificial Sequence
  Description of Artificial Sequence: Synthetic oligonucleotide
  Sense strand starting at position 3856 of SEQ ID NO: 1242498
ccuucuguguugcuaaaca

SEQ ID NO: 1352303 - RNA, 19 nt, Artificial Sequence
  Description of Artificial Sequence: Synthetic oligonucleotide
  Antisense strand to SEQ ID NO: 1352302
uguuuagcaacacagaagg

SEQ ID NO: 1352304 - RNA, 19 nt, Artificial Sequence
  Description of Artificial Sequence: Synthetic oligonucleotide
  Sense strand starting at position 3961 of SEQ ID NO: 1242498
ccuccuuguccucaggcaa

SEQ ID NO: 1352305 - RNA, 19 nt, Artificial Sequence
  Description of Artificial Sequence: Synthetic oligonucleotide
  Antisense strand to SEQ ID NO: 1352304
uugccugaggacaaggagg

SEQ ID NO: 1352306 - RNA, 19 nt, Artificial Sequence
  Description of Artificial Sequence: Synthetic oligonucleotide
  Sense strand starting at position 148 of SEQ ID NO: 1242499
aaggcagucuuucccagaa

SEQ ID NO: 1352307 - RNA, 19 nt, Artificial Sequence
  Description of Artificial Sequence: Synthetic oligonucleotide
  Antisense strand to SEQ ID NO: 1352306
uucugggaaagacugccuu

SEQ ID NO: 1352308 - RNA, 19 nt, Artificial Sequence
  Description of Artificial Sequence: Synthetic oligonucleotide
  Sense strand starting at position 963 of SEQ ID NO: 1242499
auagauuagacaggugcau

SEQ ID NO: 1352309 - RNA, 19 nt, Artificial Sequence
  Description of Artificial Sequence: Synthetic oligonucleotide
  Antisense strand to SEQ ID NO: 1352308
augcaccugucuaaucuau

SEQ ID NO: 1352310 - RNA, 19 nt, Artificial Sequence
  Description of Artificial Sequence: Synthetic oligonucleotide
  Sense strand starting at position 965 of SEQ ID NO: 1242499
agauuagacaggugcaugu

SEQ ID NO: 1352311 - RNA, 19 nt, Artificial Sequence
  Description of Artificial Sequence: Synthetic oligonucleotide
  Antisense strand to SEQ ID NO: 1352310
acaugcaccugucuaaucu

SEQ ID NO: 1352312 - RNA, 19 nt, Artificial Sequence
  Description of Artificial Sequence: Synthetic oligonucleotide
  Sense strand starting at position 1000 of SEQ ID NO: 1242499
acaauaauucuguacgguu

SEQ ID NO: 1352313 - RNA, 19 nt, Artificial Sequence
  Description of Artificial Sequence: Synthetic oligonucleotide
  Antisense strand to SEQ ID NO: 1352312
aaccguacagaauuauugu

SEQ ID NO: 1352314 - RNA, 19 nt, Artificial Sequence
  Description of Artificial Sequence: Synthetic oligonucleotide
  Sense strand starting at position 1002 of SEQ ID NO: 1242499
aauaauucuguacgguuau

SEQ ID NO: 1352315 - RNA, 19 nt, Artificial Sequence
  Description of Artificial Sequence: Synthetic oligonucleotide
  Antisense strand to SEQ ID NO: 1352314
auaaccguacagaauuauu

SEQ ID NO: 1352316 - RNA, 19 nt, Artificial Sequence
  Description of Artificial Sequence: Synthetic oligonucleotide
  Sense strand starting at position 1080 of SEQ ID NO: 1242499
ccaugauugauguguccag

SEQ ID NO: 1352317 - RNA, 19 nt, Artificial Sequence
  Description of Artificial Sequence: Synthetic oligonucleotide
  Antisense strand to SEQ ID NO: 1352316
cuggacacaucaaucaugg

SEQ ID NO: 1352318 - RNA, 19 nt, Artificial Sequence
  Description of Artificial Sequence: Synthetic oligonucleotide
  Sense strand starting at position 1084 of SEQ ID NO: 1242499
gauugauguguccagcccu

SEQ ID NO: 1352319 - RNA, 19 nt, Artificial Sequence
  Description of Artificial Sequence: Synthetic oligonucleotide
  Antisense strand to SEQ ID NO: 1352318
agggcuggacacaucaauc

SEQ ID NO: 1352320 - RNA, 19 nt, Artificial Sequence
  Description of Artificial Sequence: Synthetic oligonucleotide
  Sense strand starting at position 1178 of SEQ ID NO: 1242499
aggauucgcuccucaggau

SEQ ID NO: 1352321 - RNA, 19 nt, Artificial Sequence
  Description of Artificial Sequence: Synthetic oligonucleotide
  Antisense strand to SEQ ID NO: 1352320
auccugaggagcgaauccu

SEQ ID NO: 1352322 - RNA, 19 nt, Artificial Sequence
  Description of Artificial Sequence: Synthetic oligonucleotide
  Sense strand starting at position 1309 of SEQ ID NO: 1242499
uccuguuccguguaaccaa

SEQ ID NO: 1352323 - RNA, 19 nt, Artificial Sequence
  Description of Artificial Sequence: Synthetic oligonucleotide
  Antisense strand to SEQ ID NO: 1352322
uugguuacacggaacagga

SEQ ID NO: 1352324 - RNA, 19 nt, Artificial Sequence
  Description of Artificial Sequence: Synthetic oligonucleotide
  Sense strand starting at position 1350 of SEQ ID NO: 1242499
ggugaaauaucagcugaua

SEQ ID NO: 1352325 - RNA, 19 nt, Artificial Sequence
  Description of Artificial Sequence: Synthetic oligonucleotide
  Antisense strand to SEQ ID NO: 1352324
uaucagcugauauuucacc

SEQ ID NO: 1352326 - RNA, 19 nt, Artificial Sequence
  Description of Artificial Sequence: Synthetic oligonucleotide
  Sense strand starting at position 1363 of SEQ ID NO: 1242499
cugauaaaggcuuacaagu

SEQ ID NO: 1352327 - RNA, 19 nt, Artificial Sequence
  Description of Artificial Sequence: Synthetic oligonucleotide
  Antisense strand to SEQ ID NO: 1352326
acuuguaagccuuuaucag

SEQ ID NO: 1352328 - RNA, 19 nt, Artificial Sequence
  Description of Artificial Sequence: Synthetic oligonucleotide
  Sense strand starting at position 1827 of SEQ ID NO: 1242499
ugugguuaucugcaccuga

SEQ ID NO: 1352329 - RNA, 19 nt, Artificial Sequence
  Description of Artificial Sequence: Synthetic oligonucleotide
  Antisense strand to SEQ ID NO: 1352328
ucaggugcagauaaccaca

SEQ ID NO: 1352330 - RNA, 19 nt, Artificial Sequence
  Description of Artificial Sequence: Synthetic oligonucleotide
  Sense strand starting at position 1846 of SEQ ID NO: 1242499
guuuguccacgcuugaguu

SEQ ID NO: 1352331 - RNA, 19 nt, Artificial Sequence
  Description of Artificial Sequence: Synthetic oligonucleotide
  Antisense strand to SEQ ID NO: 1352330
aacucaagcguggacaaac

SEQ ID NO: 1352332 - RNA, 19 nt, Artificial Sequence
  Description of Artificial Sequence: Synthetic oligonucleotide
  Sense strand starting at position 1859 of SEQ ID NO: 1242499
ugaguuuacccacaccuga

SEQ ID NO: 1352333 - RNA, 19 nt, Artificial Sequence
  Description of Artificial Sequence: Synthetic oligonucleotide
  Antisense strand to SEQ ID NO: 1352332
ucagguguggguaaacuca

SEQ ID NO: 1352334 - RNA, 19 nt, Artificial Sequence
  Description of Artificial Sequence: Synthetic oligonucleotide
  Sense strand starting at position 2072 of SEQ ID NO: 1242499
cccucaugauugcugugaa

SEQ ID NO: 1352335 - RNA, 19 nt, Artificial Sequence
  Description of Artificial Sequence: Synthetic oligonucleotide
  Antisense strand to SEQ ID NO: 1352334
uucacagcaaucaugaggg

SEQ ID NO: 1352336 - RNA, 19 nt, Artificial Sequence
  Description of Artificial Sequence: Synthetic oligonucleotide
  Sense strand starting at position 2178 of SEQ ID NO: 1242499
gcagccuuaggaugugaga

SEQ ID NO: 1352337 - RNA, 19 nt, Artificial Sequence
  Description of Artificial Sequence: Synthetic oligonucleotide
  Antisense strand to SEQ ID NO: 1352336
ucucacauccuaaggcugc

SEQ ID NO: 1352338 - RNA, 19 nt, Artificial Sequence
  Description of Artificial Sequence: Synthetic oligonucleotide
  Sense strand starting at position 2180 of SEQ ID NO: 1242499
agccuuaggaugugagaga

SEQ ID NO: 1352339 - RNA, 19 nt, Artificial Sequence
  Description of Artificial Sequence: Synthetic oligonucleotide
  Antisense strand to SEQ ID NO: 1352338
ucucucacauccuaaggcu

SEQ ID NO: 1352340 - RNA, 19 nt, Artificial Sequence
  Description of Artificial Sequence: Synthetic oligonucleotide
  Sense strand starting at position 2273 of SEQ ID NO: 1242499
uggaaaugucagcaggguu

SEQ ID NO: 1352341 - RNA, 19 nt, Artificial Sequence
  Description of Artificial Sequence: Synthetic oligonucleotide
  Antisense strand to SEQ ID NO: 1352340
aacccugcugacauuucca

SEQ ID NO: 1352342 - RNA, 19 nt, Artificial Sequence
  Description of Artificial Sequence: Synthetic oligonucleotide
  Sense strand starting at position 2281 of SEQ ID NO: 1242499
ucagcaggguuugcauaau

SEQ ID NO: 1352343 - RNA, 19 nt, Artificial Sequence
  Description of Artificial Sequence: Synthetic oligonucleotide
  Antisense strand to SEQ ID NO: 1352342
auuaugcaaacccugcuga

SEQ ID NO: 1352344 - RNA, 19 nt, Artificial Sequence
  Description of Artificial Sequence: Synthetic oligonucleotide
  Sense strand starting at position 2287 of SEQ ID NO: 1242499
ggguuugcauaauugagac

SEQ ID NO: 1352345 - RNA, 19 nt, Artificial Sequence
  Description of Artificial Sequence: Synthetic oligonucleotide
  Antisense strand to SEQ ID NO: 1352344
gucucaauuaugcaaaccc

SEQ ID NO: 1352346 - RNA, 19 nt, Artificial Sequence
  Description of Artificial Sequence: Synthetic oligonucleotide
  Sense strand starting at position 2487 of SEQ ID NO: 1242499
ccuucugagugcuucuaau

SEQ ID NO: 1352347 - RNA, 19 nt, Artificial Sequence
  Description of Artificial Sequence: Synthetic oligonucleotide
  Antisense strand to SEQ ID NO: 1352346
auuagaagcacucagaagg

SEQ ID NO: 1352348 - RNA, 19 nt, Artificial Sequence
  Description of Artificial Sequence: Synthetic oligonucleotide
  Sense strand starting at position 2572 of SEQ ID NO: 1242499
ggugggagcucuguuggau

SEQ ID NO: 1352349 - RNA, 19 nt, Artificial Sequence
  Description of Artificial Sequence: Synthetic oligonucleotide
  Antisense strand to SEQ ID NO: 1352348
auccaacagagcucccacc

SEQ ID NO: 1352350 - RNA, 19 nt, Artificial Sequence
  Description of Artificial Sequence: Synthetic oligonucleotide
  Sense strand starting at position 2617 of SEQ ID NO: 1242499
ccagcuuuccaugagcuuu

SEQ ID NO: 1352351 - RNA, 19 nt, Artificial Sequence
  Description of Artificial Sequence: Synthetic oligonucleotide
  Antisense strand to SEQ ID NO: 1352350
aaagcucauggaaagcugg

SEQ ID NO: 1352352 - RNA, 19 nt, Artificial Sequence
  Description of Artificial Sequence: Synthetic oligonucleotide
  Sense strand starting at position 2805 of SEQ ID NO: 1242499
ugaggacucugagucaugu

SEQ ID NO: 1352353 - RNA, 19 nt, Artificial Sequence
  Description of Artificial Sequence: Synthetic oligonucleotide
  Antisense strand to SEQ ID NO: 1352352
acaugacucagaguccuca

SEQ ID NO: 1352354 - RNA, 19 nt, Artificial Sequence
  Description of Artificial Sequence: Synthetic oligonucleotide
  Sense strand starting at position 2807 of SEQ ID NO: 1242499
aggacucugagucauguga

SEQ ID NO: 1352355 - RNA, 19 nt, Artificial Sequence
  Description of Artificial Sequence: Synthetic oligonucleotide
  Antisense strand to SEQ ID NO: 1352354
ucacaugacucagaguccu

SEQ ID NO: 1352356 - RNA, 19 nt, Artificial Sequence
  Description of Artificial Sequence: Synthetic oligonucleotide
  Sense strand starting at position 2811 of SEQ ID NO: 1242499
cucugagucaugugagagg

SEQ ID NO: 1352357 - RNA, 19 nt, Artificial Sequence
  Description of Artificial Sequence: Synthetic oligonucleotide
  Antisense strand to SEQ ID NO: 1352356
ccucucacaugacucagag

SEQ ID NO: 1352358 - RNA, 19 nt, Artificial Sequence
  Description of Artificial Sequence: Synthetic oligonucleotide
  Sense strand starting at position 2878 of SEQ ID NO: 1242499
ucaaguucugcccauaugu

SEQ ID NO: 1352359 - RNA, 19 nt, Artificial Sequence
  Description of Artificial Sequence: Synthetic oligonucleotide
  Antisense strand to SEQ ID NO: 1352358
acauaugggcagaacuuga

SEQ ID NO: 1352360 - RNA, 19 nt, Artificial Sequence
  Description of Artificial Sequence: Synthetic oligonucleotide
  Sense strand starting at position 2972 of SEQ ID NO: 1242499
ugaacuucugacggaagca

SEQ ID NO: 1352361 - RNA, 19 nt, Artificial Sequence
  Description of Artificial Sequence: Synthetic oligonucleotide
  Antisense strand to SEQ ID NO: 1352360
ugcuuccgucagaaguuca

SEQ ID NO: 1352362 - RNA, 19 nt, Artificial Sequence
  Description of Artificial Sequence: Synthetic oligonucleotide
  Sense strand starting at position 3163 of SEQ ID NO: 1242499
cgagucuucuuucuugaac

SEQ ID NO: 1352363 - RNA, 19 nt, Artificial Sequence
  Description of Artificial Sequence: Synthetic oligonucleotide
  Antisense strand to SEQ ID NO: 1352362
guucaagaaagaagacucg

SEQ ID NO: 1352364 - RNA, 19 nt, Artificial Sequence
  Description of Artificial Sequence: Synthetic oligonucleotide
  Sense strand starting at position 3190 of SEQ ID NO: 1242499
gcuccugaggccugagaga

SEQ ID NO: 1352365 - RNA, 19 nt, Artificial Sequence
  Description of Artificial Sequence: Synthetic oligonucleotide
  Antisense strand to SEQ ID NO: 1352364
ucucucaggccucaggagc

SEQ ID NO: 1352366 - RNA, 19 nt, Artificial Sequence
  Description of Artificial Sequence: Synthetic oligonucleotide
  Sense strand starting at position 3386 of SEQ ID NO: 1242499
cucuguggucagcaccaau

SEQ ID NO: 1352367 - RNA, 19 nt, Artificial Sequence
  Description of Artificial Sequence: Synthetic oligonucleotide
  Antisense strand to SEQ ID NO: 1352366
auuggugcugaccacagag

SEQ ID NO: 1352368 - RNA, 19 nt, Artificial Sequence
  Description of Artificial Sequence: Synthetic oligonucleotide
  Sense strand starting at position 3634 of SEQ ID NO: 1242499
gccagucagaauugagaua

SEQ ID NO: 1352369 - RNA, 19 nt, Artificial Sequence
  Description of Artificial Sequence: Synthetic oligonucleotide
  Antisense strand to SEQ ID NO: 1352368
uaucucaauucugacuggc

SEQ ID NO: 1352370 - RNA, 19 nt, Artificial Sequence
  Description of Artificial Sequence: Synthetic oligonucleotide
  Sense strand starting at position 3646 of SEQ ID NO: 1242499
ugagauaugcuccgaaugu

SEQ ID NO: 1352371 - RNA, 19 nt, Artificial Sequence
  Description of Artificial Sequence: Synthetic oligonucleotide
  Antisense strand to SEQ ID NO: 1352370
acauucggagcauaucuca

SEQ ID NO: 1352372 - RNA, 19 nt, Artificial Sequence
  Description of Artificial Sequence: Synthetic oligonucleotide
  Sense strand starting at position 3675 of SEQ ID NO: 1242499
cgggauugccaagacuugu

SEQ ID NO: 1352373 - RNA, 19 nt, Artificial Sequence
  Description of Artificial Sequence: Synthetic oligonucleotide
  Antisense strand to SEQ ID NO: 1352372
acaagucuuggcaaucccg

SEQ ID NO: 1352374 - RNA, 19 nt, Artificial Sequence
  Description of Artificial Sequence: Synthetic oligonucleotide
  Sense strand starting at position 3690 of SEQ ID NO: 1242499
uugugauaauaaucgauug

SEQ ID NO: 1352375 - RNA, 19 nt, Artificial Sequence
  Description of Artificial Sequence: Synthetic oligonucleotide
  Antisense strand to SEQ ID NO: 1352374
caaucgauuauuaucacaa

SEQ ID NO: 1352376 - RNA, 19 nt, Artificial Sequence
  Description of Artificial Sequence: Synthetic oligonucleotide
  Sense strand starting at position 3692 of SEQ ID NO: 1242499
gugauaauaaucgauugca

SEQ ID NO: 1352377 - RNA, 19 nt, Artificial Sequence
  Description of Artificial Sequence: Synthetic oligonucleotide
  Antisense strand to SEQ ID NO: 1352376
ugcaaucgauuauuaucac

SEQ ID NO: 1352378 - RNA, 19 nt, Artificial Sequence
  Description of Artificial Sequence: Synthetic oligonucleotide
  Sense strand starting at position 3695 of SEQ ID NO: 1242499
auaauaaucgauugcacau

SEQ ID NO: 1352379 - RNA, 19 nt, Artificial Sequence
  Description of Artificial Sequence: Synthetic oligonucleotide
  Antisense strand to SEQ ID NO: 1352378
augugcaaucgauuauuau

SEQ ID NO: 1352380 - RNA, 19 nt, Artificial Sequence
  Description of Artificial Sequence: Synthetic oligonucleotide
  Sense strand starting at position 3702 of SEQ ID NO: 1242499
ucgauugcacauugaaaua

SEQ ID NO: 1352381 - RNA, 19 nt, Artificial Sequence
  Description of Artificial Sequence: Synthetic oligonucleotide
  Antisense strand to SEQ ID NO: 1352380
uauuucaaugugcaaucga

SEQ ID NO: 1352382 - RNA, 19 nt, Artificial Sequence
  Description of Artificial Sequence: Synthetic oligonucleotide
  Sense strand starting at position 3724 of SEQ ID NO: 1242499
agaacauguuggguugaau

SEQ ID NO: 1352383 - RNA, 19 nt, Artificial Sequence
  Description of Artificial Sequence: Synthetic oligonucleotide
  Antisense strand to SEQ ID NO: 1352382
auucaacccaacauguucu

SEQ ID NO: 1352384 - RNA, 19 nt, Artificial Sequence
  Description of Artificial Sequence: Synthetic oligonucleotide
  Sense strand starting at position 3735 of SEQ ID NO: 1242499
gguugaauagaauguuauu

SEQ ID NO: 1352385 - RNA, 19 nt, Artificial Sequence
  Description of Artificial Sequence: Synthetic oligonucleotide
  Antisense strand to SEQ ID NO: 1352384
aauaacauucuauucaacc

SEQ ID NO: 1352386 - RNA, 19 nt, Artificial Sequence
  Description of Artificial Sequence: Synthetic oligonucleotide
  Sense strand starting at position 19 of SEQ ID NO: 1242500
accaaaugcuaugugcaga

SEQ ID NO: 1352387 - RNA, 19 nt, Artificial Sequence
  Description of Artificial Sequence: Synthetic oligonucleotide
  Antisense strand to SEQ ID NO: 1352386
ucugcacauagcauuuggu

SEQ ID NO: 1352388 - RNA, 19 nt, Artificial Sequence
  Description of Artificial Sequence: Synthetic oligonucleotide
  Sense strand starting at position 22 of SEQ ID NO: 1242500
aaaugcuaugugcagaauu

SEQ ID NO: 1352389 - RNA, 19 nt, Artificial Sequence
  Description of Artificial Sequence: Synthetic oligonucleotide
  Antisense strand to SEQ ID NO: 1352388
aauucugcacauagcauuu

SEQ ID NO: 1352390 - RNA, 19 nt, Artificial Sequence
  Description of Artificial Sequence: Synthetic oligonucleotide
  Sense strand starting at position 24 of SEQ ID NO: 1242500
augcuaugugcagaauucu

SEQ ID NO: 1352391 - RNA, 19 nt, Artificial Sequence
  Description of Artificial Sequence: Synthetic oligonucleotide
  Antisense strand to SEQ ID NO: 1352390
agaauucugcacauagcau

SEQ ID NO: 1352392 - RNA, 19 nt, Artificial Sequence
  Description of Artificial Sequence: Synthetic oligonucleotide
  Sense strand starting at position 32 of SEQ ID NO: 1242500
ugcagaauucuuuguaacc

SEQ ID NO: 1352393 - RNA, 19 nt, Artificial Sequence
  Description of Artificial Sequence: Synthetic oligonucleotide
  Antisense strand to SEQ ID NO: 1352392
gguuacaaagaauucugca

SEQ ID NO: 1352394 - RNA, 19 nt, Artificial Sequence
  Description of Artificial Sequence: Synthetic oligonucleotide
  Sense strand starting at position 33 of SEQ ID NO: 1242500
gcagaauucuuuguaaccu

SEQ ID NO: 1352395 - RNA, 19 nt, Artificial Sequence
  Description of Artificial Sequence: Synthetic oligonucleotide
  Antisense strand to SEQ ID NO: 1352394
agguuacaaagaauucugc

SEQ ID NO: 1352396 - RNA, 19 nt, Artificial Sequence
  Description of Artificial Sequence: Synthetic oligonucleotide
  Sense strand starting at position 215 of SEQ ID NO: 1242500
ugacauuugucugggauuu

SEQ ID NO: 1352397 - RNA, 19 nt, Artificial Sequence
  Description of Artificial Sequence: Synthetic oligonucleotide
  Antisense strand to SEQ ID NO: 1352396
aaaucccagacaaauguca

SEQ ID NO: 1352398 - RNA, 19 nt, Artificial Sequence
  Description of Artificial Sequence: Synthetic oligonucleotide
  Sense strand starting at position 302 of SEQ ID NO: 1242500
ggccaauggguauauggua

SEQ ID NO: 1352399 - RNA, 19 nt, Artificial Sequence
  Description of Artificial Sequence: Synthetic oligonucleotide
  Antisense strand to SEQ ID NO: 1352398
uaccauauacccauuggcc

SEQ ID NO: 1352400 - RNA, 19 nt, Artificial Sequence
  Description of Artificial Sequence: Synthetic oligonucleotide
  Sense strand starting at position 758 of SEQ ID NO: 1242500
ugaauuagcguccagugaa

SEQ ID NO: 1352401 - RNA, 19 nt, Artificial Sequence
  Description of Artificial Sequence: Synthetic oligonucleotide
  Antisense strand to SEQ ID NO: 1352400
uucacuggacgcuaauuca

SEQ ID NO: 1352402 - RNA, 19 nt, Artificial Sequence
  Description of Artificial Sequence: Synthetic oligonucleotide
  Sense strand starting at position 801 of SEQ ID NO: 1242500
gagggagaguuguuugcau

SEQ ID NO: 1352403 - RNA, 19 nt, Artificial Sequence
  Description of Artificial Sequence: Synthetic oligonucleotide
  Antisense strand to SEQ ID NO: 1352402
augcaaacaacucucccuc

SEQ ID NO: 1352404 - RNA, 19 nt, Artificial Sequence
  Description of Artificial Sequence: Synthetic oligonucleotide
  Sense strand starting at position 803 of SEQ ID NO: 1242500
gggagaguuguuugcauaa

SEQ ID NO: 1352405 - RNA, 19 nt, Artificial Sequence
  Description of Artificial Sequence: Synthetic oligonucleotide
  Antisense strand to SEQ ID NO: 1352404
uuaugcaaacaacucuccc

SEQ ID NO: 1352406 - RNA, 19 nt, Artificial Sequence
  Description of Artificial Sequence: Synthetic oligonucleotide
  Sense strand starting at position 880 of SEQ ID NO: 1242500
guaaaugacuuucuuaaga

SEQ ID NO: 1352407 - RNA, 19 nt, Artificial Sequence
  Description of Artificial Sequence: Synthetic oligonucleotide
  Antisense strand to SEQ ID NO: 1352406
ucuuaagaaagucauuuac

SEQ ID NO: 1352408 - RNA, 19 nt, Artificial Sequence
  Description of Artificial Sequence: Synthetic oligonucleotide
  Sense strand starting at position 1031 of SEQ ID NO: 1242500
gguaguucgacuuaaaucc

SEQ ID NO: 1352409 - RNA, 19 nt, Artificial Sequence
  Description of Artificial Sequence: Synthetic oligonucleotide
  Antisense strand to SEQ ID NO: 1352408
ggauuuaagucgaacuacc

SEQ ID NO: 1352410 - RNA, 19 nt, Artificial Sequence
  Description of Artificial Sequence: Synthetic oligonucleotide
  Sense strand starting at position 1042 of SEQ ID NO: 1242500
uuaaauccugacugacagu

SEQ ID NO: 1352411 - RNA, 19 nt, Artificial Sequence
  Description of Artificial Sequence: Synthetic oligonucleotide
  Antisense strand to SEQ ID NO: 1352410
acugucagucaggauuuaa

SEQ ID NO: 1352412 - RNA, 19 nt, Artificial Sequence
  Description of Artificial Sequence: Synthetic oligonucleotide
  Sense strand starting at position 1174 of SEQ ID NO: 1242500
aaggaaauguaccuguaga

SEQ ID NO: 1352413 - RNA, 19 nt, Artificial Sequence
  Description of Artificial Sequence: Synthetic oligonucleotide
  Antisense strand to SEQ ID NO: 1352412
ucuacagguacauuuccuu

SEQ ID NO: 1352414 - RNA, 19 nt, Artificial Sequence
  Description of Artificial Sequence: Synthetic oligonucleotide
  Sense strand starting at position 1175 of SEQ ID NO: 1242500
aggaaauguaccuguagag

SEQ ID NO: 1352415 - RNA, 19 nt, Artificial Sequence
  Description of Artificial Sequence: Synthetic oligonucleotide
  Antisense strand to SEQ ID NO: 1352414
cucuacagguacauuuccu

SEQ ID NO: 1352416 - RNA, 19 nt, Artificial Sequence
  Description of Artificial Sequence: Synthetic oligonucleotide
  Sense strand starting at position 1301 of SEQ ID NO: 1242500
gcauuugguucccuuaucu

SEQ ID NO: 1352417 - RNA, 19 nt, Artificial Sequence
  Description of Artificial Sequence: Synthetic oligonucleotide
  Antisense strand to SEQ ID NO: 1352416
agauaagggaaccaaaugc

SEQ ID NO: 1352418 - RNA, 19 nt, Artificial Sequence
  Description of Artificial Sequence: Synthetic oligonucleotide
  Sense strand starting at position 2161 of SEQ ID NO: 1242500
gccguaucuccguugggua

SEQ ID NO: 1352419 - RNA, 19 nt, Artificial Sequence
  Description of Artificial Sequence: Synthetic oligonucleotide
  Antisense strand to SEQ ID NO: 1352418
uacccaacggagauacggc

SEQ ID NO: 1352420 - RNA, 19 nt, Artificial Sequence
  Description of Artificial Sequence: Synthetic oligonucleotide
  Sense strand starting at position 2185 of SEQ ID NO: 1242500
gcgggacuuagacaaacuu

SEQ ID NO: 1352421 - RNA, 19 nt, Artificial Sequence
  Description of Artificial Sequence: Synthetic oligonucleotide
  Antisense strand to SEQ ID NO: 1352420
aaguuugucuaagucccgc

SEQ ID NO: 1352422 - RNA, 19 nt, Artificial Sequence
  Description of Artificial Sequence: Synthetic oligonucleotide
  Sense strand starting at position 2239 of SEQ ID NO: 1242500
gagguugaggguuaagguu

SEQ ID NO: 1352423 - RNA, 19 nt, Artificial Sequence
  Description of Artificial Sequence: Synthetic oligonucleotide
  Antisense strand to SEQ ID NO: 1352422
aaccuuaacccucaaccuc

SEQ ID NO: 1352424 - RNA, 19 nt, Artificial Sequence
  Description of Artificial Sequence: Synthetic oligonucleotide
  Sense strand starting at position 2364 of SEQ ID NO: 1242500
gugugcuucagagcgagua

SEQ ID NO: 1352425 - RNA, 19 nt, Artificial Sequence
  Description of Artificial Sequence: Synthetic oligonucleotide
  Antisense strand to SEQ ID NO: 1352424
uacucgcucugaagcacac

SEQ ID NO: 1352426 - RNA, 19 nt, Artificial Sequence
  Description of Artificial Sequence: Synthetic oligonucleotide
  Sense strand starting at position 2474 of SEQ ID NO: 1242500
cgguaaauauucuucuuug

SEQ ID NO: 1352427 - RNA, 19 nt, Artificial Sequence
  Description of Artificial Sequence: Synthetic oligonucleotide
  Antisense strand to SEQ ID NO: 1352426
caaagaagaauauuuaccg

SEQ ID NO: 1352428 - RNA, 19 nt, Artificial Sequence
  Description of Artificial Sequence: Synthetic oligonucleotide
  Sense strand starting at position 2475 of SEQ ID NO: 1242500
gguaaauauucuucuuugu

SEQ ID NO: 1352429 - RNA, 19 nt, Artificial Sequence
  Description of Artificial Sequence: Synthetic oligonucleotide
  Antisense strand to SEQ ID NO: 1352428
acaaagaagaauauuuacc

SEQ ID NO: 1352430 - RNA, 19 nt, Artificial Sequence
  Description of Artificial Sequence: Synthetic oligonucleotide
  Sense strand starting at position 2489 of SEQ ID NO: 1242500
uuuguuuaacuaugggacu

SEQ ID NO: 1352431 - RNA, 19 nt, Artificial Sequence
  Description of Artificial Sequence: Synthetic oligonucleotide
  Antisense strand to SEQ ID NO: 1352430
agucccauaguuaaacaaa

SEQ ID NO: 1352432 - RNA, 19 nt, Artificial Sequence
  Description of Artificial Sequence: Synthetic oligonucleotide
  Sense strand starting at position 2491 of SEQ ID NO: 1242500
uguuuaacuaugggacugu

SEQ ID NO: 1352433 - RNA, 19 nt, Artificial Sequence
  Description of Artificial Sequence: Synthetic oligonucleotide
  Antisense strand to SEQ ID NO: 1352432
acagucccauaguuaaaca

SEQ ID NO: 1352434 - RNA, 19 nt, Artificial Sequence
  Description of Artificial Sequence: Synthetic oligonucleotide
  Sense strand starting at position 2495 of SEQ ID NO: 1242500
uaacuaugggacugucuuu

SEQ ID NO: 1352435 - RNA, 19 nt, Artificial Sequence
  Description of Artificial Sequence: Synthetic oligonucleotide
  Antisense strand to SEQ ID NO: 1352434
aaagacagucccauaguua

SEQ ID NO: 1352436 - RNA, 19 nt, Artificial Sequence
  Description of Artificial Sequence: Synthetic oligonucleotide
  Sense strand starting at position 2575 of SEQ ID NO: 1242500
gguuguucccuugauguaa

SEQ ID NO: 1352437 - RNA, 19 nt, Artificial Sequence
  Description of Artificial Sequence: Synthetic oligonucleotide
  Antisense strand to SEQ ID NO: 1352436
uuacaucaagggaacaacc

SEQ ID NO: 1352438 - RNA, 19 nt, Artificial Sequence
  Description of Artificial Sequence: Synthetic oligonucleotide
  Sense strand starting at position 2589 of SEQ ID NO: 1242500
uguaauauguaccuaucca

SEQ ID NO: 1352439 - RNA, 19 nt, Artificial Sequence
  Description of Artificial Sequence: Synthetic oligonucleotide
  Antisense strand to SEQ ID NO: 1352438
uggauagguacauauuaca

SEQ ID NO: 1352440 - RNA, 19 nt, Artificial Sequence
  Description of Artificial Sequence: Synthetic oligonucleotide
  Sense strand starting at position 2651 of SEQ ID NO: 1242500
uuagcaaugguuuacuaaa

SEQ ID NO: 1352441 - RNA, 19 nt, Artificial Sequence
  Description of Artificial Sequence: Synthetic oligonucleotide
  Antisense strand to SEQ ID NO: 1352440
uuuaguaaaccauugcuaa

SEQ ID NO: 1352442 - RNA, 19 nt, Artificial Sequence
  Description of Artificial Sequence: Synthetic oligonucleotide
  Sense strand starting at position 2750 of SEQ ID NO: 1242500
cuucgagaguuccucaauc

SEQ ID NO: 1352443 - RNA, 19 nt, Artificial Sequence
  Description of Artificial Sequence: Synthetic oligonucleotide
  Antisense strand to SEQ ID NO: 1352442
gauugaggaacucucgaag

SEQ ID NO: 1352444 - RNA, 19 nt, Artificial Sequence
  Description of Artificial Sequence: Synthetic oligonucleotide
  Sense strand starting at position 2752 of SEQ ID NO: 1242500
ucgagaguuccucaaucug

SEQ ID NO: 1352445 - RNA, 19 nt, Artificial Sequence
  Description of Artificial Sequence: Synthetic oligonucleotide
  Antisense strand to SEQ ID NO: 1352444
cagauugaggaacucucga

SEQ ID NO: 1352446 - RNA, 19 nt, Artificial Sequence
  Description of Artificial Sequence: Synthetic oligonucleotide
  Sense strand starting at position 2776 of SEQ ID NO: 1242500
cagggaucugacugucuua

SEQ ID NO: 1352447 - RNA, 19 nt, Artificial Sequence
  Description of Artificial Sequence: Synthetic oligonucleotide
  Antisense strand to SEQ ID NO: 1352446
uaagacagucagaucccug

SEQ ID NO: 1352448 - RNA, 19 nt, Artificial Sequence
  Description of Artificial Sequence: Synthetic oligonucleotide
  Sense strand starting at position 2779 of SEQ ID NO: 1242500
ggaucugacugucuuaucu

SEQ ID NO: 1352449 - RNA, 19 nt, Artificial Sequence
  Description of Artificial Sequence: Synthetic oligonucleotide
  Antisense strand to SEQ ID NO: 1352448
agauaagacagucagaucc

SEQ ID NO: 1352450 - RNA, 19 nt, Artificial Sequence
  Description of Artificial Sequence: Synthetic oligonucleotide
  Sense strand starting at position 2835 of SEQ ID NO: 1242500
ugacaaacugcacguauuu

SEQ ID NO: 1352451 - RNA, 19 nt, Artificial Sequence
  Description of Artificial Sequence: Synthetic oligonucleotide
  Antisense strand to SEQ ID NO: 1352450
aaauacgugcaguuuguca

SEQ ID NO: 1352452 - RNA, 19 nt, Artificial Sequence
  Description of Artificial Sequence: Synthetic oligonucleotide
  Sense strand starting at position 2884 of SEQ ID NO: 1242500
cugugcacccaugaaauca

SEQ ID NO: 1352453 - RNA, 19 nt, Artificial Sequence
  Description of Artificial Sequence: Synthetic oligonucleotide
  Antisense strand to SEQ ID NO: 1352452
ugauuucaugggugcacag

SEQ ID NO: 1352454 - RNA, 19 nt, Artificial Sequence
  Description of Artificial Sequence: Synthetic oligonucleotide
  Sense strand starting at position 3140 of SEQ ID NO: 1242500
gaaguaggaucuucucuca

SEQ ID NO: 1352455 - RNA, 19 nt, Artificial Sequence
  Description of Artificial Sequence: Synthetic oligonucleotide
  Antisense strand to SEQ ID NO: 1352454
ugagagaagauccuacuuc

SEQ ID NO: 1352456 - RNA, 19 nt, Artificial Sequence
  Description of Artificial Sequence: Synthetic oligonucleotide
  Sense strand starting at position 3143 of SEQ ID NO: 1242500
guaggaucuucucucagaa

SEQ ID NO: 1352457 - RNA, 19 nt, Artificial Sequence
  Description of Artificial Sequence: Synthetic oligonucleotide
  Antisense strand to SEQ ID NO: 1352456
uucugagagaagauccuac

SEQ ID NO: 1352458 - RNA, 19 nt, Artificial Sequence
  Description of Artificial Sequence: Synthetic oligonucleotide
  Sense strand starting at position 3189 of SEQ ID NO: 1242500
ccagcuugugaacaaucuu

SEQ ID NO: 1352459 - RNA, 19 nt, Artificial Sequence
  Description of Artificial Sequence: Synthetic oligonucleotide
  Antisense strand to SEQ ID NO: 1352458
aagauuguucacaagcugg

SEQ ID NO: 1352460 - RNA, 19 nt, Artificial Sequence
  Description of Artificial Sequence: Synthetic oligonucleotide
  Sense strand starting at position 3327 of SEQ ID NO: 1242500
gcaugcagucaauaaaugu

SEQ ID NO: 1352461 - RNA, 19 nt, Artificial Sequence
  Description of Artificial Sequence: Synthetic oligonucleotide
  Antisense strand to SEQ ID NO: 1352460
acauuuauugacugcaugc

SEQ ID NO: 1352462 - RNA, 19 nt, Artificial Sequence
  Description of Artificial Sequence: Synthetic oligonucleotide
  Sense strand starting at position 3502 of SEQ ID NO: 1242500
gaaugcuucgcuccuuagu

SEQ ID NO: 1352463 - RNA, 19 nt, Artificial Sequence
  Description of Artificial Sequence: Synthetic oligonucleotide
  Antisense strand to SEQ ID NO: 1352462
acuaaggagcgaagcauuc

SEQ ID NO: 1352464 - RNA, 19 nt, Artificial Sequence
  Description of Artificial Sequence: Synthetic oligonucleotide
  Sense strand starting at position 3563 of SEQ ID NO: 1242500
gccagaacucuuugguaaa

SEQ ID NO: 1352465 - RNA, 19 nt, Artificial Sequence
  Description of Artificial Sequence: Synthetic oligonucleotide
  Antisense strand to SEQ ID NO: 1352464
uuuaccaaagaguucuggc

SEQ ID NO: 1352466 - RNA, 19 nt, Artificial Sequence
  Description of Artificial Sequence: Synthetic oligonucleotide
  Sense strand starting at position 32 of SEQ ID NO: 1242501
aaauguuauggaugcauaa

SEQ ID NO: 1352467 - RNA, 19 nt, Artificial Sequence
  Description of Artificial Sequence: Synthetic oligonucleotide
  Antisense strand to SEQ ID NO: 1352466
uuaugcauccauaacauuu

SEQ ID NO: 1352468 - RNA, 19 nt, Artificial Sequence
  Description of Artificial Sequence: Synthetic oligonucleotide
  Sense strand starting at position 34 of SEQ ID NO: 1242501
auguuauggaugcauaagu

SEQ ID NO: 1352469 - RNA, 19 nt, Artificial Sequence
  Description of Artificial Sequence: Synthetic oligonucleotide
  Antisense strand to SEQ ID NO: 1352468
acuuaugcauccauaacau

SEQ ID NO: 1352470 - RNA, 19 nt, Artificial Sequence
  Description of Artificial Sequence: Synthetic oligonucleotide
  Sense strand starting at position 54 of SEQ ID NO: 1242501
gcaguagguauauagauac

SEQ ID NO: 1352471 - RNA, 19 nt, Artificial Sequence
  Description of Artificial Sequence: Synthetic oligonucleotide
  Antisense strand to SEQ ID NO: 1352470
guaucuauauaccuacugc

SEQ ID NO: 1352472 - RNA, 19 nt, Artificial Sequence
  Description of Artificial Sequence: Synthetic oligonucleotide
  Sense strand starting at position 60 of SEQ ID NO: 1242501
gguauauagauacguauua

SEQ ID NO: 1352473 - RNA, 19 nt, Artificial Sequence
  Description of Artificial Sequence: Synthetic oligonucleotide
  Antisense strand to SEQ ID NO: 1352472
uaauacguaucuauauacc

SEQ ID NO: 1352474 - RNA, 19 nt, Artificial Sequence
  Description of Artificial Sequence: Synthetic oligonucleotide
  Sense strand starting at position 94 of SEQ ID NO: 1242501
cccuuauaauggucagauu

SEQ ID NO: 1352475 - RNA, 19 nt, Artificial Sequence
  Description of Artificial Sequence: Synthetic oligonucleotide
  Antisense strand to SEQ ID NO: 1352474
aaucugaccauuauaaggg

SEQ ID NO: 1352476 - RNA, 19 nt, Artificial Sequence
  Description of Artificial Sequence: Synthetic oligonucleotide
  Sense strand starting at position 95 of SEQ ID NO: 1242501
ccuuauaauggucagauuc

SEQ ID NO: 1352477 - RNA, 19 nt, Artificial Sequence
  Description of Artificial Sequence: Synthetic oligonucleotide
  Antisense strand to SEQ ID NO: 1352476
gaaucugaccauuauaagg

SEQ ID NO: 1352478 - RNA, 19 nt, Artificial Sequence
  Description of Artificial Sequence: Synthetic oligonucleotide
  Sense strand starting at position 138 of SEQ ID NO: 1242501
agaagacugauacgacuuu

SEQ ID NO: 1352479 - RNA, 19 nt, Artificial Sequence
  Description of Artificial Sequence: Synthetic oligonucleotide
  Antisense strand to SEQ ID NO: 1352478
aaagucguaucagucuucu

SEQ ID NO: 1352480 - RNA, 19 nt, Artificial Sequence
  Description of Artificial Sequence: Synthetic oligonucleotide
  Sense strand starting at position 375 of SEQ ID NO: 1242501
cccgaaggacucuggcaau

SEQ ID NO: 1352481 - RNA, 19 nt, Artificial Sequence
  Description of Artificial Sequence: Synthetic oligonucleotide
  Antisense strand to SEQ ID NO: 1352480
auugccagaguccuucggg

SEQ ID NO: 1352482 - RNA, 19 nt, Artificial Sequence
  Description of Artificial Sequence: Synthetic oligonucleotide
  Sense strand starting at position 381 of SEQ ID NO: 1242501
ggacucuggcaauacaagu

SEQ ID NO: 1352483 - RNA, 19 nt, Artificial Sequence
  Description of Artificial Sequence: Synthetic oligonucleotide
  Antisense strand to SEQ ID NO: 1352482
acuuguauugccagagucc

SEQ ID NO: 1352484 - RNA, 19 nt, Artificial Sequence
  Description of Artificial Sequence: Synthetic oligonucleotide
  Sense strand starting at position 566 of SEQ ID NO: 1242501
caguaugguuaaccggaau

SEQ ID NO: 1352485 - RNA, 19 nt, Artificial Sequence
  Description of Artificial Sequence: Synthetic oligonucleotide
  Antisense strand to SEQ ID NO: 1352484
auuccgguuaaccauacug

SEQ ID NO: 1352486 - RNA, 19 nt, Artificial Sequence
  Description of Artificial Sequence: Synthetic oligonucleotide
  Sense strand starting at position 569 of SEQ ID NO: 1242501
uaugguuaaccggaauguu

SEQ ID NO: 1352487 - RNA, 19 nt, Artificial Sequence
  Description of Artificial Sequence: Synthetic oligonucleotide
  Antisense strand to SEQ ID NO: 1352486
aacauuccgguuaaccaua

SEQ ID NO: 1352488 - RNA, 19 nt, Artificial Sequence
  Description of Artificial Sequence: Synthetic oligonucleotide
  Sense strand starting at position 572 of SEQ ID NO: 1242501
gguuaaccggaauguucaa

SEQ ID NO: 1352489 - RNA, 19 nt, Artificial Sequence
  Description of Artificial Sequence: Synthetic oligonucleotide
  Antisense strand to SEQ ID NO: 1352488
uugaacauuccgguuaacc

SEQ ID NO: 1352490 - RNA, 19 nt, Artificial Sequence
  Description of Artificial Sequence: Synthetic oligonucleotide
  Sense strand starting at position 615 of SEQ ID NO: 1242501
gagcaaucuguccagggca

SEQ ID NO: 1352491 - RNA, 19 nt, Artificial Sequence
  Description of Artificial Sequence: Synthetic oligonucleotide
  Antisense strand to SEQ ID NO: 1352490
ugcccuggacagauugcuc

SEQ ID NO: 1352492 - RNA, 19 nt, Artificial Sequence
  Description of Artificial Sequence: Synthetic oligonucleotide
  Sense strand starting at position 628 of SEQ ID NO: 1242501
agggcacucaaguguuuaa

SEQ ID NO: 1352493 - RNA, 19 nt, Artificial Sequence
  Description of Artificial Sequence: Synthetic oligonucleotide
  Antisense strand to SEQ ID NO: 1352492
uuaaacacuugagugcccu

SEQ ID NO: 1352494 - RNA, 19 nt, Artificial Sequence
  Description of Artificial Sequence: Synthetic oligonucleotide
  Sense strand starting at position 631 of SEQ ID NO: 1242501
gcacucaaguguuuaagga

SEQ ID NO: 1352495 - RNA, 19 nt, Artificial Sequence
  Description of Artificial Sequence: Synthetic oligonucleotide
  Antisense strand to SEQ ID NO: 1352494
uccuuaaacacuugagugc

SEQ ID NO: 1352496 - RNA, 19 nt, Artificial Sequence
  Description of Artificial Sequence: Synthetic oligonucleotide
  Sense strand starting at position 691 of SEQ ID NO: 1242501
gaggacuucugcuccaaga

SEQ ID NO: 1352497 - RNA, 19 nt, Artificial Sequence
  Description of Artificial Sequence: Synthetic oligonucleotide
  Antisense strand to SEQ ID NO: 1352496
ucuuggagcagaaguccuc

SEQ ID NO: 1352498 - RNA, 19 nt, Artificial Sequence
  Description of Artificial Sequence: Synthetic oligonucleotide
  Sense strand starting at position 768 of SEQ ID NO: 1242501
gaucaagugaugugauaga

SEQ ID NO: 1352499 - RNA, 19 nt, Artificial Sequence
  Description of Artificial Sequence: Synthetic oligonucleotide
  Antisense strand to SEQ ID NO: 1352498
ucuaucacaucacuugauc

SEQ ID NO: 1352500 - RNA, 19 nt, Artificial Sequence
  Description of Artificial Sequence: Synthetic oligonucleotide
  Sense strand starting at position 853 of SEQ ID NO: 1242501
ggaacaacuuagguuacua

SEQ ID NO: 1352501 - RNA, 19 nt, Artificial Sequence
  Description of Artificial Sequence: Synthetic oligonucleotide
  Antisense strand to SEQ ID NO: 1352500
uaguaaccuaaguuguucc

SEQ ID NO: 1352502 - RNA, 19 nt, Artificial Sequence
  Description of Artificial Sequence: Synthetic oligonucleotide
  Sense strand starting at position 997 of SEQ ID NO: 1242501
uugugacaucuccaucaua

SEQ ID NO: 1352503 - RNA, 19 nt, Artificial Sequence
  Description of Artificial Sequence: Synthetic oligonucleotide
  Antisense strand to SEQ ID NO: 1352502
uaugauggagaugucacaa

SEQ ID NO: 1352504 - RNA, 19 nt, Artificial Sequence
  Description of Artificial Sequence: Synthetic oligonucleotide
  Sense strand starting at position 1067 of SEQ ID NO: 1242501
caaauagaccgauguucuu

SEQ ID NO: 1352505 - RNA, 19 nt, Artificial Sequence
  Description of Artificial Sequence: Synthetic oligonucleotide
  Antisense strand to SEQ ID NO: 1352504
aagaacaucggucuauuug

SEQ ID NO: 1352506 - RNA, 19 nt, Artificial Sequence
  Description of Artificial Sequence: Synthetic oligonucleotide
  Sense strand starting at position 1077 of SEQ ID NO: 1242501
gauguucuuggucaaugga

SEQ ID NO: 1352507 - RNA, 19 nt, Artificial Sequence
  Description of Artificial Sequence: Synthetic oligonucleotide
  Antisense strand to SEQ ID NO: 1352506
uccauugaccaagaacauc

SEQ ID NO: 1352508 - RNA, 19 nt, Artificial Sequence
  Description of Artificial Sequence: Synthetic oligonucleotide
  Sense strand starting at position 1080 of SEQ ID NO: 1242501
guucuuggucaauggauua

SEQ ID NO: 1352509 - RNA, 19 nt, Artificial Sequence
  Description of Artificial Sequence: Synthetic oligonucleotide
  Antisense strand to SEQ ID NO: 1352508
uaauccauugaccaagaac

SEQ ID NO: 1352510 - RNA, 19 nt, Artificial Sequence
  Description of Artificial Sequence: Synthetic oligonucleotide
  Sense strand starting at position 1096 of SEQ ID NO: 1242501
uuauuuggcuccucgaguu

SEQ ID NO: 1352511 - RNA, 19 nt, Artificial Sequence
  Description of Artificial Sequence: Synthetic oligonucleotide
  Antisense strand to SEQ ID NO: 1352510
aacucgaggagccaaauaa

SEQ ID NO: 1352512 - RNA, 19 nt, Artificial Sequence
  Description of Artificial Sequence: Synthetic oligonucleotide
  Sense strand starting at position 2084 of SEQ ID NO: 1242501
ggagguucugguggaccaa

SEQ ID NO: 1352513 - RNA, 19 nt, Artificial Sequence
  Description of Artificial Sequence: Synthetic oligonucleotide
  Antisense strand to SEQ ID NO: 1352512
uugguccaccagaaccucc

SEQ ID NO: 1352514 - RNA, 19 nt, Artificial Sequence
  Description of Artificial Sequence: Synthetic oligonucleotide
  Sense strand starting at position 2224 of SEQ ID NO: 1242501
gauucuccugaccagguua

SEQ ID NO: 1352515 - RNA, 19 nt, Artificial Sequence
  Description of Artificial Sequence: Synthetic oligonucleotide
  Antisense strand to SEQ ID NO: 1352514
uaaccuggucaggagaauc

SEQ ID NO: 1352516 - RNA, 19 nt, Artificial Sequence
  Description of Artificial Sequence: Synthetic oligonucleotide
  Sense strand starting at position 2226 of SEQ ID NO: 1242501
uucuccugaccagguuaaa

SEQ ID NO: 1352517 - RNA, 19 nt, Artificial Sequence
  Description of Artificial Sequence: Synthetic oligonucleotide
  Antisense strand to SEQ ID NO: 1352516
uuuaaccuggucaggagaa

SEQ ID NO: 1352518 - RNA, 19 nt, Artificial Sequence
  Description of Artificial Sequence: Synthetic oligonucleotide
  Sense strand starting at position 2253 of SEQ ID NO: 1242501
agcacuguuggugagaagu

SEQ ID NO: 1352519 - RNA, 19 nt, Artificial Sequence
  Description of Artificial Sequence: Synthetic oligonucleotide
  Antisense strand to SEQ ID NO: 1352518
acuucucaccaacagugcu

SEQ ID NO: 1352520 - RNA, 19 nt, Artificial Sequence
  Description of Artificial Sequence: Synthetic oligonucleotide
  Sense strand starting at position 2394 of SEQ ID NO: 1242501
gugggugagugguugggaa

SEQ ID NO: 1352521 - RNA, 19 nt, Artificial Sequence
  Description of Artificial Sequence: Synthetic oligonucleotide
  Antisense strand to SEQ ID NO: 1352520
uucccaaccacucacccac

SEQ ID NO: 1352522 - RNA, 19 nt, Artificial Sequence
  Description of Artificial Sequence: Synthetic oligonucleotide
  Sense strand starting at position 2396 of SEQ ID NO: 1242501
gggugagugguugggaaca

SEQ ID NO: 1352523 - RNA, 19 nt, Artificial Sequence
  Description of Artificial Sequence: Synthetic oligonucleotide
  Antisense strand to SEQ ID NO: 1352522
uguucccaaccacucaccc

SEQ ID NO: 1352524 - RNA, 19 nt, Artificial Sequence
  Description of Artificial Sequence: Synthetic oligonucleotide
  Sense strand starting at position 2449 of SEQ ID NO: 1242501
auucgcaacgauuacagaa

SEQ ID NO: 1352525 - RNA, 19 nt, Artificial Sequence
  Description of Artificial Sequence: Synthetic oligonucleotide
  Antisense strand to SEQ ID NO: 1352524
uucuguaaucguugcgaau

SEQ ID NO: 1352526 - RNA, 19 nt, Artificial Sequence
  Description of Artificial Sequence: Synthetic oligonucleotide
  Sense strand starting at position 2508 of SEQ ID NO: 1242501
ucuugaauccgucauagca

SEQ ID NO: 1352527 - RNA, 19 nt, Artificial Sequence
  Description of Artificial Sequence: Synthetic oligonucleotide
  Antisense strand to SEQ ID NO: 1352526
ugcuaugacggauucaaga

SEQ ID NO: 1352528 - RNA, 19 nt, Artificial Sequence
  Description of Artificial Sequence: Synthetic oligonucleotide
  Sense strand starting at position 2676 of SEQ ID NO: 1242501
acacauaguaaguggucua

SEQ ID NO: 1352529 - RNA, 19 nt, Artificial Sequence
  Description of Artificial Sequence: Synthetic oligonucleotide
  Antisense strand to SEQ ID NO: 1352528
uagaccacuuacuaugugu

SEQ ID NO: 1352530 - RNA, 19 nt, Artificial Sequence
  Description of Artificial Sequence: Synthetic oligonucleotide
  Sense strand starting at position 2986 of SEQ ID NO: 1242501
gauauuccacugugagcaa

SEQ ID NO: 1352531 - RNA, 19 nt, Artificial Sequence
  Description of Artificial Sequence: Synthetic oligonucleotide
  Antisense strand to SEQ ID NO: 1352530
uugcucacaguggaauauc

SEQ ID NO: 1352532 - RNA, 19 nt, Artificial Sequence
  Description of Artificial Sequence: Synthetic oligonucleotide
  Sense strand starting at position 2993 of SEQ ID NO: 1242501
cacugugagcaagacguau

SEQ ID NO: 1352533 - RNA, 19 nt, Artificial Sequence
  Description of Artificial Sequence: Synthetic oligonucleotide
  Antisense strand to SEQ ID NO: 1352532
auacgucuugcucacagug

SEQ ID NO: 1352534 - RNA, 19 nt, Artificial Sequence
  Description of Artificial Sequence: Synthetic oligonucleotide
  Sense strand starting at position 3075 of SEQ ID NO: 1242501
ggguauaugacaugaggua

SEQ ID NO: 1352535 - RNA, 19 nt, Artificial Sequence
  Description of Artificial Sequence: Synthetic oligonucleotide
  Antisense strand to SEQ ID NO: 1352534
uaccucaugucauauaccc

SEQ ID NO: 1352536 - RNA, 19 nt, Artificial Sequence
  Description of Artificial Sequence: Synthetic oligonucleotide
  Sense strand starting at position 3464 of SEQ ID NO: 1242501
cgccucugcccucuguaaa

SEQ ID NO: 1352537 - RNA, 19 nt, Artificial Sequence
  Description of Artificial Sequence: Synthetic oligonucleotide
  Antisense strand to SEQ ID NO: 1352536
uuuacagagggcagaggcg

SEQ ID NO: 1352538 - RNA, 19 nt, Artificial Sequence
  Description of Artificial Sequence: Synthetic oligonucleotide
  Sense strand starting at position 3475 of SEQ ID NO: 1242501
ucuguaaauuucucugucu

SEQ ID NO: 1352539 - RNA, 19 nt, Artificial Sequence
  Description of Artificial Sequence: Synthetic oligonucleotide
  Antisense strand to SEQ ID NO: 1352538
agacagagaaauuuacaga

SEQ ID NO: 1352540 - RNA, 19 nt, Artificial Sequence
  Description of Artificial Sequence: Synthetic oligonucleotide
  Sense strand starting at position 3478 of SEQ ID NO: 1242501
guaaauuucucugucugcu

SEQ ID NO: 1352541 - RNA, 19 nt, Artificial Sequence
  Description of Artificial Sequence: Synthetic oligonucleotide
  Antisense strand to SEQ ID NO: 1352540
agcagacagagaaauuuac

SEQ ID NO: 1352542 - RNA, 19 nt, Artificial Sequence
  Description of Artificial Sequence: Synthetic oligonucleotide
  Sense strand starting at position 3734 of SEQ ID NO: 1242501
aggugauucgaauaugcug

SEQ ID NO: 1352543 - RNA, 19 nt, Artificial Sequence
  Description of Artificial Sequence: Synthetic oligonucleotide
  Antisense strand to SEQ ID NO: 1352542
cagcauauucgaaucaccu

SEQ ID NO: 1352544 - RNA, 19 nt, Artificial Sequence
  Description of Artificial Sequence: Synthetic oligonucleotide
  Sense strand starting at position 3880 of SEQ ID NO: 1242501
agagucaucucauccagug

SEQ ID NO: 1352545 - RNA, 19 nt, Artificial Sequence
  Description of Artificial Sequence: Synthetic oligonucleotide
  Antisense strand to SEQ ID NO: 1352544
cacuggaugagaugacucu

SEQ ID NO: 1352546 - RNA, 19 nt, Artificial Sequence
  Description of Artificial Sequence: Synthetic oligonucleotide
  Sense strand starting at position 168 of SEQ ID NO: 1242502
uuaauuucuucugugucua

SEQ ID NO: 1352547 - RNA, 19 nt, Artificial Sequence
  Description of Artificial Sequence: Synthetic oligonucleotide
  Antisense strand to SEQ ID NO: 1352546
uagacacagaagaaauuaa

SEQ ID NO: 1352548 - RNA, 19 nt, Artificial Sequence
  Description of Artificial Sequence: Synthetic oligonucleotide
  Sense strand starting at position 598 of SEQ ID NO: 1242502
ccaacacaucuuuguguua

SEQ ID NO: 1352549 - RNA, 19 nt, Artificial Sequence
  Description of Artificial Sequence: Synthetic oligonucleotide
  Antisense strand to SEQ ID NO: 1352548
uaacacaaagauguguugg

SEQ ID NO: 1352550 - RNA, 19 nt, Artificial Sequence
  Description of Artificial Sequence: Synthetic oligonucleotide
  Sense strand starting at position 601 of SEQ ID NO: 1242502
acacaucuuuguguuauac

SEQ ID NO: 1352551 - RNA, 19 nt, Artificial Sequence
  Description of Artificial Sequence: Synthetic oligonucleotide
  Antisense strand to SEQ ID NO: 1352550
guauaacacaaagaugugu

SEQ ID NO: 1352552 - RNA, 19 nt, Artificial Sequence
  Description of Artificial Sequence: Synthetic oligonucleotide
  Sense strand starting at position 856 of SEQ ID NO: 1242502
uuucuaaagcgaugagaga

SEQ ID NO: 1352553 - RNA, 19 nt, Artificial Sequence
  Description of Artificial Sequence: Synthetic oligonucleotide
  Antisense strand to SEQ ID NO: 1352552
ucucucaucgcuuuagaaa

SEQ ID NO: 1352554 - RNA, 19 nt, Artificial Sequence
  Description of Artificial Sequence: Synthetic oligonucleotide
  Sense strand starting at position 879 of SEQ ID NO: 1242502
aguuaauaccaggauugcu

SEQ ID NO: 1352555 - RNA, 19 nt, Artificial Sequence
  Description of Artificial Sequence: Synthetic oligonucleotide
  Antisense strand to SEQ ID NO: 1352554
agcaauccugguauuaacu

SEQ ID NO: 1352556 - RNA, 19 nt, Artificial Sequence
  Description of Artificial Sequence: Synthetic oligonucleotide
  Sense strand starting at position 926 of SEQ ID NO: 1242502
aguacaacucaaugucauu

SEQ ID NO: 1352557 - RNA, 19 nt, Artificial Sequence
  Description of Artificial Sequence: Synthetic oligonucleotide
  Antisense strand to SEQ ID NO: 1352556
aaugacauugaguuguacu

SEQ ID NO: 1352558 - RNA, 19 nt, Artificial Sequence
  Description of Artificial Sequence: Synthetic oligonucleotide
  Sense strand starting at position 957 of SEQ ID NO: 1242502
guagccucgacggauacaa

SEQ ID NO: 1352559 - RNA, 19 nt, Artificial Sequence
  Description of Artificial Sequence: Synthetic oligonucleotide
  Antisense strand to SEQ ID NO: 1352558
uuguauccgucgaggcuac

SEQ ID NO: 1352560 - RNA, 19 nt, Artificial Sequence
  Description of Artificial Sequence: Synthetic oligonucleotide
  Sense strand starting at position 975 of SEQ ID NO: 1242502
aaauuaacuucgcuguaga

SEQ ID NO: 1352561 - RNA, 19 nt, Artificial Sequence
  Description of Artificial Sequence: Synthetic oligonucleotide
  Antisense strand to SEQ ID NO: 1352560
ucuacagcgaaguuaauuu

SEQ ID NO: 1352562 - RNA, 19 nt, Artificial Sequence
  Description of Artificial Sequence: Synthetic oligonucleotide
  Sense strand starting at position 978 of SEQ ID NO: 1242502
uuaacuucgcuguagaaua

SEQ ID NO: 1352563 - RNA, 19 nt, Artificial Sequence
  Description of Artificial Sequence: Synthetic oligonucleotide
  Antisense strand to SEQ ID NO: 1352562
uauucuacagcgaaguuaa

SEQ ID NO: 1352564 - RNA, 19 nt, Artificial Sequence
  Description of Artificial Sequence: Synthetic oligonucleotide
  Sense strand starting at position 983 of SEQ ID NO: 1242502
uucgcuguagaauaaagua

SEQ ID NO: 1352565 - RNA, 19 nt, Artificial Sequence
  Description of Artificial Sequence: Synthetic oligonucleotide
  Antisense strand to SEQ ID NO: 1352564
uacuuuauucuacagcgaa

SEQ ID NO: 1352566 - RNA, 19 nt, Artificial Sequence
  Description of Artificial Sequence: Synthetic oligonucleotide
  Sense strand starting at position 1004 of SEQ ID NO: 1242502
cuggcaucccaauggauua

SEQ ID NO: 1352567 - RNA, 19 nt, Artificial Sequence
  Description of Artificial Sequence: Synthetic oligonucleotide
  Antisense strand to SEQ ID NO: 1352566
uaauccauugggaugccag

SEQ ID NO: 1352568 - RNA, 19 nt, Artificial Sequence
  Description of Artificial Sequence: Synthetic oligonucleotide
  Sense strand starting at position 1022 of SEQ ID NO: 1242502
auuuacuucuccgauuuga

SEQ ID NO: 1352569 - RNA, 19 nt, Artificial Sequence
  Description of Artificial Sequence: Synthetic oligonucleotide
  Antisense strand to SEQ ID NO: 1352568
ucaaaucggagaaguaaau

SEQ ID NO: 1352570 - RNA, 19 nt, Artificial Sequence
  Description of Artificial Sequence: Synthetic oligonucleotide
  Sense strand starting at position 1042 of SEQ ID NO: 1242502
agaacauauacgugagucu

SEQ ID NO: 1352571 - RNA, 19 nt, Artificial Sequence
  Description of Artificial Sequence: Synthetic oligonucleotide
  Antisense strand to SEQ ID NO: 1352570
agacucacguauauguucu

SEQ ID NO: 1352572 - RNA, 19 nt, Artificial Sequence
  Description of Artificial Sequence: Synthetic oligonucleotide
  Sense strand starting at position 1043 of SEQ ID NO: 1242502
gaacauauacgugagucuu

SEQ ID NO: 1352573 - RNA, 19 nt, Artificial Sequence
  Description of Artificial Sequence: Synthetic oligonucleotide
  Antisense strand to SEQ ID NO: 1352572
aagacucacguauauguuc

SEQ ID NO: 1352574 - RNA, 19 nt, Artificial Sequence
  Description of Artificial Sequence: Synthetic oligonucleotide
  Sense strand starting at position 1116 of SEQ ID NO: 1242502
acgagcaaaucccucagau

SEQ ID NO: 1352575 - RNA, 19 nt, Artificial Sequence
  Description of Artificial Sequence: Synthetic oligonucleotide
  Antisense strand to SEQ ID NO: 1352574
aucugagggauuugcucgu

SEQ ID NO: 1352576 - RNA, 19 nt, Artificial Sequence
  Description of Artificial Sequence: Synthetic oligonucleotide
  Sense strand starting at position 1212 of SEQ ID NO: 1242502
ccauguuccuuuccaugau

SEQ ID NO: 1352577 - RNA, 19 nt, Artificial Sequence
  Description of Artificial Sequence: Synthetic oligonucleotide
  Antisense strand to SEQ ID NO: 1352576
aucauggaaaggaacaugg

SEQ ID NO: 1352578 - RNA, 19 nt, Artificial Sequence
  Description of Artificial Sequence: Synthetic oligonucleotide
  Sense strand starting at position 1216 of SEQ ID NO: 1242502
guuccuuuccaugauaguu

SEQ ID NO: 1352579 - RNA, 19 nt, Artificial Sequence
  Description of Artificial Sequence: Synthetic oligonucleotide
  Antisense strand to SEQ ID NO: 1352578
aacuaucauggaaaggaac

SEQ ID NO: 1352580 - RNA, 19 nt, Artificial Sequence
  Description of Artificial Sequence: Synthetic oligonucleotide
  Sense strand starting at position 1316 of SEQ ID NO: 1242502
acaagugauauguggguca

SEQ ID NO: 1352581 - RNA, 19 nt, Artificial Sequence
  Description of Artificial Sequence: Synthetic oligonucleotide
  Antisense strand to SEQ ID NO: 1352580
ugacccacauaucacuugu

SEQ ID NO: 1352582 - RNA, 19 nt, Artificial Sequence
  Description of Artificial Sequence: Synthetic oligonucleotide
  Sense strand starting at position 1443 of SEQ ID NO: 1242502
ccagaacgaucuccgagau

SEQ ID NO: 1352583 - RNA, 19 nt, Artificial Sequence
  Description of Artificial Sequence: Synthetic oligonucleotide
  Antisense strand to SEQ ID NO: 1352582
aucucggagaucguucugg

SEQ ID NO: 1352584 - RNA, 19 nt, Artificial Sequence
  Description of Artificial Sequence: Synthetic oligonucleotide
  Sense strand starting at position 2212 of SEQ ID NO: 1242502
gggcgaguuaccgggaaag

SEQ ID NO: 1352585 - RNA, 19 nt, Artificial Sequence
  Description of Artificial Sequence: Synthetic oligonucleotide
  Antisense strand to SEQ ID NO: 1352584
cuuucccgguaacucgccc

SEQ ID NO: 1352586 - RNA, 19 nt, Artificial Sequence
  Description of Artificial Sequence: Synthetic oligonucleotide
  Sense strand starting at position 2214 of SEQ ID NO: 1242502
gcgaguuaccgggaaagga

SEQ ID NO: 1352587 - RNA, 19 nt, Artificial Sequence
  Description of Artificial Sequence: Synthetic oligonucleotide
  Antisense strand to SEQ ID NO: 1352586
uccuuucccgguaacucgc

SEQ ID NO: 1352588 - RNA, 19 nt, Artificial Sequence
  Description of Artificial Sequence: Synthetic oligonucleotide
  Sense strand starting at position 2325 of SEQ ID NO: 1242502
uagggcuuccgagacaagu

SEQ ID NO: 1352589 - RNA, 19 nt, Artificial Sequence
  Description of Artificial Sequence: Synthetic oligonucleotide
  Antisense strand to SEQ ID NO: 1352588
acuugucucggaagcccua

SEQ ID NO: 1352590 - RNA, 19 nt, Artificial Sequence
  Description of Artificial Sequence: Synthetic oligonucleotide
  Sense strand starting at position 2368 of SEQ ID NO: 1242502
uagcgugacaguuaaauug

SEQ ID NO: 1352591 - RNA, 19 nt, Artificial Sequence
  Description of Artificial Sequence: Synthetic oligonucleotide
  Antisense strand to SEQ ID NO: 1352590
caauuuaacugucacgcua

SEQ ID NO: 1352592 - RNA, 19 nt, Artificial Sequence
  Description of Artificial Sequence: Synthetic oligonucleotide
  Sense strand starting at position 2376 of SEQ ID NO: 1242502
caguuaaauugguuauaga

SEQ ID NO: 1352593 - RNA, 19 nt, Artificial Sequence
  Description of Artificial Sequence: Synthetic oligonucleotide
  Antisense strand to SEQ ID NO: 1352592
ucuauaaccaauuuaacug

SEQ ID NO: 1352594 - RNA, 19 nt, Artificial Sequence
  Description of Artificial Sequence: Synthetic oligonucleotide
  Sense strand starting at position 2438 of SEQ ID NO: 1242502
ggaaaugcuuugucacgau

SEQ ID NO: 1352595 - RNA, 19 nt, Artificial Sequence
  Description of Artificial Sequence: Synthetic oligonucleotide
  Antisense strand to SEQ ID NO: 1352594
aucgugacaaagcauuucc

SEQ ID NO: 1352596 - RNA, 19 nt, Artificial Sequence
  Description of Artificial Sequence: Synthetic oligonucleotide
  Sense strand starting at position 2446 of SEQ ID NO: 1242502
uuugucacgauacgaaauu

SEQ ID NO: 1352597 - RNA, 19 nt, Artificial Sequence
  Description of Artificial Sequence: Synthetic oligonucleotide
  Antisense strand to SEQ ID NO: 1352596
aauuucguaucgugacaaa

SEQ ID NO: 1352598 - RNA, 19 nt, Artificial Sequence
  Description of Artificial Sequence: Synthetic oligonucleotide
  Sense strand starting at position 2506 of SEQ ID NO: 1242502
cccugcaagccuuaaggau

SEQ ID NO: 1352599 - RNA, 19 nt, Artificial Sequence
  Description of Artificial Sequence: Synthetic oligonucleotide
  Antisense strand to SEQ ID NO: 1352598
auccuuaaggcuugcaggg

SEQ ID NO: 1352600 - RNA, 19 nt, Artificial Sequence
  Description of Artificial Sequence: Synthetic oligonucleotide
  Sense strand starting at position 2654 of SEQ ID NO: 1242502
ugggcacuuccauaaacga

SEQ ID NO: 1352601 - RNA, 19 nt, Artificial Sequence
  Description of Artificial Sequence: Synthetic oligonucleotide
  Antisense strand to SEQ ID NO: 1352600
ucguuuauggaagugccca

SEQ ID NO: 1352602 - RNA, 19 nt, Artificial Sequence
  Description of Artificial Sequence: Synthetic oligonucleotide
  Sense strand starting at position 2662 of SEQ ID NO: 1242502
uccauaaacgaaugucaac

SEQ ID NO: 1352603 - RNA, 19 nt, Artificial Sequence
  Description of Artificial Sequence: Synthetic oligonucleotide
  Antisense strand to SEQ ID NO: 1352602
guugacauucguuuaugga

SEQ ID NO: 1352604 - RNA, 19 nt, Artificial Sequence
  Description of Artificial Sequence: Synthetic oligonucleotide
  Sense strand starting at position 2871 of SEQ ID NO: 1242502
caggaugcguuucuauuua

SEQ ID NO: 1352605 - RNA, 19 nt, Artificial Sequence
  Description of Artificial Sequence: Synthetic oligonucleotide
  Antisense strand to SEQ ID NO: 1352604
uaaauagaaacgcauccug

SEQ ID NO: 1352606 - RNA, 19 nt, Artificial Sequence
  Description of Artificial Sequence: Synthetic oligonucleotide
  Sense strand starting at position 2876 of SEQ ID NO: 1242502
ugcguuucuauuuaguguu

SEQ ID NO: 1352607 - RNA, 19 nt, Artificial Sequence
  Description of Artificial Sequence: Synthetic oligonucleotide
  Antisense strand to SEQ ID NO: 1352606
aacacuaaauagaaacgca

SEQ ID NO: 1352608 - RNA, 19 nt, Artificial Sequence
  Description of Artificial Sequence: Synthetic oligonucleotide
  Sense strand starting at position 3099 of SEQ ID NO: 1242502
ggguucugccaugaaugga

SEQ ID NO: 1352609 - RNA, 19 nt, Artificial Sequence
  Description of Artificial Sequence: Synthetic oligonucleotide
  Antisense strand to SEQ ID NO: 1352608
uccauucauggcagaaccc

SEQ ID NO: 1352610 - RNA, 19 nt, Artificial Sequence
  Description of Artificial Sequence: Synthetic oligonucleotide
  Sense strand starting at position 3174 of SEQ ID NO: 1242502
gugacauugucauuaaagc

SEQ ID NO: 1352611 - RNA, 19 nt, Artificial Sequence
  Description of Artificial Sequence: Synthetic oligonucleotide
  Antisense strand to SEQ ID NO: 1352610
gcuuuaaugacaaugucac

SEQ ID NO: 1352612 - RNA, 19 nt, Artificial Sequence
  Description of Artificial Sequence: Synthetic oligonucleotide
  Sense strand starting at position 3175 of SEQ ID NO: 1242502
ugacauugucauuaaagcu

SEQ ID NO: 1352613 - RNA, 19 nt, Artificial Sequence
  Description of Artificial Sequence: Synthetic oligonucleotide
  Antisense strand to SEQ ID NO: 1352612
agcuuuaaugacaauguca

SEQ ID NO: 1352614 - RNA, 19 nt, Artificial Sequence
  Description of Artificial Sequence: Synthetic oligonucleotide
  Sense strand starting at position 3182 of SEQ ID NO: 1242502
gucauuaaagcugauuaag

SEQ ID NO: 1352615 - RNA, 19 nt, Artificial Sequence
  Description of Artificial Sequence: Synthetic oligonucleotide
  Antisense strand to SEQ ID NO: 1352614
cuuaaucagcuuuaaugac

SEQ ID NO: 1352616 - RNA, 19 nt, Artificial Sequence
  Description of Artificial Sequence: Synthetic oligonucleotide
  Sense strand starting at position 3238 of SEQ ID NO: 1242502
uuggaacuguuccuauaga

SEQ ID NO: 1352617 - RNA, 19 nt, Artificial Sequence
  Description of Artificial Sequence: Synthetic oligonucleotide
  Antisense strand to SEQ ID NO: 1352616
ucuauaggaacaguuccaa

SEQ ID NO: 1352618 - RNA, 19 nt, Artificial Sequence
  Description of Artificial Sequence: Synthetic oligonucleotide
  Sense strand starting at position 3331 of SEQ ID NO: 1242502
cugucauguccagauccuu

SEQ ID NO: 1352619 - RNA, 19 nt, Artificial Sequence
  Description of Artificial Sequence: Synthetic oligonucleotide
  Antisense strand to SEQ ID NO: 1352618
aaggaucuggacaugacag

SEQ ID NO: 1352620 - RNA, 19 nt, Artificial Sequence
  Description of Artificial Sequence: Synthetic oligonucleotide
  Sense strand starting at position 3336 of SEQ ID NO: 1242502
auguccagauccuuggauu

SEQ ID NO: 1352621 - RNA, 19 nt, Artificial Sequence
  Description of Artificial Sequence: Synthetic oligonucleotide
  Antisense strand to SEQ ID NO: 1352620
aauccaaggaucuggacau

SEQ ID NO: 1352622 - RNA, 19 nt, Artificial Sequence
  Description of Artificial Sequence: Synthetic oligonucleotide
  Sense strand starting at position 3375 of SEQ ID NO: 1242502
auuaaaggcaagugaugau

SEQ ID NO: 1352623 - RNA, 19 nt, Artificial Sequence
  Description of Artificial Sequence: Synthetic oligonucleotide
  Antisense strand to SEQ ID NO: 1352622
aucaucacuugccuuuaau

SEQ ID NO: 1352624 - RNA, 19 nt, Artificial Sequence
  Description of Artificial Sequence: Synthetic oligonucleotide
  Sense strand starting at position 3549 of SEQ ID NO: 1242502
acauuaggguuucuguaaa

SEQ ID NO: 1352625 - RNA, 19 nt, Artificial Sequence
  Description of Artificial Sequence: Synthetic oligonucleotide
  Antisense strand to SEQ ID NO: 1352624
uuuacagaaacccuaaugu

SEQ ID NO: 1352626 - RNA, 19 nt, Artificial Sequence
  Description of Artificial Sequence: Synthetic oligonucleotide
  Sense strand starting at position 266 of SEQ ID NO: 1242503
ugaguuauauccuuaagac

SEQ ID NO: 1352627 - RNA, 19 nt, Artificial Sequence
  Description of Artificial Sequence: Synthetic oligonucleotide
  Antisense strand to SEQ ID NO: 1352626
gucuuaaggauauaacuca

SEQ ID NO: 1352628 - RNA, 19 nt, Artificial Sequence
  Description of Artificial Sequence: Synthetic oligonucleotide
  Sense strand starting at position 537 of SEQ ID NO: 1242503
aauguauucggguaagaag

SEQ ID NO: 1352629 - RNA, 19 nt, Artificial Sequence
  Description of Artificial Sequence: Synthetic oligonucleotide
  Antisense strand to SEQ ID NO: 1352628
cuucuuacccgaauacauu

SEQ ID NO: 1352630 - RNA, 19 nt, Artificial Sequence
  Description of Artificial Sequence: Synthetic oligonucleotide
  Sense strand starting at position 546 of SEQ ID NO: 1242503
ggguaagaagcaugguuac

SEQ ID NO: 1352631 - RNA, 19 nt, Artificial Sequence
  Description of Artificial Sequence: Synthetic oligonucleotide
  Antisense strand to SEQ ID NO: 1352630
guaaccaugcuucuuaccc

SEQ ID NO: 1352632 - RNA, 19 nt, Artificial Sequence
  Description of Artificial Sequence: Synthetic oligonucleotide
  Sense strand starting at position 826 of SEQ ID NO: 1242503
ggcugcauguauuugcuaa

SEQ ID NO: 1352633 - RNA, 19 nt, Artificial Sequence
  Description of Artificial Sequence: Synthetic oligonucleotide
  Antisense strand to SEQ ID NO: 1352632
uuagcaaauacaugcagcc

SEQ ID NO: 1352634 - RNA, 19 nt, Artificial Sequence
  Description of Artificial Sequence: Synthetic oligonucleotide
  Sense strand starting at position 828 of SEQ ID NO: 1242503
cugcauguauuugcuaaca

SEQ ID NO: 1352635 - RNA, 19 nt, Artificial Sequence
  Description of Artificial Sequence: Synthetic oligonucleotide
  Antisense strand to SEQ ID NO: 1352634
uguuagcaaauacaugcag

SEQ ID NO: 1352636 - RNA, 19 nt, Artificial Sequence
  Description of Artificial Sequence: Synthetic oligonucleotide
  Sense strand starting at position 921 of SEQ ID NO: 1242503
gagucuuacccauacugug

SEQ ID NO: 1352637 - RNA, 19 nt, Artificial Sequence
  Description of Artificial Sequence: Synthetic oligonucleotide
  Antisense strand to SEQ ID NO: 1352636
cacaguauggguaagacuc

SEQ ID NO: 1352638 - RNA, 19 nt, Artificial Sequence
  Description of Artificial Sequence: Synthetic oligonucleotide
  Sense strand starting at position 1003 of SEQ ID NO: 1242503
cagucauccgggcauuaag

SEQ ID NO: 1352639 - RNA, 19 nt, Artificial Sequence
  Description of Artificial Sequence: Synthetic oligonucleotide
  Antisense strand to SEQ ID NO: 1352638
cuuaaugcccggaugacug

SEQ ID NO: 1352640 - RNA, 19 nt, Artificial Sequence
  Description of Artificial Sequence: Synthetic oligonucleotide
  Sense strand starting at position 1204 of SEQ ID NO: 1242503
uugaaauaugauugcugga

SEQ ID NO: 1352641 - RNA, 19 nt, Artificial Sequence
  Description of Artificial Sequence: Synthetic oligonucleotide
  Antisense strand to SEQ ID NO: 1352640
uccagcaaucauauuucaa

SEQ ID NO: 1352642 - RNA, 19 nt, Artificial Sequence
  Description of Artificial Sequence: Synthetic oligonucleotide
  Sense strand starting at position 1295 of SEQ ID NO: 1242503
cagaucugucccuggaauc

SEQ ID NO: 1352643 - RNA, 19 nt, Artificial Sequence
  Description of Artificial Sequence: Synthetic oligonucleotide
  Antisense strand to SEQ ID NO: 1352642
gauuccagggacagaucug

SEQ ID NO: 1352644 - RNA, 19 nt, Artificial Sequence
  Description of Artificial Sequence: Synthetic oligonucleotide
  Sense strand starting at position 1393 of SEQ ID NO: 1242503
uuaugccagguaugacaau

SEQ ID NO: 1352645 - RNA, 19 nt, Artificial Sequence
  Description of Artificial Sequence: Synthetic oligonucleotide
  Antisense strand to SEQ ID NO: 1352644
auugucauaccuggcauaa

SEQ ID NO: 1352646 - RNA, 19 nt, Artificial Sequence
  Description of Artificial Sequence: Synthetic oligonucleotide
  Sense strand starting at position 1565 of SEQ ID NO: 1242503
acugauaaucugggcauga

SEQ ID NO: 1352647 - RNA, 19 nt, Artificial Sequence
  Description of Artificial Sequence: Synthetic oligonucleotide
  Antisense strand to SEQ ID NO: 1352646
ucaugcccagauuaucagu

SEQ ID NO: 1352648 - RNA, 19 nt, Artificial Sequence
  Description of Artificial Sequence: Synthetic oligonucleotide
  Sense strand starting at position 1566 of SEQ ID NO: 1242503
cugauaaucugggcaugau

SEQ ID NO: 1352649 - RNA, 19 nt, Artificial Sequence
  Description of Artificial Sequence: Synthetic oligonucleotide
  Antisense strand to SEQ ID NO: 1352648
aucaugcccagauuaucag

SEQ ID NO: 1352650 - RNA, 19 nt, Artificial Sequence
  Description of Artificial Sequence: Synthetic oligonucleotide
  Sense strand starting at position 1645 of SEQ ID NO: 1242503
uuaaauugugccuguauuu

SEQ ID NO: 1352651 - RNA, 19 nt, Artificial Sequence
  Description of Artificial Sequence: Synthetic oligonucleotide
  Antisense strand to SEQ ID NO: 1352650
aaauacaggcacaauuuaa

SEQ ID NO: 1352652 - RNA, 19 nt, Artificial Sequence
  Description of Artificial Sequence: Synthetic oligonucleotide
  Sense strand starting at position 1824 of SEQ ID NO: 1242503
guugucuuggcagcgugau

SEQ ID NO: 1352653 - RNA, 19 nt, Artificial Sequence
  Description of Artificial Sequence: Synthetic oligonucleotide
  Antisense strand to SEQ ID NO: 1352652
aucacgcugccaagacaac

SEQ ID NO: 1352654 - RNA, 19 nt, Artificial Sequence
  Description of Artificial Sequence: Synthetic oligonucleotide
  Sense strand starting at position 1879 of SEQ ID NO: 1242503
cuuuguacagauugauaac

SEQ ID NO: 1352655 - RNA, 19 nt, Artificial Sequence
  Description of Artificial Sequence: Synthetic oligonucleotide
  Antisense strand to SEQ ID NO: 1352654
guuaucaaucuguacaaag

SEQ ID NO: 1352656 - RNA, 19 nt, Artificial Sequence
  Description of Artificial Sequence: Synthetic oligonucleotide
  Sense strand starting at position 2001 of SEQ ID NO: 1242503
accaauagcgaguggagaa

SEQ ID NO: 1352657 - RNA, 19 nt, Artificial Sequence
  Description of Artificial Sequence: Synthetic oligonucleotide
  Antisense strand to SEQ ID NO: 1352656
uucuccacucgcuauuggu

SEQ ID NO: 1352658 - RNA, 19 nt, Artificial Sequence
  Description of Artificial Sequence: Synthetic oligonucleotide
  Sense strand starting at position 2008 of SEQ ID NO: 1242503
gcgaguggagaagaguauu

SEQ ID NO: 1352659 - RNA, 19 nt, Artificial Sequence
  Description of Artificial Sequence: Synthetic oligonucleotide
  Antisense strand to SEQ ID NO: 1352658
aauacucuucuccacucgc

SEQ ID NO: 1352660 - RNA, 19 nt, Artificial Sequence
  Description of Artificial Sequence: Synthetic oligonucleotide
  Sense strand starting at position 2107 of SEQ ID NO: 1242503
agugguaucguugccuguu

SEQ ID NO: 1352661 - RNA, 19 nt, Artificial Sequence
  Description of Artificial Sequence: Synthetic oligonucleotide
  Antisense strand to SEQ ID NO: 1352660
aacaggcaacgauaccacu

SEQ ID NO: 1352662 - RNA, 19 nt, Artificial Sequence
  Description of Artificial Sequence: Synthetic oligonucleotide
  Sense strand starting at position 2126 of SEQ ID NO: 1242503
gauauugaaguuugucaaa

SEQ ID NO: 1352663 - RNA, 19 nt, Artificial Sequence
  Description of Artificial Sequence: Synthetic oligonucleotide
  Antisense strand to SEQ ID NO: 1352662
uuugacaaacuucaauauc

SEQ ID NO: 1352664 - RNA, 19 nt, Artificial Sequence
  Description of Artificial Sequence: Synthetic oligonucleotide
  Sense strand starting at position 2128 of SEQ ID NO: 1242503
uauugaaguuugucaaaga

SEQ ID NO: 1352665 - RNA, 19 nt, Artificial Sequence
  Description of Artificial Sequence: Synthetic oligonucleotide
  Antisense strand to SEQ ID NO: 1352664
ucuuugacaaacuucaaua

SEQ ID NO: 1352666 - RNA, 19 nt, Artificial Sequence
  Description of Artificial Sequence: Synthetic oligonucleotide
  Sense strand starting at position 2138 of SEQ ID NO: 1242503
ugucaaagaacgugaaauc

SEQ ID NO: 1352667 - RNA, 19 nt, Artificial Sequence
  Description of Artificial Sequence: Synthetic oligonucleotide
  Antisense strand to SEQ ID NO: 1352666
gauuucacguucuuugaca

SEQ ID NO: 1352668 - RNA, 19 nt, Artificial Sequence
  Description of Artificial Sequence: Synthetic oligonucleotide
  Sense strand starting at position 2147 of SEQ ID NO: 1242503
acgugaaaucaccagcuua

SEQ ID NO: 1352669 - RNA, 19 nt, Artificial Sequence
  Description of Artificial Sequence: Synthetic oligonucleotide
  Antisense strand to SEQ ID NO: 1352668
uaagcuggugauuucacgu

SEQ ID NO: 1352670 - RNA, 19 nt, Artificial Sequence
  Description of Artificial Sequence: Synthetic oligonucleotide
  Sense strand starting at position 2202 of SEQ ID NO: 1242503
cgaauugauucucuacaaa

SEQ ID NO: 1352671 - RNA, 19 nt, Artificial Sequence
  Description of Artificial Sequence: Synthetic oligonucleotide
  Antisense strand to SEQ ID NO: 1352670
uuuguagagaaucaauucg

SEQ ID NO: 1352672 - RNA, 19 nt, Artificial Sequence
  Description of Artificial Sequence: Synthetic oligonucleotide
  Sense strand starting at position 2295 of SEQ ID NO: 1242503
ggaggaggugaagguuauu

SEQ ID NO: 1352673 - RNA, 19 nt, Artificial Sequence
  Description of Artificial Sequence: Synthetic oligonucleotide
  Antisense strand to SEQ ID NO: 1352672
aauaaccuucaccuccucc

SEQ ID NO: 1352674 - RNA, 19 nt, Artificial Sequence
  Description of Artificial Sequence: Synthetic oligonucleotide
  Sense strand starting at position 2590 of SEQ ID NO: 1242503
auucuuagguauuccgaaa

SEQ ID NO: 1352675 - RNA, 19 nt, Artificial Sequence
  Description of Artificial Sequence: Synthetic oligonucleotide
  Antisense strand to SEQ ID NO: 1352674
uuucggaauaccuaagaau

SEQ ID NO: 1352676 - RNA, 19 nt, Artificial Sequence
  Description of Artificial Sequence: Synthetic oligonucleotide
  Sense strand starting at position 2601 of SEQ ID NO: 1242503
uuccgaaacuaucuuagaa

SEQ ID NO: 1352677 - RNA, 19 nt, Artificial Sequence
  Description of Artificial Sequence: Synthetic oligonucleotide
  Antisense strand to SEQ ID NO: 1352676
uucuaagauaguuucggaa

SEQ ID NO: 1352678 - RNA, 19 nt, Artificial Sequence
  Description of Artificial Sequence: Synthetic oligonucleotide
  Sense strand starting at position 2766 of SEQ ID NO: 1242503
cgucucuaugaauaauuaa

SEQ ID NO: 1352679 - RNA, 19 nt, Artificial Sequence
  Description of Artificial Sequence: Synthetic oligonucleotide
  Antisense strand to SEQ ID NO: 1352678
uuaauuauucauagagacg

SEQ ID NO: 1352680 - RNA, 19 nt, Artificial Sequence
  Description of Artificial Sequence: Synthetic oligonucleotide
  Sense strand starting at position 2816 of SEQ ID NO: 1242503
aguuaaaguuccuugacaa

SEQ ID NO: 1352681 - RNA, 19 nt, Artificial Sequence
  Description of Artificial Sequence: Synthetic oligonucleotide
  Antisense strand to SEQ ID NO: 1352680
uugucaaggaacuuuaacu

SEQ ID NO: 1352682 - RNA, 19 nt, Artificial Sequence
  Description of Artificial Sequence: Synthetic oligonucleotide
  Sense strand starting at position 2817 of SEQ ID NO: 1242503
guuaaaguuccuugacaag

SEQ ID NO: 1352683 - RNA, 19 nt, Artificial Sequence
  Description of Artificial Sequence: Synthetic oligonucleotide
  Antisense strand to SEQ ID NO: 1352682
cuugucaaggaacuuuaac

SEQ ID NO: 1352684 - RNA, 19 nt, Artificial Sequence
  Description of Artificial Sequence: Synthetic oligonucleotide
  Sense strand starting at position 2886 of SEQ ID NO: 1242503
gguuguaguagaggauuau

SEQ ID NO: 1352685 - RNA, 19 nt, Artificial Sequence
  Description of Artificial Sequence: Synthetic oligonucleotide
  Antisense strand to SEQ ID NO: 1352684
auaauccucuacuacaacc

SEQ ID NO: 1352686 - RNA, 19 nt, Artificial Sequence
  Description of Artificial Sequence: Synthetic oligonucleotide
  Sense strand starting at position 2887 of SEQ ID NO: 1242503
guuguaguagaggauuaua

SEQ ID NO: 1352687 - RNA, 19 nt, Artificial Sequence
  Description of Artificial Sequence: Synthetic oligonucleotide
  Antisense strand to SEQ ID NO: 1352686
uauaauccucuacuacaac

SEQ ID NO: 1352688 - RNA, 19 nt, Artificial Sequence
  Description of Artificial Sequence: Synthetic oligonucleotide
  Sense strand starting at position 3025 of SEQ ID NO: 1242503
ucaugcuauuucgcugaca

SEQ ID NO: 1352689 - RNA, 19 nt, Artificial Sequence
  Description of Artificial Sequence: Synthetic oligonucleotide
  Antisense strand to SEQ ID NO: 1352688
ugucagcgaaauagcauga

SEQ ID NO: 1352690 - RNA, 19 nt, Artificial Sequence
  Description of Artificial Sequence: Synthetic oligonucleotide
  Sense strand starting at position 3026 of SEQ ID NO: 1242503
caugcuauuucgcugacau

SEQ ID NO: 1352691 - RNA, 19 nt, Artificial Sequence
  Description of Artificial Sequence: Synthetic oligonucleotide
  Antisense strand to SEQ ID NO: 1352690
augucagcgaaauagcaug

SEQ ID NO: 1352692 - RNA, 19 nt, Artificial Sequence
  Description of Artificial Sequence: Synthetic oligonucleotide
  Sense strand starting at position 3027 of SEQ ID NO: 1242503
augcuauuucgcugacaua

SEQ ID NO: 1352693 - RNA, 19 nt, Artificial Sequence
  Description of Artificial Sequence: Synthetic oligonucleotide
  Antisense strand to SEQ ID NO: 1352692
uaugucagcgaaauagcau

SEQ ID NO: 1352694 - RNA, 19 nt, Artificial Sequence
  Description of Artificial Sequence: Synthetic oligonucleotide
  Sense strand starting at position 3051 of SEQ ID NO: 1242503
uuucgucuugaagaaauac

SEQ ID NO: 1352695 - RNA, 19 nt, Artificial Sequence
  Description of Artificial Sequence: Synthetic oligonucleotide
  Antisense strand to SEQ ID NO: 1352694
guauuucuucaagacgaaa

SEQ ID NO: 1352696 - RNA, 19 nt, Artificial Sequence
  Description of Artificial Sequence: Synthetic oligonucleotide
  Sense strand starting at position 3101 of SEQ ID NO: 1242503
gugucauuguauuuaacuc

SEQ ID NO: 1352697 - RNA, 19 nt, Artificial Sequence
  Description of Artificial Sequence: Synthetic oligonucleotide
  Antisense strand to SEQ ID NO: 1352696
gaguuaaauacaaugacac

SEQ ID NO: 1352698 - RNA, 19 nt, Artificial Sequence
  Description of Artificial Sequence: Synthetic oligonucleotide
  Sense strand starting at position 3455 of SEQ ID NO: 1242503
agccgagugacugaaugaa

SEQ ID NO: 1352699 - RNA, 19 nt, Artificial Sequence
  Description of Artificial Sequence: Synthetic oligonucleotide
  Antisense strand to SEQ ID NO: 1352698
uucauucagucacucggcu

SEQ ID NO: 1352700 - RNA, 19 nt, Artificial Sequence
  Description of Artificial Sequence: Synthetic oligonucleotide
  Sense strand starting at position 3513 of SEQ ID NO: 1242503
gaaguuggagccgacuaaa

SEQ ID NO: 1352701 - RNA, 19 nt, Artificial Sequence
  Description of Artificial Sequence: Synthetic oligonucleotide
  Antisense strand to SEQ ID NO: 1352700
uuuagucggcuccaacuuc

SEQ ID NO: 1352702 - RNA, 19 nt, Artificial Sequence
  Description of Artificial Sequence: Synthetic oligonucleotide
  Sense strand starting at position 3516 of SEQ ID NO: 1242503
guuggagccgacuaaauua

SEQ ID NO: 1352703 - RNA, 19 nt, Artificial Sequence
  Description of Artificial Sequence: Synthetic oligonucleotide
  Antisense strand to SEQ ID NO: 1352702
uaauuuagucggcuccaac

SEQ ID NO: 1352704 - RNA, 19 nt, Artificial Sequence
  Description of Artificial Sequence: Synthetic oligonucleotide
  Sense strand starting at position 3559 of SEQ ID NO: 1242503
ccacuccgucgacaucaaa

SEQ ID NO: 1352705 - RNA, 19 nt, Artificial Sequence
  Description of Artificial Sequence: Synthetic oligonucleotide
  Antisense strand to SEQ ID NO: 1352704
uuugaugucgacggagugg

SEQ ID NO: 1352706 - RNA, 19 nt, Artificial Sequence
  Description of Artificial Sequence: Synthetic oligonucleotide
  Sense strand starting at position 38 of SEQ ID NO: 1242504
uuaaauugugccuguauuu

SEQ ID NO: 1352707 - RNA, 19 nt, Artificial Sequence
  Description of Artificial Sequence: Synthetic oligonucleotide
  Antisense strand to SEQ ID NO: 1352706
aaauacaggcacaauuuaa

SEQ ID NO: 1352708 - RNA, 19 nt, Artificial Sequence
  Description of Artificial Sequence: Synthetic oligonucleotide
  Sense strand starting at position 217 of SEQ ID NO: 1242504
guugucuuggcagcgugau

SEQ ID NO: 1352709 - RNA, 19 nt, Artificial Sequence
  Description of Artificial Sequence: Synthetic oligonucleotide
  Antisense strand to SEQ ID NO: 1352708
aucacgcugccaagacaac

SEQ ID NO: 1352710 - RNA, 19 nt, Artificial Sequence
  Description of Artificial Sequence: Synthetic oligonucleotide
  Sense strand starting at position 272 of SEQ ID NO: 1242504
cuuuguacagauugauaac

SEQ ID NO: 1352711 - RNA, 19 nt, Artificial Sequence
  Description of Artificial Sequence: Synthetic oligonucleotide
  Antisense strand to SEQ ID NO: 1352710
guuaucaaucuguacaaag

SEQ ID NO: 1352712 - RNA, 19 nt, Artificial Sequence
  Description of Artificial Sequence: Synthetic oligonucleotide
  Sense strand starting at position 394 of SEQ ID NO: 1242504
accaauagcgaguggagaa

SEQ ID NO: 1352713 - RNA, 19 nt, Artificial Sequence
  Description of Artificial Sequence: Synthetic oligonucleotide
  Antisense strand to SEQ ID NO: 1352712
uucuccacucgcuauuggu

SEQ ID NO: 1352714 - RNA, 19 nt, Artificial Sequence
  Description of Artificial Sequence: Synthetic oligonucleotide
  Sense strand starting at position 401 of SEQ ID NO: 1242504
gcgaguggagaagaguauu

SEQ ID NO: 1352715 - RNA, 19 nt, Artificial Sequence
  Description of Artificial Sequence: Synthetic oligonucleotide
  Antisense strand to SEQ ID NO: 1352714
aauacucuucuccacucgc

SEQ ID NO: 1352716 - RNA, 19 nt, Artificial Sequence
  Description of Artificial Sequence: Synthetic oligonucleotide
  Sense strand starting at position 500 of SEQ ID NO: 1242504
agugguaucguugccuguu

SEQ ID NO: 1352717 - RNA, 19 nt, Artificial Sequence
  Description of Artificial Sequence: Synthetic oligonucleotide
  Antisense strand to SEQ ID NO: 1352716
aacaggcaacgauaccacu

SEQ ID NO: 1352718 - RNA, 19 nt, Artificial Sequence
  Description of Artificial Sequence: Synthetic oligonucleotide
  Sense strand starting at position 519 of SEQ ID NO: 1242504
gauauugaaguuugucaaa

SEQ ID NO: 1352719 - RNA, 19 nt, Artificial Sequence
  Description of Artificial Sequence: Synthetic oligonucleotide
  Antisense strand to SEQ ID NO: 1352718
uuugacaaacuucaauauc

SEQ ID NO: 1352720 - RNA, 19 nt, Artificial Sequence
  Description of Artificial Sequence: Synthetic oligonucleotide
  Sense strand starting at position 521 of SEQ ID NO: 1242504
uauugaaguuugucaaaga

SEQ ID NO: 1352721 - RNA, 19 nt, Artificial Sequence
  Description of Artificial Sequence: Synthetic oligonucleotide
  Antisense strand to SEQ ID NO: 1352720
ucuuugacaaacuucaaua

SEQ ID NO: 1352722 - RNA, 19 nt, Artificial Sequence
  Description of Artificial Sequence: Synthetic oligonucleotide
  Sense strand starting at position 540 of SEQ ID NO: 1242504
acgugaaaucaccagcuua

SEQ ID NO: 1352723 - RNA, 19 nt, Artificial Sequence
  Description of Artificial Sequence: Synthetic oligonucleotide
  Antisense strand to SEQ ID NO: 1352722
uaagcuggugauuucacgu

SEQ ID NO: 1352724 - RNA, 19 nt, Artificial Sequence
  Description of Artificial Sequence: Synthetic oligonucleotide
  Sense strand starting at position 595 of SEQ ID NO: 1242504
cgaauugauucucuacaaa

SEQ ID NO: 1352725 - RNA, 19 nt, Artificial Sequence
  Description of Artificial Sequence: Synthetic oligonucleotide
  Antisense strand to SEQ ID NO: 1352724
uuuguagagaaucaauucg

SEQ ID NO: 1352726 - RNA, 19 nt, Artificial Sequence
  Description of Artificial Sequence: Synthetic oligonucleotide
  Sense strand starting at position 688 of SEQ ID NO: 1242504
ggaggaggugaagguuauu

SEQ ID NO: 1352727 - RNA, 19 nt, Artificial Sequence
  Description of Artificial Sequence: Synthetic oligonucleotide
  Antisense strand to SEQ ID NO: 1352726
aauaaccuucaccuccucc

SEQ ID NO: 1352728 - RNA, 19 nt, Artificial Sequence
  Description of Artificial Sequence: Synthetic oligonucleotide
  Sense strand starting at position 994 of SEQ ID NO: 1242504
uuccgaaacuaucuuagaa

SEQ ID NO: 1352729 - RNA, 19 nt, Artificial Sequence
  Description of Artificial Sequence: Synthetic oligonucleotide
  Antisense strand to SEQ ID NO: 1352728
uucuaagauaguuucggaa

SEQ ID NO: 1352730 - RNA, 19 nt, Artificial Sequence
  Description of Artificial Sequence: Synthetic oligonucleotide
  Sense strand starting at position 1159 of SEQ ID NO: 1242504
cgucucuaugaauaauuaa

SEQ ID NO: 1352731 - RNA, 19 nt, Artificial Sequence
  Description of Artificial Sequence: Synthetic oligonucleotide
  Antisense strand to SEQ ID NO: 1352730
uuaauuauucauagagacg

SEQ ID NO: 1352732 - RNA, 19 nt, Artificial Sequence
  Description of Artificial Sequence: Synthetic oligonucleotide
  Sense strand starting at position 1209 of SEQ ID NO: 1242504
aguuaaaguuccuugacaa

SEQ ID NO: 1352733 - RNA, 19 nt, Artificial Sequence
  Description of Artificial Sequence: Synthetic oligonucleotide
  Antisense strand to SEQ ID NO: 1352732
uugucaaggaacuuuaacu

SEQ ID NO: 1352734 - RNA, 19 nt, Artificial Sequence
  Description of Artificial Sequence: Synthetic oligonucleotide
  Sense strand starting at position 1280 of SEQ ID NO: 1242504
guuguaguagaggauuaua

SEQ ID NO: 1352735 - RNA, 19 nt, Artificial Sequence
  Description of Artificial Sequence: Synthetic oligonucleotide
  Antisense strand to SEQ ID NO: 1352734
uauaauccucuacuacaac

SEQ ID NO: 1352736 - RNA, 19 nt, Artificial Sequence
  Description of Artificial Sequence: Synthetic oligonucleotide
  Sense strand starting at position 1418 of SEQ ID NO: 1242504
ucaugcuauuucgcugaca

SEQ ID NO: 1352737 - RNA, 19 nt, Artificial Sequence
  Description of Artificial Sequence: Synthetic oligonucleotide
  Antisense strand to SEQ ID NO: 1352736
ugucagcgaaauagcauga

SEQ ID NO: 1352738 - RNA, 19 nt, Artificial Sequence
  Description of Artificial Sequence: Synthetic oligonucleotide
  Sense strand starting at position 1419 of SEQ ID NO: 1242504
caugcuauuucgcugacau

SEQ ID NO: 1352739 - RNA, 19 nt, Artificial Sequence
  Description of Artificial Sequence: Synthetic oligonucleotide
  Antisense strand to SEQ ID NO: 1352738
augucagcgaaauagcaug

SEQ ID NO: 1352740 - RNA, 19 nt, Artificial Sequence
  Description of Artificial Sequence: Synthetic oligonucleotide
  Sense strand starting at position 1420 of SEQ ID NO: 1242504
augcuauuucgcugacaua

SEQ ID NO: 1352741 - RNA, 19 nt, Artificial Sequence
  Description of Artificial Sequence: Synthetic oligonucleotide
  Antisense strand to SEQ ID NO: 1352740
uaugucagcgaaauagcau

SEQ ID NO: 1352742 - RNA, 19 nt, Artificial Sequence
  Description of Artificial Sequence: Synthetic oligonucleotide
  Sense strand starting at position 1444 of SEQ ID NO: 1242504
uuucgucuugaagaaauac

SEQ ID NO: 1352743 - RNA, 19 nt, Artificial Sequence
  Description of Artificial Sequence: Synthetic oligonucleotide
  Antisense strand to SEQ ID NO: 1352742
guauuucuucaagacgaaa

SEQ ID NO: 1352744 - RNA, 19 nt, Artificial Sequence
  Description of Artificial Sequence: Synthetic oligonucleotide
  Sense strand starting at position 1494 of SEQ ID NO: 1242504
gugucauuguauuuaacuc

SEQ ID NO: 1352745 - RNA, 19 nt, Artificial Sequence
  Description of Artificial Sequence: Synthetic oligonucleotide
  Antisense strand to SEQ ID NO: 1352744
gaguuaaauacaaugacac

SEQ ID NO: 1352746 - RNA, 19 nt, Artificial Sequence
  Description of Artificial Sequence: Synthetic oligonucleotide
  Sense strand starting at position 1848 of SEQ ID NO: 1242504
agccgagugacugaaugaa

SEQ ID NO: 1352747 - RNA, 19 nt, Artificial Sequence
  Description of Artificial Sequence: Synthetic oligonucleotide
  Antisense strand to SEQ ID NO: 1352746
uucauucagucacucggcu

SEQ ID NO: 1352748 - RNA, 19 nt, Artificial Sequence
  Description of Artificial Sequence: Synthetic oligonucleotide
  Sense strand starting at position 1906 of SEQ ID NO: 1242504
gaaguuggagccgacuaaa

SEQ ID NO: 1352749 - RNA, 19 nt, Artificial Sequence
  Description of Artificial Sequence: Synthetic oligonucleotide
  Antisense strand to SEQ ID NO: 1352748
uuuagucggcuccaacuuc

SEQ ID NO: 1352750 - RNA, 19 nt, Artificial Sequence
  Description of Artificial Sequence: Synthetic oligonucleotide
  Sense strand starting at position 1909 of SEQ ID NO: 1242504
guuggagccgacuaaauua

SEQ ID NO: 1352751 - RNA, 19 nt, Artificial Sequence
  Description of Artificial Sequence: Synthetic oligonucleotide
  Antisense strand to SEQ ID NO: 1352750
uaauuuagucggcuccaac

SEQ ID NO: 1352752 - RNA, 19 nt, Artificial Sequence
  Description of Artificial Sequence: Synthetic oligonucleotide
  Sense strand starting at position 2704 of SEQ ID NO: 1242504
aaucuccagcguuaggaaa

SEQ ID NO: 1352753 - RNA, 19 nt, Artificial Sequence
  Description of Artificial Sequence: Synthetic oligonucleotide
  Antisense strand to SEQ ID NO: 1352752
uuuccuaacgcuggagauu

SEQ ID NO: 1352754 - RNA, 19 nt, Artificial Sequence
  Description of Artificial Sequence: Synthetic oligonucleotide
  Sense strand starting at position 2888 of SEQ ID NO: 1242504
uguguaagugcagcuguau

SEQ ID NO: 1352755 - RNA, 19 nt, Artificial Sequence
  Description of Artificial Sequence: Synthetic oligonucleotide
  Antisense strand to SEQ ID NO: 1352754
auacagcugcacuuacaca

SEQ ID NO: 1352756 - RNA, 19 nt, Artificial Sequence
  Description of Artificial Sequence: Synthetic oligonucleotide
  Sense strand starting at position 2889 of SEQ ID NO: 1242504
guguaagugcagcuguaua

SEQ ID NO: 1352757 - RNA, 19 nt, Artificial Sequence
  Description of Artificial Sequence: Synthetic oligonucleotide
  Antisense strand to SEQ ID NO: 1352756
uauacagcugcacuuacac

SEQ ID NO: 1352758 - RNA, 19 nt, Artificial Sequence
  Description of Artificial Sequence: Synthetic oligonucleotide
  Sense strand starting at position 2901 of SEQ ID NO: 1242504
cuguauacagcugauauua

SEQ ID NO: 1352759 - RNA, 19 nt, Artificial Sequence
  Description of Artificial Sequence: Synthetic oligonucleotide
  Antisense strand to SEQ ID NO: 1352758
uaauaucagcuguauacag

SEQ ID NO: 1352760 - RNA, 19 nt, Artificial Sequence
  Description of Artificial Sequence: Synthetic oligonucleotide
  Sense strand starting at position 2909 of SEQ ID NO: 1242504
agcugauauuaaguaauac

SEQ ID NO: 1352761 - RNA, 19 nt, Artificial Sequence
  Description of Artificial Sequence: Synthetic oligonucleotide
  Antisense strand to SEQ ID NO: 1352760
guauuacuuaauaucagcu

SEQ ID NO: 1352762 - RNA, 19 nt, Artificial Sequence
  Description of Artificial Sequence: Synthetic oligonucleotide
  Sense strand starting at position 2948 of SEQ ID NO: 1242504
gagguaguauaacuauaca

SEQ ID NO: 1352763 - RNA, 19 nt, Artificial Sequence
  Description of Artificial Sequence: Synthetic oligonucleotide
  Antisense strand to SEQ ID NO: 1352762
uguauaguuauacuaccuc

SEQ ID NO: 1352764 - RNA, 19 nt, Artificial Sequence
  Description of Artificial Sequence: Synthetic oligonucleotide
  Sense strand starting at position 2977 of SEQ ID NO: 1242504
ugcuuaacuagguaagaug

SEQ ID NO: 1352765 - RNA, 19 nt, Artificial Sequence
  Description of Artificial Sequence: Synthetic oligonucleotide
  Antisense strand to SEQ ID NO: 1352764
caucuuaccuaguuaagca

SEQ ID NO: 1352766 - RNA, 19 nt, Artificial Sequence
  Description of Artificial Sequence: Synthetic oligonucleotide
  Sense strand starting at position 2984 of SEQ ID NO: 1242504
cuagguaagauguagucaa

SEQ ID NO: 1352767 - RNA, 19 nt, Artificial Sequence
  Description of Artificial Sequence: Synthetic oligonucleotide
  Antisense strand to SEQ ID NO: 1352766
uugacuacaucuuaccuag

SEQ ID NO: 1352768 - RNA, 19 nt, Artificial Sequence
  Description of Artificial Sequence: Synthetic oligonucleotide
  Sense strand starting at position 2988 of SEQ ID NO: 1242504
guaagauguagucaaguga

SEQ ID NO: 1352769 - RNA, 19 nt, Artificial Sequence
  Description of Artificial Sequence: Synthetic oligonucleotide
  Antisense strand to SEQ ID NO: 1352768
ucacuugacuacaucuuac

SEQ ID NO: 1352770 - RNA, 19 nt, Artificial Sequence
  Description of Artificial Sequence: Synthetic oligonucleotide
  Sense strand starting at position 2992 of SEQ ID NO: 1242504
gauguagucaagugaaaug

SEQ ID NO: 1352771 - RNA, 19 nt, Artificial Sequence
  Description of Artificial Sequence: Synthetic oligonucleotide
  Antisense strand to SEQ ID NO: 1352770
cauuucacuugacuacauc

SEQ ID NO: 1352772 - RNA, 19 nt, Artificial Sequence
  Description of Artificial Sequence: Synthetic oligonucleotide
  Sense strand starting at position 3216 of SEQ ID NO: 1242504
aaggaaagccgucagguua

SEQ ID NO: 1352773 - RNA, 19 nt, Artificial Sequence
  Description of Artificial Sequence: Synthetic oligonucleotide
  Antisense strand to SEQ ID NO: 1352772
uaaccugacggcuuuccuu

SEQ ID NO: 1352774 - RNA, 19 nt, Artificial Sequence
  Description of Artificial Sequence: Synthetic oligonucleotide
  Sense strand starting at position 3237 of SEQ ID NO: 1242504
gggacugucuuauugaauc

SEQ ID NO: 1352775 - RNA, 19 nt, Artificial Sequence
  Description of Artificial Sequence: Synthetic oligonucleotide
  Antisense strand to SEQ ID NO: 1352774
gauucaauaagacaguccc

SEQ ID NO: 1352776 - RNA, 19 nt, Artificial Sequence
  Description of Artificial Sequence: Synthetic oligonucleotide
  Sense strand starting at position 3348 of SEQ ID NO: 1242504
cugagaaacucaguuuccu

SEQ ID NO: 1352777 - RNA, 19 nt, Artificial Sequence
  Description of Artificial Sequence: Synthetic oligonucleotide
  Antisense strand to SEQ ID NO: 1352776
aggaaacugaguuucucag

SEQ ID NO: 1352778 - RNA, 19 nt, Artificial Sequence
  Description of Artificial Sequence: Synthetic oligonucleotide
  Sense strand starting at position 3465 of SEQ ID NO: 1242504
ucuugacauaguuggauga

SEQ ID NO: 1352779 - RNA, 19 nt, Artificial Sequence
  Description of Artificial Sequence: Synthetic oligonucleotide
  Antisense strand to SEQ ID NO: 1352778
ucauccaacuaugucaaga

SEQ ID NO: 1352780 - RNA, 19 nt, Artificial Sequence
  Description of Artificial Sequence: Synthetic oligonucleotide
  Sense strand starting at position 3466 of SEQ ID NO: 1242504
cuugacauaguuggaugaa

SEQ ID NO: 1352781 - RNA, 19 nt, Artificial Sequence
  Description of Artificial Sequence: Synthetic oligonucleotide
  Antisense strand to SEQ ID NO: 1352780
uucauccaacuaugucaag

SEQ ID NO: 1352782 - RNA, 19 nt, Artificial Sequence
  Description of Artificial Sequence: Synthetic oligonucleotide
  Sense strand starting at position 3505 of SEQ ID NO: 1242504
uuccacaugucaucagaua

SEQ ID NO: 1352783 - RNA, 19 nt, Artificial Sequence
  Description of Artificial Sequence: Synthetic oligonucleotide
  Antisense strand to SEQ ID NO: 1352782
uaucugaugacauguggaa

SEQ ID NO: 1352784 - RNA, 19 nt, Artificial Sequence
  Description of Artificial Sequence: Synthetic oligonucleotide
  Sense strand starting at position 3818 of SEQ ID NO: 1242504
ugaggaguccuacgaagaa

SEQ ID NO: 1352785 - RNA, 19 nt, Artificial Sequence
  Description of Artificial Sequence: Synthetic oligonucleotide
  Antisense strand to SEQ ID NO: 1352784
uucuucguaggacuccuca

SEQ ID NO: 1352786 - RNA, 19 nt, Artificial Sequence
  Description of Artificial Sequence: Synthetic oligonucleotide
  Sense strand starting at position 17 of SEQ ID NO: 1242505
agacacugcucugcagaaa

SEQ ID NO: 1352787 - RNA, 19 nt, Artificial Sequence
  Description of Artificial Sequence: Synthetic oligonucleotide
  Antisense strand to SEQ ID NO: 1352786
uuucugcagagcagugucu

SEQ ID NO: 1352788 - RNA, 19 nt, Artificial Sequence
  Description of Artificial Sequence: Synthetic oligonucleotide
  Sense strand starting at position 108 of SEQ ID NO: 1242505
gugcuaggugcucugggua

SEQ ID NO: 1352789 - RNA, 19 nt, Artificial Sequence
  Description of Artificial Sequence: Synthetic oligonucleotide
  Antisense strand to SEQ ID NO: 1352788
uacccagagcaccuagcac

SEQ ID NO: 1352790 - RNA, 19 nt, Artificial Sequence
  Description of Artificial Sequence: Synthetic oligonucleotide
  Sense strand starting at position 113 of SEQ ID NO: 1242505
aggugcucuggguagauga

SEQ ID NO: 1352791 - RNA, 19 nt, Artificial Sequence
  Description of Artificial Sequence: Synthetic oligonucleotide
  Antisense strand to SEQ ID NO: 1352790
ucaucuacccagagcaccu

SEQ ID NO: 1352792 - RNA, 19 nt, Artificial Sequence
  Description of Artificial Sequence: Synthetic oligonucleotide
  Sense strand starting at position 115 of SEQ ID NO: 1242505
gugcucuggguagaugaau

SEQ ID NO: 1352793 - RNA, 19 nt, Artificial Sequence
  Description of Artificial Sequence: Synthetic oligonucleotide
  Antisense strand to SEQ ID NO: 1352792
auucaucuacccagagcac

SEQ ID NO: 1352794 - RNA, 19 nt, Artificial Sequence
  Description of Artificial Sequence: Synthetic oligonucleotide
  Sense strand starting at position 134 of SEQ ID NO: 1242505
gaagaagaccacuggucuu

SEQ ID NO: 1352795 - RNA, 19 nt, Artificial Sequence
  Description of Artificial Sequence: Synthetic oligonucleotide
  Antisense strand to SEQ ID NO: 1352794
aagaccaguggucuucuuc

SEQ ID NO: 1352796 - RNA, 19 nt, Artificial Sequence
  Description of Artificial Sequence: Synthetic oligonucleotide
  Sense strand starting at position 162 of SEQ ID NO: 1242505
gggcaaucuaugcgggaga

SEQ ID NO: 1352797 - RNA, 19 nt, Artificial Sequence
  Description of Artificial Sequence: Synthetic oligonucleotide
  Antisense strand to SEQ ID NO: 1352796
ucucccgcauagauugccc

SEQ ID NO: 1352798 - RNA, 19 nt, Artificial Sequence
  Description of Artificial Sequence: Synthetic oligonucleotide
  Sense strand starting at position 164 of SEQ ID NO: 1242505
gcaaucuaugcgggagaaa

SEQ ID NO: 1352799 - RNA, 19 nt, Artificial Sequence
  Description of Artificial Sequence: Synthetic oligonucleotide
  Antisense strand to SEQ ID NO: 1352798
uuucucccgcauagauugc

SEQ ID NO: 1352800 - RNA, 19 nt, Artificial Sequence
  Description of Artificial Sequence: Synthetic oligonucleotide
  Sense strand starting at position 400 of SEQ ID NO: 1242505
agaugaauuacuugugguu

SEQ ID NO: 1352801 - RNA, 19 nt, Artificial Sequence
  Description of Artificial Sequence: Synthetic oligonucleotide
  Antisense strand to SEQ ID NO: 1352800
aaccacaaguaauucaucu

SEQ ID NO: 1352802 - RNA, 19 nt, Artificial Sequence
  Description of Artificial Sequence: Synthetic oligonucleotide
  Sense strand starting at position 695 of SEQ ID NO: 1242505
aggaaacuguuugauuuau

SEQ ID NO: 1352803 - RNA, 19 nt, Artificial Sequence
  Description of Artificial Sequence: Synthetic oligonucleotide
  Antisense strand to SEQ ID NO: 1352802
auaaaucaaacaguuuccu

SEQ ID NO: 1352804 - RNA, 19 nt, Artificial Sequence
  Description of Artificial Sequence: Synthetic oligonucleotide
  Sense strand starting at position 771 of SEQ ID NO: 1242505
gcaugucuuggugaucaga

SEQ ID NO: 1352805 - RNA, 19 nt, Artificial Sequence
  Description of Artificial Sequence: Synthetic oligonucleotide
  Antisense strand to SEQ ID NO: 1352804
ucugaucaccaagacaugc

SEQ ID NO: 1352806 - RNA, 19 nt, Artificial Sequence
  Description of Artificial Sequence: Synthetic oligonucleotide
  Sense strand starting at position 779 of SEQ ID NO: 1242505
uggugaucagacggaccua

SEQ ID NO: 1352807 - RNA, 19 nt, Artificial Sequence
  Description of Artificial Sequence: Synthetic oligonucleotide
  Antisense strand to SEQ ID NO: 1352806
uagguccgucugaucacca

SEQ ID NO: 1352808 - RNA, 19 nt, Artificial Sequence
  Description of Artificial Sequence: Synthetic oligonucleotide
  Sense strand starting at position 852 of SEQ ID NO: 1242505
guuugcucauuuguuaacu

SEQ ID NO: 1352809 - RNA, 19 nt, Artificial Sequence
  Description of Artificial Sequence: Synthetic oligonucleotide
  Antisense strand to SEQ ID NO: 1352808
aguuaacaaaugagcaaac

SEQ ID NO: 1352810 - RNA, 19 nt, Artificial Sequence
  Description of Artificial Sequence: Synthetic oligonucleotide
  Sense strand starting at position 995 of SEQ ID NO: 1242505
guuaauuacuagcuaugac

SEQ ID NO: 1352811 - RNA, 19 nt, Artificial Sequence
  Description of Artificial Sequence: Synthetic oligonucleotide
  Antisense strand to SEQ ID NO: 1352810
gucauagcuaguaauuaac

SEQ ID NO: 1352812 - RNA, 19 nt, Artificial Sequence
  Description of Artificial Sequence: Synthetic oligonucleotide
  Sense strand starting at position 1106 of SEQ ID NO: 1242505
ucauacauuccugguuaca

SEQ ID NO: 1352813 - RNA, 19 nt, Artificial Sequence
  Description of Artificial Sequence: Synthetic oligonucleotide
  Antisense strand to SEQ ID NO: 1352812
uguaaccaggaauguauga

SEQ ID NO: 1352814 - RNA, 19 nt, Artificial Sequence
  Description of Artificial Sequence: Synthetic oligonucleotide
  Sense strand starting at position 1108 of SEQ ID NO: 1242505
auacauuccugguuacaca

SEQ ID NO: 1352815 - RNA, 19 nt, Artificial Sequence
  Description of Artificial Sequence: Synthetic oligonucleotide
  Antisense strand to SEQ ID NO: 1352814
uguguaaccaggaauguau

SEQ ID NO: 1352816 - RNA, 19 nt, Artificial Sequence
  Description of Artificial Sequence: Synthetic oligonucleotide
  Sense strand starting at position 1261 of SEQ ID NO: 1242505
cuguguauuuggcccagua

SEQ ID NO: 1352817 - RNA, 19 nt, Artificial Sequence
  Description of Artificial Sequence: Synthetic oligonucleotide
  Antisense strand to SEQ ID NO: 1352816
uacugggccaaauacacag

SEQ ID NO: 1352818 - RNA, 19 nt, Artificial Sequence
  Description of Artificial Sequence: Synthetic oligonucleotide
  Sense strand starting at position 1263 of SEQ ID NO: 1242505
guguauuuggcccaguacu

SEQ ID NO: 1352819 - RNA, 19 nt, Artificial Sequence
  Description of Artificial Sequence: Synthetic oligonucleotide
  Antisense strand to SEQ ID NO: 1352818
aguacugggccaaauacac

SEQ ID NO: 1352820 - RNA, 19 nt, Artificial Sequence
  Description of Artificial Sequence: Synthetic oligonucleotide
  Sense strand starting at position 2715 of SEQ ID NO: 1242505
gauggugacuugucuuuag

SEQ ID NO: 1352821 - RNA, 19 nt, Artificial Sequence
  Description of Artificial Sequence: Synthetic oligonucleotide
  Antisense strand to SEQ ID NO: 1352820
cuaaagacaagucaccauc

SEQ ID NO: 1352822 - RNA, 19 nt, Artificial Sequence
  Description of Artificial Sequence: Synthetic oligonucleotide
  Sense strand starting at position 2718 of SEQ ID NO: 1242505
ggugacuugucuuuagauc

SEQ ID NO: 1352823 - RNA, 19 nt, Artificial Sequence
  Description of Artificial Sequence: Synthetic oligonucleotide
  Antisense strand to SEQ ID NO: 1352822
gaucuaaagacaagucacc

SEQ ID NO: 1352824 - RNA, 19 nt, Artificial Sequence
  Description of Artificial Sequence: Synthetic oligonucleotide
  Sense strand starting at position 2747 of SEQ ID NO: 1242505
ccagcucuccuauaugguu

SEQ ID NO: 1352825 - RNA, 19 nt, Artificial Sequence
  Description of Artificial Sequence: Synthetic oligonucleotide
  Antisense strand to SEQ ID NO: 1352824
aaccauauaggagagcugg

SEQ ID NO: 1352826 - RNA, 19 nt, Artificial Sequence
  Description of Artificial Sequence: Synthetic oligonucleotide
  Sense strand starting at position 2767 of SEQ ID NO: 1242505
ggacucacugugcaacauu

SEQ ID NO: 1352827 - RNA, 19 nt, Artificial Sequence
  Description of Artificial Sequence: Synthetic oligonucleotide
  Antisense strand to SEQ ID NO: 1352826
aauguugcacagugagucc

SEQ ID NO: 1352828 - RNA, 19 nt, Artificial Sequence
  Description of Artificial Sequence: Synthetic oligonucleotide
  Sense strand starting at position 2779 of SEQ ID NO: 1242505
caacauuggccagggaagu

SEQ ID NO: 1352829 - RNA, 19 nt, Artificial Sequence
  Description of Artificial Sequence: Synthetic oligonucleotide
  Antisense strand to SEQ ID NO: 1352828
acuucccuggccaauguug

SEQ ID NO: 1352830 - RNA, 19 nt, Artificial Sequence
  Description of Artificial Sequence: Synthetic oligonucleotide
  Sense strand starting at position 2780 of SEQ ID NO: 1242505
aacauuggccagggaaguu

SEQ ID NO: 1352831 - RNA, 19 nt, Artificial Sequence
  Description of Artificial Sequence: Synthetic oligonucleotide
  Antisense strand to SEQ ID NO: 1352830
aacuucccuggccaauguu

SEQ ID NO: 1352832 - RNA, 19 nt, Artificial Sequence
  Description of Artificial Sequence: Synthetic oligonucleotide
  Sense strand starting at position 2912 of SEQ ID NO: 1242505
uuuacugaagauugugcua

SEQ ID NO: 1352833 - RNA, 19 nt, Artificial Sequence
  Description of Artificial Sequence: Synthetic oligonucleotide
  Antisense strand to SEQ ID NO: 1352832
uagcacaaucuucaguaaa

SEQ ID NO: 1352834 - RNA, 19 nt, Artificial Sequence
  Description of Artificial Sequence: Synthetic oligonucleotide
  Sense strand starting at position 2992 of SEQ ID NO: 1242505
augaauguauuccuucuga

SEQ ID NO: 1352835 - RNA, 19 nt, Artificial Sequence
  Description of Artificial Sequence: Synthetic oligonucleotide
  Antisense strand to SEQ ID NO: 1352834
ucagaaggaauacauucau

SEQ ID NO: 1352836 - RNA, 19 nt, Artificial Sequence
  Description of Artificial Sequence: Synthetic oligonucleotide
  Sense strand starting at position 3022 of SEQ ID NO: 1242505
uucucugcccuaggaagaa

SEQ ID NO: 1352837 - RNA, 19 nt, Artificial Sequence
  Description of Artificial Sequence: Synthetic oligonucleotide
  Antisense strand to SEQ ID NO: 1352836
uucuuccuagggcagagaa

SEQ ID NO: 1352838 - RNA, 19 nt, Artificial Sequence
  Description of Artificial Sequence: Synthetic oligonucleotide
  Sense strand starting at position 3140 of SEQ ID NO: 1242505
gcuauuaaugauggccaaa

SEQ ID NO: 1352839 - RNA, 19 nt, Artificial Sequence
  Description of Artificial Sequence: Synthetic oligonucleotide
  Antisense strand to SEQ ID NO: 1352838
uuuggccaucauuaauagc

SEQ ID NO: 1352840 - RNA, 19 nt, Artificial Sequence
  Description of Artificial Sequence: Synthetic oligonucleotide
  Sense strand starting at position 3413 of SEQ ID NO: 1242505
agugacucucguggaagau

SEQ ID NO: 1352841 - RNA, 19 nt, Artificial Sequence
  Description of Artificial Sequence: Synthetic oligonucleotide
  Antisense strand to SEQ ID NO: 1352840
aucuuccacgagagucacu

SEQ ID NO: 1352842 - RNA, 19 nt, Artificial Sequence
  Description of Artificial Sequence: Synthetic oligonucleotide
  Sense strand starting at position 3414 of SEQ ID NO: 1242505
gugacucucguggaagauu

SEQ ID NO: 1352843 - RNA, 19 nt, Artificial Sequence
  Description of Artificial Sequence: Synthetic oligonucleotide
  Antisense strand to SEQ ID NO: 1352842
aaucuuccacgagagucac

SEQ ID NO: 1352844 - RNA, 19 nt, Artificial Sequence
  Description of Artificial Sequence: Synthetic oligonucleotide
  Sense strand starting at position 3450 of SEQ ID NO: 1242505
agaccuagaucuucgguga

SEQ ID NO: 1352845 - RNA, 19 nt, Artificial Sequence
  Description of Artificial Sequence: Synthetic oligonucleotide
  Antisense strand to SEQ ID NO: 1352844
ucaccgaagaucuaggucu

SEQ ID NO: 1352846 - RNA, 19 nt, Artificial Sequence
  Description of Artificial Sequence: Synthetic oligonucleotide
  Sense strand starting at position 3453 of SEQ ID NO: 1242505
ccuagaucuucggugagaa

SEQ ID NO: 1352847 - RNA, 19 nt, Artificial Sequence
  Description of Artificial Sequence: Synthetic oligonucleotide
  Antisense strand to SEQ ID NO: 1352846
uucucaccgaagaucuagg

SEQ ID NO: 1352848 - RNA, 19 nt, Artificial Sequence
  Description of Artificial Sequence: Synthetic oligonucleotide
  Sense strand starting at position 3454 of SEQ ID NO: 1242505
cuagaucuucggugagaag

SEQ ID NO: 1352849 - RNA, 19 nt, Artificial Sequence
  Description of Artificial Sequence: Synthetic oligonucleotide
  Antisense strand to SEQ ID NO: 1352848
cuucucaccgaagaucuag

SEQ ID NO: 1352850 - RNA, 19 nt, Artificial Sequence
  Description of Artificial Sequence: Synthetic oligonucleotide
  Sense strand starting at position 3559 of SEQ ID NO: 1242505
cuuggugaggcuuauacuu

SEQ ID NO: 1352851 - RNA, 19 nt, Artificial Sequence
  Description of Artificial Sequence: Synthetic oligonucleotide
  Antisense strand to SEQ ID NO: 1352850
aaguauaagccucaccaag

SEQ ID NO: 1352852 - RNA, 19 nt, Artificial Sequence
  Description of Artificial Sequence: Synthetic oligonucleotide
  Sense strand starting at position 3572 of SEQ ID NO: 1242505
auacuucuggucugguaua

SEQ ID NO: 1352853 - RNA, 19 nt, Artificial Sequence
  Description of Artificial Sequence: Synthetic oligonucleotide
  Antisense strand to SEQ ID NO: 1352852
uauaccagaccagaaguau

SEQ ID NO: 1352854 - RNA, 19 nt, Artificial Sequence
  Description of Artificial Sequence: Synthetic oligonucleotide
  Sense strand starting at position 3577 of SEQ ID NO: 1242505
ucuggucugguauagguaa

SEQ ID NO: 1352855 - RNA, 19 nt, Artificial Sequence
  Description of Artificial Sequence: Synthetic oligonucleotide
  Antisense strand to SEQ ID NO: 1352854
uuaccuauaccagaccaga

SEQ ID NO: 1352856 - RNA, 19 nt, Artificial Sequence
  Description of Artificial Sequence: Synthetic oligonucleotide
  Sense strand starting at position 3604 of SEQ ID NO: 1242505
gauagugcuugucuggaga

SEQ ID NO: 1352857 - RNA, 19 nt, Artificial Sequence
  Description of Artificial Sequence: Synthetic oligonucleotide
  Antisense strand to SEQ ID NO: 1352856
ucuccagacaagcacuauc

SEQ ID NO: 1352858 - RNA, 19 nt, Artificial Sequence
  Description of Artificial Sequence: Synthetic oligonucleotide
  Sense strand starting at position 3768 of SEQ ID NO: 1242505
agcuaauggcaauggaaua

SEQ ID NO: 1352859 - RNA, 19 nt, Artificial Sequence
  Description of Artificial Sequence: Synthetic oligonucleotide
  Antisense strand to SEQ ID NO: 1352858
uauuccauugccauuagcu

SEQ ID NO: 1352860 - RNA, 19 nt, Artificial Sequence
  Description of Artificial Sequence: Synthetic oligonucleotide
  Sense strand starting at position 3827 of SEQ ID NO: 1242505
uggccauggcucugaaaga

SEQ ID NO: 1352861 - RNA, 19 nt, Artificial Sequence
  Description of Artificial Sequence: Synthetic oligonucleotide
  Antisense strand to SEQ ID NO: 1352860
ucuuucagagccauggcca

SEQ ID NO: 1352862 - RNA, 19 nt, Artificial Sequence
  Description of Artificial Sequence: Synthetic oligonucleotide
  Sense strand starting at position 3837 of SEQ ID NO: 1242505
ucugaaagaugaucucuuu

SEQ ID NO: 1352863 - RNA, 19 nt, Artificial Sequence
  Description of Artificial Sequence: Synthetic oligonucleotide
  Antisense strand to SEQ ID NO: 1352862
aaagagaucaucuuucaga

SEQ ID NO: 1352864 - RNA, 19 nt, Artificial Sequence
  Description of Artificial Sequence: Synthetic oligonucleotide
  Sense strand starting at position 3895 of SEQ ID NO: 1242505
augaucuugcagugacaau

SEQ ID NO: 1352865 - RNA, 19 nt, Artificial Sequence
  Description of Artificial Sequence: Synthetic oligonucleotide
  Antisense strand to SEQ ID NO: 1352864
auugucacugcaagaucau

SEQ ID NO: 1352866 - RNA, 19 nt, Artificial Sequence
  Description of Artificial Sequence: Synthetic oligonucleotide
  Sense strand starting at position 25 of SEQ ID NO: 1242506
aucuacaacucugauguga

SEQ ID NO: 1352867 - RNA, 19 nt, Artificial Sequence
  Description of Artificial Sequence: Synthetic oligonucleotide
  Antisense strand to SEQ ID NO: 1352866
ucacaucagaguuguagau

SEQ ID NO: 1352868 - RNA, 19 nt, Artificial Sequence
  Description of Artificial Sequence: Synthetic oligonucleotide
  Sense strand starting at position 53 of SEQ ID NO: 1242506
gcgauuucuacuggugaua

SEQ ID NO: 1352869 - RNA, 19 nt, Artificial Sequence
  Description of Artificial Sequence: Synthetic oligonucleotide
  Antisense strand to SEQ ID NO: 1352868
uaucaccaguagaaaucgc

SEQ ID NO: 1352870 - RNA, 19 nt, Artificial Sequence
  Description of Artificial Sequence: Synthetic oligonucleotide
  Sense strand starting at position 55 of SEQ ID NO: 1242506
gauuucuacuggugauaaa

SEQ ID NO: 1352871 - RNA, 19 nt, Artificial Sequence
  Description of Artificial Sequence: Synthetic oligonucleotide
  Antisense strand to SEQ ID NO: 1352870
uuuaucaccaguagaaauc

SEQ ID NO: 1352872 - RNA, 19 nt, Artificial Sequence
  Description of Artificial Sequence: Synthetic oligonucleotide
  Sense strand starting at position 66 of SEQ ID NO: 1242506
gugauaaagucauagguag

SEQ ID NO: 1352873 - RNA, 19 nt, Artificial Sequence
  Description of Artificial Sequence: Synthetic oligonucleotide
  Antisense strand to SEQ ID NO: 1352872
cuaccuaugacuuuaucac

SEQ ID NO: 1352874 - RNA, 19 nt, Artificial Sequence
  Description of Artificial Sequence: Synthetic oligonucleotide
  Sense strand starting at position 72 of SEQ ID NO: 1242506
aagucauagguaggcuaau

SEQ ID NO: 1352875 - RNA, 19 nt, Artificial Sequence
  Description of Artificial Sequence: Synthetic oligonucleotide
  Antisense strand to SEQ ID NO: 1352874
auuagccuaccuaugacuu

SEQ ID NO: 1352876 - RNA, 19 nt, Artificial Sequence
  Description of Artificial Sequence: Synthetic oligonucleotide
  Sense strand starting at position 73 of SEQ ID NO: 1242506
agucauagguaggcuaaua

SEQ ID NO: 1352877 - RNA, 19 nt, Artificial Sequence
  Description of Artificial Sequence: Synthetic oligonucleotide
  Antisense strand to SEQ ID NO: 1352876
uauuagccuaccuaugacu

SEQ ID NO: 1352878 - RNA, 19 nt, Artificial Sequence
  Description of Artificial Sequence: Synthetic oligonucleotide
  Sense strand starting at position 524 of SEQ ID NO: 1242506
uuaguaucaaagcgagcaa

SEQ ID NO: 1352879 - RNA, 19 nt, Artificial Sequence
  Description of Artificial Sequence: Synthetic oligonucleotide
  Antisense strand to SEQ ID NO: 1352878
uugcucgcuuugauacuaa

SEQ ID NO: 1352880 - RNA, 19 nt, Artificial Sequence
  Description of Artificial Sequence: Synthetic oligonucleotide
  Sense strand starting at position 535 of SEQ ID NO: 1242506
gcgagcaaucuguacuuaa

SEQ ID NO: 1352881 - RNA, 19 nt, Artificial Sequence
  Description of Artificial Sequence: Synthetic oligonucleotide
  Antisense strand to SEQ ID NO: 1352880
uuaaguacagauugcucgc

SEQ ID NO: 1352882 - RNA, 19 nt, Artificial Sequence
  Description of Artificial Sequence: Synthetic oligonucleotide
  Sense strand starting at position 577 of SEQ ID NO: 1242506
acaugauucuaggccagua

SEQ ID NO: 1352883 - RNA, 19 nt, Artificial Sequence
  Description of Artificial Sequence: Synthetic oligonucleotide
  Antisense strand to SEQ ID NO: 1352882
uacuggccuagaaucaugu

SEQ ID NO: 1352884 - RNA, 19 nt, Artificial Sequence
  Description of Artificial Sequence: Synthetic oligonucleotide
  Sense strand starting at position 579 of SEQ ID NO: 1242506
augauucuaggccaguaaa

SEQ ID NO: 1352885 - RNA, 19 nt, Artificial Sequence
  Description of Artificial Sequence: Synthetic oligonucleotide
  Antisense strand to SEQ ID NO: 1352884
uuuacuggccuagaaucau

SEQ ID NO: 1352886 - RNA, 19 nt, Artificial Sequence
  Description of Artificial Sequence: Synthetic oligonucleotide
  Sense strand starting at position 637 of SEQ ID NO: 1242506
uccugaaaucugugaauga

SEQ ID NO: 1352887 - RNA, 19 nt, Artificial Sequence
  Description of Artificial Sequence: Synthetic oligonucleotide
  Antisense strand to SEQ ID NO: 1352886
ucauucacagauuucagga

SEQ ID NO: 1352888 - RNA, 19 nt, Artificial Sequence
  Description of Artificial Sequence: Synthetic oligonucleotide
  Sense strand starting at position 638 of SEQ ID NO: 1242506
ccugaaaucugugaaugaa

SEQ ID NO: 1352889 - RNA, 19 nt, Artificial Sequence
  Description of Artificial Sequence: Synthetic oligonucleotide
  Antisense strand to SEQ ID NO: 1352888
uucauucacagauuucagg

SEQ ID NO: 1352890 - RNA, 19 nt, Artificial Sequence
  Description of Artificial Sequence: Synthetic oligonucleotide
  Sense strand starting at position 751 of SEQ ID NO: 1242506
gcauuuaaguuucuguauu

SEQ ID NO: 1352891 - RNA, 19 nt, Artificial Sequence
  Description of Artificial Sequence: Synthetic oligonucleotide
  Antisense strand to SEQ ID NO: 1352890
aauacagaaacuuaaaugc

SEQ ID NO: 1352892 - RNA, 19 nt, Artificial Sequence
  Description of Artificial Sequence: Synthetic oligonucleotide
  Sense strand starting at position 761 of SEQ ID NO: 1242506
uucuguauuguauaaccua

SEQ ID NO: 1352893 - RNA, 19 nt, Artificial Sequence
  Description of Artificial Sequence: Synthetic oligonucleotide
  Antisense strand to SEQ ID NO: 1352892
uagguuauacaauacagaa

SEQ ID NO: 1352894 - RNA, 19 nt, Artificial Sequence
  Description of Artificial Sequence: Synthetic oligonucleotide
  Sense strand starting at position 835 of SEQ ID NO: 1242506
agaaacuuggcaugguuua

SEQ ID NO: 1352895 - RNA, 19 nt, Artificial Sequence
  Description of Artificial Sequence: Synthetic oligonucleotide
  Antisense strand to SEQ ID NO: 1352894
uaaaccaugccaaguuucu

SEQ ID NO: 1352896 - RNA, 19 nt, Artificial Sequence
  Description of Artificial Sequence: Synthetic oligonucleotide
  Sense strand starting at position 836 of SEQ ID NO: 1242506
gaaacuuggcaugguuuaa

SEQ ID NO: 1352897 - RNA, 19 nt, Artificial Sequence
  Description of Artificial Sequence: Synthetic oligonucleotide
  Antisense strand to SEQ ID NO: 1352896
uuaaaccaugccaaguuuc

SEQ ID NO: 1352898 - RNA, 19 nt, Artificial Sequence
  Description of Artificial Sequence: Synthetic oligonucleotide
  Sense strand starting at position 895 of SEQ ID NO: 1242506
gacacuuuauggcuaugau

SEQ ID NO: 1352899 - RNA, 19 nt, Artificial Sequence
  Description of Artificial Sequence: Synthetic oligonucleotide
  Antisense strand to SEQ ID NO: 1352898
aucauagccauaaaguguc

SEQ ID NO: 1352900 - RNA, 19 nt, Artificial Sequence
  Description of Artificial Sequence: Synthetic oligonucleotide
  Sense strand starting at position 896 of SEQ ID NO: 1242506
acacuuuauggcuaugauc

SEQ ID NO: 1352901 - RNA, 19 nt, Artificial Sequence
  Description of Artificial Sequence: Synthetic oligonucleotide
  Antisense strand to SEQ ID NO: 1352900
gaucauagccauaaagugu

SEQ ID NO: 1352902 - RNA, 19 nt, Artificial Sequence
  Description of Artificial Sequence: Synthetic oligonucleotide
  Sense strand starting at position 898 of SEQ ID NO: 1242506
acuuuauggcuaugaucau

SEQ ID NO: 1352903 - RNA, 19 nt, Artificial Sequence
  Description of Artificial Sequence: Synthetic oligonucleotide
  Antisense strand to SEQ ID NO: 1352902
augaucauagccauaaagu

SEQ ID NO: 1352904 - RNA, 19 nt, Artificial Sequence
  Description of Artificial Sequence: Synthetic oligonucleotide
  Sense strand starting at position 904 of SEQ ID NO: 1242506
uggcuaugaucauuaaggu

SEQ ID NO: 1352905 - RNA, 19 nt, Artificial Sequence
  Description of Artificial Sequence: Synthetic oligonucleotide
  Antisense strand to SEQ ID NO: 1352904
accuuaaugaucauagcca

SEQ ID NO: 1352906 - RNA, 19 nt, Artificial Sequence
  Description of Artificial Sequence: Synthetic oligonucleotide
  Sense strand starting at position 905 of SEQ ID NO: 1242506
ggcuaugaucauuaaggua

SEQ ID NO: 1352907 - RNA, 19 nt, Artificial Sequence
  Description of Artificial Sequence: Synthetic oligonucleotide
  Antisense strand to SEQ ID NO: 1352906
uaccuuaaugaucauagcc

SEQ ID NO: 1352908 - RNA, 19 nt, Artificial Sequence
  Description of Artificial Sequence: Synthetic oligonucleotide
  Sense strand starting at position 1082 of SEQ ID NO: 1242506
gagaucucacuuuacguaa

SEQ ID NO: 1352909 - RNA, 19 nt, Artificial Sequence
  Description of Artificial Sequence: Synthetic oligonucleotide
  Antisense strand to SEQ ID NO: 1352908
uuacguaaagugagaucuc

SEQ ID NO: 1352910 - RNA, 19 nt, Artificial Sequence
  Description of Artificial Sequence: Synthetic oligonucleotide
  Sense strand starting at position 1103 of SEQ ID NO: 1242506
aucuaaauucuguaagucu

SEQ ID NO: 1352911 - RNA, 19 nt, Artificial Sequence
  Description of Artificial Sequence: Synthetic oligonucleotide
  Antisense strand to SEQ ID NO: 1352910
agacuuacagaauuuagau

SEQ ID NO: 1352912 - RNA, 19 nt, Artificial Sequence
  Description of Artificial Sequence: Synthetic oligonucleotide
  Sense strand starting at position 1151 of SEQ ID NO: 1242506
uagaaauuguauuagguga

SEQ ID NO: 1352913 - RNA, 19 nt, Artificial Sequence
  Description of Artificial Sequence: Synthetic oligonucleotide
  Antisense strand to SEQ ID NO: 1352912
ucaccuaauacaauuucua

SEQ ID NO: 1352914 - RNA, 19 nt, Artificial Sequence
  Description of Artificial Sequence: Synthetic oligonucleotide
  Sense strand starting at position 1205 of SEQ ID NO: 1242506
gcagcauucuagcuggagu

SEQ ID NO: 1352915 - RNA, 19 nt, Artificial Sequence
  Description of Artificial Sequence: Synthetic oligonucleotide
  Antisense strand to SEQ ID NO: 1352914
acuccagcuagaaugcugc

SEQ ID NO: 1352916 - RNA, 19 nt, Artificial Sequence
  Description of Artificial Sequence: Synthetic oligonucleotide
  Sense strand starting at position 1247 of SEQ ID NO: 1242506
cagguuaaaucagugucau

SEQ ID NO: 1352917 - RNA, 19 nt, Artificial Sequence
  Description of Artificial Sequence: Synthetic oligonucleotide
  Antisense strand to SEQ ID NO: 1352916
augacacugauuuaaccug

SEQ ID NO: 1352918 - RNA, 19 nt, Artificial Sequence
  Description of Artificial Sequence: Synthetic oligonucleotide
  Sense strand starting at position 1248 of SEQ ID NO: 1242506
agguuaaaucagugucaug

SEQ ID NO: 1352919 - RNA, 19 nt, Artificial Sequence
  Description of Artificial Sequence: Synthetic oligonucleotide
  Antisense strand to SEQ ID NO: 1352918
caugacacugauuuaaccu

SEQ ID NO: 1352920 - RNA, 19 nt, Artificial Sequence
  Description of Artificial Sequence: Synthetic oligonucleotide
  Sense strand starting at position 1251 of SEQ ID NO: 1242506
uuaaaucagugucaugaca

SEQ ID NO: 1352921 - RNA, 19 nt, Artificial Sequence
  Description of Artificial Sequence: Synthetic oligonucleotide
  Antisense strand to SEQ ID NO: 1352920
ugucaugacacugauuuaa

SEQ ID NO: 1352922 - RNA, 19 nt, Artificial Sequence
  Description of Artificial Sequence: Synthetic oligonucleotide
  Sense strand starting at position 1326 of SEQ ID NO: 1242506
gcaggagucagugagaaua

SEQ ID NO: 1352923 - RNA, 19 nt, Artificial Sequence
  Description of Artificial Sequence: Synthetic oligonucleotide
  Antisense strand to SEQ ID NO: 1352922
uauucucacugacuccugc

SEQ ID NO: 1352924 - RNA, 19 nt, Artificial Sequence
  Description of Artificial Sequence: Synthetic oligonucleotide
  Sense strand starting at position 1328 of SEQ ID NO: 1242506
aggagucagugagaauaca

SEQ ID NO: 1352925 - RNA, 19 nt, Artificial Sequence
  Description of Artificial Sequence: Synthetic oligonucleotide
  Antisense strand to SEQ ID NO: 1352924
uguauucucacugacuccu

SEQ ID NO: 1352926 - RNA, 19 nt, Artificial Sequence
  Description of Artificial Sequence: Synthetic oligonucleotide
  Sense strand starting at position 1958 of SEQ ID NO: 1242506
cggcauucucgcgagaguu

SEQ ID NO: 1352927 - RNA, 19 nt, Artificial Sequence
  Description of Artificial Sequence: Synthetic oligonucleotide
  Antisense strand to SEQ ID NO: 1352926
aacucucgcgagaaugccg

SEQ ID NO: 1352928 - RNA, 19 nt, Artificial Sequence
  Description of Artificial Sequence: Synthetic oligonucleotide
  Sense strand starting at position 1959 of SEQ ID NO: 1242506
ggcauucucgcgagaguuc

SEQ ID NO: 1352929 - RNA, 19 nt, Artificial Sequence
  Description of Artificial Sequence: Synthetic oligonucleotide
  Antisense strand to SEQ ID NO: 1352928
gaacucucgcgagaaugcc

SEQ ID NO: 1352930 - RNA, 19 nt, Artificial Sequence
  Description of Artificial Sequence: Synthetic oligonucleotide
  Sense strand starting at position 2114 of SEQ ID NO: 1242506
uuucuacuguacucagagu

SEQ ID NO: 1352931 - RNA, 19 nt, Artificial Sequence
  Description of Artificial Sequence: Synthetic oligonucleotide
  Antisense strand to SEQ ID NO: 1352930
acucugaguacaguagaaa

SEQ ID NO: 1352932 - RNA, 19 nt, Artificial Sequence
  Description of Artificial Sequence: Synthetic oligonucleotide
  Sense strand starting at position 2137 of SEQ ID NO: 1242506
uggugucaucgugaaucag

SEQ ID NO: 1352933 - RNA, 19 nt, Artificial Sequence
  Description of Artificial Sequence: Synthetic oligonucleotide
  Antisense strand to SEQ ID NO: 1352932
cugauucacgaugacacca

SEQ ID NO: 1352934 - RNA, 19 nt, Artificial Sequence
  Description of Artificial Sequence: Synthetic oligonucleotide
  Sense strand starting at position 2143 of SEQ ID NO: 1242506
caucgugaaucagauacau

SEQ ID NO: 1352935 - RNA, 19 nt, Artificial Sequence
  Description of Artificial Sequence: Synthetic oligonucleotide
  Antisense strand to SEQ ID NO: 1352934
auguaucugauucacgaug

SEQ ID NO: 1352936 - RNA, 19 nt, Artificial Sequence
  Description of Artificial Sequence: Synthetic oligonucleotide
  Sense strand starting at position 2179 of SEQ ID NO: 1242506
cucggugacagucagugau

SEQ ID NO: 1352937 - RNA, 19 nt, Artificial Sequence
  Description of Artificial Sequence: Synthetic oligonucleotide
  Antisense strand to SEQ ID NO: 1352936
aucacugacugucaccgag

SEQ ID NO: 1352938 - RNA, 19 nt, Artificial Sequence
  Description of Artificial Sequence: Synthetic oligonucleotide
  Sense strand starting at position 2181 of SEQ ID NO: 1242506
cggugacagucagugauuu

SEQ ID NO: 1352939 - RNA, 19 nt, Artificial Sequence
  Description of Artificial Sequence: Synthetic oligonucleotide
  Antisense strand to SEQ ID NO: 1352938
aaaucacugacugucaccg

SEQ ID NO: 1352940 - RNA, 19 nt, Artificial Sequence
  Description of Artificial Sequence: Synthetic oligonucleotide
  Sense strand starting at position 2297 of SEQ ID NO: 1242506
agcuucucccuccagugau

SEQ ID NO: 1352941 - RNA, 19 nt, Artificial Sequence
  Description of Artificial Sequence: Synthetic oligonucleotide
  Antisense strand to SEQ ID NO: 1352940
aucacuggagggagaagcu

SEQ ID NO: 1352942 - RNA, 19 nt, Artificial Sequence
  Description of Artificial Sequence: Synthetic oligonucleotide
  Sense strand starting at position 2309 of SEQ ID NO: 1242506
cagugauggucucugcgga

SEQ ID NO: 1352943 - RNA, 19 nt, Artificial Sequence
  Description of Artificial Sequence: Synthetic oligonucleotide
  Antisense strand to SEQ ID NO: 1352942
uccgcagagaccaucacug

SEQ ID NO: 1352944 - RNA, 19 nt, Artificial Sequence
  Description of Artificial Sequence: Synthetic oligonucleotide
  Sense strand starting at position 2310 of SEQ ID NO: 1242506
agugauggucucugcggau

SEQ ID NO: 1352945 - RNA, 19 nt, Artificial Sequence
  Description of Artificial Sequence: Synthetic oligonucleotide
  Antisense strand to SEQ ID NO: 1352944
auccgcagagaccaucacu

SEQ ID NO: 1352946 - RNA, 19 nt, Artificial Sequence
  Description of Artificial Sequence: Synthetic oligonucleotide
  Sense strand starting at position 81 of SEQ ID NO: 1242507
auggcaagcucuccaaguu

SEQ ID NO: 1352947 - RNA, 19 nt, Artificial Sequence
  Description of Artificial Sequence: Synthetic oligonucleotide
  Antisense strand to SEQ ID NO: 1352946
aacuuggagagcuugccau

SEQ ID NO: 1352948 - RNA, 19 nt, Artificial Sequence
  Description of Artificial Sequence: Synthetic oligonucleotide
  Sense strand starting at position 170 of SEQ ID NO: 1242507
ggcugaaacgaugggaguu

SEQ ID NO: 1352949 - RNA, 19 nt, Artificial Sequence
  Description of Artificial Sequence: Synthetic oligonucleotide
  Antisense strand to SEQ ID NO: 1352948
aacucccaucguuucagcc

SEQ ID NO: 1352950 - RNA, 19 nt, Artificial Sequence
  Description of Artificial Sequence: Synthetic oligonucleotide
  Sense strand starting at position 171 of SEQ ID NO: 1242507
gcugaaacgaugggaguua

SEQ ID NO: 1352951 - RNA, 19 nt, Artificial Sequence
  Description of Artificial Sequence: Synthetic oligonucleotide
  Antisense strand to SEQ ID NO: 1352950
uaacucccaucguuucagc

SEQ ID NO: 1352952 - RNA, 19 nt, Artificial Sequence
  Description of Artificial Sequence: Synthetic oligonucleotide
  Sense strand starting at position 201 of SEQ ID NO: 1242507
caggcacugcucuaggaau

SEQ ID NO: 1352953 - RNA, 19 nt, Artificial Sequence
  Description of Artificial Sequence: Synthetic oligonucleotide
  Antisense strand to SEQ ID NO: 1352952
auuccuagagcagugccug

SEQ ID NO: 1352954 - RNA, 19 nt, Artificial Sequence
  Description of Artificial Sequence: Synthetic oligonucleotide
  Sense strand starting at position 203 of SEQ ID NO: 1242507
ggcacugcucuaggaauga

SEQ ID NO: 1352955 - RNA, 19 nt, Artificial Sequence
  Description of Artificial Sequence: Synthetic oligonucleotide
  Antisense strand to SEQ ID NO: 1352954
ucauuccuagagcagugcc

SEQ ID NO: 1352956 - RNA, 19 nt, Artificial Sequence
  Description of Artificial Sequence: Synthetic oligonucleotide
  Sense strand starting at position 370 of SEQ ID NO: 1242507
gagaacauauggcugcaaa

SEQ ID NO: 1352957 - RNA, 19 nt, Artificial Sequence
  Description of Artificial Sequence: Synthetic oligonucleotide
  Antisense strand to SEQ ID NO: 1352956
uuugcagccauauguucuc

SEQ ID NO: 1352958 - RNA, 19 nt, Artificial Sequence
  Description of Artificial Sequence: Synthetic oligonucleotide
  Sense strand starting at position 550 of SEQ ID NO: 1242507
gggccacucuuuggaacuu

SEQ ID NO: 1352959 - RNA, 19 nt, Artificial Sequence
  Description of Artificial Sequence: Synthetic oligonucleotide
  Antisense strand to SEQ ID NO: 1352958
aaguuccaaagaguggccc

SEQ ID NO: 1352960 - RNA, 19 nt, Artificial Sequence
  Description of Artificial Sequence: Synthetic oligonucleotide
  Sense strand starting at position 724 of SEQ ID NO: 1242507
cacccuuugcugugugacu

SEQ ID NO: 1352961 - RNA, 19 nt, Artificial Sequence
  Description of Artificial Sequence: Synthetic oligonucleotide
  Antisense strand to SEQ ID NO: 1352960
agucacacagcaaagggug

SEQ ID NO: 1352962 - RNA, 19 nt, Artificial Sequence
  Description of Artificial Sequence: Synthetic oligonucleotide
  Sense strand starting at position 735 of SEQ ID NO: 1242507
gugugacucuaggcaaagu

SEQ ID NO: 1352963 - RNA, 19 nt, Artificial Sequence
  Description of Artificial Sequence: Synthetic oligonucleotide
  Antisense strand to SEQ ID NO: 1352962
acuuugccuagagucacac

SEQ ID NO: 1352964 - RNA, 19 nt, Artificial Sequence
  Description of Artificial Sequence: Synthetic oligonucleotide
  Sense strand starting at position 778 of SEQ ID NO: 1242507
cgcaccuuucggcuuguaa

SEQ ID NO: 1352965 - RNA, 19 nt, Artificial Sequence
  Description of Artificial Sequence: Synthetic oligonucleotide
  Antisense strand to SEQ ID NO: 1352964
uuacaagccgaaaggugcg

SEQ ID NO: 1352966 - RNA, 19 nt, Artificial Sequence
  Description of Artificial Sequence: Synthetic oligonucleotide
  Sense strand starting at position 780 of SEQ ID NO: 1242507
caccuuucggcuuguaaau

SEQ ID NO: 1352967 - RNA, 19 nt, Artificial Sequence
  Description of Artificial Sequence: Synthetic oligonucleotide
  Antisense strand to SEQ ID NO: 1352966
auuuacaagccgaaaggug

SEQ ID NO: 1352968 - RNA, 19 nt, Artificial Sequence
  Description of Artificial Sequence: Synthetic oligonucleotide
  Sense strand starting at position 845 of SEQ ID NO: 1242507
aaggaaugcugucucaaga

SEQ ID NO: 1352969 - RNA, 19 nt, Artificial Sequence
  Description of Artificial Sequence: Synthetic oligonucleotide
  Antisense strand to SEQ ID NO: 1352968
ucuugagacagcauuccuu

SEQ ID NO: 1352970 - RNA, 19 nt, Artificial Sequence
  Description of Artificial Sequence: Synthetic oligonucleotide
  Sense strand starting at position 961 of SEQ ID NO: 1242507
ucccuauaugcccaucagu

SEQ ID NO: 1352971 - RNA, 19 nt, Artificial Sequence
  Description of Artificial Sequence: Synthetic oligonucleotide
  Antisense strand to SEQ ID NO: 1352970
acugaugggcauauaggga

SEQ ID NO: 1352972 - RNA, 19 nt, Artificial Sequence
  Description of Artificial Sequence: Synthetic oligonucleotide
  Sense strand starting at position 1027 of SEQ ID NO: 1242507
cgcucuugucaccagcaaa

SEQ ID NO: 1352973 - RNA, 19 nt, Artificial Sequence
  Description of Artificial Sequence: Synthetic oligonucleotide
  Antisense strand to SEQ ID NO: 1352972
uuugcuggugacaagagcg

SEQ ID NO: 1352974 - RNA, 19 nt, Artificial Sequence
  Description of Artificial Sequence: Synthetic oligonucleotide
  Sense strand starting at position 2355 of SEQ ID NO: 1242507
ggacucugaucccagaauc

SEQ ID NO: 1352975 - RNA, 19 nt, Artificial Sequence
  Description of Artificial Sequence: Synthetic oligonucleotide
  Antisense strand to SEQ ID NO: 1352974
gauucugggaucagagucc

SEQ ID NO: 1352976 - RNA, 19 nt, Artificial Sequence
  Description of Artificial Sequence: Synthetic oligonucleotide
  Sense strand starting at position 2536 of SEQ ID NO: 1242507
guccuauugccaugccuuu

SEQ ID NO: 1352977 - RNA, 19 nt, Artificial Sequence
  Description of Artificial Sequence: Synthetic oligonucleotide
  Antisense strand to SEQ ID NO: 1352976
aaaggcauggcaauaggac

SEQ ID NO: 1352978 - RNA, 19 nt, Artificial Sequence
  Description of Artificial Sequence: Synthetic oligonucleotide
  Sense strand starting at position 2619 of SEQ ID NO: 1242507
caacuuggguccugaguuu

SEQ ID NO: 1352979 - RNA, 19 nt, Artificial Sequence
  Description of Artificial Sequence: Synthetic oligonucleotide
  Antisense strand to SEQ ID NO: 1352978
aaacucaggacccaaguug

SEQ ID NO: 1352980 - RNA, 19 nt, Artificial Sequence
  Description of Artificial Sequence: Synthetic oligonucleotide
  Sense strand starting at position 2626 of SEQ ID NO: 1242507
gguccugaguuucccaaga

SEQ ID NO: 1352981 - RNA, 19 nt, Artificial Sequence
  Description of Artificial Sequence: Synthetic oligonucleotide
  Antisense strand to SEQ ID NO: 1352980
ucuugggaaacucaggacc

SEQ ID NO: 1352982 - RNA, 19 nt, Artificial Sequence
  Description of Artificial Sequence: Synthetic oligonucleotide
  Sense strand starting at position 2628 of SEQ ID NO: 1242507
uccugaguuucccaagauc

SEQ ID NO: 1352983 - RNA, 19 nt, Artificial Sequence
  Description of Artificial Sequence: Synthetic oligonucleotide
  Antisense strand to SEQ ID NO: 1352982
gaucuugggaaacucagga

SEQ ID NO: 1352984 - RNA, 19 nt, Artificial Sequence
  Description of Artificial Sequence: Synthetic oligonucleotide
  Sense strand starting at position 2631 of SEQ ID NO: 1242507
ugaguuucccaagaucuug

SEQ ID NO: 1352985 - RNA, 19 nt, Artificial Sequence
  Description of Artificial Sequence: Synthetic oligonucleotide
  Antisense strand to SEQ ID NO: 1352984
caagaucuugggaaacuca

SEQ ID NO: 1352986 - RNA, 19 nt, Artificial Sequence
  Description of Artificial Sequence: Synthetic oligonucleotide
  Sense strand starting at position 2636 of SEQ ID NO: 1242507
uucccaagaucuugguaau

SEQ ID NO: 1352987 - RNA, 19 nt, Artificial Sequence
  Description of Artificial Sequence: Synthetic oligonucleotide
  Antisense strand to SEQ ID NO: 1352986
auuaccaagaucuugggaa

SEQ ID NO: 1352988 - RNA, 19 nt, Artificial Sequence
  Description of Artificial Sequence: Synthetic oligonucleotide
  Sense strand starting at position 2637 of SEQ ID NO: 1242507
ucccaagaucuugguaauc

SEQ ID NO: 1352989 - RNA, 19 nt, Artificial Sequence
  Description of Artificial Sequence: Synthetic oligonucleotide
  Antisense strand to SEQ ID NO: 1352988
gauuaccaagaucuuggga

SEQ ID NO: 1352990 - RNA, 19 nt, Artificial Sequence
  Description of Artificial Sequence: Synthetic oligonucleotide
  Sense strand starting at position 2706 of SEQ ID NO: 1242507
gccuaauugcccguaucuu

SEQ ID NO: 1352991 - RNA, 19 nt, Artificial Sequence
  Description of Artificial Sequence: Synthetic oligonucleotide
  Antisense strand to SEQ ID NO: 1352990
aagauacgggcaauuaggc

SEQ ID NO: 1352992 - RNA, 19 nt, Artificial Sequence
  Description of Artificial Sequence: Synthetic oligonucleotide
  Sense strand starting at position 2707 of SEQ ID NO: 1242507
ccuaauugcccguaucuuu

SEQ ID NO: 1352993 - RNA, 19 nt, Artificial Sequence
  Description of Artificial Sequence: Synthetic oligonucleotide
  Antisense strand to SEQ ID NO: 1352992
aaagauacgggcaauuagg

SEQ ID NO: 1352994 - RNA, 19 nt, Artificial Sequence
  Description of Artificial Sequence: Synthetic oligonucleotide
  Sense strand starting at position 2784 of SEQ ID NO: 1242507
gugugaaaguuggcugugu

SEQ ID NO: 1352995 - RNA, 19 nt, Artificial Sequence
  Description of Artificial Sequence: Synthetic oligonucleotide
  Antisense strand to SEQ ID NO: 1352994
acacagccaacuuucacac

SEQ ID NO: 1352996 - RNA, 19 nt, Artificial Sequence
  Description of Artificial Sequence: Synthetic oligonucleotide
  Sense strand starting at position 2827 of SEQ ID NO: 1242507
agcuauuauuaguagacca

SEQ ID NO: 1352997 - RNA, 19 nt, Artificial Sequence
  Description of Artificial Sequence: Synthetic oligonucleotide
  Antisense strand to SEQ ID NO: 1352996
uggucuacuaauaauagcu

SEQ ID NO: 1352998 - RNA, 19 nt, Artificial Sequence
  Description of Artificial Sequence: Synthetic oligonucleotide
  Sense strand starting at position 2854 of SEQ ID NO: 1242507
acaguaggcuuuccauaaa

SEQ ID NO: 1352999 - RNA, 19 nt, Artificial Sequence
  Description of Artificial Sequence: Synthetic oligonucleotide
  Antisense strand to SEQ ID NO: 1352998
uuuauggaaagccuacugu

SEQ ID NO: 1353000 - RNA, 19 nt, Artificial Sequence
  Description of Artificial Sequence: Synthetic oligonucleotide
  Sense strand starting at position 2857 of SEQ ID NO: 1242507
guaggcuuuccauaaauaa

SEQ ID NO: 1353001 - RNA, 19 nt, Artificial Sequence
  Description of Artificial Sequence: Synthetic oligonucleotide
  Antisense strand to SEQ ID NO: 1353000
uuauuuauggaaagccuac

SEQ ID NO: 1353002 - RNA, 19 nt, Artificial Sequence
  Description of Artificial Sequence: Synthetic oligonucleotide
  Sense strand starting at position 2880 of SEQ ID NO: 1242507
gcagaugccuguuaaauga

SEQ ID NO: 1353003 - RNA, 19 nt, Artificial Sequence
  Description of Artificial Sequence: Synthetic oligonucleotide
  Antisense strand to SEQ ID NO: 1353002
ucauuuaacaggcaucugc

SEQ ID NO: 1353004 - RNA, 19 nt, Artificial Sequence
  Description of Artificial Sequence: Synthetic oligonucleotide
  Sense strand starting at position 2946 of SEQ ID NO: 1242507
uggccuugcccacagacau

SEQ ID NO: 1353005 - RNA, 19 nt, Artificial Sequence
  Description of Artificial Sequence: Synthetic oligonucleotide
  Antisense strand to SEQ ID NO: 1353004
augucugugggcaaggcca

SEQ ID NO: 1353006 - RNA, 19 nt, Artificial Sequence
  Description of Artificial Sequence: Synthetic oligonucleotide
  Sense strand starting at position 3062 of SEQ ID NO: 1242507
uccagagguccuggguaga

SEQ ID NO: 1353007 - RNA, 19 nt, Artificial Sequence
  Description of Artificial Sequence: Synthetic oligonucleotide
  Antisense strand to SEQ ID NO: 1353006
ucuacccaggaccucugga

SEQ ID NO: 1353008 - RNA, 19 nt, Artificial Sequence
  Description of Artificial Sequence: Synthetic oligonucleotide
  Sense strand starting at position 3133 of SEQ ID NO: 1242507
cagggauucuccugagcag

SEQ ID NO: 1353009 - RNA, 19 nt, Artificial Sequence
  Description of Artificial Sequence: Synthetic oligonucleotide
  Antisense strand to SEQ ID NO: 1353008
cugcucaggagaaucccug

SEQ ID NO: 1353010 - RNA, 19 nt, Artificial Sequence
  Description of Artificial Sequence: Synthetic oligonucleotide
  Sense strand starting at position 3180 of SEQ ID NO: 1242507
cccagcagugcuuguuuau

SEQ ID NO: 1353011 - RNA, 19 nt, Artificial Sequence
  Description of Artificial Sequence: Synthetic oligonucleotide
  Antisense strand to SEQ ID NO: 1353010
auaaacaagcacugcuggg

SEQ ID NO: 1353012 - RNA, 19 nt, Artificial Sequence
  Description of Artificial Sequence: Synthetic oligonucleotide
  Sense strand starting at position 3181 of SEQ ID NO: 1242507
ccagcagugcuuguuuauu

SEQ ID NO: 1353013 - RNA, 19 nt, Artificial Sequence
  Description of Artificial Sequence: Synthetic oligonucleotide
  Antisense strand to SEQ ID NO: 1353012
aauaaacaagcacugcugg

SEQ ID NO: 1353014 - RNA, 19 nt, Artificial Sequence
  Description of Artificial Sequence: Synthetic oligonucleotide
  Sense strand starting at position 3183 of SEQ ID NO: 1242507
agcagugcuuguuuauuaa

SEQ ID NO: 1353015 - RNA, 19 nt, Artificial Sequence
  Description of Artificial Sequence: Synthetic oligonucleotide
  Antisense strand to SEQ ID NO: 1353014
uuaauaaacaagcacugcu

SEQ ID NO: 1353016 - RNA, 19 nt, Artificial Sequence
  Description of Artificial Sequence: Synthetic oligonucleotide
  Sense strand starting at position 3187 of SEQ ID NO: 1242507
gugcuuguuuauuaauuac

SEQ ID NO: 1353017 - RNA, 19 nt, Artificial Sequence
  Description of Artificial Sequence: Synthetic oligonucleotide
  Antisense strand to SEQ ID NO: 1353016
guaauuaauaaacaagcac

SEQ ID NO: 1353018 - RNA, 19 nt, Artificial Sequence
  Description of Artificial Sequence: Synthetic oligonucleotide
  Sense strand starting at position 3319 of SEQ ID NO: 1242507
gccagauaucucugucucu

SEQ ID NO: 1353019 - RNA, 19 nt, Artificial Sequence
  Description of Artificial Sequence: Synthetic oligonucleotide
  Antisense strand to SEQ ID NO: 1353018
agagacagagauaucuggc

SEQ ID NO: 1353020 - RNA, 19 nt, Artificial Sequence
  Description of Artificial Sequence: Synthetic oligonucleotide
  Sense strand starting at position 3322 of SEQ ID NO: 1242507
agauaucucugucucuguu

SEQ ID NO: 1353021 - RNA, 19 nt, Artificial Sequence
  Description of Artificial Sequence: Synthetic oligonucleotide
  Antisense strand to SEQ ID NO: 1353020
aacagagacagagauaucu

SEQ ID NO: 1353022 - RNA, 19 nt, Artificial Sequence
  Description of Artificial Sequence: Synthetic oligonucleotide
  Sense strand starting at position 300 of SEQ ID NO: 1242508
uaagaaggaugucucauau

SEQ ID NO: 1353023 - RNA, 19 nt, Artificial Sequence
  Description of Artificial Sequence: Synthetic oligonucleotide
  Antisense strand to SEQ ID NO: 1353022
auaugagacauccuucuua

SEQ ID NO: 1353024 - RNA, 19 nt, Artificial Sequence
  Description of Artificial Sequence: Synthetic oligonucleotide
  Sense strand starting at position 335 of SEQ ID NO: 1242508
guaucaagguuaccucuaa

SEQ ID NO: 1353025 - RNA, 19 nt, Artificial Sequence
  Description of Artificial Sequence: Synthetic oligonucleotide
  Antisense strand to SEQ ID NO: 1353024
uuagagguaaccuugauac

SEQ ID NO: 1353026 - RNA, 19 nt, Artificial Sequence
  Description of Artificial Sequence: Synthetic oligonucleotide
  Sense strand starting at position 342 of SEQ ID NO: 1242508
gguuaccucuaacuuuaga

SEQ ID NO: 1353027 - RNA, 19 nt, Artificial Sequence
  Description of Artificial Sequence: Synthetic oligonucleotide
  Antisense strand to SEQ ID NO: 1353026
ucuaaaguuagagguaacc

SEQ ID NO: 1353028 - RNA, 19 nt, Artificial Sequence
  Description of Artificial Sequence: Synthetic oligonucleotide
  Sense strand starting at position 447 of SEQ ID NO: 1242508
guuacuuaaacaggugaga

SEQ ID NO: 1353029 - RNA, 19 nt, Artificial Sequence
  Description of Artificial Sequence: Synthetic oligonucleotide
  Antisense strand to SEQ ID NO: 1353028
ucucaccuguuuaaguaac

SEQ ID NO: 1353030 - RNA, 19 nt, Artificial Sequence
  Description of Artificial Sequence: Synthetic oligonucleotide
  Sense strand starting at position 575 of SEQ ID NO: 1242508
ugaauccuauggccacaaa

SEQ ID NO: 1353031 - RNA, 19 nt, Artificial Sequence
  Description of Artificial Sequence: Synthetic oligonucleotide
  Antisense strand to SEQ ID NO: 1353030
uuuguggccauaggauuca

SEQ ID NO: 1353032 - RNA, 19 nt, Artificial Sequence
  Description of Artificial Sequence: Synthetic oligonucleotide
  Sense strand starting at position 628 of SEQ ID NO: 1242508
cuguauauccucuacaugu

SEQ ID NO: 1353033 - RNA, 19 nt, Artificial Sequence
  Description of Artificial Sequence: Synthetic oligonucleotide
  Antisense strand to SEQ ID NO: 1353032
acauguagaggauauacag

SEQ ID NO: 1353034 - RNA, 19 nt, Artificial Sequence
  Description of Artificial Sequence: Synthetic oligonucleotide
  Sense strand starting at position 630 of SEQ ID NO: 1242508
guauauccucuacauguuu

SEQ ID NO: 1353035 - RNA, 19 nt, Artificial Sequence
  Description of Artificial Sequence: Synthetic oligonucleotide
  Antisense strand to SEQ ID NO: 1353034
aaacauguagaggauauac

SEQ ID NO: 1353036 - RNA, 19 nt, Artificial Sequence
  Description of Artificial Sequence: Synthetic oligonucleotide
  Sense strand starting at position 635 of SEQ ID NO: 1242508
uccucuacauguuugauca

SEQ ID NO: 1353037 - RNA, 19 nt, Artificial Sequence
  Description of Artificial Sequence: Synthetic oligonucleotide
  Antisense strand to SEQ ID NO: 1353036
ugaucaaacauguagagga

SEQ ID NO: 1353038 - RNA, 19 nt, Artificial Sequence
  Description of Artificial Sequence: Synthetic oligonucleotide
  Sense strand starting at position 895 of SEQ ID NO: 1242508
acuuaaauuuggugaugaa

SEQ ID NO: 1353039 - RNA, 19 nt, Artificial Sequence
  Description of Artificial Sequence: Synthetic oligonucleotide
  Antisense strand to SEQ ID NO: 1353038
uucaucaccaaauuuaagu

SEQ ID NO: 1353040 - RNA, 19 nt, Artificial Sequence
  Description of Artificial Sequence: Synthetic oligonucleotide
  Sense strand starting at position 1063 of SEQ ID NO: 1242508
ggaguggucguggacauaa

SEQ ID NO: 1353041 - RNA, 19 nt, Artificial Sequence
  Description of Artificial Sequence: Synthetic oligonucleotide
  Antisense strand to SEQ ID NO: 1353040
uuauguccacgaccacucc

SEQ ID NO: 1353042 - RNA, 19 nt, Artificial Sequence
  Description of Artificial Sequence: Synthetic oligonucleotide
  Sense strand starting at position 1083 of SEQ ID NO: 1242508
cuuacaagacauuguguuu

SEQ ID NO: 1353043 - RNA, 19 nt, Artificial Sequence
  Description of Artificial Sequence: Synthetic oligonucleotide
  Antisense strand to SEQ ID NO: 1353042
aaacacaaugucuuguaag

SEQ ID NO: 1353044 - RNA, 19 nt, Artificial Sequence
  Description of Artificial Sequence: Synthetic oligonucleotide
  Sense strand starting at position 1136 of SEQ ID NO: 1242508
acaaaugcuuguucuagau

SEQ ID NO: 1353045 - RNA, 19 nt, Artificial Sequence
  Description of Artificial Sequence: Synthetic oligonucleotide
  Antisense strand to SEQ ID NO: 1353044
aucuagaacaagcauuugu

SEQ ID NO: 1353046 - RNA, 19 nt, Artificial Sequence
  Description of Artificial Sequence: Synthetic oligonucleotide
  Sense strand starting at position 1156 of SEQ ID NO: 1242508
ugauuagucuauccuuaca

SEQ ID NO: 1353047 - RNA, 19 nt, Artificial Sequence
  Description of Artificial Sequence: Synthetic oligonucleotide
  Antisense strand to SEQ ID NO: 1353046
uguaaggauagacuaauca

SEQ ID NO: 1353048 - RNA, 19 nt, Artificial Sequence
  Description of Artificial Sequence: Synthetic oligonucleotide
  Sense strand starting at position 1363 of SEQ ID NO: 1242508
gucaguuaacaguaacacu

SEQ ID NO: 1353049 - RNA, 19 nt, Artificial Sequence
  Description of Artificial Sequence: Synthetic oligonucleotide
  Antisense strand to SEQ ID NO: 1353048
aguguuacuguuaacugac

SEQ ID NO: 1353050 - RNA, 19 nt, Artificial Sequence
  Description of Artificial Sequence: Synthetic oligonucleotide
  Sense strand starting at position 1768 of SEQ ID NO: 1242508
uagcuuggaucucuaacga

SEQ ID NO: 1353051 - RNA, 19 nt, Artificial Sequence
  Description of Artificial Sequence: Synthetic oligonucleotide
  Antisense strand to SEQ ID NO: 1353050
ucguuagagauccaagcua

SEQ ID NO: 1353052 - RNA, 19 nt, Artificial Sequence
  Description of Artificial Sequence: Synthetic oligonucleotide
  Sense strand starting at position 1851 of SEQ ID NO: 1242508
ugcagaacuugauuaagag

SEQ ID NO: 1353053 - RNA, 19 nt, Artificial Sequence
  Description of Artificial Sequence: Synthetic oligonucleotide
  Antisense strand to SEQ ID NO: 1353052
cucuuaaucaaguucugca

SEQ ID NO: 1353054 - RNA, 19 nt, Artificial Sequence
  Description of Artificial Sequence: Synthetic oligonucleotide
  Sense strand starting at position 2043 of SEQ ID NO: 1242508
cgaauuguccgguaaacag

SEQ ID NO: 1353055 - RNA, 19 nt, Artificial Sequence
  Description of Artificial Sequence: Synthetic oligonucleotide
  Antisense strand to SEQ ID NO: 1353054
cuguuuaccggacaauucg

SEQ ID NO: 1353056 - RNA, 19 nt, Artificial Sequence
  Description of Artificial Sequence: Synthetic oligonucleotide
  Sense strand starting at position 2085 of SEQ ID NO: 1242508
ugaguucuacuuuagauuc

SEQ ID NO: 1353057 - RNA, 19 nt, Artificial Sequence
  Description of Artificial Sequence: Synthetic oligonucleotide
  Antisense strand to SEQ ID NO: 1353056
gaaucuaaaguagaacuca

SEQ ID NO: 1353058 - RNA, 19 nt, Artificial Sequence
  Description of Artificial Sequence: Synthetic oligonucleotide
  Sense strand starting at position 2108 of SEQ ID NO: 1242508
ggacuugacagcugaauga

SEQ ID NO: 1353059 - RNA, 19 nt, Artificial Sequence
  Description of Artificial Sequence: Synthetic oligonucleotide
  Antisense strand to SEQ ID NO: 1353058
ucauucagcugucaagucc

SEQ ID NO: 1353060 - RNA, 19 nt, Artificial Sequence
  Description of Artificial Sequence: Synthetic oligonucleotide
  Sense strand starting at position 2112 of SEQ ID NO: 1242508
uugacagcugaaugauaga

SEQ ID NO: 1353061 - RNA, 19 nt, Artificial Sequence
  Description of Artificial Sequence: Synthetic oligonucleotide
  Antisense strand to SEQ ID NO: 1353060
ucuaucauucagcugucaa

SEQ ID NO: 1353062 - RNA, 19 nt, Artificial Sequence
  Description of Artificial Sequence: Synthetic oligonucleotide
  Sense strand starting at position 2275 of SEQ ID NO: 1242508
agagacaaauuugguuauu

SEQ ID NO: 1353063 - RNA, 19 nt, Artificial Sequence
  Description of Artificial Sequence: Synthetic oligonucleotide
  Antisense strand to SEQ ID NO: 1353062
aauaaccaaauuugucucu

SEQ ID NO: 1353064 - RNA, 19 nt, Artificial Sequence
  Description of Artificial Sequence: Synthetic oligonucleotide
  Sense strand starting at position 2323 of SEQ ID NO: 1242508
gucuuaggaucaucuaaca

SEQ ID NO: 1353065 - RNA, 19 nt, Artificial Sequence
  Description of Artificial Sequence: Synthetic oligonucleotide
  Antisense strand to SEQ ID NO: 1353064
uguuagaugauccuaagac

SEQ ID NO: 1353066 - RNA, 19 nt, Artificial Sequence
  Description of Artificial Sequence: Synthetic oligonucleotide
  Sense strand starting at position 2516 of SEQ ID NO: 1242508
gucugucuccuagcauguu

SEQ ID NO: 1353067 - RNA, 19 nt, Artificial Sequence
  Description of Artificial Sequence: Synthetic oligonucleotide
  Antisense strand to SEQ ID NO: 1353066
aacaugcuaggagacagac

SEQ ID NO: 1353068 - RNA, 19 nt, Artificial Sequence
  Description of Artificial Sequence: Synthetic oligonucleotide
  Sense strand starting at position 2756 of SEQ ID NO: 1242508
gacaacgagcuagacuauu

SEQ ID NO: 1353069 - RNA, 19 nt, Artificial Sequence
  Description of Artificial Sequence: Synthetic oligonucleotide
  Antisense strand to SEQ ID NO: 1353068
aauagucuagcucguuguc

SEQ ID NO: 1353070 - RNA, 19 nt, Artificial Sequence
  Description of Artificial Sequence: Synthetic oligonucleotide
  Sense strand starting at position 2811 of SEQ ID NO: 1242508
cucugcauucucuacgaua

SEQ ID NO: 1353071 - RNA, 19 nt, Artificial Sequence
  Description of Artificial Sequence: Synthetic oligonucleotide
  Antisense strand to SEQ ID NO: 1353070
uaucguagagaaugcagag

SEQ ID NO: 1353072 - RNA, 19 nt, Artificial Sequence
  Description of Artificial Sequence: Synthetic oligonucleotide
  Sense strand starting at position 3267 of SEQ ID NO: 1242508
ugucaccauucuuugagga

SEQ ID NO: 1353073 - RNA, 19 nt, Artificial Sequence
  Description of Artificial Sequence: Synthetic oligonucleotide
  Antisense strand to SEQ ID NO: 1353072
uccucaaagaauggugaca

SEQ ID NO: 1353074 - RNA, 19 nt, Artificial Sequence
  Description of Artificial Sequence: Synthetic oligonucleotide
  Sense strand starting at position 3268 of SEQ ID NO: 1242508
gucaccauucuuugaggaa

SEQ ID NO: 1353075 - RNA, 19 nt, Artificial Sequence
  Description of Artificial Sequence: Synthetic oligonucleotide
  Antisense strand to SEQ ID NO: 1353074
uuccucaaagaauggugac

SEQ ID NO: 1353076 - RNA, 19 nt, Artificial Sequence
  Description of Artificial Sequence: Synthetic oligonucleotide
  Sense strand starting at position 3280 of SEQ ID NO: 1242508
ugaggaaaucuuuguuaga

SEQ ID NO: 1353077 - RNA, 19 nt, Artificial Sequence
  Description of Artificial Sequence: Synthetic oligonucleotide
  Antisense strand to SEQ ID NO: 1353076
ucuaacaaagauuuccuca

SEQ ID NO: 1353078 - RNA, 19 nt, Artificial Sequence
  Description of Artificial Sequence: Synthetic oligonucleotide
  Sense strand starting at position 3282 of SEQ ID NO: 1242508
aggaaaucuuuguuagaac

SEQ ID NO: 1353079 - RNA, 19 nt, Artificial Sequence
  Description of Artificial Sequence: Synthetic oligonucleotide
  Antisense strand to SEQ ID NO: 1353078
guucuaacaaagauuuccu

SEQ ID NO: 1353080 - RNA, 19 nt, Artificial Sequence
  Description of Artificial Sequence: Synthetic oligonucleotide
  Sense strand starting at position 3308 of SEQ ID NO: 1242508
uuguccuuuggguaacaaa

SEQ ID NO: 1353081 - RNA, 19 nt, Artificial Sequence
  Description of Artificial Sequence: Synthetic oligonucleotide
  Antisense strand to SEQ ID NO: 1353080
uuuguuacccaaaggacaa

SEQ ID NO: 1353082 - RNA, 19 nt, Artificial Sequence
  Description of Artificial Sequence: Synthetic oligonucleotide
  Sense strand starting at position 3423 of SEQ ID NO: 1242508
aggagauaggauugugugu

SEQ ID NO: 1353083 - RNA, 19 nt, Artificial Sequence
  Description of Artificial Sequence: Synthetic oligonucleotide
  Antisense strand to SEQ ID NO: 1353082
acacacaauccuaucuccu

SEQ ID NO: 1353084 - RNA, 19 nt, Artificial Sequence
  Description of Artificial Sequence: Synthetic oligonucleotide
  Sense strand starting at position 3744 of SEQ ID NO: 1242508
cugccauuacaucagaugu

SEQ ID NO: 1353085 - RNA, 19 nt, Artificial Sequence
  Description of Artificial Sequence: Synthetic oligonucleotide
  Antisense strand to SEQ ID NO: 1353084
acaucugauguaauggcag

SEQ ID NO: 1353086 - RNA, 19 nt, Artificial Sequence
  Description of Artificial Sequence: Synthetic oligonucleotide
  Sense strand starting at position 3752 of SEQ ID NO: 1242508
acaucagauguuuaucugu

SEQ ID NO: 1353087 - RNA, 19 nt, Artificial Sequence
  Description of Artificial Sequence: Synthetic oligonucleotide
  Antisense strand to SEQ ID NO: 1353086
acagauaaacaucugaugu

SEQ ID NO: 1353088 - RNA, 19 nt, Artificial Sequence
  Description of Artificial Sequence: Synthetic oligonucleotide
  Sense strand starting at position 3868 of SEQ ID NO: 1242508
auaaguaacuugguaguca

SEQ ID NO: 1353089 - RNA, 19 nt, Artificial Sequence
  Description of Artificial Sequence: Synthetic oligonucleotide
  Antisense strand to SEQ ID NO: 1353088
ugacuaccaaguuacuuau

SEQ ID NO: 1353090 - RNA, 19 nt, Artificial Sequence
  Description of Artificial Sequence: Synthetic oligonucleotide
  Sense strand starting at position 3877 of SEQ ID NO: 1242508
uugguagucagucacuaga

SEQ ID NO: 1353091 - RNA, 19 nt, Artificial Sequence
  Description of Artificial Sequence: Synthetic oligonucleotide
  Antisense strand to SEQ ID NO: 1353090
ucuagugacugacuaccaa

SEQ ID NO: 1353092 - RNA, 19 nt, Artificial Sequence
  Description of Artificial Sequence: Synthetic oligonucleotide
  Sense strand starting at position 3879 of SEQ ID NO: 1242508
gguagucagucacuagauu

SEQ ID NO: 1353093 - RNA, 19 nt, Artificial Sequence
  Description of Artificial Sequence: Synthetic oligonucleotide
  Antisense strand to SEQ ID NO: 1353092
aaucuagugacugacuacc

SEQ ID NO: 1353094 - RNA, 19 nt, Artificial Sequence
  Description of Artificial Sequence: Synthetic oligonucleotide
  Sense strand starting at position 3880 of SEQ ID NO: 1242508
guagucagucacuagauuc

SEQ ID NO: 1353095 - RNA, 19 nt, Artificial Sequence
  Description of Artificial Sequence: Synthetic oligonucleotide
  Antisense strand to SEQ ID NO: 1353094
gaaucuagugacugacuac

SEQ ID NO: 1353096 - RNA, 19 nt, Artificial Sequence
  Description of Artificial Sequence: Synthetic oligonucleotide
  Sense strand starting at position 3961 of SEQ ID NO: 1242508
auuguuaaauaggcuagau

SEQ ID NO: 1353097 - RNA, 19 nt, Artificial Sequence
  Description of Artificial Sequence: Synthetic oligonucleotide
  Antisense strand to SEQ ID NO: 1353096
aucuagccuauuuaacaau

SEQ ID NO: 1353098 - RNA, 19 nt, Artificial Sequence
  Description of Artificial Sequence: Synthetic oligonucleotide
  Sense strand starting at position 3963 of SEQ ID NO: 1242508
uguuaaauaggcuagaucu

SEQ ID NO: 1353099 - RNA, 19 nt, Artificial Sequence
  Description of Artificial Sequence: Synthetic oligonucleotide
  Antisense strand to SEQ ID NO: 1353098
agaucuagccuauuuaaca

SEQ ID NO: 1353100 - RNA, 19 nt, Artificial Sequence
  Description of Artificial Sequence: Synthetic oligonucleotide
  Sense strand starting at position 3971 of SEQ ID NO: 1242508
aggcuagaucuguaacaca

SEQ ID NO: 1353101 - RNA, 19 nt, Artificial Sequence
  Description of Artificial Sequence: Synthetic oligonucleotide
  Antisense strand to SEQ ID NO: 1353100
uguguuacagaucuagccu

SEQ ID NO: 1353102 - RNA, 19 nt, Artificial Sequence
  Description of Artificial Sequence: Synthetic oligonucleotide
  Sense strand starting at position 434 of SEQ ID NO: 1242509
uuguaucuucuauaaggcu

SEQ ID NO: 1353103 - RNA, 19 nt, Artificial Sequence
  Description of Artificial Sequence: Synthetic oligonucleotide
  Antisense strand to SEQ ID NO: 1353102
agccuuauagaagauacaa

SEQ ID NO: 1353104 - RNA, 19 nt, Artificial Sequence
  Description of Artificial Sequence: Synthetic oligonucleotide
  Sense strand starting at position 477 of SEQ ID NO: 1242509
guagaaucuuaacuguaau

SEQ ID NO: 1353105 - RNA, 19 nt, Artificial Sequence
  Description of Artificial Sequence: Synthetic oligonucleotide
  Antisense strand to SEQ ID NO: 1353104
auuacaguuaagauucuac

SEQ ID NO: 1353106 - RNA, 19 nt, Artificial Sequence
  Description of Artificial Sequence: Synthetic oligonucleotide
  Sense strand starting at position 616 of SEQ ID NO: 1242509
ucaauuacgucaucugaau

SEQ ID NO: 1353107 - RNA, 19 nt, Artificial Sequence
  Description of Artificial Sequence: Synthetic oligonucleotide
  Antisense strand to SEQ ID NO: 1353106
auucagaugacguaauuga

SEQ ID NO: 1353108 - RNA, 19 nt, Artificial Sequence
  Description of Artificial Sequence: Synthetic oligonucleotide
  Sense strand starting at position 667 of SEQ ID NO: 1242509
cuagguaguuccuccacaa

SEQ ID NO: 1353109 - RNA, 19 nt, Artificial Sequence
  Description of Artificial Sequence: Synthetic oligonucleotide
  Antisense strand to SEQ ID NO: 1353108
uuguggaggaacuaccuag

SEQ ID NO: 1353110 - RNA, 19 nt, Artificial Sequence
  Description of Artificial Sequence: Synthetic oligonucleotide
  Sense strand starting at position 687 of SEQ ID NO: 1242509
uuccuuuauguccaaguaa

SEQ ID NO: 1353111 - RNA, 19 nt, Artificial Sequence
  Description of Artificial Sequence: Synthetic oligonucleotide
  Antisense strand to SEQ ID NO: 1353110
uuacuuggacauaaaggaa

SEQ ID NO: 1353112 - RNA, 19 nt, Artificial Sequence
  Description of Artificial Sequence: Synthetic oligonucleotide
  Sense strand starting at position 706 of SEQ ID NO: 1242509
aauaauccucgauauaggu

SEQ ID NO: 1353113 - RNA, 19 nt, Artificial Sequence
  Description of Artificial Sequence: Synthetic oligonucleotide
  Antisense strand to SEQ ID NO: 1353112
accuauaucgaggauuauu

SEQ ID NO: 1353114 - RNA, 19 nt, Artificial Sequence
  Description of Artificial Sequence: Synthetic oligonucleotide
  Sense strand starting at position 715 of SEQ ID NO: 1242509
cgauauagguggagagaaa

SEQ ID NO: 1353115 - RNA, 19 nt, Artificial Sequence
  Description of Artificial Sequence: Synthetic oligonucleotide
  Antisense strand to SEQ ID NO: 1353114
uuucucuccaccuauaucg

SEQ ID NO: 1353116 - RNA, 19 nt, Artificial Sequence
  Description of Artificial Sequence: Synthetic oligonucleotide
  Sense strand starting at position 762 of SEQ ID NO: 1242509
gaagcagauuaauuaguau

SEQ ID NO: 1353117 - RNA, 19 nt, Artificial Sequence
  Description of Artificial Sequence: Synthetic oligonucleotide
  Antisense strand to SEQ ID NO: 1353116
auacuaauuaaucugcuuc

SEQ ID NO: 1353118 - RNA, 19 nt, Artificial Sequence
  Description of Artificial Sequence: Synthetic oligonucleotide
  Sense strand starting at position 765 of SEQ ID NO: 1242509
gcagauuaauuaguauucu

SEQ ID NO: 1353119 - RNA, 19 nt, Artificial Sequence
  Description of Artificial Sequence: Synthetic oligonucleotide
  Antisense strand to SEQ ID NO: 1353118
agaauacuaauuaaucugc

SEQ ID NO: 1353120 - RNA, 19 nt, Artificial Sequence
  Description of Artificial Sequence: Synthetic oligonucleotide
  Sense strand starting at position 899 of SEQ ID NO: 1242509
cuuccaagacuuuguaagu

SEQ ID NO: 1353121 - RNA, 19 nt, Artificial Sequence
  Description of Artificial Sequence: Synthetic oligonucleotide
  Antisense strand to SEQ ID NO: 1353120
acuuacaaagucuuggaag

SEQ ID NO: 1353122 - RNA, 19 nt, Artificial Sequence
  Description of Artificial Sequence: Synthetic oligonucleotide
  Sense strand starting at position 968 of SEQ ID NO: 1242509
cgugacaaauuaucuaaau

SEQ ID NO: 1353123 - RNA, 19 nt, Artificial Sequence
  Description of Artificial Sequence: Synthetic oligonucleotide
  Antisense strand to SEQ ID NO: 1353122
auuuagauaauuugucacg

SEQ ID NO: 1353124 - RNA, 19 nt, Artificial Sequence
  Description of Artificial Sequence: Synthetic oligonucleotide
  Sense strand starting at position 1001 of SEQ ID NO: 1242509
ucaggcuguuucucaagau

SEQ ID NO: 1353125 - RNA, 19 nt, Artificial Sequence
  Description of Artificial Sequence: Synthetic oligonucleotide
  Antisense strand to SEQ ID NO: 1353124
aucuugagaaacagccuga

SEQ ID NO: 1353126 - RNA, 19 nt, Artificial Sequence
  Description of Artificial Sequence: Synthetic oligonucleotide
  Sense strand starting at position 1516 of SEQ ID NO: 1242509
cgaggaacuuuggauuuag

SEQ ID NO: 1353127 - RNA, 19 nt, Artificial Sequence
  Description of Artificial Sequence: Synthetic oligonucleotide
  Antisense strand to SEQ ID NO: 1353126
cuaaauccaaaguuccucg

SEQ ID NO: 1353128 - RNA, 19 nt, Artificial Sequence
  Description of Artificial Sequence: Synthetic oligonucleotide
  Sense strand starting at position 1557 of SEQ ID NO: 1242509
cacugagguuucuuccaga

SEQ ID NO: 1353129 - RNA, 19 nt, Artificial Sequence
  Description of Artificial Sequence: Synthetic oligonucleotide
  Antisense strand to SEQ ID NO: 1353128
ucuggaagaaaccucagug

SEQ ID NO: 1353130 - RNA, 19 nt, Artificial Sequence
  Description of Artificial Sequence: Synthetic oligonucleotide
  Sense strand starting at position 1562 of SEQ ID NO: 1242509
agguuucuuccagaaguuc

SEQ ID NO: 1353131 - RNA, 19 nt, Artificial Sequence
  Description of Artificial Sequence: Synthetic oligonucleotide
  Antisense strand to SEQ ID NO: 1353130
gaacuucuggaagaaaccu

SEQ ID NO: 1353132 - RNA, 19 nt, Artificial Sequence
  Description of Artificial Sequence: Synthetic oligonucleotide
  Sense strand starting at position 2496 of SEQ ID NO: 1242509
aaauccuggugccuggaaa

SEQ ID NO: 1353133 - RNA, 19 nt, Artificial Sequence
  Description of Artificial Sequence: Synthetic oligonucleotide
  Antisense strand to SEQ ID NO: 1353132
uuuccaggcaccaggauuu

SEQ ID NO: 1353134 - RNA, 19 nt, Artificial Sequence
  Description of Artificial Sequence: Synthetic oligonucleotide
  Sense strand starting at position 2603 of SEQ ID NO: 1242509
cuugaaagacguuauagua

SEQ ID NO: 1353135 - RNA, 19 nt, Artificial Sequence
  Description of Artificial Sequence: Synthetic oligonucleotide
  Antisense strand to SEQ ID NO: 1353134
uacuauaacgucuuucaag

SEQ ID NO: 1353136 - RNA, 19 nt, Artificial Sequence
  Description of Artificial Sequence: Synthetic oligonucleotide
  Sense strand starting at position 2634 of SEQ ID NO: 1242509
aguuacgugcucguuuauu

SEQ ID NO: 1353137 - RNA, 19 nt, Artificial Sequence
  Description of Artificial Sequence: Synthetic oligonucleotide
  Antisense strand to SEQ ID NO: 1353136
aauaaacgagcacguaacu

SEQ ID NO: 1353138 - RNA, 19 nt, Artificial Sequence
  Description of Artificial Sequence: Synthetic oligonucleotide
  Sense strand starting at position 2662 of SEQ ID NO: 1242509
aagaauccgccguauugga

SEQ ID NO: 1353139 - RNA, 19 nt, Artificial Sequence
  Description of Artificial Sequence: Synthetic oligonucleotide
  Antisense strand to SEQ ID NO: 1353138
uccaauacggcggauucuu

SEQ ID NO: 1353140 - RNA, 19 nt, Artificial Sequence
  Description of Artificial Sequence: Synthetic oligonucleotide
  Sense strand starting at position 2830 of SEQ ID NO: 1242509
uguaaacguauacgaugaa

SEQ ID NO: 1353141 - RNA, 19 nt, Artificial Sequence
  Description of Artificial Sequence: Synthetic oligonucleotide
  Antisense strand to SEQ ID NO: 1353140
uucaucguauacguuuaca

SEQ ID NO: 1353142 - RNA, 19 nt, Artificial Sequence
  Description of Artificial Sequence: Synthetic oligonucleotide
  Sense strand starting at position 2833 of SEQ ID NO: 1242509
aaacguauacgaugaaguu

SEQ ID NO: 1353143 - RNA, 19 nt, Artificial Sequence
  Description of Artificial Sequence: Synthetic oligonucleotide
  Antisense strand to SEQ ID NO: 1353142
aacuucaucguauacguuu

SEQ ID NO: 1353144 - RNA, 19 nt, Artificial Sequence
  Description of Artificial Sequence: Synthetic oligonucleotide
  Sense strand starting at position 2834 of SEQ ID NO: 1242509
aacguauacgaugaaguua

SEQ ID NO: 1353145 - RNA, 19 nt, Artificial Sequence
  Description of Artificial Sequence: Synthetic oligonucleotide
  Antisense strand to SEQ ID NO: 1353144
uaacuucaucguauacguu

SEQ ID NO: 1353146 - RNA, 19 nt, Artificial Sequence
  Description of Artificial Sequence: Synthetic oligonucleotide
  Sense strand starting at position 2863 of SEQ ID NO: 1242509
ccuagaaaucuggguuagu

SEQ ID NO: 1353147 - RNA, 19 nt, Artificial Sequence
  Description of Artificial Sequence: Synthetic oligonucleotide
  Antisense strand to SEQ ID NO: 1353146
acuaacccagauuucuagg

SEQ ID NO: 1353148 - RNA, 19 nt, Artificial Sequence
  Description of Artificial Sequence: Synthetic oligonucleotide
  Sense strand starting at position 2864 of SEQ ID NO: 1242509
cuagaaaucuggguuagua

SEQ ID NO: 1353149 - RNA, 19 nt, Artificial Sequence
  Description of Artificial Sequence: Synthetic oligonucleotide
  Antisense strand to SEQ ID NO: 1353148
uacuaacccagauuucuag

SEQ ID NO: 1353150 - RNA, 19 nt, Artificial Sequence
  Description of Artificial Sequence: Synthetic oligonucleotide
  Sense strand starting at position 2993 of SEQ ID NO: 1242509
acguuuaucguagcaugca

SEQ ID NO: 1353151 - RNA, 19 nt, Artificial Sequence
  Description of Artificial Sequence: Synthetic oligonucleotide
  Antisense strand to SEQ ID NO: 1353150
ugcaugcuacgauaaacgu

SEQ ID NO: 1353152 - RNA, 19 nt, Artificial Sequence
  Description of Artificial Sequence: Synthetic oligonucleotide
  Sense strand starting at position 3079 of SEQ ID NO: 1242509
aguugcucucuuuagaguu

SEQ ID NO: 1353153 - RNA, 19 nt, Artificial Sequence
  Description of Artificial Sequence: Synthetic oligonucleotide
  Antisense strand to SEQ ID NO: 1353152
aacucuaaagagagcaacu

SEQ ID NO: 1353154 - RNA, 19 nt, Artificial Sequence
  Description of Artificial Sequence: Synthetic oligonucleotide
  Sense strand starting at position 3100 of SEQ ID NO: 1242509
uuuauaguaacgcaagguu

SEQ ID NO: 1353155 - RNA, 19 nt, Artificial Sequence
  Description of Artificial Sequence: Synthetic oligonucleotide
  Antisense strand to SEQ ID NO: 1353154
aaccuugcguuacuauaaa

SEQ ID NO: 1353156 - RNA, 19 nt, Artificial Sequence
  Description of Artificial Sequence: Synthetic oligonucleotide
  Sense strand starting at position 3176 of SEQ ID NO: 1242509
cuguguuaacccuauacaa

SEQ ID NO: 1353157 - RNA, 19 nt, Artificial Sequence
  Description of Artificial Sequence: Synthetic oligonucleotide
  Antisense strand to SEQ ID NO: 1353156
uuguauaggguuaacacag

SEQ ID NO: 1353158 - RNA, 19 nt, Artificial Sequence
  Description of Artificial Sequence: Synthetic oligonucleotide
  Sense strand starting at position 3178 of SEQ ID NO: 1242509
guguuaacccuauacaaca

SEQ ID NO: 1353159 - RNA, 19 nt, Artificial Sequence
  Description of Artificial Sequence: Synthetic oligonucleotide
  Antisense strand to SEQ ID NO: 1353158
uguuguauaggguuaacac

SEQ ID NO: 1353160 - RNA, 19 nt, Artificial Sequence
  Description of Artificial Sequence: Synthetic oligonucleotide
  Sense strand starting at position 3244 of SEQ ID NO: 1242509
auuagaucuuuggaagaaa

SEQ ID NO: 1353161 - RNA, 19 nt, Artificial Sequence
  Description of Artificial Sequence: Synthetic oligonucleotide
  Antisense strand to SEQ ID NO: 1353160
uuucuuccaaagaucuaau

SEQ ID NO: 1353162 - RNA, 19 nt, Artificial Sequence
  Description of Artificial Sequence: Synthetic oligonucleotide
  Sense strand starting at position 3286 of SEQ ID NO: 1242509
ccucuagaucuccagucau

SEQ ID NO: 1353163 - RNA, 19 nt, Artificial Sequence
  Description of Artificial Sequence: Synthetic oligonucleotide
  Antisense strand to SEQ ID NO: 1353162
augacuggagaucuagagg

SEQ ID NO: 1353164 - RNA, 19 nt, Artificial Sequence
  Description of Artificial Sequence: Synthetic oligonucleotide
  Sense strand starting at position 3297 of SEQ ID NO: 1242509
ccagucauuuaguucuugu

SEQ ID NO: 1353165 - RNA, 19 nt, Artificial Sequence
  Description of Artificial Sequence: Synthetic oligonucleotide
  Antisense strand to SEQ ID NO: 1353164
acaagaacuaaaugacugg

SEQ ID NO: 1353166 - RNA, 19 nt, Artificial Sequence
  Description of Artificial Sequence: Synthetic oligonucleotide
  Sense strand starting at position 3382 of SEQ ID NO: 1242509
accucauacccggacuauu

SEQ ID NO: 1353167 - RNA, 19 nt, Artificial Sequence
  Description of Artificial Sequence: Synthetic oligonucleotide
  Antisense strand to SEQ ID NO: 1353166
aauaguccggguaugaggu

SEQ ID NO: 1353168 - RNA, 19 nt, Artificial Sequence
  Description of Artificial Sequence: Synthetic oligonucleotide
  Sense strand starting at position 3390 of SEQ ID NO: 1242509
cccggacuauuauuacaga

SEQ ID NO: 1353169 - RNA, 19 nt, Artificial Sequence
  Description of Artificial Sequence: Synthetic oligonucleotide
  Antisense strand to SEQ ID NO: 1353168
ucuguaauaauaguccggg

SEQ ID NO: 1353170 - RNA, 19 nt, Artificial Sequence
  Description of Artificial Sequence: Synthetic oligonucleotide
  Sense strand starting at position 3759 of SEQ ID NO: 1242509
gggcuucuggaauacugua

SEQ ID NO: 1353171 - RNA, 19 nt, Artificial Sequence
  Description of Artificial Sequence: Synthetic oligonucleotide
  Antisense strand to SEQ ID NO: 1353170
uacaguauuccagaagccc

SEQ ID NO: 1353172 - RNA, 19 nt, Artificial Sequence
  Description of Artificial Sequence: Synthetic oligonucleotide
  Sense strand starting at position 3764 of SEQ ID NO: 1242509
ucuggaauacuguacuauu

SEQ ID NO: 1353173 - RNA, 19 nt, Artificial Sequence
  Description of Artificial Sequence: Synthetic oligonucleotide
  Antisense strand to SEQ ID NO: 1353172
aauaguacaguauuccaga

SEQ ID NO: 1353174 - RNA, 19 nt, Artificial Sequence
  Description of Artificial Sequence: Synthetic oligonucleotide
  Sense strand starting at position 3787 of SEQ ID NO: 1242509
gugggugcugguuacauau

SEQ ID NO: 1353175 - RNA, 19 nt, Artificial Sequence
  Description of Artificial Sequence: Synthetic oligonucleotide
  Antisense strand to SEQ ID NO: 1353174
auauguaaccagcacccac

SEQ ID NO: 1353176 - RNA, 19 nt, Artificial Sequence
  Description of Artificial Sequence: Synthetic oligonucleotide
  Sense strand starting at position 3795 of SEQ ID NO: 1242509
ugguuacauaucuaguguu

SEQ ID NO: 1353177 - RNA, 19 nt, Artificial Sequence
  Description of Artificial Sequence: Synthetic oligonucleotide
  Antisense strand to SEQ ID NO: 1353176
aacacuagauauguaacca

SEQ ID NO: 1353178 - RNA, 19 nt, Artificial Sequence
  Description of Artificial Sequence: Synthetic oligonucleotide
  Sense strand starting at position 3835 of SEQ ID NO: 1242509
gagccuguacuguaugcaa

SEQ ID NO: 1353179 - RNA, 19 nt, Artificial Sequence
  Description of Artificial Sequence: Synthetic oligonucleotide
  Antisense strand to SEQ ID NO: 1353178
uugcauacaguacaggcuc

SEQ ID NO: 1353180 - RNA, 19 nt, Artificial Sequence
  Description of Artificial Sequence: Synthetic oligonucleotide
  Sense strand starting at position 3872 of SEQ ID NO: 1242509
uguguuaugcuuuaacaaa

SEQ ID NO: 1353181 - RNA, 19 nt, Artificial Sequence
  Description of Artificial Sequence: Synthetic oligonucleotide
  Antisense strand to SEQ ID NO: 1353180
uuuguuaaagcauaacaca

SEQ ID NO: 1353182 - RNA, 19 nt, Artificial Sequence
  Description of Artificial Sequence: Synthetic oligonucleotide
  Sense strand starting at position 12 of SEQ ID NO: 1242510
gccagaaacucuggagaca

SEQ ID NO: 1353183 - RNA, 19 nt, Artificial Sequence
  Description of Artificial Sequence: Synthetic oligonucleotide
  Antisense strand to SEQ ID NO: 1353182
ugucuccagaguuucuggc

SEQ ID NO: 1353184 - RNA, 19 nt, Artificial Sequence
  Description of Artificial Sequence: Synthetic oligonucleotide
  Sense strand starting at position 208 of SEQ ID NO: 1242510
acgauaaaguucuggucaa

SEQ ID NO: 1353185 - RNA, 19 nt, Artificial Sequence
  Description of Artificial Sequence: Synthetic oligonucleotide
  Antisense strand to SEQ ID NO: 1353184
uugaccagaacuuuaucgu

SEQ ID NO: 1353186 - RNA, 19 nt, Artificial Sequence
  Description of Artificial Sequence: Synthetic oligonucleotide
  Sense strand starting at position 209 of SEQ ID NO: 1242510
cgauaaaguucuggucaau

SEQ ID NO: 1353187 - RNA, 19 nt, Artificial Sequence
  Description of Artificial Sequence: Synthetic oligonucleotide
  Antisense strand to SEQ ID NO: 1353186
auugaccagaacuuuaucg

SEQ ID NO: 1353188 - RNA, 19 nt, Artificial Sequence
  Description of Artificial Sequence: Synthetic oligonucleotide
  Sense strand starting at position 231 of SEQ ID NO: 1242510
uaguguuaggcugggcaca

SEQ ID NO: 1353189 - RNA, 19 nt, Artificial Sequence
  Description of Artificial Sequence: Synthetic oligonucleotide
  Antisense strand to SEQ ID NO: 1353188
ugugcccagccuaacacua

SEQ ID NO: 1353190 - RNA, 19 nt, Artificial Sequence
  Description of Artificial Sequence: Synthetic oligonucleotide
  Sense strand starting at position 924 of SEQ ID NO: 1242510
cgggcaacauggugugaaa

SEQ ID NO: 1353191 - RNA, 19 nt, Artificial Sequence
  Description of Artificial Sequence: Synthetic oligonucleotide
  Antisense strand to SEQ ID NO: 1353190
uuucacaccauguugcccg

SEQ ID NO: 1353192 - RNA, 19 nt, Artificial Sequence
  Description of Artificial Sequence: Synthetic oligonucleotide
  Sense strand starting at position 927 of SEQ ID NO: 1242510
gcaacauggugugaaaucu

SEQ ID NO: 1353193 - RNA, 19 nt, Artificial Sequence
  Description of Artificial Sequence: Synthetic oligonucleotide
  Antisense strand to SEQ ID NO: 1353192
agauuucacaccauguugc

SEQ ID NO: 1353194 - RNA, 19 nt, Artificial Sequence
  Description of Artificial Sequence: Synthetic oligonucleotide
  Sense strand starting at position 1033 of SEQ ID NO: 1242510
ucgcuugagcccuagaaga

SEQ ID NO: 1353195 - RNA, 19 nt, Artificial Sequence
  Description of Artificial Sequence: Synthetic oligonucleotide
  Antisense strand to SEQ ID NO: 1353194
ucuucuagggcucaagcga

SEQ ID NO: 1353196 - RNA, 19 nt, Artificial Sequence
  Description of Artificial Sequence: Synthetic oligonucleotide
  Sense strand starting at position 1088 of SEQ ID NO: 1242510
ccaucuagucugggugaca

SEQ ID NO: 1353197 - RNA, 19 nt, Artificial Sequence
  Description of Artificial Sequence: Synthetic oligonucleotide
  Antisense strand to SEQ ID NO: 1353196
ugucacccagacuagaugg

SEQ ID NO: 1353198 - RNA, 19 nt, Artificial Sequence
  Description of Artificial Sequence: Synthetic oligonucleotide
  Sense strand starting at position 1304 of SEQ ID NO: 1242510
gccauuaaguaucugaaag

SEQ ID NO: 1353199 - RNA, 19 nt, Artificial Sequence
  Description of Artificial Sequence: Synthetic oligonucleotide
  Antisense strand to SEQ ID NO: 1353198
cuuucagauacuuaauggc

SEQ ID NO: 1353200 - RNA, 19 nt, Artificial Sequence
  Description of Artificial Sequence: Synthetic oligonucleotide
  Sense strand starting at position 1377 of SEQ ID NO: 1242510
guaggugugcccaggucaa

SEQ ID NO: 1353201 - RNA, 19 nt, Artificial Sequence
  Description of Artificial Sequence: Synthetic oligonucleotide
  Antisense strand to SEQ ID NO: 1353200
uugaccugggcacaccuac

SEQ ID NO: 1353202 - RNA, 19 nt, Artificial Sequence
  Description of Artificial Sequence: Synthetic oligonucleotide
  Sense strand starting at position 1642 of SEQ ID NO: 1242510
agggcuagcuguccuuuaa

SEQ ID NO: 1353203 - RNA, 19 nt, Artificial Sequence
  Description of Artificial Sequence: Synthetic oligonucleotide
  Antisense strand to SEQ ID NO: 1353202
uuaaaggacagcuagcccu

SEQ ID NO: 1353204 - RNA, 19 nt, Artificial Sequence
  Description of Artificial Sequence: Synthetic oligonucleotide
  Sense strand starting at position 1794 of SEQ ID NO: 1242510
aggcucugugccuaucaca

SEQ ID NO: 1353205 - RNA, 19 nt, Artificial Sequence
  Description of Artificial Sequence: Synthetic oligonucleotide
  Antisense strand to SEQ ID NO: 1353204
ugugauaggcacagagccu

SEQ ID NO: 1353206 - RNA, 19 nt, Artificial Sequence
  Description of Artificial Sequence: Synthetic oligonucleotide
  Sense strand starting at position 1900 of SEQ ID NO: 1242510
gcuugauggcagggagaga

SEQ ID NO: 1353207 - RNA, 19 nt, Artificial Sequence
  Description of Artificial Sequence: Synthetic oligonucleotide
  Antisense strand to SEQ ID NO: 1353206
ucucucccugccaucaagc

SEQ ID NO: 1353208 - RNA, 19 nt, Artificial Sequence
  Description of Artificial Sequence: Synthetic oligonucleotide
  Sense strand starting at position 1966 of SEQ ID NO: 1242510
ucuccuguguggucacuua

SEQ ID NO: 1353209 - RNA, 19 nt, Artificial Sequence
  Description of Artificial Sequence: Synthetic oligonucleotide
  Antisense strand to SEQ ID NO: 1353208
uaagugaccacacaggaga

SEQ ID NO: 1353210 - RNA, 19 nt, Artificial Sequence
  Description of Artificial Sequence: Synthetic oligonucleotide
  Sense strand starting at position 2023 of SEQ ID NO: 1242510
gccagugcugcauaaagga

SEQ ID NO: 1353211 - RNA, 19 nt, Artificial Sequence
  Description of Artificial Sequence: Synthetic oligonucleotide
  Antisense strand to SEQ ID NO: 1353210
uccuuuaugcagcacuggc

SEQ ID NO: 1353212 - RNA, 19 nt, Artificial Sequence
  Description of Artificial Sequence: Synthetic oligonucleotide
  Sense strand starting at position 2098 of SEQ ID NO: 1242510
ucagucaugcucuagacca

SEQ ID NO: 1353213 - RNA, 19 nt, Artificial Sequence
  Description of Artificial Sequence: Synthetic oligonucleotide
  Antisense strand to SEQ ID NO: 1353212
uggucuagagcaugacuga

SEQ ID NO: 1353214 - RNA, 19 nt, Artificial Sequence
  Description of Artificial Sequence: Synthetic oligonucleotide
  Sense strand starting at position 2676 of SEQ ID NO: 1242510
uggguagaauaauauaaca

SEQ ID NO: 1353215 - RNA, 19 nt, Artificial Sequence
  Description of Artificial Sequence: Synthetic oligonucleotide
  Antisense strand to SEQ ID NO: 1353214
uguuauauuauucuaccca

SEQ ID NO: 1353216 - RNA, 19 nt, Artificial Sequence
  Description of Artificial Sequence: Synthetic oligonucleotide
  Sense strand starting at position 2687 of SEQ ID NO: 1242510
auauaacacugucaaguua

SEQ ID NO: 1353217 - RNA, 19 nt, Artificial Sequence
  Description of Artificial Sequence: Synthetic oligonucleotide
  Antisense strand to SEQ ID NO: 1353216
uaacuugacaguguuauau

SEQ ID NO: 1353218 - RNA, 19 nt, Artificial Sequence
  Description of Artificial Sequence: Synthetic oligonucleotide
  Sense strand starting at position 2695 of SEQ ID NO: 1242510
cugucaaguuaaguuuauu

SEQ ID NO: 1353219 - RNA, 19 nt, Artificial Sequence
  Description of Artificial Sequence: Synthetic oligonucleotide
  Antisense strand to SEQ ID NO: 1353218
aauaaacuuaacuugacag

SEQ ID NO: 1353220 - RNA, 19 nt, Artificial Sequence
  Description of Artificial Sequence: Synthetic oligonucleotide
  Sense strand starting at position 2957 of SEQ ID NO: 1242510
ggagcaagaugcugucuca

SEQ ID NO: 1353221 - RNA, 19 nt, Artificial Sequence
  Description of Artificial Sequence: Synthetic oligonucleotide
  Antisense strand to SEQ ID NO: 1353220
ugagacagcaucuugcucc

SEQ ID NO: 1353222 - RNA, 19 nt, Artificial Sequence
  Description of Artificial Sequence: Synthetic oligonucleotide
  Sense strand starting at position 3148 of SEQ ID NO: 1242510
gugggaggauuaucuugag

SEQ ID NO: 1353223 - RNA, 19 nt, Artificial Sequence
  Description of Artificial Sequence: Synthetic oligonucleotide
  Antisense strand to SEQ ID NO: 1353222
cucaagauaauccucccac

SEQ ID NO: 1353224 - RNA, 19 nt, Artificial Sequence
  Description of Artificial Sequence: Synthetic oligonucleotide
  Sense strand starting at position 3151 of SEQ ID NO: 1242510
ggaggauuaucuugagguc

SEQ ID NO: 1353225 - RNA, 19 nt, Artificial Sequence
  Description of Artificial Sequence: Synthetic oligonucleotide
  Antisense strand to SEQ ID NO: 1353224
gaccucaagauaauccucc

SEQ ID NO: 1353226 - RNA, 19 nt, Artificial Sequence
  Description of Artificial Sequence: Synthetic oligonucleotide
  Sense strand starting at position 3154 of SEQ ID NO: 1242510
ggauuaucuugaggucagg

SEQ ID NO: 1353227 - RNA, 19 nt, Artificial Sequence
  Description of Artificial Sequence: Synthetic oligonucleotide
  Antisense strand to SEQ ID NO: 1353226
ccugaccucaagauaaucc

SEQ ID NO: 1353228 - RNA, 19 nt, Artificial Sequence
  Description of Artificial Sequence: Synthetic oligonucleotide
  Sense strand starting at position 3157 of SEQ ID NO: 1242510
uuaucuugaggucaggagu

SEQ ID NO: 1353229 - RNA, 19 nt, Artificial Sequence
  Description of Artificial Sequence: Synthetic oligonucleotide
  Antisense strand to SEQ ID NO: 1353228
acuccugaccucaagauaa

SEQ ID NO: 1353230 - RNA, 19 nt, Artificial Sequence
  Description of Artificial Sequence: Synthetic oligonucleotide
  Sense strand starting at position 3429 of SEQ ID NO: 1242510
uuaguauaguucucuagga

SEQ ID NO: 1353231 - RNA, 19 nt, Artificial Sequence
  Description of Artificial Sequence: Synthetic oligonucleotide
  Antisense strand to SEQ ID NO: 1353230
uccuagagaacuauacuaa

SEQ ID NO: 1353232 - RNA, 19 nt, Artificial Sequence
  Description of Artificial Sequence: Synthetic oligonucleotide
  Sense strand starting at position 3430 of SEQ ID NO: 1242510
uaguauaguucucuaggac

SEQ ID NO: 1353233 - RNA, 19 nt, Artificial Sequence
  Description of Artificial Sequence: Synthetic oligonucleotide
  Antisense strand to SEQ ID NO: 1353232
guccuagagaacuauacua

SEQ ID NO: 1353234 - RNA, 19 nt, Artificial Sequence
  Description of Artificial Sequence: Synthetic oligonucleotide
  Sense strand starting at position 3431 of SEQ ID NO: 1242510
aguauaguucucuaggacu

SEQ ID NO: 1353235 - RNA, 19 nt, Artificial Sequence
  Description of Artificial Sequence: Synthetic oligonucleotide
  Antisense strand to SEQ ID NO: 1353234
aguccuagagaacuauacu

SEQ ID NO: 1353236 - RNA, 19 nt, Artificial Sequence
  Description of Artificial Sequence: Synthetic oligonucleotide
  Sense strand starting at position 3434 of SEQ ID NO: 1242510
auaguucucuaggacuaaa

SEQ ID NO: 1353237 - RNA, 19 nt, Artificial Sequence
  Description of Artificial Sequence: Synthetic oligonucleotide
  Antisense strand to SEQ ID NO: 1353236
uuuaguccuagagaacuau

SEQ ID NO: 1353238 - RNA, 19 nt, Artificial Sequence
  Description of Artificial Sequence: Synthetic oligonucleotide
  Sense strand starting at position 3437 of SEQ ID NO: 1242510
guucucuaggacuaaaucu

SEQ ID NO: 1353239 - RNA, 19 nt, Artificial Sequence
  Description of Artificial Sequence: Synthetic oligonucleotide
  Antisense strand to SEQ ID NO: 1353238
agauuuaguccuagagaac

SEQ ID NO: 1353240 - RNA, 19 nt, Artificial Sequence
  Description of Artificial Sequence: Synthetic oligonucleotide
  Sense strand starting at position 3463 of SEQ ID NO: 1242510
gauguaugagaccgcuaca

SEQ ID NO: 1353241 - RNA, 19 nt, Artificial Sequence
  Description of Artificial Sequence: Synthetic oligonucleotide
  Antisense strand to SEQ ID NO: 1353240
uguagcggucucauacauc

SEQ ID NO: 1353242 - RNA, 19 nt, Artificial Sequence
  Description of Artificial Sequence: Synthetic oligonucleotide
  Sense strand starting at position 3621 of SEQ ID NO: 1242510
gguagaaauuggcaagcua

SEQ ID NO: 1353243 - RNA, 19 nt, Artificial Sequence
  Description of Artificial Sequence: Synthetic oligonucleotide
  Antisense strand to SEQ ID NO: 1353242
uagcuugccaauuucuacc

SEQ ID NO: 1353244 - RNA, 19 nt, Artificial Sequence
  Description of Artificial Sequence: Synthetic oligonucleotide
  Sense strand starting at position 3678 of SEQ ID NO: 1242510
ccaagagacucuuggagaa

SEQ ID NO: 1353245 - RNA, 19 nt, Artificial Sequence
  Description of Artificial Sequence: Synthetic oligonucleotide
  Antisense strand to SEQ ID NO: 1353244
uucuccaagagucucuugg

SEQ ID NO: 1353246 - RNA, 19 nt, Artificial Sequence
  Description of Artificial Sequence: Synthetic oligonucleotide
  Sense strand starting at position 3899 of SEQ ID NO: 1242510
ggauuaauuugauauccau

SEQ ID NO: 1353247 - RNA, 19 nt, Artificial Sequence
  Description of Artificial Sequence: Synthetic oligonucleotide
  Antisense strand to SEQ ID NO: 1353246
auggauaucaaauuaaucc

SEQ ID NO: 1353248 - RNA, 19 nt, Artificial Sequence
  Description of Artificial Sequence: Synthetic oligonucleotide
  Sense strand starting at position 4 of SEQ ID NO: 1242511
agacauuuguacugagcag

SEQ ID NO: 1353249 - RNA, 19 nt, Artificial Sequence
  Description of Artificial Sequence: Synthetic oligonucleotide
  Antisense strand to SEQ ID NO: 1353248
cugcucaguacaaaugucu

SEQ ID NO: 1353250 - RNA, 19 nt, Artificial Sequence
  Description of Artificial Sequence: Synthetic oligonucleotide
  Sense strand starting at position 40 of SEQ ID NO: 1242511
uccugauagucugucauau

SEQ ID NO: 1353251 - RNA, 19 nt, Artificial Sequence
  Description of Artificial Sequence: Synthetic oligonucleotide
  Antisense strand to SEQ ID NO: 1353250
auaugacagacuaucagga

SEQ ID NO: 1353252 - RNA, 19 nt, Artificial Sequence
  Description of Artificial Sequence: Synthetic oligonucleotide
  Sense strand starting at position 42 of SEQ ID NO: 1242511
cugauagucugucauauuu

SEQ ID NO: 1353253 - RNA, 19 nt, Artificial Sequence
  Description of Artificial Sequence: Synthetic oligonucleotide
  Antisense strand to SEQ ID NO: 1353252
aaauaugacagacuaucag

SEQ ID NO: 1353254 - RNA, 19 nt, Artificial Sequence
  Description of Artificial Sequence: Synthetic oligonucleotide
  Sense strand starting at position 264 of SEQ ID NO: 1242511
uggcacuuuaggugggaua

SEQ ID NO: 1353255 - RNA, 19 nt, Artificial Sequence
  Description of Artificial Sequence: Synthetic oligonucleotide
  Antisense strand to SEQ ID NO: 1353254
uaucccaccuaaagugcca

SEQ ID NO: 1353256 - RNA, 19 nt, Artificial Sequence
  Description of Artificial Sequence: Synthetic oligonucleotide
  Sense strand starting at position 265 of SEQ ID NO: 1242511
ggcacuuuaggugggauaa

SEQ ID NO: 1353257 - RNA, 19 nt, Artificial Sequence
  Description of Artificial Sequence: Synthetic oligonucleotide
  Antisense strand to SEQ ID NO: 1353256
uuaucccaccuaaagugcc

SEQ ID NO: 1353258 - RNA, 19 nt, Artificial Sequence
  Description of Artificial Sequence: Synthetic oligonucleotide
  Sense strand starting at position 266 of SEQ ID NO: 1242511
gcacuuuaggugggauaau

SEQ ID NO: 1353259 - RNA, 19 nt, Artificial Sequence
  Description of Artificial Sequence: Synthetic oligonucleotide
  Antisense strand to SEQ ID NO: 1353258
auuaucccaccuaaagugc

SEQ ID NO: 1353260 - RNA, 19 nt, Artificial Sequence
  Description of Artificial Sequence: Synthetic oligonucleotide
  Sense strand starting at position 276 of SEQ ID NO: 1242511
ugggauaauucuuugcugu

SEQ ID NO: 1353261 - RNA, 19 nt, Artificial Sequence
  Description of Artificial Sequence: Synthetic oligonucleotide
  Antisense strand to SEQ ID NO: 1353260
acagcaaagaauuauccca

SEQ ID NO: 1353262 - RNA, 19 nt, Artificial Sequence
  Description of Artificial Sequence: Synthetic oligonucleotide
  Sense strand starting at position 295 of SEQ ID NO: 1242511
ggcagacugccugaacguu

SEQ ID NO: 1353263 - RNA, 19 nt, Artificial Sequence
  Description of Artificial Sequence: Synthetic oligonucleotide
  Antisense strand to SEQ ID NO: 1353262
aacguucaggcagucugcc

SEQ ID NO: 1353264 - RNA, 19 nt, Artificial Sequence
  Description of Artificial Sequence: Synthetic oligonucleotide
  Sense strand starting at position 746 of SEQ ID NO: 1242511
gucuucuuuggguggaguu

SEQ ID NO: 1353265 - RNA, 19 nt, Artificial Sequence
  Description of Artificial Sequence: Synthetic oligonucleotide
  Antisense strand to SEQ ID NO: 1353264
aacuccacccaaagaagac

SEQ ID NO: 1353266 - RNA, 19 nt, Artificial Sequence
  Description of Artificial Sequence: Synthetic oligonucleotide
  Sense strand starting at position 756 of SEQ ID NO: 1242511
gguggaguuuccucagucu

SEQ ID NO: 1353267 - RNA, 19 nt, Artificial Sequence
  Description of Artificial Sequence: Synthetic oligonucleotide
  Antisense strand to SEQ ID NO: 1353266
agacugaggaaacuccacc

SEQ ID NO: 1353268 - RNA, 19 nt, Artificial Sequence
  Description of Artificial Sequence: Synthetic oligonucleotide
  Sense strand starting at position 759 of SEQ ID NO: 1242511
ggaguuuccucagucuaaa

SEQ ID NO: 1353269 - RNA, 19 nt, Artificial Sequence
  Description of Artificial Sequence: Synthetic oligonucleotide
  Antisense strand to SEQ ID NO: 1353268
uuuagacugaggaaacucc

SEQ ID NO: 1353270 - RNA, 19 nt, Artificial Sequence
  Description of Artificial Sequence: Synthetic oligonucleotide
  Sense strand starting at position 802 of SEQ ID NO: 1242511
auuguagucaccuguggaa

SEQ ID NO: 1353271 - RNA, 19 nt, Artificial Sequence
  Description of Artificial Sequence: Synthetic oligonucleotide
  Antisense strand to SEQ ID NO: 1353270
uuccacaggugacuacaau

SEQ ID NO: 1353272 - RNA, 19 nt, Artificial Sequence
  Description of Artificial Sequence: Synthetic oligonucleotide
  Sense strand starting at position 814 of SEQ ID NO: 1242511
uguggaagcucaucucuaa

SEQ ID NO: 1353273 - RNA, 19 nt, Artificial Sequence
  Description of Artificial Sequence: Synthetic oligonucleotide
  Antisense strand to SEQ ID NO: 1353272
uuagagaugagcuuccaca

SEQ ID NO: 1353274 - RNA, 19 nt, Artificial Sequence
  Description of Artificial Sequence: Synthetic oligonucleotide
  Sense strand starting at position 896 of SEQ ID NO: 1242511
uuuggcuuuccugaugaua

SEQ ID NO: 1353275 - RNA, 19 nt, Artificial Sequence
  Description of Artificial Sequence: Synthetic oligonucleotide
  Antisense strand to SEQ ID NO: 1353274
uaucaucaggaaagccaaa

SEQ ID NO: 1353276 - RNA, 19 nt, Artificial Sequence
  Description of Artificial Sequence: Synthetic oligonucleotide
  Sense strand starting at position 899 of SEQ ID NO: 1242511
ggcuuuccugaugauacca

SEQ ID NO: 1353277 - RNA, 19 nt, Artificial Sequence
  Description of Artificial Sequence: Synthetic oligonucleotide
  Antisense strand to SEQ ID NO: 1353276
ugguaucaucaggaaagcc

SEQ ID NO: 1353278 - RNA, 19 nt, Artificial Sequence
  Description of Artificial Sequence: Synthetic oligonucleotide
  Sense strand starting at position 923 of SEQ ID NO: 1242511
gcugucaccuuauugaacu

SEQ ID NO: 1353279 - RNA, 19 nt, Artificial Sequence
  Description of Artificial Sequence: Synthetic oligonucleotide
  Antisense strand to SEQ ID NO: 1353278
aguucaauaaggugacagc

SEQ ID NO: 1353280 - RNA, 19 nt, Artificial Sequence
  Description of Artificial Sequence: Synthetic oligonucleotide
  Sense strand starting at position 1123 of SEQ ID NO: 1242511
ggucaauuauaacaucaag

SEQ ID NO: 1353281 - RNA, 19 nt, Artificial Sequence
  Description of Artificial Sequence: Synthetic oligonucleotide
  Antisense strand to SEQ ID NO: 1353280
cuugauguuauaauugacc

SEQ ID NO: 1353282 - RNA, 19 nt, Artificial Sequence
  Description of Artificial Sequence: Synthetic oligonucleotide
  Sense strand starting at position 1174 of SEQ ID NO: 1242511
uugaguacccacugacuca

SEQ ID NO: 1353283 - RNA, 19 nt, Artificial Sequence
  Description of Artificial Sequence: Synthetic oligonucleotide
  Antisense strand to SEQ ID NO: 1353282
ugagucaguggguacucaa

SEQ ID NO: 1353284 - RNA, 19 nt, Artificial Sequence
  Description of Artificial Sequence: Synthetic oligonucleotide
  Sense strand starting at position 1278 of SEQ ID NO: 1242511
agagaauauucugcaguuu

SEQ ID NO: 1353285 - RNA, 19 nt, Artificial Sequence
  Description of Artificial Sequence: Synthetic oligonucleotide
  Antisense strand to SEQ ID NO: 1353284
aaacugcagaauauucucu

SEQ ID NO: 1353286 - RNA, 19 nt, Artificial Sequence
  Description of Artificial Sequence: Synthetic oligonucleotide
  Sense strand starting at position 1279 of SEQ ID NO: 1242511
gagaauauucugcaguuug

SEQ ID NO: 1353287 - RNA, 19 nt, Artificial Sequence
  Description of Artificial Sequence: Synthetic oligonucleotide
  Antisense strand to SEQ ID NO: 1353286
caaacugcagaauauucuc

SEQ ID NO: 1353288 - RNA, 19 nt, Artificial Sequence
  Description of Artificial Sequence: Synthetic oligonucleotide
  Sense strand starting at position 1382 of SEQ ID NO: 1242511
agccuuggguuucuaauga

SEQ ID NO: 1353289 - RNA, 19 nt, Artificial Sequence
  Description of Artificial Sequence: Synthetic oligonucleotide
  Antisense strand to SEQ ID NO: 1353288
ucauuagaaacccaaggcu

SEQ ID NO: 1353290 - RNA, 19 nt, Artificial Sequence
  Description of Artificial Sequence: Synthetic oligonucleotide
  Sense strand starting at position 1405 of SEQ ID NO: 1242511
uccgcuuaaugagugaguu

SEQ ID NO: 1353291 - RNA, 19 nt, Artificial Sequence
  Description of Artificial Sequence: Synthetic oligonucleotide
  Antisense strand to SEQ ID NO: 1353290
aacucacucauuaagcgga

SEQ ID NO: 1353292 - RNA, 19 nt, Artificial Sequence
  Description of Artificial Sequence: Synthetic oligonucleotide
  Sense strand starting at position 1441 of SEQ ID NO: 1242511
ggcuuugugacauacguga

SEQ ID NO: 1353293 - RNA, 19 nt, Artificial Sequence
  Description of Artificial Sequence: Synthetic oligonucleotide
  Antisense strand to SEQ ID NO: 1353292
ucacguaugucacaaagcc

SEQ ID NO: 1353294 - RNA, 19 nt, Artificial Sequence
  Description of Artificial Sequence: Synthetic oligonucleotide
  Sense strand starting at position 1443 of SEQ ID NO: 1242511
cuuugugacauacgugauc

SEQ ID NO: 1353295 - RNA, 19 nt, Artificial Sequence
  Description of Artificial Sequence: Synthetic oligonucleotide
  Antisense strand to SEQ ID NO: 1353294
gaucacguaugucacaaag

SEQ ID NO: 1353296 - RNA, 19 nt, Artificial Sequence
  Description of Artificial Sequence: Synthetic oligonucleotide
  Sense strand starting at position 1445 of SEQ ID NO: 1242511
uugugacauacgugaucuu

SEQ ID NO: 1353297 - RNA, 19 nt, Artificial Sequence
  Description of Artificial Sequence: Synthetic oligonucleotide
  Antisense strand to SEQ ID NO: 1353296
aagaucacguaugucacaa

SEQ ID NO: 1353298 - RNA, 19 nt, Artificial Sequence
  Description of Artificial Sequence: Synthetic oligonucleotide
  Sense strand starting at position 1446 of SEQ ID NO: 1242511
ugugacauacgugaucuuu

SEQ ID NO: 1353299 - RNA, 19 nt, Artificial Sequence
  Description of Artificial Sequence: Synthetic oligonucleotide
  Antisense strand to SEQ ID NO: 1353298
aaagaucacguaugucaca

SEQ ID NO: 1353300 - RNA, 19 nt, Artificial Sequence
  Description of Artificial Sequence: Synthetic oligonucleotide
  Sense strand starting at position 3072 of SEQ ID NO: 1242511
gcguuaccuccgcuacuuu

SEQ ID NO: 1353301 - RNA, 19 nt, Artificial Sequence
  Description of Artificial Sequence: Synthetic oligonucleotide
  Antisense strand to SEQ ID NO: 1353300
aaaguagcggagguaacgc

SEQ ID NO: 1353302 - RNA, 19 nt, Artificial Sequence
  Description of Artificial Sequence: Synthetic oligonucleotide
  Sense strand starting at position 3217 of SEQ ID NO: 1242511
uacccaagacgaugguuua

SEQ ID NO: 1353303 - RNA, 19 nt, Artificial Sequence
  Description of Artificial Sequence: Synthetic oligonucleotide
  Antisense strand to SEQ ID NO: 1353302
uaaaccaucgucuugggua

SEQ ID NO: 1353304 - RNA, 19 nt, Artificial Sequence
  Description of Artificial Sequence: Synthetic oligonucleotide
  Sense strand starting at position 3298 of SEQ ID NO: 1242511
guguucacucugccguaua

SEQ ID NO: 1353305 - RNA, 19 nt, Artificial Sequence
  Description of Artificial Sequence: Synthetic oligonucleotide
  Antisense strand to SEQ ID NO: 1353304
uauacggcagagugaacac

SEQ ID NO: 1353306 - RNA, 19 nt, Artificial Sequence
  Description of Artificial Sequence: Synthetic oligonucleotide
  Sense strand starting at position 3352 of SEQ ID NO: 1242511
guuucccaagcuuaagaua

SEQ ID NO: 1353307 - RNA, 19 nt, Artificial Sequence
  Description of Artificial Sequence: Synthetic oligonucleotide
  Antisense strand to SEQ ID NO: 1353306
uaucuuaagcuugggaaac

SEQ ID NO: 1353308 - RNA, 19 nt, Artificial Sequence
  Description of Artificial Sequence: Synthetic oligonucleotide
  Sense strand starting at position 3630 of SEQ ID NO: 1242511
acccgauaugauugaauug

SEQ ID NO: 1353309 - RNA, 19 nt, Artificial Sequence
  Description of Artificial Sequence: Synthetic oligonucleotide
  Antisense strand to SEQ ID NO: 1353308
caauucaaucauaucgggu

SEQ ID NO: 1353310 - RNA, 19 nt, Artificial Sequence
  Description of Artificial Sequence: Synthetic oligonucleotide
  Sense strand starting at position 3645 of SEQ ID NO: 1242511
auugaaugcucgcucuuau

SEQ ID NO: 1353311 - RNA, 19 nt, Artificial Sequence
  Description of Artificial Sequence: Synthetic oligonucleotide
  Antisense strand to SEQ ID NO: 1353310
auaagagcgagcauucaau

SEQ ID NO: 1353312 - RNA, 19 nt, Artificial Sequence
  Description of Artificial Sequence: Synthetic oligonucleotide
  Sense strand starting at position 3752 of SEQ ID NO: 1242511
aucccaauuuggcagacaa

SEQ ID NO: 1353313 - RNA, 19 nt, Artificial Sequence
  Description of Artificial Sequence: Synthetic oligonucleotide
  Antisense strand to SEQ ID NO: 1353312
uugucugccaaauugggau

SEQ ID NO: 1353314 - RNA, 19 nt, Artificial Sequence
  Description of Artificial Sequence: Synthetic oligonucleotide
  Sense strand starting at position 3764 of SEQ ID NO: 1242511
cagacaauagugugugcaa

SEQ ID NO: 1353315 - RNA, 19 nt, Artificial Sequence
  Description of Artificial Sequence: Synthetic oligonucleotide
  Antisense strand to SEQ ID NO: 1353314
uugcacacacuauugucug

SEQ ID NO: 1353316 - RNA, 19 nt, Artificial Sequence
  Description of Artificial Sequence: Synthetic oligonucleotide
  Sense strand starting at position 3765 of SEQ ID NO: 1242511
agacaauagugugugcaau

SEQ ID NO: 1353317 - RNA, 19 nt, Artificial Sequence
  Description of Artificial Sequence: Synthetic oligonucleotide
  Antisense strand to SEQ ID NO: 1353316
auugcacacacuauugucu

SEQ ID NO: 1353318 - RNA, 19 nt, Artificial Sequence
  Description of Artificial Sequence: Synthetic oligonucleotide
  Sense strand starting at position 3766 of SEQ ID NO: 1242511
gacaauagugugugcaauc

SEQ ID NO: 1353319 - RNA, 19 nt, Artificial Sequence
  Description of Artificial Sequence: Synthetic oligonucleotide
  Antisense strand to SEQ ID NO: 1353318
gauugcacacacuauuguc

SEQ ID NO: 1353320 - RNA, 19 nt, Artificial Sequence
  Description of Artificial Sequence: Synthetic oligonucleotide
  Sense strand starting at position 3778 of SEQ ID NO: 1242511
ugcaaucguaagugcaaga

SEQ ID NO: 1353321 - RNA, 19 nt, Artificial Sequence
  Description of Artificial Sequence: Synthetic oligonucleotide
  Antisense strand to SEQ ID NO: 1353320
ucuugcacuuacgauugca

SEQ ID NO: 1353322 - RNA, 19 nt, Artificial Sequence
  Description of Artificial Sequence: Synthetic oligonucleotide
  Sense strand starting at position 3809 of SEQ ID NO: 1242511
ugcauaugcguccaaccua

SEQ ID NO: 1353323 - RNA, 19 nt, Artificial Sequence
  Description of Artificial Sequence: Synthetic oligonucleotide
  Antisense strand to SEQ ID NO: 1353322
uagguuggacgcauaugca

SEQ ID NO: 1353324 - RNA, 19 nt, Artificial Sequence
  Description of Artificial Sequence: Synthetic oligonucleotide
  Sense strand starting at position 3860 of SEQ ID NO: 1242511
cuucgagcuugguuuaaua

SEQ ID NO: 1353325 - RNA, 19 nt, Artificial Sequence
  Description of Artificial Sequence: Synthetic oligonucleotide
  Antisense strand to SEQ ID NO: 1353324
uauuaaaccaagcucgaag

SEQ ID NO: 1353326 - RNA, 19 nt, Artificial Sequence
  Description of Artificial Sequence: Synthetic oligonucleotide
  Sense strand starting at position 3862 of SEQ ID NO: 1242511
ucgagcuugguuuaauauu

SEQ ID NO: 1353327 - RNA, 19 nt, Artificial Sequence
  Description of Artificial Sequence: Synthetic oligonucleotide
  Antisense strand to SEQ ID NO: 1353326
aauauuaaaccaagcucga

SEQ ID NO: 1353328 - RNA, 19 nt, Artificial Sequence
  Description of Artificial Sequence: Synthetic oligonucleotide
  Sense strand starting at position 1 of SEQ ID NO: 1242512
ggaguuuccucagucuaaa

SEQ ID NO: 1353329 - RNA, 19 nt, Artificial Sequence
  Description of Artificial Sequence: Synthetic oligonucleotide
  Antisense strand to SEQ ID NO: 1353328
uuuagacugaggaaacucc

SEQ ID NO: 1353330 - RNA, 19 nt, Artificial Sequence
  Description of Artificial Sequence: Synthetic oligonucleotide
  Sense strand starting at position 44 of SEQ ID NO: 1242512
auuguagucaccuguggaa

SEQ ID NO: 1353331 - RNA, 19 nt, Artificial Sequence
  Description of Artificial Sequence: Synthetic oligonucleotide
  Antisense strand to SEQ ID NO: 1353330
uuccacaggugacuacaau

SEQ ID NO: 1353332 - RNA, 19 nt, Artificial Sequence
  Description of Artificial Sequence: Synthetic oligonucleotide
  Sense strand starting at position 56 of SEQ ID NO: 1242512
uguggaagcucaucucuaa

SEQ ID NO: 1353333 - RNA, 19 nt, Artificial Sequence
  Description of Artificial Sequence: Synthetic oligonucleotide
  Antisense strand to SEQ ID NO: 1353332
uuagagaugagcuuccaca

SEQ ID NO: 1353334 - RNA, 19 nt, Artificial Sequence
  Description of Artificial Sequence: Synthetic oligonucleotide
  Sense strand starting at position 138 of SEQ ID NO: 1242512
uuuggcuuuccugaugaua

SEQ ID NO: 1353335 - RNA, 19 nt, Artificial Sequence
  Description of Artificial Sequence: Synthetic oligonucleotide
  Antisense strand to SEQ ID NO: 1353334
uaucaucaggaaagccaaa

SEQ ID NO: 1353336 - RNA, 19 nt, Artificial Sequence
  Description of Artificial Sequence: Synthetic oligonucleotide
  Sense strand starting at position 141 of SEQ ID NO: 1242512
ggcuuuccugaugauacca

SEQ ID NO: 1353337 - RNA, 19 nt, Artificial Sequence
  Description of Artificial Sequence: Synthetic oligonucleotide
  Antisense strand to SEQ ID NO: 1353336
ugguaucaucaggaaagcc

SEQ ID NO: 1353338 - RNA, 19 nt, Artificial Sequence
  Description of Artificial Sequence: Synthetic oligonucleotide
  Sense strand starting at position 165 of SEQ ID NO: 1242512
gcugucaccuuauugaacu

SEQ ID NO: 1353339 - RNA, 19 nt, Artificial Sequence
  Description of Artificial Sequence: Synthetic oligonucleotide
  Antisense strand to SEQ ID NO: 1353338
aguucaauaaggugacagc

SEQ ID NO: 1353340 - RNA, 19 nt, Artificial Sequence
  Description of Artificial Sequence: Synthetic oligonucleotide
  Sense strand starting at position 416 of SEQ ID NO: 1242512
uugaguacccacugacuca

SEQ ID NO: 1353341 - RNA, 19 nt, Artificial Sequence
  Description of Artificial Sequence: Synthetic oligonucleotide
  Antisense strand to SEQ ID NO: 1353340
ugagucaguggguacucaa

SEQ ID NO: 1353342 - RNA, 19 nt, Artificial Sequence
  Description of Artificial Sequence: Synthetic oligonucleotide
  Sense strand starting at position 520 of SEQ ID NO: 1242512
agagaauauucugcaguuu

SEQ ID NO: 1353343 - RNA, 19 nt, Artificial Sequence
  Description of Artificial Sequence: Synthetic oligonucleotide
  Antisense strand to SEQ ID NO: 1353342
aaacugcagaauauucucu

SEQ ID NO: 1353344 - RNA, 19 nt, Artificial Sequence
  Description of Artificial Sequence: Synthetic oligonucleotide
  Sense strand starting at position 521 of SEQ ID NO: 1242512
gagaauauucugcaguuug

SEQ ID NO: 1353345 - RNA, 19 nt, Artificial Sequence
  Description of Artificial Sequence: Synthetic oligonucleotide
  Antisense strand to SEQ ID NO: 1353344
caaacugcagaauauucuc

SEQ ID NO: 1353346 - RNA, 19 nt, Artificial Sequence
  Description of Artificial Sequence: Synthetic oligonucleotide
  Sense strand starting at position 624 of SEQ ID NO: 1242512
agccuuggguuucuaauga

SEQ ID NO: 1353347 - RNA, 19 nt, Artificial Sequence
  Description of Artificial Sequence: Synthetic oligonucleotide
  Antisense strand to SEQ ID NO: 1353346
ucauuagaaacccaaggcu

SEQ ID NO: 1353348 - RNA, 19 nt, Artificial Sequence
  Description of Artificial Sequence: Synthetic oligonucleotide
  Sense strand starting at position 683 of SEQ ID NO: 1242512
ggcuuugugacauacguga

SEQ ID NO: 1353349 - RNA, 19 nt, Artificial Sequence
  Description of Artificial Sequence: Synthetic oligonucleotide
  Antisense strand to SEQ ID NO: 1353348
ucacguaugucacaaagcc

SEQ ID NO: 1353350 - RNA, 19 nt, Artificial Sequence
  Description of Artificial Sequence: Synthetic oligonucleotide
  Sense strand starting at position 685 of SEQ ID NO: 1242512
cuuugugacauacgugauc

SEQ ID NO: 1353351 - RNA, 19 nt, Artificial Sequence
  Description of Artificial Sequence: Synthetic oligonucleotide
  Antisense strand to SEQ ID NO: 1353350
gaucacguaugucacaaag

SEQ ID NO: 1353352 - RNA, 19 nt, Artificial Sequence
  Description of Artificial Sequence: Synthetic oligonucleotide
  Sense strand starting at position 687 of SEQ ID NO: 1242512
uugugacauacgugaucuu

SEQ ID NO: 1353353 - RNA, 19 nt, Artificial Sequence
  Description of Artificial Sequence: Synthetic oligonucleotide
  Antisense strand to SEQ ID NO: 1353352
aagaucacguaugucacaa

SEQ ID NO: 1353354 - RNA, 19 nt, Artificial Sequence
  Description of Artificial Sequence: Synthetic oligonucleotide
  Sense strand starting at position 688 of SEQ ID NO: 1242512
ugugacauacgugaucuuu

SEQ ID NO: 1353355 - RNA, 19 nt, Artificial Sequence
  Description of Artificial Sequence: Synthetic oligonucleotide
  Antisense strand to SEQ ID NO: 1353354
aaagaucacguaugucaca

SEQ ID NO: 1353356 - RNA, 19 nt, Artificial Sequence
  Description of Artificial Sequence: Synthetic oligonucleotide
  Sense strand starting at position 2314 of SEQ ID NO: 1242512
gcguuaccuccgcuacuuu

SEQ ID NO: 1353357 - RNA, 19 nt, Artificial Sequence
  Description of Artificial Sequence: Synthetic oligonucleotide
  Antisense strand to SEQ ID NO: 1353356
aaaguagcggagguaacgc

SEQ ID NO: 1353358 - RNA, 19 nt, Artificial Sequence
  Description of Artificial Sequence: Synthetic oligonucleotide
  Sense strand starting at position 2459 of SEQ ID NO: 1242512
uacccaagacgaugguuua

SEQ ID NO: 1353359 - RNA, 19 nt, Artificial Sequence
  Description of Artificial Sequence: Synthetic oligonucleotide
  Antisense strand to SEQ ID NO: 1353358
uaaaccaucgucuugggua

SEQ ID NO: 1353360 - RNA, 19 nt, Artificial Sequence
  Description of Artificial Sequence: Synthetic oligonucleotide
  Sense strand starting at position 2540 of SEQ ID NO: 1242512
guguucacucugccguaua

SEQ ID NO: 1353361 - RNA, 19 nt, Artificial Sequence
  Description of Artificial Sequence: Synthetic oligonucleotide
  Antisense strand to SEQ ID NO: 1353360
uauacggcagagugaacac

SEQ ID NO: 1353362 - RNA, 19 nt, Artificial Sequence
  Description of Artificial Sequence: Synthetic oligonucleotide
  Sense strand starting at position 2594 of SEQ ID NO: 1242512
guuucccaagcuuaagaua

SEQ ID NO: 1353363 - RNA, 19 nt, Artificial Sequence
  Description of Artificial Sequence: Synthetic oligonucleotide
  Antisense strand to SEQ ID NO: 1353362
uaucuuaagcuugggaaac

SEQ ID NO: 1353364 - RNA, 19 nt, Artificial Sequence
  Description of Artificial Sequence: Synthetic oligonucleotide
  Sense strand starting at position 2872 of SEQ ID NO: 1242512
acccgauaugauugaauug

SEQ ID NO: 1353365 - RNA, 19 nt, Artificial Sequence
  Description of Artificial Sequence: Synthetic oligonucleotide
  Antisense strand to SEQ ID NO: 1353364
caauucaaucauaucgggu

SEQ ID NO: 1353366 - RNA, 19 nt, Artificial Sequence
  Description of Artificial Sequence: Synthetic oligonucleotide
  Sense strand starting at position 2994 of SEQ ID NO: 1242512
aucccaauuuggcagacaa

SEQ ID NO: 1353367 - RNA, 19 nt, Artificial Sequence
  Description of Artificial Sequence: Synthetic oligonucleotide
  Antisense strand to SEQ ID NO: 1353366
uugucugccaaauugggau

SEQ ID NO: 1353368 - RNA, 19 nt, Artificial Sequence
  Description of Artificial Sequence: Synthetic oligonucleotide
  Sense strand starting at position 3006 of SEQ ID NO: 1242512
cagacaauagugugugcaa

SEQ ID NO: 1353369 - RNA, 19 nt, Artificial Sequence
  Description of Artificial Sequence: Synthetic oligonucleotide
  Antisense strand to SEQ ID NO: 1353368
uugcacacacuauugucug

SEQ ID NO: 1353370 - RNA, 19 nt, Artificial Sequence
  Description of Artificial Sequence: Synthetic oligonucleotide
  Sense strand starting at position 3007 of SEQ ID NO: 1242512
agacaauagugugugcaau

SEQ ID NO: 1353371 - RNA, 19 nt, Artificial Sequence
  Description of Artificial Sequence: Synthetic oligonucleotide
  Antisense strand to SEQ ID NO: 1353370
auugcacacacuauugucu

SEQ ID NO: 1353372 - RNA, 19 nt, Artificial Sequence
  Description of Artificial Sequence: Synthetic oligonucleotide
  Sense strand starting at position 3008 of SEQ ID NO: 1242512
gacaauagugugugcaauc

SEQ ID NO: 1353373 - RNA, 19 nt, Artificial Sequence
  Description of Artificial Sequence: Synthetic oligonucleotide
  Antisense strand to SEQ ID NO: 1353372
gauugcacacacuauuguc

SEQ ID NO: 1353374 - RNA, 19 nt, Artificial Sequence
  Description of Artificial Sequence: Synthetic oligonucleotide
  Sense strand starting at position 3051 of SEQ ID NO: 1242512
ugcauaugcguccaaccua

SEQ ID NO: 1353375 - RNA, 19 nt, Artificial Sequence
  Description of Artificial Sequence: Synthetic oligonucleotide
  Antisense strand to SEQ ID NO: 1353374
uagguuggacgcauaugca

SEQ ID NO: 1353376 - RNA, 19 nt, Artificial Sequence
  Description of Artificial Sequence: Synthetic oligonucleotide
  Sense strand starting at position 3102 of SEQ ID NO: 1242512
cuucgagcuugguuuaaua

SEQ ID NO: 1353377 - RNA, 19 nt, Artificial Sequence
  Description of Artificial Sequence: Synthetic oligonucleotide
  Antisense strand to SEQ ID NO: 1353376
uauuaaaccaagcucgaag

SEQ ID NO: 1353378 - RNA, 19 nt, Artificial Sequence
  Description of Artificial Sequence: Synthetic oligonucleotide
  Sense strand starting at position 3104 of SEQ ID NO: 1242512
ucgagcuugguuuaauauu

SEQ ID NO: 1353379 - RNA, 19 nt, Artificial Sequence
  Description of Artificial Sequence: Synthetic oligonucleotide
  Antisense strand to SEQ ID NO: 1353378
aauauuaaaccaagcucga

SEQ ID NO: 1353380 - RNA, 19 nt, Artificial Sequence
  Description of Artificial Sequence: Synthetic oligonucleotide
  Sense strand starting at position 3236 of SEQ ID NO: 1242512
acaagagaucccugggcua

SEQ ID NO: 1353381 - RNA, 19 nt, Artificial Sequence
  Description of Artificial Sequence: Synthetic oligonucleotide
  Antisense strand to SEQ ID NO: 1353380
uagcccagggaucucuugu

SEQ ID NO: 1353382 - RNA, 19 nt, Artificial Sequence
  Description of Artificial Sequence: Synthetic oligonucleotide
  Sense strand starting at position 3238 of SEQ ID NO: 1242512
aagagaucccugggcuacu

SEQ ID NO: 1353383 - RNA, 19 nt, Artificial Sequence
  Description of Artificial Sequence: Synthetic oligonucleotide
  Antisense strand to SEQ ID NO: 1353382
aguagcccagggaucucuu

SEQ ID NO: 1353384 - RNA, 19 nt, Artificial Sequence
  Description of Artificial Sequence: Synthetic oligonucleotide
  Sense strand starting at position 3350 of SEQ ID NO: 1242512
uguuauaguccuuagccuu

SEQ ID NO: 1353385 - RNA, 19 nt, Artificial Sequence
  Description of Artificial Sequence: Synthetic oligonucleotide
  Antisense strand to SEQ ID NO: 1353384
aaggcuaaggacuauaaca

SEQ ID NO: 1353386 - RNA, 19 nt, Artificial Sequence
  Description of Artificial Sequence: Synthetic oligonucleotide
  Sense strand starting at position 3357 of SEQ ID NO: 1242512
guccuuagccuuuaagaag

SEQ ID NO: 1353387 - RNA, 19 nt, Artificial Sequence
  Description of Artificial Sequence: Synthetic oligonucleotide
  Antisense strand to SEQ ID NO: 1353386
cuucuuaaaggcuaaggac

SEQ ID NO: 1353388 - RNA, 19 nt, Artificial Sequence
  Description of Artificial Sequence: Synthetic oligonucleotide
  Sense strand starting at position 3510 of SEQ ID NO: 1242512
cuaucuagccuuuaagaag

SEQ ID NO: 1353389 - RNA, 19 nt, Artificial Sequence
  Description of Artificial Sequence: Synthetic oligonucleotide
  Antisense strand to SEQ ID NO: 1353388
cuucuuaaaggcuagauag

SEQ ID NO: 1353390 - RNA, 19 nt, Artificial Sequence
  Description of Artificial Sequence: Synthetic oligonucleotide
  Sense strand starting at position 3572 of SEQ ID NO: 1242512
ugauccaucuucccaggaa

SEQ ID NO: 1353391 - RNA, 19 nt, Artificial Sequence
  Description of Artificial Sequence: Synthetic oligonucleotide
  Antisense strand to SEQ ID NO: 1353390
uuccugggaagauggauca

SEQ ID NO: 1353392 - RNA, 19 nt, Artificial Sequence
  Description of Artificial Sequence: Synthetic oligonucleotide
  Sense strand starting at position 3694 of SEQ ID NO: 1242512
uggguucugagccagaaac

SEQ ID NO: 1353393 - RNA, 19 nt, Artificial Sequence
  Description of Artificial Sequence: Synthetic oligonucleotide
  Antisense strand to SEQ ID NO: 1353392
guuucuggcucagaaccca

SEQ ID NO: 1353394 - RNA, 19 nt, Artificial Sequence
  Description of Artificial Sequence: Synthetic oligonucleotide
  Sense strand starting at position 3719 of SEQ ID NO: 1242512
gcuacuguauuagcauuau

SEQ ID NO: 1353395 - RNA, 19 nt, Artificial Sequence
  Description of Artificial Sequence: Synthetic oligonucleotide
  Antisense strand to SEQ ID NO: 1353394
auaaugcuaauacaguagc

SEQ ID NO: 1353396 - RNA, 19 nt, Artificial Sequence
  Description of Artificial Sequence: Synthetic oligonucleotide
  Sense strand starting at position 3730 of SEQ ID NO: 1242512
agcauuauugcuggguuaa

SEQ ID NO: 1353397 - RNA, 19 nt, Artificial Sequence
  Description of Artificial Sequence: Synthetic oligonucleotide
  Antisense strand to SEQ ID NO: 1353396
uuaacccagcaauaaugcu

SEQ ID NO: 1353398 - RNA, 19 nt, Artificial Sequence
  Description of Artificial Sequence: Synthetic oligonucleotide
  Sense strand starting at position 3731 of SEQ ID NO: 1242512
gcauuauugcuggguuaag

SEQ ID NO: 1353399 - RNA, 19 nt, Artificial Sequence
  Description of Artificial Sequence: Synthetic oligonucleotide
  Antisense strand to SEQ ID NO: 1353398
cuuaacccagcaauaaugc

SEQ ID NO: 1353400 - RNA, 19 nt, Artificial Sequence
  Description of Artificial Sequence: Synthetic oligonucleotide
  Sense strand starting at position 3740 of SEQ ID NO: 1242512
cuggguuaagcacagaagu

SEQ ID NO: 1353401 - RNA, 19 nt, Artificial Sequence
  Description of Artificial Sequence: Synthetic oligonucleotide
  Antisense strand to SEQ ID NO: 1353400
acuucugugcuuaacccag

SEQ ID NO: 1353402 - RNA, 19 nt, Artificial Sequence
  Description of Artificial Sequence: Synthetic oligonucleotide
  Sense strand starting at position 3855 of SEQ ID NO: 1242512
ucuugagaaguugguauga

SEQ ID NO: 1353403 - RNA, 19 nt, Artificial Sequence
  Description of Artificial Sequence: Synthetic oligonucleotide
  Antisense strand to SEQ ID NO: 1353402
ucauaccaacuucucaaga

SEQ ID NO: 1353404 - RNA, 19 nt, Artificial Sequence
  Description of Artificial Sequence: Synthetic oligonucleotide
  Sense strand starting at position 3865 of SEQ ID NO: 1242512
uugguaugacuucgagaaa

SEQ ID NO: 1353405 - RNA, 19 nt, Artificial Sequence
  Description of Artificial Sequence: Synthetic oligonucleotide
  Antisense strand to SEQ ID NO: 1353404
uuucucgaagucauaccaa

SEQ ID NO: 1353406 - RNA, 19 nt, Artificial Sequence
  Description of Artificial Sequence: Synthetic oligonucleotide
  Sense strand starting at position 3927 of SEQ ID NO: 1242512
uuguuaccucuagauugcu

SEQ ID NO: 1353407 - RNA, 19 nt, Artificial Sequence
  Description of Artificial Sequence: Synthetic oligonucleotide
  Antisense strand to SEQ ID NO: 1353406
agcaaucuagagguaacaa

SEQ ID NO: 1353408 - RNA, 19 nt, Artificial Sequence
  Description of Artificial Sequence: Synthetic oligonucleotide
  Sense strand starting at position 1640 of SEQ ID NO: 1242513
cucaacucuagucggagua

SEQ ID NO: 1353409 - RNA, 19 nt, Artificial Sequence
  Description of Artificial Sequence: Synthetic oligonucleotide
  Antisense strand to SEQ ID NO: 1353408
uacuccgacuagaguugag

SEQ ID NO: 1353410 - RNA, 19 nt, Artificial Sequence
  Description of Artificial Sequence: Synthetic oligonucleotide
  Sense strand starting at position 3494 of SEQ ID NO: 1242513
gcuaacuuccaacgugagu

SEQ ID NO: 1353411 - RNA, 19 nt, Artificial Sequence
  Description of Artificial Sequence: Synthetic oligonucleotide
  Antisense strand to SEQ ID NO: 1353410
acucacguuggaaguuagc

SEQ ID NO: 1353412 - RNA, 19 nt, Artificial Sequence
  Description of Artificial Sequence: Synthetic oligonucleotide
  Sense strand starting at position 3718 of SEQ ID NO: 1242513
aggcauacguggugaggaa

SEQ ID NO: 1353413 - RNA, 19 nt, Artificial Sequence
  Description of Artificial Sequence: Synthetic oligonucleotide
  Antisense strand to SEQ ID NO: 1353412
uuccucaccacguaugccu

SEQ ID NO: 1353414 - RNA, 19 nt, Artificial Sequence
  Description of Artificial Sequence: Synthetic oligonucleotide
  Sense strand starting at position 59 of SEQ ID NO: 1242514
uuuggucaacuguauuagu

SEQ ID NO: 1353415 - RNA, 19 nt, Artificial Sequence
  Description of Artificial Sequence: Synthetic oligonucleotide
  Antisense strand to SEQ ID NO: 1353414
acuaauacaguugaccaaa

SEQ ID NO: 1353416 - RNA, 19 nt, Artificial Sequence
  Description of Artificial Sequence: Synthetic oligonucleotide
  Sense strand starting at position 101 of SEQ ID NO: 1242514
auccuuagggcuuaucagu

SEQ ID NO: 1353417 - RNA, 19 nt, Artificial Sequence
  Description of Artificial Sequence: Synthetic oligonucleotide
  Antisense strand to SEQ ID NO: 1353416
acugauaagcccuaaggau

SEQ ID NO: 1353418 - RNA, 19 nt, Artificial Sequence
  Description of Artificial Sequence: Synthetic oligonucleotide
  Sense strand starting at position 156 of SEQ ID NO: 1242514
ugguaaguagcuuggauuu

SEQ ID NO: 1353419 - RNA, 19 nt, Artificial Sequence
  Description of Artificial Sequence: Synthetic oligonucleotide
  Antisense strand to SEQ ID NO: 1353418
aaauccaagcuacuuacca

SEQ ID NO: 1353420 - RNA, 19 nt, Artificial Sequence
  Description of Artificial Sequence: Synthetic oligonucleotide
  Sense strand starting at position 281 of SEQ ID NO: 1242514
aaguaagaguacuuauuga

SEQ ID NO: 1353421 - RNA, 19 nt, Artificial Sequence
  Description of Artificial Sequence: Synthetic oligonucleotide
  Antisense strand to SEQ ID NO: 1353420
ucaauaaguacucuuacuu

SEQ ID NO: 1353422 - RNA, 19 nt, Artificial Sequence
  Description of Artificial Sequence: Synthetic oligonucleotide
  Sense strand starting at position 288 of SEQ ID NO: 1242514
aguacuuauugaucagaag

SEQ ID NO: 1353423 - RNA, 19 nt, Artificial Sequence
  Description of Artificial Sequence: Synthetic oligonucleotide
  Antisense strand to SEQ ID NO: 1353422
cuucugaucaauaaguacu

SEQ ID NO: 1353424 - RNA, 19 nt, Artificial Sequence
  Description of Artificial Sequence: Synthetic oligonucleotide
  Sense strand starting at position 289 of SEQ ID NO: 1242514
guacuuauugaucagaagu

SEQ ID NO: 1353425 - RNA, 19 nt, Artificial Sequence
  Description of Artificial Sequence: Synthetic oligonucleotide
  Antisense strand to SEQ ID NO: 1353424
acuucugaucaauaaguac

SEQ ID NO: 1353426 - RNA, 19 nt, Artificial Sequence
  Description of Artificial Sequence: Synthetic oligonucleotide
  Sense strand starting at position 295 of SEQ ID NO: 1242514
auugaucagaagugugaga

SEQ ID NO: 1353427 - RNA, 19 nt, Artificial Sequence
  Description of Artificial Sequence: Synthetic oligonucleotide
  Antisense strand to SEQ ID NO: 1353426
ucucacacuucugaucaau

SEQ ID NO: 1353428 - RNA, 19 nt, Artificial Sequence
  Description of Artificial Sequence: Synthetic oligonucleotide
  Sense strand starting at position 297 of SEQ ID NO: 1242514
ugaucagaagugugagaca

SEQ ID NO: 1353429 - RNA, 19 nt, Artificial Sequence
  Description of Artificial Sequence: Synthetic oligonucleotide
  Antisense strand to SEQ ID NO: 1353428
ugucucacacuucugauca

SEQ ID NO: 1353430 - RNA, 19 nt, Artificial Sequence
  Description of Artificial Sequence: Synthetic oligonucleotide
  Sense strand starting at position 369 of SEQ ID NO: 1242514
gugucucugacagguaacu

SEQ ID NO: 1353431 - RNA, 19 nt, Artificial Sequence
  Description of Artificial Sequence: Synthetic oligonucleotide
  Antisense strand to SEQ ID NO: 1353430
aguuaccugucagagacac

SEQ ID NO: 1353432 - RNA, 19 nt, Artificial Sequence
  Description of Artificial Sequence: Synthetic oligonucleotide
  Sense strand starting at position 519 of SEQ ID NO: 1242514
agguuaacugugcacugua

SEQ ID NO: 1353433 - RNA, 19 nt, Artificial Sequence
  Description of Artificial Sequence: Synthetic oligonucleotide
  Antisense strand to SEQ ID NO: 1353432
uacagugcacaguuaaccu

SEQ ID NO: 1353434 - RNA, 19 nt, Artificial Sequence
  Description of Artificial Sequence: Synthetic oligonucleotide
  Sense strand starting at position 604 of SEQ ID NO: 1242514
uuggacuguuacuaauuua

SEQ ID NO: 1353435 - RNA, 19 nt, Artificial Sequence
  Description of Artificial Sequence: Synthetic oligonucleotide
  Antisense strand to SEQ ID NO: 1353434
uaaauuaguaacaguccaa

SEQ ID NO: 1353436 - RNA, 19 nt, Artificial Sequence
  Description of Artificial Sequence: Synthetic oligonucleotide
  Sense strand starting at position 1725 of SEQ ID NO: 1242514
gagcuauuccgaggaggag

SEQ ID NO: 1353437 - RNA, 19 nt, Artificial Sequence
  Description of Artificial Sequence: Synthetic oligonucleotide
  Antisense strand to SEQ ID NO: 1353436
cuccuccucggaauagcuc

SEQ ID NO: 1353438 - RNA, 19 nt, Artificial Sequence
  Description of Artificial Sequence: Synthetic oligonucleotide
  Sense strand starting at position 2278 of SEQ ID NO: 1242514
cugucugugacccgaaaga

SEQ ID NO: 1353439 - RNA, 19 nt, Artificial Sequence
  Description of Artificial Sequence: Synthetic oligonucleotide
  Antisense strand to SEQ ID NO: 1353438
ucuuucgggucacagacag

SEQ ID NO: 1353440 - RNA, 19 nt, Artificial Sequence
  Description of Artificial Sequence: Synthetic oligonucleotide
  Sense strand starting at position 2374 of SEQ ID NO: 1242514
agaggaacgccucagacuu

SEQ ID NO: 1353441 - RNA, 19 nt, Artificial Sequence
  Description of Artificial Sequence: Synthetic oligonucleotide
  Antisense strand to SEQ ID NO: 1353440
aagucugaggcguuccucu

SEQ ID NO: 1353442 - RNA, 19 nt, Artificial Sequence
  Description of Artificial Sequence: Synthetic oligonucleotide
  Sense strand starting at position 2401 of SEQ ID NO: 1242514
aacgaauggcucugaaagu

SEQ ID NO: 1353443 - RNA, 19 nt, Artificial Sequence
  Description of Artificial Sequence: Synthetic oligonucleotide
  Antisense strand to SEQ ID NO: 1353442
acuuucagagccauucguu

SEQ ID NO: 1353444 - RNA, 19 nt, Artificial Sequence
  Description of Artificial Sequence: Synthetic oligonucleotide
  Sense strand starting at position 2408 of SEQ ID NO: 1242514
ggcucugaaaguuagcuga

SEQ ID NO: 1353445 - RNA, 19 nt, Artificial Sequence
  Description of Artificial Sequence: Synthetic oligonucleotide
  Antisense strand to SEQ ID NO: 1353444
ucagcuaacuuucagagcc

SEQ ID NO: 1353446 - RNA, 19 nt, Artificial Sequence
  Description of Artificial Sequence: Synthetic oligonucleotide
  Sense strand starting at position 2566 of SEQ ID NO: 1242514
ggaccaaggucaucuacuu

SEQ ID NO: 1353447 - RNA, 19 nt, Artificial Sequence
  Description of Artificial Sequence: Synthetic oligonucleotide
  Antisense strand to SEQ ID NO: 1353446
aaguagaugaccuuggucc

SEQ ID NO: 1353448 - RNA, 19 nt, Artificial Sequence
  Description of Artificial Sequence: Synthetic oligonucleotide
  Sense strand starting at position 2603 of SEQ ID NO: 1242514
ggaugugucaacuaguuua

SEQ ID NO: 1353449 - RNA, 19 nt, Artificial Sequence
  Description of Artificial Sequence: Synthetic oligonucleotide
  Antisense strand to SEQ ID NO: 1353448
uaaacuaguugacacaucc

SEQ ID NO: 1353450 - RNA, 19 nt, Artificial Sequence
  Description of Artificial Sequence: Synthetic oligonucleotide
  Sense strand starting at position 2608 of SEQ ID NO: 1242514
ugucaacuaguuuaccaga

SEQ ID NO: 1353451 - RNA, 19 nt, Artificial Sequence
  Description of Artificial Sequence: Synthetic oligonucleotide
  Antisense strand to SEQ ID NO: 1353450
ucugguaaacuaguugaca

SEQ ID NO: 1353452 - RNA, 19 nt, Artificial Sequence
  Description of Artificial Sequence: Synthetic oligonucleotide
  Sense strand starting at position 2651 of SEQ ID NO: 1242514
gcaguuguugacguucagu

SEQ ID NO: 1353453 - RNA, 19 nt, Artificial Sequence
  Description of Artificial Sequence: Synthetic oligonucleotide
  Antisense strand to SEQ ID NO: 1353452
acugaacgucaacaacugc

SEQ ID NO: 1353454 - RNA, 19 nt, Artificial Sequence
  Description of Artificial Sequence: Synthetic oligonucleotide
  Sense strand starting at position 2669 of SEQ ID NO: 1242514
uaggucgucgguuaagaaa

SEQ ID NO: 1353455 - RNA, 19 nt, Artificial Sequence
  Description of Artificial Sequence: Synthetic oligonucleotide
  Antisense strand to SEQ ID NO: 1353454
uuucuuaaccgacgaccua

SEQ ID NO: 1353456 - RNA, 19 nt, Artificial Sequence
  Description of Artificial Sequence: Synthetic oligonucleotide
  Sense strand starting at position 2853 of SEQ ID NO: 1242514
uguguauagcuuuacaaca

SEQ ID NO: 1353457 - RNA, 19 nt, Artificial Sequence
  Description of Artificial Sequence: Synthetic oligonucleotide
  Antisense strand to SEQ ID NO: 1353456
uguuguaaagcuauacaca

SEQ ID NO: 1353458 - RNA, 19 nt, Artificial Sequence
  Description of Artificial Sequence: Synthetic oligonucleotide
  Sense strand starting at position 2920 of SEQ ID NO: 1242514
acuugcaacuuuguugaua

SEQ ID NO: 1353459 - RNA, 19 nt, Artificial Sequence
  Description of Artificial Sequence: Synthetic oligonucleotide
  Antisense strand to SEQ ID NO: 1353458
uaucaacaaaguugcaagu

SEQ ID NO: 1353460 - RNA, 19 nt, Artificial Sequence
  Description of Artificial Sequence: Synthetic oligonucleotide
  Sense strand starting at position 2921 of SEQ ID NO: 1242514
cuugcaacuuuguugauaa

SEQ ID NO: 1353461 - RNA, 19 nt, Artificial Sequence
  Description of Artificial Sequence: Synthetic oligonucleotide
  Antisense strand to SEQ ID NO: 1353460
uuaucaacaaaguugcaag

SEQ ID NO: 1353462 - RNA, 19 nt, Artificial Sequence
  Description of Artificial Sequence: Synthetic oligonucleotide
  Sense strand starting at position 2933 of SEQ ID NO: 1242514
uugauaagcccuugaagua

SEQ ID NO: 1353463 - RNA, 19 nt, Artificial Sequence
  Description of Artificial Sequence: Synthetic oligonucleotide
  Antisense strand to SEQ ID NO: 1353462
uacuucaagggcuuaucaa

SEQ ID NO: 1353464 - RNA, 19 nt, Artificial Sequence
  Description of Artificial Sequence: Synthetic oligonucleotide
  Sense strand starting at position 2949 of SEQ ID NO: 1242514
guacuagaugaguacccau

SEQ ID NO: 1353465 - RNA, 19 nt, Artificial Sequence
  Description of Artificial Sequence: Synthetic oligonucleotide
  Antisense strand to SEQ ID NO: 1353464
auggguacucaucuaguac

SEQ ID NO: 1353466 - RNA, 19 nt, Artificial Sequence
  Description of Artificial Sequence: Synthetic oligonucleotide
  Sense strand starting at position 3182 of SEQ ID NO: 1242514
acugucagucucggaacau

SEQ ID NO: 1353467 - RNA, 19 nt, Artificial Sequence
  Description of Artificial Sequence: Synthetic oligonucleotide
  Antisense strand to SEQ ID NO: 1353466
auguuccgagacugacagu

SEQ ID NO: 1353468 - RNA, 19 nt, Artificial Sequence
  Description of Artificial Sequence: Synthetic oligonucleotide
  Sense strand starting at position 3232 of SEQ ID NO: 1242514
guguguauccgccucacaa

SEQ ID NO: 1353469 - RNA, 19 nt, Artificial Sequence
  Description of Artificial Sequence: Synthetic oligonucleotide
  Antisense strand to SEQ ID NO: 1353468
uugugaggcggauacacac

SEQ ID NO: 1353470 - RNA, 19 nt, Artificial Sequence
  Description of Artificial Sequence: Synthetic oligonucleotide
  Sense strand starting at position 3326 of SEQ ID NO: 1242514
aguauuaagccauauucga

SEQ ID NO: 1353471 - RNA, 19 nt, Artificial Sequence
  Description of Artificial Sequence: Synthetic oligonucleotide
  Antisense strand to SEQ ID NO: 1353470
ucgaauauggcuuaauacu

SEQ ID NO: 1353472 - RNA, 19 nt, Artificial Sequence
  Description of Artificial Sequence: Synthetic oligonucleotide
  Sense strand starting at position 3497 of SEQ ID NO: 1242514
ggcaacaaagaauguaaau

SEQ ID NO: 1353473 - RNA, 19 nt, Artificial Sequence
  Description of Artificial Sequence: Synthetic oligonucleotide
  Antisense strand to SEQ ID NO: 1353472
auuuacauucuuuguugcc

SEQ ID NO: 1353474 - RNA, 19 nt, Artificial Sequence
  Description of Artificial Sequence: Synthetic oligonucleotide
  Sense strand starting at position 3516 of SEQ ID NO: 1242514
cuuuaaggacuuuauuguu

SEQ ID NO: 1353475 - RNA, 19 nt, Artificial Sequence
  Description of Artificial Sequence: Synthetic oligonucleotide
  Antisense strand to SEQ ID NO: 1353474
aacaauaaaguccuuaaag

SEQ ID NO: 1353476 - RNA, 19 nt, Artificial Sequence
  Description of Artificial Sequence: Synthetic oligonucleotide
  Sense strand starting at position 3523 of SEQ ID NO: 1242514
gacuuuauuguuggacuaa

SEQ ID NO: 1353477 - RNA, 19 nt, Artificial Sequence
  Description of Artificial Sequence: Synthetic oligonucleotide
  Antisense strand to SEQ ID NO: 1353476
uuaguccaacaauaaaguc

SEQ ID NO: 1353478 - RNA, 19 nt, Artificial Sequence
  Description of Artificial Sequence: Synthetic oligonucleotide
  Sense strand starting at position 3640 of SEQ ID NO: 1242514
aauggccugguguaucaaa

SEQ ID NO: 1353479 - RNA, 19 nt, Artificial Sequence
  Description of Artificial Sequence: Synthetic oligonucleotide
  Antisense strand to SEQ ID NO: 1353478
uuugauacaccaggccauu

SEQ ID NO: 1353480 - RNA, 19 nt, Artificial Sequence
  Description of Artificial Sequence: Synthetic oligonucleotide
  Sense strand starting at position 3666 of SEQ ID NO: 1242514
ggaaaucccugaguuccaa

SEQ ID NO: 1353481 - RNA, 19 nt, Artificial Sequence
  Description of Artificial Sequence: Synthetic oligonucleotide
  Antisense strand to SEQ ID NO: 1353480
uuggaacucagggauuucc

SEQ ID NO: 1353482 - RNA, 19 nt, Artificial Sequence
  Description of Artificial Sequence: Synthetic oligonucleotide
  Sense strand starting at position 3772 of SEQ ID NO: 1242514
uuaauuccuccuggagaaa

SEQ ID NO: 1353483 - RNA, 19 nt, Artificial Sequence
  Description of Artificial Sequence: Synthetic oligonucleotide
  Antisense strand to SEQ ID NO: 1353482
uuucuccaggaggaauuaa

SEQ ID NO: 1353484 - RNA, 19 nt, Artificial Sequence
  Description of Artificial Sequence: Synthetic oligonucleotide
  Sense strand starting at position 3783 of SEQ ID NO: 1242514
uggagaaauuacguauauc

SEQ ID NO: 1353485 - RNA, 19 nt, Artificial Sequence
  Description of Artificial Sequence: Synthetic oligonucleotide
  Antisense strand to SEQ ID NO: 1353484
gauauacguaauuucucca

SEQ ID NO: 1353486 - RNA, 19 nt, Artificial Sequence
  Description of Artificial Sequence: Synthetic oligonucleotide
  Sense strand starting at position 3786 of SEQ ID NO: 1242514
agaaauuacguauauccgu

SEQ ID NO: 1353487 - RNA, 19 nt, Artificial Sequence
  Description of Artificial Sequence: Synthetic oligonucleotide
  Antisense strand to SEQ ID NO: 1353486
acggauauacguaauuucu

SEQ ID NO: 1353488 - RNA, 19 nt, Artificial Sequence
  Description of Artificial Sequence: Synthetic oligonucleotide
  Sense strand starting at position 3903 of SEQ ID NO: 1242514
uuuagaaauguuugcucau

SEQ ID NO: 1353489 - RNA, 19 nt, Artificial Sequence
  Description of Artificial Sequence: Synthetic oligonucleotide
  Antisense strand to SEQ ID NO: 1353488
augagcaaacauuucuaaa

SEQ ID NO: 1353490 - RNA, 19 nt, Artificial Sequence
  Description of Artificial Sequence: Synthetic oligonucleotide
  Sense strand starting at position 3904 of SEQ ID NO: 1242514
uuagaaauguuugcucauc

SEQ ID NO: 1353491 - RNA, 19 nt, Artificial Sequence
  Description of Artificial Sequence: Synthetic oligonucleotide
  Antisense strand to SEQ ID NO: 1353490
gaugagcaaacauuucuaa

SEQ ID NO: 1353492 - RNA, 19 nt, Artificial Sequence
  Description of Artificial Sequence: Synthetic oligonucleotide
  Sense strand starting at position 3906 of SEQ ID NO: 1242514
agaaauguuugcucaucaa

SEQ ID NO: 1353493 - RNA, 19 nt, Artificial Sequence
  Description of Artificial Sequence: Synthetic oligonucleotide
  Antisense strand to SEQ ID NO: 1353492
uugaugagcaaacauuucu

SEQ ID NO: 1353494 - RNA, 19 nt, Artificial Sequence
  Description of Artificial Sequence: Synthetic oligonucleotide
  Sense strand starting at position 22 of SEQ ID NO: 1242515
acaguugcucuggaagagu

SEQ ID NO: 1353495 - RNA, 19 nt, Artificial Sequence
  Description of Artificial Sequence: Synthetic oligonucleotide
  Antisense strand to SEQ ID NO: 1353494
acucuuccagagcaacugu

SEQ ID NO: 1353496 - RNA, 19 nt, Artificial Sequence
  Description of Artificial Sequence: Synthetic oligonucleotide
  Sense strand starting at position 166 of SEQ ID NO: 1242515
cuguaauagcuacaacaug

SEQ ID NO: 1353497 - RNA, 19 nt, Artificial Sequence
  Description of Artificial Sequence: Synthetic oligonucleotide
  Antisense strand to SEQ ID NO: 1353496
cauguuguagcuauuacag

SEQ ID NO: 1353498 - RNA, 19 nt, Artificial Sequence
  Description of Artificial Sequence: Synthetic oligonucleotide
  Sense strand starting at position 377 of SEQ ID NO: 1242515
ggguacuuagagcagucaa

SEQ ID NO: 1353499 - RNA, 19 nt, Artificial Sequence
  Description of Artificial Sequence: Synthetic oligonucleotide
  Antisense strand to SEQ ID NO: 1353498
uugacugcucuaaguaccc

SEQ ID NO: 1353500 - RNA, 19 nt, Artificial Sequence
  Description of Artificial Sequence: Synthetic oligonucleotide
  Sense strand starting at position 508 of SEQ ID NO: 1242515
gugacugugcaacaauauu

SEQ ID NO: 1353501 - RNA, 19 nt, Artificial Sequence
  Description of Artificial Sequence: Synthetic oligonucleotide
  Antisense strand to SEQ ID NO: 1353500
aauauuguugcacagucac

SEQ ID NO: 1353502 - RNA, 19 nt, Artificial Sequence
  Description of Artificial Sequence: Synthetic oligonucleotide
  Sense strand starting at position 810 of SEQ ID NO: 1242515
ucauuagaugggcaucuuu

SEQ ID NO: 1353503 - RNA, 19 nt, Artificial Sequence
  Description of Artificial Sequence: Synthetic oligonucleotide
  Antisense strand to SEQ ID NO: 1353502
aaagaugcccaucuaauga

SEQ ID NO: 1353504 - RNA, 19 nt, Artificial Sequence
  Description of Artificial Sequence: Synthetic oligonucleotide
  Sense strand starting at position 874 of SEQ ID NO: 1242515
auauuaccuguaugagaga

SEQ ID NO: 1353505 - RNA, 19 nt, Artificial Sequence
  Description of Artificial Sequence: Synthetic oligonucleotide
  Antisense strand to SEQ ID NO: 1353504
ucucucauacagguaauau

SEQ ID NO: 1353506 - RNA, 19 nt, Artificial Sequence
  Description of Artificial Sequence: Synthetic oligonucleotide
  Sense strand starting at position 1067 of SEQ ID NO: 1242515
auaccacugucauugucaa

SEQ ID NO: 1353507 - RNA, 19 nt, Artificial Sequence
  Description of Artificial Sequence: Synthetic oligonucleotide
  Antisense strand to SEQ ID NO: 1353506
uugacaaugacagugguau

SEQ ID NO: 1353508 - RNA, 19 nt, Artificial Sequence
  Description of Artificial Sequence: Synthetic oligonucleotide
  Sense strand starting at position 1087 of SEQ ID NO: 1242515
gcucucacugacugaacua

SEQ ID NO: 1353509 - RNA, 19 nt, Artificial Sequence
  Description of Artificial Sequence: Synthetic oligonucleotide
  Antisense strand to SEQ ID NO: 1353508
uaguucagucagugagagc

SEQ ID NO: 1353510 - RNA, 19 nt, Artificial Sequence
  Description of Artificial Sequence: Synthetic oligonucleotide
  Sense strand starting at position 1332 of SEQ ID NO: 1242515
ucauacuucugccuggaau

SEQ ID NO: 1353511 - RNA, 19 nt, Artificial Sequence
  Description of Artificial Sequence: Synthetic oligonucleotide
  Antisense strand to SEQ ID NO: 1353510
auuccaggcagaaguauga

SEQ ID NO: 1353512 - RNA, 19 nt, Artificial Sequence
  Description of Artificial Sequence: Synthetic oligonucleotide
  Sense strand starting at position 1334 of SEQ ID NO: 1242515
auacuucugccuggaauaa

SEQ ID NO: 1353513 - RNA, 19 nt, Artificial Sequence
  Description of Artificial Sequence: Synthetic oligonucleotide
  Antisense strand to SEQ ID NO: 1353512
uuauuccaggcagaaguau

SEQ ID NO: 1353514 - RNA, 19 nt, Artificial Sequence
  Description of Artificial Sequence: Synthetic oligonucleotide
  Sense strand starting at position 1404 of SEQ ID NO: 1242515
uuagcauuuccuggccacu

SEQ ID NO: 1353515 - RNA, 19 nt, Artificial Sequence
  Description of Artificial Sequence: Synthetic oligonucleotide
  Antisense strand to SEQ ID NO: 1353514
aguggccaggaaaugcuaa

SEQ ID NO: 1353516 - RNA, 19 nt, Artificial Sequence
  Description of Artificial Sequence: Synthetic oligonucleotide
  Sense strand starting at position 1513 of SEQ ID NO: 1242515
cuaccucagugacugaaau

SEQ ID NO: 1353517 - RNA, 19 nt, Artificial Sequence
  Description of Artificial Sequence: Synthetic oligonucleotide
  Antisense strand to SEQ ID NO: 1353516
auuucagucacugagguag

SEQ ID NO: 1353518 - RNA, 19 nt, Artificial Sequence
  Description of Artificial Sequence: Synthetic oligonucleotide
  Sense strand starting at position 1621 of SEQ ID NO: 1242515
aguacuugaugccuuaaau

SEQ ID NO: 1353519 - RNA, 19 nt, Artificial Sequence
  Description of Artificial Sequence: Synthetic oligonucleotide
  Antisense strand to SEQ ID NO: 1353518
auuuaaggcaucaaguacu

SEQ ID NO: 1353520 - RNA, 19 nt, Artificial Sequence
  Description of Artificial Sequence: Synthetic oligonucleotide
  Sense strand starting at position 1726 of SEQ ID NO: 1242515
agaauuuaggcgugugcau

SEQ ID NO: 1353521 - RNA, 19 nt, Artificial Sequence
  Description of Artificial Sequence: Synthetic oligonucleotide
  Antisense strand to SEQ ID NO: 1353520
augcacacgccuaaauucu

SEQ ID NO: 1353522 - RNA, 19 nt, Artificial Sequence
  Description of Artificial Sequence: Synthetic oligonucleotide
  Sense strand starting at position 1737 of SEQ ID NO: 1242515
gugugcauuuaucuaucua

SEQ ID NO: 1353523 - RNA, 19 nt, Artificial Sequence
  Description of Artificial Sequence: Synthetic oligonucleotide
  Antisense strand to SEQ ID NO: 1353522
uagauagauaaaugcacac

SEQ ID NO: 1353524 - RNA, 19 nt, Artificial Sequence
  Description of Artificial Sequence: Synthetic oligonucleotide
  Sense strand starting at position 1773 of SEQ ID NO: 1242515
aacuguuaccgagguuuag

SEQ ID NO: 1353525 - RNA, 19 nt, Artificial Sequence
  Description of Artificial Sequence: Synthetic oligonucleotide
  Antisense strand to SEQ ID NO: 1353524
cuaaaccucgguaacaguu

SEQ ID NO: 1353526 - RNA, 19 nt, Artificial Sequence
  Description of Artificial Sequence: Synthetic oligonucleotide
  Sense strand starting at position 1783 of SEQ ID NO: 1242515
gagguuuagaguuaucuga

SEQ ID NO: 1353527 - RNA, 19 nt, Artificial Sequence
  Description of Artificial Sequence: Synthetic oligonucleotide
  Antisense strand to SEQ ID NO: 1353526
ucagauaacucuaaaccuc

SEQ ID NO: 1353528 - RNA, 19 nt, Artificial Sequence
  Description of Artificial Sequence: Synthetic oligonucleotide
  Sense strand starting at position 1785 of SEQ ID NO: 1242515
gguuuagaguuaucugaua

SEQ ID NO: 1353529 - RNA, 19 nt, Artificial Sequence
  Description of Artificial Sequence: Synthetic oligonucleotide
  Antisense strand to SEQ ID NO: 1353528
uaucagauaacucuaaacc

SEQ ID NO: 1353530 - RNA, 19 nt, Artificial Sequence
  Description of Artificial Sequence: Synthetic oligonucleotide
  Sense strand starting at position 1787 of SEQ ID NO: 1242515
uuuagaguuaucugauagg

SEQ ID NO: 1353531 - RNA, 19 nt, Artificial Sequence
  Description of Artificial Sequence: Synthetic oligonucleotide
  Antisense strand to SEQ ID NO: 1353530
ccuaucagauaacucuaaa

SEQ ID NO: 1353532 - RNA, 19 nt, Artificial Sequence
  Description of Artificial Sequence: Synthetic oligonucleotide
  Sense strand starting at position 1979 of SEQ ID NO: 1242515
gacugagguucuccugauc

SEQ ID NO: 1353533 - RNA, 19 nt, Artificial Sequence
  Description of Artificial Sequence: Synthetic oligonucleotide
  Antisense strand to SEQ ID NO: 1353532
gaucaggagaaccucaguc

SEQ ID NO: 1353534 - RNA, 19 nt, Artificial Sequence
  Description of Artificial Sequence: Synthetic oligonucleotide
  Sense strand starting at position 1982 of SEQ ID NO: 1242515
ugagguucuccugaucugu

SEQ ID NO: 1353535 - RNA, 19 nt, Artificial Sequence
  Description of Artificial Sequence: Synthetic oligonucleotide
  Antisense strand to SEQ ID NO: 1353534
acagaucaggagaaccuca

SEQ ID NO: 1353536 - RNA, 19 nt, Artificial Sequence
  Description of Artificial Sequence: Synthetic oligonucleotide
  Sense strand starting at position 1984 of SEQ ID NO: 1242515
agguucuccugaucuguaa

SEQ ID NO: 1353537 - RNA, 19 nt, Artificial Sequence
  Description of Artificial Sequence: Synthetic oligonucleotide
  Antisense strand to SEQ ID NO: 1353536
uuacagaucaggagaaccu

SEQ ID NO: 1353538 - RNA, 19 nt, Artificial Sequence
  Description of Artificial Sequence: Synthetic oligonucleotide
  Sense strand starting at position 2053 of SEQ ID NO: 1242515
guagacauauuacuuagga

SEQ ID NO: 1353539 - RNA, 19 nt, Artificial Sequence
  Description of Artificial Sequence: Synthetic oligonucleotide
  Antisense strand to SEQ ID NO: 1353538
uccuaaguaauaugucuac

SEQ ID NO: 1353540 - RNA, 19 nt, Artificial Sequence
  Description of Artificial Sequence: Synthetic oligonucleotide
  Sense strand starting at position 2223 of SEQ ID NO: 1242515
ggaaacuguaaacgcuaua

SEQ ID NO: 1353541 - RNA, 19 nt, Artificial Sequence
  Description of Artificial Sequence: Synthetic oligonucleotide
  Antisense strand to SEQ ID NO: 1353540
uauagcguuuacaguuucc

SEQ ID NO: 1353542 - RNA, 19 nt, Artificial Sequence
  Description of Artificial Sequence: Synthetic oligonucleotide
  Sense strand starting at position 2286 of SEQ ID NO: 1242515
aaagucaaauacguguaau

SEQ ID NO: 1353543 - RNA, 19 nt, Artificial Sequence
  Description of Artificial Sequence: Synthetic oligonucleotide
  Antisense strand to SEQ ID NO: 1353542
auuacacguauuugacuuu

SEQ ID NO: 1353544 - RNA, 19 nt, Artificial Sequence
  Description of Artificial Sequence: Synthetic oligonucleotide
  Sense strand starting at position 2337 of SEQ ID NO: 1242515
aguauugguuauccacauu

SEQ ID NO: 1353545 - RNA, 19 nt, Artificial Sequence
  Description of Artificial Sequence: Synthetic oligonucleotide
  Antisense strand to SEQ ID NO: 1353544
aauguggauaaccaauacu

SEQ ID NO: 1353546 - RNA, 19 nt, Artificial Sequence
  Description of Artificial Sequence: Synthetic oligonucleotide
  Sense strand starting at position 2359 of SEQ ID NO: 1242515
aaagguacucacugguauu

SEQ ID NO: 1353547 - RNA, 19 nt, Artificial Sequence
  Description of Artificial Sequence: Synthetic oligonucleotide
  Antisense strand to SEQ ID NO: 1353546
aauaccagugaguaccuuu

SEQ ID NO: 1353548 - RNA, 19 nt, Artificial Sequence
  Description of Artificial Sequence: Synthetic oligonucleotide
  Sense strand starting at position 2398 of SEQ ID NO: 1242515
agauuaguggcucaguaaa

SEQ ID NO: 1353549 - RNA, 19 nt, Artificial Sequence
  Description of Artificial Sequence: Synthetic oligonucleotide
  Antisense strand to SEQ ID NO: 1353548
uuuacugagccacuaaucu

SEQ ID NO: 1353550 - RNA, 19 nt, Artificial Sequence
  Description of Artificial Sequence: Synthetic oligonucleotide
  Sense strand starting at position 2604 of SEQ ID NO: 1242515
gcccuuuaagaacaaaugu

SEQ ID NO: 1353551 - RNA, 19 nt, Artificial Sequence
  Description of Artificial Sequence: Synthetic oligonucleotide
  Antisense strand to SEQ ID NO: 1353550
acauuuguucuuaaagggc

SEQ ID NO: 1353552 - RNA, 19 nt, Artificial Sequence
  Description of Artificial Sequence: Synthetic oligonucleotide
  Sense strand starting at position 2633 of SEQ ID NO: 1242515
accgcuacuccagacaauu

SEQ ID NO: 1353553 - RNA, 19 nt, Artificial Sequence
  Description of Artificial Sequence: Synthetic oligonucleotide
  Antisense strand to SEQ ID NO: 1353552
aauugucuggaguagcggu

SEQ ID NO: 1353554 - RNA, 19 nt, Artificial Sequence
  Description of Artificial Sequence: Synthetic oligonucleotide
  Sense strand starting at position 2661 of SEQ ID NO: 1242515
aucuaauaccuugguaagu

SEQ ID NO: 1353555 - RNA, 19 nt, Artificial Sequence
  Description of Artificial Sequence: Synthetic oligonucleotide
  Antisense strand to SEQ ID NO: 1353554
acuuaccaagguauuagau

SEQ ID NO: 1353556 - RNA, 19 nt, Artificial Sequence
  Description of Artificial Sequence: Synthetic oligonucleotide
  Sense strand starting at position 2662 of SEQ ID NO: 1242515
ucuaauaccuugguaaguu

SEQ ID NO: 1353557 - RNA, 19 nt, Artificial Sequence
  Description of Artificial Sequence: Synthetic oligonucleotide
  Antisense strand to SEQ ID NO: 1353556
aacuuaccaagguauuaga

SEQ ID NO: 1353558 - RNA, 19 nt, Artificial Sequence
  Description of Artificial Sequence: Synthetic oligonucleotide
  Sense strand starting at position 2666 of SEQ ID NO: 1242515
auaccuugguaaguuuaaa

SEQ ID NO: 1353559 - RNA, 19 nt, Artificial Sequence
  Description of Artificial Sequence: Synthetic oligonucleotide
  Antisense strand to SEQ ID NO: 1353558
uuuaaacuuaccaagguau

SEQ ID NO: 1353560 - RNA, 19 nt, Artificial Sequence
  Description of Artificial Sequence: Synthetic oligonucleotide
  Sense strand starting at position 2757 of SEQ ID NO: 1242515
acacuuacuguauguauua

SEQ ID NO: 1353561 - RNA, 19 nt, Artificial Sequence
  Description of Artificial Sequence: Synthetic oligonucleotide
  Antisense strand to SEQ ID NO: 1353560
uaauacauacaguaagugu

SEQ ID NO: 1353562 - RNA, 19 nt, Artificial Sequence
  Description of Artificial Sequence: Synthetic oligonucleotide
  Sense strand starting at position 2812 of SEQ ID NO: 1242515
acuggauagcugugaauua

SEQ ID NO: 1353563 - RNA, 19 nt, Artificial Sequence
  Description of Artificial Sequence: Synthetic oligonucleotide
  Antisense strand to SEQ ID NO: 1353562
uaauucacagcuauccagu

SEQ ID NO: 1353564 - RNA, 19 nt, Artificial Sequence
  Description of Artificial Sequence: Synthetic oligonucleotide
  Sense strand starting at position 2850 of SEQ ID NO: 1242515
gccaguuacuuuguuauuu

SEQ ID NO: 1353565 - RNA, 19 nt, Artificial Sequence
  Description of Artificial Sequence: Synthetic oligonucleotide
  Antisense strand to SEQ ID NO: 1353564
aaauaacaaaguaacuggc

SEQ ID NO: 1353566 - RNA, 19 nt, Artificial Sequence
  Description of Artificial Sequence: Synthetic oligonucleotide
  Sense strand starting at position 3118 of SEQ ID NO: 1242515
gugaacuucucacugacuu

SEQ ID NO: 1353567 - RNA, 19 nt, Artificial Sequence
  Description of Artificial Sequence: Synthetic oligonucleotide
  Antisense strand to SEQ ID NO: 1353566
aagucagugagaaguucac

SEQ ID NO: 1353568 - RNA, 19 nt, Artificial Sequence
  Description of Artificial Sequence: Synthetic oligonucleotide
  Sense strand starting at position 3394 of SEQ ID NO: 1242515
uuagaucuucuuugcaaug

SEQ ID NO: 1353569 - RNA, 19 nt, Artificial Sequence
  Description of Artificial Sequence: Synthetic oligonucleotide
  Antisense strand to SEQ ID NO: 1353568
cauugcaaagaagaucuaa

SEQ ID NO: 1353570 - RNA, 19 nt, Artificial Sequence
  Description of Artificial Sequence: Synthetic oligonucleotide
  Sense strand starting at position 3539 of SEQ ID NO: 1242515
gcaaaucaccuaugugaca

SEQ ID NO: 1353571 - RNA, 19 nt, Artificial Sequence
  Description of Artificial Sequence: Synthetic oligonucleotide
  Antisense strand to SEQ ID NO: 1353570
ugucacauaggugauuugc

SEQ ID NO: 1353572 - RNA, 19 nt, Artificial Sequence
  Description of Artificial Sequence: Synthetic oligonucleotide
  Sense strand starting at position 3848 of SEQ ID NO: 1242515
aggacaugaugauaggaaa

SEQ ID NO: 1353573 - RNA, 19 nt, Artificial Sequence
  Description of Artificial Sequence: Synthetic oligonucleotide
  Antisense strand to SEQ ID NO: 1353572
uuuccuaucaucauguccu

SEQ ID NO: 1353574 - RNA, 19 nt, Artificial Sequence
  Description of Artificial Sequence: Synthetic oligonucleotide
  Sense strand starting at position 14 of SEQ ID NO: 1242516
ucaacuguugcuugaacca

SEQ ID NO: 1353575 - RNA, 19 nt, Artificial Sequence
  Description of Artificial Sequence: Synthetic oligonucleotide
  Antisense strand to SEQ ID NO: 1353574
ugguucaagcaacaguuga

SEQ ID NO: 1353576 - RNA, 19 nt, Artificial Sequence
  Description of Artificial Sequence: Synthetic oligonucleotide
  Sense strand starting at position 33 of SEQ ID NO: 1242516
guagaacagcuuuauaaca

SEQ ID NO: 1353577 - RNA, 19 nt, Artificial Sequence
  Description of Artificial Sequence: Synthetic oligonucleotide
  Antisense strand to SEQ ID NO: 1353576
uguuauaaagcuguucuac

SEQ ID NO: 1353578 - RNA, 19 nt, Artificial Sequence
  Description of Artificial Sequence: Synthetic oligonucleotide
  Sense strand starting at position 462 of SEQ ID NO: 1242516
agucacuucucugcuuaga

SEQ ID NO: 1353579 - RNA, 19 nt, Artificial Sequence
  Description of Artificial Sequence: Synthetic oligonucleotide
  Antisense strand to SEQ ID NO: 1353578
ucuaagcagagaagugacu

SEQ ID NO: 1353580 - RNA, 19 nt, Artificial Sequence
  Description of Artificial Sequence: Synthetic oligonucleotide
  Sense strand starting at position 1296 of SEQ ID NO: 1242516
uuagcaaacuccuaccgaa

SEQ ID NO: 1353581 - RNA, 19 nt, Artificial Sequence
  Description of Artificial Sequence: Synthetic oligonucleotide
  Antisense strand to SEQ ID NO: 1353580
uucgguaggaguuugcuaa

SEQ ID NO: 1353582 - RNA, 19 nt, Artificial Sequence
  Description of Artificial Sequence: Synthetic oligonucleotide
  Sense strand starting at position 1526 of SEQ ID NO: 1242516
ggaagaaucuugcaaagca

SEQ ID NO: 1353583 - RNA, 19 nt, Artificial Sequence
  Description of Artificial Sequence: Synthetic oligonucleotide
  Antisense strand to SEQ ID NO: 1353582
ugcuuugcaagauucuucc

SEQ ID NO: 1353584 - RNA, 19 nt, Artificial Sequence
  Description of Artificial Sequence: Synthetic oligonucleotide
  Sense strand starting at position 1534 of SEQ ID NO: 1242516
cuugcaaagcaagauaagu

SEQ ID NO: 1353585 - RNA, 19 nt, Artificial Sequence
  Description of Artificial Sequence: Synthetic oligonucleotide
  Antisense strand to SEQ ID NO: 1353584
acuuaucuugcuuugcaag

SEQ ID NO: 1353586 - RNA, 19 nt, Artificial Sequence
  Description of Artificial Sequence: Synthetic oligonucleotide
  Sense strand starting at position 1583 of SEQ ID NO: 1242516
agagaccucugauagagaa

SEQ ID NO: 1353587 - RNA, 19 nt, Artificial Sequence
  Description of Artificial Sequence: Synthetic oligonucleotide
  Antisense strand to SEQ ID NO: 1353586
uucucuaucagaggucucu

SEQ ID NO: 1353588 - RNA, 19 nt, Artificial Sequence
  Description of Artificial Sequence: Synthetic oligonucleotide
  Sense strand starting at position 1664 of SEQ ID NO: 1242516
ccucaaguuuaugccagaa

SEQ ID NO: 1353589 - RNA, 19 nt, Artificial Sequence
  Description of Artificial Sequence: Synthetic oligonucleotide
  Antisense strand to SEQ ID NO: 1353588
uucuggcauaaacuugagg

SEQ ID NO: 1353590 - RNA, 19 nt, Artificial Sequence
  Description of Artificial Sequence: Synthetic oligonucleotide
  Sense strand starting at position 1797 of SEQ ID NO: 1242516
ggucacagaucgcuaguaa

SEQ ID NO: 1353591 - RNA, 19 nt, Artificial Sequence
  Description of Artificial Sequence: Synthetic oligonucleotide
  Antisense strand to SEQ ID NO: 1353590
uuacuagcgaucugugacc

SEQ ID NO: 1353592 - RNA, 19 nt, Artificial Sequence
  Description of Artificial Sequence: Synthetic oligonucleotide
  Sense strand starting at position 1798 of SEQ ID NO: 1242516
gucacagaucgcuaguaau

SEQ ID NO: 1353593 - RNA, 19 nt, Artificial Sequence
  Description of Artificial Sequence: Synthetic oligonucleotide
  Antisense strand to SEQ ID NO: 1353592
auuacuagcgaucugugac

SEQ ID NO: 1353594 - RNA, 19 nt, Artificial Sequence
  Description of Artificial Sequence: Synthetic oligonucleotide
  Sense strand starting at position 1991 of SEQ ID NO: 1242516
cggaaauuccgcgcugcau

SEQ ID NO: 1353595 - RNA, 19 nt, Artificial Sequence
  Description of Artificial Sequence: Synthetic oligonucleotide
  Antisense strand to SEQ ID NO: 1353594
augcagcgcggaauuuccg

SEQ ID NO: 1353596 - RNA, 19 nt, Artificial Sequence
  Description of Artificial Sequence: Synthetic oligonucleotide
  Sense strand starting at position 1992 of SEQ ID NO: 1242516
ggaaauuccgcgcugcauu

SEQ ID NO: 1353597 - RNA, 19 nt, Artificial Sequence
  Description of Artificial Sequence: Synthetic oligonucleotide
  Antisense strand to SEQ ID NO: 1353596
aaugcagcgcggaauuucc

SEQ ID NO: 1353598 - RNA, 19 nt, Artificial Sequence
  Description of Artificial Sequence: Synthetic oligonucleotide
  Sense strand starting at position 2897 of SEQ ID NO: 1242516
agcaauugagcaggguaau

SEQ ID NO: 1353599 - RNA, 19 nt, Artificial Sequence
  Description of Artificial Sequence: Synthetic oligonucleotide
  Antisense strand to SEQ ID NO: 1353598
auuacccugcucaauugcu

SEQ ID NO: 1353600 - RNA, 19 nt, Artificial Sequence
  Description of Artificial Sequence: Synthetic oligonucleotide
  Sense strand starting at position 2898 of SEQ ID NO: 1242516
gcaauugagcaggguaaug

SEQ ID NO: 1353601 - RNA, 19 nt, Artificial Sequence
  Description of Artificial Sequence: Synthetic oligonucleotide
  Antisense strand to SEQ ID NO: 1353600
cauuacccugcucaauugc

SEQ ID NO: 1353602 - RNA, 19 nt, Artificial Sequence
  Description of Artificial Sequence: Synthetic oligonucleotide
  Sense strand starting at position 2900 of SEQ ID NO: 1242516
aauugagcaggguaauguu

SEQ ID NO: 1353603 - RNA, 19 nt, Artificial Sequence
  Description of Artificial Sequence: Synthetic oligonucleotide
  Antisense strand to SEQ ID NO: 1353602
aacauuacccugcucaauu

SEQ ID NO: 1353604 - RNA, 19 nt, Artificial Sequence
  Description of Artificial Sequence: Synthetic oligonucleotide
  Sense strand starting at position 2908 of SEQ ID NO: 1242516
aggguaauguuacugagga

SEQ ID NO: 1353605 - RNA, 19 nt, Artificial Sequence
  Description of Artificial Sequence: Synthetic oligonucleotide
  Antisense strand to SEQ ID NO: 1353604
uccucaguaacauuacccu

SEQ ID NO: 1353606 - RNA, 19 nt, Artificial Sequence
  Description of Artificial Sequence: Synthetic oligonucleotide
  Sense strand starting at position 2909 of SEQ ID NO: 1242516
ggguaauguuacugaggag

SEQ ID NO: 1353607 - RNA, 19 nt, Artificial Sequence
  Description of Artificial Sequence: Synthetic oligonucleotide
  Antisense strand to SEQ ID NO: 1353606
cuccucaguaacauuaccc

SEQ ID NO: 1353608 - RNA, 19 nt, Artificial Sequence
  Description of Artificial Sequence: Synthetic oligonucleotide
  Sense strand starting at position 2982 of SEQ ID NO: 1242516
cuguucucauaaguuauau

SEQ ID NO: 1353609 - RNA, 19 nt, Artificial Sequence
  Description of Artificial Sequence: Synthetic oligonucleotide
  Antisense strand to SEQ ID NO: 1353608
auauaacuuaugagaacag

SEQ ID NO: 1353610 - RNA, 19 nt, Artificial Sequence
  Description of Artificial Sequence: Synthetic oligonucleotide
  Sense strand starting at position 3048 of SEQ ID NO: 1242516
ggauaacucccauguaugu

SEQ ID NO: 1353611 - RNA, 19 nt, Artificial Sequence
  Description of Artificial Sequence: Synthetic oligonucleotide
  Antisense strand to SEQ ID NO: 1353610
acauacaugggaguuaucc

SEQ ID NO: 1353612 - RNA, 19 nt, Artificial Sequence
  Description of Artificial Sequence: Synthetic oligonucleotide
  Sense strand starting at position 3061 of SEQ ID NO: 1242516
guauguugugggcgcauua

SEQ ID NO: 1353613 - RNA, 19 nt, Artificial Sequence
  Description of Artificial Sequence: Synthetic oligonucleotide
  Antisense strand to SEQ ID NO: 1353612
uaaugcgcccacaacauac

SEQ ID NO: 1353614 - RNA, 19 nt, Artificial Sequence
  Description of Artificial Sequence: Synthetic oligonucleotide
  Sense strand starting at position 3083 of SEQ ID NO: 1242516
acccauggcuguucccaaa

SEQ ID NO: 1353615 - RNA, 19 nt, Artificial Sequence
  Description of Artificial Sequence: Synthetic oligonucleotide
  Antisense strand to SEQ ID NO: 1353614
uuugggaacagccaugggu

SEQ ID NO: 1353616 - RNA, 19 nt, Artificial Sequence
  Description of Artificial Sequence: Synthetic oligonucleotide
  Sense strand starting at position 3208 of SEQ ID NO: 1242516
gcaccugagcuccauaauu

SEQ ID NO: 1353617 - RNA, 19 nt, Artificial Sequence
  Description of Artificial Sequence: Synthetic oligonucleotide
  Antisense strand to SEQ ID NO: 1353616
aauuauggagcucaggugc

SEQ ID NO: 1353618 - RNA, 19 nt, Artificial Sequence
  Description of Artificial Sequence: Synthetic oligonucleotide
  Sense strand starting at position 3243 of SEQ ID NO: 1242516
ugugaauacuuucccaguu

SEQ ID NO: 1353619 - RNA, 19 nt, Artificial Sequence
  Description of Artificial Sequence: Synthetic oligonucleotide
  Antisense strand to SEQ ID NO: 1353618
aacugggaaaguauucaca

SEQ ID NO: 1353620 - RNA, 19 nt, Artificial Sequence
  Description of Artificial Sequence: Synthetic oligonucleotide
  Sense strand starting at position 3244 of SEQ ID NO: 1242516
gugaauacuuucccaguuc

SEQ ID NO: 1353621 - RNA, 19 nt, Artificial Sequence
  Description of Artificial Sequence: Synthetic oligonucleotide
  Antisense strand to SEQ ID NO: 1353620
gaacugggaaaguauucac

SEQ ID NO: 1353622 - RNA, 19 nt, Artificial Sequence
  Description of Artificial Sequence: Synthetic oligonucleotide
  Sense strand starting at position 3629 of SEQ ID NO: 1242516
uguccuauguaagaaaucu

SEQ ID NO: 1353623 - RNA, 19 nt, Artificial Sequence
  Description of Artificial Sequence: Synthetic oligonucleotide
  Antisense strand to SEQ ID NO: 1353622
agauuucuuacauaggaca

SEQ ID NO: 1353624 - RNA, 19 nt, Artificial Sequence
  Description of Artificial Sequence: Synthetic oligonucleotide
  Sense strand starting at position 3656 of SEQ ID NO: 1242516
ccucguuaugaagauacua

SEQ ID NO: 1353625 - RNA, 19 nt, Artificial Sequence
  Description of Artificial Sequence: Synthetic oligonucleotide
  Antisense strand to SEQ ID NO: 1353624
uaguaucuucauaacgagg

SEQ ID NO: 1353626 - RNA, 19 nt, Artificial Sequence
  Description of Artificial Sequence: Synthetic oligonucleotide
  Sense strand starting at position 3664 of SEQ ID NO: 1242516
ugaagauacuauccuaggu

SEQ ID NO: 1353627 - RNA, 19 nt, Artificial Sequence
  Description of Artificial Sequence: Synthetic oligonucleotide
  Antisense strand to SEQ ID NO: 1353626
accuaggauaguaucuuca

SEQ ID NO: 1353628 - RNA, 19 nt, Artificial Sequence
  Description of Artificial Sequence: Synthetic oligonucleotide
  Sense strand starting at position 3738 of SEQ ID NO: 1242516
aucuuuguauaugauagga

SEQ ID NO: 1353629 - RNA, 19 nt, Artificial Sequence
  Description of Artificial Sequence: Synthetic oligonucleotide
  Antisense strand to SEQ ID NO: 1353628
uccuaucauauacaaagau

SEQ ID NO: 1353630 - RNA, 19 nt, Artificial Sequence
  Description of Artificial Sequence: Synthetic oligonucleotide
  Sense strand starting at position 3740 of SEQ ID NO: 1242516
cuuuguauaugauaggagu

SEQ ID NO: 1353631 - RNA, 19 nt, Artificial Sequence
  Description of Artificial Sequence: Synthetic oligonucleotide
  Antisense strand to SEQ ID NO: 1353630
acuccuaucauauacaaag

SEQ ID NO: 1353632 - RNA, 19 nt, Artificial Sequence
  Description of Artificial Sequence: Synthetic oligonucleotide
  Sense strand starting at position 3778 of SEQ ID NO: 1242516
cuuccauauggguguacaa

SEQ ID NO: 1353633 - RNA, 19 nt, Artificial Sequence
  Description of Artificial Sequence: Synthetic oligonucleotide
  Antisense strand to SEQ ID NO: 1353632
uuguacacccauauggaag

SEQ ID NO: 1353634 - RNA, 19 nt, Artificial Sequence
  Description of Artificial Sequence: Synthetic oligonucleotide
  Sense strand starting at position 3780 of SEQ ID NO: 1242516
uccauauggguguacaauu

SEQ ID NO: 1353635 - RNA, 19 nt, Artificial Sequence
  Description of Artificial Sequence: Synthetic oligonucleotide
  Antisense strand to SEQ ID NO: 1353634
aauuguacacccauaugga

SEQ ID NO: 1353636 - RNA, 19 nt, Artificial Sequence
  Description of Artificial Sequence: Synthetic oligonucleotide
  Sense strand starting at position 3789 of SEQ ID NO: 1242516
guguacaauugauccagca

SEQ ID NO: 1353637 - RNA, 19 nt, Artificial Sequence
  Description of Artificial Sequence: Synthetic oligonucleotide
  Antisense strand to SEQ ID NO: 1353636
ugcuggaucaauuguacac

SEQ ID NO: 1353638 - RNA, 19 nt, Artificial Sequence
  Description of Artificial Sequence: Synthetic oligonucleotide
  Sense strand starting at position 3840 of SEQ ID NO: 1242516
guggcagcuuugucauaaa

SEQ ID NO: 1353639 - RNA, 19 nt, Artificial Sequence
  Description of Artificial Sequence: Synthetic oligonucleotide
  Antisense strand to SEQ ID NO: 1353638
uuuaugacaaagcugccac

SEQ ID NO: 1353640 - RNA, 19 nt, Artificial Sequence
  Description of Artificial Sequence: Synthetic oligonucleotide
  Sense strand starting at position 3852 of SEQ ID NO: 1242516
ucauaaauccggugacuau

SEQ ID NO: 1353641 - RNA, 19 nt, Artificial Sequence
  Description of Artificial Sequence: Synthetic oligonucleotide
  Antisense strand to SEQ ID NO: 1353640
auagucaccggauuuauga

SEQ ID NO: 1353642 - RNA, 19 nt, Artificial Sequence
  Description of Artificial Sequence: Synthetic oligonucleotide
  Sense strand starting at position 3853 of SEQ ID NO: 1242516
cauaaauccggugacuaug

SEQ ID NO: 1353643 - RNA, 19 nt, Artificial Sequence
  Description of Artificial Sequence: Synthetic oligonucleotide
  Antisense strand to SEQ ID NO: 1353642
cauagucaccggauuuaug

SEQ ID NO: 1353644 - RNA, 19 nt, Artificial Sequence
  Description of Artificial Sequence: Synthetic oligonucleotide
  Sense strand starting at position 3868 of SEQ ID NO: 1242516
uauguaugucugggucaau

SEQ ID NO: 1353645 - RNA, 19 nt, Artificial Sequence
  Description of Artificial Sequence: Synthetic oligonucleotide
  Antisense strand to SEQ ID NO: 1353644
auugacccagacauacaua

SEQ ID NO: 1353646 - RNA, 19 nt, Artificial Sequence
  Description of Artificial Sequence: Synthetic oligonucleotide
  Sense strand starting at position 3869 of SEQ ID NO: 1242516
auguaugucugggucaauu

SEQ ID NO: 1353647 - RNA, 19 nt, Artificial Sequence
  Description of Artificial Sequence: Synthetic oligonucleotide
  Antisense strand to SEQ ID NO: 1353646
aauugacccagacauacau

SEQ ID NO: 1353648 - RNA, 19 nt, Artificial Sequence
  Description of Artificial Sequence: Synthetic oligonucleotide
  Sense strand starting at position 3892 of SEQ ID NO: 1242516
acucuuauucugugccaug

SEQ ID NO: 1353649 - RNA, 19 nt, Artificial Sequence
  Description of Artificial Sequence: Synthetic oligonucleotide
  Antisense strand to SEQ ID NO: 1353648
cauggcacagaauaagagu

SEQ ID NO: 1353650 - RNA, 19 nt, Artificial Sequence
  Description of Artificial Sequence: Synthetic oligonucleotide
  Sense strand starting at position 3944 of SEQ ID NO: 1242516
cgucuugauuucucuaacu

SEQ ID NO: 1353651 - RNA, 19 nt, Artificial Sequence
  Description of Artificial Sequence: Synthetic oligonucleotide
  Antisense strand to SEQ ID NO: 1353650
aguuagagaaaucaagacg

SEQ ID NO: 1353652 - RNA, 19 nt, Artificial Sequence
  Description of Artificial Sequence: Synthetic oligonucleotide
  Sense strand starting at position 3965 of SEQ ID NO: 1242516
agaguaggucuugauaucu

SEQ ID NO: 1353653 - RNA, 19 nt, Artificial Sequence
  Description of Artificial Sequence: Synthetic oligonucleotide
  Antisense strand to SEQ ID NO: 1353652
agauaucaagaccuacucu

SEQ ID NO: 1353654 - RNA, 19 nt, Artificial Sequence
  Description of Artificial Sequence: Synthetic oligonucleotide
  Sense strand starting at position 13 of SEQ ID NO: 1242517
guuccuugaggcuauauua

SEQ ID NO: 1353655 - RNA, 19 nt, Artificial Sequence
  Description of Artificial Sequence: Synthetic oligonucleotide
  Antisense strand to SEQ ID NO: 1353654
uaauauagccucaaggaac

SEQ ID NO: 1353656 - RNA, 19 nt, Artificial Sequence
  Description of Artificial Sequence: Synthetic oligonucleotide
  Sense strand starting at position 86 of SEQ ID NO: 1242517
aauauuuccugagguaaag

SEQ ID NO: 1353657 - RNA, 19 nt, Artificial Sequence
  Description of Artificial Sequence: Synthetic oligonucleotide
  Antisense strand to SEQ ID NO: 1353656
cuuuaccucaggaaauauu

SEQ ID NO: 1353658 - RNA, 19 nt, Artificial Sequence
  Description of Artificial Sequence: Synthetic oligonucleotide
  Sense strand starting at position 96 of SEQ ID NO: 1242517
gagguaaagaguugccaca

SEQ ID NO: 1353659 - RNA, 19 nt, Artificial Sequence
  Description of Artificial Sequence: Synthetic oligonucleotide
  Antisense strand to SEQ ID NO: 1353658
uguggcaacucuuuaccuc

SEQ ID NO: 1353660 - RNA, 19 nt, Artificial Sequence
  Description of Artificial Sequence: Synthetic oligonucleotide
  Sense strand starting at position 98 of SEQ ID NO: 1242517
gguaaagaguugccacaua

SEQ ID NO: 1353661 - RNA, 19 nt, Artificial Sequence
  Description of Artificial Sequence: Synthetic oligonucleotide
  Antisense strand to SEQ ID NO: 1353660
uauguggcaacucuuuacc

SEQ ID NO: 1353662 - RNA, 19 nt, Artificial Sequence
  Description of Artificial Sequence: Synthetic oligonucleotide
  Sense strand starting at position 157 of SEQ ID NO: 1242517
auuagugacguccagaaug

SEQ ID NO: 1353663 - RNA, 19 nt, Artificial Sequence
  Description of Artificial Sequence: Synthetic oligonucleotide
  Antisense strand to SEQ ID NO: 1353662
cauucuggacgucacuaau

SEQ ID NO: 1353664 - RNA, 19 nt, Artificial Sequence
  Description of Artificial Sequence: Synthetic oligonucleotide
  Sense strand starting at position 159 of SEQ ID NO: 1242517
uagugacguccagaaugau

SEQ ID NO: 1353665 - RNA, 19 nt, Artificial Sequence
  Description of Artificial Sequence: Synthetic oligonucleotide
  Antisense strand to SEQ ID NO: 1353664
aucauucuggacgucacua

SEQ ID NO: 1353666 - RNA, 19 nt, Artificial Sequence
  Description of Artificial Sequence: Synthetic oligonucleotide
  Sense strand starting at position 456 of SEQ ID NO: 1242517
ugacauagucaguggccaa

SEQ ID NO: 1353667 - RNA, 19 nt, Artificial Sequence
  Description of Artificial Sequence: Synthetic oligonucleotide
  Antisense strand to SEQ ID NO: 1353666
uuggccacugacuauguca

SEQ ID NO: 1353668 - RNA, 19 nt, Artificial Sequence
  Description of Artificial Sequence: Synthetic oligonucleotide
  Sense strand starting at position 598 of SEQ ID NO: 1242517
aauuguaugcaggguuaaa

SEQ ID NO: 1353669 - RNA, 19 nt, Artificial Sequence
  Description of Artificial Sequence: Synthetic oligonucleotide
  Antisense strand to SEQ ID NO: 1353668
uuuaacccugcauacaauu

SEQ ID NO: 1353670 - RNA, 19 nt, Artificial Sequence
  Description of Artificial Sequence: Synthetic oligonucleotide
  Sense strand starting at position 823 of SEQ ID NO: 1242517
gcaggagaauuccugaacu

SEQ ID NO: 1353671 - RNA, 19 nt, Artificial Sequence
  Description of Artificial Sequence: Synthetic oligonucleotide
  Antisense strand to SEQ ID NO: 1353670
aguucaggaauucuccugc

SEQ ID NO: 1353672 - RNA, 19 nt, Artificial Sequence
  Description of Artificial Sequence: Synthetic oligonucleotide
  Sense strand starting at position 831 of SEQ ID NO: 1242517
auuccugaacucgggaauu

SEQ ID NO: 1353673 - RNA, 19 nt, Artificial Sequence
  Description of Artificial Sequence: Synthetic oligonucleotide
  Antisense strand to SEQ ID NO: 1353672
aauucccgaguucaggaau

SEQ ID NO: 1353674 - RNA, 19 nt, Artificial Sequence
  Description of Artificial Sequence: Synthetic oligonucleotide
  Sense strand starting at position 1057 of SEQ ID NO: 1242517
aacaucaugcggugacaga

SEQ ID NO: 1353675 - RNA, 19 nt, Artificial Sequence
  Description of Artificial Sequence: Synthetic oligonucleotide
  Antisense strand to SEQ ID NO: 1353674
ucugucaccgcaugauguu

SEQ ID NO: 1353676 - RNA, 19 nt, Artificial Sequence
  Description of Artificial Sequence: Synthetic oligonucleotide
  Sense strand starting at position 1058 of SEQ ID NO: 1242517
acaucaugcggugacagau

SEQ ID NO: 1353677 - RNA, 19 nt, Artificial Sequence
  Description of Artificial Sequence: Synthetic oligonucleotide
  Antisense strand to SEQ ID NO: 1353676
aucugucaccgcaugaugu

SEQ ID NO: 1353678 - RNA, 19 nt, Artificial Sequence
  Description of Artificial Sequence: Synthetic oligonucleotide
  Sense strand starting at position 1178 of SEQ ID NO: 1242517
uguagcuagugacucaaau

SEQ ID NO: 1353679 - RNA, 19 nt, Artificial Sequence
  Description of Artificial Sequence: Synthetic oligonucleotide
  Antisense strand to SEQ ID NO: 1353678
auuugagucacuagcuaca

SEQ ID NO: 1353680 - RNA, 19 nt, Artificial Sequence
  Description of Artificial Sequence: Synthetic oligonucleotide
  Sense strand starting at position 1233 of SEQ ID NO: 1242517
gcaagagcaaaguauagau

SEQ ID NO: 1353681 - RNA, 19 nt, Artificial Sequence
  Description of Artificial Sequence: Synthetic oligonucleotide
  Antisense strand to SEQ ID NO: 1353680
aucuauacuuugcucuugc

SEQ ID NO: 1353682 - RNA, 19 nt, Artificial Sequence
  Description of Artificial Sequence: Synthetic oligonucleotide
  Sense strand starting at position 1334 of SEQ ID NO: 1242517
ggguuucuccacugagggu

SEQ ID NO: 1353683 - RNA, 19 nt, Artificial Sequence
  Description of Artificial Sequence: Synthetic oligonucleotide
  Antisense strand to SEQ ID NO: 1353682
acccucaguggagaaaccc

SEQ ID NO: 1353684 - RNA, 19 nt, Artificial Sequence
  Description of Artificial Sequence: Synthetic oligonucleotide
  Sense strand starting at position 1335 of SEQ ID NO: 1242517
gguuucuccacugaggguu

SEQ ID NO: 1353685 - RNA, 19 nt, Artificial Sequence
  Description of Artificial Sequence: Synthetic oligonucleotide
  Antisense strand to SEQ ID NO: 1353684
aacccucaguggagaaacc

SEQ ID NO: 1353686 - RNA, 19 nt, Artificial Sequence
  Description of Artificial Sequence: Synthetic oligonucleotide
  Sense strand starting at position 1361 of SEQ ID NO: 1242517
ggguucccaagaugcuaua

SEQ ID NO: 1353687 - RNA, 19 nt, Artificial Sequence
  Description of Artificial Sequence: Synthetic oligonucleotide
  Antisense strand to SEQ ID NO: 1353686
uauagcaucuugggaaccc

SEQ ID NO: 1353688 - RNA, 19 nt, Artificial Sequence
  Description of Artificial Sequence: Synthetic oligonucleotide
  Sense strand starting at position 1501 of SEQ ID NO: 1242517
ucaagaguaaaggguuagu

SEQ ID NO: 1353689 - RNA, 19 nt, Artificial Sequence
  Description of Artificial Sequence: Synthetic oligonucleotide
  Antisense strand to SEQ ID NO: 1353688
acuaacccuuuacucuuga

SEQ ID NO: 1353690 - RNA, 19 nt, Artificial Sequence
  Description of Artificial Sequence: Synthetic oligonucleotide
  Sense strand starting at position 1504 of SEQ ID NO: 1242517
agaguaaaggguuaguacu

SEQ ID NO: 1353691 - RNA, 19 nt, Artificial Sequence
  Description of Artificial Sequence: Synthetic oligonucleotide
  Antisense strand to SEQ ID NO: 1353690
aguacuaacccuuuacucu

SEQ ID NO: 1353692 - RNA, 19 nt, Artificial Sequence
  Description of Artificial Sequence: Synthetic oligonucleotide
  Sense strand starting at position 1660 of SEQ ID NO: 1242517
ucauuauauuccguagacu

SEQ ID NO: 1353693 - RNA, 19 nt, Artificial Sequence
  Description of Artificial Sequence: Synthetic oligonucleotide
  Antisense strand to SEQ ID NO: 1353692
agucuacggaauauaauga

SEQ ID NO: 1353694 - RNA, 19 nt, Artificial Sequence
  Description of Artificial Sequence: Synthetic oligonucleotide
  Sense strand starting at position 1721 of SEQ ID NO: 1242517
ggcuuccuuccagaucaau

SEQ ID NO: 1353695 - RNA, 19 nt, Artificial Sequence
  Description of Artificial Sequence: Synthetic oligonucleotide
  Antisense strand to SEQ ID NO: 1353694
auugaucuggaaggaagcc

SEQ ID NO: 1353696 - RNA, 19 nt, Artificial Sequence
  Description of Artificial Sequence: Synthetic oligonucleotide
  Sense strand starting at position 1845 of SEQ ID NO: 1242517
gggacuuacagaugccaga

SEQ ID NO: 1353697 - RNA, 19 nt, Artificial Sequence
  Description of Artificial Sequence: Synthetic oligonucleotide
  Antisense strand to SEQ ID NO: 1353696
ucuggcaucuguaaguccc

SEQ ID NO: 1353698 - RNA, 19 nt, Artificial Sequence
  Description of Artificial Sequence: Synthetic oligonucleotide
  Sense strand starting at position 1878 of SEQ ID NO: 1242517
ggguaacuccgcgcugauu

SEQ ID NO: 1353699 - RNA, 19 nt, Artificial Sequence
  Description of Artificial Sequence: Synthetic oligonucleotide
  Antisense strand to SEQ ID NO: 1353698
aaucagcgcggaguuaccc

SEQ ID NO: 1353700 - RNA, 19 nt, Artificial Sequence
  Description of Artificial Sequence: Synthetic oligonucleotide
  Sense strand starting at position 1929 of SEQ ID NO: 1242517
cgccaucuugagggaaacu

SEQ ID NO: 1353701 - RNA, 19 nt, Artificial Sequence
  Description of Artificial Sequence: Synthetic oligonucleotide
  Antisense strand to SEQ ID NO: 1353700
aguuucccucaagauggcg

SEQ ID NO: 1353702 - RNA, 19 nt, Artificial Sequence
  Description of Artificial Sequence: Synthetic oligonucleotide
  Sense strand starting at position 2229 of SEQ ID NO: 1242517
gucagcguccauuaugaaa

SEQ ID NO: 1353703 - RNA, 19 nt, Artificial Sequence
  Description of Artificial Sequence: Synthetic oligonucleotide
  Antisense strand to SEQ ID NO: 1353702
uuucauaauggacgcugac

SEQ ID NO: 1353704 - RNA, 19 nt, Artificial Sequence
  Description of Artificial Sequence: Synthetic oligonucleotide
  Sense strand starting at position 2558 of SEQ ID NO: 1242517
gcagcucuugagcaagaua

SEQ ID NO: 1353705 - RNA, 19 nt, Artificial Sequence
  Description of Artificial Sequence: Synthetic oligonucleotide
  Antisense strand to SEQ ID NO: 1353704
uaucuugcucaagagcugc

SEQ ID NO: 1353706 - RNA, 19 nt, Artificial Sequence
  Description of Artificial Sequence: Synthetic oligonucleotide
  Sense strand starting at position 2561 of SEQ ID NO: 1242517
gcucuugagcaagauaaau

SEQ ID NO: 1353707 - RNA, 19 nt, Artificial Sequence
  Description of Artificial Sequence: Synthetic oligonucleotide
  Antisense strand to SEQ ID NO: 1353706
auuuaucuugcucaagagc

SEQ ID NO: 1353708 - RNA, 19 nt, Artificial Sequence
  Description of Artificial Sequence: Synthetic oligonucleotide
  Sense strand starting at position 2570 of SEQ ID NO: 1242517
caagauaaaucugcgugaa

SEQ ID NO: 1353709 - RNA, 19 nt, Artificial Sequence
  Description of Artificial Sequence: Synthetic oligonucleotide
  Antisense strand to SEQ ID NO: 1353708
uucacgcagauuuaucuug

SEQ ID NO: 1353710 - RNA, 19 nt, Artificial Sequence
  Description of Artificial Sequence: Synthetic oligonucleotide
  Sense strand starting at position 2571 of SEQ ID NO: 1242517
aagauaaaucugcgugaaa

SEQ ID NO: 1353711 - RNA, 19 nt, Artificial Sequence
  Description of Artificial Sequence: Synthetic oligonucleotide
  Antisense strand to SEQ ID NO: 1353710
uuucacgcagauuuaucuu

SEQ ID NO: 1353712 - RNA, 19 nt, Artificial Sequence
  Description of Artificial Sequence: Synthetic oligonucleotide
  Sense strand starting at position 2654 of SEQ ID NO: 1242517
gcauuuaaaugugaaggag

SEQ ID NO: 1353713 - RNA, 19 nt, Artificial Sequence
  Description of Artificial Sequence: Synthetic oligonucleotide
  Antisense strand to SEQ ID NO: 1353712
cuccuucacauuuaaaugc

SEQ ID NO: 1353714 - RNA, 19 nt, Artificial Sequence
  Description of Artificial Sequence: Synthetic oligonucleotide
  Sense strand starting at position 2657 of SEQ ID NO: 1242517
uuuaaaugugaaggaguaa

SEQ ID NO: 1353715 - RNA, 19 nt, Artificial Sequence
  Description of Artificial Sequence: Synthetic oligonucleotide
  Antisense strand to SEQ ID NO: 1353714
uuacuccuucacauuuaaa

SEQ ID NO: 1353716 - RNA, 19 nt, Artificial Sequence
  Description of Artificial Sequence: Synthetic oligonucleotide
  Sense strand starting at position 2739 of SEQ ID NO: 1242517
guggucaagagcuacuuua

SEQ ID NO: 1353717 - RNA, 19 nt, Artificial Sequence
  Description of Artificial Sequence: Synthetic oligonucleotide
  Antisense strand to SEQ ID NO: 1353716
uaaaguagcucuugaccac

SEQ ID NO: 1353718 - RNA, 19 nt, Artificial Sequence
  Description of Artificial Sequence: Synthetic oligonucleotide
  Sense strand starting at position 2832 of SEQ ID NO: 1242517
agcuccaaacaaugugaaa

SEQ ID NO: 1353719 - RNA, 19 nt, Artificial Sequence
  Description of Artificial Sequence: Synthetic oligonucleotide
  Antisense strand to SEQ ID NO: 1353718
uuucacauuguuuggagcu

SEQ ID NO: 1353720 - RNA, 19 nt, Artificial Sequence
  Description of Artificial Sequence: Synthetic oligonucleotide
  Sense strand starting at position 2854 of SEQ ID NO: 1242517
agaggaggcuuuccaaaug

SEQ ID NO: 1353721 - RNA, 19 nt, Artificial Sequence
  Description of Artificial Sequence: Synthetic oligonucleotide
  Antisense strand to SEQ ID NO: 1353720
cauuuggaaagccuccucu

SEQ ID NO: 1353722 - RNA, 19 nt, Artificial Sequence
  Description of Artificial Sequence: Synthetic oligonucleotide
  Sense strand starting at position 3151 of SEQ ID NO: 1242517
acugguuguaguuauuaaa

SEQ ID NO: 1353723 - RNA, 19 nt, Artificial Sequence
  Description of Artificial Sequence: Synthetic oligonucleotide
  Antisense strand to SEQ ID NO: 1353722
uuuaauaacuacaaccagu

SEQ ID NO: 1353724 - RNA, 19 nt, Artificial Sequence
  Description of Artificial Sequence: Synthetic oligonucleotide
  Sense strand starting at position 3754 of SEQ ID NO: 1242517
auccuuuagguagauguua

SEQ ID NO: 1353725 - RNA, 19 nt, Artificial Sequence
  Description of Artificial Sequence: Synthetic oligonucleotide
  Antisense strand to SEQ ID NO: 1353724
uaacaucuaccuaaaggau

SEQ ID NO: 1353726 - RNA, 19 nt, Artificial Sequence
  Description of Artificial Sequence: Synthetic oligonucleotide
  Sense strand starting at position 3765 of SEQ ID NO: 1242517
agauguuacuacuucuauu

SEQ ID NO: 1353727 - RNA, 19 nt, Artificial Sequence
  Description of Artificial Sequence: Synthetic oligonucleotide
  Antisense strand to SEQ ID NO: 1353726
aauagaaguaguaacaucu

SEQ ID NO: 1353728 - RNA, 19 nt, Artificial Sequence
  Description of Artificial Sequence: Synthetic oligonucleotide
  Sense strand starting at position 3829 of SEQ ID NO: 1242517
auaauuugguuagggacau

SEQ ID NO: 1353729 - RNA, 19 nt, Artificial Sequence
  Description of Artificial Sequence: Synthetic oligonucleotide
  Antisense strand to SEQ ID NO: 1353728
augucccuaaccaaauuau

SEQ ID NO: 1353730 - RNA, 19 nt, Artificial Sequence
  Description of Artificial Sequence: Synthetic oligonucleotide
  Sense strand starting at position 3948 of SEQ ID NO: 1242517
aggaguuugagaugggcaa

SEQ ID NO: 1353731 - RNA, 19 nt, Artificial Sequence
  Description of Artificial Sequence: Synthetic oligonucleotide
  Antisense strand to SEQ ID NO: 1353730
uugcccaucucaaacuccu

SEQ ID NO: 1353732 - RNA, 19 nt, Artificial Sequence
  Description of Artificial Sequence: Synthetic oligonucleotide
  Sense strand starting at position 3950 of SEQ ID NO: 1242517
gaguuugagaugggcaaca

SEQ ID NO: 1353733 - RNA, 19 nt, Artificial Sequence
  Description of Artificial Sequence: Synthetic oligonucleotide
  Antisense strand to SEQ ID NO: 1353732
uguugcccaucucaaacuc

SEQ ID NO: 1353734 - RNA, 19 nt, Artificial Sequence
  Description of Artificial Sequence: Synthetic oligonucleotide
  Sense strand starting at position 73 of SEQ ID NO: 1242518
gccugucacucuuugagga

SEQ ID NO: 1353735 - RNA, 19 nt, Artificial Sequence
  Description of Artificial Sequence: Synthetic oligonucleotide
  Antisense strand to SEQ ID NO: 1353734
uccucaaagagugacaggc

SEQ ID NO: 1353736 - RNA, 19 nt, Artificial Sequence
  Description of Artificial Sequence: Synthetic oligonucleotide
  Sense strand starting at position 75 of SEQ ID NO: 1242518
cugucacucuuugaggacu

SEQ ID NO: 1353737 - RNA, 19 nt, Artificial Sequence
  Description of Artificial Sequence: Synthetic oligonucleotide
  Antisense strand to SEQ ID NO: 1353736
aguccucaaagagugacag

SEQ ID NO: 1353738 - RNA, 19 nt, Artificial Sequence
  Description of Artificial Sequence: Synthetic oligonucleotide
  Sense strand starting at position 230 of SEQ ID NO: 1242518
guagaauguucuguggcuu

SEQ ID NO: 1353739 - RNA, 19 nt, Artificial Sequence
  Description of Artificial Sequence: Synthetic oligonucleotide
  Antisense strand to SEQ ID NO: 1353738
aagccacagaacauucuac

SEQ ID NO: 1353740 - RNA, 19 nt, Artificial Sequence
  Description of Artificial Sequence: Synthetic oligonucleotide
  Sense strand starting at position 245 of SEQ ID NO: 1242518
gcuucagauccaggugaga

SEQ ID NO: 1353741 - RNA, 19 nt, Artificial Sequence
  Description of Artificial Sequence: Synthetic oligonucleotide
  Antisense strand to SEQ ID NO: 1353740
ucucaccuggaucugaagc

SEQ ID NO: 1353742 - RNA, 19 nt, Artificial Sequence
  Description of Artificial Sequence: Synthetic oligonucleotide
  Sense strand starting at position 250 of SEQ ID NO: 1242518
agauccaggugagagauau

SEQ ID NO: 1353743 - RNA, 19 nt, Artificial Sequence
  Description of Artificial Sequence: Synthetic oligonucleotide
  Antisense strand to SEQ ID NO: 1353742
auaucucucaccuggaucu

SEQ ID NO: 1353744 - RNA, 19 nt, Artificial Sequence
  Description of Artificial Sequence: Synthetic oligonucleotide
  Sense strand starting at position 446 of SEQ ID NO: 1242518
acaccacuucuaggaguuu

SEQ ID NO: 1353745 - RNA, 19 nt, Artificial Sequence
  Description of Artificial Sequence: Synthetic oligonucleotide
  Antisense strand to SEQ ID NO: 1353744
aaacuccuagaaguggugu

SEQ ID NO: 1353746 - RNA, 19 nt, Artificial Sequence
  Description of Artificial Sequence: Synthetic oligonucleotide
  Sense strand starting at position 524 of SEQ ID NO: 1242518
cucagaagcuucucuggau

SEQ ID NO: 1353747 - RNA, 19 nt, Artificial Sequence
  Description of Artificial Sequence: Synthetic oligonucleotide
  Antisense strand to SEQ ID NO: 1353746
auccagagaagcuucugag

SEQ ID NO: 1353748 - RNA, 19 nt, Artificial Sequence
  Description of Artificial Sequence: Synthetic oligonucleotide
  Sense strand starting at position 581 of SEQ ID NO: 1242518
gcacuugaguccuaccuac

SEQ ID NO: 1353749 - RNA, 19 nt, Artificial Sequence
  Description of Artificial Sequence: Synthetic oligonucleotide
  Antisense strand to SEQ ID NO: 1353748
guagguaggacucaagugc

SEQ ID NO: 1353750 - RNA, 19 nt, Artificial Sequence
  Description of Artificial Sequence: Synthetic oligonucleotide
  Sense strand starting at position 600 of SEQ ID NO: 1242518
aggacucuggaauguucua

SEQ ID NO: 1353751 - RNA, 19 nt, Artificial Sequence
  Description of Artificial Sequence: Synthetic oligonucleotide
  Antisense strand to SEQ ID NO: 1353750
uagaacauuccagaguccu

SEQ ID NO: 1353752 - RNA, 19 nt, Artificial Sequence
  Description of Artificial Sequence: Synthetic oligonucleotide
  Sense strand starting at position 710 of SEQ ID NO: 1242518
gguugaguguaugagauaa

SEQ ID NO: 1353753 - RNA, 19 nt, Artificial Sequence
  Description of Artificial Sequence: Synthetic oligonucleotide
  Antisense strand to SEQ ID NO: 1353752
uuaucucauacacucaacc

SEQ ID NO: 1353754 - RNA, 19 nt, Artificial Sequence
  Description of Artificial Sequence: Synthetic oligonucleotide
  Sense strand starting at position 712 of SEQ ID NO: 1242518
uugaguguaugagauaaac

SEQ ID NO: 1353755 - RNA, 19 nt, Artificial Sequence
  Description of Artificial Sequence: Synthetic oligonucleotide
  Antisense strand to SEQ ID NO: 1353754
guuuaucucauacacucaa

SEQ ID NO: 1353756 - RNA, 19 nt, Artificial Sequence
  Description of Artificial Sequence: Synthetic oligonucleotide
  Sense strand starting at position 862 of SEQ ID NO: 1242518
accuaauugcugcaugaag

SEQ ID NO: 1353757 - RNA, 19 nt, Artificial Sequence
  Description of Artificial Sequence: Synthetic oligonucleotide
  Antisense strand to SEQ ID NO: 1353756
cuucaugcagcaauuaggu

SEQ ID NO: 1353758 - RNA, 19 nt, Artificial Sequence
  Description of Artificial Sequence: Synthetic oligonucleotide
  Sense strand starting at position 864 of SEQ ID NO: 1242518
cuaauugcugcaugaagac

SEQ ID NO: 1353759 - RNA, 19 nt, Artificial Sequence
  Description of Artificial Sequence: Synthetic oligonucleotide
  Antisense strand to SEQ ID NO: 1353758
gucuucaugcagcaauuag

SEQ ID NO: 1353760 - RNA, 19 nt, Artificial Sequence
  Description of Artificial Sequence: Synthetic oligonucleotide
  Sense strand starting at position 899 of SEQ ID NO: 1242518
ggcagaauccugcggguau

SEQ ID NO: 1353761 - RNA, 19 nt, Artificial Sequence
  Description of Artificial Sequence: Synthetic oligonucleotide
  Antisense strand to SEQ ID NO: 1353760
auacccgcaggauucugcc

SEQ ID NO: 1353762 - RNA, 19 nt, Artificial Sequence
  Description of Artificial Sequence: Synthetic oligonucleotide
  Sense strand starting at position 903 of SEQ ID NO: 1242518
gaauccugcggguauggau

SEQ ID NO: 1353763 - RNA, 19 nt, Artificial Sequence
  Description of Artificial Sequence: Synthetic oligonucleotide
  Antisense strand to SEQ ID NO: 1353762
auccauacccgcaggauuc

SEQ ID NO: 1353764 - RNA, 19 nt, Artificial Sequence
  Description of Artificial Sequence: Synthetic oligonucleotide
  Sense strand starting at position 960 of SEQ ID NO: 1242518
ugagguagauauugucacu

SEQ ID NO: 1353765 - RNA, 19 nt, Artificial Sequence
  Description of Artificial Sequence: Synthetic oligonucleotide
  Antisense strand to SEQ ID NO: 1353764
agugacaauaucuaccuca

SEQ ID NO: 1353766 - RNA, 19 nt, Artificial Sequence
  Description of Artificial Sequence: Synthetic oligonucleotide
  Sense strand starting at position 963 of SEQ ID NO: 1242518
gguagauauugucacuguc

SEQ ID NO: 1353767 - RNA, 19 nt, Artificial Sequence
  Description of Artificial Sequence: Synthetic oligonucleotide
  Antisense strand to SEQ ID NO: 1353766
gacagugacaauaucuacc

SEQ ID NO: 1353768 - RNA, 19 nt, Artificial Sequence
  Description of Artificial Sequence: Synthetic oligonucleotide
  Sense strand starting at position 966 of SEQ ID NO: 1242518
agauauugucacuguccca

SEQ ID NO: 1353769 - RNA, 19 nt, Artificial Sequence
  Description of Artificial Sequence: Synthetic oligonucleotide
  Antisense strand to SEQ ID NO: 1353768
ugggacagugacaauaucu

SEQ ID NO: 1353770 - RNA, 19 nt, Artificial Sequence
  Description of Artificial Sequence: Synthetic oligonucleotide
  Sense strand starting at position 1101 of SEQ ID NO: 1242518
gucgaaugcccuugaggau

SEQ ID NO: 1353771 - RNA, 19 nt, Artificial Sequence
  Description of Artificial Sequence: Synthetic oligonucleotide
  Antisense strand to SEQ ID NO: 1353770
auccucaagggcauucgac

SEQ ID NO: 1353772 - RNA, 19 nt, Artificial Sequence
  Description of Artificial Sequence: Synthetic oligonucleotide
  Sense strand starting at position 1118 of SEQ ID NO: 1242518
aucucaaucuccgugagga

SEQ ID NO: 1353773 - RNA, 19 nt, Artificial Sequence
  Description of Artificial Sequence: Synthetic oligonucleotide
  Antisense strand to SEQ ID NO: 1353772
uccucacggagauugagau

SEQ ID NO: 1353774 - RNA, 19 nt, Artificial Sequence
  Description of Artificial Sequence: Synthetic oligonucleotide
  Sense strand starting at position 1119 of SEQ ID NO: 1242518
ucucaaucuccgugaggag

SEQ ID NO: 1353775 - RNA, 19 nt, Artificial Sequence
  Description of Artificial Sequence: Synthetic oligonucleotide
  Antisense strand to SEQ ID NO: 1353774
cuccucacggagauugaga

SEQ ID NO: 1353776 - RNA, 19 nt, Artificial Sequence
  Description of Artificial Sequence: Synthetic oligonucleotide
  Sense strand starting at position 1201 of SEQ ID NO: 1242518
aguguccuucugcgagaca

SEQ ID NO: 1353777 - RNA, 19 nt, Artificial Sequence
  Description of Artificial Sequence: Synthetic oligonucleotide
  Antisense strand to SEQ ID NO: 1353776
ugucucgcagaaggacacu

SEQ ID NO: 1353778 - RNA, 19 nt, Artificial Sequence
  Description of Artificial Sequence: Synthetic oligonucleotide
  Sense strand starting at position 1254 of SEQ ID NO: 1242518
acccuugucugacuggaaa

SEQ ID NO: 1353779 - RNA, 19 nt, Artificial Sequence
  Description of Artificial Sequence: Synthetic oligonucleotide
  Antisense strand to SEQ ID NO: 1353778
uuuccagucagacaagggu

SEQ ID NO: 1353780 - RNA, 19 nt, Artificial Sequence
  Description of Artificial Sequence: Synthetic oligonucleotide
  Sense strand starting at position 1367 of SEQ ID NO: 1242518
gccagugaggaaugcugau

SEQ ID NO: 1353781 - RNA, 19 nt, Artificial Sequence
  Description of Artificial Sequence: Synthetic oligonucleotide
  Antisense strand to SEQ ID NO: 1353780
aucagcauuccucacuggc

SEQ ID NO: 1353782 - RNA, 19 nt, Artificial Sequence
  Description of Artificial Sequence: Synthetic oligonucleotide
  Sense strand starting at position 1373 of SEQ ID NO: 1242518
gaggaaugcugauucugga

SEQ ID NO: 1353783 - RNA, 19 nt, Artificial Sequence
  Description of Artificial Sequence: Synthetic oligonucleotide
  Antisense strand to SEQ ID NO: 1353782
uccagaaucagcauuccuc

SEQ ID NO: 1353784 - RNA, 19 nt, Artificial Sequence
  Description of Artificial Sequence: Synthetic oligonucleotide
  Sense strand starting at position 1376 of SEQ ID NO: 1242518
gaaugcugauucuggaauc

SEQ ID NO: 1353785 - RNA, 19 nt, Artificial Sequence
  Description of Artificial Sequence: Synthetic oligonucleotide
  Antisense strand to SEQ ID NO: 1353784
gauuccagaaucagcauuc

SEQ ID NO: 1353786 - RNA, 19 nt, Artificial Sequence
  Description of Artificial Sequence: Synthetic oligonucleotide
  Sense strand starting at position 1485 of SEQ ID NO: 1242518
caugucacucaggguucua

SEQ ID NO: 1353787 - RNA, 19 nt, Artificial Sequence
  Description of Artificial Sequence: Synthetic oligonucleotide
  Antisense strand to SEQ ID NO: 1353786
uagaacccugagugacaug

SEQ ID NO: 1353788 - RNA, 19 nt, Artificial Sequence
  Description of Artificial Sequence: Synthetic oligonucleotide
  Sense strand starting at position 1610 of SEQ ID NO: 1242518
gcaggugcgcucuuuaaga

SEQ ID NO: 1353789 - RNA, 19 nt, Artificial Sequence
  Description of Artificial Sequence: Synthetic oligonucleotide
  Antisense strand to SEQ ID NO: 1353788
ucuuaaagagcgcaccugc

SEQ ID NO: 1353790 - RNA, 19 nt, Artificial Sequence
  Description of Artificial Sequence: Synthetic oligonucleotide
  Sense strand starting at position 2194 of SEQ ID NO: 1242518
cgcagaggcgucuagagau

SEQ ID NO: 1353791 - RNA, 19 nt, Artificial Sequence
  Description of Artificial Sequence: Synthetic oligonucleotide
  Antisense strand to SEQ ID NO: 1353790
aucucuagacgccucugcg

SEQ ID NO: 1353792 - RNA, 19 nt, Artificial Sequence
  Description of Artificial Sequence: Synthetic oligonucleotide
  Sense strand starting at position 2392 of SEQ ID NO: 1242518
gaggaagggccuugaccua

SEQ ID NO: 1353793 - RNA, 19 nt, Artificial Sequence
  Description of Artificial Sequence: Synthetic oligonucleotide
  Antisense strand to SEQ ID NO: 1353792
uaggucaaggcccuuccuc

SEQ ID NO: 1353794 - RNA, 19 nt, Artificial Sequence
  Description of Artificial Sequence: Synthetic oligonucleotide
  Sense strand starting at position 2510 of SEQ ID NO: 1242518
ggacccguguugucugaaa

SEQ ID NO: 1353795 - RNA, 19 nt, Artificial Sequence
  Description of Artificial Sequence: Synthetic oligonucleotide
  Antisense strand to SEQ ID NO: 1353794
uuucagacaacacgggucc

SEQ ID NO: 1353796 - RNA, 19 nt, Artificial Sequence
  Description of Artificial Sequence: Synthetic oligonucleotide
  Sense strand starting at position 2625 of SEQ ID NO: 1242518
agccgcugccaguaucauu

SEQ ID NO: 1353797 - RNA, 19 nt, Artificial Sequence
  Description of Artificial Sequence: Synthetic oligonucleotide
  Antisense strand to SEQ ID NO: 1353796
aaugauacuggcagcggcu

SEQ ID NO: 1353798 - RNA, 19 nt, Artificial Sequence
  Description of Artificial Sequence: Synthetic oligonucleotide
  Sense strand starting at position 2775 of SEQ ID NO: 1242518
gucccaucacagugacaca

SEQ ID NO: 1353799 - RNA, 19 nt, Artificial Sequence
  Description of Artificial Sequence: Synthetic oligonucleotide
  Antisense strand to SEQ ID NO: 1353798
ugugucacugugaugggac

SEQ ID NO: 1353800 - RNA, 19 nt, Artificial Sequence
  Description of Artificial Sequence: Synthetic oligonucleotide
  Sense strand starting at position 2811 of SEQ ID NO: 1242518
cagacuccacuggguauua

SEQ ID NO: 1353801 - RNA, 19 nt, Artificial Sequence
  Description of Artificial Sequence: Synthetic oligonucleotide
  Antisense strand to SEQ ID NO: 1353800
uaauacccaguggagucug

SEQ ID NO: 1353802 - RNA, 19 nt, Artificial Sequence
  Description of Artificial Sequence: Synthetic oligonucleotide
  Sense strand starting at position 2901 of SEQ ID NO: 1242518
uccugaaagucuggaugcu

SEQ ID NO: 1353803 - RNA, 19 nt, Artificial Sequence
  Description of Artificial Sequence: Synthetic oligonucleotide
  Antisense strand to SEQ ID NO: 1353802
agcauccagacuuucagga

SEQ ID NO: 1353804 - RNA, 19 nt, Artificial Sequence
  Description of Artificial Sequence: Synthetic oligonucleotide
  Sense strand starting at position 3241 of SEQ ID NO: 1242518
gggcuauuaauccguuucu

SEQ ID NO: 1353805 - RNA, 19 nt, Artificial Sequence
  Description of Artificial Sequence: Synthetic oligonucleotide
  Antisense strand to SEQ ID NO: 1353804
agaaacggauuaauagccc

SEQ ID NO: 1353806 - RNA, 19 nt, Artificial Sequence
  Description of Artificial Sequence: Synthetic oligonucleotide
  Sense strand starting at position 3247 of SEQ ID NO: 1242518
uuaauccguuucucaggaa

SEQ ID NO: 1353807 - RNA, 19 nt, Artificial Sequence
  Description of Artificial Sequence: Synthetic oligonucleotide
  Antisense strand to SEQ ID NO: 1353806
uuccugagaaacggauuaa

SEQ ID NO: 1353808 - RNA, 19 nt, Artificial Sequence
  Description of Artificial Sequence: Synthetic oligonucleotide
  Sense strand starting at position 3309 of SEQ ID NO: 1242518
ccguuuaugaggcagagaa

SEQ ID NO: 1353809 - RNA, 19 nt, Artificial Sequence
  Description of Artificial Sequence: Synthetic oligonucleotide
  Antisense strand to SEQ ID NO: 1353808
uucucugccucauaaacgg

SEQ ID NO: 1353810 - RNA, 19 nt, Artificial Sequence
  Description of Artificial Sequence: Synthetic oligonucleotide
  Sense strand starting at position 3412 of SEQ ID NO: 1242518
gaggcuuauucccagccca

SEQ ID NO: 1353811 - RNA, 19 nt, Artificial Sequence
  Description of Artificial Sequence: Synthetic oligonucleotide
  Antisense strand to SEQ ID NO: 1353810
ugggcugggaauaagccuc

SEQ ID NO: 1353812 - RNA, 19 nt, Artificial Sequence
  Description of Artificial Sequence: Synthetic oligonucleotide
  Sense strand starting at position 3438 of SEQ ID NO: 1242518
aggacugggcugugucuaa

SEQ ID NO: 1353813 - RNA, 19 nt, Artificial Sequence
  Description of Artificial Sequence: Synthetic oligonucleotide
  Antisense strand to SEQ ID NO: 1353812
uuagacacagcccaguccu

SEQ ID NO: 1353814 - RNA, 19 nt, Artificial Sequence
  Description of Artificial Sequence: Synthetic oligonucleotide
  Sense strand starting at position 2005 of SEQ ID NO: 1242519
gagcaauuagugcaagcuu

SEQ ID NO: 1353815 - RNA, 19 nt, Artificial Sequence
  Description of Artificial Sequence: Synthetic oligonucleotide
  Antisense strand to SEQ ID NO: 1353814
aagcuugcacuaauugcuc

SEQ ID NO: 1353816 - RNA, 19 nt, Artificial Sequence
  Description of Artificial Sequence: Synthetic oligonucleotide
  Sense strand starting at position 2090 of SEQ ID NO: 1242519
ucagaaguucugugaauca

SEQ ID NO: 1353817 - RNA, 19 nt, Artificial Sequence
  Description of Artificial Sequence: Synthetic oligonucleotide
  Antisense strand to SEQ ID NO: 1353816
ugauucacagaacuucuga

SEQ ID NO: 1353818 - RNA, 19 nt, Artificial Sequence
  Description of Artificial Sequence: Synthetic oligonucleotide
  Sense strand starting at position 2097 of SEQ ID NO: 1242519
uucugugaaucacuggaaa

SEQ ID NO: 1353819 - RNA, 19 nt, Artificial Sequence
  Description of Artificial Sequence: Synthetic oligonucleotide
  Antisense strand to SEQ ID NO: 1353818
uuuccagugauucacagaa

SEQ ID NO: 1353820 - RNA, 19 nt, Artificial Sequence
  Description of Artificial Sequence: Synthetic oligonucleotide
  Sense strand starting at position 2148 of SEQ ID NO: 1242519
ugucgcuguccugugcaaa

SEQ ID NO: 1353821 - RNA, 19 nt, Artificial Sequence
  Description of Artificial Sequence: Synthetic oligonucleotide
  Antisense strand to SEQ ID NO: 1353820
uuugcacaggacagcgaca

SEQ ID NO: 1353822 - RNA, 19 nt, Artificial Sequence
  Description of Artificial Sequence: Synthetic oligonucleotide
  Sense strand starting at position 2176 of SEQ ID NO: 1242519
aagcuccaucugugaaaga

SEQ ID NO: 1353823 - RNA, 19 nt, Artificial Sequence
  Description of Artificial Sequence: Synthetic oligonucleotide
  Antisense strand to SEQ ID NO: 1353822
ucuuucacagauggagcuu

SEQ ID NO: 1353824 - RNA, 19 nt, Artificial Sequence
  Description of Artificial Sequence: Synthetic oligonucleotide
  Sense strand starting at position 2528 of SEQ ID NO: 1242519
aacauugaguaauacgaca

SEQ ID NO: 1353825 - RNA, 19 nt, Artificial Sequence
  Description of Artificial Sequence: Synthetic oligonucleotide
  Antisense strand to SEQ ID NO: 1353824
ugucguauuacucaauguu

SEQ ID NO: 1353826 - RNA, 19 nt, Artificial Sequence
  Description of Artificial Sequence: Synthetic oligonucleotide
  Sense strand starting at position 2533 of SEQ ID NO: 1242519
ugaguaauacgacagucaa

SEQ ID NO: 1353827 - RNA, 19 nt, Artificial Sequence
  Description of Artificial Sequence: Synthetic oligonucleotide
  Antisense strand to SEQ ID NO: 1353826
uugacugucguauuacuca

SEQ ID NO: 1353828 - RNA, 19 nt, Artificial Sequence
  Description of Artificial Sequence: Synthetic oligonucleotide
  Sense strand starting at position 2621 of SEQ ID NO: 1242519
acacaaauguaaggauuua

SEQ ID NO: 1353829 - RNA, 19 nt, Artificial Sequence
  Description of Artificial Sequence: Synthetic oligonucleotide
  Antisense strand to SEQ ID NO: 1353828
uaaauccuuacauuugugu

SEQ ID NO: 1353830 - RNA, 19 nt, Artificial Sequence
  Description of Artificial Sequence: Synthetic oligonucleotide
  Sense strand starting at position 2761 of SEQ ID NO: 1242519
ucucuaugaugacuaguuu

SEQ ID NO: 1353831 - RNA, 19 nt, Artificial Sequence
  Description of Artificial Sequence: Synthetic oligonucleotide
  Antisense strand to SEQ ID NO: 1353830
aaacuagucaucauagaga

SEQ ID NO: 1353832 - RNA, 19 nt, Artificial Sequence
  Description of Artificial Sequence: Synthetic oligonucleotide
  Sense strand starting at position 2768 of SEQ ID NO: 1242519
gaugacuaguuucuugaau

SEQ ID NO: 1353833 - RNA, 19 nt, Artificial Sequence
  Description of Artificial Sequence: Synthetic oligonucleotide
  Antisense strand to SEQ ID NO: 1353832
auucaagaaacuagucauc

SEQ ID NO: 1353834 - RNA, 19 nt, Artificial Sequence
  Description of Artificial Sequence: Synthetic oligonucleotide
  Sense strand starting at position 2769 of SEQ ID NO: 1242519
augacuaguuucuugaauu

SEQ ID NO: 1353835 - RNA, 19 nt, Artificial Sequence
  Description of Artificial Sequence: Synthetic oligonucleotide
  Antisense strand to SEQ ID NO: 1353834
aauucaagaaacuagucau

SEQ ID NO: 1353836 - RNA, 19 nt, Artificial Sequence
  Description of Artificial Sequence: Synthetic oligonucleotide
  Sense strand starting at position 2837 of SEQ ID NO: 1242519
agcacagggccucauauua

SEQ ID NO: 1353837 - RNA, 19 nt, Artificial Sequence
  Description of Artificial Sequence: Synthetic oligonucleotide
  Antisense strand to SEQ ID NO: 1353836
uaauaugaggcccugugcu

SEQ ID NO: 1353838 - RNA, 19 nt, Artificial Sequence
  Description of Artificial Sequence: Synthetic oligonucleotide
  Sense strand starting at position 2844 of SEQ ID NO: 1242519
ggccucauauuaguaggaa

SEQ ID NO: 1353839 - RNA, 19 nt, Artificial Sequence
  Description of Artificial Sequence: Synthetic oligonucleotide
  Antisense strand to SEQ ID NO: 1353838
uuccuacuaauaugaggcc

SEQ ID NO: 1353840 - RNA, 19 nt, Artificial Sequence
  Description of Artificial Sequence: Synthetic oligonucleotide
  Sense strand starting at position 2912 of SEQ ID NO: 1242519
ccagaauaauaguaacagu

SEQ ID NO: 1353841 - RNA, 19 nt, Artificial Sequence
  Description of Artificial Sequence: Synthetic oligonucleotide
  Antisense strand to SEQ ID NO: 1353840
acuguuacuauuauucugg

SEQ ID NO: 1353842 - RNA, 19 nt, Artificial Sequence
  Description of Artificial Sequence: Synthetic oligonucleotide
  Sense strand starting at position 2938 of SEQ ID NO: 1242519
cuuuguugguauuccagua

SEQ ID NO: 1353843 - RNA, 19 nt, Artificial Sequence
  Description of Artificial Sequence: Synthetic oligonucleotide
  Antisense strand to SEQ ID NO: 1353842
uacuggaauaccaacaaag

SEQ ID NO: 1353844 - RNA, 19 nt, Artificial Sequence
  Description of Artificial Sequence: Synthetic oligonucleotide
  Sense strand starting at position 2943 of SEQ ID NO: 1242519
uugguauuccaguaugugu

SEQ ID NO: 1353845 - RNA, 19 nt, Artificial Sequence
  Description of Artificial Sequence: Synthetic oligonucleotide
  Antisense strand to SEQ ID NO: 1353844
acacauacuggaauaccaa

SEQ ID NO: 1353846 - RNA, 19 nt, Artificial Sequence
  Description of Artificial Sequence: Synthetic oligonucleotide
  Sense strand starting at position 2945 of SEQ ID NO: 1242519
gguauuccaguauguguuu

SEQ ID NO: 1353847 - RNA, 19 nt, Artificial Sequence
  Description of Artificial Sequence: Synthetic oligonucleotide
  Antisense strand to SEQ ID NO: 1353846
aaacacauacuggaauacc

SEQ ID NO: 1353848 - RNA, 19 nt, Artificial Sequence
  Description of Artificial Sequence: Synthetic oligonucleotide
  Sense strand starting at position 2951 of SEQ ID NO: 1242519
ccaguauguguuugggaag

SEQ ID NO: 1353849 - RNA, 19 nt, Artificial Sequence
  Description of Artificial Sequence: Synthetic oligonucleotide
  Antisense strand to SEQ ID NO: 1353848
cuucccaaacacauacugg

SEQ ID NO: 1353850 - RNA, 19 nt, Artificial Sequence
  Description of Artificial Sequence: Synthetic oligonucleotide
  Sense strand starting at position 2957 of SEQ ID NO: 1242519
uguguuugggaagauaauc

SEQ ID NO: 1353851 - RNA, 19 nt, Artificial Sequence
  Description of Artificial Sequence: Synthetic oligonucleotide
  Antisense strand to SEQ ID NO: 1353850
gauuaucuucccaaacaca

SEQ ID NO: 1353852 - RNA, 19 nt, Artificial Sequence
  Description of Artificial Sequence: Synthetic oligonucleotide
  Sense strand starting at position 3005 of SEQ ID NO: 1242519
acuacagauugucucagaa

SEQ ID NO: 1353853 - RNA, 19 nt, Artificial Sequence
  Description of Artificial Sequence: Synthetic oligonucleotide
  Antisense strand to SEQ ID NO: 1353852
uucugagacaaucuguagu

SEQ ID NO: 1353854 - RNA, 19 nt, Artificial Sequence
  Description of Artificial Sequence: Synthetic oligonucleotide
  Sense strand starting at position 3197 of SEQ ID NO: 1242519
guccaagucuuucuggguu

SEQ ID NO: 1353855 - RNA, 19 nt, Artificial Sequence
  Description of Artificial Sequence: Synthetic oligonucleotide
  Antisense strand to SEQ ID NO: 1353854
aacccagaaagacuuggac

SEQ ID NO: 1353856 - RNA, 19 nt, Artificial Sequence
  Description of Artificial Sequence: Synthetic oligonucleotide
  Sense strand starting at position 3348 of SEQ ID NO: 1242519
uuuauacuccuaugugaca

SEQ ID NO: 1353857 - RNA, 19 nt, Artificial Sequence
  Description of Artificial Sequence: Synthetic oligonucleotide
  Antisense strand to SEQ ID NO: 1353856
ugucacauaggaguauaaa

SEQ ID NO: 1353858 - RNA, 19 nt, Artificial Sequence
  Description of Artificial Sequence: Synthetic oligonucleotide
  Sense strand starting at position 3349 of SEQ ID NO: 1242519
uuauacuccuaugugacau

SEQ ID NO: 1353859 - RNA, 19 nt, Artificial Sequence
  Description of Artificial Sequence: Synthetic oligonucleotide
  Antisense strand to SEQ ID NO: 1353858
augucacauaggaguauaa

SEQ ID NO: 1353860 - RNA, 19 nt, Artificial Sequence
  Description of Artificial Sequence: Synthetic oligonucleotide
  Sense strand starting at position 3360 of SEQ ID NO: 1242519
ugugacaucucccugugaa

SEQ ID NO: 1353861 - RNA, 19 nt, Artificial Sequence
  Description of Artificial Sequence: Synthetic oligonucleotide
  Antisense strand to SEQ ID NO: 1353860
uucacagggagaugucaca

SEQ ID NO: 1353862 - RNA, 19 nt, Artificial Sequence
  Description of Artificial Sequence: Synthetic oligonucleotide
  Sense strand starting at position 3361 of SEQ ID NO: 1242519
gugacaucucccugugaag

SEQ ID NO: 1353863 - RNA, 19 nt, Artificial Sequence
  Description of Artificial Sequence: Synthetic oligonucleotide
  Antisense strand to SEQ ID NO: 1353862
cuucacagggagaugucac

SEQ ID NO: 1353864 - RNA, 19 nt, Artificial Sequence
  Description of Artificial Sequence: Synthetic oligonucleotide
  Sense strand starting at position 3363 of SEQ ID NO: 1242519
gacaucucccugugaagaa

SEQ ID NO: 1353865 - RNA, 19 nt, Artificial Sequence
  Description of Artificial Sequence: Synthetic oligonucleotide
  Antisense strand to SEQ ID NO: 1353864
uucuucacagggagauguc

SEQ ID NO: 1353866 - RNA, 19 nt, Artificial Sequence
  Description of Artificial Sequence: Synthetic oligonucleotide
  Sense strand starting at position 3364 of SEQ ID NO: 1242519
acaucucccugugaagaaa

SEQ ID NO: 1353867 - RNA, 19 nt, Artificial Sequence
  Description of Artificial Sequence: Synthetic oligonucleotide
  Antisense strand to SEQ ID NO: 1353866
uuucuucacagggagaugu

SEQ ID NO: 1353868 - RNA, 19 nt, Artificial Sequence
  Description of Artificial Sequence: Synthetic oligonucleotide
  Sense strand starting at position 3400 of SEQ ID NO: 1242519
gcugcaaucagguagauaa

SEQ ID NO: 1353869 - RNA, 19 nt, Artificial Sequence
  Description of Artificial Sequence: Synthetic oligonucleotide
  Antisense strand to SEQ ID NO: 1353868
uuaucuaccugauugcagc

SEQ ID NO: 1353870 - RNA, 19 nt, Artificial Sequence
  Description of Artificial Sequence: Synthetic oligonucleotide
  Sense strand starting at position 3527 of SEQ ID NO: 1242519
aguagcaauucuguuaaug

SEQ ID NO: 1353871 - RNA, 19 nt, Artificial Sequence
  Description of Artificial Sequence: Synthetic oligonucleotide
  Antisense strand to SEQ ID NO: 1353870
cauuaacagaauugcuacu

SEQ ID NO: 1353872 - RNA, 19 nt, Artificial Sequence
  Description of Artificial Sequence: Synthetic oligonucleotide
  Sense strand starting at position 3538 of SEQ ID NO: 1242519
uguuaaugccucugauguu

SEQ ID NO: 1353873 - RNA, 19 nt, Artificial Sequence
  Description of Artificial Sequence: Synthetic oligonucleotide
  Antisense strand to SEQ ID NO: 1353872
aacaucagaggcauuaaca

SEQ ID NO: 1353874 - RNA, 19 nt, Artificial Sequence
  Description of Artificial Sequence: Synthetic oligonucleotide
  Sense strand starting at position 3596 of SEQ ID NO: 1242519
gcuacuguucuaggcaaca

SEQ ID NO: 1353875 - RNA, 19 nt, Artificial Sequence
  Description of Artificial Sequence: Synthetic oligonucleotide
  Antisense strand to SEQ ID NO: 1353874
uguugccuagaacaguagc

SEQ ID NO: 1353876 - RNA, 19 nt, Artificial Sequence
  Description of Artificial Sequence: Synthetic oligonucleotide
  Sense strand starting at position 3607 of SEQ ID NO: 1242519
aggcaacaauuguuagaaa

SEQ ID NO: 1353877 - RNA, 19 nt, Artificial Sequence
  Description of Artificial Sequence: Synthetic oligonucleotide
  Antisense strand to SEQ ID NO: 1353876
uuucuaacaauuguugccu

SEQ ID NO: 1353878 - RNA, 19 nt, Artificial Sequence
  Description of Artificial Sequence: Synthetic oligonucleotide
  Sense strand starting at position 3625 of SEQ ID NO: 1242519
aaaguuugagcgggaaagu

SEQ ID NO: 1353879 - RNA, 19 nt, Artificial Sequence
  Description of Artificial Sequence: Synthetic oligonucleotide
  Antisense strand to SEQ ID NO: 1353878
acuuucccgcucaaacuuu

SEQ ID NO: 1353880 - RNA, 19 nt, Artificial Sequence
  Description of Artificial Sequence: Synthetic oligonucleotide
  Sense strand starting at position 3626 of SEQ ID NO: 1242519
aaguuugagcgggaaaguu

SEQ ID NO: 1353881 - RNA, 19 nt, Artificial Sequence
  Description of Artificial Sequence: Synthetic oligonucleotide
  Antisense strand to SEQ ID NO: 1353880
aacuuucccgcucaaacuu

SEQ ID NO: 1353882 - RNA, 19 nt, Artificial Sequence
  Description of Artificial Sequence: Synthetic oligonucleotide
  Sense strand starting at position 3636 of SEQ ID NO: 1242519
gggaaaguucaaugcgaaa

SEQ ID NO: 1353883 - RNA, 19 nt, Artificial Sequence
  Description of Artificial Sequence: Synthetic oligonucleotide
  Antisense strand to SEQ ID NO: 1353882
uuucgcauugaacuuuccc

SEQ ID NO: 1353884 - RNA, 19 nt, Artificial Sequence
  Description of Artificial Sequence: Synthetic oligonucleotide
  Sense strand starting at position 3679 of SEQ ID NO: 1242519
ggaacagguguccacaguu

SEQ ID NO: 1353885 - RNA, 19 nt, Artificial Sequence
  Description of Artificial Sequence: Synthetic oligonucleotide
  Antisense strand to SEQ ID NO: 1353884
aacuguggacaccuguucc

SEQ ID NO: 1353886 - RNA, 19 nt, Artificial Sequence
  Description of Artificial Sequence: Synthetic oligonucleotide
  Sense strand starting at position 3706 of SEQ ID NO: 1242519
gaacucacuugcucguauu

SEQ ID NO: 1353887 - RNA, 19 nt, Artificial Sequence
  Description of Artificial Sequence: Synthetic oligonucleotide
  Antisense strand to SEQ ID NO: 1353886
aauacgagcaagugaguuc

SEQ ID NO: 1353888 - RNA, 19 nt, Artificial Sequence
  Description of Artificial Sequence: Synthetic oligonucleotide
  Sense strand starting at position 3792 of SEQ ID NO: 1242519
uguccucucuagccagaau

SEQ ID NO: 1353889 - RNA, 19 nt, Artificial Sequence
  Description of Artificial Sequence: Synthetic oligonucleotide
  Antisense strand to SEQ ID NO: 1353888
auucuggcuagagaggaca

SEQ ID NO: 1353890 - RNA, 19 nt, Artificial Sequence
  Description of Artificial Sequence: Synthetic oligonucleotide
  Sense strand starting at position 3903 of SEQ ID NO: 1242519
cuagccacucuuuaucgaa

SEQ ID NO: 1353891 - RNA, 19 nt, Artificial Sequence
  Description of Artificial Sequence: Synthetic oligonucleotide
  Antisense strand to SEQ ID NO: 1353890
uucgauaaagaguggcuag

SEQ ID NO: 1353892 - RNA, 19 nt, Artificial Sequence
  Description of Artificial Sequence: Synthetic oligonucleotide
  Sense strand starting at position 3905 of SEQ ID NO: 1242519
agccacucuuuaucgaaga

SEQ ID NO: 1353893 - RNA, 19 nt, Artificial Sequence
  Description of Artificial Sequence: Synthetic oligonucleotide
  Antisense strand to SEQ ID NO: 1353892
ucuucgauaaagaguggcu

SEQ ID NO: 1353894 - RNA, 19 nt, Artificial Sequence
  Description of Artificial Sequence: Synthetic oligonucleotide
  Sense strand starting at position 97 of SEQ ID NO: 1242520
gcgggaaucacugacauug

SEQ ID NO: 1353895 - RNA, 19 nt, Artificial Sequence
  Description of Artificial Sequence: Synthetic oligonucleotide
  Antisense strand to SEQ ID NO: 1353894
caaugucagugauucccgc

SEQ ID NO: 1353896 - RNA, 19 nt, Artificial Sequence
  Description of Artificial Sequence: Synthetic oligonucleotide
  Sense strand starting at position 114 of SEQ ID NO: 1242520
ugugguguuacagguaacu

SEQ ID NO: 1353897 - RNA, 19 nt, Artificial Sequence
  Description of Artificial Sequence: Synthetic oligonucleotide
  Antisense strand to SEQ ID NO: 1353896
aguuaccuguaacaccaca

SEQ ID NO: 1353898 - RNA, 19 nt, Artificial Sequence
  Description of Artificial Sequence: Synthetic oligonucleotide
  Sense strand starting at position 116 of SEQ ID NO: 1242520
ugguguuacagguaacuuu

SEQ ID NO: 1353899 - RNA, 19 nt, Artificial Sequence
  Description of Artificial Sequence: Synthetic oligonucleotide
  Antisense strand to SEQ ID NO: 1353898
aaaguuaccuguaacacca

SEQ ID NO: 1353900 - RNA, 19 nt, Artificial Sequence
  Description of Artificial Sequence: Synthetic oligonucleotide
  Sense strand starting at position 436 of SEQ ID NO: 1242520
agcuguacaaucugaggga

SEQ ID NO: 1353901 - RNA, 19 nt, Artificial Sequence
  Description of Artificial Sequence: Synthetic oligonucleotide
  Antisense strand to SEQ ID NO: 1353900
ucccucagauuguacagcu

SEQ ID NO: 1353902 - RNA, 19 nt, Artificial Sequence
  Description of Artificial Sequence: Synthetic oligonucleotide
  Sense strand starting at position 520 of SEQ ID NO: 1242520
ccgccuucugaagacacau

SEQ ID NO: 1353903 - RNA, 19 nt, Artificial Sequence
  Description of Artificial Sequence: Synthetic oligonucleotide
  Antisense strand to SEQ ID NO: 1353902
augugucuucagaaggcgg

SEQ ID NO: 1353904 - RNA, 19 nt, Artificial Sequence
  Description of Artificial Sequence: Synthetic oligonucleotide
  Sense strand starting at position 531 of SEQ ID NO: 1242520
agacacauguuggucaguu

SEQ ID NO: 1353905 - RNA, 19 nt, Artificial Sequence
  Description of Artificial Sequence: Synthetic oligonucleotide
  Antisense strand to SEQ ID NO: 1353904
aacugaccaacaugugucu

SEQ ID NO: 1353906 - RNA, 19 nt, Artificial Sequence
  Description of Artificial Sequence: Synthetic oligonucleotide
  Sense strand starting at position 532 of SEQ ID NO: 1242520
gacacauguuggucaguuc

SEQ ID NO: 1353907 - RNA, 19 nt, Artificial Sequence
  Description of Artificial Sequence: Synthetic oligonucleotide
  Antisense strand to SEQ ID NO: 1353906
gaacugaccaacauguguc

SEQ ID NO: 1353908 - RNA, 19 nt, Artificial Sequence
  Description of Artificial Sequence: Synthetic oligonucleotide
  Sense strand starting at position 565 of SEQ ID NO: 1242520
gggcauucuuaauucccaa

SEQ ID NO: 1353909 - RNA, 19 nt, Artificial Sequence
  Description of Artificial Sequence: Synthetic oligonucleotide
  Antisense strand to SEQ ID NO: 1353908
uugggaauuaagaaugccc

SEQ ID NO: 1353910 - RNA, 19 nt, Artificial Sequence
  Description of Artificial Sequence: Synthetic oligonucleotide
  Sense strand starting at position 726 of SEQ ID NO: 1242520
agugcuuuccuugacauca

SEQ ID NO: 1353911 - RNA, 19 nt, Artificial Sequence
  Description of Artificial Sequence: Synthetic oligonucleotide
  Antisense strand to SEQ ID NO: 1353910
ugaugucaaggaaagcacu

SEQ ID NO: 1353912 - RNA, 19 nt, Artificial Sequence
  Description of Artificial Sequence: Synthetic oligonucleotide
  Sense strand starting at position 787 of SEQ ID NO: 1242520
caucgaguccaggaauacu

SEQ ID NO: 1353913 - RNA, 19 nt, Artificial Sequence
  Description of Artificial Sequence: Synthetic oligonucleotide
  Antisense strand to SEQ ID NO: 1353912
aguauuccuggacucgaug

SEQ ID NO: 1353914 - RNA, 19 nt, Artificial Sequence
  Description of Artificial Sequence: Synthetic oligonucleotide
  Sense strand starting at position 899 of SEQ ID NO: 1242520
caaucugaucagugcuuga

SEQ ID NO: 1353915 - RNA, 19 nt, Artificial Sequence
  Description of Artificial Sequence: Synthetic oligonucleotide
  Antisense strand to SEQ ID NO: 1353914
ucaagcacugaucagauug

SEQ ID NO: 1353916 - RNA, 19 nt, Artificial Sequence
  Description of Artificial Sequence: Synthetic oligonucleotide
  Sense strand starting at position 904 of SEQ ID NO: 1242520
ugaucagugcuugaagcua

SEQ ID NO: 1353917 - RNA, 19 nt, Artificial Sequence
  Description of Artificial Sequence: Synthetic oligonucleotide
  Antisense strand to SEQ ID NO: 1353916
uagcuucaagcacugauca

SEQ ID NO: 1353918 - RNA, 19 nt, Artificial Sequence
  Description of Artificial Sequence: Synthetic oligonucleotide
  Sense strand starting at position 1184 of SEQ ID NO: 1242520
cccucagggacuugagauu

SEQ ID NO: 1353919 - RNA, 19 nt, Artificial Sequence
  Description of Artificial Sequence: Synthetic oligonucleotide
  Antisense strand to SEQ ID NO: 1353918
aaucucaagucccugaggg

SEQ ID NO: 1353920 - RNA, 19 nt, Artificial Sequence
  Description of Artificial Sequence: Synthetic oligonucleotide
  Sense strand starting at position 1242 of SEQ ID NO: 1242520
auaacucuggguuaagguu

SEQ ID NO: 1353921 - RNA, 19 nt, Artificial Sequence
  Description of Artificial Sequence: Synthetic oligonucleotide
  Antisense strand to SEQ ID NO: 1353920
aaccuuaacccagaguuau

SEQ ID NO: 1353922 - RNA, 19 nt, Artificial Sequence
  Description of Artificial Sequence: Synthetic oligonucleotide
  Sense strand starting at position 1391 of SEQ ID NO: 1242520
cuuccuugucagugacaug

SEQ ID NO: 1353923 - RNA, 19 nt, Artificial Sequence
  Description of Artificial Sequence: Synthetic oligonucleotide
  Antisense strand to SEQ ID NO: 1353922
caugucacugacaaggaag

SEQ ID NO: 1353924 - RNA, 19 nt, Artificial Sequence
  Description of Artificial Sequence: Synthetic oligonucleotide
  Sense strand starting at position 1401 of SEQ ID NO: 1242520
agugacauggguuguguaa

SEQ ID NO: 1353925 - RNA, 19 nt, Artificial Sequence
  Description of Artificial Sequence: Synthetic oligonucleotide
  Antisense strand to SEQ ID NO: 1353924
uuacacaacccaugucacu

SEQ ID NO: 1353926 - RNA, 19 nt, Artificial Sequence
  Description of Artificial Sequence: Synthetic oligonucleotide
  Sense strand starting at position 1408 of SEQ ID NO: 1242520
uggguuguguaauuaucag

SEQ ID NO: 1353927 - RNA, 19 nt, Artificial Sequence
  Description of Artificial Sequence: Synthetic oligonucleotide
  Antisense strand to SEQ ID NO: 1353926
cugauaauuacacaaccca

SEQ ID NO: 1353928 - RNA, 19 nt, Artificial Sequence
  Description of Artificial Sequence: Synthetic oligonucleotide
  Sense strand starting at position 1484 of SEQ ID NO: 1242520
agccuuucccguuaagaaa

SEQ ID NO: 1353929 - RNA, 19 nt, Artificial Sequence
  Description of Artificial Sequence: Synthetic oligonucleotide
  Antisense strand to SEQ ID NO: 1353928
uuucuuaacgggaaaggcu

SEQ ID NO: 1353930 - RNA, 19 nt, Artificial Sequence
  Description of Artificial Sequence: Synthetic oligonucleotide
  Sense strand starting at position 1731 of SEQ ID NO: 1242520
ggaguuuguacugagccga

SEQ ID NO: 1353931 - RNA, 19 nt, Artificial Sequence
  Description of Artificial Sequence: Synthetic oligonucleotide
  Antisense strand to SEQ ID NO: 1353930
ucggcucaguacaaacucc

SEQ ID NO: 1353932 - RNA, 19 nt, Artificial Sequence
  Description of Artificial Sequence: Synthetic oligonucleotide
  Sense strand starting at position 1994 of SEQ ID NO: 1242520
uguuaagugacagggacuu

SEQ ID NO: 1353933 - RNA, 19 nt, Artificial Sequence
  Description of Artificial Sequence: Synthetic oligonucleotide
  Antisense strand to SEQ ID NO: 1353932
aagucccugucacuuaaca

SEQ ID NO: 1353934 - RNA, 19 nt, Artificial Sequence
  Description of Artificial Sequence: Synthetic oligonucleotide
  Sense strand starting at position 2198 of SEQ ID NO: 1242520
agccaaaguuuauuaaguu

SEQ ID NO: 1353935 - RNA, 19 nt, Artificial Sequence
  Description of Artificial Sequence: Synthetic oligonucleotide
  Antisense strand to SEQ ID NO: 1353934
aacuuaauaaacuuuggcu

SEQ ID NO: 1353936 - RNA, 19 nt, Artificial Sequence
  Description of Artificial Sequence: Synthetic oligonucleotide
  Sense strand starting at position 2206 of SEQ ID NO: 1242520
uuuauuaaguugucuggaa

SEQ ID NO: 1353937 - RNA, 19 nt, Artificial Sequence
  Description of Artificial Sequence: Synthetic oligonucleotide
  Antisense strand to SEQ ID NO: 1353936
uuccagacaacuuaauaaa

SEQ ID NO: 1353938 - RNA, 19 nt, Artificial Sequence
  Description of Artificial Sequence: Synthetic oligonucleotide
  Sense strand starting at position 2207 of SEQ ID NO: 1242520
uuauuaaguugucuggaaa

SEQ ID NO: 1353939 - RNA, 19 nt, Artificial Sequence
  Description of Artificial Sequence: Synthetic oligonucleotide
  Antisense strand to SEQ ID NO: 1353938
uuuccagacaacuuaauaa

SEQ ID NO: 1353940 - RNA, 19 nt, Artificial Sequence
  Description of Artificial Sequence: Synthetic oligonucleotide
  Sense strand starting at position 2246 of SEQ ID NO: 1242520
ggaaauuguuaggucaaag

SEQ ID NO: 1353941 - RNA, 19 nt, Artificial Sequence
  Description of Artificial Sequence: Synthetic oligonucleotide
  Antisense strand to SEQ ID NO: 1353940
cuuugaccuaacaauuucc

SEQ ID NO: 1353942 - RNA, 19 nt, Artificial Sequence
  Description of Artificial Sequence: Synthetic oligonucleotide
  Sense strand starting at position 2267 of SEQ ID NO: 1242520
guucgacuacgauaguugu

SEQ ID NO: 1353943 - RNA, 19 nt, Artificial Sequence
  Description of Artificial Sequence: Synthetic oligonucleotide
  Antisense strand to SEQ ID NO: 1353942
acaacuaucguagucgaac

SEQ ID NO: 1353944 - RNA, 19 nt, Artificial Sequence
  Description of Artificial Sequence: Synthetic oligonucleotide
  Sense strand starting at position 2408 of SEQ ID NO: 1242520
uuuggagaacuuugaacuu

SEQ ID NO: 1353945 - RNA, 19 nt, Artificial Sequence
  Description of Artificial Sequence: Synthetic oligonucleotide
  Antisense strand to SEQ ID NO: 1353944
aaguucaaaguucuccaaa

SEQ ID NO: 1353946 - RNA, 19 nt, Artificial Sequence
  Description of Artificial Sequence: Synthetic oligonucleotide
  Sense strand starting at position 2491 of SEQ ID NO: 1242520
uguaguccacuuuauauau

SEQ ID NO: 1353947 - RNA, 19 nt, Artificial Sequence
  Description of Artificial Sequence: Synthetic oligonucleotide
  Antisense strand to SEQ ID NO: 1353946
auauauaaaguggacuaca

SEQ ID NO: 1353948 - RNA, 19 nt, Artificial Sequence
  Description of Artificial Sequence: Synthetic oligonucleotide
  Sense strand starting at position 2538 of SEQ ID NO: 1242520
cuaagaaaucguugccaaa

SEQ ID NO: 1353949 - RNA, 19 nt, Artificial Sequence
  Description of Artificial Sequence: Synthetic oligonucleotide
  Antisense strand to SEQ ID NO: 1353948
uuuggcaacgauuucuuag

SEQ ID NO: 1353950 - RNA, 19 nt, Artificial Sequence
  Description of Artificial Sequence: Synthetic oligonucleotide
  Sense strand starting at position 2556 of SEQ ID NO: 1242520
aucuaaugccaugaagcuu

SEQ ID NO: 1353951 - RNA, 19 nt, Artificial Sequence
  Description of Artificial Sequence: Synthetic oligonucleotide
  Antisense strand to SEQ ID NO: 1353950
aagcuucauggcauuagau

SEQ ID NO: 1353952 - RNA, 19 nt, Artificial Sequence
  Description of Artificial Sequence: Synthetic oligonucleotide
  Sense strand starting at position 3024 of SEQ ID NO: 1242520
ucacguaguuacccaauuu

SEQ ID NO: 1353953 - RNA, 19 nt, Artificial Sequence
  Description of Artificial Sequence: Synthetic oligonucleotide
  Antisense strand to SEQ ID NO: 1353952
aaauuggguaacuacguga

SEQ ID NO: 1353954 - RNA, 19 nt, Artificial Sequence
  Description of Artificial Sequence: Synthetic oligonucleotide
  Sense strand starting at position 3341 of SEQ ID NO: 1242520
ugugcccagccuugaauaa

SEQ ID NO: 1353955 - RNA, 19 nt, Artificial Sequence
  Description of Artificial Sequence: Synthetic oligonucleotide
  Antisense strand to SEQ ID NO: 1353954
uuauucaaggcugggcaca

SEQ ID NO: 1353956 - RNA, 19 nt, Artificial Sequence
  Description of Artificial Sequence: Synthetic oligonucleotide
  Sense strand starting at position 3587 of SEQ ID NO: 1242520
ucuugaaugguguagcuga

SEQ ID NO: 1353957 - RNA, 19 nt, Artificial Sequence
  Description of Artificial Sequence: Synthetic oligonucleotide
  Antisense strand to SEQ ID NO: 1353956
ucagcuacaccauucaaga

SEQ ID NO: 1353958 - RNA, 19 nt, Artificial Sequence
  Description of Artificial Sequence: Synthetic oligonucleotide
  Sense strand starting at position 3650 of SEQ ID NO: 1242520
aggugucuacuguagcuaa

SEQ ID NO: 1353959 - RNA, 19 nt, Artificial Sequence
  Description of Artificial Sequence: Synthetic oligonucleotide
  Antisense strand to SEQ ID NO: 1353958
uuagcuacaguagacaccu

SEQ ID NO: 1353960 - RNA, 19 nt, Artificial Sequence
  Description of Artificial Sequence: Synthetic oligonucleotide
  Sense strand starting at position 3653 of SEQ ID NO: 1242520
ugucuacuguagcuaacua

SEQ ID NO: 1353961 - RNA, 19 nt, Artificial Sequence
  Description of Artificial Sequence: Synthetic oligonucleotide
  Antisense strand to SEQ ID NO: 1353960
uaguuagcuacaguagaca

SEQ ID NO: 1353962 - RNA, 19 nt, Artificial Sequence
  Description of Artificial Sequence: Synthetic oligonucleotide
  Sense strand starting at position 3665 of SEQ ID NO: 1242520
cuaacuagaugucugcuau

SEQ ID NO: 1353963 - RNA, 19 nt, Artificial Sequence
  Description of Artificial Sequence: Synthetic oligonucleotide
  Antisense strand to SEQ ID NO: 1353962
auagcagacaucuaguuag

SEQ ID NO: 1353964 - RNA, 19 nt, Artificial Sequence
  Description of Artificial Sequence: Synthetic oligonucleotide
  Sense strand starting at position 3680 of SEQ ID NO: 1242520
cuaucacugugauugucuu

SEQ ID NO: 1353965 - RNA, 19 nt, Artificial Sequence
  Description of Artificial Sequence: Synthetic oligonucleotide
  Antisense strand to SEQ ID NO: 1353964
aagacaaucacagugauag

SEQ ID NO: 1353966 - RNA, 19 nt, Artificial Sequence
  Description of Artificial Sequence: Synthetic oligonucleotide
  Sense strand starting at position 3692 of SEQ ID NO: 1242520
uugucuuuccuuuguaaga

SEQ ID NO: 1353967 - RNA, 19 nt, Artificial Sequence
  Description of Artificial Sequence: Synthetic oligonucleotide
  Antisense strand to SEQ ID NO: 1353966
ucuuacaaaggaaagacaa

SEQ ID NO: 1353968 - RNA, 19 nt, Artificial Sequence
  Description of Artificial Sequence: Synthetic oligonucleotide
  Sense strand starting at position 3693 of SEQ ID NO: 1242520
ugucuuuccuuuguaagac

SEQ ID NO: 1353969 - RNA, 19 nt, Artificial Sequence
  Description of Artificial Sequence: Synthetic oligonucleotide
  Antisense strand to SEQ ID NO: 1353968
gucuuacaaaggaaagaca

SEQ ID NO: 1353970 - RNA, 19 nt, Artificial Sequence
  Description of Artificial Sequence: Synthetic oligonucleotide
  Sense strand starting at position 3798 of SEQ ID NO: 1242520
gucacaggucaguaacaaa

SEQ ID NO: 1353971 - RNA, 19 nt, Artificial Sequence
  Description of Artificial Sequence: Synthetic oligonucleotide
  Antisense strand to SEQ ID NO: 1353970
uuuguuacugaccugugac

SEQ ID NO: 1353972 - RNA, 19 nt, Artificial Sequence
  Description of Artificial Sequence: Synthetic oligonucleotide
  Sense strand starting at position 3825 of SEQ ID NO: 1242520
ugaaauguuccagagccuu

SEQ ID NO: 1353973 - RNA, 19 nt, Artificial Sequence
  Description of Artificial Sequence: Synthetic oligonucleotide
  Antisense strand to SEQ ID NO: 1353972
aaggcucuggaacauuuca

SEQ ID NO: 1353974 - RNA, 19 nt, Artificial Sequence
  Description of Artificial Sequence: Synthetic oligonucleotide
  Sense strand starting at position 1 of SEQ ID NO: 1242521
auauaagagucuguaguaa

SEQ ID NO: 1353975 - RNA, 19 nt, Artificial Sequence
  Description of Artificial Sequence: Synthetic oligonucleotide
  Antisense strand to SEQ ID NO: 1353974
uuacuacagacucuuauau

SEQ ID NO: 1353976 - RNA, 19 nt, Artificial Sequence
  Description of Artificial Sequence: Synthetic oligonucleotide
  Sense strand starting at position 9 of SEQ ID NO: 1242521
gucuguaguaaggacauua

SEQ ID NO: 1353977 - RNA, 19 nt, Artificial Sequence
  Description of Artificial Sequence: Synthetic oligonucleotide
  Antisense strand to SEQ ID NO: 1353976
uaauguccuuacuacagac

SEQ ID NO: 1353978 - RNA, 19 nt, Artificial Sequence
  Description of Artificial Sequence: Synthetic oligonucleotide
  Sense strand starting at position 138 of SEQ ID NO: 1242521
caagguuucucugagagaa

SEQ ID NO: 1353979 - RNA, 19 nt, Artificial Sequence
  Description of Artificial Sequence: Synthetic oligonucleotide
  Antisense strand to SEQ ID NO: 1353978
uucucucagagaaaccuug

SEQ ID NO: 1353980 - RNA, 19 nt, Artificial Sequence
  Description of Artificial Sequence: Synthetic oligonucleotide
  Sense strand starting at position 140 of SEQ ID NO: 1242521
agguuucucugagagaaac

SEQ ID NO: 1353981 - RNA, 19 nt, Artificial Sequence
  Description of Artificial Sequence: Synthetic oligonucleotide
  Antisense strand to SEQ ID NO: 1353980
guuucucucagagaaaccu

SEQ ID NO: 1353982 - RNA, 19 nt, Artificial Sequence
  Description of Artificial Sequence: Synthetic oligonucleotide
  Sense strand starting at position 167 of SEQ ID NO: 1242521
guaaacauaugggaucaca

SEQ ID NO: 1353983 - RNA, 19 nt, Artificial Sequence
  Description of Artificial Sequence: Synthetic oligonucleotide
  Antisense strand to SEQ ID NO: 1353982
ugugaucccauauguuuac

SEQ ID NO: 1353984 - RNA, 19 nt, Artificial Sequence
  Description of Artificial Sequence: Synthetic oligonucleotide
  Sense strand starting at position 214 of SEQ ID NO: 1242521
augcuaaaguacucucgaa

SEQ ID NO: 1353985 - RNA, 19 nt, Artificial Sequence
  Description of Artificial Sequence: Synthetic oligonucleotide
  Antisense strand to SEQ ID NO: 1353984
uucgagaguacuuuagcau

SEQ ID NO: 1353986 - RNA, 19 nt, Artificial Sequence
  Description of Artificial Sequence: Synthetic oligonucleotide
  Sense strand starting at position 341 of SEQ ID NO: 1242521
uuaaauaucugccagacag

SEQ ID NO: 1353987 - RNA, 19 nt, Artificial Sequence
  Description of Artificial Sequence: Synthetic oligonucleotide
  Antisense strand to SEQ ID NO: 1353986
cugucuggcagauauuuaa

SEQ ID NO: 1353988 - RNA, 19 nt, Artificial Sequence
  Description of Artificial Sequence: Synthetic oligonucleotide
  Sense strand starting at position 434 of SEQ ID NO: 1242521
cgggaucucgucuggagaa

SEQ ID NO: 1353989 - RNA, 19 nt, Artificial Sequence
  Description of Artificial Sequence: Synthetic oligonucleotide
  Antisense strand to SEQ ID NO: 1353988
uucuccagacgagaucccg

SEQ ID NO: 1353990 - RNA, 19 nt, Artificial Sequence
  Description of Artificial Sequence: Synthetic oligonucleotide
  Sense strand starting at position 436 of SEQ ID NO: 1242521
ggaucucgucuggagaacu

SEQ ID NO: 1353991 - RNA, 19 nt, Artificial Sequence
  Description of Artificial Sequence: Synthetic oligonucleotide
  Antisense strand to SEQ ID NO: 1353990
aguucuccagacgagaucc

SEQ ID NO: 1353992 - RNA, 19 nt, Artificial Sequence
  Description of Artificial Sequence: Synthetic oligonucleotide
  Sense strand starting at position 444 of SEQ ID NO: 1242521
ucuggagaacugugucuac

SEQ ID NO: 1353993 - RNA, 19 nt, Artificial Sequence
  Description of Artificial Sequence: Synthetic oligonucleotide
  Antisense strand to SEQ ID NO: 1353992
guagacacaguucuccaga

SEQ ID NO: 1353994 - RNA, 19 nt, Artificial Sequence
  Description of Artificial Sequence: Synthetic oligonucleotide
  Sense strand starting at position 763 of SEQ ID NO: 1242521
agggaaagaucucgaggaa

SEQ ID NO: 1353995 - RNA, 19 nt, Artificial Sequence
  Description of Artificial Sequence: Synthetic oligonucleotide
  Antisense strand to SEQ ID NO: 1353994
uuccucgagaucuuucccu

SEQ ID NO: 1353996 - RNA, 19 nt, Artificial Sequence
  Description of Artificial Sequence: Synthetic oligonucleotide
  Sense strand starting at position 1029 of SEQ ID NO: 1242521
gucguaaucuuccuguaag

SEQ ID NO: 1353997 - RNA, 19 nt, Artificial Sequence
  Description of Artificial Sequence: Synthetic oligonucleotide
  Antisense strand to SEQ ID NO: 1353996
cuuacaggaagauuacgac

SEQ ID NO: 1353998 - RNA, 19 nt, Artificial Sequence
  Description of Artificial Sequence: Synthetic oligonucleotide
  Sense strand starting at position 1032 of SEQ ID NO: 1242521
guaaucuuccuguaagaga

SEQ ID NO: 1353999 - RNA, 19 nt, Artificial Sequence
  Description of Artificial Sequence: Synthetic oligonucleotide
  Antisense strand to SEQ ID NO: 1353998
ucucuuacaggaagauuac

SEQ ID NO: 1354000 - RNA, 19 nt, Artificial Sequence
  Description of Artificial Sequence: Synthetic oligonucleotide
  Sense strand starting at position 2156 of SEQ ID NO: 1242521
aaauaagugucgucuuaca

SEQ ID NO: 1354001 - RNA, 19 nt, Artificial Sequence
  Description of Artificial Sequence: Synthetic oligonucleotide
  Antisense strand to SEQ ID NO: 1354000
uguaagacgacacuuauuu

SEQ ID NO: 1354002 - RNA, 19 nt, Artificial Sequence
  Description of Artificial Sequence: Synthetic oligonucleotide
  Sense strand starting at position 2180 of SEQ ID NO: 1242521
acauuugcauacgaauuua

SEQ ID NO: 1354003 - RNA, 19 nt, Artificial Sequence
  Description of Artificial Sequence: Synthetic oligonucleotide
  Antisense strand to SEQ ID NO: 1354002
uaaauucguaugcaaaugu

SEQ ID NO: 1354004 - RNA, 19 nt, Artificial Sequence
  Description of Artificial Sequence: Synthetic oligonucleotide
  Sense strand starting at position 2274 of SEQ ID NO: 1242521
ucuccuuuguaauuguaau

SEQ ID NO: 1354005 - RNA, 19 nt, Artificial Sequence
  Description of Artificial Sequence: Synthetic oligonucleotide
  Antisense strand to SEQ ID NO: 1354004
auuacaauuacaaaggaga

SEQ ID NO: 1354006 - RNA, 19 nt, Artificial Sequence
  Description of Artificial Sequence: Synthetic oligonucleotide
  Sense strand starting at position 2331 of SEQ ID NO: 1242521
acuagucuguaaguuacaa

SEQ ID NO: 1354007 - RNA, 19 nt, Artificial Sequence
  Description of Artificial Sequence: Synthetic oligonucleotide
  Antisense strand to SEQ ID NO: 1354006
uuguaacuuacagacuagu

SEQ ID NO: 1354008 - RNA, 19 nt, Artificial Sequence
  Description of Artificial Sequence: Synthetic oligonucleotide
  Sense strand starting at position 2359 of SEQ ID NO: 1242521
cccauaauuuaggaacaga

SEQ ID NO: 1354009 - RNA, 19 nt, Artificial Sequence
  Description of Artificial Sequence: Synthetic oligonucleotide
  Antisense strand to SEQ ID NO: 1354008
ucuguuccuaaauuauggg

SEQ ID NO: 1354010 - RNA, 19 nt, Artificial Sequence
  Description of Artificial Sequence: Synthetic oligonucleotide
  Sense strand starting at position 2777 of SEQ ID NO: 1242521
aguuccaguucccaggaau

SEQ ID NO: 1354011 - RNA, 19 nt, Artificial Sequence
  Description of Artificial Sequence: Synthetic oligonucleotide
  Antisense strand to SEQ ID NO: 1354010
auuccugggaacuggaacu

SEQ ID NO: 1354012 - RNA, 19 nt, Artificial Sequence
  Description of Artificial Sequence: Synthetic oligonucleotide
  Sense strand starting at position 2828 of SEQ ID NO: 1242521
ggguaagugcuguaccuga

SEQ ID NO: 1354013 - RNA, 19 nt, Artificial Sequence
  Description of Artificial Sequence: Synthetic oligonucleotide
  Antisense strand to SEQ ID NO: 1354012
ucagguacagcacuuaccc

SEQ ID NO: 1354014 - RNA, 19 nt, Artificial Sequence
  Description of Artificial Sequence: Synthetic oligonucleotide
  Sense strand starting at position 2832 of SEQ ID NO: 1242521
aagugcuguaccugagaga

SEQ ID NO: 1354015 - RNA, 19 nt, Artificial Sequence
  Description of Artificial Sequence: Synthetic oligonucleotide
  Antisense strand to SEQ ID NO: 1354014
ucucucagguacagcacuu

SEQ ID NO: 1354016 - RNA, 19 nt, Artificial Sequence
  Description of Artificial Sequence: Synthetic oligonucleotide
  Sense strand starting at position 3047 of SEQ ID NO: 1242521
gcccuugggcaccauuaau

SEQ ID NO: 1354017 - RNA, 19 nt, Artificial Sequence
  Description of Artificial Sequence: Synthetic oligonucleotide
  Antisense strand to SEQ ID NO: 1354016
auuaauggugcccaagggc

SEQ ID NO: 1354018 - RNA, 19 nt, Artificial Sequence
  Description of Artificial Sequence: Synthetic oligonucleotide
  Sense strand starting at position 3223 of SEQ ID NO: 1242521
gagccauuaguaugaagaa

SEQ ID NO: 1354019 - RNA, 19 nt, Artificial Sequence
  Description of Artificial Sequence: Synthetic oligonucleotide
  Antisense strand to SEQ ID NO: 1354018
uucuucauacuaauggcuc

SEQ ID NO: 1354020 - RNA, 19 nt, Artificial Sequence
  Description of Artificial Sequence: Synthetic oligonucleotide
  Sense strand starting at position 3224 of SEQ ID NO: 1242521
agccauuaguaugaagaac

SEQ ID NO: 1354021 - RNA, 19 nt, Artificial Sequence
  Description of Artificial Sequence: Synthetic oligonucleotide
  Antisense strand to SEQ ID NO: 1354020
guucuucauacuaauggcu

SEQ ID NO: 1354022 - RNA, 19 nt, Artificial Sequence
  Description of Artificial Sequence: Synthetic oligonucleotide
  Sense strand starting at position 3485 of SEQ ID NO: 1242521
aagcuacaugucugauuag

SEQ ID NO: 1354023 - RNA, 19 nt, Artificial Sequence
  Description of Artificial Sequence: Synthetic oligonucleotide
  Antisense strand to SEQ ID NO: 1354022
cuaaucagacauguagcuu

SEQ ID NO: 1354024 - RNA, 19 nt, Artificial Sequence
  Description of Artificial Sequence: Synthetic oligonucleotide
  Sense strand starting at position 3486 of SEQ ID NO: 1242521
agcuacaugucugauuaga

SEQ ID NO: 1354025 - RNA, 19 nt, Artificial Sequence
  Description of Artificial Sequence: Synthetic oligonucleotide
  Antisense strand to SEQ ID NO: 1354024
ucuaaucagacauguagcu

SEQ ID NO: 1354026 - RNA, 19 nt, Artificial Sequence
  Description of Artificial Sequence: Synthetic oligonucleotide
  Sense strand starting at position 3488 of SEQ ID NO: 1242521
cuacaugucugauuagagu

SEQ ID NO: 1354027 - RNA, 19 nt, Artificial Sequence
  Description of Artificial Sequence: Synthetic oligonucleotide
  Antisense strand to SEQ ID NO: 1354026
acucuaaucagacauguag

SEQ ID NO: 1354028 - RNA, 19 nt, Artificial Sequence
  Description of Artificial Sequence: Synthetic oligonucleotide
  Sense strand starting at position 3491 of SEQ ID NO: 1242521
caugucugauuagaguaua

SEQ ID NO: 1354029 - RNA, 19 nt, Artificial Sequence
  Description of Artificial Sequence: Synthetic oligonucleotide
  Antisense strand to SEQ ID NO: 1354028
uauacucuaaucagacaug

SEQ ID NO: 1354030 - RNA, 19 nt, Artificial Sequence
  Description of Artificial Sequence: Synthetic oligonucleotide
  Sense strand starting at position 3494 of SEQ ID NO: 1242521
gucugauuagaguauacuu

SEQ ID NO: 1354031 - RNA, 19 nt, Artificial Sequence
  Description of Artificial Sequence: Synthetic oligonucleotide
  Antisense strand to SEQ ID NO: 1354030
aaguauacucuaaucagac

SEQ ID NO: 1354032 - RNA, 19 nt, Artificial Sequence
  Description of Artificial Sequence: Synthetic oligonucleotide
  Sense strand starting at position 3499 of SEQ ID NO: 1242521
auuagaguauacuuagcua

SEQ ID NO: 1354033 - RNA, 19 nt, Artificial Sequence
  Description of Artificial Sequence: Synthetic oligonucleotide
  Antisense strand to SEQ ID NO: 1354032
uagcuaaguauacucuaau

SEQ ID NO: 1354034 - RNA, 19 nt, Artificial Sequence
  Description of Artificial Sequence: Synthetic oligonucleotide
  Sense strand starting at position 3502 of SEQ ID NO: 1242521
agaguauacuuagcuaaua

SEQ ID NO: 1354035 - RNA, 19 nt, Artificial Sequence
  Description of Artificial Sequence: Synthetic oligonucleotide
  Antisense strand to SEQ ID NO: 1354034
uauuagcuaaguauacucu

SEQ ID NO: 1354036 - RNA, 19 nt, Artificial Sequence
  Description of Artificial Sequence: Synthetic oligonucleotide
  Sense strand starting at position 3503 of SEQ ID NO: 1242521
gaguauacuuagcuaauag

SEQ ID NO: 1354037 - RNA, 19 nt, Artificial Sequence
  Description of Artificial Sequence: Synthetic oligonucleotide
  Antisense strand to SEQ ID NO: 1354036
cuauuagcuaaguauacuc

SEQ ID NO: 1354038 - RNA, 19 nt, Artificial Sequence
  Description of Artificial Sequence: Synthetic oligonucleotide
  Sense strand starting at position 3507 of SEQ ID NO: 1242521
auacuuagcuaauagggaa

SEQ ID NO: 1354039 - RNA, 19 nt, Artificial Sequence
  Description of Artificial Sequence: Synthetic oligonucleotide
  Antisense strand to SEQ ID NO: 1354038
uucccuauuagcuaaguau

SEQ ID NO: 1354040 - RNA, 19 nt, Artificial Sequence
  Description of Artificial Sequence: Synthetic oligonucleotide
  Sense strand starting at position 3624 of SEQ ID NO: 1242521
agaauuaaguguuauucca

SEQ ID NO: 1354041 - RNA, 19 nt, Artificial Sequence
  Description of Artificial Sequence: Synthetic oligonucleotide
  Antisense strand to SEQ ID NO: 1354040
uggaauaacacuuaauucu

SEQ ID NO: 1354042 - RNA, 19 nt, Artificial Sequence
  Description of Artificial Sequence: Synthetic oligonucleotide
  Sense strand starting at position 3632 of SEQ ID NO: 1242521
guguuauuccagugccuac

SEQ ID NO: 1354043 - RNA, 19 nt, Artificial Sequence
  Description of Artificial Sequence: Synthetic oligonucleotide
  Antisense strand to SEQ ID NO: 1354042
guaggcacuggaauaacac

SEQ ID NO: 1354044 - RNA, 19 nt, Artificial Sequence
  Description of Artificial Sequence: Synthetic oligonucleotide
  Sense strand starting at position 3663 of SEQ ID NO: 1242521
acaucaugcucccaggaca

SEQ ID NO: 1354045 - RNA, 19 nt, Artificial Sequence
  Description of Artificial Sequence: Synthetic oligonucleotide
  Antisense strand to SEQ ID NO: 1354044
uguccugggagcaugaugu

SEQ ID NO: 1354046 - RNA, 19 nt, Artificial Sequence
  Description of Artificial Sequence: Synthetic oligonucleotide
  Sense strand starting at position 3720 of SEQ ID NO: 1242521
augccuagagacugaaaua

SEQ ID NO: 1354047 - RNA, 19 nt, Artificial Sequence
  Description of Artificial Sequence: Synthetic oligonucleotide
  Antisense strand to SEQ ID NO: 1354046
uauuucagucucuaggcau

SEQ ID NO: 1354048 - RNA, 19 nt, Artificial Sequence
  Description of Artificial Sequence: Synthetic oligonucleotide
  Sense strand starting at position 3742 of SEQ ID NO: 1242521
gcucucauagcauaagaag

SEQ ID NO: 1354049 - RNA, 19 nt, Artificial Sequence
  Description of Artificial Sequence: Synthetic oligonucleotide
  Antisense strand to SEQ ID NO: 1354048
cuucuuaugcuaugagagc

SEQ ID NO: 1354050 - RNA, 19 nt, Artificial Sequence
  Description of Artificial Sequence: Synthetic oligonucleotide
  Sense strand starting at position 3801 of SEQ ID NO: 1242521
gcaguuccugcagaaacgu

SEQ ID NO: 1354051 - RNA, 19 nt, Artificial Sequence
  Description of Artificial Sequence: Synthetic oligonucleotide
  Antisense strand to SEQ ID NO: 1354050
acguuucugcaggaacugc

SEQ ID NO: 1354052 - RNA, 19 nt, Artificial Sequence
  Description of Artificial Sequence: Synthetic oligonucleotide
  Sense strand starting at position 3974 of SEQ ID NO: 1242521
uuagaacacuuggagaauu

SEQ ID NO: 1354053 - RNA, 19 nt, Artificial Sequence
  Description of Artificial Sequence: Synthetic oligonucleotide
  Antisense strand to SEQ ID NO: 1354052
aauucuccaaguguucuaa

SEQ ID NO: 1354054 - RNA, 19 nt, Artificial Sequence
  Description of Artificial Sequence: Synthetic oligonucleotide
  Sense strand starting at position 18 of SEQ ID NO: 1242522
augccagaagugugcuaau

SEQ ID NO: 1354055 - RNA, 19 nt, Artificial Sequence
  Description of Artificial Sequence: Synthetic oligonucleotide
  Antisense strand to SEQ ID NO: 1354054
auuagcacacuucuggcau

SEQ ID NO: 1354056 - RNA, 19 nt, Artificial Sequence
  Description of Artificial Sequence: Synthetic oligonucleotide
  Sense strand starting at position 29 of SEQ ID NO: 1242522
gugcuaauuguccauguug

SEQ ID NO: 1354057 - RNA, 19 nt, Artificial Sequence
  Description of Artificial Sequence: Synthetic oligonucleotide
  Antisense strand to SEQ ID NO: 1354056
caacauggacaauuagcac

SEQ ID NO: 1354058 - RNA, 19 nt, Artificial Sequence
  Description of Artificial Sequence: Synthetic oligonucleotide
  Sense strand starting at position 44 of SEQ ID NO: 1242522
guugucuuucuguaguuua

SEQ ID NO: 1354059 - RNA, 19 nt, Artificial Sequence
  Description of Artificial Sequence: Synthetic oligonucleotide
  Antisense strand to SEQ ID NO: 1354058
uaaacuacagaaagacaac

SEQ ID NO: 1354060 - RNA, 19 nt, Artificial Sequence
  Description of Artificial Sequence: Synthetic oligonucleotide
  Sense strand starting at position 51 of SEQ ID NO: 1242522
uucuguaguuuacuacaga

SEQ ID NO: 1354061 - RNA, 19 nt, Artificial Sequence
  Description of Artificial Sequence: Synthetic oligonucleotide
  Antisense strand to SEQ ID NO: 1354060
ucuguaguaaacuacagaa

SEQ ID NO: 1354062 - RNA, 19 nt, Artificial Sequence
  Description of Artificial Sequence: Synthetic oligonucleotide
  Sense strand starting at position 54 of SEQ ID NO: 1242522
uguaguuuacuacagauga

SEQ ID NO: 1354063 - RNA, 19 nt, Artificial Sequence
  Description of Artificial Sequence: Synthetic oligonucleotide
  Antisense strand to SEQ ID NO: 1354062
ucaucuguaguaaacuaca

SEQ ID NO: 1354064 - RNA, 19 nt, Artificial Sequence
  Description of Artificial Sequence: Synthetic oligonucleotide
  Sense strand starting at position 86 of SEQ ID NO: 1242522
caccauucccugugaggua

SEQ ID NO: 1354065 - RNA, 19 nt, Artificial Sequence
  Description of Artificial Sequence: Synthetic oligonucleotide
  Antisense strand to SEQ ID NO: 1354064
uaccucacagggaauggug

SEQ ID NO: 1354066 - RNA, 19 nt, Artificial Sequence
  Description of Artificial Sequence: Synthetic oligonucleotide
  Sense strand starting at position 99 of SEQ ID NO: 1242522
gagguaggcuucuccuagu

SEQ ID NO: 1354067 - RNA, 19 nt, Artificial Sequence
  Description of Artificial Sequence: Synthetic oligonucleotide
  Antisense strand to SEQ ID NO: 1354066
acuaggagaagccuaccuc

SEQ ID NO: 1354068 - RNA, 19 nt, Artificial Sequence
  Description of Artificial Sequence: Synthetic oligonucleotide
  Sense strand starting at position 189 of SEQ ID NO: 1242522
cagcaauggcuacaguuau

SEQ ID NO: 1354069 - RNA, 19 nt, Artificial Sequence
  Description of Artificial Sequence: Synthetic oligonucleotide
  Antisense strand to SEQ ID NO: 1354068
auaacuguagccauugcug

SEQ ID NO: 1354070 - RNA, 19 nt, Artificial Sequence
  Description of Artificial Sequence: Synthetic oligonucleotide
  Sense strand starting at position 253 of SEQ ID NO: 1242522
ccuuauuuguuguucuaua

SEQ ID NO: 1354071 - RNA, 19 nt, Artificial Sequence
  Description of Artificial Sequence: Synthetic oligonucleotide
  Antisense strand to SEQ ID NO: 1354070
uauagaacaacaaauaagg

SEQ ID NO: 1354072 - RNA, 19 nt, Artificial Sequence
  Description of Artificial Sequence: Synthetic oligonucleotide
  Sense strand starting at position 254 of SEQ ID NO: 1242522
cuuauuuguuguucuauac

SEQ ID NO: 1354073 - RNA, 19 nt, Artificial Sequence
  Description of Artificial Sequence: Synthetic oligonucleotide
  Antisense strand to SEQ ID NO: 1354072
guauagaacaacaaauaag

SEQ ID NO: 1354074 - RNA, 19 nt, Artificial Sequence
  Description of Artificial Sequence: Synthetic oligonucleotide
  Sense strand starting at position 258 of SEQ ID NO: 1242522
uuuguuguucuauacucaa

SEQ ID NO: 1354075 - RNA, 19 nt, Artificial Sequence
  Description of Artificial Sequence: Synthetic oligonucleotide
  Antisense strand to SEQ ID NO: 1354074
uugaguauagaacaacaaa

SEQ ID NO: 1354076 - RNA, 19 nt, Artificial Sequence
  Description of Artificial Sequence: Synthetic oligonucleotide
  Sense strand starting at position 261 of SEQ ID NO: 1242522
guuguucuauacucaacau

SEQ ID NO: 1354077 - RNA, 19 nt, Artificial Sequence
  Description of Artificial Sequence: Synthetic oligonucleotide
  Antisense strand to SEQ ID NO: 1354076
auguugaguauagaacaac

SEQ ID NO: 1354078 - RNA, 19 nt, Artificial Sequence
  Description of Artificial Sequence: Synthetic oligonucleotide
  Sense strand starting at position 281 of SEQ ID NO: 1242522
ccgacagauuuacagguaa

SEQ ID NO: 1354079 - RNA, 19 nt, Artificial Sequence
  Description of Artificial Sequence: Synthetic oligonucleotide
  Antisense strand to SEQ ID NO: 1354078
uuaccuguaaaucugucgg

SEQ ID NO: 1354080 - RNA, 19 nt, Artificial Sequence
  Description of Artificial Sequence: Synthetic oligonucleotide
  Sense strand starting at position 341 of SEQ ID NO: 1242522
gcaauacugcucugugaaa

SEQ ID NO: 1354081 - RNA, 19 nt, Artificial Sequence
  Description of Artificial Sequence: Synthetic oligonucleotide
  Antisense strand to SEQ ID NO: 1354080
uuucacagagcaguauugc

SEQ ID NO: 1354082 - RNA, 19 nt, Artificial Sequence
  Description of Artificial Sequence: Synthetic oligonucleotide
  Sense strand starting at position 471 of SEQ ID NO: 1242522
uuccuuaucccagaguaca

SEQ ID NO: 1354083 - RNA, 19 nt, Artificial Sequence
  Description of Artificial Sequence: Synthetic oligonucleotide
  Antisense strand to SEQ ID NO: 1354082
uguacucugggauaaggaa

SEQ ID NO: 1354084 - RNA, 19 nt, Artificial Sequence
  Description of Artificial Sequence: Synthetic oligonucleotide
  Sense strand starting at position 512 of SEQ ID NO: 1242522
uguuguuuccaagaacaua

SEQ ID NO: 1354085 - RNA, 19 nt, Artificial Sequence
  Description of Artificial Sequence: Synthetic oligonucleotide
  Antisense strand to SEQ ID NO: 1354084
uauguucuuggaaacaaca

SEQ ID NO: 1354086 - RNA, 19 nt, Artificial Sequence
  Description of Artificial Sequence: Synthetic oligonucleotide
  Sense strand starting at position 688 of SEQ ID NO: 1242522
cgaauuguacgcuauuaau

SEQ ID NO: 1354087 - RNA, 19 nt, Artificial Sequence
  Description of Artificial Sequence: Synthetic oligonucleotide
  Antisense strand to SEQ ID NO: 1354086
auuaauagcguacaauucg

SEQ ID NO: 1354088 - RNA, 19 nt, Artificial Sequence
  Description of Artificial Sequence: Synthetic oligonucleotide
  Sense strand starting at position 812 of SEQ ID NO: 1242522
uaagaagucgcuuagagca

SEQ ID NO: 1354089 - RNA, 19 nt, Artificial Sequence
  Description of Artificial Sequence: Synthetic oligonucleotide
  Antisense strand to SEQ ID NO: 1354088
ugcucuaagcgacuucuua

SEQ ID NO: 1354090 - RNA, 19 nt, Artificial Sequence
  Description of Artificial Sequence: Synthetic oligonucleotide
  Sense strand starting at position 2123 of SEQ ID NO: 1242522
cgcagaguccggcuguguu

SEQ ID NO: 1354091 - RNA, 19 nt, Artificial Sequence
  Description of Artificial Sequence: Synthetic oligonucleotide
  Antisense strand to SEQ ID NO: 1354090
aacacagccggacucugcg

SEQ ID NO: 1354092 - RNA, 19 nt, Artificial Sequence
  Description of Artificial Sequence: Synthetic oligonucleotide
  Sense strand starting at position 2133 of SEQ ID NO: 1242522
ggcuguguuccgaagugac

SEQ ID NO: 1354093 - RNA, 19 nt, Artificial Sequence
  Description of Artificial Sequence: Synthetic oligonucleotide
  Antisense strand to SEQ ID NO: 1354092
gucacuucggaacacagcc

SEQ ID NO: 1354094 - RNA, 19 nt, Artificial Sequence
  Description of Artificial Sequence: Synthetic oligonucleotide
  Sense strand starting at position 2143 of SEQ ID NO: 1242522
cgaagugacuuuccuaguc

SEQ ID NO: 1354095 - RNA, 19 nt, Artificial Sequence
  Description of Artificial Sequence: Synthetic oligonucleotide
  Antisense strand to SEQ ID NO: 1354094
gacuaggaaagucacuucg

SEQ ID NO: 1354096 - RNA, 19 nt, Artificial Sequence
  Description of Artificial Sequence: Synthetic oligonucleotide
  Sense strand starting at position 2663 of SEQ ID NO: 1242522
auaaacguagccugggauu

SEQ ID NO: 1354097 - RNA, 19 nt, Artificial Sequence
  Description of Artificial Sequence: Synthetic oligonucleotide
  Antisense strand to SEQ ID NO: 1354096
aaucccaggcuacguuuau

SEQ ID NO: 1354098 - RNA, 19 nt, Artificial Sequence
  Description of Artificial Sequence: Synthetic oligonucleotide
  Sense strand starting at position 2676 of SEQ ID NO: 1242522
gggauugcugggcaagcua

SEQ ID NO: 1354099 - RNA, 19 nt, Artificial Sequence
  Description of Artificial Sequence: Synthetic oligonucleotide
  Antisense strand to SEQ ID NO: 1354098
uagcuugcccagcaauccc

SEQ ID NO: 1354100 - RNA, 19 nt, Artificial Sequence
  Description of Artificial Sequence: Synthetic oligonucleotide
  Sense strand starting at position 2701 of SEQ ID NO: 1242522
ccauuaccaggcgauaaga

SEQ ID NO: 1354101 - RNA, 19 nt, Artificial Sequence
  Description of Artificial Sequence: Synthetic oligonucleotide
  Antisense strand to SEQ ID NO: 1354100
ucuuaucgccugguaaugg

SEQ ID NO: 1354102 - RNA, 19 nt, Artificial Sequence
  Description of Artificial Sequence: Synthetic oligonucleotide
  Sense strand starting at position 2730 of SEQ ID NO: 1242522
ucuagcauuuguuagauac

SEQ ID NO: 1354103 - RNA, 19 nt, Artificial Sequence
  Description of Artificial Sequence: Synthetic oligonucleotide
  Antisense strand to SEQ ID NO: 1354102
guaucuaacaaaugcuaga

SEQ ID NO: 1354104 - RNA, 19 nt, Artificial Sequence
  Description of Artificial Sequence: Synthetic oligonucleotide
  Sense strand starting at position 2781 of SEQ ID NO: 1242522
gcauuuaagccucgcaaca

SEQ ID NO: 1354105 - RNA, 19 nt, Artificial Sequence
  Description of Artificial Sequence: Synthetic oligonucleotide
  Antisense strand to SEQ ID NO: 1354104
uguugcgaggcuuaaaugc

SEQ ID NO: 1354106 - RNA, 19 nt, Artificial Sequence
  Description of Artificial Sequence: Synthetic oligonucleotide
  Sense strand starting at position 2838 of SEQ ID NO: 1242522
gaaaccgagucuguaacuu

SEQ ID NO: 1354107 - RNA, 19 nt, Artificial Sequence
  Description of Artificial Sequence: Synthetic oligonucleotide
  Antisense strand to SEQ ID NO: 1354106
aaguuacagacucgguuuc

SEQ ID NO: 1354108 - RNA, 19 nt, Artificial Sequence
  Description of Artificial Sequence: Synthetic oligonucleotide
  Sense strand starting at position 2846 of SEQ ID NO: 1242522
gucuguaacuuguugaucu

SEQ ID NO: 1354109 - RNA, 19 nt, Artificial Sequence
  Description of Artificial Sequence: Synthetic oligonucleotide
  Antisense strand to SEQ ID NO: 1354108
agaucaacaaguuacagac

SEQ ID NO: 1354110 - RNA, 19 nt, Artificial Sequence
  Description of Artificial Sequence: Synthetic oligonucleotide
  Sense strand starting at position 2850 of SEQ ID NO: 1242522
guaacuuguugaucuguau

SEQ ID NO: 1354111 - RNA, 19 nt, Artificial Sequence
  Description of Artificial Sequence: Synthetic oligonucleotide
  Antisense strand to SEQ ID NO: 1354110
auacagaucaacaaguuac

SEQ ID NO: 1354112 - RNA, 19 nt, Artificial Sequence
  Description of Artificial Sequence: Synthetic oligonucleotide
  Sense strand starting at position 2853 of SEQ ID NO: 1242522
acuuguugaucuguaugga

SEQ ID NO: 1354113 - RNA, 19 nt, Artificial Sequence
  Description of Artificial Sequence: Synthetic oligonucleotide
  Antisense strand to SEQ ID NO: 1354112
uccauacagaucaacaagu

SEQ ID NO: 1354114 - RNA, 19 nt, Artificial Sequence
  Description of Artificial Sequence: Synthetic oligonucleotide
  Sense strand starting at position 2854 of SEQ ID NO: 1242522
cuuguugaucuguauggag

SEQ ID NO: 1354115 - RNA, 19 nt, Artificial Sequence
  Description of Artificial Sequence: Synthetic oligonucleotide
  Antisense strand to SEQ ID NO: 1354114
cuccauacagaucaacaag

SEQ ID NO: 1354116 - RNA, 19 nt, Artificial Sequence
  Description of Artificial Sequence: Synthetic oligonucleotide
  Sense strand starting at position 2856 of SEQ ID NO: 1242522
uguugaucuguauggagau

SEQ ID NO: 1354117 - RNA, 19 nt, Artificial Sequence
  Description of Artificial Sequence: Synthetic oligonucleotide
  Antisense strand to SEQ ID NO: 1354116
aucuccauacagaucaaca

SEQ ID NO: 1354118 - RNA, 19 nt, Artificial Sequence
  Description of Artificial Sequence: Synthetic oligonucleotide
  Sense strand starting at position 3090 of SEQ ID NO: 1242522
ggaagacugauguggcaau

SEQ ID NO: 1354119 - RNA, 19 nt, Artificial Sequence
  Description of Artificial Sequence: Synthetic oligonucleotide
  Antisense strand to SEQ ID NO: 1354118
auugccacaucagucuucc

SEQ ID NO: 1354120 - RNA, 19 nt, Artificial Sequence
  Description of Artificial Sequence: Synthetic oligonucleotide
  Sense strand starting at position 3420 of SEQ ID NO: 1242522
ggcagugaugcguugugga

SEQ ID NO: 1354121 - RNA, 19 nt, Artificial Sequence
  Description of Artificial Sequence: Synthetic oligonucleotide
  Antisense strand to SEQ ID NO: 1354120
uccacaacgcaucacugcc

SEQ ID NO: 1354122 - RNA, 19 nt, Artificial Sequence
  Description of Artificial Sequence: Synthetic oligonucleotide
  Sense strand starting at position 3565 of SEQ ID NO: 1242522
gaagaauacuugucucgca

SEQ ID NO: 1354123 - RNA, 19 nt, Artificial Sequence
  Description of Artificial Sequence: Synthetic oligonucleotide
  Antisense strand to SEQ ID NO: 1354122
ugcgagacaaguauucuuc

SEQ ID NO: 1354124 - RNA, 19 nt, Artificial Sequence
  Description of Artificial Sequence: Synthetic oligonucleotide
  Sense strand starting at position 3573 of SEQ ID NO: 1242522
cuugucucgcaaggaacau

SEQ ID NO: 1354125 - RNA, 19 nt, Artificial Sequence
  Description of Artificial Sequence: Synthetic oligonucleotide
  Antisense strand to SEQ ID NO: 1354124
auguuccuugcgagacaag

SEQ ID NO: 1354126 - RNA, 19 nt, Artificial Sequence
  Description of Artificial Sequence: Synthetic oligonucleotide
  Sense strand starting at position 3582 of SEQ ID NO: 1242522
caaggaacaugugagaauu

SEQ ID NO: 1354127 - RNA, 19 nt, Artificial Sequence
  Description of Artificial Sequence: Synthetic oligonucleotide
  Antisense strand to SEQ ID NO: 1354126
aauucucacauguuccuug

SEQ ID NO: 1354128 - RNA, 19 nt, Artificial Sequence
  Description of Artificial Sequence: Synthetic oligonucleotide
  Sense strand starting at position 3622 of SEQ ID NO: 1242522
cuagguggccaauaaauua

SEQ ID NO: 1354129 - RNA, 19 nt, Artificial Sequence
  Description of Artificial Sequence: Synthetic oligonucleotide
  Antisense strand to SEQ ID NO: 1354128
uaauuuauuggccaccuag

SEQ ID NO: 1354130 - RNA, 19 nt, Artificial Sequence
  Description of Artificial Sequence: Synthetic oligonucleotide
  Sense strand starting at position 3878 of SEQ ID NO: 1242522
ucauacugguauguaauau

SEQ ID NO: 1354131 - RNA, 19 nt, Artificial Sequence
  Description of Artificial Sequence: Synthetic oligonucleotide
  Antisense strand to SEQ ID NO: 1354130
auauuacauaccaguauga

SEQ ID NO: 1354132 - RNA, 19 nt, Artificial Sequence
  Description of Artificial Sequence: Synthetic oligonucleotide
  Sense strand starting at position 3964 of SEQ ID NO: 1242522
ggagucuuucccgacccuu

SEQ ID NO: 1354133 - RNA, 19 nt, Artificial Sequence
  Description of Artificial Sequence: Synthetic oligonucleotide
  Antisense strand to SEQ ID NO: 1354132
aagggucgggaaagacucc

SEQ ID NO: 1354134 - RNA, 19 nt, Artificial Sequence
  Description of Artificial Sequence: Synthetic oligonucleotide
  Sense strand starting at position 243 of SEQ ID NO: 1242523
uguauuauggcagagcaua

SEQ ID NO: 1354135 - RNA, 19 nt, Artificial Sequence
  Description of Artificial Sequence: Synthetic oligonucleotide
  Antisense strand to SEQ ID NO: 1354134
uaugcucugccauaauaca

SEQ ID NO: 1354136 - RNA, 19 nt, Artificial Sequence
  Description of Artificial Sequence: Synthetic oligonucleotide
  Sense strand starting at position 355 of SEQ ID NO: 1242523
agaucuugucucuauuaca

SEQ ID NO: 1354137 - RNA, 19 nt, Artificial Sequence
  Description of Artificial Sequence: Synthetic oligonucleotide
  Antisense strand to SEQ ID NO: 1354136
uguaauagagacaagaucu

SEQ ID NO: 1354138 - RNA, 19 nt, Artificial Sequence
  Description of Artificial Sequence: Synthetic oligonucleotide
  Sense strand starting at position 612 of SEQ ID NO: 1242523
ucaacaauuguguaaggca

SEQ ID NO: 1354139 - RNA, 19 nt, Artificial Sequence
  Description of Artificial Sequence: Synthetic oligonucleotide
  Antisense strand to SEQ ID NO: 1354138
ugccuuacacaauuguuga

SEQ ID NO: 1354140 - RNA, 19 nt, Artificial Sequence
  Description of Artificial Sequence: Synthetic oligonucleotide
  Sense strand starting at position 674 of SEQ ID NO: 1242523
guuuaaaugauguagucau

SEQ ID NO: 1354141 - RNA, 19 nt, Artificial Sequence
  Description of Artificial Sequence: Synthetic oligonucleotide
  Antisense strand to SEQ ID NO: 1354140
augacuacaucauuuaaac

SEQ ID NO: 1354142 - RNA, 19 nt, Artificial Sequence
  Description of Artificial Sequence: Synthetic oligonucleotide
  Sense strand starting at position 898 of SEQ ID NO: 1242523
ggcauaauauaugcacauu

SEQ ID NO: 1354143 - RNA, 19 nt, Artificial Sequence
  Description of Artificial Sequence: Synthetic oligonucleotide
  Antisense strand to SEQ ID NO: 1354142
aaugugcauauauuaugcc

SEQ ID NO: 1354144 - RNA, 19 nt, Artificial Sequence
  Description of Artificial Sequence: Synthetic oligonucleotide
  Sense strand starting at position 910 of SEQ ID NO: 1242523
gcacauuaagagcaugaau

SEQ ID NO: 1354145 - RNA, 19 nt, Artificial Sequence
  Description of Artificial Sequence: Synthetic oligonucleotide
  Antisense strand to SEQ ID NO: 1354144
auucaugcucuuaaugugc

SEQ ID NO: 1354146 - RNA, 19 nt, Artificial Sequence
  Description of Artificial Sequence: Synthetic oligonucleotide
  Sense strand starting at position 1134 of SEQ ID NO: 1242523
auaucaucugccugauagg

SEQ ID NO: 1354147 - RNA, 19 nt, Artificial Sequence
  Description of Artificial Sequence: Synthetic oligonucleotide
  Antisense strand to SEQ ID NO: 1354146
ccuaucaggcagaugauau

SEQ ID NO: 1354148 - RNA, 19 nt, Artificial Sequence
  Description of Artificial Sequence: Synthetic oligonucleotide
  Sense strand starting at position 1135 of SEQ ID NO: 1242523
uaucaucugccugauagga

SEQ ID NO: 1354149 - RNA, 19 nt, Artificial Sequence
  Description of Artificial Sequence: Synthetic oligonucleotide
  Antisense strand to SEQ ID NO: 1354148
uccuaucaggcagaugaua

SEQ ID NO: 1354150 - RNA, 19 nt, Artificial Sequence
  Description of Artificial Sequence: Synthetic oligonucleotide
  Sense strand starting at position 1161 of SEQ ID NO: 1242523
gaggauuaugcagguauca

SEQ ID NO: 1354151 - RNA, 19 nt, Artificial Sequence
  Description of Artificial Sequence: Synthetic oligonucleotide
  Antisense strand to SEQ ID NO: 1354150
ugauaccugcauaauccuc

SEQ ID NO: 1354152 - RNA, 19 nt, Artificial Sequence
  Description of Artificial Sequence: Synthetic oligonucleotide
  Sense strand starting at position 1163 of SEQ ID NO: 1242523
ggauuaugcagguaucaug

SEQ ID NO: 1354153 - RNA, 19 nt, Artificial Sequence
  Description of Artificial Sequence: Synthetic oligonucleotide
  Antisense strand to SEQ ID NO: 1354152
caugauaccugcauaaucc

SEQ ID NO: 1354154 - RNA, 19 nt, Artificial Sequence
  Description of Artificial Sequence: Synthetic oligonucleotide
  Sense strand starting at position 1229 of SEQ ID NO: 1242523
uuaagugauugaucuagga

SEQ ID NO: 1354155 - RNA, 19 nt, Artificial Sequence
  Description of Artificial Sequence: Synthetic oligonucleotide
  Antisense strand to SEQ ID NO: 1354154
uccuagaucaaucacuuaa

SEQ ID NO: 1354156 - RNA, 19 nt, Artificial Sequence
  Description of Artificial Sequence: Synthetic oligonucleotide
  Sense strand starting at position 1233 of SEQ ID NO: 1242523
gugauugaucuaggauguc

SEQ ID NO: 1354157 - RNA, 19 nt, Artificial Sequence
  Description of Artificial Sequence: Synthetic oligonucleotide
  Antisense strand to SEQ ID NO: 1354156
gacauccuagaucaaucac

SEQ ID NO: 1354158 - RNA, 19 nt, Artificial Sequence
  Description of Artificial Sequence: Synthetic oligonucleotide
  Sense strand starting at position 1255 of SEQ ID NO: 1242523
cccaguaagcuacaggauu

SEQ ID NO: 1354159 - RNA, 19 nt, Artificial Sequence
  Description of Artificial Sequence: Synthetic oligonucleotide
  Antisense strand to SEQ ID NO: 1354158
aauccuguagcuuacuggg

SEQ ID NO: 1354160 - RNA, 19 nt, Artificial Sequence
  Description of Artificial Sequence: Synthetic oligonucleotide
  Sense strand starting at position 1283 of SEQ ID NO: 1242523
augugaauugcccagaccu

SEQ ID NO: 1354161 - RNA, 19 nt, Artificial Sequence
  Description of Artificial Sequence: Synthetic oligonucleotide
  Antisense strand to SEQ ID NO: 1354160
aggucugggcaauucacau

SEQ ID NO: 1354162 - RNA, 19 nt, Artificial Sequence
  Description of Artificial Sequence: Synthetic oligonucleotide
  Sense strand starting at position 1463 of SEQ ID NO: 1242523
gugaccuuaccucauacau

SEQ ID NO: 1354163 - RNA, 19 nt, Artificial Sequence
  Description of Artificial Sequence: Synthetic oligonucleotide
  Antisense strand to SEQ ID NO: 1354162
auguaugagguaaggucac

SEQ ID NO: 1354164 - RNA, 19 nt, Artificial Sequence
  Description of Artificial Sequence: Synthetic oligonucleotide
  Sense strand starting at position 1645 of SEQ ID NO: 1242523
ggaccuuccaugggucaca

SEQ ID NO: 1354165 - RNA, 19 nt, Artificial Sequence
  Description of Artificial Sequence: Synthetic oligonucleotide
  Antisense strand to SEQ ID NO: 1354164
ugugacccauggaaggucc

SEQ ID NO: 1354166 - RNA, 19 nt, Artificial Sequence
  Description of Artificial Sequence: Synthetic oligonucleotide
  Sense strand starting at position 1730 of SEQ ID NO: 1242523
ugggcuaaucuagaaagcu

SEQ ID NO: 1354167 - RNA, 19 nt, Artificial Sequence
  Description of Artificial Sequence: Synthetic oligonucleotide
  Antisense strand to SEQ ID NO: 1354166
agcuuucuagauuagccca

SEQ ID NO: 1354168 - RNA, 19 nt, Artificial Sequence
  Description of Artificial Sequence: Synthetic oligonucleotide
  Sense strand starting at position 1738 of SEQ ID NO: 1242523
ucuagaaagcuguaguaga

SEQ ID NO: 1354169 - RNA, 19 nt, Artificial Sequence
  Description of Artificial Sequence: Synthetic oligonucleotide
  Antisense strand to SEQ ID NO: 1354168
ucuacuacagcuuucuaga

SEQ ID NO: 1354170 - RNA, 19 nt, Artificial Sequence
  Description of Artificial Sequence: Synthetic oligonucleotide
  Sense strand starting at position 1769 of SEQ ID NO: 1242523
ggacgugguagauaucgaa

SEQ ID NO: 1354171 - RNA, 19 nt, Artificial Sequence
  Description of Artificial Sequence: Synthetic oligonucleotide
  Antisense strand to SEQ ID NO: 1354170
uucgauaucuaccacgucc

SEQ ID NO: 1354172 - RNA, 19 nt, Artificial Sequence
  Description of Artificial Sequence: Synthetic oligonucleotide
  Sense strand starting at position 1773 of SEQ ID NO: 1242523
gugguagauaucgaaguca

SEQ ID NO: 1354173 - RNA, 19 nt, Artificial Sequence
  Description of Artificial Sequence: Synthetic oligonucleotide
  Antisense strand to SEQ ID NO: 1354172
ugacuucgauaucuaccac

SEQ ID NO: 1354174 - RNA, 19 nt, Artificial Sequence
  Description of Artificial Sequence: Synthetic oligonucleotide
  Sense strand starting at position 1787 of SEQ ID NO: 1242523
agucaucugcagggagaga

SEQ ID NO: 1354175 - RNA, 19 nt, Artificial Sequence
  Description of Artificial Sequence: Synthetic oligonucleotide
  Antisense strand to SEQ ID NO: 1354174
ucucucccugcagaugacu

SEQ ID NO: 1354176 - RNA, 19 nt, Artificial Sequence
  Description of Artificial Sequence: Synthetic oligonucleotide
  Sense strand starting at position 2042 of SEQ ID NO: 1242523
ucauguugccaugagacac

SEQ ID NO: 1354177 - RNA, 19 nt, Artificial Sequence
  Description of Artificial Sequence: Synthetic oligonucleotide
  Antisense strand to SEQ ID NO: 1354176
gugucucauggcaacauga

SEQ ID NO: 1354178 - RNA, 19 nt, Artificial Sequence
  Description of Artificial Sequence: Synthetic oligonucleotide
  Sense strand starting at position 3114 of SEQ ID NO: 1242523
ccagauauaugacugguaa

SEQ ID NO: 1354179 - RNA, 19 nt, Artificial Sequence
  Description of Artificial Sequence: Synthetic oligonucleotide
  Antisense strand to SEQ ID NO: 1354178
uuaccagucauauaucugg

SEQ ID NO: 1354180 - RNA, 19 nt, Artificial Sequence
  Description of Artificial Sequence: Synthetic oligonucleotide
  Sense strand starting at position 3116 of SEQ ID NO: 1242523
agauauaugacugguaagu

SEQ ID NO: 1354181 - RNA, 19 nt, Artificial Sequence
  Description of Artificial Sequence: Synthetic oligonucleotide
  Antisense strand to SEQ ID NO: 1354180
acuuaccagucauauaucu

SEQ ID NO: 1354182 - RNA, 19 nt, Artificial Sequence
  Description of Artificial Sequence: Synthetic oligonucleotide
  Sense strand starting at position 3141 of SEQ ID NO: 1242523
aagcaagguguugaggaau

SEQ ID NO: 1354183 - RNA, 19 nt, Artificial Sequence
  Description of Artificial Sequence: Synthetic oligonucleotide
  Antisense strand to SEQ ID NO: 1354182
auuccucaacaccuugcuu

SEQ ID NO: 1354184 - RNA, 19 nt, Artificial Sequence
  Description of Artificial Sequence: Synthetic oligonucleotide
  Sense strand starting at position 3327 of SEQ ID NO: 1242523
agagguaucucuccaaguc

SEQ ID NO: 1354185 - RNA, 19 nt, Artificial Sequence
  Description of Artificial Sequence: Synthetic oligonucleotide
  Antisense strand to SEQ ID NO: 1354184
gacuuggagagauaccucu

SEQ ID NO: 1354186 - RNA, 19 nt, Artificial Sequence
  Description of Artificial Sequence: Synthetic oligonucleotide
  Sense strand starting at position 3328 of SEQ ID NO: 1242523
gagguaucucuccaaguca

SEQ ID NO: 1354187 - RNA, 19 nt, Artificial Sequence
  Description of Artificial Sequence: Synthetic oligonucleotide
  Antisense strand to SEQ ID NO: 1354186
ugacuuggagagauaccuc

SEQ ID NO: 1354188 - RNA, 19 nt, Artificial Sequence
  Description of Artificial Sequence: Synthetic oligonucleotide
  Sense strand starting at position 3355 of SEQ ID NO: 1242523
gugguucugcaggacuuaa

SEQ ID NO: 1354189 - RNA, 19 nt, Artificial Sequence
  Description of Artificial Sequence: Synthetic oligonucleotide
  Antisense strand to SEQ ID NO: 1354188
uuaaguccugcagaaccac

SEQ ID NO: 1354190 - RNA, 19 nt, Artificial Sequence
  Description of Artificial Sequence: Synthetic oligonucleotide
  Sense strand starting at position 3385 of SEQ ID NO: 1242523
uugcucuauuugucaguga

SEQ ID NO: 1354191 - RNA, 19 nt, Artificial Sequence
  Description of Artificial Sequence: Synthetic oligonucleotide
  Antisense strand to SEQ ID NO: 1354190
ucacugacaaauagagcaa

SEQ ID NO: 1354192 - RNA, 19 nt, Artificial Sequence
  Description of Artificial Sequence: Synthetic oligonucleotide
  Sense strand starting at position 3389 of SEQ ID NO: 1242523
ucuauuugucagugaggcu

SEQ ID NO: 1354193 - RNA, 19 nt, Artificial Sequence
  Description of Artificial Sequence: Synthetic oligonucleotide
  Antisense strand to SEQ ID NO: 1354192
agccucacugacaaauaga

SEQ ID NO: 1354194 - RNA, 19 nt, Artificial Sequence
  Description of Artificial Sequence: Synthetic oligonucleotide
  Sense strand starting at position 3492 of SEQ ID NO: 1242523
uuauuugucauauguuggu

SEQ ID NO: 1354195 - RNA, 19 nt, Artificial Sequence
  Description of Artificial Sequence: Synthetic oligonucleotide
  Antisense strand to SEQ ID NO: 1354194
accaacauaugacaaauaa

SEQ ID NO: 1354196 - RNA, 19 nt, Artificial Sequence
  Description of Artificial Sequence: Synthetic oligonucleotide
  Sense strand starting at position 3506 of SEQ ID NO: 1242523
uugguugucuauccaggaa

SEQ ID NO: 1354197 - RNA, 19 nt, Artificial Sequence
  Description of Artificial Sequence: Synthetic oligonucleotide
  Antisense strand to SEQ ID NO: 1354196
uuccuggauagacaaccaa

SEQ ID NO: 1354198 - RNA, 19 nt, Artificial Sequence
  Description of Artificial Sequence: Synthetic oligonucleotide
  Sense strand starting at position 3510 of SEQ ID NO: 1242523
uugucuauccaggaaccuu

SEQ ID NO: 1354199 - RNA, 19 nt, Artificial Sequence
  Description of Artificial Sequence: Synthetic oligonucleotide
  Antisense strand to SEQ ID NO: 1354198
aagguuccuggauagacaa

SEQ ID NO: 1354200 - RNA, 19 nt, Artificial Sequence
  Description of Artificial Sequence: Synthetic oligonucleotide
  Sense strand starting at position 3715 of SEQ ID NO: 1242523
uuacauagguucuuuggau

SEQ ID NO: 1354201 - RNA, 19 nt, Artificial Sequence
  Description of Artificial Sequence: Synthetic oligonucleotide
  Antisense strand to SEQ ID NO: 1354200
auccaaagaaccuauguaa

SEQ ID NO: 1354202 - RNA, 19 nt, Artificial Sequence
  Description of Artificial Sequence: Synthetic oligonucleotide
  Sense strand starting at position 3716 of SEQ ID NO: 1242523
uacauagguucuuuggauu

SEQ ID NO: 1354203 - RNA, 19 nt, Artificial Sequence
  Description of Artificial Sequence: Synthetic oligonucleotide
  Antisense strand to SEQ ID NO: 1354202
aauccaaagaaccuaugua

SEQ ID NO: 1354204 - RNA, 19 nt, Artificial Sequence
  Description of Artificial Sequence: Synthetic oligonucleotide
  Sense strand starting at position 3749 of SEQ ID NO: 1242523
ucaaguugucugcaacaaa

SEQ ID NO: 1354205 - RNA, 19 nt, Artificial Sequence
  Description of Artificial Sequence: Synthetic oligonucleotide
  Antisense strand to SEQ ID NO: 1354204
uuuguugcagacaacuuga

SEQ ID NO: 1354206 - RNA, 19 nt, Artificial Sequence
  Description of Artificial Sequence: Synthetic oligonucleotide
  Sense strand starting at position 3878 of SEQ ID NO: 1242523
ggagauagcuaauugcuua

SEQ ID NO: 1354207 - RNA, 19 nt, Artificial Sequence
  Description of Artificial Sequence: Synthetic oligonucleotide
  Antisense strand to SEQ ID NO: 1354206
uaagcaauuagcuaucucc

SEQ ID NO: 1354208 - RNA, 19 nt, Artificial Sequence
  Description of Artificial Sequence: Synthetic oligonucleotide
  Sense strand starting at position 3948 of SEQ ID NO: 1242523
cauaguauugaagaguugu

SEQ ID NO: 1354209 - RNA, 19 nt, Artificial Sequence
  Description of Artificial Sequence: Synthetic oligonucleotide
  Antisense strand to SEQ ID NO: 1354208
acaacucuucaauacuaug

SEQ ID NO: 1354210 - RNA, 19 nt, Artificial Sequence
  Description of Artificial Sequence: Synthetic oligonucleotide
  Sense strand starting at position 3965 of SEQ ID NO: 1242523
guaaucaugaauggauagu

SEQ ID NO: 1354211 - RNA, 19 nt, Artificial Sequence
  Description of Artificial Sequence: Synthetic oligonucleotide
  Antisense strand to SEQ ID NO: 1354210
acuauccauucaugauuac

SEQ ID NO: 1354212 - RNA, 19 nt, Artificial Sequence
  Description of Artificial Sequence: Synthetic oligonucleotide
  Sense strand starting at position 3980 of SEQ ID NO: 1242523
uagugaguaugaccagauu

SEQ ID NO: 1354213 - RNA, 19 nt, Artificial Sequence
  Description of Artificial Sequence: Synthetic oligonucleotide
  Antisense strand to SEQ ID NO: 1354212
aaucuggucauacucacua

SEQ ID NO: 1354214 - RNA, 19 nt, Artificial Sequence
  Description of Artificial Sequence: Synthetic oligonucleotide
  Sense strand starting at position 100 of SEQ ID NO: 1242524
ccauaaauaugagugcauu

SEQ ID NO: 1354215 - RNA, 19 nt, Artificial Sequence
  Description of Artificial Sequence: Synthetic oligonucleotide
  Antisense strand to SEQ ID NO: 1354214
aaugcacucauauuuaugg

SEQ ID NO: 1354216 - RNA, 19 nt, Artificial Sequence
  Description of Artificial Sequence: Synthetic oligonucleotide
  Sense strand starting at position 667 of SEQ ID NO: 1242524
aacagaugucuaugugcaa

SEQ ID NO: 1354217 - RNA, 19 nt, Artificial Sequence
  Description of Artificial Sequence: Synthetic oligonucleotide
  Antisense strand to SEQ ID NO: 1354216
uugcacauagacaucuguu

SEQ ID NO: 1354218 - RNA, 19 nt, Artificial Sequence
  Description of Artificial Sequence: Synthetic oligonucleotide
  Sense strand starting at position 668 of SEQ ID NO: 1242524
acagaugucuaugugcaaa

SEQ ID NO: 1354219 - RNA, 19 nt, Artificial Sequence
  Description of Artificial Sequence: Synthetic oligonucleotide
  Antisense strand to SEQ ID NO: 1354218
uuugcacauagacaucugu

SEQ ID NO: 1354220 - RNA, 19 nt, Artificial Sequence
  Description of Artificial Sequence: Synthetic oligonucleotide
  Sense strand starting at position 690 of SEQ ID NO: 1242524
ucauuaaugagagguguau

SEQ ID NO: 1354221 - RNA, 19 nt, Artificial Sequence
  Description of Artificial Sequence: Synthetic oligonucleotide
  Antisense strand to SEQ ID NO: 1354220
auacaccucucauuaauga

SEQ ID NO: 1354222 - RNA, 19 nt, Artificial Sequence
  Description of Artificial Sequence: Synthetic oligonucleotide
  Sense strand starting at position 838 of SEQ ID NO: 1242524
uccagauaugcuuaauagu

SEQ ID NO: 1354223 - RNA, 19 nt, Artificial Sequence
  Description of Artificial Sequence: Synthetic oligonucleotide
  Antisense strand to SEQ ID NO: 1354222
acuauuaagcauaucugga

SEQ ID NO: 1354224 - RNA, 19 nt, Artificial Sequence
  Description of Artificial Sequence: Synthetic oligonucleotide
  Sense strand starting at position 846 of SEQ ID NO: 1242524
ugcuuaauaguccagggau

SEQ ID NO: 1354225 - RNA, 19 nt, Artificial Sequence
  Description of Artificial Sequence: Synthetic oligonucleotide
  Antisense strand to SEQ ID NO: 1354224
aucccuggacuauuaagca

SEQ ID NO: 1354226 - RNA, 19 nt, Artificial Sequence
  Description of Artificial Sequence: Synthetic oligonucleotide
  Sense strand starting at position 848 of SEQ ID NO: 1242524
cuuaauaguccagggauau

SEQ ID NO: 1354227 - RNA, 19 nt, Artificial Sequence
  Description of Artificial Sequence: Synthetic oligonucleotide
  Antisense strand to SEQ ID NO: 1354226
auaucccuggacuauuaag

SEQ ID NO: 1354228 - RNA, 19 nt, Artificial Sequence
  Description of Artificial Sequence: Synthetic oligonucleotide
  Sense strand starting at position 849 of SEQ ID NO: 1242524
uuaauaguccagggauaug

SEQ ID NO: 1354229 - RNA, 19 nt, Artificial Sequence
  Description of Artificial Sequence: Synthetic oligonucleotide
  Antisense strand to SEQ ID NO: 1354228
cauaucccuggacuauuaa

SEQ ID NO: 1354230 - RNA, 19 nt, Artificial Sequence
  Description of Artificial Sequence: Synthetic oligonucleotide
  Sense strand starting at position 860 of SEQ ID NO: 1242524
gggauaugcuguaaggaga

SEQ ID NO: 1354231 - RNA, 19 nt, Artificial Sequence
  Description of Artificial Sequence: Synthetic oligonucleotide
  Antisense strand to SEQ ID NO: 1354230
ucuccuuacagcauauccc

SEQ ID NO: 1354232 - RNA, 19 nt, Artificial Sequence
  Description of Artificial Sequence: Synthetic oligonucleotide
  Sense strand starting at position 921 of SEQ ID NO: 1242524
uaaacagaaucggcugaaa

SEQ ID NO: 1354233 - RNA, 19 nt, Artificial Sequence
  Description of Artificial Sequence: Synthetic oligonucleotide
  Antisense strand to SEQ ID NO: 1354232
uuucagccgauucuguuua

SEQ ID NO: 1354234 - RNA, 19 nt, Artificial Sequence
  Description of Artificial Sequence: Synthetic oligonucleotide
  Sense strand starting at position 923 of SEQ ID NO: 1242524
aacagaaucggcugaaaug

SEQ ID NO: 1354235 - RNA, 19 nt, Artificial Sequence
  Description of Artificial Sequence: Synthetic oligonucleotide
  Antisense strand to SEQ ID NO: 1354234
cauuucagccgauucuguu

SEQ ID NO: 1354236 - RNA, 19 nt, Artificial Sequence
  Description of Artificial Sequence: Synthetic oligonucleotide
  Sense strand starting at position 1187 of SEQ ID NO: 1242524
guuagugauuaagugacuu

SEQ ID NO: 1354237 - RNA, 19 nt, Artificial Sequence
  Description of Artificial Sequence: Synthetic oligonucleotide
  Antisense strand to SEQ ID NO: 1354236
aagucacuuaaucacuaac

SEQ ID NO: 1354238 - RNA, 19 nt, Artificial Sequence
  Description of Artificial Sequence: Synthetic oligonucleotide
  Sense strand starting at position 1312 of SEQ ID NO: 1242524
uggaguggcggugaaauua

SEQ ID NO: 1354239 - RNA, 19 nt, Artificial Sequence
  Description of Artificial Sequence: Synthetic oligonucleotide
  Antisense strand to SEQ ID NO: 1354238
uaauuucaccgccacucca

SEQ ID NO: 1354240 - RNA, 19 nt, Artificial Sequence
  Description of Artificial Sequence: Synthetic oligonucleotide
  Sense strand starting at position 1423 of SEQ ID NO: 1242524
cuuauagggucuuuaaacu

SEQ ID NO: 1354241 - RNA, 19 nt, Artificial Sequence
  Description of Artificial Sequence: Synthetic oligonucleotide
  Antisense strand to SEQ ID NO: 1354240
aguuuaaagacccuauaag

SEQ ID NO: 1354242 - RNA, 19 nt, Artificial Sequence
  Description of Artificial Sequence: Synthetic oligonucleotide
  Sense strand starting at position 1505 of SEQ ID NO: 1242524
uacaguaaggccugggauu

SEQ ID NO: 1354243 - RNA, 19 nt, Artificial Sequence
  Description of Artificial Sequence: Synthetic oligonucleotide
  Antisense strand to SEQ ID NO: 1354242
aaucccaggccuuacugua

SEQ ID NO: 1354244 - RNA, 19 nt, Artificial Sequence
  Description of Artificial Sequence: Synthetic oligonucleotide
  Sense strand starting at position 1516 of SEQ ID NO: 1242524
cugggauuguaggcagauu

SEQ ID NO: 1354245 - RNA, 19 nt, Artificial Sequence
  Description of Artificial Sequence: Synthetic oligonucleotide
  Antisense strand to SEQ ID NO: 1354244
aaucugccuacaaucccag

SEQ ID NO: 1354246 - RNA, 19 nt, Artificial Sequence
  Description of Artificial Sequence: Synthetic oligonucleotide
  Sense strand starting at position 1569 of SEQ ID NO: 1242524
gaggucaaagucggguaua

SEQ ID NO: 1354247 - RNA, 19 nt, Artificial Sequence
  Description of Artificial Sequence: Synthetic oligonucleotide
  Antisense strand to SEQ ID NO: 1354246
uauacccgacuuugaccuc

SEQ ID NO: 1354248 - RNA, 19 nt, Artificial Sequence
  Description of Artificial Sequence: Synthetic oligonucleotide
  Sense strand starting at position 1572 of SEQ ID NO: 1242524
gucaaagucggguauaagu

SEQ ID NO: 1354249 - RNA, 19 nt, Artificial Sequence
  Description of Artificial Sequence: Synthetic oligonucleotide
  Antisense strand to SEQ ID NO: 1354248
acuuauacccgacuuugac

SEQ ID NO: 1354250 - RNA, 19 nt, Artificial Sequence
  Description of Artificial Sequence: Synthetic oligonucleotide
  Sense strand starting at position 1581 of SEQ ID NO: 1242524
ggguauaaguguccaagag

SEQ ID NO: 1354251 - RNA, 19 nt, Artificial Sequence
  Description of Artificial Sequence: Synthetic oligonucleotide
  Antisense strand to SEQ ID NO: 1354250
cucuuggacacuuauaccc

SEQ ID NO: 1354252 - RNA, 19 nt, Artificial Sequence
  Description of Artificial Sequence: Synthetic oligonucleotide
  Sense strand starting at position 1582 of SEQ ID NO: 1242524
gguauaaguguccaagaga

SEQ ID NO: 1354253 - RNA, 19 nt, Artificial Sequence
  Description of Artificial Sequence: Synthetic oligonucleotide
  Antisense strand to SEQ ID NO: 1354252
ucucuuggacacuuauacc

SEQ ID NO: 1354254 - RNA, 19 nt, Artificial Sequence
  Description of Artificial Sequence: Synthetic oligonucleotide
  Sense strand starting at position 1655 of SEQ ID NO: 1242524
uuggcaauccuagguagau

SEQ ID NO: 1354255 - RNA, 19 nt, Artificial Sequence
  Description of Artificial Sequence: Synthetic oligonucleotide
  Antisense strand to SEQ ID NO: 1354254
aucuaccuaggauugccaa

SEQ ID NO: 1354256 - RNA, 19 nt, Artificial Sequence
  Description of Artificial Sequence: Synthetic oligonucleotide
  Sense strand starting at position 1656 of SEQ ID NO: 1242524
uggcaauccuagguagaug

SEQ ID NO: 1354257 - RNA, 19 nt, Artificial Sequence
  Description of Artificial Sequence: Synthetic oligonucleotide
  Antisense strand to SEQ ID NO: 1354256
caucuaccuaggauugcca

SEQ ID NO: 1354258 - RNA, 19 nt, Artificial Sequence
  Description of Artificial Sequence: Synthetic oligonucleotide
  Sense strand starting at position 1715 of SEQ ID NO: 1242524
ugauucuaccuuuaggagu

SEQ ID NO: 1354259 - RNA, 19 nt, Artificial Sequence
  Description of Artificial Sequence: Synthetic oligonucleotide
  Antisense strand to SEQ ID NO: 1354258
acuccuaaagguagaauca

SEQ ID NO: 1354260 - RNA, 19 nt, Artificial Sequence
  Description of Artificial Sequence: Synthetic oligonucleotide
  Sense strand starting at position 2258 of SEQ ID NO: 1242524
ggccuuguuguggaagaag

SEQ ID NO: 1354261 - RNA, 19 nt, Artificial Sequence
  Description of Artificial Sequence: Synthetic oligonucleotide
  Antisense strand to SEQ ID NO: 1354260
cuucuuccacaacaaggcc

SEQ ID NO: 1354262 - RNA, 19 nt, Artificial Sequence
  Description of Artificial Sequence: Synthetic oligonucleotide
  Sense strand starting at position 2312 of SEQ ID NO: 1242524
uccuccucagauuggaaau

SEQ ID NO: 1354263 - RNA, 19 nt, Artificial Sequence
  Description of Artificial Sequence: Synthetic oligonucleotide
  Antisense strand to SEQ ID NO: 1354262
auuuccaaucugaggagga

SEQ ID NO: 1354264 - RNA, 19 nt, Artificial Sequence
  Description of Artificial Sequence: Synthetic oligonucleotide
  Sense strand starting at position 2365 of SEQ ID NO: 1242524
ggcuaaacauucucugaag

SEQ ID NO: 1354265 - RNA, 19 nt, Artificial Sequence
  Description of Artificial Sequence: Synthetic oligonucleotide
  Antisense strand to SEQ ID NO: 1354264
cuucagagaauguuuagcc

SEQ ID NO: 1354266 - RNA, 19 nt, Artificial Sequence
  Description of Artificial Sequence: Synthetic oligonucleotide
  Sense strand starting at position 2384 of SEQ ID NO: 1242524
ccaagccuuuggucaaaga

SEQ ID NO: 1354267 - RNA, 19 nt, Artificial Sequence
  Description of Artificial Sequence: Synthetic oligonucleotide
  Antisense strand to SEQ ID NO: 1354266
ucuuugaccaaaggcuugg

SEQ ID NO: 1354268 - RNA, 19 nt, Artificial Sequence
  Description of Artificial Sequence: Synthetic oligonucleotide
  Sense strand starting at position 2768 of SEQ ID NO: 1242524
guguaauagaaacgaaaug

SEQ ID NO: 1354269 - RNA, 19 nt, Artificial Sequence
  Description of Artificial Sequence: Synthetic oligonucleotide
  Antisense strand to SEQ ID NO: 1354268
cauuucguuucuauuacac

SEQ ID NO: 1354270 - RNA, 19 nt, Artificial Sequence
  Description of Artificial Sequence: Synthetic oligonucleotide
  Sense strand starting at position 2782 of SEQ ID NO: 1242524
aaaugagacgucugaacuu

SEQ ID NO: 1354271 - RNA, 19 nt, Artificial Sequence
  Description of Artificial Sequence: Synthetic oligonucleotide
  Antisense strand to SEQ ID NO: 1354270
aaguucagacgucucauuu

SEQ ID NO: 1354272 - RNA, 19 nt, Artificial Sequence
  Description of Artificial Sequence: Synthetic oligonucleotide
  Sense strand starting at position 2803 of SEQ ID NO: 1242524
ucgcgagcugaucuuugua

SEQ ID NO: 1354273 - RNA, 19 nt, Artificial Sequence
  Description of Artificial Sequence: Synthetic oligonucleotide
  Antisense strand to SEQ ID NO: 1354272
uacaaagaucagcucgcga

SEQ ID NO: 1354274 - RNA, 19 nt, Artificial Sequence
  Description of Artificial Sequence: Synthetic oligonucleotide
  Sense strand starting at position 2811 of SEQ ID NO: 1242524
ugaucuuuguacucucuua

SEQ ID NO: 1354275 - RNA, 19 nt, Artificial Sequence
  Description of Artificial Sequence: Synthetic oligonucleotide
  Antisense strand to SEQ ID NO: 1354274
uaagagaguacaaagauca

SEQ ID NO: 1354276 - RNA, 19 nt, Artificial Sequence
  Description of Artificial Sequence: Synthetic oligonucleotide
  Sense strand starting at position 2824 of SEQ ID NO: 1242524
cucuuagagaaaggugauu

SEQ ID NO: 1354277 - RNA, 19 nt, Artificial Sequence
  Description of Artificial Sequence: Synthetic oligonucleotide
  Antisense strand to SEQ ID NO: 1354276
aaucaccuuucucuaagag

SEQ ID NO: 1354278 - RNA, 19 nt, Artificial Sequence
  Description of Artificial Sequence: Synthetic oligonucleotide
  Sense strand starting at position 2899 of SEQ ID NO: 1242524
gucacuaaguccucaggaa

SEQ ID NO: 1354279 - RNA, 19 nt, Artificial Sequence
  Description of Artificial Sequence: Synthetic oligonucleotide
  Antisense strand to SEQ ID NO: 1354278
uuccugaggacuuagugac

SEQ ID NO: 1354280 - RNA, 19 nt, Artificial Sequence
  Description of Artificial Sequence: Synthetic oligonucleotide
  Sense strand starting at position 2926 of SEQ ID NO: 1242524
gugucucagggaugggaaa

SEQ ID NO: 1354281 - RNA, 19 nt, Artificial Sequence
  Description of Artificial Sequence: Synthetic oligonucleotide
  Antisense strand to SEQ ID NO: 1354280
uuucccaucccugagacac

SEQ ID NO: 1354282 - RNA, 19 nt, Artificial Sequence
  Description of Artificial Sequence: Synthetic oligonucleotide
  Sense strand starting at position 2939 of SEQ ID NO: 1242524
gggaaaucuggcuagcgag

SEQ ID NO: 1354283 - RNA, 19 nt, Artificial Sequence
  Description of Artificial Sequence: Synthetic oligonucleotide
  Antisense strand to SEQ ID NO: 1354282
cucgcuagccagauuuccc

SEQ ID NO: 1354284 - RNA, 19 nt, Artificial Sequence
  Description of Artificial Sequence: Synthetic oligonucleotide
  Sense strand starting at position 2961 of SEQ ID NO: 1242524
uaguaaaugcuuuaaguga

SEQ ID NO: 1354285 - RNA, 19 nt, Artificial Sequence
  Description of Artificial Sequence: Synthetic oligonucleotide
  Antisense strand to SEQ ID NO: 1354284
ucacuuaaagcauuuacua

SEQ ID NO: 1354286 - RNA, 19 nt, Artificial Sequence
  Description of Artificial Sequence: Synthetic oligonucleotide
  Sense strand starting at position 3140 of SEQ ID NO: 1242524
caaugaauuugugaugaag

SEQ ID NO: 1354287 - RNA, 19 nt, Artificial Sequence
  Description of Artificial Sequence: Synthetic oligonucleotide
  Antisense strand to SEQ ID NO: 1354286
cuucaucacaaauucauug

SEQ ID NO: 1354288 - RNA, 19 nt, Artificial Sequence
  Description of Artificial Sequence: Synthetic oligonucleotide
  Sense strand starting at position 3638 of SEQ ID NO: 1242524
cccaaauugcugugaacua

SEQ ID NO: 1354289 - RNA, 19 nt, Artificial Sequence
  Description of Artificial Sequence: Synthetic oligonucleotide
  Antisense strand to SEQ ID NO: 1354288
uaguucacagcaauuuggg

SEQ ID NO: 1354290 - RNA, 19 nt, Artificial Sequence
  Description of Artificial Sequence: Synthetic oligonucleotide
  Sense strand starting at position 3648 of SEQ ID NO: 1242524
ugugaacuacagcaguauu

SEQ ID NO: 1354291 - RNA, 19 nt, Artificial Sequence
  Description of Artificial Sequence: Synthetic oligonucleotide
  Antisense strand to SEQ ID NO: 1354290
aauacugcuguaguucaca

SEQ ID NO: 1354292 - RNA, 19 nt, Artificial Sequence
  Description of Artificial Sequence: Synthetic oligonucleotide
  Sense strand starting at position 3670 of SEQ ID NO: 1242524
uccauuugguaagagacau

SEQ ID NO: 1354293 - RNA, 19 nt, Artificial Sequence
  Description of Artificial Sequence: Synthetic oligonucleotide
  Antisense strand to SEQ ID NO: 1354292
augucucuuaccaaaugga

SEQ ID NO: 1354294 - RNA, 19 nt, Artificial Sequence
  Description of Artificial Sequence: Synthetic oligonucleotide
  Sense strand starting at position 63 of SEQ ID NO: 1242525
ccagaaaucuguuagaaau

SEQ ID NO: 1354295 - RNA, 19 nt, Artificial Sequence
  Description of Artificial Sequence: Synthetic oligonucleotide
  Antisense strand to SEQ ID NO: 1354294
auuucuaacagauuucugg

SEQ ID NO: 1354296 - RNA, 19 nt, Artificial Sequence
  Description of Artificial Sequence: Synthetic oligonucleotide
  Sense strand starting at position 115 of SEQ ID NO: 1242525
ucauaaagccugggauagu

SEQ ID NO: 1354297 - RNA, 19 nt, Artificial Sequence
  Description of Artificial Sequence: Synthetic oligonucleotide
  Antisense strand to SEQ ID NO: 1354296
acuaucccaggcuuuauga

SEQ ID NO: 1354298 - RNA, 19 nt, Artificial Sequence
  Description of Artificial Sequence: Synthetic oligonucleotide
  Sense strand starting at position 177 of SEQ ID NO: 1242525
ucucuaggcugacuagaau

SEQ ID NO: 1354299 - RNA, 19 nt, Artificial Sequence
  Description of Artificial Sequence: Synthetic oligonucleotide
  Antisense strand to SEQ ID NO: 1354298
auucuagucagccuagaga

SEQ ID NO: 1354300 - RNA, 19 nt, Artificial Sequence
  Description of Artificial Sequence: Synthetic oligonucleotide
  Sense strand starting at position 186 of SEQ ID NO: 1242525
ugacuagaauccuggaaga

SEQ ID NO: 1354301 - RNA, 19 nt, Artificial Sequence
  Description of Artificial Sequence: Synthetic oligonucleotide
  Antisense strand to SEQ ID NO: 1354300
ucuuccaggauucuaguca

SEQ ID NO: 1354302 - RNA, 19 nt, Artificial Sequence
  Description of Artificial Sequence: Synthetic oligonucleotide
  Sense strand starting at position 247 of SEQ ID NO: 1242525
uuaauuagcgcagaagauu

SEQ ID NO: 1354303 - RNA, 19 nt, Artificial Sequence
  Description of Artificial Sequence: Synthetic oligonucleotide
  Antisense strand to SEQ ID NO: 1354302
aaucuucugcgcuaauuaa

SEQ ID NO: 1354304 - RNA, 19 nt, Artificial Sequence
  Description of Artificial Sequence: Synthetic oligonucleotide
  Sense strand starting at position 255 of SEQ ID NO: 1242525
cgcagaagauucuuaagua

SEQ ID NO: 1354305 - RNA, 19 nt, Artificial Sequence
  Description of Artificial Sequence: Synthetic oligonucleotide
  Antisense strand to SEQ ID NO: 1354304
uacuuaagaaucuucugcg

SEQ ID NO: 1354306 - RNA, 19 nt, Artificial Sequence
  Description of Artificial Sequence: Synthetic oligonucleotide
  Sense strand starting at position 270 of SEQ ID NO: 1242525
aguauuuguuucuacagaa

SEQ ID NO: 1354307 - RNA, 19 nt, Artificial Sequence
  Description of Artificial Sequence: Synthetic oligonucleotide
  Antisense strand to SEQ ID NO: 1354306
uucuguagaaacaaauacu

SEQ ID NO: 1354308 - RNA, 19 nt, Artificial Sequence
  Description of Artificial Sequence: Synthetic oligonucleotide
  Sense strand starting at position 1259 of SEQ ID NO: 1242525
cauggucuaggcugaggaa

SEQ ID NO: 1354309 - RNA, 19 nt, Artificial Sequence
  Description of Artificial Sequence: Synthetic oligonucleotide
  Antisense strand to SEQ ID NO: 1354308
uuccucagccuagaccaug

SEQ ID NO: 1354310 - RNA, 19 nt, Artificial Sequence
  Description of Artificial Sequence: Synthetic oligonucleotide
  Sense strand starting at position 1284 of SEQ ID NO: 1242525
uccuaaguagaucguuaaa

SEQ ID NO: 1354311 - RNA, 19 nt, Artificial Sequence
  Description of Artificial Sequence: Synthetic oligonucleotide
  Antisense strand to SEQ ID NO: 1354310
uuuaacgaucuacuuagga

SEQ ID NO: 1354312 - RNA, 19 nt, Artificial Sequence
  Description of Artificial Sequence: Synthetic oligonucleotide
  Sense strand starting at position 1309 of SEQ ID NO: 1242525
acucaagaagugcgacaau

SEQ ID NO: 1354313 - RNA, 19 nt, Artificial Sequence
  Description of Artificial Sequence: Synthetic oligonucleotide
  Antisense strand to SEQ ID NO: 1354312
auugucgcacuucuugagu

SEQ ID NO: 1354314 - RNA, 19 nt, Artificial Sequence
  Description of Artificial Sequence: Synthetic oligonucleotide
  Sense strand starting at position 1330 of SEQ ID NO: 1242525
agggaucacugagaaguga

SEQ ID NO: 1354315 - RNA, 19 nt, Artificial Sequence
  Description of Artificial Sequence: Synthetic oligonucleotide
  Antisense strand to SEQ ID NO: 1354314
ucacuucucagugaucccu

SEQ ID NO: 1354316 - RNA, 19 nt, Artificial Sequence
  Description of Artificial Sequence: Synthetic oligonucleotide
  Sense strand starting at position 1489 of SEQ ID NO: 1242525
gggagucaggaguguguau

SEQ ID NO: 1354317 - RNA, 19 nt, Artificial Sequence
  Description of Artificial Sequence: Synthetic oligonucleotide
  Antisense strand to SEQ ID NO: 1354316
auacacacuccugacuccc

SEQ ID NO: 1354318 - RNA, 19 nt, Artificial Sequence
  Description of Artificial Sequence: Synthetic oligonucleotide
  Sense strand starting at position 2118 of SEQ ID NO: 1242525
ugggaacguucugugcuau

SEQ ID NO: 1354319 - RNA, 19 nt, Artificial Sequence
  Description of Artificial Sequence: Synthetic oligonucleotide
  Antisense strand to SEQ ID NO: 1354318
auagcacagaacguuccca

SEQ ID NO: 1354320 - RNA, 19 nt, Artificial Sequence
  Description of Artificial Sequence: Synthetic oligonucleotide
  Sense strand starting at position 2119 of SEQ ID NO: 1242525
gggaacguucugugcuauc

SEQ ID NO: 1354321 - RNA, 19 nt, Artificial Sequence
  Description of Artificial Sequence: Synthetic oligonucleotide
  Antisense strand to SEQ ID NO: 1354320
gauagcacagaacguuccc

SEQ ID NO: 1354322 - RNA, 19 nt, Artificial Sequence
  Description of Artificial Sequence: Synthetic oligonucleotide
  Sense strand starting at position 2132 of SEQ ID NO: 1242525
gcuaucucuuggcuugagu

SEQ ID NO: 1354323 - RNA, 19 nt, Artificial Sequence
  Description of Artificial Sequence: Synthetic oligonucleotide
  Antisense strand to SEQ ID NO: 1354322
acucaagccaagagauagc

SEQ ID NO: 1354324 - RNA, 19 nt, Artificial Sequence
  Description of Artificial Sequence: Synthetic oligonucleotide
  Sense strand starting at position 2177 of SEQ ID NO: 1242525
cggauuucuuaccgaauuu

SEQ ID NO: 1354325 - RNA, 19 nt, Artificial Sequence
  Description of Artificial Sequence: Synthetic oligonucleotide
  Antisense strand to SEQ ID NO: 1354324
aaauucgguaagaaauccg

SEQ ID NO: 1354326 - RNA, 19 nt, Artificial Sequence
  Description of Artificial Sequence: Synthetic oligonucleotide
  Sense strand starting at position 2493 of SEQ ID NO: 1242525
ugcucuaaccuguguugaa

SEQ ID NO: 1354327 - RNA, 19 nt, Artificial Sequence
  Description of Artificial Sequence: Synthetic oligonucleotide
  Antisense strand to SEQ ID NO: 1354326
uucaacacagguuagagca

SEQ ID NO: 1354328 - RNA, 19 nt, Artificial Sequence
  Description of Artificial Sequence: Synthetic oligonucleotide
  Sense strand starting at position 2494 of SEQ ID NO: 1242525
gcucuaaccuguguugaau

SEQ ID NO: 1354329 - RNA, 19 nt, Artificial Sequence
  Description of Artificial Sequence: Synthetic oligonucleotide
  Antisense strand to SEQ ID NO: 1354328
auucaacacagguuagagc

SEQ ID NO: 1354330 - RNA, 19 nt, Artificial Sequence
  Description of Artificial Sequence: Synthetic oligonucleotide
  Sense strand starting at position 2497 of SEQ ID NO: 1242525
cuaaccuguguugaauuau

SEQ ID NO: 1354331 - RNA, 19 nt, Artificial Sequence
  Description of Artificial Sequence: Synthetic oligonucleotide
  Antisense strand to SEQ ID NO: 1354330
auaauucaacacagguuag

SEQ ID NO: 1354332 - RNA, 19 nt, Artificial Sequence
  Description of Artificial Sequence: Synthetic oligonucleotide
  Sense strand starting at position 2626 of SEQ ID NO: 1242525
ccuuuauggugaccauaac

SEQ ID NO: 1354333 - RNA, 19 nt, Artificial Sequence
  Description of Artificial Sequence: Synthetic oligonucleotide
  Antisense strand to SEQ ID NO: 1354332
guuauggucaccauaaagg

SEQ ID NO: 1354334 - RNA, 19 nt, Artificial Sequence
  Description of Artificial Sequence: Synthetic oligonucleotide
  Sense strand starting at position 2832 of SEQ ID NO: 1242525
gcgugaacgcaaucagugu

SEQ ID NO: 1354335 - RNA, 19 nt, Artificial Sequence
  Description of Artificial Sequence: Synthetic oligonucleotide
  Antisense strand to SEQ ID NO: 1354334
acacugauugcguucacgc

SEQ ID NO: 1354336 - RNA, 19 nt, Artificial Sequence
  Description of Artificial Sequence: Synthetic oligonucleotide
  Sense strand starting at position 2833 of SEQ ID NO: 1242525
cgugaacgcaaucaguguu

SEQ ID NO: 1354337 - RNA, 19 nt, Artificial Sequence
  Description of Artificial Sequence: Synthetic oligonucleotide
  Antisense strand to SEQ ID NO: 1354336
aacacugauugcguucacg

SEQ ID NO: 1354338 - RNA, 19 nt, Artificial Sequence
  Description of Artificial Sequence: Synthetic oligonucleotide
  Sense strand starting at position 2836 of SEQ ID NO: 1242525
gaacgcaaucaguguuucu

SEQ ID NO: 1354339 - RNA, 19 nt, Artificial Sequence
  Description of Artificial Sequence: Synthetic oligonucleotide
  Antisense strand to SEQ ID NO: 1354338
agaaacacugauugcguuc

SEQ ID NO: 1354340 - RNA, 19 nt, Artificial Sequence
  Description of Artificial Sequence: Synthetic oligonucleotide
  Sense strand starting at position 2857 of SEQ ID NO: 1242525
aaugcagguuugccaagaa

SEQ ID NO: 1354341 - RNA, 19 nt, Artificial Sequence
  Description of Artificial Sequence: Synthetic oligonucleotide
  Antisense strand to SEQ ID NO: 1354340
uucuuggcaaaccugcauu

SEQ ID NO: 1354342 - RNA, 19 nt, Artificial Sequence
  Description of Artificial Sequence: Synthetic oligonucleotide
  Sense strand starting at position 2861 of SEQ ID NO: 1242525
cagguuugccaagaaguuc

SEQ ID NO: 1354343 - RNA, 19 nt, Artificial Sequence
  Description of Artificial Sequence: Synthetic oligonucleotide
  Antisense strand to SEQ ID NO: 1354342
gaacuucuuggcaaaccug

SEQ ID NO: 1354344 - RNA, 19 nt, Artificial Sequence
  Description of Artificial Sequence: Synthetic oligonucleotide
  Sense strand starting at position 3049 of SEQ ID NO: 1242525
gaggacucuggauguuauc

SEQ ID NO: 1354345 - RNA, 19 nt, Artificial Sequence
  Description of Artificial Sequence: Synthetic oligonucleotide
  Antisense strand to SEQ ID NO: 1354344
gauaacauccagaguccuc

SEQ ID NO: 1354346 - RNA, 19 nt, Artificial Sequence
  Description of Artificial Sequence: Synthetic oligonucleotide
  Sense strand starting at position 3055 of SEQ ID NO: 1242525
ucuggauguuauccauaaa

SEQ ID NO: 1354347 - RNA, 19 nt, Artificial Sequence
  Description of Artificial Sequence: Synthetic oligonucleotide
  Antisense strand to SEQ ID NO: 1354346
uuuauggauaacauccaga

SEQ ID NO: 1354348 - RNA, 19 nt, Artificial Sequence
  Description of Artificial Sequence: Synthetic oligonucleotide
  Sense strand starting at position 3058 of SEQ ID NO: 1242525
ggauguuauccauaaaggc

SEQ ID NO: 1354349 - RNA, 19 nt, Artificial Sequence
  Description of Artificial Sequence: Synthetic oligonucleotide
  Antisense strand to SEQ ID NO: 1354348
gccuuuauggauaacaucc

SEQ ID NO: 1354350 - RNA, 19 nt, Artificial Sequence
  Description of Artificial Sequence: Synthetic oligonucleotide
  Sense strand starting at position 3067 of SEQ ID NO: 1242525
ccauaaaggcugugaagau

SEQ ID NO: 1354351 - RNA, 19 nt, Artificial Sequence
  Description of Artificial Sequence: Synthetic oligonucleotide
  Antisense strand to SEQ ID NO: 1354350
aucuucacagccuuuaugg

SEQ ID NO: 1354352 - RNA, 19 nt, Artificial Sequence
  Description of Artificial Sequence: Synthetic oligonucleotide
  Sense strand starting at position 3175 of SEQ ID NO: 1242525
cucuuugcuuugcuacaga

SEQ ID NO: 1354353 - RNA, 19 nt, Artificial Sequence
  Description of Artificial Sequence: Synthetic oligonucleotide
  Antisense strand to SEQ ID NO: 1354352
ucuguagcaaagcaaagag

SEQ ID NO: 1354354 - RNA, 19 nt, Artificial Sequence
  Description of Artificial Sequence: Synthetic oligonucleotide
  Sense strand starting at position 3178 of SEQ ID NO: 1242525
uuugcuuugcuacagauga

SEQ ID NO: 1354355 - RNA, 19 nt, Artificial Sequence
  Description of Artificial Sequence: Synthetic oligonucleotide
  Antisense strand to SEQ ID NO: 1354354
ucaucuguagcaaagcaaa

SEQ ID NO: 1354356 - RNA, 19 nt, Artificial Sequence
  Description of Artificial Sequence: Synthetic oligonucleotide
  Sense strand starting at position 3211 of SEQ ID NO: 1242525
uggcaucuugcaggaacau

SEQ ID NO: 1354357 - RNA, 19 nt, Artificial Sequence
  Description of Artificial Sequence: Synthetic oligonucleotide
  Antisense strand to SEQ ID NO: 1354356
auguuccugcaagaugcca

SEQ ID NO: 1354358 - RNA, 19 nt, Artificial Sequence
  Description of Artificial Sequence: Synthetic oligonucleotide
  Sense strand starting at position 3212 of SEQ ID NO: 1242525
ggcaucuugcaggaacauu

SEQ ID NO: 1354359 - RNA, 19 nt, Artificial Sequence
  Description of Artificial Sequence: Synthetic oligonucleotide
  Antisense strand to SEQ ID NO: 1354358
aauguuccugcaagaugcc

SEQ ID NO: 1354360 - RNA, 19 nt, Artificial Sequence
  Description of Artificial Sequence: Synthetic oligonucleotide
  Sense strand starting at position 3221 of SEQ ID NO: 1242525
caggaacauuuaugugcua

SEQ ID NO: 1354361 - RNA, 19 nt, Artificial Sequence
  Description of Artificial Sequence: Synthetic oligonucleotide
  Antisense strand to SEQ ID NO: 1354360
uagcacauaaauguuccug

SEQ ID NO: 1354362 - RNA, 19 nt, Artificial Sequence
  Description of Artificial Sequence: Synthetic oligonucleotide
  Sense strand starting at position 3226 of SEQ ID NO: 1242525
acauuuaugugcuaaauug

SEQ ID NO: 1354363 - RNA, 19 nt, Artificial Sequence
  Description of Artificial Sequence: Synthetic oligonucleotide
  Antisense strand to SEQ ID NO: 1354362
caauuuagcacauaaaugu

SEQ ID NO: 1354364 - RNA, 19 nt, Artificial Sequence
  Description of Artificial Sequence: Synthetic oligonucleotide
  Sense strand starting at position 3242 of SEQ ID NO: 1242525
uugaaugacuucuauggaa

SEQ ID NO: 1354365 - RNA, 19 nt, Artificial Sequence
  Description of Artificial Sequence: Synthetic oligonucleotide
  Antisense strand to SEQ ID NO: 1354364
uuccauagaagucauucaa

SEQ ID NO: 1354366 - RNA, 19 nt, Artificial Sequence
  Description of Artificial Sequence: Synthetic oligonucleotide
  Sense strand starting at position 3277 of SEQ ID NO: 1242525
gucccagauuagcuuuaaa

SEQ ID NO: 1354367 - RNA, 19 nt, Artificial Sequence
  Description of Artificial Sequence: Synthetic oligonucleotide
  Antisense strand to SEQ ID NO: 1354366
uuuaaagcuaaucugggac

SEQ ID NO: 1354368 - RNA, 19 nt, Artificial Sequence
  Description of Artificial Sequence: Synthetic oligonucleotide
  Sense strand starting at position 3355 of SEQ ID NO: 1242525
uuuguuaggcugugaagga

SEQ ID NO: 1354369 - RNA, 19 nt, Artificial Sequence
  Description of Artificial Sequence: Synthetic oligonucleotide
  Antisense strand to SEQ ID NO: 1354368
uccuucacagccuaacaaa

SEQ ID NO: 1354370 - RNA, 19 nt, Artificial Sequence
  Description of Artificial Sequence: Synthetic oligonucleotide
  Sense strand starting at position 3371 of SEQ ID NO: 1242525
ggacauuagguauaccgua

SEQ ID NO: 1354371 - RNA, 19 nt, Artificial Sequence
  Description of Artificial Sequence: Synthetic oligonucleotide
  Antisense strand to SEQ ID NO: 1354370
uacgguauaccuaaugucc

SEQ ID NO: 1354372 - RNA, 19 nt, Artificial Sequence
  Description of Artificial Sequence: Synthetic oligonucleotide
  Sense strand starting at position 3501 of SEQ ID NO: 1242525
aacuuaacaggaugguuua

SEQ ID NO: 1354373 - RNA, 19 nt, Artificial Sequence
  Description of Artificial Sequence: Synthetic oligonucleotide
  Antisense strand to SEQ ID NO: 1354372
uaaaccauccuguuaaguu

SEQ ID NO: 1354374 - RNA, 19 nt, Artificial Sequence
  Description of Artificial Sequence: Synthetic oligonucleotide
  Sense strand starting at position 66 of SEQ ID NO: 1242526
agcacuuacuuauugggua

SEQ ID NO: 1354375 - RNA, 19 nt, Artificial Sequence
  Description of Artificial Sequence: Synthetic oligonucleotide
  Antisense strand to SEQ ID NO: 1354374
uacccaauaaguaagugcu

SEQ ID NO: 1354376 - RNA, 19 nt, Artificial Sequence
  Description of Artificial Sequence: Synthetic oligonucleotide
  Sense strand starting at position 70 of SEQ ID NO: 1242526
cuuacuuauuggguauuau

SEQ ID NO: 1354377 - RNA, 19 nt, Artificial Sequence
  Description of Artificial Sequence: Synthetic oligonucleotide
  Antisense strand to SEQ ID NO: 1354376
auaauacccaauaaguaag

SEQ ID NO: 1354378 - RNA, 19 nt, Artificial Sequence
  Description of Artificial Sequence: Synthetic oligonucleotide
  Sense strand starting at position 241 of SEQ ID NO: 1242526
uguauuguugggcaaacca

SEQ ID NO: 1354379 - RNA, 19 nt, Artificial Sequence
  Description of Artificial Sequence: Synthetic oligonucleotide
  Antisense strand to SEQ ID NO: 1354378
ugguuugcccaacaauaca

SEQ ID NO: 1354380 - RNA, 19 nt, Artificial Sequence
  Description of Artificial Sequence: Synthetic oligonucleotide
  Sense strand starting at position 522 of SEQ ID NO: 1242526
agcauugcccaauauaugu

SEQ ID NO: 1354381 - RNA, 19 nt, Artificial Sequence
  Description of Artificial Sequence: Synthetic oligonucleotide
  Antisense strand to SEQ ID NO: 1354380
acauauauugggcaaugcu

SEQ ID NO: 1354382 - RNA, 19 nt, Artificial Sequence
  Description of Artificial Sequence: Synthetic oligonucleotide
  Sense strand starting at position 533 of SEQ ID NO: 1242526
auauauguuccauauacgu

SEQ ID NO: 1354383 - RNA, 19 nt, Artificial Sequence
  Description of Artificial Sequence: Synthetic oligonucleotide
  Antisense strand to SEQ ID NO: 1354382
acguauauggaacauauau

SEQ ID NO: 1354384 - RNA, 19 nt, Artificial Sequence
  Description of Artificial Sequence: Synthetic oligonucleotide
  Sense strand starting at position 850 of SEQ ID NO: 1242526
auuuguuguugcuugaauu

SEQ ID NO: 1354385 - RNA, 19 nt, Artificial Sequence
  Description of Artificial Sequence: Synthetic oligonucleotide
  Antisense strand to SEQ ID NO: 1354384
aauucaagcaacaacaaau

SEQ ID NO: 1354386 - RNA, 19 nt, Artificial Sequence
  Description of Artificial Sequence: Synthetic oligonucleotide
  Sense strand starting at position 879 of SEQ ID NO: 1242526
ccauacauuugagucguuu

SEQ ID NO: 1354387 - RNA, 19 nt, Artificial Sequence
  Description of Artificial Sequence: Synthetic oligonucleotide
  Antisense strand to SEQ ID NO: 1354386
aaacgacucaaauguaugg

SEQ ID NO: 1354388 - RNA, 19 nt, Artificial Sequence
  Description of Artificial Sequence: Synthetic oligonucleotide
  Sense strand starting at position 994 of SEQ ID NO: 1242526
gauuaagcucguugaagag

SEQ ID NO: 1354389 - RNA, 19 nt, Artificial Sequence
  Description of Artificial Sequence: Synthetic oligonucleotide
  Antisense strand to SEQ ID NO: 1354388
cucuucaacgagcuuaauc

SEQ ID NO: 1354390 - RNA, 19 nt, Artificial Sequence
  Description of Artificial Sequence: Synthetic oligonucleotide
  Sense strand starting at position 1006 of SEQ ID NO: 1242526
ugaagaguguauguuuaag

SEQ ID NO: 1354391 - RNA, 19 nt, Artificial Sequence
  Description of Artificial Sequence: Synthetic oligonucleotide
  Antisense strand to SEQ ID NO: 1354390
cuuaaacauacacucuuca

SEQ ID NO: 1354392 - RNA, 19 nt, Artificial Sequence
  Description of Artificial Sequence: Synthetic oligonucleotide
  Sense strand starting at position 1076 of SEQ ID NO: 1242526
uggcauaaauuccugagca

SEQ ID NO: 1354393 - RNA, 19 nt, Artificial Sequence
  Description of Artificial Sequence: Synthetic oligonucleotide
  Antisense strand to SEQ ID NO: 1354392
ugcucaggaauuuaugcca

SEQ ID NO: 1354394 - RNA, 19 nt, Artificial Sequence
  Description of Artificial Sequence: Synthetic oligonucleotide
  Sense strand starting at position 1078 of SEQ ID NO: 1242526
gcauaaauuccugagcaug

SEQ ID NO: 1354395 - RNA, 19 nt, Artificial Sequence
  Description of Artificial Sequence: Synthetic oligonucleotide
  Antisense strand to SEQ ID NO: 1354394
caugcucaggaauuuaugc

SEQ ID NO: 1354396 - RNA, 19 nt, Artificial Sequence
  Description of Artificial Sequence: Synthetic oligonucleotide
  Sense strand starting at position 1080 of SEQ ID NO: 1242526
auaaauuccugagcaugca

SEQ ID NO: 1354397 - RNA, 19 nt, Artificial Sequence
  Description of Artificial Sequence: Synthetic oligonucleotide
  Antisense strand to SEQ ID NO: 1354396
ugcaugcucaggaauuuau

SEQ ID NO: 1354398 - RNA, 19 nt, Artificial Sequence
  Description of Artificial Sequence: Synthetic oligonucleotide
  Sense strand starting at position 1104 of SEQ ID NO: 1242526
gcagacaccuaauuaauga

SEQ ID NO: 1354399 - RNA, 19 nt, Artificial Sequence
  Description of Artificial Sequence: Synthetic oligonucleotide
  Antisense strand to SEQ ID NO: 1354398
ucauuaauuaggugucugc

SEQ ID NO: 1354400 - RNA, 19 nt, Artificial Sequence
  Description of Artificial Sequence: Synthetic oligonucleotide
  Sense strand starting at position 1128 of SEQ ID NO: 1242526
cuggucgaggcuugaauuu

SEQ ID NO: 1354401 - RNA, 19 nt, Artificial Sequence
  Description of Artificial Sequence: Synthetic oligonucleotide
  Antisense strand to SEQ ID NO: 1354400
aaauucaagccucgaccag

SEQ ID NO: 1354402 - RNA, 19 nt, Artificial Sequence
  Description of Artificial Sequence: Synthetic oligonucleotide
  Sense strand starting at position 1232 of SEQ ID NO: 1242526
agcugaaagcauuaagagu

SEQ ID NO: 1354403 - RNA, 19 nt, Artificial Sequence
  Description of Artificial Sequence: Synthetic oligonucleotide
  Antisense strand to SEQ ID NO: 1354402
acucuuaaugcuuucagcu

SEQ ID NO: 1354404 - RNA, 19 nt, Artificial Sequence
  Description of Artificial Sequence: Synthetic oligonucleotide
  Sense strand starting at position 1357 of SEQ ID NO: 1242526
agugaagauaacugcgaga

SEQ ID NO: 1354405 - RNA, 19 nt, Artificial Sequence
  Description of Artificial Sequence: Synthetic oligonucleotide
  Antisense strand to SEQ ID NO: 1354404
ucucgcaguuaucuucacu

SEQ ID NO: 1354406 - RNA, 19 nt, Artificial Sequence
  Description of Artificial Sequence: Synthetic oligonucleotide
  Sense strand starting at position 1359 of SEQ ID NO: 1242526
ugaagauaacugcgagaug

SEQ ID NO: 1354407 - RNA, 19 nt, Artificial Sequence
  Description of Artificial Sequence: Synthetic oligonucleotide
  Antisense strand to SEQ ID NO: 1354406
caucucgcaguuaucuuca

SEQ ID NO: 1354408 - RNA, 19 nt, Artificial Sequence
  Description of Artificial Sequence: Synthetic oligonucleotide
  Sense strand starting at position 1362 of SEQ ID NO: 1242526
agauaacugcgagaugcaa

SEQ ID NO: 1354409 - RNA, 19 nt, Artificial Sequence
  Description of Artificial Sequence: Synthetic oligonucleotide
  Antisense strand to SEQ ID NO: 1354408
uugcaucucgcaguuaucu

SEQ ID NO: 1354410 - RNA, 19 nt, Artificial Sequence
  Description of Artificial Sequence: Synthetic oligonucleotide
  Sense strand starting at position 1399 of SEQ ID NO: 1242526
gugccacuucgagcguaua

SEQ ID NO: 1354411 - RNA, 19 nt, Artificial Sequence
  Description of Artificial Sequence: Synthetic oligonucleotide
  Antisense strand to SEQ ID NO: 1354410
uauacgcucgaaguggcac

SEQ ID NO: 1354412 - RNA, 19 nt, Artificial Sequence
  Description of Artificial Sequence: Synthetic oligonucleotide
  Sense strand starting at position 1409 of SEQ ID NO: 1242526
gagcguauaugaccagaca

SEQ ID NO: 1354413 - RNA, 19 nt, Artificial Sequence
  Description of Artificial Sequence: Synthetic oligonucleotide
  Antisense strand to SEQ ID NO: 1354412
ugucuggucauauacgcuc

SEQ ID NO: 1354414 - RNA, 19 nt, Artificial Sequence
  Description of Artificial Sequence: Synthetic oligonucleotide
  Sense strand starting at position 1410 of SEQ ID NO: 1242526
agcguauaugaccagacaa

SEQ ID NO: 1354415 - RNA, 19 nt, Artificial Sequence
  Description of Artificial Sequence: Synthetic oligonucleotide
  Antisense strand to SEQ ID NO: 1354414
uugucuggucauauacgcu

SEQ ID NO: 1354416 - RNA, 19 nt, Artificial Sequence
  Description of Artificial Sequence: Synthetic oligonucleotide
  Sense strand starting at position 2222 of SEQ ID NO: 1242526
gcaagaguuaccgaguaca

SEQ ID NO: 1354417 - RNA, 19 nt, Artificial Sequence
  Description of Artificial Sequence: Synthetic oligonucleotide
  Antisense strand to SEQ ID NO: 1354416
uguacucgguaacucuugc

SEQ ID NO: 1354418 - RNA, 19 nt, Artificial Sequence
  Description of Artificial Sequence: Synthetic oligonucleotide
  Sense strand starting at position 2537 of SEQ ID NO: 1242526
ucgggaucauagcucacua

SEQ ID NO: 1354419 - RNA, 19 nt, Artificial Sequence
  Description of Artificial Sequence: Synthetic oligonucleotide
  Antisense strand to SEQ ID NO: 1354418
uagugagcuaugaucccga

SEQ ID NO: 1354420 - RNA, 19 nt, Artificial Sequence
  Description of Artificial Sequence: Synthetic oligonucleotide
  Sense strand starting at position 2559 of SEQ ID NO: 1242526
acuugacauccuggacuca

SEQ ID NO: 1354421 - RNA, 19 nt, Artificial Sequence
  Description of Artificial Sequence: Synthetic oligonucleotide
  Antisense strand to SEQ ID NO: 1354420
ugaguccaggaugucaagu

SEQ ID NO: 1354422 - RNA, 19 nt, Artificial Sequence
  Description of Artificial Sequence: Synthetic oligonucleotide
  Sense strand starting at position 2825 of SEQ ID NO: 1242526
uuaaguaugaguuacuugu

SEQ ID NO: 1354423 - RNA, 19 nt, Artificial Sequence
  Description of Artificial Sequence: Synthetic oligonucleotide
  Antisense strand to SEQ ID NO: 1354422
acaaguaacucauacuuaa

SEQ ID NO: 1354424 - RNA, 19 nt, Artificial Sequence
  Description of Artificial Sequence: Synthetic oligonucleotide
  Sense strand starting at position 2827 of SEQ ID NO: 1242526
aaguaugaguuacuuguua

SEQ ID NO: 1354425 - RNA, 19 nt, Artificial Sequence
  Description of Artificial Sequence: Synthetic oligonucleotide
  Antisense strand to SEQ ID NO: 1354424
uaacaaguaacucauacuu

SEQ ID NO: 1354426 - RNA, 19 nt, Artificial Sequence
  Description of Artificial Sequence: Synthetic oligonucleotide
  Sense strand starting at position 3017 of SEQ ID NO: 1242526
guuguugagauacaguaca

SEQ ID NO: 1354427 - RNA, 19 nt, Artificial Sequence
  Description of Artificial Sequence: Synthetic oligonucleotide
  Antisense strand to SEQ ID NO: 1354426
uguacuguaucucaacaac

SEQ ID NO: 1354428 - RNA, 19 nt, Artificial Sequence
  Description of Artificial Sequence: Synthetic oligonucleotide
  Sense strand starting at position 3055 of SEQ ID NO: 1242526
ugcugauuauuuguaguca

SEQ ID NO: 1354429 - RNA, 19 nt, Artificial Sequence
  Description of Artificial Sequence: Synthetic oligonucleotide
  Antisense strand to SEQ ID NO: 1354428
ugacuacaaauaaucagca

SEQ ID NO: 1354430 - RNA, 19 nt, Artificial Sequence
  Description of Artificial Sequence: Synthetic oligonucleotide
  Sense strand starting at position 3098 of SEQ ID NO: 1242526
cgaggaagugucugagaaa

SEQ ID NO: 1354431 - RNA, 19 nt, Artificial Sequence
  Description of Artificial Sequence: Synthetic oligonucleotide
  Antisense strand to SEQ ID NO: 1354430
uuucucagacacuuccucg

SEQ ID NO: 1354432 - RNA, 19 nt, Artificial Sequence
  Description of Artificial Sequence: Synthetic oligonucleotide
  Sense strand starting at position 3109 of SEQ ID NO: 1242526
cugagaaacuauucgugua

SEQ ID NO: 1354433 - RNA, 19 nt, Artificial Sequence
  Description of Artificial Sequence: Synthetic oligonucleotide
  Antisense strand to SEQ ID NO: 1354432
uacacgaauaguuucucag

SEQ ID NO: 1354434 - RNA, 19 nt, Artificial Sequence
  Description of Artificial Sequence: Synthetic oligonucleotide
  Sense strand starting at position 3111 of SEQ ID NO: 1242526
gagaaacuauucguguauu

SEQ ID NO: 1354435 - RNA, 19 nt, Artificial Sequence
  Description of Artificial Sequence: Synthetic oligonucleotide
  Antisense strand to SEQ ID NO: 1354434
aauacacgaauaguuucuc

SEQ ID NO: 1354436 - RNA, 19 nt, Artificial Sequence
  Description of Artificial Sequence: Synthetic oligonucleotide
  Sense strand starting at position 3221 of SEQ ID NO: 1242526
auugguguuguguauuaaa

SEQ ID NO: 1354437 - RNA, 19 nt, Artificial Sequence
  Description of Artificial Sequence: Synthetic oligonucleotide
  Antisense strand to SEQ ID NO: 1354436
uuuaauacacaacaccaau

SEQ ID NO: 1354438 - RNA, 19 nt, Artificial Sequence
  Description of Artificial Sequence: Synthetic oligonucleotide
  Sense strand starting at position 3388 of SEQ ID NO: 1242526
acuaguaaguacuuuggau

SEQ ID NO: 1354439 - RNA, 19 nt, Artificial Sequence
  Description of Artificial Sequence: Synthetic oligonucleotide
  Antisense strand to SEQ ID NO: 1354438
auccaaaguacuuacuagu

SEQ ID NO: 1354440 - RNA, 19 nt, Artificial Sequence
  Description of Artificial Sequence: Synthetic oligonucleotide
  Sense strand starting at position 3634 of SEQ ID NO: 1242526
cuucccaguguuuagaaca

SEQ ID NO: 1354441 - RNA, 19 nt, Artificial Sequence
  Description of Artificial Sequence: Synthetic oligonucleotide
  Antisense strand to SEQ ID NO: 1354440
uguucuaaacacugggaag

SEQ ID NO: 1354442 - RNA, 19 nt, Artificial Sequence
  Description of Artificial Sequence: Synthetic oligonucleotide
  Sense strand starting at position 3760 of SEQ ID NO: 1242526
auauguucugguugagaua

SEQ ID NO: 1354443 - RNA, 19 nt, Artificial Sequence
  Description of Artificial Sequence: Synthetic oligonucleotide
  Antisense strand to SEQ ID NO: 1354442
uaucucaaccagaacauau

SEQ ID NO: 1354444 - RNA, 19 nt, Artificial Sequence
  Description of Artificial Sequence: Synthetic oligonucleotide
  Sense strand starting at position 3761 of SEQ ID NO: 1242526
uauguucugguugagauaa

SEQ ID NO: 1354445 - RNA, 19 nt, Artificial Sequence
  Description of Artificial Sequence: Synthetic oligonucleotide
  Antisense strand to SEQ ID NO: 1354444
uuaucucaaccagaacaua

SEQ ID NO: 1354446 - RNA, 19 nt, Artificial Sequence
  Description of Artificial Sequence: Synthetic oligonucleotide
  Sense strand starting at position 3772 of SEQ ID NO: 1242526
ugagauaaggcauguacca

SEQ ID NO: 1354447 - RNA, 19 nt, Artificial Sequence
  Description of Artificial Sequence: Synthetic oligonucleotide
  Antisense strand to SEQ ID NO: 1354446
ugguacaugccuuaucuca

SEQ ID NO: 1354448 - RNA, 19 nt, Artificial Sequence
  Description of Artificial Sequence: Synthetic oligonucleotide
  Sense strand starting at position 3837 of SEQ ID NO: 1242526
auaagaugauaggaaagau

SEQ ID NO: 1354449 - RNA, 19 nt, Artificial Sequence
  Description of Artificial Sequence: Synthetic oligonucleotide
  Antisense strand to SEQ ID NO: 1354448
aucuuuccuaucaucuuau

SEQ ID NO: 1354450 - RNA, 19 nt, Artificial Sequence
  Description of Artificial Sequence: Synthetic oligonucleotide
  Sense strand starting at position 3897 of SEQ ID NO: 1242526
gcacaaucucuugggagaa

SEQ ID NO: 1354451 - RNA, 19 nt, Artificial Sequence
  Description of Artificial Sequence: Synthetic oligonucleotide
  Antisense strand to SEQ ID NO: 1354450
uucucccaagagauugugc

SEQ ID NO: 1354452 - RNA, 19 nt, Artificial Sequence
  Description of Artificial Sequence: Synthetic oligonucleotide
  Sense strand starting at position 3964 of SEQ ID NO: 1242526
augguauaacuugguaauu

SEQ ID NO: 1354453 - RNA, 19 nt, Artificial Sequence
  Description of Artificial Sequence: Synthetic oligonucleotide
  Antisense strand to SEQ ID NO: 1354452
aauuaccaaguuauaccau

SEQ ID NO: 1354454 - RNA, 19 nt, Artificial Sequence
  Description of Artificial Sequence: Synthetic oligonucleotide
  Sense strand starting at position 199 of SEQ ID NO: 1242527
uguauugguucucuuugga

SEQ ID NO: 1354455 - RNA, 19 nt, Artificial Sequence
  Description of Artificial Sequence: Synthetic oligonucleotide
  Antisense strand to SEQ ID NO: 1354454
uccaaagagaaccaauaca

SEQ ID NO: 1354456 - RNA, 19 nt, Artificial Sequence
  Description of Artificial Sequence: Synthetic oligonucleotide
  Sense strand starting at position 202 of SEQ ID NO: 1242527
auugguucucuuuggaaag

SEQ ID NO: 1354457 - RNA, 19 nt, Artificial Sequence
  Description of Artificial Sequence: Synthetic oligonucleotide
  Antisense strand to SEQ ID NO: 1354456
cuuuccaaagagaaccaau

SEQ ID NO: 1354458 - RNA, 19 nt, Artificial Sequence
  Description of Artificial Sequence: Synthetic oligonucleotide
  Sense strand starting at position 257 of SEQ ID NO: 1242527
uuuacuugccuggaauaga

SEQ ID NO: 1354459 - RNA, 19 nt, Artificial Sequence
  Description of Artificial Sequence: Synthetic oligonucleotide
  Antisense strand to SEQ ID NO: 1354458
ucuauuccaggcaaguaaa

SEQ ID NO: 1354460 - RNA, 19 nt, Artificial Sequence
  Description of Artificial Sequence: Synthetic oligonucleotide
  Sense strand starting at position 281 of SEQ ID NO: 1242527
ggcccagugaguuaacagu

SEQ ID NO: 1354461 - RNA, 19 nt, Artificial Sequence
  Description of Artificial Sequence: Synthetic oligonucleotide
  Antisense strand to SEQ ID NO: 1354460
acuguuaacucacugggcc

SEQ ID NO: 1354462 - RNA, 19 nt, Artificial Sequence
  Description of Artificial Sequence: Synthetic oligonucleotide
  Sense strand starting at position 342 of SEQ ID NO: 1242527
ucuugauuaccggagcagu

SEQ ID NO: 1354463 - RNA, 19 nt, Artificial Sequence
  Description of Artificial Sequence: Synthetic oligonucleotide
  Antisense strand to SEQ ID NO: 1354462
acugcuccgguaaucaaga

SEQ ID NO: 1354464 - RNA, 19 nt, Artificial Sequence
  Description of Artificial Sequence: Synthetic oligonucleotide
  Sense strand starting at position 580 of SEQ ID NO: 1242527
cgccacuuuccugacauau

SEQ ID NO: 1354465 - RNA, 19 nt, Artificial Sequence
  Description of Artificial Sequence: Synthetic oligonucleotide
  Antisense strand to SEQ ID NO: 1354464
auaugucaggaaaguggcg

SEQ ID NO: 1354466 - RNA, 19 nt, Artificial Sequence
  Description of Artificial Sequence: Synthetic oligonucleotide
  Sense strand starting at position 607 of SEQ ID NO: 1242527
ccaggaccuugguuaacaa

SEQ ID NO: 1354467 - RNA, 19 nt, Artificial Sequence
  Description of Artificial Sequence: Synthetic oligonucleotide
  Antisense strand to SEQ ID NO: 1354466
uuguuaaccaagguccugg

SEQ ID NO: 1354468 - RNA, 19 nt, Artificial Sequence
  Description of Artificial Sequence: Synthetic oligonucleotide
  Sense strand starting at position 648 of SEQ ID NO: 1242527
gcuggucaccuuuacaaua

SEQ ID NO: 1354469 - RNA, 19 nt, Artificial Sequence
  Description of Artificial Sequence: Synthetic oligonucleotide
  Antisense strand to SEQ ID NO: 1354468
uauuguaaaggugaccagc

SEQ ID NO: 1354470 - RNA, 19 nt, Artificial Sequence
  Description of Artificial Sequence: Synthetic oligonucleotide
  Sense strand starting at position 731 of SEQ ID NO: 1242527
gcugucacagcaugauaua

SEQ ID NO: 1354471 - RNA, 19 nt, Artificial Sequence
  Description of Artificial Sequence: Synthetic oligonucleotide
  Antisense strand to SEQ ID NO: 1354470
uauaucaugcugugacagc

SEQ ID NO: 1354472 - RNA, 19 nt, Artificial Sequence
  Description of Artificial Sequence: Synthetic oligonucleotide
  Sense strand starting at position 749 of SEQ ID NO: 1242527
accugcucccacugguaau

SEQ ID NO: 1354473 - RNA, 19 nt, Artificial Sequence
  Description of Artificial Sequence: Synthetic oligonucleotide
  Antisense strand to SEQ ID NO: 1354472
auuaccagugggagcaggu

SEQ ID NO: 1354474 - RNA, 19 nt, Artificial Sequence
  Description of Artificial Sequence: Synthetic oligonucleotide
  Sense strand starting at position 790 of SEQ ID NO: 1242527
ggacugguggucuggguau

SEQ ID NO: 1354475 - RNA, 19 nt, Artificial Sequence
  Description of Artificial Sequence: Synthetic oligonucleotide
  Antisense strand to SEQ ID NO: 1354474
auacccagaccaccagucc

SEQ ID NO: 1354476 - RNA, 19 nt, Artificial Sequence
  Description of Artificial Sequence: Synthetic oligonucleotide
  Sense strand starting at position 802 of SEQ ID NO: 1242527
uggguauucucccuuauca

SEQ ID NO: 1354477 - RNA, 19 nt, Artificial Sequence
  Description of Artificial Sequence: Synthetic oligonucleotide
  Antisense strand to SEQ ID NO: 1354476
ugauaagggagaauaccca

SEQ ID NO: 1354478 - RNA, 19 nt, Artificial Sequence
  Description of Artificial Sequence: Synthetic oligonucleotide
  Sense strand starting at position 820 of SEQ ID NO: 1242527
aggucuuuggcccagcaau

SEQ ID NO: 1354479 - RNA, 19 nt, Artificial Sequence
  Description of Artificial Sequence: Synthetic oligonucleotide
  Antisense strand to SEQ ID NO: 1354478
auugcugggccaaagaccu

SEQ ID NO: 1354480 - RNA, 19 nt, Artificial Sequence
  Description of Artificial Sequence: Synthetic oligonucleotide
  Sense strand starting at position 894 of SEQ ID NO: 1242527
gguaaugagccucagugua

SEQ ID NO: 1354481 - RNA, 19 nt, Artificial Sequence
  Description of Artificial Sequence: Synthetic oligonucleotide
  Antisense strand to SEQ ID NO: 1354480
uacacugaggcucauuacc

SEQ ID NO: 1354482 - RNA, 19 nt, Artificial Sequence
  Description of Artificial Sequence: Synthetic oligonucleotide
  Sense strand starting at position 896 of SEQ ID NO: 1242527
uaaugagccucaguguaga

SEQ ID NO: 1354483 - RNA, 19 nt, Artificial Sequence
  Description of Artificial Sequence: Synthetic oligonucleotide
  Antisense strand to SEQ ID NO: 1354482
ucuacacugaggcucauua

SEQ ID NO: 1354484 - RNA, 19 nt, Artificial Sequence
  Description of Artificial Sequence: Synthetic oligonucleotide
  Sense strand starting at position 916 of SEQ ID NO: 1242527
uuggcaagugcugggauau

SEQ ID NO: 1354485 - RNA, 19 nt, Artificial Sequence
  Description of Artificial Sequence: Synthetic oligonucleotide
  Antisense strand to SEQ ID NO: 1354484
auaucccagcacuugccaa

SEQ ID NO: 1354486 - RNA, 19 nt, Artificial Sequence
  Description of Artificial Sequence: Synthetic oligonucleotide
  Sense strand starting at position 917 of SEQ ID NO: 1242527
uggcaagugcugggauauu

SEQ ID NO: 1354487 - RNA, 19 nt, Artificial Sequence
  Description of Artificial Sequence: Synthetic oligonucleotide
  Antisense strand to SEQ ID NO: 1354486
aauaucccagcacuugcca

SEQ ID NO: 1354488 - RNA, 19 nt, Artificial Sequence
  Description of Artificial Sequence: Synthetic oligonucleotide
  Sense strand starting at position 1027 of SEQ ID NO: 1242527
ccucauucuccuggagacu

SEQ ID NO: 1354489 - RNA, 19 nt, Artificial Sequence
  Description of Artificial Sequence: Synthetic oligonucleotide
  Antisense strand to SEQ ID NO: 1354488
agucuccaggagaaugagg

SEQ ID NO: 1354490 - RNA, 19 nt, Artificial Sequence
  Description of Artificial Sequence: Synthetic oligonucleotide
  Sense strand starting at position 1304 of SEQ ID NO: 1242527
guaggugaguaauuccuua

SEQ ID NO: 1354491 - RNA, 19 nt, Artificial Sequence
  Description of Artificial Sequence: Synthetic oligonucleotide
  Antisense strand to SEQ ID NO: 1354490
uaaggaauuacucaccuac

SEQ ID NO: 1354492 - RNA, 19 nt, Artificial Sequence
  Description of Artificial Sequence: Synthetic oligonucleotide
  Sense strand starting at position 1308 of SEQ ID NO: 1242527
gugaguaauuccuuaucug

SEQ ID NO: 1354493 - RNA, 19 nt, Artificial Sequence
  Description of Artificial Sequence: Synthetic oligonucleotide
  Antisense strand to SEQ ID NO: 1354492
cagauaaggaauuacucac

SEQ ID NO: 1354494 - RNA, 19 nt, Artificial Sequence
  Description of Artificial Sequence: Synthetic oligonucleotide
  Sense strand starting at position 1309 of SEQ ID NO: 1242527
ugaguaauuccuuaucugg

SEQ ID NO: 1354495 - RNA, 19 nt, Artificial Sequence
  Description of Artificial Sequence: Synthetic oligonucleotide
  Antisense strand to SEQ ID NO: 1354494
ccagauaaggaauuacuca

SEQ ID NO: 1354496 - RNA, 19 nt, Artificial Sequence
  Description of Artificial Sequence: Synthetic oligonucleotide
  Sense strand starting at position 2547 of SEQ ID NO: 1242527
aaaugugguugagcacuua

SEQ ID NO: 1354497 - RNA, 19 nt, Artificial Sequence
  Description of Artificial Sequence: Synthetic oligonucleotide
  Antisense strand to SEQ ID NO: 1354496
uaagugcucaaccacauuu

SEQ ID NO: 1354498 - RNA, 19 nt, Artificial Sequence
  Description of Artificial Sequence: Synthetic oligonucleotide
  Sense strand starting at position 2688 of SEQ ID NO: 1242527
aaagcaagugauggauuau

SEQ ID NO: 1354499 - RNA, 19 nt, Artificial Sequence
  Description of Artificial Sequence: Synthetic oligonucleotide
  Antisense strand to SEQ ID NO: 1354498
auaauccaucacuugcuuu

SEQ ID NO: 1354500 - RNA, 19 nt, Artificial Sequence
  Description of Artificial Sequence: Synthetic oligonucleotide
  Sense strand starting at position 2694 of SEQ ID NO: 1242527
agugauggauuauccauca

SEQ ID NO: 1354501 - RNA, 19 nt, Artificial Sequence
  Description of Artificial Sequence: Synthetic oligonucleotide
  Antisense strand to SEQ ID NO: 1354500
ugauggauaauccaucacu

SEQ ID NO: 1354502 - RNA, 19 nt, Artificial Sequence
  Description of Artificial Sequence: Synthetic oligonucleotide
  Sense strand starting at position 2712 of SEQ ID NO: 1242527
aggcacuuacuccacgaau

SEQ ID NO: 1354503 - RNA, 19 nt, Artificial Sequence
  Description of Artificial Sequence: Synthetic oligonucleotide
  Antisense strand to SEQ ID NO: 1354502
auucguggaguaagugccu

SEQ ID NO: 1354504 - RNA, 19 nt, Artificial Sequence
  Description of Artificial Sequence: Synthetic oligonucleotide
  Sense strand starting at position 2714 of SEQ ID NO: 1242527
gcacuuacuccacgaauga

SEQ ID NO: 1354505 - RNA, 19 nt, Artificial Sequence
  Description of Artificial Sequence: Synthetic oligonucleotide
  Antisense strand to SEQ ID NO: 1354504
ucauucguggaguaagugc

SEQ ID NO: 1354506 - RNA, 19 nt, Artificial Sequence
  Description of Artificial Sequence: Synthetic oligonucleotide
  Sense strand starting at position 3055 of SEQ ID NO: 1242527
cuuggauucuaccuugcua

SEQ ID NO: 1354507 - RNA, 19 nt, Artificial Sequence
  Description of Artificial Sequence: Synthetic oligonucleotide
  Antisense strand to SEQ ID NO: 1354506
uagcaagguagaauccaag

SEQ ID NO: 1354508 - RNA, 19 nt, Artificial Sequence
  Description of Artificial Sequence: Synthetic oligonucleotide
  Sense strand starting at position 3057 of SEQ ID NO: 1242527
uggauucuaccuugcuaaa

SEQ ID NO: 1354509 - RNA, 19 nt, Artificial Sequence
  Description of Artificial Sequence: Synthetic oligonucleotide
  Antisense strand to SEQ ID NO: 1354508
uuuagcaagguagaaucca

SEQ ID NO: 1354510 - RNA, 19 nt, Artificial Sequence
  Description of Artificial Sequence: Synthetic oligonucleotide
  Sense strand starting at position 3075 of SEQ ID NO: 1242527
aguggaaggcucuggacua

SEQ ID NO: 1354511 - RNA, 19 nt, Artificial Sequence
  Description of Artificial Sequence: Synthetic oligonucleotide
  Antisense strand to SEQ ID NO: 1354510
uaguccagagccuuccacu

SEQ ID NO: 1354512 - RNA, 19 nt, Artificial Sequence
  Description of Artificial Sequence: Synthetic oligonucleotide
  Sense strand starting at position 3171 of SEQ ID NO: 1242527
agguuugcaccauaccuua

SEQ ID NO: 1354513 - RNA, 19 nt, Artificial Sequence
  Description of Artificial Sequence: Synthetic oligonucleotide
  Antisense strand to SEQ ID NO: 1354512
uaagguauggugcaaaccu

SEQ ID NO: 1354514 - RNA, 19 nt, Artificial Sequence
  Description of Artificial Sequence: Synthetic oligonucleotide
  Sense strand starting at position 3184 of SEQ ID NO: 1242527
accuuaugugguuggguua

SEQ ID NO: 1354515 - RNA, 19 nt, Artificial Sequence
  Description of Artificial Sequence: Synthetic oligonucleotide
  Antisense strand to SEQ ID NO: 1354514
uaacccaaccacauaaggu

SEQ ID NO: 1354516 - RNA, 19 nt, Artificial Sequence
  Description of Artificial Sequence: Synthetic oligonucleotide
  Sense strand starting at position 3197 of SEQ ID NO: 1242527
ggguuacucuugcucaacu

SEQ ID NO: 1354517 - RNA, 19 nt, Artificial Sequence
  Description of Artificial Sequence: Synthetic oligonucleotide
  Antisense strand to SEQ ID NO: 1354516
aguugagcaagaguaaccc

SEQ ID NO: 1354518 - RNA, 19 nt, Artificial Sequence
  Description of Artificial Sequence: Synthetic oligonucleotide
  Sense strand starting at position 3445 of SEQ ID NO: 1242527
gcaggaggcuuccucuaag

SEQ ID NO: 1354519 - RNA, 19 nt, Artificial Sequence
  Description of Artificial Sequence: Synthetic oligonucleotide
  Antisense strand to SEQ ID NO: 1354518
cuuagaggaagccuccugc

SEQ ID NO: 1354520 - RNA, 19 nt, Artificial Sequence
  Description of Artificial Sequence: Synthetic oligonucleotide
  Sense strand starting at position 3587 of SEQ ID NO: 1242527
gcaguuggaggucagcaua

SEQ ID NO: 1354521 - RNA, 19 nt, Artificial Sequence
  Description of Artificial Sequence: Synthetic oligonucleotide
  Antisense strand to SEQ ID NO: 1354520
uaugcugaccuccaacugc

SEQ ID NO: 1354522 - RNA, 19 nt, Artificial Sequence
  Description of Artificial Sequence: Synthetic oligonucleotide
  Sense strand starting at position 3680 of SEQ ID NO: 1242527
auggcucuccgggauguau

SEQ ID NO: 1354523 - RNA, 19 nt, Artificial Sequence
  Description of Artificial Sequence: Synthetic oligonucleotide
  Antisense strand to SEQ ID NO: 1354522
auacaucccggagagccau

SEQ ID NO: 1354524 - RNA, 19 nt, Artificial Sequence
  Description of Artificial Sequence: Synthetic oligonucleotide
  Sense strand starting at position 3754 of SEQ ID NO: 1242527
cguugauuaccacagugca

SEQ ID NO: 1354525 - RNA, 19 nt, Artificial Sequence
  Description of Artificial Sequence: Synthetic oligonucleotide
  Antisense strand to SEQ ID NO: 1354524
ugcacugugguaaucaacg

SEQ ID NO: 1354526 - RNA, 19 nt, Artificial Sequence
  Description of Artificial Sequence: Synthetic oligonucleotide
  Sense strand starting at position 3806 of SEQ ID NO: 1242527
gacuuuggauucuuugaga

SEQ ID NO: 1354527 - RNA, 19 nt, Artificial Sequence
  Description of Artificial Sequence: Synthetic oligonucleotide
  Antisense strand to SEQ ID NO: 1354526
ucucaaagaauccaaaguc

SEQ ID NO: 1354528 - RNA, 19 nt, Artificial Sequence
  Description of Artificial Sequence: Synthetic oligonucleotide
  Sense strand starting at position 3846 of SEQ ID NO: 1242527
guugcaaugagacagguaa

SEQ ID NO: 1354529 - RNA, 19 nt, Artificial Sequence
  Description of Artificial Sequence: Synthetic oligonucleotide
  Antisense strand to SEQ ID NO: 1354528
uuaccugucucauugcaac

SEQ ID NO: 1354530 - RNA, 19 nt, Artificial Sequence
  Description of Artificial Sequence: Synthetic oligonucleotide
  Sense strand starting at position 3892 of SEQ ID NO: 1242527
aggauuccuguaugaaagc

SEQ ID NO: 1354531 - RNA, 19 nt, Artificial Sequence
  Description of Artificial Sequence: Synthetic oligonucleotide
  Antisense strand to SEQ ID NO: 1354530
gcuuucauacaggaauccu

SEQ ID NO: 1354532 - RNA, 19 nt, Artificial Sequence
  Description of Artificial Sequence: Synthetic oligonucleotide
  Sense strand starting at position 3929 of SEQ ID NO: 1242527
acuugaagugcauguauga

SEQ ID NO: 1354533 - RNA, 19 nt, Artificial Sequence
  Description of Artificial Sequence: Synthetic oligonucleotide
  Antisense strand to SEQ ID NO: 1354532
ucauacaugcacuucaagu

SEQ ID NO: 1354534 - RNA, 19 nt, Artificial Sequence
  Description of Artificial Sequence: Synthetic oligonucleotide
  Sense strand starting at position 123 of SEQ ID NO: 1242528
gcuagcgugcgccuguaau

SEQ ID NO: 1354535 - RNA, 19 nt, Artificial Sequence
  Description of Artificial Sequence: Synthetic oligonucleotide
  Antisense strand to SEQ ID NO: 1354534
auuacaggcgcacgcuagc

SEQ ID NO: 1354536 - RNA, 19 nt, Artificial Sequence
  Description of Artificial Sequence: Synthetic oligonucleotide
  Sense strand starting at position 312 of SEQ ID NO: 1242528
aguucucaucuugauccau

SEQ ID NO: 1354537 - RNA, 19 nt, Artificial Sequence
  Description of Artificial Sequence: Synthetic oligonucleotide
  Antisense strand to SEQ ID NO: 1354536
auggaucaagaugagaacu

SEQ ID NO: 1354538 - RNA, 19 nt, Artificial Sequence
  Description of Artificial Sequence: Synthetic oligonucleotide
  Sense strand starting at position 369 of SEQ ID NO: 1242528
uuucuaucugcuggauguu

SEQ ID NO: 1354539 - RNA, 19 nt, Artificial Sequence
  Description of Artificial Sequence: Synthetic oligonucleotide
  Antisense strand to SEQ ID NO: 1354538
aacauccagcagauagaaa

SEQ ID NO: 1354540 - RNA, 19 nt, Artificial Sequence
  Description of Artificial Sequence: Synthetic oligonucleotide
  Sense strand starting at position 370 of SEQ ID NO: 1242528
uucuaucugcuggauguua

SEQ ID NO: 1354541 - RNA, 19 nt, Artificial Sequence
  Description of Artificial Sequence: Synthetic oligonucleotide
  Antisense strand to SEQ ID NO: 1354540
uaacauccagcagauagaa

SEQ ID NO: 1354542 - RNA, 19 nt, Artificial Sequence
  Description of Artificial Sequence: Synthetic oligonucleotide
  Sense strand starting at position 372 of SEQ ID NO: 1242528
cuaucugcuggauguuaca

SEQ ID NO: 1354543 - RNA, 19 nt, Artificial Sequence
  Description of Artificial Sequence: Synthetic oligonucleotide
  Antisense strand to SEQ ID NO: 1354542
uguaacauccagcagauag

SEQ ID NO: 1354544 - RNA, 19 nt, Artificial Sequence
  Description of Artificial Sequence: Synthetic oligonucleotide
  Sense strand starting at position 393 of SEQ ID NO: 1242528
cuauauuucuuacgggcau

SEQ ID NO: 1354545 - RNA, 19 nt, Artificial Sequence
  Description of Artificial Sequence: Synthetic oligonucleotide
  Antisense strand to SEQ ID NO: 1354544
augcccguaagaaauauag

SEQ ID NO: 1354546 - RNA, 19 nt, Artificial Sequence
  Description of Artificial Sequence: Synthetic oligonucleotide
  Sense strand starting at position 535 of SEQ ID NO: 1242528
ugugcuugacucuaagcua

SEQ ID NO: 1354547 - RNA, 19 nt, Artificial Sequence
  Description of Artificial Sequence: Synthetic oligonucleotide
  Antisense strand to SEQ ID NO: 1354546
uagcuuagagucaagcaca

SEQ ID NO: 1354548 - RNA, 19 nt, Artificial Sequence
  Description of Artificial Sequence: Synthetic oligonucleotide
  Sense strand starting at position 562 of SEQ ID NO: 1242528
cuagguaguguugaacaaa

SEQ ID NO: 1354549 - RNA, 19 nt, Artificial Sequence
  Description of Artificial Sequence: Synthetic oligonucleotide
  Antisense strand to SEQ ID NO: 1354548
uuuguucaacacuaccuag

SEQ ID NO: 1354550 - RNA, 19 nt, Artificial Sequence
  Description of Artificial Sequence: Synthetic oligonucleotide
  Sense strand starting at position 752 of SEQ ID NO: 1242528
aucaguaagucuuugaguu

SEQ ID NO: 1354551 - RNA, 19 nt, Artificial Sequence
  Description of Artificial Sequence: Synthetic oligonucleotide
  Antisense strand to SEQ ID NO: 1354550
aacucaaagacuuacugau

SEQ ID NO: 1354552 - RNA, 19 nt, Artificial Sequence
  Description of Artificial Sequence: Synthetic oligonucleotide
  Sense strand starting at position 753 of SEQ ID NO: 1242528
ucaguaagucuuugaguuu

SEQ ID NO: 1354553 - RNA, 19 nt, Artificial Sequence
  Description of Artificial Sequence: Synthetic oligonucleotide
  Antisense strand to SEQ ID NO: 1354552
aaacucaaagacuuacuga

SEQ ID NO: 1354554 - RNA, 19 nt, Artificial Sequence
  Description of Artificial Sequence: Synthetic oligonucleotide
  Sense strand starting at position 987 of SEQ ID NO: 1242528
augggugucuucccuuaca

SEQ ID NO: 1354555 - RNA, 19 nt, Artificial Sequence
  Description of Artificial Sequence: Synthetic oligonucleotide
  Antisense strand to SEQ ID NO: 1354554
uguaagggaagacacccau

SEQ ID NO: 1354556 - RNA, 19 nt, Artificial Sequence
  Description of Artificial Sequence: Synthetic oligonucleotide
  Sense strand starting at position 1046 of SEQ ID NO: 1242528
aucuaucugccuggagcau

SEQ ID NO: 1354557 - RNA, 19 nt, Artificial Sequence
  Description of Artificial Sequence: Synthetic oligonucleotide
  Antisense strand to SEQ ID NO: 1354556
augcuccaggcagauagau

SEQ ID NO: 1354558 - RNA, 19 nt, Artificial Sequence
  Description of Artificial Sequence: Synthetic oligonucleotide
  Sense strand starting at position 1059 of SEQ ID NO: 1242528
gagcaugcuuagucuccaa

SEQ ID NO: 1354559 - RNA, 19 nt, Artificial Sequence
  Description of Artificial Sequence: Synthetic oligonucleotide
  Antisense strand to SEQ ID NO: 1354558
uuggagacuaagcaugcuc

SEQ ID NO: 1354560 - RNA, 19 nt, Artificial Sequence
  Description of Artificial Sequence: Synthetic oligonucleotide
  Sense strand starting at position 1063 of SEQ ID NO: 1242528
augcuuagucuccaaagaa

SEQ ID NO: 1354561 - RNA, 19 nt, Artificial Sequence
  Description of Artificial Sequence: Synthetic oligonucleotide
  Antisense strand to SEQ ID NO: 1354560
uucuuuggagacuaagcau

SEQ ID NO: 1354562 - RNA, 19 nt, Artificial Sequence
  Description of Artificial Sequence: Synthetic oligonucleotide
  Sense strand starting at position 1108 of SEQ ID NO: 1242528
ccuugaagcuccuagauca

SEQ ID NO: 1354563 - RNA, 19 nt, Artificial Sequence
  Description of Artificial Sequence: Synthetic oligonucleotide
  Antisense strand to SEQ ID NO: 1354562
ugaucuaggagcuucaagg

SEQ ID NO: 1354564 - RNA, 19 nt, Artificial Sequence
  Description of Artificial Sequence: Synthetic oligonucleotide
  Sense strand starting at position 1153 of SEQ ID NO: 1242528
cugugaacucuucggguac

SEQ ID NO: 1354565 - RNA, 19 nt, Artificial Sequence
  Description of Artificial Sequence: Synthetic oligonucleotide
  Antisense strand to SEQ ID NO: 1354564
guacccgaagaguucacag

SEQ ID NO: 1354566 - RNA, 19 nt, Artificial Sequence
  Description of Artificial Sequence: Synthetic oligonucleotide
  Sense strand starting at position 1157 of SEQ ID NO: 1242528
gaacucuucggguacacua

SEQ ID NO: 1354567 - RNA, 19 nt, Artificial Sequence
  Description of Artificial Sequence: Synthetic oligonucleotide
  Antisense strand to SEQ ID NO: 1354566
uaguguacccgaagaguuc

SEQ ID NO: 1354568 - RNA, 19 nt, Artificial Sequence
  Description of Artificial Sequence: Synthetic oligonucleotide
  Sense strand starting at position 1168 of SEQ ID NO: 1242528
guacacuagcucuaucacu

SEQ ID NO: 1354569 - RNA, 19 nt, Artificial Sequence
  Description of Artificial Sequence: Synthetic oligonucleotide
  Antisense strand to SEQ ID NO: 1354568
agugauagagcuaguguac

SEQ ID NO: 1354570 - RNA, 19 nt, Artificial Sequence
  Description of Artificial Sequence: Synthetic oligonucleotide
  Sense strand starting at position 1201 of SEQ ID NO: 1242528
gugugauaauuugugcuuc

SEQ ID NO: 1354571 - RNA, 19 nt, Artificial Sequence
  Description of Artificial Sequence: Synthetic oligonucleotide
  Antisense strand to SEQ ID NO: 1354570
gaagcacaaauuaucacac

SEQ ID NO: 1354572 - RNA, 19 nt, Artificial Sequence
  Description of Artificial Sequence: Synthetic oligonucleotide
  Sense strand starting at position 1227 of SEQ ID NO: 1242528
uccuacuggagugguaaga

SEQ ID NO: 1354573 - RNA, 19 nt, Artificial Sequence
  Description of Artificial Sequence: Synthetic oligonucleotide
  Antisense strand to SEQ ID NO: 1354572
ucuuaccacuccaguagga

SEQ ID NO: 1354574 - RNA, 19 nt, Artificial Sequence
  Description of Artificial Sequence: Synthetic oligonucleotide
  Sense strand starting at position 1286 of SEQ ID NO: 1242528
agggaugccuggcacuaau

SEQ ID NO: 1354575 - RNA, 19 nt, Artificial Sequence
  Description of Artificial Sequence: Synthetic oligonucleotide
  Antisense strand to SEQ ID NO: 1354574
auuagugccaggcaucccu

SEQ ID NO: 1354576 - RNA, 19 nt, Artificial Sequence
  Description of Artificial Sequence: Synthetic oligonucleotide
  Sense strand starting at position 1478 of SEQ ID NO: 1242528
gcauccaaugagugcuaaa

SEQ ID NO: 1354577 - RNA, 19 nt, Artificial Sequence
  Description of Artificial Sequence: Synthetic oligonucleotide
  Antisense strand to SEQ ID NO: 1354576
uuuagcacucauuggaugc

SEQ ID NO: 1354578 - RNA, 19 nt, Artificial Sequence
  Description of Artificial Sequence: Synthetic oligonucleotide
  Sense strand starting at position 1492 of SEQ ID NO: 1242528
cuaaacuguagaugcgaua

SEQ ID NO: 1354579 - RNA, 19 nt, Artificial Sequence
  Description of Artificial Sequence: Synthetic oligonucleotide
  Antisense strand to SEQ ID NO: 1354578
uaucgcaucuacaguuuag

SEQ ID NO: 1354580 - RNA, 19 nt, Artificial Sequence
  Description of Artificial Sequence: Synthetic oligonucleotide
  Sense strand starting at position 1771 of SEQ ID NO: 1242528
gcagcacuccaggaaugaa

SEQ ID NO: 1354581 - RNA, 19 nt, Artificial Sequence
  Description of Artificial Sequence: Synthetic oligonucleotide
  Antisense strand to SEQ ID NO: 1354580
uucauuccuggagugcugc

SEQ ID NO: 1354582 - RNA, 19 nt, Artificial Sequence
  Description of Artificial Sequence: Synthetic oligonucleotide
  Sense strand starting at position 1822 of SEQ ID NO: 1242528
ggagcagccuugucucaga

SEQ ID NO: 1354583 - RNA, 19 nt, Artificial Sequence
  Description of Artificial Sequence: Synthetic oligonucleotide
  Antisense strand to SEQ ID NO: 1354582
ucugagacaaggcugcucc

SEQ ID NO: 1354584 - RNA, 19 nt, Artificial Sequence
  Description of Artificial Sequence: Synthetic oligonucleotide
  Sense strand starting at position 1970 of SEQ ID NO: 1242528
cuuccuagaucucccggaa

SEQ ID NO: 1354585 - RNA, 19 nt, Artificial Sequence
  Description of Artificial Sequence: Synthetic oligonucleotide
  Antisense strand to SEQ ID NO: 1354584
uuccgggagaucuaggaag

SEQ ID NO: 1354586 - RNA, 19 nt, Artificial Sequence
  Description of Artificial Sequence: Synthetic oligonucleotide
  Sense strand starting at position 1973 of SEQ ID NO: 1242528
ccuagaucucccggaaguc

SEQ ID NO: 1354587 - RNA, 19 nt, Artificial Sequence
  Description of Artificial Sequence: Synthetic oligonucleotide
  Antisense strand to SEQ ID NO: 1354586
gacuuccgggagaucuagg

SEQ ID NO: 1354588 - RNA, 19 nt, Artificial Sequence
  Description of Artificial Sequence: Synthetic oligonucleotide
  Sense strand starting at position 2122 of SEQ ID NO: 1242528
gggagaaucgcucgaguca

SEQ ID NO: 1354589 - RNA, 19 nt, Artificial Sequence
  Description of Artificial Sequence: Synthetic oligonucleotide
  Antisense strand to SEQ ID NO: 1354588
ugacucgagcgauucuccc

SEQ ID NO: 1354590 - RNA, 19 nt, Artificial Sequence
  Description of Artificial Sequence: Synthetic oligonucleotide
  Sense strand starting at position 2123 of SEQ ID NO: 1242528
ggagaaucgcucgagucag

SEQ ID NO: 1354591 - RNA, 19 nt, Artificial Sequence
  Description of Artificial Sequence: Synthetic oligonucleotide
  Antisense strand to SEQ ID NO: 1354590
cugacucgagcgauucucc

SEQ ID NO: 1354592 - RNA, 19 nt, Artificial Sequence
  Description of Artificial Sequence: Synthetic oligonucleotide
  Sense strand starting at position 2304 of SEQ ID NO: 1242528
aucauuuccuggugagaug

SEQ ID NO: 1354593 - RNA, 19 nt, Artificial Sequence
  Description of Artificial Sequence: Synthetic oligonucleotide
  Antisense strand to SEQ ID NO: 1354592
caucucaccaggaaaugau

SEQ ID NO: 1354594 - RNA, 19 nt, Artificial Sequence
  Description of Artificial Sequence: Synthetic oligonucleotide
  Sense strand starting at position 2315 of SEQ ID NO: 1242528
gugagaugcauaggaaaua

SEQ ID NO: 1354595 - RNA, 19 nt, Artificial Sequence
  Description of Artificial Sequence: Synthetic oligonucleotide
  Antisense strand to SEQ ID NO: 1354594
uauuuccuaugcaucucac

SEQ ID NO: 1354596 - RNA, 19 nt, Artificial Sequence
  Description of Artificial Sequence: Synthetic oligonucleotide
  Sense strand starting at position 2392 of SEQ ID NO: 1242528
guuuauaggcuauauagag

SEQ ID NO: 1354597 - RNA, 19 nt, Artificial Sequence
  Description of Artificial Sequence: Synthetic oligonucleotide
  Antisense strand to SEQ ID NO: 1354596
cucuauauagccuauaaac

SEQ ID NO: 1354598 - RNA, 19 nt, Artificial Sequence
  Description of Artificial Sequence: Synthetic oligonucleotide
  Sense strand starting at position 2404 of SEQ ID NO: 1242528
uauagagauuagcaggaau

SEQ ID NO: 1354599 - RNA, 19 nt, Artificial Sequence
  Description of Artificial Sequence: Synthetic oligonucleotide
  Antisense strand to SEQ ID NO: 1354598
auuccugcuaaucucuaua

SEQ ID NO: 1354600 - RNA, 19 nt, Artificial Sequence
  Description of Artificial Sequence: Synthetic oligonucleotide
  Sense strand starting at position 2415 of SEQ ID NO: 1242528
gcaggaauauguuaagaca

SEQ ID NO: 1354601 - RNA, 19 nt, Artificial Sequence
  Description of Artificial Sequence: Synthetic oligonucleotide
  Antisense strand to SEQ ID NO: 1354600
ugucuuaacauauuccugc

SEQ ID NO: 1354602 - RNA, 19 nt, Artificial Sequence
  Description of Artificial Sequence: Synthetic oligonucleotide
  Sense strand starting at position 2418 of SEQ ID NO: 1242528
ggaauauguuaagacacca

SEQ ID NO: 1354603 - RNA, 19 nt, Artificial Sequence
  Description of Artificial Sequence: Synthetic oligonucleotide
  Antisense strand to SEQ ID NO: 1354602
uggugucuuaacauauucc

SEQ ID NO: 1354604 - RNA, 19 nt, Artificial Sequence
  Description of Artificial Sequence: Synthetic oligonucleotide
  Sense strand starting at position 2467 of SEQ ID NO: 1242528
aggaaauuauaugggacaa

SEQ ID NO: 1354605 - RNA, 19 nt, Artificial Sequence
  Description of Artificial Sequence: Synthetic oligonucleotide
  Antisense strand to SEQ ID NO: 1354604
uugucccauauaauuuccu

SEQ ID NO: 1354606 - RNA, 19 nt, Artificial Sequence
  Description of Artificial Sequence: Synthetic oligonucleotide
  Sense strand starting at position 2480 of SEQ ID NO: 1242528
ggacaaaugaucugucguc

SEQ ID NO: 1354607 - RNA, 19 nt, Artificial Sequence
  Description of Artificial Sequence: Synthetic oligonucleotide
  Antisense strand to SEQ ID NO: 1354606
gacgacagaucauuugucc

SEQ ID NO: 1354608 - RNA, 19 nt, Artificial Sequence
  Description of Artificial Sequence: Synthetic oligonucleotide
  Sense strand starting at position 2481 of SEQ ID NO: 1242528
gacaaaugaucugucgucu

SEQ ID NO: 1354609 - RNA, 19 nt, Artificial Sequence
  Description of Artificial Sequence: Synthetic oligonucleotide
  Antisense strand to SEQ ID NO: 1354608
agacgacagaucauuuguc

SEQ ID NO: 1354610 - RNA, 19 nt, Artificial Sequence
  Description of Artificial Sequence: Synthetic oligonucleotide
  Sense strand starting at position 3396 of SEQ ID NO: 1242528
aaggucuggcuuuaucuau

SEQ ID NO: 1354611 - RNA, 19 nt, Artificial Sequence
  Description of Artificial Sequence: Synthetic oligonucleotide
  Antisense strand to SEQ ID NO: 1354610
auagauaaagccagaccuu

SEQ ID NO: 1354612 - RNA, 19 nt, Artificial Sequence
  Description of Artificial Sequence: Synthetic oligonucleotide
  Sense strand starting at position 3433 of SEQ ID NO: 1242528
gugauauguucugucucuu

SEQ ID NO: 1354613 - RNA, 19 nt, Artificial Sequence
  Description of Artificial Sequence: Synthetic oligonucleotide
  Antisense strand to SEQ ID NO: 1354612
aagagacagaacauaucac

SEQ ID NO: 1354614 - RNA, 19 nt, Artificial Sequence
  Description of Artificial Sequence: Synthetic oligonucleotide
  Sense strand starting at position 591 of SEQ ID NO: 1242529
gagagcauuuaaugacaga

SEQ ID NO: 1354615 - RNA, 19 nt, Artificial Sequence
  Description of Artificial Sequence: Synthetic oligonucleotide
  Antisense strand to SEQ ID NO: 1354614
ucugucauuaaaugcucuc

SEQ ID NO: 1354616 - RNA, 19 nt, Artificial Sequence
  Description of Artificial Sequence: Synthetic oligonucleotide
  Sense strand starting at position 619 of SEQ ID NO: 1242529
ucuugagaugucuggagga

SEQ ID NO: 1354617 - RNA, 19 nt, Artificial Sequence
  Description of Artificial Sequence: Synthetic oligonucleotide
  Antisense strand to SEQ ID NO: 1354616
uccuccagacaucucaaga

SEQ ID NO: 1354618 - RNA, 19 nt, Artificial Sequence
  Description of Artificial Sequence: Synthetic oligonucleotide
  Sense strand starting at position 636 of SEQ ID NO: 1242529
gaaguaggauucuccucuu

SEQ ID NO: 1354619 - RNA, 19 nt, Artificial Sequence
  Description of Artificial Sequence: Synthetic oligonucleotide
  Antisense strand to SEQ ID NO: 1354618
aagaggagaauccuacuuc

SEQ ID NO: 1354620 - RNA, 19 nt, Artificial Sequence
  Description of Artificial Sequence: Synthetic oligonucleotide
  Sense strand starting at position 639 of SEQ ID NO: 1242529
guaggauucuccucuuaac

SEQ ID NO: 1354621 - RNA, 19 nt, Artificial Sequence
  Description of Artificial Sequence: Synthetic oligonucleotide
  Antisense strand to SEQ ID NO: 1354620
guuaagaggagaauccuac

SEQ ID NO: 1354622 - RNA, 19 nt, Artificial Sequence
  Description of Artificial Sequence: Synthetic oligonucleotide
  Sense strand starting at position 791 of SEQ ID NO: 1242529
caaggaugacucggugaca

SEQ ID NO: 1354623 - RNA, 19 nt, Artificial Sequence
  Description of Artificial Sequence: Synthetic oligonucleotide
  Antisense strand to SEQ ID NO: 1354622
ugucaccgagucauccuug

SEQ ID NO: 1354624 - RNA, 19 nt, Artificial Sequence
  Description of Artificial Sequence: Synthetic oligonucleotide
  Sense strand starting at position 873 of SEQ ID NO: 1242529
accuaucuagcucaguaua

SEQ ID NO: 1354625 - RNA, 19 nt, Artificial Sequence
  Description of Artificial Sequence: Synthetic oligonucleotide
  Antisense strand to SEQ ID NO: 1354624
uauacugagcuagauaggu

SEQ ID NO: 1354626 - RNA, 19 nt, Artificial Sequence
  Description of Artificial Sequence: Synthetic oligonucleotide
  Sense strand starting at position 875 of SEQ ID NO: 1242529
cuaucuagcucaguauaag

SEQ ID NO: 1354627 - RNA, 19 nt, Artificial Sequence
  Description of Artificial Sequence: Synthetic oligonucleotide
  Antisense strand to SEQ ID NO: 1354626
cuuauacugagcuagauag

SEQ ID NO: 1354628 - RNA, 19 nt, Artificial Sequence
  Description of Artificial Sequence: Synthetic oligonucleotide
  Sense strand starting at position 944 of SEQ ID NO: 1242529
ccuaaacauuaagaggaaa

SEQ ID NO: 1354629 - RNA, 19 nt, Artificial Sequence
  Description of Artificial Sequence: Synthetic oligonucleotide
  Antisense strand to SEQ ID NO: 1354628
uuuccucuuaauguuuagg

SEQ ID NO: 1354630 - RNA, 19 nt, Artificial Sequence
  Description of Artificial Sequence: Synthetic oligonucleotide
  Sense strand starting at position 955 of SEQ ID NO: 1242529
agaggaaaguuagaaauga

SEQ ID NO: 1354631 - RNA, 19 nt, Artificial Sequence
  Description of Artificial Sequence: Synthetic oligonucleotide
  Antisense strand to SEQ ID NO: 1354630
ucauuucuaacuuuccucu

SEQ ID NO: 1354632 - RNA, 19 nt, Artificial Sequence
  Description of Artificial Sequence: Synthetic oligonucleotide
  Sense strand starting at position 1015 of SEQ ID NO: 1242529
cggauaagagcacaauguu

SEQ ID NO: 1354633 - RNA, 19 nt, Artificial Sequence
  Description of Artificial Sequence: Synthetic oligonucleotide
  Antisense strand to SEQ ID NO: 1354632
aacauugugcucuuauccg

SEQ ID NO: 1354634 - RNA, 19 nt, Artificial Sequence
  Description of Artificial Sequence: Synthetic oligonucleotide
  Sense strand starting at position 1035 of SEQ ID NO: 1242529
accguuaucccugaaaccu

SEQ ID NO: 1354635 - RNA, 19 nt, Artificial Sequence
  Description of Artificial Sequence: Synthetic oligonucleotide
  Antisense strand to SEQ ID NO: 1354634
agguuucagggauaacggu

SEQ ID NO: 1354636 - RNA, 19 nt, Artificial Sequence
  Description of Artificial Sequence: Synthetic oligonucleotide
  Sense strand starting at position 1091 of SEQ ID NO: 1242529
cggccuucugcacuaguca

SEQ ID NO: 1354637 - RNA, 19 nt, Artificial Sequence
  Description of Artificial Sequence: Synthetic oligonucleotide
  Antisense strand to SEQ ID NO: 1354636
ugacuagugcagaaggccg

SEQ ID NO: 1354638 - RNA, 19 nt, Artificial Sequence
  Description of Artificial Sequence: Synthetic oligonucleotide
  Sense strand starting at position 1237 of SEQ ID NO: 1242529
guuagcuaacuacaugagu

SEQ ID NO: 1354639 - RNA, 19 nt, Artificial Sequence
  Description of Artificial Sequence: Synthetic oligonucleotide
  Antisense strand to SEQ ID NO: 1354638
acucauguaguuagcuaac

SEQ ID NO: 1354640 - RNA, 19 nt, Artificial Sequence
  Description of Artificial Sequence: Synthetic oligonucleotide
  Sense strand starting at position 1432 of SEQ ID NO: 1242529
aaaugaagucuucguggga

SEQ ID NO: 1354641 - RNA, 19 nt, Artificial Sequence
  Description of Artificial Sequence: Synthetic oligonucleotide
  Antisense strand to SEQ ID NO: 1354640
ucccacgaagacuucauuu

SEQ ID NO: 1354642 - RNA, 19 nt, Artificial Sequence
  Description of Artificial Sequence: Synthetic oligonucleotide
  Sense strand starting at position 1433 of SEQ ID NO: 1242529
aaugaagucuucgugggaa

SEQ ID NO: 1354643 - RNA, 19 nt, Artificial Sequence
  Description of Artificial Sequence: Synthetic oligonucleotide
  Antisense strand to SEQ ID NO: 1354642
uucccacgaagacuucauu

SEQ ID NO: 1354644 - RNA, 19 nt, Artificial Sequence
  Description of Artificial Sequence: Synthetic oligonucleotide
  Sense strand starting at position 1436 of SEQ ID NO: 1242529
gaagucuucgugggaauca

SEQ ID NO: 1354645 - RNA, 19 nt, Artificial Sequence
  Description of Artificial Sequence: Synthetic oligonucleotide
  Antisense strand to SEQ ID NO: 1354644
ugauucccacgaagacuuc

SEQ ID NO: 1354646 - RNA, 19 nt, Artificial Sequence
  Description of Artificial Sequence: Synthetic oligonucleotide
  Sense strand starting at position 1574 of SEQ ID NO: 1242529
cacagacaucgaugucuau

SEQ ID NO: 1354647 - RNA, 19 nt, Artificial Sequence
  Description of Artificial Sequence: Synthetic oligonucleotide
  Antisense strand to SEQ ID NO: 1354646
auagacaucgaugucugug

SEQ ID NO: 1354648 - RNA, 19 nt, Artificial Sequence
  Description of Artificial Sequence: Synthetic oligonucleotide
  Sense strand starting at position 2034 of SEQ ID NO: 1242529
cccggugcacucuaaauga

SEQ ID NO: 1354649 - RNA, 19 nt, Artificial Sequence
  Description of Artificial Sequence: Synthetic oligonucleotide
  Antisense strand to SEQ ID NO: 1354648
ucauuuagagugcaccggg

SEQ ID NO: 1354650 - RNA, 19 nt, Artificial Sequence
  Description of Artificial Sequence: Synthetic oligonucleotide
  Sense strand starting at position 2111 of SEQ ID NO: 1242529
uagccaugggcuuaccaua

SEQ ID NO: 1354651 - RNA, 19 nt, Artificial Sequence
  Description of Artificial Sequence: Synthetic oligonucleotide
  Antisense strand to SEQ ID NO: 1354650
uaugguaagcccauggcua

SEQ ID NO: 1354652 - RNA, 19 nt, Artificial Sequence
  Description of Artificial Sequence: Synthetic oligonucleotide
  Sense strand starting at position 2227 of SEQ ID NO: 1242529
uuaggaaauuagcugugau

SEQ ID NO: 1354653 - RNA, 19 nt, Artificial Sequence
  Description of Artificial Sequence: Synthetic oligonucleotide
  Antisense strand to SEQ ID NO: 1354652
aucacagcuaauuuccuaa

SEQ ID NO: 1354654 - RNA, 19 nt, Artificial Sequence
  Description of Artificial Sequence: Synthetic oligonucleotide
  Sense strand starting at position 2253 of SEQ ID NO: 1242529
auuuaauauuucgaugcca

SEQ ID NO: 1354655 - RNA, 19 nt, Artificial Sequence
  Description of Artificial Sequence: Synthetic oligonucleotide
  Antisense strand to SEQ ID NO: 1354654
uggcaucgaaauauuaaau

SEQ ID NO: 1354656 - RNA, 19 nt, Artificial Sequence
  Description of Artificial Sequence: Synthetic oligonucleotide
  Sense strand starting at position 2296 of SEQ ID NO: 1242529
uguaaauaccugugaccua

SEQ ID NO: 1354657 - RNA, 19 nt, Artificial Sequence
  Description of Artificial Sequence: Synthetic oligonucleotide
  Antisense strand to SEQ ID NO: 1354656
uaggucacagguauuuaca

SEQ ID NO: 1354658 - RNA, 19 nt, Artificial Sequence
  Description of Artificial Sequence: Synthetic oligonucleotide
  Sense strand starting at position 2316 of SEQ ID NO: 1242529
ugucgugagcgcuuagcaa

SEQ ID NO: 1354659 - RNA, 19 nt, Artificial Sequence
  Description of Artificial Sequence: Synthetic oligonucleotide
  Antisense strand to SEQ ID NO: 1354658
uugcuaagcgcucacgaca

SEQ ID NO: 1354660 - RNA, 19 nt, Artificial Sequence
  Description of Artificial Sequence: Synthetic oligonucleotide
  Sense strand starting at position 2446 of SEQ ID NO: 1242529
uucugaaagugguucuaga

SEQ ID NO: 1354661 - RNA, 19 nt, Artificial Sequence
  Description of Artificial Sequence: Synthetic oligonucleotide
  Antisense strand to SEQ ID NO: 1354660
ucuagaaccacuuucagaa

SEQ ID NO: 1354662 - RNA, 19 nt, Artificial Sequence
  Description of Artificial Sequence: Synthetic oligonucleotide
  Sense strand starting at position 2697 of SEQ ID NO: 1242529
gggcauguucuguacaaug

SEQ ID NO: 1354663 - RNA, 19 nt, Artificial Sequence
  Description of Artificial Sequence: Synthetic oligonucleotide
  Antisense strand to SEQ ID NO: 1354662
cauuguacagaacaugccc

SEQ ID NO: 1354664 - RNA, 19 nt, Artificial Sequence
  Description of Artificial Sequence: Synthetic oligonucleotide
  Sense strand starting at position 2712 of SEQ ID NO: 1242529
aauguaagauguuuaacag

SEQ ID NO: 1354665 - RNA, 19 nt, Artificial Sequence
  Description of Artificial Sequence: Synthetic oligonucleotide
  Antisense strand to SEQ ID NO: 1354664
cuguuaaacaucuuacauu

SEQ ID NO: 1354666 - RNA, 19 nt, Artificial Sequence
  Description of Artificial Sequence: Synthetic oligonucleotide
  Sense strand starting at position 2991 of SEQ ID NO: 1242529
guagcaagaguuuaggcaa

SEQ ID NO: 1354667 - RNA, 19 nt, Artificial Sequence
  Description of Artificial Sequence: Synthetic oligonucleotide
  Antisense strand to SEQ ID NO: 1354666
uugccuaaacucuugcuac

SEQ ID NO: 1354668 - RNA, 19 nt, Artificial Sequence
  Description of Artificial Sequence: Synthetic oligonucleotide
  Sense strand starting at position 3027 of SEQ ID NO: 1242529
cuuggaagucagugaaaua

SEQ ID NO: 1354669 - RNA, 19 nt, Artificial Sequence
  Description of Artificial Sequence: Synthetic oligonucleotide
  Antisense strand to SEQ ID NO: 1354668
uauuucacugacuuccaag

SEQ ID NO: 1354670 - RNA, 19 nt, Artificial Sequence
  Description of Artificial Sequence: Synthetic oligonucleotide
  Sense strand starting at position 3119 of SEQ ID NO: 1242529
ccuuuaggaaggugucaug

SEQ ID NO: 1354671 - RNA, 19 nt, Artificial Sequence
  Description of Artificial Sequence: Synthetic oligonucleotide
  Antisense strand to SEQ ID NO: 1354670
caugacaccuuccuaaagg

SEQ ID NO: 1354672 - RNA, 19 nt, Artificial Sequence
  Description of Artificial Sequence: Synthetic oligonucleotide
  Sense strand starting at position 3217 of SEQ ID NO: 1242529
aaguuugggcugcaagaau

SEQ ID NO: 1354673 - RNA, 19 nt, Artificial Sequence
  Description of Artificial Sequence: Synthetic oligonucleotide
  Antisense strand to SEQ ID NO: 1354672
auucuugcagcccaaacuu

SEQ ID NO: 1354674 - RNA, 19 nt, Artificial Sequence
  Description of Artificial Sequence: Synthetic oligonucleotide
  Sense strand starting at position 3226 of SEQ ID NO: 1242529
cugcaagaaugaucuauau

SEQ ID NO: 1354675 - RNA, 19 nt, Artificial Sequence
  Description of Artificial Sequence: Synthetic oligonucleotide
  Antisense strand to SEQ ID NO: 1354674
auauagaucauucuugcag

SEQ ID NO: 1354676 - RNA, 19 nt, Artificial Sequence
  Description of Artificial Sequence: Synthetic oligonucleotide
  Sense strand starting at position 3322 of SEQ ID NO: 1242529
aaggguaagucugugauau

SEQ ID NO: 1354677 - RNA, 19 nt, Artificial Sequence
  Description of Artificial Sequence: Synthetic oligonucleotide
  Antisense strand to SEQ ID NO: 1354676
auaucacagacuuacccuu

SEQ ID NO: 1354678 - RNA, 19 nt, Artificial Sequence
  Description of Artificial Sequence: Synthetic oligonucleotide
  Sense strand starting at position 3323 of SEQ ID NO: 1242529
aggguaagucugugauaug

SEQ ID NO: 1354679 - RNA, 19 nt, Artificial Sequence
  Description of Artificial Sequence: Synthetic oligonucleotide
  Antisense strand to SEQ ID NO: 1354678
cauaucacagacuuacccu

SEQ ID NO: 1354680 - RNA, 19 nt, Artificial Sequence
  Description of Artificial Sequence: Synthetic oligonucleotide
  Sense strand starting at position 3407 of SEQ ID NO: 1242529
aggaauacuugucccaucu

SEQ ID NO: 1354681 - RNA, 19 nt, Artificial Sequence
  Description of Artificial Sequence: Synthetic oligonucleotide
  Antisense strand to SEQ ID NO: 1354680
agaugggacaaguauuccu

SEQ ID NO: 1354682 - RNA, 19 nt, Artificial Sequence
  Description of Artificial Sequence: Synthetic oligonucleotide
  Sense strand starting at position 3428 of SEQ ID NO: 1242529
accaaaugcuguucugaua

SEQ ID NO: 1354683 - RNA, 19 nt, Artificial Sequence
  Description of Artificial Sequence: Synthetic oligonucleotide
  Antisense strand to SEQ ID NO: 1354682
uaucagaacagcauuuggu

SEQ ID NO: 1354684 - RNA, 19 nt, Artificial Sequence
  Description of Artificial Sequence: Synthetic oligonucleotide
  Sense strand starting at position 3493 of SEQ ID NO: 1242529
acacaaauccuguguuaua

SEQ ID NO: 1354685 - RNA, 19 nt, Artificial Sequence
  Description of Artificial Sequence: Synthetic oligonucleotide
  Antisense strand to SEQ ID NO: 1354684
uauaacacaggauuugugu

SEQ ID NO: 1354686 - RNA, 19 nt, Artificial Sequence
  Description of Artificial Sequence: Synthetic oligonucleotide
  Sense strand starting at position 3916 of SEQ ID NO: 1242529
uggcuaaugacuuagcaug

SEQ ID NO: 1354687 - RNA, 19 nt, Artificial Sequence
  Description of Artificial Sequence: Synthetic oligonucleotide
  Antisense strand to SEQ ID NO: 1354686
caugcuaagucauuagcca

SEQ ID NO: 1354688 - RNA, 19 nt, Artificial Sequence
  Description of Artificial Sequence: Synthetic oligonucleotide
  Sense strand starting at position 3932 of SEQ ID NO: 1242529
augagaauauagucaguuc

SEQ ID NO: 1354689 - RNA, 19 nt, Artificial Sequence
  Description of Artificial Sequence: Synthetic oligonucleotide
  Antisense strand to SEQ ID NO: 1354688
gaacugacuauauucucau

SEQ ID NO: 1354690 - RNA, 19 nt, Artificial Sequence
  Description of Artificial Sequence: Synthetic oligonucleotide
  Sense strand starting at position 3935 of SEQ ID NO: 1242529
agaauauagucaguucuuc

SEQ ID NO: 1354691 - RNA, 19 nt, Artificial Sequence
  Description of Artificial Sequence: Synthetic oligonucleotide
  Antisense strand to SEQ ID NO: 1354690
gaagaacugacuauauucu

SEQ ID NO: 1354692 - RNA, 19 nt, Artificial Sequence
  Description of Artificial Sequence: Synthetic oligonucleotide
  Sense strand starting at position 3956 of SEQ ID NO: 1242529
auugcuguuccucagagau

SEQ ID NO: 1354693 - RNA, 19 nt, Artificial Sequence
  Description of Artificial Sequence: Synthetic oligonucleotide
  Antisense strand to SEQ ID NO: 1354692
aucucugaggaacagcaau

SEQ ID NO: 1354694 - RNA, 19 nt, Artificial Sequence
  Description of Artificial Sequence: Synthetic oligonucleotide
  Sense strand starting at position 36 of SEQ ID NO: 1242530
gguuguaagcauaggcgua

SEQ ID NO: 1354695 - RNA, 19 nt, Artificial Sequence
  Description of Artificial Sequence: Synthetic oligonucleotide
  Antisense strand to SEQ ID NO: 1354694
uacgccuaugcuuacaacc

SEQ ID NO: 1354696 - RNA, 19 nt, Artificial Sequence
  Description of Artificial Sequence: Synthetic oligonucleotide
  Sense strand starting at position 125 of SEQ ID NO: 1242530
ugagguccugcacaauauu

SEQ ID NO: 1354697 - RNA, 19 nt, Artificial Sequence
  Description of Artificial Sequence: Synthetic oligonucleotide
  Antisense strand to SEQ ID NO: 1354696
aauauugugcaggaccuca

SEQ ID NO: 1354698 - RNA, 19 nt, Artificial Sequence
  Description of Artificial Sequence: Synthetic oligonucleotide
  Sense strand starting at position 250 of SEQ ID NO: 1242530
auaguaggugcccaacaau

SEQ ID NO: 1354699 - RNA, 19 nt, Artificial Sequence
  Description of Artificial Sequence: Synthetic oligonucleotide
  Antisense strand to SEQ ID NO: 1354698
auuguugggcaccuacuau

SEQ ID NO: 1354700 - RNA, 19 nt, Artificial Sequence
  Description of Artificial Sequence: Synthetic oligonucleotide
  Sense strand starting at position 687 of SEQ ID NO: 1242530
uuacaaagucgugggagau

SEQ ID NO: 1354701 - RNA, 19 nt, Artificial Sequence
  Description of Artificial Sequence: Synthetic oligonucleotide
  Antisense strand to SEQ ID NO: 1354700
aucucccacgacuuuguaa

SEQ ID NO: 1354702 - RNA, 19 nt, Artificial Sequence
  Description of Artificial Sequence: Synthetic oligonucleotide
  Sense strand starting at position 688 of SEQ ID NO: 1242530
uacaaagucgugggagauc

SEQ ID NO: 1354703 - RNA, 19 nt, Artificial Sequence
  Description of Artificial Sequence: Synthetic oligonucleotide
  Antisense strand to SEQ ID NO: 1354702
gaucucccacgacuuugua

SEQ ID NO: 1354704 - RNA, 19 nt, Artificial Sequence
  Description of Artificial Sequence: Synthetic oligonucleotide
  Sense strand starting at position 691 of SEQ ID NO: 1242530
aaagucgugggagaucaau

SEQ ID NO: 1354705 - RNA, 19 nt, Artificial Sequence
  Description of Artificial Sequence: Synthetic oligonucleotide
  Antisense strand to SEQ ID NO: 1354704
auugaucucccacgacuuu

SEQ ID NO: 1354706 - RNA, 19 nt, Artificial Sequence
  Description of Artificial Sequence: Synthetic oligonucleotide
  Sense strand starting at position 711 of SEQ ID NO: 1242530
uaguacucagguuggagua

SEQ ID NO: 1354707 - RNA, 19 nt, Artificial Sequence
  Description of Artificial Sequence: Synthetic oligonucleotide
  Antisense strand to SEQ ID NO: 1354706
uacuccaaccugaguacua

SEQ ID NO: 1354708 - RNA, 19 nt, Artificial Sequence
  Description of Artificial Sequence: Synthetic oligonucleotide
  Sense strand starting at position 712 of SEQ ID NO: 1242530
aguacucagguuggaguaa

SEQ ID NO: 1354709 - RNA, 19 nt, Artificial Sequence
  Description of Artificial Sequence: Synthetic oligonucleotide
  Antisense strand to SEQ ID NO: 1354708
uuacuccaaccugaguacu

SEQ ID NO: 1354710 - RNA, 19 nt, Artificial Sequence
  Description of Artificial Sequence: Synthetic oligonucleotide
  Sense strand starting at position 743 of SEQ ID NO: 1242530
aaaguuccugaaggauagu

SEQ ID NO: 1354711 - RNA, 19 nt, Artificial Sequence
  Description of Artificial Sequence: Synthetic oligonucleotide
  Antisense strand to SEQ ID NO: 1354710
acuauccuucaggaacuuu

SEQ ID NO: 1354712 - RNA, 19 nt, Artificial Sequence
  Description of Artificial Sequence: Synthetic oligonucleotide
  Sense strand starting at position 771 of SEQ ID NO: 1242530
caguauaggccugauuaaa

SEQ ID NO: 1354713 - RNA, 19 nt, Artificial Sequence
  Description of Artificial Sequence: Synthetic oligonucleotide
  Antisense strand to SEQ ID NO: 1354712
uuuaaucaggccuauacug

SEQ ID NO: 1354714 - RNA, 19 nt, Artificial Sequence
  Description of Artificial Sequence: Synthetic oligonucleotide
  Sense strand starting at position 1212 of SEQ ID NO: 1242530
cuucuuucucaggaacagu

SEQ ID NO: 1354715 - RNA, 19 nt, Artificial Sequence
  Description of Artificial Sequence: Synthetic oligonucleotide
  Antisense strand to SEQ ID NO: 1354714
acuguuccugagaaagaag

SEQ ID NO: 1354716 - RNA, 19 nt, Artificial Sequence
  Description of Artificial Sequence: Synthetic oligonucleotide
  Sense strand starting at position 1293 of SEQ ID NO: 1242530
uuguaauucuucccugaag

SEQ ID NO: 1354717 - RNA, 19 nt, Artificial Sequence
  Description of Artificial Sequence: Synthetic oligonucleotide
  Antisense strand to SEQ ID NO: 1354716
cuucagggaagaauuacaa

SEQ ID NO: 1354718 - RNA, 19 nt, Artificial Sequence
  Description of Artificial Sequence: Synthetic oligonucleotide
  Sense strand starting at position 1310 of SEQ ID NO: 1242530
aggugauaauuagcucauu

SEQ ID NO: 1354719 - RNA, 19 nt, Artificial Sequence
  Description of Artificial Sequence: Synthetic oligonucleotide
  Antisense strand to SEQ ID NO: 1354718
aaugagcuaauuaucaccu

SEQ ID NO: 1354720 - RNA, 19 nt, Artificial Sequence
  Description of Artificial Sequence: Synthetic oligonucleotide
  Sense strand starting at position 1357 of SEQ ID NO: 1242530
cucucaaagcaggauucua

SEQ ID NO: 1354721 - RNA, 19 nt, Artificial Sequence
  Description of Artificial Sequence: Synthetic oligonucleotide
  Antisense strand to SEQ ID NO: 1354720
uagaauccugcuuugagag

SEQ ID NO: 1354722 - RNA, 19 nt, Artificial Sequence
  Description of Artificial Sequence: Synthetic oligonucleotide
  Sense strand starting at position 1365 of SEQ ID NO: 1242530
gcaggauucuaccugaauu

SEQ ID NO: 1354723 - RNA, 19 nt, Artificial Sequence
  Description of Artificial Sequence: Synthetic oligonucleotide
  Antisense strand to SEQ ID NO: 1354722
aauucagguagaauccugc

SEQ ID NO: 1354724 - RNA, 19 nt, Artificial Sequence
  Description of Artificial Sequence: Synthetic oligonucleotide
  Sense strand starting at position 1525 of SEQ ID NO: 1242530
aaaugugggaucuggaagu

SEQ ID NO: 1354725 - RNA, 19 nt, Artificial Sequence
  Description of Artificial Sequence: Synthetic oligonucleotide
  Antisense strand to SEQ ID NO: 1354724
acuuccagaucccacauuu

SEQ ID NO: 1354726 - RNA, 19 nt, Artificial Sequence
  Description of Artificial Sequence: Synthetic oligonucleotide
  Sense strand starting at position 1536 of SEQ ID NO: 1242530
cuggaagucucucuuggaa

SEQ ID NO: 1354727 - RNA, 19 nt, Artificial Sequence
  Description of Artificial Sequence: Synthetic oligonucleotide
  Antisense strand to SEQ ID NO: 1354726
uuccaagagagacuuccag

SEQ ID NO: 1354728 - RNA, 19 nt, Artificial Sequence
  Description of Artificial Sequence: Synthetic oligonucleotide
  Sense strand starting at position 1539 of SEQ ID NO: 1242530
gaagucucucuuggaaaga

SEQ ID NO: 1354729 - RNA, 19 nt, Artificial Sequence
  Description of Artificial Sequence: Synthetic oligonucleotide
  Antisense strand to SEQ ID NO: 1354728
ucuuuccaagagagacuuc

SEQ ID NO: 1354730 - RNA, 19 nt, Artificial Sequence
  Description of Artificial Sequence: Synthetic oligonucleotide
  Sense strand starting at position 1582 of SEQ ID NO: 1242530
gggcgaaaucgugcaguuu

SEQ ID NO: 1354731 - RNA, 19 nt, Artificial Sequence
  Description of Artificial Sequence: Synthetic oligonucleotide
  Antisense strand to SEQ ID NO: 1354730
aaacugcacgauuucgccc

SEQ ID NO: 1354732 - RNA, 19 nt, Artificial Sequence
  Description of Artificial Sequence: Synthetic oligonucleotide
  Sense strand starting at position 2771 of SEQ ID NO: 1242530
ugcucagauuucccuguaa

SEQ ID NO: 1354733 - RNA, 19 nt, Artificial Sequence
  Description of Artificial Sequence: Synthetic oligonucleotide
  Antisense strand to SEQ ID NO: 1354732
uuacagggaaaucugagca

SEQ ID NO: 1354734 - RNA, 19 nt, Artificial Sequence
  Description of Artificial Sequence: Synthetic oligonucleotide
  Sense strand starting at position 2873 of SEQ ID NO: 1242530
agaggugacuuucuuucua

SEQ ID NO: 1354735 - RNA, 19 nt, Artificial Sequence
  Description of Artificial Sequence: Synthetic oligonucleotide
  Antisense strand to SEQ ID NO: 1354734
uagaaagaaagucaccucu

SEQ ID NO: 1354736 - RNA, 19 nt, Artificial Sequence
  Description of Artificial Sequence: Synthetic oligonucleotide
  Sense strand starting at position 2875 of SEQ ID NO: 1242530
aggugacuuucuuucuaac

SEQ ID NO: 1354737 - RNA, 19 nt, Artificial Sequence
  Description of Artificial Sequence: Synthetic oligonucleotide
  Antisense strand to SEQ ID NO: 1354736
guuagaaagaaagucaccu

SEQ ID NO: 1354738 - RNA, 19 nt, Artificial Sequence
  Description of Artificial Sequence: Synthetic oligonucleotide
  Sense strand starting at position 2957 of SEQ ID NO: 1242530
guaguuacgguucaaagaa

SEQ ID NO: 1354739 - RNA, 19 nt, Artificial Sequence
  Description of Artificial Sequence: Synthetic oligonucleotide
  Antisense strand to SEQ ID NO: 1354738
uucuuugaaccguaacuac

SEQ ID NO: 1354740 - RNA, 19 nt, Artificial Sequence
  Description of Artificial Sequence: Synthetic oligonucleotide
  Sense strand starting at position 2994 of SEQ ID NO: 1242530
guuacaaagugaguacaga

SEQ ID NO: 1354741 - RNA, 19 nt, Artificial Sequence
  Description of Artificial Sequence: Synthetic oligonucleotide
  Antisense strand to SEQ ID NO: 1354740
ucuguacucacuuuguaac

SEQ ID NO: 1354742 - RNA, 19 nt, Artificial Sequence
  Description of Artificial Sequence: Synthetic oligonucleotide
  Sense strand starting at position 3019 of SEQ ID NO: 1242530
ucuagaaggccucaggcau

SEQ ID NO: 1354743 - RNA, 19 nt, Artificial Sequence
  Description of Artificial Sequence: Synthetic oligonucleotide
  Antisense strand to SEQ ID NO: 1354742
augccugaggccuucuaga

SEQ ID NO: 1354744 - RNA, 19 nt, Artificial Sequence
  Description of Artificial Sequence: Synthetic oligonucleotide
  Sense strand starting at position 3115 of SEQ ID NO: 1242530
agacaaaucugucugacuu

SEQ ID NO: 1354745 - RNA, 19 nt, Artificial Sequence
  Description of Artificial Sequence: Synthetic oligonucleotide
  Antisense strand to SEQ ID NO: 1354744
aagucagacagauuugucu

SEQ ID NO: 1354746 - RNA, 19 nt, Artificial Sequence
  Description of Artificial Sequence: Synthetic oligonucleotide
  Sense strand starting at position 3182 of SEQ ID NO: 1242530
uuuccugucccugggaaua

SEQ ID NO: 1354747 - RNA, 19 nt, Artificial Sequence
  Description of Artificial Sequence: Synthetic oligonucleotide
  Antisense strand to SEQ ID NO: 1354746
uauucccagggacaggaaa

SEQ ID NO: 1354748 - RNA, 19 nt, Artificial Sequence
  Description of Artificial Sequence: Synthetic oligonucleotide
  Sense strand starting at position 3270 of SEQ ID NO: 1242530
ggcugaucucaccauguca

SEQ ID NO: 1354749 - RNA, 19 nt, Artificial Sequence
  Description of Artificial Sequence: Synthetic oligonucleotide
  Antisense strand to SEQ ID NO: 1354748
ugacauggugagaucagcc

SEQ ID NO: 1354750 - RNA, 19 nt, Artificial Sequence
  Description of Artificial Sequence: Synthetic oligonucleotide
  Sense strand starting at position 3310 of SEQ ID NO: 1242530
ggcauugggcuccagguaa

SEQ ID NO: 1354751 - RNA, 19 nt, Artificial Sequence
  Description of Artificial Sequence: Synthetic oligonucleotide
  Antisense strand to SEQ ID NO: 1354750
uuaccuggagcccaaugcc

SEQ ID NO: 1354752 - RNA, 19 nt, Artificial Sequence
  Description of Artificial Sequence: Synthetic oligonucleotide
  Sense strand starting at position 3314 of SEQ ID NO: 1242530
uugggcuccagguaaguaa

SEQ ID NO: 1354753 - RNA, 19 nt, Artificial Sequence
  Description of Artificial Sequence: Synthetic oligonucleotide
  Antisense strand to SEQ ID NO: 1354752
uuacuuaccuggagcccaa

SEQ ID NO: 1354754 - RNA, 19 nt, Artificial Sequence
  Description of Artificial Sequence: Synthetic oligonucleotide
  Sense strand starting at position 3341 of SEQ ID NO: 1242530
ccugauaacuuagucauga

SEQ ID NO: 1354755 - RNA, 19 nt, Artificial Sequence
  Description of Artificial Sequence: Synthetic oligonucleotide
  Antisense strand to SEQ ID NO: 1354754
ucaugacuaaguuaucagg

SEQ ID NO: 1354756 - RNA, 19 nt, Artificial Sequence
  Description of Artificial Sequence: Synthetic oligonucleotide
  Sense strand starting at position 3342 of SEQ ID NO: 1242530
cugauaacuuagucaugau

SEQ ID NO: 1354757 - RNA, 19 nt, Artificial Sequence
  Description of Artificial Sequence: Synthetic oligonucleotide
  Antisense strand to SEQ ID NO: 1354756
aucaugacuaaguuaucag

SEQ ID NO: 1354758 - RNA, 19 nt, Artificial Sequence
  Description of Artificial Sequence: Synthetic oligonucleotide
  Sense strand starting at position 3371 of SEQ ID NO: 1242530
gcccuauugggagggaugu

SEQ ID NO: 1354759 - RNA, 19 nt, Artificial Sequence
  Description of Artificial Sequence: Synthetic oligonucleotide
  Antisense strand to SEQ ID NO: 1354758
acaucccucccaauagggc

SEQ ID NO: 1354760 - RNA, 19 nt, Artificial Sequence
  Description of Artificial Sequence: Synthetic oligonucleotide
  Sense strand starting at position 3433 of SEQ ID NO: 1242530
gugacaacgacuuagccau

SEQ ID NO: 1354761 - RNA, 19 nt, Artificial Sequence
  Description of Artificial Sequence: Synthetic oligonucleotide
  Antisense strand to SEQ ID NO: 1354760
auggcuaagucguugucac

SEQ ID NO: 1354762 - RNA, 19 nt, Artificial Sequence
  Description of Artificial Sequence: Synthetic oligonucleotide
  Sense strand starting at position 3439 of SEQ ID NO: 1242530
acgacuuagccauaggguu

SEQ ID NO: 1354763 - RNA, 19 nt, Artificial Sequence
  Description of Artificial Sequence: Synthetic oligonucleotide
  Antisense strand to SEQ ID NO: 1354762
aacccuauggcuaagucgu

SEQ ID NO: 1354764 - RNA, 19 nt, Artificial Sequence
  Description of Artificial Sequence: Synthetic oligonucleotide
  Sense strand starting at position 3558 of SEQ ID NO: 1242530
ugaccuaguucuucugaau

SEQ ID NO: 1354765 - RNA, 19 nt, Artificial Sequence
  Description of Artificial Sequence: Synthetic oligonucleotide
  Antisense strand to SEQ ID NO: 1354764
auucagaagaacuagguca

SEQ ID NO: 1354766 - RNA, 19 nt, Artificial Sequence
  Description of Artificial Sequence: Synthetic oligonucleotide
  Sense strand starting at position 3644 of SEQ ID NO: 1242530
ccaggaggacuguguuacu

SEQ ID NO: 1354767 - RNA, 19 nt, Artificial Sequence
  Description of Artificial Sequence: Synthetic oligonucleotide
  Antisense strand to SEQ ID NO: 1354766
aguaacacaguccuccugg

SEQ ID NO: 1354768 - RNA, 19 nt, Artificial Sequence
  Description of Artificial Sequence: Synthetic oligonucleotide
  Sense strand starting at position 3651 of SEQ ID NO: 1242530
gacuguguuacuuagggca

SEQ ID NO: 1354769 - RNA, 19 nt, Artificial Sequence
  Description of Artificial Sequence: Synthetic oligonucleotide
  Antisense strand to SEQ ID NO: 1354768
ugcccuaaguaacacaguc

SEQ ID NO: 1354770 - RNA, 19 nt, Artificial Sequence
  Description of Artificial Sequence: Synthetic oligonucleotide
  Sense strand starting at position 3718 of SEQ ID NO: 1242530
ucagaagguuguucaguga

SEQ ID NO: 1354771 - RNA, 19 nt, Artificial Sequence
  Description of Artificial Sequence: Synthetic oligonucleotide
  Antisense strand to SEQ ID NO: 1354770
ucacugaacaaccuucuga

SEQ ID NO: 1354772 - RNA, 19 nt, Artificial Sequence
  Description of Artificial Sequence: Synthetic oligonucleotide
  Sense strand starting at position 3798 of SEQ ID NO: 1242530
ccaucacuggcugaugaau

SEQ ID NO: 1354773 - RNA, 19 nt, Artificial Sequence
  Description of Artificial Sequence: Synthetic oligonucleotide
  Antisense strand to SEQ ID NO: 1354772
auucaucagccagugaugg

SEQ ID NO: 1354774 - RNA, 19 nt, Artificial Sequence
  Description of Artificial Sequence: Synthetic oligonucleotide
  Sense strand starting at position 475 of SEQ ID NO: 1242531
guucuuucugcccagggua

SEQ ID NO: 1354775 - RNA, 19 nt, Artificial Sequence
  Description of Artificial Sequence: Synthetic oligonucleotide
  Antisense strand to SEQ ID NO: 1354774
uacccugggcagaaagaac

SEQ ID NO: 1354776 - RNA, 19 nt, Artificial Sequence
  Description of Artificial Sequence: Synthetic oligonucleotide
  Sense strand starting at position 524 of SEQ ID NO: 1242531
ggcuaaugggaaugguauu

SEQ ID NO: 1354777 - RNA, 19 nt, Artificial Sequence
  Description of Artificial Sequence: Synthetic oligonucleotide
  Antisense strand to SEQ ID NO: 1354776
aauaccauucccauuagcc

SEQ ID NO: 1354778 - RNA, 19 nt, Artificial Sequence
  Description of Artificial Sequence: Synthetic oligonucleotide
  Sense strand starting at position 657 of SEQ ID NO: 1242531
gcgguaagccagcuuccaa

SEQ ID NO: 1354779 - RNA, 19 nt, Artificial Sequence
  Description of Artificial Sequence: Synthetic oligonucleotide
  Antisense strand to SEQ ID NO: 1354778
uuggaagcuggcuuaccgc

SEQ ID NO: 1354780 - RNA, 19 nt, Artificial Sequence
  Description of Artificial Sequence: Synthetic oligonucleotide
  Sense strand starting at position 707 of SEQ ID NO: 1242531
ucuaucaaugagugcacau

SEQ ID NO: 1354781 - RNA, 19 nt, Artificial Sequence
  Description of Artificial Sequence: Synthetic oligonucleotide
  Antisense strand to SEQ ID NO: 1354780
augugcacucauugauaga

SEQ ID NO: 1354782 - RNA, 19 nt, Artificial Sequence
  Description of Artificial Sequence: Synthetic oligonucleotide
  Sense strand starting at position 812 of SEQ ID NO: 1242531
acaguaguucuuuagcuga

SEQ ID NO: 1354783 - RNA, 19 nt, Artificial Sequence
  Description of Artificial Sequence: Synthetic oligonucleotide
  Antisense strand to SEQ ID NO: 1354782
ucagcuaaagaacuacugu

SEQ ID NO: 1354784 - RNA, 19 nt, Artificial Sequence
  Description of Artificial Sequence: Synthetic oligonucleotide
  Sense strand starting at position 881 of SEQ ID NO: 1242531
aguagagugcaguaagaua

SEQ ID NO: 1354785 - RNA, 19 nt, Artificial Sequence
  Description of Artificial Sequence: Synthetic oligonucleotide
  Antisense strand to SEQ ID NO: 1354784
uaucuuacugcacucuacu

SEQ ID NO: 1354786 - RNA, 19 nt, Artificial Sequence
  Description of Artificial Sequence: Synthetic oligonucleotide
  Sense strand starting at position 977 of SEQ ID NO: 1242531
uauugugccuaauuuacga

SEQ ID NO: 1354787 - RNA, 19 nt, Artificial Sequence
  Description of Artificial Sequence: Synthetic oligonucleotide
  Antisense strand to SEQ ID NO: 1354786
ucguaaauuaggcacaaua

SEQ ID NO: 1354788 - RNA, 19 nt, Artificial Sequence
  Description of Artificial Sequence: Synthetic oligonucleotide
  Sense strand starting at position 1005 of SEQ ID NO: 1242531
aguaaucacagguauguau

SEQ ID NO: 1354789 - RNA, 19 nt, Artificial Sequence
  Description of Artificial Sequence: Synthetic oligonucleotide
  Antisense strand to SEQ ID NO: 1354788
auacauaccugugauuacu

SEQ ID NO: 1354790 - RNA, 19 nt, Artificial Sequence
  Description of Artificial Sequence: Synthetic oligonucleotide
  Sense strand starting at position 1014 of SEQ ID NO: 1242531
agguauguauguguaaucu

SEQ ID NO: 1354791 - RNA, 19 nt, Artificial Sequence
  Description of Artificial Sequence: Synthetic oligonucleotide
  Antisense strand to SEQ ID NO: 1354790
agauuacacauacauaccu

SEQ ID NO: 1354792 - RNA, 19 nt, Artificial Sequence
  Description of Artificial Sequence: Synthetic oligonucleotide
  Sense strand starting at position 1020 of SEQ ID NO: 1242531
guauguguaaucuguauga

SEQ ID NO: 1354793 - RNA, 19 nt, Artificial Sequence
  Description of Artificial Sequence: Synthetic oligonucleotide
  Antisense strand to SEQ ID NO: 1354792
ucauacagauuacacauac

SEQ ID NO: 1354794 - RNA, 19 nt, Artificial Sequence
  Description of Artificial Sequence: Synthetic oligonucleotide
  Sense strand starting at position 1022 of SEQ ID NO: 1242531
auguguaaucuguaugaga

SEQ ID NO: 1354795 - RNA, 19 nt, Artificial Sequence
  Description of Artificial Sequence: Synthetic oligonucleotide
  Antisense strand to SEQ ID NO: 1354794
ucucauacagauuacacau

SEQ ID NO: 1354796 - RNA, 19 nt, Artificial Sequence
  Description of Artificial Sequence: Synthetic oligonucleotide
  Sense strand starting at position 1024 of SEQ ID NO: 1242531
guguaaucuguaugagaaa

SEQ ID NO: 1354797 - RNA, 19 nt, Artificial Sequence
  Description of Artificial Sequence: Synthetic oligonucleotide
  Antisense strand to SEQ ID NO: 1354796
uuucucauacagauuacac

SEQ ID NO: 1354798 - RNA, 19 nt, Artificial Sequence
  Description of Artificial Sequence: Synthetic oligonucleotide
  Sense strand starting at position 1252 of SEQ ID NO: 1242531
gaggcuuagaagcgguuaa

SEQ ID NO: 1354799 - RNA, 19 nt, Artificial Sequence
  Description of Artificial Sequence: Synthetic oligonucleotide
  Antisense strand to SEQ ID NO: 1354798
uuaaccgcuucuaagccuc

SEQ ID NO: 1354800 - RNA, 19 nt, Artificial Sequence
  Description of Artificial Sequence: Synthetic oligonucleotide
  Sense strand starting at position 1256 of SEQ ID NO: 1242531
cuuagaagcgguuaaggaa

SEQ ID NO: 1354801 - RNA, 19 nt, Artificial Sequence
  Description of Artificial Sequence: Synthetic oligonucleotide
  Antisense strand to SEQ ID NO: 1354800
uuccuuaaccgcuucuaag

SEQ ID NO: 1354802 - RNA, 19 nt, Artificial Sequence
  Description of Artificial Sequence: Synthetic oligonucleotide
  Sense strand starting at position 1298 of SEQ ID NO: 1242531
guggauacaagcuauagua

SEQ ID NO: 1354803 - RNA, 19 nt, Artificial Sequence
  Description of Artificial Sequence: Synthetic oligonucleotide
  Antisense strand to SEQ ID NO: 1354802
uacuauagcuuguauccac

SEQ ID NO: 1354804 - RNA, 19 nt, Artificial Sequence
  Description of Artificial Sequence: Synthetic oligonucleotide
  Sense strand starting at position 1349 of SEQ ID NO: 1242531
gggucuuaugaaggucaga

SEQ ID NO: 1354805 - RNA, 19 nt, Artificial Sequence
  Description of Artificial Sequence: Synthetic oligonucleotide
  Antisense strand to SEQ ID NO: 1354804
ucugaccuucauaagaccc

SEQ ID NO: 1354806 - RNA, 19 nt, Artificial Sequence
  Description of Artificial Sequence: Synthetic oligonucleotide
  Sense strand starting at position 1402 of SEQ ID NO: 1242531
aucuucucucuuugggaaa

SEQ ID NO: 1354807 - RNA, 19 nt, Artificial Sequence
  Description of Artificial Sequence: Synthetic oligonucleotide
  Antisense strand to SEQ ID NO: 1354806
uuucccaaagagagaagau

SEQ ID NO: 1354808 - RNA, 19 nt, Artificial Sequence
  Description of Artificial Sequence: Synthetic oligonucleotide
  Sense strand starting at position 1456 of SEQ ID NO: 1242531
gacucaguguuuccaagga

SEQ ID NO: 1354809 - RNA, 19 nt, Artificial Sequence
  Description of Artificial Sequence: Synthetic oligonucleotide
  Antisense strand to SEQ ID NO: 1354808
uccuuggaaacacugaguc

SEQ ID NO: 1354810 - RNA, 19 nt, Artificial Sequence
  Description of Artificial Sequence: Synthetic oligonucleotide
  Sense strand starting at position 1460 of SEQ ID NO: 1242531
caguguuuccaaggaacac

SEQ ID NO: 1354811 - RNA, 19 nt, Artificial Sequence
  Description of Artificial Sequence: Synthetic oligonucleotide
  Antisense strand to SEQ ID NO: 1354810
guguuccuuggaaacacug

SEQ ID NO: 1354812 - RNA, 19 nt, Artificial Sequence
  Description of Artificial Sequence: Synthetic oligonucleotide
  Sense strand starting at position 1490 of SEQ ID NO: 1242531
cuaugaaacuacucaggca

SEQ ID NO: 1354813 - RNA, 19 nt, Artificial Sequence
  Description of Artificial Sequence: Synthetic oligonucleotide
  Antisense strand to SEQ ID NO: 1354812
ugccugaguaguuucauag

SEQ ID NO: 1354814 - RNA, 19 nt, Artificial Sequence
  Description of Artificial Sequence: Synthetic oligonucleotide
  Sense strand starting at position 1564 of SEQ ID NO: 1242531
ucuguacccguccagugau

SEQ ID NO: 1354815 - RNA, 19 nt, Artificial Sequence
  Description of Artificial Sequence: Synthetic oligonucleotide
  Antisense strand to SEQ ID NO: 1354814
aucacuggacggguacaga

SEQ ID NO: 1354816 - RNA, 19 nt, Artificial Sequence
  Description of Artificial Sequence: Synthetic oligonucleotide
  Sense strand starting at position 1576 of SEQ ID NO: 1242531
cagugaugucuguaucugu

SEQ ID NO: 1354817 - RNA, 19 nt, Artificial Sequence
  Description of Artificial Sequence: Synthetic oligonucleotide
  Antisense strand to SEQ ID NO: 1354816
acagauacagacaucacug

SEQ ID NO: 1354818 - RNA, 19 nt, Artificial Sequence
  Description of Artificial Sequence: Synthetic oligonucleotide
  Sense strand starting at position 1655 of SEQ ID NO: 1242531
cccagcuacggauaaauga

SEQ ID NO: 1354819 - RNA, 19 nt, Artificial Sequence
  Description of Artificial Sequence: Synthetic oligonucleotide
  Antisense strand to SEQ ID NO: 1354818
ucauuuauccguagcuggg

SEQ ID NO: 1354820 - RNA, 19 nt, Artificial Sequence
  Description of Artificial Sequence: Synthetic oligonucleotide
  Sense strand starting at position 1670 of SEQ ID NO: 1242531
augaucuccuccgcagaga

SEQ ID NO: 1354821 - RNA, 19 nt, Artificial Sequence
  Description of Artificial Sequence: Synthetic oligonucleotide
  Antisense strand to SEQ ID NO: 1354820
ucucugcggaggagaucau

SEQ ID NO: 1354822 - RNA, 19 nt, Artificial Sequence
  Description of Artificial Sequence: Synthetic oligonucleotide
  Sense strand starting at position 1671 of SEQ ID NO: 1242531
ugaucuccuccgcagagaa

SEQ ID NO: 1354823 - RNA, 19 nt, Artificial Sequence
  Description of Artificial Sequence: Synthetic oligonucleotide
  Antisense strand to SEQ ID NO: 1354822
uucucugcggaggagauca

SEQ ID NO: 1354824 - RNA, 19 nt, Artificial Sequence
  Description of Artificial Sequence: Synthetic oligonucleotide
  Sense strand starting at position 1704 of SEQ ID NO: 1242531
cgauacugcccagaacauu

SEQ ID NO: 1354825 - RNA, 19 nt, Artificial Sequence
  Description of Artificial Sequence: Synthetic oligonucleotide
  Antisense strand to SEQ ID NO: 1354824
aauguucugggcaguaucg

SEQ ID NO: 1354826 - RNA, 19 nt, Artificial Sequence
  Description of Artificial Sequence: Synthetic oligonucleotide
  Sense strand starting at position 1716 of SEQ ID NO: 1242531
gaacauucucaggacgcaa

SEQ ID NO: 1354827 - RNA, 19 nt, Artificial Sequence
  Description of Artificial Sequence: Synthetic oligonucleotide
  Antisense strand to SEQ ID NO: 1354826
uugcguccugagaauguuc

SEQ ID NO: 1354828 - RNA, 19 nt, Artificial Sequence
  Description of Artificial Sequence: Synthetic oligonucleotide
  Sense strand starting at position 2176 of SEQ ID NO: 1242531
aggagugguaguuggaaau

SEQ ID NO: 1354829 - RNA, 19 nt, Artificial Sequence
  Description of Artificial Sequence: Synthetic oligonucleotide
  Antisense strand to SEQ ID NO: 1354828
auuuccaacuaccacuccu

SEQ ID NO: 1354830 - RNA, 19 nt, Artificial Sequence
  Description of Artificial Sequence: Synthetic oligonucleotide
  Sense strand starting at position 2212 of SEQ ID NO: 1242531
gacguuuagcuuccggcaa

SEQ ID NO: 1354831 - RNA, 19 nt, Artificial Sequence
  Description of Artificial Sequence: Synthetic oligonucleotide
  Antisense strand to SEQ ID NO: 1354830
uugccggaagcuaaacguc

SEQ ID NO: 1354832 - RNA, 19 nt, Artificial Sequence
  Description of Artificial Sequence: Synthetic oligonucleotide
  Sense strand starting at position 2296 of SEQ ID NO: 1242531
acuucuguugcugaaauaa

SEQ ID NO: 1354833 - RNA, 19 nt, Artificial Sequence
  Description of Artificial Sequence: Synthetic oligonucleotide
  Antisense strand to SEQ ID NO: 1354832
uuauuucagcaacagaagu

SEQ ID NO: 1354834 - RNA, 19 nt, Artificial Sequence
  Description of Artificial Sequence: Synthetic oligonucleotide
  Sense strand starting at position 2357 of SEQ ID NO: 1242531
acccauuaacgugacagau

SEQ ID NO: 1354835 - RNA, 19 nt, Artificial Sequence
  Description of Artificial Sequence: Synthetic oligonucleotide
  Antisense strand to SEQ ID NO: 1354834
aucugucacguuaaugggu

SEQ ID NO: 1354836 - RNA, 19 nt, Artificial Sequence
  Description of Artificial Sequence: Synthetic oligonucleotide
  Sense strand starting at position 2377 of SEQ ID NO: 1242531
ucaguuuaauagguuguca

SEQ ID NO: 1354837 - RNA, 19 nt, Artificial Sequence
  Description of Artificial Sequence: Synthetic oligonucleotide
  Antisense strand to SEQ ID NO: 1354836
ugacaaccuauuaaacuga

SEQ ID NO: 1354838 - RNA, 19 nt, Artificial Sequence
  Description of Artificial Sequence: Synthetic oligonucleotide
  Sense strand starting at position 2379 of SEQ ID NO: 1242531
aguuuaauagguugucaac

SEQ ID NO: 1354839 - RNA, 19 nt, Artificial Sequence
  Description of Artificial Sequence: Synthetic oligonucleotide
  Antisense strand to SEQ ID NO: 1354838
guugacaaccuauuaaacu

SEQ ID NO: 1354840 - RNA, 19 nt, Artificial Sequence
  Description of Artificial Sequence: Synthetic oligonucleotide
  Sense strand starting at position 2633 of SEQ ID NO: 1242531
uacauugagccgugaugac

SEQ ID NO: 1354841 - RNA, 19 nt, Artificial Sequence
  Description of Artificial Sequence: Synthetic oligonucleotide
  Antisense strand to SEQ ID NO: 1354840
gucaucacggcucaaugua

SEQ ID NO: 1354842 - RNA, 19 nt, Artificial Sequence
  Description of Artificial Sequence: Synthetic oligonucleotide
  Sense strand starting at position 2794 of SEQ ID NO: 1242531
ugaaaucaaccuggccaau

SEQ ID NO: 1354843 - RNA, 19 nt, Artificial Sequence
  Description of Artificial Sequence: Synthetic oligonucleotide
  Antisense strand to SEQ ID NO: 1354842
auuggccagguugauuuca

SEQ ID NO: 1354844 - RNA, 19 nt, Artificial Sequence
  Description of Artificial Sequence: Synthetic oligonucleotide
  Sense strand starting at position 3001 of SEQ ID NO: 1242531
ugagacugucucgaauaac

SEQ ID NO: 1354845 - RNA, 19 nt, Artificial Sequence
  Description of Artificial Sequence: Synthetic oligonucleotide
  Antisense strand to SEQ ID NO: 1354844
guuauucgagacagucuca

SEQ ID NO: 1354846 - RNA, 19 nt, Artificial Sequence
  Description of Artificial Sequence: Synthetic oligonucleotide
  Sense strand starting at position 3137 of SEQ ID NO: 1242531
gcuucuggccgugauuuca

SEQ ID NO: 1354847 - RNA, 19 nt, Artificial Sequence
  Description of Artificial Sequence: Synthetic oligonucleotide
  Antisense strand to SEQ ID NO: 1354846
ugaaaucacggccagaagc

SEQ ID NO: 1354848 - RNA, 19 nt, Artificial Sequence
  Description of Artificial Sequence: Synthetic oligonucleotide
  Sense strand starting at position 3799 of SEQ ID NO: 1242531
uggugagaaauuggcaaau

SEQ ID NO: 1354849 - RNA, 19 nt, Artificial Sequence
  Description of Artificial Sequence: Synthetic oligonucleotide
  Antisense strand to SEQ ID NO: 1354848
auuugccaauuucucacca

SEQ ID NO: 1354850 - RNA, 19 nt, Artificial Sequence
  Description of Artificial Sequence: Synthetic oligonucleotide
  Sense strand starting at position 3840 of SEQ ID NO: 1242531
auucucuuguccucaguaa

SEQ ID NO: 1354851 - RNA, 19 nt, Artificial Sequence
  Description of Artificial Sequence: Synthetic oligonucleotide
  Antisense strand to SEQ ID NO: 1354850
uuacugaggacaagagaau

SEQ ID NO: 1354852 - RNA, 19 nt, Artificial Sequence
  Description of Artificial Sequence: Synthetic oligonucleotide
  Sense strand starting at position 3847 of SEQ ID NO: 1242531
uguccucaguaaucucaca

SEQ ID NO: 1354853 - RNA, 19 nt, Artificial Sequence
  Description of Artificial Sequence: Synthetic oligonucleotide
  Antisense strand to SEQ ID NO: 1354852
ugugagauuacugaggaca

SEQ ID NO: 1354854 - RNA, 19 nt, Artificial Sequence
  Description of Artificial Sequence: Synthetic oligonucleotide
  Sense strand starting at position 56 of SEQ ID NO: 1242532
cuagaaaggcugcaaguua

SEQ ID NO: 1354855 - RNA, 19 nt, Artificial Sequence
  Description of Artificial Sequence: Synthetic oligonucleotide
  Antisense strand to SEQ ID NO: 1354854
uaacuugcagccuuucuag

SEQ ID NO: 1354856 - RNA, 19 nt, Artificial Sequence
  Description of Artificial Sequence: Synthetic oligonucleotide
  Sense strand starting at position 115 of SEQ ID NO: 1242532
gccuuuccugggugaccua

SEQ ID NO: 1354857 - RNA, 19 nt, Artificial Sequence
  Description of Artificial Sequence: Synthetic oligonucleotide
  Antisense strand to SEQ ID NO: 1354856
uaggucacccaggaaaggc

SEQ ID NO: 1354858 - RNA, 19 nt, Artificial Sequence
  Description of Artificial Sequence: Synthetic oligonucleotide
  Sense strand starting at position 143 of SEQ ID NO: 1242532
agcuuuagauaacuagaau

SEQ ID NO: 1354859 - RNA, 19 nt, Artificial Sequence
  Description of Artificial Sequence: Synthetic oligonucleotide
  Antisense strand to SEQ ID NO: 1354858
auucuaguuaucuaaagcu

SEQ ID NO: 1354860 - RNA, 19 nt, Artificial Sequence
  Description of Artificial Sequence: Synthetic oligonucleotide
  Sense strand starting at position 170 of SEQ ID NO: 1242532
agccaucagcaucagaaua

SEQ ID NO: 1354861 - RNA, 19 nt, Artificial Sequence
  Description of Artificial Sequence: Synthetic oligonucleotide
  Antisense strand to SEQ ID NO: 1354860
uauucugaugcugauggcu

SEQ ID NO: 1354862 - RNA, 19 nt, Artificial Sequence
  Description of Artificial Sequence: Synthetic oligonucleotide
  Sense strand starting at position 178 of SEQ ID NO: 1242532
gcaucagaauaagagguaa

SEQ ID NO: 1354863 - RNA, 19 nt, Artificial Sequence
  Description of Artificial Sequence: Synthetic oligonucleotide
  Antisense strand to SEQ ID NO: 1354862
uuaccucuuauucugaugc

SEQ ID NO: 1354864 - RNA, 19 nt, Artificial Sequence
  Description of Artificial Sequence: Synthetic oligonucleotide
  Sense strand starting at position 238 of SEQ ID NO: 1242532
ugguuauagaaauauggcu

SEQ ID NO: 1354865 - RNA, 19 nt, Artificial Sequence
  Description of Artificial Sequence: Synthetic oligonucleotide
  Antisense strand to SEQ ID NO: 1354864
agccauauuucuauaacca

SEQ ID NO: 1354866 - RNA, 19 nt, Artificial Sequence
  Description of Artificial Sequence: Synthetic oligonucleotide
  Sense strand starting at position 244 of SEQ ID NO: 1242532
uagaaauauggcuguauuc

SEQ ID NO: 1354867 - RNA, 19 nt, Artificial Sequence
  Description of Artificial Sequence: Synthetic oligonucleotide
  Antisense strand to SEQ ID NO: 1354866
gaauacagccauauuucua

SEQ ID NO: 1354868 - RNA, 19 nt, Artificial Sequence
  Description of Artificial Sequence: Synthetic oligonucleotide
  Sense strand starting at position 246 of SEQ ID NO: 1242532
gaaauauggcuguauucuc

SEQ ID NO: 1354869 - RNA, 19 nt, Artificial Sequence
  Description of Artificial Sequence: Synthetic oligonucleotide
  Antisense strand to SEQ ID NO: 1354868
gagaauacagccauauuuc

SEQ ID NO: 1354870 - RNA, 19 nt, Artificial Sequence
  Description of Artificial Sequence: Synthetic oligonucleotide
  Sense strand starting at position 251 of SEQ ID NO: 1242532
auggcuguauucucugaca

SEQ ID NO: 1354871 - RNA, 19 nt, Artificial Sequence
  Description of Artificial Sequence: Synthetic oligonucleotide
  Antisense strand to SEQ ID NO: 1354870
ugucagagaauacagccau

SEQ ID NO: 1354872 - RNA, 19 nt, Artificial Sequence
  Description of Artificial Sequence: Synthetic oligonucleotide
  Sense strand starting at position 253 of SEQ ID NO: 1242532
ggcuguauucucugacaau

SEQ ID NO: 1354873 - RNA, 19 nt, Artificial Sequence
  Description of Artificial Sequence: Synthetic oligonucleotide
  Antisense strand to SEQ ID NO: 1354872
auugucagagaauacagcc

SEQ ID NO: 1354874 - RNA, 19 nt, Artificial Sequence
  Description of Artificial Sequence: Synthetic oligonucleotide
  Sense strand starting at position 254 of SEQ ID NO: 1242532
gcuguauucucugacaauu

SEQ ID NO: 1354875 - RNA, 19 nt, Artificial Sequence
  Description of Artificial Sequence: Synthetic oligonucleotide
  Antisense strand to SEQ ID NO: 1354874
aauugucagagaauacagc

SEQ ID NO: 1354876 - RNA, 19 nt, Artificial Sequence
  Description of Artificial Sequence: Synthetic oligonucleotide
  Sense strand starting at position 308 of SEQ ID NO: 1242532
ggauauggagagugcauaa

SEQ ID NO: 1354877 - RNA, 19 nt, Artificial Sequence
  Description of Artificial Sequence: Synthetic oligonucleotide
  Antisense strand to SEQ ID NO: 1354876
uuaugcacucuccauaucc

SEQ ID NO: 1354878 - RNA, 19 nt, Artificial Sequence
  Description of Artificial Sequence: Synthetic oligonucleotide
  Sense strand starting at position 330 of SEQ ID NO: 1242532
gcaggauaagcugaguaau

SEQ ID NO: 1354879 - RNA, 19 nt, Artificial Sequence
  Description of Artificial Sequence: Synthetic oligonucleotide
  Antisense strand to SEQ ID NO: 1354878
auuacucagcuuauccugc

SEQ ID NO: 1354880 - RNA, 19 nt, Artificial Sequence
  Description of Artificial Sequence: Synthetic oligonucleotide
  Sense strand starting at position 332 of SEQ ID NO: 1242532
aggauaagcugaguaauua

SEQ ID NO: 1354881 - RNA, 19 nt, Artificial Sequence
  Description of Artificial Sequence: Synthetic oligonucleotide
  Antisense strand to SEQ ID NO: 1354880
uaauuacucagcuuauccu

SEQ ID NO: 1354882 - RNA, 19 nt, Artificial Sequence
  Description of Artificial Sequence: Synthetic oligonucleotide
  Sense strand starting at position 374 of SEQ ID NO: 1242532
guauauguauuaccugaga

SEQ ID NO: 1354883 - RNA, 19 nt, Artificial Sequence
  Description of Artificial Sequence: Synthetic oligonucleotide
  Antisense strand to SEQ ID NO: 1354882
ucucagguaauacauauac

SEQ ID NO: 1354884 - RNA, 19 nt, Artificial Sequence
  Description of Artificial Sequence: Synthetic oligonucleotide
  Sense strand starting at position 377 of SEQ ID NO: 1242532
uauguauuaccugagagua

SEQ ID NO: 1354885 - RNA, 19 nt, Artificial Sequence
  Description of Artificial Sequence: Synthetic oligonucleotide
  Antisense strand to SEQ ID NO: 1354884
uacucucagguaauacaua

SEQ ID NO: 1354886 - RNA, 19 nt, Artificial Sequence
  Description of Artificial Sequence: Synthetic oligonucleotide
  Sense strand starting at position 379 of SEQ ID NO: 1242532
uguauuaccugagaguaaa

SEQ ID NO: 1354887 - RNA, 19 nt, Artificial Sequence
  Description of Artificial Sequence: Synthetic oligonucleotide
  Antisense strand to SEQ ID NO: 1354886
uuuacucucagguaauaca

SEQ ID NO: 1354888 - RNA, 19 nt, Artificial Sequence
  Description of Artificial Sequence: Synthetic oligonucleotide
  Sense strand starting at position 410 of SEQ ID NO: 1242532
caaauuagaugcuggaaga

SEQ ID NO: 1354889 - RNA, 19 nt, Artificial Sequence
  Description of Artificial Sequence: Synthetic oligonucleotide
  Antisense strand to SEQ ID NO: 1354888
ucuuccagcaucuaauuug

SEQ ID NO: 1354890 - RNA, 19 nt, Artificial Sequence
  Description of Artificial Sequence: Synthetic oligonucleotide
  Sense strand starting at position 468 of SEQ ID NO: 1242532
gcuaauaguugagggcuaa

SEQ ID NO: 1354891 - RNA, 19 nt, Artificial Sequence
  Description of Artificial Sequence: Synthetic oligonucleotide
  Antisense strand to SEQ ID NO: 1354890
uuagcccucaacuauuagc

SEQ ID NO: 1354892 - RNA, 19 nt, Artificial Sequence
  Description of Artificial Sequence: Synthetic oligonucleotide
  Sense strand starting at position 497 of SEQ ID NO: 1242532
gaagaaagguaauacguaa

SEQ ID NO: 1354893 - RNA, 19 nt, Artificial Sequence
  Description of Artificial Sequence: Synthetic oligonucleotide
  Antisense strand to SEQ ID NO: 1354892
uuacguauuaccuuucuuc

SEQ ID NO: 1354894 - RNA, 19 nt, Artificial Sequence
  Description of Artificial Sequence: Synthetic oligonucleotide
  Sense strand starting at position 501 of SEQ ID NO: 1242532
aaagguaauacguaaaggu

SEQ ID NO: 1354895 - RNA, 19 nt, Artificial Sequence
  Description of Artificial Sequence: Synthetic oligonucleotide
  Antisense strand to SEQ ID NO: 1354894
accuuuacguauuaccuuu

SEQ ID NO: 1354896 - RNA, 19 nt, Artificial Sequence
  Description of Artificial Sequence: Synthetic oligonucleotide
  Sense strand starting at position 625 of SEQ ID NO: 1242532
ugaaauagaugacauagua

SEQ ID NO: 1354897 - RNA, 19 nt, Artificial Sequence
  Description of Artificial Sequence: Synthetic oligonucleotide
  Antisense strand to SEQ ID NO: 1354896
uacuaugucaucuauuuca

SEQ ID NO: 1354898 - RNA, 19 nt, Artificial Sequence
  Description of Artificial Sequence: Synthetic oligonucleotide
  Sense strand starting at position 874 of SEQ ID NO: 1242532
gucacaauauuauugagca

SEQ ID NO: 1354899 - RNA, 19 nt, Artificial Sequence
  Description of Artificial Sequence: Synthetic oligonucleotide
  Antisense strand to SEQ ID NO: 1354898
ugcucaauaauauugugac

SEQ ID NO: 1354900 - RNA, 19 nt, Artificial Sequence
  Description of Artificial Sequence: Synthetic oligonucleotide
  Sense strand starting at position 878 of SEQ ID NO: 1242532
caauauuauugagcauggu

SEQ ID NO: 1354901 - RNA, 19 nt, Artificial Sequence
  Description of Artificial Sequence: Synthetic oligonucleotide
  Antisense strand to SEQ ID NO: 1354900
accaugcucaauaauauug

SEQ ID NO: 1354902 - RNA, 19 nt, Artificial Sequence
  Description of Artificial Sequence: Synthetic oligonucleotide
  Sense strand starting at position 881 of SEQ ID NO: 1242532
uauuauugagcauggugga

SEQ ID NO: 1354903 - RNA, 19 nt, Artificial Sequence
  Description of Artificial Sequence: Synthetic oligonucleotide
  Antisense strand to SEQ ID NO: 1354902
uccaccaugcucaauaaua

SEQ ID NO: 1354904 - RNA, 19 nt, Artificial Sequence
  Description of Artificial Sequence: Synthetic oligonucleotide
  Sense strand starting at position 882 of SEQ ID NO: 1242532
auuauugagcaugguggaa

SEQ ID NO: 1354905 - RNA, 19 nt, Artificial Sequence
  Description of Artificial Sequence: Synthetic oligonucleotide
  Antisense strand to SEQ ID NO: 1354904
uuccaccaugcucaauaau

SEQ ID NO: 1354906 - RNA, 19 nt, Artificial Sequence
  Description of Artificial Sequence: Synthetic oligonucleotide
  Sense strand starting at position 933 of SEQ ID NO: 1242532
agaagaguauuucguaaua

SEQ ID NO: 1354907 - RNA, 19 nt, Artificial Sequence
  Description of Artificial Sequence: Synthetic oligonucleotide
  Antisense strand to SEQ ID NO: 1354906
uauuacgaaauacucuucu

SEQ ID NO: 1354908 - RNA, 19 nt, Artificial Sequence
  Description of Artificial Sequence: Synthetic oligonucleotide
  Sense strand starting at position 935 of SEQ ID NO: 1242532
aagaguauuucguaauacu

SEQ ID NO: 1354909 - RNA, 19 nt, Artificial Sequence
  Description of Artificial Sequence: Synthetic oligonucleotide
  Antisense strand to SEQ ID NO: 1354908
aguauuacgaaauacucuu

SEQ ID NO: 1354910 - RNA, 19 nt, Artificial Sequence
  Description of Artificial Sequence: Synthetic oligonucleotide
  Sense strand starting at position 986 of SEQ ID NO: 1242532
ugacuaauauauguguaag

SEQ ID NO: 1354911 - RNA, 19 nt, Artificial Sequence
  Description of Artificial Sequence: Synthetic oligonucleotide
  Antisense strand to SEQ ID NO: 1354910
cuuacacauauauuaguca

SEQ ID NO: 1354912 - RNA, 19 nt, Artificial Sequence
  Description of Artificial Sequence: Synthetic oligonucleotide
  Sense strand starting at position 996 of SEQ ID NO: 1242532
auguguaaguaauaacaca

SEQ ID NO: 1354913 - RNA, 19 nt, Artificial Sequence
  Description of Artificial Sequence: Synthetic oligonucleotide
  Antisense strand to SEQ ID NO: 1354912
uguguuauuacuuacacau

SEQ ID NO: 1354914 - RNA, 19 nt, Artificial Sequence
  Description of Artificial Sequence: Synthetic oligonucleotide
  Sense strand starting at position 1044 of SEQ ID NO: 1242532
aauggaaacuaacgauaga

SEQ ID NO: 1354915 - RNA, 19 nt, Artificial Sequence
  Description of Artificial Sequence: Synthetic oligonucleotide
  Antisense strand to SEQ ID NO: 1354914
ucuaucguuaguuuccauu

SEQ ID NO: 1354916 - RNA, 19 nt, Artificial Sequence
  Description of Artificial Sequence: Synthetic oligonucleotide
  Sense strand starting at position 1057 of SEQ ID NO: 1242532
gauagauaauguuagcaca

SEQ ID NO: 1354917 - RNA, 19 nt, Artificial Sequence
  Description of Artificial Sequence: Synthetic oligonucleotide
  Antisense strand to SEQ ID NO: 1354916
ugugcuaacauuaucuauc

SEQ ID NO: 1354918 - RNA, 19 nt, Artificial Sequence
  Description of Artificial Sequence: Synthetic oligonucleotide
  Sense strand starting at position 1060 of SEQ ID NO: 1242532
agauaauguuagcacauau

SEQ ID NO: 1354919 - RNA, 19 nt, Artificial Sequence
  Description of Artificial Sequence: Synthetic oligonucleotide
  Antisense strand to SEQ ID NO: 1354918
auaugugcuaacauuaucu

SEQ ID NO: 1354920 - RNA, 19 nt, Artificial Sequence
  Description of Artificial Sequence: Synthetic oligonucleotide
  Sense strand starting at position 1105 of SEQ ID NO: 1242532
acgaaauauugacaagaau

SEQ ID NO: 1354921 - RNA, 19 nt, Artificial Sequence
  Description of Artificial Sequence: Synthetic oligonucleotide
  Antisense strand to SEQ ID NO: 1354920
auucuugucaauauuucgu

SEQ ID NO: 1354922 - RNA, 19 nt, Artificial Sequence
  Description of Artificial Sequence: Synthetic oligonucleotide
  Sense strand starting at position 1172 of SEQ ID NO: 1242532
cucuaaugccaauaguaga

SEQ ID NO: 1354923 - RNA, 19 nt, Artificial Sequence
  Description of Artificial Sequence: Synthetic oligonucleotide
  Antisense strand to SEQ ID NO: 1354922
ucuacuauuggcauuagag

SEQ ID NO: 1354924 - RNA, 19 nt, Artificial Sequence
  Description of Artificial Sequence: Synthetic oligonucleotide
  Sense strand starting at position 1302 of SEQ ID NO: 1242532
cucugaucacaacgcaaua

SEQ ID NO: 1354925 - RNA, 19 nt, Artificial Sequence
  Description of Artificial Sequence: Synthetic oligonucleotide
  Antisense strand to SEQ ID NO: 1354924
uauugcguugugaucagag

SEQ ID NO: 1354926 - RNA, 19 nt, Artificial Sequence
  Description of Artificial Sequence: Synthetic oligonucleotide
  Sense strand starting at position 1325 of SEQ ID NO: 1242532
uagaaauuagaucguucca

SEQ ID NO: 1354927 - RNA, 19 nt, Artificial Sequence
  Description of Artificial Sequence: Synthetic oligonucleotide
  Antisense strand to SEQ ID NO: 1354926
uggaacgaucuaauuucua

SEQ ID NO: 1354928 - RNA, 19 nt, Artificial Sequence
  Description of Artificial Sequence: Synthetic oligonucleotide
  Sense strand starting at position 1335 of SEQ ID NO: 1242532
aucguuccaccuggaaauu

SEQ ID NO: 1354929 - RNA, 19 nt, Artificial Sequence
  Description of Artificial Sequence: Synthetic oligonucleotide
  Antisense strand to SEQ ID NO: 1354928
aauuuccagguggaacgau

SEQ ID NO: 1354930 - RNA, 19 nt, Artificial Sequence
  Description of Artificial Sequence: Synthetic oligonucleotide
  Sense strand starting at position 22 of SEQ ID NO: 1242533
ccucuauugugagcaacau

SEQ ID NO: 1354931 - RNA, 19 nt, Artificial Sequence
  Description of Artificial Sequence: Synthetic oligonucleotide
  Antisense strand to SEQ ID NO: 1354930
auguugcucacaauagagg

SEQ ID NO: 1354932 - RNA, 19 nt, Artificial Sequence
  Description of Artificial Sequence: Synthetic oligonucleotide
  Sense strand starting at position 23 of SEQ ID NO: 1242533
cucuauugugagcaacauu

SEQ ID NO: 1354933 - RNA, 19 nt, Artificial Sequence
  Description of Artificial Sequence: Synthetic oligonucleotide
  Antisense strand to SEQ ID NO: 1354932
aauguugcucacaauagag

SEQ ID NO: 1354934 - RNA, 19 nt, Artificial Sequence
  Description of Artificial Sequence: Synthetic oligonucleotide
  Sense strand starting at position 67 of SEQ ID NO: 1242533
aacagaaauuucgaguaua

SEQ ID NO: 1354935 - RNA, 19 nt, Artificial Sequence
  Description of Artificial Sequence: Synthetic oligonucleotide
  Antisense strand to SEQ ID NO: 1354934
uauacucgaaauuucuguu

SEQ ID NO: 1354936 - RNA, 19 nt, Artificial Sequence
  Description of Artificial Sequence: Synthetic oligonucleotide
  Sense strand starting at position 81 of SEQ ID NO: 1242533
guauaugaauugucaagcu

SEQ ID NO: 1354937 - RNA, 19 nt, Artificial Sequence
  Description of Artificial Sequence: Synthetic oligonucleotide
  Antisense strand to SEQ ID NO: 1354936
agcuugacaauucauauac

SEQ ID NO: 1354938 - RNA, 19 nt, Artificial Sequence
  Description of Artificial Sequence: Synthetic oligonucleotide
  Sense strand starting at position 89 of SEQ ID NO: 1242533
auugucaagcuacaaagau

SEQ ID NO: 1354939 - RNA, 19 nt, Artificial Sequence
  Description of Artificial Sequence: Synthetic oligonucleotide
  Antisense strand to SEQ ID NO: 1354938
aucuuuguagcuugacaau

SEQ ID NO: 1354940 - RNA, 19 nt, Artificial Sequence
  Description of Artificial Sequence: Synthetic oligonucleotide
  Sense strand starting at position 198 of SEQ ID NO: 1242533
cuuccauuccaguaggcau

SEQ ID NO: 1354941 - RNA, 19 nt, Artificial Sequence
  Description of Artificial Sequence: Synthetic oligonucleotide
  Antisense strand to SEQ ID NO: 1354940
augccuacuggaauggaag

SEQ ID NO: 1354942 - RNA, 19 nt, Artificial Sequence
  Description of Artificial Sequence: Synthetic oligonucleotide
  Sense strand starting at position 223 of SEQ ID NO: 1242533
acuagaacgucagauuucu

SEQ ID NO: 1354943 - RNA, 19 nt, Artificial Sequence
  Description of Artificial Sequence: Synthetic oligonucleotide
  Antisense strand to SEQ ID NO: 1354942
agaaaucugacguucuagu

SEQ ID NO: 1354944 - RNA, 19 nt, Artificial Sequence
  Description of Artificial Sequence: Synthetic oligonucleotide
  Sense strand starting at position 229 of SEQ ID NO: 1242533
acgucagauuucuaaagca

SEQ ID NO: 1354945 - RNA, 19 nt, Artificial Sequence
  Description of Artificial Sequence: Synthetic oligonucleotide
  Antisense strand to SEQ ID NO: 1354944
ugcuuuagaaaucugacgu

SEQ ID NO: 1354946 - RNA, 19 nt, Artificial Sequence
  Description of Artificial Sequence: Synthetic oligonucleotide
  Sense strand starting at position 249 of SEQ ID NO: 1242533
ucaguucauuggguagaga

SEQ ID NO: 1354947 - RNA, 19 nt, Artificial Sequence
  Description of Artificial Sequence: Synthetic oligonucleotide
  Antisense strand to SEQ ID NO: 1354946
ucucuacccaaugaacuga

SEQ ID NO: 1354948 - RNA, 19 nt, Artificial Sequence
  Description of Artificial Sequence: Synthetic oligonucleotide
  Sense strand starting at position 257 of SEQ ID NO: 1242533
uuggguagagaccguuaau

SEQ ID NO: 1354949 - RNA, 19 nt, Artificial Sequence
  Description of Artificial Sequence: Synthetic oligonucleotide
  Antisense strand to SEQ ID NO: 1354948
auuaacggucucuacccaa

SEQ ID NO: 1354950 - RNA, 19 nt, Artificial Sequence
  Description of Artificial Sequence: Synthetic oligonucleotide
  Sense strand starting at position 260 of SEQ ID NO: 1242533
gguagagaccguuaaugga

SEQ ID NO: 1354951 - RNA, 19 nt, Artificial Sequence
  Description of Artificial Sequence: Synthetic oligonucleotide
  Antisense strand to SEQ ID NO: 1354950
uccauuaacggucucuacc

SEQ ID NO: 1354952 - RNA, 19 nt, Artificial Sequence
  Description of Artificial Sequence: Synthetic oligonucleotide
  Sense strand starting at position 264 of SEQ ID NO: 1242533
gagaccguuaauggaagau

SEQ ID NO: 1354953 - RNA, 19 nt, Artificial Sequence
  Description of Artificial Sequence: Synthetic oligonucleotide
  Antisense strand to SEQ ID NO: 1354952
aucuuccauuaacggucuc

SEQ ID NO: 1354954 - RNA, 19 nt, Artificial Sequence
  Description of Artificial Sequence: Synthetic oligonucleotide
  Sense strand starting at position 294 of SEQ ID NO: 1242533
ggagaaacuuaagaguuua

SEQ ID NO: 1354955 - RNA, 19 nt, Artificial Sequence
  Description of Artificial Sequence: Synthetic oligonucleotide
  Antisense strand to SEQ ID NO: 1354954
uaaacucuuaaguuucucc

SEQ ID NO: 1354956 - RNA, 19 nt, Artificial Sequence
  Description of Artificial Sequence: Synthetic oligonucleotide
  Sense strand starting at position 437 of SEQ ID NO: 1242533
aggcucaagucauccaacu

SEQ ID NO: 1354957 - RNA, 19 nt, Artificial Sequence
  Description of Artificial Sequence: Synthetic oligonucleotide
  Antisense strand to SEQ ID NO: 1354956
aguuggaugacuugagccu

SEQ ID NO: 1354958 - RNA, 19 nt, Artificial Sequence
  Description of Artificial Sequence: Synthetic oligonucleotide
  Sense strand starting at position 477 of SEQ ID NO: 1242533
gggauuauggacugacgca

SEQ ID NO: 1354959 - RNA, 19 nt, Artificial Sequence
  Description of Artificial Sequence: Synthetic oligonucleotide
  Antisense strand to SEQ ID NO: 1354958
ugcgucaguccauaauccc

SEQ ID NO: 1354960 - RNA, 19 nt, Artificial Sequence
  Description of Artificial Sequence: Synthetic oligonucleotide
  Sense strand starting at position 629 of SEQ ID NO: 1242533
gcgcccagccuaguuaaua

SEQ ID NO: 1354961 - RNA, 19 nt, Artificial Sequence
  Description of Artificial Sequence: Synthetic oligonucleotide
  Antisense strand to SEQ ID NO: 1354960
uauuaacuaggcugggcgc

SEQ ID NO: 1354962 - RNA, 19 nt, Artificial Sequence
  Description of Artificial Sequence: Synthetic oligonucleotide
  Sense strand starting at position 630 of SEQ ID NO: 1242533
cgcccagccuaguuaauau

SEQ ID NO: 1354963 - RNA, 19 nt, Artificial Sequence
  Description of Artificial Sequence: Synthetic oligonucleotide
  Antisense strand to SEQ ID NO: 1354962
auauuaacuaggcugggcg

SEQ ID NO: 1354964 - RNA, 19 nt, Artificial Sequence
  Description of Artificial Sequence: Synthetic oligonucleotide
  Sense strand starting at position 694 of SEQ ID NO: 1242533
aagugaaagcuuuggaacu

SEQ ID NO: 1354965 - RNA, 19 nt, Artificial Sequence
  Description of Artificial Sequence: Synthetic oligonucleotide
  Antisense strand to SEQ ID NO: 1354964
aguuccaaagcuuucacuu

SEQ ID NO: 1354966 - RNA, 19 nt, Artificial Sequence
  Description of Artificial Sequence: Synthetic oligonucleotide
  Sense strand starting at position 910 of SEQ ID NO: 1242533
caaguacuugcaugacaga

SEQ ID NO: 1354967 - RNA, 19 nt, Artificial Sequence
  Description of Artificial Sequence: Synthetic oligonucleotide
  Antisense strand to SEQ ID NO: 1354966
ucugucaugcaaguacuug

SEQ ID NO: 1354968 - RNA, 19 nt, Artificial Sequence
  Description of Artificial Sequence: Synthetic oligonucleotide
  Sense strand starting at position 948 of SEQ ID NO: 1242533
acugguuuguaagugguga

SEQ ID NO: 1354969 - RNA, 19 nt, Artificial Sequence
  Description of Artificial Sequence: Synthetic oligonucleotide
  Antisense strand to SEQ ID NO: 1354968
ucaccacuuacaaaccagu

SEQ ID NO: 1354970 - RNA, 19 nt, Artificial Sequence
  Description of Artificial Sequence: Synthetic oligonucleotide
  Sense strand starting at position 950 of SEQ ID NO: 1242533
ugguuuguaaguggugaga

SEQ ID NO: 1354971 - RNA, 19 nt, Artificial Sequence
  Description of Artificial Sequence: Synthetic oligonucleotide
  Antisense strand to SEQ ID NO: 1354970
ucucaccacuuacaaacca

SEQ ID NO: 1354972 - RNA, 19 nt, Artificial Sequence
  Description of Artificial Sequence: Synthetic oligonucleotide
  Sense strand starting at position 979 of SEQ ID NO: 1242533
gaagaaaggaaugguguuu

SEQ ID NO: 1354973 - RNA, 19 nt, Artificial Sequence
  Description of Artificial Sequence: Synthetic oligonucleotide
  Antisense strand to SEQ ID NO: 1354972
aaacaccauuccuuucuuc

SEQ ID NO: 1354974 - RNA, 19 nt, Artificial Sequence
  Description of Artificial Sequence: Synthetic oligonucleotide
  Sense strand starting at position 1065 of SEQ ID NO: 1242533
gucuccaaucggugaccuu

SEQ ID NO: 1354975 - RNA, 19 nt, Artificial Sequence
  Description of Artificial Sequence: Synthetic oligonucleotide
  Antisense strand to SEQ ID NO: 1354974
aaggucaccgauuggagac

SEQ ID NO: 1354976 - RNA, 19 nt, Artificial Sequence
  Description of Artificial Sequence: Synthetic oligonucleotide
  Sense strand starting at position 1173 of SEQ ID NO: 1242533
gaacgucguuaacuguauu

SEQ ID NO: 1354977 - RNA, 19 nt, Artificial Sequence
  Description of Artificial Sequence: Synthetic oligonucleotide
  Antisense strand to SEQ ID NO: 1354976
aauacaguuaacgacguuc

SEQ ID NO: 1354978 - RNA, 19 nt, Artificial Sequence
  Description of Artificial Sequence: Synthetic oligonucleotide
  Sense strand starting at position 1176 of SEQ ID NO: 1242533
cgucguuaacuguauugaa

SEQ ID NO: 1354979 - RNA, 19 nt, Artificial Sequence
  Description of Artificial Sequence: Synthetic oligonucleotide
  Antisense strand to SEQ ID NO: 1354978
uucaauacaguuaacgacg

SEQ ID NO: 1354980 - RNA, 19 nt, Artificial Sequence
  Description of Artificial Sequence: Synthetic oligonucleotide
  Sense strand starting at position 1230 of SEQ ID NO: 1242533
gguauaagucagcaccagu

SEQ ID NO: 1354981 - RNA, 19 nt, Artificial Sequence
  Description of Artificial Sequence: Synthetic oligonucleotide
  Antisense strand to SEQ ID NO: 1354980
acuggugcugacuuauacc

SEQ ID NO: 1354982 - RNA, 19 nt, Artificial Sequence
  Description of Artificial Sequence: Synthetic oligonucleotide
  Sense strand starting at position 1567 of SEQ ID NO: 1242533
gauuccguuccauagaagu

SEQ ID NO: 1354983 - RNA, 19 nt, Artificial Sequence
  Description of Artificial Sequence: Synthetic oligonucleotide
  Antisense strand to SEQ ID NO: 1354982
acuucuauggaacggaauc

SEQ ID NO: 1354984 - RNA, 19 nt, Artificial Sequence
  Description of Artificial Sequence: Synthetic oligonucleotide
  Sense strand starting at position 1652 of SEQ ID NO: 1242533
gacuccucccaggagcaua

SEQ ID NO: 1354985 - RNA, 19 nt, Artificial Sequence
  Description of Artificial Sequence: Synthetic oligonucleotide
  Antisense strand to SEQ ID NO: 1354984
uaugcuccugggaggaguc

SEQ ID NO: 1354986 - RNA, 19 nt, Artificial Sequence
  Description of Artificial Sequence: Synthetic oligonucleotide
  Sense strand starting at position 2309 of SEQ ID NO: 1242533
acgugaacucuugacccua

SEQ ID NO: 1354987 - RNA, 19 nt, Artificial Sequence
  Description of Artificial Sequence: Synthetic oligonucleotide
  Antisense strand to SEQ ID NO: 1354986
uagggucaagaguucacgu

SEQ ID NO: 1354988 - RNA, 19 nt, Artificial Sequence
  Description of Artificial Sequence: Synthetic oligonucleotide
  Sense strand starting at position 2326 of SEQ ID NO: 1242533
uaggcauuggcagagauga

SEQ ID NO: 1354989 - RNA, 19 nt, Artificial Sequence
  Description of Artificial Sequence: Synthetic oligonucleotide
  Antisense strand to SEQ ID NO: 1354988
ucaucucugccaaugccua

SEQ ID NO: 1354990 - RNA, 19 nt, Artificial Sequence
  Description of Artificial Sequence: Synthetic oligonucleotide
  Sense strand starting at position 2436 of SEQ ID NO: 1242533
acaaacaaugcguaauaau

SEQ ID NO: 1354991 - RNA, 19 nt, Artificial Sequence
  Description of Artificial Sequence: Synthetic oligonucleotide
  Antisense strand to SEQ ID NO: 1354990
auuauuacgcauuguuugu

SEQ ID NO: 1354992 - RNA, 19 nt, Artificial Sequence
  Description of Artificial Sequence: Synthetic oligonucleotide
  Sense strand starting at position 2915 of SEQ ID NO: 1242533
ucgguugauggacaacuua

SEQ ID NO: 1354993 - RNA, 19 nt, Artificial Sequence
  Description of Artificial Sequence: Synthetic oligonucleotide
  Antisense strand to SEQ ID NO: 1354992
uaaguuguccaucaaccga

SEQ ID NO: 1354994 - RNA, 19 nt, Artificial Sequence
  Description of Artificial Sequence: Synthetic oligonucleotide
  Sense strand starting at position 2923 of SEQ ID NO: 1242533
uggacaacuuagguugauu

SEQ ID NO: 1354995 - RNA, 19 nt, Artificial Sequence
  Description of Artificial Sequence: Synthetic oligonucleotide
  Antisense strand to SEQ ID NO: 1354994
aaucaaccuaaguugucca

SEQ ID NO: 1354996 - RNA, 19 nt, Artificial Sequence
  Description of Artificial Sequence: Synthetic oligonucleotide
  Sense strand starting at position 3092 of SEQ ID NO: 1242533
ccaaauuauucuccguagu

SEQ ID NO: 1354997 - RNA, 19 nt, Artificial Sequence
  Description of Artificial Sequence: Synthetic oligonucleotide
  Antisense strand to SEQ ID NO: 1354996
acuacggagaauaauuugg

SEQ ID NO: 1354998 - RNA, 19 nt, Artificial Sequence
  Description of Artificial Sequence: Synthetic oligonucleotide
  Sense strand starting at position 3093 of SEQ ID NO: 1242533
caaauuauucuccguagug

SEQ ID NO: 1354999 - RNA, 19 nt, Artificial Sequence
  Description of Artificial Sequence: Synthetic oligonucleotide
  Antisense strand to SEQ ID NO: 1354998
cacuacggagaauaauuug

SEQ ID NO: 1355000 - RNA, 19 nt, Artificial Sequence
  Description of Artificial Sequence: Synthetic oligonucleotide
  Sense strand starting at position 3095 of SEQ ID NO: 1242533
aauuauucuccguaguggu

SEQ ID NO: 1355001 - RNA, 19 nt, Artificial Sequence
  Description of Artificial Sequence: Synthetic oligonucleotide
  Antisense strand to SEQ ID NO: 1355000
accacuacggagaauaauu

SEQ ID NO: 1355002 - RNA, 19 nt, Artificial Sequence
  Description of Artificial Sequence: Synthetic oligonucleotide
  Sense strand starting at position 3111 of SEQ ID NO: 1242533
ggugguacuaaagagcuua

SEQ ID NO: 1355003 - RNA, 19 nt, Artificial Sequence
  Description of Artificial Sequence: Synthetic oligonucleotide
  Antisense strand to SEQ ID NO: 1355002
uaagcucuuuaguaccacc

SEQ ID NO: 1355004 - RNA, 19 nt, Artificial Sequence
  Description of Artificial Sequence: Synthetic oligonucleotide
  Sense strand starting at position 3602 of SEQ ID NO: 1242533
gggauaucaucuuacccaa

SEQ ID NO: 1355005 - RNA, 19 nt, Artificial Sequence
  Description of Artificial Sequence: Synthetic oligonucleotide
  Antisense strand to SEQ ID NO: 1355004
uuggguaagaugauauccc

SEQ ID NO: 1355006 - RNA, 19 nt, Artificial Sequence
  Description of Artificial Sequence: Synthetic oligonucleotide
  Sense strand starting at position 3792 of SEQ ID NO: 1242533
auuccucugcuggauauau

SEQ ID NO: 1355007 - RNA, 19 nt, Artificial Sequence
  Description of Artificial Sequence: Synthetic oligonucleotide
  Antisense strand to SEQ ID NO: 1355006
auauauccagcagaggaau

SEQ ID NO: 1355008 - RNA, 19 nt, Artificial Sequence
  Description of Artificial Sequence: Synthetic oligonucleotide
  Sense strand starting at position 3937 of SEQ ID NO: 1242533
auagauugcuugcucccaa

SEQ ID NO: 1355009 - RNA, 19 nt, Artificial Sequence
  Description of Artificial Sequence: Synthetic oligonucleotide
  Antisense strand to SEQ ID NO: 1355008
uugggagcaagcaaucuau

SEQ ID NO: 1355010 - RNA, 19 nt, Artificial Sequence
  Description of Artificial Sequence: Synthetic oligonucleotide
  Sense strand starting at position 47 of SEQ ID NO: 1242534
guacucaucccuuaaaugu

SEQ ID NO: 1355011 - RNA, 19 nt, Artificial Sequence
  Description of Artificial Sequence: Synthetic oligonucleotide
  Antisense strand to SEQ ID NO: 1355010
acauuuaagggaugaguac

SEQ ID NO: 1355012 - RNA, 19 nt, Artificial Sequence
  Description of Artificial Sequence: Synthetic oligonucleotide
  Sense strand starting at position 126 of SEQ ID NO: 1242534
aggugacuuuaaucacucu

SEQ ID NO: 1355013 - RNA, 19 nt, Artificial Sequence
  Description of Artificial Sequence: Synthetic oligonucleotide
  Antisense strand to SEQ ID NO: 1355012
agagugauuaaagucaccu

SEQ ID NO: 1355014 - RNA, 19 nt, Artificial Sequence
  Description of Artificial Sequence: Synthetic oligonucleotide
  Sense strand starting at position 230 of SEQ ID NO: 1242534
cucuguaaaccacgagaca

SEQ ID NO: 1355015 - RNA, 19 nt, Artificial Sequence
  Description of Artificial Sequence: Synthetic oligonucleotide
  Antisense strand to SEQ ID NO: 1355014
ugucucgugguuuacagag

SEQ ID NO: 1355016 - RNA, 19 nt, Artificial Sequence
  Description of Artificial Sequence: Synthetic oligonucleotide
  Sense strand starting at position 231 of SEQ ID NO: 1242534
ucuguaaaccacgagacau

SEQ ID NO: 1355017 - RNA, 19 nt, Artificial Sequence
  Description of Artificial Sequence: Synthetic oligonucleotide
  Antisense strand to SEQ ID NO: 1355016
augucucgugguuuacaga

SEQ ID NO: 1355018 - RNA, 19 nt, Artificial Sequence
  Description of Artificial Sequence: Synthetic oligonucleotide
  Sense strand starting at position 242 of SEQ ID NO: 1242534
cgagacauucuacagcauu

SEQ ID NO: 1355019 - RNA, 19 nt, Artificial Sequence
  Description of Artificial Sequence: Synthetic oligonucleotide
  Antisense strand to SEQ ID NO: 1355018
aaugcuguagaaugucucg

SEQ ID NO: 1355020 - RNA, 19 nt, Artificial Sequence
  Description of Artificial Sequence: Synthetic oligonucleotide
  Sense strand starting at position 255 of SEQ ID NO: 1242534
agcauuuaucucugugcau

SEQ ID NO: 1355021 - RNA, 19 nt, Artificial Sequence
  Description of Artificial Sequence: Synthetic oligonucleotide
  Antisense strand to SEQ ID NO: 1355020
augcacagagauaaaugcu

SEQ ID NO: 1355022 - RNA, 19 nt, Artificial Sequence
  Description of Artificial Sequence: Synthetic oligonucleotide
  Sense strand starting at position 256 of SEQ ID NO: 1242534
gcauuuaucucugugcaua

SEQ ID NO: 1355023 - RNA, 19 nt, Artificial Sequence
  Description of Artificial Sequence: Synthetic oligonucleotide
  Antisense strand to SEQ ID NO: 1355022
uaugcacagagauaaaugc

SEQ ID NO: 1355024 - RNA, 19 nt, Artificial Sequence
  Description of Artificial Sequence: Synthetic oligonucleotide
  Sense strand starting at position 536 of SEQ ID NO: 1242534
ugucacaaauuguuagaaa

SEQ ID NO: 1355025 - RNA, 19 nt, Artificial Sequence
  Description of Artificial Sequence: Synthetic oligonucleotide
  Antisense strand to SEQ ID NO: 1355024
uuucuaacaauuugugaca

SEQ ID NO: 1355026 - RNA, 19 nt, Artificial Sequence
  Description of Artificial Sequence: Synthetic oligonucleotide
  Sense strand starting at position 1167 of SEQ ID NO: 1242534
acugcucccggucagagau

SEQ ID NO: 1355027 - RNA, 19 nt, Artificial Sequence
  Description of Artificial Sequence: Synthetic oligonucleotide
  Antisense strand to SEQ ID NO: 1355026
aucucugaccgggagcagu

SEQ ID NO: 1355028 - RNA, 19 nt, Artificial Sequence
  Description of Artificial Sequence: Synthetic oligonucleotide
  Sense strand starting at position 1193 of SEQ ID NO: 1242534
agaggaauauuagugcuga

SEQ ID NO: 1355029 - RNA, 19 nt, Artificial Sequence
  Description of Artificial Sequence: Synthetic oligonucleotide
  Antisense strand to SEQ ID NO: 1355028
ucagcacuaauauuccucu

SEQ ID NO: 1355030 - RNA, 19 nt, Artificial Sequence
  Description of Artificial Sequence: Synthetic oligonucleotide
  Sense strand starting at position 1218 of SEQ ID NO: 1242534
aucaaauugcuacaaguga

SEQ ID NO: 1355031 - RNA, 19 nt, Artificial Sequence
  Description of Artificial Sequence: Synthetic oligonucleotide
  Antisense strand to SEQ ID NO: 1355030
ucacuuguagcaauuugau

SEQ ID NO: 1355032 - RNA, 19 nt, Artificial Sequence
  Description of Artificial Sequence: Synthetic oligonucleotide
  Sense strand starting at position 1291 of SEQ ID NO: 1242534
ccagcucaggagugagauu

SEQ ID NO: 1355033 - RNA, 19 nt, Artificial Sequence
  Description of Artificial Sequence: Synthetic oligonucleotide
  Antisense strand to SEQ ID NO: 1355032
aaucucacuccugagcugg

SEQ ID NO: 1355034 - RNA, 19 nt, Artificial Sequence
  Description of Artificial Sequence: Synthetic oligonucleotide
  Sense strand starting at position 1300 of SEQ ID NO: 1242534
gagugagauucccucuccu

SEQ ID NO: 1355035 - RNA, 19 nt, Artificial Sequence
  Description of Artificial Sequence: Synthetic oligonucleotide
  Antisense strand to SEQ ID NO: 1355034
aggagagggaaucucacuc

SEQ ID NO: 1355036 - RNA, 19 nt, Artificial Sequence
  Description of Artificial Sequence: Synthetic oligonucleotide
  Sense strand starting at position 1515 of SEQ ID NO: 1242534
agacgugggacugaguuua

SEQ ID NO: 1355037 - RNA, 19 nt, Artificial Sequence
  Description of Artificial Sequence: Synthetic oligonucleotide
  Antisense strand to SEQ ID NO: 1355036
uaaacucagucccacgucu

SEQ ID NO: 1355038 - RNA, 19 nt, Artificial Sequence
  Description of Artificial Sequence: Synthetic oligonucleotide
  Sense strand starting at position 1632 of SEQ ID NO: 1242534
caagguugacgugaggaau

SEQ ID NO: 1355039 - RNA, 19 nt, Artificial Sequence
  Description of Artificial Sequence: Synthetic oligonucleotide
  Antisense strand to SEQ ID NO: 1355038
auuccucacgucaaccuug

SEQ ID NO: 1355040 - RNA, 19 nt, Artificial Sequence
  Description of Artificial Sequence: Synthetic oligonucleotide
  Sense strand starting at position 1635 of SEQ ID NO: 1242534
gguugacgugaggaaucaa

SEQ ID NO: 1355041 - RNA, 19 nt, Artificial Sequence
  Description of Artificial Sequence: Synthetic oligonucleotide
  Antisense strand to SEQ ID NO: 1355040
uugauuccucacgucaacc

SEQ ID NO: 1355042 - RNA, 19 nt, Artificial Sequence
  Description of Artificial Sequence: Synthetic oligonucleotide
  Sense strand starting at position 1655 of SEQ ID NO: 1242534
gagaucaucuguguucuga

SEQ ID NO: 1355043 - RNA, 19 nt, Artificial Sequence
  Description of Artificial Sequence: Synthetic oligonucleotide
  Antisense strand to SEQ ID NO: 1355042
ucagaacacagaugaucuc

SEQ ID NO: 1355044 - RNA, 19 nt, Artificial Sequence
  Description of Artificial Sequence: Synthetic oligonucleotide
  Sense strand starting at position 1665 of SEQ ID NO: 1242534
guguucugagcugaacuca

SEQ ID NO: 1355045 - RNA, 19 nt, Artificial Sequence
  Description of Artificial Sequence: Synthetic oligonucleotide
  Antisense strand to SEQ ID NO: 1355044
ugaguucagcucagaacac

SEQ ID NO: 1355046 - RNA, 19 nt, Artificial Sequence
  Description of Artificial Sequence: Synthetic oligonucleotide
  Sense strand starting at position 1766 of SEQ ID NO: 1242534
ggagccauuuccuagagau

SEQ ID NO: 1355047 - RNA, 19 nt, Artificial Sequence
  Description of Artificial Sequence: Synthetic oligonucleotide
  Antisense strand to SEQ ID NO: 1355046
aucucuaggaaauggcucc

SEQ ID NO: 1355048 - RNA, 19 nt, Artificial Sequence
  Description of Artificial Sequence: Synthetic oligonucleotide
  Sense strand starting at position 2260 of SEQ ID NO: 1242534
gcuccaaggccagaaauaa

SEQ ID NO: 1355049 - RNA, 19 nt, Artificial Sequence
  Description of Artificial Sequence: Synthetic oligonucleotide
  Antisense strand to SEQ ID NO: 1355048
uuauuucuggccuuggagc

SEQ ID NO: 1355050 - RNA, 19 nt, Artificial Sequence
  Description of Artificial Sequence: Synthetic oligonucleotide
  Sense strand starting at position 2289 of SEQ ID NO: 1242534
cccgguuaaauucgaauuu

SEQ ID NO: 1355051 - RNA, 19 nt, Artificial Sequence
  Description of Artificial Sequence: Synthetic oligonucleotide
  Antisense strand to SEQ ID NO: 1355050
aaauucgaauuuaaccggg

SEQ ID NO: 1355052 - RNA, 19 nt, Artificial Sequence
  Description of Artificial Sequence: Synthetic oligonucleotide
  Sense strand starting at position 2349 of SEQ ID NO: 1242534
ugcaauauuugguacauuu

SEQ ID NO: 1355053 - RNA, 19 nt, Artificial Sequence
  Description of Artificial Sequence: Synthetic oligonucleotide
  Antisense strand to SEQ ID NO: 1355052
aaauguaccaaauauugca

SEQ ID NO: 1355054 - RNA, 19 nt, Artificial Sequence
  Description of Artificial Sequence: Synthetic oligonucleotide
  Sense strand starting at position 2568 of SEQ ID NO: 1242534
uuuacuagcgaggaaacua

SEQ ID NO: 1355055 - RNA, 19 nt, Artificial Sequence
  Description of Artificial Sequence: Synthetic oligonucleotide
  Antisense strand to SEQ ID NO: 1355054
uaguuuccucgcuaguaaa

SEQ ID NO: 1355056 - RNA, 19 nt, Artificial Sequence
  Description of Artificial Sequence: Synthetic oligonucleotide
  Sense strand starting at position 2667 of SEQ ID NO: 1242534
guuauuugcuugcugaaug

SEQ ID NO: 1355057 - RNA, 19 nt, Artificial Sequence
  Description of Artificial Sequence: Synthetic oligonucleotide
  Antisense strand to SEQ ID NO: 1355056
cauucagcaagcaaauaac

SEQ ID NO: 1355058 - RNA, 19 nt, Artificial Sequence
  Description of Artificial Sequence: Synthetic oligonucleotide
  Sense strand starting at position 2833 of SEQ ID NO: 1242534
caggcauuguauguaaaga

SEQ ID NO: 1355059 - RNA, 19 nt, Artificial Sequence
  Description of Artificial Sequence: Synthetic oligonucleotide
  Antisense strand to SEQ ID NO: 1355058
ucuuuacauacaaugccug

SEQ ID NO: 1355060 - RNA, 19 nt, Artificial Sequence
  Description of Artificial Sequence: Synthetic oligonucleotide
  Sense strand starting at position 2834 of SEQ ID NO: 1242534
aggcauuguauguaaagag

SEQ ID NO: 1355061 - RNA, 19 nt, Artificial Sequence
  Description of Artificial Sequence: Synthetic oligonucleotide
  Antisense strand to SEQ ID NO: 1355060
cucuuuacauacaaugccu

SEQ ID NO: 1355062 - RNA, 19 nt, Artificial Sequence
  Description of Artificial Sequence: Synthetic oligonucleotide
  Sense strand starting at position 2841 of SEQ ID NO: 1242534
guauguaaagagcaagguu

SEQ ID NO: 1355063 - RNA, 19 nt, Artificial Sequence
  Description of Artificial Sequence: Synthetic oligonucleotide
  Antisense strand to SEQ ID NO: 1355062
aaccuugcucuuuacauac

SEQ ID NO: 1355064 - RNA, 19 nt, Artificial Sequence
  Description of Artificial Sequence: Synthetic oligonucleotide
  Sense strand starting at position 2912 of SEQ ID NO: 1242534
gucugcaucagcgauauuu

SEQ ID NO: 1355065 - RNA, 19 nt, Artificial Sequence
  Description of Artificial Sequence: Synthetic oligonucleotide
  Antisense strand to SEQ ID NO: 1355064
aaauaucgcugaugcagac

SEQ ID NO: 1355066 - RNA, 19 nt, Artificial Sequence
  Description of Artificial Sequence: Synthetic oligonucleotide
  Sense strand starting at position 2914 of SEQ ID NO: 1242534
cugcaucagcgauauuucu

SEQ ID NO: 1355067 - RNA, 19 nt, Artificial Sequence
  Description of Artificial Sequence: Synthetic oligonucleotide
  Antisense strand to SEQ ID NO: 1355066
agaaauaucgcugaugcag

SEQ ID NO: 1355068 - RNA, 19 nt, Artificial Sequence
  Description of Artificial Sequence: Synthetic oligonucleotide
  Sense strand starting at position 2932 of SEQ ID NO: 1242534
uggugacccagccagaaau

SEQ ID NO: 1355069 - RNA, 19 nt, Artificial Sequence
  Description of Artificial Sequence: Synthetic oligonucleotide
  Antisense strand to SEQ ID NO: 1355068
auuucuggcugggucacca

SEQ ID NO: 1355070 - RNA, 19 nt, Artificial Sequence
  Description of Artificial Sequence: Synthetic oligonucleotide
  Sense strand starting at position 3080 of SEQ ID NO: 1242534
ggugucauuucugcaguau

SEQ ID NO: 1355071 - RNA, 19 nt, Artificial Sequence
  Description of Artificial Sequence: Synthetic oligonucleotide
  Antisense strand to SEQ ID NO: 1355070
auacugcagaaaugacacc

SEQ ID NO: 1355072 - RNA, 19 nt, Artificial Sequence
  Description of Artificial Sequence: Synthetic oligonucleotide
  Sense strand starting at position 3081 of SEQ ID NO: 1242534
gugucauuucugcaguauu

SEQ ID NO: 1355073 - RNA, 19 nt, Artificial Sequence
  Description of Artificial Sequence: Synthetic oligonucleotide
  Antisense strand to SEQ ID NO: 1355072
aauacugcagaaaugacac

SEQ ID NO: 1355074 - RNA, 19 nt, Artificial Sequence
  Description of Artificial Sequence: Synthetic oligonucleotide
  Sense strand starting at position 3460 of SEQ ID NO: 1242534
uucugagauucucuaguug

SEQ ID NO: 1355075 - RNA, 19 nt, Artificial Sequence
  Description of Artificial Sequence: Synthetic oligonucleotide
  Antisense strand to SEQ ID NO: 1355074
caacuagagaaucucagaa

SEQ ID NO: 1355076 - RNA, 19 nt, Artificial Sequence
  Description of Artificial Sequence: Synthetic oligonucleotide
  Sense strand starting at position 3508 of SEQ ID NO: 1242534
gggcauuagaggugacauu

SEQ ID NO: 1355077 - RNA, 19 nt, Artificial Sequence
  Description of Artificial Sequence: Synthetic oligonucleotide
  Antisense strand to SEQ ID NO: 1355076
aaugucaccucuaaugccc

SEQ ID NO: 1355078 - RNA, 19 nt, Artificial Sequence
  Description of Artificial Sequence: Synthetic oligonucleotide
  Sense strand starting at position 3603 of SEQ ID NO: 1242534
ucaggaagucagggauguu

SEQ ID NO: 1355079 - RNA, 19 nt, Artificial Sequence
  Description of Artificial Sequence: Synthetic oligonucleotide
  Antisense strand to SEQ ID NO: 1355078
aacaucccugacuuccuga

SEQ ID NO: 1355080 - RNA, 19 nt, Artificial Sequence
  Description of Artificial Sequence: Synthetic oligonucleotide
  Sense strand starting at position 3700 of SEQ ID NO: 1242534
ggauaugaaggcgagucua

SEQ ID NO: 1355081 - RNA, 19 nt, Artificial Sequence
  Description of Artificial Sequence: Synthetic oligonucleotide
  Antisense strand to SEQ ID NO: 1355080
uagacucgccuucauaucc

SEQ ID NO: 1355082 - RNA, 19 nt, Artificial Sequence
  Description of Artificial Sequence: Synthetic oligonucleotide
  Sense strand starting at position 3797 of SEQ ID NO: 1242534
cugagcauuugacauaaau

SEQ ID NO: 1355083 - RNA, 19 nt, Artificial Sequence
  Description of Artificial Sequence: Synthetic oligonucleotide
  Antisense strand to SEQ ID NO: 1355082
auuuaugucaaaugcucag

SEQ ID NO: 1355084 - RNA, 19 nt, Artificial Sequence
  Description of Artificial Sequence: Synthetic oligonucleotide
  Sense strand starting at position 3806 of SEQ ID NO: 1242534
ugacauaaauggucucauu

SEQ ID NO: 1355085 - RNA, 19 nt, Artificial Sequence
  Description of Artificial Sequence: Synthetic oligonucleotide
  Antisense strand to SEQ ID NO: 1355084
aaugagaccauuuauguca

SEQ ID NO: 1355086 - RNA, 19 nt, Artificial Sequence
  Description of Artificial Sequence: Synthetic oligonucleotide
  Sense strand starting at position 3830 of SEQ ID NO: 1242534
ggagaugggccuuauuauc

SEQ ID NO: 1355087 - RNA, 19 nt, Artificial Sequence
  Description of Artificial Sequence: Synthetic oligonucleotide
  Antisense strand to SEQ ID NO: 1355086
gauaauaaggcccaucucc

SEQ ID NO: 1355088 - RNA, 19 nt, Artificial Sequence
  Description of Artificial Sequence: Synthetic oligonucleotide
  Sense strand starting at position 3918 of SEQ ID NO: 1242534
cuaaguagcuagguuauga

SEQ ID NO: 1355089 - RNA, 19 nt, Artificial Sequence
  Description of Artificial Sequence: Synthetic oligonucleotide
  Antisense strand to SEQ ID NO: 1355088
ucauaaccuagcuacuuag

SEQ ID NO: 1355090 - RNA, 19 nt, Artificial Sequence
  Description of Artificial Sequence: Synthetic oligonucleotide
  Sense strand starting at position 32 of SEQ ID NO: 1242535
ccuuaaauugauuggaauu

SEQ ID NO: 1355091 - RNA, 19 nt, Artificial Sequence
  Description of Artificial Sequence: Synthetic oligonucleotide
  Antisense strand to SEQ ID NO: 1355090
aauuccaaucaauuuaagg

SEQ ID NO: 1355092 - RNA, 19 nt, Artificial Sequence
  Description of Artificial Sequence: Synthetic oligonucleotide
  Sense strand starting at position 152 of SEQ ID NO: 1242535
auguuucccuacccugaua

SEQ ID NO: 1355093 - RNA, 19 nt, Artificial Sequence
  Description of Artificial Sequence: Synthetic oligonucleotide
  Antisense strand to SEQ ID NO: 1355092
uaucaggguagggaaacau

SEQ ID NO: 1355094 - RNA, 19 nt, Artificial Sequence
  Description of Artificial Sequence: Synthetic oligonucleotide
  Sense strand starting at position 316 of SEQ ID NO: 1242535
aguaaagauuaagucaauc

SEQ ID NO: 1355095 - RNA, 19 nt, Artificial Sequence
  Description of Artificial Sequence: Synthetic oligonucleotide
  Antisense strand to SEQ ID NO: 1355094
gauugacuuaaucuuuacu

SEQ ID NO: 1355096 - RNA, 19 nt, Artificial Sequence
  Description of Artificial Sequence: Synthetic oligonucleotide
  Sense strand starting at position 443 of SEQ ID NO: 1242535
ugaaauaacuuguuuguac

SEQ ID NO: 1355097 - RNA, 19 nt, Artificial Sequence
  Description of Artificial Sequence: Synthetic oligonucleotide
  Antisense strand to SEQ ID NO: 1355096
guacaaacaaguuauuuca

SEQ ID NO: 1355098 - RNA, 19 nt, Artificial Sequence
  Description of Artificial Sequence: Synthetic oligonucleotide
  Sense strand starting at position 452 of SEQ ID NO: 1242535
uuguuuguaccagagagau

SEQ ID NO: 1355099 - RNA, 19 nt, Artificial Sequence
  Description of Artificial Sequence: Synthetic oligonucleotide
  Antisense strand to SEQ ID NO: 1355098
aucucucugguacaaacaa

SEQ ID NO: 1355100 - RNA, 19 nt, Artificial Sequence
  Description of Artificial Sequence: Synthetic oligonucleotide
  Sense strand starting at position 482 of SEQ ID NO: 1242535
uucgauuuaucagaacuuc

SEQ ID NO: 1355101 - RNA, 19 nt, Artificial Sequence
  Description of Artificial Sequence: Synthetic oligonucleotide
  Antisense strand to SEQ ID NO: 1355100
gaaguucugauaaaucgaa

SEQ ID NO: 1355102 - RNA, 19 nt, Artificial Sequence
  Description of Artificial Sequence: Synthetic oligonucleotide
  Sense strand starting at position 540 of SEQ ID NO: 1242535
aguucuuaccagggauggu

SEQ ID NO: 1355103 - RNA, 19 nt, Artificial Sequence
  Description of Artificial Sequence: Synthetic oligonucleotide
  Antisense strand to SEQ ID NO: 1355102
accaucccugguaagaacu

SEQ ID NO: 1355104 - RNA, 19 nt, Artificial Sequence
  Description of Artificial Sequence: Synthetic oligonucleotide
  Sense strand starting at position 1373 of SEQ ID NO: 1242535
auugacacccuucguaaga

SEQ ID NO: 1355105 - RNA, 19 nt, Artificial Sequence
  Description of Artificial Sequence: Synthetic oligonucleotide
  Antisense strand to SEQ ID NO: 1355104
ucuuacgaagggugucaau

SEQ ID NO: 1355106 - RNA, 19 nt, Artificial Sequence
  Description of Artificial Sequence: Synthetic oligonucleotide
  Sense strand starting at position 1374 of SEQ ID NO: 1242535
uugacacccuucguaagaa

SEQ ID NO: 1355107 - RNA, 19 nt, Artificial Sequence
  Description of Artificial Sequence: Synthetic oligonucleotide
  Antisense strand to SEQ ID NO: 1355106
uucuuacgaagggugucaa

SEQ ID NO: 1355108 - RNA, 19 nt, Artificial Sequence
  Description of Artificial Sequence: Synthetic oligonucleotide
  Sense strand starting at position 1547 of SEQ ID NO: 1242535
gcggauugucuggaauuau

SEQ ID NO: 1355109 - RNA, 19 nt, Artificial Sequence
  Description of Artificial Sequence: Synthetic oligonucleotide
  Antisense strand to SEQ ID NO: 1355108
auaauuccagacaauccgc

SEQ ID NO: 1355110 - RNA, 19 nt, Artificial Sequence
  Description of Artificial Sequence: Synthetic oligonucleotide
  Sense strand starting at position 1571 of SEQ ID NO: 1242535
gagugugaagccgaucaua

SEQ ID NO: 1355111 - RNA, 19 nt, Artificial Sequence
  Description of Artificial Sequence: Synthetic oligonucleotide
  Antisense strand to SEQ ID NO: 1355110
uaugaucggcuucacacuc

SEQ ID NO: 1355112 - RNA, 19 nt, Artificial Sequence
  Description of Artificial Sequence: Synthetic oligonucleotide
  Sense strand starting at position 1574 of SEQ ID NO: 1242535
ugugaagccgaucauaacu

SEQ ID NO: 1355113 - RNA, 19 nt, Artificial Sequence
  Description of Artificial Sequence: Synthetic oligonucleotide
  Antisense strand to SEQ ID NO: 1355112
aguuaugaucggcuucaca

SEQ ID NO: 1355114 - RNA, 19 nt, Artificial Sequence
  Description of Artificial Sequence: Synthetic oligonucleotide
  Sense strand starting at position 1582 of SEQ ID NO: 1242535
cgaucauaacuguggcaga

SEQ ID NO: 1355115 - RNA, 19 nt, Artificial Sequence
  Description of Artificial Sequence: Synthetic oligonucleotide
  Antisense strand to SEQ ID NO: 1355114
ucugccacaguuaugaucg

SEQ ID NO: 1355116 - RNA, 19 nt, Artificial Sequence
  Description of Artificial Sequence: Synthetic oligonucleotide
  Sense strand starting at position 1625 of SEQ ID NO: 1242535
gggaaucccagaugugacu

SEQ ID NO: 1355117 - RNA, 19 nt, Artificial Sequence
  Description of Artificial Sequence: Synthetic oligonucleotide
  Antisense strand to SEQ ID NO: 1355116
agucacaucugggauuccc

SEQ ID NO: 1355118 - RNA, 19 nt, Artificial Sequence
  Description of Artificial Sequence: Synthetic oligonucleotide
  Sense strand starting at position 1634 of SEQ ID NO: 1242535
agaugugacucucccacua

SEQ ID NO: 1355119 - RNA, 19 nt, Artificial Sequence
  Description of Artificial Sequence: Synthetic oligonucleotide
  Antisense strand to SEQ ID NO: 1355118
uagugggagagucacaucu

SEQ ID NO: 1355120 - RNA, 19 nt, Artificial Sequence
  Description of Artificial Sequence: Synthetic oligonucleotide
  Sense strand starting at position 1647 of SEQ ID NO: 1242535
ccacuauuucucggguuau

SEQ ID NO: 1355121 - RNA, 19 nt, Artificial Sequence
  Description of Artificial Sequence: Synthetic oligonucleotide
  Antisense strand to SEQ ID NO: 1355120
auaacccgagaaauagugg

SEQ ID NO: 1355122 - RNA, 19 nt, Artificial Sequence
  Description of Artificial Sequence: Synthetic oligonucleotide
  Sense strand starting at position 1653 of SEQ ID NO: 1242535
uuucucggguuauugauaa

SEQ ID NO: 1355123 - RNA, 19 nt, Artificial Sequence
  Description of Artificial Sequence: Synthetic oligonucleotide
  Antisense strand to SEQ ID NO: 1355122
uuaucaauaacccgagaaa

SEQ ID NO: 1355124 - RNA, 19 nt, Artificial Sequence
  Description of Artificial Sequence: Synthetic oligonucleotide
  Sense strand starting at position 1671 of SEQ ID NO: 1242535
agaaccuuucgucaaagcu

SEQ ID NO: 1355125 - RNA, 19 nt, Artificial Sequence
  Description of Artificial Sequence: Synthetic oligonucleotide
  Antisense strand to SEQ ID NO: 1355124
agcuuugacgaaagguucu

SEQ ID NO: 1355126 - RNA, 19 nt, Artificial Sequence
  Description of Artificial Sequence: Synthetic oligonucleotide
  Sense strand starting at position 2605 of SEQ ID NO: 1242535
gguguuguacgucuguagu

SEQ ID NO: 1355127 - RNA, 19 nt, Artificial Sequence
  Description of Artificial Sequence: Synthetic oligonucleotide
  Antisense strand to SEQ ID NO: 1355126
acuacagacguacaacacc

SEQ ID NO: 1355128 - RNA, 19 nt, Artificial Sequence
  Description of Artificial Sequence: Synthetic oligonucleotide
  Sense strand starting at position 2751 of SEQ ID NO: 1242535
auaagauucuggcuauucu

SEQ ID NO: 1355129 - RNA, 19 nt, Artificial Sequence
  Description of Artificial Sequence: Synthetic oligonucleotide
  Antisense strand to SEQ ID NO: 1355128
agaauagccagaaucuuau

SEQ ID NO: 1355130 - RNA, 19 nt, Artificial Sequence
  Description of Artificial Sequence: Synthetic oligonucleotide
  Sense strand starting at position 2760 of SEQ ID NO: 1242535
uggcuauucucuuuaaggu

SEQ ID NO: 1355131 - RNA, 19 nt, Artificial Sequence
  Description of Artificial Sequence: Synthetic oligonucleotide
  Antisense strand to SEQ ID NO: 1355130
accuuaaagagaauagcca

SEQ ID NO: 1355132 - RNA, 19 nt, Artificial Sequence
  Description of Artificial Sequence: Synthetic oligonucleotide
  Sense strand starting at position 2761 of SEQ ID NO: 1242535
ggcuauucucuuuaagguu

SEQ ID NO: 1355133 - RNA, 19 nt, Artificial Sequence
  Description of Artificial Sequence: Synthetic oligonucleotide
  Antisense strand to SEQ ID NO: 1355132
aaccuuaaagagaauagcc

SEQ ID NO: 1355134 - RNA, 19 nt, Artificial Sequence
  Description of Artificial Sequence: Synthetic oligonucleotide
  Sense strand starting at position 2825 of SEQ ID NO: 1242535
cacuguuccuugccugaga

SEQ ID NO: 1355135 - RNA, 19 nt, Artificial Sequence
  Description of Artificial Sequence: Synthetic oligonucleotide
  Antisense strand to SEQ ID NO: 1355134
ucucaggcaaggaacagug

SEQ ID NO: 1355136 - RNA, 19 nt, Artificial Sequence
  Description of Artificial Sequence: Synthetic oligonucleotide
  Sense strand starting at position 2826 of SEQ ID NO: 1242535
acuguuccuugccugagau

SEQ ID NO: 1355137 - RNA, 19 nt, Artificial Sequence
  Description of Artificial Sequence: Synthetic oligonucleotide
  Antisense strand to SEQ ID NO: 1355136
aucucaggcaaggaacagu

SEQ ID NO: 1355138 - RNA, 19 nt, Artificial Sequence
  Description of Artificial Sequence: Synthetic oligonucleotide
  Sense strand starting at position 2836 of SEQ ID NO: 1242535
gccugagauuuguccaguu

SEQ ID NO: 1355139 - RNA, 19 nt, Artificial Sequence
  Description of Artificial Sequence: Synthetic oligonucleotide
  Antisense strand to SEQ ID NO: 1355138
aacuggacaaaucucaggc

SEQ ID NO: 1355140 - RNA, 19 nt, Artificial Sequence
  Description of Artificial Sequence: Synthetic oligonucleotide
  Sense strand starting at position 2875 of SEQ ID NO: 1242535
ggcccaauuguagaacaca

SEQ ID NO: 1355141 - RNA, 19 nt, Artificial Sequence
  Description of Artificial Sequence: Synthetic oligonucleotide
  Antisense strand to SEQ ID NO: 1355140
uguguucuacaauugggcc

SEQ ID NO: 1355142 - RNA, 19 nt, Artificial Sequence
  Description of Artificial Sequence: Synthetic oligonucleotide
  Sense strand starting at position 2884 of SEQ ID NO: 1242535
guagaacacaggugaagua

SEQ ID NO: 1355143 - RNA, 19 nt, Artificial Sequence
  Description of Artificial Sequence: Synthetic oligonucleotide
  Antisense strand to SEQ ID NO: 1355142
uacuucaccuguguucuac

SEQ ID NO: 1355144 - RNA, 19 nt, Artificial Sequence
  Description of Artificial Sequence: Synthetic oligonucleotide
  Sense strand starting at position 2896 of SEQ ID NO: 1242535
ugaaguaauuuggguuaau

SEQ ID NO: 1355145 - RNA, 19 nt, Artificial Sequence
  Description of Artificial Sequence: Synthetic oligonucleotide
  Antisense strand to SEQ ID NO: 1355144
auuaacccaaauuacuuca

SEQ ID NO: 1355146 - RNA, 19 nt, Artificial Sequence
  Description of Artificial Sequence: Synthetic oligonucleotide
  Sense strand starting at position 3002 of SEQ ID NO: 1242535
guuucuggacuuuaagacu

SEQ ID NO: 1355147 - RNA, 19 nt, Artificial Sequence
  Description of Artificial Sequence: Synthetic oligonucleotide
  Antisense strand to SEQ ID NO: 1355146
agucuuaaaguccagaaac

SEQ ID NO: 1355148 - RNA, 19 nt, Artificial Sequence
  Description of Artificial Sequence: Synthetic oligonucleotide
  Sense strand starting at position 3051 of SEQ ID NO: 1242535
guuauaaaguccuuucuac

SEQ ID NO: 1355149 - RNA, 19 nt, Artificial Sequence
  Description of Artificial Sequence: Synthetic oligonucleotide
  Antisense strand to SEQ ID NO: 1355148
guagaaaggacuuuauaac

SEQ ID NO: 1355150 - RNA, 19 nt, Artificial Sequence
  Description of Artificial Sequence: Synthetic oligonucleotide
  Sense strand starting at position 3060 of SEQ ID NO: 1242535
uccuuucuacugugaaaug

SEQ ID NO: 1355151 - RNA, 19 nt, Artificial Sequence
  Description of Artificial Sequence: Synthetic oligonucleotide
  Antisense strand to SEQ ID NO: 1355150
cauuucacaguagaaagga

SEQ ID NO: 1355152 - RNA, 19 nt, Artificial Sequence
  Description of Artificial Sequence: Synthetic oligonucleotide
  Sense strand starting at position 3070 of SEQ ID NO: 1242535
ugugaaauguguccugacu

SEQ ID NO: 1355153 - RNA, 19 nt, Artificial Sequence
  Description of Artificial Sequence: Synthetic oligonucleotide
  Antisense strand to SEQ ID NO: 1355152
agucaggacacauuucaca

SEQ ID NO: 1355154 - RNA, 19 nt, Artificial Sequence
  Description of Artificial Sequence: Synthetic oligonucleotide
  Sense strand starting at position 3122 of SEQ ID NO: 1242535
cacgacucagcuuguaaau

SEQ ID NO: 1355155 - RNA, 19 nt, Artificial Sequence
  Description of Artificial Sequence: Synthetic oligonucleotide
  Antisense strand to SEQ ID NO: 1355154
auuuacaagcugagucgug

SEQ ID NO: 1355156 - RNA, 19 nt, Artificial Sequence
  Description of Artificial Sequence: Synthetic oligonucleotide
  Sense strand starting at position 3150 of SEQ ID NO: 1242535
uucuguuauuauccuguaa

SEQ ID NO: 1355157 - RNA, 19 nt, Artificial Sequence
  Description of Artificial Sequence: Synthetic oligonucleotide
  Antisense strand to SEQ ID NO: 1355156
uuacaggauaauaacagaa

SEQ ID NO: 1355158 - RNA, 19 nt, Artificial Sequence
  Description of Artificial Sequence: Synthetic oligonucleotide
  Sense strand starting at position 3154 of SEQ ID NO: 1242535
guuauuauccuguaagucc

SEQ ID NO: 1355159 - RNA, 19 nt, Artificial Sequence
  Description of Artificial Sequence: Synthetic oligonucleotide
  Antisense strand to SEQ ID NO: 1355158
ggacuuacaggauaauaac

SEQ ID NO: 1355160 - RNA, 19 nt, Artificial Sequence
  Description of Artificial Sequence: Synthetic oligonucleotide
  Sense strand starting at position 3161 of SEQ ID NO: 1242535
uccuguaaguccuuaaaga

SEQ ID NO: 1355161 - RNA, 19 nt, Artificial Sequence
  Description of Artificial Sequence: Synthetic oligonucleotide
  Antisense strand to SEQ ID NO: 1355160
ucuuuaaggacuuacagga

SEQ ID NO: 1355162 - RNA, 19 nt, Artificial Sequence
  Description of Artificial Sequence: Synthetic oligonucleotide
  Sense strand starting at position 3162 of SEQ ID NO: 1242535
ccuguaaguccuuaaagag

SEQ ID NO: 1355163 - RNA, 19 nt, Artificial Sequence
  Description of Artificial Sequence: Synthetic oligonucleotide
  Antisense strand to SEQ ID NO: 1355162
cucuuuaaggacuuacagg

SEQ ID NO: 1355164 - RNA, 19 nt, Artificial Sequence
  Description of Artificial Sequence: Synthetic oligonucleotide
  Sense strand starting at position 3831 of SEQ ID NO: 1242535
gaacuaagcuaaucggaua

SEQ ID NO: 1355165 - RNA, 19 nt, Artificial Sequence
  Description of Artificial Sequence: Synthetic oligonucleotide
  Antisense strand to SEQ ID NO: 1355164
uauccgauuagcuuaguuc

SEQ ID NO: 1355166 - RNA, 19 nt, Artificial Sequence
  Description of Artificial Sequence: Synthetic oligonucleotide
  Sense strand starting at position 3843 of SEQ ID NO: 1242535
ucggauacuacuggcaaga

SEQ ID NO: 1355167 - RNA, 19 nt, Artificial Sequence
  Description of Artificial Sequence: Synthetic oligonucleotide
  Antisense strand to SEQ ID NO: 1355166
ucuugccaguaguauccga

SEQ ID NO: 1355168 - RNA, 19 nt, Artificial Sequence
  Description of Artificial Sequence: Synthetic oligonucleotide
  Sense strand starting at position 3926 of SEQ ID NO: 1242535
gucgccugaguuucuuauu

SEQ ID NO: 1355169 - RNA, 19 nt, Artificial Sequence
  Description of Artificial Sequence: Synthetic oligonucleotide
  Antisense strand to SEQ ID NO: 1355168
aauaagaaacucaggcgac

SEQ ID NO: 1355170 - RNA, 19 nt, Artificial Sequence
  Description of Artificial Sequence: Synthetic oligonucleotide
  Sense strand starting at position 194 of SEQ ID NO: 1242536
ugauacacaucuguguuua

SEQ ID NO: 1355171 - RNA, 19 nt, Artificial Sequence
  Description of Artificial Sequence: Synthetic oligonucleotide
  Antisense strand to SEQ ID NO: 1355170
uaaacacagauguguauca

SEQ ID NO: 1355172 - RNA, 19 nt, Artificial Sequence
  Description of Artificial Sequence: Synthetic oligonucleotide
  Sense strand starting at position 195 of SEQ ID NO: 1242536
gauacacaucuguguuuag

SEQ ID NO: 1355173 - RNA, 19 nt, Artificial Sequence
  Description of Artificial Sequence: Synthetic oligonucleotide
  Antisense strand to SEQ ID NO: 1355172
cuaaacacagauguguauc

SEQ ID NO: 1355174 - RNA, 19 nt, Artificial Sequence
  Description of Artificial Sequence: Synthetic oligonucleotide
  Sense strand starting at position 196 of SEQ ID NO: 1242536
auacacaucuguguuuaga

SEQ ID NO: 1355175 - RNA, 19 nt, Artificial Sequence
  Description of Artificial Sequence: Synthetic oligonucleotide
  Antisense strand to SEQ ID NO: 1355174
ucuaaacacagauguguau

SEQ ID NO: 1355176 - RNA, 19 nt, Artificial Sequence
  Description of Artificial Sequence: Synthetic oligonucleotide
  Sense strand starting at position 198 of SEQ ID NO: 1242536
acacaucuguguuuagaag

SEQ ID NO: 1355177 - RNA, 19 nt, Artificial Sequence
  Description of Artificial Sequence: Synthetic oligonucleotide
  Antisense strand to SEQ ID NO: 1355176
cuucuaaacacagaugugu

SEQ ID NO: 1355178 - RNA, 19 nt, Artificial Sequence
  Description of Artificial Sequence: Synthetic oligonucleotide
  Sense strand starting at position 240 of SEQ ID NO: 1242536
cuaacauaucucuguguug

SEQ ID NO: 1355179 - RNA, 19 nt, Artificial Sequence
  Description of Artificial Sequence: Synthetic oligonucleotide
  Antisense strand to SEQ ID NO: 1355178
caacacagagauauguuag

SEQ ID NO: 1355180 - RNA, 19 nt, Artificial Sequence
  Description of Artificial Sequence: Synthetic oligonucleotide
  Sense strand starting at position 325 of SEQ ID NO: 1242536
gguauauggccaggacuca

SEQ ID NO: 1355181 - RNA, 19 nt, Artificial Sequence
  Description of Artificial Sequence: Synthetic oligonucleotide
  Antisense strand to SEQ ID NO: 1355180
ugaguccuggccauauacc

SEQ ID NO: 1355182 - RNA, 19 nt, Artificial Sequence
  Description of Artificial Sequence: Synthetic oligonucleotide
  Sense strand starting at position 326 of SEQ ID NO: 1242536
guauauggccaggacucaa

SEQ ID NO: 1355183 - RNA, 19 nt, Artificial Sequence
  Description of Artificial Sequence: Synthetic oligonucleotide
  Antisense strand to SEQ ID NO: 1355182
uugaguccuggccauauac

SEQ ID NO: 1355184 - RNA, 19 nt, Artificial Sequence
  Description of Artificial Sequence: Synthetic oligonucleotide
  Sense strand starting at position 361 of SEQ ID NO: 1242536
gcagaauugcccugaccug

SEQ ID NO: 1355185 - RNA, 19 nt, Artificial Sequence
  Description of Artificial Sequence: Synthetic oligonucleotide
  Antisense strand to SEQ ID NO: 1355184
caggucagggcaauucugc

SEQ ID NO: 1355186 - RNA, 19 nt, Artificial Sequence
  Description of Artificial Sequence: Synthetic oligonucleotide
  Sense strand starting at position 610 of SEQ ID NO: 1242536
ugagcacuccucgaucuga

SEQ ID NO: 1355187 - RNA, 19 nt, Artificial Sequence
  Description of Artificial Sequence: Synthetic oligonucleotide
  Antisense strand to SEQ ID NO: 1355186
ucagaucgaggagugcuca

SEQ ID NO: 1355188 - RNA, 19 nt, Artificial Sequence
  Description of Artificial Sequence: Synthetic oligonucleotide
  Sense strand starting at position 686 of SEQ ID NO: 1242536
ggaguaucaggaugguaua

SEQ ID NO: 1355189 - RNA, 19 nt, Artificial Sequence
  Description of Artificial Sequence: Synthetic oligonucleotide
  Antisense strand to SEQ ID NO: 1355188
uauaccauccugauacucc

SEQ ID NO: 1355190 - RNA, 19 nt, Artificial Sequence
  Description of Artificial Sequence: Synthetic oligonucleotide
  Sense strand starting at position 795 of SEQ ID NO: 1242536
gccauauuccagcuguguu

SEQ ID NO: 1355191 - RNA, 19 nt, Artificial Sequence
  Description of Artificial Sequence: Synthetic oligonucleotide
  Antisense strand to SEQ ID NO: 1355190
aacacagcuggaauauggc

SEQ ID NO: 1355192 - RNA, 19 nt, Artificial Sequence
  Description of Artificial Sequence: Synthetic oligonucleotide
  Sense strand starting at position 846 of SEQ ID NO: 1242536
agaugaaccuggccuucua

SEQ ID NO: 1355193 - RNA, 19 nt, Artificial Sequence
  Description of Artificial Sequence: Synthetic oligonucleotide
  Antisense strand to SEQ ID NO: 1355192
uagaaggccagguucaucu

SEQ ID NO: 1355194 - RNA, 19 nt, Artificial Sequence
  Description of Artificial Sequence: Synthetic oligonucleotide
  Sense strand starting at position 865 of SEQ ID NO: 1242536
caucauuaugagggucuau

SEQ ID NO: 1355195 - RNA, 19 nt, Artificial Sequence
  Description of Artificial Sequence: Synthetic oligonucleotide
  Antisense strand to SEQ ID NO: 1355194
auagacccucauaaugaug

SEQ ID NO: 1355196 - RNA, 19 nt, Artificial Sequence
  Description of Artificial Sequence: Synthetic oligonucleotide
  Sense strand starting at position 1014 of SEQ ID NO: 1242536
uggccugaccaagggaaua

SEQ ID NO: 1355197 - RNA, 19 nt, Artificial Sequence
  Description of Artificial Sequence: Synthetic oligonucleotide
  Antisense strand to SEQ ID NO: 1355196
uauucccuuggucaggcca

SEQ ID NO: 1355198 - RNA, 19 nt, Artificial Sequence
  Description of Artificial Sequence: Synthetic oligonucleotide
  Sense strand starting at position 1371 of SEQ ID NO: 1242536
ugugguuauagaggguaca

SEQ ID NO: 1355199 - RNA, 19 nt, Artificial Sequence
  Description of Artificial Sequence: Synthetic oligonucleotide
  Antisense strand to SEQ ID NO: 1355198
uguacccucuauaaccaca

SEQ ID NO: 1355200 - RNA, 19 nt, Artificial Sequence
  Description of Artificial Sequence: Synthetic oligonucleotide
  Sense strand starting at position 1372 of SEQ ID NO: 1242536
gugguuauagaggguacau

SEQ ID NO: 1355201 - RNA, 19 nt, Artificial Sequence
  Description of Artificial Sequence: Synthetic oligonucleotide
  Antisense strand to SEQ ID NO: 1355200
auguacccucuauaaccac

SEQ ID NO: 1355202 - RNA, 19 nt, Artificial Sequence
  Description of Artificial Sequence: Synthetic oligonucleotide
  Sense strand starting at position 1606 of SEQ ID NO: 1242536
cugugaaauuggcuuaucu

SEQ ID NO: 1355203 - RNA, 19 nt, Artificial Sequence
  Description of Artificial Sequence: Synthetic oligonucleotide
  Antisense strand to SEQ ID NO: 1355202
agauaagccaauuucacag

SEQ ID NO: 1355204 - RNA, 19 nt, Artificial Sequence
  Description of Artificial Sequence: Synthetic oligonucleotide
  Sense strand starting at position 1608 of SEQ ID NO: 1242536
gugaaauuggcuuaucucu

SEQ ID NO: 1355205 - RNA, 19 nt, Artificial Sequence
  Description of Artificial Sequence: Synthetic oligonucleotide
  Antisense strand to SEQ ID NO: 1355204
agagauaagccaauuucac

SEQ ID NO: 1355206 - RNA, 19 nt, Artificial Sequence
  Description of Artificial Sequence: Synthetic oligonucleotide
  Sense strand starting at position 1614 of SEQ ID NO: 1242536
uuggcuuaucucugaccua

SEQ ID NO: 1355207 - RNA, 19 nt, Artificial Sequence
  Description of Artificial Sequence: Synthetic oligonucleotide
  Antisense strand to SEQ ID NO: 1355206
uaggucagagauaagccaa

SEQ ID NO: 1355208 - RNA, 19 nt, Artificial Sequence
  Description of Artificial Sequence: Synthetic oligonucleotide
  Sense strand starting at position 1647 of SEQ ID NO: 1242536
cagacauagagcuggugua

SEQ ID NO: 1355209 - RNA, 19 nt, Artificial Sequence
  Description of Artificial Sequence: Synthetic oligonucleotide
  Antisense strand to SEQ ID NO: 1355208
uacaccagcucuaugucug

SEQ ID NO: 1355210 - RNA, 19 nt, Artificial Sequence
  Description of Artificial Sequence: Synthetic oligonucleotide
  Sense strand starting at position 1847 of SEQ ID NO: 1242536
cucagacuuuccucuagga

SEQ ID NO: 1355211 - RNA, 19 nt, Artificial Sequence
  Description of Artificial Sequence: Synthetic oligonucleotide
  Antisense strand to SEQ ID NO: 1355210
uccuagaggaaagucugag

SEQ ID NO: 1355212 - RNA, 19 nt, Artificial Sequence
  Description of Artificial Sequence: Synthetic oligonucleotide
  Sense strand starting at position 1851 of SEQ ID NO: 1242536
gacuuuccucuaggagacu

SEQ ID NO: 1355213 - RNA, 19 nt, Artificial Sequence
  Description of Artificial Sequence: Synthetic oligonucleotide
  Antisense strand to SEQ ID NO: 1355212
agucuccuagaggaaaguc

SEQ ID NO: 1355214 - RNA, 19 nt, Artificial Sequence
  Description of Artificial Sequence: Synthetic oligonucleotide
  Sense strand starting at position 1908 of SEQ ID NO: 1242536
ccggcauccaaagguaaga

SEQ ID NO: 1355215 - RNA, 19 nt, Artificial Sequence
  Description of Artificial Sequence: Synthetic oligonucleotide
  Antisense strand to SEQ ID NO: 1355214
ucuuaccuuuggaugccgg

SEQ ID NO: 1355216 - RNA, 19 nt, Artificial Sequence
  Description of Artificial Sequence: Synthetic oligonucleotide
  Sense strand starting at position 2068 of SEQ ID NO: 1242536
gcggauaaccugggacuga

SEQ ID NO: 1355217 - RNA, 19 nt, Artificial Sequence
  Description of Artificial Sequence: Synthetic oligonucleotide
  Antisense strand to SEQ ID NO: 1355216
ucagucccagguuauccgc

SEQ ID NO: 1355218 - RNA, 19 nt, Artificial Sequence
  Description of Artificial Sequence: Synthetic oligonucleotide
  Sense strand starting at position 2566 of SEQ ID NO: 1242536
acauucuuccgagggaucu

SEQ ID NO: 1355219 - RNA, 19 nt, Artificial Sequence
  Description of Artificial Sequence: Synthetic oligonucleotide
  Antisense strand to SEQ ID NO: 1355218
agaucccucggaagaaugu

SEQ ID NO: 1355220 - RNA, 19 nt, Artificial Sequence
  Description of Artificial Sequence: Synthetic oligonucleotide
  Sense strand starting at position 2959 of SEQ ID NO: 1242536
ucuugaaauguuugaggag

SEQ ID NO: 1355221 - RNA, 19 nt, Artificial Sequence
  Description of Artificial Sequence: Synthetic oligonucleotide
  Antisense strand to SEQ ID NO: 1355220
cuccucaaacauuucaaga

SEQ ID NO: 1355222 - RNA, 19 nt, Artificial Sequence
  Description of Artificial Sequence: Synthetic oligonucleotide
  Sense strand starting at position 3005 of SEQ ID NO: 1242536
caggcuguaucauugagau

SEQ ID NO: 1355223 - RNA, 19 nt, Artificial Sequence
  Description of Artificial Sequence: Synthetic oligonucleotide
  Antisense strand to SEQ ID NO: 1355222
aucucaaugauacagccug

SEQ ID NO: 1355224 - RNA, 19 nt, Artificial Sequence
  Description of Artificial Sequence: Synthetic oligonucleotide
  Sense strand starting at position 3007 of SEQ ID NO: 1242536
ggcuguaucauugagauac

SEQ ID NO: 1355225 - RNA, 19 nt, Artificial Sequence
  Description of Artificial Sequence: Synthetic oligonucleotide
  Antisense strand to SEQ ID NO: 1355224
guaucucaaugauacagcc

SEQ ID NO: 1355226 - RNA, 19 nt, Artificial Sequence
  Description of Artificial Sequence: Synthetic oligonucleotide
  Sense strand starting at position 3018 of SEQ ID NO: 1242536
ugagauacugcauguggaa

SEQ ID NO: 1355227 - RNA, 19 nt, Artificial Sequence
  Description of Artificial Sequence: Synthetic oligonucleotide
  Antisense strand to SEQ ID NO: 1355226
uuccacaugcaguaucuca

SEQ ID NO: 1355228 - RNA, 19 nt, Artificial Sequence
  Description of Artificial Sequence: Synthetic oligonucleotide
  Sense strand starting at position 3020 of SEQ ID NO: 1242536
agauacugcauguggaaua

SEQ ID NO: 1355229 - RNA, 19 nt, Artificial Sequence
  Description of Artificial Sequence: Synthetic oligonucleotide
  Antisense strand to SEQ ID NO: 1355228
uauuccacaugcaguaucu

SEQ ID NO: 1355230 - RNA, 19 nt, Artificial Sequence
  Description of Artificial Sequence: Synthetic oligonucleotide
  Sense strand starting at position 3225 of SEQ ID NO: 1242536
gagagauuguaucuuuaau

SEQ ID NO: 1355231 - RNA, 19 nt, Artificial Sequence
  Description of Artificial Sequence: Synthetic oligonucleotide
  Antisense strand to SEQ ID NO: 1355230
auuaaagauacaaucucuc

SEQ ID NO: 1355232 - RNA, 19 nt, Artificial Sequence
  Description of Artificial Sequence: Synthetic oligonucleotide
  Sense strand starting at position 3242 of SEQ ID NO: 1242536
auacgaauacaguacuagu

SEQ ID NO: 1355233 - RNA, 19 nt, Artificial Sequence
  Description of Artificial Sequence: Synthetic oligonucleotide
  Antisense strand to SEQ ID NO: 1355232
acuaguacuguauucguau

SEQ ID NO: 1355234 - RNA, 19 nt, Artificial Sequence
  Description of Artificial Sequence: Synthetic oligonucleotide
  Sense strand starting at position 3281 of SEQ ID NO: 1242536
gguugauucuugcuuaaug

SEQ ID NO: 1355235 - RNA, 19 nt, Artificial Sequence
  Description of Artificial Sequence: Synthetic oligonucleotide
  Antisense strand to SEQ ID NO: 1355234
cauuaagcaagaaucaacc

SEQ ID NO: 1355236 - RNA, 19 nt, Artificial Sequence
  Description of Artificial Sequence: Synthetic oligonucleotide
  Sense strand starting at position 3282 of SEQ ID NO: 1242536
guugauucuugcuuaauga

SEQ ID NO: 1355237 - RNA, 19 nt, Artificial Sequence
  Description of Artificial Sequence: Synthetic oligonucleotide
  Antisense strand to SEQ ID NO: 1355236
ucauuaagcaagaaucaac

SEQ ID NO: 1355238 - RNA, 19 nt, Artificial Sequence
  Description of Artificial Sequence: Synthetic oligonucleotide
  Sense strand starting at position 3283 of SEQ ID NO: 1242536
uugauucuugcuuaaugaa

SEQ ID NO: 1355239 - RNA, 19 nt, Artificial Sequence
  Description of Artificial Sequence: Synthetic oligonucleotide
  Antisense strand to SEQ ID NO: 1355238
uucauuaagcaagaaucaa

SEQ ID NO: 1355240 - RNA, 19 nt, Artificial Sequence
  Description of Artificial Sequence: Synthetic oligonucleotide
  Sense strand starting at position 3353 of SEQ ID NO: 1242536
ugugcaagugcugauacaa

SEQ ID NO: 1355241 - RNA, 19 nt, Artificial Sequence
  Description of Artificial Sequence: Synthetic oligonucleotide
  Antisense strand to SEQ ID NO: 1355240
uuguaucagcacuugcaca

SEQ ID NO: 1355242 - RNA, 19 nt, Artificial Sequence
  Description of Artificial Sequence: Synthetic oligonucleotide
  Sense strand starting at position 3485 of SEQ ID NO: 1242536
ugagguagauacucuaaau

SEQ ID NO: 1355243 - RNA, 19 nt, Artificial Sequence
  Description of Artificial Sequence: Synthetic oligonucleotide
  Antisense strand to SEQ ID NO: 1355242
auuuagaguaucuaccuca

SEQ ID NO: 1355244 - RNA, 19 nt, Artificial Sequence
  Description of Artificial Sequence: Synthetic oligonucleotide
  Sense strand starting at position 3562 of SEQ ID NO: 1242536
ggcagaacugagggauuca

SEQ ID NO: 1355245 - RNA, 19 nt, Artificial Sequence
  Description of Artificial Sequence: Synthetic oligonucleotide
  Antisense strand to SEQ ID NO: 1355244
ugaaucccucaguucugcc

SEQ ID NO: 1355246 - RNA, 19 nt, Artificial Sequence
  Description of Artificial Sequence: Synthetic oligonucleotide
  Sense strand starting at position 3717 of SEQ ID NO: 1242536
auuccaguguaccuagaau

SEQ ID NO: 1355247 - RNA, 19 nt, Artificial Sequence
  Description of Artificial Sequence: Synthetic oligonucleotide
  Antisense strand to SEQ ID NO: 1355246
auucuagguacacuggaau

SEQ ID NO: 1355248 - RNA, 19 nt, Artificial Sequence
  Description of Artificial Sequence: Synthetic oligonucleotide
  Sense strand starting at position 3745 of SEQ ID NO: 1242536
aggguuuaucaaggaaguu

SEQ ID NO: 1355249 - RNA, 19 nt, Artificial Sequence
  Description of Artificial Sequence: Synthetic oligonucleotide
  Antisense strand to SEQ ID NO: 1355248
aacuuccuugauaaacccu

SEQ ID NO: 1355250 - RNA, 19 nt, Artificial Sequence
  Description of Artificial Sequence: Synthetic oligonucleotide
  Sense strand starting at position 74 of SEQ ID NO: 1242537
agcucaacaguaugaacua

SEQ ID NO: 1355251 - RNA, 19 nt, Artificial Sequence
  Description of Artificial Sequence: Synthetic oligonucleotide
  Antisense strand to SEQ ID NO: 1355250
uaguucauacuguugagcu

SEQ ID NO: 1355252 - RNA, 19 nt, Artificial Sequence
  Description of Artificial Sequence: Synthetic oligonucleotide
  Sense strand starting at position 218 of SEQ ID NO: 1242537
ugagaaaccgaguguguaa

SEQ ID NO: 1355253 - RNA, 19 nt, Artificial Sequence
  Description of Artificial Sequence: Synthetic oligonucleotide
  Antisense strand to SEQ ID NO: 1355252
uuacacacucgguuucuca

SEQ ID NO: 1355254 - RNA, 19 nt, Artificial Sequence
  Description of Artificial Sequence: Synthetic oligonucleotide
  Sense strand starting at position 329 of SEQ ID NO: 1242537
cgcugacuggccugaaacu

SEQ ID NO: 1355255 - RNA, 19 nt, Artificial Sequence
  Description of Artificial Sequence: Synthetic oligonucleotide
  Antisense strand to SEQ ID NO: 1355254
aguuucaggccagucagcg

SEQ ID NO: 1355256 - RNA, 19 nt, Artificial Sequence
  Description of Artificial Sequence: Synthetic oligonucleotide
  Sense strand starting at position 388 of SEQ ID NO: 1242537
agaaguggguguguagaua

SEQ ID NO: 1355257 - RNA, 19 nt, Artificial Sequence
  Description of Artificial Sequence: Synthetic oligonucleotide
  Antisense strand to SEQ ID NO: 1355256
uaucuacacacccacuucu

SEQ ID NO: 1355258 - RNA, 19 nt, Artificial Sequence
  Description of Artificial Sequence: Synthetic oligonucleotide
  Sense strand starting at position 475 of SEQ ID NO: 1242537
uuggaaagcuuauucuaca

SEQ ID NO: 1355259 - RNA, 19 nt, Artificial Sequence
  Description of Artificial Sequence: Synthetic oligonucleotide
  Antisense strand to SEQ ID NO: 1355258
uguagaauaagcuuuccaa

SEQ ID NO: 1355260 - RNA, 19 nt, Artificial Sequence
  Description of Artificial Sequence: Synthetic oligonucleotide
  Sense strand starting at position 476 of SEQ ID NO: 1242537
uggaaagcuuauucuacau

SEQ ID NO: 1355261 - RNA, 19 nt, Artificial Sequence
  Description of Artificial Sequence: Synthetic oligonucleotide
  Antisense strand to SEQ ID NO: 1355260
auguagaauaagcuuucca

SEQ ID NO: 1355262 - RNA, 19 nt, Artificial Sequence
  Description of Artificial Sequence: Synthetic oligonucleotide
  Sense strand starting at position 621 of SEQ ID NO: 1242537
guggacuuagaaggcauau

SEQ ID NO: 1355263 - RNA, 19 nt, Artificial Sequence
  Description of Artificial Sequence: Synthetic oligonucleotide
  Antisense strand to SEQ ID NO: 1355262
auaugccuucuaaguccac

SEQ ID NO: 1355264 - RNA, 19 nt, Artificial Sequence
  Description of Artificial Sequence: Synthetic oligonucleotide
  Sense strand starting at position 916 of SEQ ID NO: 1242537
uuacauuuaguccguguua

SEQ ID NO: 1355265 - RNA, 19 nt, Artificial Sequence
  Description of Artificial Sequence: Synthetic oligonucleotide
  Antisense strand to SEQ ID NO: 1355264
uaacacggacuaaauguaa

SEQ ID NO: 1355266 - RNA, 19 nt, Artificial Sequence
  Description of Artificial Sequence: Synthetic oligonucleotide
  Sense strand starting at position 917 of SEQ ID NO: 1242537
uacauuuaguccguguuau

SEQ ID NO: 1355267 - RNA, 19 nt, Artificial Sequence
  Description of Artificial Sequence: Synthetic oligonucleotide
  Antisense strand to SEQ ID NO: 1355266
auaacacggacuaaaugua

SEQ ID NO: 1355268 - RNA, 19 nt, Artificial Sequence
  Description of Artificial Sequence: Synthetic oligonucleotide
  Sense strand starting at position 918 of SEQ ID NO: 1242537
acauuuaguccguguuauu

SEQ ID NO: 1355269 - RNA, 19 nt, Artificial Sequence
  Description of Artificial Sequence: Synthetic oligonucleotide
  Antisense strand to SEQ ID NO: 1355268
aauaacacggacuaaaugu

SEQ ID NO: 1355270 - RNA, 19 nt, Artificial Sequence
  Description of Artificial Sequence: Synthetic oligonucleotide
  Sense strand starting at position 2094 of SEQ ID NO: 1242537
ggguugguugggugauaga

SEQ ID NO: 1355271 - RNA, 19 nt, Artificial Sequence
  Description of Artificial Sequence: Synthetic oligonucleotide
  Antisense strand to SEQ ID NO: 1355270
ucuaucacccaaccaaccc

SEQ ID NO: 1355272 - RNA, 19 nt, Artificial Sequence
  Description of Artificial Sequence: Synthetic oligonucleotide
  Sense strand starting at position 2146 of SEQ ID NO: 1242537
gaaggucucccucaggagu

SEQ ID NO: 1355273 - RNA, 19 nt, Artificial Sequence
  Description of Artificial Sequence: Synthetic oligonucleotide
  Antisense strand to SEQ ID NO: 1355272
acuccugagggagaccuuc

SEQ ID NO: 1355274 - RNA, 19 nt, Artificial Sequence
  Description of Artificial Sequence: Synthetic oligonucleotide
  Sense strand starting at position 2181 of SEQ ID NO: 1242537
uguucaggagucugggaaa

SEQ ID NO: 1355275 - RNA, 19 nt, Artificial Sequence
  Description of Artificial Sequence: Synthetic oligonucleotide
  Antisense strand to SEQ ID NO: 1355274
uuucccagacuccugaaca

SEQ ID NO: 1355276 - RNA, 19 nt, Artificial Sequence
  Description of Artificial Sequence: Synthetic oligonucleotide
  Sense strand starting at position 2184 of SEQ ID NO: 1242537
ucaggagucugggaaauac

SEQ ID NO: 1355277 - RNA, 19 nt, Artificial Sequence
  Description of Artificial Sequence: Synthetic oligonucleotide
  Antisense strand to SEQ ID NO: 1355276
guauuucccagacuccuga

SEQ ID NO: 1355278 - RNA, 19 nt, Artificial Sequence
  Description of Artificial Sequence: Synthetic oligonucleotide
  Sense strand starting at position 2255 of SEQ ID NO: 1242537
uguugaaucggcgaguuau

SEQ ID NO: 1355279 - RNA, 19 nt, Artificial Sequence
  Description of Artificial Sequence: Synthetic oligonucleotide
  Antisense strand to SEQ ID NO: 1355278
auaacucgccgauucaaca

SEQ ID NO: 1355280 - RNA, 19 nt, Artificial Sequence
  Description of Artificial Sequence: Synthetic oligonucleotide
  Sense strand starting at position 2256 of SEQ ID NO: 1242537
guugaaucggcgaguuauu

SEQ ID NO: 1355281 - RNA, 19 nt, Artificial Sequence
  Description of Artificial Sequence: Synthetic oligonucleotide
  Antisense strand to SEQ ID NO: 1355280
aauaacucgccgauucaac

SEQ ID NO: 1355282 - RNA, 19 nt, Artificial Sequence
  Description of Artificial Sequence: Synthetic oligonucleotide
  Sense strand starting at position 2368 of SEQ ID NO: 1242537
cgcccuuaagaaugucaca

SEQ ID NO: 1355283 - RNA, 19 nt, Artificial Sequence
  Description of Artificial Sequence: Synthetic oligonucleotide
  Antisense strand to SEQ ID NO: 1355282
ugugacauucuuaagggcg

SEQ ID NO: 1355284 - RNA, 19 nt, Artificial Sequence
  Description of Artificial Sequence: Synthetic oligonucleotide
  Sense strand starting at position 2506 of SEQ ID NO: 1242537
gucggcugugugucaguau

SEQ ID NO: 1355285 - RNA, 19 nt, Artificial Sequence
  Description of Artificial Sequence: Synthetic oligonucleotide
  Antisense strand to SEQ ID NO: 1355284
auacugacacacagccgac

SEQ ID NO: 1355286 - RNA, 19 nt, Artificial Sequence
  Description of Artificial Sequence: Synthetic oligonucleotide
  Sense strand starting at position 2569 of SEQ ID NO: 1242537
caaccaggguguuuaaaua

SEQ ID NO: 1355287 - RNA, 19 nt, Artificial Sequence
  Description of Artificial Sequence: Synthetic oligonucleotide
  Antisense strand to SEQ ID NO: 1355286
uauuuaaacacccugguug

SEQ ID NO: 1355288 - RNA, 19 nt, Artificial Sequence
  Description of Artificial Sequence: Synthetic oligonucleotide
  Sense strand starting at position 2776 of SEQ ID NO: 1242537
ccuagucucugccuaggaa

SEQ ID NO: 1355289 - RNA, 19 nt, Artificial Sequence
  Description of Artificial Sequence: Synthetic oligonucleotide
  Antisense strand to SEQ ID NO: 1355288
uuccuaggcagagacuagg

SEQ ID NO: 1355290 - RNA, 19 nt, Artificial Sequence
  Description of Artificial Sequence: Synthetic oligonucleotide
  Sense strand starting at position 2777 of SEQ ID NO: 1242537
cuagucucugccuaggaaa

SEQ ID NO: 1355291 - RNA, 19 nt, Artificial Sequence
  Description of Artificial Sequence: Synthetic oligonucleotide
  Antisense strand to SEQ ID NO: 1355290
uuuccuaggcagagacuag

SEQ ID NO: 1355292 - RNA, 19 nt, Artificial Sequence
  Description of Artificial Sequence: Synthetic oligonucleotide
  Sense strand starting at position 2788 of SEQ ID NO: 1242537
cuaggaaaugugcagugua

SEQ ID NO: 1355293 - RNA, 19 nt, Artificial Sequence
  Description of Artificial Sequence: Synthetic oligonucleotide
  Antisense strand to SEQ ID NO: 1355292
uacacugcacauuuccuag

SEQ ID NO: 1355294 - RNA, 19 nt, Artificial Sequence
  Description of Artificial Sequence: Synthetic oligonucleotide
  Sense strand starting at position 2791 of SEQ ID NO: 1242537
ggaaaugugcaguguagac

SEQ ID NO: 1355295 - RNA, 19 nt, Artificial Sequence
  Description of Artificial Sequence: Synthetic oligonucleotide
  Antisense strand to SEQ ID NO: 1355294
gucuacacugcacauuucc

SEQ ID NO: 1355296 - RNA, 19 nt, Artificial Sequence
  Description of Artificial Sequence: Synthetic oligonucleotide
  Sense strand starting at position 2798 of SEQ ID NO: 1242537
ugcaguguagacugagaaa

SEQ ID NO: 1355297 - RNA, 19 nt, Artificial Sequence
  Description of Artificial Sequence: Synthetic oligonucleotide
  Antisense strand to SEQ ID NO: 1355296
uuucucagucuacacugca

SEQ ID NO: 1355298 - RNA, 19 nt, Artificial Sequence
  Description of Artificial Sequence: Synthetic oligonucleotide
  Sense strand starting at position 2801 of SEQ ID NO: 1242537
aguguagacugagaaauac

SEQ ID NO: 1355299 - RNA, 19 nt, Artificial Sequence
  Description of Artificial Sequence: Synthetic oligonucleotide
  Antisense strand to SEQ ID NO: 1355298
guauuucucagucuacacu

SEQ ID NO: 1355300 - RNA, 19 nt, Artificial Sequence
  Description of Artificial Sequence: Synthetic oligonucleotide
  Sense strand starting at position 2908 of SEQ ID NO: 1242537
ucaggagccguuugccaaa

SEQ ID NO: 1355301 - RNA, 19 nt, Artificial Sequence
  Description of Artificial Sequence: Synthetic oligonucleotide
  Antisense strand to SEQ ID NO: 1355300
uuuggcaaacggcuccuga

SEQ ID NO: 1355302 - RNA, 19 nt, Artificial Sequence
  Description of Artificial Sequence: Synthetic oligonucleotide
  Sense strand starting at position 2930 of SEQ ID NO: 1242537
aggccugugagguguugau

SEQ ID NO: 1355303 - RNA, 19 nt, Artificial Sequence
  Description of Artificial Sequence: Synthetic oligonucleotide
  Antisense strand to SEQ ID NO: 1355302
aucaacaccucacaggccu

SEQ ID NO: 1355304 - RNA, 19 nt, Artificial Sequence
  Description of Artificial Sequence: Synthetic oligonucleotide
  Sense strand starting at position 2936 of SEQ ID NO: 1242537
gugagguguugauucggga

SEQ ID NO: 1355305 - RNA, 19 nt, Artificial Sequence
  Description of Artificial Sequence: Synthetic oligonucleotide
  Antisense strand to SEQ ID NO: 1355304
ucccgaaucaacaccucac

SEQ ID NO: 1355306 - RNA, 19 nt, Artificial Sequence
  Description of Artificial Sequence: Synthetic oligonucleotide
  Sense strand starting at position 2957 of SEQ ID NO: 1242537
aagugaaaguguuugugaa

SEQ ID NO: 1355307 - RNA, 19 nt, Artificial Sequence
  Description of Artificial Sequence: Synthetic oligonucleotide
  Antisense strand to SEQ ID NO: 1355306
uucacaaacacuuucacuu

SEQ ID NO: 1355308 - RNA, 19 nt, Artificial Sequence
  Description of Artificial Sequence: Synthetic oligonucleotide
  Sense strand starting at position 2958 of SEQ ID NO: 1242537
agugaaaguguuugugaag

SEQ ID NO: 1355309 - RNA, 19 nt, Artificial Sequence
  Description of Artificial Sequence: Synthetic oligonucleotide
  Antisense strand to SEQ ID NO: 1355308
cuucacaaacacuuucacu

SEQ ID NO: 1355310 - RNA, 19 nt, Artificial Sequence
  Description of Artificial Sequence: Synthetic oligonucleotide
  Sense strand starting at position 3064 of SEQ ID NO: 1242537
aagcuaaagcucuaguuag

SEQ ID NO: 1355311 - RNA, 19 nt, Artificial Sequence
  Description of Artificial Sequence: Synthetic oligonucleotide
  Antisense strand to SEQ ID NO: 1355310
cuaacuagagcuuuagcuu

SEQ ID NO: 1355312 - RNA, 19 nt, Artificial Sequence
  Description of Artificial Sequence: Synthetic oligonucleotide
  Sense strand starting at position 3084 of SEQ ID NO: 1242537
gcaucucucugccuugaaa

SEQ ID NO: 1355313 - RNA, 19 nt, Artificial Sequence
  Description of Artificial Sequence: Synthetic oligonucleotide
  Antisense strand to SEQ ID NO: 1355312
uuucaaggcagagagaugc

SEQ ID NO: 1355314 - RNA, 19 nt, Artificial Sequence
  Description of Artificial Sequence: Synthetic oligonucleotide
  Sense strand starting at position 3118 of SEQ ID NO: 1242537
cuaggaaccucuguggaau

SEQ ID NO: 1355315 - RNA, 19 nt, Artificial Sequence
  Description of Artificial Sequence: Synthetic oligonucleotide
  Antisense strand to SEQ ID NO: 1355314
auuccacagagguuccuag

SEQ ID NO: 1355316 - RNA, 19 nt, Artificial Sequence
  Description of Artificial Sequence: Synthetic oligonucleotide
  Sense strand starting at position 3152 of SEQ ID NO: 1242537
aaaggugccuuugucugaa

SEQ ID NO: 1355317 - RNA, 19 nt, Artificial Sequence
  Description of Artificial Sequence: Synthetic oligonucleotide
  Antisense strand to SEQ ID NO: 1355316
uucagacaaaggcaccuuu

SEQ ID NO: 1355318 - RNA, 19 nt, Artificial Sequence
  Description of Artificial Sequence: Synthetic oligonucleotide
  Sense strand starting at position 3232 of SEQ ID NO: 1242537
gucacucagucuucuugga

SEQ ID NO: 1355319 - RNA, 19 nt, Artificial Sequence
  Description of Artificial Sequence: Synthetic oligonucleotide
  Antisense strand to SEQ ID NO: 1355318
uccaagaagacugagugac

SEQ ID NO: 1355320 - RNA, 19 nt, Artificial Sequence
  Description of Artificial Sequence: Synthetic oligonucleotide
  Sense strand starting at position 3234 of SEQ ID NO: 1242537
cacucagucuucuuggaga

SEQ ID NO: 1355321 - RNA, 19 nt, Artificial Sequence
  Description of Artificial Sequence: Synthetic oligonucleotide
  Antisense strand to SEQ ID NO: 1355320
ucuccaagaagacugagug

SEQ ID NO: 1355322 - RNA, 19 nt, Artificial Sequence
  Description of Artificial Sequence: Synthetic oligonucleotide
  Sense strand starting at position 3236 of SEQ ID NO: 1242537
cucagucuucuuggagaga

SEQ ID NO: 1355323 - RNA, 19 nt, Artificial Sequence
  Description of Artificial Sequence: Synthetic oligonucleotide
  Antisense strand to SEQ ID NO: 1355322
ucucuccaagaagacugag

SEQ ID NO: 1355324 - RNA, 19 nt, Artificial Sequence
  Description of Artificial Sequence: Synthetic oligonucleotide
  Sense strand starting at position 3391 of SEQ ID NO: 1242537
ugcuuuauacuguguuauu

SEQ ID NO: 1355325 - RNA, 19 nt, Artificial Sequence
  Description of Artificial Sequence: Synthetic oligonucleotide
  Antisense strand to SEQ ID NO: 1355324
aauaacacaguauaaagca

SEQ ID NO: 1355326 - RNA, 19 nt, Artificial Sequence
  Description of Artificial Sequence: Synthetic oligonucleotide
  Sense strand starting at position 3392 of SEQ ID NO: 1242537
gcuuuauacuguguuauuu

SEQ ID NO: 1355327 - RNA, 19 nt, Artificial Sequence
  Description of Artificial Sequence: Synthetic oligonucleotide
  Antisense strand to SEQ ID NO: 1355326
aaauaacacaguauaaagc

SEQ ID NO: 1355328 - RNA, 19 nt, Artificial Sequence
  Description of Artificial Sequence: Synthetic oligonucleotide
  Sense strand starting at position 3401 of SEQ ID NO: 1242537
uguguuauuucuguuaguu

SEQ ID NO: 1355329 - RNA, 19 nt, Artificial Sequence
  Description of Artificial Sequence: Synthetic oligonucleotide
  Antisense strand to SEQ ID NO: 1355328
aacuaacagaaauaacaca

SEQ ID NO: 1355330 - RNA, 19 nt, Artificial Sequence
  Description of Artificial Sequence: Synthetic oligonucleotide
  Sense strand starting at position 353 of SEQ ID NO: 1242538
ugugaugucucccuuuaaa

SEQ ID NO: 1355331 - RNA, 19 nt, Artificial Sequence
  Description of Artificial Sequence: Synthetic oligonucleotide
  Antisense strand to SEQ ID NO: 1355330
uuuaaagggagacaucaca

SEQ ID NO: 1355332 - RNA, 19 nt, Artificial Sequence
  Description of Artificial Sequence: Synthetic oligonucleotide
  Sense strand starting at position 504 of SEQ ID NO: 1242538
uggugacaugguuaccgaa

SEQ ID NO: 1355333 - RNA, 19 nt, Artificial Sequence
  Description of Artificial Sequence: Synthetic oligonucleotide
  Antisense strand to SEQ ID NO: 1355332
uucgguaaccaugucacca

SEQ ID NO: 1355334 - RNA, 19 nt, Artificial Sequence
  Description of Artificial Sequence: Synthetic oligonucleotide
  Sense strand starting at position 506 of SEQ ID NO: 1242538
gugacaugguuaccgaaca

SEQ ID NO: 1355335 - RNA, 19 nt, Artificial Sequence
  Description of Artificial Sequence: Synthetic oligonucleotide
  Antisense strand to SEQ ID NO: 1355334
uguucgguaaccaugucac

SEQ ID NO: 1355336 - RNA, 19 nt, Artificial Sequence
  Description of Artificial Sequence: Synthetic oligonucleotide
  Sense strand starting at position 574 of SEQ ID NO: 1242538
cgauuucgguuugaaagag

SEQ ID NO: 1355337 - RNA, 19 nt, Artificial Sequence
  Description of Artificial Sequence: Synthetic oligonucleotide
  Antisense strand to SEQ ID NO: 1355336
cucuuucaaaccgaaaucg

SEQ ID NO: 1355338 - RNA, 19 nt, Artificial Sequence
  Description of Artificial Sequence: Synthetic oligonucleotide
  Sense strand starting at position 854 of SEQ ID NO: 1242538
uccugaccucgugauuagu

SEQ ID NO: 1355339 - RNA, 19 nt, Artificial Sequence
  Description of Artificial Sequence: Synthetic oligonucleotide
  Antisense strand to SEQ ID NO: 1355338
acuaaucacgaggucagga

SEQ ID NO: 1355340 - RNA, 19 nt, Artificial Sequence
  Description of Artificial Sequence: Synthetic oligonucleotide
  Sense strand starting at position 1013 of SEQ ID NO: 1242538
uacaacuuccgagauguga

SEQ ID NO: 1355341 - RNA, 19 nt, Artificial Sequence
  Description of Artificial Sequence: Synthetic oligonucleotide
  Antisense strand to SEQ ID NO: 1355340
ucacaucucggaaguugua

SEQ ID NO: 1355342 - RNA, 19 nt, Artificial Sequence
  Description of Artificial Sequence: Synthetic oligonucleotide
  Sense strand starting at position 1021 of SEQ ID NO: 1242538
ccgagaugugaagguaaau

SEQ ID NO: 1355343 - RNA, 19 nt, Artificial Sequence
  Description of Artificial Sequence: Synthetic oligonucleotide
  Antisense strand to SEQ ID NO: 1355342
auuuaccuucacaucucgg

SEQ ID NO: 1355344 - RNA, 19 nt, Artificial Sequence
  Description of Artificial Sequence: Synthetic oligonucleotide
  Sense strand starting at position 1046 of SEQ ID NO: 1242538
gucccaacuguguaggaua

SEQ ID NO: 1355345 - RNA, 19 nt, Artificial Sequence
  Description of Artificial Sequence: Synthetic oligonucleotide
  Antisense strand to SEQ ID NO: 1355344
uauccuacacaguugggac

SEQ ID NO: 1355346 - RNA, 19 nt, Artificial Sequence
  Description of Artificial Sequence: Synthetic oligonucleotide
  Sense strand starting at position 1062 of SEQ ID NO: 1242538
auaguuagcacgugacuua

SEQ ID NO: 1355347 - RNA, 19 nt, Artificial Sequence
  Description of Artificial Sequence: Synthetic oligonucleotide
  Antisense strand to SEQ ID NO: 1355346
uaagucacgugcuaacuau

SEQ ID NO: 1355348 - RNA, 19 nt, Artificial Sequence
  Description of Artificial Sequence: Synthetic oligonucleotide
  Sense strand starting at position 1063 of SEQ ID NO: 1242538
uaguuagcacgugacuuaa

SEQ ID NO: 1355349 - RNA, 19 nt, Artificial Sequence
  Description of Artificial Sequence: Synthetic oligonucleotide
  Antisense strand to SEQ ID NO: 1355348
uuaagucacgugcuaacua

SEQ ID NO: 1355350 - RNA, 19 nt, Artificial Sequence
  Description of Artificial Sequence: Synthetic oligonucleotide
  Sense strand starting at position 2183 of SEQ ID NO: 1242538
cgguuucucuaccuccaau

SEQ ID NO: 1355351 - RNA, 19 nt, Artificial Sequence
  Description of Artificial Sequence: Synthetic oligonucleotide
  Antisense strand to SEQ ID NO: 1355350
auuggagguagagaaaccg

SEQ ID NO: 1355352 - RNA, 19 nt, Artificial Sequence
  Description of Artificial Sequence: Synthetic oligonucleotide
  Sense strand starting at position 2236 of SEQ ID NO: 1242538
acuuuaagggcuugguuau

SEQ ID NO: 1355353 - RNA, 19 nt, Artificial Sequence
  Description of Artificial Sequence: Synthetic oligonucleotide
  Antisense strand to SEQ ID NO: 1355352
auaaccaagcccuuaaagu

SEQ ID NO: 1355354 - RNA, 19 nt, Artificial Sequence
  Description of Artificial Sequence: Synthetic oligonucleotide
  Sense strand starting at position 2354 of SEQ ID NO: 1242538
aaggaauucugagcuucug

SEQ ID NO: 1355355 - RNA, 19 nt, Artificial Sequence
  Description of Artificial Sequence: Synthetic oligonucleotide
  Antisense strand to SEQ ID NO: 1355354
cagaagcucagaauuccuu

SEQ ID NO: 1355356 - RNA, 19 nt, Artificial Sequence
  Description of Artificial Sequence: Synthetic oligonucleotide
  Sense strand starting at position 2703 of SEQ ID NO: 1242538
acuuuaguucgaggucauu

SEQ ID NO: 1355357 - RNA, 19 nt, Artificial Sequence
  Description of Artificial Sequence: Synthetic oligonucleotide
  Antisense strand to SEQ ID NO: 1355356
aaugaccucgaacuaaagu

SEQ ID NO: 1355358 - RNA, 19 nt, Artificial Sequence
  Description of Artificial Sequence: Synthetic oligonucleotide
  Sense strand starting at position 2726 of SEQ ID NO: 1242538
ccuauugugaaugaggagu

SEQ ID NO: 1355359 - RNA, 19 nt, Artificial Sequence
  Description of Artificial Sequence: Synthetic oligonucleotide
  Antisense strand to SEQ ID NO: 1355358
acuccucauucacaauagg

SEQ ID NO: 1355360 - RNA, 19 nt, Artificial Sequence
  Description of Artificial Sequence: Synthetic oligonucleotide
  Sense strand starting at position 2768 of SEQ ID NO: 1242538
gagcccaguccugagaauc

SEQ ID NO: 1355361 - RNA, 19 nt, Artificial Sequence
  Description of Artificial Sequence: Synthetic oligonucleotide
  Antisense strand to SEQ ID NO: 1355360
gauucucaggacugggcuc

SEQ ID NO: 1355362 - RNA, 19 nt, Artificial Sequence
  Description of Artificial Sequence: Synthetic oligonucleotide
  Sense strand starting at position 2901 of SEQ ID NO: 1242538
cuuaaauguugugccugaa

SEQ ID NO: 1355363 - RNA, 19 nt, Artificial Sequence
  Description of Artificial Sequence: Synthetic oligonucleotide
  Antisense strand to SEQ ID NO: 1355362
uucaggcacaacauuuaag

SEQ ID NO: 1355364 - RNA, 19 nt, Artificial Sequence
  Description of Artificial Sequence: Synthetic oligonucleotide
  Sense strand starting at position 2904 of SEQ ID NO: 1242538
aaauguugugccugaagug

SEQ ID NO: 1355365 - RNA, 19 nt, Artificial Sequence
  Description of Artificial Sequence: Synthetic oligonucleotide
  Antisense strand to SEQ ID NO: 1355364
cacuucaggcacaacauuu

SEQ ID NO: 1355366 - RNA, 19 nt, Artificial Sequence
  Description of Artificial Sequence: Synthetic oligonucleotide
  Sense strand starting at position 2905 of SEQ ID NO: 1242538
aauguugugccugaaguga

SEQ ID NO: 1355367 - RNA, 19 nt, Artificial Sequence
  Description of Artificial Sequence: Synthetic oligonucleotide
  Antisense strand to SEQ ID NO: 1355366
ucacuucaggcacaacauu

SEQ ID NO: 1355368 - RNA, 19 nt, Artificial Sequence
  Description of Artificial Sequence: Synthetic oligonucleotide
  Sense strand starting at position 2916 of SEQ ID NO: 1242538
ugaagugaguaccuguuga

SEQ ID NO: 1355369 - RNA, 19 nt, Artificial Sequence
  Description of Artificial Sequence: Synthetic oligonucleotide
  Antisense strand to SEQ ID NO: 1355368
ucaacagguacucacuuca

SEQ ID NO: 1355370 - RNA, 19 nt, Artificial Sequence
  Description of Artificial Sequence: Synthetic oligonucleotide
  Sense strand starting at position 2921 of SEQ ID NO: 1242538
ugaguaccuguugagcauu

SEQ ID NO: 1355371 - RNA, 19 nt, Artificial Sequence
  Description of Artificial Sequence: Synthetic oligonucleotide
  Antisense strand to SEQ ID NO: 1355370
aaugcucaacagguacuca

SEQ ID NO: 1355372 - RNA, 19 nt, Artificial Sequence
  Description of Artificial Sequence: Synthetic oligonucleotide
  Sense strand starting at position 2990 of SEQ ID NO: 1242538
gccugauuggaaugguaau

SEQ ID NO: 1355373 - RNA, 19 nt, Artificial Sequence
  Description of Artificial Sequence: Synthetic oligonucleotide
  Antisense strand to SEQ ID NO: 1355372
auuaccauuccaaucaggc

SEQ ID NO: 1355374 - RNA, 19 nt, Artificial Sequence
  Description of Artificial Sequence: Synthetic oligonucleotide
  Sense strand starting at position 2991 of SEQ ID NO: 1242538
ccugauuggaaugguaaua

SEQ ID NO: 1355375 - RNA, 19 nt, Artificial Sequence
  Description of Artificial Sequence: Synthetic oligonucleotide
  Antisense strand to SEQ ID NO: 1355374
uauuaccauuccaaucagg

SEQ ID NO: 1355376 - RNA, 19 nt, Artificial Sequence
  Description of Artificial Sequence: Synthetic oligonucleotide
  Sense strand starting at position 3046 of SEQ ID NO: 1242538
acauaauaugugugaaaga

SEQ ID NO: 1355377 - RNA, 19 nt, Artificial Sequence
  Description of Artificial Sequence: Synthetic oligonucleotide
  Antisense strand to SEQ ID NO: 1355376
ucuuucacacauauuaugu

SEQ ID NO: 1355378 - RNA, 19 nt, Artificial Sequence
  Description of Artificial Sequence: Synthetic oligonucleotide
  Sense strand starting at position 3080 of SEQ ID NO: 1242538
aagguuaugcgucaagucu

SEQ ID NO: 1355379 - RNA, 19 nt, Artificial Sequence
  Description of Artificial Sequence: Synthetic oligonucleotide
  Antisense strand to SEQ ID NO: 1355378
agacuugacgcauaaccuu

SEQ ID NO: 1355380 - RNA, 19 nt, Artificial Sequence
  Description of Artificial Sequence: Synthetic oligonucleotide
  Sense strand starting at position 3129 of SEQ ID NO: 1242538
ccgauucuuguccaguuua

SEQ ID NO: 1355381 - RNA, 19 nt, Artificial Sequence
  Description of Artificial Sequence: Synthetic oligonucleotide
  Antisense strand to SEQ ID NO: 1355380
uaaacuggacaagaaucgg

SEQ ID NO: 1355382 - RNA, 19 nt, Artificial Sequence
  Description of Artificial Sequence: Synthetic oligonucleotide
  Sense strand starting at position 3208 of SEQ ID NO: 1242538
ugcagaaauuggguuuaca

SEQ ID NO: 1355383 - RNA, 19 nt, Artificial Sequence
  Description of Artificial Sequence: Synthetic oligonucleotide
  Antisense strand to SEQ ID NO: 1355382
uguaaacccaauuucugca

SEQ ID NO: 1355384 - RNA, 19 nt, Artificial Sequence
  Description of Artificial Sequence: Synthetic oligonucleotide
  Sense strand starting at position 3237 of SEQ ID NO: 1242538
ugcuuuccuuuguuccaga

SEQ ID NO: 1355385 - RNA, 19 nt, Artificial Sequence
  Description of Artificial Sequence: Synthetic oligonucleotide
  Antisense strand to SEQ ID NO: 1355384
ucuggaacaaaggaaagca

SEQ ID NO: 1355386 - RNA, 19 nt, Artificial Sequence
  Description of Artificial Sequence: Synthetic oligonucleotide
  Sense strand starting at position 3238 of SEQ ID NO: 1242538
gcuuuccuuuguuccagau

SEQ ID NO: 1355387 - RNA, 19 nt, Artificial Sequence
  Description of Artificial Sequence: Synthetic oligonucleotide
  Antisense strand to SEQ ID NO: 1355386
aucuggaacaaaggaaagc

SEQ ID NO: 1355388 - RNA, 19 nt, Artificial Sequence
  Description of Artificial Sequence: Synthetic oligonucleotide
  Sense strand starting at position 3242 of SEQ ID NO: 1242538
uccuuuguuccagauucgu

SEQ ID NO: 1355389 - RNA, 19 nt, Artificial Sequence
  Description of Artificial Sequence: Synthetic oligonucleotide
  Antisense strand to SEQ ID NO: 1355388
acgaaucuggaacaaagga

SEQ ID NO: 1355390 - RNA, 19 nt, Artificial Sequence
  Description of Artificial Sequence: Synthetic oligonucleotide
  Sense strand starting at position 3253 of SEQ ID NO: 1242538
agauucguucugggagauu

SEQ ID NO: 1355391 - RNA, 19 nt, Artificial Sequence
  Description of Artificial Sequence: Synthetic oligonucleotide
  Antisense strand to SEQ ID NO: 1355390
aaucucccagaacgaaucu

SEQ ID NO: 1355392 - RNA, 19 nt, Artificial Sequence
  Description of Artificial Sequence: Synthetic oligonucleotide
  Sense strand starting at position 3262 of SEQ ID NO: 1242538
cugggagauugagagauua

SEQ ID NO: 1355393 - RNA, 19 nt, Artificial Sequence
  Description of Artificial Sequence: Synthetic oligonucleotide
  Antisense strand to SEQ ID NO: 1355392
uaaucucucaaucucccag

SEQ ID NO: 1355394 - RNA, 19 nt, Artificial Sequence
  Description of Artificial Sequence: Synthetic oligonucleotide
  Sense strand starting at position 3287 of SEQ ID NO: 1242538
ugcauugugacguggaaug

SEQ ID NO: 1355395 - RNA, 19 nt, Artificial Sequence
  Description of Artificial Sequence: Synthetic oligonucleotide
  Antisense strand to SEQ ID NO: 1355394
cauuccacgucacaaugca

SEQ ID NO: 1355396 - RNA, 19 nt, Artificial Sequence
  Description of Artificial Sequence: Synthetic oligonucleotide
  Sense strand starting at position 3311 of SEQ ID NO: 1242538
agaccacugucacuuacua

SEQ ID NO: 1355397 - RNA, 19 nt, Artificial Sequence
  Description of Artificial Sequence: Synthetic oligonucleotide
  Antisense strand to SEQ ID NO: 1355396
uaguaagugacaguggucu

SEQ ID NO: 1355398 - RNA, 19 nt, Artificial Sequence
  Description of Artificial Sequence: Synthetic oligonucleotide
  Sense strand starting at position 3622 of SEQ ID NO: 1242538
cucaauaaaugauugugua

SEQ ID NO: 1355399 - RNA, 19 nt, Artificial Sequence
  Description of Artificial Sequence: Synthetic oligonucleotide
  Antisense strand to SEQ ID NO: 1355398
uacacaaucauuuauugag

SEQ ID NO: 1355400 - RNA, 19 nt, Artificial Sequence
  Description of Artificial Sequence: Synthetic oligonucleotide
  Sense strand starting at position 3626 of SEQ ID NO: 1242538
auaaaugauuguguaugca

SEQ ID NO: 1355401 - RNA, 19 nt, Artificial Sequence
  Description of Artificial Sequence: Synthetic oligonucleotide
  Antisense strand to SEQ ID NO: 1355400
ugcauacacaaucauuuau

SEQ ID NO: 1355402 - RNA, 19 nt, Artificial Sequence
  Description of Artificial Sequence: Synthetic oligonucleotide
  Sense strand starting at position 3629 of SEQ ID NO: 1242538
aaugauuguguaugcauua

SEQ ID NO: 1355403 - RNA, 19 nt, Artificial Sequence
  Description of Artificial Sequence: Synthetic oligonucleotide
  Antisense strand to SEQ ID NO: 1355402
uaaugcauacacaaucauu

SEQ ID NO: 1355404 - RNA, 19 nt, Artificial Sequence
  Description of Artificial Sequence: Synthetic oligonucleotide
  Sense strand starting at position 3630 of SEQ ID NO: 1242538
augauuguguaugcauuau

SEQ ID NO: 1355405 - RNA, 19 nt, Artificial Sequence
  Description of Artificial Sequence: Synthetic oligonucleotide
  Antisense strand to SEQ ID NO: 1355404
auaaugcauacacaaucau

SEQ ID NO: 1355406 - RNA, 19 nt, Artificial Sequence
  Description of Artificial Sequence: Synthetic oligonucleotide
  Sense strand starting at position 3818 of SEQ ID NO: 1242538
acucaagcuuuauugagau

SEQ ID NO: 1355407 - RNA, 19 nt, Artificial Sequence
  Description of Artificial Sequence: Synthetic oligonucleotide
  Antisense strand to SEQ ID NO: 1355406
aucucaauaaagcuugagu

SEQ ID NO: 1355408 - RNA, 19 nt, Artificial Sequence
  Description of Artificial Sequence: Synthetic oligonucleotide
  Sense strand starting at position 3935 of SEQ ID NO: 1242538
cugggagaauugcucgagu

SEQ ID NO: 1355409 - RNA, 19 nt, Artificial Sequence
  Description of Artificial Sequence: Synthetic oligonucleotide
  Antisense strand to SEQ ID NO: 1355408
acucgagcaauucucccag

SEQ ID NO: 1355410 - RNA, 19 nt, Artificial Sequence
  Description of Artificial Sequence: Synthetic oligonucleotide
  Sense strand starting at position 93 of SEQ ID NO: 1242539
ccuaauaccgucuaaugca

SEQ ID NO: 1355411 - RNA, 19 nt, Artificial Sequence
  Description of Artificial Sequence: Synthetic oligonucleotide
  Antisense strand to SEQ ID NO: 1355410
ugcauuagacgguauuagg

SEQ ID NO: 1355412 - RNA, 19 nt, Artificial Sequence
  Description of Artificial Sequence: Synthetic oligonucleotide
  Sense strand starting at position 142 of SEQ ID NO: 1242539
ucuuguacuuguguaccaa

SEQ ID NO: 1355413 - RNA, 19 nt, Artificial Sequence
  Description of Artificial Sequence: Synthetic oligonucleotide
  Antisense strand to SEQ ID NO: 1355412
uugguacacaaguacaaga

SEQ ID NO: 1355414 - RNA, 19 nt, Artificial Sequence
  Description of Artificial Sequence: Synthetic oligonucleotide
  Sense strand starting at position 233 of SEQ ID NO: 1242539
ggucgaagugcccauaagu

SEQ ID NO: 1355415 - RNA, 19 nt, Artificial Sequence
  Description of Artificial Sequence: Synthetic oligonucleotide
  Antisense strand to SEQ ID NO: 1355414
acuuaugggcacuucgacc

SEQ ID NO: 1355416 - RNA, 19 nt, Artificial Sequence
  Description of Artificial Sequence: Synthetic oligonucleotide
  Sense strand starting at position 247 of SEQ ID NO: 1242539
uaaguuauggcagauuaac

SEQ ID NO: 1355417 - RNA, 19 nt, Artificial Sequence
  Description of Artificial Sequence: Synthetic oligonucleotide
  Antisense strand to SEQ ID NO: 1355416
guuaaucugccauaacuua

SEQ ID NO: 1355418 - RNA, 19 nt, Artificial Sequence
  Description of Artificial Sequence: Synthetic oligonucleotide
  Sense strand starting at position 341 of SEQ ID NO: 1242539
cacacaguuucggcauaca

SEQ ID NO: 1355419 - RNA, 19 nt, Artificial Sequence
  Description of Artificial Sequence: Synthetic oligonucleotide
  Antisense strand to SEQ ID NO: 1355418
uguaugccgaaacugugug

SEQ ID NO: 1355420 - RNA, 19 nt, Artificial Sequence
  Description of Artificial Sequence: Synthetic oligonucleotide
  Sense strand starting at position 344 of SEQ ID NO: 1242539
acaguuucggcauacaaac

SEQ ID NO: 1355421 - RNA, 19 nt, Artificial Sequence
  Description of Artificial Sequence: Synthetic oligonucleotide
  Antisense strand to SEQ ID NO: 1355420
guuuguaugccgaaacugu

SEQ ID NO: 1355422 - RNA, 19 nt, Artificial Sequence
  Description of Artificial Sequence: Synthetic oligonucleotide
  Sense strand starting at position 715 of SEQ ID NO: 1242539
ugugaugucucccuuuaaa

SEQ ID NO: 1355423 - RNA, 19 nt, Artificial Sequence
  Description of Artificial Sequence: Synthetic oligonucleotide
  Antisense strand to SEQ ID NO: 1355422
uuuaaagggagacaucaca

SEQ ID NO: 1355424 - RNA, 19 nt, Artificial Sequence
  Description of Artificial Sequence: Synthetic oligonucleotide
  Sense strand starting at position 866 of SEQ ID NO: 1242539
uggugacaugguuaccgaa

SEQ ID NO: 1355425 - RNA, 19 nt, Artificial Sequence
  Description of Artificial Sequence: Synthetic oligonucleotide
  Antisense strand to SEQ ID NO: 1355424
uucgguaaccaugucacca

SEQ ID NO: 1355426 - RNA, 19 nt, Artificial Sequence
  Description of Artificial Sequence: Synthetic oligonucleotide
  Sense strand starting at position 868 of SEQ ID NO: 1242539
gugacaugguuaccgaaca

SEQ ID NO: 1355427 - RNA, 19 nt, Artificial Sequence
  Description of Artificial Sequence: Synthetic oligonucleotide
  Antisense strand to SEQ ID NO: 1355426
uguucgguaaccaugucac

SEQ ID NO: 1355428 - RNA, 19 nt, Artificial Sequence
  Description of Artificial Sequence: Synthetic oligonucleotide
  Sense strand starting at position 936 of SEQ ID NO: 1242539
cgauuucgguuugaaagag

SEQ ID NO: 1355429 - RNA, 19 nt, Artificial Sequence
  Description of Artificial Sequence: Synthetic oligonucleotide
  Antisense strand to SEQ ID NO: 1355428
cucuuucaaaccgaaaucg

SEQ ID NO: 1355430 - RNA, 19 nt, Artificial Sequence
  Description of Artificial Sequence: Synthetic oligonucleotide
  Sense strand starting at position 1216 of SEQ ID NO: 1242539
uccugaccucgugauuagu

SEQ ID NO: 1355431 - RNA, 19 nt, Artificial Sequence
  Description of Artificial Sequence: Synthetic oligonucleotide
  Antisense strand to SEQ ID NO: 1355430
acuaaucacgaggucagga

SEQ ID NO: 1355432 - RNA, 19 nt, Artificial Sequence
  Description of Artificial Sequence: Synthetic oligonucleotide
  Sense strand starting at position 1375 of SEQ ID NO: 1242539
uacaacuuccgagauguga

SEQ ID NO: 1355433 - RNA, 19 nt, Artificial Sequence
  Description of Artificial Sequence: Synthetic oligonucleotide
  Antisense strand to SEQ ID NO: 1355432
ucacaucucggaaguugua

SEQ ID NO: 1355434 - RNA, 19 nt, Artificial Sequence
  Description of Artificial Sequence: Synthetic oligonucleotide
  Sense strand starting at position 1383 of SEQ ID NO: 1242539
ccgagaugugaagguaaau

SEQ ID NO: 1355435 - RNA, 19 nt, Artificial Sequence
  Description of Artificial Sequence: Synthetic oligonucleotide
  Antisense strand to SEQ ID NO: 1355434
auuuaccuucacaucucgg

SEQ ID NO: 1355436 - RNA, 19 nt, Artificial Sequence
  Description of Artificial Sequence: Synthetic oligonucleotide
  Sense strand starting at position 1408 of SEQ ID NO: 1242539
gucccaacuguguaggaua

SEQ ID NO: 1355437 - RNA, 19 nt, Artificial Sequence
  Description of Artificial Sequence: Synthetic oligonucleotide
  Antisense strand to SEQ ID NO: 1355436
uauccuacacaguugggac

SEQ ID NO: 1355438 - RNA, 19 nt, Artificial Sequence
  Description of Artificial Sequence: Synthetic oligonucleotide
  Sense strand starting at position 1424 of SEQ ID NO: 1242539
auaguuagcacgugacuua

SEQ ID NO: 1355439 - RNA, 19 nt, Artificial Sequence
  Description of Artificial Sequence: Synthetic oligonucleotide
  Antisense strand to SEQ ID NO: 1355438
uaagucacgugcuaacuau

SEQ ID NO: 1355440 - RNA, 19 nt, Artificial Sequence
  Description of Artificial Sequence: Synthetic oligonucleotide
  Sense strand starting at position 1425 of SEQ ID NO: 1242539
uaguuagcacgugacuuaa

SEQ ID NO: 1355441 - RNA, 19 nt, Artificial Sequence
  Description of Artificial Sequence: Synthetic oligonucleotide
  Antisense strand to SEQ ID NO: 1355440
uuaagucacgugcuaacua

SEQ ID NO: 1355442 - RNA, 19 nt, Artificial Sequence
  Description of Artificial Sequence: Synthetic oligonucleotide
  Sense strand starting at position 2545 of SEQ ID NO: 1242539
cgguuucucuaccuccaau

SEQ ID NO: 1355443 - RNA, 19 nt, Artificial Sequence
  Description of Artificial Sequence: Synthetic oligonucleotide
  Antisense strand to SEQ ID NO: 1355442
auuggagguagagaaaccg

SEQ ID NO: 1355444 - RNA, 19 nt, Artificial Sequence
  Description of Artificial Sequence: Synthetic oligonucleotide
  Sense strand starting at position 2598 of SEQ ID NO: 1242539
acuuuaagggcuugguuau

SEQ ID NO: 1355445 - RNA, 19 nt, Artificial Sequence
  Description of Artificial Sequence: Synthetic oligonucleotide
  Antisense strand to SEQ ID NO: 1355444
auaaccaagcccuuaaagu

SEQ ID NO: 1355446 - RNA, 19 nt, Artificial Sequence
  Description of Artificial Sequence: Synthetic oligonucleotide
  Sense strand starting at position 2716 of SEQ ID NO: 1242539
aaggaauucugagcuucug

SEQ ID NO: 1355447 - RNA, 19 nt, Artificial Sequence
  Description of Artificial Sequence: Synthetic oligonucleotide
  Antisense strand to SEQ ID NO: 1355446
cagaagcucagaauuccuu

SEQ ID NO: 1355448 - RNA, 19 nt, Artificial Sequence
  Description of Artificial Sequence: Synthetic oligonucleotide
  Sense strand starting at position 3065 of SEQ ID NO: 1242539
acuuuaguucgaggucauu

SEQ ID NO: 1355449 - RNA, 19 nt, Artificial Sequence
  Description of Artificial Sequence: Synthetic oligonucleotide
  Antisense strand to SEQ ID NO: 1355448
aaugaccucgaacuaaagu

SEQ ID NO: 1355450 - RNA, 19 nt, Artificial Sequence
  Description of Artificial Sequence: Synthetic oligonucleotide
  Sense strand starting at position 3088 of SEQ ID NO: 1242539
ccuauugugaaugaggagu

SEQ ID NO: 1355451 - RNA, 19 nt, Artificial Sequence
  Description of Artificial Sequence: Synthetic oligonucleotide
  Antisense strand to SEQ ID NO: 1355450
acuccucauucacaauagg

SEQ ID NO: 1355452 - RNA, 19 nt, Artificial Sequence
  Description of Artificial Sequence: Synthetic oligonucleotide
  Sense strand starting at position 3130 of SEQ ID NO: 1242539
gagcccaguccugagaauc

SEQ ID NO: 1355453 - RNA, 19 nt, Artificial Sequence
  Description of Artificial Sequence: Synthetic oligonucleotide
  Antisense strand to SEQ ID NO: 1355452
gauucucaggacugggcuc

SEQ ID NO: 1355454 - RNA, 19 nt, Artificial Sequence
  Description of Artificial Sequence: Synthetic oligonucleotide
  Sense strand starting at position 3263 of SEQ ID NO: 1242539
cuuaaauguugugccugaa

SEQ ID NO: 1355455 - RNA, 19 nt, Artificial Sequence
  Description of Artificial Sequence: Synthetic oligonucleotide
  Antisense strand to SEQ ID NO: 1355454
uucaggcacaacauuuaag

SEQ ID NO: 1355456 - RNA, 19 nt, Artificial Sequence
  Description of Artificial Sequence: Synthetic oligonucleotide
  Sense strand starting at position 3266 of SEQ ID NO: 1242539
aaauguugugccugaagug

SEQ ID NO: 1355457 - RNA, 19 nt, Artificial Sequence
  Description of Artificial Sequence: Synthetic oligonucleotide
  Antisense strand to SEQ ID NO: 1355456
cacuucaggcacaacauuu

SEQ ID NO: 1355458 - RNA, 19 nt, Artificial Sequence
  Description of Artificial Sequence: Synthetic oligonucleotide
  Sense strand starting at position 3267 of SEQ ID NO: 1242539
aauguugugccugaaguga

SEQ ID NO: 1355459 - RNA, 19 nt, Artificial Sequence
  Description of Artificial Sequence: Synthetic oligonucleotide
  Antisense strand to SEQ ID NO: 1355458
ucacuucaggcacaacauu

SEQ ID NO: 1355460 - RNA, 19 nt, Artificial Sequence
  Description of Artificial Sequence: Synthetic oligonucleotide
  Sense strand starting at position 3278 of SEQ ID NO: 1242539
ugaagugaguaccuguuga

SEQ ID NO: 1355461 - RNA, 19 nt, Artificial Sequence
  Description of Artificial Sequence: Synthetic oligonucleotide
  Antisense strand to SEQ ID NO: 1355460
ucaacagguacucacuuca

SEQ ID NO: 1355462 - RNA, 19 nt, Artificial Sequence
  Description of Artificial Sequence: Synthetic oligonucleotide
  Sense strand starting at position 3283 of SEQ ID NO: 1242539
ugaguaccuguugagcauu

SEQ ID NO: 1355463 - RNA, 19 nt, Artificial Sequence
  Description of Artificial Sequence: Synthetic oligonucleotide
  Antisense strand to SEQ ID NO: 1355462
aaugcucaacagguacuca

SEQ ID NO: 1355464 - RNA, 19 nt, Artificial Sequence
  Description of Artificial Sequence: Synthetic oligonucleotide
  Sense strand starting at position 3352 of SEQ ID NO: 1242539
gccugauuggaaugguaau

SEQ ID NO: 1355465 - RNA, 19 nt, Artificial Sequence
  Description of Artificial Sequence: Synthetic oligonucleotide
  Antisense strand to SEQ ID NO: 1355464
auuaccauuccaaucaggc

SEQ ID NO: 1355466 - RNA, 19 nt, Artificial Sequence
  Description of Artificial Sequence: Synthetic oligonucleotide
  Sense strand starting at position 3353 of SEQ ID NO: 1242539
ccugauuggaaugguaaua

SEQ ID NO: 1355467 - RNA, 19 nt, Artificial Sequence
  Description of Artificial Sequence: Synthetic oligonucleotide
  Antisense strand to SEQ ID NO: 1355466
uauuaccauuccaaucagg

SEQ ID NO: 1355468 - RNA, 19 nt, Artificial Sequence
  Description of Artificial Sequence: Synthetic oligonucleotide
  Sense strand starting at position 3408 of SEQ ID NO: 1242539
acauaauaugugugaaaga

SEQ ID NO: 1355469 - RNA, 19 nt, Artificial Sequence
  Description of Artificial Sequence: Synthetic oligonucleotide
  Antisense strand to SEQ ID NO: 1355468
ucuuucacacauauuaugu

SEQ ID NO: 1355470 - RNA, 19 nt, Artificial Sequence
  Description of Artificial Sequence: Synthetic oligonucleotide
  Sense strand starting at position 3442 of SEQ ID NO: 1242539
aagguuaugcgucaagucu

SEQ ID NO: 1355471 - RNA, 19 nt, Artificial Sequence
  Description of Artificial Sequence: Synthetic oligonucleotide
  Antisense strand to SEQ ID NO: 1355470
agacuugacgcauaaccuu

SEQ ID NO: 1355472 - RNA, 19 nt, Artificial Sequence
  Description of Artificial Sequence: Synthetic oligonucleotide
  Sense strand starting at position 3491 of SEQ ID NO: 1242539
ccgauucuuguccaguuua

SEQ ID NO: 1355473 - RNA, 19 nt, Artificial Sequence
  Description of Artificial Sequence: Synthetic oligonucleotide
  Antisense strand to SEQ ID NO: 1355472
uaaacuggacaagaaucgg

SEQ ID NO: 1355474 - RNA, 19 nt, Artificial Sequence
  Description of Artificial Sequence: Synthetic oligonucleotide
  Sense strand starting at position 3570 of SEQ ID NO: 1242539
ugcagaaauuggguuuaca

SEQ ID NO: 1355475 - RNA, 19 nt, Artificial Sequence
  Description of Artificial Sequence: Synthetic oligonucleotide
  Antisense strand to SEQ ID NO: 1355474
uguaaacccaauuucugca

SEQ ID NO: 1355476 - RNA, 19 nt, Artificial Sequence
  Description of Artificial Sequence: Synthetic oligonucleotide
  Sense strand starting at position 3599 of SEQ ID NO: 1242539
ugcuuuccuuuguuccaga

SEQ ID NO: 1355477 - RNA, 19 nt, Artificial Sequence
  Description of Artificial Sequence: Synthetic oligonucleotide
  Antisense strand to SEQ ID NO: 1355476
ucuggaacaaaggaaagca

SEQ ID NO: 1355478 - RNA, 19 nt, Artificial Sequence
  Description of Artificial Sequence: Synthetic oligonucleotide
  Sense strand starting at position 3600 of SEQ ID NO: 1242539
gcuuuccuuuguuccagau

SEQ ID NO: 1355479 - RNA, 19 nt, Artificial Sequence
  Description of Artificial Sequence: Synthetic oligonucleotide
  Antisense strand to SEQ ID NO: 1355478
aucuggaacaaaggaaagc

SEQ ID NO: 1355480 - RNA, 19 nt, Artificial Sequence
  Description of Artificial Sequence: Synthetic oligonucleotide
  Sense strand starting at position 3604 of SEQ ID NO: 1242539
uccuuuguuccagauucgu

SEQ ID NO: 1355481 - RNA, 19 nt, Artificial Sequence
  Description of Artificial Sequence: Synthetic oligonucleotide
  Antisense strand to SEQ ID NO: 1355480
acgaaucuggaacaaagga

SEQ ID NO: 1355482 - RNA, 19 nt, Artificial Sequence
  Description of Artificial Sequence: Synthetic oligonucleotide
  Sense strand starting at position 3615 of SEQ ID NO: 1242539
agauucguucugggagauu

SEQ ID NO: 1355483 - RNA, 19 nt, Artificial Sequence
  Description of Artificial Sequence: Synthetic oligonucleotide
  Antisense strand to SEQ ID NO: 1355482
aaucucccagaacgaaucu

SEQ ID NO: 1355484 - RNA, 19 nt, Artificial Sequence
  Description of Artificial Sequence: Synthetic oligonucleotide
  Sense strand starting at position 3624 of SEQ ID NO: 1242539
cugggagauugagagauua

SEQ ID NO: 1355485 - RNA, 19 nt, Artificial Sequence
  Description of Artificial Sequence: Synthetic oligonucleotide
  Antisense strand to SEQ ID NO: 1355484
uaaucucucaaucucccag

SEQ ID NO: 1355486 - RNA, 19 nt, Artificial Sequence
  Description of Artificial Sequence: Synthetic oligonucleotide
  Sense strand starting at position 3649 of SEQ ID NO: 1242539
ugcauugugacguggaaug

SEQ ID NO: 1355487 - RNA, 19 nt, Artificial Sequence
  Description of Artificial Sequence: Synthetic oligonucleotide
  Antisense strand to SEQ ID NO: 1355486
cauuccacgucacaaugca

SEQ ID NO: 1355488 - RNA, 19 nt, Artificial Sequence
  Description of Artificial Sequence: Synthetic oligonucleotide
  Sense strand starting at position 3673 of SEQ ID NO: 1242539
agaccacugucacuuacua

SEQ ID NO: 1355489 - RNA, 19 nt, Artificial Sequence
  Description of Artificial Sequence: Synthetic oligonucleotide
  Antisense strand to SEQ ID NO: 1355488
uaguaagugacaguggucu

SEQ ID NO: 1355490 - RNA, 19 nt, Artificial Sequence
  Description of Artificial Sequence: Synthetic oligonucleotide
  Sense strand starting at position 145 of SEQ ID NO: 1242540
guaagagagucauuacaca

SEQ ID NO: 1355491 - RNA, 19 nt, Artificial Sequence
  Description of Artificial Sequence: Synthetic oligonucleotide
  Antisense strand to SEQ ID NO: 1355490
uguguaaugacucucuuac

SEQ ID NO: 1355492 - RNA, 19 nt, Artificial Sequence
  Description of Artificial Sequence: Synthetic oligonucleotide
  Sense strand starting at position 160 of SEQ ID NO: 1242540
cacauagguuaacaggaau

SEQ ID NO: 1355493 - RNA, 19 nt, Artificial Sequence
  Description of Artificial Sequence: Synthetic oligonucleotide
  Antisense strand to SEQ ID NO: 1355492
auuccuguuaaccuaugug

SEQ ID NO: 1355494 - RNA, 19 nt, Artificial Sequence
  Description of Artificial Sequence: Synthetic oligonucleotide
  Sense strand starting at position 323 of SEQ ID NO: 1242540
ccuaauaccgucuaaugca

SEQ ID NO: 1355495 - RNA, 19 nt, Artificial Sequence
  Description of Artificial Sequence: Synthetic oligonucleotide
  Antisense strand to SEQ ID NO: 1355494
ugcauuagacgguauuagg

SEQ ID NO: 1355496 - RNA, 19 nt, Artificial Sequence
  Description of Artificial Sequence: Synthetic oligonucleotide
  Sense strand starting at position 372 of SEQ ID NO: 1242540
ucuuguacuuguguaccaa

SEQ ID NO: 1355497 - RNA, 19 nt, Artificial Sequence
  Description of Artificial Sequence: Synthetic oligonucleotide
  Antisense strand to SEQ ID NO: 1355496
uugguacacaaguacaaga

SEQ ID NO: 1355498 - RNA, 19 nt, Artificial Sequence
  Description of Artificial Sequence: Synthetic oligonucleotide
  Sense strand starting at position 463 of SEQ ID NO: 1242540
ggucgaagugcccauaagu

SEQ ID NO: 1355499 - RNA, 19 nt, Artificial Sequence
  Description of Artificial Sequence: Synthetic oligonucleotide
  Antisense strand to SEQ ID NO: 1355498
acuuaugggcacuucgacc

SEQ ID NO: 1355500 - RNA, 19 nt, Artificial Sequence
  Description of Artificial Sequence: Synthetic oligonucleotide
  Sense strand starting at position 477 of SEQ ID NO: 1242540
uaaguuauggcagauuaac

SEQ ID NO: 1355501 - RNA, 19 nt, Artificial Sequence
  Description of Artificial Sequence: Synthetic oligonucleotide
  Antisense strand to SEQ ID NO: 1355500
guuaaucugccauaacuua

SEQ ID NO: 1355502 - RNA, 19 nt, Artificial Sequence
  Description of Artificial Sequence: Synthetic oligonucleotide
  Sense strand starting at position 571 of SEQ ID NO: 1242540
cacacaguuucggcauaca

SEQ ID NO: 1355503 - RNA, 19 nt, Artificial Sequence
  Description of Artificial Sequence: Synthetic oligonucleotide
  Antisense strand to SEQ ID NO: 1355502
uguaugccgaaacugugug

SEQ ID NO: 1355504 - RNA, 19 nt, Artificial Sequence
  Description of Artificial Sequence: Synthetic oligonucleotide
  Sense strand starting at position 574 of SEQ ID NO: 1242540
acaguuucggcauacaaac

SEQ ID NO: 1355505 - RNA, 19 nt, Artificial Sequence
  Description of Artificial Sequence: Synthetic oligonucleotide
  Antisense strand to SEQ ID NO: 1355504
guuuguaugccgaaacugu

SEQ ID NO: 1355506 - RNA, 19 nt, Artificial Sequence
  Description of Artificial Sequence: Synthetic oligonucleotide
  Sense strand starting at position 945 of SEQ ID NO: 1242540
ugugaugucucccuuuaaa

SEQ ID NO: 1355507 - RNA, 19 nt, Artificial Sequence
  Description of Artificial Sequence: Synthetic oligonucleotide
  Antisense strand to SEQ ID NO: 1355506
uuuaaagggagacaucaca

SEQ ID NO: 1355508 - RNA, 19 nt, Artificial Sequence
  Description of Artificial Sequence: Synthetic oligonucleotide
  Sense strand starting at position 1096 of SEQ ID NO: 1242540
uggugacaugguuaccgaa

SEQ ID NO: 1355509 - RNA, 19 nt, Artificial Sequence
  Description of Artificial Sequence: Synthetic oligonucleotide
  Antisense strand to SEQ ID NO: 1355508
uucgguaaccaugucacca

SEQ ID NO: 1355510 - RNA, 19 nt, Artificial Sequence
  Description of Artificial Sequence: Synthetic oligonucleotide
  Sense strand starting at position 1098 of SEQ ID NO: 1242540
gugacaugguuaccgaaca

SEQ ID NO: 1355511 - RNA, 19 nt, Artificial Sequence
  Description of Artificial Sequence: Synthetic oligonucleotide
  Antisense strand to SEQ ID NO: 1355510
uguucgguaaccaugucac

SEQ ID NO: 1355512 - RNA, 19 nt, Artificial Sequence
  Description of Artificial Sequence: Synthetic oligonucleotide
  Sense strand starting at position 1166 of SEQ ID NO: 1242540
cgauuucgguuugaaagag

SEQ ID NO: 1355513 - RNA, 19 nt, Artificial Sequence
  Description of Artificial Sequence: Synthetic oligonucleotide
  Antisense strand to SEQ ID NO: 1355512
cucuuucaaaccgaaaucg

SEQ ID NO: 1355514 - RNA, 19 nt, Artificial Sequence
  Description of Artificial Sequence: Synthetic oligonucleotide
  Sense strand starting at position 1446 of SEQ ID NO: 1242540
uccugaccucgugauuagu

SEQ ID NO: 1355515 - RNA, 19 nt, Artificial Sequence
  Description of Artificial Sequence: Synthetic oligonucleotide
  Antisense strand to SEQ ID NO: 1355514
acuaaucacgaggucagga

SEQ ID NO: 1355516 - RNA, 19 nt, Artificial Sequence
  Description of Artificial Sequence: Synthetic oligonucleotide
  Sense strand starting at position 1605 of SEQ ID NO: 1242540
uacaacuuccgagauguga

SEQ ID NO: 1355517 - RNA, 19 nt, Artificial Sequence
  Description of Artificial Sequence: Synthetic oligonucleotide
  Antisense strand to SEQ ID NO: 1355516
ucacaucucggaaguugua

SEQ ID NO: 1355518 - RNA, 19 nt, Artificial Sequence
  Description of Artificial Sequence: Synthetic oligonucleotide
  Sense strand starting at position 1613 of SEQ ID NO: 1242540
ccgagaugugaagguaaau

SEQ ID NO: 1355519 - RNA, 19 nt, Artificial Sequence
  Description of Artificial Sequence: Synthetic oligonucleotide
  Antisense strand to SEQ ID NO: 1355518
auuuaccuucacaucucgg

SEQ ID NO: 1355520 - RNA, 19 nt, Artificial Sequence
  Description of Artificial Sequence: Synthetic oligonucleotide
  Sense strand starting at position 1638 of SEQ ID NO: 1242540
gucccaacuguguaggaua

SEQ ID NO: 1355521 - RNA, 19 nt, Artificial Sequence
  Description of Artificial Sequence: Synthetic oligonucleotide
  Antisense strand to SEQ ID NO: 1355520
uauccuacacaguugggac

SEQ ID NO: 1355522 - RNA, 19 nt, Artificial Sequence
  Description of Artificial Sequence: Synthetic oligonucleotide
  Sense strand starting at position 1654 of SEQ ID NO: 1242540
auaguuagcacgugacuua

SEQ ID NO: 1355523 - RNA, 19 nt, Artificial Sequence
  Description of Artificial Sequence: Synthetic oligonucleotide
  Antisense strand to SEQ ID NO: 1355522
uaagucacgugcuaacuau

SEQ ID NO: 1355524 - RNA, 19 nt, Artificial Sequence
  Description of Artificial Sequence: Synthetic oligonucleotide
  Sense strand starting at position 1655 of SEQ ID NO: 1242540
uaguuagcacgugacuuaa

SEQ ID NO: 1355525 - RNA, 19 nt, Artificial Sequence
  Description of Artificial Sequence: Synthetic oligonucleotide
  Antisense strand to SEQ ID NO: 1355524
uuaagucacgugcuaacua

SEQ ID NO: 1355526 - RNA, 19 nt, Artificial Sequence
  Description of Artificial Sequence: Synthetic oligonucleotide
  Sense strand starting at position 2775 of SEQ ID NO: 1242540
cgguuucucuaccuccaau

SEQ ID NO: 1355527 - RNA, 19 nt, Artificial Sequence
  Description of Artificial Sequence: Synthetic oligonucleotide
  Antisense strand to SEQ ID NO: 1355526
auuggagguagagaaaccg

SEQ ID NO: 1355528 - RNA, 19 nt, Artificial Sequence
  Description of Artificial Sequence: Synthetic oligonucleotide
  Sense strand starting at position 2828 of SEQ ID NO: 1242540
acuuuaagggcuugguuau

SEQ ID NO: 1355529 - RNA, 19 nt, Artificial Sequence
  Description of Artificial Sequence: Synthetic oligonucleotide
  Antisense strand to SEQ ID NO: 1355528
auaaccaagcccuuaaagu

SEQ ID NO: 1355530 - RNA, 19 nt, Artificial Sequence
  Description of Artificial Sequence: Synthetic oligonucleotide
  Sense strand starting at position 2946 of SEQ ID NO: 1242540
aaggaauucugagcuucug

SEQ ID NO: 1355531 - RNA, 19 nt, Artificial Sequence
  Description of Artificial Sequence: Synthetic oligonucleotide
  Antisense strand to SEQ ID NO: 1355530
cagaagcucagaauuccuu

SEQ ID NO: 1355532 - RNA, 19 nt, Artificial Sequence
  Description of Artificial Sequence: Synthetic oligonucleotide
  Sense strand starting at position 3295 of SEQ ID NO: 1242540
acuuuaguucgaggucauu

SEQ ID NO: 1355533 - RNA, 19 nt, Artificial Sequence
  Description of Artificial Sequence: Synthetic oligonucleotide
  Antisense strand to SEQ ID NO: 1355532
aaugaccucgaacuaaagu

SEQ ID NO: 1355534 - RNA, 19 nt, Artificial Sequence
  Description of Artificial Sequence: Synthetic oligonucleotide
  Sense strand starting at position 3318 of SEQ ID NO: 1242540
ccuauugugaaugaggagu

SEQ ID NO: 1355535 - RNA, 19 nt, Artificial Sequence
  Description of Artificial Sequence: Synthetic oligonucleotide
  Antisense strand to SEQ ID NO: 1355534
acuccucauucacaauagg

SEQ ID NO: 1355536 - RNA, 19 nt, Artificial Sequence
  Description of Artificial Sequence: Synthetic oligonucleotide
  Sense strand starting at position 3360 of SEQ ID NO: 1242540
gagcccaguccugagaauc

SEQ ID NO: 1355537 - RNA, 19 nt, Artificial Sequence
  Description of Artificial Sequence: Synthetic oligonucleotide
  Antisense strand to SEQ ID NO: 1355536
gauucucaggacugggcuc

SEQ ID NO: 1355538 - RNA, 19 nt, Artificial Sequence
  Description of Artificial Sequence: Synthetic oligonucleotide
  Sense strand starting at position 3493 of SEQ ID NO: 1242540
cuuaaauguugugccugaa

SEQ ID NO: 1355539 - RNA, 19 nt, Artificial Sequence
  Description of Artificial Sequence: Synthetic oligonucleotide
  Antisense strand to SEQ ID NO: 1355538
uucaggcacaacauuuaag

SEQ ID NO: 1355540 - RNA, 19 nt, Artificial Sequence
  Description of Artificial Sequence: Synthetic oligonucleotide
  Sense strand starting at position 3496 of SEQ ID NO: 1242540
aaauguugugccugaagug

SEQ ID NO: 1355541 - RNA, 19 nt, Artificial Sequence
  Description of Artificial Sequence: Synthetic oligonucleotide
  Antisense strand to SEQ ID NO: 1355540
cacuucaggcacaacauuu

SEQ ID NO: 1355542 - RNA, 19 nt, Artificial Sequence
  Description of Artificial Sequence: Synthetic oligonucleotide
  Sense strand starting at position 3497 of SEQ ID NO: 1242540
aauguugugccugaaguga

SEQ ID NO: 1355543 - RNA, 19 nt, Artificial Sequence
  Description of Artificial Sequence: Synthetic oligonucleotide
  Antisense strand to SEQ ID NO: 1355542
ucacuucaggcacaacauu

SEQ ID NO: 1355544 - RNA, 19 nt, Artificial Sequence
  Description of Artificial Sequence: Synthetic oligonucleotide
  Sense strand starting at position 3508 of SEQ ID NO: 1242540
ugaagugaguaccuguuga

SEQ ID NO: 1355545 - RNA, 19 nt, Artificial Sequence
  Description of Artificial Sequence: Synthetic oligonucleotide
  Antisense strand to SEQ ID NO: 1355544
ucaacagguacucacuuca

SEQ ID NO: 1355546 - RNA, 19 nt, Artificial Sequence
  Description of Artificial Sequence: Synthetic oligonucleotide
  Sense strand starting at position 3513 of SEQ ID NO: 1242540
ugaguaccuguugagcauu

SEQ ID NO: 1355547 - RNA, 19 nt, Artificial Sequence
  Description of Artificial Sequence: Synthetic oligonucleotide
  Antisense strand to SEQ ID NO: 1355546
aaugcucaacagguacuca

SEQ ID NO: 1355548 - RNA, 19 nt, Artificial Sequence
  Description of Artificial Sequence: Synthetic oligonucleotide
  Sense strand starting at position 3582 of SEQ ID NO: 1242540
gccugauuggaaugguaau

SEQ ID NO: 1355549 - RNA, 19 nt, Artificial Sequence
  Description of Artificial Sequence: Synthetic oligonucleotide
  Antisense strand to SEQ ID NO: 1355548
auuaccauuccaaucaggc

SEQ ID NO: 1355550 - RNA, 19 nt, Artificial Sequence
  Description of Artificial Sequence: Synthetic oligonucleotide
  Sense strand starting at position 3583 of SEQ ID NO: 1242540
ccugauuggaaugguaaua

SEQ ID NO: 1355551 - RNA, 19 nt, Artificial Sequence
  Description of Artificial Sequence: Synthetic oligonucleotide
  Antisense strand to SEQ ID NO: 1355550
uauuaccauuccaaucagg

SEQ ID NO: 1355552 - RNA, 19 nt, Artificial Sequence
  Description of Artificial Sequence: Synthetic oligonucleotide
  Sense strand starting at position 3638 of SEQ ID NO: 1242540
acauaauaugugugaaaga

SEQ ID NO: 1355553 - RNA, 19 nt, Artificial Sequence
  Description of Artificial Sequence: Synthetic oligonucleotide
  Antisense strand to SEQ ID NO: 1355552
ucuuucacacauauuaugu

SEQ ID NO: 1355554 - RNA, 19 nt, Artificial Sequence
  Description of Artificial Sequence: Synthetic oligonucleotide
  Sense strand starting at position 3672 of SEQ ID NO: 1242540
aagguuaugcgucaagucu

SEQ ID NO: 1355555 - RNA, 19 nt, Artificial Sequence
  Description of Artificial Sequence: Synthetic oligonucleotide
  Antisense strand to SEQ ID NO: 1355554
agacuugacgcauaaccuu

SEQ ID NO: 1355556 - RNA, 19 nt, Artificial Sequence
  Description of Artificial Sequence: Synthetic oligonucleotide
  Sense strand starting at position 3721 of SEQ ID NO: 1242540
ccgauucuuguccaguuua

SEQ ID NO: 1355557 - RNA, 19 nt, Artificial Sequence
  Description of Artificial Sequence: Synthetic oligonucleotide
  Antisense strand to SEQ ID NO: 1355556
uaaacuggacaagaaucgg

SEQ ID NO: 1355558 - RNA, 19 nt, Artificial Sequence
  Description of Artificial Sequence: Synthetic oligonucleotide
  Sense strand starting at position 3800 of SEQ ID NO: 1242540
ugcagaaauuggguuuaca

SEQ ID NO: 1355559 - RNA, 19 nt, Artificial Sequence
  Description of Artificial Sequence: Synthetic oligonucleotide
  Antisense strand to SEQ ID NO: 1355558
uguaaacccaauuucugca

SEQ ID NO: 1355560 - RNA, 19 nt, Artificial Sequence
  Description of Artificial Sequence: Synthetic oligonucleotide
  Sense strand starting at position 3834 of SEQ ID NO: 1242540
uccuuuguuccagauucgu

SEQ ID NO: 1355561 - RNA, 19 nt, Artificial Sequence
  Description of Artificial Sequence: Synthetic oligonucleotide
  Antisense strand to SEQ ID NO: 1355560
acgaaucuggaacaaagga

SEQ ID NO: 1355562 - RNA, 19 nt, Artificial Sequence
  Description of Artificial Sequence: Synthetic oligonucleotide
  Sense strand starting at position 3845 of SEQ ID NO: 1242540
agauucguucugggagauu

SEQ ID NO: 1355563 - RNA, 19 nt, Artificial Sequence
  Description of Artificial Sequence: Synthetic oligonucleotide
  Antisense strand to SEQ ID NO: 1355562
aaucucccagaacgaaucu

SEQ ID NO: 1355564 - RNA, 19 nt, Artificial Sequence
  Description of Artificial Sequence: Synthetic oligonucleotide
  Sense strand starting at position 3854 of SEQ ID NO: 1242540
cugggagauugagagauua

SEQ ID NO: 1355565 - RNA, 19 nt, Artificial Sequence
  Description of Artificial Sequence: Synthetic oligonucleotide
  Antisense strand to SEQ ID NO: 1355564
uaaucucucaaucucccag

SEQ ID NO: 1355566 - RNA, 19 nt, Artificial Sequence
  Description of Artificial Sequence: Synthetic oligonucleotide
  Sense strand starting at position 3879 of SEQ ID NO: 1242540
ugcauugugacguggaaug

SEQ ID NO: 1355567 - RNA, 19 nt, Artificial Sequence
  Description of Artificial Sequence: Synthetic oligonucleotide
  Antisense strand to SEQ ID NO: 1355566
cauuccacgucacaaugca

SEQ ID NO: 1355568 - RNA, 19 nt, Artificial Sequence
  Description of Artificial Sequence: Synthetic oligonucleotide
  Sense strand starting at position 3903 of SEQ ID NO: 1242540
agaccacugucacuuacua

SEQ ID NO: 1355569 - RNA, 19 nt, Artificial Sequence
  Description of Artificial Sequence: Synthetic oligonucleotide
  Antisense strand to SEQ ID NO: 1355568
uaguaagugacaguggucu

SEQ ID NO: 1355570 - RNA, 19 nt, Artificial Sequence
  Description of Artificial Sequence: Synthetic oligonucleotide
  Sense strand starting at position 160 of SEQ ID NO: 1242541
cugguaugugcuuaccaga

SEQ ID NO: 1355571 - RNA, 19 nt, Artificial Sequence
  Description of Artificial Sequence: Synthetic oligonucleotide
  Antisense strand to SEQ ID NO: 1355570
ucugguaagcacauaccag

SEQ ID NO: 1355572 - RNA, 19 nt, Artificial Sequence
  Description of Artificial Sequence: Synthetic oligonucleotide
  Sense strand starting at position 506 of SEQ ID NO: 1242541
gucgauauaaacugguaua

SEQ ID NO: 1355573 - RNA, 19 nt, Artificial Sequence
  Description of Artificial Sequence: Synthetic oligonucleotide
  Antisense strand to SEQ ID NO: 1355572
uauaccaguuuauaucgac

SEQ ID NO: 1355574 - RNA, 19 nt, Artificial Sequence
  Description of Artificial Sequence: Synthetic oligonucleotide
  Sense strand starting at position 565 of SEQ ID NO: 1242541
uccuuugaucuagguaaag

SEQ ID NO: 1355575 - RNA, 19 nt, Artificial Sequence
  Description of Artificial Sequence: Synthetic oligonucleotide
  Antisense strand to SEQ ID NO: 1355574
cuuuaccuagaucaaagga

SEQ ID NO: 1355576 - RNA, 19 nt, Artificial Sequence
  Description of Artificial Sequence: Synthetic oligonucleotide
  Sense strand starting at position 900 of SEQ ID NO: 1242541
uggguagauagguaacuuu

SEQ ID NO: 1355577 - RNA, 19 nt, Artificial Sequence
  Description of Artificial Sequence: Synthetic oligonucleotide
  Antisense strand to SEQ ID NO: 1355576
aaaguuaccuaucuaccca

SEQ ID NO: 1355578 - RNA, 19 nt, Artificial Sequence
  Description of Artificial Sequence: Synthetic oligonucleotide
  Sense strand starting at position 988 of SEQ ID NO: 1242541
cuuugcaugauccggaaca

SEQ ID NO: 1355579 - RNA, 19 nt, Artificial Sequence
  Description of Artificial Sequence: Synthetic oligonucleotide
  Antisense strand to SEQ ID NO: 1355578
uguuccggaucaugcaaag

SEQ ID NO: 1355580 - RNA, 19 nt, Artificial Sequence
  Description of Artificial Sequence: Synthetic oligonucleotide
  Sense strand starting at position 990 of SEQ ID NO: 1242541
uugcaugauccggaacaag

SEQ ID NO: 1355581 - RNA, 19 nt, Artificial Sequence
  Description of Artificial Sequence: Synthetic oligonucleotide
  Antisense strand to SEQ ID NO: 1355580
cuuguuccggaucaugcaa

SEQ ID NO: 1355582 - RNA, 19 nt, Artificial Sequence
  Description of Artificial Sequence: Synthetic oligonucleotide
  Sense strand starting at position 1062 of SEQ ID NO: 1242541
uugcaaugauuauugcaau

SEQ ID NO: 1355583 - RNA, 19 nt, Artificial Sequence
  Description of Artificial Sequence: Synthetic oligonucleotide
  Antisense strand to SEQ ID NO: 1355582
auugcaauaaucauugcaa

SEQ ID NO: 1355584 - RNA, 19 nt, Artificial Sequence
  Description of Artificial Sequence: Synthetic oligonucleotide
  Sense strand starting at position 1723 of SEQ ID NO: 1242541
gaaagucaaguuugauucu

SEQ ID NO: 1355585 - RNA, 19 nt, Artificial Sequence
  Description of Artificial Sequence: Synthetic oligonucleotide
  Antisense strand to SEQ ID NO: 1355584
agaaucaaacuugacuuuc

SEQ ID NO: 1355586 - RNA, 19 nt, Artificial Sequence
  Description of Artificial Sequence: Synthetic oligonucleotide
  Sense strand starting at position 2017 of SEQ ID NO: 1242541
caauucuaguggcugaaga

SEQ ID NO: 1355587 - RNA, 19 nt, Artificial Sequence
  Description of Artificial Sequence: Synthetic oligonucleotide
  Antisense strand to SEQ ID NO: 1355586
ucuucagccacuagaauug

SEQ ID NO: 1355588 - RNA, 19 nt, Artificial Sequence
  Description of Artificial Sequence: Synthetic oligonucleotide
  Sense strand starting at position 2019 of SEQ ID NO: 1242541
auucuaguggcugaagagu

SEQ ID NO: 1355589 - RNA, 19 nt, Artificial Sequence
  Description of Artificial Sequence: Synthetic oligonucleotide
  Antisense strand to SEQ ID NO: 1355588
acucuucagccacuagaau

SEQ ID NO: 1355590 - RNA, 19 nt, Artificial Sequence
  Description of Artificial Sequence: Synthetic oligonucleotide
  Sense strand starting at position 2063 of SEQ ID NO: 1242541
ugauaauugugauuggaua

SEQ ID NO: 1355591 - RNA, 19 nt, Artificial Sequence
  Description of Artificial Sequence: Synthetic oligonucleotide
  Antisense strand to SEQ ID NO: 1355590
uauccaaucacaauuauca

SEQ ID NO: 1355592 - RNA, 19 nt, Artificial Sequence
  Description of Artificial Sequence: Synthetic oligonucleotide
  Sense strand starting at position 2064 of SEQ ID NO: 1242541
gauaauugugauuggauac

SEQ ID NO: 1355593 - RNA, 19 nt, Artificial Sequence
  Description of Artificial Sequence: Synthetic oligonucleotide
  Antisense strand to SEQ ID NO: 1355592
guauccaaucacaauuauc

SEQ ID NO: 1355594 - RNA, 19 nt, Artificial Sequence
  Description of Artificial Sequence: Synthetic oligonucleotide
  Sense strand starting at position 2074 of SEQ ID NO: 1242541
auuggauacggcuaauauc

SEQ ID NO: 1355595 - RNA, 19 nt, Artificial Sequence
  Description of Artificial Sequence: Synthetic oligonucleotide
  Antisense strand to SEQ ID NO: 1355594
gauauuagccguauccaau

SEQ ID NO: 1355596 - RNA, 19 nt, Artificial Sequence
  Description of Artificial Sequence: Synthetic oligonucleotide
  Sense strand starting at position 2151 of SEQ ID NO: 1242541
uggauaagcugguuucuua

SEQ ID NO: 1355597 - RNA, 19 nt, Artificial Sequence
  Description of Artificial Sequence: Synthetic oligonucleotide
  Antisense strand to SEQ ID NO: 1355596
uaagaaaccagcuuaucca

SEQ ID NO: 1355598 - RNA, 19 nt, Artificial Sequence
  Description of Artificial Sequence: Synthetic oligonucleotide
  Sense strand starting at position 2155 of SEQ ID NO: 1242541
uaagcugguuucuuaaaga

SEQ ID NO: 1355599 - RNA, 19 nt, Artificial Sequence
  Description of Artificial Sequence: Synthetic oligonucleotide
  Antisense strand to SEQ ID NO: 1355598
ucuuuaagaaaccagcuua

SEQ ID NO: 1355600 - RNA, 19 nt, Artificial Sequence
  Description of Artificial Sequence: Synthetic oligonucleotide
  Sense strand starting at position 2218 of SEQ ID NO: 1242541
uacccuugucuaggugaaa

SEQ ID NO: 1355601 - RNA, 19 nt, Artificial Sequence
  Description of Artificial Sequence: Synthetic oligonucleotide
  Antisense strand to SEQ ID NO: 1355600
uuucaccuagacaagggua

SEQ ID NO: 1355602 - RNA, 19 nt, Artificial Sequence
  Description of Artificial Sequence: Synthetic oligonucleotide
  Sense strand starting at position 2332 of SEQ ID NO: 1242541
gagcaaugaaggugaaguu

SEQ ID NO: 1355603 - RNA, 19 nt, Artificial Sequence
  Description of Artificial Sequence: Synthetic oligonucleotide
  Antisense strand to SEQ ID NO: 1355602
aacuucaccuucauugcuc

SEQ ID NO: 1355604 - RNA, 19 nt, Artificial Sequence
  Description of Artificial Sequence: Synthetic oligonucleotide
  Sense strand starting at position 2341 of SEQ ID NO: 1242541
aggugaaguuaugcuuuaa

SEQ ID NO: 1355605 - RNA, 19 nt, Artificial Sequence
  Description of Artificial Sequence: Synthetic oligonucleotide
  Antisense strand to SEQ ID NO: 1355604
uuaaagcauaacuucaccu

SEQ ID NO: 1355606 - RNA, 19 nt, Artificial Sequence
  Description of Artificial Sequence: Synthetic oligonucleotide
  Sense strand starting at position 2345 of SEQ ID NO: 1242541
gaaguuaugcuuuaaagac

SEQ ID NO: 1355607 - RNA, 19 nt, Artificial Sequence
  Description of Artificial Sequence: Synthetic oligonucleotide
  Antisense strand to SEQ ID NO: 1355606
gucuuuaaagcauaacuuc

SEQ ID NO: 1355608 - RNA, 19 nt, Artificial Sequence
  Description of Artificial Sequence: Synthetic oligonucleotide
  Sense strand starting at position 2565 of SEQ ID NO: 1242541
uuauguucucaguaucaca

SEQ ID NO: 1355609 - RNA, 19 nt, Artificial Sequence
  Description of Artificial Sequence: Synthetic oligonucleotide
  Antisense strand to SEQ ID NO: 1355608
ugugauacugagaacauaa

SEQ ID NO: 1355610 - RNA, 19 nt, Artificial Sequence
  Description of Artificial Sequence: Synthetic oligonucleotide
  Sense strand starting at position 2600 of SEQ ID NO: 1242541
agugacaucaaagguugau

SEQ ID NO: 1355611 - RNA, 19 nt, Artificial Sequence
  Description of Artificial Sequence: Synthetic oligonucleotide
  Antisense strand to SEQ ID NO: 1355610
aucaaccuuugaugucacu

SEQ ID NO: 1355612 - RNA, 19 nt, Artificial Sequence
  Description of Artificial Sequence: Synthetic oligonucleotide
  Sense strand starting at position 2603 of SEQ ID NO: 1242541
gacaucaaagguugauauu

SEQ ID NO: 1355613 - RNA, 19 nt, Artificial Sequence
  Description of Artificial Sequence: Synthetic oligonucleotide
  Antisense strand to SEQ ID NO: 1355612
aauaucaaccuuugauguc

SEQ ID NO: 1355614 - RNA, 19 nt, Artificial Sequence
  Description of Artificial Sequence: Synthetic oligonucleotide
  Sense strand starting at position 2612 of SEQ ID NO: 1242541
gguugauauuucuacuuaa

SEQ ID NO: 1355615 - RNA, 19 nt, Artificial Sequence
  Description of Artificial Sequence: Synthetic oligonucleotide
  Antisense strand to SEQ ID NO: 1355614
uuaaguagaaauaucaacc

SEQ ID NO: 1355616 - RNA, 19 nt, Artificial Sequence
  Description of Artificial Sequence: Synthetic oligonucleotide
  Sense strand starting at position 2670 of SEQ ID NO: 1242541
acagaucugacaugugagu

SEQ ID NO: 1355617 - RNA, 19 nt, Artificial Sequence
  Description of Artificial Sequence: Synthetic oligonucleotide
  Antisense strand to SEQ ID NO: 1355616
acucacaugucagaucugu

SEQ ID NO: 1355618 - RNA, 19 nt, Artificial Sequence
  Description of Artificial Sequence: Synthetic oligonucleotide
  Sense strand starting at position 2672 of SEQ ID NO: 1242541
agaucugacaugugaguau

SEQ ID NO: 1355619 - RNA, 19 nt, Artificial Sequence
  Description of Artificial Sequence: Synthetic oligonucleotide
  Antisense strand to SEQ ID NO: 1355618
auacucacaugucagaucu

SEQ ID NO: 1355620 - RNA, 19 nt, Artificial Sequence
  Description of Artificial Sequence: Synthetic oligonucleotide
  Sense strand starting at position 2704 of SEQ ID NO: 1242541
augcuuaaccauuggcaaa

SEQ ID NO: 1355621 - RNA, 19 nt, Artificial Sequence
  Description of Artificial Sequence: Synthetic oligonucleotide
  Antisense strand to SEQ ID NO: 1355620
uuugccaaugguuaagcau

SEQ ID NO: 1355622 - RNA, 19 nt, Artificial Sequence
  Description of Artificial Sequence: Synthetic oligonucleotide
  Sense strand starting at position 3047 of SEQ ID NO: 1242541
auuagaacugcuuauguuu

SEQ ID NO: 1355623 - RNA, 19 nt, Artificial Sequence
  Description of Artificial Sequence: Synthetic oligonucleotide
  Antisense strand to SEQ ID NO: 1355622
aaacauaagcaguucuaau

SEQ ID NO: 1355624 - RNA, 19 nt, Artificial Sequence
  Description of Artificial Sequence: Synthetic oligonucleotide
  Sense strand starting at position 3067 of SEQ ID NO: 1242541
agcagcuuggcccaucaaa

SEQ ID NO: 1355625 - RNA, 19 nt, Artificial Sequence
  Description of Artificial Sequence: Synthetic oligonucleotide
  Antisense strand to SEQ ID NO: 1355624
uuugaugggccaagcugcu

SEQ ID NO: 1355626 - RNA, 19 nt, Artificial Sequence
  Description of Artificial Sequence: Synthetic oligonucleotide
  Sense strand starting at position 3114 of SEQ ID NO: 1242541
cugauuaaauggcauuuaa

SEQ ID NO: 1355627 - RNA, 19 nt, Artificial Sequence
  Description of Artificial Sequence: Synthetic oligonucleotide
  Antisense strand to SEQ ID NO: 1355626
uuaaaugccauuuaaucag

SEQ ID NO: 1355628 - RNA, 19 nt, Artificial Sequence
  Description of Artificial Sequence: Synthetic oligonucleotide
  Sense strand starting at position 3135 of SEQ ID NO: 1242541
ucuaauuuacgguguaagu

SEQ ID NO: 1355629 - RNA, 19 nt, Artificial Sequence
  Description of Artificial Sequence: Synthetic oligonucleotide
  Antisense strand to SEQ ID NO: 1355628
acuuacaccguaaauuaga

SEQ ID NO: 1355630 - RNA, 19 nt, Artificial Sequence
  Description of Artificial Sequence: Synthetic oligonucleotide
  Sense strand starting at position 3204 of SEQ ID NO: 1242541
agcuuauuagagugacuuc

SEQ ID NO: 1355631 - RNA, 19 nt, Artificial Sequence
  Description of Artificial Sequence: Synthetic oligonucleotide
  Antisense strand to SEQ ID NO: 1355630
gaagucacucuaauaagcu

SEQ ID NO: 1355632 - RNA, 19 nt, Artificial Sequence
  Description of Artificial Sequence: Synthetic oligonucleotide
  Sense strand starting at position 3390 of SEQ ID NO: 1242541
aagggaagucuuuguaaca

SEQ ID NO: 1355633 - RNA, 19 nt, Artificial Sequence
  Description of Artificial Sequence: Synthetic oligonucleotide
  Antisense strand to SEQ ID NO: 1355632
uguuacaaagacuucccuu

SEQ ID NO: 1355634 - RNA, 19 nt, Artificial Sequence
  Description of Artificial Sequence: Synthetic oligonucleotide
  Sense strand starting at position 3391 of SEQ ID NO: 1242541
agggaagucuuuguaacaa

SEQ ID NO: 1355635 - RNA, 19 nt, Artificial Sequence
  Description of Artificial Sequence: Synthetic oligonucleotide
  Antisense strand to SEQ ID NO: 1355634
uuguuacaaagacuucccu

SEQ ID NO: 1355636 - RNA, 19 nt, Artificial Sequence
  Description of Artificial Sequence: Synthetic oligonucleotide
  Sense strand starting at position 3428 of SEQ ID NO: 1242541
ugcaacuaggcaugaauau

SEQ ID NO: 1355637 - RNA, 19 nt, Artificial Sequence
  Description of Artificial Sequence: Synthetic oligonucleotide
  Antisense strand to SEQ ID NO: 1355636
auauucaugccuaguugca

SEQ ID NO: 1355638 - RNA, 19 nt, Artificial Sequence
  Description of Artificial Sequence: Synthetic oligonucleotide
  Sense strand starting at position 3447 of SEQ ID NO: 1242541
ggagcaauacccugcugaa

SEQ ID NO: 1355639 - RNA, 19 nt, Artificial Sequence
  Description of Artificial Sequence: Synthetic oligonucleotide
  Antisense strand to SEQ ID NO: 1355638
uucagcaggguauugcucc

SEQ ID NO: 1355640 - RNA, 19 nt, Artificial Sequence
  Description of Artificial Sequence: Synthetic oligonucleotide
  Sense strand starting at position 3492 of SEQ ID NO: 1242541
gcccuuuaaguggacaaau

SEQ ID NO: 1355641 - RNA, 19 nt, Artificial Sequence
  Description of Artificial Sequence: Synthetic oligonucleotide
  Antisense strand to SEQ ID NO: 1355640
auuuguccacuuaaagggc

SEQ ID NO: 1355642 - RNA, 19 nt, Artificial Sequence
  Description of Artificial Sequence: Synthetic oligonucleotide
  Sense strand starting at position 3540 of SEQ ID NO: 1242541
ccaagauccuuugcaagga

SEQ ID NO: 1355643 - RNA, 19 nt, Artificial Sequence
  Description of Artificial Sequence: Synthetic oligonucleotide
  Antisense strand to SEQ ID NO: 1355642
uccuugcaaaggaucuugg

SEQ ID NO: 1355644 - RNA, 19 nt, Artificial Sequence
  Description of Artificial Sequence: Synthetic oligonucleotide
  Sense strand starting at position 3697 of SEQ ID NO: 1242541
agcauaagauuugaggaaa

SEQ ID NO: 1355645 - RNA, 19 nt, Artificial Sequence
  Description of Artificial Sequence: Synthetic oligonucleotide
  Antisense strand to SEQ ID NO: 1355644
uuuccucaaaucuuaugcu

SEQ ID NO: 1355646 - RNA, 19 nt, Artificial Sequence
  Description of Artificial Sequence: Synthetic oligonucleotide
  Sense strand starting at position 3764 of SEQ ID NO: 1242541
uggcaaacaguuuaaucuu

SEQ ID NO: 1355647 - RNA, 19 nt, Artificial Sequence
  Description of Artificial Sequence: Synthetic oligonucleotide
  Antisense strand to SEQ ID NO: 1355646
aagauuaaacuguuugcca

SEQ ID NO: 1355648 - RNA, 19 nt, Artificial Sequence
  Description of Artificial Sequence: Synthetic oligonucleotide
  Sense strand starting at position 3857 of SEQ ID NO: 1242541
cuucgaaguuaauuaugaa

SEQ ID NO: 1355649 - RNA, 19 nt, Artificial Sequence
  Description of Artificial Sequence: Synthetic oligonucleotide
  Antisense strand to SEQ ID NO: 1355648
uucauaauuaacuucgaag

SEQ ID NO: 1355650 - RNA, 19 nt, Artificial Sequence
  Description of Artificial Sequence: Synthetic oligonucleotide
  Sense strand starting at position 59 of SEQ ID NO: 1242542
ucauuaguauguuccaaag

SEQ ID NO: 1355651 - RNA, 19 nt, Artificial Sequence
  Description of Artificial Sequence: Synthetic oligonucleotide
  Antisense strand to SEQ ID NO: 1355650
cuuuggaacauacuaauga

SEQ ID NO: 1355652 - RNA, 19 nt, Artificial Sequence
  Description of Artificial Sequence: Synthetic oligonucleotide
  Sense strand starting at position 198 of SEQ ID NO: 1242542
gccaaauggcaguaaauua

SEQ ID NO: 1355653 - RNA, 19 nt, Artificial Sequence
  Description of Artificial Sequence: Synthetic oligonucleotide
  Antisense strand to SEQ ID NO: 1355652
uaauuuacugccauuuggc

SEQ ID NO: 1355654 - RNA, 19 nt, Artificial Sequence
  Description of Artificial Sequence: Synthetic oligonucleotide
  Sense strand starting at position 254 of SEQ ID NO: 1242542
uaaagugagccuuguaauc

SEQ ID NO: 1355655 - RNA, 19 nt, Artificial Sequence
  Description of Artificial Sequence: Synthetic oligonucleotide
  Antisense strand to SEQ ID NO: 1355654
gauuacaaggcucacuuua

SEQ ID NO: 1355656 - RNA, 19 nt, Artificial Sequence
  Description of Artificial Sequence: Synthetic oligonucleotide
  Sense strand starting at position 259 of SEQ ID NO: 1242542
ugagccuuguaaucauuaa

SEQ ID NO: 1355657 - RNA, 19 nt, Artificial Sequence
  Description of Artificial Sequence: Synthetic oligonucleotide
  Antisense strand to SEQ ID NO: 1355656
uuaaugauuacaaggcuca

SEQ ID NO: 1355658 - RNA, 19 nt, Artificial Sequence
  Description of Artificial Sequence: Synthetic oligonucleotide
  Sense strand starting at position 350 of SEQ ID NO: 1242542
aguguuauguaucuacuga

SEQ ID NO: 1355659 - RNA, 19 nt, Artificial Sequence
  Description of Artificial Sequence: Synthetic oligonucleotide
  Antisense strand to SEQ ID NO: 1355658
ucaguagauacauaacacu

SEQ ID NO: 1355660 - RNA, 19 nt, Artificial Sequence
  Description of Artificial Sequence: Synthetic oligonucleotide
  Sense strand starting at position 351 of SEQ ID NO: 1242542
guguuauguaucuacugac

SEQ ID NO: 1355661 - RNA, 19 nt, Artificial Sequence
  Description of Artificial Sequence: Synthetic oligonucleotide
  Antisense strand to SEQ ID NO: 1355660
gucaguagauacauaacac

SEQ ID NO: 1355662 - RNA, 19 nt, Artificial Sequence
  Description of Artificial Sequence: Synthetic oligonucleotide
  Sense strand starting at position 397 of SEQ ID NO: 1242542
aagugaaaccuuuggguuu

SEQ ID NO: 1355663 - RNA, 19 nt, Artificial Sequence
  Description of Artificial Sequence: Synthetic oligonucleotide
  Antisense strand to SEQ ID NO: 1355662
aaacccaaagguuucacuu

SEQ ID NO: 1355664 - RNA, 19 nt, Artificial Sequence
  Description of Artificial Sequence: Synthetic oligonucleotide
  Sense strand starting at position 895 of SEQ ID NO: 1242542
acauuuguguuaugaaaga

SEQ ID NO: 1355665 - RNA, 19 nt, Artificial Sequence
  Description of Artificial Sequence: Synthetic oligonucleotide
  Antisense strand to SEQ ID NO: 1355664
ucuuucauaacacaaaugu

SEQ ID NO: 1355666 - RNA, 19 nt, Artificial Sequence
  Description of Artificial Sequence: Synthetic oligonucleotide
  Sense strand starting at position 960 of SEQ ID NO: 1242542
cuccaugccucagugaaca

SEQ ID NO: 1355667 - RNA, 19 nt, Artificial Sequence
  Description of Artificial Sequence: Synthetic oligonucleotide
  Antisense strand to SEQ ID NO: 1355666
uguucacugaggcauggag

SEQ ID NO: 1355668 - RNA, 19 nt, Artificial Sequence
  Description of Artificial Sequence: Synthetic oligonucleotide
  Sense strand starting at position 965 of SEQ ID NO: 1242542
ugccucagugaacaguuaa

SEQ ID NO: 1355669 - RNA, 19 nt, Artificial Sequence
  Description of Artificial Sequence: Synthetic oligonucleotide
  Antisense strand to SEQ ID NO: 1355668
uuaacuguucacugaggca

SEQ ID NO: 1355670 - RNA, 19 nt, Artificial Sequence
  Description of Artificial Sequence: Synthetic oligonucleotide
  Sense strand starting at position 990 of SEQ ID NO: 1242542
uuuauaagucucugucuac

SEQ ID NO: 1355671 - RNA, 19 nt, Artificial Sequence
  Description of Artificial Sequence: Synthetic oligonucleotide
  Antisense strand to SEQ ID NO: 1355670
guagacagagacuuauaaa

SEQ ID NO: 1355672 - RNA, 19 nt, Artificial Sequence
  Description of Artificial Sequence: Synthetic oligonucleotide
  Sense strand starting at position 991 of SEQ ID NO: 1242542
uuauaagucucugucuaca

SEQ ID NO: 1355673 - RNA, 19 nt, Artificial Sequence
  Description of Artificial Sequence: Synthetic oligonucleotide
  Antisense strand to SEQ ID NO: 1355672
uguagacagagacuuauaa

SEQ ID NO: 1355674 - RNA, 19 nt, Artificial Sequence
  Description of Artificial Sequence: Synthetic oligonucleotide
  Sense strand starting at position 1002 of SEQ ID NO: 1242542
ugucuacaugcucaucauu

SEQ ID NO: 1355675 - RNA, 19 nt, Artificial Sequence
  Description of Artificial Sequence: Synthetic oligonucleotide
  Antisense strand to SEQ ID NO: 1355674
aaugaugagcauguagaca

SEQ ID NO: 1355676 - RNA, 19 nt, Artificial Sequence
  Description of Artificial Sequence: Synthetic oligonucleotide
  Sense strand starting at position 1319 of SEQ ID NO: 1242542
gaacaagggugcuuguauu

SEQ ID NO: 1355677 - RNA, 19 nt, Artificial Sequence
  Description of Artificial Sequence: Synthetic oligonucleotide
  Antisense strand to SEQ ID NO: 1355676
aauacaagcacccuuguuc

SEQ ID NO: 1355678 - RNA, 19 nt, Artificial Sequence
  Description of Artificial Sequence: Synthetic oligonucleotide
  Sense strand starting at position 1494 of SEQ ID NO: 1242542
acuuuaaauggcugaaauc

SEQ ID NO: 1355679 - RNA, 19 nt, Artificial Sequence
  Description of Artificial Sequence: Synthetic oligonucleotide
  Antisense strand to SEQ ID NO: 1355678
gauuucagccauuuaaagu

SEQ ID NO: 1355680 - RNA, 19 nt, Artificial Sequence
  Description of Artificial Sequence: Synthetic oligonucleotide
  Sense strand starting at position 1568 of SEQ ID NO: 1242542
auuaguaaugcagauucca

SEQ ID NO: 1355681 - RNA, 19 nt, Artificial Sequence
  Description of Artificial Sequence: Synthetic oligonucleotide
  Antisense strand to SEQ ID NO: 1355680
uggaaucugcauuacuaau

SEQ ID NO: 1355682 - RNA, 19 nt, Artificial Sequence
  Description of Artificial Sequence: Synthetic oligonucleotide
  Sense strand starting at position 1576 of SEQ ID NO: 1242542
ugcagauuccaaugcuuau

SEQ ID NO: 1355683 - RNA, 19 nt, Artificial Sequence
  Description of Artificial Sequence: Synthetic oligonucleotide
  Antisense strand to SEQ ID NO: 1355682
auaagcauuggaaucugca

SEQ ID NO: 1355684 - RNA, 19 nt, Artificial Sequence
  Description of Artificial Sequence: Synthetic oligonucleotide
  Sense strand starting at position 1608 of SEQ ID NO: 1242542
aaagauguguagucacuaa

SEQ ID NO: 1355685 - RNA, 19 nt, Artificial Sequence
  Description of Artificial Sequence: Synthetic oligonucleotide
  Antisense strand to SEQ ID NO: 1355684
uuagugacuacacaucuuu

SEQ ID NO: 1355686 - RNA, 19 nt, Artificial Sequence
  Description of Artificial Sequence: Synthetic oligonucleotide
  Sense strand starting at position 1612 of SEQ ID NO: 1242542
auguguagucacuaauaac

SEQ ID NO: 1355687 - RNA, 19 nt, Artificial Sequence
  Description of Artificial Sequence: Synthetic oligonucleotide
  Antisense strand to SEQ ID NO: 1355686
guuauuagugacuacacau

SEQ ID NO: 1355688 - RNA, 19 nt, Artificial Sequence
  Description of Artificial Sequence: Synthetic oligonucleotide
  Sense strand starting at position 1731 of SEQ ID NO: 1242542
augucucaucaugaugacu

SEQ ID NO: 1355689 - RNA, 19 nt, Artificial Sequence
  Description of Artificial Sequence: Synthetic oligonucleotide
  Antisense strand to SEQ ID NO: 1355688
agucaucaugaugagacau

SEQ ID NO: 1355690 - RNA, 19 nt, Artificial Sequence
  Description of Artificial Sequence: Synthetic oligonucleotide
  Sense strand starting at position 1819 of SEQ ID NO: 1242542
aggcuuaagucucuacuca

SEQ ID NO: 1355691 - RNA, 19 nt, Artificial Sequence
  Description of Artificial Sequence: Synthetic oligonucleotide
  Antisense strand to SEQ ID NO: 1355690
ugaguagagacuuaagccu

SEQ ID NO: 1355692 - RNA, 19 nt, Artificial Sequence
  Description of Artificial Sequence: Synthetic oligonucleotide
  Sense strand starting at position 1820 of SEQ ID NO: 1242542
ggcuuaagucucuacucac

SEQ ID NO: 1355693 - RNA, 19 nt, Artificial Sequence
  Description of Artificial Sequence: Synthetic oligonucleotide
  Antisense strand to SEQ ID NO: 1355692
gugaguagagacuuaagcc

SEQ ID NO: 1355694 - RNA, 19 nt, Artificial Sequence
  Description of Artificial Sequence: Synthetic oligonucleotide
  Sense strand starting at position 2082 of SEQ ID NO: 1242542
gugcuuucgcuauuauagc

SEQ ID NO: 1355695 - RNA, 19 nt, Artificial Sequence
  Description of Artificial Sequence: Synthetic oligonucleotide
  Antisense strand to SEQ ID NO: 1355694
gcuauaauagcgaaagcac

SEQ ID NO: 1355696 - RNA, 19 nt, Artificial Sequence
  Description of Artificial Sequence: Synthetic oligonucleotide
  Sense strand starting at position 2089 of SEQ ID NO: 1242542
cgcuauuauagcuagguua

SEQ ID NO: 1355697 - RNA, 19 nt, Artificial Sequence
  Description of Artificial Sequence: Synthetic oligonucleotide
  Antisense strand to SEQ ID NO: 1355696
uaaccuagcuauaauagcg

SEQ ID NO: 1355698 - RNA, 19 nt, Artificial Sequence
  Description of Artificial Sequence: Synthetic oligonucleotide
  Sense strand starting at position 2091 of SEQ ID NO: 1242542
cuauuauagcuagguuaaa

SEQ ID NO: 1355699 - RNA, 19 nt, Artificial Sequence
  Description of Artificial Sequence: Synthetic oligonucleotide
  Antisense strand to SEQ ID NO: 1355698
uuuaaccuagcuauaauag

SEQ ID NO: 1355700 - RNA, 19 nt, Artificial Sequence
  Description of Artificial Sequence: Synthetic oligonucleotide
  Sense strand starting at position 2223 of SEQ ID NO: 1242542
gaguaaggauuacuuuaua

SEQ ID NO: 1355701 - RNA, 19 nt, Artificial Sequence
  Description of Artificial Sequence: Synthetic oligonucleotide
  Antisense strand to SEQ ID NO: 1355700
uauaaaguaauccuuacuc

SEQ ID NO: 1355702 - RNA, 19 nt, Artificial Sequence
  Description of Artificial Sequence: Synthetic oligonucleotide
  Sense strand starting at position 2355 of SEQ ID NO: 1242542
guggaaugccuuuagaguc

SEQ ID NO: 1355703 - RNA, 19 nt, Artificial Sequence
  Description of Artificial Sequence: Synthetic oligonucleotide
  Antisense strand to SEQ ID NO: 1355702
gacucuaaaggcauuccac

SEQ ID NO: 1355704 - RNA, 19 nt, Artificial Sequence
  Description of Artificial Sequence: Synthetic oligonucleotide
  Sense strand starting at position 2515 of SEQ ID NO: 1242542
agguuaaucaaguguuaga

SEQ ID NO: 1355705 - RNA, 19 nt, Artificial Sequence
  Description of Artificial Sequence: Synthetic oligonucleotide
  Antisense strand to SEQ ID NO: 1355704
ucuaacacuugauuaaccu

SEQ ID NO: 1355706 - RNA, 19 nt, Artificial Sequence
  Description of Artificial Sequence: Synthetic oligonucleotide
  Sense strand starting at position 2529 of SEQ ID NO: 1242542
uuagaagccuugccuagaa

SEQ ID NO: 1355707 - RNA, 19 nt, Artificial Sequence
  Description of Artificial Sequence: Synthetic oligonucleotide
  Antisense strand to SEQ ID NO: 1355706
uucuaggcaaggcuucuaa

SEQ ID NO: 1355708 - RNA, 19 nt, Artificial Sequence
  Description of Artificial Sequence: Synthetic oligonucleotide
  Sense strand starting at position 2699 of SEQ ID NO: 1242542
ggcagucauaaugacaguu

SEQ ID NO: 1355709 - RNA, 19 nt, Artificial Sequence
  Description of Artificial Sequence: Synthetic oligonucleotide
  Antisense strand to SEQ ID NO: 1355708
aacugucauuaugacugcc

SEQ ID NO: 1355710 - RNA, 19 nt, Artificial Sequence
  Description of Artificial Sequence: Synthetic oligonucleotide
  Sense strand starting at position 3476 of SEQ ID NO: 1242542
gaaagauucuaggcuuuga

SEQ ID NO: 1355711 - RNA, 19 nt, Artificial Sequence
  Description of Artificial Sequence: Synthetic oligonucleotide
  Antisense strand to SEQ ID NO: 1355710
ucaaagccuagaaucuuuc

SEQ ID NO: 1355712 - RNA, 19 nt, Artificial Sequence
  Description of Artificial Sequence: Synthetic oligonucleotide
  Sense strand starting at position 3480 of SEQ ID NO: 1242542
gauucuaggcuuugauguu

SEQ ID NO: 1355713 - RNA, 19 nt, Artificial Sequence
  Description of Artificial Sequence: Synthetic oligonucleotide
  Antisense strand to SEQ ID NO: 1355712
aacaucaaagccuagaauc

SEQ ID NO: 1355714 - RNA, 19 nt, Artificial Sequence
  Description of Artificial Sequence: Synthetic oligonucleotide
  Sense strand starting at position 3584 of SEQ ID NO: 1242542
cuagaauacugagauaacu

SEQ ID NO: 1355715 - RNA, 19 nt, Artificial Sequence
  Description of Artificial Sequence: Synthetic oligonucleotide
  Antisense strand to SEQ ID NO: 1355714
aguuaucucaguauucuag

SEQ ID NO: 1355716 - RNA, 19 nt, Artificial Sequence
  Description of Artificial Sequence: Synthetic oligonucleotide
  Sense strand starting at position 3614 of SEQ ID NO: 1242542
auauguacacugggcuaua

SEQ ID NO: 1355717 - RNA, 19 nt, Artificial Sequence
  Description of Artificial Sequence: Synthetic oligonucleotide
  Antisense strand to SEQ ID NO: 1355716
uauagcccaguguacauau

SEQ ID NO: 1355718 - RNA, 19 nt, Artificial Sequence
  Description of Artificial Sequence: Synthetic oligonucleotide
  Sense strand starting at position 3643 of SEQ ID NO: 1242542
auauguacacugggcuaau

SEQ ID NO: 1355719 - RNA, 19 nt, Artificial Sequence
  Description of Artificial Sequence: Synthetic oligonucleotide
  Antisense strand to SEQ ID NO: 1355718
auuagcccaguguacauau

SEQ ID NO: 1355720 - RNA, 19 nt, Artificial Sequence
  Description of Artificial Sequence: Synthetic oligonucleotide
  Sense strand starting at position 3644 of SEQ ID NO: 1242542
uauguacacugggcuaaua

SEQ ID NO: 1355721 - RNA, 19 nt, Artificial Sequence
  Description of Artificial Sequence: Synthetic oligonucleotide
  Antisense strand to SEQ ID NO: 1355720
uauuagcccaguguacaua

SEQ ID NO: 1355722 - RNA, 19 nt, Artificial Sequence
  Description of Artificial Sequence: Synthetic oligonucleotide
  Sense strand starting at position 3655 of SEQ ID NO: 1242542
ggcuaauauguauauuggu

SEQ ID NO: 1355723 - RNA, 19 nt, Artificial Sequence
  Description of Artificial Sequence: Synthetic oligonucleotide
  Antisense strand to SEQ ID NO: 1355722
accaauauacauauuagcc

SEQ ID NO: 1355724 - RNA, 19 nt, Artificial Sequence
  Description of Artificial Sequence: Synthetic oligonucleotide
  Sense strand starting at position 3671 of SEQ ID NO: 1242542
ggucuaaauuucuauagua

SEQ ID NO: 1355725 - RNA, 19 nt, Artificial Sequence
  Description of Artificial Sequence: Synthetic oligonucleotide
  Antisense strand to SEQ ID NO: 1355724
uacuauagaaauuuagacc

SEQ ID NO: 1355726 - RNA, 19 nt, Artificial Sequence
  Description of Artificial Sequence: Synthetic oligonucleotide
  Sense strand starting at position 3843 of SEQ ID NO: 1242542
uuugcuaugcuguaagaga

SEQ ID NO: 1355727 - RNA, 19 nt, Artificial Sequence
  Description of Artificial Sequence: Synthetic oligonucleotide
  Antisense strand to SEQ ID NO: 1355726
ucucuuacagcauagcaaa

SEQ ID NO: 1355728 - RNA, 19 nt, Artificial Sequence
  Description of Artificial Sequence: Synthetic oligonucleotide
  Sense strand starting at position 3901 of SEQ ID NO: 1242542
guuucucuauaaucgacuu

SEQ ID NO: 1355729 - RNA, 19 nt, Artificial Sequence
  Description of Artificial Sequence: Synthetic oligonucleotide
  Antisense strand to SEQ ID NO: 1355728
aagucgauuauagagaaac

SEQ ID NO: 1355730 - RNA, 19 nt, Artificial Sequence
  Description of Artificial Sequence: Synthetic oligonucleotide
  Sense strand starting at position 38 of SEQ ID NO: 1242543
gagagaagucacugaaguu

SEQ ID NO: 1355731 - RNA, 19 nt, Artificial Sequence
  Description of Artificial Sequence: Synthetic oligonucleotide
  Antisense strand to SEQ ID NO: 1355730
aacuucagugacuucucuc

SEQ ID NO: 1355732 - RNA, 19 nt, Artificial Sequence
  Description of Artificial Sequence: Synthetic oligonucleotide
  Sense strand starting at position 116 of SEQ ID NO: 1242543
uaaagcaauuccucgguuu

SEQ ID NO: 1355733 - RNA, 19 nt, Artificial Sequence
  Description of Artificial Sequence: Synthetic oligonucleotide
  Antisense strand to SEQ ID NO: 1355732
aaaccgaggaauugcuuua

SEQ ID NO: 1355734 - RNA, 19 nt, Artificial Sequence
  Description of Artificial Sequence: Synthetic oligonucleotide
  Sense strand starting at position 119 of SEQ ID NO: 1242543
agcaauuccucgguuucca

SEQ ID NO: 1355735 - RNA, 19 nt, Artificial Sequence
  Description of Artificial Sequence: Synthetic oligonucleotide
  Antisense strand to SEQ ID NO: 1355734
uggaaaccgaggaauugcu

SEQ ID NO: 1355736 - RNA, 19 nt, Artificial Sequence
  Description of Artificial Sequence: Synthetic oligonucleotide
  Sense strand starting at position 127 of SEQ ID NO: 1242543
cucgguuuccaguaccuua

SEQ ID NO: 1355737 - RNA, 19 nt, Artificial Sequence
  Description of Artificial Sequence: Synthetic oligonucleotide
  Antisense strand to SEQ ID NO: 1355736
uaagguacuggaaaccgag

SEQ ID NO: 1355738 - RNA, 19 nt, Artificial Sequence
  Description of Artificial Sequence: Synthetic oligonucleotide
  Sense strand starting at position 229 of SEQ ID NO: 1242543
auagauaaagcccaguauu

SEQ ID NO: 1355739 - RNA, 19 nt, Artificial Sequence
  Description of Artificial Sequence: Synthetic oligonucleotide
  Antisense strand to SEQ ID NO: 1355738
aauacugggcuuuaucuau

SEQ ID NO: 1355740 - RNA, 19 nt, Artificial Sequence
  Description of Artificial Sequence: Synthetic oligonucleotide
  Sense strand starting at position 464 of SEQ ID NO: 1242543
cuugaugccaaccgugauu

SEQ ID NO: 1355741 - RNA, 19 nt, Artificial Sequence
  Description of Artificial Sequence: Synthetic oligonucleotide
  Antisense strand to SEQ ID NO: 1355740
aaucacgguuggcaucaag

SEQ ID NO: 1355742 - RNA, 19 nt, Artificial Sequence
  Description of Artificial Sequence: Synthetic oligonucleotide
  Sense strand starting at position 466 of SEQ ID NO: 1242543
ugaugccaaccgugauuau

SEQ ID NO: 1355743 - RNA, 19 nt, Artificial Sequence
  Description of Artificial Sequence: Synthetic oligonucleotide
  Antisense strand to SEQ ID NO: 1355742
auaaucacgguuggcauca

SEQ ID NO: 1355744 - RNA, 19 nt, Artificial Sequence
  Description of Artificial Sequence: Synthetic oligonucleotide
  Sense strand starting at position 615 of SEQ ID NO: 1242543
cuuccugcgugacacuaau

SEQ ID NO: 1355745 - RNA, 19 nt, Artificial Sequence
  Description of Artificial Sequence: Synthetic oligonucleotide
  Antisense strand to SEQ ID NO: 1355744
auuagugucacgcaggaag

SEQ ID NO: 1355746 - RNA, 19 nt, Artificial Sequence
  Description of Artificial Sequence: Synthetic oligonucleotide
  Sense strand starting at position 650 of SEQ ID NO: 1242543
ccaucaucuccuggucaga

SEQ ID NO: 1355747 - RNA, 19 nt, Artificial Sequence
  Description of Artificial Sequence: Synthetic oligonucleotide
  Antisense strand to SEQ ID NO: 1355746
ucugaccaggagaugaugg

SEQ ID NO: 1355748 - RNA, 19 nt, Artificial Sequence
  Description of Artificial Sequence: Synthetic oligonucleotide
  Sense strand starting at position 652 of SEQ ID NO: 1242543
aucaucuccuggucagaau

SEQ ID NO: 1355749 - RNA, 19 nt, Artificial Sequence
  Description of Artificial Sequence: Synthetic oligonucleotide
  Antisense strand to SEQ ID NO: 1355748
auucugaccaggagaugau

SEQ ID NO: 1355750 - RNA, 19 nt, Artificial Sequence
  Description of Artificial Sequence: Synthetic oligonucleotide
  Sense strand starting at position 971 of SEQ ID NO: 1242543
gcgcgcuuuacaguuuaua

SEQ ID NO: 1355751 - RNA, 19 nt, Artificial Sequence
  Description of Artificial Sequence: Synthetic oligonucleotide
  Antisense strand to SEQ ID NO: 1355750
uauaaacuguaaagcgcgc

SEQ ID NO: 1355752 - RNA, 19 nt, Artificial Sequence
  Description of Artificial Sequence: Synthetic oligonucleotide
  Sense strand starting at position 1034 of SEQ ID NO: 1242543
cugaaagcgagagaauguu

SEQ ID NO: 1355753 - RNA, 19 nt, Artificial Sequence
  Description of Artificial Sequence: Synthetic oligonucleotide
  Antisense strand to SEQ ID NO: 1355752
aacauucucucgcuuucag

SEQ ID NO: 1355754 - RNA, 19 nt, Artificial Sequence
  Description of Artificial Sequence: Synthetic oligonucleotide
  Sense strand starting at position 2035 of SEQ ID NO: 1242543
cugccuugacugugacaag

SEQ ID NO: 1355755 - RNA, 19 nt, Artificial Sequence
  Description of Artificial Sequence: Synthetic oligonucleotide
  Antisense strand to SEQ ID NO: 1355754
cuugucacagucaaggcag

SEQ ID NO: 1355756 - RNA, 19 nt, Artificial Sequence
  Description of Artificial Sequence: Synthetic oligonucleotide
  Sense strand starting at position 2036 of SEQ ID NO: 1242543
ugccuugacugugacaaga

SEQ ID NO: 1355757 - RNA, 19 nt, Artificial Sequence
  Description of Artificial Sequence: Synthetic oligonucleotide
  Antisense strand to SEQ ID NO: 1355756
ucuugucacagucaaggca

SEQ ID NO: 1355758 - RNA, 19 nt, Artificial Sequence
  Description of Artificial Sequence: Synthetic oligonucleotide
  Sense strand starting at position 2075 of SEQ ID NO: 1242543
ucugcaggcugauuuaauu

SEQ ID NO: 1355759 - RNA, 19 nt, Artificial Sequence
  Description of Artificial Sequence: Synthetic oligonucleotide
  Antisense strand to SEQ ID NO: 1355758
aauuaaaucagccugcaga

SEQ ID NO: 1355760 - RNA, 19 nt, Artificial Sequence
  Description of Artificial Sequence: Synthetic oligonucleotide
  Sense strand starting at position 2256 of SEQ ID NO: 1242543
gugcuaguuagugggcuaa

SEQ ID NO: 1355761 - RNA, 19 nt, Artificial Sequence
  Description of Artificial Sequence: Synthetic oligonucleotide
  Antisense strand to SEQ ID NO: 1355760
uuagcccacuaacuagcac

SEQ ID NO: 1355762 - RNA, 19 nt, Artificial Sequence
  Description of Artificial Sequence: Synthetic oligonucleotide
  Sense strand starting at position 2277 of SEQ ID NO: 1242543
gcaggaggaucagaagguu

SEQ ID NO: 1355763 - RNA, 19 nt, Artificial Sequence
  Description of Artificial Sequence: Synthetic oligonucleotide
  Antisense strand to SEQ ID NO: 1355762
aaccuucugauccuccugc

SEQ ID NO: 1355764 - RNA, 19 nt, Artificial Sequence
  Description of Artificial Sequence: Synthetic oligonucleotide
  Sense strand starting at position 2292 of SEQ ID NO: 1242543
gguuaaggcagaugguaua

SEQ ID NO: 1355765 - RNA, 19 nt, Artificial Sequence
  Description of Artificial Sequence: Synthetic oligonucleotide
  Antisense strand to SEQ ID NO: 1355764
uauaccaucugccuuaacc

SEQ ID NO: 1355766 - RNA, 19 nt, Artificial Sequence
  Description of Artificial Sequence: Synthetic oligonucleotide
  Sense strand starting at position 2305 of SEQ ID NO: 1242543
gguauagagguccaugcua

SEQ ID NO: 1355767 - RNA, 19 nt, Artificial Sequence
  Description of Artificial Sequence: Synthetic oligonucleotide
  Antisense strand to SEQ ID NO: 1355766
uagcauggaccucuauacc

SEQ ID NO: 1355768 - RNA, 19 nt, Artificial Sequence
  Description of Artificial Sequence: Synthetic oligonucleotide
  Sense strand starting at position 2320 of SEQ ID NO: 1242543
gcuaccuuagguggugaua

SEQ ID NO: 1355769 - RNA, 19 nt, Artificial Sequence
  Description of Artificial Sequence: Synthetic oligonucleotide
  Antisense strand to SEQ ID NO: 1355768
uaucaccaccuaagguagc

SEQ ID NO: 1355770 - RNA, 19 nt, Artificial Sequence
  Description of Artificial Sequence: Synthetic oligonucleotide
  Sense strand starting at position 2322 of SEQ ID NO: 1242543
uaccuuagguggugauaaa

SEQ ID NO: 1355771 - RNA, 19 nt, Artificial Sequence
  Description of Artificial Sequence: Synthetic oligonucleotide
  Antisense strand to SEQ ID NO: 1355770
uuuaucaccaccuaaggua

SEQ ID NO: 1355772 - RNA, 19 nt, Artificial Sequence
  Description of Artificial Sequence: Synthetic oligonucleotide
  Sense strand starting at position 2337 of SEQ ID NO: 1242543
uaaagaugccagggaguga

SEQ ID NO: 1355773 - RNA, 19 nt, Artificial Sequence
  Description of Artificial Sequence: Synthetic oligonucleotide
  Antisense strand to SEQ ID NO: 1355772
ucacucccuggcaucuuua

SEQ ID NO: 1355774 - RNA, 19 nt, Artificial Sequence
  Description of Artificial Sequence: Synthetic oligonucleotide
  Sense strand starting at position 2352 of SEQ ID NO: 1242543
gugaaacacugaucaagcu

SEQ ID NO: 1355775 - RNA, 19 nt, Artificial Sequence
  Description of Artificial Sequence: Synthetic oligonucleotide
  Antisense strand to SEQ ID NO: 1355774
agcuugaucaguguuucac

SEQ ID NO: 1355776 - RNA, 19 nt, Artificial Sequence
  Description of Artificial Sequence: Synthetic oligonucleotide
  Sense strand starting at position 2430 of SEQ ID NO: 1242543
aggagaggcguucaucaaa

SEQ ID NO: 1355777 - RNA, 19 nt, Artificial Sequence
  Description of Artificial Sequence: Synthetic oligonucleotide
  Antisense strand to SEQ ID NO: 1355776
uuugaugaacgccucuccu

SEQ ID NO: 1355778 - RNA, 19 nt, Artificial Sequence
  Description of Artificial Sequence: Synthetic oligonucleotide
  Sense strand starting at position 2433 of SEQ ID NO: 1242543
agaggcguucaucaaauga

SEQ ID NO: 1355779 - RNA, 19 nt, Artificial Sequence
  Description of Artificial Sequence: Synthetic oligonucleotide
  Antisense strand to SEQ ID NO: 1355778
ucauuugaugaacgccucu

SEQ ID NO: 1355780 - RNA, 19 nt, Artificial Sequence
  Description of Artificial Sequence: Synthetic oligonucleotide
  Sense strand starting at position 2617 of SEQ ID NO: 1242543
cggaucauguggucagaag

SEQ ID NO: 1355781 - RNA, 19 nt, Artificial Sequence
  Description of Artificial Sequence: Synthetic oligonucleotide
  Antisense strand to SEQ ID NO: 1355780
cuucugaccacaugauccg

SEQ ID NO: 1355782 - RNA, 19 nt, Artificial Sequence
  Description of Artificial Sequence: Synthetic oligonucleotide
  Sense strand starting at position 2618 of SEQ ID NO: 1242543
ggaucauguggucagaagu

SEQ ID NO: 1355783 - RNA, 19 nt, Artificial Sequence
  Description of Artificial Sequence: Synthetic oligonucleotide
  Antisense strand to SEQ ID NO: 1355782
acuucugaccacaugaucc

SEQ ID NO: 1355784 - RNA, 19 nt, Artificial Sequence
  Description of Artificial Sequence: Synthetic oligonucleotide
  Sense strand starting at position 2874 of SEQ ID NO: 1242543
ccacuaaugucccaguacu

SEQ ID NO: 1355785 - RNA, 19 nt, Artificial Sequence
  Description of Artificial Sequence: Synthetic oligonucleotide
  Antisense strand to SEQ ID NO: 1355784
aguacugggacauuagugg

SEQ ID NO: 1355786 - RNA, 19 nt, Artificial Sequence
  Description of Artificial Sequence: Synthetic oligonucleotide
  Sense strand starting at position 2979 of SEQ ID NO: 1242543
gagaaaugcugucaaccug

SEQ ID NO: 1355787 - RNA, 19 nt, Artificial Sequence
  Description of Artificial Sequence: Synthetic oligonucleotide
  Antisense strand to SEQ ID NO: 1355786
cagguugacagcauuucuc

SEQ ID NO: 1355788 - RNA, 19 nt, Artificial Sequence
  Description of Artificial Sequence: Synthetic oligonucleotide
  Sense strand starting at position 2986 of SEQ ID NO: 1242543
gcugucaaccugcacaaau

SEQ ID NO: 1355789 - RNA, 19 nt, Artificial Sequence
  Description of Artificial Sequence: Synthetic oligonucleotide
  Antisense strand to SEQ ID NO: 1355788
auuugugcagguugacagc

SEQ ID NO: 1355790 - RNA, 19 nt, Artificial Sequence
  Description of Artificial Sequence: Synthetic oligonucleotide
  Sense strand starting at position 3042 of SEQ ID NO: 1242543
augggaugucuaugaagca

SEQ ID NO: 1355791 - RNA, 19 nt, Artificial Sequence
  Description of Artificial Sequence: Synthetic oligonucleotide
  Antisense strand to SEQ ID NO: 1355790
ugcuucauagacaucccau

SEQ ID NO: 1355792 - RNA, 19 nt, Artificial Sequence
  Description of Artificial Sequence: Synthetic oligonucleotide
  Sense strand starting at position 3043 of SEQ ID NO: 1242543
ugggaugucuaugaagcau

SEQ ID NO: 1355793 - RNA, 19 nt, Artificial Sequence
  Description of Artificial Sequence: Synthetic oligonucleotide
  Antisense strand to SEQ ID NO: 1355792
augcuucauagacauccca

SEQ ID NO: 1355794 - RNA, 19 nt, Artificial Sequence
  Description of Artificial Sequence: Synthetic oligonucleotide
  Sense strand starting at position 3123 of SEQ ID NO: 1242543
cuguauaaugcuuacuaug

SEQ ID NO: 1355795 - RNA, 19 nt, Artificial Sequence
  Description of Artificial Sequence: Synthetic oligonucleotide
  Antisense strand to SEQ ID NO: 1355794
cauaguaagcauuauacag

SEQ ID NO: 1355796 - RNA, 19 nt, Artificial Sequence
  Description of Artificial Sequence: Synthetic oligonucleotide
  Sense strand starting at position 3125 of SEQ ID NO: 1242543
guauaaugcuuacuauguc

SEQ ID NO: 1355797 - RNA, 19 nt, Artificial Sequence
  Description of Artificial Sequence: Synthetic oligonucleotide
  Antisense strand to SEQ ID NO: 1355796
gacauaguaagcauuauac

SEQ ID NO: 1355798 - RNA, 19 nt, Artificial Sequence
  Description of Artificial Sequence: Synthetic oligonucleotide
  Sense strand starting at position 3133 of SEQ ID NO: 1242543
cuuacuauguccuagacag

SEQ ID NO: 1355799 - RNA, 19 nt, Artificial Sequence
  Description of Artificial Sequence: Synthetic oligonucleotide
  Antisense strand to SEQ ID NO: 1355798
cugucuaggacauaguaag

SEQ ID NO: 1355800 - RNA, 19 nt, Artificial Sequence
  Description of Artificial Sequence: Synthetic oligonucleotide
  Sense strand starting at position 3163 of SEQ ID NO: 1242543
ucuggauaguauucuaagu

SEQ ID NO: 1355801 - RNA, 19 nt, Artificial Sequence
  Description of Artificial Sequence: Synthetic oligonucleotide
  Antisense strand to SEQ ID NO: 1355800
acuuagaauacuauccaga

SEQ ID NO: 1355802 - RNA, 19 nt, Artificial Sequence
  Description of Artificial Sequence: Synthetic oligonucleotide
  Sense strand starting at position 3168 of SEQ ID NO: 1242543
auaguauucuaagugcucu

SEQ ID NO: 1355803 - RNA, 19 nt, Artificial Sequence
  Description of Artificial Sequence: Synthetic oligonucleotide
  Antisense strand to SEQ ID NO: 1355802
agagcacuuagaauacuau

SEQ ID NO: 1355804 - RNA, 19 nt, Artificial Sequence
  Description of Artificial Sequence: Synthetic oligonucleotide
  Sense strand starting at position 3179 of SEQ ID NO: 1242543
agugcucuauguuuacaaa

SEQ ID NO: 1355805 - RNA, 19 nt, Artificial Sequence
  Description of Artificial Sequence: Synthetic oligonucleotide
  Antisense strand to SEQ ID NO: 1355804
uuuguaaacauagagcacu

SEQ ID NO: 1355806 - RNA, 19 nt, Artificial Sequence
  Description of Artificial Sequence: Synthetic oligonucleotide
  Sense strand starting at position 3180 of SEQ ID NO: 1242543
gugcucuauguuuacaaau

SEQ ID NO: 1355807 - RNA, 19 nt, Artificial Sequence
  Description of Artificial Sequence: Synthetic oligonucleotide
  Antisense strand to SEQ ID NO: 1355806
auuuguaaacauagagcac

SEQ ID NO: 1355808 - RNA, 19 nt, Artificial Sequence
  Description of Artificial Sequence: Synthetic oligonucleotide
  Sense strand starting at position 3341 of SEQ ID NO: 1242543
gccugagccucuccaagua

SEQ ID NO: 1355809 - RNA, 19 nt, Artificial Sequence
  Description of Artificial Sequence: Synthetic oligonucleotide
  Antisense strand to SEQ ID NO: 1355808
uacuuggagaggcucaggc

SEQ ID NO: 1355810 - RNA, 19 nt, Artificial Sequence
  Description of Artificial Sequence: Synthetic oligonucleotide
  Sense strand starting at position 413 of SEQ ID NO: 1242544
ugccuaauaccugaaugua

SEQ ID NO: 1355811 - RNA, 19 nt, Artificial Sequence
  Description of Artificial Sequence: Synthetic oligonucleotide
  Antisense strand to SEQ ID NO: 1355810
uacauucagguauuaggca

SEQ ID NO: 1355812 - RNA, 19 nt, Artificial Sequence
  Description of Artificial Sequence: Synthetic oligonucleotide
  Sense strand starting at position 428 of SEQ ID NO: 1242544
uguauaaauguagguauga

SEQ ID NO: 1355813 - RNA, 19 nt, Artificial Sequence
  Description of Artificial Sequence: Synthetic oligonucleotide
  Antisense strand to SEQ ID NO: 1355812
ucauaccuacauuuauaca

SEQ ID NO: 1355814 - RNA, 19 nt, Artificial Sequence
  Description of Artificial Sequence: Synthetic oligonucleotide
  Sense strand starting at position 429 of SEQ ID NO: 1242544
guauaaauguagguaugaa

SEQ ID NO: 1355815 - RNA, 19 nt, Artificial Sequence
  Description of Artificial Sequence: Synthetic oligonucleotide
  Antisense strand to SEQ ID NO: 1355814
uucauaccuacauuuauac

SEQ ID NO: 1355816 - RNA, 19 nt, Artificial Sequence
  Description of Artificial Sequence: Synthetic oligonucleotide
  Sense strand starting at position 441 of SEQ ID NO: 1242544
guaugaaauuaugcaguac

SEQ ID NO: 1355817 - RNA, 19 nt, Artificial Sequence
  Description of Artificial Sequence: Synthetic oligonucleotide
  Antisense strand to SEQ ID NO: 1355816
guacugcauaauuucauac

SEQ ID NO: 1355818 - RNA, 19 nt, Artificial Sequence
  Description of Artificial Sequence: Synthetic oligonucleotide
  Sense strand starting at position 516 of SEQ ID NO: 1242544
ucaagaaagcacuguggua

SEQ ID NO: 1355819 - RNA, 19 nt, Artificial Sequence
  Description of Artificial Sequence: Synthetic oligonucleotide
  Antisense strand to SEQ ID NO: 1355818
uaccacagugcuuucuuga

SEQ ID NO: 1355820 - RNA, 19 nt, Artificial Sequence
  Description of Artificial Sequence: Synthetic oligonucleotide
  Sense strand starting at position 635 of SEQ ID NO: 1242544
gcaguaagacuauacuaua

SEQ ID NO: 1355821 - RNA, 19 nt, Artificial Sequence
  Description of Artificial Sequence: Synthetic oligonucleotide
  Antisense strand to SEQ ID NO: 1355820
uauaguauagucuuacugc

SEQ ID NO: 1355822 - RNA, 19 nt, Artificial Sequence
  Description of Artificial Sequence: Synthetic oligonucleotide
  Sense strand starting at position 677 of SEQ ID NO: 1242544
uggcgauacgacuauacua

SEQ ID NO: 1355823 - RNA, 19 nt, Artificial Sequence
  Description of Artificial Sequence: Synthetic oligonucleotide
  Antisense strand to SEQ ID NO: 1355822
uaguauagucguaucgcca

SEQ ID NO: 1355824 - RNA, 19 nt, Artificial Sequence
  Description of Artificial Sequence: Synthetic oligonucleotide
  Sense strand starting at position 679 of SEQ ID NO: 1242544
gcgauacgacuauacuaua

SEQ ID NO: 1355825 - RNA, 19 nt, Artificial Sequence
  Description of Artificial Sequence: Synthetic oligonucleotide
  Antisense strand to SEQ ID NO: 1355824
uauaguauagucguaucgc

SEQ ID NO: 1355826 - RNA, 19 nt, Artificial Sequence
  Description of Artificial Sequence: Synthetic oligonucleotide
  Sense strand starting at position 1243 of SEQ ID NO: 1242544
auugcccuuugauuaguaa

SEQ ID NO: 1355827 - RNA, 19 nt, Artificial Sequence
  Description of Artificial Sequence: Synthetic oligonucleotide
  Antisense strand to SEQ ID NO: 1355826
uuacuaaucaaagggcaau

SEQ ID NO: 1355828 - RNA, 19 nt, Artificial Sequence
  Description of Artificial Sequence: Synthetic oligonucleotide
  Sense strand starting at position 1246 of SEQ ID NO: 1242544
gcccuuugauuaguaagac

SEQ ID NO: 1355829 - RNA, 19 nt, Artificial Sequence
  Description of Artificial Sequence: Synthetic oligonucleotide
  Antisense strand to SEQ ID NO: 1355828
gucuuacuaaucaaagggc

SEQ ID NO: 1355830 - RNA, 19 nt, Artificial Sequence
  Description of Artificial Sequence: Synthetic oligonucleotide
  Sense strand starting at position 1413 of SEQ ID NO: 1242544
uuauuaacugaaugaguuc

SEQ ID NO: 1355831 - RNA, 19 nt, Artificial Sequence
  Description of Artificial Sequence: Synthetic oligonucleotide
  Antisense strand to SEQ ID NO: 1355830
gaacucauucaguuaauaa

SEQ ID NO: 1355832 - RNA, 19 nt, Artificial Sequence
  Description of Artificial Sequence: Synthetic oligonucleotide
  Sense strand starting at position 1420 of SEQ ID NO: 1242544
cugaaugaguuccuuguca

SEQ ID NO: 1355833 - RNA, 19 nt, Artificial Sequence
  Description of Artificial Sequence: Synthetic oligonucleotide
  Antisense strand to SEQ ID NO: 1355832
ugacaaggaacucauucag

SEQ ID NO: 1355834 - RNA, 19 nt, Artificial Sequence
  Description of Artificial Sequence: Synthetic oligonucleotide
  Sense strand starting at position 1506 of SEQ ID NO: 1242544
ugugcaacuggccagaaau

SEQ ID NO: 1355835 - RNA, 19 nt, Artificial Sequence
  Description of Artificial Sequence: Synthetic oligonucleotide
  Antisense strand to SEQ ID NO: 1355834
auuucuggccaguugcaca

SEQ ID NO: 1355836 - RNA, 19 nt, Artificial Sequence
  Description of Artificial Sequence: Synthetic oligonucleotide
  Sense strand starting at position 1569 of SEQ ID NO: 1242544
cucggcacucaugacuaau

SEQ ID NO: 1355837 - RNA, 19 nt, Artificial Sequence
  Description of Artificial Sequence: Synthetic oligonucleotide
  Antisense strand to SEQ ID NO: 1355836
auuagucaugagugccgag

SEQ ID NO: 1355838 - RNA, 19 nt, Artificial Sequence
  Description of Artificial Sequence: Synthetic oligonucleotide
  Sense strand starting at position 1580 of SEQ ID NO: 1242544
ugacuaaugucccuaggga

SEQ ID NO: 1355839 - RNA, 19 nt, Artificial Sequence
  Description of Artificial Sequence: Synthetic oligonucleotide
  Antisense strand to SEQ ID NO: 1355838
ucccuagggacauuaguca

SEQ ID NO: 1355840 - RNA, 19 nt, Artificial Sequence
  Description of Artificial Sequence: Synthetic oligonucleotide
  Sense strand starting at position 1659 of SEQ ID NO: 1242544
uauuguuuccucugaagga

SEQ ID NO: 1355841 - RNA, 19 nt, Artificial Sequence
  Description of Artificial Sequence: Synthetic oligonucleotide
  Antisense strand to SEQ ID NO: 1355840
uccuucagaggaaacaaua

SEQ ID NO: 1355842 - RNA, 19 nt, Artificial Sequence
  Description of Artificial Sequence: Synthetic oligonucleotide
  Sense strand starting at position 1683 of SEQ ID NO: 1242544
cacacuuuggcacagugaa

SEQ ID NO: 1355843 - RNA, 19 nt, Artificial Sequence
  Description of Artificial Sequence: Synthetic oligonucleotide
  Antisense strand to SEQ ID NO: 1355842
uucacugugccaaagugug

SEQ ID NO: 1355844 - RNA, 19 nt, Artificial Sequence
  Description of Artificial Sequence: Synthetic oligonucleotide
  Sense strand starting at position 1818 of SEQ ID NO: 1242544
agauaaaugucguuuagga

SEQ ID NO: 1355845 - RNA, 19 nt, Artificial Sequence
  Description of Artificial Sequence: Synthetic oligonucleotide
  Antisense strand to SEQ ID NO: 1355844
uccuaaacgacauuuaucu

SEQ ID NO: 1355846 - RNA, 19 nt, Artificial Sequence
  Description of Artificial Sequence: Synthetic oligonucleotide
  Sense strand starting at position 1825 of SEQ ID NO: 1242544
ugucguuuaggaggagaaa

SEQ ID NO: 1355847 - RNA, 19 nt, Artificial Sequence
  Description of Artificial Sequence: Synthetic oligonucleotide
  Antisense strand to SEQ ID NO: 1355846
uuucuccuccuaaacgaca

SEQ ID NO: 1355848 - RNA, 19 nt, Artificial Sequence
  Description of Artificial Sequence: Synthetic oligonucleotide
  Sense strand starting at position 1826 of SEQ ID NO: 1242544
gucguuuaggaggagaaau

SEQ ID NO: 1355849 - RNA, 19 nt, Artificial Sequence
  Description of Artificial Sequence: Synthetic oligonucleotide
  Antisense strand to SEQ ID NO: 1355848
auuucuccuccuaaacgac

SEQ ID NO: 1355850 - RNA, 19 nt, Artificial Sequence
  Description of Artificial Sequence: Synthetic oligonucleotide
  Sense strand starting at position 1848 of SEQ ID NO: 1242544
cuugaauugcuguacuuaa

SEQ ID NO: 1355851 - RNA, 19 nt, Artificial Sequence
  Description of Artificial Sequence: Synthetic oligonucleotide
  Antisense strand to SEQ ID NO: 1355850
uuaaguacagcaauucaag

SEQ ID NO: 1355852 - RNA, 19 nt, Artificial Sequence
  Description of Artificial Sequence: Synthetic oligonucleotide
  Sense strand starting at position 1975 of SEQ ID NO: 1242544
ggugacagcgcuuacauuu

SEQ ID NO: 1355853 - RNA, 19 nt, Artificial Sequence
  Description of Artificial Sequence: Synthetic oligonucleotide
  Antisense strand to SEQ ID NO: 1355852
aaauguaagcgcugucacc

SEQ ID NO: 1355854 - RNA, 19 nt, Artificial Sequence
  Description of Artificial Sequence: Synthetic oligonucleotide
  Sense strand starting at position 1995 of SEQ ID NO: 1242544
aucuuuagucuagagcuuu

SEQ ID NO: 1355855 - RNA, 19 nt, Artificial Sequence
  Description of Artificial Sequence: Synthetic oligonucleotide
  Antisense strand to SEQ ID NO: 1355854
aaagcucuagacuaaagau

SEQ ID NO: 1355856 - RNA, 19 nt, Artificial Sequence
  Description of Artificial Sequence: Synthetic oligonucleotide
  Sense strand starting at position 2062 of SEQ ID NO: 1242544
aucccaagucgguaacuaa

SEQ ID NO: 1355857 - RNA, 19 nt, Artificial Sequence
  Description of Artificial Sequence: Synthetic oligonucleotide
  Antisense strand to SEQ ID NO: 1355856
uuaguuaccgacuugggau

SEQ ID NO: 1355858 - RNA, 19 nt, Artificial Sequence
  Description of Artificial Sequence: Synthetic oligonucleotide
  Sense strand starting at position 2126 of SEQ ID NO: 1242544
ccaggaguaguccaggcaa

SEQ ID NO: 1355859 - RNA, 19 nt, Artificial Sequence
  Description of Artificial Sequence: Synthetic oligonucleotide
  Antisense strand to SEQ ID NO: 1355858
uugccuggacuacuccugg

SEQ ID NO: 1355860 - RNA, 19 nt, Artificial Sequence
  Description of Artificial Sequence: Synthetic oligonucleotide
  Sense strand starting at position 2128 of SEQ ID NO: 1242544
aggaguaguccaggcaaac

SEQ ID NO: 1355861 - RNA, 19 nt, Artificial Sequence
  Description of Artificial Sequence: Synthetic oligonucleotide
  Antisense strand to SEQ ID NO: 1355860
guuugccuggacuacuccu

SEQ ID NO: 1355862 - RNA, 19 nt, Artificial Sequence
  Description of Artificial Sequence: Synthetic oligonucleotide
  Sense strand starting at position 2156 of SEQ ID NO: 1242544
cuggaugauacaugugauc

SEQ ID NO: 1355863 - RNA, 19 nt, Artificial Sequence
  Description of Artificial Sequence: Synthetic oligonucleotide
  Antisense strand to SEQ ID NO: 1355862
gaucacauguaucauccag

SEQ ID NO: 1355864 - RNA, 19 nt, Artificial Sequence
  Description of Artificial Sequence: Synthetic oligonucleotide
  Sense strand starting at position 2158 of SEQ ID NO: 1242544
ggaugauacaugugaucua

SEQ ID NO: 1355865 - RNA, 19 nt, Artificial Sequence
  Description of Artificial Sequence: Synthetic oligonucleotide
  Antisense strand to SEQ ID NO: 1355864
uagaucacauguaucaucc

SEQ ID NO: 1355866 - RNA, 19 nt, Artificial Sequence
  Description of Artificial Sequence: Synthetic oligonucleotide
  Sense strand starting at position 2161 of SEQ ID NO: 1242544
ugauacaugugaucuacau

SEQ ID NO: 1355867 - RNA, 19 nt, Artificial Sequence
  Description of Artificial Sequence: Synthetic oligonucleotide
  Antisense strand to SEQ ID NO: 1355866
auguagaucacauguauca

SEQ ID NO: 1355868 - RNA, 19 nt, Artificial Sequence
  Description of Artificial Sequence: Synthetic oligonucleotide
  Sense strand starting at position 2165 of SEQ ID NO: 1242544
acaugugaucuacauucug

SEQ ID NO: 1355869 - RNA, 19 nt, Artificial Sequence
  Description of Artificial Sequence: Synthetic oligonucleotide
  Antisense strand to SEQ ID NO: 1355868
cagaauguagaucacaugu

SEQ ID NO: 1355870 - RNA, 19 nt, Artificial Sequence
  Description of Artificial Sequence: Synthetic oligonucleotide
  Sense strand starting at position 2315 of SEQ ID NO: 1242544
uaguuaaacuaggcagacu

SEQ ID NO: 1355871 - RNA, 19 nt, Artificial Sequence
  Description of Artificial Sequence: Synthetic oligonucleotide
  Antisense strand to SEQ ID NO: 1355870
agucugccuaguuuaacua

SEQ ID NO: 1355872 - RNA, 19 nt, Artificial Sequence
  Description of Artificial Sequence: Synthetic oligonucleotide
  Sense strand starting at position 2425 of SEQ ID NO: 1242544
gcuguagcagaucaguaau

SEQ ID NO: 1355873 - RNA, 19 nt, Artificial Sequence
  Description of Artificial Sequence: Synthetic oligonucleotide
  Antisense strand to SEQ ID NO: 1355872
auuacugaucugcuacagc

SEQ ID NO: 1355874 - RNA, 19 nt, Artificial Sequence
  Description of Artificial Sequence: Synthetic oligonucleotide
  Sense strand starting at position 2494 of SEQ ID NO: 1242544
gcagucauuuaugagaaac

SEQ ID NO: 1355875 - RNA, 19 nt, Artificial Sequence
  Description of Artificial Sequence: Synthetic oligonucleotide
  Antisense strand to SEQ ID NO: 1355874
guuucucauaaaugacugc

SEQ ID NO: 1355876 - RNA, 19 nt, Artificial Sequence
  Description of Artificial Sequence: Synthetic oligonucleotide
  Sense strand starting at position 2496 of SEQ ID NO: 1242544
agucauuuaugagaaacau

SEQ ID NO: 1355877 - RNA, 19 nt, Artificial Sequence
  Description of Artificial Sequence: Synthetic oligonucleotide
  Antisense strand to SEQ ID NO: 1355876
auguuucucauaaaugacu

SEQ ID NO: 1355878 - RNA, 19 nt, Artificial Sequence
  Description of Artificial Sequence: Synthetic oligonucleotide
  Sense strand starting at position 2564 of SEQ ID NO: 1242544
ggcuuaacucuguaucaug

SEQ ID NO: 1355879 - RNA, 19 nt, Artificial Sequence
  Description of Artificial Sequence: Synthetic oligonucleotide
  Antisense strand to SEQ ID NO: 1355878
caugauacagaguuaagcc

SEQ ID NO: 1355880 - RNA, 19 nt, Artificial Sequence
  Description of Artificial Sequence: Synthetic oligonucleotide
  Sense strand starting at position 2666 of SEQ ID NO: 1242544
cgucuuuguccagacagaa

SEQ ID NO: 1355881 - RNA, 19 nt, Artificial Sequence
  Description of Artificial Sequence: Synthetic oligonucleotide
  Antisense strand to SEQ ID NO: 1355880
uucugucuggacaaagacg

SEQ ID NO: 1355882 - RNA, 19 nt, Artificial Sequence
  Description of Artificial Sequence: Synthetic oligonucleotide
  Sense strand starting at position 2812 of SEQ ID NO: 1242544
uguuacagaucaccugaau

SEQ ID NO: 1355883 - RNA, 19 nt, Artificial Sequence
  Description of Artificial Sequence: Synthetic oligonucleotide
  Antisense strand to SEQ ID NO: 1355882
auucaggugaucuguaaca

SEQ ID NO: 1355884 - RNA, 19 nt, Artificial Sequence
  Description of Artificial Sequence: Synthetic oligonucleotide
  Sense strand starting at position 3276 of SEQ ID NO: 1242544
aguaaauacuuagcauaga

SEQ ID NO: 1355885 - RNA, 19 nt, Artificial Sequence
  Description of Artificial Sequence: Synthetic oligonucleotide
  Antisense strand to SEQ ID NO: 1355884
ucuaugcuaaguauuuacu

SEQ ID NO: 1355886 - RNA, 19 nt, Artificial Sequence
  Description of Artificial Sequence: Synthetic oligonucleotide
  Sense strand starting at position 3298 of SEQ ID NO: 1242544
ucuuguuuagggugacaaa

SEQ ID NO: 1355887 - RNA, 19 nt, Artificial Sequence
  Description of Artificial Sequence: Synthetic oligonucleotide
  Antisense strand to SEQ ID NO: 1355886
uuugucacccuaaacaaga

SEQ ID NO: 1355888 - RNA, 19 nt, Artificial Sequence
  Description of Artificial Sequence: Synthetic oligonucleotide
  Sense strand starting at position 3952 of SEQ ID NO: 1242544
uccaguuuaccagggauac

SEQ ID NO: 1355889 - RNA, 19 nt, Artificial Sequence
  Description of Artificial Sequence: Synthetic oligonucleotide
  Antisense strand to SEQ ID NO: 1355888
guaucccugguaaacugga

SEQ ID NO: 1355890 - RNA, 19 nt, Artificial Sequence
  Description of Artificial Sequence: Synthetic oligonucleotide
  Sense strand starting at position 359 of SEQ ID NO: 1242545
aagaguuaacucuaggcau

SEQ ID NO: 1355891 - RNA, 19 nt, Artificial Sequence
  Description of Artificial Sequence: Synthetic oligonucleotide
  Antisense strand to SEQ ID NO: 1355890
augccuagaguuaacucuu

SEQ ID NO: 1355892 - RNA, 19 nt, Artificial Sequence
  Description of Artificial Sequence: Synthetic oligonucleotide
  Sense strand starting at position 381 of SEQ ID NO: 1242545
gcgguauuggcaaaugugu

SEQ ID NO: 1355893 - RNA, 19 nt, Artificial Sequence
  Description of Artificial Sequence: Synthetic oligonucleotide
  Antisense strand to SEQ ID NO: 1355892
acacauuugccaauaccgc

SEQ ID NO: 1355894 - RNA, 19 nt, Artificial Sequence
  Description of Artificial Sequence: Synthetic oligonucleotide
  Sense strand starting at position 387 of SEQ ID NO: 1242545
uuggcaaauguguaguaga

SEQ ID NO: 1355895 - RNA, 19 nt, Artificial Sequence
  Description of Artificial Sequence: Synthetic oligonucleotide
  Antisense strand to SEQ ID NO: 1355894
ucuacuacacauuugccaa

SEQ ID NO: 1355896 - RNA, 19 nt, Artificial Sequence
  Description of Artificial Sequence: Synthetic oligonucleotide
  Sense strand starting at position 392 of SEQ ID NO: 1242545
aaauguguaguagauacua

SEQ ID NO: 1355897 - RNA, 19 nt, Artificial Sequence
  Description of Artificial Sequence: Synthetic oligonucleotide
  Antisense strand to SEQ ID NO: 1355896
uaguaucuacuacacauuu

SEQ ID NO: 1355898 - RNA, 19 nt, Artificial Sequence
  Description of Artificial Sequence: Synthetic oligonucleotide
  Sense strand starting at position 394 of SEQ ID NO: 1242545
auguguaguagauacuaaa

SEQ ID NO: 1355899 - RNA, 19 nt, Artificial Sequence
  Description of Artificial Sequence: Synthetic oligonucleotide
  Antisense strand to SEQ ID NO: 1355898
uuuaguaucuacuacacau

SEQ ID NO: 1355900 - RNA, 19 nt, Artificial Sequence
  Description of Artificial Sequence: Synthetic oligonucleotide
  Sense strand starting at position 1046 of SEQ ID NO: 1242545
gaaguuauuugugcuuuga

SEQ ID NO: 1355901 - RNA, 19 nt, Artificial Sequence
  Description of Artificial Sequence: Synthetic oligonucleotide
  Antisense strand to SEQ ID NO: 1355900
ucaaagcacaaauaacuuc

SEQ ID NO: 1355902 - RNA, 19 nt, Artificial Sequence
  Description of Artificial Sequence: Synthetic oligonucleotide
  Sense strand starting at position 1048 of SEQ ID NO: 1242545
aguuauuugugcuuugaau

SEQ ID NO: 1355903 - RNA, 19 nt, Artificial Sequence
  Description of Artificial Sequence: Synthetic oligonucleotide
  Antisense strand to SEQ ID NO: 1355902
auucaaagcacaaauaacu

SEQ ID NO: 1355904 - RNA, 19 nt, Artificial Sequence
  Description of Artificial Sequence: Synthetic oligonucleotide
  Sense strand starting at position 1079 of SEQ ID NO: 1242545
aaccauuaugguggauaca

SEQ ID NO: 1355905 - RNA, 19 nt, Artificial Sequence
  Description of Artificial Sequence: Synthetic oligonucleotide
  Antisense strand to SEQ ID NO: 1355904
uguauccaccauaaugguu

SEQ ID NO: 1355906 - RNA, 19 nt, Artificial Sequence
  Description of Artificial Sequence: Synthetic oligonucleotide
  Sense strand starting at position 1097 of SEQ ID NO: 1242545
agcacuuauuugcuaggua

SEQ ID NO: 1355907 - RNA, 19 nt, Artificial Sequence
  Description of Artificial Sequence: Synthetic oligonucleotide
  Antisense strand to SEQ ID NO: 1355906
uaccuagcaaauaagugcu

SEQ ID NO: 1355908 - RNA, 19 nt, Artificial Sequence
  Description of Artificial Sequence: Synthetic oligonucleotide
  Sense strand starting at position 1113 of SEQ ID NO: 1242545
guaagagaacuucgcuuac

SEQ ID NO: 1355909 - RNA, 19 nt, Artificial Sequence
  Description of Artificial Sequence: Synthetic oligonucleotide
  Antisense strand to SEQ ID NO: 1355908
guaagcgaaguucucuuac

SEQ ID NO: 1355910 - RNA, 19 nt, Artificial Sequence
  Description of Artificial Sequence: Synthetic oligonucleotide
  Sense strand starting at position 1264 of SEQ ID NO: 1242545
acaauuauacaccgagauu

SEQ ID NO: 1355911 - RNA, 19 nt, Artificial Sequence
  Description of Artificial Sequence: Synthetic oligonucleotide
  Antisense strand to SEQ ID NO: 1355910
aaucucgguguauaauugu

SEQ ID NO: 1355912 - RNA, 19 nt, Artificial Sequence
  Description of Artificial Sequence: Synthetic oligonucleotide
  Sense strand starting at position 1336 of SEQ ID NO: 1242545
uguuauuaucaagacgcau

SEQ ID NO: 1355913 - RNA, 19 nt, Artificial Sequence
  Description of Artificial Sequence: Synthetic oligonucleotide
  Antisense strand to SEQ ID NO: 1355912
augcgucuugauaauaaca

SEQ ID NO: 1355914 - RNA, 19 nt, Artificial Sequence
  Description of Artificial Sequence: Synthetic oligonucleotide
  Sense strand starting at position 1395 of SEQ ID NO: 1242545
uugucagucgcgagagguu

SEQ ID NO: 1355915 - RNA, 19 nt, Artificial Sequence
  Description of Artificial Sequence: Synthetic oligonucleotide
  Antisense strand to SEQ ID NO: 1355914
aaccucucgcgacugacaa

SEQ ID NO: 1355916 - RNA, 19 nt, Artificial Sequence
  Description of Artificial Sequence: Synthetic oligonucleotide
  Sense strand starting at position 1402 of SEQ ID NO: 1242545
ucgcgagagguugaaaugu

SEQ ID NO: 1355917 - RNA, 19 nt, Artificial Sequence
  Description of Artificial Sequence: Synthetic oligonucleotide
  Antisense strand to SEQ ID NO: 1355916
acauuucaaccucucgcga

SEQ ID NO: 1355918 - RNA, 19 nt, Artificial Sequence
  Description of Artificial Sequence: Synthetic oligonucleotide
  Sense strand starting at position 1415 of SEQ ID NO: 1242545
aaaugugucccuggccuga

SEQ ID NO: 1355919 - RNA, 19 nt, Artificial Sequence
  Description of Artificial Sequence: Synthetic oligonucleotide
  Antisense strand to SEQ ID NO: 1355918
ucaggccagggacacauuu

SEQ ID NO: 1355920 - RNA, 19 nt, Artificial Sequence
  Description of Artificial Sequence: Synthetic oligonucleotide
  Sense strand starting at position 1981 of SEQ ID NO: 1242545
cgcaguucucaauaaucua

SEQ ID NO: 1355921 - RNA, 19 nt, Artificial Sequence
  Description of Artificial Sequence: Synthetic oligonucleotide
  Antisense strand to SEQ ID NO: 1355920
uagauuauugagaacugcg

SEQ ID NO: 1355922 - RNA, 19 nt, Artificial Sequence
  Description of Artificial Sequence: Synthetic oligonucleotide
  Sense strand starting at position 2302 of SEQ ID NO: 1242545
gugcaagagcuuuagaaca

SEQ ID NO: 1355923 - RNA, 19 nt, Artificial Sequence
  Description of Artificial Sequence: Synthetic oligonucleotide
  Antisense strand to SEQ ID NO: 1355922
uguucuaaagcucuugcac

SEQ ID NO: 1355924 - RNA, 19 nt, Artificial Sequence
  Description of Artificial Sequence: Synthetic oligonucleotide
  Sense strand starting at position 2354 of SEQ ID NO: 1242545
cgaauaauuugugacuuug

SEQ ID NO: 1355925 - RNA, 19 nt, Artificial Sequence
  Description of Artificial Sequence: Synthetic oligonucleotide
  Antisense strand to SEQ ID NO: 1355924
caaagucacaaauuauucg

SEQ ID NO: 1355926 - RNA, 19 nt, Artificial Sequence
  Description of Artificial Sequence: Synthetic oligonucleotide
  Sense strand starting at position 2362 of SEQ ID NO: 1242545
uugugacuuuggguaaauu

SEQ ID NO: 1355927 - RNA, 19 nt, Artificial Sequence
  Description of Artificial Sequence: Synthetic oligonucleotide
  Antisense strand to SEQ ID NO: 1355926
aauuuacccaaagucacaa

SEQ ID NO: 1355928 - RNA, 19 nt, Artificial Sequence
  Description of Artificial Sequence: Synthetic oligonucleotide
  Sense strand starting at position 2420 of SEQ ID NO: 1242545
aggauaauguuaucucaca

SEQ ID NO: 1355929 - RNA, 19 nt, Artificial Sequence
  Description of Artificial Sequence: Synthetic oligonucleotide
  Antisense strand to SEQ ID NO: 1355928
ugugagauaacauuauccu

SEQ ID NO: 1355930 - RNA, 19 nt, Artificial Sequence
  Description of Artificial Sequence: Synthetic oligonucleotide
  Sense strand starting at position 2421 of SEQ ID NO: 1242545
ggauaauguuaucucacag

SEQ ID NO: 1355931 - RNA, 19 nt, Artificial Sequence
  Description of Artificial Sequence: Synthetic oligonucleotide
  Antisense strand to SEQ ID NO: 1355930
cugugagauaacauuaucc

SEQ ID NO: 1355932 - RNA, 19 nt, Artificial Sequence
  Description of Artificial Sequence: Synthetic oligonucleotide
  Sense strand starting at position 2427 of SEQ ID NO: 1242545
uguuaucucacaggguguu

SEQ ID NO: 1355933 - RNA, 19 nt, Artificial Sequence
  Description of Artificial Sequence: Synthetic oligonucleotide
  Antisense strand to SEQ ID NO: 1355932
aacacccugugagauaaca

SEQ ID NO: 1355934 - RNA, 19 nt, Artificial Sequence
  Description of Artificial Sequence: Synthetic oligonucleotide
  Sense strand starting at position 2442 of SEQ ID NO: 1242545
uguugcuaggauuaaauaa

SEQ ID NO: 1355935 - RNA, 19 nt, Artificial Sequence
  Description of Artificial Sequence: Synthetic oligonucleotide
  Antisense strand to SEQ ID NO: 1355934
uuauuuaauccuagcaaca

SEQ ID NO: 1355936 - RNA, 19 nt, Artificial Sequence
  Description of Artificial Sequence: Synthetic oligonucleotide
  Sense strand starting at position 2463 of SEQ ID NO: 1242545
uaggucaaguguuuaucua

SEQ ID NO: 1355937 - RNA, 19 nt, Artificial Sequence
  Description of Artificial Sequence: Synthetic oligonucleotide
  Antisense strand to SEQ ID NO: 1355936
uagauaaacacuugaccua

SEQ ID NO: 1355938 - RNA, 19 nt, Artificial Sequence
  Description of Artificial Sequence: Synthetic oligonucleotide
  Sense strand starting at position 2464 of SEQ ID NO: 1242545
aggucaaguguuuaucuau

SEQ ID NO: 1355939 - RNA, 19 nt, Artificial Sequence
  Description of Artificial Sequence: Synthetic oligonucleotide
  Antisense strand to SEQ ID NO: 1355938
auagauaaacacuugaccu

SEQ ID NO: 1355940 - RNA, 19 nt, Artificial Sequence
  Description of Artificial Sequence: Synthetic oligonucleotide
  Sense strand starting at position 2467 of SEQ ID NO: 1242545
ucaaguguuuaucuaugaa

SEQ ID NO: 1355941 - RNA, 19 nt, Artificial Sequence
  Description of Artificial Sequence: Synthetic oligonucleotide
  Antisense strand to SEQ ID NO: 1355940
uucauagauaaacacuuga

SEQ ID NO: 1355942 - RNA, 19 nt, Artificial Sequence
  Description of Artificial Sequence: Synthetic oligonucleotide
  Sense strand starting at position 2470 of SEQ ID NO: 1242545
aguguuuaucuaugaaugc

SEQ ID NO: 1355943 - RNA, 19 nt, Artificial Sequence
  Description of Artificial Sequence: Synthetic oligonucleotide
  Antisense strand to SEQ ID NO: 1355942
gcauucauagauaaacacu

SEQ ID NO: 1355944 - RNA, 19 nt, Artificial Sequence
  Description of Artificial Sequence: Synthetic oligonucleotide
  Sense strand starting at position 2481 of SEQ ID NO: 1242545
augaaugcugccuaucaca

SEQ ID NO: 1355945 - RNA, 19 nt, Artificial Sequence
  Description of Artificial Sequence: Synthetic oligonucleotide
  Antisense strand to SEQ ID NO: 1355944
ugugauaggcagcauucau

SEQ ID NO: 1355946 - RNA, 19 nt, Artificial Sequence
  Description of Artificial Sequence: Synthetic oligonucleotide
  Sense strand starting at position 2530 of SEQ ID NO: 1242545
cuuacucaugccuaaggua

SEQ ID NO: 1355947 - RNA, 19 nt, Artificial Sequence
  Description of Artificial Sequence: Synthetic oligonucleotide
  Antisense strand to SEQ ID NO: 1355946
uaccuuaggcaugaguaag

SEQ ID NO: 1355948 - RNA, 19 nt, Artificial Sequence
  Description of Artificial Sequence: Synthetic oligonucleotide
  Sense strand starting at position 3107 of SEQ ID NO: 1242545
guugauaauuauguggagu

SEQ ID NO: 1355949 - RNA, 19 nt, Artificial Sequence
  Description of Artificial Sequence: Synthetic oligonucleotide
  Antisense strand to SEQ ID NO: 1355948
acuccacauaauuaucaac

SEQ ID NO: 1355950 - RNA, 19 nt, Artificial Sequence
  Description of Artificial Sequence: Synthetic oligonucleotide
  Sense strand starting at position 3124 of SEQ ID NO: 1242545
gugucccuccuauauuauu

SEQ ID NO: 1355951 - RNA, 19 nt, Artificial Sequence
  Description of Artificial Sequence: Synthetic oligonucleotide
  Antisense strand to SEQ ID NO: 1355950
aauaauauaggagggacac

SEQ ID NO: 1355952 - RNA, 19 nt, Artificial Sequence
  Description of Artificial Sequence: Synthetic oligonucleotide
  Sense strand starting at position 3517 of SEQ ID NO: 1242545
aaaggaagcggcuauauua

SEQ ID NO: 1355953 - RNA, 19 nt, Artificial Sequence
  Description of Artificial Sequence: Synthetic oligonucleotide
  Antisense strand to SEQ ID NO: 1355952
uaauauagccgcuuccuuu

SEQ ID NO: 1355954 - RNA, 19 nt, Artificial Sequence
  Description of Artificial Sequence: Synthetic oligonucleotide
  Sense strand starting at position 3553 of SEQ ID NO: 1242545
ccagauuuguucuagaggu

SEQ ID NO: 1355955 - RNA, 19 nt, Artificial Sequence
  Description of Artificial Sequence: Synthetic oligonucleotide
  Antisense strand to SEQ ID NO: 1355954
accucuagaacaaaucugg

SEQ ID NO: 1355956 - RNA, 19 nt, Artificial Sequence
  Description of Artificial Sequence: Synthetic oligonucleotide
  Sense strand starting at position 3618 of SEQ ID NO: 1242545
acacucaaggguuguggua

SEQ ID NO: 1355957 - RNA, 19 nt, Artificial Sequence
  Description of Artificial Sequence: Synthetic oligonucleotide
  Antisense strand to SEQ ID NO: 1355956
uaccacaacccuugagugu

SEQ ID NO: 1355958 - RNA, 19 nt, Artificial Sequence
  Description of Artificial Sequence: Synthetic oligonucleotide
  Sense strand starting at position 3736 of SEQ ID NO: 1242545
cagucagauauuggugagu

SEQ ID NO: 1355959 - RNA, 19 nt, Artificial Sequence
  Description of Artificial Sequence: Synthetic oligonucleotide
  Antisense strand to SEQ ID NO: 1355958
acucaccaauaucugacug

SEQ ID NO: 1355960 - RNA, 19 nt, Artificial Sequence
  Description of Artificial Sequence: Synthetic oligonucleotide
  Sense strand starting at position 3741 of SEQ ID NO: 1242545
agauauuggugagugccaa

SEQ ID NO: 1355961 - RNA, 19 nt, Artificial Sequence
  Description of Artificial Sequence: Synthetic oligonucleotide
  Antisense strand to SEQ ID NO: 1355960
uuggcacucaccaauaucu

SEQ ID NO: 1355962 - RNA, 19 nt, Artificial Sequence
  Description of Artificial Sequence: Synthetic oligonucleotide
  Sense strand starting at position 3758 of SEQ ID NO: 1242545
aagguaacgcuagauuaug

SEQ ID NO: 1355963 - RNA, 19 nt, Artificial Sequence
  Description of Artificial Sequence: Synthetic oligonucleotide
  Antisense strand to SEQ ID NO: 1355962
cauaaucuagcguuaccuu

SEQ ID NO: 1355964 - RNA, 19 nt, Artificial Sequence
  Description of Artificial Sequence: Synthetic oligonucleotide
  Sense strand starting at position 3766 of SEQ ID NO: 1242545
gcuagauuaugguuucuca

SEQ ID NO: 1355965 - RNA, 19 nt, Artificial Sequence
  Description of Artificial Sequence: Synthetic oligonucleotide
  Antisense strand to SEQ ID NO: 1355964
ugagaaaccauaaucuagc

SEQ ID NO: 1355966 - RNA, 19 nt, Artificial Sequence
  Description of Artificial Sequence: Synthetic oligonucleotide
  Sense strand starting at position 3769 of SEQ ID NO: 1242545
agauuaugguuucucaacu

SEQ ID NO: 1355967 - RNA, 19 nt, Artificial Sequence
  Description of Artificial Sequence: Synthetic oligonucleotide
  Antisense strand to SEQ ID NO: 1355966
aguugagaaaccauaaucu

SEQ ID NO: 1355968 - RNA, 19 nt, Artificial Sequence
  Description of Artificial Sequence: Synthetic oligonucleotide
  Sense strand starting at position 3777 of SEQ ID NO: 1242545
guuucucaacuuugggauu

SEQ ID NO: 1355969 - RNA, 19 nt, Artificial Sequence
  Description of Artificial Sequence: Synthetic oligonucleotide
  Antisense strand to SEQ ID NO: 1355968
aaucccaaaguugagaaac

SEQ ID NO: 1355970 - RNA, 19 nt, Artificial Sequence
  Description of Artificial Sequence: Synthetic oligonucleotide
  Sense strand starting at position 33 of SEQ ID NO: 1242546
agaguugagcaccggagaa

SEQ ID NO: 1355971 - RNA, 19 nt, Artificial Sequence
  Description of Artificial Sequence: Synthetic oligonucleotide
  Antisense strand to SEQ ID NO: 1355970
uucuccggugcucaacucu

SEQ ID NO: 1355972 - RNA, 19 nt, Artificial Sequence
  Description of Artificial Sequence: Synthetic oligonucleotide
  Sense strand starting at position 100 of SEQ ID NO: 1242546
ccuagucagugaccucauu

SEQ ID NO: 1355973 - RNA, 19 nt, Artificial Sequence
  Description of Artificial Sequence: Synthetic oligonucleotide
  Antisense strand to SEQ ID NO: 1355972
aaugaggucacugacuagg

SEQ ID NO: 1355974 - RNA, 19 nt, Artificial Sequence
  Description of Artificial Sequence: Synthetic oligonucleotide
  Sense strand starting at position 139 of SEQ ID NO: 1242546
cuguuuccucgccugcaaa

SEQ ID NO: 1355975 - RNA, 19 nt, Artificial Sequence
  Description of Artificial Sequence: Synthetic oligonucleotide
  Antisense strand to SEQ ID NO: 1355974
uuugcaggcgaggaaacag

SEQ ID NO: 1355976 - RNA, 19 nt, Artificial Sequence
  Description of Artificial Sequence: Synthetic oligonucleotide
  Sense strand starting at position 281 of SEQ ID NO: 1242546
ggcacacagcccuaacaau

SEQ ID NO: 1355977 - RNA, 19 nt, Artificial Sequence
  Description of Artificial Sequence: Synthetic oligonucleotide
  Antisense strand to SEQ ID NO: 1355976
auuguuagggcugugugcc

SEQ ID NO: 1355978 - RNA, 19 nt, Artificial Sequence
  Description of Artificial Sequence: Synthetic oligonucleotide
  Sense strand starting at position 425 of SEQ ID NO: 1242546
guccuucuagcguuccauu

SEQ ID NO: 1355979 - RNA, 19 nt, Artificial Sequence
  Description of Artificial Sequence: Synthetic oligonucleotide
  Antisense strand to SEQ ID NO: 1355978
aauggaacgcuagaaggac

SEQ ID NO: 1355980 - RNA, 19 nt, Artificial Sequence
  Description of Artificial Sequence: Synthetic oligonucleotide
  Sense strand starting at position 721 of SEQ ID NO: 1242546
guaagugaaccuugcaaag

SEQ ID NO: 1355981 - RNA, 19 nt, Artificial Sequence
  Description of Artificial Sequence: Synthetic oligonucleotide
  Antisense strand to SEQ ID NO: 1355980
cuuugcaagguucacuuac

SEQ ID NO: 1355982 - RNA, 19 nt, Artificial Sequence
  Description of Artificial Sequence: Synthetic oligonucleotide
  Sense strand starting at position 780 of SEQ ID NO: 1242546
gcccuucuucuguagacaa

SEQ ID NO: 1355983 - RNA, 19 nt, Artificial Sequence
  Description of Artificial Sequence: Synthetic oligonucleotide
  Antisense strand to SEQ ID NO: 1355982
uugucuacagaagaagggc

SEQ ID NO: 1355984 - RNA, 19 nt, Artificial Sequence
  Description of Artificial Sequence: Synthetic oligonucleotide
  Sense strand starting at position 801 of SEQ ID NO: 1242546
acgggaauucuauggcaga

SEQ ID NO: 1355985 - RNA, 19 nt, Artificial Sequence
  Description of Artificial Sequence: Synthetic oligonucleotide
  Antisense strand to SEQ ID NO: 1355984
ucugccauagaauucccgu

SEQ ID NO: 1355986 - RNA, 19 nt, Artificial Sequence
  Description of Artificial Sequence: Synthetic oligonucleotide
  Sense strand starting at position 924 of SEQ ID NO: 1242546
ucuccuuuccuacgacuga

SEQ ID NO: 1355987 - RNA, 19 nt, Artificial Sequence
  Description of Artificial Sequence: Synthetic oligonucleotide
  Antisense strand to SEQ ID NO: 1355986
ucagucguaggaaaggaga

SEQ ID NO: 1355988 - RNA, 19 nt, Artificial Sequence
  Description of Artificial Sequence: Synthetic oligonucleotide
  Sense strand starting at position 976 of SEQ ID NO: 1242546
augggucuuggccaaacau

SEQ ID NO: 1355989 - RNA, 19 nt, Artificial Sequence
  Description of Artificial Sequence: Synthetic oligonucleotide
  Antisense strand to SEQ ID NO: 1355988
auguuuggccaagacccau

SEQ ID NO: 1355990 - RNA, 19 nt, Artificial Sequence
  Description of Artificial Sequence: Synthetic oligonucleotide
  Sense strand starting at position 985 of SEQ ID NO: 1242546
ggccaaacaucggcacaaa

SEQ ID NO: 1355991 - RNA, 19 nt, Artificial Sequence
  Description of Artificial Sequence: Synthetic oligonucleotide
  Antisense strand to SEQ ID NO: 1355990
uuugugccgauguuuggcc

SEQ ID NO: 1355992 - RNA, 19 nt, Artificial Sequence
  Description of Artificial Sequence: Synthetic oligonucleotide
  Sense strand starting at position 1748 of SEQ ID NO: 1242546
uccggacugcucggaauuu

SEQ ID NO: 1355993 - RNA, 19 nt, Artificial Sequence
  Description of Artificial Sequence: Synthetic oligonucleotide
  Antisense strand to SEQ ID NO: 1355992
aaauuccgagcaguccgga

SEQ ID NO: 1355994 - RNA, 19 nt, Artificial Sequence
  Description of Artificial Sequence: Synthetic oligonucleotide
  Sense strand starting at position 2009 of SEQ ID NO: 1242546
agagacgaaucuguacauu

SEQ ID NO: 1355995 - RNA, 19 nt, Artificial Sequence
  Description of Artificial Sequence: Synthetic oligonucleotide
  Antisense strand to SEQ ID NO: 1355994
aauguacagauucgucucu

SEQ ID NO: 1355996 - RNA, 19 nt, Artificial Sequence
  Description of Artificial Sequence: Synthetic oligonucleotide
  Sense strand starting at position 2158 of SEQ ID NO: 1242546
ucuagaaaguucguugaca

SEQ ID NO: 1355997 - RNA, 19 nt, Artificial Sequence
  Description of Artificial Sequence: Synthetic oligonucleotide
  Antisense strand to SEQ ID NO: 1355996
ugucaacgaacuuucuaga

SEQ ID NO: 1355998 - RNA, 19 nt, Artificial Sequence
  Description of Artificial Sequence: Synthetic oligonucleotide
  Sense strand starting at position 2159 of SEQ ID NO: 1242546
cuagaaaguucguugacau

SEQ ID NO: 1355999 - RNA, 19 nt, Artificial Sequence
  Description of Artificial Sequence: Synthetic oligonucleotide
  Antisense strand to SEQ ID NO: 1355998
augucaacgaacuuucuag

SEQ ID NO: 1356000 - RNA, 19 nt, Artificial Sequence
  Description of Artificial Sequence: Synthetic oligonucleotide
  Sense strand starting at position 2160 of SEQ ID NO: 1242546
uagaaaguucguugacauu

SEQ ID NO: 1356001 - RNA, 19 nt, Artificial Sequence
  Description of Artificial Sequence: Synthetic oligonucleotide
  Antisense strand to SEQ ID NO: 1356000
aaugucaacgaacuuucua

SEQ ID NO: 1356002 - RNA, 19 nt, Artificial Sequence
  Description of Artificial Sequence: Synthetic oligonucleotide
  Sense strand starting at position 2169 of SEQ ID NO: 1242546
cguugacauuuaguaaagu

SEQ ID NO: 1356003 - RNA, 19 nt, Artificial Sequence
  Description of Artificial Sequence: Synthetic oligonucleotide
  Antisense strand to SEQ ID NO: 1356002
acuuuacuaaaugucaacg

SEQ ID NO: 1356004 - RNA, 19 nt, Artificial Sequence
  Description of Artificial Sequence: Synthetic oligonucleotide
  Sense strand starting at position 2200 of SEQ ID NO: 1242546
guuaguucugacuggugag

SEQ ID NO: 1356005 - RNA, 19 nt, Artificial Sequence
  Description of Artificial Sequence: Synthetic oligonucleotide
  Antisense strand to SEQ ID NO: 1356004
cucaccagucagaacuaac

SEQ ID NO: 1356006 - RNA, 19 nt, Artificial Sequence
  Description of Artificial Sequence: Synthetic oligonucleotide
  Sense strand starting at position 2341 of SEQ ID NO: 1242546
ccauucuuagagcaauguu

SEQ ID NO: 1356007 - RNA, 19 nt, Artificial Sequence
  Description of Artificial Sequence: Synthetic oligonucleotide
  Antisense strand to SEQ ID NO: 1356006
aacauugcucuaagaaugg

SEQ ID NO: 1356008 - RNA, 19 nt, Artificial Sequence
  Description of Artificial Sequence: Synthetic oligonucleotide
  Sense strand starting at position 2344 of SEQ ID NO: 1242546
uucuuagagcaauguuaug

SEQ ID NO: 1356009 - RNA, 19 nt, Artificial Sequence
  Description of Artificial Sequence: Synthetic oligonucleotide
  Antisense strand to SEQ ID NO: 1356008
cauaacauugcucuaagaa

SEQ ID NO: 1356010 - RNA, 19 nt, Artificial Sequence
  Description of Artificial Sequence: Synthetic oligonucleotide
  Sense strand starting at position 2506 of SEQ ID NO: 1242546
guuugacaacgagaaguau

SEQ ID NO: 1356011 - RNA, 19 nt, Artificial Sequence
  Description of Artificial Sequence: Synthetic oligonucleotide
  Antisense strand to SEQ ID NO: 1356010
auacuucucguugucaaac

SEQ ID NO: 1356012 - RNA, 19 nt, Artificial Sequence
  Description of Artificial Sequence: Synthetic oligonucleotide
  Sense strand starting at position 2515 of SEQ ID NO: 1242546
cgagaaguauaagaaauuu

SEQ ID NO: 1356013 - RNA, 19 nt, Artificial Sequence
  Description of Artificial Sequence: Synthetic oligonucleotide
  Antisense strand to SEQ ID NO: 1356012
aaauuucuuauacuucucg

SEQ ID NO: 1356014 - RNA, 19 nt, Artificial Sequence
  Description of Artificial Sequence: Synthetic oligonucleotide
  Sense strand starting at position 2586 of SEQ ID NO: 1242546
guauucugaucuguaagga

SEQ ID NO: 1356015 - RNA, 19 nt, Artificial Sequence
  Description of Artificial Sequence: Synthetic oligonucleotide
  Antisense strand to SEQ ID NO: 1356014
uccuuacagaucagaauac

SEQ ID NO: 1356016 - RNA, 19 nt, Artificial Sequence
  Description of Artificial Sequence: Synthetic oligonucleotide
  Sense strand starting at position 2617 of SEQ ID NO: 1242546
cugauugucuucucaagag

SEQ ID NO: 1356017 - RNA, 19 nt, Artificial Sequence
  Description of Artificial Sequence: Synthetic oligonucleotide
  Antisense strand to SEQ ID NO: 1356016
cucuugagaagacaaucag

SEQ ID NO: 1356018 - RNA, 19 nt, Artificial Sequence
  Description of Artificial Sequence: Synthetic oligonucleotide
  Sense strand starting at position 2621 of SEQ ID NO: 1242546
uugucuucucaagagcaau

SEQ ID NO: 1356019 - RNA, 19 nt, Artificial Sequence
  Description of Artificial Sequence: Synthetic oligonucleotide
  Antisense strand to SEQ ID NO: 1356018
auugcucuugagaagacaa

SEQ ID NO: 1356020 - RNA, 19 nt, Artificial Sequence
  Description of Artificial Sequence: Synthetic oligonucleotide
  Sense strand starting at position 2627 of SEQ ID NO: 1242546
ucucaagagcaauggcauu

SEQ ID NO: 1356021 - RNA, 19 nt, Artificial Sequence
  Description of Artificial Sequence: Synthetic oligonucleotide
  Antisense strand to SEQ ID NO: 1356020
aaugccauugcucuugaga

SEQ ID NO: 1356022 - RNA, 19 nt, Artificial Sequence
  Description of Artificial Sequence: Synthetic oligonucleotide
  Sense strand starting at position 2674 of SEQ ID NO: 1242546
uugaaaucuugccuguuag

SEQ ID NO: 1356023 - RNA, 19 nt, Artificial Sequence
  Description of Artificial Sequence: Synthetic oligonucleotide
  Antisense strand to SEQ ID NO: 1356022
cuaacaggcaagauuucaa

SEQ ID NO: 1356024 - RNA, 19 nt, Artificial Sequence
  Description of Artificial Sequence: Synthetic oligonucleotide
  Sense strand starting at position 2675 of SEQ ID NO: 1242546
ugaaaucuugccuguuagg

SEQ ID NO: 1356025 - RNA, 19 nt, Artificial Sequence
  Description of Artificial Sequence: Synthetic oligonucleotide
  Antisense strand to SEQ ID NO: 1356024
ccuaacaggcaagauuuca

SEQ ID NO: 1356026 - RNA, 19 nt, Artificial Sequence
  Description of Artificial Sequence: Synthetic oligonucleotide
  Sense strand starting at position 2789 of SEQ ID NO: 1242546
uuucucaaguguuuaucau

SEQ ID NO: 1356027 - RNA, 19 nt, Artificial Sequence
  Description of Artificial Sequence: Synthetic oligonucleotide
  Antisense strand to SEQ ID NO: 1356026
augauaaacacuugagaaa

SEQ ID NO: 1356028 - RNA, 19 nt, Artificial Sequence
  Description of Artificial Sequence: Synthetic oligonucleotide
  Sense strand starting at position 2790 of SEQ ID NO: 1242546
uucucaaguguuuaucauu

SEQ ID NO: 1356029 - RNA, 19 nt, Artificial Sequence
  Description of Artificial Sequence: Synthetic oligonucleotide
  Antisense strand to SEQ ID NO: 1356028
aaugauaaacacuugagaa

SEQ ID NO: 1356030 - RNA, 19 nt, Artificial Sequence
  Description of Artificial Sequence: Synthetic oligonucleotide
  Sense strand starting at position 2796 of SEQ ID NO: 1242546
aguguuuaucauuacugua

SEQ ID NO: 1356031 - RNA, 19 nt, Artificial Sequence
  Description of Artificial Sequence: Synthetic oligonucleotide
  Antisense strand to SEQ ID NO: 1356030
uacaguaaugauaaacacu

SEQ ID NO: 1356032 - RNA, 19 nt, Artificial Sequence
  Description of Artificial Sequence: Synthetic oligonucleotide
  Sense strand starting at position 2881 of SEQ ID NO: 1242546
ucugguguacuuggaggua

SEQ ID NO: 1356033 - RNA, 19 nt, Artificial Sequence
  Description of Artificial Sequence: Synthetic oligonucleotide
  Antisense strand to SEQ ID NO: 1356032
uaccuccaaguacaccaga

SEQ ID NO: 1356034 - RNA, 19 nt, Artificial Sequence
  Description of Artificial Sequence: Synthetic oligonucleotide
  Sense strand starting at position 2886 of SEQ ID NO: 1242546
uguacuuggagguaaccau

SEQ ID NO: 1356035 - RNA, 19 nt, Artificial Sequence
  Description of Artificial Sequence: Synthetic oligonucleotide
  Antisense strand to SEQ ID NO: 1356034
augguuaccuccaaguaca

SEQ ID NO: 1356036 - RNA, 19 nt, Artificial Sequence
  Description of Artificial Sequence: Synthetic oligonucleotide
  Sense strand starting at position 2931 of SEQ ID NO: 1242546
gggaucaucuacccagcuu

SEQ ID NO: 1356037 - RNA, 19 nt, Artificial Sequence
  Description of Artificial Sequence: Synthetic oligonucleotide
  Antisense strand to SEQ ID NO: 1356036
aagcuggguagaugauccc

SEQ ID NO: 1356038 - RNA, 19 nt, Artificial Sequence
  Description of Artificial Sequence: Synthetic oligonucleotide
  Sense strand starting at position 3076 of SEQ ID NO: 1242546
gucccuaaagguuagcaaa

SEQ ID NO: 1356039 - RNA, 19 nt, Artificial Sequence
  Description of Artificial Sequence: Synthetic oligonucleotide
  Antisense strand to SEQ ID NO: 1356038
uuugcuaaccuuuagggac

SEQ ID NO: 1356040 - RNA, 19 nt, Artificial Sequence
  Description of Artificial Sequence: Synthetic oligonucleotide
  Sense strand starting at position 3348 of SEQ ID NO: 1242546
ugguuaauaccagguuacu

SEQ ID NO: 1356041 - RNA, 19 nt, Artificial Sequence
  Description of Artificial Sequence: Synthetic oligonucleotide
  Antisense strand to SEQ ID NO: 1356040
aguaaccugguauuaacca

SEQ ID NO: 1356042 - RNA, 19 nt, Artificial Sequence
  Description of Artificial Sequence: Synthetic oligonucleotide
  Sense strand starting at position 3523 of SEQ ID NO: 1242546
agaucaagacguugucuca

SEQ ID NO: 1356043 - RNA, 19 nt, Artificial Sequence
  Description of Artificial Sequence: Synthetic oligonucleotide
  Antisense strand to SEQ ID NO: 1356042
ugagacaacgucuugaucu

SEQ ID NO: 1356044 - RNA, 19 nt, Artificial Sequence
  Description of Artificial Sequence: Synthetic oligonucleotide
  Sense strand starting at position 3804 of SEQ ID NO: 1242546
gauguaauuggaggccauu

SEQ ID NO: 1356045 - RNA, 19 nt, Artificial Sequence
  Description of Artificial Sequence: Synthetic oligonucleotide
  Antisense strand to SEQ ID NO: 1356044
aauggccuccaauuacauc

SEQ ID NO: 1356046 - RNA, 19 nt, Artificial Sequence
  Description of Artificial Sequence: Synthetic oligonucleotide
  Sense strand starting at position 3873 of SEQ ID NO: 1242546
guaagugggagcuauguua

SEQ ID NO: 1356047 - RNA, 19 nt, Artificial Sequence
  Description of Artificial Sequence: Synthetic oligonucleotide
  Antisense strand to SEQ ID NO: 1356046
uaacauagcucccacuuac

SEQ ID NO: 1356048 - RNA, 19 nt, Artificial Sequence
  Description of Artificial Sequence: Synthetic oligonucleotide
  Sense strand starting at position 3886 of SEQ ID NO: 1242546
auguuauaaggaugcaaag

SEQ ID NO: 1356049 - RNA, 19 nt, Artificial Sequence
  Description of Artificial Sequence: Synthetic oligonucleotide
  Antisense strand to SEQ ID NO: 1356048
cuuugcauccuuauaacau

SEQ ID NO: 1356050 - RNA, 19 nt, Artificial Sequence
  Description of Artificial Sequence: Synthetic oligonucleotide
  Sense strand starting at position 14 of SEQ ID NO: 1242547
caggccaccguauaauaua

SEQ ID NO: 1356051 - RNA, 19 nt, Artificial Sequence
  Description of Artificial Sequence: Synthetic oligonucleotide
  Antisense strand to SEQ ID NO: 1356050
uauauuauacgguggccug

SEQ ID NO: 1356052 - RNA, 19 nt, Artificial Sequence
  Description of Artificial Sequence: Synthetic oligonucleotide
  Sense strand starting at position 225 of SEQ ID NO: 1242547
acacguauuuguugacaaa

SEQ ID NO: 1356053 - RNA, 19 nt, Artificial Sequence
  Description of Artificial Sequence: Synthetic oligonucleotide
  Antisense strand to SEQ ID NO: 1356052
uuugucaacaaauacgugu

SEQ ID NO: 1356054 - RNA, 19 nt, Artificial Sequence
  Description of Artificial Sequence: Synthetic oligonucleotide
  Sense strand starting at position 228 of SEQ ID NO: 1242547
cguauuuguugacaaauau

SEQ ID NO: 1356055 - RNA, 19 nt, Artificial Sequence
  Description of Artificial Sequence: Synthetic oligonucleotide
  Antisense strand to SEQ ID NO: 1356054
auauuugucaacaaauacg

SEQ ID NO: 1356056 - RNA, 19 nt, Artificial Sequence
  Description of Artificial Sequence: Synthetic oligonucleotide
  Sense strand starting at position 254 of SEQ ID NO: 1242547
ugaauaaauuuccacgacu

SEQ ID NO: 1356057 - RNA, 19 nt, Artificial Sequence
  Description of Artificial Sequence: Synthetic oligonucleotide
  Antisense strand to SEQ ID NO: 1356056
agucguggaaauuuauuca

SEQ ID NO: 1356058 - RNA, 19 nt, Artificial Sequence
  Description of Artificial Sequence: Synthetic oligonucleotide
  Sense strand starting at position 585 of SEQ ID NO: 1242547
agacuuucccaauggcuaa

SEQ ID NO: 1356059 - RNA, 19 nt, Artificial Sequence
  Description of Artificial Sequence: Synthetic oligonucleotide
  Antisense strand to SEQ ID NO: 1356058
uuagccauugggaaagucu

SEQ ID NO: 1356060 - RNA, 19 nt, Artificial Sequence
  Description of Artificial Sequence: Synthetic oligonucleotide
  Sense strand starting at position 617 of SEQ ID NO: 1242547
guaucuuucuggcuuacca

SEQ ID NO: 1356061 - RNA, 19 nt, Artificial Sequence
  Description of Artificial Sequence: Synthetic oligonucleotide
  Antisense strand to SEQ ID NO: 1356060
ugguaagccagaaagauac

SEQ ID NO: 1356062 - RNA, 19 nt, Artificial Sequence
  Description of Artificial Sequence: Synthetic oligonucleotide
  Sense strand starting at position 792 of SEQ ID NO: 1242547
cagugagguugaggaaaca

SEQ ID NO: 1356063 - RNA, 19 nt, Artificial Sequence
  Description of Artificial Sequence: Synthetic oligonucleotide
  Antisense strand to SEQ ID NO: 1356062
uguuuccucaaccucacug

SEQ ID NO: 1356064 - RNA, 19 nt, Artificial Sequence
  Description of Artificial Sequence: Synthetic oligonucleotide
  Sense strand starting at position 843 of SEQ ID NO: 1242547
ccaggaaucugucugucca

SEQ ID NO: 1356065 - RNA, 19 nt, Artificial Sequence
  Description of Artificial Sequence: Synthetic oligonucleotide
  Antisense strand to SEQ ID NO: 1356064
uggacagacagauuccugg

SEQ ID NO: 1356066 - RNA, 19 nt, Artificial Sequence
  Description of Artificial Sequence: Synthetic oligonucleotide
  Sense strand starting at position 845 of SEQ ID NO: 1242547
aggaaucugucuguccaca

SEQ ID NO: 1356067 - RNA, 19 nt, Artificial Sequence
  Description of Artificial Sequence: Synthetic oligonucleotide
  Antisense strand to SEQ ID NO: 1356066
uguggacagacagauuccu

SEQ ID NO: 1356068 - RNA, 19 nt, Artificial Sequence
  Description of Artificial Sequence: Synthetic oligonucleotide
  Sense strand starting at position 1010 of SEQ ID NO: 1242547
aguccuauucuagacuagu

SEQ ID NO: 1356069 - RNA, 19 nt, Artificial Sequence
  Description of Artificial Sequence: Synthetic oligonucleotide
  Antisense strand to SEQ ID NO: 1356068
acuagucuagaauaggacu

SEQ ID NO: 1356070 - RNA, 19 nt, Artificial Sequence
  Description of Artificial Sequence: Synthetic oligonucleotide
  Sense strand starting at position 1021 of SEQ ID NO: 1242547
agacuaguccuggaugcca

SEQ ID NO: 1356071 - RNA, 19 nt, Artificial Sequence
  Description of Artificial Sequence: Synthetic oligonucleotide
  Antisense strand to SEQ ID NO: 1356070
uggcauccaggacuagucu

SEQ ID NO: 1356072 - RNA, 19 nt, Artificial Sequence
  Description of Artificial Sequence: Synthetic oligonucleotide
  Sense strand starting at position 1023 of SEQ ID NO: 1242547
acuaguccuggaugccaaa

SEQ ID NO: 1356073 - RNA, 19 nt, Artificial Sequence
  Description of Artificial Sequence: Synthetic oligonucleotide
  Antisense strand to SEQ ID NO: 1356072
uuuggcauccaggacuagu

SEQ ID NO: 1356074 - RNA, 19 nt, Artificial Sequence
  Description of Artificial Sequence: Synthetic oligonucleotide
  Sense strand starting at position 1224 of SEQ ID NO: 1242547
aggccaucuguccagcaga

SEQ ID NO: 1356075 - RNA, 19 nt, Artificial Sequence
  Description of Artificial Sequence: Synthetic oligonucleotide
  Antisense strand to SEQ ID NO: 1356074
ucugcuggacagauggccu

SEQ ID NO: 1356076 - RNA, 19 nt, Artificial Sequence
  Description of Artificial Sequence: Synthetic oligonucleotide
  Sense strand starting at position 1386 of SEQ ID NO: 1242547
accugucugcuccgggaga

SEQ ID NO: 1356077 - RNA, 19 nt, Artificial Sequence
  Description of Artificial Sequence: Synthetic oligonucleotide
  Antisense strand to SEQ ID NO: 1356076
ucucccggagcagacaggu

SEQ ID NO: 1356078 - RNA, 19 nt, Artificial Sequence
  Description of Artificial Sequence: Synthetic oligonucleotide
  Sense strand starting at position 1388 of SEQ ID NO: 1242547
cugucugcuccgggagaaa

SEQ ID NO: 1356079 - RNA, 19 nt, Artificial Sequence
  Description of Artificial Sequence: Synthetic oligonucleotide
  Antisense strand to SEQ ID NO: 1356078
uuucucccggagcagacag

SEQ ID NO: 1356080 - RNA, 19 nt, Artificial Sequence
  Description of Artificial Sequence: Synthetic oligonucleotide
  Sense strand starting at position 1401 of SEQ ID NO: 1242547
gagaaaccuuccucagggu

SEQ ID NO: 1356081 - RNA, 19 nt, Artificial Sequence
  Description of Artificial Sequence: Synthetic oligonucleotide
  Antisense strand to SEQ ID NO: 1356080
acccugaggaagguuucuc

SEQ ID NO: 1356082 - RNA, 19 nt, Artificial Sequence
  Description of Artificial Sequence: Synthetic oligonucleotide
  Sense strand starting at position 1476 of SEQ ID NO: 1242547
cgaagugucugcccuguga

SEQ ID NO: 1356083 - RNA, 19 nt, Artificial Sequence
  Description of Artificial Sequence: Synthetic oligonucleotide
  Antisense strand to SEQ ID NO: 1356082
ucacagggcagacacuucg

SEQ ID NO: 1356084 - RNA, 19 nt, Artificial Sequence
  Description of Artificial Sequence: Synthetic oligonucleotide
  Sense strand starting at position 2630 of SEQ ID NO: 1242547
ucaggugcgcccuaaaugu

SEQ ID NO: 1356085 - RNA, 19 nt, Artificial Sequence
  Description of Artificial Sequence: Synthetic oligonucleotide
  Antisense strand to SEQ ID NO: 1356084
acauuuagggcgcaccuga

SEQ ID NO: 1356086 - RNA, 19 nt, Artificial Sequence
  Description of Artificial Sequence: Synthetic oligonucleotide
  Sense strand starting at position 2638 of SEQ ID NO: 1242547
gcccuaaauguuuggucau

SEQ ID NO: 1356087 - RNA, 19 nt, Artificial Sequence
  Description of Artificial Sequence: Synthetic oligonucleotide
  Antisense strand to SEQ ID NO: 1356086
augaccaaacauuuagggc

SEQ ID NO: 1356088 - RNA, 19 nt, Artificial Sequence
  Description of Artificial Sequence: Synthetic oligonucleotide
  Sense strand starting at position 2640 of SEQ ID NO: 1242547
ccuaaauguuuggucauag

SEQ ID NO: 1356089 - RNA, 19 nt, Artificial Sequence
  Description of Artificial Sequence: Synthetic oligonucleotide
  Antisense strand to SEQ ID NO: 1356088
cuaugaccaaacauuuagg

SEQ ID NO: 1356090 - RNA, 19 nt, Artificial Sequence
  Description of Artificial Sequence: Synthetic oligonucleotide
  Sense strand starting at position 2790 of SEQ ID NO: 1242547
gagaucucucaggguuacu

SEQ ID NO: 1356091 - RNA, 19 nt, Artificial Sequence
  Description of Artificial Sequence: Synthetic oligonucleotide
  Antisense strand to SEQ ID NO: 1356090
aguaacccugagagaucuc

SEQ ID NO: 1356092 - RNA, 19 nt, Artificial Sequence
  Description of Artificial Sequence: Synthetic oligonucleotide
  Sense strand starting at position 2831 of SEQ ID NO: 1242547
gugagaacucagugagucu

SEQ ID NO: 1356093 - RNA, 19 nt, Artificial Sequence
  Description of Artificial Sequence: Synthetic oligonucleotide
  Antisense strand to SEQ ID NO: 1356092
agacucacugaguucucac

SEQ ID NO: 1356094 - RNA, 19 nt, Artificial Sequence
  Description of Artificial Sequence: Synthetic oligonucleotide
  Sense strand starting at position 2991 of SEQ ID NO: 1242547
acugcuaaccauggagaaa

SEQ ID NO: 1356095 - RNA, 19 nt, Artificial Sequence
  Description of Artificial Sequence: Synthetic oligonucleotide
  Antisense strand to SEQ ID NO: 1356094
uuucuccaugguuagcagu

SEQ ID NO: 1356096 - RNA, 19 nt, Artificial Sequence
  Description of Artificial Sequence: Synthetic oligonucleotide
  Sense strand starting at position 3002 of SEQ ID NO: 1242547
uggagaaauuccuucucca

SEQ ID NO: 1356097 - RNA, 19 nt, Artificial Sequence
  Description of Artificial Sequence: Synthetic oligonucleotide
  Antisense strand to SEQ ID NO: 1356096
uggagaaggaauuucucca

SEQ ID NO: 1356098 - RNA, 19 nt, Artificial Sequence
  Description of Artificial Sequence: Synthetic oligonucleotide
  Sense strand starting at position 3009 of SEQ ID NO: 1242547
auuccuucuccaggaagga

SEQ ID NO: 1356099 - RNA, 19 nt, Artificial Sequence
  Description of Artificial Sequence: Synthetic oligonucleotide
  Antisense strand to SEQ ID NO: 1356098
uccuuccuggagaaggaau

SEQ ID NO: 1356100 - RNA, 19 nt, Artificial Sequence
  Description of Artificial Sequence: Synthetic oligonucleotide
  Sense strand starting at position 3024 of SEQ ID NO: 1242547
aggagaugcaaaugugcaa

SEQ ID NO: 1356101 - RNA, 19 nt, Artificial Sequence
  Description of Artificial Sequence: Synthetic oligonucleotide
  Antisense strand to SEQ ID NO: 1356100
uugcacauuugcaucuccu

SEQ ID NO: 1356102 - RNA, 19 nt, Artificial Sequence
  Description of Artificial Sequence: Synthetic oligonucleotide
  Sense strand starting at position 3037 of SEQ ID NO: 1242547
gugcaagauggcuggaacu

SEQ ID NO: 1356103 - RNA, 19 nt, Artificial Sequence
  Description of Artificial Sequence: Synthetic oligonucleotide
  Antisense strand to SEQ ID NO: 1356102
aguuccagccaucuugcac

SEQ ID NO: 1356104 - RNA, 19 nt, Artificial Sequence
  Description of Artificial Sequence: Synthetic oligonucleotide
  Sense strand starting at position 3097 of SEQ ID NO: 1242547
aguugaagagcuugucuaa

SEQ ID NO: 1356105 - RNA, 19 nt, Artificial Sequence
  Description of Artificial Sequence: Synthetic oligonucleotide
  Antisense strand to SEQ ID NO: 1356104
uuagacaagcucuucaacu

SEQ ID NO: 1356106 - RNA, 19 nt, Artificial Sequence
  Description of Artificial Sequence: Synthetic oligonucleotide
  Sense strand starting at position 3100 of SEQ ID NO: 1242547
ugaagagcuugucuaaaga

SEQ ID NO: 1356107 - RNA, 19 nt, Artificial Sequence
  Description of Artificial Sequence: Synthetic oligonucleotide
  Antisense strand to SEQ ID NO: 1356106
ucuuuagacaagcucuuca

SEQ ID NO: 1356108 - RNA, 19 nt, Artificial Sequence
  Description of Artificial Sequence: Synthetic oligonucleotide
  Sense strand starting at position 3108 of SEQ ID NO: 1242547
uugucuaaagaguauguua

SEQ ID NO: 1356109 - RNA, 19 nt, Artificial Sequence
  Description of Artificial Sequence: Synthetic oligonucleotide
  Antisense strand to SEQ ID NO: 1356108
uaacauacucuuuagacaa

SEQ ID NO: 1356110 - RNA, 19 nt, Artificial Sequence
  Description of Artificial Sequence: Synthetic oligonucleotide
  Sense strand starting at position 3115 of SEQ ID NO: 1242547
aagaguauguuagccaaug

SEQ ID NO: 1356111 - RNA, 19 nt, Artificial Sequence
  Description of Artificial Sequence: Synthetic oligonucleotide
  Antisense strand to SEQ ID NO: 1356110
cauuggcuaacauacucuu

SEQ ID NO: 1356112 - RNA, 19 nt, Artificial Sequence
  Description of Artificial Sequence: Synthetic oligonucleotide
  Sense strand starting at position 3116 of SEQ ID NO: 1242547
agaguauguuagccaauga

SEQ ID NO: 1356113 - RNA, 19 nt, Artificial Sequence
  Description of Artificial Sequence: Synthetic oligonucleotide
  Antisense strand to SEQ ID NO: 1356112
ucauuggcuaacauacucu

SEQ ID NO: 1356114 - RNA, 19 nt, Artificial Sequence
  Description of Artificial Sequence: Synthetic oligonucleotide
  Sense strand starting at position 3120 of SEQ ID NO: 1242547
uauguuagccaaugaagca

SEQ ID NO: 1356115 - RNA, 19 nt, Artificial Sequence
  Description of Artificial Sequence: Synthetic oligonucleotide
  Antisense strand to SEQ ID NO: 1356114
ugcuucauuggcuaacaua

SEQ ID NO: 1356116 - RNA, 19 nt, Artificial Sequence
  Description of Artificial Sequence: Synthetic oligonucleotide
  Sense strand starting at position 3141 of SEQ ID NO: 1242547
ggaguuaauaaagggugau

SEQ ID NO: 1356117 - RNA, 19 nt, Artificial Sequence
  Description of Artificial Sequence: Synthetic oligonucleotide
  Antisense strand to SEQ ID NO: 1356116
aucacccuuuauuaacucc

SEQ ID NO: 1356118 - RNA, 19 nt, Artificial Sequence
  Description of Artificial Sequence: Synthetic oligonucleotide
  Sense strand starting at position 3142 of SEQ ID NO: 1242547
gaguuaauaaagggugaug

SEQ ID NO: 1356119 - RNA, 19 nt, Artificial Sequence
  Description of Artificial Sequence: Synthetic oligonucleotide
  Antisense strand to SEQ ID NO: 1356118
caucacccuuuauuaacuc

SEQ ID NO: 1356120 - RNA, 19 nt, Artificial Sequence
  Description of Artificial Sequence: Synthetic oligonucleotide
  Sense strand starting at position 3144 of SEQ ID NO: 1242547
guuaauaaagggugaugau

SEQ ID NO: 1356121 - RNA, 19 nt, Artificial Sequence
  Description of Artificial Sequence: Synthetic oligonucleotide
  Antisense strand to SEQ ID NO: 1356120
aucaucacccuuuauuaac

SEQ ID NO: 1356122 - RNA, 19 nt, Artificial Sequence
  Description of Artificial Sequence: Synthetic oligonucleotide
  Sense strand starting at position 3153 of SEQ ID NO: 1242547
gggugaugauuucaaaugu

SEQ ID NO: 1356123 - RNA, 19 nt, Artificial Sequence
  Description of Artificial Sequence: Synthetic oligonucleotide
  Antisense strand to SEQ ID NO: 1356122
acauuugaaaucaucaccc

SEQ ID NO: 1356124 - RNA, 19 nt, Artificial Sequence
  Description of Artificial Sequence: Synthetic oligonucleotide
  Sense strand starting at position 3167 of SEQ ID NO: 1242547
aauguuuggcagugagaga

SEQ ID NO: 1356125 - RNA, 19 nt, Artificial Sequence
  Description of Artificial Sequence: Synthetic oligonucleotide
  Antisense strand to SEQ ID NO: 1356124
ucucucacugccaaacauu

SEQ ID NO: 1356126 - RNA, 19 nt, Artificial Sequence
  Description of Artificial Sequence: Synthetic oligonucleotide
  Sense strand starting at position 3267 of SEQ ID NO: 1242547
aucccuuaagccgagaagu

SEQ ID NO: 1356127 - RNA, 19 nt, Artificial Sequence
  Description of Artificial Sequence: Synthetic oligonucleotide
  Antisense strand to SEQ ID NO: 1356126
acuucucggcuuaagggau

SEQ ID NO: 1356128 - RNA, 19 nt, Artificial Sequence
  Description of Artificial Sequence: Synthetic oligonucleotide
  Sense strand starting at position 3269 of SEQ ID NO: 1242547
cccuuaagccgagaaguuu

SEQ ID NO: 1356129 - RNA, 19 nt, Artificial Sequence
  Description of Artificial Sequence: Synthetic oligonucleotide
  Antisense strand to SEQ ID NO: 1356128
aaacuucucggcuuaaggg

SEQ ID NO: 1356130 - RNA, 19 nt, Artificial Sequence
  Description of Artificial Sequence: Synthetic oligonucleotide
  Sense strand starting at position 4 of SEQ ID NO: 1242548
ggaagaaacucacagaccu

SEQ ID NO: 1356131 - RNA, 19 nt, Artificial Sequence
  Description of Artificial Sequence: Synthetic oligonucleotide
  Antisense strand to SEQ ID NO: 1356130
aggucugugaguuucuucc

SEQ ID NO: 1356132 - RNA, 19 nt, Artificial Sequence
  Description of Artificial Sequence: Synthetic oligonucleotide
  Sense strand starting at position 43 of SEQ ID NO: 1242548
guugcuaagagcuacagau

SEQ ID NO: 1356133 - RNA, 19 nt, Artificial Sequence
  Description of Artificial Sequence: Synthetic oligonucleotide
  Antisense strand to SEQ ID NO: 1356132
aucuguagcucuuagcaac

SEQ ID NO: 1356134 - RNA, 19 nt, Artificial Sequence
  Description of Artificial Sequence: Synthetic oligonucleotide
  Sense strand starting at position 56 of SEQ ID NO: 1242548
acagaugugccagaggcaa

SEQ ID NO: 1356135 - RNA, 19 nt, Artificial Sequence
  Description of Artificial Sequence: Synthetic oligonucleotide
  Antisense strand to SEQ ID NO: 1356134
uugccucuggcacaucugu

SEQ ID NO: 1356136 - RNA, 19 nt, Artificial Sequence
  Description of Artificial Sequence: Synthetic oligonucleotide
  Sense strand starting at position 103 of SEQ ID NO: 1242548
augagcuaccacuggaaua

SEQ ID NO: 1356137 - RNA, 19 nt, Artificial Sequence
  Description of Artificial Sequence: Synthetic oligonucleotide
  Antisense strand to SEQ ID NO: 1356136
uauuccagugguagcucau

SEQ ID NO: 1356138 - RNA, 19 nt, Artificial Sequence
  Description of Artificial Sequence: Synthetic oligonucleotide
  Sense strand starting at position 213 of SEQ ID NO: 1242548
cugaucuaauuacagagaa

SEQ ID NO: 1356139 - RNA, 19 nt, Artificial Sequence
  Description of Artificial Sequence: Synthetic oligonucleotide
  Antisense strand to SEQ ID NO: 1356138
uucucuguaauuagaucag

SEQ ID NO: 1356140 - RNA, 19 nt, Artificial Sequence
  Description of Artificial Sequence: Synthetic oligonucleotide
  Sense strand starting at position 339 of SEQ ID NO: 1242548
gcaggaauaagcugcugaa

SEQ ID NO: 1356141 - RNA, 19 nt, Artificial Sequence
  Description of Artificial Sequence: Synthetic oligonucleotide
  Antisense strand to SEQ ID NO: 1356140
uucagcagcuuauuccugc

SEQ ID NO: 1356142 - RNA, 19 nt, Artificial Sequence
  Description of Artificial Sequence: Synthetic oligonucleotide
  Sense strand starting at position 570 of SEQ ID NO: 1242548
auuccuaauaguuguggga

SEQ ID NO: 1356143 - RNA, 19 nt, Artificial Sequence
  Description of Artificial Sequence: Synthetic oligonucleotide
  Antisense strand to SEQ ID NO: 1356142
ucccacaacuauuaggaau

SEQ ID NO: 1356144 - RNA, 19 nt, Artificial Sequence
  Description of Artificial Sequence: Synthetic oligonucleotide
  Sense strand starting at position 574 of SEQ ID NO: 1242548
cuaauaguugugggagaua

SEQ ID NO: 1356145 - RNA, 19 nt, Artificial Sequence
  Description of Artificial Sequence: Synthetic oligonucleotide
  Antisense strand to SEQ ID NO: 1356144
uaucucccacaacuauuag

SEQ ID NO: 1356146 - RNA, 19 nt, Artificial Sequence
  Description of Artificial Sequence: Synthetic oligonucleotide
  Sense strand starting at position 729 of SEQ ID NO: 1242548
uuugguagccggcaauaga

SEQ ID NO: 1356147 - RNA, 19 nt, Artificial Sequence
  Description of Artificial Sequence: Synthetic oligonucleotide
  Antisense strand to SEQ ID NO: 1356146
ucuauugccggcuaccaaa

SEQ ID NO: 1356148 - RNA, 19 nt, Artificial Sequence
  Description of Artificial Sequence: Synthetic oligonucleotide
  Sense strand starting at position 742 of SEQ ID NO: 1242548
aauagaacacuucguagau

SEQ ID NO: 1356149 - RNA, 19 nt, Artificial Sequence
  Description of Artificial Sequence: Synthetic oligonucleotide
  Antisense strand to SEQ ID NO: 1356148
aucuacgaaguguucuauu

SEQ ID NO: 1356150 - RNA, 19 nt, Artificial Sequence
  Description of Artificial Sequence: Synthetic oligonucleotide
  Sense strand starting at position 743 of SEQ ID NO: 1242548
auagaacacuucguagaua

SEQ ID NO: 1356151 - RNA, 19 nt, Artificial Sequence
  Description of Artificial Sequence: Synthetic oligonucleotide
  Antisense strand to SEQ ID NO: 1356150
uaucuacgaaguguucuau

SEQ ID NO: 1356152 - RNA, 19 nt, Artificial Sequence
  Description of Artificial Sequence: Synthetic oligonucleotide
  Sense strand starting at position 755 of SEQ ID NO: 1242548
guagauaugccaugaaauu

SEQ ID NO: 1356153 - RNA, 19 nt, Artificial Sequence
  Description of Artificial Sequence: Synthetic oligonucleotide
  Antisense strand to SEQ ID NO: 1356152
aauuucauggcauaucuac

SEQ ID NO: 1356154 - RNA, 19 nt, Artificial Sequence
  Description of Artificial Sequence: Synthetic oligonucleotide
  Sense strand starting at position 844 of SEQ ID NO: 1242548
ucaccaaaggcguauuguu

SEQ ID NO: 1356155 - RNA, 19 nt, Artificial Sequence
  Description of Artificial Sequence: Synthetic oligonucleotide
  Antisense strand to SEQ ID NO: 1356154
aacaauacgccuuugguga

SEQ ID NO: 1356156 - RNA, 19 nt, Artificial Sequence
  Description of Artificial Sequence: Synthetic oligonucleotide
  Sense strand starting at position 851 of SEQ ID NO: 1242548
aggcguauuguuuaucaac

SEQ ID NO: 1356157 - RNA, 19 nt, Artificial Sequence
  Description of Artificial Sequence: Synthetic oligonucleotide
  Antisense strand to SEQ ID NO: 1356156
guugauaaacaauacgccu

SEQ ID NO: 1356158 - RNA, 19 nt, Artificial Sequence
  Description of Artificial Sequence: Synthetic oligonucleotide
  Sense strand starting at position 869 of SEQ ID NO: 1242548
cuauuaugagucugaugau

SEQ ID NO: 1356159 - RNA, 19 nt, Artificial Sequence
  Description of Artificial Sequence: Synthetic oligonucleotide
  Antisense strand to SEQ ID NO: 1356158
aucaucagacucauaauag

SEQ ID NO: 1356160 - RNA, 19 nt, Artificial Sequence
  Description of Artificial Sequence: Synthetic oligonucleotide
  Sense strand starting at position 1052 of SEQ ID NO: 1242548
ccaggccugcuguaaauga

SEQ ID NO: 1356161 - RNA, 19 nt, Artificial Sequence
  Description of Artificial Sequence: Synthetic oligonucleotide
  Antisense strand to SEQ ID NO: 1356160
ucauuuacagcaggccugg

SEQ ID NO: 1356162 - RNA, 19 nt, Artificial Sequence
  Description of Artificial Sequence: Synthetic oligonucleotide
  Sense strand starting at position 1083 of SEQ ID NO: 1242548
auccucuaauuuggaagaa

SEQ ID NO: 1356163 - RNA, 19 nt, Artificial Sequence
  Description of Artificial Sequence: Synthetic oligonucleotide
  Antisense strand to SEQ ID NO: 1356162
uucuuccaaauuagaggau

SEQ ID NO: 1356164 - RNA, 19 nt, Artificial Sequence
  Description of Artificial Sequence: Synthetic oligonucleotide
  Sense strand starting at position 1084 of SEQ ID NO: 1242548
uccucuaauuuggaagaaa

SEQ ID NO: 1356165 - RNA, 19 nt, Artificial Sequence
  Description of Artificial Sequence: Synthetic oligonucleotide
  Antisense strand to SEQ ID NO: 1356164
uuucuuccaaauuagagga

SEQ ID NO: 1356166 - RNA, 19 nt, Artificial Sequence
  Description of Artificial Sequence: Synthetic oligonucleotide
  Sense strand starting at position 1131 of SEQ ID NO: 1242548
ccuuguaauuggucauuac

SEQ ID NO: 1356167 - RNA, 19 nt, Artificial Sequence
  Description of Artificial Sequence: Synthetic oligonucleotide
  Antisense strand to SEQ ID NO: 1356166
guaaugaccaauuacaagg

SEQ ID NO: 1356168 - RNA, 19 nt, Artificial Sequence
  Description of Artificial Sequence: Synthetic oligonucleotide
  Sense strand starting at position 1134 of SEQ ID NO: 1242548
uguaauuggucauuaccca

SEQ ID NO: 1356169 - RNA, 19 nt, Artificial Sequence
  Description of Artificial Sequence: Synthetic oligonucleotide
  Antisense strand to SEQ ID NO: 1356168
uggguaaugaccaauuaca

SEQ ID NO: 1356170 - RNA, 19 nt, Artificial Sequence
  Description of Artificial Sequence: Synthetic oligonucleotide
  Sense strand starting at position 2090 of SEQ ID NO: 1242548
ccacauuggucaguacaug

SEQ ID NO: 1356171 - RNA, 19 nt, Artificial Sequence
  Description of Artificial Sequence: Synthetic oligonucleotide
  Antisense strand to SEQ ID NO: 1356170
cauguacugaccaaugugg

SEQ ID NO: 1356172 - RNA, 19 nt, Artificial Sequence
  Description of Artificial Sequence: Synthetic oligonucleotide
  Sense strand starting at position 2117 of SEQ ID NO: 1242548
acaacaucauugcuggaaa

SEQ ID NO: 1356173 - RNA, 19 nt, Artificial Sequence
  Description of Artificial Sequence: Synthetic oligonucleotide
  Antisense strand to SEQ ID NO: 1356172
uuuccagcaaugauguugu

SEQ ID NO: 1356174 - RNA, 19 nt, Artificial Sequence
  Description of Artificial Sequence: Synthetic oligonucleotide
  Sense strand starting at position 2173 of SEQ ID NO: 1242548
gcaagagacgccugaaaua

SEQ ID NO: 1356175 - RNA, 19 nt, Artificial Sequence
  Description of Artificial Sequence: Synthetic oligonucleotide
  Antisense strand to SEQ ID NO: 1356174
uauuucaggcgucucuugc

SEQ ID NO: 1356176 - RNA, 19 nt, Artificial Sequence
  Description of Artificial Sequence: Synthetic oligonucleotide
  Sense strand starting at position 2341 of SEQ ID NO: 1242548
uccaauugcccagagauuc

SEQ ID NO: 1356177 - RNA, 19 nt, Artificial Sequence
  Description of Artificial Sequence: Synthetic oligonucleotide
  Antisense strand to SEQ ID NO: 1356176
gaaucucugggcaauugga

SEQ ID NO: 1356178 - RNA, 19 nt, Artificial Sequence
  Description of Artificial Sequence: Synthetic oligonucleotide
  Sense strand starting at position 2351 of SEQ ID NO: 1242548
cagagauuccaugguaagu

SEQ ID NO: 1356179 - RNA, 19 nt, Artificial Sequence
  Description of Artificial Sequence: Synthetic oligonucleotide
  Antisense strand to SEQ ID NO: 1356178
acuuaccauggaaucucug

SEQ ID NO: 1356180 - RNA, 19 nt, Artificial Sequence
  Description of Artificial Sequence: Synthetic oligonucleotide
  Sense strand starting at position 2356 of SEQ ID NO: 1242548
auuccaugguaagucuuaa

SEQ ID NO: 1356181 - RNA, 19 nt, Artificial Sequence
  Description of Artificial Sequence: Synthetic oligonucleotide
  Antisense strand to SEQ ID NO: 1356180
uuaagacuuaccauggaau

SEQ ID NO: 1356182 - RNA, 19 nt, Artificial Sequence
  Description of Artificial Sequence: Synthetic oligonucleotide
  Sense strand starting at position 2364 of SEQ ID NO: 1242548
guaagucuuaacuaggagu

SEQ ID NO: 1356183 - RNA, 19 nt, Artificial Sequence
  Description of Artificial Sequence: Synthetic oligonucleotide
  Antisense strand to SEQ ID NO: 1356182
acuccuaguuaagacuuac

SEQ ID NO: 1356184 - RNA, 19 nt, Artificial Sequence
  Description of Artificial Sequence: Synthetic oligonucleotide
  Sense strand starting at position 2375 of SEQ ID NO: 1242548
cuaggaguccucuagaguu

SEQ ID NO: 1356185 - RNA, 19 nt, Artificial Sequence
  Description of Artificial Sequence: Synthetic oligonucleotide
  Antisense strand to SEQ ID NO: 1356184
aacucuagaggacuccuag

SEQ ID NO: 1356186 - RNA, 19 nt, Artificial Sequence
  Description of Artificial Sequence: Synthetic oligonucleotide
  Sense strand starting at position 2457 of SEQ ID NO: 1242548
aauacagguccuggcauau

SEQ ID NO: 1356187 - RNA, 19 nt, Artificial Sequence
  Description of Artificial Sequence: Synthetic oligonucleotide
  Antisense strand to SEQ ID NO: 1356186
auaugccaggaccuguauu

SEQ ID NO: 1356188 - RNA, 19 nt, Artificial Sequence
  Description of Artificial Sequence: Synthetic oligonucleotide
  Sense strand starting at position 2589 of SEQ ID NO: 1242548
agggucuaucucuaguaca

SEQ ID NO: 1356189 - RNA, 19 nt, Artificial Sequence
  Description of Artificial Sequence: Synthetic oligonucleotide
  Antisense strand to SEQ ID NO: 1356188
uguacuagagauagacccu

SEQ ID NO: 1356190 - RNA, 19 nt, Artificial Sequence
  Description of Artificial Sequence: Synthetic oligonucleotide
  Sense strand starting at position 2611 of SEQ ID NO: 1242548
aguauagauuccuccuacu

SEQ ID NO: 1356191 - RNA, 19 nt, Artificial Sequence
  Description of Artificial Sequence: Synthetic oligonucleotide
  Antisense strand to SEQ ID NO: 1356190
aguaggaggaaucuauacu

SEQ ID NO: 1356192 - RNA, 19 nt, Artificial Sequence
  Description of Artificial Sequence: Synthetic oligonucleotide
  Sense strand starting at position 2641 of SEQ ID NO: 1242548
aaagucuuaugguuaagaa

SEQ ID NO: 1356193 - RNA, 19 nt, Artificial Sequence
  Description of Artificial Sequence: Synthetic oligonucleotide
  Antisense strand to SEQ ID NO: 1356192
uucuuaaccauaagacuuu

SEQ ID NO: 1356194 - RNA, 19 nt, Artificial Sequence
  Description of Artificial Sequence: Synthetic oligonucleotide
  Sense strand starting at position 3339 of SEQ ID NO: 1242548
guaagacucugucuccacu

SEQ ID NO: 1356195 - RNA, 19 nt, Artificial Sequence
  Description of Artificial Sequence: Synthetic oligonucleotide
  Antisense strand to SEQ ID NO: 1356194
aguggagacagagucuuac

SEQ ID NO: 1356196 - RNA, 19 nt, Artificial Sequence
  Description of Artificial Sequence: Synthetic oligonucleotide
  Sense strand starting at position 3624 of SEQ ID NO: 1242548
ucccaagagguugggauua

SEQ ID NO: 1356197 - RNA, 19 nt, Artificial Sequence
  Description of Artificial Sequence: Synthetic oligonucleotide
  Antisense strand to SEQ ID NO: 1356196
uaaucccaaccucuuggga

SEQ ID NO: 1356198 - RNA, 19 nt, Artificial Sequence
  Description of Artificial Sequence: Synthetic oligonucleotide
  Sense strand starting at position 3665 of SEQ ID NO: 1242548
acuaacuuguauucuuagu

SEQ ID NO: 1356199 - RNA, 19 nt, Artificial Sequence
  Description of Artificial Sequence: Synthetic oligonucleotide
  Antisense strand to SEQ ID NO: 1356198
acuaagaauacaaguuagu

SEQ ID NO: 1356200 - RNA, 19 nt, Artificial Sequence
  Description of Artificial Sequence: Synthetic oligonucleotide
  Sense strand starting at position 3855 of SEQ ID NO: 1242548
cagugaauucugcaaagug

SEQ ID NO: 1356201 - RNA, 19 nt, Artificial Sequence
  Description of Artificial Sequence: Synthetic oligonucleotide
  Antisense strand to SEQ ID NO: 1356200
cacuuugcagaauucacug

SEQ ID NO: 1356202 - RNA, 19 nt, Artificial Sequence
  Description of Artificial Sequence: Synthetic oligonucleotide
  Sense strand starting at position 3875 of SEQ ID NO: 1242548
aucucuaacuuuguagaga

SEQ ID NO: 1356203 - RNA, 19 nt, Artificial Sequence
  Description of Artificial Sequence: Synthetic oligonucleotide
  Antisense strand to SEQ ID NO: 1356202
ucucuacaaaguuagagau

SEQ ID NO: 1356204 - RNA, 19 nt, Artificial Sequence
  Description of Artificial Sequence: Synthetic oligonucleotide
  Sense strand starting at position 3878 of SEQ ID NO: 1242548
ucuaacuuuguagagaucu

SEQ ID NO: 1356205 - RNA, 19 nt, Artificial Sequence
  Description of Artificial Sequence: Synthetic oligonucleotide
  Antisense strand to SEQ ID NO: 1356204
agaucucuacaaaguuaga

SEQ ID NO: 1356206 - RNA, 19 nt, Artificial Sequence
  Description of Artificial Sequence: Synthetic oligonucleotide
  Sense strand starting at position 3886 of SEQ ID NO: 1242548
uguagagaucuguaaaugc

SEQ ID NO: 1356207 - RNA, 19 nt, Artificial Sequence
  Description of Artificial Sequence: Synthetic oligonucleotide
  Antisense strand to SEQ ID NO: 1356206
gcauuuacagaucucuaca

SEQ ID NO: 1356208 - RNA, 19 nt, Artificial Sequence
  Description of Artificial Sequence: Synthetic oligonucleotide
  Sense strand starting at position 3950 of SEQ ID NO: 1242548
cccucagagcaaugucaaa

SEQ ID NO: 1356209 - RNA, 19 nt, Artificial Sequence
  Description of Artificial Sequence: Synthetic oligonucleotide
  Antisense strand to SEQ ID NO: 1356208
uuugacauugcucugaggg

SEQ ID NO: 1356210 - RNA, 19 nt, Artificial Sequence
  Description of Artificial Sequence: Synthetic oligonucleotide
  Sense strand starting at position 147 of SEQ ID NO: 1242549
gggacuaguuauguacacu

SEQ ID NO: 1356211 - RNA, 19 nt, Artificial Sequence
  Description of Artificial Sequence: Synthetic oligonucleotide
  Antisense strand to SEQ ID NO: 1356210
aguguacauaacuaguccc

SEQ ID NO: 1356212 - RNA, 19 nt, Artificial Sequence
  Description of Artificial Sequence: Synthetic oligonucleotide
  Sense strand starting at position 148 of SEQ ID NO: 1242549
ggacuaguuauguacacug

SEQ ID NO: 1356213 - RNA, 19 nt, Artificial Sequence
  Description of Artificial Sequence: Synthetic oligonucleotide
  Antisense strand to SEQ ID NO: 1356212
caguguacauaacuagucc

SEQ ID NO: 1356214 - RNA, 19 nt, Artificial Sequence
  Description of Artificial Sequence: Synthetic oligonucleotide
  Sense strand starting at position 319 of SEQ ID NO: 1242549
ggacgaguaccucgaagag

SEQ ID NO: 1356215 - RNA, 19 nt, Artificial Sequence
  Description of Artificial Sequence: Synthetic oligonucleotide
  Antisense strand to SEQ ID NO: 1356214
cucuucgagguacucgucc

SEQ ID NO: 1356216 - RNA, 19 nt, Artificial Sequence
  Description of Artificial Sequence: Synthetic oligonucleotide
  Sense strand starting at position 329 of SEQ ID NO: 1242549
cucgaagaguccuugugau

SEQ ID NO: 1356217 - RNA, 19 nt, Artificial Sequence
  Description of Artificial Sequence: Synthetic oligonucleotide
  Antisense strand to SEQ ID NO: 1356216
aucacaaggacucuucgag

SEQ ID NO: 1356218 - RNA, 19 nt, Artificial Sequence
  Description of Artificial Sequence: Synthetic oligonucleotide
  Sense strand starting at position 640 of SEQ ID NO: 1242549
gcccuaaccgucucgcaaa

SEQ ID NO: 1356219 - RNA, 19 nt, Artificial Sequence
  Description of Artificial Sequence: Synthetic oligonucleotide
  Antisense strand to SEQ ID NO: 1356218
uuugcgagacgguuagggc

SEQ ID NO: 1356220 - RNA, 19 nt, Artificial Sequence
  Description of Artificial Sequence: Synthetic oligonucleotide
  Sense strand starting at position 641 of SEQ ID NO: 1242549
cccuaaccgucucgcaaau

SEQ ID NO: 1356221 - RNA, 19 nt, Artificial Sequence
  Description of Artificial Sequence: Synthetic oligonucleotide
  Antisense strand to SEQ ID NO: 1356220
auuugcgagacgguuaggg

SEQ ID NO: 1356222 - RNA, 19 nt, Artificial Sequence
  Description of Artificial Sequence: Synthetic oligonucleotide
  Sense strand starting at position 650 of SEQ ID NO: 1242549
ucucgcaaauccuagagau

SEQ ID NO: 1356223 - RNA, 19 nt, Artificial Sequence
  Description of Artificial Sequence: Synthetic oligonucleotide
  Antisense strand to SEQ ID NO: 1356222
aucucuaggauuugcgaga

SEQ ID NO: 1356224 - RNA, 19 nt, Artificial Sequence
  Description of Artificial Sequence: Synthetic oligonucleotide
  Sense strand starting at position 652 of SEQ ID NO: 1242549
ucgcaaauccuagagauac

SEQ ID NO: 1356225 - RNA, 19 nt, Artificial Sequence
  Description of Artificial Sequence: Synthetic oligonucleotide
  Antisense strand to SEQ ID NO: 1356224
guaucucuaggauuugcga

SEQ ID NO: 1356226 - RNA, 19 nt, Artificial Sequence
  Description of Artificial Sequence: Synthetic oligonucleotide
  Sense strand starting at position 2268 of SEQ ID NO: 1242549
cuuucuaccgcagaggauu

SEQ ID NO: 1356227 - RNA, 19 nt, Artificial Sequence
  Description of Artificial Sequence: Synthetic oligonucleotide
  Antisense strand to SEQ ID NO: 1356226
aauccucugcgguagaaag

SEQ ID NO: 1356228 - RNA, 19 nt, Artificial Sequence
  Description of Artificial Sequence: Synthetic oligonucleotide
  Sense strand starting at position 2420 of SEQ ID NO: 1242549
uuuguuugcugugggaguu

SEQ ID NO: 1356229 - RNA, 19 nt, Artificial Sequence
  Description of Artificial Sequence: Synthetic oligonucleotide
  Antisense strand to SEQ ID NO: 1356228
aacucccacagcaaacaaa

SEQ ID NO: 1356230 - RNA, 19 nt, Artificial Sequence
  Description of Artificial Sequence: Synthetic oligonucleotide
  Sense strand starting at position 2430 of SEQ ID NO: 1242549
gugggaguuucguuugaaa

SEQ ID NO: 1356231 - RNA, 19 nt, Artificial Sequence
  Description of Artificial Sequence: Synthetic oligonucleotide
  Antisense strand to SEQ ID NO: 1356230
uuucaaacgaaacucccac

SEQ ID NO: 1356232 - RNA, 19 nt, Artificial Sequence
  Description of Artificial Sequence: Synthetic oligonucleotide
  Sense strand starting at position 2555 of SEQ ID NO: 1242549
gcagaccucgcuuggaaau

SEQ ID NO: 1356233 - RNA, 19 nt, Artificial Sequence
  Description of Artificial Sequence: Synthetic oligonucleotide
  Antisense strand to SEQ ID NO: 1356232
auuuccaagcgaggucugc

SEQ ID NO: 1356234 - RNA, 19 nt, Artificial Sequence
  Description of Artificial Sequence: Synthetic oligonucleotide
  Sense strand starting at position 2778 of SEQ ID NO: 1242549
gugugugcuucacuuaugu

SEQ ID NO: 1356235 - RNA, 19 nt, Artificial Sequence
  Description of Artificial Sequence: Synthetic oligonucleotide
  Antisense strand to SEQ ID NO: 1356234
acauaagugaagcacacac

SEQ ID NO: 1356236 - RNA, 19 nt, Artificial Sequence
  Description of Artificial Sequence: Synthetic oligonucleotide
  Sense strand starting at position 3302 of SEQ ID NO: 1242549
ucggguucuccggaggagu

SEQ ID NO: 1356237 - RNA, 19 nt, Artificial Sequence
  Description of Artificial Sequence: Synthetic oligonucleotide
  Antisense strand to SEQ ID NO: 1356236
acuccuccggagaacccga

SEQ ID NO: 1356238 - RNA, 19 nt, Artificial Sequence
  Description of Artificial Sequence: Synthetic oligonucleotide
  Sense strand starting at position 3347 of SEQ ID NO: 1242549
aagcaaaguuggucacauu

SEQ ID NO: 1356239 - RNA, 19 nt, Artificial Sequence
  Description of Artificial Sequence: Synthetic oligonucleotide
  Antisense strand to SEQ ID NO: 1356238
aaugugaccaacuuugcuu

SEQ ID NO: 1356240 - RNA, 19 nt, Artificial Sequence
  Description of Artificial Sequence: Synthetic oligonucleotide
  Sense strand starting at position 3350 of SEQ ID NO: 1242549
caaaguuggucacauuugu

SEQ ID NO: 1356241 - RNA, 19 nt, Artificial Sequence
  Description of Artificial Sequence: Synthetic oligonucleotide
  Antisense strand to SEQ ID NO: 1356240
acaaaugugaccaacuuug

SEQ ID NO: 1356242 - RNA, 19 nt, Artificial Sequence
  Description of Artificial Sequence: Synthetic oligonucleotide
  Sense strand starting at position 3354 of SEQ ID NO: 1242549
guuggucacauuugucauu

SEQ ID NO: 1356243 - RNA, 19 nt, Artificial Sequence
  Description of Artificial Sequence: Synthetic oligonucleotide
  Antisense strand to SEQ ID NO: 1356242
aaugacaaaugugaccaac

SEQ ID NO: 1356244 - RNA, 19 nt, Artificial Sequence
  Description of Artificial Sequence: Synthetic oligonucleotide
  Sense strand starting at position 3843 of SEQ ID NO: 1242549
ggugcucugagcuaugacu

SEQ ID NO: 1356245 - RNA, 19 nt, Artificial Sequence
  Description of Artificial Sequence: Synthetic oligonucleotide
  Antisense strand to SEQ ID NO: 1356244
agucauagcucagagcacc

SEQ ID NO: 1356246 - RNA, 19 nt, Artificial Sequence
  Description of Artificial Sequence: Synthetic oligonucleotide
  Sense strand starting at position 3902 of SEQ ID NO: 1242549
gaaacaguagccugagagu

SEQ ID NO: 1356247 - RNA, 19 nt, Artificial Sequence
  Description of Artificial Sequence: Synthetic oligonucleotide
  Antisense strand to SEQ ID NO: 1356246
acucucaggcuacuguuuc

SEQ ID NO: 1356248 - RNA, 19 nt, Artificial Sequence
  Description of Artificial Sequence: Synthetic oligonucleotide
  Sense strand starting at position 3911 of SEQ ID NO: 1242549
gccugagaguuugguucaa

SEQ ID NO: 1356249 - RNA, 19 nt, Artificial Sequence
  Description of Artificial Sequence: Synthetic oligonucleotide
  Antisense strand to SEQ ID NO: 1356248
uugaaccaaacucucaggc

SEQ ID NO: 1356250 - RNA, 19 nt, Artificial Sequence
  Description of Artificial Sequence: Synthetic oligonucleotide
  Sense strand starting at position 150 of SEQ ID NO: 1242550
agcaacagucaugauaauu

SEQ ID NO: 1356251 - RNA, 19 nt, Artificial Sequence
  Description of Artificial Sequence: Synthetic oligonucleotide
  Antisense strand to SEQ ID NO: 1356250
aauuaucaugacuguugcu

SEQ ID NO: 1356252 - RNA, 19 nt, Artificial Sequence
  Description of Artificial Sequence: Synthetic oligonucleotide
  Sense strand starting at position 178 of SEQ ID NO: 1242550
ucaugaauccagugaacug

SEQ ID NO: 1356253 - RNA, 19 nt, Artificial Sequence
  Description of Artificial Sequence: Synthetic oligonucleotide
  Antisense strand to SEQ ID NO: 1356252
caguucacuggauucauga

SEQ ID NO: 1356254 - RNA, 19 nt, Artificial Sequence
  Description of Artificial Sequence: Synthetic oligonucleotide
  Sense strand starting at position 373 of SEQ ID NO: 1242550
gugcauaugagguaauccu

SEQ ID NO: 1356255 - RNA, 19 nt, Artificial Sequence
  Description of Artificial Sequence: Synthetic oligonucleotide
  Antisense strand to SEQ ID NO: 1356254
aggauuaccucauaugcac

SEQ ID NO: 1356256 - RNA, 19 nt, Artificial Sequence
  Description of Artificial Sequence: Synthetic oligonucleotide
  Sense strand starting at position 384 of SEQ ID NO: 1242550
guaauccucucacugaaag

SEQ ID NO: 1356257 - RNA, 19 nt, Artificial Sequence
  Description of Artificial Sequence: Synthetic oligonucleotide
  Antisense strand to SEQ ID NO: 1356256
cuuucagugagaggauuac

SEQ ID NO: 1356258 - RNA, 19 nt, Artificial Sequence
  Description of Artificial Sequence: Synthetic oligonucleotide
  Sense strand starting at position 559 of SEQ ID NO: 1242550
gaaagaaguuaugggauuu

SEQ ID NO: 1356259 - RNA, 19 nt, Artificial Sequence
  Description of Artificial Sequence: Synthetic oligonucleotide
  Antisense strand to SEQ ID NO: 1356258
aaaucccauaacuucuuuc

SEQ ID NO: 1356260 - RNA, 19 nt, Artificial Sequence
  Description of Artificial Sequence: Synthetic oligonucleotide
  Sense strand starting at position 898 of SEQ ID NO: 1242550
aggagcuacgguuaaucau

SEQ ID NO: 1356261 - RNA, 19 nt, Artificial Sequence
  Description of Artificial Sequence: Synthetic oligonucleotide
  Antisense strand to SEQ ID NO: 1356260
augauuaaccguagcuccu

SEQ ID NO: 1356262 - RNA, 19 nt, Artificial Sequence
  Description of Artificial Sequence: Synthetic oligonucleotide
  Sense strand starting at position 937 of SEQ ID NO: 1242550
ggauaacuguugucacuug

SEQ ID NO: 1356263 - RNA, 19 nt, Artificial Sequence
  Description of Artificial Sequence: Synthetic oligonucleotide
  Antisense strand to SEQ ID NO: 1356262
caagugacaacaguuaucc

SEQ ID NO: 1356264 - RNA, 19 nt, Artificial Sequence
  Description of Artificial Sequence: Synthetic oligonucleotide
  Sense strand starting at position 982 of SEQ ID NO: 1242550
cugggagcccuagauuguu

SEQ ID NO: 1356265 - RNA, 19 nt, Artificial Sequence
  Description of Artificial Sequence: Synthetic oligonucleotide
  Antisense strand to SEQ ID NO: 1356264
aacaaucuagggcucccag

SEQ ID NO: 1356266 - RNA, 19 nt, Artificial Sequence
  Description of Artificial Sequence: Synthetic oligonucleotide
  Sense strand starting at position 985 of SEQ ID NO: 1242550
ggagcccuagauuguuaga

SEQ ID NO: 1356267 - RNA, 19 nt, Artificial Sequence
  Description of Artificial Sequence: Synthetic oligonucleotide
  Antisense strand to SEQ ID NO: 1356266
ucuaacaaucuagggcucc

SEQ ID NO: 1356268 - RNA, 19 nt, Artificial Sequence
  Description of Artificial Sequence: Synthetic oligonucleotide
  Sense strand starting at position 987 of SEQ ID NO: 1242550
agcccuagauuguuagaac

SEQ ID NO: 1356269 - RNA, 19 nt, Artificial Sequence
  Description of Artificial Sequence: Synthetic oligonucleotide
  Antisense strand to SEQ ID NO: 1356268
guucuaacaaucuagggcu

SEQ ID NO: 1356270 - RNA, 19 nt, Artificial Sequence
  Description of Artificial Sequence: Synthetic oligonucleotide
  Sense strand starting at position 1027 of SEQ ID NO: 1242550
cuaucuccuguuuaugaga

SEQ ID NO: 1356271 - RNA, 19 nt, Artificial Sequence
  Description of Artificial Sequence: Synthetic oligonucleotide
  Antisense strand to SEQ ID NO: 1356270
ucucauaaacaggagauag

SEQ ID NO: 1356272 - RNA, 19 nt, Artificial Sequence
  Description of Artificial Sequence: Synthetic oligonucleotide
  Sense strand starting at position 1036 of SEQ ID NO: 1242550
guuuaugagagucagguua

SEQ ID NO: 1356273 - RNA, 19 nt, Artificial Sequence
  Description of Artificial Sequence: Synthetic oligonucleotide
  Antisense strand to SEQ ID NO: 1356272
uaaccugacucucauaaac

SEQ ID NO: 1356274 - RNA, 19 nt, Artificial Sequence
  Description of Artificial Sequence: Synthetic oligonucleotide
  Sense strand starting at position 1218 of SEQ ID NO: 1242550
caagauacucuacgugaag

SEQ ID NO: 1356275 - RNA, 19 nt, Artificial Sequence
  Description of Artificial Sequence: Synthetic oligonucleotide
  Antisense strand to SEQ ID NO: 1356274
cuucacguagaguaucuug

SEQ ID NO: 1356276 - RNA, 19 nt, Artificial Sequence
  Description of Artificial Sequence: Synthetic oligonucleotide
  Sense strand starting at position 1219 of SEQ ID NO: 1242550
aagauacucuacgugaaga

SEQ ID NO: 1356277 - RNA, 19 nt, Artificial Sequence
  Description of Artificial Sequence: Synthetic oligonucleotide
  Antisense strand to SEQ ID NO: 1356276
ucuucacguagaguaucuu

SEQ ID NO: 1356278 - RNA, 19 nt, Artificial Sequence
  Description of Artificial Sequence: Synthetic oligonucleotide
  Sense strand starting at position 1220 of SEQ ID NO: 1242550
agauacucuacgugaagac

SEQ ID NO: 1356279 - RNA, 19 nt, Artificial Sequence
  Description of Artificial Sequence: Synthetic oligonucleotide
  Antisense strand to SEQ ID NO: 1356278
gucuucacguagaguaucu

SEQ ID NO: 1356280 - RNA, 19 nt, Artificial Sequence
  Description of Artificial Sequence: Synthetic oligonucleotide
  Sense strand starting at position 1221 of SEQ ID NO: 1242550
gauacucuacgugaagacu

SEQ ID NO: 1356281 - RNA, 19 nt, Artificial Sequence
  Description of Artificial Sequence: Synthetic oligonucleotide
  Antisense strand to SEQ ID NO: 1356280
agucuucacguagaguauc

SEQ ID NO: 1356282 - RNA, 19 nt, Artificial Sequence
  Description of Artificial Sequence: Synthetic oligonucleotide
  Sense strand starting at position 1335 of SEQ ID NO: 1242550
augugaggauuucacgaaa

SEQ ID NO: 1356283 - RNA, 19 nt, Artificial Sequence
  Description of Artificial Sequence: Synthetic oligonucleotide
  Antisense strand to SEQ ID NO: 1356282
uuucgugaaauccucacau

SEQ ID NO: 1356284 - RNA, 19 nt, Artificial Sequence
  Description of Artificial Sequence: Synthetic oligonucleotide
  Sense strand starting at position 1549 of SEQ ID NO: 1242550
auaauaagcacguaauggu

SEQ ID NO: 1356285 - RNA, 19 nt, Artificial Sequence
  Description of Artificial Sequence: Synthetic oligonucleotide
  Antisense strand to SEQ ID NO: 1356284
accauuacgugcuuauuau

SEQ ID NO: 1356286 - RNA, 19 nt, Artificial Sequence
  Description of Artificial Sequence: Synthetic oligonucleotide
  Sense strand starting at position 2207 of SEQ ID NO: 1242550
cucugaaccucgguuagga

SEQ ID NO: 1356287 - RNA, 19 nt, Artificial Sequence
  Description of Artificial Sequence: Synthetic oligonucleotide
  Antisense strand to SEQ ID NO: 1356286
uccuaaccgagguucagag

SEQ ID NO: 1356288 - RNA, 19 nt, Artificial Sequence
  Description of Artificial Sequence: Synthetic oligonucleotide
  Sense strand starting at position 2333 of SEQ ID NO: 1242550
agaagacgacaauguguua

SEQ ID NO: 1356289 - RNA, 19 nt, Artificial Sequence
  Description of Artificial Sequence: Synthetic oligonucleotide
  Antisense strand to SEQ ID NO: 1356288
uaacacauugucgucuucu

SEQ ID NO: 1356290 - RNA, 19 nt, Artificial Sequence
  Description of Artificial Sequence: Synthetic oligonucleotide
  Sense strand starting at position 2400 of SEQ ID NO: 1242550
guaaauauaacguagaggu

SEQ ID NO: 1356291 - RNA, 19 nt, Artificial Sequence
  Description of Artificial Sequence: Synthetic oligonucleotide
  Antisense strand to SEQ ID NO: 1356290
accucuacguuauauuuac

SEQ ID NO: 1356292 - RNA, 19 nt, Artificial Sequence
  Description of Artificial Sequence: Synthetic oligonucleotide
  Sense strand starting at position 2429 of SEQ ID NO: 1242550
cgcuuugugggcagacaug

SEQ ID NO: 1356293 - RNA, 19 nt, Artificial Sequence
  Description of Artificial Sequence: Synthetic oligonucleotide
  Antisense strand to SEQ ID NO: 1356292
caugucugcccacaaagcg

SEQ ID NO: 1356294 - RNA, 19 nt, Artificial Sequence
  Description of Artificial Sequence: Synthetic oligonucleotide
  Sense strand starting at position 2577 of SEQ ID NO: 1242550
gugugaagugcucaacaua

SEQ ID NO: 1356295 - RNA, 19 nt, Artificial Sequence
  Description of Artificial Sequence: Synthetic oligonucleotide
  Antisense strand to SEQ ID NO: 1356294
uauguugagcacuucacac

SEQ ID NO: 1356296 - RNA, 19 nt, Artificial Sequence
  Description of Artificial Sequence: Synthetic oligonucleotide
  Sense strand starting at position 2580 of SEQ ID NO: 1242550
ugaagugcucaacauaauu

SEQ ID NO: 1356297 - RNA, 19 nt, Artificial Sequence
  Description of Artificial Sequence: Synthetic oligonucleotide
  Antisense strand to SEQ ID NO: 1356296
aauuauguugagcacuuca

SEQ ID NO: 1356298 - RNA, 19 nt, Artificial Sequence
  Description of Artificial Sequence: Synthetic oligonucleotide
  Sense strand starting at position 2588 of SEQ ID NO: 1242550
ucaacauaauuccuagugu

SEQ ID NO: 1356299 - RNA, 19 nt, Artificial Sequence
  Description of Artificial Sequence: Synthetic oligonucleotide
  Antisense strand to SEQ ID NO: 1356298
acacuaggaauuauguuga

SEQ ID NO: 1356300 - RNA, 19 nt, Artificial Sequence
  Description of Artificial Sequence: Synthetic oligonucleotide
  Sense strand starting at position 2700 of SEQ ID NO: 1242550
gaggcuaucagagacguua

SEQ ID NO: 1356301 - RNA, 19 nt, Artificial Sequence
  Description of Artificial Sequence: Synthetic oligonucleotide
  Antisense strand to SEQ ID NO: 1356300
uaacgucucugauagccuc

SEQ ID NO: 1356302 - RNA, 19 nt, Artificial Sequence
  Description of Artificial Sequence: Synthetic oligonucleotide
  Sense strand starting at position 2764 of SEQ ID NO: 1242550
gaacacagguugucuaaua

SEQ ID NO: 1356303 - RNA, 19 nt, Artificial Sequence
  Description of Artificial Sequence: Synthetic oligonucleotide
  Antisense strand to SEQ ID NO: 1356302
uauuagacaaccuguguuc

SEQ ID NO: 1356304 - RNA, 19 nt, Artificial Sequence
  Description of Artificial Sequence: Synthetic oligonucleotide
  Sense strand starting at position 2903 of SEQ ID NO: 1242550
augcuaagguaucuacuaa

SEQ ID NO: 1356305 - RNA, 19 nt, Artificial Sequence
  Description of Artificial Sequence: Synthetic oligonucleotide
  Antisense strand to SEQ ID NO: 1356304
uuaguagauaccuuagcau

SEQ ID NO: 1356306 - RNA, 19 nt, Artificial Sequence
  Description of Artificial Sequence: Synthetic oligonucleotide
  Sense strand starting at position 2984 of SEQ ID NO: 1242550
guaauuguaucaccuugag

SEQ ID NO: 1356307 - RNA, 19 nt, Artificial Sequence
  Description of Artificial Sequence: Synthetic oligonucleotide
  Antisense strand to SEQ ID NO: 1356306
cucaaggugauacaauuac

SEQ ID NO: 1356308 - RNA, 19 nt, Artificial Sequence
  Description of Artificial Sequence: Synthetic oligonucleotide
  Sense strand starting at position 2987 of SEQ ID NO: 1242550
auuguaucaccuugagaaa

SEQ ID NO: 1356309 - RNA, 19 nt, Artificial Sequence
  Description of Artificial Sequence: Synthetic oligonucleotide
  Antisense strand to SEQ ID NO: 1356308
uuucucaaggugauacaau

SEQ ID NO: 1356310 - RNA, 19 nt, Artificial Sequence
  Description of Artificial Sequence: Synthetic oligonucleotide
  Sense strand starting at position 3059 of SEQ ID NO: 1242550
uugcauuacuuucuaagga

SEQ ID NO: 1356311 - RNA, 19 nt, Artificial Sequence
  Description of Artificial Sequence: Synthetic oligonucleotide
  Antisense strand to SEQ ID NO: 1356310
uccuuagaaaguaaugcaa

SEQ ID NO: 1356312 - RNA, 19 nt, Artificial Sequence
  Description of Artificial Sequence: Synthetic oligonucleotide
  Sense strand starting at position 3174 of SEQ ID NO: 1242550
auguguuagcaugaggaaa

SEQ ID NO: 1356313 - RNA, 19 nt, Artificial Sequence
  Description of Artificial Sequence: Synthetic oligonucleotide
  Antisense strand to SEQ ID NO: 1356312
uuuccucaugcuaacacau

SEQ ID NO: 1356314 - RNA, 19 nt, Artificial Sequence
  Description of Artificial Sequence: Synthetic oligonucleotide
  Sense strand starting at position 3354 of SEQ ID NO: 1242550
ccggauaacccuuguaaau

SEQ ID NO: 1356315 - RNA, 19 nt, Artificial Sequence
  Description of Artificial Sequence: Synthetic oligonucleotide
  Antisense strand to SEQ ID NO: 1356314
auuuacaaggguuauccgg

SEQ ID NO: 1356316 - RNA, 19 nt, Artificial Sequence
  Description of Artificial Sequence: Synthetic oligonucleotide
  Sense strand starting at position 3518 of SEQ ID NO: 1242550
agauucguucuuuauccau

SEQ ID NO: 1356317 - RNA, 19 nt, Artificial Sequence
  Description of Artificial Sequence: Synthetic oligonucleotide
  Antisense strand to SEQ ID NO: 1356316
auggauaaagaacgaaucu

SEQ ID NO: 1356318 - RNA, 19 nt, Artificial Sequence
  Description of Artificial Sequence: Synthetic oligonucleotide
  Sense strand starting at position 3595 of SEQ ID NO: 1242550
gcaguuaggacuugaauag

SEQ ID NO: 1356319 - RNA, 19 nt, Artificial Sequence
  Description of Artificial Sequence: Synthetic oligonucleotide
  Antisense strand to SEQ ID NO: 1356318
cuauucaaguccuaacugc

SEQ ID NO: 1356320 - RNA, 19 nt, Artificial Sequence
  Description of Artificial Sequence: Synthetic oligonucleotide
  Sense strand starting at position 3607 of SEQ ID NO: 1242550
ugaauaggcuauucuccaa

SEQ ID NO: 1356321 - RNA, 19 nt, Artificial Sequence
  Description of Artificial Sequence: Synthetic oligonucleotide
  Antisense strand to SEQ ID NO: 1356320
uuggagaauagccuauuca

SEQ ID NO: 1356322 - RNA, 19 nt, Artificial Sequence
  Description of Artificial Sequence: Synthetic oligonucleotide
  Sense strand starting at position 3667 of SEQ ID NO: 1242550
gagcuaucucaggagccuu

SEQ ID NO: 1356323 - RNA, 19 nt, Artificial Sequence
  Description of Artificial Sequence: Synthetic oligonucleotide
  Antisense strand to SEQ ID NO: 1356322
aaggcuccugagauagcuc

SEQ ID NO: 1356324 - RNA, 19 nt, Artificial Sequence
  Description of Artificial Sequence: Synthetic oligonucleotide
  Sense strand starting at position 3760 of SEQ ID NO: 1242550
agcaguaguggguagacua

SEQ ID NO: 1356325 - RNA, 19 nt, Artificial Sequence
  Description of Artificial Sequence: Synthetic oligonucleotide
  Antisense strand to SEQ ID NO: 1356324
uagucuacccacuacugcu

SEQ ID NO: 1356326 - RNA, 19 nt, Artificial Sequence
  Description of Artificial Sequence: Synthetic oligonucleotide
  Sense strand starting at position 3767 of SEQ ID NO: 1242550
guggguagacuaugaauaa

SEQ ID NO: 1356327 - RNA, 19 nt, Artificial Sequence
  Description of Artificial Sequence: Synthetic oligonucleotide
  Antisense strand to SEQ ID NO: 1356326
uuauucauagucuacccac

SEQ ID NO: 1356328 - RNA, 19 nt, Artificial Sequence
  Description of Artificial Sequence: Synthetic oligonucleotide
  Sense strand starting at position 3877 of SEQ ID NO: 1242550
augacauacguuugaauua

SEQ ID NO: 1356329 - RNA, 19 nt, Artificial Sequence
  Description of Artificial Sequence: Synthetic oligonucleotide
  Antisense strand to SEQ ID NO: 1356328
uaauucaaacguaugucau

SEQ ID NO: 1356330 - RNA, 19 nt, Artificial Sequence
  Description of Artificial Sequence: Synthetic oligonucleotide
  Sense strand starting at position 16 of SEQ ID NO: 1242551
uaguuaugggagcagcuaa

SEQ ID NO: 1356331 - RNA, 19 nt, Artificial Sequence
  Description of Artificial Sequence: Synthetic oligonucleotide
  Antisense strand to SEQ ID NO: 1356330
uuagcugcucccauaacua

SEQ ID NO: 1356332 - RNA, 19 nt, Artificial Sequence
  Description of Artificial Sequence: Synthetic oligonucleotide
  Sense strand starting at position 43 of SEQ ID NO: 1242551
cuugcagauuuggugucaa

SEQ ID NO: 1356333 - RNA, 19 nt, Artificial Sequence
  Description of Artificial Sequence: Synthetic oligonucleotide
  Antisense strand to SEQ ID NO: 1356332
uugacaccaaaucugcaag

SEQ ID NO: 1356334 - RNA, 19 nt, Artificial Sequence
  Description of Artificial Sequence: Synthetic oligonucleotide
  Sense strand starting at position 96 of SEQ ID NO: 1242551
aacuguguuggauaccauu

SEQ ID NO: 1356335 - RNA, 19 nt, Artificial Sequence
  Description of Artificial Sequence: Synthetic oligonucleotide
  Antisense strand to SEQ ID NO: 1356334
aaugguauccaacacaguu

SEQ ID NO: 1356336 - RNA, 19 nt, Artificial Sequence
  Description of Artificial Sequence: Synthetic oligonucleotide
  Sense strand starting at position 181 of SEQ ID NO: 1242551
agacauggauagguuguaa

SEQ ID NO: 1356337 - RNA, 19 nt, Artificial Sequence
  Description of Artificial Sequence: Synthetic oligonucleotide
  Antisense strand to SEQ ID NO: 1356336
uuacaaccuauccaugucu

SEQ ID NO: 1356338 - RNA, 19 nt, Artificial Sequence
  Description of Artificial Sequence: Synthetic oligonucleotide
  Sense strand starting at position 307 of SEQ ID NO: 1242551
ggaggauagucaagaguga

SEQ ID NO: 1356339 - RNA, 19 nt, Artificial Sequence
  Description of Artificial Sequence: Synthetic oligonucleotide
  Antisense strand to SEQ ID NO: 1356338
ucacucuugacuauccucc

SEQ ID NO: 1356340 - RNA, 19 nt, Artificial Sequence
  Description of Artificial Sequence: Synthetic oligonucleotide
  Sense strand starting at position 311 of SEQ ID NO: 1242551
gauagucaagagugaauua

SEQ ID NO: 1356341 - RNA, 19 nt, Artificial Sequence
  Description of Artificial Sequence: Synthetic oligonucleotide
  Antisense strand to SEQ ID NO: 1356340
uaauucacucuugacuauc

SEQ ID NO: 1356342 - RNA, 19 nt, Artificial Sequence
  Description of Artificial Sequence: Synthetic oligonucleotide
  Sense strand starting at position 710 of SEQ ID NO: 1242551
gacuguggugaagaaguuu

SEQ ID NO: 1356343 - RNA, 19 nt, Artificial Sequence
  Description of Artificial Sequence: Synthetic oligonucleotide
  Antisense strand to SEQ ID NO: 1356342
aaacuucuucaccacaguc

SEQ ID NO: 1356344 - RNA, 19 nt, Artificial Sequence
  Description of Artificial Sequence: Synthetic oligonucleotide
  Sense strand starting at position 1367 of SEQ ID NO: 1242551
cuuagccacgguuauagaa

SEQ ID NO: 1356345 - RNA, 19 nt, Artificial Sequence
  Description of Artificial Sequence: Synthetic oligonucleotide
  Antisense strand to SEQ ID NO: 1356344
uucuauaaccguggcuaag

SEQ ID NO: 1356346 - RNA, 19 nt, Artificial Sequence
  Description of Artificial Sequence: Synthetic oligonucleotide
  Sense strand starting at position 1486 of SEQ ID NO: 1242551
ugcguucaccggguuuauu

SEQ ID NO: 1356347 - RNA, 19 nt, Artificial Sequence
  Description of Artificial Sequence: Synthetic oligonucleotide
  Antisense strand to SEQ ID NO: 1356346
aauaaacccggugaacgca

SEQ ID NO: 1356348 - RNA, 19 nt, Artificial Sequence
  Description of Artificial Sequence: Synthetic oligonucleotide
  Sense strand starting at position 1487 of SEQ ID NO: 1242551
gcguucaccggguuuauua

SEQ ID NO: 1356349 - RNA, 19 nt, Artificial Sequence
  Description of Artificial Sequence: Synthetic oligonucleotide
  Antisense strand to SEQ ID NO: 1356348
uaauaaacccggugaacgc

SEQ ID NO: 1356350 - RNA, 19 nt, Artificial Sequence
  Description of Artificial Sequence: Synthetic oligonucleotide
  Sense strand starting at position 1589 of SEQ ID NO: 1242551
ggucacagaucagcugaaa

SEQ ID NO: 1356351 - RNA, 19 nt, Artificial Sequence
  Description of Artificial Sequence: Synthetic oligonucleotide
  Antisense strand to SEQ ID NO: 1356350
uuucagcugaucugugacc

SEQ ID NO: 1356352 - RNA, 19 nt, Artificial Sequence
  Description of Artificial Sequence: Synthetic oligonucleotide
  Sense strand starting at position 1808 of SEQ ID NO: 1242551
cgcggucucccuccuugaa

SEQ ID NO: 1356353 - RNA, 19 nt, Artificial Sequence
  Description of Artificial Sequence: Synthetic oligonucleotide
  Antisense strand to SEQ ID NO: 1356352
uucaaggagggagaccgcg

SEQ ID NO: 1356354 - RNA, 19 nt, Artificial Sequence
  Description of Artificial Sequence: Synthetic oligonucleotide
  Sense strand starting at position 2032 of SEQ ID NO: 1242551
caguuuccauggcuagaau

SEQ ID NO: 1356355 - RNA, 19 nt, Artificial Sequence
  Description of Artificial Sequence: Synthetic oligonucleotide
  Antisense strand to SEQ ID NO: 1356354
auucuagccauggaaacug

SEQ ID NO: 1356356 - RNA, 19 nt, Artificial Sequence
  Description of Artificial Sequence: Synthetic oligonucleotide
  Sense strand starting at position 2033 of SEQ ID NO: 1242551
aguuuccauggcuagaauu

SEQ ID NO: 1356357 - RNA, 19 nt, Artificial Sequence
  Description of Artificial Sequence: Synthetic oligonucleotide
  Antisense strand to SEQ ID NO: 1356356
aauucuagccauggaaacu

SEQ ID NO: 1356358 - RNA, 19 nt, Artificial Sequence
  Description of Artificial Sequence: Synthetic oligonucleotide
  Sense strand starting at position 2057 of SEQ ID NO: 1242551
cuguccauaggcugauaga

SEQ ID NO: 1356359 - RNA, 19 nt, Artificial Sequence
  Description of Artificial Sequence: Synthetic oligonucleotide
  Antisense strand to SEQ ID NO: 1356358
ucuaucagccuauggacag

SEQ ID NO: 1356360 - RNA, 19 nt, Artificial Sequence
  Description of Artificial Sequence: Synthetic oligonucleotide
  Sense strand starting at position 2494 of SEQ ID NO: 1242551
agcagaagcccuuaguaga

SEQ ID NO: 1356361 - RNA, 19 nt, Artificial Sequence
  Description of Artificial Sequence: Synthetic oligonucleotide
  Antisense strand to SEQ ID NO: 1356360
ucuacuaagggcuucugcu

SEQ ID NO: 1356362 - RNA, 19 nt, Artificial Sequence
  Description of Artificial Sequence: Synthetic oligonucleotide
  Sense strand starting at position 2515 of SEQ ID NO: 1242551
acagacauuccgcauccuu

SEQ ID NO: 1356363 - RNA, 19 nt, Artificial Sequence
  Description of Artificial Sequence: Synthetic oligonucleotide
  Antisense strand to SEQ ID NO: 1356362
aaggaugcggaaugucugu

SEQ ID NO: 1356364 - RNA, 19 nt, Artificial Sequence
  Description of Artificial Sequence: Synthetic oligonucleotide
  Sense strand starting at position 2594 of SEQ ID NO: 1242551
gggcgagggcaucaaguau

SEQ ID NO: 1356365 - RNA, 19 nt, Artificial Sequence
  Description of Artificial Sequence: Synthetic oligonucleotide
  Antisense strand to SEQ ID NO: 1356364
auacuugaugcccucgccc

SEQ ID NO: 1356366 - RNA, 19 nt, Artificial Sequence
  Description of Artificial Sequence: Synthetic oligonucleotide
  Sense strand starting at position 2601 of SEQ ID NO: 1242551
ggcaucaaguauucuggga

SEQ ID NO: 1356367 - RNA, 19 nt, Artificial Sequence
  Description of Artificial Sequence: Synthetic oligonucleotide
  Antisense strand to SEQ ID NO: 1356366
ucccagaauacuugaugcc

SEQ ID NO: 1356368 - RNA, 19 nt, Artificial Sequence
  Description of Artificial Sequence: Synthetic oligonucleotide
  Sense strand starting at position 2660 of SEQ ID NO: 1242551
ucaugugagagccagugau

SEQ ID NO: 1356369 - RNA, 19 nt, Artificial Sequence
  Description of Artificial Sequence: Synthetic oligonucleotide
  Antisense strand to SEQ ID NO: 1356368
aucacuggcucucacauga

SEQ ID NO: 1356370 - RNA, 19 nt, Artificial Sequence
  Description of Artificial Sequence: Synthetic oligonucleotide
  Sense strand starting at position 2664 of SEQ ID NO: 1242551
gugagagccagugaucacu

SEQ ID NO: 1356371 - RNA, 19 nt, Artificial Sequence
  Description of Artificial Sequence: Synthetic oligonucleotide
  Antisense strand to SEQ ID NO: 1356370
agugaucacuggcucucac

SEQ ID NO: 1356372 - RNA, 19 nt, Artificial Sequence
  Description of Artificial Sequence: Synthetic oligonucleotide
  Sense strand starting at position 2666 of SEQ ID NO: 1242551
gagagccagugaucacuuu

SEQ ID NO: 1356373 - RNA, 19 nt, Artificial Sequence
  Description of Artificial Sequence: Synthetic oligonucleotide
  Antisense strand to SEQ ID NO: 1356372
aaagugaucacuggcucuc

SEQ ID NO: 1356374 - RNA, 19 nt, Artificial Sequence
  Description of Artificial Sequence: Synthetic oligonucleotide
  Sense strand starting at position 2913 of SEQ ID NO: 1242551
cugcgaguucugccuccca

SEQ ID NO: 1356375 - RNA, 19 nt, Artificial Sequence
  Description of Artificial Sequence: Synthetic oligonucleotide
  Antisense strand to SEQ ID NO: 1356374
ugggaggcagaacucgcag

SEQ ID NO: 1356376 - RNA, 19 nt, Artificial Sequence
  Description of Artificial Sequence: Synthetic oligonucleotide
  Sense strand starting at position 3137 of SEQ ID NO: 1242551
cgaguuaauguugaagauc

SEQ ID NO: 1356377 - RNA, 19 nt, Artificial Sequence
  Description of Artificial Sequence: Synthetic oligonucleotide
  Antisense strand to SEQ ID NO: 1356376
gaucuucaacauuaacucg

SEQ ID NO: 1356378 - RNA, 19 nt, Artificial Sequence
  Description of Artificial Sequence: Synthetic oligonucleotide
  Sense strand starting at position 3145 of SEQ ID NO: 1242551
uguugaagaucccuuugau

SEQ ID NO: 1356379 - RNA, 19 nt, Artificial Sequence
  Description of Artificial Sequence: Synthetic oligonucleotide
  Antisense strand to SEQ ID NO: 1356378
aucaaagggaucuucaaca

SEQ ID NO: 1356380 - RNA, 19 nt, Artificial Sequence
  Description of Artificial Sequence: Synthetic oligonucleotide
  Sense strand starting at position 3148 of SEQ ID NO: 1242551
ugaagaucccuuugaugcu

SEQ ID NO: 1356381 - RNA, 19 nt, Artificial Sequence
  Description of Artificial Sequence: Synthetic oligonucleotide
  Antisense strand to SEQ ID NO: 1356380
agcaucaaagggaucuuca

SEQ ID NO: 1356382 - RNA, 19 nt, Artificial Sequence
  Description of Artificial Sequence: Synthetic oligonucleotide
  Sense strand starting at position 3210 of SEQ ID NO: 1242551
ggauauuuauugggaacau

SEQ ID NO: 1356383 - RNA, 19 nt, Artificial Sequence
  Description of Artificial Sequence: Synthetic oligonucleotide
  Antisense strand to SEQ ID NO: 1356382
auguucccaauaaauaucc

SEQ ID NO: 1356384 - RNA, 19 nt, Artificial Sequence
  Description of Artificial Sequence: Synthetic oligonucleotide
  Sense strand starting at position 3220 of SEQ ID NO: 1242551
ugggaacauucuguucuca

SEQ ID NO: 1356385 - RNA, 19 nt, Artificial Sequence
  Description of Artificial Sequence: Synthetic oligonucleotide
  Antisense strand to SEQ ID NO: 1356384
ugagaacagaauguuccca

SEQ ID NO: 1356386 - RNA, 19 nt, Artificial Sequence
  Description of Artificial Sequence: Synthetic oligonucleotide
  Sense strand starting at position 3222 of SEQ ID NO: 1242551
ggaacauucuguucucaag

SEQ ID NO: 1356387 - RNA, 19 nt, Artificial Sequence
  Description of Artificial Sequence: Synthetic oligonucleotide
  Antisense strand to SEQ ID NO: 1356386
cuugagaacagaauguucc

SEQ ID NO: 1356388 - RNA, 19 nt, Artificial Sequence
  Description of Artificial Sequence: Synthetic oligonucleotide
  Sense strand starting at position 3576 of SEQ ID NO: 1242551
aacugugauuacucgggaa

SEQ ID NO: 1356389 - RNA, 19 nt, Artificial Sequence
  Description of Artificial Sequence: Synthetic oligonucleotide
  Antisense strand to SEQ ID NO: 1356388
uucccgaguaaucacaguu

SEQ ID NO: 1356390 - RNA, 19 nt, Artificial Sequence
  Description of Artificial Sequence: Synthetic oligonucleotide
  Sense strand starting at position 3578 of SEQ ID NO: 1242551
cugugauuacucgggaauc

SEQ ID NO: 1356391 - RNA, 19 nt, Artificial Sequence
  Description of Artificial Sequence: Synthetic oligonucleotide
  Antisense strand to SEQ ID NO: 1356390
gauucccgaguaaucacag

SEQ ID NO: 1356392 - RNA, 19 nt, Artificial Sequence
  Description of Artificial Sequence: Synthetic oligonucleotide
  Sense strand starting at position 3580 of SEQ ID NO: 1242551
gugauuacucgggaaucau

SEQ ID NO: 1356393 - RNA, 19 nt, Artificial Sequence
  Description of Artificial Sequence: Synthetic oligonucleotide
  Antisense strand to SEQ ID NO: 1356392
augauucccgaguaaucac

SEQ ID NO: 1356394 - RNA, 19 nt, Artificial Sequence
  Description of Artificial Sequence: Synthetic oligonucleotide
  Sense strand starting at position 3694 of SEQ ID NO: 1242551
aguggcaucuuaguuauuu

SEQ ID NO: 1356395 - RNA, 19 nt, Artificial Sequence
  Description of Artificial Sequence: Synthetic oligonucleotide
  Antisense strand to SEQ ID NO: 1356394
aaauaacuaagaugccacu

SEQ ID NO: 1356396 - RNA, 19 nt, Artificial Sequence
  Description of Artificial Sequence: Synthetic oligonucleotide
  Sense strand starting at position 3724 of SEQ ID NO: 1242551
uauagucaucugcaaggua

SEQ ID NO: 1356397 - RNA, 19 nt, Artificial Sequence
  Description of Artificial Sequence: Synthetic oligonucleotide
  Antisense strand to SEQ ID NO: 1356396
uaccuugcagaugacuaua

SEQ ID NO: 1356398 - RNA, 19 nt, Artificial Sequence
  Description of Artificial Sequence: Synthetic oligonucleotide
  Sense strand starting at position 3764 of SEQ ID NO: 1242551
cucugucgacuaugaacaa

SEQ ID NO: 1356399 - RNA, 19 nt, Artificial Sequence
  Description of Artificial Sequence: Synthetic oligonucleotide
  Antisense strand to SEQ ID NO: 1356398
uuguucauagucgacagag

SEQ ID NO: 1356400 - RNA, 19 nt, Artificial Sequence
  Description of Artificial Sequence: Synthetic oligonucleotide
  Sense strand starting at position 3775 of SEQ ID NO: 1242551
augaacaaaugucugguua

SEQ ID NO: 1356401 - RNA, 19 nt, Artificial Sequence
  Description of Artificial Sequence: Synthetic oligonucleotide
  Antisense strand to SEQ ID NO: 1356400
uaaccagacauuuguucau

SEQ ID NO: 1356402 - RNA, 19 nt, Artificial Sequence
  Description of Artificial Sequence: Synthetic oligonucleotide
  Sense strand starting at position 3776 of SEQ ID NO: 1242551
ugaacaaaugucugguuag

SEQ ID NO: 1356403 - RNA, 19 nt, Artificial Sequence
  Description of Artificial Sequence: Synthetic oligonucleotide
  Antisense strand to SEQ ID NO: 1356402
cuaaccagacauuuguuca

SEQ ID NO: 1356404 - RNA, 19 nt, Artificial Sequence
  Description of Artificial Sequence: Synthetic oligonucleotide
  Sense strand starting at position 3779 of SEQ ID NO: 1242551
acaaaugucugguuagcag

SEQ ID NO: 1356405 - RNA, 19 nt, Artificial Sequence
  Description of Artificial Sequence: Synthetic oligonucleotide
  Antisense strand to SEQ ID NO: 1356404
cugcuaaccagacauuugu

SEQ ID NO: 1356406 - RNA, 19 nt, Artificial Sequence
  Description of Artificial Sequence: Synthetic oligonucleotide
  Sense strand starting at position 3799 of SEQ ID NO: 1242551
gguaguuagacguaguuag

SEQ ID NO: 1356407 - RNA, 19 nt, Artificial Sequence
  Description of Artificial Sequence: Synthetic oligonucleotide
  Antisense strand to SEQ ID NO: 1356406
cuaacuacgucuaacuacc

SEQ ID NO: 1356408 - RNA, 19 nt, Artificial Sequence
  Description of Artificial Sequence: Synthetic oligonucleotide
  Sense strand starting at position 3815 of SEQ ID NO: 1242551
uagauuuaguuagacgaaa

SEQ ID NO: 1356409 - RNA, 19 nt, Artificial Sequence
  Description of Artificial Sequence: Synthetic oligonucleotide
  Antisense strand to SEQ ID NO: 1356408
uuucgucuaacuaaaucua

SEQ ID NO: 1356410 - RNA, 19 nt, Artificial Sequence
  Description of Artificial Sequence: Synthetic oligonucleotide
  Sense strand starting at position 76 of SEQ ID NO: 1242552
gggaauggcuaauaaacua

SEQ ID NO: 1356411 - RNA, 19 nt, Artificial Sequence
  Description of Artificial Sequence: Synthetic oligonucleotide
  Antisense strand to SEQ ID NO: 1356410
uaguuuauuagccauuccc

SEQ ID NO: 1356412 - RNA, 19 nt, Artificial Sequence
  Description of Artificial Sequence: Synthetic oligonucleotide
  Sense strand starting at position 102 of SEQ ID NO: 1242552
cccauauagcagcauguau

SEQ ID NO: 1356413 - RNA, 19 nt, Artificial Sequence
  Description of Artificial Sequence: Synthetic oligonucleotide
  Antisense strand to SEQ ID NO: 1356412
auacaugcugcuauauggg

SEQ ID NO: 1356414 - RNA, 19 nt, Artificial Sequence
  Description of Artificial Sequence: Synthetic oligonucleotide
  Sense strand starting at position 119 of SEQ ID NO: 1242552
auuagaaacugugcuauag

SEQ ID NO: 1356415 - RNA, 19 nt, Artificial Sequence
  Description of Artificial Sequence: Synthetic oligonucleotide
  Antisense strand to SEQ ID NO: 1356414
cuauagcacaguuucuaau

SEQ ID NO: 1356416 - RNA, 19 nt, Artificial Sequence
  Description of Artificial Sequence: Synthetic oligonucleotide
  Sense strand starting at position 123 of SEQ ID NO: 1242552
gaaacugugcuauaggcuu

SEQ ID NO: 1356417 - RNA, 19 nt, Artificial Sequence
  Description of Artificial Sequence: Synthetic oligonucleotide
  Antisense strand to SEQ ID NO: 1356416
aagccuauagcacaguuuc

SEQ ID NO: 1356418 - RNA, 19 nt, Artificial Sequence
  Description of Artificial Sequence: Synthetic oligonucleotide
  Sense strand starting at position 477 of SEQ ID NO: 1242552
gcuaccuuuaggugguaau

SEQ ID NO: 1356419 - RNA, 19 nt, Artificial Sequence
  Description of Artificial Sequence: Synthetic oligonucleotide
  Antisense strand to SEQ ID NO: 1356418
auuaccaccuaaagguagc

SEQ ID NO: 1356420 - RNA, 19 nt, Artificial Sequence
  Description of Artificial Sequence: Synthetic oligonucleotide
  Sense strand starting at position 514 of SEQ ID NO: 1242552
aggagccuucugggaugau

SEQ ID NO: 1356421 - RNA, 19 nt, Artificial Sequence
  Description of Artificial Sequence: Synthetic oligonucleotide
  Antisense strand to SEQ ID NO: 1356420
aucaucccagaaggcuccu

SEQ ID NO: 1356422 - RNA, 19 nt, Artificial Sequence
  Description of Artificial Sequence: Synthetic oligonucleotide
  Sense strand starting at position 517 of SEQ ID NO: 1242552
agccuucugggaugaugga

SEQ ID NO: 1356423 - RNA, 19 nt, Artificial Sequence
  Description of Artificial Sequence: Synthetic oligonucleotide
  Antisense strand to SEQ ID NO: 1356422
uccaucaucccagaaggcu

SEQ ID NO: 1356424 - RNA, 19 nt, Artificial Sequence
  Description of Artificial Sequence: Synthetic oligonucleotide
  Sense strand starting at position 598 of SEQ ID NO: 1242552
gcacauuacgcuguauguu

SEQ ID NO: 1356425 - RNA, 19 nt, Artificial Sequence
  Description of Artificial Sequence: Synthetic oligonucleotide
  Antisense strand to SEQ ID NO: 1356424
aacauacagcguaaugugc

SEQ ID NO: 1356426 - RNA, 19 nt, Artificial Sequence
  Description of Artificial Sequence: Synthetic oligonucleotide
  Sense strand starting at position 599 of SEQ ID NO: 1242552
cacauuacgcuguauguuu

SEQ ID NO: 1356427 - RNA, 19 nt, Artificial Sequence
  Description of Artificial Sequence: Synthetic oligonucleotide
  Antisense strand to SEQ ID NO: 1356426
aaacauacagcguaaugug

SEQ ID NO: 1356428 - RNA, 19 nt, Artificial Sequence
  Description of Artificial Sequence: Synthetic oligonucleotide
  Sense strand starting at position 1110 of SEQ ID NO: 1242552
uauugaaagcaguggaauu

SEQ ID NO: 1356429 - RNA, 19 nt, Artificial Sequence
  Description of Artificial Sequence: Synthetic oligonucleotide
  Antisense strand to SEQ ID NO: 1356428
aauuccacugcuuucaaua

SEQ ID NO: 1356430 - RNA, 19 nt, Artificial Sequence
  Description of Artificial Sequence: Synthetic oligonucleotide
  Sense strand starting at position 1474 of SEQ ID NO: 1242552
uggcauaugguguaagaga

SEQ ID NO: 1356431 - RNA, 19 nt, Artificial Sequence
  Description of Artificial Sequence: Synthetic oligonucleotide
  Antisense strand to SEQ ID NO: 1356430
ucucuuacaccauaugcca

SEQ ID NO: 1356432 - RNA, 19 nt, Artificial Sequence
  Description of Artificial Sequence: Synthetic oligonucleotide
  Sense strand starting at position 1488 of SEQ ID NO: 1242552
agagaacucuuccuacuug

SEQ ID NO: 1356433 - RNA, 19 nt, Artificial Sequence
  Description of Artificial Sequence: Synthetic oligonucleotide
  Antisense strand to SEQ ID NO: 1356432
caaguaggaagaguucucu

SEQ ID NO: 1356434 - RNA, 19 nt, Artificial Sequence
  Description of Artificial Sequence: Synthetic oligonucleotide
  Sense strand starting at position 1611 of SEQ ID NO: 1242552
gcgcgggaugucgucgaau

SEQ ID NO: 1356435 - RNA, 19 nt, Artificial Sequence
  Description of Artificial Sequence: Synthetic oligonucleotide
  Antisense strand to SEQ ID NO: 1356434
auucgacgacaucccgcgc

SEQ ID NO: 1356436 - RNA, 19 nt, Artificial Sequence
  Description of Artificial Sequence: Synthetic oligonucleotide
  Sense strand starting at position 1650 of SEQ ID NO: 1242552
ugcgcuucucgguaggaga

SEQ ID NO: 1356437 - RNA, 19 nt, Artificial Sequence
  Description of Artificial Sequence: Synthetic oligonucleotide
  Antisense strand to SEQ ID NO: 1356436
ucuccuaccgagaagcgca

SEQ ID NO: 1356438 - RNA, 19 nt, Artificial Sequence
  Description of Artificial Sequence: Synthetic oligonucleotide
  Sense strand starting at position 2041 of SEQ ID NO: 1242552
gagaacggcccuggaaauu

SEQ ID NO: 1356439 - RNA, 19 nt, Artificial Sequence
  Description of Artificial Sequence: Synthetic oligonucleotide
  Antisense strand to SEQ ID NO: 1356438
aauuuccagggccguucuc

SEQ ID NO: 1356440 - RNA, 19 nt, Artificial Sequence
  Description of Artificial Sequence: Synthetic oligonucleotide
  Sense strand starting at position 2062 of SEQ ID NO: 1242552
gccuuucuguugguggaga

SEQ ID NO: 1356441 - RNA, 19 nt, Artificial Sequence
  Description of Artificial Sequence: Synthetic oligonucleotide
  Antisense strand to SEQ ID NO: 1356440
ucuccaccaacagaaaggc

SEQ ID NO: 1356442 - RNA, 19 nt, Artificial Sequence
  Description of Artificial Sequence: Synthetic oligonucleotide
  Sense strand starting at position 2263 of SEQ ID NO: 1242552
agagcuguaacccgagaca

SEQ ID NO: 1356443 - RNA, 19 nt, Artificial Sequence
  Description of Artificial Sequence: Synthetic oligonucleotide
  Antisense strand to SEQ ID NO: 1356442
ugucucggguuacagcucu

SEQ ID NO: 1356444 - RNA, 19 nt, Artificial Sequence
  Description of Artificial Sequence: Synthetic oligonucleotide
  Sense strand starting at position 2295 of SEQ ID NO: 1242552
aucuaaggccucuguauau

SEQ ID NO: 1356445 - RNA, 19 nt, Artificial Sequence
  Description of Artificial Sequence: Synthetic oligonucleotide
  Antisense strand to SEQ ID NO: 1356444
auauacagaggccuuagau

SEQ ID NO: 1356446 - RNA, 19 nt, Artificial Sequence
  Description of Artificial Sequence: Synthetic oligonucleotide
  Sense strand starting at position 2302 of SEQ ID NO: 1242552
gccucuguauauuugucua

SEQ ID NO: 1356447 - RNA, 19 nt, Artificial Sequence
  Description of Artificial Sequence: Synthetic oligonucleotide
  Antisense strand to SEQ ID NO: 1356446
uagacaaauauacagaggc

SEQ ID NO: 1356448 - RNA, 19 nt, Artificial Sequence
  Description of Artificial Sequence: Synthetic oligonucleotide
  Sense strand starting at position 2372 of SEQ ID NO: 1242552
ccuuguggcaaggaguauu

SEQ ID NO: 1356449 - RNA, 19 nt, Artificial Sequence
  Description of Artificial Sequence: Synthetic oligonucleotide
  Antisense strand to SEQ ID NO: 1356448
aauacuccuugccacaagg

SEQ ID NO: 1356450 - RNA, 19 nt, Artificial Sequence
  Description of Artificial Sequence: Synthetic oligonucleotide
  Sense strand starting at position 2380 of SEQ ID NO: 1242552
caaggaguauuguuaggca

SEQ ID NO: 1356451 - RNA, 19 nt, Artificial Sequence
  Description of Artificial Sequence: Synthetic oligonucleotide
  Antisense strand to SEQ ID NO: 1356450
ugccuaacaauacuccuug

SEQ ID NO: 1356452 - RNA, 19 nt, Artificial Sequence
  Description of Artificial Sequence: Synthetic oligonucleotide
  Sense strand starting at position 2541 of SEQ ID NO: 1242552
ugguauuccuguguuugga

SEQ ID NO: 1356453 - RNA, 19 nt, Artificial Sequence
  Description of Artificial Sequence: Synthetic oligonucleotide
  Antisense strand to SEQ ID NO: 1356452
uccaaacacaggaauacca

SEQ ID NO: 1356454 - RNA, 19 nt, Artificial Sequence
  Description of Artificial Sequence: Synthetic oligonucleotide
  Sense strand starting at position 2982 of SEQ ID NO: 1242552
gagguuggccuccaucuuu

SEQ ID NO: 1356455 - RNA, 19 nt, Artificial Sequence
  Description of Artificial Sequence: Synthetic oligonucleotide
  Antisense strand to SEQ ID NO: 1356454
aaagauggaggccaaccuc

SEQ ID NO: 1356456 - RNA, 19 nt, Artificial Sequence
  Description of Artificial Sequence: Synthetic oligonucleotide
  Sense strand starting at position 3108 of SEQ ID NO: 1242552
cacccuuaauggucuguga

SEQ ID NO: 1356457 - RNA, 19 nt, Artificial Sequence
  Description of Artificial Sequence: Synthetic oligonucleotide
  Antisense strand to SEQ ID NO: 1356456
ucacagaccauuaagggug

SEQ ID NO: 1356458 - RNA, 19 nt, Artificial Sequence
  Description of Artificial Sequence: Synthetic oligonucleotide
  Sense strand starting at position 3110 of SEQ ID NO: 1242552
cccuuaauggucugugaua

SEQ ID NO: 1356459 - RNA, 19 nt, Artificial Sequence
  Description of Artificial Sequence: Synthetic oligonucleotide
  Antisense strand to SEQ ID NO: 1356458
uaucacagaccauuaaggg

SEQ ID NO: 1356460 - RNA, 19 nt, Artificial Sequence
  Description of Artificial Sequence: Synthetic oligonucleotide
  Sense strand starting at position 3111 of SEQ ID NO: 1242552
ccuuaauggucugugauag

SEQ ID NO: 1356461 - RNA, 19 nt, Artificial Sequence
  Description of Artificial Sequence: Synthetic oligonucleotide
  Antisense strand to SEQ ID NO: 1356460
cuaucacagaccauuaagg

SEQ ID NO: 1356462 - RNA, 19 nt, Artificial Sequence
  Description of Artificial Sequence: Synthetic oligonucleotide
  Sense strand starting at position 3112 of SEQ ID NO: 1242552
cuuaauggucugugauaga

SEQ ID NO: 1356463 - RNA, 19 nt, Artificial Sequence
  Description of Artificial Sequence: Synthetic oligonucleotide
  Antisense strand to SEQ ID NO: 1356462
ucuaucacagaccauuaag

SEQ ID NO: 1356464 - RNA, 19 nt, Artificial Sequence
  Description of Artificial Sequence: Synthetic oligonucleotide
  Sense strand starting at position 3117 of SEQ ID NO: 1242552
uggucugugauagaauagu

SEQ ID NO: 1356465 - RNA, 19 nt, Artificial Sequence
  Description of Artificial Sequence: Synthetic oligonucleotide
  Antisense strand to SEQ ID NO: 1356464
acuauucuaucacagacca

SEQ ID NO: 1356466 - RNA, 19 nt, Artificial Sequence
  Description of Artificial Sequence: Synthetic oligonucleotide
  Sense strand starting at position 3123 of SEQ ID NO: 1242552
gugauagaauaguuaugua

SEQ ID NO: 1356467 - RNA, 19 nt, Artificial Sequence
  Description of Artificial Sequence: Synthetic oligonucleotide
  Antisense strand to SEQ ID NO: 1356466
uacauaacuauucuaucac

SEQ ID NO: 1356468 - RNA, 19 nt, Artificial Sequence
  Description of Artificial Sequence: Synthetic oligonucleotide
  Sense strand starting at position 3131 of SEQ ID NO: 1242552
auaguuauguauguuugca

SEQ ID NO: 1356469 - RNA, 19 nt, Artificial Sequence
  Description of Artificial Sequence: Synthetic oligonucleotide
  Antisense strand to SEQ ID NO: 1356468
ugcaaacauacauaacuau

SEQ ID NO: 1356470 - RNA, 19 nt, Artificial Sequence
  Description of Artificial Sequence: Synthetic oligonucleotide
  Sense strand starting at position 3135 of SEQ ID NO: 1242552
uuauguauguuugcacuga

SEQ ID NO: 1356471 - RNA, 19 nt, Artificial Sequence
  Description of Artificial Sequence: Synthetic oligonucleotide
  Antisense strand to SEQ ID NO: 1356470
ucagugcaaacauacauaa

SEQ ID NO: 1356472 - RNA, 19 nt, Artificial Sequence
  Description of Artificial Sequence: Synthetic oligonucleotide
  Sense strand starting at position 3139 of SEQ ID NO: 1242552
guauguuugcacugagcaa

SEQ ID NO: 1356473 - RNA, 19 nt, Artificial Sequence
  Description of Artificial Sequence: Synthetic oligonucleotide
  Antisense strand to SEQ ID NO: 1356472
uugcucagugcaaacauac

SEQ ID NO: 1356474 - RNA, 19 nt, Artificial Sequence
  Description of Artificial Sequence: Synthetic oligonucleotide
  Sense strand starting at position 3554 of SEQ ID NO: 1242552
ucugcugguuuauuaaaua

SEQ ID NO: 1356475 - RNA, 19 nt, Artificial Sequence
  Description of Artificial Sequence: Synthetic oligonucleotide
  Antisense strand to SEQ ID NO: 1356474
uauuuaauaaaccagcaga

SEQ ID NO: 1356476 - RNA, 19 nt, Artificial Sequence
  Description of Artificial Sequence: Synthetic oligonucleotide
  Sense strand starting at position 3640 of SEQ ID NO: 1242552
guuagaaaguccucugcac

SEQ ID NO: 1356477 - RNA, 19 nt, Artificial Sequence
  Description of Artificial Sequence: Synthetic oligonucleotide
  Antisense strand to SEQ ID NO: 1356476
gugcagaggacuuucuaac

SEQ ID NO: 1356478 - RNA, 19 nt, Artificial Sequence
  Description of Artificial Sequence: Synthetic oligonucleotide
  Sense strand starting at position 3765 of SEQ ID NO: 1242552
cugguagcaucuuuauuau

SEQ ID NO: 1356479 - RNA, 19 nt, Artificial Sequence
  Description of Artificial Sequence: Synthetic oligonucleotide
  Antisense strand to SEQ ID NO: 1356478
auaauaaagaugcuaccag

SEQ ID NO: 1356480 - RNA, 19 nt, Artificial Sequence
  Description of Artificial Sequence: Synthetic oligonucleotide
  Sense strand starting at position 3824 of SEQ ID NO: 1242552
gccugagaagucugcacua

SEQ ID NO: 1356481 - RNA, 19 nt, Artificial Sequence
  Description of Artificial Sequence: Synthetic oligonucleotide
  Antisense strand to SEQ ID NO: 1356480
uagugcagacuucucaggc

SEQ ID NO: 1356482 - RNA, 19 nt, Artificial Sequence
  Description of Artificial Sequence: Synthetic oligonucleotide
  Sense strand starting at position 3826 of SEQ ID NO: 1242552
cugagaagucugcacuaag

SEQ ID NO: 1356483 - RNA, 19 nt, Artificial Sequence
  Description of Artificial Sequence: Synthetic oligonucleotide
  Antisense strand to SEQ ID NO: 1356482
cuuagugcagacuucucag

SEQ ID NO: 1356484 - RNA, 19 nt, Artificial Sequence
  Description of Artificial Sequence: Synthetic oligonucleotide
  Sense strand starting at position 3854 of SEQ ID NO: 1242552
gcagaauucugggccacca

SEQ ID NO: 1356485 - RNA, 19 nt, Artificial Sequence
  Description of Artificial Sequence: Synthetic oligonucleotide
  Antisense strand to SEQ ID NO: 1356484
ugguggcccagaauucugc

SEQ ID NO: 1356486 - RNA, 19 nt, Artificial Sequence
  Description of Artificial Sequence: Synthetic oligonucleotide
  Sense strand starting at position 3892 of SEQ ID NO: 1242552
uugggaugacauuguauua

SEQ ID NO: 1356487 - RNA, 19 nt, Artificial Sequence
  Description of Artificial Sequence: Synthetic oligonucleotide
  Antisense strand to SEQ ID NO: 1356486
uaauacaaugucaucccaa

SEQ ID NO: 1356488 - RNA, 19 nt, Artificial Sequence
  Description of Artificial Sequence: Synthetic oligonucleotide
  Sense strand starting at position 3920 of SEQ ID NO: 1242552
gguuucuccauguguccau

SEQ ID NO: 1356489 - RNA, 19 nt, Artificial Sequence
  Description of Artificial Sequence: Synthetic oligonucleotide
  Antisense strand to SEQ ID NO: 1356488
auggacacauggagaaacc

SEQ ID NO: 1356490 - RNA, 19 nt, Artificial Sequence
  Description of Artificial Sequence: Synthetic oligonucleotide
  Sense strand starting at position 2 of SEQ ID NO: 1242553
cagguugggcuauacugau

SEQ ID NO: 1356491 - RNA, 19 nt, Artificial Sequence
  Description of Artificial Sequence: Synthetic oligonucleotide
  Antisense strand to SEQ ID NO: 1356490
aucaguauagcccaaccug

SEQ ID NO: 1356492 - RNA, 19 nt, Artificial Sequence
  Description of Artificial Sequence: Synthetic oligonucleotide
  Sense strand starting at position 114 of SEQ ID NO: 1242553
acaugauauuuggagaacu

SEQ ID NO: 1356493 - RNA, 19 nt, Artificial Sequence
  Description of Artificial Sequence: Synthetic oligonucleotide
  Antisense strand to SEQ ID NO: 1356492
aguucuccaaauaucaugu

SEQ ID NO: 1356494 - RNA, 19 nt, Artificial Sequence
  Description of Artificial Sequence: Synthetic oligonucleotide
  Sense strand starting at position 165 of SEQ ID NO: 1242553
gguuuaaagaauggaucuu

SEQ ID NO: 1356495 - RNA, 19 nt, Artificial Sequence
  Description of Artificial Sequence: Synthetic oligonucleotide
  Antisense strand to SEQ ID NO: 1356494
aagauccauucuuuaaacc

SEQ ID NO: 1356496 - RNA, 19 nt, Artificial Sequence
  Description of Artificial Sequence: Synthetic oligonucleotide
  Sense strand starting at position 828 of SEQ ID NO: 1242553
ggcagucuaucuucccaua

SEQ ID NO: 1356497 - RNA, 19 nt, Artificial Sequence
  Description of Artificial Sequence: Synthetic oligonucleotide
  Antisense strand to SEQ ID NO: 1356496
uaugggaagauagacugcc

SEQ ID NO: 1356498 - RNA, 19 nt, Artificial Sequence
  Description of Artificial Sequence: Synthetic oligonucleotide
  Sense strand starting at position 1083 of SEQ ID NO: 1242553
guuaauugucacugcaaga

SEQ ID NO: 1356499 - RNA, 19 nt, Artificial Sequence
  Description of Artificial Sequence: Synthetic oligonucleotide
  Antisense strand to SEQ ID NO: 1356498
ucuugcagugacaauuaac

SEQ ID NO: 1356500 - RNA, 19 nt, Artificial Sequence
  Description of Artificial Sequence: Synthetic oligonucleotide
  Sense strand starting at position 1088 of SEQ ID NO: 1242553
uugucacugcaagaucaua

SEQ ID NO: 1356501 - RNA, 19 nt, Artificial Sequence
  Description of Artificial Sequence: Synthetic oligonucleotide
  Antisense strand to SEQ ID NO: 1356500
uaugaucuugcagugacaa

SEQ ID NO: 1356502 - RNA, 19 nt, Artificial Sequence
  Description of Artificial Sequence: Synthetic oligonucleotide
  Sense strand starting at position 1113 of SEQ ID NO: 1242553
ggcauucccagaggagagu

SEQ ID NO: 1356503 - RNA, 19 nt, Artificial Sequence
  Description of Artificial Sequence: Synthetic oligonucleotide
  Antisense strand to SEQ ID NO: 1356502
acucuccucugggaaugcc

SEQ ID NO: 1356504 - RNA, 19 nt, Artificial Sequence
  Description of Artificial Sequence: Synthetic oligonucleotide
  Sense strand starting at position 1221 of SEQ ID NO: 1242553
uugccauuagcuuaaagca

SEQ ID NO: 1356505 - RNA, 19 nt, Artificial Sequence
  Description of Artificial Sequence: Synthetic oligonucleotide
  Antisense strand to SEQ ID NO: 1356504
ugcuuuaagcuaauggcaa

SEQ ID NO: 1356506 - RNA, 19 nt, Artificial Sequence
  Description of Artificial Sequence: Synthetic oligonucleotide
  Sense strand starting at position 1443 of SEQ ID NO: 1242553
gagacugugucccucuuua

SEQ ID NO: 1356507 - RNA, 19 nt, Artificial Sequence
  Description of Artificial Sequence: Synthetic oligonucleotide
  Antisense strand to SEQ ID NO: 1356506
uaaagagggacacagucuc

SEQ ID NO: 1356508 - RNA, 19 nt, Artificial Sequence
  Description of Artificial Sequence: Synthetic oligonucleotide
  Sense strand starting at position 1524 of SEQ ID NO: 1242553
cucccuucucaccgaagau

SEQ ID NO: 1356509 - RNA, 19 nt, Artificial Sequence
  Description of Artificial Sequence: Synthetic oligonucleotide
  Antisense strand to SEQ ID NO: 1356508
aucuucggugagaagggag

SEQ ID NO: 1356510 - RNA, 19 nt, Artificial Sequence
  Description of Artificial Sequence: Synthetic oligonucleotide
  Sense strand starting at position 1565 of SEQ ID NO: 1242553
cuaaaucuuccacgagagu

SEQ ID NO: 1356511 - RNA, 19 nt, Artificial Sequence
  Description of Artificial Sequence: Synthetic oligonucleotide
  Antisense strand to SEQ ID NO: 1356510
acucucguggaagauuuag

SEQ ID NO: 1356512 - RNA, 19 nt, Artificial Sequence
  Description of Artificial Sequence: Synthetic oligonucleotide
  Sense strand starting at position 1566 of SEQ ID NO: 1242553
uaaaucuuccacgagaguc

SEQ ID NO: 1356513 - RNA, 19 nt, Artificial Sequence
  Description of Artificial Sequence: Synthetic oligonucleotide
  Antisense strand to SEQ ID NO: 1356512
gacucucguggaagauuua

SEQ ID NO: 1356514 - RNA, 19 nt, Artificial Sequence
  Description of Artificial Sequence: Synthetic oligonucleotide
  Sense strand starting at position 1603 of SEQ ID NO: 1242553
ucuggacauuguuccugua

SEQ ID NO: 1356515 - RNA, 19 nt, Artificial Sequence
  Description of Artificial Sequence: Synthetic oligonucleotide
  Antisense strand to SEQ ID NO: 1356514
uacaggaacaauguccaga

SEQ ID NO: 1356516 - RNA, 19 nt, Artificial Sequence
  Description of Artificial Sequence: Synthetic oligonucleotide
  Sense strand starting at position 1722 of SEQ ID NO: 1242553
acagcaaaguucccagagu

SEQ ID NO: 1356517 - RNA, 19 nt, Artificial Sequence
  Description of Artificial Sequence: Synthetic oligonucleotide
  Antisense strand to SEQ ID NO: 1356516
acucugggaacuuugcugu

SEQ ID NO: 1356518 - RNA, 19 nt, Artificial Sequence
  Description of Artificial Sequence: Synthetic oligonucleotide
  Sense strand starting at position 1731 of SEQ ID NO: 1242553
uucccagaguuggcugaaa

SEQ ID NO: 1356519 - RNA, 19 nt, Artificial Sequence
  Description of Artificial Sequence: Synthetic oligonucleotide
  Antisense strand to SEQ ID NO: 1356518
uuucagccaacucugggaa

SEQ ID NO: 1356520 - RNA, 19 nt, Artificial Sequence
  Description of Artificial Sequence: Synthetic oligonucleotide
  Sense strand starting at position 1819 of SEQ ID NO: 1242553
gugccauucucucuuagag

SEQ ID NO: 1356521 - RNA, 19 nt, Artificial Sequence
  Description of Artificial Sequence: Synthetic oligonucleotide
  Antisense strand to SEQ ID NO: 1356520
cucuaagagagaauggcac

SEQ ID NO: 1356522 - RNA, 19 nt, Artificial Sequence
  Description of Artificial Sequence: Synthetic oligonucleotide
  Sense strand starting at position 1850 of SEQ ID NO: 1242553
ucauuaauagcagaaugca

SEQ ID NO: 1356523 - RNA, 19 nt, Artificial Sequence
  Description of Artificial Sequence: Synthetic oligonucleotide
  Antisense strand to SEQ ID NO: 1356522
ugcauucugcuauuaauga

SEQ ID NO: 1356524 - RNA, 19 nt, Artificial Sequence
  Description of Artificial Sequence: Synthetic oligonucleotide
  Sense strand starting at position 1913 of SEQ ID NO: 1242553
cuucccauguccuuggaga

SEQ ID NO: 1356525 - RNA, 19 nt, Artificial Sequence
  Description of Artificial Sequence: Synthetic oligonucleotide
  Antisense strand to SEQ ID NO: 1356524
ucuccaaggacaugggaag

SEQ ID NO: 1356526 - RNA, 19 nt, Artificial Sequence
  Description of Artificial Sequence: Synthetic oligonucleotide
  Sense strand starting at position 1914 of SEQ ID NO: 1242553
uucccauguccuuggagaa

SEQ ID NO: 1356527 - RNA, 19 nt, Artificial Sequence
  Description of Artificial Sequence: Synthetic oligonucleotide
  Antisense strand to SEQ ID NO: 1356526
uucuccaaggacaugggaa

SEQ ID NO: 1356528 - RNA, 19 nt, Artificial Sequence
  Description of Artificial Sequence: Synthetic oligonucleotide
  Sense strand starting at position 1915 of SEQ ID NO: 1242553
ucccauguccuuggagaau

SEQ ID NO: 1356529 - RNA, 19 nt, Artificial Sequence
  Description of Artificial Sequence: Synthetic oligonucleotide
  Antisense strand to SEQ ID NO: 1356528
auucuccaaggacauggga

SEQ ID NO: 1356530 - RNA, 19 nt, Artificial Sequence
  Description of Artificial Sequence: Synthetic oligonucleotide
  Sense strand starting at position 1936 of SEQ ID NO: 1242553
ccugcagaugacuguaaga

SEQ ID NO: 1356531 - RNA, 19 nt, Artificial Sequence
  Description of Artificial Sequence: Synthetic oligonucleotide
  Antisense strand to SEQ ID NO: 1356530
ucuuacagucaucugcagg

SEQ ID NO: 1356532 - RNA, 19 nt, Artificial Sequence
  Description of Artificial Sequence: Synthetic oligonucleotide
  Sense strand starting at position 1945 of SEQ ID NO: 1242553
gacuguaagagguguuucu

SEQ ID NO: 1356533 - RNA, 19 nt, Artificial Sequence
  Description of Artificial Sequence: Synthetic oligonucleotide
  Antisense strand to SEQ ID NO: 1356532
agaaacaccucuuacaguc

SEQ ID NO: 1356534 - RNA, 19 nt, Artificial Sequence
  Description of Artificial Sequence: Synthetic oligonucleotide
  Sense strand starting at position 1957 of SEQ ID NO: 1242553
uguuucuuccuagggcaga

SEQ ID NO: 1356535 - RNA, 19 nt, Artificial Sequence
  Description of Artificial Sequence: Synthetic oligonucleotide
  Antisense strand to SEQ ID NO: 1356534
ucugcccuaggaagaaaca

SEQ ID NO: 1356536 - RNA, 19 nt, Artificial Sequence
  Description of Artificial Sequence: Synthetic oligonucleotide
  Sense strand starting at position 1984 of SEQ ID NO: 1242553
gcacuaucagaaggaauac

SEQ ID NO: 1356537 - RNA, 19 nt, Artificial Sequence
  Description of Artificial Sequence: Synthetic oligonucleotide
  Antisense strand to SEQ ID NO: 1356536
guauuccuucugauagugc

SEQ ID NO: 1356538 - RNA, 19 nt, Artificial Sequence
  Description of Artificial Sequence: Synthetic oligonucleotide
  Sense strand starting at position 2249 of SEQ ID NO: 1242553
gcuggaguucgagaggauc

SEQ ID NO: 1356539 - RNA, 19 nt, Artificial Sequence
  Description of Artificial Sequence: Synthetic oligonucleotide
  Antisense strand to SEQ ID NO: 1356538
gauccucucgaacuccagc

SEQ ID NO: 1356540 - RNA, 19 nt, Artificial Sequence
  Description of Artificial Sequence: Synthetic oligonucleotide
  Sense strand starting at position 2251 of SEQ ID NO: 1242553
uggaguucgagaggaucua

SEQ ID NO: 1356541 - RNA, 19 nt, Artificial Sequence
  Description of Artificial Sequence: Synthetic oligonucleotide
  Antisense strand to SEQ ID NO: 1356540
uagauccucucgaacucca

SEQ ID NO: 1356542 - RNA, 19 nt, Artificial Sequence
  Description of Artificial Sequence: Synthetic oligonucleotide
  Sense strand starting at position 2464 of SEQ ID NO: 1242553
aguaguagccgcucagcaa

SEQ ID NO: 1356543 - RNA, 19 nt, Artificial Sequence
  Description of Artificial Sequence: Synthetic oligonucleotide
  Antisense strand to SEQ ID NO: 1356542
uugcugagcggcuacuacu

SEQ ID NO: 1356544 - RNA, 19 nt, Artificial Sequence
  Description of Artificial Sequence: Synthetic oligonucleotide
  Sense strand starting at position 3483 of SEQ ID NO: 1242553
ggcguaucccuggacaggu

SEQ ID NO: 1356545 - RNA, 19 nt, Artificial Sequence
  Description of Artificial Sequence: Synthetic oligonucleotide
  Antisense strand to SEQ ID NO: 1356544
accuguccagggauacgcc

SEQ ID NO: 1356546 - RNA, 19 nt, Artificial Sequence
  Description of Artificial Sequence: Synthetic oligonucleotide
  Sense strand starting at position 3653 of SEQ ID NO: 1242553
augauauagaaguguggga

SEQ ID NO: 1356547 - RNA, 19 nt, Artificial Sequence
  Description of Artificial Sequence: Synthetic oligonucleotide
  Antisense strand to SEQ ID NO: 1356546
ucccacacuucuauaucau

SEQ ID NO: 1356548 - RNA, 19 nt, Artificial Sequence
  Description of Artificial Sequence: Synthetic oligonucleotide
  Sense strand starting at position 3669 of SEQ ID NO: 1242553
ggaggcacuuucuccuauu

SEQ ID NO: 1356549 - RNA, 19 nt, Artificial Sequence
  Description of Artificial Sequence: Synthetic oligonucleotide
  Antisense strand to SEQ ID NO: 1356548
aauaggagaaagugccucc

SEQ ID NO: 1356550 - RNA, 19 nt, Artificial Sequence
  Description of Artificial Sequence: Synthetic oligonucleotide
  Sense strand starting at position 3751 of SEQ ID NO: 1242553
augguaagcgcucaguaaa

SEQ ID NO: 1356551 - RNA, 19 nt, Artificial Sequence
  Description of Artificial Sequence: Synthetic oligonucleotide
  Antisense strand to SEQ ID NO: 1356550
uuuacugagcgcuuaccau

SEQ ID NO: 1356552 - RNA, 19 nt, Artificial Sequence
  Description of Artificial Sequence: Synthetic oligonucleotide
  Sense strand starting at position 3761 of SEQ ID NO: 1242553
cucaguaaaguuuguugaa

SEQ ID NO: 1356553 - RNA, 19 nt, Artificial Sequence
  Description of Artificial Sequence: Synthetic oligonucleotide
  Antisense strand to SEQ ID NO: 1356552
uucaacaaacuuuacugag

SEQ ID NO: 1356554 - RNA, 19 nt, Artificial Sequence
  Description of Artificial Sequence: Synthetic oligonucleotide
  Sense strand starting at position 3762 of SEQ ID NO: 1242553
ucaguaaaguuuguugaag

SEQ ID NO: 1356555 - RNA, 19 nt, Artificial Sequence
  Description of Artificial Sequence: Synthetic oligonucleotide
  Antisense strand to SEQ ID NO: 1356554
cuucaacaaacuuuacuga

SEQ ID NO: 1356556 - RNA, 19 nt, Artificial Sequence
  Description of Artificial Sequence: Synthetic oligonucleotide
  Sense strand starting at position 3768 of SEQ ID NO: 1242553
aaguuuguugaaggaaaua

SEQ ID NO: 1356557 - RNA, 19 nt, Artificial Sequence
  Description of Artificial Sequence: Synthetic oligonucleotide
  Antisense strand to SEQ ID NO: 1356556
uauuuccuucaacaaacuu

SEQ ID NO: 1356558 - RNA, 19 nt, Artificial Sequence
  Description of Artificial Sequence: Synthetic oligonucleotide
  Sense strand starting at position 3800 of SEQ ID NO: 1242553
gcgugugguguuucccuca

SEQ ID NO: 1356559 - RNA, 19 nt, Artificial Sequence
  Description of Artificial Sequence: Synthetic oligonucleotide
  Antisense strand to SEQ ID NO: 1356558
ugagggaaacaccacacgc

SEQ ID NO: 1356560 - RNA, 19 nt, Artificial Sequence
  Description of Artificial Sequence: Synthetic oligonucleotide
  Sense strand starting at position 3805 of SEQ ID NO: 1242553
ugguguuucccucauuacu

SEQ ID NO: 1356561 - RNA, 19 nt, Artificial Sequence
  Description of Artificial Sequence: Synthetic oligonucleotide
  Antisense strand to SEQ ID NO: 1356560
aguaaugagggaaacacca

SEQ ID NO: 1356562 - RNA, 19 nt, Artificial Sequence
  Description of Artificial Sequence: Synthetic oligonucleotide
  Sense strand starting at position 3873 of SEQ ID NO: 1242553
uuguguaaccaggaaugua

SEQ ID NO: 1356563 - RNA, 19 nt, Artificial Sequence
  Description of Artificial Sequence: Synthetic oligonucleotide
  Antisense strand to SEQ ID NO: 1356562
uacauuccugguuacacaa

SEQ ID NO: 1356564 - RNA, 19 nt, Artificial Sequence
  Description of Artificial Sequence: Synthetic oligonucleotide
  Sense strand starting at position 3897 of SEQ ID NO: 1242553
uuccguaugcauuaucuua

SEQ ID NO: 1356565 - RNA, 19 nt, Artificial Sequence
  Description of Artificial Sequence: Synthetic oligonucleotide
  Antisense strand to SEQ ID NO: 1356564
uaagauaaugcauacggaa

SEQ ID NO: 1356566 - RNA, 19 nt, Artificial Sequence
  Description of Artificial Sequence: Synthetic oligonucleotide
  Sense strand starting at position 3948 of SEQ ID NO: 1242553
agauuaagcuagguuuaga

SEQ ID NO: 1356567 - RNA, 19 nt, Artificial Sequence
  Description of Artificial Sequence: Synthetic oligonucleotide
  Antisense strand to SEQ ID NO: 1356566
ucuaaaccuagcuuaaucu

SEQ ID NO: 1356568 - RNA, 19 nt, Artificial Sequence
  Description of Artificial Sequence: Synthetic oligonucleotide
  Sense strand starting at position 3951 of SEQ ID NO: 1242553
uuaagcuagguuuagaaua

SEQ ID NO: 1356569 - RNA, 19 nt, Artificial Sequence
  Description of Artificial Sequence: Synthetic oligonucleotide
  Antisense strand to SEQ ID NO: 1356568
uauucuaaaccuagcuuaa

SEQ ID NO: 1356570 - RNA, 19 nt, Artificial Sequence
  Description of Artificial Sequence: Synthetic oligonucleotide
  Sense strand starting at position 384 of SEQ ID NO: 1242554
ccuaguuaauaggagauuu

SEQ ID NO: 1356571 - RNA, 19 nt, Artificial Sequence
  Description of Artificial Sequence: Synthetic oligonucleotide
  Antisense strand to SEQ ID NO: 1356570
aaaucuccuauuaacuagg

SEQ ID NO: 1356572 - RNA, 19 nt, Artificial Sequence
  Description of Artificial Sequence: Synthetic oligonucleotide
  Sense strand starting at position 718 of SEQ ID NO: 1242554
acagccauagagugaaaua

SEQ ID NO: 1356573 - RNA, 19 nt, Artificial Sequence
  Description of Artificial Sequence: Synthetic oligonucleotide
  Antisense strand to SEQ ID NO: 1356572
uauuucacucuauggcugu

SEQ ID NO: 1356574 - RNA, 19 nt, Artificial Sequence
  Description of Artificial Sequence: Synthetic oligonucleotide
  Sense strand starting at position 1103 of SEQ ID NO: 1242554
ugcuaaauuugagaacuau

SEQ ID NO: 1356575 - RNA, 19 nt, Artificial Sequence
  Description of Artificial Sequence: Synthetic oligonucleotide
  Antisense strand to SEQ ID NO: 1356574
auaguucucaaauuuagca

SEQ ID NO: 1356576 - RNA, 19 nt, Artificial Sequence
  Description of Artificial Sequence: Synthetic oligonucleotide
  Sense strand starting at position 1140 of SEQ ID NO: 1242554
ggaugcagaacuugaugga

SEQ ID NO: 1356577 - RNA, 19 nt, Artificial Sequence
  Description of Artificial Sequence: Synthetic oligonucleotide
  Antisense strand to SEQ ID NO: 1356576
uccaucaaguucugcaucc

SEQ ID NO: 1356578 - RNA, 19 nt, Artificial Sequence
  Description of Artificial Sequence: Synthetic oligonucleotide
  Sense strand starting at position 1280 of SEQ ID NO: 1242554
uggcaacuaccucgaauaa

SEQ ID NO: 1356579 - RNA, 19 nt, Artificial Sequence
  Description of Artificial Sequence: Synthetic oligonucleotide
  Antisense strand to SEQ ID NO: 1356578
uuauucgagguaguugcca

SEQ ID NO: 1356580 - RNA, 19 nt, Artificial Sequence
  Description of Artificial Sequence: Synthetic oligonucleotide
  Sense strand starting at position 1281 of SEQ ID NO: 1242554
ggcaacuaccucgaauaau

SEQ ID NO: 1356581 - RNA, 19 nt, Artificial Sequence
  Description of Artificial Sequence: Synthetic oligonucleotide
  Antisense strand to SEQ ID NO: 1356580
auuauucgagguaguugcc

SEQ ID NO: 1356582 - RNA, 19 nt, Artificial Sequence
  Description of Artificial Sequence: Synthetic oligonucleotide
  Sense strand starting at position 1334 of SEQ ID NO: 1242554
aggagucaacaaggcuuua

SEQ ID NO: 1356583 - RNA, 19 nt, Artificial Sequence
  Description of Artificial Sequence: Synthetic oligonucleotide
  Antisense strand to SEQ ID NO: 1356582
uaaagccuuguugacuccu

SEQ ID NO: 1356584 - RNA, 19 nt, Artificial Sequence
  Description of Artificial Sequence: Synthetic oligonucleotide
  Sense strand starting at position 1414 of SEQ ID NO: 1242554
aaguguguccaucagcaga

SEQ ID NO: 1356585 - RNA, 19 nt, Artificial Sequence
  Description of Artificial Sequence: Synthetic oligonucleotide
  Antisense strand to SEQ ID NO: 1356584
ucugcugauggacacacuu

SEQ ID NO: 1356586 - RNA, 19 nt, Artificial Sequence
  Description of Artificial Sequence: Synthetic oligonucleotide
  Sense strand starting at position 1984 of SEQ ID NO: 1242554
ccucgacucgcgagaguug

SEQ ID NO: 1356587 - RNA, 19 nt, Artificial Sequence
  Description of Artificial Sequence: Synthetic oligonucleotide
  Antisense strand to SEQ ID NO: 1356586
caacucucgcgagucgagg

SEQ ID NO: 1356588 - RNA, 19 nt, Artificial Sequence
  Description of Artificial Sequence: Synthetic oligonucleotide
  Sense strand starting at position 2056 of SEQ ID NO: 1242554
uauuauuacguuuggaaga

SEQ ID NO: 1356589 - RNA, 19 nt, Artificial Sequence
  Description of Artificial Sequence: Synthetic oligonucleotide
  Antisense strand to SEQ ID NO: 1356588
ucuuccaaacguaauaaua

SEQ ID NO: 1356590 - RNA, 19 nt, Artificial Sequence
  Description of Artificial Sequence: Synthetic oligonucleotide
  Sense strand starting at position 2130 of SEQ ID NO: 1242554
uguagugugguagagagau

SEQ ID NO: 1356591 - RNA, 19 nt, Artificial Sequence
  Description of Artificial Sequence: Synthetic oligonucleotide
  Antisense strand to SEQ ID NO: 1356590
aucucucuaccacacuaca

SEQ ID NO: 1356592 - RNA, 19 nt, Artificial Sequence
  Description of Artificial Sequence: Synthetic oligonucleotide
  Sense strand starting at position 2132 of SEQ ID NO: 1242554
uagugugguagagagauau

SEQ ID NO: 1356593 - RNA, 19 nt, Artificial Sequence
  Description of Artificial Sequence: Synthetic oligonucleotide
  Antisense strand to SEQ ID NO: 1356592
auaucucucuaccacacua

SEQ ID NO: 1356594 - RNA, 19 nt, Artificial Sequence
  Description of Artificial Sequence: Synthetic oligonucleotide
  Sense strand starting at position 2546 of SEQ ID NO: 1242554
gugggaccuucuguuagaa

SEQ ID NO: 1356595 - RNA, 19 nt, Artificial Sequence
  Description of Artificial Sequence: Synthetic oligonucleotide
  Antisense strand to SEQ ID NO: 1356594
uucuaacagaaggucccac

SEQ ID NO: 1356596 - RNA, 19 nt, Artificial Sequence
  Description of Artificial Sequence: Synthetic oligonucleotide
  Sense strand starting at position 2612 of SEQ ID NO: 1242554
gggaaucauuucuauuaaa

SEQ ID NO: 1356597 - RNA, 19 nt, Artificial Sequence
  Description of Artificial Sequence: Synthetic oligonucleotide
  Antisense strand to SEQ ID NO: 1356596
uuuaauagaaaugauuccc

SEQ ID NO: 1356598 - RNA, 19 nt, Artificial Sequence
  Description of Artificial Sequence: Synthetic oligonucleotide
  Sense strand starting at position 2697 of SEQ ID NO: 1242554
ucguaauaagaccaguguu

SEQ ID NO: 1356599 - RNA, 19 nt, Artificial Sequence
  Description of Artificial Sequence: Synthetic oligonucleotide
  Antisense strand to SEQ ID NO: 1356598
aacacuggucuuauuacga

SEQ ID NO: 1356600 - RNA, 19 nt, Artificial Sequence
  Description of Artificial Sequence: Synthetic oligonucleotide
  Sense strand starting at position 2748 of SEQ ID NO: 1242554
guauauacuauguaguguu

SEQ ID NO: 1356601 - RNA, 19 nt, Artificial Sequence
  Description of Artificial Sequence: Synthetic oligonucleotide
  Antisense strand to SEQ ID NO: 1356600
aacacuacauaguauauac

SEQ ID NO: 1356602 - RNA, 19 nt, Artificial Sequence
  Description of Artificial Sequence: Synthetic oligonucleotide
  Sense strand starting at position 2828 of SEQ ID NO: 1242554
uggacuaaauacguaguaa

SEQ ID NO: 1356603 - RNA, 19 nt, Artificial Sequence
  Description of Artificial Sequence: Synthetic oligonucleotide
  Antisense strand to SEQ ID NO: 1356602
uuacuacguauuuagucca

SEQ ID NO: 1356604 - RNA, 19 nt, Artificial Sequence
  Description of Artificial Sequence: Synthetic oligonucleotide
  Sense strand starting at position 2829 of SEQ ID NO: 1242554
ggacuaaauacguaguaau

SEQ ID NO: 1356605 - RNA, 19 nt, Artificial Sequence
  Description of Artificial Sequence: Synthetic oligonucleotide
  Antisense strand to SEQ ID NO: 1356604
auuacuacguauuuagucc

SEQ ID NO: 1356606 - RNA, 19 nt, Artificial Sequence
  Description of Artificial Sequence: Synthetic oligonucleotide
  Sense strand starting at position 2842 of SEQ ID NO: 1242554
aguaauauucuaugguagu

SEQ ID NO: 1356607 - RNA, 19 nt, Artificial Sequence
  Description of Artificial Sequence: Synthetic oligonucleotide
  Antisense strand to SEQ ID NO: 1356606
acuaccauagaauauuacu

SEQ ID NO: 1356608 - RNA, 19 nt, Artificial Sequence
  Description of Artificial Sequence: Synthetic oligonucleotide
  Sense strand starting at position 2887 of SEQ ID NO: 1242554
gugguuuggcuuuaaacag

SEQ ID NO: 1356609 - RNA, 19 nt, Artificial Sequence
  Description of Artificial Sequence: Synthetic oligonucleotide
  Antisense strand to SEQ ID NO: 1356608
cuguuuaaagccaaaccac

SEQ ID NO: 1356610 - RNA, 19 nt, Artificial Sequence
  Description of Artificial Sequence: Synthetic oligonucleotide
  Sense strand starting at position 2894 of SEQ ID NO: 1242554
ggcuuuaaacagugaucag

SEQ ID NO: 1356611 - RNA, 19 nt, Artificial Sequence
  Description of Artificial Sequence: Synthetic oligonucleotide
  Antisense strand to SEQ ID NO: 1356610
cugaucacuguuuaaagcc

SEQ ID NO: 1356612 - RNA, 19 nt, Artificial Sequence
  Description of Artificial Sequence: Synthetic oligonucleotide
  Sense strand starting at position 2928 of SEQ ID NO: 1242554
gccugaaggaugugagaaa

SEQ ID NO: 1356613 - RNA, 19 nt, Artificial Sequence
  Description of Artificial Sequence: Synthetic oligonucleotide
  Antisense strand to SEQ ID NO: 1356612
uuucucacauccuucaggc

SEQ ID NO: 1356614 - RNA, 19 nt, Artificial Sequence
  Description of Artificial Sequence: Synthetic oligonucleotide
  Sense strand starting at position 2937 of SEQ ID NO: 1242554
augugagaaagcuggcaaa

SEQ ID NO: 1356615 - RNA, 19 nt, Artificial Sequence
  Description of Artificial Sequence: Synthetic oligonucleotide
  Antisense strand to SEQ ID NO: 1356614
uuugccagcuuucucacau

SEQ ID NO: 1356616 - RNA, 19 nt, Artificial Sequence
  Description of Artificial Sequence: Synthetic oligonucleotide
  Sense strand starting at position 2958 of SEQ ID NO: 1242554
ggagcuuuagagugaacac

SEQ ID NO: 1356617 - RNA, 19 nt, Artificial Sequence
  Description of Artificial Sequence: Synthetic oligonucleotide
  Antisense strand to SEQ ID NO: 1356616
guguucacucuaaagcucc

SEQ ID NO: 1356618 - RNA, 19 nt, Artificial Sequence
  Description of Artificial Sequence: Synthetic oligonucleotide
  Sense strand starting at position 2967 of SEQ ID NO: 1242554
gagugaacacuuggaaagu

SEQ ID NO: 1356619 - RNA, 19 nt, Artificial Sequence
  Description of Artificial Sequence: Synthetic oligonucleotide
  Antisense strand to SEQ ID NO: 1356618
acuuuccaaguguucacuc

SEQ ID NO: 1356620 - RNA, 19 nt, Artificial Sequence
  Description of Artificial Sequence: Synthetic oligonucleotide
  Sense strand starting at position 3033 of SEQ ID NO: 1242554
guguaugggaguugagauc

SEQ ID NO: 1356621 - RNA, 19 nt, Artificial Sequence
  Description of Artificial Sequence: Synthetic oligonucleotide
  Antisense strand to SEQ ID NO: 1356620
gaucucaacucccauacac

SEQ ID NO: 1356622 - RNA, 19 nt, Artificial Sequence
  Description of Artificial Sequence: Synthetic oligonucleotide
  Sense strand starting at position 3070 of SEQ ID NO: 1242554
guaggucagccucaggauu

SEQ ID NO: 1356623 - RNA, 19 nt, Artificial Sequence
  Description of Artificial Sequence: Synthetic oligonucleotide
  Antisense strand to SEQ ID NO: 1356622
aauccugaggcugaccuac

SEQ ID NO: 1356624 - RNA, 19 nt, Artificial Sequence
  Description of Artificial Sequence: Synthetic oligonucleotide
  Sense strand starting at position 3154 of SEQ ID NO: 1242554
acuggugagcuuuggaaac

SEQ ID NO: 1356625 - RNA, 19 nt, Artificial Sequence
  Description of Artificial Sequence: Synthetic oligonucleotide
  Antisense strand to SEQ ID NO: 1356624
guuuccaaagcucaccagu

SEQ ID NO: 1356626 - RNA, 19 nt, Artificial Sequence
  Description of Artificial Sequence: Synthetic oligonucleotide
  Sense strand starting at position 3164 of SEQ ID NO: 1242554
uuuggaaacacguguuuag

SEQ ID NO: 1356627 - RNA, 19 nt, Artificial Sequence
  Description of Artificial Sequence: Synthetic oligonucleotide
  Antisense strand to SEQ ID NO: 1356626
cuaaacacguguuuccaaa

SEQ ID NO: 1356628 - RNA, 19 nt, Artificial Sequence
  Description of Artificial Sequence: Synthetic oligonucleotide
  Sense strand starting at position 3168 of SEQ ID NO: 1242554
gaaacacguguuuaguaga

SEQ ID NO: 1356629 - RNA, 19 nt, Artificial Sequence
  Description of Artificial Sequence: Synthetic oligonucleotide
  Antisense strand to SEQ ID NO: 1356628
ucuacuaaacacguguuuc

SEQ ID NO: 1356630 - RNA, 19 nt, Artificial Sequence
  Description of Artificial Sequence: Synthetic oligonucleotide
  Sense strand starting at position 3250 of SEQ ID NO: 1242554
gcugauuaauuggcauuaa

SEQ ID NO: 1356631 - RNA, 19 nt, Artificial Sequence
  Description of Artificial Sequence: Synthetic oligonucleotide
  Antisense strand to SEQ ID NO: 1356630
uuaaugccaauuaaucagc

SEQ ID NO: 1356632 - RNA, 19 nt, Artificial Sequence
  Description of Artificial Sequence: Synthetic oligonucleotide
  Sense strand starting at position 3306 of SEQ ID NO: 1242554
gcuauugugcuuuauaagg

SEQ ID NO: 1356633 - RNA, 19 nt, Artificial Sequence
  Description of Artificial Sequence: Synthetic oligonucleotide
  Antisense strand to SEQ ID NO: 1356632
ccuuauaaagcacaauagc

SEQ ID NO: 1356634 - RNA, 19 nt, Artificial Sequence
  Description of Artificial Sequence: Synthetic oligonucleotide
  Sense strand starting at position 3374 of SEQ ID NO: 1242554
ugcaguagagguugagauu

SEQ ID NO: 1356635 - RNA, 19 nt, Artificial Sequence
  Description of Artificial Sequence: Synthetic oligonucleotide
  Antisense strand to SEQ ID NO: 1356634
aaucucaaccucuacugca

SEQ ID NO: 1356636 - RNA, 19 nt, Artificial Sequence
  Description of Artificial Sequence: Synthetic oligonucleotide
  Sense strand starting at position 3386 of SEQ ID NO: 1242554
ugagauucuaaggguucua

SEQ ID NO: 1356637 - RNA, 19 nt, Artificial Sequence
  Description of Artificial Sequence: Synthetic oligonucleotide
  Antisense strand to SEQ ID NO: 1356636
uagaacccuuagaaucuca

SEQ ID NO: 1356638 - RNA, 19 nt, Artificial Sequence
  Description of Artificial Sequence: Synthetic oligonucleotide
  Sense strand starting at position 3401 of SEQ ID NO: 1242554
ucuagucauuuacugcuau

SEQ ID NO: 1356639 - RNA, 19 nt, Artificial Sequence
  Description of Artificial Sequence: Synthetic oligonucleotide
  Antisense strand to SEQ ID NO: 1356638
auagcaguaaaugacuaga

SEQ ID NO: 1356640 - RNA, 19 nt, Artificial Sequence
  Description of Artificial Sequence: Synthetic oligonucleotide
  Sense strand starting at position 3558 of SEQ ID NO: 1242554
ugugcucgcccacugauau

SEQ ID NO: 1356641 - RNA, 19 nt, Artificial Sequence
  Description of Artificial Sequence: Synthetic oligonucleotide
  Antisense strand to SEQ ID NO: 1356640
auaucagugggcgagcaca

SEQ ID NO: 1356642 - RNA, 19 nt, Artificial Sequence
  Description of Artificial Sequence: Synthetic oligonucleotide
  Sense strand starting at position 3756 of SEQ ID NO: 1242554
uagggacugcuuuacagua

SEQ ID NO: 1356643 - RNA, 19 nt, Artificial Sequence
  Description of Artificial Sequence: Synthetic oligonucleotide
  Antisense strand to SEQ ID NO: 1356642
uacuguaaagcagucccua

SEQ ID NO: 1356644 - RNA, 19 nt, Artificial Sequence
  Description of Artificial Sequence: Synthetic oligonucleotide
  Sense strand starting at position 3761 of SEQ ID NO: 1242554
acugcuuuacaguagugau

SEQ ID NO: 1356645 - RNA, 19 nt, Artificial Sequence
  Description of Artificial Sequence: Synthetic oligonucleotide
  Antisense strand to SEQ ID NO: 1356644
aucacuacuguaaagcagu

SEQ ID NO: 1356646 - RNA, 19 nt, Artificial Sequence
  Description of Artificial Sequence: Synthetic oligonucleotide
  Sense strand starting at position 3803 of SEQ ID NO: 1242554
guuucugaaccacaugauu

SEQ ID NO: 1356647 - RNA, 19 nt, Artificial Sequence
  Description of Artificial Sequence: Synthetic oligonucleotide
  Antisense strand to SEQ ID NO: 1356646
aaucaugugguucagaaac

SEQ ID NO: 1356648 - RNA, 19 nt, Artificial Sequence
  Description of Artificial Sequence: Synthetic oligonucleotide
  Sense strand starting at position 3865 of SEQ ID NO: 1242554
auggguugguauguaugau

SEQ ID NO: 1356649 - RNA, 19 nt, Artificial Sequence
  Description of Artificial Sequence: Synthetic oligonucleotide
  Antisense strand to SEQ ID NO: 1356648
aucauacauaccaacccau

SEQ ID NO: 1356650 - RNA, 19 nt, Artificial Sequence
  Description of Artificial Sequence: Synthetic oligonucleotide
  Sense strand starting at position 146 of SEQ ID NO: 1242555
gucgcuugagcacauaagu

SEQ ID NO: 1356651 - RNA, 19 nt, Artificial Sequence
  Description of Artificial Sequence: Synthetic oligonucleotide
  Antisense strand to SEQ ID NO: 1356650
acuuaugugcucaagcgac

SEQ ID NO: 1356652 - RNA, 19 nt, Artificial Sequence
  Description of Artificial Sequence: Synthetic oligonucleotide
  Sense strand starting at position 1401 of SEQ ID NO: 1242555
cuaaauacguauuucguga

SEQ ID NO: 1356653 - RNA, 19 nt, Artificial Sequence
  Description of Artificial Sequence: Synthetic oligonucleotide
  Antisense strand to SEQ ID NO: 1356652
ucacgaaauacguauuuag

SEQ ID NO: 1356654 - RNA, 19 nt, Artificial Sequence
  Description of Artificial Sequence: Synthetic oligonucleotide
  Sense strand starting at position 1408 of SEQ ID NO: 1242555
cguauuucgugaucaggua

SEQ ID NO: 1356655 - RNA, 19 nt, Artificial Sequence
  Description of Artificial Sequence: Synthetic oligonucleotide
  Antisense strand to SEQ ID NO: 1356654
uaccugaucacgaaauacg

SEQ ID NO: 1356656 - RNA, 19 nt, Artificial Sequence
  Description of Artificial Sequence: Synthetic oligonucleotide
  Sense strand starting at position 1415 of SEQ ID NO: 1242555
cgugaucagguauacuaau

SEQ ID NO: 1356657 - RNA, 19 nt, Artificial Sequence
  Description of Artificial Sequence: Synthetic oligonucleotide
  Antisense strand to SEQ ID NO: 1356656
auuaguauaccugaucacg

SEQ ID NO: 1356658 - RNA, 19 nt, Artificial Sequence
  Description of Artificial Sequence: Synthetic oligonucleotide
  Sense strand starting at position 1440 of SEQ ID NO: 1242555
acaccaaguucggaauuaa

SEQ ID NO: 1356659 - RNA, 19 nt, Artificial Sequence
  Description of Artificial Sequence: Synthetic oligonucleotide
  Antisense strand to SEQ ID NO: 1356658
uuaauuccgaacuuggugu

SEQ ID NO: 1356660 - RNA, 19 nt, Artificial Sequence
  Description of Artificial Sequence: Synthetic oligonucleotide
  Sense strand starting at position 1538 of SEQ ID NO: 1242555
ccggcaucagcuguuuagu

SEQ ID NO: 1356661 - RNA, 19 nt, Artificial Sequence
  Description of Artificial Sequence: Synthetic oligonucleotide
  Antisense strand to SEQ ID NO: 1356660
acuaaacagcugaugccgg

SEQ ID NO: 1356662 - RNA, 19 nt, Artificial Sequence
  Description of Artificial Sequence: Synthetic oligonucleotide
  Sense strand starting at position 1539 of SEQ ID NO: 1242555
cggcaucagcuguuuaguu

SEQ ID NO: 1356663 - RNA, 19 nt, Artificial Sequence
  Description of Artificial Sequence: Synthetic oligonucleotide
  Antisense strand to SEQ ID NO: 1356662
aacuaaacagcugaugccg

SEQ ID NO: 1356664 - RNA, 19 nt, Artificial Sequence
  Description of Artificial Sequence: Synthetic oligonucleotide
  Sense strand starting at position 1540 of SEQ ID NO: 1242555
ggcaucagcuguuuaguua

SEQ ID NO: 1356665 - RNA, 19 nt, Artificial Sequence
  Description of Artificial Sequence: Synthetic oligonucleotide
  Antisense strand to SEQ ID NO: 1356664
uaacuaaacagcugaugcc

SEQ ID NO: 1356666 - RNA, 19 nt, Artificial Sequence
  Description of Artificial Sequence: Synthetic oligonucleotide
  Sense strand starting at position 1541 of SEQ ID NO: 1242555
gcaucagcuguuuaguuaa

SEQ ID NO: 1356667 - RNA, 19 nt, Artificial Sequence
  Description of Artificial Sequence: Synthetic oligonucleotide
  Antisense strand to SEQ ID NO: 1356666
uuaacuaaacagcugaugc

SEQ ID NO: 1356668 - RNA, 19 nt, Artificial Sequence
  Description of Artificial Sequence: Synthetic oligonucleotide
  Sense strand starting at position 1543 of SEQ ID NO: 1242555
aucagcuguuuaguuaauu

SEQ ID NO: 1356669 - RNA, 19 nt, Artificial Sequence
  Description of Artificial Sequence: Synthetic oligonucleotide
  Antisense strand to SEQ ID NO: 1356668
aauuaacuaaacagcugau

SEQ ID NO: 1356670 - RNA, 19 nt, Artificial Sequence
  Description of Artificial Sequence: Synthetic oligonucleotide
  Sense strand starting at position 1544 of SEQ ID NO: 1242555
ucagcuguuuaguuaauuu

SEQ ID NO: 1356671 - RNA, 19 nt, Artificial Sequence
  Description of Artificial Sequence: Synthetic oligonucleotide
  Antisense strand to SEQ ID NO: 1356670
aaauuaacuaaacagcuga

SEQ ID NO: 1356672 - RNA, 19 nt, Artificial Sequence
  Description of Artificial Sequence: Synthetic oligonucleotide
  Sense strand starting at position 1676 of SEQ ID NO: 1242555
gguuggcaaccgugaggua

SEQ ID NO: 1356673 - RNA, 19 nt, Artificial Sequence
  Description of Artificial Sequence: Synthetic oligonucleotide
  Antisense strand to SEQ ID NO: 1356672
uaccucacgguugccaacc

SEQ ID NO: 1356674 - RNA, 19 nt, Artificial Sequence
  Description of Artificial Sequence: Synthetic oligonucleotide
  Sense strand starting at position 1677 of SEQ ID NO: 1242555
guuggcaaccgugagguau

SEQ ID NO: 1356675 - RNA, 19 nt, Artificial Sequence
  Description of Artificial Sequence: Synthetic oligonucleotide
  Antisense strand to SEQ ID NO: 1356674
auaccucacgguugccaac

SEQ ID NO: 1356676 - RNA, 19 nt, Artificial Sequence
  Description of Artificial Sequence: Synthetic oligonucleotide
  Sense strand starting at position 1690 of SEQ ID NO: 1242555
agguauuggugcucagcaa

SEQ ID NO: 1356677 - RNA, 19 nt, Artificial Sequence
  Description of Artificial Sequence: Synthetic oligonucleotide
  Antisense strand to SEQ ID NO: 1356676
uugcugagcaccaauaccu

SEQ ID NO: 1356678 - RNA, 19 nt, Artificial Sequence
  Description of Artificial Sequence: Synthetic oligonucleotide
  Sense strand starting at position 1691 of SEQ ID NO: 1242555
gguauuggugcucagcaaa

SEQ ID NO: 1356679 - RNA, 19 nt, Artificial Sequence
  Description of Artificial Sequence: Synthetic oligonucleotide
  Antisense strand to SEQ ID NO: 1356678
uuugcugagcaccaauacc

SEQ ID NO: 1356680 - RNA, 19 nt, Artificial Sequence
  Description of Artificial Sequence: Synthetic oligonucleotide
  Sense strand starting at position 2074 of SEQ ID NO: 1242555
cgcgccuuaccucaugaga

SEQ ID NO: 1356681 - RNA, 19 nt, Artificial Sequence
  Description of Artificial Sequence: Synthetic oligonucleotide
  Antisense strand to SEQ ID NO: 1356680
ucucaugagguaaggcgcg

SEQ ID NO: 1356682 - RNA, 19 nt, Artificial Sequence
  Description of Artificial Sequence: Synthetic oligonucleotide
  Sense strand starting at position 2077 of SEQ ID NO: 1242555
gccuuaccucaugagauau

SEQ ID NO: 1356683 - RNA, 19 nt, Artificial Sequence
  Description of Artificial Sequence: Synthetic oligonucleotide
  Antisense strand to SEQ ID NO: 1356682
auaucucaugagguaaggc

SEQ ID NO: 1356684 - RNA, 19 nt, Artificial Sequence
  Description of Artificial Sequence: Synthetic oligonucleotide
  Sense strand starting at position 2089 of SEQ ID NO: 1242555
gagauauuauuggucaacc

SEQ ID NO: 1356685 - RNA, 19 nt, Artificial Sequence
  Description of Artificial Sequence: Synthetic oligonucleotide
  Antisense strand to SEQ ID NO: 1356684
gguugaccaauaauaucuc

SEQ ID NO: 1356686 - RNA, 19 nt, Artificial Sequence
  Description of Artificial Sequence: Synthetic oligonucleotide
  Sense strand starting at position 2090 of SEQ ID NO: 1242555
agauauuauuggucaacca

SEQ ID NO: 1356687 - RNA, 19 nt, Artificial Sequence
  Description of Artificial Sequence: Synthetic oligonucleotide
  Antisense strand to SEQ ID NO: 1356686
ugguugaccaauaauaucu

SEQ ID NO: 1356688 - RNA, 19 nt, Artificial Sequence
  Description of Artificial Sequence: Synthetic oligonucleotide
  Sense strand starting at position 2141 of SEQ ID NO: 1242555
auuaguggauuccugggaa

SEQ ID NO: 1356689 - RNA, 19 nt, Artificial Sequence
  Description of Artificial Sequence: Synthetic oligonucleotide
  Antisense strand to SEQ ID NO: 1356688
uucccaggaauccacuaau

SEQ ID NO: 1356690 - RNA, 19 nt, Artificial Sequence
  Description of Artificial Sequence: Synthetic oligonucleotide
  Sense strand starting at position 2174 of SEQ ID NO: 1242555
ggcugaugcaacugcgaga

SEQ ID NO: 1356691 - RNA, 19 nt, Artificial Sequence
  Description of Artificial Sequence: Synthetic oligonucleotide
  Antisense strand to SEQ ID NO: 1356690
ucucgcaguugcaucagcc

SEQ ID NO: 1356692 - RNA, 19 nt, Artificial Sequence
  Description of Artificial Sequence: Synthetic oligonucleotide
  Sense strand starting at position 2205 of SEQ ID NO: 1242555
gggugcgucacaugaucga

SEQ ID NO: 1356693 - RNA, 19 nt, Artificial Sequence
  Description of Artificial Sequence: Synthetic oligonucleotide
  Antisense strand to SEQ ID NO: 1356692
ucgaucaugugacgcaccc

SEQ ID NO: 1356694 - RNA, 19 nt, Artificial Sequence
  Description of Artificial Sequence: Synthetic oligonucleotide
  Sense strand starting at position 2208 of SEQ ID NO: 1242555
ugcgucacaugaucgaguu

SEQ ID NO: 1356695 - RNA, 19 nt, Artificial Sequence
  Description of Artificial Sequence: Synthetic oligonucleotide
  Antisense strand to SEQ ID NO: 1356694
aacucgaucaugugacgca

SEQ ID NO: 1356696 - RNA, 19 nt, Artificial Sequence
  Description of Artificial Sequence: Synthetic oligonucleotide
  Sense strand starting at position 2209 of SEQ ID NO: 1242555
gcgucacaugaucgaguua

SEQ ID NO: 1356697 - RNA, 19 nt, Artificial Sequence
  Description of Artificial Sequence: Synthetic oligonucleotide
  Antisense strand to SEQ ID NO: 1356696
uaacucgaucaugugacgc

SEQ ID NO: 1356698 - RNA, 19 nt, Artificial Sequence
  Description of Artificial Sequence: Synthetic oligonucleotide
  Sense strand starting at position 2500 of SEQ ID NO: 1242555
guacgauuggaucagcauc

SEQ ID NO: 1356699 - RNA, 19 nt, Artificial Sequence
  Description of Artificial Sequence: Synthetic oligonucleotide
  Antisense strand to SEQ ID NO: 1356698
gaugcugauccaaucguac

SEQ ID NO: 1356700 - RNA, 19 nt, Artificial Sequence
  Description of Artificial Sequence: Synthetic oligonucleotide
  Sense strand starting at position 3153 of SEQ ID NO: 1242555
gcauuccuugggcgacaga

SEQ ID NO: 1356701 - RNA, 19 nt, Artificial Sequence
  Description of Artificial Sequence: Synthetic oligonucleotide
  Antisense strand to SEQ ID NO: 1356700
ucugucgcccaaggaaugc

SEQ ID NO: 1356702 - RNA, 19 nt, Artificial Sequence
  Description of Artificial Sequence: Synthetic oligonucleotide
  Sense strand starting at position 3198 of SEQ ID NO: 1242555
uguauuuauacgugaggca

SEQ ID NO: 1356703 - RNA, 19 nt, Artificial Sequence
  Description of Artificial Sequence: Synthetic oligonucleotide
  Antisense strand to SEQ ID NO: 1356702
ugccucacguauaaauaca

SEQ ID NO: 1356704 - RNA, 19 nt, Artificial Sequence
  Description of Artificial Sequence: Synthetic oligonucleotide
  Sense strand starting at position 3299 of SEQ ID NO: 1242555
aggaaauuaccuugcacaa

SEQ ID NO: 1356705 - RNA, 19 nt, Artificial Sequence
  Description of Artificial Sequence: Synthetic oligonucleotide
  Antisense strand to SEQ ID NO: 1356704
uugugcaagguaauuuccu

SEQ ID NO: 1356706 - RNA, 19 nt, Artificial Sequence
  Description of Artificial Sequence: Synthetic oligonucleotide
  Sense strand starting at position 3350 of SEQ ID NO: 1242555
auccaaaccugugucuauu

SEQ ID NO: 1356707 - RNA, 19 nt, Artificial Sequence
  Description of Artificial Sequence: Synthetic oligonucleotide
  Antisense strand to SEQ ID NO: 1356706
aauagacacagguuuggau

SEQ ID NO: 1356708 - RNA, 19 nt, Artificial Sequence
  Description of Artificial Sequence: Synthetic oligonucleotide
  Sense strand starting at position 3424 of SEQ ID NO: 1242555
auccaaauacacggguaau

SEQ ID NO: 1356709 - RNA, 19 nt, Artificial Sequence
  Description of Artificial Sequence: Synthetic oligonucleotide
  Antisense strand to SEQ ID NO: 1356708
auuacccguguauuuggau

SEQ ID NO: 1356710 - RNA, 19 nt, Artificial Sequence
  Description of Artificial Sequence: Synthetic oligonucleotide
  Sense strand starting at position 3444 of SEQ ID NO: 1242555
aauugugcugcuggucaua

SEQ ID NO: 1356711 - RNA, 19 nt, Artificial Sequence
  Description of Artificial Sequence: Synthetic oligonucleotide
  Antisense strand to SEQ ID NO: 1356710
uaugaccagcagcacaauu

SEQ ID NO: 1356712 - RNA, 19 nt, Artificial Sequence
  Description of Artificial Sequence: Synthetic oligonucleotide
  Sense strand starting at position 3676 of SEQ ID NO: 1242555
accuuaucaugaguuacua

SEQ ID NO: 1356713 - RNA, 19 nt, Artificial Sequence
  Description of Artificial Sequence: Synthetic oligonucleotide
  Antisense strand to SEQ ID NO: 1356712
uaguaacucaugauaaggu

SEQ ID NO: 1356714 - RNA, 19 nt, Artificial Sequence
  Description of Artificial Sequence: Synthetic oligonucleotide
  Sense strand starting at position 3684 of SEQ ID NO: 1242555
augaguuacuacuacuauc

SEQ ID NO: 1356715 - RNA, 19 nt, Artificial Sequence
  Description of Artificial Sequence: Synthetic oligonucleotide
  Antisense strand to SEQ ID NO: 1356714
gauaguaguaguaacucau

SEQ ID NO: 1356716 - RNA, 19 nt, Artificial Sequence
  Description of Artificial Sequence: Synthetic oligonucleotide
  Sense strand starting at position 3766 of SEQ ID NO: 1242555
aggagacacaaguguuuau

SEQ ID NO: 1356717 - RNA, 19 nt, Artificial Sequence
  Description of Artificial Sequence: Synthetic oligonucleotide
  Antisense strand to SEQ ID NO: 1356716
auaaacacuugugucuccu

SEQ ID NO: 1356718 - RNA, 19 nt, Artificial Sequence
  Description of Artificial Sequence: Synthetic oligonucleotide
  Sense strand starting at position 3773 of SEQ ID NO: 1242555
acaaguguuuauucugauc

SEQ ID NO: 1356719 - RNA, 19 nt, Artificial Sequence
  Description of Artificial Sequence: Synthetic oligonucleotide
  Antisense strand to SEQ ID NO: 1356718
gaucagaauaaacacuugu

SEQ ID NO: 1356720 - RNA, 19 nt, Artificial Sequence
  Description of Artificial Sequence: Synthetic oligonucleotide
  Sense strand starting at position 3778 of SEQ ID NO: 1242555
uguuuauucugauccacag

SEQ ID NO: 1356721 - RNA, 19 nt, Artificial Sequence
  Description of Artificial Sequence: Synthetic oligonucleotide
  Antisense strand to SEQ ID NO: 1356720
cuguggaucagaauaaaca

SEQ ID NO: 1356722 - RNA, 19 nt, Artificial Sequence
  Description of Artificial Sequence: Synthetic oligonucleotide
  Sense strand starting at position 3820 of SEQ ID NO: 1242555
cuuaaacaaucugggaaau

SEQ ID NO: 1356723 - RNA, 19 nt, Artificial Sequence
  Description of Artificial Sequence: Synthetic oligonucleotide
  Antisense strand to SEQ ID NO: 1356722
auuucccagauuguuuaag

SEQ ID NO: 1356724 - RNA, 19 nt, Artificial Sequence
  Description of Artificial Sequence: Synthetic oligonucleotide
  Sense strand starting at position 3833 of SEQ ID NO: 1242555
ggaaaugagucagacuucu

SEQ ID NO: 1356725 - RNA, 19 nt, Artificial Sequence
  Description of Artificial Sequence: Synthetic oligonucleotide
  Antisense strand to SEQ ID NO: 1356724
agaagucugacucauuucc

SEQ ID NO: 1356726 - RNA, 19 nt, Artificial Sequence
  Description of Artificial Sequence: Synthetic oligonucleotide
  Sense strand starting at position 3884 of SEQ ID NO: 1242555
guauguaugaauuguacuu

SEQ ID NO: 1356727 - RNA, 19 nt, Artificial Sequence
  Description of Artificial Sequence: Synthetic oligonucleotide
  Antisense strand to SEQ ID NO: 1356726
aaguacaauucauacauac

SEQ ID NO: 1356728 - RNA, 19 nt, Artificial Sequence
  Description of Artificial Sequence: Synthetic oligonucleotide
  Sense strand starting at position 3952 of SEQ ID NO: 1242555
cagaguuguuacuaggaua

SEQ ID NO: 1356729 - RNA, 19 nt, Artificial Sequence
  Description of Artificial Sequence: Synthetic oligonucleotide
  Antisense strand to SEQ ID NO: 1356728
uauccuaguaacaacucug

SEQ ID NO: 1356730 - RNA, 19 nt, Artificial Sequence
  Description of Artificial Sequence: Synthetic oligonucleotide
  Sense strand starting at position 1 of SEQ ID NO: 1242556
gagcuuggcagguagacaa

SEQ ID NO: 1356731 - RNA, 19 nt, Artificial Sequence
  Description of Artificial Sequence: Synthetic oligonucleotide
  Antisense strand to SEQ ID NO: 1356730
uugucuaccugccaagcuc

SEQ ID NO: 1356732 - RNA, 19 nt, Artificial Sequence
  Description of Artificial Sequence: Synthetic oligonucleotide
  Sense strand starting at position 21 of SEQ ID NO: 1242556
ggcagucguggcagacaga

SEQ ID NO: 1356733 - RNA, 19 nt, Artificial Sequence
  Description of Artificial Sequence: Synthetic oligonucleotide
  Antisense strand to SEQ ID NO: 1356732
ucugucugccacgacugcc

SEQ ID NO: 1356734 - RNA, 19 nt, Artificial Sequence
  Description of Artificial Sequence: Synthetic oligonucleotide
  Sense strand starting at position 88 of SEQ ID NO: 1242556
cagcaaugugucugagggu

SEQ ID NO: 1356735 - RNA, 19 nt, Artificial Sequence
  Description of Artificial Sequence: Synthetic oligonucleotide
  Antisense strand to SEQ ID NO: 1356734
acccucagacacauugcug

SEQ ID NO: 1356736 - RNA, 19 nt, Artificial Sequence
  Description of Artificial Sequence: Synthetic oligonucleotide
  Sense strand starting at position 106 of SEQ ID NO: 1242556
ugagcguaucgcgugugau

SEQ ID NO: 1356737 - RNA, 19 nt, Artificial Sequence
  Description of Artificial Sequence: Synthetic oligonucleotide
  Antisense strand to SEQ ID NO: 1356736
aucacacgcgauacgcuca

SEQ ID NO: 1356738 - RNA, 19 nt, Artificial Sequence
  Description of Artificial Sequence: Synthetic oligonucleotide
  Sense strand starting at position 116 of SEQ ID NO: 1242556
gcgugugaucgggucuguu

SEQ ID NO: 1356739 - RNA, 19 nt, Artificial Sequence
  Description of Artificial Sequence: Synthetic oligonucleotide
  Antisense strand to SEQ ID NO: 1356738
aacagacccgaucacacgc

SEQ ID NO: 1356740 - RNA, 19 nt, Artificial Sequence
  Description of Artificial Sequence: Synthetic oligonucleotide
  Sense strand starting at position 125 of SEQ ID NO: 1242556
cgggucuguuccuauuuga

SEQ ID NO: 1356741 - RNA, 19 nt, Artificial Sequence
  Description of Artificial Sequence: Synthetic oligonucleotide
  Antisense strand to SEQ ID NO: 1356740
ucaaauaggaacagacccg

SEQ ID NO: 1356742 - RNA, 19 nt, Artificial Sequence
  Description of Artificial Sequence: Synthetic oligonucleotide
  Sense strand starting at position 128 of SEQ ID NO: 1242556
gucuguuccuauuugaacu

SEQ ID NO: 1356743 - RNA, 19 nt, Artificial Sequence
  Description of Artificial Sequence: Synthetic oligonucleotide
  Antisense strand to SEQ ID NO: 1356742
aguucaaauaggaacagac

SEQ ID NO: 1356744 - RNA, 19 nt, Artificial Sequence
  Description of Artificial Sequence: Synthetic oligonucleotide
  Sense strand starting at position 544 of SEQ ID NO: 1242556
cuggcugucaacugagauu

SEQ ID NO: 1356745 - RNA, 19 nt, Artificial Sequence
  Description of Artificial Sequence: Synthetic oligonucleotide
  Antisense strand to SEQ ID NO: 1356744
aaucucaguugacagccag

SEQ ID NO: 1356746 - RNA, 19 nt, Artificial Sequence
  Description of Artificial Sequence: Synthetic oligonucleotide
  Sense strand starting at position 555 of SEQ ID NO: 1242556
cugagauucucacugcaaa

SEQ ID NO: 1356747 - RNA, 19 nt, Artificial Sequence
  Description of Artificial Sequence: Synthetic oligonucleotide
  Antisense strand to SEQ ID NO: 1356746
uuugcagugagaaucucag

SEQ ID NO: 1356748 - RNA, 19 nt, Artificial Sequence
  Description of Artificial Sequence: Synthetic oligonucleotide
  Sense strand starting at position 556 of SEQ ID NO: 1242556
ugagauucucacugcaaac

SEQ ID NO: 1356749 - RNA, 19 nt, Artificial Sequence
  Description of Artificial Sequence: Synthetic oligonucleotide
  Antisense strand to SEQ ID NO: 1356748
guuugcagugagaaucuca

SEQ ID NO: 1356750 - RNA, 19 nt, Artificial Sequence
  Description of Artificial Sequence: Synthetic oligonucleotide
  Sense strand starting at position 656 of SEQ ID NO: 1242556
ugcuguucuuguccuuaga

SEQ ID NO: 1356751 - RNA, 19 nt, Artificial Sequence
  Description of Artificial Sequence: Synthetic oligonucleotide
  Antisense strand to SEQ ID NO: 1356750
ucuaaggacaagaacagca

SEQ ID NO: 1356752 - RNA, 19 nt, Artificial Sequence
  Description of Artificial Sequence: Synthetic oligonucleotide
  Sense strand starting at position 658 of SEQ ID NO: 1242556
cuguucuuguccuuagaac

SEQ ID NO: 1356753 - RNA, 19 nt, Artificial Sequence
  Description of Artificial Sequence: Synthetic oligonucleotide
  Antisense strand to SEQ ID NO: 1356752
guucuaaggacaagaacag

SEQ ID NO: 1356754 - RNA, 19 nt, Artificial Sequence
  Description of Artificial Sequence: Synthetic oligonucleotide
  Sense strand starting at position 691 of SEQ ID NO: 1242556
uauuuagcggcuugaacaa

SEQ ID NO: 1356755 - RNA, 19 nt, Artificial Sequence
  Description of Artificial Sequence: Synthetic oligonucleotide
  Antisense strand to SEQ ID NO: 1356754
uuguucaagccgcuaaaua

SEQ ID NO: 1356756 - RNA, 19 nt, Artificial Sequence
  Description of Artificial Sequence: Synthetic oligonucleotide
  Sense strand starting at position 779 of SEQ ID NO: 1242556
gccuauugauaagagcaau

SEQ ID NO: 1356757 - RNA, 19 nt, Artificial Sequence
  Description of Artificial Sequence: Synthetic oligonucleotide
  Antisense strand to SEQ ID NO: 1356756
auugcucuuaucaauaggc

SEQ ID NO: 1356758 - RNA, 19 nt, Artificial Sequence
  Description of Artificial Sequence: Synthetic oligonucleotide
  Sense strand starting at position 899 of SEQ ID NO: 1242556
aguacauuuguguguccua

SEQ ID NO: 1356759 - RNA, 19 nt, Artificial Sequence
  Description of Artificial Sequence: Synthetic oligonucleotide
  Antisense strand to SEQ ID NO: 1356758
uaggacacacaaauguacu

SEQ ID NO: 1356760 - RNA, 19 nt, Artificial Sequence
  Description of Artificial Sequence: Synthetic oligonucleotide
  Sense strand starting at position 904 of SEQ ID NO: 1242556
auuuguguguccuacacac

SEQ ID NO: 1356761 - RNA, 19 nt, Artificial Sequence
  Description of Artificial Sequence: Synthetic oligonucleotide
  Antisense strand to SEQ ID NO: 1356760
guguguaggacacacaaau

SEQ ID NO: 1356762 - RNA, 19 nt, Artificial Sequence
  Description of Artificial Sequence: Synthetic oligonucleotide
  Sense strand starting at position 2045 of SEQ ID NO: 1242556
acaugcugcucaucaguua

SEQ ID NO: 1356763 - RNA, 19 nt, Artificial Sequence
  Description of Artificial Sequence: Synthetic oligonucleotide
  Antisense strand to SEQ ID NO: 1356762
uaacugaugagcagcaugu

SEQ ID NO: 1356764 - RNA, 19 nt, Artificial Sequence
  Description of Artificial Sequence: Synthetic oligonucleotide
  Sense strand starting at position 2113 of SEQ ID NO: 1242556
gagacacacugguucuaaa

SEQ ID NO: 1356765 - RNA, 19 nt, Artificial Sequence
  Description of Artificial Sequence: Synthetic oligonucleotide
  Antisense strand to SEQ ID NO: 1356764
uuuagaaccagugugucuc

SEQ ID NO: 1356766 - RNA, 19 nt, Artificial Sequence
  Description of Artificial Sequence: Synthetic oligonucleotide
  Sense strand starting at position 2124 of SEQ ID NO: 1242556
guucuaaaucaccgugaca

SEQ ID NO: 1356767 - RNA, 19 nt, Artificial Sequence
  Description of Artificial Sequence: Synthetic oligonucleotide
  Antisense strand to SEQ ID NO: 1356766
ugucacggugauuuagaac

SEQ ID NO: 1356768 - RNA, 19 nt, Artificial Sequence
  Description of Artificial Sequence: Synthetic oligonucleotide
  Sense strand starting at position 2141 of SEQ ID NO: 1242556
cagcgcuucgguugagcua

SEQ ID NO: 1356769 - RNA, 19 nt, Artificial Sequence
  Description of Artificial Sequence: Synthetic oligonucleotide
  Antisense strand to SEQ ID NO: 1356768
uagcucaaccgaagcgcug

SEQ ID NO: 1356770 - RNA, 19 nt, Artificial Sequence
  Description of Artificial Sequence: Synthetic oligonucleotide
  Sense strand starting at position 2144 of SEQ ID NO: 1242556
cgcuucgguugagcuauua

SEQ ID NO: 1356771 - RNA, 19 nt, Artificial Sequence
  Description of Artificial Sequence: Synthetic oligonucleotide
  Antisense strand to SEQ ID NO: 1356770
uaauagcucaaccgaagcg

SEQ ID NO: 1356772 - RNA, 19 nt, Artificial Sequence
  Description of Artificial Sequence: Synthetic oligonucleotide
  Sense strand starting at position 2233 of SEQ ID NO: 1242556
gcauccucggugcaguaau

SEQ ID NO: 1356773 - RNA, 19 nt, Artificial Sequence
  Description of Artificial Sequence: Synthetic oligonucleotide
  Antisense strand to SEQ ID NO: 1356772
auuacugcaccgaggaugc

SEQ ID NO: 1356774 - RNA, 19 nt, Artificial Sequence
  Description of Artificial Sequence: Synthetic oligonucleotide
  Sense strand starting at position 2243 of SEQ ID NO: 1242556
ugcaguaaucagcacguua

SEQ ID NO: 1356775 - RNA, 19 nt, Artificial Sequence
  Description of Artificial Sequence: Synthetic oligonucleotide
  Antisense strand to SEQ ID NO: 1356774
uaacgugcugauuacugca

SEQ ID NO: 1356776 - RNA, 19 nt, Artificial Sequence
  Description of Artificial Sequence: Synthetic oligonucleotide
  Sense strand starting at position 2358 of SEQ ID NO: 1242556
agcagaucuguugaugcua

SEQ ID NO: 1356777 - RNA, 19 nt, Artificial Sequence
  Description of Artificial Sequence: Synthetic oligonucleotide
  Antisense strand to SEQ ID NO: 1356776
uagcaucaacagaucugcu

SEQ ID NO: 1356778 - RNA, 19 nt, Artificial Sequence
  Description of Artificial Sequence: Synthetic oligonucleotide
  Sense strand starting at position 2363 of SEQ ID NO: 1242556
aucuguugaugcuacagau

SEQ ID NO: 1356779 - RNA, 19 nt, Artificial Sequence
  Description of Artificial Sequence: Synthetic oligonucleotide
  Antisense strand to SEQ ID NO: 1356778
aucuguagcaucaacagau

SEQ ID NO: 1356780 - RNA, 19 nt, Artificial Sequence
  Description of Artificial Sequence: Synthetic oligonucleotide
  Sense strand starting at position 2586 of SEQ ID NO: 1242556
ccacaugugcuuuaucaca

SEQ ID NO: 1356781 - RNA, 19 nt, Artificial Sequence
  Description of Artificial Sequence: Synthetic oligonucleotide
  Antisense strand to SEQ ID NO: 1356780
ugugauaaagcacaugugg

SEQ ID NO: 1356782 - RNA, 19 nt, Artificial Sequence
  Description of Artificial Sequence: Synthetic oligonucleotide
  Sense strand starting at position 2588 of SEQ ID NO: 1242556
acaugugcuuuaucacauc

SEQ ID NO: 1356783 - RNA, 19 nt, Artificial Sequence
  Description of Artificial Sequence: Synthetic oligonucleotide
  Antisense strand to SEQ ID NO: 1356782
gaugugauaaagcacaugu

SEQ ID NO: 1356784 - RNA, 19 nt, Artificial Sequence
  Description of Artificial Sequence: Synthetic oligonucleotide
  Sense strand starting at position 2634 of SEQ ID NO: 1242556
uguagacaucaguauccuu

SEQ ID NO: 1356785 - RNA, 19 nt, Artificial Sequence
  Description of Artificial Sequence: Synthetic oligonucleotide
  Antisense strand to SEQ ID NO: 1356784
aaggauacugaugucuaca

SEQ ID NO: 1356786 - RNA, 19 nt, Artificial Sequence
  Description of Artificial Sequence: Synthetic oligonucleotide
  Sense strand starting at position 2930 of SEQ ID NO: 1242556
caggcugauccucaaguga

SEQ ID NO: 1356787 - RNA, 19 nt, Artificial Sequence
  Description of Artificial Sequence: Synthetic oligonucleotide
  Antisense strand to SEQ ID NO: 1356786
ucacuugaggaucagccug

SEQ ID NO: 1356788 - RNA, 19 nt, Artificial Sequence
  Description of Artificial Sequence: Synthetic oligonucleotide
  Sense strand starting at position 3307 of SEQ ID NO: 1242556
gggagagcucauggacacu

SEQ ID NO: 1356789 - RNA, 19 nt, Artificial Sequence
  Description of Artificial Sequence: Synthetic oligonucleotide
  Antisense strand to SEQ ID NO: 1356788
aguguccaugagcucuccc

SEQ ID NO: 1356790 - RNA, 19 nt, Artificial Sequence
  Description of Artificial Sequence: Synthetic oligonucleotide
  Sense strand starting at position 3323 of SEQ ID NO: 1242556
acucacgguuuccacaaau

SEQ ID NO: 1356791 - RNA, 19 nt, Artificial Sequence
  Description of Artificial Sequence: Synthetic oligonucleotide
  Antisense strand to SEQ ID NO: 1356790
auuuguggaaaccgugagu

SEQ ID NO: 1356792 - RNA, 19 nt, Artificial Sequence
  Description of Artificial Sequence: Synthetic oligonucleotide
  Sense strand starting at position 3376 of SEQ ID NO: 1242556
caggguguccugcauauca

SEQ ID NO: 1356793 - RNA, 19 nt, Artificial Sequence
  Description of Artificial Sequence: Synthetic oligonucleotide
  Antisense strand to SEQ ID NO: 1356792
ugauaugcaggacacccug

SEQ ID NO: 1356794 - RNA, 19 nt, Artificial Sequence
  Description of Artificial Sequence: Synthetic oligonucleotide
  Sense strand starting at position 3378 of SEQ ID NO: 1242556
ggguguccugcauaucaag

SEQ ID NO: 1356795 - RNA, 19 nt, Artificial Sequence
  Description of Artificial Sequence: Synthetic oligonucleotide
  Antisense strand to SEQ ID NO: 1356794
cuugauaugcaggacaccc

SEQ ID NO: 1356796 - RNA, 19 nt, Artificial Sequence
  Description of Artificial Sequence: Synthetic oligonucleotide
  Sense strand starting at position 3397 of SEQ ID NO: 1242556
ugcaauacguucucacagu

SEQ ID NO: 1356797 - RNA, 19 nt, Artificial Sequence
  Description of Artificial Sequence: Synthetic oligonucleotide
  Antisense strand to SEQ ID NO: 1356796
acugugagaacguauugca

SEQ ID NO: 1356798 - RNA, 19 nt, Artificial Sequence
  Description of Artificial Sequence: Synthetic oligonucleotide
  Sense strand starting at position 3453 of SEQ ID NO: 1242556
uguugagcaucuccauuaa

SEQ ID NO: 1356799 - RNA, 19 nt, Artificial Sequence
  Description of Artificial Sequence: Synthetic oligonucleotide
  Antisense strand to SEQ ID NO: 1356798
uuaauggagaugcucaaca

SEQ ID NO: 1356800 - RNA, 19 nt, Artificial Sequence
  Description of Artificial Sequence: Synthetic oligonucleotide
  Sense strand starting at position 3561 of SEQ ID NO: 1242556
gaauuugacuuccacggua

SEQ ID NO: 1356801 - RNA, 19 nt, Artificial Sequence
  Description of Artificial Sequence: Synthetic oligonucleotide
  Antisense strand to SEQ ID NO: 1356800
uaccguggaagucaaauuc

SEQ ID NO: 1356802 - RNA, 19 nt, Artificial Sequence
  Description of Artificial Sequence: Synthetic oligonucleotide
  Sense strand starting at position 3865 of SEQ ID NO: 1242556
gcauaauucuacuugaagg

SEQ ID NO: 1356803 - RNA, 19 nt, Artificial Sequence
  Description of Artificial Sequence: Synthetic oligonucleotide
  Antisense strand to SEQ ID NO: 1356802
ccuucaaguagaauuaugc

SEQ ID NO: 1356804 - RNA, 19 nt, Artificial Sequence
  Description of Artificial Sequence: Synthetic oligonucleotide
  Sense strand starting at position 3881 of SEQ ID NO: 1242556
aggaauuugucucauugau

SEQ ID NO: 1356805 - RNA, 19 nt, Artificial Sequence
  Description of Artificial Sequence: Synthetic oligonucleotide
  Antisense strand to SEQ ID NO: 1356804
aucaaugagacaaauuccu

SEQ ID NO: 1356806 - RNA, 19 nt, Artificial Sequence
  Description of Artificial Sequence: Synthetic oligonucleotide
  Sense strand starting at position 3926 of SEQ ID NO: 1242556
augagugggaacugguuaa

SEQ ID NO: 1356807 - RNA, 19 nt, Artificial Sequence
  Description of Artificial Sequence: Synthetic oligonucleotide
  Antisense strand to SEQ ID NO: 1356806
uuaaccaguucccacucau

SEQ ID NO: 1356808 - RNA, 19 nt, Artificial Sequence
  Description of Artificial Sequence: Synthetic oligonucleotide
  Sense strand starting at position 3954 of SEQ ID NO: 1242556
ggguauauccaucaugcag

SEQ ID NO: 1356809 - RNA, 19 nt, Artificial Sequence
  Description of Artificial Sequence: Synthetic oligonucleotide
  Antisense strand to SEQ ID NO: 1356808
cugcaugauggauauaccc

SEQ ID NO: 1356810 - RNA, 19 nt, Artificial Sequence
  Description of Artificial Sequence: Synthetic oligonucleotide
  Sense strand starting at position 6 of SEQ ID NO: 1242557
acuggcacgccaugaaauu

SEQ ID NO: 1356811 - RNA, 19 nt, Artificial Sequence
  Description of Artificial Sequence: Synthetic oligonucleotide
  Antisense strand to SEQ ID NO: 1356810
aauuucauggcgugccagu

SEQ ID NO: 1356812 - RNA, 19 nt, Artificial Sequence
  Description of Artificial Sequence: Synthetic oligonucleotide
  Sense strand starting at position 21 of SEQ ID NO: 1242557
aauugugaccaaggagguu

SEQ ID NO: 1356813 - RNA, 19 nt, Artificial Sequence
  Description of Artificial Sequence: Synthetic oligonucleotide
  Antisense strand to SEQ ID NO: 1356812
aaccuccuuggucacaauu

SEQ ID NO: 1356814 - RNA, 19 nt, Artificial Sequence
  Description of Artificial Sequence: Synthetic oligonucleotide
  Sense strand starting at position 177 of SEQ ID NO: 1242557
augacuuguguugacuuaa

SEQ ID NO: 1356815 - RNA, 19 nt, Artificial Sequence
  Description of Artificial Sequence: Synthetic oligonucleotide
  Antisense strand to SEQ ID NO: 1356814
uuaagucaacacaagucau

SEQ ID NO: 1356816 - RNA, 19 nt, Artificial Sequence
  Description of Artificial Sequence: Synthetic oligonucleotide
  Sense strand starting at position 245 of SEQ ID NO: 1242557
cuaggauccuuuccaauug

SEQ ID NO: 1356817 - RNA, 19 nt, Artificial Sequence
  Description of Artificial Sequence: Synthetic oligonucleotide
  Antisense strand to SEQ ID NO: 1356816
caauuggaaaggauccuag

SEQ ID NO: 1356818 - RNA, 19 nt, Artificial Sequence
  Description of Artificial Sequence: Synthetic oligonucleotide
  Sense strand starting at position 582 of SEQ ID NO: 1242557
agagcagacagguguuaaa

SEQ ID NO: 1356819 - RNA, 19 nt, Artificial Sequence
  Description of Artificial Sequence: Synthetic oligonucleotide
  Antisense strand to SEQ ID NO: 1356818
uuuaacaccugucugcucu

SEQ ID NO: 1356820 - RNA, 19 nt, Artificial Sequence
  Description of Artificial Sequence: Synthetic oligonucleotide
  Sense strand starting at position 632 of SEQ ID NO: 1242557
uugacaugaucagaacuga

SEQ ID NO: 1356821 - RNA, 19 nt, Artificial Sequence
  Description of Artificial Sequence: Synthetic oligonucleotide
  Antisense strand to SEQ ID NO: 1356820
ucaguucugaucaugucaa

SEQ ID NO: 1356822 - RNA, 19 nt, Artificial Sequence
  Description of Artificial Sequence: Synthetic oligonucleotide
  Sense strand starting at position 688 of SEQ ID NO: 1242557
aggaauugucaggguacau

SEQ ID NO: 1356823 - RNA, 19 nt, Artificial Sequence
  Description of Artificial Sequence: Synthetic oligonucleotide
  Antisense strand to SEQ ID NO: 1356822
auguacccugacaauuccu

SEQ ID NO: 1356824 - RNA, 19 nt, Artificial Sequence
  Description of Artificial Sequence: Synthetic oligonucleotide
  Sense strand starting at position 705 of SEQ ID NO: 1242557
auagcaaaugcugguaauu

SEQ ID NO: 1356825 - RNA, 19 nt, Artificial Sequence
  Description of Artificial Sequence: Synthetic oligonucleotide
  Antisense strand to SEQ ID NO: 1356824
aauuaccagcauuugcuau

SEQ ID NO: 1356826 - RNA, 19 nt, Artificial Sequence
  Description of Artificial Sequence: Synthetic oligonucleotide
  Sense strand starting at position 737 of SEQ ID NO: 1242557
ugcagugggccugaaguaa

SEQ ID NO: 1356827 - RNA, 19 nt, Artificial Sequence
  Description of Artificial Sequence: Synthetic oligonucleotide
  Antisense strand to SEQ ID NO: 1356826
uuacuucaggcccacugca

SEQ ID NO: 1356828 - RNA, 19 nt, Artificial Sequence
  Description of Artificial Sequence: Synthetic oligonucleotide
  Sense strand starting at position 938 of SEQ ID NO: 1242557
ggccgaguucaauguuuaa

SEQ ID NO: 1356829 - RNA, 19 nt, Artificial Sequence
  Description of Artificial Sequence: Synthetic oligonucleotide
  Antisense strand to SEQ ID NO: 1356828
uuaaacauugaacucggcc

SEQ ID NO: 1356830 - RNA, 19 nt, Artificial Sequence
  Description of Artificial Sequence: Synthetic oligonucleotide
  Sense strand starting at position 1004 of SEQ ID NO: 1242557
ccaauuugcucuggagaaa

SEQ ID NO: 1356831 - RNA, 19 nt, Artificial Sequence
  Description of Artificial Sequence: Synthetic oligonucleotide
  Antisense strand to SEQ ID NO: 1356830
uuucuccagagcaaauugg

SEQ ID NO: 1356832 - RNA, 19 nt, Artificial Sequence
  Description of Artificial Sequence: Synthetic oligonucleotide
  Sense strand starting at position 1039 of SEQ ID NO: 1242557
aguaccagcucccauuuau

SEQ ID NO: 1356833 - RNA, 19 nt, Artificial Sequence
  Description of Artificial Sequence: Synthetic oligonucleotide
  Antisense strand to SEQ ID NO: 1356832
auaaaugggagcugguacu

SEQ ID NO: 1356834 - RNA, 19 nt, Artificial Sequence
  Description of Artificial Sequence: Synthetic oligonucleotide
  Sense strand starting at position 1097 of SEQ ID NO: 1242557
uagauccuuucgguaaucu

SEQ ID NO: 1356835 - RNA, 19 nt, Artificial Sequence
  Description of Artificial Sequence: Synthetic oligonucleotide
  Antisense strand to SEQ ID NO: 1356834
agauuaccgaaaggaucua

SEQ ID NO: 1356836 - RNA, 19 nt, Artificial Sequence
  Description of Artificial Sequence: Synthetic oligonucleotide
  Sense strand starting at position 1105 of SEQ ID NO: 1242557
uucgguaaucugcaggauu

SEQ ID NO: 1356837 - RNA, 19 nt, Artificial Sequence
  Description of Artificial Sequence: Synthetic oligonucleotide
  Antisense strand to SEQ ID NO: 1356836
aauccugcagauuaccgaa

SEQ ID NO: 1356838 - RNA, 19 nt, Artificial Sequence
  Description of Artificial Sequence: Synthetic oligonucleotide
  Sense strand starting at position 1274 of SEQ ID NO: 1242557
cugagucucacagguguga

SEQ ID NO: 1356839 - RNA, 19 nt, Artificial Sequence
  Description of Artificial Sequence: Synthetic oligonucleotide
  Antisense strand to SEQ ID NO: 1356838
ucacaccugugagacucag

SEQ ID NO: 1356840 - RNA, 19 nt, Artificial Sequence
  Description of Artificial Sequence: Synthetic oligonucleotide
  Sense strand starting at position 1467 of SEQ ID NO: 1242557
gugugaggugcuggauaug

SEQ ID NO: 1356841 - RNA, 19 nt, Artificial Sequence
  Description of Artificial Sequence: Synthetic oligonucleotide
  Antisense strand to SEQ ID NO: 1356840
cauauccagcaccucacac

SEQ ID NO: 1356842 - RNA, 19 nt, Artificial Sequence
  Description of Artificial Sequence: Synthetic oligonucleotide
  Sense strand starting at position 1472 of SEQ ID NO: 1242557
aggugcuggauaugaaacu

SEQ ID NO: 1356843 - RNA, 19 nt, Artificial Sequence
  Description of Artificial Sequence: Synthetic oligonucleotide
  Antisense strand to SEQ ID NO: 1356842
aguuucauauccagcaccu

SEQ ID NO: 1356844 - RNA, 19 nt, Artificial Sequence
  Description of Artificial Sequence: Synthetic oligonucleotide
  Sense strand starting at position 1671 of SEQ ID NO: 1242557
ggcagaaguccuuacuguu

SEQ ID NO: 1356845 - RNA, 19 nt, Artificial Sequence
  Description of Artificial Sequence: Synthetic oligonucleotide
  Antisense strand to SEQ ID NO: 1356844
aacaguaaggacuucugcc

SEQ ID NO: 1356846 - RNA, 19 nt, Artificial Sequence
  Description of Artificial Sequence: Synthetic oligonucleotide
  Sense strand starting at position 1763 of SEQ ID NO: 1242557
gaagauggcgucugacuca

SEQ ID NO: 1356847 - RNA, 19 nt, Artificial Sequence
  Description of Artificial Sequence: Synthetic oligonucleotide
  Antisense strand to SEQ ID NO: 1356846
ugagucagacgccaucuuc

SEQ ID NO: 1356848 - RNA, 19 nt, Artificial Sequence
  Description of Artificial Sequence: Synthetic oligonucleotide
  Sense strand starting at position 2247 of SEQ ID NO: 1242557
cugccucuugggcaucaua

SEQ ID NO: 1356849 - RNA, 19 nt, Artificial Sequence
  Description of Artificial Sequence: Synthetic oligonucleotide
  Antisense strand to SEQ ID NO: 1356848
uaugaugcccaagaggcag

SEQ ID NO: 1356850 - RNA, 19 nt, Artificial Sequence
  Description of Artificial Sequence: Synthetic oligonucleotide
  Sense strand starting at position 2293 of SEQ ID NO: 1242557
cagaaauacuguucuugga

SEQ ID NO: 1356851 - RNA, 19 nt, Artificial Sequence
  Description of Artificial Sequence: Synthetic oligonucleotide
  Antisense strand to SEQ ID NO: 1356850
uccaagaacaguauuucug

SEQ ID NO: 1356852 - RNA, 19 nt, Artificial Sequence
  Description of Artificial Sequence: Synthetic oligonucleotide
  Sense strand starting at position 2295 of SEQ ID NO: 1242557
gaaauacuguucuuggaaa

SEQ ID NO: 1356853 - RNA, 19 nt, Artificial Sequence
  Description of Artificial Sequence: Synthetic oligonucleotide
  Antisense strand to SEQ ID NO: 1356852
uuuccaagaacaguauuuc

SEQ ID NO: 1356854 - RNA, 19 nt, Artificial Sequence
  Description of Artificial Sequence: Synthetic oligonucleotide
  Sense strand starting at position 2333 of SEQ ID NO: 1242557
aagaaagacugagaaugau

SEQ ID NO: 1356855 - RNA, 19 nt, Artificial Sequence
  Description of Artificial Sequence: Synthetic oligonucleotide
  Antisense strand to SEQ ID NO: 1356854
aucauucucagucuuucuu

SEQ ID NO: 1356856 - RNA, 19 nt, Artificial Sequence
  Description of Artificial Sequence: Synthetic oligonucleotide
  Sense strand starting at position 2370 of SEQ ID NO: 1242557
gccagaaauugggucuaaa

SEQ ID NO: 1356857 - RNA, 19 nt, Artificial Sequence
  Description of Artificial Sequence: Synthetic oligonucleotide
  Antisense strand to SEQ ID NO: 1356856
uuuagacccaauuucuggc

SEQ ID NO: 1356858 - RNA, 19 nt, Artificial Sequence
  Description of Artificial Sequence: Synthetic oligonucleotide
  Sense strand starting at position 2404 of SEQ ID NO: 1242557
auauauuaccuaggcaagu

SEQ ID NO: 1356859 - RNA, 19 nt, Artificial Sequence
  Description of Artificial Sequence: Synthetic oligonucleotide
  Antisense strand to SEQ ID NO: 1356858
acuugccuagguaauauau

SEQ ID NO: 1356860 - RNA, 19 nt, Artificial Sequence
  Description of Artificial Sequence: Synthetic oligonucleotide
  Sense strand starting at position 2426 of SEQ ID NO: 1242557
ugaacucaucagugccuua

SEQ ID NO: 1356861 - RNA, 19 nt, Artificial Sequence
  Description of Artificial Sequence: Synthetic oligonucleotide
  Antisense strand to SEQ ID NO: 1356860
uaaggcacugaugaguuca

SEQ ID NO: 1356862 - RNA, 19 nt, Artificial Sequence
  Description of Artificial Sequence: Synthetic oligonucleotide
  Sense strand starting at position 2529 of SEQ ID NO: 1242557
guacauaggauguggaaga

SEQ ID NO: 1356863 - RNA, 19 nt, Artificial Sequence
  Description of Artificial Sequence: Synthetic oligonucleotide
  Antisense strand to SEQ ID NO: 1356862
ucuuccacauccuauguac

SEQ ID NO: 1356864 - RNA, 19 nt, Artificial Sequence
  Description of Artificial Sequence: Synthetic oligonucleotide
  Sense strand starting at position 2542 of SEQ ID NO: 1242557
ggaagagaugccuguugca

SEQ ID NO: 1356865 - RNA, 19 nt, Artificial Sequence
  Description of Artificial Sequence: Synthetic oligonucleotide
  Antisense strand to SEQ ID NO: 1356864
ugcaacaggcaucucuucc

SEQ ID NO: 1356866 - RNA, 19 nt, Artificial Sequence
  Description of Artificial Sequence: Synthetic oligonucleotide
  Sense strand starting at position 2811 of SEQ ID NO: 1242557
cugagaaccgaauguugca

SEQ ID NO: 1356867 - RNA, 19 nt, Artificial Sequence
  Description of Artificial Sequence: Synthetic oligonucleotide
  Antisense strand to SEQ ID NO: 1356866
ugcaacauucgguucucag

SEQ ID NO: 1356868 - RNA, 19 nt, Artificial Sequence
  Description of Artificial Sequence: Synthetic oligonucleotide
  Sense strand starting at position 2820 of SEQ ID NO: 1242557
gaauguugcagugaguaga

SEQ ID NO: 1356869 - RNA, 19 nt, Artificial Sequence
  Description of Artificial Sequence: Synthetic oligonucleotide
  Antisense strand to SEQ ID NO: 1356868
ucuacucacugcaacauuc

SEQ ID NO: 1356870 - RNA, 19 nt, Artificial Sequence
  Description of Artificial Sequence: Synthetic oligonucleotide
  Sense strand starting at position 3335 of SEQ ID NO: 1242557
aggaaauaauauggaaaga

SEQ ID NO: 1356871 - RNA, 19 nt, Artificial Sequence
  Description of Artificial Sequence: Synthetic oligonucleotide
  Antisense strand to SEQ ID NO: 1356870
ucuuuccauauuauuuccu

SEQ ID NO: 1356872 - RNA, 19 nt, Artificial Sequence
  Description of Artificial Sequence: Synthetic oligonucleotide
  Sense strand starting at position 3366 of SEQ ID NO: 1242557
aggauaagcuagcuuugga

SEQ ID NO: 1356873 - RNA, 19 nt, Artificial Sequence
  Description of Artificial Sequence: Synthetic oligonucleotide
  Antisense strand to SEQ ID NO: 1356872
uccaaagcuagcuuauccu

SEQ ID NO: 1356874 - RNA, 19 nt, Artificial Sequence
  Description of Artificial Sequence: Synthetic oligonucleotide
  Sense strand starting at position 3420 of SEQ ID NO: 1242557
ggaauuggcuuagaaagga

SEQ ID NO: 1356875 - RNA, 19 nt, Artificial Sequence
  Description of Artificial Sequence: Synthetic oligonucleotide
  Antisense strand to SEQ ID NO: 1356874
uccuuucuaagccaauucc

SEQ ID NO: 1356876 - RNA, 19 nt, Artificial Sequence
  Description of Artificial Sequence: Synthetic oligonucleotide
  Sense strand starting at position 3548 of SEQ ID NO: 1242557
cccagagauuccucaguaa

SEQ ID NO: 1356877 - RNA, 19 nt, Artificial Sequence
  Description of Artificial Sequence: Synthetic oligonucleotide
  Antisense strand to SEQ ID NO: 1356876
uuacugaggaaucucuggg

SEQ ID NO: 1356878 - RNA, 19 nt, Artificial Sequence
  Description of Artificial Sequence: Synthetic oligonucleotide
  Sense strand starting at position 3635 of SEQ ID NO: 1242557
caaaucaggucggugugau

SEQ ID NO: 1356879 - RNA, 19 nt, Artificial Sequence
  Description of Artificial Sequence: Synthetic oligonucleotide
  Antisense strand to SEQ ID NO: 1356878
aucacaccgaccugauuug

SEQ ID NO: 1356880 - RNA, 19 nt, Artificial Sequence
  Description of Artificial Sequence: Synthetic oligonucleotide
  Sense strand starting at position 3636 of SEQ ID NO: 1242557
aaaucaggucggugugauu

SEQ ID NO: 1356881 - RNA, 19 nt, Artificial Sequence
  Description of Artificial Sequence: Synthetic oligonucleotide
  Antisense strand to SEQ ID NO: 1356880
aaucacaccgaccugauuu

SEQ ID NO: 1356882 - RNA, 19 nt, Artificial Sequence
  Description of Artificial Sequence: Synthetic oligonucleotide
  Sense strand starting at position 3642 of SEQ ID NO: 1242557
ggucggugugauuggagga

SEQ ID NO: 1356883 - RNA, 19 nt, Artificial Sequence
  Description of Artificial Sequence: Synthetic oligonucleotide
  Antisense strand to SEQ ID NO: 1356882
uccuccaaucacaccgacc

SEQ ID NO: 1356884 - RNA, 19 nt, Artificial Sequence
  Description of Artificial Sequence: Synthetic oligonucleotide
  Sense strand starting at position 3643 of SEQ ID NO: 1242557
gucggugugauuggaggaa

SEQ ID NO: 1356885 - RNA, 19 nt, Artificial Sequence
  Description of Artificial Sequence: Synthetic oligonucleotide
  Antisense strand to SEQ ID NO: 1356884
uuccuccaaucacaccgac

SEQ ID NO: 1356886 - RNA, 19 nt, Artificial Sequence
  Description of Artificial Sequence: Synthetic oligonucleotide
  Sense strand starting at position 3645 of SEQ ID NO: 1242557
cggugugauuggaggaaac

SEQ ID NO: 1356887 - RNA, 19 nt, Artificial Sequence
  Description of Artificial Sequence: Synthetic oligonucleotide
  Antisense strand to SEQ ID NO: 1356886
guuuccuccaaucacaccg

SEQ ID NO: 1356888 - RNA, 19 nt, Artificial Sequence
  Description of Artificial Sequence: Synthetic oligonucleotide
  Sense strand starting at position 3734 of SEQ ID NO: 1242557
gcguauaacaagugaaaca

SEQ ID NO: 1356889 - RNA, 19 nt, Artificial Sequence
  Description of Artificial Sequence: Synthetic oligonucleotide
  Antisense strand to SEQ ID NO: 1356888
uguuucacuuguuauacgc

SEQ ID NO: 1356890 - RNA, 19 nt, Artificial Sequence
  Description of Artificial Sequence: Synthetic oligonucleotide
  Sense strand starting at position 196 of SEQ ID NO: 1242558
gcuugugucagggauccua

SEQ ID NO: 1356891 - RNA, 19 nt, Artificial Sequence
  Description of Artificial Sequence: Synthetic oligonucleotide
  Antisense strand to SEQ ID NO: 1356890
uaggaucccugacacaagc

SEQ ID NO: 1356892 - RNA, 19 nt, Artificial Sequence
  Description of Artificial Sequence: Synthetic oligonucleotide
  Sense strand starting at position 296 of SEQ ID NO: 1242558
ugccucuguguguuuaacu

SEQ ID NO: 1356893 - RNA, 19 nt, Artificial Sequence
  Description of Artificial Sequence: Synthetic oligonucleotide
  Antisense strand to SEQ ID NO: 1356892
aguuaaacacacagaggca

SEQ ID NO: 1356894 - RNA, 19 nt, Artificial Sequence
  Description of Artificial Sequence: Synthetic oligonucleotide
  Sense strand starting at position 301 of SEQ ID NO: 1242558
cuguguguuuaacugucaa

SEQ ID NO: 1356895 - RNA, 19 nt, Artificial Sequence
  Description of Artificial Sequence: Synthetic oligonucleotide
  Antisense strand to SEQ ID NO: 1356894
uugacaguuaaacacacag

SEQ ID NO: 1356896 - RNA, 19 nt, Artificial Sequence
  Description of Artificial Sequence: Synthetic oligonucleotide
  Sense strand starting at position 326 of SEQ ID NO: 1242558
gggccacgucuuuaaugca

SEQ ID NO: 1356897 - RNA, 19 nt, Artificial Sequence
  Description of Artificial Sequence: Synthetic oligonucleotide
  Antisense strand to SEQ ID NO: 1356896
ugcauuaaagacguggccc

SEQ ID NO: 1356898 - RNA, 19 nt, Artificial Sequence
  Description of Artificial Sequence: Synthetic oligonucleotide
  Sense strand starting at position 404 of SEQ ID NO: 1242558
cucuuugggccucgagaaa

SEQ ID NO: 1356899 - RNA, 19 nt, Artificial Sequence
  Description of Artificial Sequence: Synthetic oligonucleotide
  Antisense strand to SEQ ID NO: 1356898
uuucucgaggcccaaagag

SEQ ID NO: 1356900 - RNA, 19 nt, Artificial Sequence
  Description of Artificial Sequence: Synthetic oligonucleotide
  Sense strand starting at position 640 of SEQ ID NO: 1242558
acccauuucucuuggcuga

SEQ ID NO: 1356901 - RNA, 19 nt, Artificial Sequence
  Description of Artificial Sequence: Synthetic oligonucleotide
  Antisense strand to SEQ ID NO: 1356900
ucagccaagagaaaugggu

SEQ ID NO: 1356902 - RNA, 19 nt, Artificial Sequence
  Description of Artificial Sequence: Synthetic oligonucleotide
  Sense strand starting at position 642 of SEQ ID NO: 1242558
ccauuucucuuggcugagu

SEQ ID NO: 1356903 - RNA, 19 nt, Artificial Sequence
  Description of Artificial Sequence: Synthetic oligonucleotide
  Antisense strand to SEQ ID NO: 1356902
acucagccaagagaaaugg

SEQ ID NO: 1356904 - RNA, 19 nt, Artificial Sequence
  Description of Artificial Sequence: Synthetic oligonucleotide
  Sense strand starting at position 867 of SEQ ID NO: 1242558
ccaucucuguugucagagu

SEQ ID NO: 1356905 - RNA, 19 nt, Artificial Sequence
  Description of Artificial Sequence: Synthetic oligonucleotide
  Antisense strand to SEQ ID NO: 1356904
acucugacaacagagaugg

SEQ ID NO: 1356906 - RNA, 19 nt, Artificial Sequence
  Description of Artificial Sequence: Synthetic oligonucleotide
  Sense strand starting at position 1183 of SEQ ID NO: 1242558
cccugcuccugaguaugaa

SEQ ID NO: 1356907 - RNA, 19 nt, Artificial Sequence
  Description of Artificial Sequence: Synthetic oligonucleotide
  Antisense strand to SEQ ID NO: 1356906
uucauacucaggagcaggg

SEQ ID NO: 1356908 - RNA, 19 nt, Artificial Sequence
  Description of Artificial Sequence: Synthetic oligonucleotide
  Sense strand starting at position 1254 of SEQ ID NO: 1242558
cuuuaauguggugguguca

SEQ ID NO: 1356909 - RNA, 19 nt, Artificial Sequence
  Description of Artificial Sequence: Synthetic oligonucleotide
  Antisense strand to SEQ ID NO: 1356908
ugacaccaccacauuaaag

SEQ ID NO: 1356910 - RNA, 19 nt, Artificial Sequence
  Description of Artificial Sequence: Synthetic oligonucleotide
  Sense strand starting at position 1322 of SEQ ID NO: 1242558
aagggugaaucaucuaucu

SEQ ID NO: 1356911 - RNA, 19 nt, Artificial Sequence
  Description of Artificial Sequence: Synthetic oligonucleotide
  Antisense strand to SEQ ID NO: 1356910
agauagaugauucacccuu

SEQ ID NO: 1356912 - RNA, 19 nt, Artificial Sequence
  Description of Artificial Sequence: Synthetic oligonucleotide
  Sense strand starting at position 1380 of SEQ ID NO: 1242558
gagucucugcuccgggauu

SEQ ID NO: 1356913 - RNA, 19 nt, Artificial Sequence
  Description of Artificial Sequence: Synthetic oligonucleotide
  Antisense strand to SEQ ID NO: 1356912
aaucccggagcagagacuc

SEQ ID NO: 1356914 - RNA, 19 nt, Artificial Sequence
  Description of Artificial Sequence: Synthetic oligonucleotide
  Sense strand starting at position 1391 of SEQ ID NO: 1242558
ccgggauuuccuugucuua

SEQ ID NO: 1356915 - RNA, 19 nt, Artificial Sequence
  Description of Artificial Sequence: Synthetic oligonucleotide
  Antisense strand to SEQ ID NO: 1356914
uaagacaaggaaaucccgg

SEQ ID NO: 1356916 - RNA, 19 nt, Artificial Sequence
  Description of Artificial Sequence: Synthetic oligonucleotide
  Sense strand starting at position 1631 of SEQ ID NO: 1242558
aggacuucugucuagagcu

SEQ ID NO: 1356917 - RNA, 19 nt, Artificial Sequence
  Description of Artificial Sequence: Synthetic oligonucleotide
  Antisense strand to SEQ ID NO: 1356916
agcucuagacagaaguccu

SEQ ID NO: 1356918 - RNA, 19 nt, Artificial Sequence
  Description of Artificial Sequence: Synthetic oligonucleotide
  Sense strand starting at position 1763 of SEQ ID NO: 1242558
cuccguuuccaggagaaga

SEQ ID NO: 1356919 - RNA, 19 nt, Artificial Sequence
  Description of Artificial Sequence: Synthetic oligonucleotide
  Antisense strand to SEQ ID NO: 1356918
ucuucuccuggaaacggag

SEQ ID NO: 1356920 - RNA, 19 nt, Artificial Sequence
  Description of Artificial Sequence: Synthetic oligonucleotide
  Sense strand starting at position 1774 of SEQ ID NO: 1242558
ggagaagaugcccagguuu

SEQ ID NO: 1356921 - RNA, 19 nt, Artificial Sequence
  Description of Artificial Sequence: Synthetic oligonucleotide
  Antisense strand to SEQ ID NO: 1356920
aaaccugggcaucuucucc

SEQ ID NO: 1356922 - RNA, 19 nt, Artificial Sequence
  Description of Artificial Sequence: Synthetic oligonucleotide
  Sense strand starting at position 2638 of SEQ ID NO: 1242558
accuccuucguggguauaa

SEQ ID NO: 1356923 - RNA, 19 nt, Artificial Sequence
  Description of Artificial Sequence: Synthetic oligonucleotide
  Antisense strand to SEQ ID NO: 1356922
uuauacccacgaaggaggu

SEQ ID NO: 1356924 - RNA, 19 nt, Artificial Sequence
  Description of Artificial Sequence: Synthetic oligonucleotide
  Sense strand starting at position 2639 of SEQ ID NO: 1242558
ccuccuucguggguauaaa

SEQ ID NO: 1356925 - RNA, 19 nt, Artificial Sequence
  Description of Artificial Sequence: Synthetic oligonucleotide
  Antisense strand to SEQ ID NO: 1356924
uuuauacccacgaaggagg

SEQ ID NO: 1356926 - RNA, 19 nt, Artificial Sequence
  Description of Artificial Sequence: Synthetic oligonucleotide
  Sense strand starting at position 2672 of SEQ ID NO: 1242558
ugaugaaggugccuuucua

SEQ ID NO: 1356927 - RNA, 19 nt, Artificial Sequence
  Description of Artificial Sequence: Synthetic oligonucleotide
  Antisense strand to SEQ ID NO: 1356926
uagaaaggcaccuucauca

SEQ ID NO: 1356928 - RNA, 19 nt, Artificial Sequence
  Description of Artificial Sequence: Synthetic oligonucleotide
  Sense strand starting at position 2683 of SEQ ID NO: 1242558
ccuuucuaccguuguauaa

SEQ ID NO: 1356929 - RNA, 19 nt, Artificial Sequence
  Description of Artificial Sequence: Synthetic oligonucleotide
  Antisense strand to SEQ ID NO: 1356928
uuauacaacgguagaaagg

SEQ ID NO: 1356930 - RNA, 19 nt, Artificial Sequence
  Description of Artificial Sequence: Synthetic oligonucleotide
  Sense strand starting at position 2701 of SEQ ID NO: 1242558
aaaugcuguguggaagaua

SEQ ID NO: 1356931 - RNA, 19 nt, Artificial Sequence
  Description of Artificial Sequence: Synthetic oligonucleotide
  Antisense strand to SEQ ID NO: 1356930
uaucuuccacacagcauuu

SEQ ID NO: 1356932 - RNA, 19 nt, Artificial Sequence
  Description of Artificial Sequence: Synthetic oligonucleotide
  Sense strand starting at position 2704 of SEQ ID NO: 1242558
ugcuguguggaagauaauu

SEQ ID NO: 1356933 - RNA, 19 nt, Artificial Sequence
  Description of Artificial Sequence: Synthetic oligonucleotide
  Antisense strand to SEQ ID NO: 1356932
aauuaucuuccacacagca

SEQ ID NO: 1356934 - RNA, 19 nt, Artificial Sequence
  Description of Artificial Sequence: Synthetic oligonucleotide
  Sense strand starting at position 2728 of SEQ ID NO: 1242558
ucaggugugacggauggau

SEQ ID NO: 1356935 - RNA, 19 nt, Artificial Sequence
  Description of Artificial Sequence: Synthetic oligonucleotide
  Antisense strand to SEQ ID NO: 1356934
auccauccgucacaccuga

SEQ ID NO: 1356936 - RNA, 19 nt, Artificial Sequence
  Description of Artificial Sequence: Synthetic oligonucleotide
  Sense strand starting at position 2755 of SEQ ID NO: 1242558
cacagcuuucuagagguau

SEQ ID NO: 1356937 - RNA, 19 nt, Artificial Sequence
  Description of Artificial Sequence: Synthetic oligonucleotide
  Antisense strand to SEQ ID NO: 1356936
auaccucuagaaagcugug

SEQ ID NO: 1356938 - RNA, 19 nt, Artificial Sequence
  Description of Artificial Sequence: Synthetic oligonucleotide
  Sense strand starting at position 2942 of SEQ ID NO: 1242558
cacugauaacuuggucugu

SEQ ID NO: 1356939 - RNA, 19 nt, Artificial Sequence
  Description of Artificial Sequence: Synthetic oligonucleotide
  Antisense strand to SEQ ID NO: 1356938
acagaccaaguuaucagug

SEQ ID NO: 1356940 - RNA, 19 nt, Artificial Sequence
  Description of Artificial Sequence: Synthetic oligonucleotide
  Sense strand starting at position 2947 of SEQ ID NO: 1242558
auaacuuggucuguggagu

SEQ ID NO: 1356941 - RNA, 19 nt, Artificial Sequence
  Description of Artificial Sequence: Synthetic oligonucleotide
  Antisense strand to SEQ ID NO: 1356940
acuccacagaccaaguuau

SEQ ID NO: 1356942 - RNA, 19 nt, Artificial Sequence
  Description of Artificial Sequence: Synthetic oligonucleotide
  Sense strand starting at position 2988 of SEQ ID NO: 1242558
ccuccugcuguccaggaau

SEQ ID NO: 1356943 - RNA, 19 nt, Artificial Sequence
  Description of Artificial Sequence: Synthetic oligonucleotide
  Antisense strand to SEQ ID NO: 1356942
auuccuggacagcaggagg

SEQ ID NO: 1356944 - RNA, 19 nt, Artificial Sequence
  Description of Artificial Sequence: Synthetic oligonucleotide
  Sense strand starting at position 3011 of SEQ ID NO: 1242558
gcugcccuaucucugauua

SEQ ID NO: 1356945 - RNA, 19 nt, Artificial Sequence
  Description of Artificial Sequence: Synthetic oligonucleotide
  Antisense strand to SEQ ID NO: 1356944
uaaucagagauagggcagc

SEQ ID NO: 1356946 - RNA, 19 nt, Artificial Sequence
  Description of Artificial Sequence: Synthetic oligonucleotide
  Sense strand starting at position 3034 of SEQ ID NO: 1242558
agcgcuauaguccuugcaa

SEQ ID NO: 1356947 - RNA, 19 nt, Artificial Sequence
  Description of Artificial Sequence: Synthetic oligonucleotide
  Antisense strand to SEQ ID NO: 1356946
uugcaaggacuauagcgcu

SEQ ID NO: 1356948 - RNA, 19 nt, Artificial Sequence
  Description of Artificial Sequence: Synthetic oligonucleotide
  Sense strand starting at position 3087 of SEQ ID NO: 1242558
auagaaagcugccaaacaa

SEQ ID NO: 1356949 - RNA, 19 nt, Artificial Sequence
  Description of Artificial Sequence: Synthetic oligonucleotide
  Antisense strand to SEQ ID NO: 1356948
uuguuuggcagcuuucuau

SEQ ID NO: 1356950 - RNA, 19 nt, Artificial Sequence
  Description of Artificial Sequence: Synthetic oligonucleotide
  Sense strand starting at position 3403 of SEQ ID NO: 1242558
augagaaucgcuugaaugg

SEQ ID NO: 1356951 - RNA, 19 nt, Artificial Sequence
  Description of Artificial Sequence: Synthetic oligonucleotide
  Antisense strand to SEQ ID NO: 1356950
ccauucaagcgauucucau

SEQ ID NO: 1356952 - RNA, 19 nt, Artificial Sequence
  Description of Artificial Sequence: Synthetic oligonucleotide
  Sense strand starting at position 3471 of SEQ ID NO: 1242558
gggugauugucaccuugcu

SEQ ID NO: 1356953 - RNA, 19 nt, Artificial Sequence
  Description of Artificial Sequence: Synthetic oligonucleotide
  Antisense strand to SEQ ID NO: 1356952
agcaaggugacaaucaccc

SEQ ID NO: 1356954 - RNA, 19 nt, Artificial Sequence
  Description of Artificial Sequence: Synthetic oligonucleotide
  Sense strand starting at position 3478 of SEQ ID NO: 1242558
ugucaccuugcuugaggaa

SEQ ID NO: 1356955 - RNA, 19 nt, Artificial Sequence
  Description of Artificial Sequence: Synthetic oligonucleotide
  Antisense strand to SEQ ID NO: 1356954
uuccucaagcaaggugaca

SEQ ID NO: 1356956 - RNA, 19 nt, Artificial Sequence
  Description of Artificial Sequence: Synthetic oligonucleotide
  Sense strand starting at position 3499 of SEQ ID NO: 1242558
ugaugaggccugugcugaa

SEQ ID NO: 1356957 - RNA, 19 nt, Artificial Sequence
  Description of Artificial Sequence: Synthetic oligonucleotide
  Antisense strand to SEQ ID NO: 1356956
uucagcacaggccucauca

SEQ ID NO: 1356958 - RNA, 19 nt, Artificial Sequence
  Description of Artificial Sequence: Synthetic oligonucleotide
  Sense strand starting at position 3733 of SEQ ID NO: 1242558
ucauguauugaugauggca

SEQ ID NO: 1356959 - RNA, 19 nt, Artificial Sequence
  Description of Artificial Sequence: Synthetic oligonucleotide
  Antisense strand to SEQ ID NO: 1356958
ugccaucaucaauacauga

SEQ ID NO: 1356960 - RNA, 19 nt, Artificial Sequence
  Description of Artificial Sequence: Synthetic oligonucleotide
  Sense strand starting at position 3736 of SEQ ID NO: 1242558
uguauugaugauggcagua

SEQ ID NO: 1356961 - RNA, 19 nt, Artificial Sequence
  Description of Artificial Sequence: Synthetic oligonucleotide
  Antisense strand to SEQ ID NO: 1356960
uacugccaucaucaauaca

SEQ ID NO: 1356962 - RNA, 19 nt, Artificial Sequence
  Description of Artificial Sequence: Synthetic oligonucleotide
  Sense strand starting at position 3765 of SEQ ID NO: 1242558
agccuuucuggagggaaau

SEQ ID NO: 1356963 - RNA, 19 nt, Artificial Sequence
  Description of Artificial Sequence: Synthetic oligonucleotide
  Antisense strand to SEQ ID NO: 1356962
auuucccuccagaaaggcu

SEQ ID NO: 1356964 - RNA, 19 nt, Artificial Sequence
  Description of Artificial Sequence: Synthetic oligonucleotide
  Sense strand starting at position 3887 of SEQ ID NO: 1242558
augauaaaguagcuuacua

SEQ ID NO: 1356965 - RNA, 19 nt, Artificial Sequence
  Description of Artificial Sequence: Synthetic oligonucleotide
  Antisense strand to SEQ ID NO: 1356964
uaguaagcuacuuuaucau

SEQ ID NO: 1356966 - RNA, 19 nt, Artificial Sequence
  Description of Artificial Sequence: Synthetic oligonucleotide
  Sense strand starting at position 3969 of SEQ ID NO: 1242558
gggaaauuguugcaugaaa

SEQ ID NO: 1356967 - RNA, 19 nt, Artificial Sequence
  Description of Artificial Sequence: Synthetic oligonucleotide
  Antisense strand to SEQ ID NO: 1356966
uuucaugcaacaauuuccc

SEQ ID NO: 1356968 - RNA, 19 nt, Artificial Sequence
  Description of Artificial Sequence: Synthetic oligonucleotide
  Sense strand starting at position 3971 of SEQ ID NO: 1242558
gaaauuguugcaugaaauu

SEQ ID NO: 1356969 - RNA, 19 nt, Artificial Sequence
  Description of Artificial Sequence: Synthetic oligonucleotide
  Antisense strand to SEQ ID NO: 1356968
aauuucaugcaacaauuuc

SEQ ID NO: 1356970 - RNA, 19 nt, Artificial Sequence
  Description of Artificial Sequence: Synthetic oligonucleotide
  Sense strand starting at position 359 of SEQ ID NO: 1242559
cccaaaguuccagaaugcu

SEQ ID NO: 1356971 - RNA, 19 nt, Artificial Sequence
  Description of Artificial Sequence: Synthetic oligonucleotide
  Antisense strand to SEQ ID NO: 1356970
agcauucuggaacuuuggg

SEQ ID NO: 1356972 - RNA, 19 nt, Artificial Sequence
  Description of Artificial Sequence: Synthetic oligonucleotide
  Sense strand starting at position 563 of SEQ ID NO: 1242559
aagccugucuggucagaau

SEQ ID NO: 1356973 - RNA, 19 nt, Artificial Sequence
  Description of Artificial Sequence: Synthetic oligonucleotide
  Antisense strand to SEQ ID NO: 1356972
auucugaccagacaggcuu

SEQ ID NO: 1356974 - RNA, 19 nt, Artificial Sequence
  Description of Artificial Sequence: Synthetic oligonucleotide
  Sense strand starting at position 566 of SEQ ID NO: 1242559
ccugucuggucagaauggu

SEQ ID NO: 1356975 - RNA, 19 nt, Artificial Sequence
  Description of Artificial Sequence: Synthetic oligonucleotide
  Antisense strand to SEQ ID NO: 1356974
accauucugaccagacagg

SEQ ID NO: 1356976 - RNA, 19 nt, Artificial Sequence
  Description of Artificial Sequence: Synthetic oligonucleotide
  Sense strand starting at position 575 of SEQ ID NO: 1242559
ucagaauggugguaaguca

SEQ ID NO: 1356977 - RNA, 19 nt, Artificial Sequence
  Description of Artificial Sequence: Synthetic oligonucleotide
  Antisense strand to SEQ ID NO: 1356976
ugacuuaccaccauucuga

SEQ ID NO: 1356978 - RNA, 19 nt, Artificial Sequence
  Description of Artificial Sequence: Synthetic oligonucleotide
  Sense strand starting at position 604 of SEQ ID NO: 1242559
ggagagacgucguccuguu

SEQ ID NO: 1356979 - RNA, 19 nt, Artificial Sequence
  Description of Artificial Sequence: Synthetic oligonucleotide
  Antisense strand to SEQ ID NO: 1356978
aacaggacgacgucucucc

SEQ ID NO: 1356980 - RNA, 19 nt, Artificial Sequence
  Description of Artificial Sequence: Synthetic oligonucleotide
  Sense strand starting at position 738 of SEQ ID NO: 1242559
uuacauuucucaugaggca

SEQ ID NO: 1356981 - RNA, 19 nt, Artificial Sequence
  Description of Artificial Sequence: Synthetic oligonucleotide
  Antisense strand to SEQ ID NO: 1356980
ugccucaugagaaauguaa

SEQ ID NO: 1356982 - RNA, 19 nt, Artificial Sequence
  Description of Artificial Sequence: Synthetic oligonucleotide
  Sense strand starting at position 802 of SEQ ID NO: 1242559
cgcccagacuaucugaaua

SEQ ID NO: 1356983 - RNA, 19 nt, Artificial Sequence
  Description of Artificial Sequence: Synthetic oligonucleotide
  Antisense strand to SEQ ID NO: 1356982
uauucagauagucugggcg

SEQ ID NO: 1356984 - RNA, 19 nt, Artificial Sequence
  Description of Artificial Sequence: Synthetic oligonucleotide
  Sense strand starting at position 987 of SEQ ID NO: 1242559
ggacguaacccggagaaca

SEQ ID NO: 1356985 - RNA, 19 nt, Artificial Sequence
  Description of Artificial Sequence: Synthetic oligonucleotide
  Antisense strand to SEQ ID NO: 1356984
uguucuccggguuacgucc

SEQ ID NO: 1356986 - RNA, 19 nt, Artificial Sequence
  Description of Artificial Sequence: Synthetic oligonucleotide
  Sense strand starting at position 1030 of SEQ ID NO: 1242559
uggcuucaucugugcgaca

SEQ ID NO: 1356987 - RNA, 19 nt, Artificial Sequence
  Description of Artificial Sequence: Synthetic oligonucleotide
  Antisense strand to SEQ ID NO: 1356986
ugucgcacagaugaagcca

SEQ ID NO: 1356988 - RNA, 19 nt, Artificial Sequence
  Description of Artificial Sequence: Synthetic oligonucleotide
  Sense strand starting at position 1032 of SEQ ID NO: 1242559
gcuucaucugugcgacaga

SEQ ID NO: 1356989 - RNA, 19 nt, Artificial Sequence
  Description of Artificial Sequence: Synthetic oligonucleotide
  Antisense strand to SEQ ID NO: 1356988
ucugucgcacagaugaagc

SEQ ID NO: 1356990 - RNA, 19 nt, Artificial Sequence
  Description of Artificial Sequence: Synthetic oligonucleotide
  Sense strand starting at position 1446 of SEQ ID NO: 1242559
ggcugucggucgcuacaua

SEQ ID NO: 1356991 - RNA, 19 nt, Artificial Sequence
  Description of Artificial Sequence: Synthetic oligonucleotide
  Antisense strand to SEQ ID NO: 1356990
uauguagcgaccgacagcc

SEQ ID NO: 1356992 - RNA, 19 nt, Artificial Sequence
  Description of Artificial Sequence: Synthetic oligonucleotide
  Sense strand starting at position 1447 of SEQ ID NO: 1242559
gcugucggucgcuacauau

SEQ ID NO: 1356993 - RNA, 19 nt, Artificial Sequence
  Description of Artificial Sequence: Synthetic oligonucleotide
  Antisense strand to SEQ ID NO: 1356992
auauguagcgaccgacagc

SEQ ID NO: 1356994 - RNA, 19 nt, Artificial Sequence
  Description of Artificial Sequence: Synthetic oligonucleotide
  Sense strand starting at position 3494 of SEQ ID NO: 1242559
cucugaugauguucuggau

SEQ ID NO: 1356995 - RNA, 19 nt, Artificial Sequence
  Description of Artificial Sequence: Synthetic oligonucleotide
  Antisense strand to SEQ ID NO: 1356994
auccagaacaucaucagag

SEQ ID NO: 1356996 - RNA, 19 nt, Artificial Sequence
  Description of Artificial Sequence: Synthetic oligonucleotide
  Sense strand starting at position 3513 of SEQ ID NO: 1242559
agcccauuccgcgagcaaa

SEQ ID NO: 1356997 - RNA, 19 nt, Artificial Sequence
  Description of Artificial Sequence: Synthetic oligonucleotide
  Antisense strand to SEQ ID NO: 1356996
uuugcucgcggaaugggcu

SEQ ID NO: 1356998 - RNA, 19 nt, Artificial Sequence
  Description of Artificial Sequence: Synthetic oligonucleotide
  Sense strand starting at position 3532 of SEQ ID NO: 1242559
gggacuucgucagguucau

SEQ ID NO: 1356999 - RNA, 19 nt, Artificial Sequence
  Description of Artificial Sequence: Synthetic oligonucleotide
  Antisense strand to SEQ ID NO: 1356998
augaaccugacgaaguccc

SEQ ID NO: 1357000 - RNA, 19 nt, Artificial Sequence
  Description of Artificial Sequence: Synthetic oligonucleotide
  Sense strand starting at position 3583 of SEQ ID NO: 1242559
ggaggaggcucaugcuaaa

SEQ ID NO: 1357001 - RNA, 19 nt, Artificial Sequence
  Description of Artificial Sequence: Synthetic oligonucleotide
  Antisense strand to SEQ ID NO: 1357000
uuuagcaugagccuccucc

SEQ ID NO: 1357002 - RNA, 19 nt, Artificial Sequence
  Description of Artificial Sequence: Synthetic oligonucleotide
  Sense strand starting at position 3586 of SEQ ID NO: 1242559
ggaggcucaugcuaaauaa

SEQ ID NO: 1357003 - RNA, 19 nt, Artificial Sequence
  Description of Artificial Sequence: Synthetic oligonucleotide
  Antisense strand to SEQ ID NO: 1357002
uuauuuagcaugagccucc

SEQ ID NO: 1357004 - RNA, 19 nt, Artificial Sequence
  Description of Artificial Sequence: Synthetic oligonucleotide
  Sense strand starting at position 3650 of SEQ ID NO: 1242559
ccaauuaauguagacaugu

SEQ ID NO: 1357005 - RNA, 19 nt, Artificial Sequence
  Description of Artificial Sequence: Synthetic oligonucleotide
  Antisense strand to SEQ ID NO: 1357004
acaugucuacauuaauugg

SEQ ID NO: 1357006 - RNA, 19 nt, Artificial Sequence
  Description of Artificial Sequence: Synthetic oligonucleotide
  Sense strand starting at position 3798 of SEQ ID NO: 1242559
augcauguuuaagugcuua

SEQ ID NO: 1357007 - RNA, 19 nt, Artificial Sequence
  Description of Artificial Sequence: Synthetic oligonucleotide
  Antisense strand to SEQ ID NO: 1357006
uaagcacuuaaacaugcau

SEQ ID NO: 1357008 - RNA, 19 nt, Artificial Sequence
  Description of Artificial Sequence: Synthetic oligonucleotide
  Sense strand starting at position 3803 of SEQ ID NO: 1242559
uguuuaagugcuuacuaca

SEQ ID NO: 1357009 - RNA, 19 nt, Artificial Sequence
  Description of Artificial Sequence: Synthetic oligonucleotide
  Antisense strand to SEQ ID NO: 1357008
uguaguaagcacuuaaaca

SEQ ID NO: 1357010 - RNA, 19 nt, Artificial Sequence
  Description of Artificial Sequence: Synthetic oligonucleotide
  Sense strand starting at position 3840 of SEQ ID NO: 1242559
ccaaauaaaugguaguaua

SEQ ID NO: 1357011 - RNA, 19 nt, Artificial Sequence
  Description of Artificial Sequence: Synthetic oligonucleotide
  Antisense strand to SEQ ID NO: 1357010
uauacuaccauuuauuugg

SEQ ID NO: 1357012 - RNA, 19 nt, Artificial Sequence
  Description of Artificial Sequence: Synthetic oligonucleotide
  Sense strand starting at position 3850 of SEQ ID NO: 1242559
gguaguauauaaugugagu

SEQ ID NO: 1357013 - RNA, 19 nt, Artificial Sequence
  Description of Artificial Sequence: Synthetic oligonucleotide
  Antisense strand to SEQ ID NO: 1357012
acucacauuauauacuacc

SEQ ID NO: 1357014 - RNA, 19 nt, Artificial Sequence
  Description of Artificial Sequence: Synthetic oligonucleotide
  Sense strand starting at position 3856 of SEQ ID NO: 1242559
auauaaugugaguauagcu

SEQ ID NO: 1357015 - RNA, 19 nt, Artificial Sequence
  Description of Artificial Sequence: Synthetic oligonucleotide
  Antisense strand to SEQ ID NO: 1357014
agcuauacucacauuauau

SEQ ID NO: 1357016 - RNA, 19 nt, Artificial Sequence
  Description of Artificial Sequence: Synthetic oligonucleotide
  Sense strand starting at position 3865 of SEQ ID NO: 1242559
gaguauagcuagggauuua

SEQ ID NO: 1357017 - RNA, 19 nt, Artificial Sequence
  Description of Artificial Sequence: Synthetic oligonucleotide
  Antisense strand to SEQ ID NO: 1357016
uaaaucccuagcuauacuc

SEQ ID NO: 1357018 - RNA, 19 nt, Artificial Sequence
  Description of Artificial Sequence: Synthetic oligonucleotide
  Sense strand starting at position 3885 of SEQ ID NO: 1242559
auagccuagucuccguaau

SEQ ID NO: 1357019 - RNA, 19 nt, Artificial Sequence
  Description of Artificial Sequence: Synthetic oligonucleotide
  Antisense strand to SEQ ID NO: 1357018
auuacggagacuaggcuau

SEQ ID NO: 1357020 - RNA, 19 nt, Artificial Sequence
  Description of Artificial Sequence: Synthetic oligonucleotide
  Sense strand starting at position 3886 of SEQ ID NO: 1242559
uagccuagucuccguaaug

SEQ ID NO: 1357021 - RNA, 19 nt, Artificial Sequence
  Description of Artificial Sequence: Synthetic oligonucleotide
  Antisense strand to SEQ ID NO: 1357020
cauuacggagacuaggcua

SEQ ID NO: 1357022 - RNA, 19 nt, Artificial Sequence
  Description of Artificial Sequence: Synthetic oligonucleotide
  Sense strand starting at position 3887 of SEQ ID NO: 1242559
agccuagucuccguaauga

SEQ ID NO: 1357023 - RNA, 19 nt, Artificial Sequence
  Description of Artificial Sequence: Synthetic oligonucleotide
  Antisense strand to SEQ ID NO: 1357022
ucauuacggagacuaggcu

SEQ ID NO: 1357024 - RNA, 19 nt, Artificial Sequence
  Description of Artificial Sequence: Synthetic oligonucleotide
  Sense strand starting at position 3967 of SEQ ID NO: 1242559
ggauuauuaaugcgcugca

SEQ ID NO: 1357025 - RNA, 19 nt, Artificial Sequence
  Description of Artificial Sequence: Synthetic oligonucleotide
  Antisense strand to SEQ ID NO: 1357024
ugcagcgcauuaauaaucc

SEQ ID NO: 1357026 - RNA, 19 nt, Artificial Sequence
  Description of Artificial Sequence: Synthetic oligonucleotide
  Sense strand starting at position 3968 of SEQ ID NO: 1242559
gauuauuaaugcgcugcaa

SEQ ID NO: 1357027 - RNA, 19 nt, Artificial Sequence
  Description of Artificial Sequence: Synthetic oligonucleotide
  Antisense strand to SEQ ID NO: 1357026
uugcagcgcauuaauaauc

SEQ ID NO: 1357028 - RNA, 19 nt, Artificial Sequence
  Description of Artificial Sequence: Synthetic oligonucleotide
  Sense strand starting at position 3970 of SEQ ID NO: 1242559
uuauuaaugcgcugcaaac

SEQ ID NO: 1357029 - RNA, 19 nt, Artificial Sequence
  Description of Artificial Sequence: Synthetic oligonucleotide
  Antisense strand to SEQ ID NO: 1357028
guuugcagcgcauuaauaa

SEQ ID NO: 1357030 - RNA, 19 nt, Artificial Sequence
  Description of Artificial Sequence: Synthetic oligonucleotide
  Sense strand starting at position 3972 of SEQ ID NO: 1242559
auuaaugcgcugcaaacau

SEQ ID NO: 1357031 - RNA, 19 nt, Artificial Sequence
  Description of Artificial Sequence: Synthetic oligonucleotide
  Antisense strand to SEQ ID NO: 1357030
auguuugcagcgcauuaau

SEQ ID NO: 1357032 - RNA, 19 nt, Artificial Sequence
  Description of Artificial Sequence: Synthetic oligonucleotide
  Sense strand starting at position 30 of SEQ ID NO: 1242560
agaaauacgcaaggucaaa

SEQ ID NO: 1357033 - RNA, 19 nt, Artificial Sequence
  Description of Artificial Sequence: Synthetic oligonucleotide
  Antisense strand to SEQ ID NO: 1357032
uuugaccuugcguauuucu

SEQ ID NO: 1357034 - RNA, 19 nt, Artificial Sequence
  Description of Artificial Sequence: Synthetic oligonucleotide
  Sense strand starting at position 117 of SEQ ID NO: 1242560
uggcaauuucuguggcaga

SEQ ID NO: 1357035 - RNA, 19 nt, Artificial Sequence
  Description of Artificial Sequence: Synthetic oligonucleotide
  Antisense strand to SEQ ID NO: 1357034
ucugccacagaaauugcca

SEQ ID NO: 1357036 - RNA, 19 nt, Artificial Sequence
  Description of Artificial Sequence: Synthetic oligonucleotide
  Sense strand starting at position 130 of SEQ ID NO: 1242560
ggcagaaaguccuuaacga

SEQ ID NO: 1357037 - RNA, 19 nt, Artificial Sequence
  Description of Artificial Sequence: Synthetic oligonucleotide
  Antisense strand to SEQ ID NO: 1357036
ucguuaaggacuuucugcc

SEQ ID NO: 1357038 - RNA, 19 nt, Artificial Sequence
  Description of Artificial Sequence: Synthetic oligonucleotide
  Sense strand starting at position 131 of SEQ ID NO: 1242560
gcagaaaguccuuaacgaa

SEQ ID NO: 1357039 - RNA, 19 nt, Artificial Sequence
  Description of Artificial Sequence: Synthetic oligonucleotide
  Antisense strand to SEQ ID NO: 1357038
uucguuaaggacuuucugc

SEQ ID NO: 1357040 - RNA, 19 nt, Artificial Sequence
  Description of Artificial Sequence: Synthetic oligonucleotide
  Sense strand starting at position 196 of SEQ ID NO: 1242560
acaacuggacuucgugaau

SEQ ID NO: 1357041 - RNA, 19 nt, Artificial Sequence
  Description of Artificial Sequence: Synthetic oligonucleotide
  Antisense strand to SEQ ID NO: 1357040
auucacgaaguccaguugu

SEQ ID NO: 1357042 - RNA, 19 nt, Artificial Sequence
  Description of Artificial Sequence: Synthetic oligonucleotide
  Sense strand starting at position 199 of SEQ ID NO: 1242560
acuggacuucgugaaugag

SEQ ID NO: 1357043 - RNA, 19 nt, Artificial Sequence
  Description of Artificial Sequence: Synthetic oligonucleotide
  Antisense strand to SEQ ID NO: 1357042
cucauucacgaaguccagu

SEQ ID NO: 1357044 - RNA, 19 nt, Artificial Sequence
  Description of Artificial Sequence: Synthetic oligonucleotide
  Sense strand starting at position 202 of SEQ ID NO: 1242560
ggacuucgugaaugaguuu

SEQ ID NO: 1357045 - RNA, 19 nt, Artificial Sequence
  Description of Artificial Sequence: Synthetic oligonucleotide
  Antisense strand to SEQ ID NO: 1357044
aaacucauucacgaagucc

SEQ ID NO: 1357046 - RNA, 19 nt, Artificial Sequence
  Description of Artificial Sequence: Synthetic oligonucleotide
  Sense strand starting at position 209 of SEQ ID NO: 1242560
gugaaugaguuucuuaaga

SEQ ID NO: 1357047 - RNA, 19 nt, Artificial Sequence
  Description of Artificial Sequence: Synthetic oligonucleotide
  Antisense strand to SEQ ID NO: 1357046
ucuuaagaaacucauucac

SEQ ID NO: 1357048 - RNA, 19 nt, Artificial Sequence
  Description of Artificial Sequence: Synthetic oligonucleotide
  Sense strand starting at position 393 of SEQ ID NO: 1242560
cccagaucaccaugugaau

SEQ ID NO: 1357049 - RNA, 19 nt, Artificial Sequence
  Description of Artificial Sequence: Synthetic oligonucleotide
  Antisense strand to SEQ ID NO: 1357048
auucacauggugaucuggg

SEQ ID NO: 1357050 - RNA, 19 nt, Artificial Sequence
  Description of Artificial Sequence: Synthetic oligonucleotide
  Sense strand starting at position 402 of SEQ ID NO: 1242560
ccaugugaaucuuugcaaa

SEQ ID NO: 1357051 - RNA, 19 nt, Artificial Sequence
  Description of Artificial Sequence: Synthetic oligonucleotide
  Antisense strand to SEQ ID NO: 1357050
uuugcaaagauucacaugg

SEQ ID NO: 1357052 - RNA, 19 nt, Artificial Sequence
  Description of Artificial Sequence: Synthetic oligonucleotide
  Sense strand starting at position 481 of SEQ ID NO: 1242560
gaaaguccaucugcaaaga

SEQ ID NO: 1357053 - RNA, 19 nt, Artificial Sequence
  Description of Artificial Sequence: Synthetic oligonucleotide
  Antisense strand to SEQ ID NO: 1357052
ucuuugcagauggacuuuc

SEQ ID NO: 1357054 - RNA, 19 nt, Artificial Sequence
  Description of Artificial Sequence: Synthetic oligonucleotide
  Sense strand starting at position 598 of SEQ ID NO: 1242560
caaagugugguagguuauu

SEQ ID NO: 1357055 - RNA, 19 nt, Artificial Sequence
  Description of Artificial Sequence: Synthetic oligonucleotide
  Antisense strand to SEQ ID NO: 1357054
aauaaccuaccacacuuug

SEQ ID NO: 1357056 - RNA, 19 nt, Artificial Sequence
  Description of Artificial Sequence: Synthetic oligonucleotide
  Sense strand starting at position 603 of SEQ ID NO: 1242560
ugugguagguuauuaaaca

SEQ ID NO: 1357057 - RNA, 19 nt, Artificial Sequence
  Description of Artificial Sequence: Synthetic oligonucleotide
  Antisense strand to SEQ ID NO: 1357056
uguuuaauaaccuaccaca

SEQ ID NO: 1357058 - RNA, 19 nt, Artificial Sequence
  Description of Artificial Sequence: Synthetic oligonucleotide
  Sense strand starting at position 782 of SEQ ID NO: 1242560
aaggcuguuucuccugauu

SEQ ID NO: 1357059 - RNA, 19 nt, Artificial Sequence
  Description of Artificial Sequence: Synthetic oligonucleotide
  Antisense strand to SEQ ID NO: 1357058
aaucaggagaaacagccuu

SEQ ID NO: 1357060 - RNA, 19 nt, Artificial Sequence
  Description of Artificial Sequence: Synthetic oligonucleotide
  Sense strand starting at position 887 of SEQ ID NO: 1242560
ccugccuuccuggaacaaa

SEQ ID NO: 1357061 - RNA, 19 nt, Artificial Sequence
  Description of Artificial Sequence: Synthetic oligonucleotide
  Antisense strand to SEQ ID NO: 1357060
uuuguuccaggaaggcagg

SEQ ID NO: 1357062 - RNA, 19 nt, Artificial Sequence
  Description of Artificial Sequence: Synthetic oligonucleotide
  Sense strand starting at position 997 of SEQ ID NO: 1242560
ggccacguuacagaagaaa

SEQ ID NO: 1357063 - RNA, 19 nt, Artificial Sequence
  Description of Artificial Sequence: Synthetic oligonucleotide
  Antisense strand to SEQ ID NO: 1357062
uuucuucuguaacguggcc

SEQ ID NO: 1357064 - RNA, 19 nt, Artificial Sequence
  Description of Artificial Sequence: Synthetic oligonucleotide
  Sense strand starting at position 1210 of SEQ ID NO: 1242560
cgcaguaucuaaguagaaa

SEQ ID NO: 1357065 - RNA, 19 nt, Artificial Sequence
  Description of Artificial Sequence: Synthetic oligonucleotide
  Antisense strand to SEQ ID NO: 1357064
uuucuacuuagauacugcg

SEQ ID NO: 1357066 - RNA, 19 nt, Artificial Sequence
  Description of Artificial Sequence: Synthetic oligonucleotide
  Sense strand starting at position 1211 of SEQ ID NO: 1242560
gcaguaucuaaguagaaag

SEQ ID NO: 1357067 - RNA, 19 nt, Artificial Sequence
  Description of Artificial Sequence: Synthetic oligonucleotide
  Antisense strand to SEQ ID NO: 1357066
cuuucuacuuagauacugc

SEQ ID NO: 1357068 - RNA, 19 nt, Artificial Sequence
  Description of Artificial Sequence: Synthetic oligonucleotide
  Sense strand starting at position 1270 of SEQ ID NO: 1242560
uggcuuguacgacaacuuu

SEQ ID NO: 1357069 - RNA, 19 nt, Artificial Sequence
  Description of Artificial Sequence: Synthetic oligonucleotide
  Antisense strand to SEQ ID NO: 1357068
aaaguugucguacaagcca

SEQ ID NO: 1357070 - RNA, 19 nt, Artificial Sequence
  Description of Artificial Sequence: Synthetic oligonucleotide
  Sense strand starting at position 2593 of SEQ ID NO: 1242560
guuaauaaggagugaaagu

SEQ ID NO: 1357071 - RNA, 19 nt, Artificial Sequence
  Description of Artificial Sequence: Synthetic oligonucleotide
  Antisense strand to SEQ ID NO: 1357070
acuuucacuccuuauuaac

SEQ ID NO: 1357072 - RNA, 19 nt, Artificial Sequence
  Description of Artificial Sequence: Synthetic oligonucleotide
  Sense strand starting at position 2766 of SEQ ID NO: 1242560
guuauugauccucaccuca

SEQ ID NO: 1357073 - RNA, 19 nt, Artificial Sequence
  Description of Artificial Sequence: Synthetic oligonucleotide
  Antisense strand to SEQ ID NO: 1357072
ugaggugaggaucaauaac

SEQ ID NO: 1357074 - RNA, 19 nt, Artificial Sequence
  Description of Artificial Sequence: Synthetic oligonucleotide
  Sense strand starting at position 3213 of SEQ ID NO: 1242560
ugagguaagaaguaguauu

SEQ ID NO: 1357075 - RNA, 19 nt, Artificial Sequence
  Description of Artificial Sequence: Synthetic oligonucleotide
  Antisense strand to SEQ ID NO: 1357074
aauacuacuucuuaccuca

SEQ ID NO: 1357076 - RNA, 19 nt, Artificial Sequence
  Description of Artificial Sequence: Synthetic oligonucleotide
  Sense strand starting at position 3272 of SEQ ID NO: 1242560
cagaguacauugucaggga

SEQ ID NO: 1357077 - RNA, 19 nt, Artificial Sequence
  Description of Artificial Sequence: Synthetic oligonucleotide
  Antisense strand to SEQ ID NO: 1357076
ucccugacaauguacucug

SEQ ID NO: 1357078 - RNA, 19 nt, Artificial Sequence
  Description of Artificial Sequence: Synthetic oligonucleotide
  Sense strand starting at position 3276 of SEQ ID NO: 1242560
guacauugucagggauuau

SEQ ID NO: 1357079 - RNA, 19 nt, Artificial Sequence
  Description of Artificial Sequence: Synthetic oligonucleotide
  Antisense strand to SEQ ID NO: 1357078
auaaucccugacaauguac

SEQ ID NO: 1357080 - RNA, 19 nt, Artificial Sequence
  Description of Artificial Sequence: Synthetic oligonucleotide
  Sense strand starting at position 3286 of SEQ ID NO: 1242560
agggauuauuuagauggua

SEQ ID NO: 1357081 - RNA, 19 nt, Artificial Sequence
  Description of Artificial Sequence: Synthetic oligonucleotide
  Antisense strand to SEQ ID NO: 1357080
uaccaucuaaauaaucccu

SEQ ID NO: 1357082 - RNA, 19 nt, Artificial Sequence
  Description of Artificial Sequence: Synthetic oligonucleotide
  Sense strand starting at position 3291 of SEQ ID NO: 1242560
uuauuuagaugguaaguga

SEQ ID NO: 1357083 - RNA, 19 nt, Artificial Sequence
  Description of Artificial Sequence: Synthetic oligonucleotide
  Antisense strand to SEQ ID NO: 1357082
ucacuuaccaucuaaauaa

SEQ ID NO: 1357084 - RNA, 19 nt, Artificial Sequence
  Description of Artificial Sequence: Synthetic oligonucleotide
  Sense strand starting at position 3294 of SEQ ID NO: 1242560
uuuagaugguaagugauua

SEQ ID NO: 1357085 - RNA, 19 nt, Artificial Sequence
  Description of Artificial Sequence: Synthetic oligonucleotide
  Antisense strand to SEQ ID NO: 1357084
uaaucacuuaccaucuaaa

SEQ ID NO: 1357086 - RNA, 19 nt, Artificial Sequence
  Description of Artificial Sequence: Synthetic oligonucleotide
  Sense strand starting at position 3295 of SEQ ID NO: 1242560
uuagaugguaagugauuaa

SEQ ID NO: 1357087 - RNA, 19 nt, Artificial Sequence
  Description of Artificial Sequence: Synthetic oligonucleotide
  Antisense strand to SEQ ID NO: 1357086
uuaaucacuuaccaucuaa

SEQ ID NO: 1357088 - RNA, 19 nt, Artificial Sequence
  Description of Artificial Sequence: Synthetic oligonucleotide
  Sense strand starting at position 3299 of SEQ ID NO: 1242560
augguaagugauuaagcca

SEQ ID NO: 1357089 - RNA, 19 nt, Artificial Sequence
  Description of Artificial Sequence: Synthetic oligonucleotide
  Antisense strand to SEQ ID NO: 1357088
uggcuuaaucacuuaccau

SEQ ID NO: 1357090 - RNA, 19 nt, Artificial Sequence
  Description of Artificial Sequence: Synthetic oligonucleotide
  Sense strand starting at position 3302 of SEQ ID NO: 1242560
guaagugauuaagccaaac

SEQ ID NO: 1357091 - RNA, 19 nt, Artificial Sequence
  Description of Artificial Sequence: Synthetic oligonucleotide
  Antisense strand to SEQ ID NO: 1357090
guuuggcuuaaucacuuac

SEQ ID NO: 1357092 - RNA, 19 nt, Artificial Sequence
  Description of Artificial Sequence: Synthetic oligonucleotide
  Sense strand starting at position 3437 of SEQ ID NO: 1242560
ggccgcagaguguaaauuu

SEQ ID NO: 1357093 - RNA, 19 nt, Artificial Sequence
  Description of Artificial Sequence: Synthetic oligonucleotide
  Antisense strand to SEQ ID NO: 1357092
aaauuuacacucugcggcc

SEQ ID NO: 1357094 - RNA, 19 nt, Artificial Sequence
  Description of Artificial Sequence: Synthetic oligonucleotide
  Sense strand starting at position 3510 of SEQ ID NO: 1242560
ugauguggguuuccauaac

SEQ ID NO: 1357095 - RNA, 19 nt, Artificial Sequence
  Description of Artificial Sequence: Synthetic oligonucleotide
  Antisense strand to SEQ ID NO: 1357094
guuauggaaacccacauca

SEQ ID NO: 1357096 - RNA, 19 nt, Artificial Sequence
  Description of Artificial Sequence: Synthetic oligonucleotide
  Sense strand starting at position 3559 of SEQ ID NO: 1242560
cagaaacagugugugcauu

SEQ ID NO: 1357097 - RNA, 19 nt, Artificial Sequence
  Description of Artificial Sequence: Synthetic oligonucleotide
  Antisense strand to SEQ ID NO: 1357096
aaugcacacacuguuucug

SEQ ID NO: 1357098 - RNA, 19 nt, Artificial Sequence
  Description of Artificial Sequence: Synthetic oligonucleotide
  Sense strand starting at position 3677 of SEQ ID NO: 1242560
aagggugaaugaguuucua

SEQ ID NO: 1357099 - RNA, 19 nt, Artificial Sequence
  Description of Artificial Sequence: Synthetic oligonucleotide
  Antisense strand to SEQ ID NO: 1357098
uagaaacucauucacccuu

SEQ ID NO: 1357100 - RNA, 19 nt, Artificial Sequence
  Description of Artificial Sequence: Synthetic oligonucleotide
  Sense strand starting at position 3686 of SEQ ID NO: 1242560
ugaguuucuaagggauaau

SEQ ID NO: 1357101 - RNA, 19 nt, Artificial Sequence
  Description of Artificial Sequence: Synthetic oligonucleotide
  Antisense strand to SEQ ID NO: 1357100
auuaucccuuagaaacuca

SEQ ID NO: 1357102 - RNA, 19 nt, Artificial Sequence
  Description of Artificial Sequence: Synthetic oligonucleotide
  Sense strand starting at position 3722 of SEQ ID NO: 1242560
gccaguuaugcuguugcuu

SEQ ID NO: 1357103 - RNA, 19 nt, Artificial Sequence
  Description of Artificial Sequence: Synthetic oligonucleotide
  Antisense strand to SEQ ID NO: 1357102
aagcaacagcauaacuggc

SEQ ID NO: 1357104 - RNA, 19 nt, Artificial Sequence
  Description of Artificial Sequence: Synthetic oligonucleotide
  Sense strand starting at position 3786 of SEQ ID NO: 1242560
ccagaugucuugcuaggaa

SEQ ID NO: 1357105 - RNA, 19 nt, Artificial Sequence
  Description of Artificial Sequence: Synthetic oligonucleotide
  Antisense strand to SEQ ID NO: 1357104
uuccuagcaagacaucugg

SEQ ID NO: 1357106 - RNA, 19 nt, Artificial Sequence
  Description of Artificial Sequence: Synthetic oligonucleotide
  Sense strand starting at position 3789 of SEQ ID NO: 1242560
gaugucuugcuaggaacaa

SEQ ID NO: 1357107 - RNA, 19 nt, Artificial Sequence
  Description of Artificial Sequence: Synthetic oligonucleotide
  Antisense strand to SEQ ID NO: 1357106
uuguuccuagcaagacauc

SEQ ID NO: 1357108 - RNA, 19 nt, Artificial Sequence
  Description of Artificial Sequence: Synthetic oligonucleotide
  Sense strand starting at position 3830 of SEQ ID NO: 1242560
agcuuaaaggauuggaauu

SEQ ID NO: 1357109 - RNA, 19 nt, Artificial Sequence
  Description of Artificial Sequence: Synthetic oligonucleotide
  Antisense strand to SEQ ID NO: 1357108
aauuccaauccuuuaagcu

SEQ ID NO: 1357110 - RNA, 19 nt, Artificial Sequence
  Description of Artificial Sequence: Synthetic oligonucleotide
  Sense strand starting at position 3940 of SEQ ID NO: 1242560
gaaguagugacucacgcau

SEQ ID NO: 1357111 - RNA, 19 nt, Artificial Sequence
  Description of Artificial Sequence: Synthetic oligonucleotide
  Antisense strand to SEQ ID NO: 1357110
augcgugagucacuacuuc

SEQ ID NO: 1357112 - RNA, 19 nt, Artificial Sequence
  Description of Artificial Sequence: Synthetic oligonucleotide
  Sense strand starting at position 70 of SEQ ID NO: 1242561
gcaaauagacugcaagcua

SEQ ID NO: 1357113 - RNA, 19 nt, Artificial Sequence
  Description of Artificial Sequence: Synthetic oligonucleotide
  Antisense strand to SEQ ID NO: 1357112
uagcuugcagucuauuugc

SEQ ID NO: 1357114 - RNA, 19 nt, Artificial Sequence
  Description of Artificial Sequence: Synthetic oligonucleotide
  Sense strand starting at position 89 of SEQ ID NO: 1242561
acccauuacuuugugagaa

SEQ ID NO: 1357115 - RNA, 19 nt, Artificial Sequence
  Description of Artificial Sequence: Synthetic oligonucleotide
  Antisense strand to SEQ ID NO: 1357114
uucucacaaaguaaugggu

SEQ ID NO: 1357116 - RNA, 19 nt, Artificial Sequence
  Description of Artificial Sequence: Synthetic oligonucleotide
  Sense strand starting at position 101 of SEQ ID NO: 1242561
gugagaaguuacucuagau

SEQ ID NO: 1357117 - RNA, 19 nt, Artificial Sequence
  Description of Artificial Sequence: Synthetic oligonucleotide
  Antisense strand to SEQ ID NO: 1357116
aucuagaguaacuucucac

SEQ ID NO: 1357118 - RNA, 19 nt, Artificial Sequence
  Description of Artificial Sequence: Synthetic oligonucleotide
  Sense strand starting at position 180 of SEQ ID NO: 1242561
gagucaguugcuggaauuu

SEQ ID NO: 1357119 - RNA, 19 nt, Artificial Sequence
  Description of Artificial Sequence: Synthetic oligonucleotide
  Antisense strand to SEQ ID NO: 1357118
aaauuccagcaacugacuc

SEQ ID NO: 1357120 - RNA, 19 nt, Artificial Sequence
  Description of Artificial Sequence: Synthetic oligonucleotide
  Sense strand starting at position 353 of SEQ ID NO: 1242561
uuuacagcucugggaggaa

SEQ ID NO: 1357121 - RNA, 19 nt, Artificial Sequence
  Description of Artificial Sequence: Synthetic oligonucleotide
  Antisense strand to SEQ ID NO: 1357120
uuccucccagagcuguaaa

SEQ ID NO: 1357122 - RNA, 19 nt, Artificial Sequence
  Description of Artificial Sequence: Synthetic oligonucleotide
  Sense strand starting at position 420 of SEQ ID NO: 1242561
cuggcaugauucccuagaa

SEQ ID NO: 1357123 - RNA, 19 nt, Artificial Sequence
  Description of Artificial Sequence: Synthetic oligonucleotide
  Antisense strand to SEQ ID NO: 1357122
uucuagggaaucaugccag

SEQ ID NO: 1357124 - RNA, 19 nt, Artificial Sequence
  Description of Artificial Sequence: Synthetic oligonucleotide
  Sense strand starting at position 421 of SEQ ID NO: 1242561
uggcaugauucccuagaau

SEQ ID NO: 1357125 - RNA, 19 nt, Artificial Sequence
  Description of Artificial Sequence: Synthetic oligonucleotide
  Antisense strand to SEQ ID NO: 1357124
auucuagggaaucaugcca

SEQ ID NO: 1357126 - RNA, 19 nt, Artificial Sequence
  Description of Artificial Sequence: Synthetic oligonucleotide
  Sense strand starting at position 596 of SEQ ID NO: 1242561
cguuuauaucuguaacaaa

SEQ ID NO: 1357127 - RNA, 19 nt, Artificial Sequence
  Description of Artificial Sequence: Synthetic oligonucleotide
  Antisense strand to SEQ ID NO: 1357126
uuuguuacagauauaaacg

SEQ ID NO: 1357128 - RNA, 19 nt, Artificial Sequence
  Description of Artificial Sequence: Synthetic oligonucleotide
  Sense strand starting at position 621 of SEQ ID NO: 1242561
guugcaauuggugauuaag

SEQ ID NO: 1357129 - RNA, 19 nt, Artificial Sequence
  Description of Artificial Sequence: Synthetic oligonucleotide
  Antisense strand to SEQ ID NO: 1357128
cuuaaucaccaauugcaac

SEQ ID NO: 1357130 - RNA, 19 nt, Artificial Sequence
  Description of Artificial Sequence: Synthetic oligonucleotide
  Sense strand starting at position 624 of SEQ ID NO: 1242561
gcaauuggugauuaaguau

SEQ ID NO: 1357131 - RNA, 19 nt, Artificial Sequence
  Description of Artificial Sequence: Synthetic oligonucleotide
  Antisense strand to SEQ ID NO: 1357130
auacuuaaucaccaauugc

SEQ ID NO: 1357132 - RNA, 19 nt, Artificial Sequence
  Description of Artificial Sequence: Synthetic oligonucleotide
  Sense strand starting at position 704 of SEQ ID NO: 1242561
gagauauauguugguugaa

SEQ ID NO: 1357133 - RNA, 19 nt, Artificial Sequence
  Description of Artificial Sequence: Synthetic oligonucleotide
  Antisense strand to SEQ ID NO: 1357132
uucaaccaacauauaucuc

SEQ ID NO: 1357134 - RNA, 19 nt, Artificial Sequence
  Description of Artificial Sequence: Synthetic oligonucleotide
  Sense strand starting at position 705 of SEQ ID NO: 1242561
agauauauguugguugaau

SEQ ID NO: 1357135 - RNA, 19 nt, Artificial Sequence
  Description of Artificial Sequence: Synthetic oligonucleotide
  Antisense strand to SEQ ID NO: 1357134
auucaaccaacauauaucu

SEQ ID NO: 1357136 - RNA, 19 nt, Artificial Sequence
  Description of Artificial Sequence: Synthetic oligonucleotide
  Sense strand starting at position 706 of SEQ ID NO: 1242561
gauauauguugguugaauc

SEQ ID NO: 1357137 - RNA, 19 nt, Artificial Sequence
  Description of Artificial Sequence: Synthetic oligonucleotide
  Antisense strand to SEQ ID NO: 1357136
gauucaaccaacauauauc

SEQ ID NO: 1357138 - RNA, 19 nt, Artificial Sequence
  Description of Artificial Sequence: Synthetic oligonucleotide
  Sense strand starting at position 748 of SEQ ID NO: 1242561
aguaacuuugcugaauagu

SEQ ID NO: 1357139 - RNA, 19 nt, Artificial Sequence
  Description of Artificial Sequence: Synthetic oligonucleotide
  Antisense strand to SEQ ID NO: 1357138
acuauucagcaaaguuacu

SEQ ID NO: 1357140 - RNA, 19 nt, Artificial Sequence
  Description of Artificial Sequence: Synthetic oligonucleotide
  Sense strand starting at position 969 of SEQ ID NO: 1242561
ggccgauuucgugauguga

SEQ ID NO: 1357141 - RNA, 19 nt, Artificial Sequence
  Description of Artificial Sequence: Synthetic oligonucleotide
  Antisense strand to SEQ ID NO: 1357140
ucacaucacgaaaucggcc

SEQ ID NO: 1357142 - RNA, 19 nt, Artificial Sequence
  Description of Artificial Sequence: Synthetic oligonucleotide
  Sense strand starting at position 1075 of SEQ ID NO: 1242561
agauguaaguaaccucaga

SEQ ID NO: 1357143 - RNA, 19 nt, Artificial Sequence
  Description of Artificial Sequence: Synthetic oligonucleotide
  Antisense strand to SEQ ID NO: 1357142
ucugagguuacuuacaucu

SEQ ID NO: 1357144 - RNA, 19 nt, Artificial Sequence
  Description of Artificial Sequence: Synthetic oligonucleotide
  Sense strand starting at position 1254 of SEQ ID NO: 1242561
gaccgaugauugucaugag

SEQ ID NO: 1357145 - RNA, 19 nt, Artificial Sequence
  Description of Artificial Sequence: Synthetic oligonucleotide
  Antisense strand to SEQ ID NO: 1357144
cucaugacaaucaucgguc

SEQ ID NO: 1357146 - RNA, 19 nt, Artificial Sequence
  Description of Artificial Sequence: Synthetic oligonucleotide
  Sense strand starting at position 1436 of SEQ ID NO: 1242561
ugugguauagaugggaaca

SEQ ID NO: 1357147 - RNA, 19 nt, Artificial Sequence
  Description of Artificial Sequence: Synthetic oligonucleotide
  Antisense strand to SEQ ID NO: 1357146
uguucccaucuauaccaca

SEQ ID NO: 1357148 - RNA, 19 nt, Artificial Sequence
  Description of Artificial Sequence: Synthetic oligonucleotide
  Sense strand starting at position 1437 of SEQ ID NO: 1242561
gugguauagaugggaacaa

SEQ ID NO: 1357149 - RNA, 19 nt, Artificial Sequence
  Description of Artificial Sequence: Synthetic oligonucleotide
  Antisense strand to SEQ ID NO: 1357148
uuguucccaucuauaccac

SEQ ID NO: 1357150 - RNA, 19 nt, Artificial Sequence
  Description of Artificial Sequence: Synthetic oligonucleotide
  Sense strand starting at position 1478 of SEQ ID NO: 1242561
aagggcuucccagaagugu

SEQ ID NO: 1357151 - RNA, 19 nt, Artificial Sequence
  Description of Artificial Sequence: Synthetic oligonucleotide
  Antisense strand to SEQ ID NO: 1357150
acacuucugggaagcccuu

SEQ ID NO: 1357152 - RNA, 19 nt, Artificial Sequence
  Description of Artificial Sequence: Synthetic oligonucleotide
  Sense strand starting at position 1785 of SEQ ID NO: 1242561
agagccuuuagugagaauu

SEQ ID NO: 1357153 - RNA, 19 nt, Artificial Sequence
  Description of Artificial Sequence: Synthetic oligonucleotide
  Antisense strand to SEQ ID NO: 1357152
aauucucacuaaaggcucu

SEQ ID NO: 1357154 - RNA, 19 nt, Artificial Sequence
  Description of Artificial Sequence: Synthetic oligonucleotide
  Sense strand starting at position 1961 of SEQ ID NO: 1242561
gcuauaguaugauuugcca

SEQ ID NO: 1357155 - RNA, 19 nt, Artificial Sequence
  Description of Artificial Sequence: Synthetic oligonucleotide
  Antisense strand to SEQ ID NO: 1357154
uggcaaaucauacuauagc

SEQ ID NO: 1357156 - RNA, 19 nt, Artificial Sequence
  Description of Artificial Sequence: Synthetic oligonucleotide
  Sense strand starting at position 2009 of SEQ ID NO: 1242561
agagguaacgaagguuuca

SEQ ID NO: 1357157 - RNA, 19 nt, Artificial Sequence
  Description of Artificial Sequence: Synthetic oligonucleotide
  Antisense strand to SEQ ID NO: 1357156
ugaaaccuucguuaccucu

SEQ ID NO: 1357158 - RNA, 19 nt, Artificial Sequence
  Description of Artificial Sequence: Synthetic oligonucleotide
  Sense strand starting at position 2058 of SEQ ID NO: 1242561
ugcaaugaggguuacucau

SEQ ID NO: 1357159 - RNA, 19 nt, Artificial Sequence
  Description of Artificial Sequence: Synthetic oligonucleotide
  Antisense strand to SEQ ID NO: 1357158
augaguaacccucauugca

SEQ ID NO: 1357160 - RNA, 19 nt, Artificial Sequence
  Description of Artificial Sequence: Synthetic oligonucleotide
  Sense strand starting at position 2060 of SEQ ID NO: 1242561
caaugaggguuacucauca

SEQ ID NO: 1357161 - RNA, 19 nt, Artificial Sequence
  Description of Artificial Sequence: Synthetic oligonucleotide
  Antisense strand to SEQ ID NO: 1357160
ugaugaguaacccucauug

SEQ ID NO: 1357162 - RNA, 19 nt, Artificial Sequence
  Description of Artificial Sequence: Synthetic oligonucleotide
  Sense strand starting at position 2064 of SEQ ID NO: 1242561
gaggguuacucaucacauu

SEQ ID NO: 1357163 - RNA, 19 nt, Artificial Sequence
  Description of Artificial Sequence: Synthetic oligonucleotide
  Antisense strand to SEQ ID NO: 1357162
aaugugaugaguaacccuc

SEQ ID NO: 1357164 - RNA, 19 nt, Artificial Sequence
  Description of Artificial Sequence: Synthetic oligonucleotide
  Sense strand starting at position 2537 of SEQ ID NO: 1242561
guguaagaccaucauugua

SEQ ID NO: 1357165 - RNA, 19 nt, Artificial Sequence
  Description of Artificial Sequence: Synthetic oligonucleotide
  Antisense strand to SEQ ID NO: 1357164
uacaaugauggucuuacac

SEQ ID NO: 1357166 - RNA, 19 nt, Artificial Sequence
  Description of Artificial Sequence: Synthetic oligonucleotide
  Sense strand starting at position 2648 of SEQ ID NO: 1242561
aggucaggaugacaaauuu

SEQ ID NO: 1357167 - RNA, 19 nt, Artificial Sequence
  Description of Artificial Sequence: Synthetic oligonucleotide
  Antisense strand to SEQ ID NO: 1357166
aaauuugucauccugaccu

SEQ ID NO: 1357168 - RNA, 19 nt, Artificial Sequence
  Description of Artificial Sequence: Synthetic oligonucleotide
  Sense strand starting at position 2794 of SEQ ID NO: 1242561
gggucuaguguccaagauc

SEQ ID NO: 1357169 - RNA, 19 nt, Artificial Sequence
  Description of Artificial Sequence: Synthetic oligonucleotide
  Antisense strand to SEQ ID NO: 1357168
gaucuuggacacuagaccc

SEQ ID NO: 1357170 - RNA, 19 nt, Artificial Sequence
  Description of Artificial Sequence: Synthetic oligonucleotide
  Sense strand starting at position 2797 of SEQ ID NO: 1242561
ucuaguguccaagaucaga

SEQ ID NO: 1357171 - RNA, 19 nt, Artificial Sequence
  Description of Artificial Sequence: Synthetic oligonucleotide
  Antisense strand to SEQ ID NO: 1357170
ucugaucuuggacacuaga

SEQ ID NO: 1357172 - RNA, 19 nt, Artificial Sequence
  Description of Artificial Sequence: Synthetic oligonucleotide
  Sense strand starting at position 2868 of SEQ ID NO: 1242561
ccagcugggcccuaaagaa

SEQ ID NO: 1357173 - RNA, 19 nt, Artificial Sequence
  Description of Artificial Sequence: Synthetic oligonucleotide
  Antisense strand to SEQ ID NO: 1357172
uucuuuagggcccagcugg

SEQ ID NO: 1357174 - RNA, 19 nt, Artificial Sequence
  Description of Artificial Sequence: Synthetic oligonucleotide
  Sense strand starting at position 2885 of SEQ ID NO: 1242561
aaguuuaagugauuagauc

SEQ ID NO: 1357175 - RNA, 19 nt, Artificial Sequence
  Description of Artificial Sequence: Synthetic oligonucleotide
  Antisense strand to SEQ ID NO: 1357174
gaucuaaucacuuaaacuu

SEQ ID NO: 1357176 - RNA, 19 nt, Artificial Sequence
  Description of Artificial Sequence: Synthetic oligonucleotide
  Sense strand starting at position 2886 of SEQ ID NO: 1242561
aguuuaagugauuagaucu

SEQ ID NO: 1357177 - RNA, 19 nt, Artificial Sequence
  Description of Artificial Sequence: Synthetic oligonucleotide
  Antisense strand to SEQ ID NO: 1357176
agaucuaaucacuuaaacu

SEQ ID NO: 1357178 - RNA, 19 nt, Artificial Sequence
  Description of Artificial Sequence: Synthetic oligonucleotide
  Sense strand starting at position 2952 of SEQ ID NO: 1242561
agguuuauuuccuucuguu

SEQ ID NO: 1357179 - RNA, 19 nt, Artificial Sequence
  Description of Artificial Sequence: Synthetic oligonucleotide
  Antisense strand to SEQ ID NO: 1357178
aacagaaggaaauaaaccu

SEQ ID NO: 1357180 - RNA, 19 nt, Artificial Sequence
  Description of Artificial Sequence: Synthetic oligonucleotide
  Sense strand starting at position 3181 of SEQ ID NO: 1242561
agaguaaccuucccagauc

SEQ ID NO: 1357181 - RNA, 19 nt, Artificial Sequence
  Description of Artificial Sequence: Synthetic oligonucleotide
  Antisense strand to SEQ ID NO: 1357180
gaucugggaagguuacucu

SEQ ID NO: 1357182 - RNA, 19 nt, Artificial Sequence
  Description of Artificial Sequence: Synthetic oligonucleotide
  Sense strand starting at position 3364 of SEQ ID NO: 1242561
uguccuugggucuagaaga

SEQ ID NO: 1357183 - RNA, 19 nt, Artificial Sequence
  Description of Artificial Sequence: Synthetic oligonucleotide
  Antisense strand to SEQ ID NO: 1357182
ucuucuagacccaaggaca

SEQ ID NO: 1357184 - RNA, 19 nt, Artificial Sequence
  Description of Artificial Sequence: Synthetic oligonucleotide
  Sense strand starting at position 3628 of SEQ ID NO: 1242561
ucuauagagcagcauuaau

SEQ ID NO: 1357185 - RNA, 19 nt, Artificial Sequence
  Description of Artificial Sequence: Synthetic oligonucleotide
  Antisense strand to SEQ ID NO: 1357184
auuaaugcugcucuauaga

SEQ ID NO: 1357186 - RNA, 19 nt, Artificial Sequence
  Description of Artificial Sequence: Synthetic oligonucleotide
  Sense strand starting at position 3732 of SEQ ID NO: 1242561
uauguauuaggccauugau

SEQ ID NO: 1357187 - RNA, 19 nt, Artificial Sequence
  Description of Artificial Sequence: Synthetic oligonucleotide
  Antisense strand to SEQ ID NO: 1357186
aucaauggccuaauacaua

SEQ ID NO: 1357188 - RNA, 19 nt, Artificial Sequence
  Description of Artificial Sequence: Synthetic oligonucleotide
  Sense strand starting at position 3768 of SEQ ID NO: 1242561
gggaaugcuaagcauguga

SEQ ID NO: 1357189 - RNA, 19 nt, Artificial Sequence
  Description of Artificial Sequence: Synthetic oligonucleotide
  Antisense strand to SEQ ID NO: 1357188
ucacaugcuuagcauuccc

SEQ ID NO: 1357190 - RNA, 19 nt, Artificial Sequence
  Description of Artificial Sequence: Synthetic oligonucleotide
  Sense strand starting at position 3981 of SEQ ID NO: 1242561
ccucuuacccuuggagaga

SEQ ID NO: 1357191 - RNA, 19 nt, Artificial Sequence
  Description of Artificial Sequence: Synthetic oligonucleotide
  Antisense strand to SEQ ID NO: 1357190
ucucuccaaggguaagagg

SEQ ID NO: 1357192 - RNA, 19 nt, Artificial Sequence
  Description of Artificial Sequence: Synthetic oligonucleotide
  Sense strand starting at position 62 of SEQ ID NO: 1242562
uagggauguaguuaugcaa

SEQ ID NO: 1357193 - RNA, 19 nt, Artificial Sequence
  Description of Artificial Sequence: Synthetic oligonucleotide
  Antisense strand to SEQ ID NO: 1357192
uugcauaacuacaucccua

SEQ ID NO: 1357194 - RNA, 19 nt, Artificial Sequence
  Description of Artificial Sequence: Synthetic oligonucleotide
  Sense strand starting at position 182 of SEQ ID NO: 1242562
agggaaucaugguucucaa

SEQ ID NO: 1357195 - RNA, 19 nt, Artificial Sequence
  Description of Artificial Sequence: Synthetic oligonucleotide
  Antisense strand to SEQ ID NO: 1357194
uugagaaccaugauucccu

SEQ ID NO: 1357196 - RNA, 19 nt, Artificial Sequence
  Description of Artificial Sequence: Synthetic oligonucleotide
  Sense strand starting at position 278 of SEQ ID NO: 1242562
ggccaucuuggagaguaua

SEQ ID NO: 1357197 - RNA, 19 nt, Artificial Sequence
  Description of Artificial Sequence: Synthetic oligonucleotide
  Antisense strand to SEQ ID NO: 1357196
uauacucuccaagauggcc

SEQ ID NO: 1357198 - RNA, 19 nt, Artificial Sequence
  Description of Artificial Sequence: Synthetic oligonucleotide
  Sense strand starting at position 422 of SEQ ID NO: 1242562
ggcuuccauaccgagaaua

SEQ ID NO: 1357199 - RNA, 19 nt, Artificial Sequence
  Description of Artificial Sequence: Synthetic oligonucleotide
  Antisense strand to SEQ ID NO: 1357198
uauucucgguauggaagcc

SEQ ID NO: 1357200 - RNA, 19 nt, Artificial Sequence
  Description of Artificial Sequence: Synthetic oligonucleotide
  Sense strand starting at position 492 of SEQ ID NO: 1242562
acauuugcugagugagucu

SEQ ID NO: 1357201 - RNA, 19 nt, Artificial Sequence
  Description of Artificial Sequence: Synthetic oligonucleotide
  Antisense strand to SEQ ID NO: 1357200
agacucacucagcaaaugu

SEQ ID NO: 1357202 - RNA, 19 nt, Artificial Sequence
  Description of Artificial Sequence: Synthetic oligonucleotide
  Sense strand starting at position 564 of SEQ ID NO: 1242562
aggaauaaagggugccaua

SEQ ID NO: 1357203 - RNA, 19 nt, Artificial Sequence
  Description of Artificial Sequence: Synthetic oligonucleotide
  Antisense strand to SEQ ID NO: 1357202
uauggcacccuuuauuccu

SEQ ID NO: 1357204 - RNA, 19 nt, Artificial Sequence
  Description of Artificial Sequence: Synthetic oligonucleotide
  Sense strand starting at position 612 of SEQ ID NO: 1242562
ucacucuuugaggguaaau

SEQ ID NO: 1357205 - RNA, 19 nt, Artificial Sequence
  Description of Artificial Sequence: Synthetic oligonucleotide
  Antisense strand to SEQ ID NO: 1357204
auuuacccucaaagaguga

SEQ ID NO: 1357206 - RNA, 19 nt, Artificial Sequence
  Description of Artificial Sequence: Synthetic oligonucleotide
  Sense strand starting at position 891 of SEQ ID NO: 1242562
ugauguauuggugaugggu

SEQ ID NO: 1357207 - RNA, 19 nt, Artificial Sequence
  Description of Artificial Sequence: Synthetic oligonucleotide
  Antisense strand to SEQ ID NO: 1357206
acccaucaccaauacauca

SEQ ID NO: 1357208 - RNA, 19 nt, Artificial Sequence
  Description of Artificial Sequence: Synthetic oligonucleotide
  Sense strand starting at position 1024 of SEQ ID NO: 1242562
augcauaaaccaugaaggu

SEQ ID NO: 1357209 - RNA, 19 nt, Artificial Sequence
  Description of Artificial Sequence: Synthetic oligonucleotide
  Antisense strand to SEQ ID NO: 1357208
accuucaugguuuaugcau

SEQ ID NO: 1357210 - RNA, 19 nt, Artificial Sequence
  Description of Artificial Sequence: Synthetic oligonucleotide
  Sense strand starting at position 1037 of SEQ ID NO: 1242562
gaagguaugccaugaugau

SEQ ID NO: 1357211 - RNA, 19 nt, Artificial Sequence
  Description of Artificial Sequence: Synthetic oligonucleotide
  Antisense strand to SEQ ID NO: 1357210
aucaucauggcauaccuuc

SEQ ID NO: 1357212 - RNA, 19 nt, Artificial Sequence
  Description of Artificial Sequence: Synthetic oligonucleotide
  Sense strand starting at position 1044 of SEQ ID NO: 1242562
ugccaugaugauggauuau

SEQ ID NO: 1357213 - RNA, 19 nt, Artificial Sequence
  Description of Artificial Sequence: Synthetic oligonucleotide
  Antisense strand to SEQ ID NO: 1357212
auaauccaucaucauggca

SEQ ID NO: 1357214 - RNA, 19 nt, Artificial Sequence
  Description of Artificial Sequence: Synthetic oligonucleotide
  Sense strand starting at position 1463 of SEQ ID NO: 1242562
ggaagaaauuguuugacgu

SEQ ID NO: 1357215 - RNA, 19 nt, Artificial Sequence
  Description of Artificial Sequence: Synthetic oligonucleotide
  Antisense strand to SEQ ID NO: 1357214
acgucaaacaauuucuucc

SEQ ID NO: 1357216 - RNA, 19 nt, Artificial Sequence
  Description of Artificial Sequence: Synthetic oligonucleotide
  Sense strand starting at position 1464 of SEQ ID NO: 1242562
gaagaaauuguuugacgua

SEQ ID NO: 1357217 - RNA, 19 nt, Artificial Sequence
  Description of Artificial Sequence: Synthetic oligonucleotide
  Antisense strand to SEQ ID NO: 1357216
uacgucaaacaauuucuuc

SEQ ID NO: 1357218 - RNA, 19 nt, Artificial Sequence
  Description of Artificial Sequence: Synthetic oligonucleotide
  Sense strand starting at position 1479 of SEQ ID NO: 1242562
cguaauuuaugaccgugga

SEQ ID NO: 1357219 - RNA, 19 nt, Artificial Sequence
  Description of Artificial Sequence: Synthetic oligonucleotide
  Antisense strand to SEQ ID NO: 1357218
uccacggucauaaauuacg

SEQ ID NO: 1357220 - RNA, 19 nt, Artificial Sequence
  Description of Artificial Sequence: Synthetic oligonucleotide
  Sense strand starting at position 1495 of SEQ ID NO: 1242562
ggagaauauucugccaacu

SEQ ID NO: 1357221 - RNA, 19 nt, Artificial Sequence
  Description of Artificial Sequence: Synthetic oligonucleotide
  Antisense strand to SEQ ID NO: 1357220
aguuggcagaauauucucc

SEQ ID NO: 1357222 - RNA, 19 nt, Artificial Sequence
  Description of Artificial Sequence: Synthetic oligonucleotide
  Sense strand starting at position 1669 of SEQ ID NO: 1242562
cuucguuucccagaaucag

SEQ ID NO: 1357223 - RNA, 19 nt, Artificial Sequence
  Description of Artificial Sequence: Synthetic oligonucleotide
  Antisense strand to SEQ ID NO: 1357222
cugauucugggaaacgaag

SEQ ID NO: 1357224 - RNA, 19 nt, Artificial Sequence
  Description of Artificial Sequence: Synthetic oligonucleotide
  Sense strand starting at position 1998 of SEQ ID NO: 1242562
agucuuuaacuguguauuu

SEQ ID NO: 1357225 - RNA, 19 nt, Artificial Sequence
  Description of Artificial Sequence: Synthetic oligonucleotide
  Antisense strand to SEQ ID NO: 1357224
aaauacacaguuaaagacu

SEQ ID NO: 1357226 - RNA, 19 nt, Artificial Sequence
  Description of Artificial Sequence: Synthetic oligonucleotide
  Sense strand starting at position 2007 of SEQ ID NO: 1242562
cuguguauuuguuugaauc

SEQ ID NO: 1357227 - RNA, 19 nt, Artificial Sequence
  Description of Artificial Sequence: Synthetic oligonucleotide
  Antisense strand to SEQ ID NO: 1357226
gauucaaacaaauacacag

SEQ ID NO: 1357228 - RNA, 19 nt, Artificial Sequence
  Description of Artificial Sequence: Synthetic oligonucleotide
  Sense strand starting at position 2008 of SEQ ID NO: 1242562
uguguauuuguuugaauca

SEQ ID NO: 1357229 - RNA, 19 nt, Artificial Sequence
  Description of Artificial Sequence: Synthetic oligonucleotide
  Antisense strand to SEQ ID NO: 1357228
ugauucaaacaaauacaca

SEQ ID NO: 1357230 - RNA, 19 nt, Artificial Sequence
  Description of Artificial Sequence: Synthetic oligonucleotide
  Sense strand starting at position 2089 of SEQ ID NO: 1242562
gcuuuccucgcuguugaau

SEQ ID NO: 1357231 - RNA, 19 nt, Artificial Sequence
  Description of Artificial Sequence: Synthetic oligonucleotide
  Antisense strand to SEQ ID NO: 1357230
auucaacagcgaggaaagc

SEQ ID NO: 1357232 - RNA, 19 nt, Artificial Sequence
  Description of Artificial Sequence: Synthetic oligonucleotide
  Sense strand starting at position 2260 of SEQ ID NO: 1242562
uuaaauaaucaggguucuu

SEQ ID NO: 1357233 - RNA, 19 nt, Artificial Sequence
  Description of Artificial Sequence: Synthetic oligonucleotide
  Antisense strand to SEQ ID NO: 1357232
aagaacccugauuauuuaa

SEQ ID NO: 1357234 - RNA, 19 nt, Artificial Sequence
  Description of Artificial Sequence: Synthetic oligonucleotide
  Sense strand starting at position 2834 of SEQ ID NO: 1242562
gcagaaguauaacuugauc

SEQ ID NO: 1357235 - RNA, 19 nt, Artificial Sequence
  Description of Artificial Sequence: Synthetic oligonucleotide
  Antisense strand to SEQ ID NO: 1357234
gaucaaguuauacuucugc

SEQ ID NO: 1357236 - RNA, 19 nt, Artificial Sequence
  Description of Artificial Sequence: Synthetic oligonucleotide
  Sense strand starting at position 2839 of SEQ ID NO: 1242562
aguauaacuugauccugga

SEQ ID NO: 1357237 - RNA, 19 nt, Artificial Sequence
  Description of Artificial Sequence: Synthetic oligonucleotide
  Antisense strand to SEQ ID NO: 1357236
uccaggaucaaguuauacu

SEQ ID NO: 1357238 - RNA, 19 nt, Artificial Sequence
  Description of Artificial Sequence: Synthetic oligonucleotide
  Sense strand starting at position 2843 of SEQ ID NO: 1242562
uaacuugauccuggaaggu

SEQ ID NO: 1357239 - RNA, 19 nt, Artificial Sequence
  Description of Artificial Sequence: Synthetic oligonucleotide
  Antisense strand to SEQ ID NO: 1357238
accuuccaggaucaaguua

SEQ ID NO: 1357240 - RNA, 19 nt, Artificial Sequence
  Description of Artificial Sequence: Synthetic oligonucleotide
  Sense strand starting at position 2976 of SEQ ID NO: 1242562
gcaaauagacugcaagcua

SEQ ID NO: 1357241 - RNA, 19 nt, Artificial Sequence
  Description of Artificial Sequence: Synthetic oligonucleotide
  Antisense strand to SEQ ID NO: 1357240
uagcuugcagucuauuugc

SEQ ID NO: 1357242 - RNA, 19 nt, Artificial Sequence
  Description of Artificial Sequence: Synthetic oligonucleotide
  Sense strand starting at position 2995 of SEQ ID NO: 1242562
acccauuacuuugugagaa

SEQ ID NO: 1357243 - RNA, 19 nt, Artificial Sequence
  Description of Artificial Sequence: Synthetic oligonucleotide
  Antisense strand to SEQ ID NO: 1357242
uucucacaaaguaaugggu

SEQ ID NO: 1357244 - RNA, 19 nt, Artificial Sequence
  Description of Artificial Sequence: Synthetic oligonucleotide
  Sense strand starting at position 3007 of SEQ ID NO: 1242562
gugagaaguuacucuagau

SEQ ID NO: 1357245 - RNA, 19 nt, Artificial Sequence
  Description of Artificial Sequence: Synthetic oligonucleotide
  Antisense strand to SEQ ID NO: 1357244
aucuagaguaacuucucac

SEQ ID NO: 1357246 - RNA, 19 nt, Artificial Sequence
  Description of Artificial Sequence: Synthetic oligonucleotide
  Sense strand starting at position 3086 of SEQ ID NO: 1242562
gagucaguugcuggaauuu

SEQ ID NO: 1357247 - RNA, 19 nt, Artificial Sequence
  Description of Artificial Sequence: Synthetic oligonucleotide
  Antisense strand to SEQ ID NO: 1357246
aaauuccagcaacugacuc

SEQ ID NO: 1357248 - RNA, 19 nt, Artificial Sequence
  Description of Artificial Sequence: Synthetic oligonucleotide
  Sense strand starting at position 3259 of SEQ ID NO: 1242562
uuuacagcucugggaggaa

SEQ ID NO: 1357249 - RNA, 19 nt, Artificial Sequence
  Description of Artificial Sequence: Synthetic oligonucleotide
  Antisense strand to SEQ ID NO: 1357248
uuccucccagagcuguaaa

SEQ ID NO: 1357250 - RNA, 19 nt, Artificial Sequence
  Description of Artificial Sequence: Synthetic oligonucleotide
  Sense strand starting at position 3326 of SEQ ID NO: 1242562
cuggcaugauucccuagaa

SEQ ID NO: 1357251 - RNA, 19 nt, Artificial Sequence
  Description of Artificial Sequence: Synthetic oligonucleotide
  Antisense strand to SEQ ID NO: 1357250
uucuagggaaucaugccag

SEQ ID NO: 1357252 - RNA, 19 nt, Artificial Sequence
  Description of Artificial Sequence: Synthetic oligonucleotide
  Sense strand starting at position 3327 of SEQ ID NO: 1242562
uggcaugauucccuagaau

SEQ ID NO: 1357253 - RNA, 19 nt, Artificial Sequence
  Description of Artificial Sequence: Synthetic oligonucleotide
  Antisense strand to SEQ ID NO: 1357252
auucuagggaaucaugcca

SEQ ID NO: 1357254 - RNA, 19 nt, Artificial Sequence
  Description of Artificial Sequence: Synthetic oligonucleotide
  Sense strand starting at position 3502 of SEQ ID NO: 1242562
cguuuauaucuguaacaaa

SEQ ID NO: 1357255 - RNA, 19 nt, Artificial Sequence
  Description of Artificial Sequence: Synthetic oligonucleotide
  Antisense strand to SEQ ID NO: 1357254
uuuguuacagauauaaacg

SEQ ID NO: 1357256 - RNA, 19 nt, Artificial Sequence
  Description of Artificial Sequence: Synthetic oligonucleotide
  Sense strand starting at position 3527 of SEQ ID NO: 1242562
guugcaauuggugauuaag

SEQ ID NO: 1357257 - RNA, 19 nt, Artificial Sequence
  Description of Artificial Sequence: Synthetic oligonucleotide
  Antisense strand to SEQ ID NO: 1357256
cuuaaucaccaauugcaac

SEQ ID NO: 1357258 - RNA, 19 nt, Artificial Sequence
  Description of Artificial Sequence: Synthetic oligonucleotide
  Sense strand starting at position 3530 of SEQ ID NO: 1242562
gcaauuggugauuaaguau

SEQ ID NO: 1357259 - RNA, 19 nt, Artificial Sequence
  Description of Artificial Sequence: Synthetic oligonucleotide
  Antisense strand to SEQ ID NO: 1357258
auacuuaaucaccaauugc

SEQ ID NO: 1357260 - RNA, 19 nt, Artificial Sequence
  Description of Artificial Sequence: Synthetic oligonucleotide
  Sense strand starting at position 3610 of SEQ ID NO: 1242562
gagauauauguugguugaa

SEQ ID NO: 1357261 - RNA, 19 nt, Artificial Sequence
  Description of Artificial Sequence: Synthetic oligonucleotide
  Antisense strand to SEQ ID NO: 1357260
uucaaccaacauauaucuc

SEQ ID NO: 1357262 - RNA, 19 nt, Artificial Sequence
  Description of Artificial Sequence: Synthetic oligonucleotide
  Sense strand starting at position 3611 of SEQ ID NO: 1242562
agauauauguugguugaau

SEQ ID NO: 1357263 - RNA, 19 nt, Artificial Sequence
  Description of Artificial Sequence: Synthetic oligonucleotide
  Antisense strand to SEQ ID NO: 1357262
auucaaccaacauauaucu

SEQ ID NO: 1357264 - RNA, 19 nt, Artificial Sequence
  Description of Artificial Sequence: Synthetic oligonucleotide
  Sense strand starting at position 3612 of SEQ ID NO: 1242562
gauauauguugguugaauc

SEQ ID NO: 1357265 - RNA, 19 nt, Artificial Sequence
  Description of Artificial Sequence: Synthetic oligonucleotide
  Antisense strand to SEQ ID NO: 1357264
gauucaaccaacauauauc

SEQ ID NO: 1357266 - RNA, 19 nt, Artificial Sequence
  Description of Artificial Sequence: Synthetic oligonucleotide
  Sense strand starting at position 3654 of SEQ ID NO: 1242562
aguaacuuugcugaauagu

SEQ ID NO: 1357267 - RNA, 19 nt, Artificial Sequence
  Description of Artificial Sequence: Synthetic oligonucleotide
  Antisense strand to SEQ ID NO: 1357266
acuauucagcaaaguuacu

SEQ ID NO: 1357268 - RNA, 19 nt, Artificial Sequence
  Description of Artificial Sequence: Synthetic oligonucleotide
  Sense strand starting at position 3875 of SEQ ID NO: 1242562
ggccgauuucgugauguga

SEQ ID NO: 1357269 - RNA, 19 nt, Artificial Sequence
  Description of Artificial Sequence: Synthetic oligonucleotide
  Antisense strand to SEQ ID NO: 1357268
ucacaucacgaaaucggcc

SEQ ID NO: 1357270 - RNA, 19 nt, Artificial Sequence
  Description of Artificial Sequence: Synthetic oligonucleotide
  Sense strand starting at position 3981 of SEQ ID NO: 1242562
agauguaaguaaccucaga

SEQ ID NO: 1357271 - RNA, 19 nt, Artificial Sequence
  Description of Artificial Sequence: Synthetic oligonucleotide
  Antisense strand to SEQ ID NO: 1357270
ucugagguuacuuacaucu

SEQ ID NO: 1357272 - RNA, 19 nt, Artificial Sequence
  Description of Artificial Sequence: Synthetic oligonucleotide
  Sense strand starting at position 205 of SEQ ID NO: 1242563
gucuuacugcuggaaagug

SEQ ID NO: 1357273 - RNA, 19 nt, Artificial Sequence
  Description of Artificial Sequence: Synthetic oligonucleotide
  Antisense strand to SEQ ID NO: 1357272
cacuuuccagcaguaagac

SEQ ID NO: 1357274 - RNA, 19 nt, Artificial Sequence
  Description of Artificial Sequence: Synthetic oligonucleotide
  Sense strand starting at position 311 of SEQ ID NO: 1242563
cgauuauaaacugguugaa

SEQ ID NO: 1357275 - RNA, 19 nt, Artificial Sequence
  Description of Artificial Sequence: Synthetic oligonucleotide
  Antisense strand to SEQ ID NO: 1357274
uucaaccaguuuauaaucg

SEQ ID NO: 1357276 - RNA, 19 nt, Artificial Sequence
  Description of Artificial Sequence: Synthetic oligonucleotide
  Sense strand starting at position 463 of SEQ ID NO: 1242563
cgcaguguccgcuuauuau

SEQ ID NO: 1357277 - RNA, 19 nt, Artificial Sequence
  Description of Artificial Sequence: Synthetic oligonucleotide
  Antisense strand to SEQ ID NO: 1357276
auaauaagcggacacugcg

SEQ ID NO: 1357278 - RNA, 19 nt, Artificial Sequence
  Description of Artificial Sequence: Synthetic oligonucleotide
  Sense strand starting at position 559 of SEQ ID NO: 1242563
uaauguuaugguuagcaua

SEQ ID NO: 1357279 - RNA, 19 nt, Artificial Sequence
  Description of Artificial Sequence: Synthetic oligonucleotide
  Antisense strand to SEQ ID NO: 1357278
uaugcuaaccauaacauua

SEQ ID NO: 1357280 - RNA, 19 nt, Artificial Sequence
  Description of Artificial Sequence: Synthetic oligonucleotide
  Sense strand starting at position 647 of SEQ ID NO: 1242563
cugaguuucuauccuggau

SEQ ID NO: 1357281 - RNA, 19 nt, Artificial Sequence
  Description of Artificial Sequence: Synthetic oligonucleotide
  Antisense strand to SEQ ID NO: 1357280
auccaggauagaaacucag

SEQ ID NO: 1357282 - RNA, 19 nt, Artificial Sequence
  Description of Artificial Sequence: Synthetic oligonucleotide
  Sense strand starting at position 698 of SEQ ID NO: 1242563
guucccaauuccuuggaau

SEQ ID NO: 1357283 - RNA, 19 nt, Artificial Sequence
  Description of Artificial Sequence: Synthetic oligonucleotide
  Antisense strand to SEQ ID NO: 1357282
auuccaaggaauugggaac

SEQ ID NO: 1357284 - RNA, 19 nt, Artificial Sequence
  Description of Artificial Sequence: Synthetic oligonucleotide
  Sense strand starting at position 699 of SEQ ID NO: 1242563
uucccaauuccuuggaaug

SEQ ID NO: 1357285 - RNA, 19 nt, Artificial Sequence
  Description of Artificial Sequence: Synthetic oligonucleotide
  Antisense strand to SEQ ID NO: 1357284
cauuccaaggaauugggaa

SEQ ID NO: 1357286 - RNA, 19 nt, Artificial Sequence
  Description of Artificial Sequence: Synthetic oligonucleotide
  Sense strand starting at position 700 of SEQ ID NO: 1242563
ucccaauuccuuggaaugu

SEQ ID NO: 1357287 - RNA, 19 nt, Artificial Sequence
  Description of Artificial Sequence: Synthetic oligonucleotide
  Antisense strand to SEQ ID NO: 1357286
acauuccaaggaauuggga

SEQ ID NO: 1357288 - RNA, 19 nt, Artificial Sequence
  Description of Artificial Sequence: Synthetic oligonucleotide
  Sense strand starting at position 788 of SEQ ID NO: 1242563
aucugcuuuggccaauaga

SEQ ID NO: 1357289 - RNA, 19 nt, Artificial Sequence
  Description of Artificial Sequence: Synthetic oligonucleotide
  Antisense strand to SEQ ID NO: 1357288
ucuauuggccaaagcagau

SEQ ID NO: 1357290 - RNA, 19 nt, Artificial Sequence
  Description of Artificial Sequence: Synthetic oligonucleotide
  Sense strand starting at position 820 of SEQ ID NO: 1242563
aguggugugccaguugcaa

SEQ ID NO: 1357291 - RNA, 19 nt, Artificial Sequence
  Description of Artificial Sequence: Synthetic oligonucleotide
  Antisense strand to SEQ ID NO: 1357290
uugcaacuggcacaccacu

SEQ ID NO: 1357292 - RNA, 19 nt, Artificial Sequence
  Description of Artificial Sequence: Synthetic oligonucleotide
  Sense strand starting at position 867 of SEQ ID NO: 1242563
gucacucauucccuuggaa

SEQ ID NO: 1357293 - RNA, 19 nt, Artificial Sequence
  Description of Artificial Sequence: Synthetic oligonucleotide
  Antisense strand to SEQ ID NO: 1357292
uuccaagggaaugagugac

SEQ ID NO: 1357294 - RNA, 19 nt, Artificial Sequence
  Description of Artificial Sequence: Synthetic oligonucleotide
  Sense strand starting at position 1015 of SEQ ID NO: 1242563
aggaguaagccuggucaag

SEQ ID NO: 1357295 - RNA, 19 nt, Artificial Sequence
  Description of Artificial Sequence: Synthetic oligonucleotide
  Antisense strand to SEQ ID NO: 1357294
cuugaccaggcuuacuccu

SEQ ID NO: 1357296 - RNA, 19 nt, Artificial Sequence
  Description of Artificial Sequence: Synthetic oligonucleotide
  Sense strand starting at position 1017 of SEQ ID NO: 1242563
gaguaagccuggucaagac

SEQ ID NO: 1357297 - RNA, 19 nt, Artificial Sequence
  Description of Artificial Sequence: Synthetic oligonucleotide
  Antisense strand to SEQ ID NO: 1357296
gucuugaccaggcuuacuc

SEQ ID NO: 1357298 - RNA, 19 nt, Artificial Sequence
  Description of Artificial Sequence: Synthetic oligonucleotide
  Sense strand starting at position 1101 of SEQ ID NO: 1242563
aagcuaaaugaguggcaau

SEQ ID NO: 1357299 - RNA, 19 nt, Artificial Sequence
  Description of Artificial Sequence: Synthetic oligonucleotide
  Antisense strand to SEQ ID NO: 1357298
auugccacucauuuagcuu

SEQ ID NO: 1357300 - RNA, 19 nt, Artificial Sequence
  Description of Artificial Sequence: Synthetic oligonucleotide
  Sense strand starting at position 1139 of SEQ ID NO: 1242563
uugagacagucuguuacaa

SEQ ID NO: 1357301 - RNA, 19 nt, Artificial Sequence
  Description of Artificial Sequence: Synthetic oligonucleotide
  Antisense strand to SEQ ID NO: 1357300
uuguaacagacugucucaa

SEQ ID NO: 1357302 - RNA, 19 nt, Artificial Sequence
  Description of Artificial Sequence: Synthetic oligonucleotide
  Sense strand starting at position 1169 of SEQ ID NO: 1242563
ccugguaaaccuuaggcaa

SEQ ID NO: 1357303 - RNA, 19 nt, Artificial Sequence
  Description of Artificial Sequence: Synthetic oligonucleotide
  Antisense strand to SEQ ID NO: 1357302
uugccuaagguuuaccagg

SEQ ID NO: 1357304 - RNA, 19 nt, Artificial Sequence
  Description of Artificial Sequence: Synthetic oligonucleotide
  Sense strand starting at position 1252 of SEQ ID NO: 1242563
ggaguuugugaggagugaa

SEQ ID NO: 1357305 - RNA, 19 nt, Artificial Sequence
  Description of Artificial Sequence: Synthetic oligonucleotide
  Antisense strand to SEQ ID NO: 1357304
uucacuccucacaaacucc

SEQ ID NO: 1357306 - RNA, 19 nt, Artificial Sequence
  Description of Artificial Sequence: Synthetic oligonucleotide
  Sense strand starting at position 1255 of SEQ ID NO: 1242563
guuugugaggagugaauga

SEQ ID NO: 1357307 - RNA, 19 nt, Artificial Sequence
  Description of Artificial Sequence: Synthetic oligonucleotide
  Antisense strand to SEQ ID NO: 1357306
ucauucacuccucacaaac

SEQ ID NO: 1357308 - RNA, 19 nt, Artificial Sequence
  Description of Artificial Sequence: Synthetic oligonucleotide
  Sense strand starting at position 1273 of SEQ ID NO: 1242563
agaagauauuuguaaagca

SEQ ID NO: 1357309 - RNA, 19 nt, Artificial Sequence
  Description of Artificial Sequence: Synthetic oligonucleotide
  Antisense strand to SEQ ID NO: 1357308
ugcuuuacaaauaucuucu

SEQ ID NO: 1357310 - RNA, 19 nt, Artificial Sequence
  Description of Artificial Sequence: Synthetic oligonucleotide
  Sense strand starting at position 1310 of SEQ ID NO: 1242563
auggaaagcucuccuuaaa

SEQ ID NO: 1357311 - RNA, 19 nt, Artificial Sequence
  Description of Artificial Sequence: Synthetic oligonucleotide
  Antisense strand to SEQ ID NO: 1357310
uuuaaggagagcuuuccau

SEQ ID NO: 1357312 - RNA, 19 nt, Artificial Sequence
  Description of Artificial Sequence: Synthetic oligonucleotide
  Sense strand starting at position 1385 of SEQ ID NO: 1242563
cugauaaaugaaugaacgu

SEQ ID NO: 1357313 - RNA, 19 nt, Artificial Sequence
  Description of Artificial Sequence: Synthetic oligonucleotide
  Antisense strand to SEQ ID NO: 1357312
acguucauucauuuaucag

SEQ ID NO: 1357314 - RNA, 19 nt, Artificial Sequence
  Description of Artificial Sequence: Synthetic oligonucleotide
  Sense strand starting at position 1613 of SEQ ID NO: 1242563
cugguccagaucugagaua

SEQ ID NO: 1357315 - RNA, 19 nt, Artificial Sequence
  Description of Artificial Sequence: Synthetic oligonucleotide
  Antisense strand to SEQ ID NO: 1357314
uaucucagaucuggaccag

SEQ ID NO: 1357316 - RNA, 19 nt, Artificial Sequence
  Description of Artificial Sequence: Synthetic oligonucleotide
  Sense strand starting at position 1727 of SEQ ID NO: 1242563
guuauugagaggugaggau

SEQ ID NO: 1357317 - RNA, 19 nt, Artificial Sequence
  Description of Artificial Sequence: Synthetic oligonucleotide
  Antisense strand to SEQ ID NO: 1357316
auccucaccucucaauaac

SEQ ID NO: 1357318 - RNA, 19 nt, Artificial Sequence
  Description of Artificial Sequence: Synthetic oligonucleotide
  Sense strand starting at position 1740 of SEQ ID NO: 1242563
gaggaugucugauugggau

SEQ ID NO: 1357319 - RNA, 19 nt, Artificial Sequence
  Description of Artificial Sequence: Synthetic oligonucleotide
  Antisense strand to SEQ ID NO: 1357318
aucccaaucagacauccuc

SEQ ID NO: 1357320 - RNA, 19 nt, Artificial Sequence
  Description of Artificial Sequence: Synthetic oligonucleotide
  Sense strand starting at position 1742 of SEQ ID NO: 1242563
ggaugucugauugggauca

SEQ ID NO: 1357321 - RNA, 19 nt, Artificial Sequence
  Description of Artificial Sequence: Synthetic oligonucleotide
  Antisense strand to SEQ ID NO: 1357320
ugaucccaaucagacaucc

SEQ ID NO: 1357322 - RNA, 19 nt, Artificial Sequence
  Description of Artificial Sequence: Synthetic oligonucleotide
  Sense strand starting at position 1769 of SEQ ID NO: 1242563
cuacuuuacccagaucagu

SEQ ID NO: 1357323 - RNA, 19 nt, Artificial Sequence
  Description of Artificial Sequence: Synthetic oligonucleotide
  Antisense strand to SEQ ID NO: 1357322
acugaucuggguaaaguag

SEQ ID NO: 1357324 - RNA, 19 nt, Artificial Sequence
  Description of Artificial Sequence: Synthetic oligonucleotide
  Sense strand starting at position 1894 of SEQ ID NO: 1242563
uucuuauuaguaggaccau

SEQ ID NO: 1357325 - RNA, 19 nt, Artificial Sequence
  Description of Artificial Sequence: Synthetic oligonucleotide
  Antisense strand to SEQ ID NO: 1357324
augguccuacuaauaagaa

SEQ ID NO: 1357326 - RNA, 19 nt, Artificial Sequence
  Description of Artificial Sequence: Synthetic oligonucleotide
  Sense strand starting at position 2481 of SEQ ID NO: 1242563
gagcaugaucccugaaggu

SEQ ID NO: 1357327 - RNA, 19 nt, Artificial Sequence
  Description of Artificial Sequence: Synthetic oligonucleotide
  Antisense strand to SEQ ID NO: 1357326
accuucagggaucaugcuc

SEQ ID NO: 1357328 - RNA, 19 nt, Artificial Sequence
  Description of Artificial Sequence: Synthetic oligonucleotide
  Sense strand starting at position 2673 of SEQ ID NO: 1242563
ucacauucccaugaguucu

SEQ ID NO: 1357329 - RNA, 19 nt, Artificial Sequence
  Description of Artificial Sequence: Synthetic oligonucleotide
  Antisense strand to SEQ ID NO: 1357328
agaacucaugggaauguga

SEQ ID NO: 1357330 - RNA, 19 nt, Artificial Sequence
  Description of Artificial Sequence: Synthetic oligonucleotide
  Sense strand starting at position 2685 of SEQ ID NO: 1242563
gaguucuuucuggaaguuu

SEQ ID NO: 1357331 - RNA, 19 nt, Artificial Sequence
  Description of Artificial Sequence: Synthetic oligonucleotide
  Antisense strand to SEQ ID NO: 1357330
aaacuuccagaaagaacuc

SEQ ID NO: 1357332 - RNA, 19 nt, Artificial Sequence
  Description of Artificial Sequence: Synthetic oligonucleotide
  Sense strand starting at position 2778 of SEQ ID NO: 1242563
cuggaaguguccucagaug

SEQ ID NO: 1357333 - RNA, 19 nt, Artificial Sequence
  Description of Artificial Sequence: Synthetic oligonucleotide
  Antisense strand to SEQ ID NO: 1357332
caucugaggacacuuccag

SEQ ID NO: 1357334 - RNA, 19 nt, Artificial Sequence
  Description of Artificial Sequence: Synthetic oligonucleotide
  Sense strand starting at position 2984 of SEQ ID NO: 1242563
gaggcacuccucuggaaua

SEQ ID NO: 1357335 - RNA, 19 nt, Artificial Sequence
  Description of Artificial Sequence: Synthetic oligonucleotide
  Antisense strand to SEQ ID NO: 1357334
uauuccagaggagugccuc

SEQ ID NO: 1357336 - RNA, 19 nt, Artificial Sequence
  Description of Artificial Sequence: Synthetic oligonucleotide
  Sense strand starting at position 2986 of SEQ ID NO: 1242563
ggcacuccucuggaauaau

SEQ ID NO: 1357337 - RNA, 19 nt, Artificial Sequence
  Description of Artificial Sequence: Synthetic oligonucleotide
  Antisense strand to SEQ ID NO: 1357336
auuauuccagaggagugcc

SEQ ID NO: 1357338 - RNA, 19 nt, Artificial Sequence
  Description of Artificial Sequence: Synthetic oligonucleotide
  Sense strand starting at position 2997 of SEQ ID NO: 1242563
ggaauaauauacguacuuu

SEQ ID NO: 1357339 - RNA, 19 nt, Artificial Sequence
  Description of Artificial Sequence: Synthetic oligonucleotide
  Antisense strand to SEQ ID NO: 1357338
aaaguacguauauuauucc

SEQ ID NO: 1357340 - RNA, 19 nt, Artificial Sequence
  Description of Artificial Sequence: Synthetic oligonucleotide
  Sense strand starting at position 3082 of SEQ ID NO: 1242563
gaagacucguagucagaug

SEQ ID NO: 1357341 - RNA, 19 nt, Artificial Sequence
  Description of Artificial Sequence: Synthetic oligonucleotide
  Antisense strand to SEQ ID NO: 1357340
caucugacuacgagucuuc

SEQ ID NO: 1357342 - RNA, 19 nt, Artificial Sequence
  Description of Artificial Sequence: Synthetic oligonucleotide
  Sense strand starting at position 3087 of SEQ ID NO: 1242563
cucguagucagauggagaa

SEQ ID NO: 1357343 - RNA, 19 nt, Artificial Sequence
  Description of Artificial Sequence: Synthetic oligonucleotide
  Antisense strand to SEQ ID NO: 1357342
uucuccaucugacuacgag

SEQ ID NO: 1357344 - RNA, 19 nt, Artificial Sequence
  Description of Artificial Sequence: Synthetic oligonucleotide
  Sense strand starting at position 3099 of SEQ ID NO: 1242563
uggagaagcccacauguuu

SEQ ID NO: 1357345 - RNA, 19 nt, Artificial Sequence
  Description of Artificial Sequence: Synthetic oligonucleotide
  Antisense strand to SEQ ID NO: 1357344
aaacaugugggcuucucca

SEQ ID NO: 1357346 - RNA, 19 nt, Artificial Sequence
  Description of Artificial Sequence: Synthetic oligonucleotide
  Sense strand starting at position 3118 of SEQ ID NO: 1242563
uagagcuaguaguugauga

SEQ ID NO: 1357347 - RNA, 19 nt, Artificial Sequence
  Description of Artificial Sequence: Synthetic oligonucleotide
  Antisense strand to SEQ ID NO: 1357346
ucaucaacuacuagcucua

SEQ ID NO: 1357348 - RNA, 19 nt, Artificial Sequence
  Description of Artificial Sequence: Synthetic oligonucleotide
  Sense strand starting at position 3924 of SEQ ID NO: 1242563
agccauguggaauaucuua

SEQ ID NO: 1357349 - RNA, 19 nt, Artificial Sequence
  Description of Artificial Sequence: Synthetic oligonucleotide
  Antisense strand to SEQ ID NO: 1357348
uaagauauuccacauggcu

SEQ ID NO: 1357350 - RNA, 19 nt, Artificial Sequence
  Description of Artificial Sequence: Synthetic oligonucleotide
  Sense strand starting at position 3952 of SEQ ID NO: 1242563
ggacaaacuguuuauuccu

SEQ ID NO: 1357351 - RNA, 19 nt, Artificial Sequence
  Description of Artificial Sequence: Synthetic oligonucleotide
  Antisense strand to SEQ ID NO: 1357350
aggaauaaacaguuugucc

SEQ ID NO: 1357352 - RNA, 19 nt, Artificial Sequence
  Description of Artificial Sequence: Synthetic oligonucleotide
  Sense strand starting at position 137 of SEQ ID NO: 1242564
cgaacauugccugguucca

SEQ ID NO: 1357353 - RNA, 19 nt, Artificial Sequence
  Description of Artificial Sequence: Synthetic oligonucleotide
  Antisense strand to SEQ ID NO: 1357352
uggaaccaggcaauguucg

SEQ ID NO: 1357354 - RNA, 19 nt, Artificial Sequence
  Description of Artificial Sequence: Synthetic oligonucleotide
  Sense strand starting at position 1113 of SEQ ID NO: 1242564
ucucuaugcuggucucgaa

SEQ ID NO: 1357355 - RNA, 19 nt, Artificial Sequence
  Description of Artificial Sequence: Synthetic oligonucleotide
  Antisense strand to SEQ ID NO: 1357354
uucgagaccagcauagaga

SEQ ID NO: 1357356 - RNA, 19 nt, Artificial Sequence
  Description of Artificial Sequence: Synthetic oligonucleotide
  Sense strand starting at position 1427 of SEQ ID NO: 1242564
auggauuaauagcagcaaa

SEQ ID NO: 1357357 - RNA, 19 nt, Artificial Sequence
  Description of Artificial Sequence: Synthetic oligonucleotide
  Antisense strand to SEQ ID NO: 1357356
uuugcugcuauuaauccau

SEQ ID NO: 1357358 - RNA, 19 nt, Artificial Sequence
  Description of Artificial Sequence: Synthetic oligonucleotide
  Sense strand starting at position 1430 of SEQ ID NO: 1242564
gauuaauagcagcaaaguu

SEQ ID NO: 1357359 - RNA, 19 nt, Artificial Sequence
  Description of Artificial Sequence: Synthetic oligonucleotide
  Antisense strand to SEQ ID NO: 1357358
aacuuugcugcuauuaauc

SEQ ID NO: 1357360 - RNA, 19 nt, Artificial Sequence
  Description of Artificial Sequence: Synthetic oligonucleotide
  Sense strand starting at position 1676 of SEQ ID NO: 1242564
gcuuuaugcaaagaagagu

SEQ ID NO: 1357361 - RNA, 19 nt, Artificial Sequence
  Description of Artificial Sequence: Synthetic oligonucleotide
  Antisense strand to SEQ ID NO: 1357360
acucuucuuugcauaaagc

SEQ ID NO: 1357362 - RNA, 19 nt, Artificial Sequence
  Description of Artificial Sequence: Synthetic oligonucleotide
  Sense strand starting at position 2785 of SEQ ID NO: 1242564
cuugucagauauuugucuu

SEQ ID NO: 1357363 - RNA, 19 nt, Artificial Sequence
  Description of Artificial Sequence: Synthetic oligonucleotide
  Antisense strand to SEQ ID NO: 1357362
aagacaaauaucugacaag

SEQ ID NO: 1357364 - RNA, 19 nt, Artificial Sequence
  Description of Artificial Sequence: Synthetic oligonucleotide
  Sense strand starting at position 3105 of SEQ ID NO: 1242564
auucguaauaucugaagga

SEQ ID NO: 1357365 - RNA, 19 nt, Artificial Sequence
  Description of Artificial Sequence: Synthetic oligonucleotide
  Antisense strand to SEQ ID NO: 1357364
uccuucagauauuacgaau

SEQ ID NO: 1357366 - RNA, 19 nt, Artificial Sequence
  Description of Artificial Sequence: Synthetic oligonucleotide
  Sense strand starting at position 3106 of SEQ ID NO: 1242564
uucguaauaucugaaggag

SEQ ID NO: 1357367 - RNA, 19 nt, Artificial Sequence
  Description of Artificial Sequence: Synthetic oligonucleotide
  Antisense strand to SEQ ID NO: 1357366
cuccuucagauauuacgaa

SEQ ID NO: 1357368 - RNA, 19 nt, Artificial Sequence
  Description of Artificial Sequence: Synthetic oligonucleotide
  Sense strand starting at position 3701 of SEQ ID NO: 1242564
cuaauaucaccuugagugu

SEQ ID NO: 1357369 - RNA, 19 nt, Artificial Sequence
  Description of Artificial Sequence: Synthetic oligonucleotide
  Antisense strand to SEQ ID NO: 1357368
acacucaaggugauauuag

SEQ ID NO: 1357370 - RNA, 19 nt, Artificial Sequence
  Description of Artificial Sequence: Synthetic oligonucleotide
  Sense strand starting at position 37 of SEQ ID NO: 1242565
acucucauguccuguggga

SEQ ID NO: 1357371 - RNA, 19 nt, Artificial Sequence
  Description of Artificial Sequence: Synthetic oligonucleotide
  Antisense strand to SEQ ID NO: 1357370
ucccacaggacaugagagu

SEQ ID NO: 1357372 - RNA, 19 nt, Artificial Sequence
  Description of Artificial Sequence: Synthetic oligonucleotide
  Sense strand starting at position 39 of SEQ ID NO: 1242565
ucucauguccugugggaua

SEQ ID NO: 1357373 - RNA, 19 nt, Artificial Sequence
  Description of Artificial Sequence: Synthetic oligonucleotide
  Antisense strand to SEQ ID NO: 1357372
uaucccacaggacaugaga

SEQ ID NO: 1357374 - RNA, 19 nt, Artificial Sequence
  Description of Artificial Sequence: Synthetic oligonucleotide
  Sense strand starting at position 53 of SEQ ID NO: 1242565
ggauaugacccuugcccaa

SEQ ID NO: 1357375 - RNA, 19 nt, Artificial Sequence
  Description of Artificial Sequence: Synthetic oligonucleotide
  Antisense strand to SEQ ID NO: 1357374
uugggcaagggucauaucc

SEQ ID NO: 1357376 - RNA, 19 nt, Artificial Sequence
  Description of Artificial Sequence: Synthetic oligonucleotide
  Sense strand starting at position 328 of SEQ ID NO: 1242565
aagacagcuuauugaggaa

SEQ ID NO: 1357377 - RNA, 19 nt, Artificial Sequence
  Description of Artificial Sequence: Synthetic oligonucleotide
  Antisense strand to SEQ ID NO: 1357376
uuccucaauaagcugucuu

SEQ ID NO: 1357378 - RNA, 19 nt, Artificial Sequence
  Description of Artificial Sequence: Synthetic oligonucleotide
  Sense strand starting at position 331 of SEQ ID NO: 1242565
acagcuuauugaggaagca

SEQ ID NO: 1357379 - RNA, 19 nt, Artificial Sequence
  Description of Artificial Sequence: Synthetic oligonucleotide
  Antisense strand to SEQ ID NO: 1357378
ugcuuccucaauaagcugu

SEQ ID NO: 1357380 - RNA, 19 nt, Artificial Sequence
  Description of Artificial Sequence: Synthetic oligonucleotide
  Sense strand starting at position 332 of SEQ ID NO: 1242565
cagcuuauugaggaagcau

SEQ ID NO: 1357381 - RNA, 19 nt, Artificial Sequence
  Description of Artificial Sequence: Synthetic oligonucleotide
  Antisense strand to SEQ ID NO: 1357380
augcuuccucaauaagcug

SEQ ID NO: 1357382 - RNA, 19 nt, Artificial Sequence
  Description of Artificial Sequence: Synthetic oligonucleotide
  Sense strand starting at position 351 of SEQ ID NO: 1242565
aagguuaaggcuggagaga

SEQ ID NO: 1357383 - RNA, 19 nt, Artificial Sequence
  Description of Artificial Sequence: Synthetic oligonucleotide
  Antisense strand to SEQ ID NO: 1357382
ucucuccagccuuaaccuu

SEQ ID NO: 1357384 - RNA, 19 nt, Artificial Sequence
  Description of Artificial Sequence: Synthetic oligonucleotide
  Sense strand starting at position 353 of SEQ ID NO: 1242565
gguuaaggcuggagagauc

SEQ ID NO: 1357385 - RNA, 19 nt, Artificial Sequence
  Description of Artificial Sequence: Synthetic oligonucleotide
  Antisense strand to SEQ ID NO: 1357384
gaucucuccagccuuaacc

SEQ ID NO: 1357386 - RNA, 19 nt, Artificial Sequence
  Description of Artificial Sequence: Synthetic oligonucleotide
  Sense strand starting at position 382 of SEQ ID NO: 1242565
guguuaggaucacugguca

SEQ ID NO: 1357387 - RNA, 19 nt, Artificial Sequence
  Description of Artificial Sequence: Synthetic oligonucleotide
  Antisense strand to SEQ ID NO: 1357386
ugaccagugauccuaacac

SEQ ID NO: 1357388 - RNA, 19 nt, Artificial Sequence
  Description of Artificial Sequence: Synthetic oligonucleotide
  Sense strand starting at position 394 of SEQ ID NO: 1242565
cuggucaagcucuacagua

SEQ ID NO: 1357389 - RNA, 19 nt, Artificial Sequence
  Description of Artificial Sequence: Synthetic oligonucleotide
  Antisense strand to SEQ ID NO: 1357388
uacuguagagcuugaccag

SEQ ID NO: 1357390 - RNA, 19 nt, Artificial Sequence
  Description of Artificial Sequence: Synthetic oligonucleotide
  Sense strand starting at position 488 of SEQ ID NO: 1242565
aggccugucuaccuagaua

SEQ ID NO: 1357391 - RNA, 19 nt, Artificial Sequence
  Description of Artificial Sequence: Synthetic oligonucleotide
  Antisense strand to SEQ ID NO: 1357390
uaucuagguagacaggccu

SEQ ID NO: 1357392 - RNA, 19 nt, Artificial Sequence
  Description of Artificial Sequence: Synthetic oligonucleotide
  Sense strand starting at position 589 of SEQ ID NO: 1242565
aucuaagucuugguugcua

SEQ ID NO: 1357393 - RNA, 19 nt, Artificial Sequence
  Description of Artificial Sequence: Synthetic oligonucleotide
  Antisense strand to SEQ ID NO: 1357392
uagcaaccaagacuuagau

SEQ ID NO: 1357394 - RNA, 19 nt, Artificial Sequence
  Description of Artificial Sequence: Synthetic oligonucleotide
  Sense strand starting at position 593 of SEQ ID NO: 1242565
aagucuugguugcuaagaa

SEQ ID NO: 1357395 - RNA, 19 nt, Artificial Sequence
  Description of Artificial Sequence: Synthetic oligonucleotide
  Antisense strand to SEQ ID NO: 1357394
uucuuagcaaccaagacuu

SEQ ID NO: 1357396 - RNA, 19 nt, Artificial Sequence
  Description of Artificial Sequence: Synthetic oligonucleotide
  Sense strand starting at position 594 of SEQ ID NO: 1242565
agucuugguugcuaagaaa

SEQ ID NO: 1357397 - RNA, 19 nt, Artificial Sequence
  Description of Artificial Sequence: Synthetic oligonucleotide
  Antisense strand to SEQ ID NO: 1357396
uuucuuagcaaccaagacu

SEQ ID NO: 1357398 - RNA, 19 nt, Artificial Sequence
  Description of Artificial Sequence: Synthetic oligonucleotide
  Sense strand starting at position 768 of SEQ ID NO: 1242565
agcgguccaccuggagaua

SEQ ID NO: 1357399 - RNA, 19 nt, Artificial Sequence
  Description of Artificial Sequence: Synthetic oligonucleotide
  Antisense strand to SEQ ID NO: 1357398
uaucuccagguggaccgcu

SEQ ID NO: 1357400 - RNA, 19 nt, Artificial Sequence
  Description of Artificial Sequence: Synthetic oligonucleotide
  Sense strand starting at position 825 of SEQ ID NO: 1242565
gucucagaaucgucacgaa

SEQ ID NO: 1357401 - RNA, 19 nt, Artificial Sequence
  Description of Artificial Sequence: Synthetic oligonucleotide
  Antisense strand to SEQ ID NO: 1357400
uucgugacgauucugagac

SEQ ID NO: 1357402 - RNA, 19 nt, Artificial Sequence
  Description of Artificial Sequence: Synthetic oligonucleotide
  Sense strand starting at position 828 of SEQ ID NO: 1242565
ucagaaucgucacgaagag

SEQ ID NO: 1357403 - RNA, 19 nt, Artificial Sequence
  Description of Artificial Sequence: Synthetic oligonucleotide
  Antisense strand to SEQ ID NO: 1357402
cucuucgugacgauucuga

SEQ ID NO: 1357404 - RNA, 19 nt, Artificial Sequence
  Description of Artificial Sequence: Synthetic oligonucleotide
  Sense strand starting at position 829 of SEQ ID NO: 1242565
cagaaucgucacgaagagu

SEQ ID NO: 1357405 - RNA, 19 nt, Artificial Sequence
  Description of Artificial Sequence: Synthetic oligonucleotide
  Antisense strand to SEQ ID NO: 1357404
acucuucgugacgauucug

SEQ ID NO: 1357406 - RNA, 19 nt, Artificial Sequence
  Description of Artificial Sequence: Synthetic oligonucleotide
  Sense strand starting at position 842 of SEQ ID NO: 1242565
aagagucaugcccgguaac

SEQ ID NO: 1357407 - RNA, 19 nt, Artificial Sequence
  Description of Artificial Sequence: Synthetic oligonucleotide
  Antisense strand to SEQ ID NO: 1357406
guuaccgggcaugacucuu

SEQ ID NO: 1357408 - RNA, 19 nt, Artificial Sequence
  Description of Artificial Sequence: Synthetic oligonucleotide
  Sense strand starting at position 1463 of SEQ ID NO: 1242565
cccgccuuuccucggaaga

SEQ ID NO: 1357409 - RNA, 19 nt, Artificial Sequence
  Description of Artificial Sequence: Synthetic oligonucleotide
  Antisense strand to SEQ ID NO: 1357408
ucuuccgaggaaaggcggg

SEQ ID NO: 1357410 - RNA, 19 nt, Artificial Sequence
  Description of Artificial Sequence: Synthetic oligonucleotide
  Sense strand starting at position 1664 of SEQ ID NO: 1242565
uugggccguucgucaagau

SEQ ID NO: 1357411 - RNA, 19 nt, Artificial Sequence
  Description of Artificial Sequence: Synthetic oligonucleotide
  Antisense strand to SEQ ID NO: 1357410
aucuugacgaacggcccaa

SEQ ID NO: 1357412 - RNA, 19 nt, Artificial Sequence
  Description of Artificial Sequence: Synthetic oligonucleotide
  Sense strand starting at position 1665 of SEQ ID NO: 1242565
ugggccguucgucaagauu

SEQ ID NO: 1357413 - RNA, 19 nt, Artificial Sequence
  Description of Artificial Sequence: Synthetic oligonucleotide
  Antisense strand to SEQ ID NO: 1357412
aaucuugacgaacggccca

SEQ ID NO: 1357414 - RNA, 19 nt, Artificial Sequence
  Description of Artificial Sequence: Synthetic oligonucleotide
  Sense strand starting at position 1674 of SEQ ID NO: 1242565
cgucaagauuccuguggua

SEQ ID NO: 1357415 - RNA, 19 nt, Artificial Sequence
  Description of Artificial Sequence: Synthetic oligonucleotide
  Antisense strand to SEQ ID NO: 1357414
uaccacaggaaucuugacg

SEQ ID NO: 1357416 - RNA, 19 nt, Artificial Sequence
  Description of Artificial Sequence: Synthetic oligonucleotide
  Sense strand starting at position 1676 of SEQ ID NO: 1242565
ucaagauuccugugguacc

SEQ ID NO: 1357417 - RNA, 19 nt, Artificial Sequence
  Description of Artificial Sequence: Synthetic oligonucleotide
  Antisense strand to SEQ ID NO: 1357416
gguaccacaggaaucuuga

SEQ ID NO: 1357418 - RNA, 19 nt, Artificial Sequence
  Description of Artificial Sequence: Synthetic oligonucleotide
  Sense strand starting at position 1685 of SEQ ID NO: 1242565
cugugguaccgguagggaa

SEQ ID NO: 1357419 - RNA, 19 nt, Artificial Sequence
  Description of Artificial Sequence: Synthetic oligonucleotide
  Antisense strand to SEQ ID NO: 1357418
uucccuaccgguaccacag

SEQ ID NO: 1357420 - RNA, 19 nt, Artificial Sequence
  Description of Artificial Sequence: Synthetic oligonucleotide
  Sense strand starting at position 1773 of SEQ ID NO: 1242565
gcgaguugacucgaaacca

SEQ ID NO: 1357421 - RNA, 19 nt, Artificial Sequence
  Description of Artificial Sequence: Synthetic oligonucleotide
  Antisense strand to SEQ ID NO: 1357420
ugguuucgagucaacucgc

SEQ ID NO: 1357422 - RNA, 19 nt, Artificial Sequence
  Description of Artificial Sequence: Synthetic oligonucleotide
  Sense strand starting at position 1871 of SEQ ID NO: 1242565
uuguaaggccaguggaaau

SEQ ID NO: 1357423 - RNA, 19 nt, Artificial Sequence
  Description of Artificial Sequence: Synthetic oligonucleotide
  Antisense strand to SEQ ID NO: 1357422
auuuccacuggccuuacaa

SEQ ID NO: 1357424 - RNA, 19 nt, Artificial Sequence
  Description of Artificial Sequence: Synthetic oligonucleotide
  Sense strand starting at position 1905 of SEQ ID NO: 1242565
gcgcuaaauaaaugguacu

SEQ ID NO: 1357425 - RNA, 19 nt, Artificial Sequence
  Description of Artificial Sequence: Synthetic oligonucleotide
  Antisense strand to SEQ ID NO: 1357424
aguaccauuuauuuagcgc

SEQ ID NO: 1357426 - RNA, 19 nt, Artificial Sequence
  Description of Artificial Sequence: Synthetic oligonucleotide
  Sense strand starting at position 2031 of SEQ ID NO: 1242565
ggcuccguuuccuaggaaa

SEQ ID NO: 1357427 - RNA, 19 nt, Artificial Sequence
  Description of Artificial Sequence: Synthetic oligonucleotide
  Antisense strand to SEQ ID NO: 1357426
uuuccuaggaaacggagcc

SEQ ID NO: 1357428 - RNA, 19 nt, Artificial Sequence
  Description of Artificial Sequence: Synthetic oligonucleotide
  Sense strand starting at position 2034 of SEQ ID NO: 1242565
uccguuuccuaggaaacgu

SEQ ID NO: 1357429 - RNA, 19 nt, Artificial Sequence
  Description of Artificial Sequence: Synthetic oligonucleotide
  Antisense strand to SEQ ID NO: 1357428
acguuuccuaggaaacgga

SEQ ID NO: 1357430 - RNA, 19 nt, Artificial Sequence
  Description of Artificial Sequence: Synthetic oligonucleotide
  Sense strand starting at position 2514 of SEQ ID NO: 1242565
agcugaggucugggcuuaa

SEQ ID NO: 1357431 - RNA, 19 nt, Artificial Sequence
  Description of Artificial Sequence: Synthetic oligonucleotide
  Antisense strand to SEQ ID NO: 1357430
uuaagcccagaccucagcu

SEQ ID NO: 1357432 - RNA, 19 nt, Artificial Sequence
  Description of Artificial Sequence: Synthetic oligonucleotide
  Sense strand starting at position 2984 of SEQ ID NO: 1242565
accucuaagugguaggaaa

SEQ ID NO: 1357433 - RNA, 19 nt, Artificial Sequence
  Description of Artificial Sequence: Synthetic oligonucleotide
  Antisense strand to SEQ ID NO: 1357432
uuuccuaccacuuagaggu

SEQ ID NO: 1357434 - RNA, 19 nt, Artificial Sequence
  Description of Artificial Sequence: Synthetic oligonucleotide
  Sense strand starting at position 2986 of SEQ ID NO: 1242565
cucuaagugguaggaaaua

SEQ ID NO: 1357435 - RNA, 19 nt, Artificial Sequence
  Description of Artificial Sequence: Synthetic oligonucleotide
  Antisense strand to SEQ ID NO: 1357434
uauuuccuaccacuuagag

SEQ ID NO: 1357436 - RNA, 19 nt, Artificial Sequence
  Description of Artificial Sequence: Synthetic oligonucleotide
  Sense strand starting at position 3041 of SEQ ID NO: 1242565
gcaggucucugaucucaac

SEQ ID NO: 1357437 - RNA, 19 nt, Artificial Sequence
  Description of Artificial Sequence: Synthetic oligonucleotide
  Antisense strand to SEQ ID NO: 1357436
guugagaucagagaccugc

SEQ ID NO: 1357438 - RNA, 19 nt, Artificial Sequence
  Description of Artificial Sequence: Synthetic oligonucleotide
  Sense strand starting at position 208 of SEQ ID NO: 1242566
cccagaccuuguguuugaa

SEQ ID NO: 1357439 - RNA, 19 nt, Artificial Sequence
  Description of Artificial Sequence: Synthetic oligonucleotide
  Antisense strand to SEQ ID NO: 1357438
uucaaacacaaggucuggg

SEQ ID NO: 1357440 - RNA, 19 nt, Artificial Sequence
  Description of Artificial Sequence: Synthetic oligonucleotide
  Sense strand starting at position 210 of SEQ ID NO: 1242566
cagaccuuguguuugaagu

SEQ ID NO: 1357441 - RNA, 19 nt, Artificial Sequence
  Description of Artificial Sequence: Synthetic oligonucleotide
  Antisense strand to SEQ ID NO: 1357440
acuucaaacacaaggucug

SEQ ID NO: 1357442 - RNA, 19 nt, Artificial Sequence
  Description of Artificial Sequence: Synthetic oligonucleotide
  Sense strand starting at position 304 of SEQ ID NO: 1242566
gcaggaugcguuucagcau

SEQ ID NO: 1357443 - RNA, 19 nt, Artificial Sequence
  Description of Artificial Sequence: Synthetic oligonucleotide
  Antisense strand to SEQ ID NO: 1357442
augcugaaacgcauccugc

SEQ ID NO: 1357444 - RNA, 19 nt, Artificial Sequence
  Description of Artificial Sequence: Synthetic oligonucleotide
  Sense strand starting at position 329 of SEQ ID NO: 1242566
ugugguuuggaggguuauu

SEQ ID NO: 1357445 - RNA, 19 nt, Artificial Sequence
  Description of Artificial Sequence: Synthetic oligonucleotide
  Antisense strand to SEQ ID NO: 1357444
aauaacccuccaaaccaca

SEQ ID NO: 1357446 - RNA, 19 nt, Artificial Sequence
  Description of Artificial Sequence: Synthetic oligonucleotide
  Sense strand starting at position 494 of SEQ ID NO: 1242566
aggugacacuuacaacuau

SEQ ID NO: 1357447 - RNA, 19 nt, Artificial Sequence
  Description of Artificial Sequence: Synthetic oligonucleotide
  Antisense strand to SEQ ID NO: 1357446
auaguuguaagugucaccu

SEQ ID NO: 1357448 - RNA, 19 nt, Artificial Sequence
  Description of Artificial Sequence: Synthetic oligonucleotide
  Sense strand starting at position 522 of SEQ ID NO: 1242566
acaguuuaauccgccauuu

SEQ ID NO: 1357449 - RNA, 19 nt, Artificial Sequence
  Description of Artificial Sequence: Synthetic oligonucleotide
  Antisense strand to SEQ ID NO: 1357448
aaauggcggauuaaacugu

SEQ ID NO: 1357450 - RNA, 19 nt, Artificial Sequence
  Description of Artificial Sequence: Synthetic oligonucleotide
  Sense strand starting at position 524 of SEQ ID NO: 1242566
aguuuaauccgccauuucu

SEQ ID NO: 1357451 - RNA, 19 nt, Artificial Sequence
  Description of Artificial Sequence: Synthetic oligonucleotide
  Antisense strand to SEQ ID NO: 1357450
agaaauggcggauuaaacu

SEQ ID NO: 1357452 - RNA, 19 nt, Artificial Sequence
  Description of Artificial Sequence: Synthetic oligonucleotide
  Sense strand starting at position 554 of SEQ ID NO: 1242566
ggagaugguucagagccaa

SEQ ID NO: 1357453 - RNA, 19 nt, Artificial Sequence
  Description of Artificial Sequence: Synthetic oligonucleotide
  Antisense strand to SEQ ID NO: 1357452
uuggcucugaaccaucucc

SEQ ID NO: 1357454 - RNA, 19 nt, Artificial Sequence
  Description of Artificial Sequence: Synthetic oligonucleotide
  Sense strand starting at position 586 of SEQ ID NO: 1242566
agggaagccucaucuuaug

SEQ ID NO: 1357455 - RNA, 19 nt, Artificial Sequence
  Description of Artificial Sequence: Synthetic oligonucleotide
  Antisense strand to SEQ ID NO: 1357454
cauaagaugaggcuucccu

SEQ ID NO: 1357456 - RNA, 19 nt, Artificial Sequence
  Description of Artificial Sequence: Synthetic oligonucleotide
  Sense strand starting at position 812 of SEQ ID NO: 1242566
ucguguuccuaucucuaaa

SEQ ID NO: 1357457 - RNA, 19 nt, Artificial Sequence
  Description of Artificial Sequence: Synthetic oligonucleotide
  Antisense strand to SEQ ID NO: 1357456
uuuagagauaggaacacga

SEQ ID NO: 1357458 - RNA, 19 nt, Artificial Sequence
  Description of Artificial Sequence: Synthetic oligonucleotide
  Sense strand starting at position 815 of SEQ ID NO: 1242566
uguuccuaucucuaaacgu

SEQ ID NO: 1357459 - RNA, 19 nt, Artificial Sequence
  Description of Artificial Sequence: Synthetic oligonucleotide
  Antisense strand to SEQ ID NO: 1357458
acguuuagagauaggaaca

SEQ ID NO: 1357460 - RNA, 19 nt, Artificial Sequence
  Description of Artificial Sequence: Synthetic oligonucleotide
  Sense strand starting at position 824 of SEQ ID NO: 1242566
cucuaaacguguucccuuu

SEQ ID NO: 1357461 - RNA, 19 nt, Artificial Sequence
  Description of Artificial Sequence: Synthetic oligonucleotide
  Antisense strand to SEQ ID NO: 1357460
aaagggaacacguuuagag

SEQ ID NO: 1357462 - RNA, 19 nt, Artificial Sequence
  Description of Artificial Sequence: Synthetic oligonucleotide
  Sense strand starting at position 831 of SEQ ID NO: 1242566
cguguucccuuucuagcaa

SEQ ID NO: 1357463 - RNA, 19 nt, Artificial Sequence
  Description of Artificial Sequence: Synthetic oligonucleotide
  Antisense strand to SEQ ID NO: 1357462
uugcuagaaagggaacacg

SEQ ID NO: 1357464 - RNA, 19 nt, Artificial Sequence
  Description of Artificial Sequence: Synthetic oligonucleotide
  Sense strand starting at position 1337 of SEQ ID NO: 1242566
uccauugcuugcucauaga

SEQ ID NO: 1357465 - RNA, 19 nt, Artificial Sequence
  Description of Artificial Sequence: Synthetic oligonucleotide
  Antisense strand to SEQ ID NO: 1357464
ucuaugagcaagcaaugga

SEQ ID NO: 1357466 - RNA, 19 nt, Artificial Sequence
  Description of Artificial Sequence: Synthetic oligonucleotide
  Sense strand starting at position 1460 of SEQ ID NO: 1242566
ucugaagcccaaugagaaa

SEQ ID NO: 1357467 - RNA, 19 nt, Artificial Sequence
  Description of Artificial Sequence: Synthetic oligonucleotide
  Antisense strand to SEQ ID NO: 1357466
uuucucauugggcuucaga

SEQ ID NO: 1357468 - RNA, 19 nt, Artificial Sequence
  Description of Artificial Sequence: Synthetic oligonucleotide
  Sense strand starting at position 2245 of SEQ ID NO: 1242566
cgcugagcuccugggugau

SEQ ID NO: 1357469 - RNA, 19 nt, Artificial Sequence
  Description of Artificial Sequence: Synthetic oligonucleotide
  Antisense strand to SEQ ID NO: 1357468
aucacccaggagcucagcg

SEQ ID NO: 1357470 - RNA, 19 nt, Artificial Sequence
  Description of Artificial Sequence: Synthetic oligonucleotide
  Sense strand starting at position 2466 of SEQ ID NO: 1242566
uuuguauuucuugggugau

SEQ ID NO: 1357471 - RNA, 19 nt, Artificial Sequence
  Description of Artificial Sequence: Synthetic oligonucleotide
  Antisense strand to SEQ ID NO: 1357470
aucacccaagaaauacaaa

SEQ ID NO: 1357472 - RNA, 19 nt, Artificial Sequence
  Description of Artificial Sequence: Synthetic oligonucleotide
  Sense strand starting at position 2467 of SEQ ID NO: 1242566
uuguauuucuugggugauu

SEQ ID NO: 1357473 - RNA, 19 nt, Artificial Sequence
  Description of Artificial Sequence: Synthetic oligonucleotide
  Antisense strand to SEQ ID NO: 1357472
aaucacccaagaaauacaa

SEQ ID NO: 1357474 - RNA, 19 nt, Artificial Sequence
  Description of Artificial Sequence: Synthetic oligonucleotide
  Sense strand starting at position 2501 of SEQ ID NO: 1242566
uugagaaucucuccucgaa

SEQ ID NO: 1357475 - RNA, 19 nt, Artificial Sequence
  Description of Artificial Sequence: Synthetic oligonucleotide
  Antisense strand to SEQ ID NO: 1357474
uucgaggagagauucucaa

SEQ ID NO: 1357476 - RNA, 19 nt, Artificial Sequence
  Description of Artificial Sequence: Synthetic oligonucleotide
  Sense strand starting at position 2503 of SEQ ID NO: 1242566
gagaaucucuccucgaagg

SEQ ID NO: 1357477 - RNA, 19 nt, Artificial Sequence
  Description of Artificial Sequence: Synthetic oligonucleotide
  Antisense strand to SEQ ID NO: 1357476
ccuucgaggagagauucuc

SEQ ID NO: 1357478 - RNA, 19 nt, Artificial Sequence
  Description of Artificial Sequence: Synthetic oligonucleotide
  Sense strand starting at position 2599 of SEQ ID NO: 1242566
aaguccaguuggcugaaau

SEQ ID NO: 1357479 - RNA, 19 nt, Artificial Sequence
  Description of Artificial Sequence: Synthetic oligonucleotide
  Antisense strand to SEQ ID NO: 1357478
auuucagccaacuggacuu

SEQ ID NO: 1357480 - RNA, 19 nt, Artificial Sequence
  Description of Artificial Sequence: Synthetic oligonucleotide
  Sense strand starting at position 2600 of SEQ ID NO: 1242566
aguccaguuggcugaaauu

SEQ ID NO: 1357481 - RNA, 19 nt, Artificial Sequence
  Description of Artificial Sequence: Synthetic oligonucleotide
  Antisense strand to SEQ ID NO: 1357480
aauuucagccaacuggacu

SEQ ID NO: 1357482 - RNA, 19 nt, Artificial Sequence
  Description of Artificial Sequence: Synthetic oligonucleotide
  Sense strand starting at position 2655 of SEQ ID NO: 1242566
aaagacauguacuggcaaa

SEQ ID NO: 1357483 - RNA, 19 nt, Artificial Sequence
  Description of Artificial Sequence: Synthetic oligonucleotide
  Antisense strand to SEQ ID NO: 1357482
uuugccaguacaugucuuu

SEQ ID NO: 1357484 - RNA, 19 nt, Artificial Sequence
  Description of Artificial Sequence: Synthetic oligonucleotide
  Sense strand starting at position 2678 of SEQ ID NO: 1242566
aguacaaauuaucugcaga

SEQ ID NO: 1357485 - RNA, 19 nt, Artificial Sequence
  Description of Artificial Sequence: Synthetic oligonucleotide
  Antisense strand to SEQ ID NO: 1357484
ucugcagauaauuuguacu

SEQ ID NO: 1357486 - RNA, 19 nt, Artificial Sequence
  Description of Artificial Sequence: Synthetic oligonucleotide
  Sense strand starting at position 2683 of SEQ ID NO: 1242566
aaauuaucugcagaaccgu

SEQ ID NO: 1357487 - RNA, 19 nt, Artificial Sequence
  Description of Artificial Sequence: Synthetic oligonucleotide
  Antisense strand to SEQ ID NO: 1357486
acgguucugcagauaauuu

SEQ ID NO: 1357488 - RNA, 19 nt, Artificial Sequence
  Description of Artificial Sequence: Synthetic oligonucleotide
  Sense strand starting at position 3044 of SEQ ID NO: 1242566
ccaucuuccucucuuguga

SEQ ID NO: 1357489 - RNA, 19 nt, Artificial Sequence
  Description of Artificial Sequence: Synthetic oligonucleotide
  Antisense strand to SEQ ID NO: 1357488
ucacaagagaggaagaugg

SEQ ID NO: 1357490 - RNA, 19 nt, Artificial Sequence
  Description of Artificial Sequence: Synthetic oligonucleotide
  Sense strand starting at position 3077 of SEQ ID NO: 1242566
gcaguuguguccuuggaaa

SEQ ID NO: 1357491 - RNA, 19 nt, Artificial Sequence
  Description of Artificial Sequence: Synthetic oligonucleotide
  Antisense strand to SEQ ID NO: 1357490
uuuccaaggacacaacugc

SEQ ID NO: 1357492 - RNA, 19 nt, Artificial Sequence
  Description of Artificial Sequence: Synthetic oligonucleotide
  Sense strand starting at position 3079 of SEQ ID NO: 1242566
aguuguguccuuggaaagc

SEQ ID NO: 1357493 - RNA, 19 nt, Artificial Sequence
  Description of Artificial Sequence: Synthetic oligonucleotide
  Antisense strand to SEQ ID NO: 1357492
gcuuuccaaggacacaacu

SEQ ID NO: 1357494 - RNA, 19 nt, Artificial Sequence
  Description of Artificial Sequence: Synthetic oligonucleotide
  Sense strand starting at position 3161 of SEQ ID NO: 1242566
ggaaguuuguaacacagag

SEQ ID NO: 1357495 - RNA, 19 nt, Artificial Sequence
  Description of Artificial Sequence: Synthetic oligonucleotide
  Antisense strand to SEQ ID NO: 1357494
cucuguguuacaaacuucc

SEQ ID NO: 1357496 - RNA, 19 nt, Artificial Sequence
  Description of Artificial Sequence: Synthetic oligonucleotide
  Sense strand starting at position 3289 of SEQ ID NO: 1242566
ucagaauucugucugcuuc

SEQ ID NO: 1357497 - RNA, 19 nt, Artificial Sequence
  Description of Artificial Sequence: Synthetic oligonucleotide
  Antisense strand to SEQ ID NO: 1357496
gaagcagacagaauucuga

SEQ ID NO: 1357498 - RNA, 19 nt, Artificial Sequence
  Description of Artificial Sequence: Synthetic oligonucleotide
  Sense strand starting at position 3291 of SEQ ID NO: 1242566
agaauucugucugcuucca

SEQ ID NO: 1357499 - RNA, 19 nt, Artificial Sequence
  Description of Artificial Sequence: Synthetic oligonucleotide
  Antisense strand to SEQ ID NO: 1357498
uggaagcagacagaauucu

SEQ ID NO: 1357500 - RNA, 19 nt, Artificial Sequence
  Description of Artificial Sequence: Synthetic oligonucleotide
  Sense strand starting at position 3364 of SEQ ID NO: 1242566
ggcgucuaacaucaggauu

SEQ ID NO: 1357501 - RNA, 19 nt, Artificial Sequence
  Description of Artificial Sequence: Synthetic oligonucleotide
  Antisense strand to SEQ ID NO: 1357500
aauccugauguuagacgcc

SEQ ID NO: 1357502 - RNA, 19 nt, Artificial Sequence
  Description of Artificial Sequence: Synthetic oligonucleotide
  Sense strand starting at position 3408 of SEQ ID NO: 1242566
uuucuaucccugggaaguu

SEQ ID NO: 1357503 - RNA, 19 nt, Artificial Sequence
  Description of Artificial Sequence: Synthetic oligonucleotide
  Antisense strand to SEQ ID NO: 1357502
aacuucccagggauagaaa

SEQ ID NO: 1357504 - RNA, 19 nt, Artificial Sequence
  Description of Artificial Sequence: Synthetic oligonucleotide
  Sense strand starting at position 3529 of SEQ ID NO: 1242566
gggugcagucuccgagaaa

SEQ ID NO: 1357505 - RNA, 19 nt, Artificial Sequence
  Description of Artificial Sequence: Synthetic oligonucleotide
  Antisense strand to SEQ ID NO: 1357504
uuucucggagacugcaccc

SEQ ID NO: 1357506 - RNA, 19 nt, Artificial Sequence
  Description of Artificial Sequence: Synthetic oligonucleotide
  Sense strand starting at position 3532 of SEQ ID NO: 1242566
ugcagucuccgagaaaugg

SEQ ID NO: 1357507 - RNA, 19 nt, Artificial Sequence
  Description of Artificial Sequence: Synthetic oligonucleotide
  Antisense strand to SEQ ID NO: 1357506
ccauuucucggagacugca

SEQ ID NO: 1357508 - RNA, 19 nt, Artificial Sequence
  Description of Artificial Sequence: Synthetic oligonucleotide
  Sense strand starting at position 3541 of SEQ ID NO: 1242566
cgagaaauggcccagucau

SEQ ID NO: 1357509 - RNA, 19 nt, Artificial Sequence
  Description of Artificial Sequence: Synthetic oligonucleotide
  Antisense strand to SEQ ID NO: 1357508
augacugggccauuucucg

SEQ ID NO: 1357510 - RNA, 19 nt, Artificial Sequence
  Description of Artificial Sequence: Synthetic oligonucleotide
  Sense strand starting at position 3552 of SEQ ID NO: 1242566
ccagucauccuaugagcag

SEQ ID NO: 1357511 - RNA, 19 nt, Artificial Sequence
  Description of Artificial Sequence: Synthetic oligonucleotide
  Antisense strand to SEQ ID NO: 1357510
cugcucauaggaugacugg

SEQ ID NO: 1357512 - RNA, 19 nt, Artificial Sequence
  Description of Artificial Sequence: Synthetic oligonucleotide
  Sense strand starting at position 3589 of SEQ ID NO: 1242566
ggcucuggucagcaucaua

SEQ ID NO: 1357513 - RNA, 19 nt, Artificial Sequence
  Description of Artificial Sequence: Synthetic oligonucleotide
  Antisense strand to SEQ ID NO: 1357512
uaugaugcugaccagagcc

SEQ ID NO: 1357514 - RNA, 19 nt, Artificial Sequence
  Description of Artificial Sequence: Synthetic oligonucleotide
  Sense strand starting at position 3900 of SEQ ID NO: 1242566
aaggacgucuccuagaaau

SEQ ID NO: 1357515 - RNA, 19 nt, Artificial Sequence
  Description of Artificial Sequence: Synthetic oligonucleotide
  Antisense strand to SEQ ID NO: 1357514
auuucuaggagacguccuu

SEQ ID NO: 1357516 - RNA, 19 nt, Artificial Sequence
  Description of Artificial Sequence: Synthetic oligonucleotide
  Sense strand starting at position 3981 of SEQ ID NO: 1242566
gcaggcauccaauaugcua

SEQ ID NO: 1357517 - RNA, 19 nt, Artificial Sequence
  Description of Artificial Sequence: Synthetic oligonucleotide
  Antisense strand to SEQ ID NO: 1357516
uagcauauuggaugccugc

SEQ ID NO: 1357518 - RNA, 19 nt, Artificial Sequence
  Description of Artificial Sequence: Synthetic oligonucleotide
  Sense strand starting at position 201 of SEQ ID NO: 1242567
gucaguaguuacuuuaaau

SEQ ID NO: 1357519 - RNA, 19 nt, Artificial Sequence
  Description of Artificial Sequence: Synthetic oligonucleotide
  Antisense strand to SEQ ID NO: 1357518
auuuaaaguaacuacugac

SEQ ID NO: 1357520 - RNA, 19 nt, Artificial Sequence
  Description of Artificial Sequence: Synthetic oligonucleotide
  Sense strand starting at position 312 of SEQ ID NO: 1242567
acuucuaugugauugaaua

SEQ ID NO: 1357521 - RNA, 19 nt, Artificial Sequence
  Description of Artificial Sequence: Synthetic oligonucleotide
  Antisense strand to SEQ ID NO: 1357520
uauucaaucacauagaagu

SEQ ID NO: 1357522 - RNA, 19 nt, Artificial Sequence
  Description of Artificial Sequence: Synthetic oligonucleotide
  Sense strand starting at position 313 of SEQ ID NO: 1242567
cuucuaugugauugaauau

SEQ ID NO: 1357523 - RNA, 19 nt, Artificial Sequence
  Description of Artificial Sequence: Synthetic oligonucleotide
  Antisense strand to SEQ ID NO: 1357522
auauucaaucacauagaag

SEQ ID NO: 1357524 - RNA, 19 nt, Artificial Sequence
  Description of Artificial Sequence: Synthetic oligonucleotide
  Sense strand starting at position 573 of SEQ ID NO: 1242567
gcaucaucagauugggaga

SEQ ID NO: 1357525 - RNA, 19 nt, Artificial Sequence
  Description of Artificial Sequence: Synthetic oligonucleotide
  Antisense strand to SEQ ID NO: 1357524
ucucccaaucugaugaugc

SEQ ID NO: 1357526 - RNA, 19 nt, Artificial Sequence
  Description of Artificial Sequence: Synthetic oligonucleotide
  Sense strand starting at position 731 of SEQ ID NO: 1242567
guacacaucuaauuagaug

SEQ ID NO: 1357527 - RNA, 19 nt, Artificial Sequence
  Description of Artificial Sequence: Synthetic oligonucleotide
  Antisense strand to SEQ ID NO: 1357526
caucuaauuagauguguac

SEQ ID NO: 1357528 - RNA, 19 nt, Artificial Sequence
  Description of Artificial Sequence: Synthetic oligonucleotide
  Sense strand starting at position 749 of SEQ ID NO: 1242567
gauuaaaugcaaggugauu

SEQ ID NO: 1357529 - RNA, 19 nt, Artificial Sequence
  Description of Artificial Sequence: Synthetic oligonucleotide
  Antisense strand to SEQ ID NO: 1357528
aaucaccuugcauuuaauc

SEQ ID NO: 1357530 - RNA, 19 nt, Artificial Sequence
  Description of Artificial Sequence: Synthetic oligonucleotide
  Sense strand starting at position 816 of SEQ ID NO: 1242567
ugagguuacuaugcaaauu

SEQ ID NO: 1357531 - RNA, 19 nt, Artificial Sequence
  Description of Artificial Sequence: Synthetic oligonucleotide
  Antisense strand to SEQ ID NO: 1357530
aauuugcauaguaaccuca

SEQ ID NO: 1357532 - RNA, 19 nt, Artificial Sequence
  Description of Artificial Sequence: Synthetic oligonucleotide
  Sense strand starting at position 884 of SEQ ID NO: 1242567
guaggcuuuggauaguaau

SEQ ID NO: 1357533 - RNA, 19 nt, Artificial Sequence
  Description of Artificial Sequence: Synthetic oligonucleotide
  Antisense strand to SEQ ID NO: 1357532
auuacuauccaaagccuac

SEQ ID NO: 1357534 - RNA, 19 nt, Artificial Sequence
  Description of Artificial Sequence: Synthetic oligonucleotide
  Sense strand starting at position 964 of SEQ ID NO: 1242567
gggauucucucuucuguac

SEQ ID NO: 1357535 - RNA, 19 nt, Artificial Sequence
  Description of Artificial Sequence: Synthetic oligonucleotide
  Antisense strand to SEQ ID NO: 1357534
guacagaagagagaauccc

SEQ ID NO: 1357536 - RNA, 19 nt, Artificial Sequence
  Description of Artificial Sequence: Synthetic oligonucleotide
  Sense strand starting at position 1027 of SEQ ID NO: 1242567
gggaguuaguggcuauaaa

SEQ ID NO: 1357537 - RNA, 19 nt, Artificial Sequence
  Description of Artificial Sequence: Synthetic oligonucleotide
  Antisense strand to SEQ ID NO: 1357536
uuuauagccacuaacuccc

SEQ ID NO: 1357538 - RNA, 19 nt, Artificial Sequence
  Description of Artificial Sequence: Synthetic oligonucleotide
  Sense strand starting at position 1028 of SEQ ID NO: 1242567
ggaguuaguggcuauaaau

SEQ ID NO: 1357539 - RNA, 19 nt, Artificial Sequence
  Description of Artificial Sequence: Synthetic oligonucleotide
  Antisense strand to SEQ ID NO: 1357538
auuuauagccacuaacucc

SEQ ID NO: 1357540 - RNA, 19 nt, Artificial Sequence
  Description of Artificial Sequence: Synthetic oligonucleotide
  Sense strand starting at position 1243 of SEQ ID NO: 1242567
ugccauccucaugggaaga

SEQ ID NO: 1357541 - RNA, 19 nt, Artificial Sequence
  Description of Artificial Sequence: Synthetic oligonucleotide
  Antisense strand to SEQ ID NO: 1357540
ucuucccaugaggauggca

SEQ ID NO: 1357542 - RNA, 19 nt, Artificial Sequence
  Description of Artificial Sequence: Synthetic oligonucleotide
  Sense strand starting at position 1244 of SEQ ID NO: 1242567
gccauccucaugggaagau

SEQ ID NO: 1357543 - RNA, 19 nt, Artificial Sequence
  Description of Artificial Sequence: Synthetic oligonucleotide
  Antisense strand to SEQ ID NO: 1357542
aucuucccaugaggauggc

SEQ ID NO: 1357544 - RNA, 19 nt, Artificial Sequence
  Description of Artificial Sequence: Synthetic oligonucleotide
  Sense strand starting at position 1467 of SEQ ID NO: 1242567
auuauaguacccugauuga

SEQ ID NO: 1357545 - RNA, 19 nt, Artificial Sequence
  Description of Artificial Sequence: Synthetic oligonucleotide
  Antisense strand to SEQ ID NO: 1357544
ucaaucaggguacuauaau

SEQ ID NO: 1357546 - RNA, 19 nt, Artificial Sequence
  Description of Artificial Sequence: Synthetic oligonucleotide
  Sense strand starting at position 1470 of SEQ ID NO: 1242567
auaguacccugauugaaua

SEQ ID NO: 1357547 - RNA, 19 nt, Artificial Sequence
  Description of Artificial Sequence: Synthetic oligonucleotide
  Antisense strand to SEQ ID NO: 1357546
uauucaaucaggguacuau

SEQ ID NO: 1357548 - RNA, 19 nt, Artificial Sequence
  Description of Artificial Sequence: Synthetic oligonucleotide
  Sense strand starting at position 1642 of SEQ ID NO: 1242567
gaaguaacuuugguuccau

SEQ ID NO: 1357549 - RNA, 19 nt, Artificial Sequence
  Description of Artificial Sequence: Synthetic oligonucleotide
  Antisense strand to SEQ ID NO: 1357548
auggaaccaaaguuacuuc

SEQ ID NO: 1357550 - RNA, 19 nt, Artificial Sequence
  Description of Artificial Sequence: Synthetic oligonucleotide
  Sense strand starting at position 1756 of SEQ ID NO: 1242567
ccaguaguccaguacauaa

SEQ ID NO: 1357551 - RNA, 19 nt, Artificial Sequence
  Description of Artificial Sequence: Synthetic oligonucleotide
  Antisense strand to SEQ ID NO: 1357550
uuauguacuggacuacugg

SEQ ID NO: 1357552 - RNA, 19 nt, Artificial Sequence
  Description of Artificial Sequence: Synthetic oligonucleotide
  Sense strand starting at position 1934 of SEQ ID NO: 1242567
gugaaacaguccucagaaa

SEQ ID NO: 1357553 - RNA, 19 nt, Artificial Sequence
  Description of Artificial Sequence: Synthetic oligonucleotide
  Antisense strand to SEQ ID NO: 1357552
uuucugaggacuguuucac

SEQ ID NO: 1357554 - RNA, 19 nt, Artificial Sequence
  Description of Artificial Sequence: Synthetic oligonucleotide
  Sense strand starting at position 1985 of SEQ ID NO: 1242567
uugggaagagauggcuaau

SEQ ID NO: 1357555 - RNA, 19 nt, Artificial Sequence
  Description of Artificial Sequence: Synthetic oligonucleotide
  Antisense strand to SEQ ID NO: 1357554
auuagccaucucuucccaa

SEQ ID NO: 1357556 - RNA, 19 nt, Artificial Sequence
  Description of Artificial Sequence: Synthetic oligonucleotide
  Sense strand starting at position 2054 of SEQ ID NO: 1242567
gguuaauugcuacaguuau

SEQ ID NO: 1357557 - RNA, 19 nt, Artificial Sequence
  Description of Artificial Sequence: Synthetic oligonucleotide
  Antisense strand to SEQ ID NO: 1357556
auaacuguagcaauuaacc

SEQ ID NO: 1357558 - RNA, 19 nt, Artificial Sequence
  Description of Artificial Sequence: Synthetic oligonucleotide
  Sense strand starting at position 2173 of SEQ ID NO: 1242567
gagguuauauagcuacuau

SEQ ID NO: 1357559 - RNA, 19 nt, Artificial Sequence
  Description of Artificial Sequence: Synthetic oligonucleotide
  Antisense strand to SEQ ID NO: 1357558
auaguagcuauauaaccuc

SEQ ID NO: 1357560 - RNA, 19 nt, Artificial Sequence
  Description of Artificial Sequence: Synthetic oligonucleotide
  Sense strand starting at position 2254 of SEQ ID NO: 1242567
auggaagccauauggucau

SEQ ID NO: 1357561 - RNA, 19 nt, Artificial Sequence
  Description of Artificial Sequence: Synthetic oligonucleotide
  Antisense strand to SEQ ID NO: 1357560
augaccauauggcuuccau

SEQ ID NO: 1357562 - RNA, 19 nt, Artificial Sequence
  Description of Artificial Sequence: Synthetic oligonucleotide
  Sense strand starting at position 2300 of SEQ ID NO: 1242567
uuggaaaguucuguaccuu

SEQ ID NO: 1357563 - RNA, 19 nt, Artificial Sequence
  Description of Artificial Sequence: Synthetic oligonucleotide
  Antisense strand to SEQ ID NO: 1357562
aagguacagaacuuuccaa

SEQ ID NO: 1357564 - RNA, 19 nt, Artificial Sequence
  Description of Artificial Sequence: Synthetic oligonucleotide
  Sense strand starting at position 2301 of SEQ ID NO: 1242567
uggaaaguucuguaccuua

SEQ ID NO: 1357565 - RNA, 19 nt, Artificial Sequence
  Description of Artificial Sequence: Synthetic oligonucleotide
  Antisense strand to SEQ ID NO: 1357564
uaagguacagaacuuucca

SEQ ID NO: 1357566 - RNA, 19 nt, Artificial Sequence
  Description of Artificial Sequence: Synthetic oligonucleotide
  Sense strand starting at position 2322 of SEQ ID NO: 1242567
gugucuuuacuuuagaaac

SEQ ID NO: 1357567 - RNA, 19 nt, Artificial Sequence
  Description of Artificial Sequence: Synthetic oligonucleotide
  Antisense strand to SEQ ID NO: 1357566
guuucuaaaguaaagacac

SEQ ID NO: 1357568 - RNA, 19 nt, Artificial Sequence
  Description of Artificial Sequence: Synthetic oligonucleotide
  Sense strand starting at position 2382 of SEQ ID NO: 1242567
cugugauaucuuuauauga

SEQ ID NO: 1357569 - RNA, 19 nt, Artificial Sequence
  Description of Artificial Sequence: Synthetic oligonucleotide
  Antisense strand to SEQ ID NO: 1357568
ucauauaaagauaucacag

SEQ ID NO: 1357570 - RNA, 19 nt, Artificial Sequence
  Description of Artificial Sequence: Synthetic oligonucleotide
  Sense strand starting at position 2420 of SEQ ID NO: 1242567
uugauugguccaggguuga

SEQ ID NO: 1357571 - RNA, 19 nt, Artificial Sequence
  Description of Artificial Sequence: Synthetic oligonucleotide
  Antisense strand to SEQ ID NO: 1357570
ucaacccuggaccaaucaa

SEQ ID NO: 1357572 - RNA, 19 nt, Artificial Sequence
  Description of Artificial Sequence: Synthetic oligonucleotide
  Sense strand starting at position 2618 of SEQ ID NO: 1242567
ugguuaugauuccuaucau

SEQ ID NO: 1357573 - RNA, 19 nt, Artificial Sequence
  Description of Artificial Sequence: Synthetic oligonucleotide
  Antisense strand to SEQ ID NO: 1357572
augauaggaaucauaacca

SEQ ID NO: 1357574 - RNA, 19 nt, Artificial Sequence
  Description of Artificial Sequence: Synthetic oligonucleotide
  Sense strand starting at position 2659 of SEQ ID NO: 1242567
cgagaaugaaacugaugua

SEQ ID NO: 1357575 - RNA, 19 nt, Artificial Sequence
  Description of Artificial Sequence: Synthetic oligonucleotide
  Antisense strand to SEQ ID NO: 1357574
uacaucaguuucauucucg

SEQ ID NO: 1357576 - RNA, 19 nt, Artificial Sequence
  Description of Artificial Sequence: Synthetic oligonucleotide
  Sense strand starting at position 2701 of SEQ ID NO: 1242567
guaagaauccugcagucau

SEQ ID NO: 1357577 - RNA, 19 nt, Artificial Sequence
  Description of Artificial Sequence: Synthetic oligonucleotide
  Antisense strand to SEQ ID NO: 1357576
augacugcaggauucuuac

SEQ ID NO: 1357578 - RNA, 19 nt, Artificial Sequence
  Description of Artificial Sequence: Synthetic oligonucleotide
  Sense strand starting at position 2765 of SEQ ID NO: 1242567
uuguuaauauucucuggau

SEQ ID NO: 1357579 - RNA, 19 nt, Artificial Sequence
  Description of Artificial Sequence: Synthetic oligonucleotide
  Antisense strand to SEQ ID NO: 1357578
auccagagaauauuaacaa

SEQ ID NO: 1357580 - RNA, 19 nt, Artificial Sequence
  Description of Artificial Sequence: Synthetic oligonucleotide
  Sense strand starting at position 2766 of SEQ ID NO: 1242567
uguuaauauucucuggauu

SEQ ID NO: 1357581 - RNA, 19 nt, Artificial Sequence
  Description of Artificial Sequence: Synthetic oligonucleotide
  Antisense strand to SEQ ID NO: 1357580
aauccagagaauauuaaca

SEQ ID NO: 1357582 - RNA, 19 nt, Artificial Sequence
  Description of Artificial Sequence: Synthetic oligonucleotide
  Sense strand starting at position 2767 of SEQ ID NO: 1242567
guuaauauucucuggauuc

SEQ ID NO: 1357583 - RNA, 19 nt, Artificial Sequence
  Description of Artificial Sequence: Synthetic oligonucleotide
  Antisense strand to SEQ ID NO: 1357582
gaauccagagaauauuaac

SEQ ID NO: 1357584 - RNA, 19 nt, Artificial Sequence
  Description of Artificial Sequence: Synthetic oligonucleotide
  Sense strand starting at position 2798 of SEQ ID NO: 1242567
gauucuccuuugccugaga

SEQ ID NO: 1357585 - RNA, 19 nt, Artificial Sequence
  Description of Artificial Sequence: Synthetic oligonucleotide
  Antisense strand to SEQ ID NO: 1357584
ucucaggcaaaggagaauc

SEQ ID NO: 1357586 - RNA, 19 nt, Artificial Sequence
  Description of Artificial Sequence: Synthetic oligonucleotide
  Sense strand starting at position 2819 of SEQ ID NO: 1242567
ggguuucugucacuugaga

SEQ ID NO: 1357587 - RNA, 19 nt, Artificial Sequence
  Description of Artificial Sequence: Synthetic oligonucleotide
  Antisense strand to SEQ ID NO: 1357586
ucucaagugacagaaaccc

SEQ ID NO: 1357588 - RNA, 19 nt, Artificial Sequence
  Description of Artificial Sequence: Synthetic oligonucleotide
  Sense strand starting at position 3155 of SEQ ID NO: 1242567
cugacaauugggugaguuu

SEQ ID NO: 1357589 - RNA, 19 nt, Artificial Sequence
  Description of Artificial Sequence: Synthetic oligonucleotide
  Antisense strand to SEQ ID NO: 1357588
aaacucacccaauugucag

SEQ ID NO: 1357590 - RNA, 19 nt, Artificial Sequence
  Description of Artificial Sequence: Synthetic oligonucleotide
  Sense strand starting at position 3156 of SEQ ID NO: 1242567
ugacaauugggugaguuua

SEQ ID NO: 1357591 - RNA, 19 nt, Artificial Sequence
  Description of Artificial Sequence: Synthetic oligonucleotide
  Antisense strand to SEQ ID NO: 1357590
uaaacucacccaauuguca

SEQ ID NO: 1357592 - RNA, 19 nt, Artificial Sequence
  Description of Artificial Sequence: Synthetic oligonucleotide
  Sense strand starting at position 3158 of SEQ ID NO: 1242567
acaauugggugaguuuauu

SEQ ID NO: 1357593 - RNA, 19 nt, Artificial Sequence
  Description of Artificial Sequence: Synthetic oligonucleotide
  Antisense strand to SEQ ID NO: 1357592
aauaaacucacccaauugu

SEQ ID NO: 1357594 - RNA, 19 nt, Artificial Sequence
  Description of Artificial Sequence: Synthetic oligonucleotide
  Sense strand starting at position 3188 of SEQ ID NO: 1242567
gauuaauggcaaggaaugu

SEQ ID NO: 1357595 - RNA, 19 nt, Artificial Sequence
  Description of Artificial Sequence: Synthetic oligonucleotide
  Antisense strand to SEQ ID NO: 1357594
acauuccuugccauuaauc

SEQ ID NO: 1357596 - RNA, 19 nt, Artificial Sequence
  Description of Artificial Sequence: Synthetic oligonucleotide
  Sense strand starting at position 3215 of SEQ ID NO: 1242567
agguaaagcuuuguggaga

SEQ ID NO: 1357597 - RNA, 19 nt, Artificial Sequence
  Description of Artificial Sequence: Synthetic oligonucleotide
  Antisense strand to SEQ ID NO: 1357596
ucuccacaaagcuuuaccu

SEQ ID NO: 1357598 - RNA, 19 nt, Artificial Sequence
  Description of Artificial Sequence: Synthetic oligonucleotide
  Sense strand starting at position 19 of SEQ ID NO: 1242568
guaguccugaggugaauua

SEQ ID NO: 1357599 - RNA, 19 nt, Artificial Sequence
  Description of Artificial Sequence: Synthetic oligonucleotide
  Antisense strand to SEQ ID NO: 1357598
uaauucaccucaggacuac

SEQ ID NO: 1357600 - RNA, 19 nt, Artificial Sequence
  Description of Artificial Sequence: Synthetic oligonucleotide
  Sense strand starting at position 34 of SEQ ID NO: 1242568
auuacauucugagcuuaug

SEQ ID NO: 1357601 - RNA, 19 nt, Artificial Sequence
  Description of Artificial Sequence: Synthetic oligonucleotide
  Antisense strand to SEQ ID NO: 1357600
cauaagcucagaauguaau

SEQ ID NO: 1357602 - RNA, 19 nt, Artificial Sequence
  Description of Artificial Sequence: Synthetic oligonucleotide
  Sense strand starting at position 117 of SEQ ID NO: 1242568
ggacgugauaaauguccau

SEQ ID NO: 1357603 - RNA, 19 nt, Artificial Sequence
  Description of Artificial Sequence: Synthetic oligonucleotide
  Antisense strand to SEQ ID NO: 1357602
auggacauuuaucacgucc

SEQ ID NO: 1357604 - RNA, 19 nt, Artificial Sequence
  Description of Artificial Sequence: Synthetic oligonucleotide
  Sense strand starting at position 120 of SEQ ID NO: 1242568
cgugauaaauguccaugaa

SEQ ID NO: 1357605 - RNA, 19 nt, Artificial Sequence
  Description of Artificial Sequence: Synthetic oligonucleotide
  Antisense strand to SEQ ID NO: 1357604
uucauggacauuuaucacg

SEQ ID NO: 1357606 - RNA, 19 nt, Artificial Sequence
  Description of Artificial Sequence: Synthetic oligonucleotide
  Sense strand starting at position 399 of SEQ ID NO: 1242568
auaagagcuuaugucuauu

SEQ ID NO: 1357607 - RNA, 19 nt, Artificial Sequence
  Description of Artificial Sequence: Synthetic oligonucleotide
  Antisense strand to SEQ ID NO: 1357606
aauagacauaagcucuuau

SEQ ID NO: 1357608 - RNA, 19 nt, Artificial Sequence
  Description of Artificial Sequence: Synthetic oligonucleotide
  Sense strand starting at position 612 of SEQ ID NO: 1242568
uggucaaagguaugaugua

SEQ ID NO: 1357609 - RNA, 19 nt, Artificial Sequence
  Description of Artificial Sequence: Synthetic oligonucleotide
  Antisense strand to SEQ ID NO: 1357608
uacaucauaccuuugacca

SEQ ID NO: 1357610 - RNA, 19 nt, Artificial Sequence
  Description of Artificial Sequence: Synthetic oligonucleotide
  Sense strand starting at position 724 of SEQ ID NO: 1242568
ggcuaucagucuucuccau

SEQ ID NO: 1357611 - RNA, 19 nt, Artificial Sequence
  Description of Artificial Sequence: Synthetic oligonucleotide
  Antisense strand to SEQ ID NO: 1357610
auggagaagacugauagcc

SEQ ID NO: 1357612 - RNA, 19 nt, Artificial Sequence
  Description of Artificial Sequence: Synthetic oligonucleotide
  Sense strand starting at position 1273 of SEQ ID NO: 1242568
ggugguuccuacccagauu

SEQ ID NO: 1357613 - RNA, 19 nt, Artificial Sequence
  Description of Artificial Sequence: Synthetic oligonucleotide
  Antisense strand to SEQ ID NO: 1357612
aaucuggguaggaaccacc

SEQ ID NO: 1357614 - RNA, 19 nt, Artificial Sequence
  Description of Artificial Sequence: Synthetic oligonucleotide
  Sense strand starting at position 1420 of SEQ ID NO: 1242568
aucacagugucugacauuu

SEQ ID NO: 1357615 - RNA, 19 nt, Artificial Sequence
  Description of Artificial Sequence: Synthetic oligonucleotide
  Antisense strand to SEQ ID NO: 1357614
aaaugucagacacugugau

SEQ ID NO: 1357616 - RNA, 19 nt, Artificial Sequence
  Description of Artificial Sequence: Synthetic oligonucleotide
  Sense strand starting at position 1566 of SEQ ID NO: 1242568
ggucucaccuccucugaga

SEQ ID NO: 1357617 - RNA, 19 nt, Artificial Sequence
  Description of Artificial Sequence: Synthetic oligonucleotide
  Antisense strand to SEQ ID NO: 1357616
ucucagaggaggugagacc

SEQ ID NO: 1357618 - RNA, 19 nt, Artificial Sequence
  Description of Artificial Sequence: Synthetic oligonucleotide
  Sense strand starting at position 1690 of SEQ ID NO: 1242568
cccaguguuuccuccuaag

SEQ ID NO: 1357619 - RNA, 19 nt, Artificial Sequence
  Description of Artificial Sequence: Synthetic oligonucleotide
  Antisense strand to SEQ ID NO: 1357618
cuuaggaggaaacacuggg

SEQ ID NO: 1357620 - RNA, 19 nt, Artificial Sequence
  Description of Artificial Sequence: Synthetic oligonucleotide
  Sense strand starting at position 1702 of SEQ ID NO: 1242568
uccuaagacuuggcaggua

SEQ ID NO: 1357621 - RNA, 19 nt, Artificial Sequence
  Description of Artificial Sequence: Synthetic oligonucleotide
  Antisense strand to SEQ ID NO: 1357620
uaccugccaagucuuagga

SEQ ID NO: 1357622 - RNA, 19 nt, Artificial Sequence
  Description of Artificial Sequence: Synthetic oligonucleotide
  Sense strand starting at position 1803 of SEQ ID NO: 1242568
ugagguuaucauggauuau

SEQ ID NO: 1357623 - RNA, 19 nt, Artificial Sequence
  Description of Artificial Sequence: Synthetic oligonucleotide
  Antisense strand to SEQ ID NO: 1357622
auaauccaugauaaccuca

SEQ ID NO: 1357624 - RNA, 19 nt, Artificial Sequence
  Description of Artificial Sequence: Synthetic oligonucleotide
  Sense strand starting at position 1831 of SEQ ID NO: 1242568
agcccauuccuugaaacag

SEQ ID NO: 1357625 - RNA, 19 nt, Artificial Sequence
  Description of Artificial Sequence: Synthetic oligonucleotide
  Antisense strand to SEQ ID NO: 1357624
cuguuucaaggaaugggcu

SEQ ID NO: 1357626 - RNA, 19 nt, Artificial Sequence
  Description of Artificial Sequence: Synthetic oligonucleotide
  Sense strand starting at position 2134 of SEQ ID NO: 1242568
gggcaugaagcagguuuau

SEQ ID NO: 1357627 - RNA, 19 nt, Artificial Sequence
  Description of Artificial Sequence: Synthetic oligonucleotide
  Antisense strand to SEQ ID NO: 1357626
auaaaccugcuucaugccc

SEQ ID NO: 1357628 - RNA, 19 nt, Artificial Sequence
  Description of Artificial Sequence: Synthetic oligonucleotide
  Sense strand starting at position 2144 of SEQ ID NO: 1242568
cagguuuaugcccaggacu

SEQ ID NO: 1357629 - RNA, 19 nt, Artificial Sequence
  Description of Artificial Sequence: Synthetic oligonucleotide
  Antisense strand to SEQ ID NO: 1357628
aguccugggcauaaaccug

SEQ ID NO: 1357630 - RNA, 19 nt, Artificial Sequence
  Description of Artificial Sequence: Synthetic oligonucleotide
  Sense strand starting at position 2146 of SEQ ID NO: 1242568
gguuuaugcccaggacuga

SEQ ID NO: 1357631 - RNA, 19 nt, Artificial Sequence
  Description of Artificial Sequence: Synthetic oligonucleotide
  Antisense strand to SEQ ID NO: 1357630
ucaguccugggcauaaacc

SEQ ID NO: 1357632 - RNA, 19 nt, Artificial Sequence
  Description of Artificial Sequence: Synthetic oligonucleotide
  Sense strand starting at position 2204 of SEQ ID NO: 1242568
cucacauaggcuugaugaa

SEQ ID NO: 1357633 - RNA, 19 nt, Artificial Sequence
  Description of Artificial Sequence: Synthetic oligonucleotide
  Antisense strand to SEQ ID NO: 1357632
uucaucaagccuaugugag

SEQ ID NO: 1357634 - RNA, 19 nt, Artificial Sequence
  Description of Artificial Sequence: Synthetic oligonucleotide
  Sense strand starting at position 2494 of SEQ ID NO: 1242568
cuaagagguugaucacauc

SEQ ID NO: 1357635 - RNA, 19 nt, Artificial Sequence
  Description of Artificial Sequence: Synthetic oligonucleotide
  Antisense strand to SEQ ID NO: 1357634
gaugugaucaaccucuuag

SEQ ID NO: 1357636 - RNA, 19 nt, Artificial Sequence
  Description of Artificial Sequence: Synthetic oligonucleotide
  Sense strand starting at position 2599 of SEQ ID NO: 1242568
cuuagagauugcccugacu

SEQ ID NO: 1357637 - RNA, 19 nt, Artificial Sequence
  Description of Artificial Sequence: Synthetic oligonucleotide
  Antisense strand to SEQ ID NO: 1357636
agucagggcaaucucuaag

SEQ ID NO: 1357638 - RNA, 19 nt, Artificial Sequence
  Description of Artificial Sequence: Synthetic oligonucleotide
  Sense strand starting at position 2601 of SEQ ID NO: 1242568
uagagauugcccugacucu

SEQ ID NO: 1357639 - RNA, 19 nt, Artificial Sequence
  Description of Artificial Sequence: Synthetic oligonucleotide
  Antisense strand to SEQ ID NO: 1357638
agagucagggcaaucucua

SEQ ID NO: 1357640 - RNA, 19 nt, Artificial Sequence
  Description of Artificial Sequence: Synthetic oligonucleotide
  Sense strand starting at position 2602 of SEQ ID NO: 1242568
agagauugcccugacucuu

SEQ ID NO: 1357641 - RNA, 19 nt, Artificial Sequence
  Description of Artificial Sequence: Synthetic oligonucleotide
  Antisense strand to SEQ ID NO: 1357640
aagagucagggcaaucucu

SEQ ID NO: 1357642 - RNA, 19 nt, Artificial Sequence
  Description of Artificial Sequence: Synthetic oligonucleotide
  Sense strand starting at position 2855 of SEQ ID NO: 1242568
aucuaucgugcucaagcaa

SEQ ID NO: 1357643 - RNA, 19 nt, Artificial Sequence
  Description of Artificial Sequence: Synthetic oligonucleotide
  Antisense strand to SEQ ID NO: 1357642
uugcuugagcacgauagau

SEQ ID NO: 1357644 - RNA, 19 nt, Artificial Sequence
  Description of Artificial Sequence: Synthetic oligonucleotide
  Sense strand starting at position 3057 of SEQ ID NO: 1242568
uggccaacauugucuuaua

SEQ ID NO: 1357645 - RNA, 19 nt, Artificial Sequence
  Description of Artificial Sequence: Synthetic oligonucleotide
  Antisense strand to SEQ ID NO: 1357644
uauaagacaauguuggcca

SEQ ID NO: 1357646 - RNA, 19 nt, Artificial Sequence
  Description of Artificial Sequence: Synthetic oligonucleotide
  Sense strand starting at position 3098 of SEQ ID NO: 1242568
gcucucucaggcuagaguu

SEQ ID NO: 1357647 - RNA, 19 nt, Artificial Sequence
  Description of Artificial Sequence: Synthetic oligonucleotide
  Antisense strand to SEQ ID NO: 1357646
aacucuagccugagagagc

SEQ ID NO: 1357648 - RNA, 19 nt, Artificial Sequence
  Description of Artificial Sequence: Synthetic oligonucleotide
  Sense strand starting at position 3104 of SEQ ID NO: 1242568
ucaggcuagaguugcaaau

SEQ ID NO: 1357649 - RNA, 19 nt, Artificial Sequence
  Description of Artificial Sequence: Synthetic oligonucleotide
  Antisense strand to SEQ ID NO: 1357648
auuugcaacucuagccuga

SEQ ID NO: 1357650 - RNA, 19 nt, Artificial Sequence
  Description of Artificial Sequence: Synthetic oligonucleotide
  Sense strand starting at position 3115 of SEQ ID NO: 1242568
uugcaaauuggugauccua

SEQ ID NO: 1357651 - RNA, 19 nt, Artificial Sequence
  Description of Artificial Sequence: Synthetic oligonucleotide
  Antisense strand to SEQ ID NO: 1357650
uaggaucaccaauuugcaa

SEQ ID NO: 1357652 - RNA, 19 nt, Artificial Sequence
  Description of Artificial Sequence: Synthetic oligonucleotide
  Sense strand starting at position 3117 of SEQ ID NO: 1242568
gcaaauuggugauccuaca

SEQ ID NO: 1357653 - RNA, 19 nt, Artificial Sequence
  Description of Artificial Sequence: Synthetic oligonucleotide
  Antisense strand to SEQ ID NO: 1357652
uguaggaucaccaauuugc

SEQ ID NO: 1357654 - RNA, 19 nt, Artificial Sequence
  Description of Artificial Sequence: Synthetic oligonucleotide
  Sense strand starting at position 3190 of SEQ ID NO: 1242568
gagggaauucuuuguagag

SEQ ID NO: 1357655 - RNA, 19 nt, Artificial Sequence
  Description of Artificial Sequence: Synthetic oligonucleotide
  Antisense strand to SEQ ID NO: 1357654
cucuacaaagaauucccuc

SEQ ID NO: 1357656 - RNA, 19 nt, Artificial Sequence
  Description of Artificial Sequence: Synthetic oligonucleotide
  Sense strand starting at position 3208 of SEQ ID NO: 1242568
ggaucuuaccaccaagcau

SEQ ID NO: 1357657 - RNA, 19 nt, Artificial Sequence
  Description of Artificial Sequence: Synthetic oligonucleotide
  Antisense strand to SEQ ID NO: 1357656
augcuuggugguaagaucc

SEQ ID NO: 1357658 - RNA, 19 nt, Artificial Sequence
  Description of Artificial Sequence: Synthetic oligonucleotide
  Sense strand starting at position 3262 of SEQ ID NO: 1242568
auaccauucugucuuuguu

SEQ ID NO: 1357659 - RNA, 19 nt, Artificial Sequence
  Description of Artificial Sequence: Synthetic oligonucleotide
  Antisense strand to SEQ ID NO: 1357658
aacaaagacagaaugguau

SEQ ID NO: 1357660 - RNA, 19 nt, Artificial Sequence
  Description of Artificial Sequence: Synthetic oligonucleotide
  Sense strand starting at position 3377 of SEQ ID NO: 1242568
uuggucaugcuuuagcaga

SEQ ID NO: 1357661 - RNA, 19 nt, Artificial Sequence
  Description of Artificial Sequence: Synthetic oligonucleotide
  Antisense strand to SEQ ID NO: 1357660
ucugcuaaagcaugaccaa

SEQ ID NO: 1357662 - RNA, 19 nt, Artificial Sequence
  Description of Artificial Sequence: Synthetic oligonucleotide
  Sense strand starting at position 3413 of SEQ ID NO: 1242568
uuggacuccucuccugaaa

SEQ ID NO: 1357663 - RNA, 19 nt, Artificial Sequence
  Description of Artificial Sequence: Synthetic oligonucleotide
  Antisense strand to SEQ ID NO: 1357662
uuucaggagaggaguccaa

SEQ ID NO: 1357664 - RNA, 19 nt, Artificial Sequence
  Description of Artificial Sequence: Synthetic oligonucleotide
  Sense strand starting at position 3453 of SEQ ID NO: 1242568
cuaugugcaggcugauaau

SEQ ID NO: 1357665 - RNA, 19 nt, Artificial Sequence
  Description of Artificial Sequence: Synthetic oligonucleotide
  Antisense strand to SEQ ID NO: 1357664
auuaucagccugcacauag

SEQ ID NO: 1357666 - RNA, 19 nt, Artificial Sequence
  Description of Artificial Sequence: Synthetic oligonucleotide
  Sense strand starting at position 3462 of SEQ ID NO: 1242568
ggcugauaauuauccaaau

SEQ ID NO: 1357667 - RNA, 19 nt, Artificial Sequence
  Description of Artificial Sequence: Synthetic oligonucleotide
  Antisense strand to SEQ ID NO: 1357666
auuuggauaauuaucagcc

SEQ ID NO: 1357668 - RNA, 19 nt, Artificial Sequence
  Description of Artificial Sequence: Synthetic oligonucleotide
  Sense strand starting at position 3681 of SEQ ID NO: 1242568
ccaaguucuuugcuacaga

SEQ ID NO: 1357669 - RNA, 19 nt, Artificial Sequence
  Description of Artificial Sequence: Synthetic oligonucleotide
  Antisense strand to SEQ ID NO: 1357668
ucuguagcaaagaacuugg

SEQ ID NO: 1357670 - RNA, 19 nt, Artificial Sequence
  Description of Artificial Sequence: Synthetic oligonucleotide
  Sense strand starting at position 3684 of SEQ ID NO: 1242568
aguucuuugcuacagagua

SEQ ID NO: 1357671 - RNA, 19 nt, Artificial Sequence
  Description of Artificial Sequence: Synthetic oligonucleotide
  Antisense strand to SEQ ID NO: 1357670
uacucuguagcaaagaacu

SEQ ID NO: 1357672 - RNA, 19 nt, Artificial Sequence
  Description of Artificial Sequence: Synthetic oligonucleotide
  Sense strand starting at position 3697 of SEQ ID NO: 1242568
agaguaacaugggugaauu

SEQ ID NO: 1357673 - RNA, 19 nt, Artificial Sequence
  Description of Artificial Sequence: Synthetic oligonucleotide
  Antisense strand to SEQ ID NO: 1357672
aauucacccauguuacucu

SEQ ID NO: 1357674 - RNA, 19 nt, Artificial Sequence
  Description of Artificial Sequence: Synthetic oligonucleotide
  Sense strand starting at position 3720 of SEQ ID NO: 1242568
uccagcuuccaaugaguuu

SEQ ID NO: 1357675 - RNA, 19 nt, Artificial Sequence
  Description of Artificial Sequence: Synthetic oligonucleotide
  Antisense strand to SEQ ID NO: 1357674
aaacucauuggaagcugga

SEQ ID NO: 1357676 - RNA, 19 nt, Artificial Sequence
  Description of Artificial Sequence: Synthetic oligonucleotide
  Sense strand starting at position 3857 of SEQ ID NO: 1242568
cugaaagcugacugaggua

SEQ ID NO: 1357677 - RNA, 19 nt, Artificial Sequence
  Description of Artificial Sequence: Synthetic oligonucleotide
  Antisense strand to SEQ ID NO: 1357676
uaccucagucagcuuucag

SEQ ID NO: 1357678 - RNA, 19 nt, Artificial Sequence
  Description of Artificial Sequence: Synthetic oligonucleotide
  Sense strand starting at position 11 of SEQ ID NO: 1242569
auuacauucugagcuuaug

SEQ ID NO: 1357679 - RNA, 19 nt, Artificial Sequence
  Description of Artificial Sequence: Synthetic oligonucleotide
  Antisense strand to SEQ ID NO: 1357678
cauaagcucagaauguaau

SEQ ID NO: 1357680 - RNA, 19 nt, Artificial Sequence
  Description of Artificial Sequence: Synthetic oligonucleotide
  Sense strand starting at position 85 of SEQ ID NO: 1242569
guuaauugggaacgugaua

SEQ ID NO: 1357681 - RNA, 19 nt, Artificial Sequence
  Description of Artificial Sequence: Synthetic oligonucleotide
  Antisense strand to SEQ ID NO: 1357680
uaucacguucccaauuaac

SEQ ID NO: 1357682 - RNA, 19 nt, Artificial Sequence
  Description of Artificial Sequence: Synthetic oligonucleotide
  Sense strand starting at position 376 of SEQ ID NO: 1242569
auaagagcuuaugucuauu

SEQ ID NO: 1357683 - RNA, 19 nt, Artificial Sequence
  Description of Artificial Sequence: Synthetic oligonucleotide
  Antisense strand to SEQ ID NO: 1357682
aauagacauaagcucuuau

SEQ ID NO: 1357684 - RNA, 19 nt, Artificial Sequence
  Description of Artificial Sequence: Synthetic oligonucleotide
  Sense strand starting at position 701 of SEQ ID NO: 1242569
ggcuaucagucuucuccau

SEQ ID NO: 1357685 - RNA, 19 nt, Artificial Sequence
  Description of Artificial Sequence: Synthetic oligonucleotide
  Antisense strand to SEQ ID NO: 1357684
auggagaagacugauagcc

SEQ ID NO: 1357686 - RNA, 19 nt, Artificial Sequence
  Description of Artificial Sequence: Synthetic oligonucleotide
  Sense strand starting at position 727 of SEQ ID NO: 1242569
gaauuagaguccuuaguau

SEQ ID NO: 1357687 - RNA, 19 nt, Artificial Sequence
  Description of Artificial Sequence: Synthetic oligonucleotide
  Antisense strand to SEQ ID NO: 1357686
auacuaaggacucuaauuc

SEQ ID NO: 1357688 - RNA, 19 nt, Artificial Sequence
  Description of Artificial Sequence: Synthetic oligonucleotide
  Sense strand starting at position 1151 of SEQ ID NO: 1242569
ggaagcauccaguacggaa

SEQ ID NO: 1357689 - RNA, 19 nt, Artificial Sequence
  Description of Artificial Sequence: Synthetic oligonucleotide
  Antisense strand to SEQ ID NO: 1357688
uuccguacuggaugcuucc

SEQ ID NO: 1357690 - RNA, 19 nt, Artificial Sequence
  Description of Artificial Sequence: Synthetic oligonucleotide
  Sense strand starting at position 1667 of SEQ ID NO: 1242569
cccaguguuuccuccuaag

SEQ ID NO: 1357691 - RNA, 19 nt, Artificial Sequence
  Description of Artificial Sequence: Synthetic oligonucleotide
  Antisense strand to SEQ ID NO: 1357690
cuuaggaggaaacacuggg

SEQ ID NO: 1357692 - RNA, 19 nt, Artificial Sequence
  Description of Artificial Sequence: Synthetic oligonucleotide
  Sense strand starting at position 1679 of SEQ ID NO: 1242569
uccuaagacuuggcaggua

SEQ ID NO: 1357693 - RNA, 19 nt, Artificial Sequence
  Description of Artificial Sequence: Synthetic oligonucleotide
  Antisense strand to SEQ ID NO: 1357692
uaccugccaagucuuagga

SEQ ID NO: 1357694 - RNA, 19 nt, Artificial Sequence
  Description of Artificial Sequence: Synthetic oligonucleotide
  Sense strand starting at position 1780 of SEQ ID NO: 1242569
ugagguuaucauggauuau

SEQ ID NO: 1357695 - RNA, 19 nt, Artificial Sequence
  Description of Artificial Sequence: Synthetic oligonucleotide
  Antisense strand to SEQ ID NO: 1357694
auaauccaugauaaccuca

SEQ ID NO: 1357696 - RNA, 19 nt, Artificial Sequence
  Description of Artificial Sequence: Synthetic oligonucleotide
  Sense strand starting at position 1808 of SEQ ID NO: 1242569
agcccauuccuugaaacag

SEQ ID NO: 1357697 - RNA, 19 nt, Artificial Sequence
  Description of Artificial Sequence: Synthetic oligonucleotide
  Antisense strand to SEQ ID NO: 1357696
cuguuucaaggaaugggcu

SEQ ID NO: 1357698 - RNA, 19 nt, Artificial Sequence
  Description of Artificial Sequence: Synthetic oligonucleotide
  Sense strand starting at position 1848 of SEQ ID NO: 1242569
caggaugucuuucuggaga

SEQ ID NO: 1357699 - RNA, 19 nt, Artificial Sequence
  Description of Artificial Sequence: Synthetic oligonucleotide
  Antisense strand to SEQ ID NO: 1357698
ucuccagaaagacauccug

SEQ ID NO: 1357700 - RNA, 19 nt, Artificial Sequence
  Description of Artificial Sequence: Synthetic oligonucleotide
  Sense strand starting at position 1853 of SEQ ID NO: 1242569
ugucuuucuggagagagcu

SEQ ID NO: 1357701 - RNA, 19 nt, Artificial Sequence
  Description of Artificial Sequence: Synthetic oligonucleotide
  Antisense strand to SEQ ID NO: 1357700
agcucucuccagaaagaca

SEQ ID NO: 1357702 - RNA, 19 nt, Artificial Sequence
  Description of Artificial Sequence: Synthetic oligonucleotide
  Sense strand starting at position 1982 of SEQ ID NO: 1242569
ucagcuaaucauugacagu

SEQ ID NO: 1357703 - RNA, 19 nt, Artificial Sequence
  Description of Artificial Sequence: Synthetic oligonucleotide
  Antisense strand to SEQ ID NO: 1357702
acugucaaugauuagcuga

SEQ ID NO: 1357704 - RNA, 19 nt, Artificial Sequence
  Description of Artificial Sequence: Synthetic oligonucleotide
  Sense strand starting at position 2111 of SEQ ID NO: 1242569
gggcaugaagcagguuuau

SEQ ID NO: 1357705 - RNA, 19 nt, Artificial Sequence
  Description of Artificial Sequence: Synthetic oligonucleotide
  Antisense strand to SEQ ID NO: 1357704
auaaaccugcuucaugccc

SEQ ID NO: 1357706 - RNA, 19 nt, Artificial Sequence
  Description of Artificial Sequence: Synthetic oligonucleotide
  Sense strand starting at position 2121 of SEQ ID NO: 1242569
cagguuuaugcccaggacu

SEQ ID NO: 1357707 - RNA, 19 nt, Artificial Sequence
  Description of Artificial Sequence: Synthetic oligonucleotide
  Antisense strand to SEQ ID NO: 1357706
aguccugggcauaaaccug

SEQ ID NO: 1357708 - RNA, 19 nt, Artificial Sequence
  Description of Artificial Sequence: Synthetic oligonucleotide
  Sense strand starting at position 2123 of SEQ ID NO: 1242569
gguuuaugcccaggacuga

SEQ ID NO: 1357709 - RNA, 19 nt, Artificial Sequence
  Description of Artificial Sequence: Synthetic oligonucleotide
  Antisense strand to SEQ ID NO: 1357708
ucaguccugggcauaaacc

SEQ ID NO: 1357710 - RNA, 19 nt, Artificial Sequence
  Description of Artificial Sequence: Synthetic oligonucleotide
  Sense strand starting at position 2181 of SEQ ID NO: 1242569
cucacauaggcuugaugaa

SEQ ID NO: 1357711 - RNA, 19 nt, Artificial Sequence
  Description of Artificial Sequence: Synthetic oligonucleotide
  Antisense strand to SEQ ID NO: 1357710
uucaucaagccuaugugag

SEQ ID NO: 1357712 - RNA, 19 nt, Artificial Sequence
  Description of Artificial Sequence: Synthetic oligonucleotide
  Sense strand starting at position 2471 of SEQ ID NO: 1242569
cuaagagguugaucacauc

SEQ ID NO: 1357713 - RNA, 19 nt, Artificial Sequence
  Description of Artificial Sequence: Synthetic oligonucleotide
  Antisense strand to SEQ ID NO: 1357712
gaugugaucaaccucuuag

SEQ ID NO: 1357714 - RNA, 19 nt, Artificial Sequence
  Description of Artificial Sequence: Synthetic oligonucleotide
  Sense strand starting at position 2602 of SEQ ID NO: 1242569
uucucacauggaugugaaa

SEQ ID NO: 1357715 - RNA, 19 nt, Artificial Sequence
  Description of Artificial Sequence: Synthetic oligonucleotide
  Antisense strand to SEQ ID NO: 1357714
uuucacauccaugugagaa

SEQ ID NO: 1357716 - RNA, 19 nt, Artificial Sequence
  Description of Artificial Sequence: Synthetic oligonucleotide
  Sense strand starting at position 2832 of SEQ ID NO: 1242569
aucuaucgugcucaagcaa

SEQ ID NO: 1357717 - RNA, 19 nt, Artificial Sequence
  Description of Artificial Sequence: Synthetic oligonucleotide
  Antisense strand to SEQ ID NO: 1357716
uugcuugagcacgauagau

SEQ ID NO: 1357718 - RNA, 19 nt, Artificial Sequence
  Description of Artificial Sequence: Synthetic oligonucleotide
  Sense strand starting at position 3034 of SEQ ID NO: 1242569
uggccaacauugucuuaua

SEQ ID NO: 1357719 - RNA, 19 nt, Artificial Sequence
  Description of Artificial Sequence: Synthetic oligonucleotide
  Antisense strand to SEQ ID NO: 1357718
uauaagacaauguuggcca

SEQ ID NO: 1357720 - RNA, 19 nt, Artificial Sequence
  Description of Artificial Sequence: Synthetic oligonucleotide
  Sense strand starting at position 3044 of SEQ ID NO: 1242569
ugucuuauagcugguauca

SEQ ID NO: 1357721 - RNA, 19 nt, Artificial Sequence
  Description of Artificial Sequence: Synthetic oligonucleotide
  Antisense strand to SEQ ID NO: 1357720
ugauaccagcuauaagaca

SEQ ID NO: 1357722 - RNA, 19 nt, Artificial Sequence
  Description of Artificial Sequence: Synthetic oligonucleotide
  Sense strand starting at position 3075 of SEQ ID NO: 1242569
gcucucucaggcuagaguu

SEQ ID NO: 1357723 - RNA, 19 nt, Artificial Sequence
  Description of Artificial Sequence: Synthetic oligonucleotide
  Antisense strand to SEQ ID NO: 1357722
aacucuagccugagagagc

SEQ ID NO: 1357724 - RNA, 19 nt, Artificial Sequence
  Description of Artificial Sequence: Synthetic oligonucleotide
  Sense strand starting at position 3081 of SEQ ID NO: 1242569
ucaggcuagaguugcaaau

SEQ ID NO: 1357725 - RNA, 19 nt, Artificial Sequence
  Description of Artificial Sequence: Synthetic oligonucleotide
  Antisense strand to SEQ ID NO: 1357724
auuugcaacucuagccuga

SEQ ID NO: 1357726 - RNA, 19 nt, Artificial Sequence
  Description of Artificial Sequence: Synthetic oligonucleotide
  Sense strand starting at position 3092 of SEQ ID NO: 1242569
uugcaaauuggugauccua

SEQ ID NO: 1357727 - RNA, 19 nt, Artificial Sequence
  Description of Artificial Sequence: Synthetic oligonucleotide
  Antisense strand to SEQ ID NO: 1357726
uaggaucaccaauuugcaa

SEQ ID NO: 1357728 - RNA, 19 nt, Artificial Sequence
  Description of Artificial Sequence: Synthetic oligonucleotide
  Sense strand starting at position 3094 of SEQ ID NO: 1242569
gcaaauuggugauccuaca

SEQ ID NO: 1357729 - RNA, 19 nt, Artificial Sequence
  Description of Artificial Sequence: Synthetic oligonucleotide
  Antisense strand to SEQ ID NO: 1357728
uguaggaucaccaauuugc

SEQ ID NO: 1357730 - RNA, 19 nt, Artificial Sequence
  Description of Artificial Sequence: Synthetic oligonucleotide
  Sense strand starting at position 3167 of SEQ ID NO: 1242569
gagggaauucuuuguagag

SEQ ID NO: 1357731 - RNA, 19 nt, Artificial Sequence
  Description of Artificial Sequence: Synthetic oligonucleotide
  Antisense strand to SEQ ID NO: 1357730
cucuacaaagaauucccuc

SEQ ID NO: 1357732 - RNA, 19 nt, Artificial Sequence
  Description of Artificial Sequence: Synthetic oligonucleotide
  Sense strand starting at position 3174 of SEQ ID NO: 1242569
uucuuuguagaggaucuua

SEQ ID NO: 1357733 - RNA, 19 nt, Artificial Sequence
  Description of Artificial Sequence: Synthetic oligonucleotide
  Antisense strand to SEQ ID NO: 1357732
uaagauccucuacaaagaa

SEQ ID NO: 1357734 - RNA, 19 nt, Artificial Sequence
  Description of Artificial Sequence: Synthetic oligonucleotide
  Sense strand starting at position 3185 of SEQ ID NO: 1242569
ggaucuuaccaccaagcau

SEQ ID NO: 1357735 - RNA, 19 nt, Artificial Sequence
  Description of Artificial Sequence: Synthetic oligonucleotide
  Antisense strand to SEQ ID NO: 1357734
augcuuggugguaagaucc

SEQ ID NO: 1357736 - RNA, 19 nt, Artificial Sequence
  Description of Artificial Sequence: Synthetic oligonucleotide
  Sense strand starting at position 3239 of SEQ ID NO: 1242569
auaccauucugucuuuguu

SEQ ID NO: 1357737 - RNA, 19 nt, Artificial Sequence
  Description of Artificial Sequence: Synthetic oligonucleotide
  Antisense strand to SEQ ID NO: 1357736
aacaaagacagaaugguau

SEQ ID NO: 1357738 - RNA, 19 nt, Artificial Sequence
  Description of Artificial Sequence: Synthetic oligonucleotide
  Sense strand starting at position 3354 of SEQ ID NO: 1242569
uuggucaugcuuuagcaga

SEQ ID NO: 1357739 - RNA, 19 nt, Artificial Sequence
  Description of Artificial Sequence: Synthetic oligonucleotide
  Antisense strand to SEQ ID NO: 1357738
ucugcuaaagcaugaccaa

SEQ ID NO: 1357740 - RNA, 19 nt, Artificial Sequence
  Description of Artificial Sequence: Synthetic oligonucleotide
  Sense strand starting at position 3390 of SEQ ID NO: 1242569
uuggacuccucuccugaaa

SEQ ID NO: 1357741 - RNA, 19 nt, Artificial Sequence
  Description of Artificial Sequence: Synthetic oligonucleotide
  Antisense strand to SEQ ID NO: 1357740
uuucaggagaggaguccaa

SEQ ID NO: 1357742 - RNA, 19 nt, Artificial Sequence
  Description of Artificial Sequence: Synthetic oligonucleotide
  Sense strand starting at position 3430 of SEQ ID NO: 1242569
cuaugugcaggcugauaau

SEQ ID NO: 1357743 - RNA, 19 nt, Artificial Sequence
  Description of Artificial Sequence: Synthetic oligonucleotide
  Antisense strand to SEQ ID NO: 1357742
auuaucagccugcacauag

SEQ ID NO: 1357744 - RNA, 19 nt, Artificial Sequence
  Description of Artificial Sequence: Synthetic oligonucleotide
  Sense strand starting at position 3439 of SEQ ID NO: 1242569
ggcugauaauuauccaaau

SEQ ID NO: 1357745 - RNA, 19 nt, Artificial Sequence
  Description of Artificial Sequence: Synthetic oligonucleotide
  Antisense strand to SEQ ID NO: 1357744
auuuggauaauuaucagcc

SEQ ID NO: 1357746 - RNA, 19 nt, Artificial Sequence
  Description of Artificial Sequence: Synthetic oligonucleotide
  Sense strand starting at position 3493 of SEQ ID NO: 1242569
ggcuuuaggucauuccuuu

SEQ ID NO: 1357747 - RNA, 19 nt, Artificial Sequence
  Description of Artificial Sequence: Synthetic oligonucleotide
  Antisense strand to SEQ ID NO: 1357746
aaaggaaugaccuaaagcc

SEQ ID NO: 1357748 - RNA, 19 nt, Artificial Sequence
  Description of Artificial Sequence: Synthetic oligonucleotide
  Sense strand starting at position 3661 of SEQ ID NO: 1242569
aguucuuugcuacagagua

SEQ ID NO: 1357749 - RNA, 19 nt, Artificial Sequence
  Description of Artificial Sequence: Synthetic oligonucleotide
  Antisense strand to SEQ ID NO: 1357748
uacucuguagcaaagaacu

SEQ ID NO: 1357750 - RNA, 19 nt, Artificial Sequence
  Description of Artificial Sequence: Synthetic oligonucleotide
  Sense strand starting at position 3674 of SEQ ID NO: 1242569
agaguaacaugggugaauu

SEQ ID NO: 1357751 - RNA, 19 nt, Artificial Sequence
  Description of Artificial Sequence: Synthetic oligonucleotide
  Antisense strand to SEQ ID NO: 1357750
aauucacccauguuacucu

SEQ ID NO: 1357752 - RNA, 19 nt, Artificial Sequence
  Description of Artificial Sequence: Synthetic oligonucleotide
  Sense strand starting at position 3697 of SEQ ID NO: 1242569
uccagcuuccaaugaguuu

SEQ ID NO: 1357753 - RNA, 19 nt, Artificial Sequence
  Description of Artificial Sequence: Synthetic oligonucleotide
  Antisense strand to SEQ ID NO: 1357752
aaacucauuggaagcugga

SEQ ID NO: 1357754 - RNA, 19 nt, Artificial Sequence
  Description of Artificial Sequence: Synthetic oligonucleotide
  Sense strand starting at position 3745 of SEQ ID NO: 1242569
gccuguacugucuauauuu

SEQ ID NO: 1357755 - RNA, 19 nt, Artificial Sequence
  Description of Artificial Sequence: Synthetic oligonucleotide
  Antisense strand to SEQ ID NO: 1357754
aaauauagacaguacaggc

SEQ ID NO: 1357756 - RNA, 19 nt, Artificial Sequence
  Description of Artificial Sequence: Synthetic oligonucleotide
  Sense strand starting at position 3834 of SEQ ID NO: 1242569
cugaaagcugacugaggua

SEQ ID NO: 1357757 - RNA, 19 nt, Artificial Sequence
  Description of Artificial Sequence: Synthetic oligonucleotide
  Antisense strand to SEQ ID NO: 1357756
uaccucagucagcuuucag

SEQ ID NO: 1357758 - RNA, 19 nt, Artificial Sequence
  Description of Artificial Sequence: Synthetic oligonucleotide
  Sense strand starting at position 66 of SEQ ID NO: 1242570
ugugauguuacgcaagaaa

SEQ ID NO: 1357759 - RNA, 19 nt, Artificial Sequence
  Description of Artificial Sequence: Synthetic oligonucleotide
  Antisense strand to SEQ ID NO: 1357758
uuucuugcguaacaucaca

SEQ ID NO: 1357760 - RNA, 19 nt, Artificial Sequence
  Description of Artificial Sequence: Synthetic oligonucleotide
  Sense strand starting at position 122 of SEQ ID NO: 1242570
ggucucucuagggacguaa

SEQ ID NO: 1357761 - RNA, 19 nt, Artificial Sequence
  Description of Artificial Sequence: Synthetic oligonucleotide
  Antisense strand to SEQ ID NO: 1357760
uuacgucccuagagagacc

SEQ ID NO: 1357762 - RNA, 19 nt, Artificial Sequence
  Description of Artificial Sequence: Synthetic oligonucleotide
  Sense strand starting at position 126 of SEQ ID NO: 1242570
ucucuagggacguaacauu

SEQ ID NO: 1357763 - RNA, 19 nt, Artificial Sequence
  Description of Artificial Sequence: Synthetic oligonucleotide
  Antisense strand to SEQ ID NO: 1357762
aauguuacgucccuagaga

SEQ ID NO: 1357764 - RNA, 19 nt, Artificial Sequence
  Description of Artificial Sequence: Synthetic oligonucleotide
  Sense strand starting at position 304 of SEQ ID NO: 1242570
augccagaccuguacuaaa

SEQ ID NO: 1357765 - RNA, 19 nt, Artificial Sequence
  Description of Artificial Sequence: Synthetic oligonucleotide
  Antisense strand to SEQ ID NO: 1357764
uuuaguacaggucuggcau

SEQ ID NO: 1357766 - RNA, 19 nt, Artificial Sequence
  Description of Artificial Sequence: Synthetic oligonucleotide
  Sense strand starting at position 751 of SEQ ID NO: 1242570
gagauaacuuucccagggu

SEQ ID NO: 1357767 - RNA, 19 nt, Artificial Sequence
  Description of Artificial Sequence: Synthetic oligonucleotide
  Antisense strand to SEQ ID NO: 1357766
acccugggaaaguuaucuc

SEQ ID NO: 1357768 - RNA, 19 nt, Artificial Sequence
  Description of Artificial Sequence: Synthetic oligonucleotide
  Sense strand starting at position 755 of SEQ ID NO: 1242570
uaacuuucccagggugacu

SEQ ID NO: 1357769 - RNA, 19 nt, Artificial Sequence
  Description of Artificial Sequence: Synthetic oligonucleotide
  Antisense strand to SEQ ID NO: 1357768
agucacccugggaaaguua

SEQ ID NO: 1357770 - RNA, 19 nt, Artificial Sequence
  Description of Artificial Sequence: Synthetic oligonucleotide
  Sense strand starting at position 950 of SEQ ID NO: 1242570
cccucuaaguauccaagua

SEQ ID NO: 1357771 - RNA, 19 nt, Artificial Sequence
  Description of Artificial Sequence: Synthetic oligonucleotide
  Antisense strand to SEQ ID NO: 1357770
uacuuggauacuuagaggg

SEQ ID NO: 1357772 - RNA, 19 nt, Artificial Sequence
  Description of Artificial Sequence: Synthetic oligonucleotide
  Sense strand starting at position 1133 of SEQ ID NO: 1242570
uucccaaaguuuccuggaa

SEQ ID NO: 1357773 - RNA, 19 nt, Artificial Sequence
  Description of Artificial Sequence: Synthetic oligonucleotide
  Antisense strand to SEQ ID NO: 1357772
uuccaggaaacuuugggaa

SEQ ID NO: 1357774 - RNA, 19 nt, Artificial Sequence
  Description of Artificial Sequence: Synthetic oligonucleotide
  Sense strand starting at position 1148 of SEQ ID NO: 1242570
ggaaguaauuuacauacuu

SEQ ID NO: 1357775 - RNA, 19 nt, Artificial Sequence
  Description of Artificial Sequence: Synthetic oligonucleotide
  Antisense strand to SEQ ID NO: 1357774
aaguauguaaauuacuucc

SEQ ID NO: 1357776 - RNA, 19 nt, Artificial Sequence
  Description of Artificial Sequence: Synthetic oligonucleotide
  Sense strand starting at position 1161 of SEQ ID NO: 1242570
auacuuucuggaugaugca

SEQ ID NO: 1357777 - RNA, 19 nt, Artificial Sequence
  Description of Artificial Sequence: Synthetic oligonucleotide
  Antisense strand to SEQ ID NO: 1357776
ugcaucauccagaaaguau

SEQ ID NO: 1357778 - RNA, 19 nt, Artificial Sequence
  Description of Artificial Sequence: Synthetic oligonucleotide
  Sense strand starting at position 1717 of SEQ ID NO: 1242570
gagaaauucugagagaaac

SEQ ID NO: 1357779 - RNA, 19 nt, Artificial Sequence
  Description of Artificial Sequence: Synthetic oligonucleotide
  Antisense strand to SEQ ID NO: 1357778
guuucucucagaauuucuc

SEQ ID NO: 1357780 - RNA, 19 nt, Artificial Sequence
  Description of Artificial Sequence: Synthetic oligonucleotide
  Sense strand starting at position 1854 of SEQ ID NO: 1242570
ugagguacucacuaguuaa

SEQ ID NO: 1357781 - RNA, 19 nt, Artificial Sequence
  Description of Artificial Sequence: Synthetic oligonucleotide
  Antisense strand to SEQ ID NO: 1357780
uuaacuagugaguaccuca

SEQ ID NO: 1357782 - RNA, 19 nt, Artificial Sequence
  Description of Artificial Sequence: Synthetic oligonucleotide
  Sense strand starting at position 1857 of SEQ ID NO: 1242570
gguacucacuaguuaacag

SEQ ID NO: 1357783 - RNA, 19 nt, Artificial Sequence
  Description of Artificial Sequence: Synthetic oligonucleotide
  Antisense strand to SEQ ID NO: 1357782
cuguuaacuagugaguacc

SEQ ID NO: 1357784 - RNA, 19 nt, Artificial Sequence
  Description of Artificial Sequence: Synthetic oligonucleotide
  Sense strand starting at position 2027 of SEQ ID NO: 1242570
uuuccuugauugguggaga

SEQ ID NO: 1357785 - RNA, 19 nt, Artificial Sequence
  Description of Artificial Sequence: Synthetic oligonucleotide
  Antisense strand to SEQ ID NO: 1357784
ucuccaccaaucaaggaaa

SEQ ID NO: 1357786 - RNA, 19 nt, Artificial Sequence
  Description of Artificial Sequence: Synthetic oligonucleotide
  Sense strand starting at position 2063 of SEQ ID NO: 1242570
caagcucugggcuaaaguu

SEQ ID NO: 1357787 - RNA, 19 nt, Artificial Sequence
  Description of Artificial Sequence: Synthetic oligonucleotide
  Antisense strand to SEQ ID NO: 1357786
aacuuuagcccagagcuug

SEQ ID NO: 1357788 - RNA, 19 nt, Artificial Sequence
  Description of Artificial Sequence: Synthetic oligonucleotide
  Sense strand starting at position 2110 of SEQ ID NO: 1242570
gguaaugauuuacagaaac

SEQ ID NO: 1357789 - RNA, 19 nt, Artificial Sequence
  Description of Artificial Sequence: Synthetic oligonucleotide
  Antisense strand to SEQ ID NO: 1357788
guuucuguaaaucauuacc

SEQ ID NO: 1357790 - RNA, 19 nt, Artificial Sequence
  Description of Artificial Sequence: Synthetic oligonucleotide
  Sense strand starting at position 2173 of SEQ ID NO: 1242570
gaaaguguccaaggaguug

SEQ ID NO: 1357791 - RNA, 19 nt, Artificial Sequence
  Description of Artificial Sequence: Synthetic oligonucleotide
  Antisense strand to SEQ ID NO: 1357790
caacuccuuggacacuuuc

SEQ ID NO: 1357792 - RNA, 19 nt, Artificial Sequence
  Description of Artificial Sequence: Synthetic oligonucleotide
  Sense strand starting at position 2184 of SEQ ID NO: 1242570
aggaguugccgaagugguu

SEQ ID NO: 1357793 - RNA, 19 nt, Artificial Sequence
  Description of Artificial Sequence: Synthetic oligonucleotide
  Antisense strand to SEQ ID NO: 1357792
aaccacuucggcaacuccu

SEQ ID NO: 1357794 - RNA, 19 nt, Artificial Sequence
  Description of Artificial Sequence: Synthetic oligonucleotide
  Sense strand starting at position 2198 of SEQ ID NO: 1242570
ugguuaguucuguaaaggg

SEQ ID NO: 1357795 - RNA, 19 nt, Artificial Sequence
  Description of Artificial Sequence: Synthetic oligonucleotide
  Antisense strand to SEQ ID NO: 1357794
cccuuuacagaacuaacca

SEQ ID NO: 1357796 - RNA, 19 nt, Artificial Sequence
  Description of Artificial Sequence: Synthetic oligonucleotide
  Sense strand starting at position 2339 of SEQ ID NO: 1242570
ugcguuuaucugucgaagu

SEQ ID NO: 1357797 - RNA, 19 nt, Artificial Sequence
  Description of Artificial Sequence: Synthetic oligonucleotide
  Antisense strand to SEQ ID NO: 1357796
acuucgacagauaaacgca

SEQ ID NO: 1357798 - RNA, 19 nt, Artificial Sequence
  Description of Artificial Sequence: Synthetic oligonucleotide
  Sense strand starting at position 2458 of SEQ ID NO: 1242570
caaggaguuguaugaucug

SEQ ID NO: 1357799 - RNA, 19 nt, Artificial Sequence
  Description of Artificial Sequence: Synthetic oligonucleotide
  Antisense strand to SEQ ID NO: 1357798
cagaucauacaacuccuug

SEQ ID NO: 1357800 - RNA, 19 nt, Artificial Sequence
  Description of Artificial Sequence: Synthetic oligonucleotide
  Sense strand starting at position 2611 of SEQ ID NO: 1242570
cuggaacucuuuccucaga

SEQ ID NO: 1357801 - RNA, 19 nt, Artificial Sequence
  Description of Artificial Sequence: Synthetic oligonucleotide
  Antisense strand to SEQ ID NO: 1357800
ucugaggaaagaguuccag

SEQ ID NO: 1357802 - RNA, 19 nt, Artificial Sequence
  Description of Artificial Sequence: Synthetic oligonucleotide
  Sense strand starting at position 2612 of SEQ ID NO: 1242570
uggaacucuuuccucagau

SEQ ID NO: 1357803 - RNA, 19 nt, Artificial Sequence
  Description of Artificial Sequence: Synthetic oligonucleotide
  Antisense strand to SEQ ID NO: 1357802
aucugaggaaagaguucca

SEQ ID NO: 1357804 - RNA, 19 nt, Artificial Sequence
  Description of Artificial Sequence: Synthetic oligonucleotide
  Sense strand starting at position 2613 of SEQ ID NO: 1242570
ggaacucuuuccucagaua

SEQ ID NO: 1357805 - RNA, 19 nt, Artificial Sequence
  Description of Artificial Sequence: Synthetic oligonucleotide
  Antisense strand to SEQ ID NO: 1357804
uaucugaggaaagaguucc

SEQ ID NO: 1357806 - RNA, 19 nt, Artificial Sequence
  Description of Artificial Sequence: Synthetic oligonucleotide
  Sense strand starting at position 2658 of SEQ ID NO: 1242570
ugaggugucuuauuaaaua

SEQ ID NO: 1357807 - RNA, 19 nt, Artificial Sequence
  Description of Artificial Sequence: Synthetic oligonucleotide
  Antisense strand to SEQ ID NO: 1357806
uauuuaauaagacaccuca

SEQ ID NO: 1357808 - RNA, 19 nt, Artificial Sequence
  Description of Artificial Sequence: Synthetic oligonucleotide
  Sense strand starting at position 2847 of SEQ ID NO: 1242570
aguugauggauaugugaau

SEQ ID NO: 1357809 - RNA, 19 nt, Artificial Sequence
  Description of Artificial Sequence: Synthetic oligonucleotide
  Antisense strand to SEQ ID NO: 1357808
auucacauauccaucaacu

SEQ ID NO: 1357810 - RNA, 19 nt, Artificial Sequence
  Description of Artificial Sequence: Synthetic oligonucleotide
  Sense strand starting at position 2848 of SEQ ID NO: 1242570
guugauggauaugugaaua

SEQ ID NO: 1357811 - RNA, 19 nt, Artificial Sequence
  Description of Artificial Sequence: Synthetic oligonucleotide
  Antisense strand to SEQ ID NO: 1357810
uauucacauauccaucaac

SEQ ID NO: 1357812 - RNA, 19 nt, Artificial Sequence
  Description of Artificial Sequence: Synthetic oligonucleotide
  Sense strand starting at position 2979 of SEQ ID NO: 1242570
guguaaucacauuaccugu

SEQ ID NO: 1357813 - RNA, 19 nt, Artificial Sequence
  Description of Artificial Sequence: Synthetic oligonucleotide
  Antisense strand to SEQ ID NO: 1357812
acagguaaugugauuacac

SEQ ID NO: 1357814 - RNA, 19 nt, Artificial Sequence
  Description of Artificial Sequence: Synthetic oligonucleotide
  Sense strand starting at position 2981 of SEQ ID NO: 1242570
guaaucacauuaccuguaa

SEQ ID NO: 1357815 - RNA, 19 nt, Artificial Sequence
  Description of Artificial Sequence: Synthetic oligonucleotide
  Antisense strand to SEQ ID NO: 1357814
uuacagguaaugugauuac

SEQ ID NO: 1357816 - RNA, 19 nt, Artificial Sequence
  Description of Artificial Sequence: Synthetic oligonucleotide
  Sense strand starting at position 3078 of SEQ ID NO: 1242570
gagugucuagcucuacguu

SEQ ID NO: 1357817 - RNA, 19 nt, Artificial Sequence
  Description of Artificial Sequence: Synthetic oligonucleotide
  Antisense strand to SEQ ID NO: 1357816
aacguagagcuagacacuc

SEQ ID NO: 1357818 - RNA, 19 nt, Artificial Sequence
  Description of Artificial Sequence: Synthetic oligonucleotide
  Sense strand starting at position 3088 of SEQ ID NO: 1242570
cucuacguugaauaagagu

SEQ ID NO: 1357819 - RNA, 19 nt, Artificial Sequence
  Description of Artificial Sequence: Synthetic oligonucleotide
  Antisense strand to SEQ ID NO: 1357818
acucuuauucaacguagag

SEQ ID NO: 1357820 - RNA, 19 nt, Artificial Sequence
  Description of Artificial Sequence: Synthetic oligonucleotide
  Sense strand starting at position 3165 of SEQ ID NO: 1242570
caugguuagguacaauauu

SEQ ID NO: 1357821 - RNA, 19 nt, Artificial Sequence
  Description of Artificial Sequence: Synthetic oligonucleotide
  Antisense strand to SEQ ID NO: 1357820
aauauuguaccuaaccaug

SEQ ID NO: 1357822 - RNA, 19 nt, Artificial Sequence
  Description of Artificial Sequence: Synthetic oligonucleotide
  Sense strand starting at position 3408 of SEQ ID NO: 1242570
uugcuugguccuguuguau

SEQ ID NO: 1357823 - RNA, 19 nt, Artificial Sequence
  Description of Artificial Sequence: Synthetic oligonucleotide
  Antisense strand to SEQ ID NO: 1357822
auacaacaggaccaagcaa

SEQ ID NO: 1357824 - RNA, 19 nt, Artificial Sequence
  Description of Artificial Sequence: Synthetic oligonucleotide
  Sense strand starting at position 3443 of SEQ ID NO: 1242570
ugcugaauucuauaguuau

SEQ ID NO: 1357825 - RNA, 19 nt, Artificial Sequence
  Description of Artificial Sequence: Synthetic oligonucleotide
  Antisense strand to SEQ ID NO: 1357824
auaacuauagaauucagca

SEQ ID NO: 1357826 - RNA, 19 nt, Artificial Sequence
  Description of Artificial Sequence: Synthetic oligonucleotide
  Sense strand starting at position 3468 of SEQ ID NO: 1242570
ugacaaauuugagaacuuu

SEQ ID NO: 1357827 - RNA, 19 nt, Artificial Sequence
  Description of Artificial Sequence: Synthetic oligonucleotide
  Antisense strand to SEQ ID NO: 1357826
aaaguucucaaauuuguca

SEQ ID NO: 1357828 - RNA, 19 nt, Artificial Sequence
  Description of Artificial Sequence: Synthetic oligonucleotide
  Sense strand starting at position 3671 of SEQ ID NO: 1242570
ugauguuaagcucauuauu

SEQ ID NO: 1357829 - RNA, 19 nt, Artificial Sequence
  Description of Artificial Sequence: Synthetic oligonucleotide
  Antisense strand to SEQ ID NO: 1357828
aauaaugagcuuaacauca

SEQ ID NO: 1357830 - RNA, 19 nt, Artificial Sequence
  Description of Artificial Sequence: Synthetic oligonucleotide
  Sense strand starting at position 3673 of SEQ ID NO: 1242570
auguuaagcucauuauuag

SEQ ID NO: 1357831 - RNA, 19 nt, Artificial Sequence
  Description of Artificial Sequence: Synthetic oligonucleotide
  Antisense strand to SEQ ID NO: 1357830
cuaauaaugagcuuaacau

SEQ ID NO: 1357832 - RNA, 19 nt, Artificial Sequence
  Description of Artificial Sequence: Synthetic oligonucleotide
  Sense strand starting at position 3674 of SEQ ID NO: 1242570
uguuaagcucauuauuaga

SEQ ID NO: 1357833 - RNA, 19 nt, Artificial Sequence
  Description of Artificial Sequence: Synthetic oligonucleotide
  Antisense strand to SEQ ID NO: 1357832
ucuaauaaugagcuuaaca

SEQ ID NO: 1357834 - RNA, 19 nt, Artificial Sequence
  Description of Artificial Sequence: Synthetic oligonucleotide
  Sense strand starting at position 3676 of SEQ ID NO: 1242570
uuaagcucauuauuagaga

SEQ ID NO: 1357835 - RNA, 19 nt, Artificial Sequence
  Description of Artificial Sequence: Synthetic oligonucleotide
  Antisense strand to SEQ ID NO: 1357834
ucucuaauaaugagcuuaa

SEQ ID NO: 1357836 - RNA, 19 nt, Artificial Sequence
  Description of Artificial Sequence: Synthetic oligonucleotide
  Sense strand starting at position 3756 of SEQ ID NO: 1242570
ggugaauccauacggaucu

SEQ ID NO: 1357837 - RNA, 19 nt, Artificial Sequence
  Description of Artificial Sequence: Synthetic oligonucleotide
  Antisense strand to SEQ ID NO: 1357836
agauccguauggauucacc

SEQ ID NO: 1357838 - RNA, 19 nt, Artificial Sequence
  Description of Artificial Sequence: Synthetic oligonucleotide
  Sense strand starting at position 60 of SEQ ID NO: 1242571
uccugucugucaccaaaga

SEQ ID NO: 1357839 - RNA, 19 nt, Artificial Sequence
  Description of Artificial Sequence: Synthetic oligonucleotide
  Antisense strand to SEQ ID NO: 1357838
ucuuuggugacagacagga

SEQ ID NO: 1357840 - RNA, 19 nt, Artificial Sequence
  Description of Artificial Sequence: Synthetic oligonucleotide
  Sense strand starting at position 82 of SEQ ID NO: 1242571
gaaagagggcauugucaua

SEQ ID NO: 1357841 - RNA, 19 nt, Artificial Sequence
  Description of Artificial Sequence: Synthetic oligonucleotide
  Antisense strand to SEQ ID NO: 1357840
uaugacaaugcccucuuuc

SEQ ID NO: 1357842 - RNA, 19 nt, Artificial Sequence
  Description of Artificial Sequence: Synthetic oligonucleotide
  Sense strand starting at position 121 of SEQ ID NO: 1242571
acacauagguuaggagaaa

SEQ ID NO: 1357843 - RNA, 19 nt, Artificial Sequence
  Description of Artificial Sequence: Synthetic oligonucleotide
  Antisense strand to SEQ ID NO: 1357842
uuucuccuaaccuaugugu

SEQ ID NO: 1357844 - RNA, 19 nt, Artificial Sequence
  Description of Artificial Sequence: Synthetic oligonucleotide
  Sense strand starting at position 130 of SEQ ID NO: 1242571
uuaggagaaaccugugguu

SEQ ID NO: 1357845 - RNA, 19 nt, Artificial Sequence
  Description of Artificial Sequence: Synthetic oligonucleotide
  Antisense strand to SEQ ID NO: 1357844
aaccacagguuucuccuaa

SEQ ID NO: 1357846 - RNA, 19 nt, Artificial Sequence
  Description of Artificial Sequence: Synthetic oligonucleotide
  Sense strand starting at position 132 of SEQ ID NO: 1242571
aggagaaaccugugguuag

SEQ ID NO: 1357847 - RNA, 19 nt, Artificial Sequence
  Description of Artificial Sequence: Synthetic oligonucleotide
  Antisense strand to SEQ ID NO: 1357846
cuaaccacagguuucuccu

SEQ ID NO: 1357848 - RNA, 19 nt, Artificial Sequence
  Description of Artificial Sequence: Synthetic oligonucleotide
  Sense strand starting at position 161 of SEQ ID NO: 1242571
gacugugauccuuacugac

SEQ ID NO: 1357849 - RNA, 19 nt, Artificial Sequence
  Description of Artificial Sequence: Synthetic oligonucleotide
  Antisense strand to SEQ ID NO: 1357848
gucaguaaggaucacaguc

SEQ ID NO: 1357850 - RNA, 19 nt, Artificial Sequence
  Description of Artificial Sequence: Synthetic oligonucleotide
  Sense strand starting at position 163 of SEQ ID NO: 1242571
cugugauccuuacugacuu

SEQ ID NO: 1357851 - RNA, 19 nt, Artificial Sequence
  Description of Artificial Sequence: Synthetic oligonucleotide
  Antisense strand to SEQ ID NO: 1357850
aagucaguaaggaucacag

SEQ ID NO: 1357852 - RNA, 19 nt, Artificial Sequence
  Description of Artificial Sequence: Synthetic oligonucleotide
  Sense strand starting at position 219 of SEQ ID NO: 1242571
gugugauggucauuucucu

SEQ ID NO: 1357853 - RNA, 19 nt, Artificial Sequence
  Description of Artificial Sequence: Synthetic oligonucleotide
  Antisense strand to SEQ ID NO: 1357852
agagaaaugaccaucacac

SEQ ID NO: 1357854 - RNA, 19 nt, Artificial Sequence
  Description of Artificial Sequence: Synthetic oligonucleotide
  Sense strand starting at position 433 of SEQ ID NO: 1242571
gugagccaccugugcaauu

SEQ ID NO: 1357855 - RNA, 19 nt, Artificial Sequence
  Description of Artificial Sequence: Synthetic oligonucleotide
  Antisense strand to SEQ ID NO: 1357854
aauugcacagguggcucac

SEQ ID NO: 1357856 - RNA, 19 nt, Artificial Sequence
  Description of Artificial Sequence: Synthetic oligonucleotide
  Sense strand starting at position 481 of SEQ ID NO: 1242571
aguagaagcaggugagauu

SEQ ID NO: 1357857 - RNA, 19 nt, Artificial Sequence
  Description of Artificial Sequence: Synthetic oligonucleotide
  Antisense strand to SEQ ID NO: 1357856
aaucucaccugcuucuacu

SEQ ID NO: 1357858 - RNA, 19 nt, Artificial Sequence
  Description of Artificial Sequence: Synthetic oligonucleotide
  Sense strand starting at position 484 of SEQ ID NO: 1242571
agaagcaggugagauuuau

SEQ ID NO: 1357859 - RNA, 19 nt, Artificial Sequence
  Description of Artificial Sequence: Synthetic oligonucleotide
  Antisense strand to SEQ ID NO: 1357858
auaaaucucaccugcuucu

SEQ ID NO: 1357860 - RNA, 19 nt, Artificial Sequence
  Description of Artificial Sequence: Synthetic oligonucleotide
  Sense strand starting at position 626 of SEQ ID NO: 1242571
gguacuaaguccucacaau

SEQ ID NO: 1357861 - RNA, 19 nt, Artificial Sequence
  Description of Artificial Sequence: Synthetic oligonucleotide
  Antisense strand to SEQ ID NO: 1357860
auugugaggacuuaguacc

SEQ ID NO: 1357862 - RNA, 19 nt, Artificial Sequence
  Description of Artificial Sequence: Synthetic oligonucleotide
  Sense strand starting at position 627 of SEQ ID NO: 1242571
guacuaaguccucacaauc

SEQ ID NO: 1357863 - RNA, 19 nt, Artificial Sequence
  Description of Artificial Sequence: Synthetic oligonucleotide
  Antisense strand to SEQ ID NO: 1357862
gauugugaggacuuaguac

SEQ ID NO: 1357864 - RNA, 19 nt, Artificial Sequence
  Description of Artificial Sequence: Synthetic oligonucleotide
  Sense strand starting at position 1091 of SEQ ID NO: 1242571
uuuagugucuugcuacuca

SEQ ID NO: 1357865 - RNA, 19 nt, Artificial Sequence
  Description of Artificial Sequence: Synthetic oligonucleotide
  Antisense strand to SEQ ID NO: 1357864
ugaguagcaagacacuaaa

SEQ ID NO: 1357866 - RNA, 19 nt, Artificial Sequence
  Description of Artificial Sequence: Synthetic oligonucleotide
  Sense strand starting at position 1110 of SEQ ID NO: 1242571
aagugugaucuugggacca

SEQ ID NO: 1357867 - RNA, 19 nt, Artificial Sequence
  Description of Artificial Sequence: Synthetic oligonucleotide
  Antisense strand to SEQ ID NO: 1357866
uggucccaagaucacacuu

SEQ ID NO: 1357868 - RNA, 19 nt, Artificial Sequence
  Description of Artificial Sequence: Synthetic oligonucleotide
  Sense strand starting at position 1188 of SEQ ID NO: 1242571
agaugagucauaugcaugu

SEQ ID NO: 1357869 - RNA, 19 nt, Artificial Sequence
  Description of Artificial Sequence: Synthetic oligonucleotide
  Antisense strand to SEQ ID NO: 1357868
acaugcauaugacucaucu

SEQ ID NO: 1357870 - RNA, 19 nt, Artificial Sequence
  Description of Artificial Sequence: Synthetic oligonucleotide
  Sense strand starting at position 1192 of SEQ ID NO: 1242571
gagucauaugcauguuaaa

SEQ ID NO: 1357871 - RNA, 19 nt, Artificial Sequence
  Description of Artificial Sequence: Synthetic oligonucleotide
  Antisense strand to SEQ ID NO: 1357870
uuuaacaugcauaugacuc

SEQ ID NO: 1357872 - RNA, 19 nt, Artificial Sequence
  Description of Artificial Sequence: Synthetic oligonucleotide
  Sense strand starting at position 1235 of SEQ ID NO: 1242571
cugcgugugaccucaguuu

SEQ ID NO: 1357873 - RNA, 19 nt, Artificial Sequence
  Description of Artificial Sequence: Synthetic oligonucleotide
  Antisense strand to SEQ ID NO: 1357872
aaacugaggucacacgcag

SEQ ID NO: 1357874 - RNA, 19 nt, Artificial Sequence
  Description of Artificial Sequence: Synthetic oligonucleotide
  Sense strand starting at position 1396 of SEQ ID NO: 1242571
agugcuuagaggcauuauu

SEQ ID NO: 1357875 - RNA, 19 nt, Artificial Sequence
  Description of Artificial Sequence: Synthetic oligonucleotide
  Antisense strand to SEQ ID NO: 1357874
aauaaugccucuaagcacu

SEQ ID NO: 1357876 - RNA, 19 nt, Artificial Sequence
  Description of Artificial Sequence: Synthetic oligonucleotide
  Sense strand starting at position 1831 of SEQ ID NO: 1242571
agcugauaccuucgucuga

SEQ ID NO: 1357877 - RNA, 19 nt, Artificial Sequence
  Description of Artificial Sequence: Synthetic oligonucleotide
  Antisense strand to SEQ ID NO: 1357876
ucagacgaagguaucagcu

SEQ ID NO: 1357878 - RNA, 19 nt, Artificial Sequence
  Description of Artificial Sequence: Synthetic oligonucleotide
  Sense strand starting at position 1832 of SEQ ID NO: 1242571
gcugauaccuucgucugaa

SEQ ID NO: 1357879 - RNA, 19 nt, Artificial Sequence
  Description of Artificial Sequence: Synthetic oligonucleotide
  Antisense strand to SEQ ID NO: 1357878
uucagacgaagguaucagc

SEQ ID NO: 1357880 - RNA, 19 nt, Artificial Sequence
  Description of Artificial Sequence: Synthetic oligonucleotide
  Sense strand starting at position 1833 of SEQ ID NO: 1242571
cugauaccuucgucugaaa

SEQ ID NO: 1357881 - RNA, 19 nt, Artificial Sequence
  Description of Artificial Sequence: Synthetic oligonucleotide
  Antisense strand to SEQ ID NO: 1357880
uuucagacgaagguaucag

SEQ ID NO: 1357882 - RNA, 19 nt, Artificial Sequence
  Description of Artificial Sequence: Synthetic oligonucleotide
  Sense strand starting at position 2156 of SEQ ID NO: 1242571
gcccaaacugguggaugua

SEQ ID NO: 1357883 - RNA, 19 nt, Artificial Sequence
  Description of Artificial Sequence: Synthetic oligonucleotide
  Antisense strand to SEQ ID NO: 1357882
uacauccaccaguuugggc

SEQ ID NO: 1357884 - RNA, 19 nt, Artificial Sequence
  Description of Artificial Sequence: Synthetic oligonucleotide
  Sense strand starting at position 2191 of SEQ ID NO: 1242571
gucgccaucuaaucggaaa

SEQ ID NO: 1357885 - RNA, 19 nt, Artificial Sequence
  Description of Artificial Sequence: Synthetic oligonucleotide
  Antisense strand to SEQ ID NO: 1357884
uuuccgauuagauggcgac

SEQ ID NO: 1357886 - RNA, 19 nt, Artificial Sequence
  Description of Artificial Sequence: Synthetic oligonucleotide
  Sense strand starting at position 2536 of SEQ ID NO: 1242571
aggugcaauagugauaaua

SEQ ID NO: 1357887 - RNA, 19 nt, Artificial Sequence
  Description of Artificial Sequence: Synthetic oligonucleotide
  Antisense strand to SEQ ID NO: 1357886
uauuaucacuauugcaccu

SEQ ID NO: 1357888 - RNA, 19 nt, Artificial Sequence
  Description of Artificial Sequence: Synthetic oligonucleotide
  Sense strand starting at position 2641 of SEQ ID NO: 1242571
aaggcaucccuuugaaguc

SEQ ID NO: 1357889 - RNA, 19 nt, Artificial Sequence
  Description of Artificial Sequence: Synthetic oligonucleotide
  Antisense strand to SEQ ID NO: 1357888
gacuucaaagggaugccuu

SEQ ID NO: 1357890 - RNA, 19 nt, Artificial Sequence
  Description of Artificial Sequence: Synthetic oligonucleotide
  Sense strand starting at position 2657 of SEQ ID NO: 1242571
gucauagaauuguucuaaa

SEQ ID NO: 1357891 - RNA, 19 nt, Artificial Sequence
  Description of Artificial Sequence: Synthetic oligonucleotide
  Antisense strand to SEQ ID NO: 1357890
uuuagaacaauucuaugac

SEQ ID NO: 1357892 - RNA, 19 nt, Artificial Sequence
  Description of Artificial Sequence: Synthetic oligonucleotide
  Sense strand starting at position 2676 of SEQ ID NO: 1242571
uuuggauuguggucaugac

SEQ ID NO: 1357893 - RNA, 19 nt, Artificial Sequence
  Description of Artificial Sequence: Synthetic oligonucleotide
  Antisense strand to SEQ ID NO: 1357892
gucaugaccacaauccaaa

SEQ ID NO: 1357894 - RNA, 19 nt, Artificial Sequence
  Description of Artificial Sequence: Synthetic oligonucleotide
  Sense strand starting at position 2677 of SEQ ID NO: 1242571
uuggauuguggucaugacu

SEQ ID NO: 1357895 - RNA, 19 nt, Artificial Sequence
  Description of Artificial Sequence: Synthetic oligonucleotide
  Antisense strand to SEQ ID NO: 1357894
agucaugaccacaauccaa

SEQ ID NO: 1357896 - RNA, 19 nt, Artificial Sequence
  Description of Artificial Sequence: Synthetic oligonucleotide
  Sense strand starting at position 2683 of SEQ ID NO: 1242571
uguggucaugacugcagau

SEQ ID NO: 1357897 - RNA, 19 nt, Artificial Sequence
  Description of Artificial Sequence: Synthetic oligonucleotide
  Antisense strand to SEQ ID NO: 1357896
aucugcagucaugaccaca

SEQ ID NO: 1357898 - RNA, 19 nt, Artificial Sequence
  Description of Artificial Sequence: Synthetic oligonucleotide
  Sense strand starting at position 2692 of SEQ ID NO: 1242571
gacugcagaucucuguaaa

SEQ ID NO: 1357899 - RNA, 19 nt, Artificial Sequence
  Description of Artificial Sequence: Synthetic oligonucleotide
  Antisense strand to SEQ ID NO: 1357898
uuuacagagaucugcaguc

SEQ ID NO: 1357900 - RNA, 19 nt, Artificial Sequence
  Description of Artificial Sequence: Synthetic oligonucleotide
  Sense strand starting at position 2693 of SEQ ID NO: 1242571
acugcagaucucuguaaau

SEQ ID NO: 1357901 - RNA, 19 nt, Artificial Sequence
  Description of Artificial Sequence: Synthetic oligonucleotide
  Antisense strand to SEQ ID NO: 1357900
auuuacagagaucugcagu

SEQ ID NO: 1357902 - RNA, 19 nt, Artificial Sequence
  Description of Artificial Sequence: Synthetic oligonucleotide
  Sense strand starting at position 3123 of SEQ ID NO: 1242571
agccaaaguccugacgauu

SEQ ID NO: 1357903 - RNA, 19 nt, Artificial Sequence
  Description of Artificial Sequence: Synthetic oligonucleotide
  Antisense strand to SEQ ID NO: 1357902
aaucgucaggacuuuggcu

SEQ ID NO: 1357904 - RNA, 19 nt, Artificial Sequence
  Description of Artificial Sequence: Synthetic oligonucleotide
  Sense strand starting at position 3134 of SEQ ID NO: 1242571
ugacgauugccggguggga

SEQ ID NO: 1357905 - RNA, 19 nt, Artificial Sequence
  Description of Artificial Sequence: Synthetic oligonucleotide
  Antisense strand to SEQ ID NO: 1357904
ucccacccggcaaucguca

SEQ ID NO: 1357906 - RNA, 19 nt, Artificial Sequence
  Description of Artificial Sequence: Synthetic oligonucleotide
  Sense strand starting at position 3487 of SEQ ID NO: 1242571
caggaauuccugugagccu

SEQ ID NO: 1357907 - RNA, 19 nt, Artificial Sequence
  Description of Artificial Sequence: Synthetic oligonucleotide
  Antisense strand to SEQ ID NO: 1357906
aggcucacaggaauuccug

SEQ ID NO: 1357908 - RNA, 19 nt, Artificial Sequence
  Description of Artificial Sequence: Synthetic oligonucleotide
  Sense strand starting at position 3557 of SEQ ID NO: 1242571
uuguuuguucucugaaguu

SEQ ID NO: 1357909 - RNA, 19 nt, Artificial Sequence
  Description of Artificial Sequence: Synthetic oligonucleotide
  Antisense strand to SEQ ID NO: 1357908
aacuucagagaacaaacaa

SEQ ID NO: 1357910 - RNA, 19 nt, Artificial Sequence
  Description of Artificial Sequence: Synthetic oligonucleotide
  Sense strand starting at position 3656 of SEQ ID NO: 1242571
caugcaaugcguuagaauc

SEQ ID NO: 1357911 - RNA, 19 nt, Artificial Sequence
  Description of Artificial Sequence: Synthetic oligonucleotide
  Antisense strand to SEQ ID NO: 1357910
gauucuaacgcauugcaug

SEQ ID NO: 1357912 - RNA, 19 nt, Artificial Sequence
  Description of Artificial Sequence: Synthetic oligonucleotide
  Sense strand starting at position 3758 of SEQ ID NO: 1242571
uuagguguaugguuacauu

SEQ ID NO: 1357913 - RNA, 19 nt, Artificial Sequence
  Description of Artificial Sequence: Synthetic oligonucleotide
  Antisense strand to SEQ ID NO: 1357912
aauguaaccauacaccuaa

SEQ ID NO: 1357914 - RNA, 19 nt, Artificial Sequence
  Description of Artificial Sequence: Synthetic oligonucleotide
  Sense strand starting at position 3782 of SEQ ID NO: 1242571
ugaagauagucauccuauu

SEQ ID NO: 1357915 - RNA, 19 nt, Artificial Sequence
  Description of Artificial Sequence: Synthetic oligonucleotide
  Antisense strand to SEQ ID NO: 1357914
aauaggaugacuaucuuca

SEQ ID NO: 1357916 - RNA, 19 nt, Artificial Sequence
  Description of Artificial Sequence: Synthetic oligonucleotide
  Sense strand starting at position 3806 of SEQ ID NO: 1242571
aggaaauacuaggccuuau

SEQ ID NO: 1357917 - RNA, 19 nt, Artificial Sequence
  Description of Artificial Sequence: Synthetic oligonucleotide
  Antisense strand to SEQ ID NO: 1357916
auaaggccuaguauuuccu

SEQ ID NO: 1357918 - RNA, 19 nt, Artificial Sequence
  Description of Artificial Sequence: Synthetic oligonucleotide
  Sense strand starting at position 162 of SEQ ID NO: 1242572
gcaagaaucguuugaauuc

SEQ ID NO: 1357919 - RNA, 19 nt, Artificial Sequence
  Description of Artificial Sequence: Synthetic oligonucleotide
  Antisense strand to SEQ ID NO: 1357918
gaauucaaacgauucuugc

SEQ ID NO: 1357920 - RNA, 19 nt, Artificial Sequence
  Description of Artificial Sequence: Synthetic oligonucleotide
  Sense strand starting at position 629 of SEQ ID NO: 1242572
ggagcauaaugucugcaau

SEQ ID NO: 1357921 - RNA, 19 nt, Artificial Sequence
  Description of Artificial Sequence: Synthetic oligonucleotide
  Antisense strand to SEQ ID NO: 1357920
auugcagacauuaugcucc

SEQ ID NO: 1357922 - RNA, 19 nt, Artificial Sequence
  Description of Artificial Sequence: Synthetic oligonucleotide
  Sense strand starting at position 630 of SEQ ID NO: 1242572
gagcauaaugucugcaauu

SEQ ID NO: 1357923 - RNA, 19 nt, Artificial Sequence
  Description of Artificial Sequence: Synthetic oligonucleotide
  Antisense strand to SEQ ID NO: 1357922
aauugcagacauuaugcuc

SEQ ID NO: 1357924 - RNA, 19 nt, Artificial Sequence
  Description of Artificial Sequence: Synthetic oligonucleotide
  Sense strand starting at position 631 of SEQ ID NO: 1242572
agcauaaugucugcaauua

SEQ ID NO: 1357925 - RNA, 19 nt, Artificial Sequence
  Description of Artificial Sequence: Synthetic oligonucleotide
  Antisense strand to SEQ ID NO: 1357924
uaauugcagacauuaugcu

SEQ ID NO: 1357926 - RNA, 19 nt, Artificial Sequence
  Description of Artificial Sequence: Synthetic oligonucleotide
  Sense strand starting at position 632 of SEQ ID NO: 1242572
gcauaaugucugcaauuaa

SEQ ID NO: 1357927 - RNA, 19 nt, Artificial Sequence
  Description of Artificial Sequence: Synthetic oligonucleotide
  Antisense strand to SEQ ID NO: 1357926
uuaauugcagacauuaugc

SEQ ID NO: 1357928 - RNA, 19 nt, Artificial Sequence
  Description of Artificial Sequence: Synthetic oligonucleotide
  Sense strand starting at position 750 of SEQ ID NO: 1242572
agaacaaucuuggcaacau

SEQ ID NO: 1357929 - RNA, 19 nt, Artificial Sequence
  Description of Artificial Sequence: Synthetic oligonucleotide
  Antisense strand to SEQ ID NO: 1357928
auguugccaagauuguucu

SEQ ID NO: 1357930 - RNA, 19 nt, Artificial Sequence
  Description of Artificial Sequence: Synthetic oligonucleotide
  Sense strand starting at position 1025 of SEQ ID NO: 1242572
gaaauaacgguuuaccucu

SEQ ID NO: 1357931 - RNA, 19 nt, Artificial Sequence
  Description of Artificial Sequence: Synthetic oligonucleotide
  Antisense strand to SEQ ID NO: 1357930
agagguaaaccguuauuuc

SEQ ID NO: 1357932 - RNA, 19 nt, Artificial Sequence
  Description of Artificial Sequence: Synthetic oligonucleotide
  Sense strand starting at position 1033 of SEQ ID NO: 1242572
gguuuaccucuguaucaug

SEQ ID NO: 1357933 - RNA, 19 nt, Artificial Sequence
  Description of Artificial Sequence: Synthetic oligonucleotide
  Antisense strand to SEQ ID NO: 1357932
caugauacagagguaaacc

SEQ ID NO: 1357934 - RNA, 19 nt, Artificial Sequence
  Description of Artificial Sequence: Synthetic oligonucleotide
  Sense strand starting at position 1045 of SEQ ID NO: 1242572
uaucauguacacgguauua

SEQ ID NO: 1357935 - RNA, 19 nt, Artificial Sequence
  Description of Artificial Sequence: Synthetic oligonucleotide
  Antisense strand to SEQ ID NO: 1357934
uaauaccguguacaugaua

SEQ ID NO: 1357936 - RNA, 19 nt, Artificial Sequence
  Description of Artificial Sequence: Synthetic oligonucleotide
  Sense strand starting at position 1056 of SEQ ID NO: 1242572
cgguauuacccuuaccaaa

SEQ ID NO: 1357937 - RNA, 19 nt, Artificial Sequence
  Description of Artificial Sequence: Synthetic oligonucleotide
  Antisense strand to SEQ ID NO: 1357936
uuugguaaggguaauaccg

SEQ ID NO: 1357938 - RNA, 19 nt, Artificial Sequence
  Description of Artificial Sequence: Synthetic oligonucleotide
  Sense strand starting at position 1145 of SEQ ID NO: 1242572
acuuaaauugcauguaagu

SEQ ID NO: 1357939 - RNA, 19 nt, Artificial Sequence
  Description of Artificial Sequence: Synthetic oligonucleotide
  Antisense strand to SEQ ID NO: 1357938
acuuacaugcaauuuaagu

SEQ ID NO: 1357940 - RNA, 19 nt, Artificial Sequence
  Description of Artificial Sequence: Synthetic oligonucleotide
  Sense strand starting at position 1272 of SEQ ID NO: 1242572
gcuggugauccuuggagau

SEQ ID NO: 1357941 - RNA, 19 nt, Artificial Sequence
  Description of Artificial Sequence: Synthetic oligonucleotide
  Antisense strand to SEQ ID NO: 1357940
aucuccaaggaucaccagc

SEQ ID NO: 1357942 - RNA, 19 nt, Artificial Sequence
  Description of Artificial Sequence: Synthetic oligonucleotide
  Sense strand starting at position 2023 of SEQ ID NO: 1242572
caaugagagcccugagauc

SEQ ID NO: 1357943 - RNA, 19 nt, Artificial Sequence
  Description of Artificial Sequence: Synthetic oligonucleotide
  Antisense strand to SEQ ID NO: 1357942
gaucucagggcucucauug

SEQ ID NO: 1357944 - RNA, 19 nt, Artificial Sequence
  Description of Artificial Sequence: Synthetic oligonucleotide
  Sense strand starting at position 2030 of SEQ ID NO: 1242572
agcccugagaucugugaug

SEQ ID NO: 1357945 - RNA, 19 nt, Artificial Sequence
  Description of Artificial Sequence: Synthetic oligonucleotide
  Antisense strand to SEQ ID NO: 1357944
caucacagaucucagggcu

SEQ ID NO: 1357946 - RNA, 19 nt, Artificial Sequence
  Description of Artificial Sequence: Synthetic oligonucleotide
  Sense strand starting at position 2032 of SEQ ID NO: 1242572
cccugagaucugugaugga

SEQ ID NO: 1357947 - RNA, 19 nt, Artificial Sequence
  Description of Artificial Sequence: Synthetic oligonucleotide
  Antisense strand to SEQ ID NO: 1357946
uccaucacagaucucaggg

SEQ ID NO: 1357948 - RNA, 19 nt, Artificial Sequence
  Description of Artificial Sequence: Synthetic oligonucleotide
  Sense strand starting at position 2036 of SEQ ID NO: 1242572
gagaucugugauggacagu

SEQ ID NO: 1357949 - RNA, 19 nt, Artificial Sequence
  Description of Artificial Sequence: Synthetic oligonucleotide
  Antisense strand to SEQ ID NO: 1357948
acuguccaucacagaucuc

SEQ ID NO: 1357950 - RNA, 19 nt, Artificial Sequence
  Description of Artificial Sequence: Synthetic oligonucleotide
  Sense strand starting at position 2395 of SEQ ID NO: 1242572
cacugucagcaggaucauu

SEQ ID NO: 1357951 - RNA, 19 nt, Artificial Sequence
  Description of Artificial Sequence: Synthetic oligonucleotide
  Antisense strand to SEQ ID NO: 1357950
aaugauccugcugacagug

SEQ ID NO: 1357952 - RNA, 19 nt, Artificial Sequence
  Description of Artificial Sequence: Synthetic oligonucleotide
  Sense strand starting at position 2400 of SEQ ID NO: 1242572
ucagcaggaucauuggaua

SEQ ID NO: 1357953 - RNA, 19 nt, Artificial Sequence
  Description of Artificial Sequence: Synthetic oligonucleotide
  Antisense strand to SEQ ID NO: 1357952
uauccaaugauccugcuga

SEQ ID NO: 1357954 - RNA, 19 nt, Artificial Sequence
  Description of Artificial Sequence: Synthetic oligonucleotide
  Sense strand starting at position 2838 of SEQ ID NO: 1242572
cugugaugcaacgcguauu

SEQ ID NO: 1357955 - RNA, 19 nt, Artificial Sequence
  Description of Artificial Sequence: Synthetic oligonucleotide
  Antisense strand to SEQ ID NO: 1357954
aauacgcguugcaucacag

SEQ ID NO: 1357956 - RNA, 19 nt, Artificial Sequence
  Description of Artificial Sequence: Synthetic oligonucleotide
  Sense strand starting at position 2849 of SEQ ID NO: 1242572
cgcguauuugcuugaagga

SEQ ID NO: 1357957 - RNA, 19 nt, Artificial Sequence
  Description of Artificial Sequence: Synthetic oligonucleotide
  Antisense strand to SEQ ID NO: 1357956
uccuucaagcaaauacgcg

SEQ ID NO: 1357958 - RNA, 19 nt, Artificial Sequence
  Description of Artificial Sequence: Synthetic oligonucleotide
  Sense strand starting at position 2872 of SEQ ID NO: 1242572
gcaaguuuaacggagucuu

SEQ ID NO: 1357959 - RNA, 19 nt, Artificial Sequence
  Description of Artificial Sequence: Synthetic oligonucleotide
  Antisense strand to SEQ ID NO: 1357958
aagacuccguuaaacuugc

SEQ ID NO: 1357960 - RNA, 19 nt, Artificial Sequence
  Description of Artificial Sequence: Synthetic oligonucleotide
  Sense strand starting at position 2916 of SEQ ID NO: 1242572
augaccagugucuguaaga

SEQ ID NO: 1357961 - RNA, 19 nt, Artificial Sequence
  Description of Artificial Sequence: Synthetic oligonucleotide
  Antisense strand to SEQ ID NO: 1357960
ucuuacagacacuggucau

SEQ ID NO: 1357962 - RNA, 19 nt, Artificial Sequence
  Description of Artificial Sequence: Synthetic oligonucleotide
  Sense strand starting at position 2917 of SEQ ID NO: 1242572
ugaccagugucuguaagau

SEQ ID NO: 1357963 - RNA, 19 nt, Artificial Sequence
  Description of Artificial Sequence: Synthetic oligonucleotide
  Antisense strand to SEQ ID NO: 1357962
aucuuacagacacugguca

SEQ ID NO: 1357964 - RNA, 19 nt, Artificial Sequence
  Description of Artificial Sequence: Synthetic oligonucleotide
  Sense strand starting at position 2977 of SEQ ID NO: 1242572
ggcagcucucuccaggauu

SEQ ID NO: 1357965 - RNA, 19 nt, Artificial Sequence
  Description of Artificial Sequence: Synthetic oligonucleotide
  Antisense strand to SEQ ID NO: 1357964
aauccuggagagagcugcc

SEQ ID NO: 1357966 - RNA, 19 nt, Artificial Sequence
  Description of Artificial Sequence: Synthetic oligonucleotide
  Sense strand starting at position 3036 of SEQ ID NO: 1242572
ggaguccucccagaaccuu

SEQ ID NO: 1357967 - RNA, 19 nt, Artificial Sequence
  Description of Artificial Sequence: Synthetic oligonucleotide
  Antisense strand to SEQ ID NO: 1357966
aagguucugggaggacucc

SEQ ID NO: 1357968 - RNA, 19 nt, Artificial Sequence
  Description of Artificial Sequence: Synthetic oligonucleotide
  Sense strand starting at position 3217 of SEQ ID NO: 1242572
gacugagggcugcacauau

SEQ ID NO: 1357969 - RNA, 19 nt, Artificial Sequence
  Description of Artificial Sequence: Synthetic oligonucleotide
  Antisense strand to SEQ ID NO: 1357968
auaugugcagcccucaguc

SEQ ID NO: 1357970 - RNA, 19 nt, Artificial Sequence
  Description of Artificial Sequence: Synthetic oligonucleotide
  Sense strand starting at position 3302 of SEQ ID NO: 1242572
gcgugaacaaaucaauggu

SEQ ID NO: 1357971 - RNA, 19 nt, Artificial Sequence
  Description of Artificial Sequence: Synthetic oligonucleotide
  Antisense strand to SEQ ID NO: 1357970
accauugauuuguucacgc

SEQ ID NO: 1357972 - RNA, 19 nt, Artificial Sequence
  Description of Artificial Sequence: Synthetic oligonucleotide
  Sense strand starting at position 3497 of SEQ ID NO: 1242572
aauagugguuccuucuuga

SEQ ID NO: 1357973 - RNA, 19 nt, Artificial Sequence
  Description of Artificial Sequence: Synthetic oligonucleotide
  Antisense strand to SEQ ID NO: 1357972
ucaagaaggaaccacuauu

SEQ ID NO: 1357974 - RNA, 19 nt, Artificial Sequence
  Description of Artificial Sequence: Synthetic oligonucleotide
  Sense strand starting at position 3505 of SEQ ID NO: 1242572
uuccuucuugaaggaagua

SEQ ID NO: 1357975 - RNA, 19 nt, Artificial Sequence
  Description of Artificial Sequence: Synthetic oligonucleotide
  Antisense strand to SEQ ID NO: 1357974
uacuuccuucaagaaggaa

SEQ ID NO: 1357976 - RNA, 19 nt, Artificial Sequence
  Description of Artificial Sequence: Synthetic oligonucleotide
  Sense strand starting at position 3518 of SEQ ID NO: 1242572
gaaguauugacugggaagu

SEQ ID NO: 1357977 - RNA, 19 nt, Artificial Sequence
  Description of Artificial Sequence: Synthetic oligonucleotide
  Antisense strand to SEQ ID NO: 1357976
acuucccagucaauacuuc

SEQ ID NO: 1357978 - RNA, 19 nt, Artificial Sequence
  Description of Artificial Sequence: Synthetic oligonucleotide
  Sense strand starting at position 3693 of SEQ ID NO: 1242572
gaacuuucuugagugauag

SEQ ID NO: 1357979 - RNA, 19 nt, Artificial Sequence
  Description of Artificial Sequence: Synthetic oligonucleotide
  Antisense strand to SEQ ID NO: 1357978
cuaucacucaagaaaguuc

SEQ ID NO: 1357980 - RNA, 19 nt, Artificial Sequence
  Description of Artificial Sequence: Synthetic oligonucleotide
  Sense strand starting at position 3694 of SEQ ID NO: 1242572
aacuuucuugagugauaga

SEQ ID NO: 1357981 - RNA, 19 nt, Artificial Sequence
  Description of Artificial Sequence: Synthetic oligonucleotide
  Antisense strand to SEQ ID NO: 1357980
ucuaucacucaagaaaguu

SEQ ID NO: 1357982 - RNA, 19 nt, Artificial Sequence
  Description of Artificial Sequence: Synthetic oligonucleotide
  Sense strand starting at position 3746 of SEQ ID NO: 1242572
guggguuucuauguaugaa

SEQ ID NO: 1357983 - RNA, 19 nt, Artificial Sequence
  Description of Artificial Sequence: Synthetic oligonucleotide
  Antisense strand to SEQ ID NO: 1357982
uucauacauagaaacccac

SEQ ID NO: 1357984 - RNA, 19 nt, Artificial Sequence
  Description of Artificial Sequence: Synthetic oligonucleotide
  Sense strand starting at position 3747 of SEQ ID NO: 1242572
uggguuucuauguaugaau

SEQ ID NO: 1357985 - RNA, 19 nt, Artificial Sequence
  Description of Artificial Sequence: Synthetic oligonucleotide
  Antisense strand to SEQ ID NO: 1357984
auucauacauagaaaccca

SEQ ID NO: 1357986 - RNA, 19 nt, Artificial Sequence
  Description of Artificial Sequence: Synthetic oligonucleotide
  Sense strand starting at position 3749 of SEQ ID NO: 1242572
gguuucuauguaugaauaa

SEQ ID NO: 1357987 - RNA, 19 nt, Artificial Sequence
  Description of Artificial Sequence: Synthetic oligonucleotide
  Antisense strand to SEQ ID NO: 1357986
uuauucauacauagaaacc

SEQ ID NO: 1357988 - RNA, 19 nt, Artificial Sequence
  Description of Artificial Sequence: Synthetic oligonucleotide
  Sense strand starting at position 3797 of SEQ ID NO: 1242572
gugugcuuuacugcauguu

SEQ ID NO: 1357989 - RNA, 19 nt, Artificial Sequence
  Description of Artificial Sequence: Synthetic oligonucleotide
  Antisense strand to SEQ ID NO: 1357988
aacaugcaguaaagcacac

SEQ ID NO: 1357990 - RNA, 19 nt, Artificial Sequence
  Description of Artificial Sequence: Synthetic oligonucleotide
  Sense strand starting at position 3807 of SEQ ID NO: 1242572
cugcauguugaguauaugu

SEQ ID NO: 1357991 - RNA, 19 nt, Artificial Sequence
  Description of Artificial Sequence: Synthetic oligonucleotide
  Antisense strand to SEQ ID NO: 1357990
acauauacucaacaugcag

SEQ ID NO: 1357992 - RNA, 19 nt, Artificial Sequence
  Description of Artificial Sequence: Synthetic oligonucleotide
  Sense strand starting at position 3809 of SEQ ID NO: 1242572
gcauguugaguauauguca

SEQ ID NO: 1357993 - RNA, 19 nt, Artificial Sequence
  Description of Artificial Sequence: Synthetic oligonucleotide
  Antisense strand to SEQ ID NO: 1357992
ugacauauacucaacaugc

SEQ ID NO: 1357994 - RNA, 19 nt, Artificial Sequence
  Description of Artificial Sequence: Synthetic oligonucleotide
  Sense strand starting at position 3816 of SEQ ID NO: 1242572
gaguauaugucaguuacaa

SEQ ID NO: 1357995 - RNA, 19 nt, Artificial Sequence
  Description of Artificial Sequence: Synthetic oligonucleotide
  Antisense strand to SEQ ID NO: 1357994
uuguaacugacauauacuc

SEQ ID NO: 1357996 - RNA, 19 nt, Artificial Sequence
  Description of Artificial Sequence: Synthetic oligonucleotide
  Sense strand starting at position 3927 of SEQ ID NO: 1242572
gguaauguagaauauuagu

SEQ ID NO: 1357997 - RNA, 19 nt, Artificial Sequence
  Description of Artificial Sequence: Synthetic oligonucleotide
  Antisense strand to SEQ ID NO: 1357996
acuaauauucuacauuacc

SEQ ID NO: 1357998 - RNA, 19 nt, Artificial Sequence
  Description of Artificial Sequence: Synthetic oligonucleotide
  Sense strand starting at position 29 of SEQ ID NO: 1242573
ugcaauuucuuagagaaag

SEQ ID NO: 1357999 - RNA, 19 nt, Artificial Sequence
  Description of Artificial Sequence: Synthetic oligonucleotide
  Antisense strand to SEQ ID NO: 1357998
cuuucucuaagaaauugca

SEQ ID NO: 1358000 - RNA, 19 nt, Artificial Sequence
  Description of Artificial Sequence: Synthetic oligonucleotide
  Sense strand starting at position 164 of SEQ ID NO: 1242573
cuuggaaggcucuguagga

SEQ ID NO: 1358001 - RNA, 19 nt, Artificial Sequence
  Description of Artificial Sequence: Synthetic oligonucleotide
  Antisense strand to SEQ ID NO: 1358000
uccuacagagccuuccaag

SEQ ID NO: 1358002 - RNA, 19 nt, Artificial Sequence
  Description of Artificial Sequence: Synthetic oligonucleotide
  Sense strand starting at position 165 of SEQ ID NO: 1242573
uuggaaggcucuguaggaa

SEQ ID NO: 1358003 - RNA, 19 nt, Artificial Sequence
  Description of Artificial Sequence: Synthetic oligonucleotide
  Antisense strand to SEQ ID NO: 1358002
uuccuacagagccuuccaa

SEQ ID NO: 1358004 - RNA, 19 nt, Artificial Sequence
  Description of Artificial Sequence: Synthetic oligonucleotide
  Sense strand starting at position 284 of SEQ ID NO: 1242573
ucgguucuugauggaagaa

SEQ ID NO: 1358005 - RNA, 19 nt, Artificial Sequence
  Description of Artificial Sequence: Synthetic oligonucleotide
  Antisense strand to SEQ ID NO: 1358004
uucuuccaucaagaaccga

SEQ ID NO: 1358006 - RNA, 19 nt, Artificial Sequence
  Description of Artificial Sequence: Synthetic oligonucleotide
  Sense strand starting at position 320 of SEQ ID NO: 1242573
uguaaagagugaucucuga

SEQ ID NO: 1358007 - RNA, 19 nt, Artificial Sequence
  Description of Artificial Sequence: Synthetic oligonucleotide
  Antisense strand to SEQ ID NO: 1358006
ucagagaucacucuuuaca

SEQ ID NO: 1358008 - RNA, 19 nt, Artificial Sequence
  Description of Artificial Sequence: Synthetic oligonucleotide
  Sense strand starting at position 324 of SEQ ID NO: 1242573
aagagugaucucugauuga

SEQ ID NO: 1358009 - RNA, 19 nt, Artificial Sequence
  Description of Artificial Sequence: Synthetic oligonucleotide
  Antisense strand to SEQ ID NO: 1358008
ucaaucagagaucacucuu

SEQ ID NO: 1358010 - RNA, 19 nt, Artificial Sequence
  Description of Artificial Sequence: Synthetic oligonucleotide
  Sense strand starting at position 327 of SEQ ID NO: 1242573
agugaucucugauugacca

SEQ ID NO: 1358011 - RNA, 19 nt, Artificial Sequence
  Description of Artificial Sequence: Synthetic oligonucleotide
  Antisense strand to SEQ ID NO: 1358010
uggucaaucagagaucacu

SEQ ID NO: 1358012 - RNA, 19 nt, Artificial Sequence
  Description of Artificial Sequence: Synthetic oligonucleotide
  Sense strand starting at position 406 of SEQ ID NO: 1242573
ccagccaucugauccugau

SEQ ID NO: 1358013 - RNA, 19 nt, Artificial Sequence
  Description of Artificial Sequence: Synthetic oligonucleotide
  Antisense strand to SEQ ID NO: 1358012
aucaggaucagauggcugg

SEQ ID NO: 1358014 - RNA, 19 nt, Artificial Sequence
  Description of Artificial Sequence: Synthetic oligonucleotide
  Sense strand starting at position 477 of SEQ ID NO: 1242573
gugaaucccuucuccauga

SEQ ID NO: 1358015 - RNA, 19 nt, Artificial Sequence
  Description of Artificial Sequence: Synthetic oligonucleotide
  Antisense strand to SEQ ID NO: 1358014
ucauggagaagggauucac

SEQ ID NO: 1358016 - RNA, 19 nt, Artificial Sequence
  Description of Artificial Sequence: Synthetic oligonucleotide
  Sense strand starting at position 605 of SEQ ID NO: 1242573
gacaccuugcgucaggaau

SEQ ID NO: 1358017 - RNA, 19 nt, Artificial Sequence
  Description of Artificial Sequence: Synthetic oligonucleotide
  Antisense strand to SEQ ID NO: 1358016
auuccugacgcaagguguc

SEQ ID NO: 1358018 - RNA, 19 nt, Artificial Sequence
  Description of Artificial Sequence: Synthetic oligonucleotide
  Sense strand starting at position 982 of SEQ ID NO: 1242573
aguaauuccuuaguuaaug

SEQ ID NO: 1358019 - RNA, 19 nt, Artificial Sequence
  Description of Artificial Sequence: Synthetic oligonucleotide
  Antisense strand to SEQ ID NO: 1358018
cauuaacuaaggaauuacu

SEQ ID NO: 1358020 - RNA, 19 nt, Artificial Sequence
  Description of Artificial Sequence: Synthetic oligonucleotide
  Sense strand starting at position 1012 of SEQ ID NO: 1242573
ucgaauuucucacugcagu

SEQ ID NO: 1358021 - RNA, 19 nt, Artificial Sequence
  Description of Artificial Sequence: Synthetic oligonucleotide
  Antisense strand to SEQ ID NO: 1358020
acugcagugagaaauucga

SEQ ID NO: 1358022 - RNA, 19 nt, Artificial Sequence
  Description of Artificial Sequence: Synthetic oligonucleotide
  Sense strand starting at position 1013 of SEQ ID NO: 1242573
cgaauuucucacugcaguu

SEQ ID NO: 1358023 - RNA, 19 nt, Artificial Sequence
  Description of Artificial Sequence: Synthetic oligonucleotide
  Antisense strand to SEQ ID NO: 1358022
aacugcagugagaaauucg

SEQ ID NO: 1358024 - RNA, 19 nt, Artificial Sequence
  Description of Artificial Sequence: Synthetic oligonucleotide
  Sense strand starting at position 2582 of SEQ ID NO: 1242573
cuucccacucuucgagauu

SEQ ID NO: 1358025 - RNA, 19 nt, Artificial Sequence
  Description of Artificial Sequence: Synthetic oligonucleotide
  Antisense strand to SEQ ID NO: 1358024
aaucucgaagagugggaag

SEQ ID NO: 1358026 - RNA, 19 nt, Artificial Sequence
  Description of Artificial Sequence: Synthetic oligonucleotide
  Sense strand starting at position 2585 of SEQ ID NO: 1242573
cccacucuucgagauugaa

SEQ ID NO: 1358027 - RNA, 19 nt, Artificial Sequence
  Description of Artificial Sequence: Synthetic oligonucleotide
  Antisense strand to SEQ ID NO: 1358026
uucaaucucgaagaguggg

SEQ ID NO: 1358028 - RNA, 19 nt, Artificial Sequence
  Description of Artificial Sequence: Synthetic oligonucleotide
  Sense strand starting at position 2588 of SEQ ID NO: 1242573
acucuucgagauugaaucu

SEQ ID NO: 1358029 - RNA, 19 nt, Artificial Sequence
  Description of Artificial Sequence: Synthetic oligonucleotide
  Antisense strand to SEQ ID NO: 1358028
agauucaaucucgaagagu

SEQ ID NO: 1358030 - RNA, 19 nt, Artificial Sequence
  Description of Artificial Sequence: Synthetic oligonucleotide
  Sense strand starting at position 2653 of SEQ ID NO: 1242573
gcacgccaucacuaggaau

SEQ ID NO: 1358031 - RNA, 19 nt, Artificial Sequence
  Description of Artificial Sequence: Synthetic oligonucleotide
  Antisense strand to SEQ ID NO: 1358030
auuccuagugauggcgugc

SEQ ID NO: 1358032 - RNA, 19 nt, Artificial Sequence
  Description of Artificial Sequence: Synthetic oligonucleotide
  Sense strand starting at position 2655 of SEQ ID NO: 1242573
acgccaucacuaggaaugu

SEQ ID NO: 1358033 - RNA, 19 nt, Artificial Sequence
  Description of Artificial Sequence: Synthetic oligonucleotide
  Antisense strand to SEQ ID NO: 1358032
acauuccuagugauggcgu

SEQ ID NO: 1358034 - RNA, 19 nt, Artificial Sequence
  Description of Artificial Sequence: Synthetic oligonucleotide
  Sense strand starting at position 2690 of SEQ ID NO: 1242573
gugccuguucguuuacuca

SEQ ID NO: 1358035 - RNA, 19 nt, Artificial Sequence
  Description of Artificial Sequence: Synthetic oligonucleotide
  Antisense strand to SEQ ID NO: 1358034
ugaguaaacgaacaggcac

SEQ ID NO: 1358036 - RNA, 19 nt, Artificial Sequence
  Description of Artificial Sequence: Synthetic oligonucleotide
  Sense strand starting at position 2796 of SEQ ID NO: 1242573
gcucgacaacgguaauaga

SEQ ID NO: 1358037 - RNA, 19 nt, Artificial Sequence
  Description of Artificial Sequence: Synthetic oligonucleotide
  Antisense strand to SEQ ID NO: 1358036
ucuauuaccguugucgagc

SEQ ID NO: 1358038 - RNA, 19 nt, Artificial Sequence
  Description of Artificial Sequence: Synthetic oligonucleotide
  Sense strand starting at position 3220 of SEQ ID NO: 1242573
uggaaaccauuagauuuaa

SEQ ID NO: 1358039 - RNA, 19 nt, Artificial Sequence
  Description of Artificial Sequence: Synthetic oligonucleotide
  Antisense strand to SEQ ID NO: 1358038
uuaaaucuaaugguuucca

SEQ ID NO: 1358040 - RNA, 19 nt, Artificial Sequence
  Description of Artificial Sequence: Synthetic oligonucleotide
  Sense strand starting at position 3234 of SEQ ID NO: 1242573
uuuaaaugaauguggguuu

SEQ ID NO: 1358041 - RNA, 19 nt, Artificial Sequence
  Description of Artificial Sequence: Synthetic oligonucleotide
  Antisense strand to SEQ ID NO: 1358040
aaacccacauucauuuaaa

SEQ ID NO: 1358042 - RNA, 19 nt, Artificial Sequence
  Description of Artificial Sequence: Synthetic oligonucleotide
  Sense strand starting at position 3245 of SEQ ID NO: 1242573
guggguuuguguaugugua

SEQ ID NO: 1358043 - RNA, 19 nt, Artificial Sequence
  Description of Artificial Sequence: Synthetic oligonucleotide
  Antisense strand to SEQ ID NO: 1358042
uacacauacacaaacccac

SEQ ID NO: 1358044 - RNA, 19 nt, Artificial Sequence
  Description of Artificial Sequence: Synthetic oligonucleotide
  Sense strand starting at position 3425 of SEQ ID NO: 1242573
aguggaaguagauguauua

SEQ ID NO: 1358045 - RNA, 19 nt, Artificial Sequence
  Description of Artificial Sequence: Synthetic oligonucleotide
  Antisense strand to SEQ ID NO: 1358044
uaauacaucuacuuccacu

SEQ ID NO: 1358046 - RNA, 19 nt, Artificial Sequence
  Description of Artificial Sequence: Synthetic oligonucleotide
  Sense strand starting at position 3435 of SEQ ID NO: 1242573
gauguauuacucugcucag

SEQ ID NO: 1358047 - RNA, 19 nt, Artificial Sequence
  Description of Artificial Sequence: Synthetic oligonucleotide
  Antisense strand to SEQ ID NO: 1358046
cugagcagaguaauacauc

SEQ ID NO: 1358048 - RNA, 19 nt, Artificial Sequence
  Description of Artificial Sequence: Synthetic oligonucleotide
  Sense strand starting at position 3459 of SEQ ID NO: 1242573
uggguacugaaguaguuaa

SEQ ID NO: 1358049 - RNA, 19 nt, Artificial Sequence
  Description of Artificial Sequence: Synthetic oligonucleotide
  Antisense strand to SEQ ID NO: 1358048
uuaacuacuucaguaccca

SEQ ID NO: 1358050 - RNA, 19 nt, Artificial Sequence
  Description of Artificial Sequence: Synthetic oligonucleotide
  Sense strand starting at position 3475 of SEQ ID NO: 1242573
uaacaugaggucuauguca

SEQ ID NO: 1358051 - RNA, 19 nt, Artificial Sequence
  Description of Artificial Sequence: Synthetic oligonucleotide
  Antisense strand to SEQ ID NO: 1358050
ugacauagaccucauguua

SEQ ID NO: 1358052 - RNA, 19 nt, Artificial Sequence
  Description of Artificial Sequence: Synthetic oligonucleotide
  Sense strand starting at position 3477 of SEQ ID NO: 1242573
acaugaggucuaugucaag

SEQ ID NO: 1358053 - RNA, 19 nt, Artificial Sequence
  Description of Artificial Sequence: Synthetic oligonucleotide
  Antisense strand to SEQ ID NO: 1358052
cuugacauagaccucaugu

SEQ ID NO: 1358054 - RNA, 19 nt, Artificial Sequence
  Description of Artificial Sequence: Synthetic oligonucleotide
  Sense strand starting at position 3488 of SEQ ID NO: 1242573
augucaagccucgauuaag

SEQ ID NO: 1358055 - RNA, 19 nt, Artificial Sequence
  Description of Artificial Sequence: Synthetic oligonucleotide
  Antisense strand to SEQ ID NO: 1358054
cuuaaucgaggcuugacau

SEQ ID NO: 1358056 - RNA, 19 nt, Artificial Sequence
  Description of Artificial Sequence: Synthetic oligonucleotide
  Sense strand starting at position 3491 of SEQ ID NO: 1242573
ucaagccucgauuaaguga

SEQ ID NO: 1358057 - RNA, 19 nt, Artificial Sequence
  Description of Artificial Sequence: Synthetic oligonucleotide
  Antisense strand to SEQ ID NO: 1358056
ucacuuaaucgaggcuuga

SEQ ID NO: 1358058 - RNA, 19 nt, Artificial Sequence
  Description of Artificial Sequence: Synthetic oligonucleotide
  Sense strand starting at position 3496 of SEQ ID NO: 1242573
ccucgauuaagugauagcu

SEQ ID NO: 1358059 - RNA, 19 nt, Artificial Sequence
  Description of Artificial Sequence: Synthetic oligonucleotide
  Antisense strand to SEQ ID NO: 1358058
agcuaucacuuaaucgagg

SEQ ID NO: 1358060 - RNA, 19 nt, Artificial Sequence
  Description of Artificial Sequence: Synthetic oligonucleotide
  Sense strand starting at position 3506 of SEQ ID NO: 1242573
gugauagcucaauacacau

SEQ ID NO: 1358061 - RNA, 19 nt, Artificial Sequence
  Description of Artificial Sequence: Synthetic oligonucleotide
  Antisense strand to SEQ ID NO: 1358060
auguguauugagcuaucac

SEQ ID NO: 1358062 - RNA, 19 nt, Artificial Sequence
  Description of Artificial Sequence: Synthetic oligonucleotide
  Sense strand starting at position 3650 of SEQ ID NO: 1242573
ggguuucccuacuuaaucu

SEQ ID NO: 1358063 - RNA, 19 nt, Artificial Sequence
  Description of Artificial Sequence: Synthetic oligonucleotide
  Antisense strand to SEQ ID NO: 1358062
agauuaaguagggaaaccc

SEQ ID NO: 1358064 - RNA, 19 nt, Artificial Sequence
  Description of Artificial Sequence: Synthetic oligonucleotide
  Sense strand starting at position 3786 of SEQ ID NO: 1242573
uuaagaagugaugguguau

SEQ ID NO: 1358065 - RNA, 19 nt, Artificial Sequence
  Description of Artificial Sequence: Synthetic oligonucleotide
  Antisense strand to SEQ ID NO: 1358064
auacaccaucacuucuuaa

SEQ ID NO: 1358066 - RNA, 19 nt, Artificial Sequence
  Description of Artificial Sequence: Synthetic oligonucleotide
  Sense strand starting at position 3795 of SEQ ID NO: 1242573
gaugguguauuucuguuau

SEQ ID NO: 1358067 - RNA, 19 nt, Artificial Sequence
  Description of Artificial Sequence: Synthetic oligonucleotide
  Antisense strand to SEQ ID NO: 1358066
auaacagaaauacaccauc

SEQ ID NO: 1358068 - RNA, 19 nt, Artificial Sequence
  Description of Artificial Sequence: Synthetic oligonucleotide
  Sense strand starting at position 3815 of SEQ ID NO: 1242573
ucauacauccugugucaaa

SEQ ID NO: 1358069 - RNA, 19 nt, Artificial Sequence
  Description of Artificial Sequence: Synthetic oligonucleotide
  Antisense strand to SEQ ID NO: 1358068
uuugacacaggauguauga

SEQ ID NO: 1358070 - RNA, 19 nt, Artificial Sequence
  Description of Artificial Sequence: Synthetic oligonucleotide
  Sense strand starting at position 3825 of SEQ ID NO: 1242573
ugugucaaacuugaauaua

SEQ ID NO: 1358071 - RNA, 19 nt, Artificial Sequence
  Description of Artificial Sequence: Synthetic oligonucleotide
  Antisense strand to SEQ ID NO: 1358070
uauauucaaguuugacaca

SEQ ID NO: 1358072 - RNA, 19 nt, Artificial Sequence
  Description of Artificial Sequence: Synthetic oligonucleotide
  Sense strand starting at position 3891 of SEQ ID NO: 1242573
caugaagcacugugauucu

SEQ ID NO: 1358073 - RNA, 19 nt, Artificial Sequence
  Description of Artificial Sequence: Synthetic oligonucleotide
  Antisense strand to SEQ ID NO: 1358072
agaaucacagugcuucaug

SEQ ID NO: 1358074 - RNA, 19 nt, Artificial Sequence
  Description of Artificial Sequence: Synthetic oligonucleotide
  Sense strand starting at position 3900 of SEQ ID NO: 1242573
cugugauucugauuccaug

SEQ ID NO: 1358075 - RNA, 19 nt, Artificial Sequence
  Description of Artificial Sequence: Synthetic oligonucleotide
  Antisense strand to SEQ ID NO: 1358074
cauggaaucagaaucacag

SEQ ID NO: 1358076 - RNA, 19 nt, Artificial Sequence
  Description of Artificial Sequence: Synthetic oligonucleotide
  Sense strand starting at position 3936 of SEQ ID NO: 1242573
aagcaugcauuuguaguaa

SEQ ID NO: 1358077 - RNA, 19 nt, Artificial Sequence
  Description of Artificial Sequence: Synthetic oligonucleotide
  Antisense strand to SEQ ID NO: 1358076
uuacuacaaaugcaugcuu

SEQ ID NO: 1358078 - RNA, 19 nt, Artificial Sequence
  Description of Artificial Sequence: Synthetic oligonucleotide
  Sense strand starting at position 14 of SEQ ID NO: 1242574
agcaguuacguguucucau

SEQ ID NO: 1358079 - RNA, 19 nt, Artificial Sequence
  Description of Artificial Sequence: Synthetic oligonucleotide
  Antisense strand to SEQ ID NO: 1358078
augagaacacguaacugcu

SEQ ID NO: 1358080 - RNA, 19 nt, Artificial Sequence
  Description of Artificial Sequence: Synthetic oligonucleotide
  Sense strand starting at position 86 of SEQ ID NO: 1242574
uuggcuuugccacaaauua

SEQ ID NO: 1358081 - RNA, 19 nt, Artificial Sequence
  Description of Artificial Sequence: Synthetic oligonucleotide
  Antisense strand to SEQ ID NO: 1358080
uaauuuguggcaaagccaa

SEQ ID NO: 1358082 - RNA, 19 nt, Artificial Sequence
  Description of Artificial Sequence: Synthetic oligonucleotide
  Sense strand starting at position 94 of SEQ ID NO: 1242574
gccacaaauuaacugugau

SEQ ID NO: 1358083 - RNA, 19 nt, Artificial Sequence
  Description of Artificial Sequence: Synthetic oligonucleotide
  Antisense strand to SEQ ID NO: 1358082
aucacaguuaauuuguggc

SEQ ID NO: 1358084 - RNA, 19 nt, Artificial Sequence
  Description of Artificial Sequence: Synthetic oligonucleotide
  Sense strand starting at position 97 of SEQ ID NO: 1242574
acaaauuaacugugaugcu

SEQ ID NO: 1358085 - RNA, 19 nt, Artificial Sequence
  Description of Artificial Sequence: Synthetic oligonucleotide
  Antisense strand to SEQ ID NO: 1358084
agcaucacaguuaauuugu

SEQ ID NO: 1358086 - RNA, 19 nt, Artificial Sequence
  Description of Artificial Sequence: Synthetic oligonucleotide
  Sense strand starting at position 107 of SEQ ID NO: 1242574
ugugaugcugaauagacua

SEQ ID NO: 1358087 - RNA, 19 nt, Artificial Sequence
  Description of Artificial Sequence: Synthetic oligonucleotide
  Antisense strand to SEQ ID NO: 1358086
uagucuauucagcaucaca

SEQ ID NO: 1358088 - RNA, 19 nt, Artificial Sequence
  Description of Artificial Sequence: Synthetic oligonucleotide
  Sense strand starting at position 267 of SEQ ID NO: 1242574
cuacuauguugagcauaau

SEQ ID NO: 1358089 - RNA, 19 nt, Artificial Sequence
  Description of Artificial Sequence: Synthetic oligonucleotide
  Antisense strand to SEQ ID NO: 1358088
auuaugcucaacauaguag

SEQ ID NO: 1358090 - RNA, 19 nt, Artificial Sequence
  Description of Artificial Sequence: Synthetic oligonucleotide
  Sense strand starting at position 289 of SEQ ID NO: 1242574
ggucaacugugauuacuau

SEQ ID NO: 1358091 - RNA, 19 nt, Artificial Sequence
  Description of Artificial Sequence: Synthetic oligonucleotide
  Antisense strand to SEQ ID NO: 1358090
auaguaaucacaguugacc

SEQ ID NO: 1358092 - RNA, 19 nt, Artificial Sequence
  Description of Artificial Sequence: Synthetic oligonucleotide
  Sense strand starting at position 290 of SEQ ID NO: 1242574
gucaacugugauuacuauu

SEQ ID NO: 1358093 - RNA, 19 nt, Artificial Sequence
  Description of Artificial Sequence: Synthetic oligonucleotide
  Antisense strand to SEQ ID NO: 1358092
aauaguaaucacaguugac

SEQ ID NO: 1358094 - RNA, 19 nt, Artificial Sequence
  Description of Artificial Sequence: Synthetic oligonucleotide
  Sense strand starting at position 338 of SEQ ID NO: 1242574
guuaauuugccuugagcua

SEQ ID NO: 1358095 - RNA, 19 nt, Artificial Sequence
  Description of Artificial Sequence: Synthetic oligonucleotide
  Antisense strand to SEQ ID NO: 1358094
uagcucaaggcaaauuaac

SEQ ID NO: 1358096 - RNA, 19 nt, Artificial Sequence
  Description of Artificial Sequence: Synthetic oligonucleotide
  Sense strand starting at position 383 of SEQ ID NO: 1242574
ggcuguaaugggcauagaa

SEQ ID NO: 1358097 - RNA, 19 nt, Artificial Sequence
  Description of Artificial Sequence: Synthetic oligonucleotide
  Antisense strand to SEQ ID NO: 1358096
uucuaugcccauuacagcc

SEQ ID NO: 1358098 - RNA, 19 nt, Artificial Sequence
  Description of Artificial Sequence: Synthetic oligonucleotide
  Sense strand starting at position 425 of SEQ ID NO: 1242574
agcagaucccuaggauacu

SEQ ID NO: 1358099 - RNA, 19 nt, Artificial Sequence
  Description of Artificial Sequence: Synthetic oligonucleotide
  Antisense strand to SEQ ID NO: 1358098
aguauccuagggaucugcu

SEQ ID NO: 1358100 - RNA, 19 nt, Artificial Sequence
  Description of Artificial Sequence: Synthetic oligonucleotide
  Sense strand starting at position 437 of SEQ ID NO: 1242574
ggauacuuugcagggaaau

SEQ ID NO: 1358101 - RNA, 19 nt, Artificial Sequence
  Description of Artificial Sequence: Synthetic oligonucleotide
  Antisense strand to SEQ ID NO: 1358100
auuucccugcaaaguaucc

SEQ ID NO: 1358102 - RNA, 19 nt, Artificial Sequence
  Description of Artificial Sequence: Synthetic oligonucleotide
  Sense strand starting at position 438 of SEQ ID NO: 1242574
gauacuuugcagggaaauc

SEQ ID NO: 1358103 - RNA, 19 nt, Artificial Sequence
  Description of Artificial Sequence: Synthetic oligonucleotide
  Antisense strand to SEQ ID NO: 1358102
gauuucccugcaaaguauc

SEQ ID NO: 1358104 - RNA, 19 nt, Artificial Sequence
  Description of Artificial Sequence: Synthetic oligonucleotide
  Sense strand starting at position 496 of SEQ ID NO: 1242574
ugaucucauuuggacucaa

SEQ ID NO: 1358105 - RNA, 19 nt, Artificial Sequence
  Description of Artificial Sequence: Synthetic oligonucleotide
  Antisense strand to SEQ ID NO: 1358104
uugaguccaaaugagauca

SEQ ID NO: 1358106 - RNA, 19 nt, Artificial Sequence
  Description of Artificial Sequence: Synthetic oligonucleotide
  Sense strand starting at position 536 of SEQ ID NO: 1242574
agaagaugagcuugugaua

SEQ ID NO: 1358107 - RNA, 19 nt, Artificial Sequence
  Description of Artificial Sequence: Synthetic oligonucleotide
  Antisense strand to SEQ ID NO: 1358106
uaucacaagcucaucuucu

SEQ ID NO: 1358108 - RNA, 19 nt, Artificial Sequence
  Description of Artificial Sequence: Synthetic oligonucleotide
  Sense strand starting at position 545 of SEQ ID NO: 1242574
gcuugugauagacauagcu

SEQ ID NO: 1358109 - RNA, 19 nt, Artificial Sequence
  Description of Artificial Sequence: Synthetic oligonucleotide
  Antisense strand to SEQ ID NO: 1358108
agcuaugucuaucacaagc

SEQ ID NO: 1358110 - RNA, 19 nt, Artificial Sequence
  Description of Artificial Sequence: Synthetic oligonucleotide
  Sense strand starting at position 986 of SEQ ID NO: 1242574
gagacccugugacuugaaa

SEQ ID NO: 1358111 - RNA, 19 nt, Artificial Sequence
  Description of Artificial Sequence: Synthetic oligonucleotide
  Antisense strand to SEQ ID NO: 1358110
uuucaagucacagggucuc

SEQ ID NO: 1358112 - RNA, 19 nt, Artificial Sequence
  Description of Artificial Sequence: Synthetic oligonucleotide
  Sense strand starting at position 1052 of SEQ ID NO: 1242574
cuagaauccucguuuggaa

SEQ ID NO: 1358113 - RNA, 19 nt, Artificial Sequence
  Description of Artificial Sequence: Synthetic oligonucleotide
  Antisense strand to SEQ ID NO: 1358112
uuccaaacgaggauucuag

SEQ ID NO: 1358114 - RNA, 19 nt, Artificial Sequence
  Description of Artificial Sequence: Synthetic oligonucleotide
  Sense strand starting at position 1106 of SEQ ID NO: 1242574
ggcaguauaguuuaugaag

SEQ ID NO: 1358115 - RNA, 19 nt, Artificial Sequence
  Description of Artificial Sequence: Synthetic oligonucleotide
  Antisense strand to SEQ ID NO: 1358114
cuucauaaacuauacugcc

SEQ ID NO: 1358116 - RNA, 19 nt, Artificial Sequence
  Description of Artificial Sequence: Synthetic oligonucleotide
  Sense strand starting at position 1132 of SEQ ID NO: 1242574
ggccaucgaccugaaauua

SEQ ID NO: 1358117 - RNA, 19 nt, Artificial Sequence
  Description of Artificial Sequence: Synthetic oligonucleotide
  Antisense strand to SEQ ID NO: 1358116
uaauuucaggucgauggcc

SEQ ID NO: 1358118 - RNA, 19 nt, Artificial Sequence
  Description of Artificial Sequence: Synthetic oligonucleotide
  Sense strand starting at position 1282 of SEQ ID NO: 1242574
ugcacaauuguuuaaauga

SEQ ID NO: 1358119 - RNA, 19 nt, Artificial Sequence
  Description of Artificial Sequence: Synthetic oligonucleotide
  Antisense strand to SEQ ID NO: 1358118
ucauuuaaacaauugugca

SEQ ID NO: 1358120 - RNA, 19 nt, Artificial Sequence
  Description of Artificial Sequence: Synthetic oligonucleotide
  Sense strand starting at position 1313 of SEQ ID NO: 1242574
cuacacuggguccauuaua

SEQ ID NO: 1358121 - RNA, 19 nt, Artificial Sequence
  Description of Artificial Sequence: Synthetic oligonucleotide
  Antisense strand to SEQ ID NO: 1358120
uauaauggacccaguguag

SEQ ID NO: 1358122 - RNA, 19 nt, Artificial Sequence
  Description of Artificial Sequence: Synthetic oligonucleotide
  Sense strand starting at position 1853 of SEQ ID NO: 1242574
caaaguuagcccggauaaa

SEQ ID NO: 1358123 - RNA, 19 nt, Artificial Sequence
  Description of Artificial Sequence: Synthetic oligonucleotide
  Antisense strand to SEQ ID NO: 1358122
uuuauccgggcuaacuuug

SEQ ID NO: 1358124 - RNA, 19 nt, Artificial Sequence
  Description of Artificial Sequence: Synthetic oligonucleotide
  Sense strand starting at position 1854 of SEQ ID NO: 1242574
aaaguuagcccggauaaac

SEQ ID NO: 1358125 - RNA, 19 nt, Artificial Sequence
  Description of Artificial Sequence: Synthetic oligonucleotide
  Antisense strand to SEQ ID NO: 1358124
guuuauccgggcuaacuuu

SEQ ID NO: 1358126 - RNA, 19 nt, Artificial Sequence
  Description of Artificial Sequence: Synthetic oligonucleotide
  Sense strand starting at position 2066 of SEQ ID NO: 1242574
cgagauucccgcgcuucaa

SEQ ID NO: 1358127 - RNA, 19 nt, Artificial Sequence
  Description of Artificial Sequence: Synthetic oligonucleotide
  Antisense strand to SEQ ID NO: 1358126
uugaagcgcgggaaucucg

SEQ ID NO: 1358128 - RNA, 19 nt, Artificial Sequence
  Description of Artificial Sequence: Synthetic oligonucleotide
  Sense strand starting at position 2164 of SEQ ID NO: 1242574
acuagaaugacguaucuug

SEQ ID NO: 1358129 - RNA, 19 nt, Artificial Sequence
  Description of Artificial Sequence: Synthetic oligonucleotide
  Antisense strand to SEQ ID NO: 1358128
caagauacgucauucuagu

SEQ ID NO: 1358130 - RNA, 19 nt, Artificial Sequence
  Description of Artificial Sequence: Synthetic oligonucleotide
  Sense strand starting at position 2182 of SEQ ID NO: 1242574
gcagcacucggcugaauuu

SEQ ID NO: 1358131 - RNA, 19 nt, Artificial Sequence
  Description of Artificial Sequence: Synthetic oligonucleotide
  Antisense strand to SEQ ID NO: 1358130
aaauucagccgagugcugc

SEQ ID NO: 1358132 - RNA, 19 nt, Artificial Sequence
  Description of Artificial Sequence: Synthetic oligonucleotide
  Sense strand starting at position 2305 of SEQ ID NO: 1242574
agcgauucuccugacuaug

SEQ ID NO: 1358133 - RNA, 19 nt, Artificial Sequence
  Description of Artificial Sequence: Synthetic oligonucleotide
  Antisense strand to SEQ ID NO: 1358132
cauagucaggagaaucgcu

SEQ ID NO: 1358134 - RNA, 19 nt, Artificial Sequence
  Description of Artificial Sequence: Synthetic oligonucleotide
  Sense strand starting at position 3162 of SEQ ID NO: 1242574
uaaugcgaaguuuaagaaa

SEQ ID NO: 1358135 - RNA, 19 nt, Artificial Sequence
  Description of Artificial Sequence: Synthetic oligonucleotide
  Antisense strand to SEQ ID NO: 1358134
uuucuuaaacuucgcauua

SEQ ID NO: 1358136 - RNA, 19 nt, Artificial Sequence
  Description of Artificial Sequence: Synthetic oligonucleotide
  Sense strand starting at position 3187 of SEQ ID NO: 1242574
guguguuacacuuagaaua

SEQ ID NO: 1358137 - RNA, 19 nt, Artificial Sequence
  Description of Artificial Sequence: Synthetic oligonucleotide
  Antisense strand to SEQ ID NO: 1358136
uauucuaaguguaacacac

SEQ ID NO: 1358138 - RNA, 19 nt, Artificial Sequence
  Description of Artificial Sequence: Synthetic oligonucleotide
  Sense strand starting at position 3285 of SEQ ID NO: 1242574
caguguagugggcagaaca

SEQ ID NO: 1358139 - RNA, 19 nt, Artificial Sequence
  Description of Artificial Sequence: Synthetic oligonucleotide
  Antisense strand to SEQ ID NO: 1358138
uguucugcccacuacacug

SEQ ID NO: 1358140 - RNA, 19 nt, Artificial Sequence
  Description of Artificial Sequence: Synthetic oligonucleotide
  Sense strand starting at position 3316 of SEQ ID NO: 1242574
uuuggauugccgggaauaa

SEQ ID NO: 1358141 - RNA, 19 nt, Artificial Sequence
  Description of Artificial Sequence: Synthetic oligonucleotide
  Antisense strand to SEQ ID NO: 1358140
uuauucccggcaauccaaa

SEQ ID NO: 1358142 - RNA, 19 nt, Artificial Sequence
  Description of Artificial Sequence: Synthetic oligonucleotide
  Sense strand starting at position 3317 of SEQ ID NO: 1242574
uuggauugccgggaauaag

SEQ ID NO: 1358143 - RNA, 19 nt, Artificial Sequence
  Description of Artificial Sequence: Synthetic oligonucleotide
  Antisense strand to SEQ ID NO: 1358142
cuuauucccggcaauccaa

SEQ ID NO: 1358144 - RNA, 19 nt, Artificial Sequence
  Description of Artificial Sequence: Synthetic oligonucleotide
  Sense strand starting at position 3377 of SEQ ID NO: 1242574
guaacugaaugcucuauua

SEQ ID NO: 1358145 - RNA, 19 nt, Artificial Sequence
  Description of Artificial Sequence: Synthetic oligonucleotide
  Antisense strand to SEQ ID NO: 1358144
uaauagagcauucaguuac

SEQ ID NO: 1358146 - RNA, 19 nt, Artificial Sequence
  Description of Artificial Sequence: Synthetic oligonucleotide
  Sense strand starting at position 3628 of SEQ ID NO: 1242574
cuuuaucucagggauuggu

SEQ ID NO: 1358147 - RNA, 19 nt, Artificial Sequence
  Description of Artificial Sequence: Synthetic oligonucleotide
  Antisense strand to SEQ ID NO: 1358146
accaaucccugagauaaag

SEQ ID NO: 1358148 - RNA, 19 nt, Artificial Sequence
  Description of Artificial Sequence: Synthetic oligonucleotide
  Sense strand starting at position 3631 of SEQ ID NO: 1242574
uaucucagggauugguauu

SEQ ID NO: 1358149 - RNA, 19 nt, Artificial Sequence
  Description of Artificial Sequence: Synthetic oligonucleotide
  Antisense strand to SEQ ID NO: 1358148
aauaccaaucccugagaua

SEQ ID NO: 1358150 - RNA, 19 nt, Artificial Sequence
  Description of Artificial Sequence: Synthetic oligonucleotide
  Sense strand starting at position 3632 of SEQ ID NO: 1242574
aucucagggauugguauua

SEQ ID NO: 1358151 - RNA, 19 nt, Artificial Sequence
  Description of Artificial Sequence: Synthetic oligonucleotide
  Antisense strand to SEQ ID NO: 1358150
uaauaccaaucccugagau

SEQ ID NO: 1358152 - RNA, 19 nt, Artificial Sequence
  Description of Artificial Sequence: Synthetic oligonucleotide
  Sense strand starting at position 3720 of SEQ ID NO: 1242574
agugcaauccauuaccaag

SEQ ID NO: 1358153 - RNA, 19 nt, Artificial Sequence
  Description of Artificial Sequence: Synthetic oligonucleotide
  Antisense strand to SEQ ID NO: 1358152
cuugguaauggauugcacu

SEQ ID NO: 1358154 - RNA, 19 nt, Artificial Sequence
  Description of Artificial Sequence: Synthetic oligonucleotide
  Sense strand starting at position 3829 of SEQ ID NO: 1242574
cuuggauugcuacacucau

SEQ ID NO: 1358155 - RNA, 19 nt, Artificial Sequence
  Description of Artificial Sequence: Synthetic oligonucleotide
  Antisense strand to SEQ ID NO: 1358154
augaguguagcaauccaag

SEQ ID NO: 1358156 - RNA, 19 nt, Artificial Sequence
  Description of Artificial Sequence: Synthetic oligonucleotide
  Sense strand starting at position 3929 of SEQ ID NO: 1242574
uggugucagauuugugacu

SEQ ID NO: 1358157 - RNA, 19 nt, Artificial Sequence
  Description of Artificial Sequence: Synthetic oligonucleotide
  Antisense strand to SEQ ID NO: 1358156
agucacaaaucugacacca

SEQ ID NO: 1358158 - RNA, 19 nt, Artificial Sequence
  Description of Artificial Sequence: Synthetic oligonucleotide
  Sense strand starting at position 84 of SEQ ID NO: 1242575
uggaguuucugaguguucu

SEQ ID NO: 1358159 - RNA, 19 nt, Artificial Sequence
  Description of Artificial Sequence: Synthetic oligonucleotide
  Antisense strand to SEQ ID NO: 1358158
agaacacucagaaacucca

SEQ ID NO: 1358160 - RNA, 19 nt, Artificial Sequence
  Description of Artificial Sequence: Synthetic oligonucleotide
  Sense strand starting at position 88 of SEQ ID NO: 1242575
guuucugaguguucuucua

SEQ ID NO: 1358161 - RNA, 19 nt, Artificial Sequence
  Description of Artificial Sequence: Synthetic oligonucleotide
  Antisense strand to SEQ ID NO: 1358160
uagaagaacacucagaaac

SEQ ID NO: 1358162 - RNA, 19 nt, Artificial Sequence
  Description of Artificial Sequence: Synthetic oligonucleotide
  Sense strand starting at position 90 of SEQ ID NO: 1242575
uucugaguguucuucuaga

SEQ ID NO: 1358163 - RNA, 19 nt, Artificial Sequence
  Description of Artificial Sequence: Synthetic oligonucleotide
  Antisense strand to SEQ ID NO: 1358162
ucuagaagaacacucagaa

SEQ ID NO: 1358164 - RNA, 19 nt, Artificial Sequence
  Description of Artificial Sequence: Synthetic oligonucleotide
  Sense strand starting at position 95 of SEQ ID NO: 1242575
aguguucuucuagaacuca

SEQ ID NO: 1358165 - RNA, 19 nt, Artificial Sequence
  Description of Artificial Sequence: Synthetic oligonucleotide
  Antisense strand to SEQ ID NO: 1358164
ugaguucuagaagaacacu

SEQ ID NO: 1358166 - RNA, 19 nt, Artificial Sequence
  Description of Artificial Sequence: Synthetic oligonucleotide
  Sense strand starting at position 439 of SEQ ID NO: 1242575
ugcaguuccucagucacau

SEQ ID NO: 1358167 - RNA, 19 nt, Artificial Sequence
  Description of Artificial Sequence: Synthetic oligonucleotide
  Antisense strand to SEQ ID NO: 1358166
augugacugaggaacugca

SEQ ID NO: 1358168 - RNA, 19 nt, Artificial Sequence
  Description of Artificial Sequence: Synthetic oligonucleotide
  Sense strand starting at position 548 of SEQ ID NO: 1242575
ccuggagagcuguguuaaa

SEQ ID NO: 1358169 - RNA, 19 nt, Artificial Sequence
  Description of Artificial Sequence: Synthetic oligonucleotide
  Antisense strand to SEQ ID NO: 1358168
uuuaacacagcucuccagg

SEQ ID NO: 1358170 - RNA, 19 nt, Artificial Sequence
  Description of Artificial Sequence: Synthetic oligonucleotide
  Sense strand starting at position 723 of SEQ ID NO: 1242575
aaaggaggauucugagaau

SEQ ID NO: 1358171 - RNA, 19 nt, Artificial Sequence
  Description of Artificial Sequence: Synthetic oligonucleotide
  Antisense strand to SEQ ID NO: 1358170
auucucagaauccuccuuu

SEQ ID NO: 1358172 - RNA, 19 nt, Artificial Sequence
  Description of Artificial Sequence: Synthetic oligonucleotide
  Sense strand starting at position 726 of SEQ ID NO: 1242575
ggaggauucugagaaugua

SEQ ID NO: 1358173 - RNA, 19 nt, Artificial Sequence
  Description of Artificial Sequence: Synthetic oligonucleotide
  Antisense strand to SEQ ID NO: 1358172
uacauucucagaauccucc

SEQ ID NO: 1358174 - RNA, 19 nt, Artificial Sequence
  Description of Artificial Sequence: Synthetic oligonucleotide
  Sense strand starting at position 756 of SEQ ID NO: 1242575
uguggaauguagggauuga

SEQ ID NO: 1358175 - RNA, 19 nt, Artificial Sequence
  Description of Artificial Sequence: Synthetic oligonucleotide
  Antisense strand to SEQ ID NO: 1358174
ucaaucccuacauuccaca

SEQ ID NO: 1358176 - RNA, 19 nt, Artificial Sequence
  Description of Artificial Sequence: Synthetic oligonucleotide
  Sense strand starting at position 773 of SEQ ID NO: 1242575
gauuaaugaugucugcaug

SEQ ID NO: 1358177 - RNA, 19 nt, Artificial Sequence
  Description of Artificial Sequence: Synthetic oligonucleotide
  Antisense strand to SEQ ID NO: 1358176
caugcagacaucauuaauc

SEQ ID NO: 1358178 - RNA, 19 nt, Artificial Sequence
  Description of Artificial Sequence: Synthetic oligonucleotide
  Sense strand starting at position 776 of SEQ ID NO: 1242575
uaaugaugucugcaugggu

SEQ ID NO: 1358179 - RNA, 19 nt, Artificial Sequence
  Description of Artificial Sequence: Synthetic oligonucleotide
  Antisense strand to SEQ ID NO: 1358178
acccaugcagacaucauua

SEQ ID NO: 1358180 - RNA, 19 nt, Artificial Sequence
  Description of Artificial Sequence: Synthetic oligonucleotide
  Sense strand starting at position 779 of SEQ ID NO: 1242575
ugaugucugcauggguaca

SEQ ID NO: 1358181 - RNA, 19 nt, Artificial Sequence
  Description of Artificial Sequence: Synthetic oligonucleotide
  Antisense strand to SEQ ID NO: 1358180
uguacccaugcagacauca

SEQ ID NO: 1358182 - RNA, 19 nt, Artificial Sequence
  Description of Artificial Sequence: Synthetic oligonucleotide
  Sense strand starting at position 800 of SEQ ID NO: 1242575
aagugagggcagugauaca

SEQ ID NO: 1358183 - RNA, 19 nt, Artificial Sequence
  Description of Artificial Sequence: Synthetic oligonucleotide
  Antisense strand to SEQ ID NO: 1358182
uguaucacugcccucacuu

SEQ ID NO: 1358184 - RNA, 19 nt, Artificial Sequence
  Description of Artificial Sequence: Synthetic oligonucleotide
  Sense strand starting at position 836 of SEQ ID NO: 1242575
aggucuucaguagaaucga

SEQ ID NO: 1358185 - RNA, 19 nt, Artificial Sequence
  Description of Artificial Sequence: Synthetic oligonucleotide
  Antisense strand to SEQ ID NO: 1358184
ucgauucuacugaagaccu

SEQ ID NO: 1358186 - RNA, 19 nt, Artificial Sequence
  Description of Artificial Sequence: Synthetic oligonucleotide
  Sense strand starting at position 871 of SEQ ID NO: 1242575
aaaugagaguaguuuaucu

SEQ ID NO: 1358187 - RNA, 19 nt, Artificial Sequence
  Description of Artificial Sequence: Synthetic oligonucleotide
  Antisense strand to SEQ ID NO: 1358186
agauaaacuacucucauuu

SEQ ID NO: 1358188 - RNA, 19 nt, Artificial Sequence
  Description of Artificial Sequence: Synthetic oligonucleotide
  Sense strand starting at position 875 of SEQ ID NO: 1242575
gagaguaguuuaucuggac

SEQ ID NO: 1358189 - RNA, 19 nt, Artificial Sequence
  Description of Artificial Sequence: Synthetic oligonucleotide
  Antisense strand to SEQ ID NO: 1358188
guccagauaaacuacucuc

SEQ ID NO: 1358190 - RNA, 19 nt, Artificial Sequence
  Description of Artificial Sequence: Synthetic oligonucleotide
  Sense strand starting at position 876 of SEQ ID NO: 1242575
agaguaguuuaucuggaca

SEQ ID NO: 1358191 - RNA, 19 nt, Artificial Sequence
  Description of Artificial Sequence: Synthetic oligonucleotide
  Antisense strand to SEQ ID NO: 1358190
uguccagauaaacuacucu

SEQ ID NO: 1358192 - RNA, 19 nt, Artificial Sequence
  Description of Artificial Sequence: Synthetic oligonucleotide
  Sense strand starting at position 878 of SEQ ID NO: 1242575
aguaguuuaucuggacaag

SEQ ID NO: 1358193 - RNA, 19 nt, Artificial Sequence
  Description of Artificial Sequence: Synthetic oligonucleotide
  Antisense strand to SEQ ID NO: 1358192
cuuguccagauaaacuacu

SEQ ID NO: 1358194 - RNA, 19 nt, Artificial Sequence
  Description of Artificial Sequence: Synthetic oligonucleotide
  Sense strand starting at position 879 of SEQ ID NO: 1242575
guaguuuaucuggacaagu

SEQ ID NO: 1358195 - RNA, 19 nt, Artificial Sequence
  Description of Artificial Sequence: Synthetic oligonucleotide
  Antisense strand to SEQ ID NO: 1358194
acuuguccagauaaacuac

SEQ ID NO: 1358196 - RNA, 19 nt, Artificial Sequence
  Description of Artificial Sequence: Synthetic oligonucleotide
  Sense strand starting at position 881 of SEQ ID NO: 1242575
aguuuaucuggacaaguua

SEQ ID NO: 1358197 - RNA, 19 nt, Artificial Sequence
  Description of Artificial Sequence: Synthetic oligonucleotide
  Antisense strand to SEQ ID NO: 1358196
uaacuuguccagauaaacu

SEQ ID NO: 1358198 - RNA, 19 nt, Artificial Sequence
  Description of Artificial Sequence: Synthetic oligonucleotide
  Sense strand starting at position 889 of SEQ ID NO: 1242575
uggacaaguuaauguaaug

SEQ ID NO: 1358199 - RNA, 19 nt, Artificial Sequence
  Description of Artificial Sequence: Synthetic oligonucleotide
  Antisense strand to SEQ ID NO: 1358198
cauuacauuaacuugucca

SEQ ID NO: 1358200 - RNA, 19 nt, Artificial Sequence
  Description of Artificial Sequence: Synthetic oligonucleotide
  Sense strand starting at position 894 of SEQ ID NO: 1242575
aaguuaauguaaugucuga

SEQ ID NO: 1358201 - RNA, 19 nt, Artificial Sequence
  Description of Artificial Sequence: Synthetic oligonucleotide
  Antisense strand to SEQ ID NO: 1358200
ucagacauuacauuaacuu

SEQ ID NO: 1358202 - RNA, 19 nt, Artificial Sequence
  Description of Artificial Sequence: Synthetic oligonucleotide
  Sense strand starting at position 1092 of SEQ ID NO: 1242575
cuugucuucuaccagucua

SEQ ID NO: 1358203 - RNA, 19 nt, Artificial Sequence
  Description of Artificial Sequence: Synthetic oligonucleotide
  Antisense strand to SEQ ID NO: 1358202
uagacugguagaagacaag

SEQ ID NO: 1358204 - RNA, 19 nt, Artificial Sequence
  Description of Artificial Sequence: Synthetic oligonucleotide
  Sense strand starting at position 1097 of SEQ ID NO: 1242575
cuucuaccagucuaaaugu

SEQ ID NO: 1358205 - RNA, 19 nt, Artificial Sequence
  Description of Artificial Sequence: Synthetic oligonucleotide
  Antisense strand to SEQ ID NO: 1358204
acauuuagacugguagaag

SEQ ID NO: 1358206 - RNA, 19 nt, Artificial Sequence
  Description of Artificial Sequence: Synthetic oligonucleotide
  Sense strand starting at position 1104 of SEQ ID NO: 1242575
cagucuaaaugugcuguaa

SEQ ID NO: 1358207 - RNA, 19 nt, Artificial Sequence
  Description of Artificial Sequence: Synthetic oligonucleotide
  Antisense strand to SEQ ID NO: 1358206
uuacagcacauuuagacug

SEQ ID NO: 1358208 - RNA, 19 nt, Artificial Sequence
  Description of Artificial Sequence: Synthetic oligonucleotide
  Sense strand starting at position 2029 of SEQ ID NO: 1242575
gaccuaaugguccaaguca

SEQ ID NO: 1358209 - RNA, 19 nt, Artificial Sequence
  Description of Artificial Sequence: Synthetic oligonucleotide
  Antisense strand to SEQ ID NO: 1358208
ugacuuggaccauuagguc

SEQ ID NO: 1358210 - RNA, 19 nt, Artificial Sequence
  Description of Artificial Sequence: Synthetic oligonucleotide
  Sense strand starting at position 2089 of SEQ ID NO: 1242575
agcaccaagucugauuuau

SEQ ID NO: 1358211 - RNA, 19 nt, Artificial Sequence
  Description of Artificial Sequence: Synthetic oligonucleotide
  Antisense strand to SEQ ID NO: 1358210
auaaaucagacuuggugcu

SEQ ID NO: 1358212 - RNA, 19 nt, Artificial Sequence
  Description of Artificial Sequence: Synthetic oligonucleotide
  Sense strand starting at position 2131 of SEQ ID NO: 1242575
uuauguccuguugucguaa

SEQ ID NO: 1358213 - RNA, 19 nt, Artificial Sequence
  Description of Artificial Sequence: Synthetic oligonucleotide
  Antisense strand to SEQ ID NO: 1358212
uuacgacaacaggacauaa

SEQ ID NO: 1358214 - RNA, 19 nt, Artificial Sequence
  Description of Artificial Sequence: Synthetic oligonucleotide
  Sense strand starting at position 2132 of SEQ ID NO: 1242575
uauguccuguugucguaaa

SEQ ID NO: 1358215 - RNA, 19 nt, Artificial Sequence
  Description of Artificial Sequence: Synthetic oligonucleotide
  Antisense strand to SEQ ID NO: 1358214
uuuacgacaacaggacaua

SEQ ID NO: 1358216 - RNA, 19 nt, Artificial Sequence
  Description of Artificial Sequence: Synthetic oligonucleotide
  Sense strand starting at position 2158 of SEQ ID NO: 1242575
cccugugucuucuaggacu

SEQ ID NO: 1358217 - RNA, 19 nt, Artificial Sequence
  Description of Artificial Sequence: Synthetic oligonucleotide
  Antisense strand to SEQ ID NO: 1358216
aguccuagaagacacaggg

SEQ ID NO: 1358218 - RNA, 19 nt, Artificial Sequence
  Description of Artificial Sequence: Synthetic oligonucleotide
  Sense strand starting at position 2173 of SEQ ID NO: 1242575
gacugcacuguccaagaua

SEQ ID NO: 1358219 - RNA, 19 nt, Artificial Sequence
  Description of Artificial Sequence: Synthetic oligonucleotide
  Antisense strand to SEQ ID NO: 1358218
uaucuuggacagugcaguc

SEQ ID NO: 1358220 - RNA, 19 nt, Artificial Sequence
  Description of Artificial Sequence: Synthetic oligonucleotide
  Sense strand starting at position 2176 of SEQ ID NO: 1242575
ugcacuguccaagauagua

SEQ ID NO: 1358221 - RNA, 19 nt, Artificial Sequence
  Description of Artificial Sequence: Synthetic oligonucleotide
  Antisense strand to SEQ ID NO: 1358220
uacuaucuuggacagugca

SEQ ID NO: 1358222 - RNA, 19 nt, Artificial Sequence
  Description of Artificial Sequence: Synthetic oligonucleotide
  Sense strand starting at position 3048 of SEQ ID NO: 1242575
cuggguauggugugaggua

SEQ ID NO: 1358223 - RNA, 19 nt, Artificial Sequence
  Description of Artificial Sequence: Synthetic oligonucleotide
  Antisense strand to SEQ ID NO: 1358222
uaccucacaccauacccag

SEQ ID NO: 1358224 - RNA, 19 nt, Artificial Sequence
  Description of Artificial Sequence: Synthetic oligonucleotide
  Sense strand starting at position 3091 of SEQ ID NO: 1242575
ccauauggauauugaauua

SEQ ID NO: 1358225 - RNA, 19 nt, Artificial Sequence
  Description of Artificial Sequence: Synthetic oligonucleotide
  Antisense strand to SEQ ID NO: 1358224
uaauucaauauccauaugg

SEQ ID NO: 1358226 - RNA, 19 nt, Artificial Sequence
  Description of Artificial Sequence: Synthetic oligonucleotide
  Sense strand starting at position 3101 of SEQ ID NO: 1242575
auugaauuaucccagcagu

SEQ ID NO: 1358227 - RNA, 19 nt, Artificial Sequence
  Description of Artificial Sequence: Synthetic oligonucleotide
  Antisense strand to SEQ ID NO: 1358226
acugcugggauaauucaau

SEQ ID NO: 1358228 - RNA, 19 nt, Artificial Sequence
  Description of Artificial Sequence: Synthetic oligonucleotide
  Sense strand starting at position 3156 of SEQ ID NO: 1242575
uggagccaccucugucaua

SEQ ID NO: 1358229 - RNA, 19 nt, Artificial Sequence
  Description of Artificial Sequence: Synthetic oligonucleotide
  Antisense strand to SEQ ID NO: 1358228
uaugacagagguggcucca

SEQ ID NO: 1358230 - RNA, 19 nt, Artificial Sequence
  Description of Artificial Sequence: Synthetic oligonucleotide
  Sense strand starting at position 3157 of SEQ ID NO: 1242575
ggagccaccucugucauaa

SEQ ID NO: 1358231 - RNA, 19 nt, Artificial Sequence
  Description of Artificial Sequence: Synthetic oligonucleotide
  Antisense strand to SEQ ID NO: 1358230
uuaugacagagguggcucc

SEQ ID NO: 1358232 - RNA, 19 nt, Artificial Sequence
  Description of Artificial Sequence: Synthetic oligonucleotide
  Sense strand starting at position 3161 of SEQ ID NO: 1242575
ccaccucugucauaaguca

SEQ ID NO: 1358233 - RNA, 19 nt, Artificial Sequence
  Description of Artificial Sequence: Synthetic oligonucleotide
  Antisense strand to SEQ ID NO: 1358232
ugacuuaugacagaggugg

SEQ ID NO: 1358234 - RNA, 19 nt, Artificial Sequence
  Description of Artificial Sequence: Synthetic oligonucleotide
  Sense strand starting at position 3650 of SEQ ID NO: 1242575
ggagacuuaggcugcagua

SEQ ID NO: 1358235 - RNA, 19 nt, Artificial Sequence
  Description of Artificial Sequence: Synthetic oligonucleotide
  Antisense strand to SEQ ID NO: 1358234
uacugcagccuaagucucc

SEQ ID NO: 1358236 - RNA, 19 nt, Artificial Sequence
  Description of Artificial Sequence: Synthetic oligonucleotide
  Sense strand starting at position 3662 of SEQ ID NO: 1242575
ugcaguaggccauguauuu

SEQ ID NO: 1358237 - RNA, 19 nt, Artificial Sequence
  Description of Artificial Sequence: Synthetic oligonucleotide
  Antisense strand to SEQ ID NO: 1358236
aaauacauggccuacugca

SEQ ID NO: 1358238 - RNA, 19 nt, Artificial Sequence
  Description of Artificial Sequence: Synthetic oligonucleotide
  Sense strand starting at position 28 of SEQ ID NO: 1242576
cgguaagauugccugagcu

SEQ ID NO: 1358239 - RNA, 19 nt, Artificial Sequence
  Description of Artificial Sequence: Synthetic oligonucleotide
  Antisense strand to SEQ ID NO: 1358238
agcucaggcaaucuuaccg

SEQ ID NO: 1358240 - RNA, 19 nt, Artificial Sequence
  Description of Artificial Sequence: Synthetic oligonucleotide
  Sense strand starting at position 282 of SEQ ID NO: 1242576
gguguaguggugugguaac

SEQ ID NO: 1358241 - RNA, 19 nt, Artificial Sequence
  Description of Artificial Sequence: Synthetic oligonucleotide
  Antisense strand to SEQ ID NO: 1358240
guuaccacaccacuacacc

SEQ ID NO: 1358242 - RNA, 19 nt, Artificial Sequence
  Description of Artificial Sequence: Synthetic oligonucleotide
  Sense strand starting at position 709 of SEQ ID NO: 1242576
ggcacuuccucucaaauug

SEQ ID NO: 1358243 - RNA, 19 nt, Artificial Sequence
  Description of Artificial Sequence: Synthetic oligonucleotide
  Antisense strand to SEQ ID NO: 1358242
caauuugagaggaagugcc

SEQ ID NO: 1358244 - RNA, 19 nt, Artificial Sequence
  Description of Artificial Sequence: Synthetic oligonucleotide
  Sense strand starting at position 749 of SEQ ID NO: 1242576
cuccuuuggccucgucuaa

SEQ ID NO: 1358245 - RNA, 19 nt, Artificial Sequence
  Description of Artificial Sequence: Synthetic oligonucleotide
  Antisense strand to SEQ ID NO: 1358244
uuagacgaggccaaaggag

SEQ ID NO: 1358246 - RNA, 19 nt, Artificial Sequence
  Description of Artificial Sequence: Synthetic oligonucleotide
  Sense strand starting at position 756 of SEQ ID NO: 1242576
ggccucgucuaagacaaua

SEQ ID NO: 1358247 - RNA, 19 nt, Artificial Sequence
  Description of Artificial Sequence: Synthetic oligonucleotide
  Antisense strand to SEQ ID NO: 1358246
uauugucuuagacgaggcc

SEQ ID NO: 1358248 - RNA, 19 nt, Artificial Sequence
  Description of Artificial Sequence: Synthetic oligonucleotide
  Sense strand starting at position 772 of SEQ ID NO: 1242576
auaauacagucaugauguc

SEQ ID NO: 1358249 - RNA, 19 nt, Artificial Sequence
  Description of Artificial Sequence: Synthetic oligonucleotide
  Antisense strand to SEQ ID NO: 1358248
gacaucaugacuguauuau

SEQ ID NO: 1358250 - RNA, 19 nt, Artificial Sequence
  Description of Artificial Sequence: Synthetic oligonucleotide
  Sense strand starting at position 778 of SEQ ID NO: 1242576
cagucaugaugucacaaug

SEQ ID NO: 1358251 - RNA, 19 nt, Artificial Sequence
  Description of Artificial Sequence: Synthetic oligonucleotide
  Antisense strand to SEQ ID NO: 1358250
cauugugacaucaugacug

SEQ ID NO: 1358252 - RNA, 19 nt, Artificial Sequence
  Description of Artificial Sequence: Synthetic oligonucleotide
  Sense strand starting at position 794 of SEQ ID NO: 1242576
auggcaauguccuauuuac

SEQ ID NO: 1358253 - RNA, 19 nt, Artificial Sequence
  Description of Artificial Sequence: Synthetic oligonucleotide
  Antisense strand to SEQ ID NO: 1358252
guaaauaggacauugccau

SEQ ID NO: 1358254 - RNA, 19 nt, Artificial Sequence
  Description of Artificial Sequence: Synthetic oligonucleotide
  Sense strand starting at position 880 of SEQ ID NO: 1242576
cccugugauucccugggca

SEQ ID NO: 1358255 - RNA, 19 nt, Artificial Sequence
  Description of Artificial Sequence: Synthetic oligonucleotide
  Antisense strand to SEQ ID NO: 1358254
ugcccagggaaucacaggg

SEQ ID NO: 1358256 - RNA, 19 nt, Artificial Sequence
  Description of Artificial Sequence: Synthetic oligonucleotide
  Sense strand starting at position 902 of SEQ ID NO: 1242576
cgguccucacuccgagaaa

SEQ ID NO: 1358257 - RNA, 19 nt, Artificial Sequence
  Description of Artificial Sequence: Synthetic oligonucleotide
  Antisense strand to SEQ ID NO: 1358256
uuucucggagugaggaccg

SEQ ID NO: 1358258 - RNA, 19 nt, Artificial Sequence
  Description of Artificial Sequence: Synthetic oligonucleotide
  Sense strand starting at position 903 of SEQ ID NO: 1242576
gguccucacuccgagaaac

SEQ ID NO: 1358259 - RNA, 19 nt, Artificial Sequence
  Description of Artificial Sequence: Synthetic oligonucleotide
  Antisense strand to SEQ ID NO: 1358258
guuucucggagugaggacc

SEQ ID NO: 1358260 - RNA, 19 nt, Artificial Sequence
  Description of Artificial Sequence: Synthetic oligonucleotide
  Sense strand starting at position 1178 of SEQ ID NO: 1242576
ccuugacccugaugugaug

SEQ ID NO: 1358261 - RNA, 19 nt, Artificial Sequence
  Description of Artificial Sequence: Synthetic oligonucleotide
  Antisense strand to SEQ ID NO: 1358260
caucacaucagggucaagg

SEQ ID NO: 1358262 - RNA, 19 nt, Artificial Sequence
  Description of Artificial Sequence: Synthetic oligonucleotide
  Sense strand starting at position 1228 of SEQ ID NO: 1242576
guacauacauguuuagaug

SEQ ID NO: 1358263 - RNA, 19 nt, Artificial Sequence
  Description of Artificial Sequence: Synthetic oligonucleotide
  Antisense strand to SEQ ID NO: 1358262
caucuaaacauguauguac

SEQ ID NO: 1358264 - RNA, 19 nt, Artificial Sequence
  Description of Artificial Sequence: Synthetic oligonucleotide
  Sense strand starting at position 1234 of SEQ ID NO: 1242576
acauguuuagaugaaugca

SEQ ID NO: 1358265 - RNA, 19 nt, Artificial Sequence
  Description of Artificial Sequence: Synthetic oligonucleotide
  Antisense strand to SEQ ID NO: 1358264
ugcauucaucuaaacaugu

SEQ ID NO: 1358266 - RNA, 19 nt, Artificial Sequence
  Description of Artificial Sequence: Synthetic oligonucleotide
  Sense strand starting at position 1491 of SEQ ID NO: 1242576
aaagucaugugugcuugua

SEQ ID NO: 1358267 - RNA, 19 nt, Artificial Sequence
  Description of Artificial Sequence: Synthetic oligonucleotide
  Antisense strand to SEQ ID NO: 1358266
uacaagcacacaugacuuu

SEQ ID NO: 1358268 - RNA, 19 nt, Artificial Sequence
  Description of Artificial Sequence: Synthetic oligonucleotide
  Sense strand starting at position 1493 of SEQ ID NO: 1242576
agucaugugugcuuguaaa

SEQ ID NO: 1358269 - RNA, 19 nt, Artificial Sequence
  Description of Artificial Sequence: Synthetic oligonucleotide
  Antisense strand to SEQ ID NO: 1358268
uuuacaagcacacaugacu

SEQ ID NO: 1358270 - RNA, 19 nt, Artificial Sequence
  Description of Artificial Sequence: Synthetic oligonucleotide
  Sense strand starting at position 1592 of SEQ ID NO: 1242576
guacaacauuguggucaca

SEQ ID NO: 1358271 - RNA, 19 nt, Artificial Sequence
  Description of Artificial Sequence: Synthetic oligonucleotide
  Antisense strand to SEQ ID NO: 1358270
ugugaccacaauguuguac

SEQ ID NO: 1358272 - RNA, 19 nt, Artificial Sequence
  Description of Artificial Sequence: Synthetic oligonucleotide
  Sense strand starting at position 1594 of SEQ ID NO: 1242576
acaacauuguggucacaac

SEQ ID NO: 1358273 - RNA, 19 nt, Artificial Sequence
  Description of Artificial Sequence: Synthetic oligonucleotide
  Antisense strand to SEQ ID NO: 1358272
guugugaccacaauguugu

SEQ ID NO: 1358274 - RNA, 19 nt, Artificial Sequence
  Description of Artificial Sequence: Synthetic oligonucleotide
  Sense strand starting at position 2284 of SEQ ID NO: 1242576
gcaaaugcauccuuaguga

SEQ ID NO: 1358275 - RNA, 19 nt, Artificial Sequence
  Description of Artificial Sequence: Synthetic oligonucleotide
  Antisense strand to SEQ ID NO: 1358274
ucacuaaggaugcauuugc

SEQ ID NO: 1358276 - RNA, 19 nt, Artificial Sequence
  Description of Artificial Sequence: Synthetic oligonucleotide
  Sense strand starting at position 2288 of SEQ ID NO: 1242576
augcauccuuagugagcaa

SEQ ID NO: 1358277 - RNA, 19 nt, Artificial Sequence
  Description of Artificial Sequence: Synthetic oligonucleotide
  Antisense strand to SEQ ID NO: 1358276
uugcucacuaaggaugcau

SEQ ID NO: 1358278 - RNA, 19 nt, Artificial Sequence
  Description of Artificial Sequence: Synthetic oligonucleotide
  Sense strand starting at position 2369 of SEQ ID NO: 1242576
gcgccuuccugggacucaa

SEQ ID NO: 1358279 - RNA, 19 nt, Artificial Sequence
  Description of Artificial Sequence: Synthetic oligonucleotide
  Antisense strand to SEQ ID NO: 1358278
uugagucccaggaaggcgc

SEQ ID NO: 1358280 - RNA, 19 nt, Artificial Sequence
  Description of Artificial Sequence: Synthetic oligonucleotide
  Sense strand starting at position 2388 of SEQ ID NO: 1242576
uuucccuaucuauguagua

SEQ ID NO: 1358281 - RNA, 19 nt, Artificial Sequence
  Description of Artificial Sequence: Synthetic oligonucleotide
  Antisense strand to SEQ ID NO: 1358280
uacuacauagauagggaaa

SEQ ID NO: 1358282 - RNA, 19 nt, Artificial Sequence
  Description of Artificial Sequence: Synthetic oligonucleotide
  Sense strand starting at position 2389 of SEQ ID NO: 1242576
uucccuaucuauguaguaa

SEQ ID NO: 1358283 - RNA, 19 nt, Artificial Sequence
  Description of Artificial Sequence: Synthetic oligonucleotide
  Antisense strand to SEQ ID NO: 1358282
uuacuacauagauagggaa

SEQ ID NO: 1358284 - RNA, 19 nt, Artificial Sequence
  Description of Artificial Sequence: Synthetic oligonucleotide
  Sense strand starting at position 2582 of SEQ ID NO: 1242576
gcaccaugaggcugggaau

SEQ ID NO: 1358285 - RNA, 19 nt, Artificial Sequence
  Description of Artificial Sequence: Synthetic oligonucleotide
  Antisense strand to SEQ ID NO: 1358284
auucccagccucauggugc

SEQ ID NO: 1358286 - RNA, 19 nt, Artificial Sequence
  Description of Artificial Sequence: Synthetic oligonucleotide
  Sense strand starting at position 2585 of SEQ ID NO: 1242576
ccaugaggcugggaaucaa

SEQ ID NO: 1358287 - RNA, 19 nt, Artificial Sequence
  Description of Artificial Sequence: Synthetic oligonucleotide
  Antisense strand to SEQ ID NO: 1358286
uugauucccagccucaugg

SEQ ID NO: 1358288 - RNA, 19 nt, Artificial Sequence
  Description of Artificial Sequence: Synthetic oligonucleotide
  Sense strand starting at position 2814 of SEQ ID NO: 1242576
uccucaaagcaauggugua

SEQ ID NO: 1358289 - RNA, 19 nt, Artificial Sequence
  Description of Artificial Sequence: Synthetic oligonucleotide
  Antisense strand to SEQ ID NO: 1358288
uacaccauugcuuugagga

SEQ ID NO: 1358290 - RNA, 19 nt, Artificial Sequence
  Description of Artificial Sequence: Synthetic oligonucleotide
  Sense strand starting at position 2938 of SEQ ID NO: 1242576
gucugucuuuccuagguua

SEQ ID NO: 1358291 - RNA, 19 nt, Artificial Sequence
  Description of Artificial Sequence: Synthetic oligonucleotide
  Antisense strand to SEQ ID NO: 1358290
uaaccuaggaaagacagac

SEQ ID NO: 1358292 - RNA, 19 nt, Artificial Sequence
  Description of Artificial Sequence: Synthetic oligonucleotide
  Sense strand starting at position 2940 of SEQ ID NO: 1242576
cugucuuuccuagguuaua

SEQ ID NO: 1358293 - RNA, 19 nt, Artificial Sequence
  Description of Artificial Sequence: Synthetic oligonucleotide
  Antisense strand to SEQ ID NO: 1358292
uauaaccuaggaaagacag

SEQ ID NO: 1358294 - RNA, 19 nt, Artificial Sequence
  Description of Artificial Sequence: Synthetic oligonucleotide
  Sense strand starting at position 2941 of SEQ ID NO: 1242576
ugucuuuccuagguuauau

SEQ ID NO: 1358295 - RNA, 19 nt, Artificial Sequence
  Description of Artificial Sequence: Synthetic oligonucleotide
  Antisense strand to SEQ ID NO: 1358294
auauaaccuaggaaagaca

SEQ ID NO: 1358296 - RNA, 19 nt, Artificial Sequence
  Description of Artificial Sequence: Synthetic oligonucleotide
  Sense strand starting at position 2950 of SEQ ID NO: 1242576
uagguuauauccuugagga

SEQ ID NO: 1358297 - RNA, 19 nt, Artificial Sequence
  Description of Artificial Sequence: Synthetic oligonucleotide
  Antisense strand to SEQ ID NO: 1358296
uccucaaggauauaaccua

SEQ ID NO: 1358298 - RNA, 19 nt, Artificial Sequence
  Description of Artificial Sequence: Synthetic oligonucleotide
  Sense strand starting at position 2951 of SEQ ID NO: 1242576
agguuauauccuugaggag

SEQ ID NO: 1358299 - RNA, 19 nt, Artificial Sequence
  Description of Artificial Sequence: Synthetic oligonucleotide
  Antisense strand to SEQ ID NO: 1358298
cuccucaaggauauaaccu

SEQ ID NO: 1358300 - RNA, 19 nt, Artificial Sequence
  Description of Artificial Sequence: Synthetic oligonucleotide
  Sense strand starting at position 2989 of SEQ ID NO: 1242576
cuguaauaucaacagcugu

SEQ ID NO: 1358301 - RNA, 19 nt, Artificial Sequence
  Description of Artificial Sequence: Synthetic oligonucleotide
  Antisense strand to SEQ ID NO: 1358300
acagcuguugauauuacag

SEQ ID NO: 1358302 - RNA, 19 nt, Artificial Sequence
  Description of Artificial Sequence: Synthetic oligonucleotide
  Sense strand starting at position 3053 of SEQ ID NO: 1242576
acauacugaucaggaggaa

SEQ ID NO: 1358303 - RNA, 19 nt, Artificial Sequence
  Description of Artificial Sequence: Synthetic oligonucleotide
  Antisense strand to SEQ ID NO: 1358302
uuccuccugaucaguaugu

SEQ ID NO: 1358304 - RNA, 19 nt, Artificial Sequence
  Description of Artificial Sequence: Synthetic oligonucleotide
  Sense strand starting at position 3114 of SEQ ID NO: 1242576
ggaacuagcaggugaucua

SEQ ID NO: 1358305 - RNA, 19 nt, Artificial Sequence
  Description of Artificial Sequence: Synthetic oligonucleotide
  Antisense strand to SEQ ID NO: 1358304
uagaucaccugcuaguucc

SEQ ID NO: 1358306 - RNA, 19 nt, Artificial Sequence
  Description of Artificial Sequence: Synthetic oligonucleotide
  Sense strand starting at position 3137 of SEQ ID NO: 1242576
cugccaucugguggagaca

SEQ ID NO: 1358307 - RNA, 19 nt, Artificial Sequence
  Description of Artificial Sequence: Synthetic oligonucleotide
  Antisense strand to SEQ ID NO: 1358306
ugucuccaccagauggcag

SEQ ID NO: 1358308 - RNA, 19 nt, Artificial Sequence
  Description of Artificial Sequence: Synthetic oligonucleotide
  Sense strand starting at position 3254 of SEQ ID NO: 1242576
gcaaaugucucccuagcaa

SEQ ID NO: 1358309 - RNA, 19 nt, Artificial Sequence
  Description of Artificial Sequence: Synthetic oligonucleotide
  Antisense strand to SEQ ID NO: 1358308
uugcuagggagacauuugc

SEQ ID NO: 1358310 - RNA, 19 nt, Artificial Sequence
  Description of Artificial Sequence: Synthetic oligonucleotide
  Sense strand starting at position 3267 of SEQ ID NO: 1242576
uagcaaaugucccagagca

SEQ ID NO: 1358311 - RNA, 19 nt, Artificial Sequence
  Description of Artificial Sequence: Synthetic oligonucleotide
  Antisense strand to SEQ ID NO: 1358310
ugcucugggacauuugcua

SEQ ID NO: 1358312 - RNA, 19 nt, Artificial Sequence
  Description of Artificial Sequence: Synthetic oligonucleotide
  Sense strand starting at position 3269 of SEQ ID NO: 1242576
gcaaaugucccagagcaga

SEQ ID NO: 1358313 - RNA, 19 nt, Artificial Sequence
  Description of Artificial Sequence: Synthetic oligonucleotide
  Antisense strand to SEQ ID NO: 1358312
ucugcucugggacauuugc

SEQ ID NO: 1358314 - RNA, 19 nt, Artificial Sequence
  Description of Artificial Sequence: Synthetic oligonucleotide
  Sense strand starting at position 3340 of SEQ ID NO: 1242576
aggagaaagucacauccua

SEQ ID NO: 1358315 - RNA, 19 nt, Artificial Sequence
  Description of Artificial Sequence: Synthetic oligonucleotide
  Antisense strand to SEQ ID NO: 1358314
uaggaugugacuuucuccu

SEQ ID NO: 1358316 - RNA, 19 nt, Artificial Sequence
  Description of Artificial Sequence: Synthetic oligonucleotide
  Sense strand starting at position 3951 of SEQ ID NO: 1242576
auguacugcuagugggaau

SEQ ID NO: 1358317 - RNA, 19 nt, Artificial Sequence
  Description of Artificial Sequence: Synthetic oligonucleotide
  Antisense strand to SEQ ID NO: 1358316
auucccacuagcaguacau

SEQ ID NO: 1358318 - RNA, 19 nt, Artificial Sequence
  Description of Artificial Sequence: Synthetic oligonucleotide
  Sense strand starting at position 23 of SEQ ID NO: 1242577
gcagacuuguuggcacuca

SEQ ID NO: 1358319 - RNA, 19 nt, Artificial Sequence
  Description of Artificial Sequence: Synthetic oligonucleotide
  Antisense strand to SEQ ID NO: 1358318
ugagugccaacaagucugc

SEQ ID NO: 1358320 - RNA, 19 nt, Artificial Sequence
  Description of Artificial Sequence: Synthetic oligonucleotide
  Sense strand starting at position 24 of SEQ ID NO: 1242577
cagacuuguuggcacucau

SEQ ID NO: 1358321 - RNA, 19 nt, Artificial Sequence
  Description of Artificial Sequence: Synthetic oligonucleotide
  Antisense strand to SEQ ID NO: 1358320
augagugccaacaagucug

SEQ ID NO: 1358322 - RNA, 19 nt, Artificial Sequence
  Description of Artificial Sequence: Synthetic oligonucleotide
  Sense strand starting at position 34 of SEQ ID NO: 1242577
ggcacucaucuuggugaag

SEQ ID NO: 1358323 - RNA, 19 nt, Artificial Sequence
  Description of Artificial Sequence: Synthetic oligonucleotide
  Antisense strand to SEQ ID NO: 1358322
cuucaccaagaugagugcc

SEQ ID NO: 1358324 - RNA, 19 nt, Artificial Sequence
  Description of Artificial Sequence: Synthetic oligonucleotide
  Sense strand starting at position 45 of SEQ ID NO: 1242577
uggugaagcccacgauauc

SEQ ID NO: 1358325 - RNA, 19 nt, Artificial Sequence
  Description of Artificial Sequence: Synthetic oligonucleotide
  Antisense strand to SEQ ID NO: 1358324
gauaucgugggcuucacca

SEQ ID NO: 1358326 - RNA, 19 nt, Artificial Sequence
  Description of Artificial Sequence: Synthetic oligonucleotide
  Sense strand starting at position 54 of SEQ ID NO: 1242577
ccacgauaucugcaaauaa

SEQ ID NO: 1358327 - RNA, 19 nt, Artificial Sequence
  Description of Artificial Sequence: Synthetic oligonucleotide
  Antisense strand to SEQ ID NO: 1358326
uuauuugcagauaucgugg

SEQ ID NO: 1358328 - RNA, 19 nt, Artificial Sequence
  Description of Artificial Sequence: Synthetic oligonucleotide
  Sense strand starting at position 216 of SEQ ID NO: 1242577
ucauuaagucaucggcuau

SEQ ID NO: 1358329 - RNA, 19 nt, Artificial Sequence
  Description of Artificial Sequence: Synthetic oligonucleotide
  Antisense strand to SEQ ID NO: 1358328
auagccgaugacuuaauga

SEQ ID NO: 1358330 - RNA, 19 nt, Artificial Sequence
  Description of Artificial Sequence: Synthetic oligonucleotide
  Sense strand starting at position 220 of SEQ ID NO: 1242577
uaagucaucggcuaugauu

SEQ ID NO: 1358331 - RNA, 19 nt, Artificial Sequence
  Description of Artificial Sequence: Synthetic oligonucleotide
  Antisense strand to SEQ ID NO: 1358330
aaucauagccgaugacuua

SEQ ID NO: 1358332 - RNA, 19 nt, Artificial Sequence
  Description of Artificial Sequence: Synthetic oligonucleotide
  Sense strand starting at position 228 of SEQ ID NO: 1242577
cggcuaugauucuuggcau

SEQ ID NO: 1358333 - RNA, 19 nt, Artificial Sequence
  Description of Artificial Sequence: Synthetic oligonucleotide
  Antisense strand to SEQ ID NO: 1358332
augccaagaaucauagccg

SEQ ID NO: 1358334 - RNA, 19 nt, Artificial Sequence
  Description of Artificial Sequence: Synthetic oligonucleotide
  Sense strand starting at position 235 of SEQ ID NO: 1242577
gauucuuggcaucacggaa

SEQ ID NO: 1358335 - RNA, 19 nt, Artificial Sequence
  Description of Artificial Sequence: Synthetic oligonucleotide
  Antisense strand to SEQ ID NO: 1358334
uuccgugaugccaagaauc

SEQ ID NO: 1358336 - RNA, 19 nt, Artificial Sequence
  Description of Artificial Sequence: Synthetic oligonucleotide
  Sense strand starting at position 239 of SEQ ID NO: 1242577
cuuggcaucacggaaugaa

SEQ ID NO: 1358337 - RNA, 19 nt, Artificial Sequence
  Description of Artificial Sequence: Synthetic oligonucleotide
  Antisense strand to SEQ ID NO: 1358336
uucauuccgugaugccaag

SEQ ID NO: 1358338 - RNA, 19 nt, Artificial Sequence
  Description of Artificial Sequence: Synthetic oligonucleotide
  Sense strand starting at position 242 of SEQ ID NO: 1242577
ggcaucacggaaugaauca

SEQ ID NO: 1358339 - RNA, 19 nt, Artificial Sequence
  Description of Artificial Sequence: Synthetic oligonucleotide
  Antisense strand to SEQ ID NO: 1358338
ugauucauuccgugaugcc

SEQ ID NO: 1358340 - RNA, 19 nt, Artificial Sequence
  Description of Artificial Sequence: Synthetic oligonucleotide
  Sense strand starting at position 290 of SEQ ID NO: 1242577
agguccuucccgugcauaa

SEQ ID NO: 1358341 - RNA, 19 nt, Artificial Sequence
  Description of Artificial Sequence: Synthetic oligonucleotide
  Antisense strand to SEQ ID NO: 1358340
uuaugcacgggaaggaccu

SEQ ID NO: 1358342 - RNA, 19 nt, Artificial Sequence
  Description of Artificial Sequence: Synthetic oligonucleotide
  Sense strand starting at position 564 of SEQ ID NO: 1242577
agagcacuucgaugcacau

SEQ ID NO: 1358343 - RNA, 19 nt, Artificial Sequence
  Description of Artificial Sequence: Synthetic oligonucleotide
  Antisense strand to SEQ ID NO: 1358342
augugcaucgaagugcucu

SEQ ID NO: 1358344 - RNA, 19 nt, Artificial Sequence
  Description of Artificial Sequence: Synthetic oligonucleotide
  Sense strand starting at position 570 of SEQ ID NO: 1242577
cuucgaugcacauggagaa

SEQ ID NO: 1358345 - RNA, 19 nt, Artificial Sequence
  Description of Artificial Sequence: Synthetic oligonucleotide
  Antisense strand to SEQ ID NO: 1358344
uucuccaugugcaucgaag

SEQ ID NO: 1358346 - RNA, 19 nt, Artificial Sequence
  Description of Artificial Sequence: Synthetic oligonucleotide
  Sense strand starting at position 740 of SEQ ID NO: 1242577
gcguaaugccgggcguaca

SEQ ID NO: 1358347 - RNA, 19 nt, Artificial Sequence
  Description of Artificial Sequence: Synthetic oligonucleotide
  Antisense strand to SEQ ID NO: 1358346
uguacgcccggcauuacgc

SEQ ID NO: 1358348 - RNA, 19 nt, Artificial Sequence
  Description of Artificial Sequence: Synthetic oligonucleotide
  Sense strand starting at position 750 of SEQ ID NO: 1242577
gggcguacagcuuggugaa

SEQ ID NO: 1358349 - RNA, 19 nt, Artificial Sequence
  Description of Artificial Sequence: Synthetic oligonucleotide
  Antisense strand to SEQ ID NO: 1358348
uucaccaagcuguacgccc

SEQ ID NO: 1358350 - RNA, 19 nt, Artificial Sequence
  Description of Artificial Sequence: Synthetic oligonucleotide
  Sense strand starting at position 825 of SEQ ID NO: 1242577
ugacgaucagucuggaucu

SEQ ID NO: 1358351 - RNA, 19 nt, Artificial Sequence
  Description of Artificial Sequence: Synthetic oligonucleotide
  Antisense strand to SEQ ID NO: 1358350
agauccagacugaucguca

SEQ ID NO: 1358352 - RNA, 19 nt, Artificial Sequence
  Description of Artificial Sequence: Synthetic oligonucleotide
  Sense strand starting at position 879 of SEQ ID NO: 1242577
aggcgaagccgauguagaa

SEQ ID NO: 1358353 - RNA, 19 nt, Artificial Sequence
  Description of Artificial Sequence: Synthetic oligonucleotide
  Antisense strand to SEQ ID NO: 1358352
uucuacaucggcuucgccu

SEQ ID NO: 1358354 - RNA, 19 nt, Artificial Sequence
  Description of Artificial Sequence: Synthetic oligonucleotide
  Sense strand starting at position 2245 of SEQ ID NO: 1242577
gcccgcugucacugacaga

SEQ ID NO: 1358355 - RNA, 19 nt, Artificial Sequence
  Description of Artificial Sequence: Synthetic oligonucleotide
  Antisense strand to SEQ ID NO: 1358354
ucugucagugacagcgggc

SEQ ID NO: 1358356 - RNA, 19 nt, Artificial Sequence
  Description of Artificial Sequence: Synthetic oligonucleotide
  Sense strand starting at position 2604 of SEQ ID NO: 1242577
ggccgcaacguuugggaaa

SEQ ID NO: 1358357 - RNA, 19 nt, Artificial Sequence
  Description of Artificial Sequence: Synthetic oligonucleotide
  Antisense strand to SEQ ID NO: 1358356
uuucccaaacguugcggcc

SEQ ID NO: 1358358 - RNA, 19 nt, Artificial Sequence
  Description of Artificial Sequence: Synthetic oligonucleotide
  Sense strand starting at position 2669 of SEQ ID NO: 1242577
guuuccaaccguuggauuu

SEQ ID NO: 1358359 - RNA, 19 nt, Artificial Sequence
  Description of Artificial Sequence: Synthetic oligonucleotide
  Antisense strand to SEQ ID NO: 1358358
aaauccaacgguuggaaac

SEQ ID NO: 1358360 - RNA, 19 nt, Artificial Sequence
  Description of Artificial Sequence: Synthetic oligonucleotide
  Sense strand starting at position 2945 of SEQ ID NO: 1242577
ugcauuggccuccauaaac

SEQ ID NO: 1358361 - RNA, 19 nt, Artificial Sequence
  Description of Artificial Sequence: Synthetic oligonucleotide
  Antisense strand to SEQ ID NO: 1358360
guuuauggaggccaaugca

SEQ ID NO: 1358362 - RNA, 19 nt, Artificial Sequence
  Description of Artificial Sequence: Synthetic oligonucleotide
  Sense strand starting at position 2959 of SEQ ID NO: 1242577
uaaacauugccacguguaa

SEQ ID NO: 1358363 - RNA, 19 nt, Artificial Sequence
  Description of Artificial Sequence: Synthetic oligonucleotide
  Antisense strand to SEQ ID NO: 1358362
uuacacguggcaauguuua

SEQ ID NO: 1358364 - RNA, 19 nt, Artificial Sequence
  Description of Artificial Sequence: Synthetic oligonucleotide
  Sense strand starting at position 2963 of SEQ ID NO: 1242577
cauugccacguguaaauaa

SEQ ID NO: 1358365 - RNA, 19 nt, Artificial Sequence
  Description of Artificial Sequence: Synthetic oligonucleotide
  Antisense strand to SEQ ID NO: 1358364
uuauuuacacguggcaaug

SEQ ID NO: 1358366 - RNA, 19 nt, Artificial Sequence
  Description of Artificial Sequence: Synthetic oligonucleotide
  Sense strand starting at position 3109 of SEQ ID NO: 1242577
aggucucacuguugaauua

SEQ ID NO: 1358367 - RNA, 19 nt, Artificial Sequence
  Description of Artificial Sequence: Synthetic oligonucleotide
  Antisense strand to SEQ ID NO: 1358366
uaauucaacagugagaccu

SEQ ID NO: 1358368 - RNA, 19 nt, Artificial Sequence
  Description of Artificial Sequence: Synthetic oligonucleotide
  Sense strand starting at position 3163 of SEQ ID NO: 1242577
ggaauauuauucggcuaca

SEQ ID NO: 1358369 - RNA, 19 nt, Artificial Sequence
  Description of Artificial Sequence: Synthetic oligonucleotide
  Antisense strand to SEQ ID NO: 1358368
uguagccgaauaauauucc

SEQ ID NO: 1358370 - RNA, 19 nt, Artificial Sequence
  Description of Artificial Sequence: Synthetic oligonucleotide
  Sense strand starting at position 3232 of SEQ ID NO: 1242577
cguuaugcuagugaaagaa

SEQ ID NO: 1358371 - RNA, 19 nt, Artificial Sequence
  Description of Artificial Sequence: Synthetic oligonucleotide
  Antisense strand to SEQ ID NO: 1358370
uucuuucacuagcauaacg

SEQ ID NO: 1358372 - RNA, 19 nt, Artificial Sequence
  Description of Artificial Sequence: Synthetic oligonucleotide
  Sense strand starting at position 3264 of SEQ ID NO: 1242577
ggccacauagcguaugauu

SEQ ID NO: 1358373 - RNA, 19 nt, Artificial Sequence
  Description of Artificial Sequence: Synthetic oligonucleotide
  Antisense strand to SEQ ID NO: 1358372
aaucauacgcuauguggcc

SEQ ID NO: 1358374 - RNA, 19 nt, Artificial Sequence
  Description of Artificial Sequence: Synthetic oligonucleotide
  Sense strand starting at position 3290 of SEQ ID NO: 1242577
gaugaaaugucucgaauug

SEQ ID NO: 1358375 - RNA, 19 nt, Artificial Sequence
  Description of Artificial Sequence: Synthetic oligonucleotide
  Antisense strand to SEQ ID NO: 1358374
caauucgagacauuucauc

SEQ ID NO: 1358376 - RNA, 19 nt, Artificial Sequence
  Description of Artificial Sequence: Synthetic oligonucleotide
  Sense strand starting at position 3791 of SEQ ID NO: 1242577
aaauguuauguugagugua

SEQ ID NO: 1358377 - RNA, 19 nt, Artificial Sequence
  Description of Artificial Sequence: Synthetic oligonucleotide
  Antisense strand to SEQ ID NO: 1358376
uacacucaacauaacauuu

SEQ ID NO: 1358378 - RNA, 19 nt, Artificial Sequence
  Description of Artificial Sequence: Synthetic oligonucleotide
  Sense strand starting at position 3793 of SEQ ID NO: 1242577
auguuauguugaguguauu

SEQ ID NO: 1358379 - RNA, 19 nt, Artificial Sequence
  Description of Artificial Sequence: Synthetic oligonucleotide
  Antisense strand to SEQ ID NO: 1358378
aauacacucaacauaacau

SEQ ID NO: 1358380 - RNA, 19 nt, Artificial Sequence
  Description of Artificial Sequence: Synthetic oligonucleotide
  Sense strand starting at position 3794 of SEQ ID NO: 1242577
uguuauguugaguguauuu

SEQ ID NO: 1358381 - RNA, 19 nt, Artificial Sequence
  Description of Artificial Sequence: Synthetic oligonucleotide
  Antisense strand to SEQ ID NO: 1358380
aaauacacucaacauaaca

SEQ ID NO: 1358382 - RNA, 19 nt, Artificial Sequence
  Description of Artificial Sequence: Synthetic oligonucleotide
  Sense strand starting at position 3855 of SEQ ID NO: 1242577
gugguauuccugcagaagu

SEQ ID NO: 1358383 - RNA, 19 nt, Artificial Sequence
  Description of Artificial Sequence: Synthetic oligonucleotide
  Antisense strand to SEQ ID NO: 1358382
acuucugcaggaauaccac

SEQ ID NO: 1358384 - RNA, 19 nt, Artificial Sequence
  Description of Artificial Sequence: Synthetic oligonucleotide
  Sense strand starting at position 3857 of SEQ ID NO: 1242577
gguauuccugcagaagugu

SEQ ID NO: 1358385 - RNA, 19 nt, Artificial Sequence
  Description of Artificial Sequence: Synthetic oligonucleotide
  Antisense strand to SEQ ID NO: 1358384
acacuucugcaggaauacc

SEQ ID NO: 1358386 - RNA, 19 nt, Artificial Sequence
  Description of Artificial Sequence: Synthetic oligonucleotide
  Sense strand starting at position 3863 of SEQ ID NO: 1242577
ccugcagaaguguguaauc

SEQ ID NO: 1358387 - RNA, 19 nt, Artificial Sequence
  Description of Artificial Sequence: Synthetic oligonucleotide
  Antisense strand to SEQ ID NO: 1358386
gauuacacacuucugcagg

SEQ ID NO: 1358388 - RNA, 19 nt, Artificial Sequence
  Description of Artificial Sequence: Synthetic oligonucleotide
  Sense strand starting at position 3868 of SEQ ID NO: 1242577
agaaguguguaaucucaau

SEQ ID NO: 1358389 - RNA, 19 nt, Artificial Sequence
  Description of Artificial Sequence: Synthetic oligonucleotide
  Antisense strand to SEQ ID NO: 1358388
auugagauuacacacuucu

SEQ ID NO: 1358390 - RNA, 19 nt, Artificial Sequence
  Description of Artificial Sequence: Synthetic oligonucleotide
  Sense strand starting at position 3882 of SEQ ID NO: 1242577
ucaauccaaucgcaagaaa

SEQ ID NO: 1358391 - RNA, 19 nt, Artificial Sequence
  Description of Artificial Sequence: Synthetic oligonucleotide
  Antisense strand to SEQ ID NO: 1358390
uuucuugcgauuggauuga

SEQ ID NO: 1358392 - RNA, 19 nt, Artificial Sequence
  Description of Artificial Sequence: Synthetic oligonucleotide
  Sense strand starting at position 3920 of SEQ ID NO: 1242577
ugagaccuguucuacaaag

SEQ ID NO: 1358393 - RNA, 19 nt, Artificial Sequence
  Description of Artificial Sequence: Synthetic oligonucleotide
  Antisense strand to SEQ ID NO: 1358392
cuuuguagaacaggucuca

SEQ ID NO: 1358394 - RNA, 19 nt, Artificial Sequence
  Description of Artificial Sequence: Synthetic oligonucleotide
  Sense strand starting at position 3938 of SEQ ID NO: 1242577
gugauuaaccaguacccau

SEQ ID NO: 1358395 - RNA, 19 nt, Artificial Sequence
  Description of Artificial Sequence: Synthetic oligonucleotide
  Antisense strand to SEQ ID NO: 1358394
auggguacugguuaaucac

SEQ ID NO: 1358396 - RNA, 19 nt, Artificial Sequence
  Description of Artificial Sequence: Synthetic oligonucleotide
  Sense strand starting at position 3973 of SEQ ID NO: 1242577
cacuuugggucuugaaaga

SEQ ID NO: 1358397 - RNA, 19 nt, Artificial Sequence
  Description of Artificial Sequence: Synthetic oligonucleotide
  Antisense strand to SEQ ID NO: 1358396
ucuuucaagacccaaagug

SEQ ID NO: 1358398 - RNA, 19 nt, Artificial Sequence
  Description of Artificial Sequence: Synthetic oligonucleotide
  Sense strand starting at position 142 of SEQ ID NO: 1242578
uggauuaauuagccaugga

SEQ ID NO: 1358399 - RNA, 19 nt, Artificial Sequence
  Description of Artificial Sequence: Synthetic oligonucleotide
  Antisense strand to SEQ ID NO: 1358398
uccauggcuaauuaaucca

SEQ ID NO: 1358400 - RNA, 19 nt, Artificial Sequence
  Description of Artificial Sequence: Synthetic oligonucleotide
  Sense strand starting at position 281 of SEQ ID NO: 1242578
uagugcuuucucgcuuuaa

SEQ ID NO: 1358401 - RNA, 19 nt, Artificial Sequence
  Description of Artificial Sequence: Synthetic oligonucleotide
  Antisense strand to SEQ ID NO: 1358400
uuaaagcgagaaagcacua

SEQ ID NO: 1358402 - RNA, 19 nt, Artificial Sequence
  Description of Artificial Sequence: Synthetic oligonucleotide
  Sense strand starting at position 283 of SEQ ID NO: 1242578
gugcuuucucgcuuuaaca

SEQ ID NO: 1358403 - RNA, 19 nt, Artificial Sequence
  Description of Artificial Sequence: Synthetic oligonucleotide
  Antisense strand to SEQ ID NO: 1358402
uguuaaagcgagaaagcac

SEQ ID NO: 1358404 - RNA, 19 nt, Artificial Sequence
  Description of Artificial Sequence: Synthetic oligonucleotide
  Sense strand starting at position 285 of SEQ ID NO: 1242578
gcuuucucgcuuuaacaaa

SEQ ID NO: 1358405 - RNA, 19 nt, Artificial Sequence
  Description of Artificial Sequence: Synthetic oligonucleotide
  Antisense strand to SEQ ID NO: 1358404
uuuguuaaagcgagaaagc

SEQ ID NO: 1358406 - RNA, 19 nt, Artificial Sequence
  Description of Artificial Sequence: Synthetic oligonucleotide
  Sense strand starting at position 318 of SEQ ID NO: 1242578
uuccuuccugugugucauu

SEQ ID NO: 1358407 - RNA, 19 nt, Artificial Sequence
  Description of Artificial Sequence: Synthetic oligonucleotide
  Antisense strand to SEQ ID NO: 1358406
aaugacacacaggaaggaa

SEQ ID NO: 1358408 - RNA, 19 nt, Artificial Sequence
  Description of Artificial Sequence: Synthetic oligonucleotide
  Sense strand starting at position 330 of SEQ ID NO: 1242578
ugucauucguuuguuacuu

SEQ ID NO: 1358409 - RNA, 19 nt, Artificial Sequence
  Description of Artificial Sequence: Synthetic oligonucleotide
  Antisense strand to SEQ ID NO: 1358408
aaguaacaaacgaaugaca

SEQ ID NO: 1358410 - RNA, 19 nt, Artificial Sequence
  Description of Artificial Sequence: Synthetic oligonucleotide
  Sense strand starting at position 331 of SEQ ID NO: 1242578
gucauucguuuguuacuuu

SEQ ID NO: 1358411 - RNA, 19 nt, Artificial Sequence
  Description of Artificial Sequence: Synthetic oligonucleotide
  Antisense strand to SEQ ID NO: 1358410
aaaguaacaaacgaaugac

SEQ ID NO: 1358412 - RNA, 19 nt, Artificial Sequence
  Description of Artificial Sequence: Synthetic oligonucleotide
  Sense strand starting at position 338 of SEQ ID NO: 1242578
guuuguuacuuucuggguu

SEQ ID NO: 1358413 - RNA, 19 nt, Artificial Sequence
  Description of Artificial Sequence: Synthetic oligonucleotide
  Antisense strand to SEQ ID NO: 1358412
aacccagaaaguaacaaac

SEQ ID NO: 1358414 - RNA, 19 nt, Artificial Sequence
  Description of Artificial Sequence: Synthetic oligonucleotide
  Sense strand starting at position 437 of SEQ ID NO: 1242578
caggcuuugcguggaagua

SEQ ID NO: 1358415 - RNA, 19 nt, Artificial Sequence
  Description of Artificial Sequence: Synthetic oligonucleotide
  Antisense strand to SEQ ID NO: 1358414
uacuuccacgcaaagccug

SEQ ID NO: 1358416 - RNA, 19 nt, Artificial Sequence
  Description of Artificial Sequence: Synthetic oligonucleotide
  Sense strand starting at position 471 of SEQ ID NO: 1242578
gccuaaggcuuauuuguua

SEQ ID NO: 1358417 - RNA, 19 nt, Artificial Sequence
  Description of Artificial Sequence: Synthetic oligonucleotide
  Antisense strand to SEQ ID NO: 1358416
uaacaaauaagccuuaggc

SEQ ID NO: 1358418 - RNA, 19 nt, Artificial Sequence
  Description of Artificial Sequence: Synthetic oligonucleotide
  Sense strand starting at position 475 of SEQ ID NO: 1242578
aaggcuuauuuguuagcca

SEQ ID NO: 1358419 - RNA, 19 nt, Artificial Sequence
  Description of Artificial Sequence: Synthetic oligonucleotide
  Antisense strand to SEQ ID NO: 1358418
uggcuaacaaauaagccuu

SEQ ID NO: 1358420 - RNA, 19 nt, Artificial Sequence
  Description of Artificial Sequence: Synthetic oligonucleotide
  Sense strand starting at position 478 of SEQ ID NO: 1242578
gcuuauuuguuagccagga

SEQ ID NO: 1358421 - RNA, 19 nt, Artificial Sequence
  Description of Artificial Sequence: Synthetic oligonucleotide
  Antisense strand to SEQ ID NO: 1358420
uccuggcuaacaaauaagc

SEQ ID NO: 1358422 - RNA, 19 nt, Artificial Sequence
  Description of Artificial Sequence: Synthetic oligonucleotide
  Sense strand starting at position 483 of SEQ ID NO: 1242578
uuuguuagccaggagugau

SEQ ID NO: 1358423 - RNA, 19 nt, Artificial Sequence
  Description of Artificial Sequence: Synthetic oligonucleotide
  Antisense strand to SEQ ID NO: 1358422
aucacuccuggcuaacaaa

SEQ ID NO: 1358424 - RNA, 19 nt, Artificial Sequence
  Description of Artificial Sequence: Synthetic oligonucleotide
  Sense strand starting at position 533 of SEQ ID NO: 1242578
ccgcacuugcuguacaaga

SEQ ID NO: 1358425 - RNA, 19 nt, Artificial Sequence
  Description of Artificial Sequence: Synthetic oligonucleotide
  Antisense strand to SEQ ID NO: 1358424
ucuuguacagcaagugcgg

SEQ ID NO: 1358426 - RNA, 19 nt, Artificial Sequence
  Description of Artificial Sequence: Synthetic oligonucleotide
  Sense strand starting at position 535 of SEQ ID NO: 1242578
gcacuugcuguacaagauu

SEQ ID NO: 1358427 - RNA, 19 nt, Artificial Sequence
  Description of Artificial Sequence: Synthetic oligonucleotide
  Antisense strand to SEQ ID NO: 1358426
aaucuuguacagcaagugc

SEQ ID NO: 1358428 - RNA, 19 nt, Artificial Sequence
  Description of Artificial Sequence: Synthetic oligonucleotide
  Sense strand starting at position 654 of SEQ ID NO: 1242578
cugggauaagaguaugugu

SEQ ID NO: 1358429 - RNA, 19 nt, Artificial Sequence
  Description of Artificial Sequence: Synthetic oligonucleotide
  Antisense strand to SEQ ID NO: 1358428
acacauacucuuaucccag

SEQ ID NO: 1358430 - RNA, 19 nt, Artificial Sequence
  Description of Artificial Sequence: Synthetic oligonucleotide
  Sense strand starting at position 659 of SEQ ID NO: 1242578
auaagaguaugugugguuu

SEQ ID NO: 1358431 - RNA, 19 nt, Artificial Sequence
  Description of Artificial Sequence: Synthetic oligonucleotide
  Antisense strand to SEQ ID NO: 1358430
aaaccacacauacucuuau

SEQ ID NO: 1358432 - RNA, 19 nt, Artificial Sequence
  Description of Artificial Sequence: Synthetic oligonucleotide
  Sense strand starting at position 663 of SEQ ID NO: 1242578
gaguaugugugguuucuug

SEQ ID NO: 1358433 - RNA, 19 nt, Artificial Sequence
  Description of Artificial Sequence: Synthetic oligonucleotide
  Antisense strand to SEQ ID NO: 1358432
caagaaaccacacauacuc

SEQ ID NO: 1358434 - RNA, 19 nt, Artificial Sequence
  Description of Artificial Sequence: Synthetic oligonucleotide
  Sense strand starting at position 674 of SEQ ID NO: 1242578
guuucuuggcuuggugaca

SEQ ID NO: 1358435 - RNA, 19 nt, Artificial Sequence
  Description of Artificial Sequence: Synthetic oligonucleotide
  Antisense strand to SEQ ID NO: 1358434
ugucaccaagccaagaaac

SEQ ID NO: 1358436 - RNA, 19 nt, Artificial Sequence
  Description of Artificial Sequence: Synthetic oligonucleotide
  Sense strand starting at position 725 of SEQ ID NO: 1242578
gacggccacguuugaaaua

SEQ ID NO: 1358437 - RNA, 19 nt, Artificial Sequence
  Description of Artificial Sequence: Synthetic oligonucleotide
  Antisense strand to SEQ ID NO: 1358436
uauuucaaacguggccguc

SEQ ID NO: 1358438 - RNA, 19 nt, Artificial Sequence
  Description of Artificial Sequence: Synthetic oligonucleotide
  Sense strand starting at position 761 of SEQ ID NO: 1242578
ggucccauccuuuauucga

SEQ ID NO: 1358439 - RNA, 19 nt, Artificial Sequence
  Description of Artificial Sequence: Synthetic oligonucleotide
  Antisense strand to SEQ ID NO: 1358438
ucgaauaaaggaugggacc

SEQ ID NO: 1358440 - RNA, 19 nt, Artificial Sequence
  Description of Artificial Sequence: Synthetic oligonucleotide
  Sense strand starting at position 1394 of SEQ ID NO: 1242578
gagacuauuuguggccaga

SEQ ID NO: 1358441 - RNA, 19 nt, Artificial Sequence
  Description of Artificial Sequence: Synthetic oligonucleotide
  Antisense strand to SEQ ID NO: 1358440
ucuggccacaaauagucuc

SEQ ID NO: 1358442 - RNA, 19 nt, Artificial Sequence
  Description of Artificial Sequence: Synthetic oligonucleotide
  Sense strand starting at position 1712 of SEQ ID NO: 1242578
ccgggauucuugccuagag

SEQ ID NO: 1358443 - RNA, 19 nt, Artificial Sequence
  Description of Artificial Sequence: Synthetic oligonucleotide
  Antisense strand to SEQ ID NO: 1358442
cucuaggcaagaaucccgg

SEQ ID NO: 1358444 - RNA, 19 nt, Artificial Sequence
  Description of Artificial Sequence: Synthetic oligonucleotide
  Sense strand starting at position 1713 of SEQ ID NO: 1242578
cgggauucuugccuagaga

SEQ ID NO: 1358445 - RNA, 19 nt, Artificial Sequence
  Description of Artificial Sequence: Synthetic oligonucleotide
  Antisense strand to SEQ ID NO: 1358444
ucucuaggcaagaaucccg

SEQ ID NO: 1358446 - RNA, 19 nt, Artificial Sequence
  Description of Artificial Sequence: Synthetic oligonucleotide
  Sense strand starting at position 1716 of SEQ ID NO: 1242578
gauucuugccuagagaguu

SEQ ID NO: 1358447 - RNA, 19 nt, Artificial Sequence
  Description of Artificial Sequence: Synthetic oligonucleotide
  Antisense strand to SEQ ID NO: 1358446
aacucucuaggcaagaauc

SEQ ID NO: 1358448 - RNA, 19 nt, Artificial Sequence
  Description of Artificial Sequence: Synthetic oligonucleotide
  Sense strand starting at position 1876 of SEQ ID NO: 1242578
uuuguucuacaagaggagu

SEQ ID NO: 1358449 - RNA, 19 nt, Artificial Sequence
  Description of Artificial Sequence: Synthetic oligonucleotide
  Antisense strand to SEQ ID NO: 1358448
acuccucuuguagaacaaa

SEQ ID NO: 1358450 - RNA, 19 nt, Artificial Sequence
  Description of Artificial Sequence: Synthetic oligonucleotide
  Sense strand starting at position 1889 of SEQ ID NO: 1242578
aggagugccuaucuccaau

SEQ ID NO: 1358451 - RNA, 19 nt, Artificial Sequence
  Description of Artificial Sequence: Synthetic oligonucleotide
  Antisense strand to SEQ ID NO: 1358450
auuggagauaggcacuccu

SEQ ID NO: 1358452 - RNA, 19 nt, Artificial Sequence
  Description of Artificial Sequence: Synthetic oligonucleotide
  Sense strand starting at position 1914 of SEQ ID NO: 1242578
ugagguuuccaggagccga

SEQ ID NO: 1358453 - RNA, 19 nt, Artificial Sequence
  Description of Artificial Sequence: Synthetic oligonucleotide
  Antisense strand to SEQ ID NO: 1358452
ucggcuccuggaaaccuca

SEQ ID NO: 1358454 - RNA, 19 nt, Artificial Sequence
  Description of Artificial Sequence: Synthetic oligonucleotide
  Sense strand starting at position 1919 of SEQ ID NO: 1242578
uuuccaggagccgauuaaa

SEQ ID NO: 1358455 - RNA, 19 nt, Artificial Sequence
  Description of Artificial Sequence: Synthetic oligonucleotide
  Antisense strand to SEQ ID NO: 1358454
uuuaaucggcuccuggaaa

SEQ ID NO: 1358456 - RNA, 19 nt, Artificial Sequence
  Description of Artificial Sequence: Synthetic oligonucleotide
  Sense strand starting at position 2067 of SEQ ID NO: 1242578
cccagagaugcuuacucaa

SEQ ID NO: 1358457 - RNA, 19 nt, Artificial Sequence
  Description of Artificial Sequence: Synthetic oligonucleotide
  Antisense strand to SEQ ID NO: 1358456
uugaguaagcaucucuggg

SEQ ID NO: 1358458 - RNA, 19 nt, Artificial Sequence
  Description of Artificial Sequence: Synthetic oligonucleotide
  Sense strand starting at position 2198 of SEQ ID NO: 1242578
uggguuucuuuggagggaa

SEQ ID NO: 1358459 - RNA, 19 nt, Artificial Sequence
  Description of Artificial Sequence: Synthetic oligonucleotide
  Antisense strand to SEQ ID NO: 1358458
uucccuccaaagaaaccca

SEQ ID NO: 1358460 - RNA, 19 nt, Artificial Sequence
  Description of Artificial Sequence: Synthetic oligonucleotide
  Sense strand starting at position 2199 of SEQ ID NO: 1242578
ggguuucuuuggagggaaa

SEQ ID NO: 1358461 - RNA, 19 nt, Artificial Sequence
  Description of Artificial Sequence: Synthetic oligonucleotide
  Antisense strand to SEQ ID NO: 1358460
uuucccuccaaagaaaccc

SEQ ID NO: 1358462 - RNA, 19 nt, Artificial Sequence
  Description of Artificial Sequence: Synthetic oligonucleotide
  Sense strand starting at position 2200 of SEQ ID NO: 1242578
gguuucuuuggagggaaag

SEQ ID NO: 1358463 - RNA, 19 nt, Artificial Sequence
  Description of Artificial Sequence: Synthetic oligonucleotide
  Antisense strand to SEQ ID NO: 1358462
cuuucccuccaaagaaacc

SEQ ID NO: 1358464 - RNA, 19 nt, Artificial Sequence
  Description of Artificial Sequence: Synthetic oligonucleotide
  Sense strand starting at position 2290 of SEQ ID NO: 1242578
ccuccagguuucuccaaga

SEQ ID NO: 1358465 - RNA, 19 nt, Artificial Sequence
  Description of Artificial Sequence: Synthetic oligonucleotide
  Antisense strand to SEQ ID NO: 1358464
ucuuggagaaaccuggagg

SEQ ID NO: 1358466 - RNA, 19 nt, Artificial Sequence
  Description of Artificial Sequence: Synthetic oligonucleotide
  Sense strand starting at position 2481 of SEQ ID NO: 1242578
cugucuaugccuggucuca

SEQ ID NO: 1358467 - RNA, 19 nt, Artificial Sequence
  Description of Artificial Sequence: Synthetic oligonucleotide
  Antisense strand to SEQ ID NO: 1358466
ugagaccaggcauagacag

SEQ ID NO: 1358468 - RNA, 19 nt, Artificial Sequence
  Description of Artificial Sequence: Synthetic oligonucleotide
  Sense strand starting at position 2483 of SEQ ID NO: 1242578
gucuaugccuggucucauc

SEQ ID NO: 1358469 - RNA, 19 nt, Artificial Sequence
  Description of Artificial Sequence: Synthetic oligonucleotide
  Antisense strand to SEQ ID NO: 1358468
gaugagaccaggcauagac

SEQ ID NO: 1358470 - RNA, 19 nt, Artificial Sequence
  Description of Artificial Sequence: Synthetic oligonucleotide
  Sense strand starting at position 2587 of SEQ ID NO: 1242578
ugcagagcuguuuaucaca

SEQ ID NO: 1358471 - RNA, 19 nt, Artificial Sequence
  Description of Artificial Sequence: Synthetic oligonucleotide
  Antisense strand to SEQ ID NO: 1358470
ugugauaaacagcucugca

SEQ ID NO: 1358472 - RNA, 19 nt, Artificial Sequence
  Description of Artificial Sequence: Synthetic oligonucleotide
  Sense strand starting at position 2609 of SEQ ID NO: 1242578
guguccaucugggaaagga

SEQ ID NO: 1358473 - RNA, 19 nt, Artificial Sequence
  Description of Artificial Sequence: Synthetic oligonucleotide
  Antisense strand to SEQ ID NO: 1358472
uccuuucccagauggacac

SEQ ID NO: 1358474 - RNA, 19 nt, Artificial Sequence
  Description of Artificial Sequence: Synthetic oligonucleotide
  Sense strand starting at position 2636 of SEQ ID NO: 1242578
ugaaucagcuuugagagga

SEQ ID NO: 1358475 - RNA, 19 nt, Artificial Sequence
  Description of Artificial Sequence: Synthetic oligonucleotide
  Antisense strand to SEQ ID NO: 1358474
uccucucaaagcugauuca

SEQ ID NO: 1358476 - RNA, 19 nt, Artificial Sequence
  Description of Artificial Sequence: Synthetic oligonucleotide
  Sense strand starting at position 3505 of SEQ ID NO: 1242578
acaggugcucagugucuua

SEQ ID NO: 1358477 - RNA, 19 nt, Artificial Sequence
  Description of Artificial Sequence: Synthetic oligonucleotide
  Antisense strand to SEQ ID NO: 1358476
uaagacacugagcaccugu

SEQ ID NO: 1358478 - RNA, 19 nt, Artificial Sequence
  Description of Artificial Sequence: Synthetic oligonucleotide
  Sense strand starting at position 179 of SEQ ID NO: 1242579
cccugagccgcgucugauu

SEQ ID NO: 1358479 - RNA, 19 nt, Artificial Sequence
  Description of Artificial Sequence: Synthetic oligonucleotide
  Antisense strand to SEQ ID NO: 1358478
aaucagacgcggcucaggg

SEQ ID NO: 1358480 - RNA, 19 nt, Artificial Sequence
  Description of Artificial Sequence: Synthetic oligonucleotide
  Sense strand starting at position 464 of SEQ ID NO: 1242579
gggagcuagaccgggaauu

SEQ ID NO: 1358481 - RNA, 19 nt, Artificial Sequence
  Description of Artificial Sequence: Synthetic oligonucleotide
  Antisense strand to SEQ ID NO: 1358480
aauucccggucuagcuccc

SEQ ID NO: 1358482 - RNA, 19 nt, Artificial Sequence
  Description of Artificial Sequence: Synthetic oligonucleotide
  Sense strand starting at position 513 of SEQ ID NO: 1242579
ggauuccucugcuucccaa

SEQ ID NO: 1358483 - RNA, 19 nt, Artificial Sequence
  Description of Artificial Sequence: Synthetic oligonucleotide
  Antisense strand to SEQ ID NO: 1358482
uugggaagcagaggaaucc

SEQ ID NO: 1358484 - RNA, 19 nt, Artificial Sequence
  Description of Artificial Sequence: Synthetic oligonucleotide
  Sense strand starting at position 603 of SEQ ID NO: 1242579
gcuaaaggguucccaggau

SEQ ID NO: 1358485 - RNA, 19 nt, Artificial Sequence
  Description of Artificial Sequence: Synthetic oligonucleotide
  Antisense strand to SEQ ID NO: 1358484
auccugggaacccuuuagc

SEQ ID NO: 1358486 - RNA, 19 nt, Artificial Sequence
  Description of Artificial Sequence: Synthetic oligonucleotide
  Sense strand starting at position 676 of SEQ ID NO: 1242579
guagucagaguccgaagau

SEQ ID NO: 1358487 - RNA, 19 nt, Artificial Sequence
  Description of Artificial Sequence: Synthetic oligonucleotide
  Antisense strand to SEQ ID NO: 1358486
aucuucggacucugacuac

SEQ ID NO: 1358488 - RNA, 19 nt, Artificial Sequence
  Description of Artificial Sequence: Synthetic oligonucleotide
  Sense strand starting at position 767 of SEQ ID NO: 1242579
gaacaagacugggagacuu

SEQ ID NO: 1358489 - RNA, 19 nt, Artificial Sequence
  Description of Artificial Sequence: Synthetic oligonucleotide
  Antisense strand to SEQ ID NO: 1358488
aagucucccagucuuguuc

SEQ ID NO: 1358490 - RNA, 19 nt, Artificial Sequence
  Description of Artificial Sequence: Synthetic oligonucleotide
  Sense strand starting at position 789 of SEQ ID NO: 1242579
acaguuuccuccucgacaa

SEQ ID NO: 1358491 - RNA, 19 nt, Artificial Sequence
  Description of Artificial Sequence: Synthetic oligonucleotide
  Antisense strand to SEQ ID NO: 1358490
uugucgaggaggaaacugu

SEQ ID NO: 1358492 - RNA, 19 nt, Artificial Sequence
  Description of Artificial Sequence: Synthetic oligonucleotide
  Sense strand starting at position 790 of SEQ ID NO: 1242579
caguuuccuccucgacaag

SEQ ID NO: 1358493 - RNA, 19 nt, Artificial Sequence
  Description of Artificial Sequence: Synthetic oligonucleotide
  Antisense strand to SEQ ID NO: 1358492
cuugucgaggaggaaacug

SEQ ID NO: 1358494 - RNA, 19 nt, Artificial Sequence
  Description of Artificial Sequence: Synthetic oligonucleotide
  Sense strand starting at position 973 of SEQ ID NO: 1242579
gcuguaaggaauuaagcuu

SEQ ID NO: 1358495 - RNA, 19 nt, Artificial Sequence
  Description of Artificial Sequence: Synthetic oligonucleotide
  Antisense strand to SEQ ID NO: 1358494
aagcuuaauuccuuacagc

SEQ ID NO: 1358496 - RNA, 19 nt, Artificial Sequence
  Description of Artificial Sequence: Synthetic oligonucleotide
  Sense strand starting at position 984 of SEQ ID NO: 1242579
uuaagcuuccaagagcaua

SEQ ID NO: 1358497 - RNA, 19 nt, Artificial Sequence
  Description of Artificial Sequence: Synthetic oligonucleotide
  Antisense strand to SEQ ID NO: 1358496
uaugcucuuggaagcuuaa

SEQ ID NO: 1358498 - RNA, 19 nt, Artificial Sequence
  Description of Artificial Sequence: Synthetic oligonucleotide
  Sense strand starting at position 1455 of SEQ ID NO: 1242579
gggagaauguggucagcaa

SEQ ID NO: 1358499 - RNA, 19 nt, Artificial Sequence
  Description of Artificial Sequence: Synthetic oligonucleotide
  Antisense strand to SEQ ID NO: 1358498
uugcugaccacauucuccc

SEQ ID NO: 1358500 - RNA, 19 nt, Artificial Sequence
  Description of Artificial Sequence: Synthetic oligonucleotide
  Sense strand starting at position 1462 of SEQ ID NO: 1242579
uguggucagcaaugggauu

SEQ ID NO: 1358501 - RNA, 19 nt, Artificial Sequence
  Description of Artificial Sequence: Synthetic oligonucleotide
  Antisense strand to SEQ ID NO: 1358500
aaucccauugcugaccaca

SEQ ID NO: 1358502 - RNA, 19 nt, Artificial Sequence
  Description of Artificial Sequence: Synthetic oligonucleotide
  Sense strand starting at position 1469 of SEQ ID NO: 1242579
agcaaugggauucgggaau

SEQ ID NO: 1358503 - RNA, 19 nt, Artificial Sequence
  Description of Artificial Sequence: Synthetic oligonucleotide
  Antisense strand to SEQ ID NO: 1358502
auucccgaaucccauugcu

SEQ ID NO: 1358504 - RNA, 19 nt, Artificial Sequence
  Description of Artificial Sequence: Synthetic oligonucleotide
  Sense strand starting at position 1632 of SEQ ID NO: 1242579
ccaggccaguccuuugaaa

SEQ ID NO: 1358505 - RNA, 19 nt, Artificial Sequence
  Description of Artificial Sequence: Synthetic oligonucleotide
  Antisense strand to SEQ ID NO: 1358504
uuucaaaggacuggccugg

SEQ ID NO: 1358506 - RNA, 19 nt, Artificial Sequence
  Description of Artificial Sequence: Synthetic oligonucleotide
  Sense strand starting at position 1634 of SEQ ID NO: 1242579
aggccaguccuuugaaaug

SEQ ID NO: 1358507 - RNA, 19 nt, Artificial Sequence
  Description of Artificial Sequence: Synthetic oligonucleotide
  Antisense strand to SEQ ID NO: 1358506
cauuucaaaggacuggccu

SEQ ID NO: 1358508 - RNA, 19 nt, Artificial Sequence
  Description of Artificial Sequence: Synthetic oligonucleotide
  Sense strand starting at position 1740 of SEQ ID NO: 1242579
ccaucugccuggguagaga

SEQ ID NO: 1358509 - RNA, 19 nt, Artificial Sequence
  Description of Artificial Sequence: Synthetic oligonucleotide
  Antisense strand to SEQ ID NO: 1358508
ucucuacccaggcagaugg

SEQ ID NO: 1358510 - RNA, 19 nt, Artificial Sequence
  Description of Artificial Sequence: Synthetic oligonucleotide
  Sense strand starting at position 1847 of SEQ ID NO: 1242579
agggcuaucuccuuuccaa

SEQ ID NO: 1358511 - RNA, 19 nt, Artificial Sequence
  Description of Artificial Sequence: Synthetic oligonucleotide
  Antisense strand to SEQ ID NO: 1358510
uuggaaaggagauagcccu

SEQ ID NO: 1358512 - RNA, 19 nt, Artificial Sequence
  Description of Artificial Sequence: Synthetic oligonucleotide
  Sense strand starting at position 2060 of SEQ ID NO: 1242579
ggugauaggucauucuagg

SEQ ID NO: 1358513 - RNA, 19 nt, Artificial Sequence
  Description of Artificial Sequence: Synthetic oligonucleotide
  Antisense strand to SEQ ID NO: 1358512
ccuagaaugaccuaucacc

SEQ ID NO: 1358514 - RNA, 19 nt, Artificial Sequence
  Description of Artificial Sequence: Synthetic oligonucleotide
  Sense strand starting at position 2090 of SEQ ID NO: 1242579
gggagaggcuucccugaag

SEQ ID NO: 1358515 - RNA, 19 nt, Artificial Sequence
  Description of Artificial Sequence: Synthetic oligonucleotide
  Antisense strand to SEQ ID NO: 1358514
cuucagggaagccucuccc

SEQ ID NO: 1358516 - RNA, 19 nt, Artificial Sequence
  Description of Artificial Sequence: Synthetic oligonucleotide
  Sense strand starting at position 2093 of SEQ ID NO: 1242579
agaggcuucccugaaggua

SEQ ID NO: 1358517 - RNA, 19 nt, Artificial Sequence
  Description of Artificial Sequence: Synthetic oligonucleotide
  Antisense strand to SEQ ID NO: 1358516
uaccuucagggaagccucu

SEQ ID NO: 1358518 - RNA, 19 nt, Artificial Sequence
  Description of Artificial Sequence: Synthetic oligonucleotide
  Sense strand starting at position 2235 of SEQ ID NO: 1242579
cucgaaaugcuauggaaau

SEQ ID NO: 1358519 - RNA, 19 nt, Artificial Sequence
  Description of Artificial Sequence: Synthetic oligonucleotide
  Antisense strand to SEQ ID NO: 1358518
auuuccauagcauuucgag

SEQ ID NO: 1358520 - RNA, 19 nt, Artificial Sequence
  Description of Artificial Sequence: Synthetic oligonucleotide
  Sense strand starting at position 2293 of SEQ ID NO: 1242579
uguaaucacaacgauguga

SEQ ID NO: 1358521 - RNA, 19 nt, Artificial Sequence
  Description of Artificial Sequence: Synthetic oligonucleotide
  Antisense strand to SEQ ID NO: 1358520
ucacaucguugugauuaca

SEQ ID NO: 1358522 - RNA, 19 nt, Artificial Sequence
  Description of Artificial Sequence: Synthetic oligonucleotide
  Sense strand starting at position 2295 of SEQ ID NO: 1242579
uaaucacaacgaugugauc

SEQ ID NO: 1358523 - RNA, 19 nt, Artificial Sequence
  Description of Artificial Sequence: Synthetic oligonucleotide
  Antisense strand to SEQ ID NO: 1358522
gaucacaucguugugauua

SEQ ID NO: 1358524 - RNA, 19 nt, Artificial Sequence
  Description of Artificial Sequence: Synthetic oligonucleotide
  Sense strand starting at position 2313 of SEQ ID NO: 1242579
cgcaaugauucucccaauu

SEQ ID NO: 1358525 - RNA, 19 nt, Artificial Sequence
  Description of Artificial Sequence: Synthetic oligonucleotide
  Antisense strand to SEQ ID NO: 1358524
aauugggagaaucauugcg

SEQ ID NO: 1358526 - RNA, 19 nt, Artificial Sequence
  Description of Artificial Sequence: Synthetic oligonucleotide
  Sense strand starting at position 2326 of SEQ ID NO: 1242579
ccaauucggagaugaugua

SEQ ID NO: 1358527 - RNA, 19 nt, Artificial Sequence
  Description of Artificial Sequence: Synthetic oligonucleotide
  Antisense strand to SEQ ID NO: 1358526
uacaucaucuccgaauugg

SEQ ID NO: 1358528 - RNA, 19 nt, Artificial Sequence
  Description of Artificial Sequence: Synthetic oligonucleotide
  Sense strand starting at position 2491 of SEQ ID NO: 1242579
gcuccauaagaauggagau

SEQ ID NO: 1358529 - RNA, 19 nt, Artificial Sequence
  Description of Artificial Sequence: Synthetic oligonucleotide
  Antisense strand to SEQ ID NO: 1358528
aucuccauucuuauggagc

SEQ ID NO: 1358530 - RNA, 19 nt, Artificial Sequence
  Description of Artificial Sequence: Synthetic oligonucleotide
  Sense strand starting at position 2782 of SEQ ID NO: 1242579
aguagauguuucucaaauu

SEQ ID NO: 1358531 - RNA, 19 nt, Artificial Sequence
  Description of Artificial Sequence: Synthetic oligonucleotide
  Antisense strand to SEQ ID NO: 1358530
aauuugagaaacaucuacu

SEQ ID NO: 1358532 - RNA, 19 nt, Artificial Sequence
  Description of Artificial Sequence: Synthetic oligonucleotide
  Sense strand starting at position 2965 of SEQ ID NO: 1242579
cucauaaagcuuuguugau

SEQ ID NO: 1358533 - RNA, 19 nt, Artificial Sequence
  Description of Artificial Sequence: Synthetic oligonucleotide
  Antisense strand to SEQ ID NO: 1358532
aucaacaaagcuuuaugag

SEQ ID NO: 1358534 - RNA, 19 nt, Artificial Sequence
  Description of Artificial Sequence: Synthetic oligonucleotide
  Sense strand starting at position 2966 of SEQ ID NO: 1242579
ucauaaagcuuuguugauu

SEQ ID NO: 1358535 - RNA, 19 nt, Artificial Sequence
  Description of Artificial Sequence: Synthetic oligonucleotide
  Antisense strand to SEQ ID NO: 1358534
aaucaacaaagcuuuauga

SEQ ID NO: 1358536 - RNA, 19 nt, Artificial Sequence
  Description of Artificial Sequence: Synthetic oligonucleotide
  Sense strand starting at position 3038 of SEQ ID NO: 1242579
uuugguguacaguauauua

SEQ ID NO: 1358537 - RNA, 19 nt, Artificial Sequence
  Description of Artificial Sequence: Synthetic oligonucleotide
  Antisense strand to SEQ ID NO: 1358536
uaauauacuguacaccaaa

SEQ ID NO: 1358538 - RNA, 19 nt, Artificial Sequence
  Description of Artificial Sequence: Synthetic oligonucleotide
  Sense strand starting at position 3040 of SEQ ID NO: 1242579
ugguguacaguauauuaaa

SEQ ID NO: 1358539 - RNA, 19 nt, Artificial Sequence
  Description of Artificial Sequence: Synthetic oligonucleotide
  Antisense strand to SEQ ID NO: 1358538
uuuaauauacuguacacca

SEQ ID NO: 1358540 - RNA, 19 nt, Artificial Sequence
  Description of Artificial Sequence: Synthetic oligonucleotide
  Sense strand starting at position 3345 of SEQ ID NO: 1242579
ucuggccuaguuuauuaau

SEQ ID NO: 1358541 - RNA, 19 nt, Artificial Sequence
  Description of Artificial Sequence: Synthetic oligonucleotide
  Antisense strand to SEQ ID NO: 1358540
auuaauaaacuaggccaga

SEQ ID NO: 1358542 - RNA, 19 nt, Artificial Sequence
  Description of Artificial Sequence: Synthetic oligonucleotide
  Sense strand starting at position 3347 of SEQ ID NO: 1242579
uggccuaguuuauuaauuu

SEQ ID NO: 1358543 - RNA, 19 nt, Artificial Sequence
  Description of Artificial Sequence: Synthetic oligonucleotide
  Antisense strand to SEQ ID NO: 1358542
aaauuaauaaacuaggcca

SEQ ID NO: 1358544 - RNA, 19 nt, Artificial Sequence
  Description of Artificial Sequence: Synthetic oligonucleotide
  Sense strand starting at position 3551 of SEQ ID NO: 1242579
guauguaaccuuugagacu

SEQ ID NO: 1358545 - RNA, 19 nt, Artificial Sequence
  Description of Artificial Sequence: Synthetic oligonucleotide
  Antisense strand to SEQ ID NO: 1358544
agucucaaagguuacauac

SEQ ID NO: 1358546 - RNA, 19 nt, Artificial Sequence
  Description of Artificial Sequence: Synthetic oligonucleotide
  Sense strand starting at position 3592 of SEQ ID NO: 1242579
guucuugagcuccauccaa

SEQ ID NO: 1358547 - RNA, 19 nt, Artificial Sequence
  Description of Artificial Sequence: Synthetic oligonucleotide
  Antisense strand to SEQ ID NO: 1358546
uuggauggagcucaagaac

SEQ ID NO: 1358548 - RNA, 19 nt, Artificial Sequence
  Description of Artificial Sequence: Synthetic oligonucleotide
  Sense strand starting at position 3615 of SEQ ID NO: 1242579
ucacaagugucaguggaca

SEQ ID NO: 1358549 - RNA, 19 nt, Artificial Sequence
  Description of Artificial Sequence: Synthetic oligonucleotide
  Antisense strand to SEQ ID NO: 1358548
uguccacugacacuuguga

SEQ ID NO: 1358550 - RNA, 19 nt, Artificial Sequence
  Description of Artificial Sequence: Synthetic oligonucleotide
  Sense strand starting at position 3617 of SEQ ID NO: 1242579
acaagugucaguggacaca

SEQ ID NO: 1358551 - RNA, 19 nt, Artificial Sequence
  Description of Artificial Sequence: Synthetic oligonucleotide
  Antisense strand to SEQ ID NO: 1358550
uguguccacugacacuugu

SEQ ID NO: 1358552 - RNA, 19 nt, Artificial Sequence
  Description of Artificial Sequence: Synthetic oligonucleotide
  Sense strand starting at position 3713 of SEQ ID NO: 1242579
ugugaauagaguugcuaua

SEQ ID NO: 1358553 - RNA, 19 nt, Artificial Sequence
  Description of Artificial Sequence: Synthetic oligonucleotide
  Antisense strand to SEQ ID NO: 1358552
uauagcaacucuauucaca

SEQ ID NO: 1358554 - RNA, 19 nt, Artificial Sequence
  Description of Artificial Sequence: Synthetic oligonucleotide
  Sense strand starting at position 3767 of SEQ ID NO: 1242579
ucauuuauauaggguggaa

SEQ ID NO: 1358555 - RNA, 19 nt, Artificial Sequence
  Description of Artificial Sequence: Synthetic oligonucleotide
  Antisense strand to SEQ ID NO: 1358554
uuccacccuauauaaauga

SEQ ID NO: 1358556 - RNA, 19 nt, Artificial Sequence
  Description of Artificial Sequence: Synthetic oligonucleotide
  Sense strand starting at position 3770 of SEQ ID NO: 1242579
uuuauauaggguggaaagu

SEQ ID NO: 1358557 - RNA, 19 nt, Artificial Sequence
  Description of Artificial Sequence: Synthetic oligonucleotide
  Antisense strand to SEQ ID NO: 1358556
acuuuccacccuauauaaa

SEQ ID NO: 1358558 - RNA, 19 nt, Artificial Sequence
  Description of Artificial Sequence: Synthetic oligonucleotide
  Sense strand starting at position 112 of SEQ ID NO: 1242580
cuucaagucguggauaaga

SEQ ID NO: 1358559 - RNA, 19 nt, Artificial Sequence
  Description of Artificial Sequence: Synthetic oligonucleotide
  Antisense strand to SEQ ID NO: 1358558
ucuuauccacgacuugaag

SEQ ID NO: 1358560 - RNA, 19 nt, Artificial Sequence
  Description of Artificial Sequence: Synthetic oligonucleotide
  Sense strand starting at position 147 of SEQ ID NO: 1242580
ucauaaagucaguggguca

SEQ ID NO: 1358561 - RNA, 19 nt, Artificial Sequence
  Description of Artificial Sequence: Synthetic oligonucleotide
  Antisense strand to SEQ ID NO: 1358560
ugacccacugacuuuauga

SEQ ID NO: 1358562 - RNA, 19 nt, Artificial Sequence
  Description of Artificial Sequence: Synthetic oligonucleotide
  Sense strand starting at position 251 of SEQ ID NO: 1242580
aggcucuguuaccuuuaaa

SEQ ID NO: 1358563 - RNA, 19 nt, Artificial Sequence
  Description of Artificial Sequence: Synthetic oligonucleotide
  Antisense strand to SEQ ID NO: 1358562
uuuaaagguaacagagccu

SEQ ID NO: 1358564 - RNA, 19 nt, Artificial Sequence
  Description of Artificial Sequence: Synthetic oligonucleotide
  Sense strand starting at position 272 of SEQ ID NO: 1242580
agagcuccuucucugaauu

SEQ ID NO: 1358565 - RNA, 19 nt, Artificial Sequence
  Description of Artificial Sequence: Synthetic oligonucleotide
  Antisense strand to SEQ ID NO: 1358564
aauucagagaaggagcucu

SEQ ID NO: 1358566 - RNA, 19 nt, Artificial Sequence
  Description of Artificial Sequence: Synthetic oligonucleotide
  Sense strand starting at position 369 of SEQ ID NO: 1242580
augagcaaaccauguacua

SEQ ID NO: 1358567 - RNA, 19 nt, Artificial Sequence
  Description of Artificial Sequence: Synthetic oligonucleotide
  Antisense strand to SEQ ID NO: 1358566
uaguacaugguuugcucau

SEQ ID NO: 1358568 - RNA, 19 nt, Artificial Sequence
  Description of Artificial Sequence: Synthetic oligonucleotide
  Sense strand starting at position 429 of SEQ ID NO: 1242580
ugugacauccagggacgua

SEQ ID NO: 1358569 - RNA, 19 nt, Artificial Sequence
  Description of Artificial Sequence: Synthetic oligonucleotide
  Antisense strand to SEQ ID NO: 1358568
uacgucccuggaugucaca

SEQ ID NO: 1358570 - RNA, 19 nt, Artificial Sequence
  Description of Artificial Sequence: Synthetic oligonucleotide
  Sense strand starting at position 553 of SEQ ID NO: 1242580
cuucuacuagcauggauaa

SEQ ID NO: 1358571 - RNA, 19 nt, Artificial Sequence
  Description of Artificial Sequence: Synthetic oligonucleotide
  Antisense strand to SEQ ID NO: 1358570
uuauccaugcuaguagaag

SEQ ID NO: 1358572 - RNA, 19 nt, Artificial Sequence
  Description of Artificial Sequence: Synthetic oligonucleotide
  Sense strand starting at position 727 of SEQ ID NO: 1242580
cccaguguccucuaggaca

SEQ ID NO: 1358573 - RNA, 19 nt, Artificial Sequence
  Description of Artificial Sequence: Synthetic oligonucleotide
  Antisense strand to SEQ ID NO: 1358572
uguccuagaggacacuggg

SEQ ID NO: 1358574 - RNA, 19 nt, Artificial Sequence
  Description of Artificial Sequence: Synthetic oligonucleotide
  Sense strand starting at position 729 of SEQ ID NO: 1242580
caguguccucuaggacaca

SEQ ID NO: 1358575 - RNA, 19 nt, Artificial Sequence
  Description of Artificial Sequence: Synthetic oligonucleotide
  Antisense strand to SEQ ID NO: 1358574
uguguccuagaggacacug

SEQ ID NO: 1358576 - RNA, 19 nt, Artificial Sequence
  Description of Artificial Sequence: Synthetic oligonucleotide
  Sense strand starting at position 780 of SEQ ID NO: 1242580
uggugugcuccacaacaua

SEQ ID NO: 1358577 - RNA, 19 nt, Artificial Sequence
  Description of Artificial Sequence: Synthetic oligonucleotide
  Antisense strand to SEQ ID NO: 1358576
uauguuguggagcacacca

SEQ ID NO: 1358578 - RNA, 19 nt, Artificial Sequence
  Description of Artificial Sequence: Synthetic oligonucleotide
  Sense strand starting at position 812 of SEQ ID NO: 1242580
ggugcaaaccuguaaaguc

SEQ ID NO: 1358579 - RNA, 19 nt, Artificial Sequence
  Description of Artificial Sequence: Synthetic oligonucleotide
  Antisense strand to SEQ ID NO: 1358578
gacuuuacagguuugcacc

SEQ ID NO: 1358580 - RNA, 19 nt, Artificial Sequence
  Description of Artificial Sequence: Synthetic oligonucleotide
  Sense strand starting at position 820 of SEQ ID NO: 1242580
ccuguaaagucucuuaaag

SEQ ID NO: 1358581 - RNA, 19 nt, Artificial Sequence
  Description of Artificial Sequence: Synthetic oligonucleotide
  Antisense strand to SEQ ID NO: 1358580
cuuuaagagacuuuacagg

SEQ ID NO: 1358582 - RNA, 19 nt, Artificial Sequence
  Description of Artificial Sequence: Synthetic oligonucleotide
  Sense strand starting at position 896 of SEQ ID NO: 1242580
ugucauuaagcaggaggua

SEQ ID NO: 1358583 - RNA, 19 nt, Artificial Sequence
  Description of Artificial Sequence: Synthetic oligonucleotide
  Antisense strand to SEQ ID NO: 1358582
uaccuccugcuuaaugaca

SEQ ID NO: 1358584 - RNA, 19 nt, Artificial Sequence
  Description of Artificial Sequence: Synthetic oligonucleotide
  Sense strand starting at position 897 of SEQ ID NO: 1242580
gucauuaagcaggagguau

SEQ ID NO: 1358585 - RNA, 19 nt, Artificial Sequence
  Description of Artificial Sequence: Synthetic oligonucleotide
  Antisense strand to SEQ ID NO: 1358584
auaccuccugcuuaaugac

SEQ ID NO: 1358586 - RNA, 19 nt, Artificial Sequence
  Description of Artificial Sequence: Synthetic oligonucleotide
  Sense strand starting at position 929 of SEQ ID NO: 1242580
cuaacuuugcuauggaucu

SEQ ID NO: 1358587 - RNA, 19 nt, Artificial Sequence
  Description of Artificial Sequence: Synthetic oligonucleotide
  Antisense strand to SEQ ID NO: 1358586
agauccauagcaaaguuag

SEQ ID NO: 1358588 - RNA, 19 nt, Artificial Sequence
  Description of Artificial Sequence: Synthetic oligonucleotide
  Sense strand starting at position 1026 of SEQ ID NO: 1242580
cagcauacauguucugaga

SEQ ID NO: 1358589 - RNA, 19 nt, Artificial Sequence
  Description of Artificial Sequence: Synthetic oligonucleotide
  Antisense strand to SEQ ID NO: 1358588
ucucagaacauguaugcug

SEQ ID NO: 1358590 - RNA, 19 nt, Artificial Sequence
  Description of Artificial Sequence: Synthetic oligonucleotide
  Sense strand starting at position 1059 of SEQ ID NO: 1242580
ggaagcaagacauguuaca

SEQ ID NO: 1358591 - RNA, 19 nt, Artificial Sequence
  Description of Artificial Sequence: Synthetic oligonucleotide
  Antisense strand to SEQ ID NO: 1358590
uguaacaugucuugcuucc

SEQ ID NO: 1358592 - RNA, 19 nt, Artificial Sequence
  Description of Artificial Sequence: Synthetic oligonucleotide
  Sense strand starting at position 1099 of SEQ ID NO: 1242580
uuuagaauuucugccuguu

SEQ ID NO: 1358593 - RNA, 19 nt, Artificial Sequence
  Description of Artificial Sequence: Synthetic oligonucleotide
  Antisense strand to SEQ ID NO: 1358592
aacaggcagaaauucuaaa

SEQ ID NO: 1358594 - RNA, 19 nt, Artificial Sequence
  Description of Artificial Sequence: Synthetic oligonucleotide
  Sense strand starting at position 1150 of SEQ ID NO: 1242580
cugagaagucugggucuuc

SEQ ID NO: 1358595 - RNA, 19 nt, Artificial Sequence
  Description of Artificial Sequence: Synthetic oligonucleotide
  Antisense strand to SEQ ID NO: 1358594
gaagacccagacuucucag

SEQ ID NO: 1358596 - RNA, 19 nt, Artificial Sequence
  Description of Artificial Sequence: Synthetic oligonucleotide
  Sense strand starting at position 1151 of SEQ ID NO: 1242580
ugagaagucugggucuuca

SEQ ID NO: 1358597 - RNA, 19 nt, Artificial Sequence
  Description of Artificial Sequence: Synthetic oligonucleotide
  Antisense strand to SEQ ID NO: 1358596
ugaagacccagacuucuca

SEQ ID NO: 1358598 - RNA, 19 nt, Artificial Sequence
  Description of Artificial Sequence: Synthetic oligonucleotide
  Sense strand starting at position 2233 of SEQ ID NO: 1242580
ccugucagucauggaagua

SEQ ID NO: 1358599 - RNA, 19 nt, Artificial Sequence
  Description of Artificial Sequence: Synthetic oligonucleotide
  Antisense strand to SEQ ID NO: 1358598
uacuuccaugacugacagg

SEQ ID NO: 1358600 - RNA, 19 nt, Artificial Sequence
  Description of Artificial Sequence: Synthetic oligonucleotide
  Sense strand starting at position 2234 of SEQ ID NO: 1242580
cugucagucauggaaguau

SEQ ID NO: 1358601 - RNA, 19 nt, Artificial Sequence
  Description of Artificial Sequence: Synthetic oligonucleotide
  Antisense strand to SEQ ID NO: 1358600
auacuuccaugacugacag

SEQ ID NO: 1358602 - RNA, 19 nt, Artificial Sequence
  Description of Artificial Sequence: Synthetic oligonucleotide
  Sense strand starting at position 2331 of SEQ ID NO: 1242580
gagaccuucccggagguuu

SEQ ID NO: 1358603 - RNA, 19 nt, Artificial Sequence
  Description of Artificial Sequence: Synthetic oligonucleotide
  Antisense strand to SEQ ID NO: 1358602
aaaccuccgggaaggucuc

SEQ ID NO: 1358604 - RNA, 19 nt, Artificial Sequence
  Description of Artificial Sequence: Synthetic oligonucleotide
  Sense strand starting at position 3064 of SEQ ID NO: 1242580
cacugaccugucugugaca

SEQ ID NO: 1358605 - RNA, 19 nt, Artificial Sequence
  Description of Artificial Sequence: Synthetic oligonucleotide
  Antisense strand to SEQ ID NO: 1358604
ugucacagacaggucagug

SEQ ID NO: 1358606 - RNA, 19 nt, Artificial Sequence
  Description of Artificial Sequence: Synthetic oligonucleotide
  Sense strand starting at position 3123 of SEQ ID NO: 1242580
cggguuguuugguccauuu

SEQ ID NO: 1358607 - RNA, 19 nt, Artificial Sequence
  Description of Artificial Sequence: Synthetic oligonucleotide
  Antisense strand to SEQ ID NO: 1358606
aaauggaccaaacaacccg

SEQ ID NO: 1358608 - RNA, 19 nt, Artificial Sequence
  Description of Artificial Sequence: Synthetic oligonucleotide
  Sense strand starting at position 3163 of SEQ ID NO: 1242580
guaagugacuuauuaaagg

SEQ ID NO: 1358609 - RNA, 19 nt, Artificial Sequence
  Description of Artificial Sequence: Synthetic oligonucleotide
  Antisense strand to SEQ ID NO: 1358608
ccuuuaauaagucacuuac

SEQ ID NO: 1358610 - RNA, 19 nt, Artificial Sequence
  Description of Artificial Sequence: Synthetic oligonucleotide
  Sense strand starting at position 3287 of SEQ ID NO: 1242580
ggacacauuuaggaauguu

SEQ ID NO: 1358611 - RNA, 19 nt, Artificial Sequence
  Description of Artificial Sequence: Synthetic oligonucleotide
  Antisense strand to SEQ ID NO: 1358610
aacauuccuaaaugugucc

SEQ ID NO: 1358612 - RNA, 19 nt, Artificial Sequence
  Description of Artificial Sequence: Synthetic oligonucleotide
  Sense strand starting at position 3544 of SEQ ID NO: 1242580
gcaugucaucaacugcgua

SEQ ID NO: 1358613 - RNA, 19 nt, Artificial Sequence
  Description of Artificial Sequence: Synthetic oligonucleotide
  Antisense strand to SEQ ID NO: 1358612
uacgcaguugaugacaugc

SEQ ID NO: 1358614 - RNA, 19 nt, Artificial Sequence
  Description of Artificial Sequence: Synthetic oligonucleotide
  Sense strand starting at position 3647 of SEQ ID NO: 1242580
ggauuucucucccauggga

SEQ ID NO: 1358615 - RNA, 19 nt, Artificial Sequence
  Description of Artificial Sequence: Synthetic oligonucleotide
  Antisense strand to SEQ ID NO: 1358614
ucccaugggagagaaaucc

SEQ ID NO: 1358616 - RNA, 19 nt, Artificial Sequence
  Description of Artificial Sequence: Synthetic oligonucleotide
  Sense strand starting at position 3663 of SEQ ID NO: 1242580
ggaggauugucuccagagg

SEQ ID NO: 1358617 - RNA, 19 nt, Artificial Sequence
  Description of Artificial Sequence: Synthetic oligonucleotide
  Antisense strand to SEQ ID NO: 1358616
ccucuggagacaauccucc

SEQ ID NO: 1358618 - RNA, 19 nt, Artificial Sequence
  Description of Artificial Sequence: Synthetic oligonucleotide
  Sense strand starting at position 3664 of SEQ ID NO: 1242580
gaggauugucuccagaggu

SEQ ID NO: 1358619 - RNA, 19 nt, Artificial Sequence
  Description of Artificial Sequence: Synthetic oligonucleotide
  Antisense strand to SEQ ID NO: 1358618
accucuggagacaauccuc

SEQ ID NO: 1358620 - RNA, 19 nt, Artificial Sequence
  Description of Artificial Sequence: Synthetic oligonucleotide
  Sense strand starting at position 3838 of SEQ ID NO: 1242580
agaagcuccgcagaagaaa

SEQ ID NO: 1358621 - RNA, 19 nt, Artificial Sequence
  Description of Artificial Sequence: Synthetic oligonucleotide
  Antisense strand to SEQ ID NO: 1358620
uuucuucugcggagcuucu

SEQ ID NO: 1358622 - RNA, 19 nt, Artificial Sequence
  Description of Artificial Sequence: Synthetic oligonucleotide
  Sense strand starting at position 3849 of SEQ ID NO: 1242580
agaagaaaugccugcaggu

SEQ ID NO: 1358623 - RNA, 19 nt, Artificial Sequence
  Description of Artificial Sequence: Synthetic oligonucleotide
  Antisense strand to SEQ ID NO: 1358622
accugcaggcauuucuucu

SEQ ID NO: 1358624 - RNA, 19 nt, Artificial Sequence
  Description of Artificial Sequence: Synthetic oligonucleotide
  Sense strand starting at position 3865 of SEQ ID NO: 1242580
gguuucaauggccagaagu

SEQ ID NO: 1358625 - RNA, 19 nt, Artificial Sequence
  Description of Artificial Sequence: Synthetic oligonucleotide
  Antisense strand to SEQ ID NO: 1358624
acuucuggccauugaaacc

SEQ ID NO: 1358626 - RNA, 19 nt, Artificial Sequence
  Description of Artificial Sequence: Synthetic oligonucleotide
  Sense strand starting at position 3878 of SEQ ID NO: 1242580
agaaguaagucucuggcca

SEQ ID NO: 1358627 - RNA, 19 nt, Artificial Sequence
  Description of Artificial Sequence: Synthetic oligonucleotide
  Antisense strand to SEQ ID NO: 1358626
uggccagagacuuacuucu

SEQ ID NO: 1358628 - RNA, 19 nt, Artificial Sequence
  Description of Artificial Sequence: Synthetic oligonucleotide
  Sense strand starting at position 3923 of SEQ ID NO: 1242580
gaaggaguccgccaugauc

SEQ ID NO: 1358629 - RNA, 19 nt, Artificial Sequence
  Description of Artificial Sequence: Synthetic oligonucleotide
  Antisense strand to SEQ ID NO: 1358628
gaucauggcggacuccuuc

SEQ ID NO: 1358630 - RNA, 19 nt, Artificial Sequence
  Description of Artificial Sequence: Synthetic oligonucleotide
  Sense strand starting at position 3939 of SEQ ID NO: 1242580
aucgacuugggcugagauu

SEQ ID NO: 1358631 - RNA, 19 nt, Artificial Sequence
  Description of Artificial Sequence: Synthetic oligonucleotide
  Antisense strand to SEQ ID NO: 1358630
aaucucagcccaagucgau

SEQ ID NO: 1358632 - RNA, 19 nt, Artificial Sequence
  Description of Artificial Sequence: Synthetic oligonucleotide
  Sense strand starting at position 3963 of SEQ ID NO: 1242580
uagaucucugccuggacuu

SEQ ID NO: 1358633 - RNA, 19 nt, Artificial Sequence
  Description of Artificial Sequence: Synthetic oligonucleotide
  Antisense strand to SEQ ID NO: 1358632
aaguccaggcagagaucua

SEQ ID NO: 1358634 - RNA, 19 nt, Artificial Sequence
  Description of Artificial Sequence: Synthetic oligonucleotide
  Sense strand starting at position 3964 of SEQ ID NO: 1242580
agaucucugccuggacuuu

SEQ ID NO: 1358635 - RNA, 19 nt, Artificial Sequence
  Description of Artificial Sequence: Synthetic oligonucleotide
  Antisense strand to SEQ ID NO: 1358634
aaaguccaggcagagaucu

SEQ ID NO: 1358636 - RNA, 19 nt, Artificial Sequence
  Description of Artificial Sequence: Synthetic oligonucleotide
  Sense strand starting at position 3965 of SEQ ID NO: 1242580
gaucucugccuggacuuua

SEQ ID NO: 1358637 - RNA, 19 nt, Artificial Sequence
  Description of Artificial Sequence: Synthetic oligonucleotide
  Antisense strand to SEQ ID NO: 1358636
uaaaguccaggcagagauc

SEQ ID NO: 1358638 - RNA, 19 nt, Artificial Sequence
  Description of Artificial Sequence: Synthetic oligonucleotide
  Sense strand starting at position 65 of SEQ ID NO: 1242581
ugucaagugucucagggua

SEQ ID NO: 1358639 - RNA, 19 nt, Artificial Sequence
  Description of Artificial Sequence: Synthetic oligonucleotide
  Antisense strand to SEQ ID NO: 1358638
uacccugagacacuugaca

SEQ ID NO: 1358640 - RNA, 19 nt, Artificial Sequence
  Description of Artificial Sequence: Synthetic oligonucleotide
  Sense strand starting at position 67 of SEQ ID NO: 1242581
ucaagugucucaggguaag

SEQ ID NO: 1358641 - RNA, 19 nt, Artificial Sequence
  Description of Artificial Sequence: Synthetic oligonucleotide
  Antisense strand to SEQ ID NO: 1358640
cuuacccugagacacuuga

SEQ ID NO: 1358642 - RNA, 19 nt, Artificial Sequence
  Description of Artificial Sequence: Synthetic oligonucleotide
  Sense strand starting at position 78 of SEQ ID NO: 1242581
aggguaagagccugcagau

SEQ ID NO: 1358643 - RNA, 19 nt, Artificial Sequence
  Description of Artificial Sequence: Synthetic oligonucleotide
  Antisense strand to SEQ ID NO: 1358642
aucugcaggcucuuacccu

SEQ ID NO: 1358644 - RNA, 19 nt, Artificial Sequence
  Description of Artificial Sequence: Synthetic oligonucleotide
  Sense strand starting at position 525 of SEQ ID NO: 1242581
uagagucuucuagggcuga

SEQ ID NO: 1358645 - RNA, 19 nt, Artificial Sequence
  Description of Artificial Sequence: Synthetic oligonucleotide
  Antisense strand to SEQ ID NO: 1358644
ucagcccuagaagacucua

SEQ ID NO: 1358646 - RNA, 19 nt, Artificial Sequence
  Description of Artificial Sequence: Synthetic oligonucleotide
  Sense strand starting at position 526 of SEQ ID NO: 1242581
agagucuucuagggcugau

SEQ ID NO: 1358647 - RNA, 19 nt, Artificial Sequence
  Description of Artificial Sequence: Synthetic oligonucleotide
  Antisense strand to SEQ ID NO: 1358646
aucagcccuagaagacucu

SEQ ID NO: 1358648 - RNA, 19 nt, Artificial Sequence
  Description of Artificial Sequence: Synthetic oligonucleotide
  Sense strand starting at position 553 of SEQ ID NO: 1242581
uggaaugccucuccaaaga

SEQ ID NO: 1358649 - RNA, 19 nt, Artificial Sequence
  Description of Artificial Sequence: Synthetic oligonucleotide
  Antisense strand to SEQ ID NO: 1358648
ucuuuggagaggcauucca

SEQ ID NO: 1358650 - RNA, 19 nt, Artificial Sequence
  Description of Artificial Sequence: Synthetic oligonucleotide
  Sense strand starting at position 569 of SEQ ID NO: 1242581
agagaucucuugucucuga

SEQ ID NO: 1358651 - RNA, 19 nt, Artificial Sequence
  Description of Artificial Sequence: Synthetic oligonucleotide
  Antisense strand to SEQ ID NO: 1358650
ucagagacaagagaucucu

SEQ ID NO: 1358652 - RNA, 19 nt, Artificial Sequence
  Description of Artificial Sequence: Synthetic oligonucleotide
  Sense strand starting at position 668 of SEQ ID NO: 1242581
accagauguccuuguguag

SEQ ID NO: 1358653 - RNA, 19 nt, Artificial Sequence
  Description of Artificial Sequence: Synthetic oligonucleotide
  Antisense strand to SEQ ID NO: 1358652
cuacacaaggacaucuggu

SEQ ID NO: 1358654 - RNA, 19 nt, Artificial Sequence
  Description of Artificial Sequence: Synthetic oligonucleotide
  Sense strand starting at position 671 of SEQ ID NO: 1242581
agauguccuuguguaguau

SEQ ID NO: 1358655 - RNA, 19 nt, Artificial Sequence
  Description of Artificial Sequence: Synthetic oligonucleotide
  Antisense strand to SEQ ID NO: 1358654
auacuacacaaggacaucu

SEQ ID NO: 1358656 - RNA, 19 nt, Artificial Sequence
  Description of Artificial Sequence: Synthetic oligonucleotide
  Sense strand starting at position 769 of SEQ ID NO: 1242581
uucuuauugagacggagua

SEQ ID NO: 1358657 - RNA, 19 nt, Artificial Sequence
  Description of Artificial Sequence: Synthetic oligonucleotide
  Antisense strand to SEQ ID NO: 1358656
uacuccgucucaauaagaa

SEQ ID NO: 1358658 - RNA, 19 nt, Artificial Sequence
  Description of Artificial Sequence: Synthetic oligonucleotide
  Sense strand starting at position 770 of SEQ ID NO: 1242581
ucuuauugagacggaguau

SEQ ID NO: 1358659 - RNA, 19 nt, Artificial Sequence
  Description of Artificial Sequence: Synthetic oligonucleotide
  Antisense strand to SEQ ID NO: 1358658
auacuccgucucaauaaga

SEQ ID NO: 1358660 - RNA, 19 nt, Artificial Sequence
  Description of Artificial Sequence: Synthetic oligonucleotide
  Sense strand starting at position 1129 of SEQ ID NO: 1242581
ucgagcuccugggcuuaaa

SEQ ID NO: 1358661 - RNA, 19 nt, Artificial Sequence
  Description of Artificial Sequence: Synthetic oligonucleotide
  Antisense strand to SEQ ID NO: 1358660
uuuaagcccaggagcucga

SEQ ID NO: 1358662 - RNA, 19 nt, Artificial Sequence
  Description of Artificial Sequence: Synthetic oligonucleotide
  Sense strand starting at position 1283 of SEQ ID NO: 1242581
acacgauagcccuagcagu

SEQ ID NO: 1358663 - RNA, 19 nt, Artificial Sequence
  Description of Artificial Sequence: Synthetic oligonucleotide
  Antisense strand to SEQ ID NO: 1358662
acugcuagggcuaucgugu

SEQ ID NO: 1358664 - RNA, 19 nt, Artificial Sequence
  Description of Artificial Sequence: Synthetic oligonucleotide
  Sense strand starting at position 1335 of SEQ ID NO: 1242581
gacuguuuccucugccgga

SEQ ID NO: 1358665 - RNA, 19 nt, Artificial Sequence
  Description of Artificial Sequence: Synthetic oligonucleotide
  Antisense strand to SEQ ID NO: 1358664
uccggcagaggaaacaguc

SEQ ID NO: 1358666 - RNA, 19 nt, Artificial Sequence
  Description of Artificial Sequence: Synthetic oligonucleotide
  Sense strand starting at position 1336 of SEQ ID NO: 1242581
acuguuuccucugccggaa

SEQ ID NO: 1358667 - RNA, 19 nt, Artificial Sequence
  Description of Artificial Sequence: Synthetic oligonucleotide
  Antisense strand to SEQ ID NO: 1358666
uuccggcagaggaaacagu

SEQ ID NO: 1358668 - RNA, 19 nt, Artificial Sequence
  Description of Artificial Sequence: Synthetic oligonucleotide
  Sense strand starting at position 1339 of SEQ ID NO: 1242581
guuuccucugccggaaaug

SEQ ID NO: 1358669 - RNA, 19 nt, Artificial Sequence
  Description of Artificial Sequence: Synthetic oligonucleotide
  Antisense strand to SEQ ID NO: 1358668
cauuuccggcagaggaaac

SEQ ID NO: 1358670 - RNA, 19 nt, Artificial Sequence
  Description of Artificial Sequence: Synthetic oligonucleotide
  Sense strand starting at position 1367 of SEQ ID NO: 1242581
guggauuacuuagucaacu

SEQ ID NO: 1358671 - RNA, 19 nt, Artificial Sequence
  Description of Artificial Sequence: Synthetic oligonucleotide
  Antisense strand to SEQ ID NO: 1358670
aguugacuaaguaauccac

SEQ ID NO: 1358672 - RNA, 19 nt, Artificial Sequence
  Description of Artificial Sequence: Synthetic oligonucleotide
  Sense strand starting at position 1368 of SEQ ID NO: 1242581
uggauuacuuagucaacuc

SEQ ID NO: 1358673 - RNA, 19 nt, Artificial Sequence
  Description of Artificial Sequence: Synthetic oligonucleotide
  Antisense strand to SEQ ID NO: 1358672
gaguugacuaaguaaucca

SEQ ID NO: 1358674 - RNA, 19 nt, Artificial Sequence
  Description of Artificial Sequence: Synthetic oligonucleotide
  Sense strand starting at position 1384 of SEQ ID NO: 1242581
cuccuuaucuugccaggaa

SEQ ID NO: 1358675 - RNA, 19 nt, Artificial Sequence
  Description of Artificial Sequence: Synthetic oligonucleotide
  Antisense strand to SEQ ID NO: 1358674
uuccuggcaagauaaggag

SEQ ID NO: 1358676 - RNA, 19 nt, Artificial Sequence
  Description of Artificial Sequence: Synthetic oligonucleotide
  Sense strand starting at position 1385 of SEQ ID NO: 1242581
uccuuaucuugccaggaau

SEQ ID NO: 1358677 - RNA, 19 nt, Artificial Sequence
  Description of Artificial Sequence: Synthetic oligonucleotide
  Antisense strand to SEQ ID NO: 1358676
auuccuggcaagauaagga

SEQ ID NO: 1358678 - RNA, 19 nt, Artificial Sequence
  Description of Artificial Sequence: Synthetic oligonucleotide
  Sense strand starting at position 1387 of SEQ ID NO: 1242581
cuuaucuugccaggaauac

SEQ ID NO: 1358679 - RNA, 19 nt, Artificial Sequence
  Description of Artificial Sequence: Synthetic oligonucleotide
  Antisense strand to SEQ ID NO: 1358678
guauuccuggcaagauaag

SEQ ID NO: 1358680 - RNA, 19 nt, Artificial Sequence
  Description of Artificial Sequence: Synthetic oligonucleotide
  Sense strand starting at position 1429 of SEQ ID NO: 1242581
aguccauuccuggacucuu

SEQ ID NO: 1358681 - RNA, 19 nt, Artificial Sequence
  Description of Artificial Sequence: Synthetic oligonucleotide
  Antisense strand to SEQ ID NO: 1358680
aagaguccaggaauggacu

SEQ ID NO: 1358682 - RNA, 19 nt, Artificial Sequence
  Description of Artificial Sequence: Synthetic oligonucleotide
  Sense strand starting at position 1479 of SEQ ID NO: 1242581
guagucucuguuggguaga

SEQ ID NO: 1358683 - RNA, 19 nt, Artificial Sequence
  Description of Artificial Sequence: Synthetic oligonucleotide
  Antisense strand to SEQ ID NO: 1358682
ucuacccaacagagacuac

SEQ ID NO: 1358684 - RNA, 19 nt, Artificial Sequence
  Description of Artificial Sequence: Synthetic oligonucleotide
  Sense strand starting at position 1480 of SEQ ID NO: 1242581
uagucucuguuggguagaa

SEQ ID NO: 1358685 - RNA, 19 nt, Artificial Sequence
  Description of Artificial Sequence: Synthetic oligonucleotide
  Antisense strand to SEQ ID NO: 1358684
uucuacccaacagagacua

SEQ ID NO: 1358686 - RNA, 19 nt, Artificial Sequence
  Description of Artificial Sequence: Synthetic oligonucleotide
  Sense strand starting at position 2159 of SEQ ID NO: 1242581
gucggauccucaucagaug

SEQ ID NO: 1358687 - RNA, 19 nt, Artificial Sequence
  Description of Artificial Sequence: Synthetic oligonucleotide
  Antisense strand to SEQ ID NO: 1358686
caucugaugaggauccgac

SEQ ID NO: 1358688 - RNA, 19 nt, Artificial Sequence
  Description of Artificial Sequence: Synthetic oligonucleotide
  Sense strand starting at position 2302 of SEQ ID NO: 1242581
gccgcucagggauauugua

SEQ ID NO: 1358689 - RNA, 19 nt, Artificial Sequence
  Description of Artificial Sequence: Synthetic oligonucleotide
  Antisense strand to SEQ ID NO: 1358688
uacaauaucccugagcggc

SEQ ID NO: 1358690 - RNA, 19 nt, Artificial Sequence
  Description of Artificial Sequence: Synthetic oligonucleotide
  Sense strand starting at position 3031 of SEQ ID NO: 1242581
uggucuugcuauguuguua

SEQ ID NO: 1358691 - RNA, 19 nt, Artificial Sequence
  Description of Artificial Sequence: Synthetic oligonucleotide
  Antisense strand to SEQ ID NO: 1358690
uaacaacauagcaagacca

SEQ ID NO: 1358692 - RNA, 19 nt, Artificial Sequence
  Description of Artificial Sequence: Synthetic oligonucleotide
  Sense strand starting at position 3135 of SEQ ID NO: 1242581
guaggaucugcugaagcuu

SEQ ID NO: 1358693 - RNA, 19 nt, Artificial Sequence
  Description of Artificial Sequence: Synthetic oligonucleotide
  Antisense strand to SEQ ID NO: 1358692
aagcuucagcagauccuac

SEQ ID NO: 1358694 - RNA, 19 nt, Artificial Sequence
  Description of Artificial Sequence: Synthetic oligonucleotide
  Sense strand starting at position 3164 of SEQ ID NO: 1242581
uguguagggucucacauuu

SEQ ID NO: 1358695 - RNA, 19 nt, Artificial Sequence
  Description of Artificial Sequence: Synthetic oligonucleotide
  Antisense strand to SEQ ID NO: 1358694
aaaugugagacccuacaca

SEQ ID NO: 1358696 - RNA, 19 nt, Artificial Sequence
  Description of Artificial Sequence: Synthetic oligonucleotide
  Sense strand starting at position 3315 of SEQ ID NO: 1242581
gcugcuuuggacugugaau

SEQ ID NO: 1358697 - RNA, 19 nt, Artificial Sequence
  Description of Artificial Sequence: Synthetic oligonucleotide
  Antisense strand to SEQ ID NO: 1358696
auucacaguccaaagcagc

SEQ ID NO: 1358698 - RNA, 19 nt, Artificial Sequence
  Description of Artificial Sequence: Synthetic oligonucleotide
  Sense strand starting at position 3327 of SEQ ID NO: 1242581
ugugaauucccacagcauc

SEQ ID NO: 1358699 - RNA, 19 nt, Artificial Sequence
  Description of Artificial Sequence: Synthetic oligonucleotide
  Antisense strand to SEQ ID NO: 1358698
gaugcugugggaauucaca

SEQ ID NO: 1358700 - RNA, 19 nt, Artificial Sequence
  Description of Artificial Sequence: Synthetic oligonucleotide
  Sense strand starting at position 3364 of SEQ ID NO: 1242581
ucgcacuucucacaagaua

SEQ ID NO: 1358701 - RNA, 19 nt, Artificial Sequence
  Description of Artificial Sequence: Synthetic oligonucleotide
  Antisense strand to SEQ ID NO: 1358700
uaucuugugagaagugcga

SEQ ID NO: 1358702 - RNA, 19 nt, Artificial Sequence
  Description of Artificial Sequence: Synthetic oligonucleotide
  Sense strand starting at position 3411 of SEQ ID NO: 1242581
ccacaauuagacugcaagu

SEQ ID NO: 1358703 - RNA, 19 nt, Artificial Sequence
  Description of Artificial Sequence: Synthetic oligonucleotide
  Antisense strand to SEQ ID NO: 1358702
acuugcagucuaauugugg

SEQ ID NO: 1358704 - RNA, 19 nt, Artificial Sequence
  Description of Artificial Sequence: Synthetic oligonucleotide
  Sense strand starting at position 3445 of SEQ ID NO: 1242581
ugagucaucuccguauccu

SEQ ID NO: 1358705 - RNA, 19 nt, Artificial Sequence
  Description of Artificial Sequence: Synthetic oligonucleotide
  Antisense strand to SEQ ID NO: 1358704
aggauacggagaugacuca

SEQ ID NO: 1358706 - RNA, 19 nt, Artificial Sequence
  Description of Artificial Sequence: Synthetic oligonucleotide
  Sense strand starting at position 3446 of SEQ ID NO: 1242581
gagucaucuccguauccug

SEQ ID NO: 1358707 - RNA, 19 nt, Artificial Sequence
  Description of Artificial Sequence: Synthetic oligonucleotide
  Antisense strand to SEQ ID NO: 1358706
caggauacggagaugacuc

SEQ ID NO: 1358708 - RNA, 19 nt, Artificial Sequence
  Description of Artificial Sequence: Synthetic oligonucleotide
  Sense strand starting at position 3487 of SEQ ID NO: 1242581
cugggagccuuggugaaua

SEQ ID NO: 1358709 - RNA, 19 nt, Artificial Sequence
  Description of Artificial Sequence: Synthetic oligonucleotide
  Antisense strand to SEQ ID NO: 1358708
uauucaccaaggcucccag

SEQ ID NO: 1358710 - RNA, 19 nt, Artificial Sequence
  Description of Artificial Sequence: Synthetic oligonucleotide
  Sense strand starting at position 3495 of SEQ ID NO: 1242581
cuuggugaauacucacuga

SEQ ID NO: 1358711 - RNA, 19 nt, Artificial Sequence
  Description of Artificial Sequence: Synthetic oligonucleotide
  Antisense strand to SEQ ID NO: 1358710
ucagugaguauucaccaag

SEQ ID NO: 1358712 - RNA, 19 nt, Artificial Sequence
  Description of Artificial Sequence: Synthetic oligonucleotide
  Sense strand starting at position 3498 of SEQ ID NO: 1242581
ggugaauacucacugauuc

SEQ ID NO: 1358713 - RNA, 19 nt, Artificial Sequence
  Description of Artificial Sequence: Synthetic oligonucleotide
  Antisense strand to SEQ ID NO: 1358712
gaaucagugaguauucacc

SEQ ID NO: 1358714 - RNA, 19 nt, Artificial Sequence
  Description of Artificial Sequence: Synthetic oligonucleotide
  Sense strand starting at position 3499 of SEQ ID NO: 1242581
gugaauacucacugauucu

SEQ ID NO: 1358715 - RNA, 19 nt, Artificial Sequence
  Description of Artificial Sequence: Synthetic oligonucleotide
  Antisense strand to SEQ ID NO: 1358714
agaaucagugaguauucac

SEQ ID NO: 1358716 - RNA, 19 nt, Artificial Sequence
  Description of Artificial Sequence: Synthetic oligonucleotide
  Sense strand starting at position 3943 of SEQ ID NO: 1242581
gcugguauuacaggccaga

SEQ ID NO: 1358717 - RNA, 19 nt, Artificial Sequence
  Description of Artificial Sequence: Synthetic oligonucleotide
  Antisense strand to SEQ ID NO: 1358716
ucuggccuguaauaccagc

SEQ ID NO: 1358718 - RNA, 19 nt, Artificial Sequence
  Description of Artificial Sequence: Synthetic oligonucleotide
  Sense strand starting at position 94 of SEQ ID NO: 1242582
gaaucaaggucgcccgaua

SEQ ID NO: 1358719 - RNA, 19 nt, Artificial Sequence
  Description of Artificial Sequence: Synthetic oligonucleotide
  Antisense strand to SEQ ID NO: 1358718
uaucgggcgaccuugauuc

SEQ ID NO: 1358720 - RNA, 19 nt, Artificial Sequence
  Description of Artificial Sequence: Synthetic oligonucleotide
  Sense strand starting at position 158 of SEQ ID NO: 1242582
ggguuucccuccucgcgaa

SEQ ID NO: 1358721 - RNA, 19 nt, Artificial Sequence
  Description of Artificial Sequence: Synthetic oligonucleotide
  Antisense strand to SEQ ID NO: 1358720
uucgcgaggagggaaaccc

SEQ ID NO: 1358722 - RNA, 19 nt, Artificial Sequence
  Description of Artificial Sequence: Synthetic oligonucleotide
  Sense strand starting at position 183 of SEQ ID NO: 1242582
cccguuucccaggacagaa

SEQ ID NO: 1358723 - RNA, 19 nt, Artificial Sequence
  Description of Artificial Sequence: Synthetic oligonucleotide
  Antisense strand to SEQ ID NO: 1358722
uucuguccugggaaacggg

SEQ ID NO: 1358724 - RNA, 19 nt, Artificial Sequence
  Description of Artificial Sequence: Synthetic oligonucleotide
  Sense strand starting at position 1010 of SEQ ID NO: 1242582
cgccgugacucagccagaa

SEQ ID NO: 1358725 - RNA, 19 nt, Artificial Sequence
  Description of Artificial Sequence: Synthetic oligonucleotide
  Antisense strand to SEQ ID NO: 1358724
uucuggcugagucacggcg

SEQ ID NO: 1358726 - RNA, 19 nt, Artificial Sequence
  Description of Artificial Sequence: Synthetic oligonucleotide
  Sense strand starting at position 1012 of SEQ ID NO: 1242582
ccgugacucagccagaaug

SEQ ID NO: 1358727 - RNA, 19 nt, Artificial Sequence
  Description of Artificial Sequence: Synthetic oligonucleotide
  Antisense strand to SEQ ID NO: 1358726
cauucuggcugagucacgg

SEQ ID NO: 1358728 - RNA, 19 nt, Artificial Sequence
  Description of Artificial Sequence: Synthetic oligonucleotide
  Sense strand starting at position 1014 of SEQ ID NO: 1242582
gugacucagccagaauguu

SEQ ID NO: 1358729 - RNA, 19 nt, Artificial Sequence
  Description of Artificial Sequence: Synthetic oligonucleotide
  Antisense strand to SEQ ID NO: 1358728
aacauucuggcugagucac

SEQ ID NO: 1358730 - RNA, 19 nt, Artificial Sequence
  Description of Artificial Sequence: Synthetic oligonucleotide
  Sense strand starting at position 1510 of SEQ ID NO: 1242582
ggucacaguuccugccaaa

SEQ ID NO: 1358731 - RNA, 19 nt, Artificial Sequence
  Description of Artificial Sequence: Synthetic oligonucleotide
  Antisense strand to SEQ ID NO: 1358730
uuuggcaggaacugugacc

SEQ ID NO: 1358732 - RNA, 19 nt, Artificial Sequence
  Description of Artificial Sequence: Synthetic oligonucleotide
  Sense strand starting at position 1522 of SEQ ID NO: 1242582
ugccaaacgucuuccuuga

SEQ ID NO: 1358733 - RNA, 19 nt, Artificial Sequence
  Description of Artificial Sequence: Synthetic oligonucleotide
  Antisense strand to SEQ ID NO: 1358732
ucaaggaagacguuuggca

SEQ ID NO: 1358734 - RNA, 19 nt, Artificial Sequence
  Description of Artificial Sequence: Synthetic oligonucleotide
  Sense strand starting at position 1607 of SEQ ID NO: 1242582
cugcuccuaucguccaaau

SEQ ID NO: 1358735 - RNA, 19 nt, Artificial Sequence
  Description of Artificial Sequence: Synthetic oligonucleotide
  Antisense strand to SEQ ID NO: 1358734
auuuggacgauaggagcag

SEQ ID NO: 1358736 - RNA, 19 nt, Artificial Sequence
  Description of Artificial Sequence: Synthetic oligonucleotide
  Sense strand starting at position 1609 of SEQ ID NO: 1242582
gcuccuaucguccaaaucu

SEQ ID NO: 1358737 - RNA, 19 nt, Artificial Sequence
  Description of Artificial Sequence: Synthetic oligonucleotide
  Antisense strand to SEQ ID NO: 1358736
agauuuggacgauaggagc

SEQ ID NO: 1358738 - RNA, 19 nt, Artificial Sequence
  Description of Artificial Sequence: Synthetic oligonucleotide
  Sense strand starting at position 2811 of SEQ ID NO: 1242582
cacgucuguugcucucuaa

SEQ ID NO: 1358739 - RNA, 19 nt, Artificial Sequence
  Description of Artificial Sequence: Synthetic oligonucleotide
  Antisense strand to SEQ ID NO: 1358738
uuagagagcaacagacgug

SEQ ID NO: 1358740 - RNA, 19 nt, Artificial Sequence
  Description of Artificial Sequence: Synthetic oligonucleotide
  Sense strand starting at position 2862 of SEQ ID NO: 1242582
ucacuugcccaguggaaca

SEQ ID NO: 1358741 - RNA, 19 nt, Artificial Sequence
  Description of Artificial Sequence: Synthetic oligonucleotide
  Antisense strand to SEQ ID NO: 1358740
uguuccacugggcaaguga

SEQ ID NO: 1358742 - RNA, 19 nt, Artificial Sequence
  Description of Artificial Sequence: Synthetic oligonucleotide
  Sense strand starting at position 2881 of SEQ ID NO: 1242582
gaggguacuguccaucauu

SEQ ID NO: 1358743 - RNA, 19 nt, Artificial Sequence
  Description of Artificial Sequence: Synthetic oligonucleotide
  Antisense strand to SEQ ID NO: 1358742
aaugauggacaguacccuc

SEQ ID NO: 1358744 - RNA, 19 nt, Artificial Sequence
  Description of Artificial Sequence: Synthetic oligonucleotide
  Sense strand starting at position 2889 of SEQ ID NO: 1242582
uguccaucauucccaggaa

SEQ ID NO: 1358745 - RNA, 19 nt, Artificial Sequence
  Description of Artificial Sequence: Synthetic oligonucleotide
  Antisense strand to SEQ ID NO: 1358744
uuccugggaaugauggaca

SEQ ID NO: 1358746 - RNA, 19 nt, Artificial Sequence
  Description of Artificial Sequence: Synthetic oligonucleotide
  Sense strand starting at position 2892 of SEQ ID NO: 1242582
ccaucauucccaggaacag

SEQ ID NO: 1358747 - RNA, 19 nt, Artificial Sequence
  Description of Artificial Sequence: Synthetic oligonucleotide
  Antisense strand to SEQ ID NO: 1358746
cuguuccugggaaugaugg

SEQ ID NO: 1358748 - RNA, 19 nt, Artificial Sequence
  Description of Artificial Sequence: Synthetic oligonucleotide
  Sense strand starting at position 2910 of SEQ ID NO: 1242582
gugcaauucccugugcugu

SEQ ID NO: 1358749 - RNA, 19 nt, Artificial Sequence
  Description of Artificial Sequence: Synthetic oligonucleotide
  Antisense strand to SEQ ID NO: 1358748
acagcacagggaauugcac

SEQ ID NO: 1358750 - RNA, 19 nt, Artificial Sequence
  Description of Artificial Sequence: Synthetic oligonucleotide
  Sense strand starting at position 2938 of SEQ ID NO: 1242582
agcagugaguccuuguucu

SEQ ID NO: 1358751 - RNA, 19 nt, Artificial Sequence
  Description of Artificial Sequence: Synthetic oligonucleotide
  Antisense strand to SEQ ID NO: 1358750
agaacaaggacucacugcu

SEQ ID NO: 1358752 - RNA, 19 nt, Artificial Sequence
  Description of Artificial Sequence: Synthetic oligonucleotide
  Sense strand starting at position 2942 of SEQ ID NO: 1242582
gugaguccuuguucugaac

SEQ ID NO: 1358753 - RNA, 19 nt, Artificial Sequence
  Description of Artificial Sequence: Synthetic oligonucleotide
  Antisense strand to SEQ ID NO: 1358752
guucagaacaaggacucac

SEQ ID NO: 1358754 - RNA, 19 nt, Artificial Sequence
  Description of Artificial Sequence: Synthetic oligonucleotide
  Sense strand starting at position 2944 of SEQ ID NO: 1242582
gaguccuuguucugaacaa

SEQ ID NO: 1358755 - RNA, 19 nt, Artificial Sequence
  Description of Artificial Sequence: Synthetic oligonucleotide
  Antisense strand to SEQ ID NO: 1358754
uuguucagaacaaggacuc

SEQ ID NO: 1358756 - RNA, 19 nt, Artificial Sequence
  Description of Artificial Sequence: Synthetic oligonucleotide
  Sense strand starting at position 2945 of SEQ ID NO: 1242582
aguccuuguucugaacaac

SEQ ID NO: 1358757 - RNA, 19 nt, Artificial Sequence
  Description of Artificial Sequence: Synthetic oligonucleotide
  Antisense strand to SEQ ID NO: 1358756
guuguucagaacaaggacu

SEQ ID NO: 1358758 - RNA, 19 nt, Artificial Sequence
  Description of Artificial Sequence: Synthetic oligonucleotide
  Sense strand starting at position 2948 of SEQ ID NO: 1242582
ccuuguucugaacaacuga

SEQ ID NO: 1358759 - RNA, 19 nt, Artificial Sequence
  Description of Artificial Sequence: Synthetic oligonucleotide
  Antisense strand to SEQ ID NO: 1358758
ucaguuguucagaacaagg

SEQ ID NO: 1358760 - RNA, 19 nt, Artificial Sequence
  Description of Artificial Sequence: Synthetic oligonucleotide
  Sense strand starting at position 3052 of SEQ ID NO: 1242582
ugggucccgugcuagaauu

SEQ ID NO: 1358761 - RNA, 19 nt, Artificial Sequence
  Description of Artificial Sequence: Synthetic oligonucleotide
  Antisense strand to SEQ ID NO: 1358760
aauucuagcacgggaccca

SEQ ID NO: 1358762 - RNA, 19 nt, Artificial Sequence
  Description of Artificial Sequence: Synthetic oligonucleotide
  Sense strand starting at position 3178 of SEQ ID NO: 1242582
aaaugacuugugggcuuua

SEQ ID NO: 1358763 - RNA, 19 nt, Artificial Sequence
  Description of Artificial Sequence: Synthetic oligonucleotide
  Antisense strand to SEQ ID NO: 1358762
uaaagcccacaagucauuu

SEQ ID NO: 1358764 - RNA, 19 nt, Artificial Sequence
  Description of Artificial Sequence: Synthetic oligonucleotide
  Sense strand starting at position 3179 of SEQ ID NO: 1242582
aaugacuugugggcuuuau

SEQ ID NO: 1358765 - RNA, 19 nt, Artificial Sequence
  Description of Artificial Sequence: Synthetic oligonucleotide
  Antisense strand to SEQ ID NO: 1358764
auaaagcccacaagucauu

SEQ ID NO: 1358766 - RNA, 19 nt, Artificial Sequence
  Description of Artificial Sequence: Synthetic oligonucleotide
  Sense strand starting at position 3300 of SEQ ID NO: 1242582
cuuuacagguaucuuugaa

SEQ ID NO: 1358767 - RNA, 19 nt, Artificial Sequence
  Description of Artificial Sequence: Synthetic oligonucleotide
  Antisense strand to SEQ ID NO: 1358766
uucaaagauaccuguaaag

SEQ ID NO: 1358768 - RNA, 19 nt, Artificial Sequence
  Description of Artificial Sequence: Synthetic oligonucleotide
  Sense strand starting at position 214 of SEQ ID NO: 1242583
ggcaaugcucccugggagu

SEQ ID NO: 1358769 - RNA, 19 nt, Artificial Sequence
  Description of Artificial Sequence: Synthetic oligonucleotide
  Antisense strand to SEQ ID NO: 1358768
acucccagggagcauugcc

SEQ ID NO: 1358770 - RNA, 19 nt, Artificial Sequence
  Description of Artificial Sequence: Synthetic oligonucleotide
  Sense strand starting at position 227 of SEQ ID NO: 1242583
gggagugucacaugggaau

SEQ ID NO: 1358771 - RNA, 19 nt, Artificial Sequence
  Description of Artificial Sequence: Synthetic oligonucleotide
  Antisense strand to SEQ ID NO: 1358770
auucccaugugacacuccc

SEQ ID NO: 1358772 - RNA, 19 nt, Artificial Sequence
  Description of Artificial Sequence: Synthetic oligonucleotide
  Sense strand starting at position 229 of SEQ ID NO: 1242583
gagugucacaugggaauua

SEQ ID NO: 1358773 - RNA, 19 nt, Artificial Sequence
  Description of Artificial Sequence: Synthetic oligonucleotide
  Antisense strand to SEQ ID NO: 1358772
uaauucccaugugacacuc

SEQ ID NO: 1358774 - RNA, 19 nt, Artificial Sequence
  Description of Artificial Sequence: Synthetic oligonucleotide
  Sense strand starting at position 429 of SEQ ID NO: 1242583
aguagcaaguuccuggaua

SEQ ID NO: 1358775 - RNA, 19 nt, Artificial Sequence
  Description of Artificial Sequence: Synthetic oligonucleotide
  Antisense strand to SEQ ID NO: 1358774
uauccaggaacuugcuacu

SEQ ID NO: 1358776 - RNA, 19 nt, Artificial Sequence
  Description of Artificial Sequence: Synthetic oligonucleotide
  Sense strand starting at position 430 of SEQ ID NO: 1242583
guagcaaguuccuggauac

SEQ ID NO: 1358777 - RNA, 19 nt, Artificial Sequence
  Description of Artificial Sequence: Synthetic oligonucleotide
  Antisense strand to SEQ ID NO: 1358776
guauccaggaacuugcuac

SEQ ID NO: 1358778 - RNA, 19 nt, Artificial Sequence
  Description of Artificial Sequence: Synthetic oligonucleotide
  Sense strand starting at position 431 of SEQ ID NO: 1242583
uagcaaguuccuggauaca

SEQ ID NO: 1358779 - RNA, 19 nt, Artificial Sequence
  Description of Artificial Sequence: Synthetic oligonucleotide
  Antisense strand to SEQ ID NO: 1358778
uguauccaggaacuugcua

SEQ ID NO: 1358780 - RNA, 19 nt, Artificial Sequence
  Description of Artificial Sequence: Synthetic oligonucleotide
  Sense strand starting at position 465 of SEQ ID NO: 1242583
ggacuaguuagcuaggguu

SEQ ID NO: 1358781 - RNA, 19 nt, Artificial Sequence
  Description of Artificial Sequence: Synthetic oligonucleotide
  Antisense strand to SEQ ID NO: 1358780
aacccuagcuaacuagucc

SEQ ID NO: 1358782 - RNA, 19 nt, Artificial Sequence
  Description of Artificial Sequence: Synthetic oligonucleotide
  Sense strand starting at position 526 of SEQ ID NO: 1242583
agggaaauguucccuaccu

SEQ ID NO: 1358783 - RNA, 19 nt, Artificial Sequence
  Description of Artificial Sequence: Synthetic oligonucleotide
  Antisense strand to SEQ ID NO: 1358782
agguagggaacauuucccu

SEQ ID NO: 1358784 - RNA, 19 nt, Artificial Sequence
  Description of Artificial Sequence: Synthetic oligonucleotide
  Sense strand starting at position 527 of SEQ ID NO: 1242583
gggaaauguucccuaccuc

SEQ ID NO: 1358785 - RNA, 19 nt, Artificial Sequence
  Description of Artificial Sequence: Synthetic oligonucleotide
  Antisense strand to SEQ ID NO: 1358784
gagguagggaacauuuccc

SEQ ID NO: 1358786 - RNA, 19 nt, Artificial Sequence
  Description of Artificial Sequence: Synthetic oligonucleotide
  Sense strand starting at position 820 of SEQ ID NO: 1242583
gaauguaaagaucgugaau

SEQ ID NO: 1358787 - RNA, 19 nt, Artificial Sequence
  Description of Artificial Sequence: Synthetic oligonucleotide
  Antisense strand to SEQ ID NO: 1358786
auucacgaucuuuacauuc

SEQ ID NO: 1358788 - RNA, 19 nt, Artificial Sequence
  Description of Artificial Sequence: Synthetic oligonucleotide
  Sense strand starting at position 822 of SEQ ID NO: 1242583
auguaaagaucgugaauca

SEQ ID NO: 1358789 - RNA, 19 nt, Artificial Sequence
  Description of Artificial Sequence: Synthetic oligonucleotide
  Antisense strand to SEQ ID NO: 1358788
ugauucacgaucuuuacau

SEQ ID NO: 1358790 - RNA, 19 nt, Artificial Sequence
  Description of Artificial Sequence: Synthetic oligonucleotide
  Sense strand starting at position 823 of SEQ ID NO: 1242583
uguaaagaucgugaaucaa

SEQ ID NO: 1358791 - RNA, 19 nt, Artificial Sequence
  Description of Artificial Sequence: Synthetic oligonucleotide
  Antisense strand to SEQ ID NO: 1358790
uugauucacgaucuuuaca

SEQ ID NO: 1358792 - RNA, 19 nt, Artificial Sequence
  Description of Artificial Sequence: Synthetic oligonucleotide
  Sense strand starting at position 880 of SEQ ID NO: 1242583
augggaaaggucugugcuu

SEQ ID NO: 1358793 - RNA, 19 nt, Artificial Sequence
  Description of Artificial Sequence: Synthetic oligonucleotide
  Antisense strand to SEQ ID NO: 1358792
aagcacagaccuuucccau

SEQ ID NO: 1358794 - RNA, 19 nt, Artificial Sequence
  Description of Artificial Sequence: Synthetic oligonucleotide
  Sense strand starting at position 882 of SEQ ID NO: 1242583
gggaaaggucugugcuuca

SEQ ID NO: 1358795 - RNA, 19 nt, Artificial Sequence
  Description of Artificial Sequence: Synthetic oligonucleotide
  Antisense strand to SEQ ID NO: 1358794
ugaagcacagaccuuuccc

SEQ ID NO: 1358796 - RNA, 19 nt, Artificial Sequence
  Description of Artificial Sequence: Synthetic oligonucleotide
  Sense strand starting at position 917 of SEQ ID NO: 1242583
cggagccagaucugagauu

SEQ ID NO: 1358797 - RNA, 19 nt, Artificial Sequence
  Description of Artificial Sequence: Synthetic oligonucleotide
  Antisense strand to SEQ ID NO: 1358796
aaucucagaucuggcuccg

SEQ ID NO: 1358798 - RNA, 19 nt, Artificial Sequence
  Description of Artificial Sequence: Synthetic oligonucleotide
  Sense strand starting at position 918 of SEQ ID NO: 1242583
ggagccagaucugagauua

SEQ ID NO: 1358799 - RNA, 19 nt, Artificial Sequence
  Description of Artificial Sequence: Synthetic oligonucleotide
  Antisense strand to SEQ ID NO: 1358798
uaaucucagaucuggcucc

SEQ ID NO: 1358800 - RNA, 19 nt, Artificial Sequence
  Description of Artificial Sequence: Synthetic oligonucleotide
  Sense strand starting at position 1148 of SEQ ID NO: 1242583
cgaggaaagcgguaagcuu

SEQ ID NO: 1358801 - RNA, 19 nt, Artificial Sequence
  Description of Artificial Sequence: Synthetic oligonucleotide
  Antisense strand to SEQ ID NO: 1358800
aagcuuaccgcuuuccucg

SEQ ID NO: 1358802 - RNA, 19 nt, Artificial Sequence
  Description of Artificial Sequence: Synthetic oligonucleotide
  Sense strand starting at position 1161 of SEQ ID NO: 1242583
aagcuuugccaucgucacu

SEQ ID NO: 1358803 - RNA, 19 nt, Artificial Sequence
  Description of Artificial Sequence: Synthetic oligonucleotide
  Antisense strand to SEQ ID NO: 1358802
agugacgauggcaaagcuu

SEQ ID NO: 1358804 - RNA, 19 nt, Artificial Sequence
  Description of Artificial Sequence: Synthetic oligonucleotide
  Sense strand starting at position 1270 of SEQ ID NO: 1242583
gaaucaaggucgcccgaua

SEQ ID NO: 1358805 - RNA, 19 nt, Artificial Sequence
  Description of Artificial Sequence: Synthetic oligonucleotide
  Antisense strand to SEQ ID NO: 1358804
uaucgggcgaccuugauuc

SEQ ID NO: 1358806 - RNA, 19 nt, Artificial Sequence
  Description of Artificial Sequence: Synthetic oligonucleotide
  Sense strand starting at position 1334 of SEQ ID NO: 1242583
ggguuucccuccucgcgaa

SEQ ID NO: 1358807 - RNA, 19 nt, Artificial Sequence
  Description of Artificial Sequence: Synthetic oligonucleotide
  Antisense strand to SEQ ID NO: 1358806
uucgcgaggagggaaaccc

SEQ ID NO: 1358808 - RNA, 19 nt, Artificial Sequence
  Description of Artificial Sequence: Synthetic oligonucleotide
  Sense strand starting at position 1359 of SEQ ID NO: 1242583
cccguuucccaggacagaa

SEQ ID NO: 1358809 - RNA, 19 nt, Artificial Sequence
  Description of Artificial Sequence: Synthetic oligonucleotide
  Antisense strand to SEQ ID NO: 1358808
uucuguccugggaaacggg

SEQ ID NO: 1358810 - RNA, 19 nt, Artificial Sequence
  Description of Artificial Sequence: Synthetic oligonucleotide
  Sense strand starting at position 2186 of SEQ ID NO: 1242583
cgccgugacucagccagaa

SEQ ID NO: 1358811 - RNA, 19 nt, Artificial Sequence
  Description of Artificial Sequence: Synthetic oligonucleotide
  Antisense strand to SEQ ID NO: 1358810
uucuggcugagucacggcg

SEQ ID NO: 1358812 - RNA, 19 nt, Artificial Sequence
  Description of Artificial Sequence: Synthetic oligonucleotide
  Sense strand starting at position 2188 of SEQ ID NO: 1242583
ccgugacucagccagaaug

SEQ ID NO: 1358813 - RNA, 19 nt, Artificial Sequence
  Description of Artificial Sequence: Synthetic oligonucleotide
  Antisense strand to SEQ ID NO: 1358812
cauucuggcugagucacgg

SEQ ID NO: 1358814 - RNA, 19 nt, Artificial Sequence
  Description of Artificial Sequence: Synthetic oligonucleotide
  Sense strand starting at position 2190 of SEQ ID NO: 1242583
gugacucagccagaauguu

SEQ ID NO: 1358815 - RNA, 19 nt, Artificial Sequence
  Description of Artificial Sequence: Synthetic oligonucleotide
  Antisense strand to SEQ ID NO: 1358814
aacauucuggcugagucac

SEQ ID NO: 1358816 - RNA, 19 nt, Artificial Sequence
  Description of Artificial Sequence: Synthetic oligonucleotide
  Sense strand starting at position 2686 of SEQ ID NO: 1242583
ggucacaguuccugccaaa

SEQ ID NO: 1358817 - RNA, 19 nt, Artificial Sequence
  Description of Artificial Sequence: Synthetic oligonucleotide
  Antisense strand to SEQ ID NO: 1358816
uuuggcaggaacugugacc

SEQ ID NO: 1358818 - RNA, 19 nt, Artificial Sequence
  Description of Artificial Sequence: Synthetic oligonucleotide
  Sense strand starting at position 2698 of SEQ ID NO: 1242583
ugccaaacgucuuccuuga

SEQ ID NO: 1358819 - RNA, 19 nt, Artificial Sequence
  Description of Artificial Sequence: Synthetic oligonucleotide
  Antisense strand to SEQ ID NO: 1358818
ucaaggaagacguuuggca

SEQ ID NO: 1358820 - RNA, 19 nt, Artificial Sequence
  Description of Artificial Sequence: Synthetic oligonucleotide
  Sense strand starting at position 2783 of SEQ ID NO: 1242583
cugcuccuaucguccaaau

SEQ ID NO: 1358821 - RNA, 19 nt, Artificial Sequence
  Description of Artificial Sequence: Synthetic oligonucleotide
  Antisense strand to SEQ ID NO: 1358820
auuuggacgauaggagcag

SEQ ID NO: 1358822 - RNA, 19 nt, Artificial Sequence
  Description of Artificial Sequence: Synthetic oligonucleotide
  Sense strand starting at position 2785 of SEQ ID NO: 1242583
gcuccuaucguccaaaucu

SEQ ID NO: 1358823 - RNA, 19 nt, Artificial Sequence
  Description of Artificial Sequence: Synthetic oligonucleotide
  Antisense strand to SEQ ID NO: 1358822
agauuuggacgauaggagc

SEQ ID NO: 1358824 - RNA, 19 nt, Artificial Sequence
  Description of Artificial Sequence: Synthetic oligonucleotide
  Sense strand starting at position 792 of SEQ ID NO: 1242584
cgccgugacucagccagaa

SEQ ID NO: 1358825 - RNA, 19 nt, Artificial Sequence
  Description of Artificial Sequence: Synthetic oligonucleotide
  Antisense strand to SEQ ID NO: 1358824
uucuggcugagucacggcg

SEQ ID NO: 1358826 - RNA, 19 nt, Artificial Sequence
  Description of Artificial Sequence: Synthetic oligonucleotide
  Sense strand starting at position 794 of SEQ ID NO: 1242584
ccgugacucagccagaaug

SEQ ID NO: 1358827 - RNA, 19 nt, Artificial Sequence
  Description of Artificial Sequence: Synthetic oligonucleotide
  Antisense strand to SEQ ID NO: 1358826
cauucuggcugagucacgg

SEQ ID NO: 1358828 - RNA, 19 nt, Artificial Sequence
  Description of Artificial Sequence: Synthetic oligonucleotide
  Sense strand starting at position 796 of SEQ ID NO: 1242584
gugacucagccagaauguu

SEQ ID NO: 1358829 - RNA, 19 nt, Artificial Sequence
  Description of Artificial Sequence: Synthetic oligonucleotide
  Antisense strand to SEQ ID NO: 1358828
aacauucuggcugagucac

SEQ ID NO: 1358830 - RNA, 19 nt, Artificial Sequence
  Description of Artificial Sequence: Synthetic oligonucleotide
  Sense strand starting at position 1292 of SEQ ID NO: 1242584
ggucacaguuccugccaaa

SEQ ID NO: 1358831 - RNA, 19 nt, Artificial Sequence
  Description of Artificial Sequence: Synthetic oligonucleotide
  Antisense strand to SEQ ID NO: 1358830
uuuggcaggaacugugacc

SEQ ID NO: 1358832 - RNA, 19 nt, Artificial Sequence
  Description of Artificial Sequence: Synthetic oligonucleotide
  Sense strand starting at position 1304 of SEQ ID NO: 1242584
ugccaaacgucuuccuuga

SEQ ID NO: 1358833 - RNA, 19 nt, Artificial Sequence
  Description of Artificial Sequence: Synthetic oligonucleotide
  Antisense strand to SEQ ID NO: 1358832
ucaaggaagacguuuggca

SEQ ID NO: 1358834 - RNA, 19 nt, Artificial Sequence
  Description of Artificial Sequence: Synthetic oligonucleotide
  Sense strand starting at position 1389 of SEQ ID NO: 1242584
cugcuccuaucguccaaau

SEQ ID NO: 1358835 - RNA, 19 nt, Artificial Sequence
  Description of Artificial Sequence: Synthetic oligonucleotide
  Antisense strand to SEQ ID NO: 1358834
auuuggacgauaggagcag

SEQ ID NO: 1358836 - RNA, 19 nt, Artificial Sequence
  Description of Artificial Sequence: Synthetic oligonucleotide
  Sense strand starting at position 1391 of SEQ ID NO: 1242584
gcuccuaucguccaaaucu

SEQ ID NO: 1358837 - RNA, 19 nt, Artificial Sequence
  Description of Artificial Sequence: Synthetic oligonucleotide
  Antisense strand to SEQ ID NO: 1358836
agauuuggacgauaggagc

SEQ ID NO: 1358838 - RNA, 19 nt, Artificial Sequence
  Description of Artificial Sequence: Synthetic oligonucleotide
  Sense strand starting at position 2593 of SEQ ID NO: 1242584
cacgucuguugcucucuaa

SEQ ID NO: 1358839 - RNA, 19 nt, Artificial Sequence
  Description of Artificial Sequence: Synthetic oligonucleotide
  Antisense strand to SEQ ID NO: 1358838
uuagagagcaacagacgug

SEQ ID NO: 1358840 - RNA, 19 nt, Artificial Sequence
  Description of Artificial Sequence: Synthetic oligonucleotide
  Sense strand starting at position 2644 of SEQ ID NO: 1242584
ucacuugcccaguggaaca

SEQ ID NO: 1358841 - RNA, 19 nt, Artificial Sequence
  Description of Artificial Sequence: Synthetic oligonucleotide
  Antisense strand to SEQ ID NO: 1358840
uguuccacugggcaaguga

SEQ ID NO: 1358842 - RNA, 19 nt, Artificial Sequence
  Description of Artificial Sequence: Synthetic oligonucleotide
  Sense strand starting at position 2663 of SEQ ID NO: 1242584
gaggguacuguccaucauu

SEQ ID NO: 1358843 - RNA, 19 nt, Artificial Sequence
  Description of Artificial Sequence: Synthetic oligonucleotide
  Antisense strand to SEQ ID NO: 1358842
aaugauggacaguacccuc

SEQ ID NO: 1358844 - RNA, 19 nt, Artificial Sequence
  Description of Artificial Sequence: Synthetic oligonucleotide
  Sense strand starting at position 2671 of SEQ ID NO: 1242584
uguccaucauucccaggaa

SEQ ID NO: 1358845 - RNA, 19 nt, Artificial Sequence
  Description of Artificial Sequence: Synthetic oligonucleotide
  Antisense strand to SEQ ID NO: 1358844
uuccugggaaugauggaca

SEQ ID NO: 1358846 - RNA, 19 nt, Artificial Sequence
  Description of Artificial Sequence: Synthetic oligonucleotide
  Sense strand starting at position 2674 of SEQ ID NO: 1242584
ccaucauucccaggaacag

SEQ ID NO: 1358847 - RNA, 19 nt, Artificial Sequence
  Description of Artificial Sequence: Synthetic oligonucleotide
  Antisense strand to SEQ ID NO: 1358846
cuguuccugggaaugaugg

SEQ ID NO: 1358848 - RNA, 19 nt, Artificial Sequence
  Description of Artificial Sequence: Synthetic oligonucleotide
  Sense strand starting at position 2692 of SEQ ID NO: 1242584
gugcaauucccugugcugu

SEQ ID NO: 1358849 - RNA, 19 nt, Artificial Sequence
  Description of Artificial Sequence: Synthetic oligonucleotide
  Antisense strand to SEQ ID NO: 1358848
acagcacagggaauugcac

SEQ ID NO: 1358850 - RNA, 19 nt, Artificial Sequence
  Description of Artificial Sequence: Synthetic oligonucleotide
  Sense strand starting at position 2720 of SEQ ID NO: 1242584
agcagugaguccuuguucu

SEQ ID NO: 1358851 - RNA, 19 nt, Artificial Sequence
  Description of Artificial Sequence: Synthetic oligonucleotide
  Antisense strand to SEQ ID NO: 1358850
agaacaaggacucacugcu

SEQ ID NO: 1358852 - RNA, 19 nt, Artificial Sequence
  Description of Artificial Sequence: Synthetic oligonucleotide
  Sense strand starting at position 2724 of SEQ ID NO: 1242584
gugaguccuuguucugaac

SEQ ID NO: 1358853 - RNA, 19 nt, Artificial Sequence
  Description of Artificial Sequence: Synthetic oligonucleotide
  Antisense strand to SEQ ID NO: 1358852
guucagaacaaggacucac

SEQ ID NO: 1358854 - RNA, 19 nt, Artificial Sequence
  Description of Artificial Sequence: Synthetic oligonucleotide
  Sense strand starting at position 2726 of SEQ ID NO: 1242584
gaguccuuguucugaacaa

SEQ ID NO: 1358855 - RNA, 19 nt, Artificial Sequence
  Description of Artificial Sequence: Synthetic oligonucleotide
  Antisense strand to SEQ ID NO: 1358854
uuguucagaacaaggacuc

SEQ ID NO: 1358856 - RNA, 19 nt, Artificial Sequence
  Description of Artificial Sequence: Synthetic oligonucleotide
  Sense strand starting at position 2727 of SEQ ID NO: 1242584
aguccuuguucugaacaac

SEQ ID NO: 1358857 - RNA, 19 nt, Artificial Sequence
  Description of Artificial Sequence: Synthetic oligonucleotide
  Antisense strand to SEQ ID NO: 1358856
guuguucagaacaaggacu

SEQ ID NO: 1358858 - RNA, 19 nt, Artificial Sequence
  Description of Artificial Sequence: Synthetic oligonucleotide
  Sense strand starting at position 2730 of SEQ ID NO: 1242584
ccuuguucugaacaacuga

SEQ ID NO: 1358859 - RNA, 19 nt, Artificial Sequence
  Description of Artificial Sequence: Synthetic oligonucleotide
  Antisense strand to SEQ ID NO: 1358858
ucaguuguucagaacaagg

SEQ ID NO: 1358860 - RNA, 19 nt, Artificial Sequence
  Description of Artificial Sequence: Synthetic oligonucleotide
  Sense strand starting at position 2834 of SEQ ID NO: 1242584
ugggucccgugcuagaauu

SEQ ID NO: 1358861 - RNA, 19 nt, Artificial Sequence
  Description of Artificial Sequence: Synthetic oligonucleotide
  Antisense strand to SEQ ID NO: 1358860
aauucuagcacgggaccca

SEQ ID NO: 1358862 - RNA, 19 nt, Artificial Sequence
  Description of Artificial Sequence: Synthetic oligonucleotide
  Sense strand starting at position 2960 of SEQ ID NO: 1242584
aaaugacuugugggcuuua

SEQ ID NO: 1358863 - RNA, 19 nt, Artificial Sequence
  Description of Artificial Sequence: Synthetic oligonucleotide
  Antisense strand to SEQ ID NO: 1358862
uaaagcccacaagucauuu

SEQ ID NO: 1358864 - RNA, 19 nt, Artificial Sequence
  Description of Artificial Sequence: Synthetic oligonucleotide
  Sense strand starting at position 2961 of SEQ ID NO: 1242584
aaugacuugugggcuuuau

SEQ ID NO: 1358865 - RNA, 19 nt, Artificial Sequence
  Description of Artificial Sequence: Synthetic oligonucleotide
  Antisense strand to SEQ ID NO: 1358864
auaaagcccacaagucauu

SEQ ID NO: 1358866 - RNA, 19 nt, Artificial Sequence
  Description of Artificial Sequence: Synthetic oligonucleotide
  Sense strand starting at position 3082 of SEQ ID NO: 1242584
cuuuacagguaucuuugaa

SEQ ID NO: 1358867 - RNA, 19 nt, Artificial Sequence
  Description of Artificial Sequence: Synthetic oligonucleotide
  Antisense strand to SEQ ID NO: 1358866
uucaaagauaccuguaaag

SEQ ID NO: 1358868 - RNA, 19 nt, Artificial Sequence
  Description of Artificial Sequence: Synthetic oligonucleotide
  Sense strand starting at position 111 of SEQ ID NO: 1242585
guaugcgugcguguguaua

SEQ ID NO: 1358869 - RNA, 19 nt, Artificial Sequence
  Description of Artificial Sequence: Synthetic oligonucleotide
  Antisense strand to SEQ ID NO: 1358868
uauacacacgcacgcauac

SEQ ID NO: 1358870 - RNA, 19 nt, Artificial Sequence
  Description of Artificial Sequence: Synthetic oligonucleotide
  Sense strand starting at position 255 of SEQ ID NO: 1242585
agaaacagguucuuguauu

SEQ ID NO: 1358871 - RNA, 19 nt, Artificial Sequence
  Description of Artificial Sequence: Synthetic oligonucleotide
  Antisense strand to SEQ ID NO: 1358870
aauacaagaaccuguuucu

SEQ ID NO: 1358872 - RNA, 19 nt, Artificial Sequence
  Description of Artificial Sequence: Synthetic oligonucleotide
  Sense strand starting at position 263 of SEQ ID NO: 1242585
guucuuguauuaccuacau

SEQ ID NO: 1358873 - RNA, 19 nt, Artificial Sequence
  Description of Artificial Sequence: Synthetic oligonucleotide
  Antisense strand to SEQ ID NO: 1358872
auguagguaauacaagaac

SEQ ID NO: 1358874 - RNA, 19 nt, Artificial Sequence
  Description of Artificial Sequence: Synthetic oligonucleotide
  Sense strand starting at position 281 of SEQ ID NO: 1242585
ugcaauauuucuuagggua

SEQ ID NO: 1358875 - RNA, 19 nt, Artificial Sequence
  Description of Artificial Sequence: Synthetic oligonucleotide
  Antisense strand to SEQ ID NO: 1358874
uacccuaagaaauauugca

SEQ ID NO: 1358876 - RNA, 19 nt, Artificial Sequence
  Description of Artificial Sequence: Synthetic oligonucleotide
  Sense strand starting at position 356 of SEQ ID NO: 1242585
auguaagacuaucuguaau

SEQ ID NO: 1358877 - RNA, 19 nt, Artificial Sequence
  Description of Artificial Sequence: Synthetic oligonucleotide
  Antisense strand to SEQ ID NO: 1358876
auuacagauagucuuacau

SEQ ID NO: 1358878 - RNA, 19 nt, Artificial Sequence
  Description of Artificial Sequence: Synthetic oligonucleotide
  Sense strand starting at position 476 of SEQ ID NO: 1242585
gcaauauaguaccaauuug

SEQ ID NO: 1358879 - RNA, 19 nt, Artificial Sequence
  Description of Artificial Sequence: Synthetic oligonucleotide
  Antisense strand to SEQ ID NO: 1358878
caaauugguacuauauugc

SEQ ID NO: 1358880 - RNA, 19 nt, Artificial Sequence
  Description of Artificial Sequence: Synthetic oligonucleotide
  Sense strand starting at position 762 of SEQ ID NO: 1242585
uggaguugacggcauccua

SEQ ID NO: 1358881 - RNA, 19 nt, Artificial Sequence
  Description of Artificial Sequence: Synthetic oligonucleotide
  Antisense strand to SEQ ID NO: 1358880
uaggaugccgucaacucca

SEQ ID NO: 1358882 - RNA, 19 nt, Artificial Sequence
  Description of Artificial Sequence: Synthetic oligonucleotide
  Sense strand starting at position 771 of SEQ ID NO: 1242585
cggcauccuaccugcaaga

SEQ ID NO: 1358883 - RNA, 19 nt, Artificial Sequence
  Description of Artificial Sequence: Synthetic oligonucleotide
  Antisense strand to SEQ ID NO: 1358882
ucuugcagguaggaugccg

SEQ ID NO: 1358884 - RNA, 19 nt, Artificial Sequence
  Description of Artificial Sequence: Synthetic oligonucleotide
  Sense strand starting at position 773 of SEQ ID NO: 1242585
gcauccuaccugcaagacu

SEQ ID NO: 1358885 - RNA, 19 nt, Artificial Sequence
  Description of Artificial Sequence: Synthetic oligonucleotide
  Antisense strand to SEQ ID NO: 1358884
agucuugcagguaggaugc

SEQ ID NO: 1358886 - RNA, 19 nt, Artificial Sequence
  Description of Artificial Sequence: Synthetic oligonucleotide
  Sense strand starting at position 1002 of SEQ ID NO: 1242585
agagaaugcggccaauucu

SEQ ID NO: 1358887 - RNA, 19 nt, Artificial Sequence
  Description of Artificial Sequence: Synthetic oligonucleotide
  Antisense strand to SEQ ID NO: 1358886
agaauuggccgcauucucu

SEQ ID NO: 1358888 - RNA, 19 nt, Artificial Sequence
  Description of Artificial Sequence: Synthetic oligonucleotide
  Sense strand starting at position 1025 of SEQ ID NO: 1242585
cagauugcucuaggaggca

SEQ ID NO: 1358889 - RNA, 19 nt, Artificial Sequence
  Description of Artificial Sequence: Synthetic oligonucleotide
  Antisense strand to SEQ ID NO: 1358888
ugccuccuagagcaaucug

SEQ ID NO: 1358890 - RNA, 19 nt, Artificial Sequence
  Description of Artificial Sequence: Synthetic oligonucleotide
  Sense strand starting at position 1047 of SEQ ID NO: 1242585
agagauagggccugaaucu

SEQ ID NO: 1358891 - RNA, 19 nt, Artificial Sequence
  Description of Artificial Sequence: Synthetic oligonucleotide
  Antisense strand to SEQ ID NO: 1358890
agauucaggcccuaucucu

SEQ ID NO: 1358892 - RNA, 19 nt, Artificial Sequence
  Description of Artificial Sequence: Synthetic oligonucleotide
  Sense strand starting at position 1097 of SEQ ID NO: 1242585
aacaguaggugcucaauua

SEQ ID NO: 1358893 - RNA, 19 nt, Artificial Sequence
  Description of Artificial Sequence: Synthetic oligonucleotide
  Antisense strand to SEQ ID NO: 1358892
uaauugagcaccuacuguu

SEQ ID NO: 1358894 - RNA, 19 nt, Artificial Sequence
  Description of Artificial Sequence: Synthetic oligonucleotide
  Sense strand starting at position 1119 of SEQ ID NO: 1242585
uaaucuagauugucuggau

SEQ ID NO: 1358895 - RNA, 19 nt, Artificial Sequence
  Description of Artificial Sequence: Synthetic oligonucleotide
  Antisense strand to SEQ ID NO: 1358894
auccagacaaucuagauua

SEQ ID NO: 1358896 - RNA, 19 nt, Artificial Sequence
  Description of Artificial Sequence: Synthetic oligonucleotide
  Sense strand starting at position 1120 of SEQ ID NO: 1242585
aaucuagauugucuggaua

SEQ ID NO: 1358897 - RNA, 19 nt, Artificial Sequence
  Description of Artificial Sequence: Synthetic oligonucleotide
  Antisense strand to SEQ ID NO: 1358896
uauccagacaaucuagauu

SEQ ID NO: 1358898 - RNA, 19 nt, Artificial Sequence
  Description of Artificial Sequence: Synthetic oligonucleotide
  Sense strand starting at position 1123 of SEQ ID NO: 1242585
cuagauugucuggauagug

SEQ ID NO: 1358899 - RNA, 19 nt, Artificial Sequence
  Description of Artificial Sequence: Synthetic oligonucleotide
  Antisense strand to SEQ ID NO: 1358898
cacuauccagacaaucuag

SEQ ID NO: 1358900 - RNA, 19 nt, Artificial Sequence
  Description of Artificial Sequence: Synthetic oligonucleotide
  Sense strand starting at position 1385 of SEQ ID NO: 1242585
ugcguugagggaugaggaa

SEQ ID NO: 1358901 - RNA, 19 nt, Artificial Sequence
  Description of Artificial Sequence: Synthetic oligonucleotide
  Antisense strand to SEQ ID NO: 1358900
uuccucaucccucaacgca

SEQ ID NO: 1358902 - RNA, 19 nt, Artificial Sequence
  Description of Artificial Sequence: Synthetic oligonucleotide
  Sense strand starting at position 1386 of SEQ ID NO: 1242585
gcguugagggaugaggaau

SEQ ID NO: 1358903 - RNA, 19 nt, Artificial Sequence
  Description of Artificial Sequence: Synthetic oligonucleotide
  Antisense strand to SEQ ID NO: 1358902
auuccucaucccucaacgc

SEQ ID NO: 1358904 - RNA, 19 nt, Artificial Sequence
  Description of Artificial Sequence: Synthetic oligonucleotide
  Sense strand starting at position 1497 of SEQ ID NO: 1242585
uuccacuuacuaggagaau

SEQ ID NO: 1358905 - RNA, 19 nt, Artificial Sequence
  Description of Artificial Sequence: Synthetic oligonucleotide
  Antisense strand to SEQ ID NO: 1358904
auucuccuaguaaguggaa

SEQ ID NO: 1358906 - RNA, 19 nt, Artificial Sequence
  Description of Artificial Sequence: Synthetic oligonucleotide
  Sense strand starting at position 1508 of SEQ ID NO: 1242585
aggagaauuacgugagacc

SEQ ID NO: 1358907 - RNA, 19 nt, Artificial Sequence
  Description of Artificial Sequence: Synthetic oligonucleotide
  Antisense strand to SEQ ID NO: 1358906
ggucucacguaauucuccu

SEQ ID NO: 1358908 - RNA, 19 nt, Artificial Sequence
  Description of Artificial Sequence: Synthetic oligonucleotide
  Sense strand starting at position 1565 of SEQ ID NO: 1242585
aagauuaacgccggcuaua

SEQ ID NO: 1358909 - RNA, 19 nt, Artificial Sequence
  Description of Artificial Sequence: Synthetic oligonucleotide
  Antisense strand to SEQ ID NO: 1358908
uauagccggcguuaaucuu

SEQ ID NO: 1358910 - RNA, 19 nt, Artificial Sequence
  Description of Artificial Sequence: Synthetic oligonucleotide
  Sense strand starting at position 1612 of SEQ ID NO: 1242585
gcagaaccgcucgucuaau

SEQ ID NO: 1358911 - RNA, 19 nt, Artificial Sequence
  Description of Artificial Sequence: Synthetic oligonucleotide
  Antisense strand to SEQ ID NO: 1358910
auuagacgagcgguucugc

SEQ ID NO: 1358912 - RNA, 19 nt, Artificial Sequence
  Description of Artificial Sequence: Synthetic oligonucleotide
  Sense strand starting at position 2249 of SEQ ID NO: 1242585
acacaagaauuuggauaaa

SEQ ID NO: 1358913 - RNA, 19 nt, Artificial Sequence
  Description of Artificial Sequence: Synthetic oligonucleotide
  Antisense strand to SEQ ID NO: 1358912
uuuauccaaauucuugugu

SEQ ID NO: 1358914 - RNA, 19 nt, Artificial Sequence
  Description of Artificial Sequence: Synthetic oligonucleotide
  Sense strand starting at position 2273 of SEQ ID NO: 1242585
uccuaacauugauaaagga

SEQ ID NO: 1358915 - RNA, 19 nt, Artificial Sequence
  Description of Artificial Sequence: Synthetic oligonucleotide
  Antisense strand to SEQ ID NO: 1358914
uccuuuaucaauguuagga

SEQ ID NO: 1358916 - RNA, 19 nt, Artificial Sequence
  Description of Artificial Sequence: Synthetic oligonucleotide
  Sense strand starting at position 2296 of SEQ ID NO: 1242585
gaugcugacgaguacgaau

SEQ ID NO: 1358917 - RNA, 19 nt, Artificial Sequence
  Description of Artificial Sequence: Synthetic oligonucleotide
  Antisense strand to SEQ ID NO: 1358916
auucguacucgucagcauc

SEQ ID NO: 1358918 - RNA, 19 nt, Artificial Sequence
  Description of Artificial Sequence: Synthetic oligonucleotide
  Sense strand starting at position 2317 of SEQ ID NO: 1242585
uagaguuccgucuauguaa

SEQ ID NO: 1358919 - RNA, 19 nt, Artificial Sequence
  Description of Artificial Sequence: Synthetic oligonucleotide
  Antisense strand to SEQ ID NO: 1358918
uuacauagacggaacucua

SEQ ID NO: 1358920 - RNA, 19 nt, Artificial Sequence
  Description of Artificial Sequence: Synthetic oligonucleotide
  Sense strand starting at position 2320 of SEQ ID NO: 1242585
aguuccgucuauguaaaua

SEQ ID NO: 1358921 - RNA, 19 nt, Artificial Sequence
  Description of Artificial Sequence: Synthetic oligonucleotide
  Antisense strand to SEQ ID NO: 1358920
uauuuacauagacggaacu

SEQ ID NO: 1358922 - RNA, 19 nt, Artificial Sequence
  Description of Artificial Sequence: Synthetic oligonucleotide
  Sense strand starting at position 2619 of SEQ ID NO: 1242585
gagaguuuaaugugugucu

SEQ ID NO: 1358923 - RNA, 19 nt, Artificial Sequence
  Description of Artificial Sequence: Synthetic oligonucleotide
  Antisense strand to SEQ ID NO: 1358922
agacacacauuaaacucuc

SEQ ID NO: 1358924 - RNA, 19 nt, Artificial Sequence
  Description of Artificial Sequence: Synthetic oligonucleotide
  Sense strand starting at position 3045 of SEQ ID NO: 1242585
ccaagagcucacuggugau

SEQ ID NO: 1358925 - RNA, 19 nt, Artificial Sequence
  Description of Artificial Sequence: Synthetic oligonucleotide
  Antisense strand to SEQ ID NO: 1358924
aucaccagugagcucuugg

SEQ ID NO: 1358926 - RNA, 19 nt, Artificial Sequence
  Description of Artificial Sequence: Synthetic oligonucleotide
  Sense strand starting at position 3049 of SEQ ID NO: 1242585
gagcucacuggugaugcua

SEQ ID NO: 1358927 - RNA, 19 nt, Artificial Sequence
  Description of Artificial Sequence: Synthetic oligonucleotide
  Antisense strand to SEQ ID NO: 1358926
uagcaucaccagugagcuc

SEQ ID NO: 1358928 - RNA, 19 nt, Artificial Sequence
  Description of Artificial Sequence: Synthetic oligonucleotide
  Sense strand starting at position 3359 of SEQ ID NO: 1242585
acgaguaaguaucugcaga

SEQ ID NO: 1358929 - RNA, 19 nt, Artificial Sequence
  Description of Artificial Sequence: Synthetic oligonucleotide
  Antisense strand to SEQ ID NO: 1358928
ucugcagauacuuacucgu

SEQ ID NO: 1358930 - RNA, 19 nt, Artificial Sequence
  Description of Artificial Sequence: Synthetic oligonucleotide
  Sense strand starting at position 3360 of SEQ ID NO: 1242585
cgaguaaguaucugcagac

SEQ ID NO: 1358931 - RNA, 19 nt, Artificial Sequence
  Description of Artificial Sequence: Synthetic oligonucleotide
  Antisense strand to SEQ ID NO: 1358930
gucugcagauacuuacucg

SEQ ID NO: 1358932 - RNA, 19 nt, Artificial Sequence
  Description of Artificial Sequence: Synthetic oligonucleotide
  Sense strand starting at position 3361 of SEQ ID NO: 1242585
gaguaaguaucugcagaca

SEQ ID NO: 1358933 - RNA, 19 nt, Artificial Sequence
  Description of Artificial Sequence: Synthetic oligonucleotide
  Antisense strand to SEQ ID NO: 1358932
ugucugcagauacuuacuc

SEQ ID NO: 1358934 - RNA, 19 nt, Artificial Sequence
  Description of Artificial Sequence: Synthetic oligonucleotide
  Sense strand starting at position 3410 of SEQ ID NO: 1242585
cggcauuuauccuccaguu

SEQ ID NO: 1358935 - RNA, 19 nt, Artificial Sequence
  Description of Artificial Sequence: Synthetic oligonucleotide
  Antisense strand to SEQ ID NO: 1358934
aacuggaggauaaaugccg

SEQ ID NO: 1358936 - RNA, 19 nt, Artificial Sequence
  Description of Artificial Sequence: Synthetic oligonucleotide
  Sense strand starting at position 3498 of SEQ ID NO: 1242585
ucugucgacgcucuguaau

SEQ ID NO: 1358937 - RNA, 19 nt, Artificial Sequence
  Description of Artificial Sequence: Synthetic oligonucleotide
  Antisense strand to SEQ ID NO: 1358936
auuacagagcgucgacaga

SEQ ID NO: 1358938 - RNA, 19 nt, Artificial Sequence
  Description of Artificial Sequence: Synthetic oligonucleotide
  Sense strand starting at position 3599 of SEQ ID NO: 1242585
ugcuuucuucgucugugaa

SEQ ID NO: 1358939 - RNA, 19 nt, Artificial Sequence
  Description of Artificial Sequence: Synthetic oligonucleotide
  Antisense strand to SEQ ID NO: 1358938
uucacagacgaagaaagca

SEQ ID NO: 1358940 - RNA, 19 nt, Artificial Sequence
  Description of Artificial Sequence: Synthetic oligonucleotide
  Sense strand starting at position 3607 of SEQ ID NO: 1242585
ucgucugugaauuaaggga

SEQ ID NO: 1358941 - RNA, 19 nt, Artificial Sequence
  Description of Artificial Sequence: Synthetic oligonucleotide
  Antisense strand to SEQ ID NO: 1358940
ucccuuaauucacagacga

SEQ ID NO: 1358942 - RNA, 19 nt, Artificial Sequence
  Description of Artificial Sequence: Synthetic oligonucleotide
  Sense strand starting at position 3655 of SEQ ID NO: 1242585
cugcucugaugagcuaaga

SEQ ID NO: 1358943 - RNA, 19 nt, Artificial Sequence
  Description of Artificial Sequence: Synthetic oligonucleotide
  Antisense strand to SEQ ID NO: 1358942
ucuuagcucaucagagcag

SEQ ID NO: 1358944 - RNA, 19 nt, Artificial Sequence
  Description of Artificial Sequence: Synthetic oligonucleotide
  Sense strand starting at position 3846 of SEQ ID NO: 1242585
gcauccauuccacaugaga

SEQ ID NO: 1358945 - RNA, 19 nt, Artificial Sequence
  Description of Artificial Sequence: Synthetic oligonucleotide
  Antisense strand to SEQ ID NO: 1358944
ucucauguggaauggaugc

SEQ ID NO: 1358946 - RNA, 19 nt, Artificial Sequence
  Description of Artificial Sequence: Synthetic oligonucleotide
  Sense strand starting at position 3894 of SEQ ID NO: 1242585
auggauaagucacucaauc

SEQ ID NO: 1358947 - RNA, 19 nt, Artificial Sequence
  Description of Artificial Sequence: Synthetic oligonucleotide
  Antisense strand to SEQ ID NO: 1358946
gauugagugacuuauccau

SEQ ID NO: 1358948 - RNA, 19 nt, Artificial Sequence
  Description of Artificial Sequence: Synthetic oligonucleotide
  Sense strand starting at position 83 of SEQ ID NO: 1242586
gugagacuuucucuacaaa

SEQ ID NO: 1358949 - RNA, 19 nt, Artificial Sequence
  Description of Artificial Sequence: Synthetic oligonucleotide
  Antisense strand to SEQ ID NO: 1358948
uuuguagagaaagucucac

SEQ ID NO: 1358950 - RNA, 19 nt, Artificial Sequence
  Description of Artificial Sequence: Synthetic oligonucleotide
  Sense strand starting at position 188 of SEQ ID NO: 1242586
gaagaaugaggcugcaaug

SEQ ID NO: 1358951 - RNA, 19 nt, Artificial Sequence
  Description of Artificial Sequence: Synthetic oligonucleotide
  Antisense strand to SEQ ID NO: 1358950
cauugcagccucauucuuc

SEQ ID NO: 1358952 - RNA, 19 nt, Artificial Sequence
  Description of Artificial Sequence: Synthetic oligonucleotide
  Sense strand starting at position 668 of SEQ ID NO: 1242586
ccugaauaguaguaacaua

SEQ ID NO: 1358953 - RNA, 19 nt, Artificial Sequence
  Description of Artificial Sequence: Synthetic oligonucleotide
  Antisense strand to SEQ ID NO: 1358952
uauguuacuacuauucagg

SEQ ID NO: 1358954 - RNA, 19 nt, Artificial Sequence
  Description of Artificial Sequence: Synthetic oligonucleotide
  Sense strand starting at position 881 of SEQ ID NO: 1242586
ggacuaucgcugugccaau

SEQ ID NO: 1358955 - RNA, 19 nt, Artificial Sequence
  Description of Artificial Sequence: Synthetic oligonucleotide
  Antisense strand to SEQ ID NO: 1358954
auuggcacagcgauagucc

SEQ ID NO: 1358956 - RNA, 19 nt, Artificial Sequence
  Description of Artificial Sequence: Synthetic oligonucleotide
  Sense strand starting at position 888 of SEQ ID NO: 1242586
cgcugugccaaucacagaa

SEQ ID NO: 1358957 - RNA, 19 nt, Artificial Sequence
  Description of Artificial Sequence: Synthetic oligonucleotide
  Antisense strand to SEQ ID NO: 1358956
uucugugauuggcacagcg

SEQ ID NO: 1358958 - RNA, 19 nt, Artificial Sequence
  Description of Artificial Sequence: Synthetic oligonucleotide
  Sense strand starting at position 1060 of SEQ ID NO: 1242586
agcgacaacugauaaagaa

SEQ ID NO: 1358959 - RNA, 19 nt, Artificial Sequence
  Description of Artificial Sequence: Synthetic oligonucleotide
  Antisense strand to SEQ ID NO: 1358958
uucuuuaucaguugucgcu

SEQ ID NO: 1358960 - RNA, 19 nt, Artificial Sequence
  Description of Artificial Sequence: Synthetic oligonucleotide
  Sense strand starting at position 1099 of SEQ ID NO: 1242586
cccagauccggucaucaaa

SEQ ID NO: 1358961 - RNA, 19 nt, Artificial Sequence
  Description of Artificial Sequence: Synthetic oligonucleotide
  Antisense strand to SEQ ID NO: 1358960
uuugaugaccggaucuggg

SEQ ID NO: 1358962 - RNA, 19 nt, Artificial Sequence
  Description of Artificial Sequence: Synthetic oligonucleotide
  Sense strand starting at position 1230 of SEQ ID NO: 1242586
cucaccucaccuugugaua

SEQ ID NO: 1358963 - RNA, 19 nt, Artificial Sequence
  Description of Artificial Sequence: Synthetic oligonucleotide
  Antisense strand to SEQ ID NO: 1358962
uaucacaaggugaggugag

SEQ ID NO: 1358964 - RNA, 19 nt, Artificial Sequence
  Description of Artificial Sequence: Synthetic oligonucleotide
  Sense strand starting at position 1396 of SEQ ID NO: 1242586
ggaagugucgcauggagcu

SEQ ID NO: 1358965 - RNA, 19 nt, Artificial Sequence
  Description of Artificial Sequence: Synthetic oligonucleotide
  Antisense strand to SEQ ID NO: 1358964
agcuccaugcgacacuucc

SEQ ID NO: 1358966 - RNA, 19 nt, Artificial Sequence
  Description of Artificial Sequence: Synthetic oligonucleotide
  Sense strand starting at position 3721 of SEQ ID NO: 1242586
ggccaaacauucugccaga

SEQ ID NO: 1358967 - RNA, 19 nt, Artificial Sequence
  Description of Artificial Sequence: Synthetic oligonucleotide
  Antisense strand to SEQ ID NO: 1358966
ucuggcagaauguuuggcc

SEQ ID NO: 1358968 - RNA, 19 nt, Artificial Sequence
  Description of Artificial Sequence: Synthetic oligonucleotide
  Sense strand starting at position 3722 of SEQ ID NO: 1242586
gccaaacauucugccagaa

SEQ ID NO: 1358969 - RNA, 19 nt, Artificial Sequence
  Description of Artificial Sequence: Synthetic oligonucleotide
  Antisense strand to SEQ ID NO: 1358968
uucuggcagaauguuuggc

SEQ ID NO: 1358970 - RNA, 19 nt, Artificial Sequence
  Description of Artificial Sequence: Synthetic oligonucleotide
  Sense strand starting at position 3775 of SEQ ID NO: 1242586
gccugaacccuugacagau

SEQ ID NO: 1358971 - RNA, 19 nt, Artificial Sequence
  Description of Artificial Sequence: Synthetic oligonucleotide
  Antisense strand to SEQ ID NO: 1358970
aucugucaaggguucaggc

SEQ ID NO: 1358972 - RNA, 19 nt, Artificial Sequence
  Description of Artificial Sequence: Synthetic oligonucleotide
  Sense strand starting at position 3792 of SEQ ID NO: 1242586
auuggagaaucuucucuac

SEQ ID NO: 1358973 - RNA, 19 nt, Artificial Sequence
  Description of Artificial Sequence: Synthetic oligonucleotide
  Antisense strand to SEQ ID NO: 1358972
guagagaagauucuccaau

SEQ ID NO: 1358974 - RNA, 19 nt, Artificial Sequence
  Description of Artificial Sequence: Synthetic oligonucleotide
  Sense strand starting at position 3794 of SEQ ID NO: 1242586
uggagaaucuucucuacca

SEQ ID NO: 1358975 - RNA, 19 nt, Artificial Sequence
  Description of Artificial Sequence: Synthetic oligonucleotide
  Antisense strand to SEQ ID NO: 1358974
ugguagagaagauucucca

SEQ ID NO: 1358976 - RNA, 19 nt, Artificial Sequence
  Description of Artificial Sequence: Synthetic oligonucleotide
  Sense strand starting at position 3795 of SEQ ID NO: 1242586
ggagaaucuucucuaccag

SEQ ID NO: 1358977 - RNA, 19 nt, Artificial Sequence
  Description of Artificial Sequence: Synthetic oligonucleotide
  Antisense strand to SEQ ID NO: 1358976
cugguagagaagauucucc

SEQ ID NO: 1358978 - RNA, 19 nt, Artificial Sequence
  Description of Artificial Sequence: Synthetic oligonucleotide
  Sense strand starting at position 171 of SEQ ID NO: 1242587
agagaugugaguugaguuc

SEQ ID NO: 1358979 - RNA, 19 nt, Artificial Sequence
  Description of Artificial Sequence: Synthetic oligonucleotide
  Antisense strand to SEQ ID NO: 1358978
gaacucaacucacaucucu

SEQ ID NO: 1358980 - RNA, 19 nt, Artificial Sequence
  Description of Artificial Sequence: Synthetic oligonucleotide
  Sense strand starting at position 180 of SEQ ID NO: 1242587
aguugaguucuuucgcuuc

SEQ ID NO: 1358981 - RNA, 19 nt, Artificial Sequence
  Description of Artificial Sequence: Synthetic oligonucleotide
  Antisense strand to SEQ ID NO: 1358980
gaagcgaaagaacucaacu

SEQ ID NO: 1358982 - RNA, 19 nt, Artificial Sequence
  Description of Artificial Sequence: Synthetic oligonucleotide
  Sense strand starting at position 202 of SEQ ID NO: 1242587
cuucuuuaggacuguaaag

SEQ ID NO: 1358983 - RNA, 19 nt, Artificial Sequence
  Description of Artificial Sequence: Synthetic oligonucleotide
  Antisense strand to SEQ ID NO: 1358982
cuuuacaguccuaaagaag

SEQ ID NO: 1358984 - RNA, 19 nt, Artificial Sequence
  Description of Artificial Sequence: Synthetic oligonucleotide
  Sense strand starting at position 204 of SEQ ID NO: 1242587
ucuuuaggacuguaaaguu

SEQ ID NO: 1358985 - RNA, 19 nt, Artificial Sequence
  Description of Artificial Sequence: Synthetic oligonucleotide
  Antisense strand to SEQ ID NO: 1358984
aacuuuacaguccuaaaga

SEQ ID NO: 1358986 - RNA, 19 nt, Artificial Sequence
  Description of Artificial Sequence: Synthetic oligonucleotide
  Sense strand starting at position 315 of SEQ ID NO: 1242587
gcccacagaguccauaaau

SEQ ID NO: 1358987 - RNA, 19 nt, Artificial Sequence
  Description of Artificial Sequence: Synthetic oligonucleotide
  Antisense strand to SEQ ID NO: 1358986
auuuauggacucugugggc

SEQ ID NO: 1358988 - RNA, 19 nt, Artificial Sequence
  Description of Artificial Sequence: Synthetic oligonucleotide
  Sense strand starting at position 359 of SEQ ID NO: 1242587
ugggacuaauuauaacaaa

SEQ ID NO: 1358989 - RNA, 19 nt, Artificial Sequence
  Description of Artificial Sequence: Synthetic oligonucleotide
  Antisense strand to SEQ ID NO: 1358988
uuuguuauaauuaguccca

SEQ ID NO: 1358990 - RNA, 19 nt, Artificial Sequence
  Description of Artificial Sequence: Synthetic oligonucleotide
  Sense strand starting at position 502 of SEQ ID NO: 1242587
gcuuuaaauccuggagaaa

SEQ ID NO: 1358991 - RNA, 19 nt, Artificial Sequence
  Description of Artificial Sequence: Synthetic oligonucleotide
  Antisense strand to SEQ ID NO: 1358990
uuucuccaggauuuaaagc

SEQ ID NO: 1358992 - RNA, 19 nt, Artificial Sequence
  Description of Artificial Sequence: Synthetic oligonucleotide
  Sense strand starting at position 524 of SEQ ID NO: 1242587
uucugaucacugcgggauu

SEQ ID NO: 1358993 - RNA, 19 nt, Artificial Sequence
  Description of Artificial Sequence: Synthetic oligonucleotide
  Antisense strand to SEQ ID NO: 1358992
aaucccgcagugaucagaa

SEQ ID NO: 1358994 - RNA, 19 nt, Artificial Sequence
  Description of Artificial Sequence: Synthetic oligonucleotide
  Sense strand starting at position 596 of SEQ ID NO: 1242587
uugaucugaucagucugaa

SEQ ID NO: 1358995 - RNA, 19 nt, Artificial Sequence
  Description of Artificial Sequence: Synthetic oligonucleotide
  Antisense strand to SEQ ID NO: 1358994
uucagacugaucagaucaa

SEQ ID NO: 1358996 - RNA, 19 nt, Artificial Sequence
  Description of Artificial Sequence: Synthetic oligonucleotide
  Sense strand starting at position 599 of SEQ ID NO: 1242587
aucugaucagucugaaauu

SEQ ID NO: 1358997 - RNA, 19 nt, Artificial Sequence
  Description of Artificial Sequence: Synthetic oligonucleotide
  Antisense strand to SEQ ID NO: 1358996
aauuucagacugaucagau

SEQ ID NO: 1358998 - RNA, 19 nt, Artificial Sequence
  Description of Artificial Sequence: Synthetic oligonucleotide
  Sense strand starting at position 608 of SEQ ID NO: 1242587
gucugaaauuaucuguucu

SEQ ID NO: 1358999 - RNA, 19 nt, Artificial Sequence
  Description of Artificial Sequence: Synthetic oligonucleotide
  Antisense strand to SEQ ID NO: 1358998
agaacagauaauuucagac

SEQ ID NO: 1359000 - RNA, 19 nt, Artificial Sequence
  Description of Artificial Sequence: Synthetic oligonucleotide
  Sense strand starting at position 641 of SEQ ID NO: 1242587
gcaugugugccuuaucaau

SEQ ID NO: 1359001 - RNA, 19 nt, Artificial Sequence
  Description of Artificial Sequence: Synthetic oligonucleotide
  Antisense strand to SEQ ID NO: 1359000
auugauaaggcacacaugc

SEQ ID NO: 1359002 - RNA, 19 nt, Artificial Sequence
  Description of Artificial Sequence: Synthetic oligonucleotide
  Sense strand starting at position 686 of SEQ ID NO: 1242587
ccuggaaacuguguuagaa

SEQ ID NO: 1359003 - RNA, 19 nt, Artificial Sequence
  Description of Artificial Sequence: Synthetic oligonucleotide
  Antisense strand to SEQ ID NO: 1359002
uucuaacacaguuuccagg

SEQ ID NO: 1359004 - RNA, 19 nt, Artificial Sequence
  Description of Artificial Sequence: Synthetic oligonucleotide
  Sense strand starting at position 690 of SEQ ID NO: 1242587
gaaacuguguuagaauaga

SEQ ID NO: 1359005 - RNA, 19 nt, Artificial Sequence
  Description of Artificial Sequence: Synthetic oligonucleotide
  Antisense strand to SEQ ID NO: 1359004
ucuauucuaacacaguuuc

SEQ ID NO: 1359006 - RNA, 19 nt, Artificial Sequence
  Description of Artificial Sequence: Synthetic oligonucleotide
  Sense strand starting at position 746 of SEQ ID NO: 1242587
gccucuugacacugugaau

SEQ ID NO: 1359007 - RNA, 19 nt, Artificial Sequence
  Description of Artificial Sequence: Synthetic oligonucleotide
  Antisense strand to SEQ ID NO: 1359006
auucacagugucaagaggc

SEQ ID NO: 1359008 - RNA, 19 nt, Artificial Sequence
  Description of Artificial Sequence: Synthetic oligonucleotide
  Sense strand starting at position 773 of SEQ ID NO: 1242587
gcguucagacaucaaagga

SEQ ID NO: 1359009 - RNA, 19 nt, Artificial Sequence
  Description of Artificial Sequence: Synthetic oligonucleotide
  Antisense strand to SEQ ID NO: 1359008
uccuuugaugucugaacgc

SEQ ID NO: 1359010 - RNA, 19 nt, Artificial Sequence
  Description of Artificial Sequence: Synthetic oligonucleotide
  Sense strand starting at position 878 of SEQ ID NO: 1242587
ucgaauacuaagcggcaaa

SEQ ID NO: 1359011 - RNA, 19 nt, Artificial Sequence
  Description of Artificial Sequence: Synthetic oligonucleotide
  Antisense strand to SEQ ID NO: 1359010
uuugccgcuuaguauucga

SEQ ID NO: 1359012 - RNA, 19 nt, Artificial Sequence
  Description of Artificial Sequence: Synthetic oligonucleotide
  Sense strand starting at position 996 of SEQ ID NO: 1242587
ucuccucuucgucggaaga

SEQ ID NO: 1359013 - RNA, 19 nt, Artificial Sequence
  Description of Artificial Sequence: Synthetic oligonucleotide
  Antisense strand to SEQ ID NO: 1359012
ucuuccgacgaagaggaga

SEQ ID NO: 1359014 - RNA, 19 nt, Artificial Sequence
  Description of Artificial Sequence: Synthetic oligonucleotide
  Sense strand starting at position 997 of SEQ ID NO: 1242587
cuccucuucgucggaagaa

SEQ ID NO: 1359015 - RNA, 19 nt, Artificial Sequence
  Description of Artificial Sequence: Synthetic oligonucleotide
  Antisense strand to SEQ ID NO: 1359014
uucuuccgacgaagaggag

SEQ ID NO: 1359016 - RNA, 19 nt, Artificial Sequence
  Description of Artificial Sequence: Synthetic oligonucleotide
  Sense strand starting at position 1075 of SEQ ID NO: 1242587
cguccaacccucgggauaa

SEQ ID NO: 1359017 - RNA, 19 nt, Artificial Sequence
  Description of Artificial Sequence: Synthetic oligonucleotide
  Antisense strand to SEQ ID NO: 1359016
uuaucccgaggguuggacg

SEQ ID NO: 1359018 - RNA, 19 nt, Artificial Sequence
  Description of Artificial Sequence: Synthetic oligonucleotide
  Sense strand starting at position 2320 of SEQ ID NO: 1242587
ccauuaacccucugaagag

SEQ ID NO: 1359019 - RNA, 19 nt, Artificial Sequence
  Description of Artificial Sequence: Synthetic oligonucleotide
  Antisense strand to SEQ ID NO: 1359018
cucuucagaggguuaaugg

SEQ ID NO: 1359020 - RNA, 19 nt, Artificial Sequence
  Description of Artificial Sequence: Synthetic oligonucleotide
  Sense strand starting at position 2418 of SEQ ID NO: 1242587
aaguuucugcuguuugcua

SEQ ID NO: 1359021 - RNA, 19 nt, Artificial Sequence
  Description of Artificial Sequence: Synthetic oligonucleotide
  Antisense strand to SEQ ID NO: 1359020
uagcaaacagcagaaacuu

SEQ ID NO: 1359022 - RNA, 19 nt, Artificial Sequence
  Description of Artificial Sequence: Synthetic oligonucleotide
  Sense strand starting at position 2549 of SEQ ID NO: 1242587
ccuguccuuuccuuaaagu

SEQ ID NO: 1359023 - RNA, 19 nt, Artificial Sequence
  Description of Artificial Sequence: Synthetic oligonucleotide
  Antisense strand to SEQ ID NO: 1359022
acuuuaaggaaaggacagg

SEQ ID NO: 1359024 - RNA, 19 nt, Artificial Sequence
  Description of Artificial Sequence: Synthetic oligonucleotide
  Sense strand starting at position 2690 of SEQ ID NO: 1242587
gcuaauguccgucaagcga

SEQ ID NO: 1359025 - RNA, 19 nt, Artificial Sequence
  Description of Artificial Sequence: Synthetic oligonucleotide
  Antisense strand to SEQ ID NO: 1359024
ucgcuugacggacauuagc

SEQ ID NO: 1359026 - RNA, 19 nt, Artificial Sequence
  Description of Artificial Sequence: Synthetic oligonucleotide
  Sense strand starting at position 2711 of SEQ ID NO: 1242587
aguggauaaaugugauaca

SEQ ID NO: 1359027 - RNA, 19 nt, Artificial Sequence
  Description of Artificial Sequence: Synthetic oligonucleotide
  Antisense strand to SEQ ID NO: 1359026
uguaucacauuuauccacu

SEQ ID NO: 1359028 - RNA, 19 nt, Artificial Sequence
  Description of Artificial Sequence: Synthetic oligonucleotide
  Sense strand starting at position 2738 of SEQ ID NO: 1242587
auguacuauucggccauaa

SEQ ID NO: 1359029 - RNA, 19 nt, Artificial Sequence
  Description of Artificial Sequence: Synthetic oligonucleotide
  Antisense strand to SEQ ID NO: 1359028
uuauggccgaauaguacau

SEQ ID NO: 1359030 - RNA, 19 nt, Artificial Sequence
  Description of Artificial Sequence: Synthetic oligonucleotide
  Sense strand starting at position 2831 of SEQ ID NO: 1242587
gguccacguguugugugau

SEQ ID NO: 1359031 - RNA, 19 nt, Artificial Sequence
  Description of Artificial Sequence: Synthetic oligonucleotide
  Antisense strand to SEQ ID NO: 1359030
aucacacaacacguggacc

SEQ ID NO: 1359032 - RNA, 19 nt, Artificial Sequence
  Description of Artificial Sequence: Synthetic oligonucleotide
  Sense strand starting at position 2902 of SEQ ID NO: 1242587
guugauuaaugauugcuua

SEQ ID NO: 1359033 - RNA, 19 nt, Artificial Sequence
  Description of Artificial Sequence: Synthetic oligonucleotide
  Antisense strand to SEQ ID NO: 1359032
uaagcaaucauuaaucaac

SEQ ID NO: 1359034 - RNA, 19 nt, Artificial Sequence
  Description of Artificial Sequence: Synthetic oligonucleotide
  Sense strand starting at position 2906 of SEQ ID NO: 1242587
auuaaugauugcuuaggga

SEQ ID NO: 1359035 - RNA, 19 nt, Artificial Sequence
  Description of Artificial Sequence: Synthetic oligonucleotide
  Antisense strand to SEQ ID NO: 1359034
ucccuaagcaaucauuaau

SEQ ID NO: 1359036 - RNA, 19 nt, Artificial Sequence
  Description of Artificial Sequence: Synthetic oligonucleotide
  Sense strand starting at position 3139 of SEQ ID NO: 1242587
ugcuauguuguccagacca

SEQ ID NO: 1359037 - RNA, 19 nt, Artificial Sequence
  Description of Artificial Sequence: Synthetic oligonucleotide
  Antisense strand to SEQ ID NO: 1359036
uggucuggacaacauagca

SEQ ID NO: 1359038 - RNA, 19 nt, Artificial Sequence
  Description of Artificial Sequence: Synthetic oligonucleotide
  Sense strand starting at position 3224 of SEQ ID NO: 1242587
ugagucacuggcugggaua

SEQ ID NO: 1359039 - RNA, 19 nt, Artificial Sequence
  Description of Artificial Sequence: Synthetic oligonucleotide
  Antisense strand to SEQ ID NO: 1359038
uaucccagccagugacuca

SEQ ID NO: 1359040 - RNA, 19 nt, Artificial Sequence
  Description of Artificial Sequence: Synthetic oligonucleotide
  Sense strand starting at position 3275 of SEQ ID NO: 1242587
ugaggugaugauugcccaa

SEQ ID NO: 1359041 - RNA, 19 nt, Artificial Sequence
  Description of Artificial Sequence: Synthetic oligonucleotide
  Antisense strand to SEQ ID NO: 1359040
uugggcaaucaucaccuca

SEQ ID NO: 1359042 - RNA, 19 nt, Artificial Sequence
  Description of Artificial Sequence: Synthetic oligonucleotide
  Sense strand starting at position 3277 of SEQ ID NO: 1242587
aggugaugauugcccaacu

SEQ ID NO: 1359043 - RNA, 19 nt, Artificial Sequence
  Description of Artificial Sequence: Synthetic oligonucleotide
  Antisense strand to SEQ ID NO: 1359042
aguugggcaaucaucaccu

SEQ ID NO: 1359044 - RNA, 19 nt, Artificial Sequence
  Description of Artificial Sequence: Synthetic oligonucleotide
  Sense strand starting at position 3328 of SEQ ID NO: 1242587
guucuaucucaauaugcga

SEQ ID NO: 1359045 - RNA, 19 nt, Artificial Sequence
  Description of Artificial Sequence: Synthetic oligonucleotide
  Antisense strand to SEQ ID NO: 1359044
ucgcauauugagauagaac

SEQ ID NO: 1359046 - RNA, 19 nt, Artificial Sequence
  Description of Artificial Sequence: Synthetic oligonucleotide
  Sense strand starting at position 3331 of SEQ ID NO: 1242587
cuaucucaauaugcgaauu

SEQ ID NO: 1359047 - RNA, 19 nt, Artificial Sequence
  Description of Artificial Sequence: Synthetic oligonucleotide
  Antisense strand to SEQ ID NO: 1359046
aauucgcauauugagauag

SEQ ID NO: 1359048 - RNA, 19 nt, Artificial Sequence
  Description of Artificial Sequence: Synthetic oligonucleotide
  Sense strand starting at position 3380 of SEQ ID NO: 1242587
aaauguuaccuugggaguu

SEQ ID NO: 1359049 - RNA, 19 nt, Artificial Sequence
  Description of Artificial Sequence: Synthetic oligonucleotide
  Antisense strand to SEQ ID NO: 1359048
aacucccaagguaacauuu

SEQ ID NO: 1359050 - RNA, 19 nt, Artificial Sequence
  Description of Artificial Sequence: Synthetic oligonucleotide
  Sense strand starting at position 3429 of SEQ ID NO: 1242587
gaguucucagcccagagua

SEQ ID NO: 1359051 - RNA, 19 nt, Artificial Sequence
  Description of Artificial Sequence: Synthetic oligonucleotide
  Antisense strand to SEQ ID NO: 1359050
uacucugggcugagaacuc

SEQ ID NO: 1359052 - RNA, 19 nt, Artificial Sequence
  Description of Artificial Sequence: Synthetic oligonucleotide
  Sense strand starting at position 3611 of SEQ ID NO: 1242587
guuaaagggucuuugauga

SEQ ID NO: 1359053 - RNA, 19 nt, Artificial Sequence
  Description of Artificial Sequence: Synthetic oligonucleotide
  Antisense strand to SEQ ID NO: 1359052
ucaucaaagacccuuuaac

SEQ ID NO: 1359054 - RNA, 19 nt, Artificial Sequence
  Description of Artificial Sequence: Synthetic oligonucleotide
  Sense strand starting at position 3820 of SEQ ID NO: 1242587
uuuccagggaaguguucua

SEQ ID NO: 1359055 - RNA, 19 nt, Artificial Sequence
  Description of Artificial Sequence: Synthetic oligonucleotide
  Antisense strand to SEQ ID NO: 1359054
uagaacacuucccuggaaa

SEQ ID NO: 1359056 - RNA, 19 nt, Artificial Sequence
  Description of Artificial Sequence: Synthetic oligonucleotide
  Sense strand starting at position 3970 of SEQ ID NO: 1242587
guuaacagaucugcccuua

SEQ ID NO: 1359057 - RNA, 19 nt, Artificial Sequence
  Description of Artificial Sequence: Synthetic oligonucleotide
  Antisense strand to SEQ ID NO: 1359056
uaagggcagaucuguuaac

SEQ ID NO: 1359058 - RNA, 19 nt, Artificial Sequence
  Description of Artificial Sequence: Synthetic oligonucleotide
  Sense strand starting at position 47 of SEQ ID NO: 1242588
aacguuaugccauagacua

SEQ ID NO: 1359059 - RNA, 19 nt, Artificial Sequence
  Description of Artificial Sequence: Synthetic oligonucleotide
  Antisense strand to SEQ ID NO: 1359058
uagucuauggcauaacguu

SEQ ID NO: 1359060 - RNA, 19 nt, Artificial Sequence
  Description of Artificial Sequence: Synthetic oligonucleotide
  Sense strand starting at position 60 of SEQ ID NO: 1242588
agacuaggucugcacacaa

SEQ ID NO: 1359061 - RNA, 19 nt, Artificial Sequence
  Description of Artificial Sequence: Synthetic oligonucleotide
  Antisense strand to SEQ ID NO: 1359060
uugugugcagaccuagucu

SEQ ID NO: 1359062 - RNA, 19 nt, Artificial Sequence
  Description of Artificial Sequence: Synthetic oligonucleotide
  Sense strand starting at position 125 of SEQ ID NO: 1242588
aucuuauauguuuggcuaa

SEQ ID NO: 1359063 - RNA, 19 nt, Artificial Sequence
  Description of Artificial Sequence: Synthetic oligonucleotide
  Antisense strand to SEQ ID NO: 1359062
uuagccaaacauauaagau

SEQ ID NO: 1359064 - RNA, 19 nt, Artificial Sequence
  Description of Artificial Sequence: Synthetic oligonucleotide
  Sense strand starting at position 127 of SEQ ID NO: 1242588
cuuauauguuuggcuaagu

SEQ ID NO: 1359065 - RNA, 19 nt, Artificial Sequence
  Description of Artificial Sequence: Synthetic oligonucleotide
  Antisense strand to SEQ ID NO: 1359064
acuuagccaaacauauaag

SEQ ID NO: 1359066 - RNA, 19 nt, Artificial Sequence
  Description of Artificial Sequence: Synthetic oligonucleotide
  Sense strand starting at position 238 of SEQ ID NO: 1242588
uugcucuaaugacugcaua

SEQ ID NO: 1359067 - RNA, 19 nt, Artificial Sequence
  Description of Artificial Sequence: Synthetic oligonucleotide
  Antisense strand to SEQ ID NO: 1359066
uaugcagucauuagagcaa

SEQ ID NO: 1359068 - RNA, 19 nt, Artificial Sequence
  Description of Artificial Sequence: Synthetic oligonucleotide
  Sense strand starting at position 239 of SEQ ID NO: 1242588
ugcucuaaugacugcauaa

SEQ ID NO: 1359069 - RNA, 19 nt, Artificial Sequence
  Description of Artificial Sequence: Synthetic oligonucleotide
  Antisense strand to SEQ ID NO: 1359068
uuaugcagucauuagagca

SEQ ID NO: 1359070 - RNA, 19 nt, Artificial Sequence
  Description of Artificial Sequence: Synthetic oligonucleotide
  Sense strand starting at position 356 of SEQ ID NO: 1242588
gaugaauccuaagcauguu

SEQ ID NO: 1359071 - RNA, 19 nt, Artificial Sequence
  Description of Artificial Sequence: Synthetic oligonucleotide
  Antisense strand to SEQ ID NO: 1359070
aacaugcuuaggauucauc

SEQ ID NO: 1359072 - RNA, 19 nt, Artificial Sequence
  Description of Artificial Sequence: Synthetic oligonucleotide
  Sense strand starting at position 398 of SEQ ID NO: 1242588
agcauagggagcuguuaga

SEQ ID NO: 1359073 - RNA, 19 nt, Artificial Sequence
  Description of Artificial Sequence: Synthetic oligonucleotide
  Antisense strand to SEQ ID NO: 1359072
ucuaacagcucccuaugcu

SEQ ID NO: 1359074 - RNA, 19 nt, Artificial Sequence
  Description of Artificial Sequence: Synthetic oligonucleotide
  Sense strand starting at position 525 of SEQ ID NO: 1242588
aagagcaagccucgagaaa

SEQ ID NO: 1359075 - RNA, 19 nt, Artificial Sequence
  Description of Artificial Sequence: Synthetic oligonucleotide
  Antisense strand to SEQ ID NO: 1359074
uuucucgaggcuugcucuu

SEQ ID NO: 1359076 - RNA, 19 nt, Artificial Sequence
  Description of Artificial Sequence: Synthetic oligonucleotide
  Sense strand starting at position 1498 of SEQ ID NO: 1242588
cauuauuggucccucacga

SEQ ID NO: 1359077 - RNA, 19 nt, Artificial Sequence
  Description of Artificial Sequence: Synthetic oligonucleotide
  Antisense strand to SEQ ID NO: 1359076
ucgugagggaccaauaaug

SEQ ID NO: 1359078 - RNA, 19 nt, Artificial Sequence
  Description of Artificial Sequence: Synthetic oligonucleotide
  Sense strand starting at position 2130 of SEQ ID NO: 1242588
ccgugaguuagugcgcuaa

SEQ ID NO: 1359079 - RNA, 19 nt, Artificial Sequence
  Description of Artificial Sequence: Synthetic oligonucleotide
  Antisense strand to SEQ ID NO: 1359078
uuagcgcacuaacucacgg

SEQ ID NO: 1359080 - RNA, 19 nt, Artificial Sequence
  Description of Artificial Sequence: Synthetic oligonucleotide
  Sense strand starting at position 2134 of SEQ ID NO: 1242588
gaguuagugcgcuaaugga

SEQ ID NO: 1359081 - RNA, 19 nt, Artificial Sequence
  Description of Artificial Sequence: Synthetic oligonucleotide
  Antisense strand to SEQ ID NO: 1359080
uccauuagcgcacuaacuc

SEQ ID NO: 1359082 - RNA, 19 nt, Artificial Sequence
  Description of Artificial Sequence: Synthetic oligonucleotide
  Sense strand starting at position 2142 of SEQ ID NO: 1242588
gcgcuaauggagugaagga

SEQ ID NO: 1359083 - RNA, 19 nt, Artificial Sequence
  Description of Artificial Sequence: Synthetic oligonucleotide
  Antisense strand to SEQ ID NO: 1359082
uccuucacuccauuagcgc

SEQ ID NO: 1359084 - RNA, 19 nt, Artificial Sequence
  Description of Artificial Sequence: Synthetic oligonucleotide
  Sense strand starting at position 2209 of SEQ ID NO: 1242588
aggacgucccgguaacgau

SEQ ID NO: 1359085 - RNA, 19 nt, Artificial Sequence
  Description of Artificial Sequence: Synthetic oligonucleotide
  Antisense strand to SEQ ID NO: 1359084
aucguuaccgggacguccu

SEQ ID NO: 1359086 - RNA, 19 nt, Artificial Sequence
  Description of Artificial Sequence: Synthetic oligonucleotide
  Sense strand starting at position 2331 of SEQ ID NO: 1242588
gacgauuggucuuuccaag

SEQ ID NO: 1359087 - RNA, 19 nt, Artificial Sequence
  Description of Artificial Sequence: Synthetic oligonucleotide
  Antisense strand to SEQ ID NO: 1359086
cuuggaaagaccaaucguc

SEQ ID NO: 1359088 - RNA, 19 nt, Artificial Sequence
  Description of Artificial Sequence: Synthetic oligonucleotide
  Sense strand starting at position 2363 of SEQ ID NO: 1242588
agggaugucgucuggaaac

SEQ ID NO: 1359089 - RNA, 19 nt, Artificial Sequence
  Description of Artificial Sequence: Synthetic oligonucleotide
  Antisense strand to SEQ ID NO: 1359088
guuuccagacgacaucccu

SEQ ID NO: 1359090 - RNA, 19 nt, Artificial Sequence
  Description of Artificial Sequence: Synthetic oligonucleotide
  Sense strand starting at position 2365 of SEQ ID NO: 1242588
ggaugucgucuggaaacaa

SEQ ID NO: 1359091 - RNA, 19 nt, Artificial Sequence
  Description of Artificial Sequence: Synthetic oligonucleotide
  Antisense strand to SEQ ID NO: 1359090
uuguuuccagacgacaucc

SEQ ID NO: 1359092 - RNA, 19 nt, Artificial Sequence
  Description of Artificial Sequence: Synthetic oligonucleotide
  Sense strand starting at position 2618 of SEQ ID NO: 1242588
cuugcucugccgucgaaga

SEQ ID NO: 1359093 - RNA, 19 nt, Artificial Sequence
  Description of Artificial Sequence: Synthetic oligonucleotide
  Antisense strand to SEQ ID NO: 1359092
ucuucgacggcagagcaag

SEQ ID NO: 1359094 - RNA, 19 nt, Artificial Sequence
  Description of Artificial Sequence: Synthetic oligonucleotide
  Sense strand starting at position 2620 of SEQ ID NO: 1242588
ugcucugccgucgaagaga

SEQ ID NO: 1359095 - RNA, 19 nt, Artificial Sequence
  Description of Artificial Sequence: Synthetic oligonucleotide
  Antisense strand to SEQ ID NO: 1359094
ucucuucgacggcagagca

SEQ ID NO: 1359096 - RNA, 19 nt, Artificial Sequence
  Description of Artificial Sequence: Synthetic oligonucleotide
  Sense strand starting at position 2749 of SEQ ID NO: 1242588
gcuaguuaguucuccaaca

SEQ ID NO: 1359097 - RNA, 19 nt, Artificial Sequence
  Description of Artificial Sequence: Synthetic oligonucleotide
  Antisense strand to SEQ ID NO: 1359096
uguuggagaacuaacuagc

SEQ ID NO: 1359098 - RNA, 19 nt, Artificial Sequence
  Description of Artificial Sequence: Synthetic oligonucleotide
  Sense strand starting at position 2750 of SEQ ID NO: 1242588
cuaguuaguucuccaacac

SEQ ID NO: 1359099 - RNA, 19 nt, Artificial Sequence
  Description of Artificial Sequence: Synthetic oligonucleotide
  Antisense strand to SEQ ID NO: 1359098
guguuggagaacuaacuag

SEQ ID NO: 1359100 - RNA, 19 nt, Artificial Sequence
  Description of Artificial Sequence: Synthetic oligonucleotide
  Sense strand starting at position 2812 of SEQ ID NO: 1242588
gaaucaagccucugguaag

SEQ ID NO: 1359101 - RNA, 19 nt, Artificial Sequence
  Description of Artificial Sequence: Synthetic oligonucleotide
  Antisense strand to SEQ ID NO: 1359100
cuuaccagaggcuugauuc

SEQ ID NO: 1359102 - RNA, 19 nt, Artificial Sequence
  Description of Artificial Sequence: Synthetic oligonucleotide
  Sense strand starting at position 2831 of SEQ ID NO: 1242588
uguggauccuguucuaagu

SEQ ID NO: 1359103 - RNA, 19 nt, Artificial Sequence
  Description of Artificial Sequence: Synthetic oligonucleotide
  Antisense strand to SEQ ID NO: 1359102
acuuagaacaggauccaca

SEQ ID NO: 1359104 - RNA, 19 nt, Artificial Sequence
  Description of Artificial Sequence: Synthetic oligonucleotide
  Sense strand starting at position 2855 of SEQ ID NO: 1242588
uguguucuccuccagaacu

SEQ ID NO: 1359105 - RNA, 19 nt, Artificial Sequence
  Description of Artificial Sequence: Synthetic oligonucleotide
  Antisense strand to SEQ ID NO: 1359104
aguucuggaggagaacaca

SEQ ID NO: 1359106 - RNA, 19 nt, Artificial Sequence
  Description of Artificial Sequence: Synthetic oligonucleotide
  Sense strand starting at position 2919 of SEQ ID NO: 1242588
ucuuuaguucugcauguua

SEQ ID NO: 1359107 - RNA, 19 nt, Artificial Sequence
  Description of Artificial Sequence: Synthetic oligonucleotide
  Antisense strand to SEQ ID NO: 1359106
uaacaugcagaacuaaaga

SEQ ID NO: 1359108 - RNA, 19 nt, Artificial Sequence
  Description of Artificial Sequence: Synthetic oligonucleotide
  Sense strand starting at position 2921 of SEQ ID NO: 1242588
uuuaguucugcauguuacu

SEQ ID NO: 1359109 - RNA, 19 nt, Artificial Sequence
  Description of Artificial Sequence: Synthetic oligonucleotide
  Antisense strand to SEQ ID NO: 1359108
aguaacaugcagaacuaaa

SEQ ID NO: 1359110 - RNA, 19 nt, Artificial Sequence
  Description of Artificial Sequence: Synthetic oligonucleotide
  Sense strand starting at position 2975 of SEQ ID NO: 1242588
ggccucaauuuacgaaaua

SEQ ID NO: 1359111 - RNA, 19 nt, Artificial Sequence
  Description of Artificial Sequence: Synthetic oligonucleotide
  Antisense strand to SEQ ID NO: 1359110
uauuucguaaauugaggcc

SEQ ID NO: 1359112 - RNA, 19 nt, Artificial Sequence
  Description of Artificial Sequence: Synthetic oligonucleotide
  Sense strand starting at position 2976 of SEQ ID NO: 1242588
gccucaauuuacgaaauaa

SEQ ID NO: 1359113 - RNA, 19 nt, Artificial Sequence
  Description of Artificial Sequence: Synthetic oligonucleotide
  Antisense strand to SEQ ID NO: 1359112
uuauuucguaaauugaggc

SEQ ID NO: 1359114 - RNA, 19 nt, Artificial Sequence
  Description of Artificial Sequence: Synthetic oligonucleotide
  Sense strand starting at position 3054 of SEQ ID NO: 1242588
acgcauuauggucgagaga

SEQ ID NO: 1359115 - RNA, 19 nt, Artificial Sequence
  Description of Artificial Sequence: Synthetic oligonucleotide
  Antisense strand to SEQ ID NO: 1359114
ucucucgaccauaaugcgu

SEQ ID NO: 1359116 - RNA, 19 nt, Artificial Sequence
  Description of Artificial Sequence: Synthetic oligonucleotide
  Sense strand starting at position 3055 of SEQ ID NO: 1242588
cgcauuauggucgagagau

SEQ ID NO: 1359117 - RNA, 19 nt, Artificial Sequence
  Description of Artificial Sequence: Synthetic oligonucleotide
  Antisense strand to SEQ ID NO: 1359116
aucucucgaccauaaugcg

SEQ ID NO: 1359118 - RNA, 19 nt, Artificial Sequence
  Description of Artificial Sequence: Synthetic oligonucleotide
  Sense strand starting at position 3133 of SEQ ID NO: 1242588
uaggcuuugucucucagau

SEQ ID NO: 1359119 - RNA, 19 nt, Artificial Sequence
  Description of Artificial Sequence: Synthetic oligonucleotide
  Antisense strand to SEQ ID NO: 1359118
aucugagagacaaagccua

SEQ ID NO: 1359120 - RNA, 19 nt, Artificial Sequence
  Description of Artificial Sequence: Synthetic oligonucleotide
  Sense strand starting at position 3153 of SEQ ID NO: 1242588
uucaguuucuuggugggua

SEQ ID NO: 1359121 - RNA, 19 nt, Artificial Sequence
  Description of Artificial Sequence: Synthetic oligonucleotide
  Antisense strand to SEQ ID NO: 1359120
uacccaccaagaaacugaa

SEQ ID NO: 1359122 - RNA, 19 nt, Artificial Sequence
  Description of Artificial Sequence: Synthetic oligonucleotide
  Sense strand starting at position 3155 of SEQ ID NO: 1242588
caguuucuugguggguaaa

SEQ ID NO: 1359123 - RNA, 19 nt, Artificial Sequence
  Description of Artificial Sequence: Synthetic oligonucleotide
  Antisense strand to SEQ ID NO: 1359122
uuuacccaccaagaaacug

SEQ ID NO: 1359124 - RNA, 19 nt, Artificial Sequence
  Description of Artificial Sequence: Synthetic oligonucleotide
  Sense strand starting at position 3577 of SEQ ID NO: 1242588
gggaaacauuaguuaugcu

SEQ ID NO: 1359125 - RNA, 19 nt, Artificial Sequence
  Description of Artificial Sequence: Synthetic oligonucleotide
  Antisense strand to SEQ ID NO: 1359124
agcauaacuaauguuuccc

SEQ ID NO: 1359126 - RNA, 19 nt, Artificial Sequence
  Description of Artificial Sequence: Synthetic oligonucleotide
  Sense strand starting at position 3704 of SEQ ID NO: 1242588
cgcugaugugcguucacga

SEQ ID NO: 1359127 - RNA, 19 nt, Artificial Sequence
  Description of Artificial Sequence: Synthetic oligonucleotide
  Antisense strand to SEQ ID NO: 1359126
ucgugaacgcacaucagcg

SEQ ID NO: 1359128 - RNA, 19 nt, Artificial Sequence
  Description of Artificial Sequence: Synthetic oligonucleotide
  Sense strand starting at position 3705 of SEQ ID NO: 1242588
gcugaugugcguucacgaa

SEQ ID NO: 1359129 - RNA, 19 nt, Artificial Sequence
  Description of Artificial Sequence: Synthetic oligonucleotide
  Antisense strand to SEQ ID NO: 1359128
uucgugaacgcacaucagc

SEQ ID NO: 1359130 - RNA, 19 nt, Artificial Sequence
  Description of Artificial Sequence: Synthetic oligonucleotide
  Sense strand starting at position 3728 of SEQ ID NO: 1242588
ugauccaaguguuuccaua

SEQ ID NO: 1359131 - RNA, 19 nt, Artificial Sequence
  Description of Artificial Sequence: Synthetic oligonucleotide
  Antisense strand to SEQ ID NO: 1359130
uauggaaacacuuggauca

SEQ ID NO: 1359132 - RNA, 19 nt, Artificial Sequence
  Description of Artificial Sequence: Synthetic oligonucleotide
  Sense strand starting at position 3730 of SEQ ID NO: 1242588
auccaaguguuuccauauu

SEQ ID NO: 1359133 - RNA, 19 nt, Artificial Sequence
  Description of Artificial Sequence: Synthetic oligonucleotide
  Antisense strand to SEQ ID NO: 1359132
aauauggaaacacuuggau

SEQ ID NO: 1359134 - RNA, 19 nt, Artificial Sequence
  Description of Artificial Sequence: Synthetic oligonucleotide
  Sense strand starting at position 3815 of SEQ ID NO: 1242588
auggaauuauucuagauga

SEQ ID NO: 1359135 - RNA, 19 nt, Artificial Sequence
  Description of Artificial Sequence: Synthetic oligonucleotide
  Antisense strand to SEQ ID NO: 1359134
ucaucuagaauaauuccau

SEQ ID NO: 1359136 - RNA, 19 nt, Artificial Sequence
  Description of Artificial Sequence: Synthetic oligonucleotide
  Sense strand starting at position 3924 of SEQ ID NO: 1242588
gcucgcacucgagaauguu

SEQ ID NO: 1359137 - RNA, 19 nt, Artificial Sequence
  Description of Artificial Sequence: Synthetic oligonucleotide
  Antisense strand to SEQ ID NO: 1359136
aacauucucgagugcgagc

SEQ ID NO: 1359138 - RNA, 19 nt, Artificial Sequence
  Description of Artificial Sequence: Synthetic oligonucleotide
  Sense strand starting at position 19 of SEQ ID NO: 1242589
agacuugcauaucugacau

SEQ ID NO: 1359139 - RNA, 19 nt, Artificial Sequence
  Description of Artificial Sequence: Synthetic oligonucleotide
  Antisense strand to SEQ ID NO: 1359138
augucagauaugcaagucu

SEQ ID NO: 1359140 - RNA, 19 nt, Artificial Sequence
  Description of Artificial Sequence: Synthetic oligonucleotide
  Sense strand starting at position 351 of SEQ ID NO: 1242589
ucccgagugguguggugua

SEQ ID NO: 1359141 - RNA, 19 nt, Artificial Sequence
  Description of Artificial Sequence: Synthetic oligonucleotide
  Antisense strand to SEQ ID NO: 1359140
uacaccacaccacucggga

SEQ ID NO: 1359142 - RNA, 19 nt, Artificial Sequence
  Description of Artificial Sequence: Synthetic oligonucleotide
  Sense strand starting at position 356 of SEQ ID NO: 1242589
aguggugugguguaaagua

SEQ ID NO: 1359143 - RNA, 19 nt, Artificial Sequence
  Description of Artificial Sequence: Synthetic oligonucleotide
  Antisense strand to SEQ ID NO: 1359142
uacuuuacaccacaccacu

SEQ ID NO: 1359144 - RNA, 19 nt, Artificial Sequence
  Description of Artificial Sequence: Synthetic oligonucleotide
  Sense strand starting at position 361 of SEQ ID NO: 1242589
ugugguguaaaguagcauu

SEQ ID NO: 1359145 - RNA, 19 nt, Artificial Sequence
  Description of Artificial Sequence: Synthetic oligonucleotide
  Antisense strand to SEQ ID NO: 1359144
aaugcuacuuuacaccaca

SEQ ID NO: 1359146 - RNA, 19 nt, Artificial Sequence
  Description of Artificial Sequence: Synthetic oligonucleotide
  Sense strand starting at position 369 of SEQ ID NO: 1242589
aaaguagcauuagagauaa

SEQ ID NO: 1359147 - RNA, 19 nt, Artificial Sequence
  Description of Artificial Sequence: Synthetic oligonucleotide
  Antisense strand to SEQ ID NO: 1359146
uuaucucuaaugcuacuuu

SEQ ID NO: 1359148 - RNA, 19 nt, Artificial Sequence
  Description of Artificial Sequence: Synthetic oligonucleotide
  Sense strand starting at position 440 of SEQ ID NO: 1242589
aguaucuguuaccuuuaca

SEQ ID NO: 1359149 - RNA, 19 nt, Artificial Sequence
  Description of Artificial Sequence: Synthetic oligonucleotide
  Antisense strand to SEQ ID NO: 1359148
uguaaagguaacagauacu

SEQ ID NO: 1359150 - RNA, 19 nt, Artificial Sequence
  Description of Artificial Sequence: Synthetic oligonucleotide
  Sense strand starting at position 445 of SEQ ID NO: 1242589
cuguuaccuuuacagugaa

SEQ ID NO: 1359151 - RNA, 19 nt, Artificial Sequence
  Description of Artificial Sequence: Synthetic oligonucleotide
  Antisense strand to SEQ ID NO: 1359150
uucacuguaaagguaacag

SEQ ID NO: 1359152 - RNA, 19 nt, Artificial Sequence
  Description of Artificial Sequence: Synthetic oligonucleotide
  Sense strand starting at position 556 of SEQ ID NO: 1242589
agcggagaucguuauguuu

SEQ ID NO: 1359153 - RNA, 19 nt, Artificial Sequence
  Description of Artificial Sequence: Synthetic oligonucleotide
  Antisense strand to SEQ ID NO: 1359152
aaacauaacgaucuccgcu

SEQ ID NO: 1359154 - RNA, 19 nt, Artificial Sequence
  Description of Artificial Sequence: Synthetic oligonucleotide
  Sense strand starting at position 616 of SEQ ID NO: 1242589
cucaauuauuugugguuau

SEQ ID NO: 1359155 - RNA, 19 nt, Artificial Sequence
  Description of Artificial Sequence: Synthetic oligonucleotide
  Antisense strand to SEQ ID NO: 1359154
auaaccacaaauaauugag

SEQ ID NO: 1359156 - RNA, 19 nt, Artificial Sequence
  Description of Artificial Sequence: Synthetic oligonucleotide
  Sense strand starting at position 617 of SEQ ID NO: 1242589
ucaauuauuugugguuauc

SEQ ID NO: 1359157 - RNA, 19 nt, Artificial Sequence
  Description of Artificial Sequence: Synthetic oligonucleotide
  Antisense strand to SEQ ID NO: 1359156
gauaaccacaaauaauuga

SEQ ID NO: 1359158 - RNA, 19 nt, Artificial Sequence
  Description of Artificial Sequence: Synthetic oligonucleotide
  Sense strand starting at position 675 of SEQ ID NO: 1242589
gaaggaugguuacuucuag

SEQ ID NO: 1359159 - RNA, 19 nt, Artificial Sequence
  Description of Artificial Sequence: Synthetic oligonucleotide
  Antisense strand to SEQ ID NO: 1359158
cuagaaguaaccauccuuc

SEQ ID NO: 1359160 - RNA, 19 nt, Artificial Sequence
  Description of Artificial Sequence: Synthetic oligonucleotide
  Sense strand starting at position 679 of SEQ ID NO: 1242589
gaugguuacuucuagugua

SEQ ID NO: 1359161 - RNA, 19 nt, Artificial Sequence
  Description of Artificial Sequence: Synthetic oligonucleotide
  Antisense strand to SEQ ID NO: 1359160
uacacuagaaguaaccauc

SEQ ID NO: 1359162 - RNA, 19 nt, Artificial Sequence
  Description of Artificial Sequence: Synthetic oligonucleotide
  Sense strand starting at position 684 of SEQ ID NO: 1242589
uuacuucuaguguaaccaa

SEQ ID NO: 1359163 - RNA, 19 nt, Artificial Sequence
  Description of Artificial Sequence: Synthetic oligonucleotide
  Antisense strand to SEQ ID NO: 1359162
uugguuacacuagaaguaa

SEQ ID NO: 1359164 - RNA, 19 nt, Artificial Sequence
  Description of Artificial Sequence: Synthetic oligonucleotide
  Sense strand starting at position 765 of SEQ ID NO: 1242589
gaucuaguauuugaucaag

SEQ ID NO: 1359165 - RNA, 19 nt, Artificial Sequence
  Description of Artificial Sequence: Synthetic oligonucleotide
  Antisense strand to SEQ ID NO: 1359164
cuugaucaaauacuagauc

SEQ ID NO: 1359166 - RNA, 19 nt, Artificial Sequence
  Description of Artificial Sequence: Synthetic oligonucleotide
  Sense strand starting at position 851 of SEQ ID NO: 1242589
ucuaguauuugaccgcaca

SEQ ID NO: 1359167 - RNA, 19 nt, Artificial Sequence
  Description of Artificial Sequence: Synthetic oligonucleotide
  Antisense strand to SEQ ID NO: 1359166
ugugcggucaaauacuaga

SEQ ID NO: 1359168 - RNA, 19 nt, Artificial Sequence
  Description of Artificial Sequence: Synthetic oligonucleotide
  Sense strand starting at position 852 of SEQ ID NO: 1242589
cuaguauuugaccgcacaa

SEQ ID NO: 1359169 - RNA, 19 nt, Artificial Sequence
  Description of Artificial Sequence: Synthetic oligonucleotide
  Antisense strand to SEQ ID NO: 1359168
uugugcggucaaauacuag

SEQ ID NO: 1359170 - RNA, 19 nt, Artificial Sequence
  Description of Artificial Sequence: Synthetic oligonucleotide
  Sense strand starting at position 1129 of SEQ ID NO: 1242589
ggucucaaauccuugacuu

SEQ ID NO: 1359171 - RNA, 19 nt, Artificial Sequence
  Description of Artificial Sequence: Synthetic oligonucleotide
  Antisense strand to SEQ ID NO: 1359170
aagucaaggauuugagacc

SEQ ID NO: 1359172 - RNA, 19 nt, Artificial Sequence
  Description of Artificial Sequence: Synthetic oligonucleotide
  Sense strand starting at position 1249 of SEQ ID NO: 1242589
ucauauuguuuguaacaca

SEQ ID NO: 1359173 - RNA, 19 nt, Artificial Sequence
  Description of Artificial Sequence: Synthetic oligonucleotide
  Antisense strand to SEQ ID NO: 1359172
uguguuacaaacaauauga

SEQ ID NO: 1359174 - RNA, 19 nt, Artificial Sequence
  Description of Artificial Sequence: Synthetic oligonucleotide
  Sense strand starting at position 1305 of SEQ ID NO: 1242589
acaugugauuauuacgaac

SEQ ID NO: 1359175 - RNA, 19 nt, Artificial Sequence
  Description of Artificial Sequence: Synthetic oligonucleotide
  Antisense strand to SEQ ID NO: 1359174
guucguaauaaucacaugu

SEQ ID NO: 1359176 - RNA, 19 nt, Artificial Sequence
  Description of Artificial Sequence: Synthetic oligonucleotide
  Sense strand starting at position 1307 of SEQ ID NO: 1242589
augugauuauuacgaacug

SEQ ID NO: 1359177 - RNA, 19 nt, Artificial Sequence
  Description of Artificial Sequence: Synthetic oligonucleotide
  Antisense strand to SEQ ID NO: 1359176
caguucguaauaaucacau

SEQ ID NO: 1359178 - RNA, 19 nt, Artificial Sequence
  Description of Artificial Sequence: Synthetic oligonucleotide
  Sense strand starting at position 1416 of SEQ ID NO: 1242589
aaaugugaugcugguggua

SEQ ID NO: 1359179 - RNA, 19 nt, Artificial Sequence
  Description of Artificial Sequence: Synthetic oligonucleotide
  Antisense strand to SEQ ID NO: 1359178
uaccaccagcaucacauuu

SEQ ID NO: 1359180 - RNA, 19 nt, Artificial Sequence
  Description of Artificial Sequence: Synthetic oligonucleotide
  Sense strand starting at position 2463 of SEQ ID NO: 1242589
uggcgucugguugccauaa

SEQ ID NO: 1359181 - RNA, 19 nt, Artificial Sequence
  Description of Artificial Sequence: Synthetic oligonucleotide
  Antisense strand to SEQ ID NO: 1359180
uuauggcaaccagacgcca

SEQ ID NO: 1359182 - RNA, 19 nt, Artificial Sequence
  Description of Artificial Sequence: Synthetic oligonucleotide
  Sense strand starting at position 2808 of SEQ ID NO: 1242589
auugucuuguccgccugaa

SEQ ID NO: 1359183 - RNA, 19 nt, Artificial Sequence
  Description of Artificial Sequence: Synthetic oligonucleotide
  Antisense strand to SEQ ID NO: 1359182
uucaggcggacaagacaau

SEQ ID NO: 1359184 - RNA, 19 nt, Artificial Sequence
  Description of Artificial Sequence: Synthetic oligonucleotide
  Sense strand starting at position 2820 of SEQ ID NO: 1242589
gccugaaggguuuaucaga

SEQ ID NO: 1359185 - RNA, 19 nt, Artificial Sequence
  Description of Artificial Sequence: Synthetic oligonucleotide
  Antisense strand to SEQ ID NO: 1359184
ucugauaaacccuucaggc

SEQ ID NO: 1359186 - RNA, 19 nt, Artificial Sequence
  Description of Artificial Sequence: Synthetic oligonucleotide
  Sense strand starting at position 2865 of SEQ ID NO: 1242589
cgauucuguugcccuaaga

SEQ ID NO: 1359187 - RNA, 19 nt, Artificial Sequence
  Description of Artificial Sequence: Synthetic oligonucleotide
  Antisense strand to SEQ ID NO: 1359186
ucuuagggcaacagaaucg

SEQ ID NO: 1359188 - RNA, 19 nt, Artificial Sequence
  Description of Artificial Sequence: Synthetic oligonucleotide
  Sense strand starting at position 2882 of SEQ ID NO: 1242589
gaaauacugugcccugaau

SEQ ID NO: 1359189 - RNA, 19 nt, Artificial Sequence
  Description of Artificial Sequence: Synthetic oligonucleotide
  Antisense strand to SEQ ID NO: 1359188
auucagggcacaguauuuc

SEQ ID NO: 1359190 - RNA, 19 nt, Artificial Sequence
  Description of Artificial Sequence: Synthetic oligonucleotide
  Sense strand starting at position 2884 of SEQ ID NO: 1242589
aauacugugcccugaauug

SEQ ID NO: 1359191 - RNA, 19 nt, Artificial Sequence
  Description of Artificial Sequence: Synthetic oligonucleotide
  Antisense strand to SEQ ID NO: 1359190
caauucagggcacaguauu

SEQ ID NO: 1359192 - RNA, 19 nt, Artificial Sequence
  Description of Artificial Sequence: Synthetic oligonucleotide
  Sense strand starting at position 2893 of SEQ ID NO: 1242589
cccugaauugcggaacaga

SEQ ID NO: 1359193 - RNA, 19 nt, Artificial Sequence
  Description of Artificial Sequence: Synthetic oligonucleotide
  Antisense strand to SEQ ID NO: 1359192
ucuguuccgcaauucaggg

SEQ ID NO: 1359194 - RNA, 19 nt, Artificial Sequence
  Description of Artificial Sequence: Synthetic oligonucleotide
  Sense strand starting at position 2904 of SEQ ID NO: 1242589
ggaacagagcucuaguuac

SEQ ID NO: 1359195 - RNA, 19 nt, Artificial Sequence
  Description of Artificial Sequence: Synthetic oligonucleotide
  Antisense strand to SEQ ID NO: 1359194
guaacuagagcucuguucc

SEQ ID NO: 1359196 - RNA, 19 nt, Artificial Sequence
  Description of Artificial Sequence: Synthetic oligonucleotide
  Sense strand starting at position 2999 of SEQ ID NO: 1242589
gcccuauucccagaaguac

SEQ ID NO: 1359197 - RNA, 19 nt, Artificial Sequence
  Description of Artificial Sequence: Synthetic oligonucleotide
  Antisense strand to SEQ ID NO: 1359196
guacuucugggaauagggc

SEQ ID NO: 1359198 - RNA, 19 nt, Artificial Sequence
  Description of Artificial Sequence: Synthetic oligonucleotide
  Sense strand starting at position 3121 of SEQ ID NO: 1242589
cagaguucuccugacacug

SEQ ID NO: 1359199 - RNA, 19 nt, Artificial Sequence
  Description of Artificial Sequence: Synthetic oligonucleotide
  Antisense strand to SEQ ID NO: 1359198
cagugucaggagaacucug

SEQ ID NO: 1359200 - RNA, 19 nt, Artificial Sequence
  Description of Artificial Sequence: Synthetic oligonucleotide
  Sense strand starting at position 3598 of SEQ ID NO: 1242589
gucuucuguuccuugguaa

SEQ ID NO: 1359201 - RNA, 19 nt, Artificial Sequence
  Description of Artificial Sequence: Synthetic oligonucleotide
  Antisense strand to SEQ ID NO: 1359200
uuaccaaggaacagaagac

SEQ ID NO: 1359202 - RNA, 19 nt, Artificial Sequence
  Description of Artificial Sequence: Synthetic oligonucleotide
  Sense strand starting at position 3599 of SEQ ID NO: 1242589
ucuucuguuccuugguaaa

SEQ ID NO: 1359203 - RNA, 19 nt, Artificial Sequence
  Description of Artificial Sequence: Synthetic oligonucleotide
  Antisense strand to SEQ ID NO: 1359202
uuuaccaaggaacagaaga

SEQ ID NO: 1359204 - RNA, 19 nt, Artificial Sequence
  Description of Artificial Sequence: Synthetic oligonucleotide
  Sense strand starting at position 3629 of SEQ ID NO: 1242589
gguaguaggacuugaaauu

SEQ ID NO: 1359205 - RNA, 19 nt, Artificial Sequence
  Description of Artificial Sequence: Synthetic oligonucleotide
  Antisense strand to SEQ ID NO: 1359204
aauuucaaguccuacuacc

SEQ ID NO: 1359206 - RNA, 19 nt, Artificial Sequence
  Description of Artificial Sequence: Synthetic oligonucleotide
  Sense strand starting at position 3661 of SEQ ID NO: 1242589
aguccacuguugcuauuua

SEQ ID NO: 1359207 - RNA, 19 nt, Artificial Sequence
  Description of Artificial Sequence: Synthetic oligonucleotide
  Antisense strand to SEQ ID NO: 1359206
uaaauagcaacaguggacu

SEQ ID NO: 1359208 - RNA, 19 nt, Artificial Sequence
  Description of Artificial Sequence: Synthetic oligonucleotide
  Sense strand starting at position 3687 of SEQ ID NO: 1242589
cccugagccuaugaaauga

SEQ ID NO: 1359209 - RNA, 19 nt, Artificial Sequence
  Description of Artificial Sequence: Synthetic oligonucleotide
  Antisense strand to SEQ ID NO: 1359208
ucauuucauaggcucaggg

SEQ ID NO: 1359210 - RNA, 19 nt, Artificial Sequence
  Description of Artificial Sequence: Synthetic oligonucleotide
  Sense strand starting at position 3706 of SEQ ID NO: 1242589
agagaauaguuaugcuaua

SEQ ID NO: 1359211 - RNA, 19 nt, Artificial Sequence
  Description of Artificial Sequence: Synthetic oligonucleotide
  Antisense strand to SEQ ID NO: 1359210
uauagcauaacuauucucu

SEQ ID NO: 1359212 - RNA, 19 nt, Artificial Sequence
  Description of Artificial Sequence: Synthetic oligonucleotide
  Sense strand starting at position 3707 of SEQ ID NO: 1242589
gagaauaguuaugcuauau

SEQ ID NO: 1359213 - RNA, 19 nt, Artificial Sequence
  Description of Artificial Sequence: Synthetic oligonucleotide
  Antisense strand to SEQ ID NO: 1359212
auauagcauaacuauucuc

SEQ ID NO: 1359214 - RNA, 19 nt, Artificial Sequence
  Description of Artificial Sequence: Synthetic oligonucleotide
  Sense strand starting at position 3881 of SEQ ID NO: 1242589
uccacaugugugcaugagu

SEQ ID NO: 1359215 - RNA, 19 nt, Artificial Sequence
  Description of Artificial Sequence: Synthetic oligonucleotide
  Antisense strand to SEQ ID NO: 1359214
acucaugcacacaugugga

SEQ ID NO: 1359216 - RNA, 19 nt, Artificial Sequence
  Description of Artificial Sequence: Synthetic oligonucleotide
  Sense strand starting at position 3939 of SEQ ID NO: 1242589
cuaacaggagcuugcauaa

SEQ ID NO: 1359217 - RNA, 19 nt, Artificial Sequence
  Description of Artificial Sequence: Synthetic oligonucleotide
  Antisense strand to SEQ ID NO: 1359216
uuaugcaagcuccuguuag

SEQ ID NO: 1359218 - RNA, 19 nt, Artificial Sequence
  Description of Artificial Sequence: Synthetic oligonucleotide
  Sense strand starting at position 176 of SEQ ID NO: 1242590
augucucuuccacgccaaa

SEQ ID NO: 1359219 - RNA, 19 nt, Artificial Sequence
  Description of Artificial Sequence: Synthetic oligonucleotide
  Antisense strand to SEQ ID NO: 1359218
uuuggcguggaagagacau

SEQ ID NO: 1359220 - RNA, 19 nt, Artificial Sequence
  Description of Artificial Sequence: Synthetic oligonucleotide
  Sense strand starting at position 210 of SEQ ID NO: 1242590
gaggccguguucucuauuu

SEQ ID NO: 1359221 - RNA, 19 nt, Artificial Sequence
  Description of Artificial Sequence: Synthetic oligonucleotide
  Antisense strand to SEQ ID NO: 1359220
aaauagagaacacggccuc

SEQ ID NO: 1359222 - RNA, 19 nt, Artificial Sequence
  Description of Artificial Sequence: Synthetic oligonucleotide
  Sense strand starting at position 212 of SEQ ID NO: 1242590
ggccguguucucuauuuac

SEQ ID NO: 1359223 - RNA, 19 nt, Artificial Sequence
  Description of Artificial Sequence: Synthetic oligonucleotide
  Antisense strand to SEQ ID NO: 1359222
guaaauagagaacacggcc

SEQ ID NO: 1359224 - RNA, 19 nt, Artificial Sequence
  Description of Artificial Sequence: Synthetic oligonucleotide
  Sense strand starting at position 234 of SEQ ID NO: 1242590
agacuugcauaucugacau

SEQ ID NO: 1359225 - RNA, 19 nt, Artificial Sequence
  Description of Artificial Sequence: Synthetic oligonucleotide
  Antisense strand to SEQ ID NO: 1359224
augucagauaugcaagucu

SEQ ID NO: 1359226 - RNA, 19 nt, Artificial Sequence
  Description of Artificial Sequence: Synthetic oligonucleotide
  Sense strand starting at position 566 of SEQ ID NO: 1242590
ucccgagugguguggugua

SEQ ID NO: 1359227 - RNA, 19 nt, Artificial Sequence
  Description of Artificial Sequence: Synthetic oligonucleotide
  Antisense strand to SEQ ID NO: 1359226
uacaccacaccacucggga

SEQ ID NO: 1359228 - RNA, 19 nt, Artificial Sequence
  Description of Artificial Sequence: Synthetic oligonucleotide
  Sense strand starting at position 571 of SEQ ID NO: 1242590
aguggugugguguaaagua

SEQ ID NO: 1359229 - RNA, 19 nt, Artificial Sequence
  Description of Artificial Sequence: Synthetic oligonucleotide
  Antisense strand to SEQ ID NO: 1359228
uacuuuacaccacaccacu

SEQ ID NO: 1359230 - RNA, 19 nt, Artificial Sequence
  Description of Artificial Sequence: Synthetic oligonucleotide
  Sense strand starting at position 576 of SEQ ID NO: 1242590
ugugguguaaaguagcauu

SEQ ID NO: 1359231 - RNA, 19 nt, Artificial Sequence
  Description of Artificial Sequence: Synthetic oligonucleotide
  Antisense strand to SEQ ID NO: 1359230
aaugcuacuuuacaccaca

SEQ ID NO: 1359232 - RNA, 19 nt, Artificial Sequence
  Description of Artificial Sequence: Synthetic oligonucleotide
  Sense strand starting at position 584 of SEQ ID NO: 1242590
aaaguagcauuagagauaa

SEQ ID NO: 1359233 - RNA, 19 nt, Artificial Sequence
  Description of Artificial Sequence: Synthetic oligonucleotide
  Antisense strand to SEQ ID NO: 1359232
uuaucucuaaugcuacuuu

SEQ ID NO: 1359234 - RNA, 19 nt, Artificial Sequence
  Description of Artificial Sequence: Synthetic oligonucleotide
  Sense strand starting at position 655 of SEQ ID NO: 1242590
aguaucuguuaccuuuaca

SEQ ID NO: 1359235 - RNA, 19 nt, Artificial Sequence
  Description of Artificial Sequence: Synthetic oligonucleotide
  Antisense strand to SEQ ID NO: 1359234
uguaaagguaacagauacu

SEQ ID NO: 1359236 - RNA, 19 nt, Artificial Sequence
  Description of Artificial Sequence: Synthetic oligonucleotide
  Sense strand starting at position 660 of SEQ ID NO: 1242590
cuguuaccuuuacagugaa

SEQ ID NO: 1359237 - RNA, 19 nt, Artificial Sequence
  Description of Artificial Sequence: Synthetic oligonucleotide
  Antisense strand to SEQ ID NO: 1359236
uucacuguaaagguaacag

SEQ ID NO: 1359238 - RNA, 19 nt, Artificial Sequence
  Description of Artificial Sequence: Synthetic oligonucleotide
  Sense strand starting at position 771 of SEQ ID NO: 1242590
agcggagaucguuauguuu

SEQ ID NO: 1359239 - RNA, 19 nt, Artificial Sequence
  Description of Artificial Sequence: Synthetic oligonucleotide
  Antisense strand to SEQ ID NO: 1359238
aaacauaacgaucuccgcu

SEQ ID NO: 1359240 - RNA, 19 nt, Artificial Sequence
  Description of Artificial Sequence: Synthetic oligonucleotide
  Sense strand starting at position 831 of SEQ ID NO: 1242590
cucaauuauuugugguuau

SEQ ID NO: 1359241 - RNA, 19 nt, Artificial Sequence
  Description of Artificial Sequence: Synthetic oligonucleotide
  Antisense strand to SEQ ID NO: 1359240
auaaccacaaauaauugag

SEQ ID NO: 1359242 - RNA, 19 nt, Artificial Sequence
  Description of Artificial Sequence: Synthetic oligonucleotide
  Sense strand starting at position 832 of SEQ ID NO: 1242590
ucaauuauuugugguuauc

SEQ ID NO: 1359243 - RNA, 19 nt, Artificial Sequence
  Description of Artificial Sequence: Synthetic oligonucleotide
  Antisense strand to SEQ ID NO: 1359242
gauaaccacaaauaauuga

SEQ ID NO: 1359244 - RNA, 19 nt, Artificial Sequence
  Description of Artificial Sequence: Synthetic oligonucleotide
  Sense strand starting at position 890 of SEQ ID NO: 1242590
gaaggaugguuacuucuag

SEQ ID NO: 1359245 - RNA, 19 nt, Artificial Sequence
  Description of Artificial Sequence: Synthetic oligonucleotide
  Antisense strand to SEQ ID NO: 1359244
cuagaaguaaccauccuuc

SEQ ID NO: 1359246 - RNA, 19 nt, Artificial Sequence
  Description of Artificial Sequence: Synthetic oligonucleotide
  Sense strand starting at position 899 of SEQ ID NO: 1242590
uuacuucuaguguaaccaa

SEQ ID NO: 1359247 - RNA, 19 nt, Artificial Sequence
  Description of Artificial Sequence: Synthetic oligonucleotide
  Antisense strand to SEQ ID NO: 1359246
uugguuacacuagaaguaa

SEQ ID NO: 1359248 - RNA, 19 nt, Artificial Sequence
  Description of Artificial Sequence: Synthetic oligonucleotide
  Sense strand starting at position 980 of SEQ ID NO: 1242590
gaucuaguauuugaucaag

SEQ ID NO: 1359249 - RNA, 19 nt, Artificial Sequence
  Description of Artificial Sequence: Synthetic oligonucleotide
  Antisense strand to SEQ ID NO: 1359248
cuugaucaaauacuagauc

SEQ ID NO: 1359250 - RNA, 19 nt, Artificial Sequence
  Description of Artificial Sequence: Synthetic oligonucleotide
  Sense strand starting at position 1066 of SEQ ID NO: 1242590
ucuaguauuugaccgcaca

SEQ ID NO: 1359251 - RNA, 19 nt, Artificial Sequence
  Description of Artificial Sequence: Synthetic oligonucleotide
  Antisense strand to SEQ ID NO: 1359250
ugugcggucaaauacuaga

SEQ ID NO: 1359252 - RNA, 19 nt, Artificial Sequence
  Description of Artificial Sequence: Synthetic oligonucleotide
  Sense strand starting at position 1067 of SEQ ID NO: 1242590
cuaguauuugaccgcacaa

SEQ ID NO: 1359253 - RNA, 19 nt, Artificial Sequence
  Description of Artificial Sequence: Synthetic oligonucleotide
  Antisense strand to SEQ ID NO: 1359252
uugugcggucaaauacuag

SEQ ID NO: 1359254 - RNA, 19 nt, Artificial Sequence
  Description of Artificial Sequence: Synthetic oligonucleotide
  Sense strand starting at position 1344 of SEQ ID NO: 1242590
ggucucaaauccuugacuu

SEQ ID NO: 1359255 - RNA, 19 nt, Artificial Sequence
  Description of Artificial Sequence: Synthetic oligonucleotide
  Antisense strand to SEQ ID NO: 1359254
aagucaaggauuugagacc

SEQ ID NO: 1359256 - RNA, 19 nt, Artificial Sequence
  Description of Artificial Sequence: Synthetic oligonucleotide
  Sense strand starting at position 1464 of SEQ ID NO: 1242590
ucauauuguuuguaacaca

SEQ ID NO: 1359257 - RNA, 19 nt, Artificial Sequence
  Description of Artificial Sequence: Synthetic oligonucleotide
  Antisense strand to SEQ ID NO: 1359256
uguguuacaaacaauauga

SEQ ID NO: 1359258 - RNA, 19 nt, Artificial Sequence
  Description of Artificial Sequence: Synthetic oligonucleotide
  Sense strand starting at position 1520 of SEQ ID NO: 1242590
acaugugauuauuacgaac

SEQ ID NO: 1359259 - RNA, 19 nt, Artificial Sequence
  Description of Artificial Sequence: Synthetic oligonucleotide
  Antisense strand to SEQ ID NO: 1359258
guucguaauaaucacaugu

SEQ ID NO: 1359260 - RNA, 19 nt, Artificial Sequence
  Description of Artificial Sequence: Synthetic oligonucleotide
  Sense strand starting at position 1522 of SEQ ID NO: 1242590
augugauuauuacgaacug

SEQ ID NO: 1359261 - RNA, 19 nt, Artificial Sequence
  Description of Artificial Sequence: Synthetic oligonucleotide
  Antisense strand to SEQ ID NO: 1359260
caguucguaauaaucacau

SEQ ID NO: 1359262 - RNA, 19 nt, Artificial Sequence
  Description of Artificial Sequence: Synthetic oligonucleotide
  Sense strand starting at position 1631 of SEQ ID NO: 1242590
aaaugugaugcugguggua

SEQ ID NO: 1359263 - RNA, 19 nt, Artificial Sequence
  Description of Artificial Sequence: Synthetic oligonucleotide
  Antisense strand to SEQ ID NO: 1359262
uaccaccagcaucacauuu

SEQ ID NO: 1359264 - RNA, 19 nt, Artificial Sequence
  Description of Artificial Sequence: Synthetic oligonucleotide
  Sense strand starting at position 2678 of SEQ ID NO: 1242590
uggcgucugguugccauaa

SEQ ID NO: 1359265 - RNA, 19 nt, Artificial Sequence
  Description of Artificial Sequence: Synthetic oligonucleotide
  Antisense strand to SEQ ID NO: 1359264
uuauggcaaccagacgcca

SEQ ID NO: 1359266 - RNA, 19 nt, Artificial Sequence
  Description of Artificial Sequence: Synthetic oligonucleotide
  Sense strand starting at position 3023 of SEQ ID NO: 1242590
auugucuuguccgccugaa

SEQ ID NO: 1359267 - RNA, 19 nt, Artificial Sequence
  Description of Artificial Sequence: Synthetic oligonucleotide
  Antisense strand to SEQ ID NO: 1359266
uucaggcggacaagacaau

SEQ ID NO: 1359268 - RNA, 19 nt, Artificial Sequence
  Description of Artificial Sequence: Synthetic oligonucleotide
  Sense strand starting at position 3035 of SEQ ID NO: 1242590
gccugaaggguuuaucaga

SEQ ID NO: 1359269 - RNA, 19 nt, Artificial Sequence
  Description of Artificial Sequence: Synthetic oligonucleotide
  Antisense strand to SEQ ID NO: 1359268
ucugauaaacccuucaggc

SEQ ID NO: 1359270 - RNA, 19 nt, Artificial Sequence
  Description of Artificial Sequence: Synthetic oligonucleotide
  Sense strand starting at position 3080 of SEQ ID NO: 1242590
cgauucuguugcccuaaga

SEQ ID NO: 1359271 - RNA, 19 nt, Artificial Sequence
  Description of Artificial Sequence: Synthetic oligonucleotide
  Antisense strand to SEQ ID NO: 1359270
ucuuagggcaacagaaucg

SEQ ID NO: 1359272 - RNA, 19 nt, Artificial Sequence
  Description of Artificial Sequence: Synthetic oligonucleotide
  Sense strand starting at position 3097 of SEQ ID NO: 1242590
gaaauacugugcccugaau

SEQ ID NO: 1359273 - RNA, 19 nt, Artificial Sequence
  Description of Artificial Sequence: Synthetic oligonucleotide
  Antisense strand to SEQ ID NO: 1359272
auucagggcacaguauuuc

SEQ ID NO: 1359274 - RNA, 19 nt, Artificial Sequence
  Description of Artificial Sequence: Synthetic oligonucleotide
  Sense strand starting at position 3099 of SEQ ID NO: 1242590
aauacugugcccugaauug

SEQ ID NO: 1359275 - RNA, 19 nt, Artificial Sequence
  Description of Artificial Sequence: Synthetic oligonucleotide
  Antisense strand to SEQ ID NO: 1359274
caauucagggcacaguauu

SEQ ID NO: 1359276 - RNA, 19 nt, Artificial Sequence
  Description of Artificial Sequence: Synthetic oligonucleotide
  Sense strand starting at position 3108 of SEQ ID NO: 1242590
cccugaauugcggaacaga

SEQ ID NO: 1359277 - RNA, 19 nt, Artificial Sequence
  Description of Artificial Sequence: Synthetic oligonucleotide
  Antisense strand to SEQ ID NO: 1359276
ucuguuccgcaauucaggg

SEQ ID NO: 1359278 - RNA, 19 nt, Artificial Sequence
  Description of Artificial Sequence: Synthetic oligonucleotide
  Sense strand starting at position 3119 of SEQ ID NO: 1242590
ggaacagagcucuaguuac

SEQ ID NO: 1359279 - RNA, 19 nt, Artificial Sequence
  Description of Artificial Sequence: Synthetic oligonucleotide
  Antisense strand to SEQ ID NO: 1359278
guaacuagagcucuguucc

SEQ ID NO: 1359280 - RNA, 19 nt, Artificial Sequence
  Description of Artificial Sequence: Synthetic oligonucleotide
  Sense strand starting at position 3214 of SEQ ID NO: 1242590
gcccuauucccagaaguac

SEQ ID NO: 1359281 - RNA, 19 nt, Artificial Sequence
  Description of Artificial Sequence: Synthetic oligonucleotide
  Antisense strand to SEQ ID NO: 1359280
guacuucugggaauagggc

SEQ ID NO: 1359282 - RNA, 19 nt, Artificial Sequence
  Description of Artificial Sequence: Synthetic oligonucleotide
  Sense strand starting at position 3336 of SEQ ID NO: 1242590
cagaguucuccugacacug

SEQ ID NO: 1359283 - RNA, 19 nt, Artificial Sequence
  Description of Artificial Sequence: Synthetic oligonucleotide
  Antisense strand to SEQ ID NO: 1359282
cagugucaggagaacucug

SEQ ID NO: 1359284 - RNA, 19 nt, Artificial Sequence
  Description of Artificial Sequence: Synthetic oligonucleotide
  Sense strand starting at position 3813 of SEQ ID NO: 1242590
gucuucuguuccuugguaa

SEQ ID NO: 1359285 - RNA, 19 nt, Artificial Sequence
  Description of Artificial Sequence: Synthetic oligonucleotide
  Antisense strand to SEQ ID NO: 1359284
uuaccaaggaacagaagac

SEQ ID NO: 1359286 - RNA, 19 nt, Artificial Sequence
  Description of Artificial Sequence: Synthetic oligonucleotide
  Sense strand starting at position 3814 of SEQ ID NO: 1242590
ucuucuguuccuugguaaa

SEQ ID NO: 1359287 - RNA, 19 nt, Artificial Sequence
  Description of Artificial Sequence: Synthetic oligonucleotide
  Antisense strand to SEQ ID NO: 1359286
uuuaccaaggaacagaaga

SEQ ID NO: 1359288 - RNA, 19 nt, Artificial Sequence
  Description of Artificial Sequence: Synthetic oligonucleotide
  Sense strand starting at position 3844 of SEQ ID NO: 1242590
gguaguaggacuugaaauu

SEQ ID NO: 1359289 - RNA, 19 nt, Artificial Sequence
  Description of Artificial Sequence: Synthetic oligonucleotide
  Antisense strand to SEQ ID NO: 1359288
aauuucaaguccuacuacc

SEQ ID NO: 1359290 - RNA, 19 nt, Artificial Sequence
  Description of Artificial Sequence: Synthetic oligonucleotide
  Sense strand starting at position 3876 of SEQ ID NO: 1242590
aguccacuguugcuauuua

SEQ ID NO: 1359291 - RNA, 19 nt, Artificial Sequence
  Description of Artificial Sequence: Synthetic oligonucleotide
  Antisense strand to SEQ ID NO: 1359290
uaaauagcaacaguggacu

SEQ ID NO: 1359292 - RNA, 19 nt, Artificial Sequence
  Description of Artificial Sequence: Synthetic oligonucleotide
  Sense strand starting at position 3902 of SEQ ID NO: 1242590
cccugagccuaugaaauga

SEQ ID NO: 1359293 - RNA, 19 nt, Artificial Sequence
  Description of Artificial Sequence: Synthetic oligonucleotide
  Antisense strand to SEQ ID NO: 1359292
ucauuucauaggcucaggg

SEQ ID NO: 1359294 - RNA, 19 nt, Artificial Sequence
  Description of Artificial Sequence: Synthetic oligonucleotide
  Sense strand starting at position 3921 of SEQ ID NO: 1242590
agagaauaguuaugcuaua

SEQ ID NO: 1359295 - RNA, 19 nt, Artificial Sequence
  Description of Artificial Sequence: Synthetic oligonucleotide
  Antisense strand to SEQ ID NO: 1359294
uauagcauaacuauucucu

SEQ ID NO: 1359296 - RNA, 19 nt, Artificial Sequence
  Description of Artificial Sequence: Synthetic oligonucleotide
  Sense strand starting at position 3922 of SEQ ID NO: 1242590
gagaauaguuaugcuauau

SEQ ID NO: 1359297 - RNA, 19 nt, Artificial Sequence
  Description of Artificial Sequence: Synthetic oligonucleotide
  Antisense strand to SEQ ID NO: 1359296
auauagcauaacuauucuc

SEQ ID NO: 1359298 - RNA, 19 nt, Artificial Sequence
  Description of Artificial Sequence: Synthetic oligonucleotide
  Sense strand starting at position 170 of SEQ ID NO: 1242591
ccaucuaccugagugaguu

SEQ ID NO: 1359299 - RNA, 19 nt, Artificial Sequence
  Description of Artificial Sequence: Synthetic oligonucleotide
  Antisense strand to SEQ ID NO: 1359298
aacucacucagguagaugg

SEQ ID NO: 1359300 - RNA, 19 nt, Artificial Sequence
  Description of Artificial Sequence: Synthetic oligonucleotide
  Sense strand starting at position 249 of SEQ ID NO: 1242591
aggauaaaguccuuaccag

SEQ ID NO: 1359301 - RNA, 19 nt, Artificial Sequence
  Description of Artificial Sequence: Synthetic oligonucleotide
  Antisense strand to SEQ ID NO: 1359300
cugguaaggacuuuauccu

SEQ ID NO: 1359302 - RNA, 19 nt, Artificial Sequence
  Description of Artificial Sequence: Synthetic oligonucleotide
  Sense strand starting at position 255 of SEQ ID NO: 1242591
aaguccuuaccagaguuga

SEQ ID NO: 1359303 - RNA, 19 nt, Artificial Sequence
  Description of Artificial Sequence: Synthetic oligonucleotide
  Antisense strand to SEQ ID NO: 1359302
ucaacucugguaaggacuu

SEQ ID NO: 1359304 - RNA, 19 nt, Artificial Sequence
  Description of Artificial Sequence: Synthetic oligonucleotide
  Sense strand starting at position 271 of SEQ ID NO: 1242591
ugacaaggcucuuugugau

SEQ ID NO: 1359305 - RNA, 19 nt, Artificial Sequence
  Description of Artificial Sequence: Synthetic oligonucleotide
  Antisense strand to SEQ ID NO: 1359304
aucacaaagagccuuguca

SEQ ID NO: 1359306 - RNA, 19 nt, Artificial Sequence
  Description of Artificial Sequence: Synthetic oligonucleotide
  Sense strand starting at position 501 of SEQ ID NO: 1242591
ccuauuuagugcccucuau

SEQ ID NO: 1359307 - RNA, 19 nt, Artificial Sequence
  Description of Artificial Sequence: Synthetic oligonucleotide
  Antisense strand to SEQ ID NO: 1359306
auagagggcacuaaauagg

SEQ ID NO: 1359308 - RNA, 19 nt, Artificial Sequence
  Description of Artificial Sequence: Synthetic oligonucleotide
  Sense strand starting at position 821 of SEQ ID NO: 1242591
ccugucucagagcaaacau

SEQ ID NO: 1359309 - RNA, 19 nt, Artificial Sequence
  Description of Artificial Sequence: Synthetic oligonucleotide
  Antisense strand to SEQ ID NO: 1359308
auguuugcucugagacagg

SEQ ID NO: 1359310 - RNA, 19 nt, Artificial Sequence
  Description of Artificial Sequence: Synthetic oligonucleotide
  Sense strand starting at position 972 of SEQ ID NO: 1242591
gagauaaguggcuggcaca

SEQ ID NO: 1359311 - RNA, 19 nt, Artificial Sequence
  Description of Artificial Sequence: Synthetic oligonucleotide
  Antisense strand to SEQ ID NO: 1359310
ugugccagccacuuaucuc

SEQ ID NO: 1359312 - RNA, 19 nt, Artificial Sequence
  Description of Artificial Sequence: Synthetic oligonucleotide
  Sense strand starting at position 1239 of SEQ ID NO: 1242591
agaguuaagauaggcuaaa

SEQ ID NO: 1359313 - RNA, 19 nt, Artificial Sequence
  Description of Artificial Sequence: Synthetic oligonucleotide
  Antisense strand to SEQ ID NO: 1359312
uuuagccuaucuuaacucu

SEQ ID NO: 1359314 - RNA, 19 nt, Artificial Sequence
  Description of Artificial Sequence: Synthetic oligonucleotide
  Sense strand starting at position 1240 of SEQ ID NO: 1242591
gaguuaagauaggcuaaag

SEQ ID NO: 1359315 - RNA, 19 nt, Artificial Sequence
  Description of Artificial Sequence: Synthetic oligonucleotide
  Antisense strand to SEQ ID NO: 1359314
cuuuagccuaucuuaacuc

SEQ ID NO: 1359316 - RNA, 19 nt, Artificial Sequence
  Description of Artificial Sequence: Synthetic oligonucleotide
  Sense strand starting at position 1252 of SEQ ID NO: 1242591
gcuaaagaguccuuguaga

SEQ ID NO: 1359317 - RNA, 19 nt, Artificial Sequence
  Description of Artificial Sequence: Synthetic oligonucleotide
  Antisense strand to SEQ ID NO: 1359316
ucuacaaggacucuuuagc

SEQ ID NO: 1359318 - RNA, 19 nt, Artificial Sequence
  Description of Artificial Sequence: Synthetic oligonucleotide
  Sense strand starting at position 1336 of SEQ ID NO: 1242591
uugcacugggauugaaagu

SEQ ID NO: 1359319 - RNA, 19 nt, Artificial Sequence
  Description of Artificial Sequence: Synthetic oligonucleotide
  Antisense strand to SEQ ID NO: 1359318
acuuucaaucccagugcaa

SEQ ID NO: 1359320 - RNA, 19 nt, Artificial Sequence
  Description of Artificial Sequence: Synthetic oligonucleotide
  Sense strand starting at position 1337 of SEQ ID NO: 1242591
ugcacugggauugaaaguu

SEQ ID NO: 1359321 - RNA, 19 nt, Artificial Sequence
  Description of Artificial Sequence: Synthetic oligonucleotide
  Antisense strand to SEQ ID NO: 1359320
aacuuucaaucccagugca

SEQ ID NO: 1359322 - RNA, 19 nt, Artificial Sequence
  Description of Artificial Sequence: Synthetic oligonucleotide
  Sense strand starting at position 1561 of SEQ ID NO: 1242591
cagggucucuccucugauu

SEQ ID NO: 1359323 - RNA, 19 nt, Artificial Sequence
  Description of Artificial Sequence: Synthetic oligonucleotide
  Antisense strand to SEQ ID NO: 1359322
aaucagaggagagacccug

SEQ ID NO: 1359324 - RNA, 19 nt, Artificial Sequence
  Description of Artificial Sequence: Synthetic oligonucleotide
  Sense strand starting at position 1573 of SEQ ID NO: 1242591
ucugauuguggcuaaggga

SEQ ID NO: 1359325 - RNA, 19 nt, Artificial Sequence
  Description of Artificial Sequence: Synthetic oligonucleotide
  Antisense strand to SEQ ID NO: 1359324
ucccuuagccacaaucaga

SEQ ID NO: 1359326 - RNA, 19 nt, Artificial Sequence
  Description of Artificial Sequence: Synthetic oligonucleotide
  Sense strand starting at position 1770 of SEQ ID NO: 1242591
acagaaaccaucggguuga

SEQ ID NO: 1359327 - RNA, 19 nt, Artificial Sequence
  Description of Artificial Sequence: Synthetic oligonucleotide
  Antisense strand to SEQ ID NO: 1359326
ucaacccgaugguuucugu

SEQ ID NO: 1359328 - RNA, 19 nt, Artificial Sequence
  Description of Artificial Sequence: Synthetic oligonucleotide
  Sense strand starting at position 1774 of SEQ ID NO: 1242591
aaaccaucggguugaacuu

SEQ ID NO: 1359329 - RNA, 19 nt, Artificial Sequence
  Description of Artificial Sequence: Synthetic oligonucleotide
  Antisense strand to SEQ ID NO: 1359328
aaguucaacccgaugguuu

SEQ ID NO: 1359330 - RNA, 19 nt, Artificial Sequence
  Description of Artificial Sequence: Synthetic oligonucleotide
  Sense strand starting at position 2016 of SEQ ID NO: 1242591
ggagcaaccuuccuauaga

SEQ ID NO: 1359331 - RNA, 19 nt, Artificial Sequence
  Description of Artificial Sequence: Synthetic oligonucleotide
  Antisense strand to SEQ ID NO: 1359330
ucuauaggaagguugcucc

SEQ ID NO: 1359332 - RNA, 19 nt, Artificial Sequence
  Description of Artificial Sequence: Synthetic oligonucleotide
  Sense strand starting at position 2019 of SEQ ID NO: 1242591
gcaaccuuccuauagagcu

SEQ ID NO: 1359333 - RNA, 19 nt, Artificial Sequence
  Description of Artificial Sequence: Synthetic oligonucleotide
  Antisense strand to SEQ ID NO: 1359332
agcucuauaggaagguugc

SEQ ID NO: 1359334 - RNA, 19 nt, Artificial Sequence
  Description of Artificial Sequence: Synthetic oligonucleotide
  Sense strand starting at position 2026 of SEQ ID NO: 1242591
uccuauagagcugguuaau

SEQ ID NO: 1359335 - RNA, 19 nt, Artificial Sequence
  Description of Artificial Sequence: Synthetic oligonucleotide
  Antisense strand to SEQ ID NO: 1359334
auuaaccagcucuauagga

SEQ ID NO: 1359336 - RNA, 19 nt, Artificial Sequence
  Description of Artificial Sequence: Synthetic oligonucleotide
  Sense strand starting at position 2029 of SEQ ID NO: 1242591
uauagagcugguuaauuag

SEQ ID NO: 1359337 - RNA, 19 nt, Artificial Sequence
  Description of Artificial Sequence: Synthetic oligonucleotide
  Antisense strand to SEQ ID NO: 1359336
cuaauuaaccagcucuaua

SEQ ID NO: 1359338 - RNA, 19 nt, Artificial Sequence
  Description of Artificial Sequence: Synthetic oligonucleotide
  Sense strand starting at position 2035 of SEQ ID NO: 1242591
gcugguuaauuagugacaa

SEQ ID NO: 1359339 - RNA, 19 nt, Artificial Sequence
  Description of Artificial Sequence: Synthetic oligonucleotide
  Antisense strand to SEQ ID NO: 1359338
uugucacuaauuaaccagc

SEQ ID NO: 1359340 - RNA, 19 nt, Artificial Sequence
  Description of Artificial Sequence: Synthetic oligonucleotide
  Sense strand starting at position 2153 of SEQ ID NO: 1242591
ggccaugacguugacuauu

SEQ ID NO: 1359341 - RNA, 19 nt, Artificial Sequence
  Description of Artificial Sequence: Synthetic oligonucleotide
  Antisense strand to SEQ ID NO: 1359340
aauagucaacgucauggcc

SEQ ID NO: 1359342 - RNA, 19 nt, Artificial Sequence
  Description of Artificial Sequence: Synthetic oligonucleotide
  Sense strand starting at position 2155 of SEQ ID NO: 1242591
ccaugacguugacuauuga

SEQ ID NO: 1359343 - RNA, 19 nt, Artificial Sequence
  Description of Artificial Sequence: Synthetic oligonucleotide
  Antisense strand to SEQ ID NO: 1359342
ucaauagucaacgucaugg

SEQ ID NO: 1359344 - RNA, 19 nt, Artificial Sequence
  Description of Artificial Sequence: Synthetic oligonucleotide
  Sense strand starting at position 2156 of SEQ ID NO: 1242591
caugacguugacuauugaa

SEQ ID NO: 1359345 - RNA, 19 nt, Artificial Sequence
  Description of Artificial Sequence: Synthetic oligonucleotide
  Antisense strand to SEQ ID NO: 1359344
uucaauagucaacgucaug

SEQ ID NO: 1359346 - RNA, 19 nt, Artificial Sequence
  Description of Artificial Sequence: Synthetic oligonucleotide
  Sense strand starting at position 2232 of SEQ ID NO: 1242591
guuucuugaguguaauauu

SEQ ID NO: 1359347 - RNA, 19 nt, Artificial Sequence
  Description of Artificial Sequence: Synthetic oligonucleotide
  Antisense strand to SEQ ID NO: 1359346
aauauuacacucaagaaac

SEQ ID NO: 1359348 - RNA, 19 nt, Artificial Sequence
  Description of Artificial Sequence: Synthetic oligonucleotide
  Sense strand starting at position 2242 of SEQ ID NO: 1242591
uguaauauuggccaucuag

SEQ ID NO: 1359349 - RNA, 19 nt, Artificial Sequence
  Description of Artificial Sequence: Synthetic oligonucleotide
  Antisense strand to SEQ ID NO: 1359348
cuagauggccaauauuaca

SEQ ID NO: 1359350 - RNA, 19 nt, Artificial Sequence
  Description of Artificial Sequence: Synthetic oligonucleotide
  Sense strand starting at position 2399 of SEQ ID NO: 1242591
uuaggacauuuauagaguu

SEQ ID NO: 1359351 - RNA, 19 nt, Artificial Sequence
  Description of Artificial Sequence: Synthetic oligonucleotide
  Antisense strand to SEQ ID NO: 1359350
aacucuauaaauguccuaa

SEQ ID NO: 1359352 - RNA, 19 nt, Artificial Sequence
  Description of Artificial Sequence: Synthetic oligonucleotide
  Sense strand starting at position 2839 of SEQ ID NO: 1242591
cguauauaucaaggaguga

SEQ ID NO: 1359353 - RNA, 19 nt, Artificial Sequence
  Description of Artificial Sequence: Synthetic oligonucleotide
  Antisense strand to SEQ ID NO: 1359352
ucacuccuugauauauacg

SEQ ID NO: 1359354 - RNA, 19 nt, Artificial Sequence
  Description of Artificial Sequence: Synthetic oligonucleotide
  Sense strand starting at position 3007 of SEQ ID NO: 1242591
uuuguuuauggucauccua

SEQ ID NO: 1359355 - RNA, 19 nt, Artificial Sequence
  Description of Artificial Sequence: Synthetic oligonucleotide
  Antisense strand to SEQ ID NO: 1359354
uaggaugaccauaaacaaa

SEQ ID NO: 1359356 - RNA, 19 nt, Artificial Sequence
  Description of Artificial Sequence: Synthetic oligonucleotide
  Sense strand starting at position 3027 of SEQ ID NO: 1242591
uggauaugaaguggucuua

SEQ ID NO: 1359357 - RNA, 19 nt, Artificial Sequence
  Description of Artificial Sequence: Synthetic oligonucleotide
  Antisense strand to SEQ ID NO: 1359356
uaagaccacuucauaucca

SEQ ID NO: 1359358 - RNA, 19 nt, Artificial Sequence
  Description of Artificial Sequence: Synthetic oligonucleotide
  Sense strand starting at position 3473 of SEQ ID NO: 1242591
aauuuaugauguggaagac

SEQ ID NO: 1359359 - RNA, 19 nt, Artificial Sequence
  Description of Artificial Sequence: Synthetic oligonucleotide
  Antisense strand to SEQ ID NO: 1359358
gucuuccacaucauaaauu

SEQ ID NO: 1359360 - RNA, 19 nt, Artificial Sequence
  Description of Artificial Sequence: Synthetic oligonucleotide
  Sense strand starting at position 3485 of SEQ ID NO: 1242591
ggaagacucagccaugucu

SEQ ID NO: 1359361 - RNA, 19 nt, Artificial Sequence
  Description of Artificial Sequence: Synthetic oligonucleotide
  Antisense strand to SEQ ID NO: 1359360
agacauggcugagucuucc

SEQ ID NO: 1359362 - RNA, 19 nt, Artificial Sequence
  Description of Artificial Sequence: Synthetic oligonucleotide
  Sense strand starting at position 3496 of SEQ ID NO: 1242591
ccaugucuuguuuauaaua

SEQ ID NO: 1359363 - RNA, 19 nt, Artificial Sequence
  Description of Artificial Sequence: Synthetic oligonucleotide
  Antisense strand to SEQ ID NO: 1359362
uauuauaaacaagacaugg

SEQ ID NO: 1359364 - RNA, 19 nt, Artificial Sequence
  Description of Artificial Sequence: Synthetic oligonucleotide
  Sense strand starting at position 3604 of SEQ ID NO: 1242591
ccacauagauggucugcaa

SEQ ID NO: 1359365 - RNA, 19 nt, Artificial Sequence
  Description of Artificial Sequence: Synthetic oligonucleotide
  Antisense strand to SEQ ID NO: 1359364
uugcagaccaucuaugugg

SEQ ID NO: 1359366 - RNA, 19 nt, Artificial Sequence
  Description of Artificial Sequence: Synthetic oligonucleotide
  Sense strand starting at position 3607 of SEQ ID NO: 1242591
cauagauggucugcaacuu

SEQ ID NO: 1359367 - RNA, 19 nt, Artificial Sequence
  Description of Artificial Sequence: Synthetic oligonucleotide
  Antisense strand to SEQ ID NO: 1359366
aaguugcagaccaucuaug

SEQ ID NO: 1359368 - RNA, 19 nt, Artificial Sequence
  Description of Artificial Sequence: Synthetic oligonucleotide
  Sense strand starting at position 3608 of SEQ ID NO: 1242591
auagauggucugcaacuua

SEQ ID NO: 1359369 - RNA, 19 nt, Artificial Sequence
  Description of Artificial Sequence: Synthetic oligonucleotide
  Antisense strand to SEQ ID NO: 1359368
uaaguugcagaccaucuau

SEQ ID NO: 1359370 - RNA, 19 nt, Artificial Sequence
  Description of Artificial Sequence: Synthetic oligonucleotide
  Sense strand starting at position 3613 of SEQ ID NO: 1242591
uggucugcaacuuaugaga

SEQ ID NO: 1359371 - RNA, 19 nt, Artificial Sequence
  Description of Artificial Sequence: Synthetic oligonucleotide
  Antisense strand to SEQ ID NO: 1359370
ucucauaaguugcagacca

SEQ ID NO: 1359372 - RNA, 19 nt, Artificial Sequence
  Description of Artificial Sequence: Synthetic oligonucleotide
  Sense strand starting at position 3626 of SEQ ID NO: 1242591
augagaguuugaccuaauu

SEQ ID NO: 1359373 - RNA, 19 nt, Artificial Sequence
  Description of Artificial Sequence: Synthetic oligonucleotide
  Antisense strand to SEQ ID NO: 1359372
aauuaggucaaacucucau

SEQ ID NO: 1359374 - RNA, 19 nt, Artificial Sequence
  Description of Artificial Sequence: Synthetic oligonucleotide
  Sense strand starting at position 3695 of SEQ ID NO: 1242591
gcucacaacugaguuauua

SEQ ID NO: 1359375 - RNA, 19 nt, Artificial Sequence
  Description of Artificial Sequence: Synthetic oligonucleotide
  Antisense strand to SEQ ID NO: 1359374
uaauaacucaguugugagc

SEQ ID NO: 1359376 - RNA, 19 nt, Artificial Sequence
  Description of Artificial Sequence: Synthetic oligonucleotide
  Sense strand starting at position 3733 of SEQ ID NO: 1242591
ugcauuguaaguugaagag

SEQ ID NO: 1359377 - RNA, 19 nt, Artificial Sequence
  Description of Artificial Sequence: Synthetic oligonucleotide
  Antisense strand to SEQ ID NO: 1359376
cucuucaacuuacaaugca

SEQ ID NO: 1359378 - RNA, 19 nt, Artificial Sequence
  Description of Artificial Sequence: Synthetic oligonucleotide
  Sense strand starting at position 24 of SEQ ID NO: 1242592
acuugaaacguaggaaaug

SEQ ID NO: 1359379 - RNA, 19 nt, Artificial Sequence
  Description of Artificial Sequence: Synthetic oligonucleotide
  Antisense strand to SEQ ID NO: 1359378
cauuuccuacguuucaagu

SEQ ID NO: 1359380 - RNA, 19 nt, Artificial Sequence
  Description of Artificial Sequence: Synthetic oligonucleotide
  Sense strand starting at position 36 of SEQ ID NO: 1242592
ggaaauguaucagugaaua

SEQ ID NO: 1359381 - RNA, 19 nt, Artificial Sequence
  Description of Artificial Sequence: Synthetic oligonucleotide
  Antisense strand to SEQ ID NO: 1359380
uauucacugauacauuucc

SEQ ID NO: 1359382 - RNA, 19 nt, Artificial Sequence
  Description of Artificial Sequence: Synthetic oligonucleotide
  Sense strand starting at position 47 of SEQ ID NO: 1242592
agugaauaacugugaaaua

SEQ ID NO: 1359383 - RNA, 19 nt, Artificial Sequence
  Description of Artificial Sequence: Synthetic oligonucleotide
  Antisense strand to SEQ ID NO: 1359382
uauuucacaguuauucacu

SEQ ID NO: 1359384 - RNA, 19 nt, Artificial Sequence
  Description of Artificial Sequence: Synthetic oligonucleotide
  Sense strand starting at position 410 of SEQ ID NO: 1242592
cugcaaacaugccuuuaga

SEQ ID NO: 1359385 - RNA, 19 nt, Artificial Sequence
  Description of Artificial Sequence: Synthetic oligonucleotide
  Antisense strand to SEQ ID NO: 1359384
ucuaaaggcauguuugcag

SEQ ID NO: 1359386 - RNA, 19 nt, Artificial Sequence
  Description of Artificial Sequence: Synthetic oligonucleotide
  Sense strand starting at position 439 of SEQ ID NO: 1242592
cgagauuacgaguacuuag

SEQ ID NO: 1359387 - RNA, 19 nt, Artificial Sequence
  Description of Artificial Sequence: Synthetic oligonucleotide
  Antisense strand to SEQ ID NO: 1359386
cuaaguacucguaaucucg

SEQ ID NO: 1359388 - RNA, 19 nt, Artificial Sequence
  Description of Artificial Sequence: Synthetic oligonucleotide
  Sense strand starting at position 481 of SEQ ID NO: 1242592
aaaguuagggugugugaca

SEQ ID NO: 1359389 - RNA, 19 nt, Artificial Sequence
  Description of Artificial Sequence: Synthetic oligonucleotide
  Antisense strand to SEQ ID NO: 1359388
ugucacacacccuaacuuu

SEQ ID NO: 1359390 - RNA, 19 nt, Artificial Sequence
  Description of Artificial Sequence: Synthetic oligonucleotide
  Sense strand starting at position 502 of SEQ ID NO: 1242592
uuagguauuugacaaguau

SEQ ID NO: 1359391 - RNA, 19 nt, Artificial Sequence
  Description of Artificial Sequence: Synthetic oligonucleotide
  Antisense strand to SEQ ID NO: 1359390
auacuugucaaauaccuaa

SEQ ID NO: 1359392 - RNA, 19 nt, Artificial Sequence
  Description of Artificial Sequence: Synthetic oligonucleotide
  Sense strand starting at position 515 of SEQ ID NO: 1242592
aaguauucuagggaacggu

SEQ ID NO: 1359393 - RNA, 19 nt, Artificial Sequence
  Description of Artificial Sequence: Synthetic oligonucleotide
  Antisense strand to SEQ ID NO: 1359392
accguucccuagaauacuu

SEQ ID NO: 1359394 - RNA, 19 nt, Artificial Sequence
  Description of Artificial Sequence: Synthetic oligonucleotide
  Sense strand starting at position 603 of SEQ ID NO: 1242592
uagaaucagucagcaaaga

SEQ ID NO: 1359395 - RNA, 19 nt, Artificial Sequence
  Description of Artificial Sequence: Synthetic oligonucleotide
  Antisense strand to SEQ ID NO: 1359394
ucuuugcugacugauucua

SEQ ID NO: 1359396 - RNA, 19 nt, Artificial Sequence
  Description of Artificial Sequence: Synthetic oligonucleotide
  Sense strand starting at position 614 of SEQ ID NO: 1242592
agcaaagaucauuacugua

SEQ ID NO: 1359397 - RNA, 19 nt, Artificial Sequence
  Description of Artificial Sequence: Synthetic oligonucleotide
  Antisense strand to SEQ ID NO: 1359396
uacaguaaugaucuuugcu

SEQ ID NO: 1359398 - RNA, 19 nt, Artificial Sequence
  Description of Artificial Sequence: Synthetic oligonucleotide
  Sense strand starting at position 680 of SEQ ID NO: 1242592
ucuguuaacuaaucacugu

SEQ ID NO: 1359399 - RNA, 19 nt, Artificial Sequence
  Description of Artificial Sequence: Synthetic oligonucleotide
  Antisense strand to SEQ ID NO: 1359398
acagugauuaguuaacaga

SEQ ID NO: 1359400 - RNA, 19 nt, Artificial Sequence
  Description of Artificial Sequence: Synthetic oligonucleotide
  Sense strand starting at position 752 of SEQ ID NO: 1242592
gacagauuuccgugcucag

SEQ ID NO: 1359401 - RNA, 19 nt, Artificial Sequence
  Description of Artificial Sequence: Synthetic oligonucleotide
  Antisense strand to SEQ ID NO: 1359400
cugagcacggaaaucuguc

SEQ ID NO: 1359402 - RNA, 19 nt, Artificial Sequence
  Description of Artificial Sequence: Synthetic oligonucleotide
  Sense strand starting at position 762 of SEQ ID NO: 1242592
cgugcucagggauauauaa

SEQ ID NO: 1359403 - RNA, 19 nt, Artificial Sequence
  Description of Artificial Sequence: Synthetic oligonucleotide
  Antisense strand to SEQ ID NO: 1359402
uuauauaucccugagcacg

SEQ ID NO: 1359404 - RNA, 19 nt, Artificial Sequence
  Description of Artificial Sequence: Synthetic oligonucleotide
  Sense strand starting at position 947 of SEQ ID NO: 1242592
gcgagugguucgauggauc

SEQ ID NO: 1359405 - RNA, 19 nt, Artificial Sequence
  Description of Artificial Sequence: Synthetic oligonucleotide
  Antisense strand to SEQ ID NO: 1359404
gauccaucgaaccacucgc

SEQ ID NO: 1359406 - RNA, 19 nt, Artificial Sequence
  Description of Artificial Sequence: Synthetic oligonucleotide
  Sense strand starting at position 973 of SEQ ID NO: 1242592
ccgaguccuaaccgggaaa

SEQ ID NO: 1359407 - RNA, 19 nt, Artificial Sequence
  Description of Artificial Sequence: Synthetic oligonucleotide
  Antisense strand to SEQ ID NO: 1359406
uuucccgguuaggacucgg

SEQ ID NO: 1359408 - RNA, 19 nt, Artificial Sequence
  Description of Artificial Sequence: Synthetic oligonucleotide
  Sense strand starting at position 975 of SEQ ID NO: 1242592
gaguccuaaccgggaaaca

SEQ ID NO: 1359409 - RNA, 19 nt, Artificial Sequence
  Description of Artificial Sequence: Synthetic oligonucleotide
  Antisense strand to SEQ ID NO: 1359408
uguuucccgguuaggacuc

SEQ ID NO: 1359410 - RNA, 19 nt, Artificial Sequence
  Description of Artificial Sequence: Synthetic oligonucleotide
  Sense strand starting at position 1161 of SEQ ID NO: 1242592
gaaagaaguuggucggaag

SEQ ID NO: 1359411 - RNA, 19 nt, Artificial Sequence
  Description of Artificial Sequence: Synthetic oligonucleotide
  Antisense strand to SEQ ID NO: 1359410
cuuccgaccaacuucuuuc

SEQ ID NO: 1359412 - RNA, 19 nt, Artificial Sequence
  Description of Artificial Sequence: Synthetic oligonucleotide
  Sense strand starting at position 1238 of SEQ ID NO: 1242592
agcgauuaacugggcauuu

SEQ ID NO: 1359413 - RNA, 19 nt, Artificial Sequence
  Description of Artificial Sequence: Synthetic oligonucleotide
  Antisense strand to SEQ ID NO: 1359412
aaaugcccaguuaaucgcu

SEQ ID NO: 1359414 - RNA, 19 nt, Artificial Sequence
  Description of Artificial Sequence: Synthetic oligonucleotide
  Sense strand starting at position 1254 of SEQ ID NO: 1242592
uuuggauaugcugggaguu

SEQ ID NO: 1359415 - RNA, 19 nt, Artificial Sequence
  Description of Artificial Sequence: Synthetic oligonucleotide
  Antisense strand to SEQ ID NO: 1359414
aacucccagcauauccaaa

SEQ ID NO: 1359416 - RNA, 19 nt, Artificial Sequence
  Description of Artificial Sequence: Synthetic oligonucleotide
  Sense strand starting at position 1255 of SEQ ID NO: 1242592
uuggauaugcugggaguua

SEQ ID NO: 1359417 - RNA, 19 nt, Artificial Sequence
  Description of Artificial Sequence: Synthetic oligonucleotide
  Antisense strand to SEQ ID NO: 1359416
uaacucccagcauauccaa

SEQ ID NO: 1359418 - RNA, 19 nt, Artificial Sequence
  Description of Artificial Sequence: Synthetic oligonucleotide
  Sense strand starting at position 1264 of SEQ ID NO: 1242592
cugggaguuaucugacaga

SEQ ID NO: 1359419 - RNA, 19 nt, Artificial Sequence
  Description of Artificial Sequence: Synthetic oligonucleotide
  Antisense strand to SEQ ID NO: 1359418
ucugucagauaacucccag

SEQ ID NO: 1359420 - RNA, 19 nt, Artificial Sequence
  Description of Artificial Sequence: Synthetic oligonucleotide
  Sense strand starting at position 1312 of SEQ ID NO: 1242592
ugauacguggcucagagaa

SEQ ID NO: 1359421 - RNA, 19 nt, Artificial Sequence
  Description of Artificial Sequence: Synthetic oligonucleotide
  Antisense strand to SEQ ID NO: 1359420
uucucugagccacguauca

SEQ ID NO: 1359422 - RNA, 19 nt, Artificial Sequence
  Description of Artificial Sequence: Synthetic oligonucleotide
  Sense strand starting at position 1388 of SEQ ID NO: 1242592
aagaucgcagccugagaaa

SEQ ID NO: 1359423 - RNA, 19 nt, Artificial Sequence
  Description of Artificial Sequence: Synthetic oligonucleotide
  Antisense strand to SEQ ID NO: 1359422
uuucucaggcugcgaucuu

SEQ ID NO: 1359424 - RNA, 19 nt, Artificial Sequence
  Description of Artificial Sequence: Synthetic oligonucleotide
  Sense strand starting at position 1400 of SEQ ID NO: 1242592
ugagaaagucaaggguuca

SEQ ID NO: 1359425 - RNA, 19 nt, Artificial Sequence
  Description of Artificial Sequence: Synthetic oligonucleotide
  Antisense strand to SEQ ID NO: 1359424
ugaacccuugacuuucuca

SEQ ID NO: 1359426 - RNA, 19 nt, Artificial Sequence
  Description of Artificial Sequence: Synthetic oligonucleotide
  Sense strand starting at position 1692 of SEQ ID NO: 1242592
gcccgaaaccucgaaugaa

SEQ ID NO: 1359427 - RNA, 19 nt, Artificial Sequence
  Description of Artificial Sequence: Synthetic oligonucleotide
  Antisense strand to SEQ ID NO: 1359426
uucauucgagguuucgggc

SEQ ID NO: 1359428 - RNA, 19 nt, Artificial Sequence
  Description of Artificial Sequence: Synthetic oligonucleotide
  Sense strand starting at position 1925 of SEQ ID NO: 1242592
ucucucgaauuauccaaga

SEQ ID NO: 1359429 - RNA, 19 nt, Artificial Sequence
  Description of Artificial Sequence: Synthetic oligonucleotide
  Antisense strand to SEQ ID NO: 1359428
ucuuggauaauucgagaga

SEQ ID NO: 1359430 - RNA, 19 nt, Artificial Sequence
  Description of Artificial Sequence: Synthetic oligonucleotide
  Sense strand starting at position 2068 of SEQ ID NO: 1242592
cgaugagucugagcgagaa

SEQ ID NO: 1359431 - RNA, 19 nt, Artificial Sequence
  Description of Artificial Sequence: Synthetic oligonucleotide
  Antisense strand to SEQ ID NO: 1359430
uucucgcucagacucaucg

SEQ ID NO: 1359432 - RNA, 19 nt, Artificial Sequence
  Description of Artificial Sequence: Synthetic oligonucleotide
  Sense strand starting at position 2072 of SEQ ID NO: 1242592
gagucugagcgagaaagau

SEQ ID NO: 1359433 - RNA, 19 nt, Artificial Sequence
  Description of Artificial Sequence: Synthetic oligonucleotide
  Antisense strand to SEQ ID NO: 1359432
aucuuucucgcucagacuc

SEQ ID NO: 1359434 - RNA, 19 nt, Artificial Sequence
  Description of Artificial Sequence: Synthetic oligonucleotide
  Sense strand starting at position 2328 of SEQ ID NO: 1242592
ugcugucuccuuuaagauu

SEQ ID NO: 1359435 - RNA, 19 nt, Artificial Sequence
  Description of Artificial Sequence: Synthetic oligonucleotide
  Antisense strand to SEQ ID NO: 1359434
aaucuuaaaggagacagca

SEQ ID NO: 1359436 - RNA, 19 nt, Artificial Sequence
  Description of Artificial Sequence: Synthetic oligonucleotide
  Sense strand starting at position 2545 of SEQ ID NO: 1242592
ggacucauguuagcugaaa

SEQ ID NO: 1359437 - RNA, 19 nt, Artificial Sequence
  Description of Artificial Sequence: Synthetic oligonucleotide
  Antisense strand to SEQ ID NO: 1359436
uuucagcuaacaugagucc

SEQ ID NO: 1359438 - RNA, 19 nt, Artificial Sequence
  Description of Artificial Sequence: Synthetic oligonucleotide
  Sense strand starting at position 2546 of SEQ ID NO: 1242592
gacucauguuagcugaaac

SEQ ID NO: 1359439 - RNA, 19 nt, Artificial Sequence
  Description of Artificial Sequence: Synthetic oligonucleotide
  Antisense strand to SEQ ID NO: 1359438
guuucagcuaacaugaguc

SEQ ID NO: 1359440 - RNA, 19 nt, Artificial Sequence
  Description of Artificial Sequence: Synthetic oligonucleotide
  Sense strand starting at position 2662 of SEQ ID NO: 1242592
aacauaugacgugagucuu

SEQ ID NO: 1359441 - RNA, 19 nt, Artificial Sequence
  Description of Artificial Sequence: Synthetic oligonucleotide
  Antisense strand to SEQ ID NO: 1359440
aagacucacgucauauguu

SEQ ID NO: 1359442 - RNA, 19 nt, Artificial Sequence
  Description of Artificial Sequence: Synthetic oligonucleotide
  Sense strand starting at position 2680 of SEQ ID NO: 1242592
uuuccaugugaauguaaag

SEQ ID NO: 1359443 - RNA, 19 nt, Artificial Sequence
  Description of Artificial Sequence: Synthetic oligonucleotide
  Antisense strand to SEQ ID NO: 1359442
cuuuacauucacauggaaa

SEQ ID NO: 1359444 - RNA, 19 nt, Artificial Sequence
  Description of Artificial Sequence: Synthetic oligonucleotide
  Sense strand starting at position 2715 of SEQ ID NO: 1242592
gccuguuuaaaggaaaggu

SEQ ID NO: 1359445 - RNA, 19 nt, Artificial Sequence
  Description of Artificial Sequence: Synthetic oligonucleotide
  Antisense strand to SEQ ID NO: 1359444
accuuuccuuuaaacaggc

SEQ ID NO: 1359446 - RNA, 19 nt, Artificial Sequence
  Description of Artificial Sequence: Synthetic oligonucleotide
  Sense strand starting at position 2995 of SEQ ID NO: 1242592
gccgucuaauauuugcauu

SEQ ID NO: 1359447 - RNA, 19 nt, Artificial Sequence
  Description of Artificial Sequence: Synthetic oligonucleotide
  Antisense strand to SEQ ID NO: 1359446
aaugcaaauauuagacggc

SEQ ID NO: 1359448 - RNA, 19 nt, Artificial Sequence
  Description of Artificial Sequence: Synthetic oligonucleotide
  Sense strand starting at position 3162 of SEQ ID NO: 1242592
ggauuugggugucauagag

SEQ ID NO: 1359449 - RNA, 19 nt, Artificial Sequence
  Description of Artificial Sequence: Synthetic oligonucleotide
  Antisense strand to SEQ ID NO: 1359448
cucuaugacacccaaaucc

SEQ ID NO: 1359450 - RNA, 19 nt, Artificial Sequence
  Description of Artificial Sequence: Synthetic oligonucleotide
  Sense strand starting at position 3170 of SEQ ID NO: 1242592
gugucauagagagaagguu

SEQ ID NO: 1359451 - RNA, 19 nt, Artificial Sequence
  Description of Artificial Sequence: Synthetic oligonucleotide
  Antisense strand to SEQ ID NO: 1359450
aaccuucucucuaugacac

SEQ ID NO: 1359452 - RNA, 19 nt, Artificial Sequence
  Description of Artificial Sequence: Synthetic oligonucleotide
  Sense strand starting at position 3616 of SEQ ID NO: 1242592
gugcgauaauaauuaucau

SEQ ID NO: 1359453 - RNA, 19 nt, Artificial Sequence
  Description of Artificial Sequence: Synthetic oligonucleotide
  Antisense strand to SEQ ID NO: 1359452
augauaauuauuaucgcac

SEQ ID NO: 1359454 - RNA, 19 nt, Artificial Sequence
  Description of Artificial Sequence: Synthetic oligonucleotide
  Sense strand starting at position 3678 of SEQ ID NO: 1242592
ucauguguauaaucuaauc

SEQ ID NO: 1359455 - RNA, 19 nt, Artificial Sequence
  Description of Artificial Sequence: Synthetic oligonucleotide
  Antisense strand to SEQ ID NO: 1359454
gauuagauuauacacauga

SEQ ID NO: 1359456 - RNA, 19 nt, Artificial Sequence
  Description of Artificial Sequence: Synthetic oligonucleotide
  Sense strand starting at position 3824 of SEQ ID NO: 1242592
gguucugcuacagagcuau

SEQ ID NO: 1359457 - RNA, 19 nt, Artificial Sequence
  Description of Artificial Sequence: Synthetic oligonucleotide
  Antisense strand to SEQ ID NO: 1359456
auagcucuguagcagaacc

SEQ ID NO: 1359458 - RNA, 19 nt, Artificial Sequence
  Description of Artificial Sequence: Synthetic oligonucleotide
  Sense strand starting at position 1576 of SEQ ID NO: 1242593
gagagucauugaggagagu

SEQ ID NO: 1359459 - RNA, 19 nt, Artificial Sequence
  Description of Artificial Sequence: Synthetic oligonucleotide
  Antisense strand to SEQ ID NO: 1359458
acucuccucaaugacucuc

SEQ ID NO: 1359460 - RNA, 19 nt, Artificial Sequence
  Description of Artificial Sequence: Synthetic oligonucleotide
  Sense strand starting at position 1755 of SEQ ID NO: 1242593
aauauuaggccaggagucu

SEQ ID NO: 1359461 - RNA, 19 nt, Artificial Sequence
  Description of Artificial Sequence: Synthetic oligonucleotide
  Antisense strand to SEQ ID NO: 1359460
agacuccuggccuaauauu

SEQ ID NO: 1359462 - RNA, 19 nt, Artificial Sequence
  Description of Artificial Sequence: Synthetic oligonucleotide
  Sense strand starting at position 1880 of SEQ ID NO: 1242593
gcaaguaucuggcagcugu

SEQ ID NO: 1359463 - RNA, 19 nt, Artificial Sequence
  Description of Artificial Sequence: Synthetic oligonucleotide
  Antisense strand to SEQ ID NO: 1359462
acagcugccagauacuugc

SEQ ID NO: 1359464 - RNA, 19 nt, Artificial Sequence
  Description of Artificial Sequence: Synthetic oligonucleotide
  Sense strand starting at position 1992 of SEQ ID NO: 1242593
ccagaaagcugauaaugac

SEQ ID NO: 1359465 - RNA, 19 nt, Artificial Sequence
  Description of Artificial Sequence: Synthetic oligonucleotide
  Antisense strand to SEQ ID NO: 1359464
gucauuaucagcuuucugg

SEQ ID NO: 1359466 - RNA, 19 nt, Artificial Sequence
  Description of Artificial Sequence: Synthetic oligonucleotide
  Sense strand starting at position 2143 of SEQ ID NO: 1242593
ccgggaaauggguguacau

SEQ ID NO: 1359467 - RNA, 19 nt, Artificial Sequence
  Description of Artificial Sequence: Synthetic oligonucleotide
  Antisense strand to SEQ ID NO: 1359466
auguacacccauuucccgg

SEQ ID NO: 1359468 - RNA, 19 nt, Artificial Sequence
  Description of Artificial Sequence: Synthetic oligonucleotide
  Sense strand starting at position 2176 of SEQ ID NO: 1242593
aggugcacauuuggaaaua

SEQ ID NO: 1359469 - RNA, 19 nt, Artificial Sequence
  Description of Artificial Sequence: Synthetic oligonucleotide
  Antisense strand to SEQ ID NO: 1359468
uauuuccaaaugugcaccu

SEQ ID NO: 1359470 - RNA, 19 nt, Artificial Sequence
  Description of Artificial Sequence: Synthetic oligonucleotide
  Sense strand starting at position 2177 of SEQ ID NO: 1242593
ggugcacauuuggaaauaa

SEQ ID NO: 1359471 - RNA, 19 nt, Artificial Sequence
  Description of Artificial Sequence: Synthetic oligonucleotide
  Antisense strand to SEQ ID NO: 1359470
uuauuuccaaaugugcacc

SEQ ID NO: 1359472 - RNA, 19 nt, Artificial Sequence
  Description of Artificial Sequence: Synthetic oligonucleotide
  Sense strand starting at position 2436 of SEQ ID NO: 1242593
ugacacauuucggcgucau

SEQ ID NO: 1359473 - RNA, 19 nt, Artificial Sequence
  Description of Artificial Sequence: Synthetic oligonucleotide
  Antisense strand to SEQ ID NO: 1359472
augacgccgaaauguguca

SEQ ID NO: 1359474 - RNA, 19 nt, Artificial Sequence
  Description of Artificial Sequence: Synthetic oligonucleotide
  Sense strand starting at position 2437 of SEQ ID NO: 1242593
gacacauuucggcgucauu

SEQ ID NO: 1359475 - RNA, 19 nt, Artificial Sequence
  Description of Artificial Sequence: Synthetic oligonucleotide
  Antisense strand to SEQ ID NO: 1359474
aaugacgccgaaauguguc

SEQ ID NO: 1359476 - RNA, 19 nt, Artificial Sequence
  Description of Artificial Sequence: Synthetic oligonucleotide
  Sense strand starting at position 2440 of SEQ ID NO: 1242593
acauuucggcgucauuaau

SEQ ID NO: 1359477 - RNA, 19 nt, Artificial Sequence
  Description of Artificial Sequence: Synthetic oligonucleotide
  Antisense strand to SEQ ID NO: 1359476
auuaaugacgccgaaaugu

SEQ ID NO: 1359478 - RNA, 19 nt, Artificial Sequence
  Description of Artificial Sequence: Synthetic oligonucleotide
  Sense strand starting at position 2549 of SEQ ID NO: 1242593
acuuuauauuguggauauc

SEQ ID NO: 1359479 - RNA, 19 nt, Artificial Sequence
  Description of Artificial Sequence: Synthetic oligonucleotide
  Antisense strand to SEQ ID NO: 1359478
gauauccacaauauaaagu

SEQ ID NO: 1359480 - RNA, 19 nt, Artificial Sequence
  Description of Artificial Sequence: Synthetic oligonucleotide
  Sense strand starting at position 2550 of SEQ ID NO: 1242593
cuuuauauuguggauaucu

SEQ ID NO: 1359481 - RNA, 19 nt, Artificial Sequence
  Description of Artificial Sequence: Synthetic oligonucleotide
  Antisense strand to SEQ ID NO: 1359480
agauauccacaauauaaag

SEQ ID NO: 1359482 - RNA, 19 nt, Artificial Sequence
  Description of Artificial Sequence: Synthetic oligonucleotide
  Sense strand starting at position 2586 of SEQ ID NO: 1242593
uccugugacuuccuugaug

SEQ ID NO: 1359483 - RNA, 19 nt, Artificial Sequence
  Description of Artificial Sequence: Synthetic oligonucleotide
  Antisense strand to SEQ ID NO: 1359482
caucaaggaagucacagga

SEQ ID NO: 1359484 - RNA, 19 nt, Artificial Sequence
  Description of Artificial Sequence: Synthetic oligonucleotide
  Sense strand starting at position 2589 of SEQ ID NO: 1242593
ugugacuuccuugauggca

SEQ ID NO: 1359485 - RNA, 19 nt, Artificial Sequence
  Description of Artificial Sequence: Synthetic oligonucleotide
  Antisense strand to SEQ ID NO: 1359484
ugccaucaaggaagucaca

SEQ ID NO: 1359486 - RNA, 19 nt, Artificial Sequence
  Description of Artificial Sequence: Synthetic oligonucleotide
  Sense strand starting at position 2591 of SEQ ID NO: 1242593
ugacuuccuugauggcaga

SEQ ID NO: 1359487 - RNA, 19 nt, Artificial Sequence
  Description of Artificial Sequence: Synthetic oligonucleotide
  Antisense strand to SEQ ID NO: 1359486
ucugccaucaaggaaguca

SEQ ID NO: 1359488 - RNA, 19 nt, Artificial Sequence
  Description of Artificial Sequence: Synthetic oligonucleotide
  Sense strand starting at position 2605 of SEQ ID NO: 1242593
gcagaugccauguaugaaa

SEQ ID NO: 1359489 - RNA, 19 nt, Artificial Sequence
  Description of Artificial Sequence: Synthetic oligonucleotide
  Antisense strand to SEQ ID NO: 1359488
uuucauacauggcaucugc

SEQ ID NO: 1359490 - RNA, 19 nt, Artificial Sequence
  Description of Artificial Sequence: Synthetic oligonucleotide
  Sense strand starting at position 2618 of SEQ ID NO: 1242593
augaaacgcugcugaauuu

SEQ ID NO: 1359491 - RNA, 19 nt, Artificial Sequence
  Description of Artificial Sequence: Synthetic oligonucleotide
  Antisense strand to SEQ ID NO: 1359490
aaauucagcagcguuucau

SEQ ID NO: 1359492 - RNA, 19 nt, Artificial Sequence
  Description of Artificial Sequence: Synthetic oligonucleotide
  Sense strand starting at position 2647 of SEQ ID NO: 1242593
gcacguuaguaggauucca

SEQ ID NO: 1359493 - RNA, 19 nt, Artificial Sequence
  Description of Artificial Sequence: Synthetic oligonucleotide
  Antisense strand to SEQ ID NO: 1359492
uggaauccuacuaacgugc

SEQ ID NO: 1359494 - RNA, 19 nt, Artificial Sequence
  Description of Artificial Sequence: Synthetic oligonucleotide
  Sense strand starting at position 3262 of SEQ ID NO: 1242593
agggcaauucuaugaaauc

SEQ ID NO: 1359495 - RNA, 19 nt, Artificial Sequence
  Description of Artificial Sequence: Synthetic oligonucleotide
  Antisense strand to SEQ ID NO: 1359494
gauuucauagaauugcccu

SEQ ID NO: 1359496 - RNA, 19 nt, Artificial Sequence
  Description of Artificial Sequence: Synthetic oligonucleotide
  Sense strand starting at position 3263 of SEQ ID NO: 1242593
gggcaauucuaugaaauca

SEQ ID NO: 1359497 - RNA, 19 nt, Artificial Sequence
  Description of Artificial Sequence: Synthetic oligonucleotide
  Antisense strand to SEQ ID NO: 1359496
ugauuucauagaauugccc

SEQ ID NO: 1359498 - RNA, 19 nt, Artificial Sequence
  Description of Artificial Sequence: Synthetic oligonucleotide
  Sense strand starting at position 3286 of SEQ ID NO: 1242593
aucagaaucuuaggccuua

SEQ ID NO: 1359499 - RNA, 19 nt, Artificial Sequence
  Description of Artificial Sequence: Synthetic oligonucleotide
  Antisense strand to SEQ ID NO: 1359498
uaaggccuaagauucugau

SEQ ID NO: 1359500 - RNA, 19 nt, Artificial Sequence
  Description of Artificial Sequence: Synthetic oligonucleotide
  Sense strand starting at position 3287 of SEQ ID NO: 1242593
ucagaaucuuaggccuuaa

SEQ ID NO: 1359501 - RNA, 19 nt, Artificial Sequence
  Description of Artificial Sequence: Synthetic oligonucleotide
  Antisense strand to SEQ ID NO: 1359500
uuaaggccuaagauucuga

SEQ ID NO: 1359502 - RNA, 19 nt, Artificial Sequence
  Description of Artificial Sequence: Synthetic oligonucleotide
  Sense strand starting at position 3692 of SEQ ID NO: 1242593
ggugcucuauuucuuauca

SEQ ID NO: 1359503 - RNA, 19 nt, Artificial Sequence
  Description of Artificial Sequence: Synthetic oligonucleotide
  Antisense strand to SEQ ID NO: 1359502
ugauaagaaauagagcacc

SEQ ID NO: 1359504 - RNA, 19 nt, Artificial Sequence
  Description of Artificial Sequence: Synthetic oligonucleotide
  Sense strand starting at position 3736 of SEQ ID NO: 1242593
uaggucuaacauuguauga

SEQ ID NO: 1359505 - RNA, 19 nt, Artificial Sequence
  Description of Artificial Sequence: Synthetic oligonucleotide
  Antisense strand to SEQ ID NO: 1359504
ucauacaauguuagaccua

SEQ ID NO: 1359506 - RNA, 19 nt, Artificial Sequence
  Description of Artificial Sequence: Synthetic oligonucleotide
  Sense strand starting at position 3738 of SEQ ID NO: 1242593
ggucuaacauuguaugaau

SEQ ID NO: 1359507 - RNA, 19 nt, Artificial Sequence
  Description of Artificial Sequence: Synthetic oligonucleotide
  Antisense strand to SEQ ID NO: 1359506
auucauacaauguuagacc

SEQ ID NO: 1359508 - RNA, 19 nt, Artificial Sequence
  Description of Artificial Sequence: Synthetic oligonucleotide
  Sense strand starting at position 3740 of SEQ ID NO: 1242593
ucuaacauuguaugaauga

SEQ ID NO: 1359509 - RNA, 19 nt, Artificial Sequence
  Description of Artificial Sequence: Synthetic oligonucleotide
  Antisense strand to SEQ ID NO: 1359508
ucauucauacaauguuaga

SEQ ID NO: 1359510 - RNA, 19 nt, Artificial Sequence
  Description of Artificial Sequence: Synthetic oligonucleotide
  Sense strand starting at position 3741 of SEQ ID NO: 1242593
cuaacauuguaugaaugau

SEQ ID NO: 1359511 - RNA, 19 nt, Artificial Sequence
  Description of Artificial Sequence: Synthetic oligonucleotide
  Antisense strand to SEQ ID NO: 1359510
aucauucauacaauguuag

SEQ ID NO: 1359512 - RNA, 19 nt, Artificial Sequence
  Description of Artificial Sequence: Synthetic oligonucleotide
  Sense strand starting at position 3750 of SEQ ID NO: 1242593
uaugaaugauugucagcaa

SEQ ID NO: 1359513 - RNA, 19 nt, Artificial Sequence
  Description of Artificial Sequence: Synthetic oligonucleotide
  Antisense strand to SEQ ID NO: 1359512
uugcugacaaucauucaua

SEQ ID NO: 1359514 - RNA, 19 nt, Artificial Sequence
  Description of Artificial Sequence: Synthetic oligonucleotide
  Sense strand starting at position 3751 of SEQ ID NO: 1242593
augaaugauugucagcaac

SEQ ID NO: 1359515 - RNA, 19 nt, Artificial Sequence
  Description of Artificial Sequence: Synthetic oligonucleotide
  Antisense strand to SEQ ID NO: 1359514
guugcugacaaucauucau

SEQ ID NO: 1359516 - RNA, 19 nt, Artificial Sequence
  Description of Artificial Sequence: Synthetic oligonucleotide
  Sense strand starting at position 3753 of SEQ ID NO: 1242593
gaaugauugucagcaacuu

SEQ ID NO: 1359517 - RNA, 19 nt, Artificial Sequence
  Description of Artificial Sequence: Synthetic oligonucleotide
  Antisense strand to SEQ ID NO: 1359516
aaguugcugacaaucauuc

SEQ ID NO: 1359518 - RNA, 19 nt, Artificial Sequence
  Description of Artificial Sequence: Synthetic oligonucleotide
  Sense strand starting at position 3936 of SEQ ID NO: 1242593
caagguaccugugacuaca

SEQ ID NO: 1359519 - RNA, 19 nt, Artificial Sequence
  Description of Artificial Sequence: Synthetic oligonucleotide
  Antisense strand to SEQ ID NO: 1359518
uguagucacagguaccuug

SEQ ID NO: 1359520 - RNA, 19 nt, Artificial Sequence
  Description of Artificial Sequence: Synthetic oligonucleotide
  Sense strand starting at position 491 of SEQ ID NO: 1242594
ucccguacuccagggaaua

SEQ ID NO: 1359521 - RNA, 19 nt, Artificial Sequence
  Description of Artificial Sequence: Synthetic oligonucleotide
  Antisense strand to SEQ ID NO: 1359520
uauucccuggaguacggga

SEQ ID NO: 1359522 - RNA, 19 nt, Artificial Sequence
  Description of Artificial Sequence: Synthetic oligonucleotide
  Sense strand starting at position 492 of SEQ ID NO: 1242594
cccguacuccagggaauag

SEQ ID NO: 1359523 - RNA, 19 nt, Artificial Sequence
  Description of Artificial Sequence: Synthetic oligonucleotide
  Antisense strand to SEQ ID NO: 1359522
cuauucccuggaguacggg

SEQ ID NO: 1359524 - RNA, 19 nt, Artificial Sequence
  Description of Artificial Sequence: Synthetic oligonucleotide
  Sense strand starting at position 640 of SEQ ID NO: 1242594
aggagugacucggcagcau

SEQ ID NO: 1359525 - RNA, 19 nt, Artificial Sequence
  Description of Artificial Sequence: Synthetic oligonucleotide
  Antisense strand to SEQ ID NO: 1359524
augcugccgagucacuccu

SEQ ID NO: 1359526 - RNA, 19 nt, Artificial Sequence
  Description of Artificial Sequence: Synthetic oligonucleotide
  Sense strand starting at position 1077 of SEQ ID NO: 1242594
caguguuguggcuccagca

SEQ ID NO: 1359527 - RNA, 19 nt, Artificial Sequence
  Description of Artificial Sequence: Synthetic oligonucleotide
  Antisense strand to SEQ ID NO: 1359526
ugcuggagccacaacacug

SEQ ID NO: 1359528 - RNA, 19 nt, Artificial Sequence
  Description of Artificial Sequence: Synthetic oligonucleotide
  Sense strand starting at position 1103 of SEQ ID NO: 1242594
gcgcuuuccucagggcagu

SEQ ID NO: 1359529 - RNA, 19 nt, Artificial Sequence
  Description of Artificial Sequence: Synthetic oligonucleotide
  Antisense strand to SEQ ID NO: 1359528
acugcccugaggaaagcgc

SEQ ID NO: 1359530 - RNA, 19 nt, Artificial Sequence
  Description of Artificial Sequence: Synthetic oligonucleotide
  Sense strand starting at position 1235 of SEQ ID NO: 1242594
gugggcauuccgugaucuu

SEQ ID NO: 1359531 - RNA, 19 nt, Artificial Sequence
  Description of Artificial Sequence: Synthetic oligonucleotide
  Antisense strand to SEQ ID NO: 1359530
aagaucacggaaugcccac

SEQ ID NO: 1359532 - RNA, 19 nt, Artificial Sequence
  Description of Artificial Sequence: Synthetic oligonucleotide
  Sense strand starting at position 1236 of SEQ ID NO: 1242594
ugggcauuccgugaucuuc

SEQ ID NO: 1359533 - RNA, 19 nt, Artificial Sequence
  Description of Artificial Sequence: Synthetic oligonucleotide
  Antisense strand to SEQ ID NO: 1359532
gaagaucacggaaugccca

SEQ ID NO: 1359534 - RNA, 19 nt, Artificial Sequence
  Description of Artificial Sequence: Synthetic oligonucleotide
  Sense strand starting at position 1244 of SEQ ID NO: 1242594
ccgugaucuucaccaggga

SEQ ID NO: 1359535 - RNA, 19 nt, Artificial Sequence
  Description of Artificial Sequence: Synthetic oligonucleotide
  Antisense strand to SEQ ID NO: 1359534
ucccuggugaagaucacgg

SEQ ID NO: 1359536 - RNA, 19 nt, Artificial Sequence
  Description of Artificial Sequence: Synthetic oligonucleotide
  Sense strand starting at position 1245 of SEQ ID NO: 1242594
cgugaucuucaccagggaa

SEQ ID NO: 1359537 - RNA, 19 nt, Artificial Sequence
  Description of Artificial Sequence: Synthetic oligonucleotide
  Antisense strand to SEQ ID NO: 1359536
uucccuggugaagaucacg

SEQ ID NO: 1359538 - RNA, 19 nt, Artificial Sequence
  Description of Artificial Sequence: Synthetic oligonucleotide
  Sense strand starting at position 1607 of SEQ ID NO: 1242594
ggcacucgccugcgaugua

SEQ ID NO: 1359539 - RNA, 19 nt, Artificial Sequence
  Description of Artificial Sequence: Synthetic oligonucleotide
  Antisense strand to SEQ ID NO: 1359538
uacaucgcaggcgagugcc

SEQ ID NO: 1359540 - RNA, 19 nt, Artificial Sequence
  Description of Artificial Sequence: Synthetic oligonucleotide
  Sense strand starting at position 1713 of SEQ ID NO: 1242594
cgagaugucccuggaccca

SEQ ID NO: 1359541 - RNA, 19 nt, Artificial Sequence
  Description of Artificial Sequence: Synthetic oligonucleotide
  Antisense strand to SEQ ID NO: 1359540
uggguccagggacaucucg

SEQ ID NO: 1359542 - RNA, 19 nt, Artificial Sequence
  Description of Artificial Sequence: Synthetic oligonucleotide
  Sense strand starting at position 1874 of SEQ ID NO: 1242594
cugugcgugcaccugaaua

SEQ ID NO: 1359543 - RNA, 19 nt, Artificial Sequence
  Description of Artificial Sequence: Synthetic oligonucleotide
  Antisense strand to SEQ ID NO: 1359542
uauucaggugcacgcacag

SEQ ID NO: 1359544 - RNA, 19 nt, Artificial Sequence
  Description of Artificial Sequence: Synthetic oligonucleotide
  Sense strand starting at position 2167 of SEQ ID NO: 1242594
gaacguucgaaccggacaa

SEQ ID NO: 1359545 - RNA, 19 nt, Artificial Sequence
  Description of Artificial Sequence: Synthetic oligonucleotide
  Antisense strand to SEQ ID NO: 1359544
uuguccgguucgaacguuc

SEQ ID NO: 1359546 - RNA, 19 nt, Artificial Sequence
  Description of Artificial Sequence: Synthetic oligonucleotide
  Sense strand starting at position 2322 of SEQ ID NO: 1242594
gcgcccuuucuccuuuauu

SEQ ID NO: 1359547 - RNA, 19 nt, Artificial Sequence
  Description of Artificial Sequence: Synthetic oligonucleotide
  Antisense strand to SEQ ID NO: 1359546
aauaaaggagaaagggcgc

SEQ ID NO: 1359548 - RNA, 19 nt, Artificial Sequence
  Description of Artificial Sequence: Synthetic oligonucleotide
  Sense strand starting at position 2331 of SEQ ID NO: 1242594
cuccuuuauuggccgagau

SEQ ID NO: 1359549 - RNA, 19 nt, Artificial Sequence
  Description of Artificial Sequence: Synthetic oligonucleotide
  Antisense strand to SEQ ID NO: 1359548
aucucggccaauaaaggag

SEQ ID NO: 1359550 - RNA, 19 nt, Artificial Sequence
  Description of Artificial Sequence: Synthetic oligonucleotide
  Sense strand starting at position 2332 of SEQ ID NO: 1242594
uccuuuauuggccgagauc

SEQ ID NO: 1359551 - RNA, 19 nt, Artificial Sequence
  Description of Artificial Sequence: Synthetic oligonucleotide
  Antisense strand to SEQ ID NO: 1359550
gaucucggccaauaaagga

SEQ ID NO: 1359552 - RNA, 19 nt, Artificial Sequence
  Description of Artificial Sequence: Synthetic oligonucleotide
  Sense strand starting at position 2697 of SEQ ID NO: 1242594
gguugugugaggcauaacu

SEQ ID NO: 1359553 - RNA, 19 nt, Artificial Sequence
  Description of Artificial Sequence: Synthetic oligonucleotide
  Antisense strand to SEQ ID NO: 1359552
aguuaugccucacacaacc

SEQ ID NO: 1359554 - RNA, 19 nt, Artificial Sequence
  Description of Artificial Sequence: Synthetic oligonucleotide
  Sense strand starting at position 2766 of SEQ ID NO: 1242594
ugugcucuauuccaagacu

SEQ ID NO: 1359555 - RNA, 19 nt, Artificial Sequence
  Description of Artificial Sequence: Synthetic oligonucleotide
  Antisense strand to SEQ ID NO: 1359554
agucuuggaauagagcaca

SEQ ID NO: 1359556 - RNA, 19 nt, Artificial Sequence
  Description of Artificial Sequence: Synthetic oligonucleotide
  Sense strand starting at position 3088 of SEQ ID NO: 1242594
gcccaucauuucgcaacuu

SEQ ID NO: 1359557 - RNA, 19 nt, Artificial Sequence
  Description of Artificial Sequence: Synthetic oligonucleotide
  Antisense strand to SEQ ID NO: 1359556
aaguugcgaaaugaugggc

SEQ ID NO: 1359558 - RNA, 19 nt, Artificial Sequence
  Description of Artificial Sequence: Synthetic oligonucleotide
  Sense strand starting at position 3415 of SEQ ID NO: 1242594
gguccaagugugugagcua

SEQ ID NO: 1359559 - RNA, 19 nt, Artificial Sequence
  Description of Artificial Sequence: Synthetic oligonucleotide
  Antisense strand to SEQ ID NO: 1359558
uagcucacacacuuggacc

SEQ ID NO: 1359560 - RNA, 19 nt, Artificial Sequence
  Description of Artificial Sequence: Synthetic oligonucleotide
  Sense strand starting at position 3489 of SEQ ID NO: 1242594
cugauucugucucccagau

SEQ ID NO: 1359561 - RNA, 19 nt, Artificial Sequence
  Description of Artificial Sequence: Synthetic oligonucleotide
  Antisense strand to SEQ ID NO: 1359560
aucugggagacagaaucag

SEQ ID NO: 1359562 - RNA, 19 nt, Artificial Sequence
  Description of Artificial Sequence: Synthetic oligonucleotide
  Sense strand starting at position 3884 of SEQ ID NO: 1242594
auaauuagcguccagggaa

SEQ ID NO: 1359563 - RNA, 19 nt, Artificial Sequence
  Description of Artificial Sequence: Synthetic oligonucleotide
  Antisense strand to SEQ ID NO: 1359562
uucccuggacgcuaauuau

SEQ ID NO: 1359564 - RNA, 19 nt, Artificial Sequence
  Description of Artificial Sequence: Synthetic oligonucleotide
  Sense strand starting at position 3887 of SEQ ID NO: 1242594
auuagcguccagggaaauu

SEQ ID NO: 1359565 - RNA, 19 nt, Artificial Sequence
  Description of Artificial Sequence: Synthetic oligonucleotide
  Antisense strand to SEQ ID NO: 1359564
aauuucccuggacgcuaau

SEQ ID NO: 1359566 - RNA, 19 nt, Artificial Sequence
  Description of Artificial Sequence: Synthetic oligonucleotide
  Sense strand starting at position 32 of SEQ ID NO: 1242595
cgucuaaagagaugugguu

SEQ ID NO: 1359567 - RNA, 19 nt, Artificial Sequence
  Description of Artificial Sequence: Synthetic oligonucleotide
  Antisense strand to SEQ ID NO: 1359566
aaccacaucucuuuagacg

SEQ ID NO: 1359568 - RNA, 19 nt, Artificial Sequence
  Description of Artificial Sequence: Synthetic oligonucleotide
  Sense strand starting at position 364 of SEQ ID NO: 1242595
ggccuaaagagauguuaaa

SEQ ID NO: 1359569 - RNA, 19 nt, Artificial Sequence
  Description of Artificial Sequence: Synthetic oligonucleotide
  Antisense strand to SEQ ID NO: 1359568
uuuaacaucucuuuaggcc

SEQ ID NO: 1359570 - RNA, 19 nt, Artificial Sequence
  Description of Artificial Sequence: Synthetic oligonucleotide
  Sense strand starting at position 414 of SEQ ID NO: 1242595
guauuucuguuuccucauu

SEQ ID NO: 1359571 - RNA, 19 nt, Artificial Sequence
  Description of Artificial Sequence: Synthetic oligonucleotide
  Antisense strand to SEQ ID NO: 1359570
aaugaggaaacagaaauac

SEQ ID NO: 1359572 - RNA, 19 nt, Artificial Sequence
  Description of Artificial Sequence: Synthetic oligonucleotide
  Sense strand starting at position 504 of SEQ ID NO: 1242595
caagaucuucgucgugaug

SEQ ID NO: 1359573 - RNA, 19 nt, Artificial Sequence
  Description of Artificial Sequence: Synthetic oligonucleotide
  Antisense strand to SEQ ID NO: 1359572
caucacgacgaagaucuug

SEQ ID NO: 1359574 - RNA, 19 nt, Artificial Sequence
  Description of Artificial Sequence: Synthetic oligonucleotide
  Sense strand starting at position 696 of SEQ ID NO: 1242595
ucaggucuucuaugcauuu

SEQ ID NO: 1359575 - RNA, 19 nt, Artificial Sequence
  Description of Artificial Sequence: Synthetic oligonucleotide
  Antisense strand to SEQ ID NO: 1359574
aaaugcauagaagaccuga

SEQ ID NO: 1359576 - RNA, 19 nt, Artificial Sequence
  Description of Artificial Sequence: Synthetic oligonucleotide
  Sense strand starting at position 835 of SEQ ID NO: 1242595
cuuggauuugagcgcugga

SEQ ID NO: 1359577 - RNA, 19 nt, Artificial Sequence
  Description of Artificial Sequence: Synthetic oligonucleotide
  Antisense strand to SEQ ID NO: 1359576
uccagcgcucaaauccaag

SEQ ID NO: 1359578 - RNA, 19 nt, Artificial Sequence
  Description of Artificial Sequence: Synthetic oligonucleotide
  Sense strand starting at position 855 of SEQ ID NO: 1242595
ccagacagcuuguucuuga

SEQ ID NO: 1359579 - RNA, 19 nt, Artificial Sequence
  Description of Artificial Sequence: Synthetic oligonucleotide
  Antisense strand to SEQ ID NO: 1359578
ucaagaacaagcugucugg

SEQ ID NO: 1359580 - RNA, 19 nt, Artificial Sequence
  Description of Artificial Sequence: Synthetic oligonucleotide
  Sense strand starting at position 897 of SEQ ID NO: 1242595
cccucuaagcuuggacaga

SEQ ID NO: 1359581 - RNA, 19 nt, Artificial Sequence
  Description of Artificial Sequence: Synthetic oligonucleotide
  Antisense strand to SEQ ID NO: 1359580
ucuguccaagcuuagaggg

SEQ ID NO: 1359582 - RNA, 19 nt, Artificial Sequence
  Description of Artificial Sequence: Synthetic oligonucleotide
  Sense strand starting at position 910 of SEQ ID NO: 1242595
gacagauuacauggccuuu

SEQ ID NO: 1359583 - RNA, 19 nt, Artificial Sequence
  Description of Artificial Sequence: Synthetic oligonucleotide
  Antisense strand to SEQ ID NO: 1359582
aaaggccauguaaucuguc

SEQ ID NO: 1359584 - RNA, 19 nt, Artificial Sequence
  Description of Artificial Sequence: Synthetic oligonucleotide
  Sense strand starting at position 1029 of SEQ ID NO: 1242595
cugguacaugguuagcaau

SEQ ID NO: 1359585 - RNA, 19 nt, Artificial Sequence
  Description of Artificial Sequence: Synthetic oligonucleotide
  Antisense strand to SEQ ID NO: 1359584
auugcuaaccauguaccag

SEQ ID NO: 1359586 - RNA, 19 nt, Artificial Sequence
  Description of Artificial Sequence: Synthetic oligonucleotide
  Sense strand starting at position 1031 of SEQ ID NO: 1242595
gguacaugguuagcaauau

SEQ ID NO: 1359587 - RNA, 19 nt, Artificial Sequence
  Description of Artificial Sequence: Synthetic oligonucleotide
  Antisense strand to SEQ ID NO: 1359586
auauugcuaaccauguacc

SEQ ID NO: 1359588 - RNA, 19 nt, Artificial Sequence
  Description of Artificial Sequence: Synthetic oligonucleotide
  Sense strand starting at position 1035 of SEQ ID NO: 1242595
caugguuagcaauauagau

SEQ ID NO: 1359589 - RNA, 19 nt, Artificial Sequence
  Description of Artificial Sequence: Synthetic oligonucleotide
  Antisense strand to SEQ ID NO: 1359588
aucuauauugcuaaccaug

SEQ ID NO: 1359590 - RNA, 19 nt, Artificial Sequence
  Description of Artificial Sequence: Synthetic oligonucleotide
  Sense strand starting at position 1047 of SEQ ID NO: 1242595
uauagauauguuggcuuga

SEQ ID NO: 1359591 - RNA, 19 nt, Artificial Sequence
  Description of Artificial Sequence: Synthetic oligonucleotide
  Antisense strand to SEQ ID NO: 1359590
ucaagccaacauaucuaua

SEQ ID NO: 1359592 - RNA, 19 nt, Artificial Sequence
  Description of Artificial Sequence: Synthetic oligonucleotide
  Sense strand starting at position 1048 of SEQ ID NO: 1242595
auagauauguuggcuugaa

SEQ ID NO: 1359593 - RNA, 19 nt, Artificial Sequence
  Description of Artificial Sequence: Synthetic oligonucleotide
  Antisense strand to SEQ ID NO: 1359592
uucaagccaacauaucuau

SEQ ID NO: 1359594 - RNA, 19 nt, Artificial Sequence
  Description of Artificial Sequence: Synthetic oligonucleotide
  Sense strand starting at position 1049 of SEQ ID NO: 1242595
uagauauguuggcuugaaa

SEQ ID NO: 1359595 - RNA, 19 nt, Artificial Sequence
  Description of Artificial Sequence: Synthetic oligonucleotide
  Antisense strand to SEQ ID NO: 1359594
uuucaagccaacauaucua

SEQ ID NO: 1359596 - RNA, 19 nt, Artificial Sequence
  Description of Artificial Sequence: Synthetic oligonucleotide
  Sense strand starting at position 1318 of SEQ ID NO: 1242595
gagaaugacuugcucaaag

SEQ ID NO: 1359597 - RNA, 19 nt, Artificial Sequence
  Description of Artificial Sequence: Synthetic oligonucleotide
  Antisense strand to SEQ ID NO: 1359596
cuuugagcaagucauucuc

SEQ ID NO: 1359598 - RNA, 19 nt, Artificial Sequence
  Description of Artificial Sequence: Synthetic oligonucleotide
  Sense strand starting at position 1392 of SEQ ID NO: 1242595
cauaguuauccagagcgcu

SEQ ID NO: 1359599 - RNA, 19 nt, Artificial Sequence
  Description of Artificial Sequence: Synthetic oligonucleotide
  Antisense strand to SEQ ID NO: 1359598
agcgcucuggauaacuaug

SEQ ID NO: 1359600 - RNA, 19 nt, Artificial Sequence
  Description of Artificial Sequence: Synthetic oligonucleotide
  Sense strand starting at position 1402 of SEQ ID NO: 1242595
cagagcgcuccuugaaauc

SEQ ID NO: 1359601 - RNA, 19 nt, Artificial Sequence
  Description of Artificial Sequence: Synthetic oligonucleotide
  Antisense strand to SEQ ID NO: 1359600
gauuucaaggagcgcucug

SEQ ID NO: 1359602 - RNA, 19 nt, Artificial Sequence
  Description of Artificial Sequence: Synthetic oligonucleotide
  Sense strand starting at position 1414 of SEQ ID NO: 1242595
ugaaaucccgaauacguau

SEQ ID NO: 1359603 - RNA, 19 nt, Artificial Sequence
  Description of Artificial Sequence: Synthetic oligonucleotide
  Antisense strand to SEQ ID NO: 1359602
auacguauucgggauuuca

SEQ ID NO: 1359604 - RNA, 19 nt, Artificial Sequence
  Description of Artificial Sequence: Synthetic oligonucleotide
  Sense strand starting at position 1762 of SEQ ID NO: 1242595
ggcuaucugccguagggaa

SEQ ID NO: 1359605 - RNA, 19 nt, Artificial Sequence
  Description of Artificial Sequence: Synthetic oligonucleotide
  Antisense strand to SEQ ID NO: 1359604
uucccuacggcagauagcc

SEQ ID NO: 1359606 - RNA, 19 nt, Artificial Sequence
  Description of Artificial Sequence: Synthetic oligonucleotide
  Sense strand starting at position 1901 of SEQ ID NO: 1242595
ggcucaccucuccagacau

SEQ ID NO: 1359607 - RNA, 19 nt, Artificial Sequence
  Description of Artificial Sequence: Synthetic oligonucleotide
  Antisense strand to SEQ ID NO: 1359606
augucuggagaggugagcc

SEQ ID NO: 1359608 - RNA, 19 nt, Artificial Sequence
  Description of Artificial Sequence: Synthetic oligonucleotide
  Sense strand starting at position 2159 of SEQ ID NO: 1242595
ggagucagggauugcugaa

SEQ ID NO: 1359609 - RNA, 19 nt, Artificial Sequence
  Description of Artificial Sequence: Synthetic oligonucleotide
  Antisense strand to SEQ ID NO: 1359608
uucagcaaucccugacucc

SEQ ID NO: 1359610 - RNA, 19 nt, Artificial Sequence
  Description of Artificial Sequence: Synthetic oligonucleotide
  Sense strand starting at position 2209 of SEQ ID NO: 1242595
uuggcugugucaucuggga

SEQ ID NO: 1359611 - RNA, 19 nt, Artificial Sequence
  Description of Artificial Sequence: Synthetic oligonucleotide
  Antisense strand to SEQ ID NO: 1359610
ucccagaugacacagccaa

SEQ ID NO: 1359612 - RNA, 19 nt, Artificial Sequence
  Description of Artificial Sequence: Synthetic oligonucleotide
  Sense strand starting at position 2566 of SEQ ID NO: 1242595
gaagauugcgcagagccaa

SEQ ID NO: 1359613 - RNA, 19 nt, Artificial Sequence
  Description of Artificial Sequence: Synthetic oligonucleotide
  Antisense strand to SEQ ID NO: 1359612
uuggcucugcgcaaucuuc

SEQ ID NO: 1359614 - RNA, 19 nt, Artificial Sequence
  Description of Artificial Sequence: Synthetic oligonucleotide
  Sense strand starting at position 3272 of SEQ ID NO: 1242595
cggcaagacccaugaacuu

SEQ ID NO: 1359615 - RNA, 19 nt, Artificial Sequence
  Description of Artificial Sequence: Synthetic oligonucleotide
  Antisense strand to SEQ ID NO: 1359614
aaguucaugggucuugccg

SEQ ID NO: 1359616 - RNA, 19 nt, Artificial Sequence
  Description of Artificial Sequence: Synthetic oligonucleotide
  Sense strand starting at position 3281 of SEQ ID NO: 1242595
ccaugaacuuuggaaauag

SEQ ID NO: 1359617 - RNA, 19 nt, Artificial Sequence
  Description of Artificial Sequence: Synthetic oligonucleotide
  Antisense strand to SEQ ID NO: 1359616
cuauuuccaaaguucaugg

SEQ ID NO: 1359618 - RNA, 19 nt, Artificial Sequence
  Description of Artificial Sequence: Synthetic oligonucleotide
  Sense strand starting at position 3326 of SEQ ID NO: 1242595
gcuguaaacuagcuaugua

SEQ ID NO: 1359619 - RNA, 19 nt, Artificial Sequence
  Description of Artificial Sequence: Synthetic oligonucleotide
  Antisense strand to SEQ ID NO: 1359618
uacauagcuaguuuacagc

SEQ ID NO: 1359620 - RNA, 19 nt, Artificial Sequence
  Description of Artificial Sequence: Synthetic oligonucleotide
  Sense strand starting at position 3387 of SEQ ID NO: 1242595
ucaucuguuagguguggau

SEQ ID NO: 1359621 - RNA, 19 nt, Artificial Sequence
  Description of Artificial Sequence: Synthetic oligonucleotide
  Antisense strand to SEQ ID NO: 1359620
auccacaccuaacagauga

SEQ ID NO: 1359622 - RNA, 19 nt, Artificial Sequence
  Description of Artificial Sequence: Synthetic oligonucleotide
  Sense strand starting at position 3391 of SEQ ID NO: 1242595
cuguuagguguggauguua

SEQ ID NO: 1359623 - RNA, 19 nt, Artificial Sequence
  Description of Artificial Sequence: Synthetic oligonucleotide
  Antisense strand to SEQ ID NO: 1359622
uaacauccacaccuaacag

SEQ ID NO: 1359624 - RNA, 19 nt, Artificial Sequence
  Description of Artificial Sequence: Synthetic oligonucleotide
  Sense strand starting at position 3423 of SEQ ID NO: 1242595
gucauagggucguugggaa

SEQ ID NO: 1359625 - RNA, 19 nt, Artificial Sequence
  Description of Artificial Sequence: Synthetic oligonucleotide
  Antisense strand to SEQ ID NO: 1359624
uucccaacgacccuaugac

SEQ ID NO: 1359626 - RNA, 19 nt, Artificial Sequence
  Description of Artificial Sequence: Synthetic oligonucleotide
  Sense strand starting at position 3460 of SEQ ID NO: 1242595
ggguaaagugcucaggaca

SEQ ID NO: 1359627 - RNA, 19 nt, Artificial Sequence
  Description of Artificial Sequence: Synthetic oligonucleotide
  Antisense strand to SEQ ID NO: 1359626
uguccugagcacuuuaccc

SEQ ID NO: 1359628 - RNA, 19 nt, Artificial Sequence
  Description of Artificial Sequence: Synthetic oligonucleotide
  Sense strand starting at position 3539 of SEQ ID NO: 1242595
agcuaauagugagcacuuu

SEQ ID NO: 1359629 - RNA, 19 nt, Artificial Sequence
  Description of Artificial Sequence: Synthetic oligonucleotide
  Antisense strand to SEQ ID NO: 1359628
aaagugcucacuauuagcu

SEQ ID NO: 1359630 - RNA, 19 nt, Artificial Sequence
  Description of Artificial Sequence: Synthetic oligonucleotide
  Sense strand starting at position 3677 of SEQ ID NO: 1242595
aagauugaguuucccaaga

SEQ ID NO: 1359631 - RNA, 19 nt, Artificial Sequence
  Description of Artificial Sequence: Synthetic oligonucleotide
  Antisense strand to SEQ ID NO: 1359630
ucuugggaaacucaaucuu

SEQ ID NO: 1359632 - RNA, 19 nt, Artificial Sequence
  Description of Artificial Sequence: Synthetic oligonucleotide
  Sense strand starting at position 3718 of SEQ ID NO: 1242595
gaacuugugggcugucaca

SEQ ID NO: 1359633 - RNA, 19 nt, Artificial Sequence
  Description of Artificial Sequence: Synthetic oligonucleotide
  Antisense strand to SEQ ID NO: 1359632
ugugacagcccacaaguuc

SEQ ID NO: 1359634 - RNA, 19 nt, Artificial Sequence
  Description of Artificial Sequence: Synthetic oligonucleotide
  Sense strand starting at position 3843 of SEQ ID NO: 1242595
gaaugaagaguuuguguuu

SEQ ID NO: 1359635 - RNA, 19 nt, Artificial Sequence
  Description of Artificial Sequence: Synthetic oligonucleotide
  Antisense strand to SEQ ID NO: 1359634
aaacacaaacucuucauuc

SEQ ID NO: 1359636 - RNA, 19 nt, Artificial Sequence
  Description of Artificial Sequence: Synthetic oligonucleotide
  Sense strand starting at position 3844 of SEQ ID NO: 1242595
aaugaagaguuuguguuua

SEQ ID NO: 1359637 - RNA, 19 nt, Artificial Sequence
  Description of Artificial Sequence: Synthetic oligonucleotide
  Antisense strand to SEQ ID NO: 1359636
uaaacacaaacucuucauu

SEQ ID NO: 1359638 - RNA, 19 nt, Artificial Sequence
  Description of Artificial Sequence: Synthetic oligonucleotide
  Sense strand starting at position 3856 of SEQ ID NO: 1242595
guguuuagcggguacagau

SEQ ID NO: 1359639 - RNA, 19 nt, Artificial Sequence
  Description of Artificial Sequence: Synthetic oligonucleotide
  Antisense strand to SEQ ID NO: 1359638
aucuguacccgcuaaacac

SEQ ID NO: 1359640 - RNA, 19 nt, Artificial Sequence
  Description of Artificial Sequence: Synthetic oligonucleotide
  Sense strand starting at position 3877 of SEQ ID NO: 1242595
ccuguuugggaggaaaguu

SEQ ID NO: 1359641 - RNA, 19 nt, Artificial Sequence
  Description of Artificial Sequence: Synthetic oligonucleotide
  Antisense strand to SEQ ID NO: 1359640
aacuuuccucccaaacagg

SEQ ID NO: 1359642 - RNA, 19 nt, Artificial Sequence
  Description of Artificial Sequence: Synthetic oligonucleotide
  Sense strand starting at position 3903 of SEQ ID NO: 1242595
ggaugauacaguggcacaa

SEQ ID NO: 1359643 - RNA, 19 nt, Artificial Sequence
  Description of Artificial Sequence: Synthetic oligonucleotide
  Antisense strand to SEQ ID NO: 1359642
uugugccacuguaucaucc

SEQ ID NO: 1359644 - RNA, 19 nt, Artificial Sequence
  Description of Artificial Sequence: Synthetic oligonucleotide
  Sense strand starting at position 3915 of SEQ ID NO: 1242595
ggcacaacaaugugaagua

SEQ ID NO: 1359645 - RNA, 19 nt, Artificial Sequence
  Description of Artificial Sequence: Synthetic oligonucleotide
  Antisense strand to SEQ ID NO: 1359644
uacuucacauuguugugcc

SEQ ID NO: 1359646 - RNA, 19 nt, Artificial Sequence
  Description of Artificial Sequence: Synthetic oligonucleotide
  Sense strand starting at position 302 of SEQ ID NO: 1242596
cccuaaauagcuugguaga

SEQ ID NO: 1359647 - RNA, 19 nt, Artificial Sequence
  Description of Artificial Sequence: Synthetic oligonucleotide
  Antisense strand to SEQ ID NO: 1359646
ucuaccaagcuauuuaggg

SEQ ID NO: 1359648 - RNA, 19 nt, Artificial Sequence
  Description of Artificial Sequence: Synthetic oligonucleotide
  Sense strand starting at position 303 of SEQ ID NO: 1242596
ccuaaauagcuugguagau

SEQ ID NO: 1359649 - RNA, 19 nt, Artificial Sequence
  Description of Artificial Sequence: Synthetic oligonucleotide
  Antisense strand to SEQ ID NO: 1359648
aucuaccaagcuauuuagg

SEQ ID NO: 1359650 - RNA, 19 nt, Artificial Sequence
  Description of Artificial Sequence: Synthetic oligonucleotide
  Sense strand starting at position 304 of SEQ ID NO: 1242596
cuaaauagcuugguagauu

SEQ ID NO: 1359651 - RNA, 19 nt, Artificial Sequence
  Description of Artificial Sequence: Synthetic oligonucleotide
  Antisense strand to SEQ ID NO: 1359650
aaucuaccaagcuauuuag

SEQ ID NO: 1359652 - RNA, 19 nt, Artificial Sequence
  Description of Artificial Sequence: Synthetic oligonucleotide
  Sense strand starting at position 305 of SEQ ID NO: 1242596
uaaauagcuugguagauuu

SEQ ID NO: 1359653 - RNA, 19 nt, Artificial Sequence
  Description of Artificial Sequence: Synthetic oligonucleotide
  Antisense strand to SEQ ID NO: 1359652
aaaucuaccaagcuauuua

SEQ ID NO: 1359654 - RNA, 19 nt, Artificial Sequence
  Description of Artificial Sequence: Synthetic oligonucleotide
  Sense strand starting at position 318 of SEQ ID NO: 1242596
agauuuaagucucagaacu

SEQ ID NO: 1359655 - RNA, 19 nt, Artificial Sequence
  Description of Artificial Sequence: Synthetic oligonucleotide
  Antisense strand to SEQ ID NO: 1359654
aguucugagacuuaaaucu

SEQ ID NO: 1359656 - RNA, 19 nt, Artificial Sequence
  Description of Artificial Sequence: Synthetic oligonucleotide
  Sense strand starting at position 348 of SEQ ID NO: 1242596
gagugaaagucccuuaccu

SEQ ID NO: 1359657 - RNA, 19 nt, Artificial Sequence
  Description of Artificial Sequence: Synthetic oligonucleotide
  Antisense strand to SEQ ID NO: 1359656
agguaagggacuuucacuc

SEQ ID NO: 1359658 - RNA, 19 nt, Artificial Sequence
  Description of Artificial Sequence: Synthetic oligonucleotide
  Sense strand starting at position 350 of SEQ ID NO: 1242596
gugaaagucccuuaccugu

SEQ ID NO: 1359659 - RNA, 19 nt, Artificial Sequence
  Description of Artificial Sequence: Synthetic oligonucleotide
  Antisense strand to SEQ ID NO: 1359658
acagguaagggacuuucac

SEQ ID NO: 1359660 - RNA, 19 nt, Artificial Sequence
  Description of Artificial Sequence: Synthetic oligonucleotide
  Sense strand starting at position 360 of SEQ ID NO: 1242596
cuuaccugucacgaacaau

SEQ ID NO: 1359661 - RNA, 19 nt, Artificial Sequence
  Description of Artificial Sequence: Synthetic oligonucleotide
  Antisense strand to SEQ ID NO: 1359660
auuguucgugacagguaag

SEQ ID NO: 1359662 - RNA, 19 nt, Artificial Sequence
  Description of Artificial Sequence: Synthetic oligonucleotide
  Sense strand starting at position 363 of SEQ ID NO: 1242596
accugucacgaacaaugua

SEQ ID NO: 1359663 - RNA, 19 nt, Artificial Sequence
  Description of Artificial Sequence: Synthetic oligonucleotide
  Antisense strand to SEQ ID NO: 1359662
uacauuguucgugacaggu

SEQ ID NO: 1359664 - RNA, 19 nt, Artificial Sequence
  Description of Artificial Sequence: Synthetic oligonucleotide
  Sense strand starting at position 394 of SEQ ID NO: 1242596
acgacuauuugacaaaugu

SEQ ID NO: 1359665 - RNA, 19 nt, Artificial Sequence
  Description of Artificial Sequence: Synthetic oligonucleotide
  Antisense strand to SEQ ID NO: 1359664
acauuugucaaauagucgu

SEQ ID NO: 1359666 - RNA, 19 nt, Artificial Sequence
  Description of Artificial Sequence: Synthetic oligonucleotide
  Sense strand starting at position 403 of SEQ ID NO: 1242596
ugacaaauguaucuuggca

SEQ ID NO: 1359667 - RNA, 19 nt, Artificial Sequence
  Description of Artificial Sequence: Synthetic oligonucleotide
  Antisense strand to SEQ ID NO: 1359666
ugccaagauacauuuguca

SEQ ID NO: 1359668 - RNA, 19 nt, Artificial Sequence
  Description of Artificial Sequence: Synthetic oligonucleotide
  Sense strand starting at position 490 of SEQ ID NO: 1242596
auuaucaugugcuuguaaa

SEQ ID NO: 1359669 - RNA, 19 nt, Artificial Sequence
  Description of Artificial Sequence: Synthetic oligonucleotide
  Antisense strand to SEQ ID NO: 1359668
uuuacaagcacaugauaau

SEQ ID NO: 1359670 - RNA, 19 nt, Artificial Sequence
  Description of Artificial Sequence: Synthetic oligonucleotide
  Sense strand starting at position 501 of SEQ ID NO: 1242596
cuuguaaacuguuccuuga

SEQ ID NO: 1359671 - RNA, 19 nt, Artificial Sequence
  Description of Artificial Sequence: Synthetic oligonucleotide
  Antisense strand to SEQ ID NO: 1359670
ucaaggaacaguuuacaag

SEQ ID NO: 1359672 - RNA, 19 nt, Artificial Sequence
  Description of Artificial Sequence: Synthetic oligonucleotide
  Sense strand starting at position 503 of SEQ ID NO: 1242596
uguaaacuguuccuugaaa

SEQ ID NO: 1359673 - RNA, 19 nt, Artificial Sequence
  Description of Artificial Sequence: Synthetic oligonucleotide
  Antisense strand to SEQ ID NO: 1359672
uuucaaggaacaguuuaca

SEQ ID NO: 1359674 - RNA, 19 nt, Artificial Sequence
  Description of Artificial Sequence: Synthetic oligonucleotide
  Sense strand starting at position 504 of SEQ ID NO: 1242596
guaaacuguuccuugaaac

SEQ ID NO: 1359675 - RNA, 19 nt, Artificial Sequence
  Description of Artificial Sequence: Synthetic oligonucleotide
  Antisense strand to SEQ ID NO: 1359674
guuucaaggaacaguuuac

SEQ ID NO: 1359676 - RNA, 19 nt, Artificial Sequence
  Description of Artificial Sequence: Synthetic oligonucleotide
  Sense strand starting at position 899 of SEQ ID NO: 1242596
acacuaaaucgguacagua

SEQ ID NO: 1359677 - RNA, 19 nt, Artificial Sequence
  Description of Artificial Sequence: Synthetic oligonucleotide
  Antisense strand to SEQ ID NO: 1359676
uacuguaccgauuuagugu

SEQ ID NO: 1359678 - RNA, 19 nt, Artificial Sequence
  Description of Artificial Sequence: Synthetic oligonucleotide
  Sense strand starting at position 1065 of SEQ ID NO: 1242596
ucaauaacguuucuuguua

SEQ ID NO: 1359679 - RNA, 19 nt, Artificial Sequence
  Description of Artificial Sequence: Synthetic oligonucleotide
  Antisense strand to SEQ ID NO: 1359678
uaacaagaaacguuauuga

SEQ ID NO: 1359680 - RNA, 19 nt, Artificial Sequence
  Description of Artificial Sequence: Synthetic oligonucleotide
  Sense strand starting at position 1155 of SEQ ID NO: 1242596
ggcgcaaggcgucuccaua

SEQ ID NO: 1359681 - RNA, 19 nt, Artificial Sequence
  Description of Artificial Sequence: Synthetic oligonucleotide
  Antisense strand to SEQ ID NO: 1359680
uauggagacgccuugcgcc

SEQ ID NO: 1359682 - RNA, 19 nt, Artificial Sequence
  Description of Artificial Sequence: Synthetic oligonucleotide
  Sense strand starting at position 1156 of SEQ ID NO: 1242596
gcgcaaggcgucuccauaa

SEQ ID NO: 1359683 - RNA, 19 nt, Artificial Sequence
  Description of Artificial Sequence: Synthetic oligonucleotide
  Antisense strand to SEQ ID NO: 1359682
uuauggagacgccuugcgc

SEQ ID NO: 1359684 - RNA, 19 nt, Artificial Sequence
  Description of Artificial Sequence: Synthetic oligonucleotide
  Sense strand starting at position 1286 of SEQ ID NO: 1242596
uucugaacucacugagcaa

SEQ ID NO: 1359685 - RNA, 19 nt, Artificial Sequence
  Description of Artificial Sequence: Synthetic oligonucleotide
  Antisense strand to SEQ ID NO: 1359684
uugcucagugaguucagaa

SEQ ID NO: 1359686 - RNA, 19 nt, Artificial Sequence
  Description of Artificial Sequence: Synthetic oligonucleotide
  Sense strand starting at position 1442 of SEQ ID NO: 1242596
gacagaagucaccguuguu

SEQ ID NO: 1359687 - RNA, 19 nt, Artificial Sequence
  Description of Artificial Sequence: Synthetic oligonucleotide
  Antisense strand to SEQ ID NO: 1359686
aacaacggugacuucuguc

SEQ ID NO: 1359688 - RNA, 19 nt, Artificial Sequence
  Description of Artificial Sequence: Synthetic oligonucleotide
  Sense strand starting at position 2078 of SEQ ID NO: 1242596
cgaguagagccgagucgaa

SEQ ID NO: 1359689 - RNA, 19 nt, Artificial Sequence
  Description of Artificial Sequence: Synthetic oligonucleotide
  Antisense strand to SEQ ID NO: 1359688
uucgacucggcucuacucg

SEQ ID NO: 1359690 - RNA, 19 nt, Artificial Sequence
  Description of Artificial Sequence: Synthetic oligonucleotide
  Sense strand starting at position 2209 of SEQ ID NO: 1242596
gucacccucucguuuauuu

SEQ ID NO: 1359691 - RNA, 19 nt, Artificial Sequence
  Description of Artificial Sequence: Synthetic oligonucleotide
  Antisense strand to SEQ ID NO: 1359690
aaauaaacgagagggugac

SEQ ID NO: 1359692 - RNA, 19 nt, Artificial Sequence
  Description of Artificial Sequence: Synthetic oligonucleotide
  Sense strand starting at position 2553 of SEQ ID NO: 1242596
aauuaaagucaaugugugu

SEQ ID NO: 1359693 - RNA, 19 nt, Artificial Sequence
  Description of Artificial Sequence: Synthetic oligonucleotide
  Antisense strand to SEQ ID NO: 1359692
acacacauugacuuuaauu

SEQ ID NO: 1359694 - RNA, 19 nt, Artificial Sequence
  Description of Artificial Sequence: Synthetic oligonucleotide
  Sense strand starting at position 2727 of SEQ ID NO: 1242596
gcucccuaacuaugggaua

SEQ ID NO: 1359695 - RNA, 19 nt, Artificial Sequence
  Description of Artificial Sequence: Synthetic oligonucleotide
  Antisense strand to SEQ ID NO: 1359694
uaucccauaguuagggagc

SEQ ID NO: 1359696 - RNA, 19 nt, Artificial Sequence
  Description of Artificial Sequence: Synthetic oligonucleotide
  Sense strand starting at position 2730 of SEQ ID NO: 1242596
cccuaacuaugggauaaag

SEQ ID NO: 1359697 - RNA, 19 nt, Artificial Sequence
  Description of Artificial Sequence: Synthetic oligonucleotide
  Antisense strand to SEQ ID NO: 1359696
cuuuaucccauaguuaggg

SEQ ID NO: 1359698 - RNA, 19 nt, Artificial Sequence
  Description of Artificial Sequence: Synthetic oligonucleotide
  Sense strand starting at position 3016 of SEQ ID NO: 1242596
cccuccauuccauguggua

SEQ ID NO: 1359699 - RNA, 19 nt, Artificial Sequence
  Description of Artificial Sequence: Synthetic oligonucleotide
  Antisense strand to SEQ ID NO: 1359698
uaccacauggaauggaggg

SEQ ID NO: 1359700 - RNA, 19 nt, Artificial Sequence
  Description of Artificial Sequence: Synthetic oligonucleotide
  Sense strand starting at position 3108 of SEQ ID NO: 1242596
cagauaguccaaugaaguu

SEQ ID NO: 1359701 - RNA, 19 nt, Artificial Sequence
  Description of Artificial Sequence: Synthetic oligonucleotide
  Antisense strand to SEQ ID NO: 1359700
aacuucauuggacuaucug

SEQ ID NO: 1359702 - RNA, 19 nt, Artificial Sequence
  Description of Artificial Sequence: Synthetic oligonucleotide
  Sense strand starting at position 3142 of SEQ ID NO: 1242596
ccaguuggccauuggaaau

SEQ ID NO: 1359703 - RNA, 19 nt, Artificial Sequence
  Description of Artificial Sequence: Synthetic oligonucleotide
  Antisense strand to SEQ ID NO: 1359702
auuuccaauggccaacugg

SEQ ID NO: 1359704 - RNA, 19 nt, Artificial Sequence
  Description of Artificial Sequence: Synthetic oligonucleotide
  Sense strand starting at position 3155 of SEQ ID NO: 1242596
ggaaauguauugcucagac

SEQ ID NO: 1359705 - RNA, 19 nt, Artificial Sequence
  Description of Artificial Sequence: Synthetic oligonucleotide
  Antisense strand to SEQ ID NO: 1359704
gucugagcaauacauuucc

SEQ ID NO: 1359706 - RNA, 19 nt, Artificial Sequence
  Description of Artificial Sequence: Synthetic oligonucleotide
  Sense strand starting at position 3285 of SEQ ID NO: 1242596
ugaccaucagcuugaauua

SEQ ID NO: 1359707 - RNA, 19 nt, Artificial Sequence
  Description of Artificial Sequence: Synthetic oligonucleotide
  Antisense strand to SEQ ID NO: 1359706
uaauucaagcugaugguca

SEQ ID NO: 1359708 - RNA, 19 nt, Artificial Sequence
  Description of Artificial Sequence: Synthetic oligonucleotide
  Sense strand starting at position 3326 of SEQ ID NO: 1242596
aacagaaauugagggaaau

SEQ ID NO: 1359709 - RNA, 19 nt, Artificial Sequence
  Description of Artificial Sequence: Synthetic oligonucleotide
  Antisense strand to SEQ ID NO: 1359708
auuucccucaauuucuguu

SEQ ID NO: 1359710 - RNA, 19 nt, Artificial Sequence
  Description of Artificial Sequence: Synthetic oligonucleotide
  Sense strand starting at position 3346 of SEQ ID NO: 1242596
aguuguaagcaucaagaaa

SEQ ID NO: 1359711 - RNA, 19 nt, Artificial Sequence
  Description of Artificial Sequence: Synthetic oligonucleotide
  Antisense strand to SEQ ID NO: 1359710
uuucuugaugcuuacaacu

SEQ ID NO: 1359712 - RNA, 19 nt, Artificial Sequence
  Description of Artificial Sequence: Synthetic oligonucleotide
  Sense strand starting at position 3367 of SEQ ID NO: 1242596
cuaagcaauuaggaagaaa

SEQ ID NO: 1359713 - RNA, 19 nt, Artificial Sequence
  Description of Artificial Sequence: Synthetic oligonucleotide
  Antisense strand to SEQ ID NO: 1359712
uuucuuccuaauugcuuag

SEQ ID NO: 1359714 - RNA, 19 nt, Artificial Sequence
  Description of Artificial Sequence: Synthetic oligonucleotide
  Sense strand starting at position 3903 of SEQ ID NO: 1242596
aagauuguccacugaagcu

SEQ ID NO: 1359715 - RNA, 19 nt, Artificial Sequence
  Description of Artificial Sequence: Synthetic oligonucleotide
  Antisense strand to SEQ ID NO: 1359714
agcuucaguggacaaucuu

SEQ ID NO: 1359716 - RNA, 19 nt, Artificial Sequence
  Description of Artificial Sequence: Synthetic oligonucleotide
  Sense strand starting at position 3924 of SEQ ID NO: 1242596
ccuggagagcucugccuua

SEQ ID NO: 1359717 - RNA, 19 nt, Artificial Sequence
  Description of Artificial Sequence: Synthetic oligonucleotide
  Antisense strand to SEQ ID NO: 1359716
uaaggcagagcucuccagg

SEQ ID NO: 1359718 - RNA, 19 nt, Artificial Sequence
  Description of Artificial Sequence: Synthetic oligonucleotide
  Sense strand starting at position 3948 of SEQ ID NO: 1242596
agagcaagaguguguaauu

SEQ ID NO: 1359719 - RNA, 19 nt, Artificial Sequence
  Description of Artificial Sequence: Synthetic oligonucleotide
  Antisense strand to SEQ ID NO: 1359718
aauuacacacucuugcucu

SEQ ID NO: 1359720 - RNA, 19 nt, Artificial Sequence
  Description of Artificial Sequence: Synthetic oligonucleotide
  Sense strand starting at position 3949 of SEQ ID NO: 1242596
gagcaagaguguguaauua

SEQ ID NO: 1359721 - RNA, 19 nt, Artificial Sequence
  Description of Artificial Sequence: Synthetic oligonucleotide
  Antisense strand to SEQ ID NO: 1359720
uaauuacacacucuugcuc

SEQ ID NO: 1359722 - RNA, 19 nt, Artificial Sequence
  Description of Artificial Sequence: Synthetic oligonucleotide
  Sense strand starting at position 3953 of SEQ ID NO: 1242596
aagaguguguaauuaaacu

SEQ ID NO: 1359723 - RNA, 19 nt, Artificial Sequence
  Description of Artificial Sequence: Synthetic oligonucleotide
  Antisense strand to SEQ ID NO: 1359722
aguuuaauuacacacucuu

SEQ ID NO: 1359724 - RNA, 19 nt, Artificial Sequence
  Description of Artificial Sequence: Synthetic oligonucleotide
  Sense strand starting at position 3979 of SEQ ID NO: 1242596
gagaaagacucugaaaugu

SEQ ID NO: 1359725 - RNA, 19 nt, Artificial Sequence
  Description of Artificial Sequence: Synthetic oligonucleotide
  Antisense strand to SEQ ID NO: 1359724
acauuucagagucuuucuc

SEQ ID NO: 1359726 - RNA, 19 nt, Artificial Sequence
  Description of Artificial Sequence: Synthetic oligonucleotide
  Sense strand starting at position 224 of SEQ ID NO: 1242597
cggcucucaccuugaagga

SEQ ID NO: 1359727 - RNA, 19 nt, Artificial Sequence
  Description of Artificial Sequence: Synthetic oligonucleotide
  Antisense strand to SEQ ID NO: 1359726
uccuucaaggugagagccg

SEQ ID NO: 1359728 - RNA, 19 nt, Artificial Sequence
  Description of Artificial Sequence: Synthetic oligonucleotide
  Sense strand starting at position 479 of SEQ ID NO: 1242597
ugcagcauccugcgaguua

SEQ ID NO: 1359729 - RNA, 19 nt, Artificial Sequence
  Description of Artificial Sequence: Synthetic oligonucleotide
  Antisense strand to SEQ ID NO: 1359728
uaacucgcaggaugcugca

SEQ ID NO: 1359730 - RNA, 19 nt, Artificial Sequence
  Description of Artificial Sequence: Synthetic oligonucleotide
  Sense strand starting at position 488 of SEQ ID NO: 1242597
cugcgaguuaccugugaga

SEQ ID NO: 1359731 - RNA, 19 nt, Artificial Sequence
  Description of Artificial Sequence: Synthetic oligonucleotide
  Antisense strand to SEQ ID NO: 1359730
ucucacagguaacucgcag

SEQ ID NO: 1359732 - RNA, 19 nt, Artificial Sequence
  Description of Artificial Sequence: Synthetic oligonucleotide
  Sense strand starting at position 490 of SEQ ID NO: 1242597
gcgaguuaccugugagauc

SEQ ID NO: 1359733 - RNA, 19 nt, Artificial Sequence
  Description of Artificial Sequence: Synthetic oligonucleotide
  Antisense strand to SEQ ID NO: 1359732
gaucucacagguaacucgc

SEQ ID NO: 1359734 - RNA, 19 nt, Artificial Sequence
  Description of Artificial Sequence: Synthetic oligonucleotide
  Sense strand starting at position 573 of SEQ ID NO: 1242597
aggcuugggucugaggaga

SEQ ID NO: 1359735 - RNA, 19 nt, Artificial Sequence
  Description of Artificial Sequence: Synthetic oligonucleotide
  Antisense strand to SEQ ID NO: 1359734
ucuccucagacccaagccu

SEQ ID NO: 1359736 - RNA, 19 nt, Artificial Sequence
  Description of Artificial Sequence: Synthetic oligonucleotide
  Sense strand starting at position 2825 of SEQ ID NO: 1242597
aaggccugcgucuggauaa

SEQ ID NO: 1359737 - RNA, 19 nt, Artificial Sequence
  Description of Artificial Sequence: Synthetic oligonucleotide
  Antisense strand to SEQ ID NO: 1359736
uuauccagacgcaggccuu

SEQ ID NO: 1359738 - RNA, 19 nt, Artificial Sequence
  Description of Artificial Sequence: Synthetic oligonucleotide
  Sense strand starting at position 2869 of SEQ ID NO: 1242597
ugagucccuuucuuagaca

SEQ ID NO: 1359739 - RNA, 19 nt, Artificial Sequence
  Description of Artificial Sequence: Synthetic oligonucleotide
  Antisense strand to SEQ ID NO: 1359738
ugucuaagaaagggacuca

SEQ ID NO: 1359740 - RNA, 19 nt, Artificial Sequence
  Description of Artificial Sequence: Synthetic oligonucleotide
  Sense strand starting at position 2940 of SEQ ID NO: 1242597
cuccucaauugagagaaga

SEQ ID NO: 1359741 - RNA, 19 nt, Artificial Sequence
  Description of Artificial Sequence: Synthetic oligonucleotide
  Antisense strand to SEQ ID NO: 1359740
ucuucucucaauugaggag

SEQ ID NO: 1359742 - RNA, 19 nt, Artificial Sequence
  Description of Artificial Sequence: Synthetic oligonucleotide
  Sense strand starting at position 3169 of SEQ ID NO: 1242597
gauagaaggucuuggaggu

SEQ ID NO: 1359743 - RNA, 19 nt, Artificial Sequence
  Description of Artificial Sequence: Synthetic oligonucleotide
  Antisense strand to SEQ ID NO: 1359742
accuccaagaccuucuauc

SEQ ID NO: 1359744 - RNA, 19 nt, Artificial Sequence
  Description of Artificial Sequence: Synthetic oligonucleotide
  Sense strand starting at position 3173 of SEQ ID NO: 1242597
gaaggucuuggaggugagu

SEQ ID NO: 1359745 - RNA, 19 nt, Artificial Sequence
  Description of Artificial Sequence: Synthetic oligonucleotide
  Antisense strand to SEQ ID NO: 1359744
acucaccuccaagaccuuc

SEQ ID NO: 1359746 - RNA, 19 nt, Artificial Sequence
  Description of Artificial Sequence: Synthetic oligonucleotide
  Sense strand starting at position 3184 of SEQ ID NO: 1242597
aggugaguuguccagguuc

SEQ ID NO: 1359747 - RNA, 19 nt, Artificial Sequence
  Description of Artificial Sequence: Synthetic oligonucleotide
  Antisense strand to SEQ ID NO: 1359746
gaaccuggacaacucaccu

SEQ ID NO: 1359748 - RNA, 19 nt, Artificial Sequence
  Description of Artificial Sequence: Synthetic oligonucleotide
  Sense strand starting at position 3358 of SEQ ID NO: 1242597
uccagagccucuguaauua

SEQ ID NO: 1359749 - RNA, 19 nt, Artificial Sequence
  Description of Artificial Sequence: Synthetic oligonucleotide
  Antisense strand to SEQ ID NO: 1359748
uaauuacagaggcucugga

SEQ ID NO: 1359750 - RNA, 19 nt, Artificial Sequence
  Description of Artificial Sequence: Synthetic oligonucleotide
  Sense strand starting at position 3362 of SEQ ID NO: 1242597
gagccucuguaauuaggau

SEQ ID NO: 1359751 - RNA, 19 nt, Artificial Sequence
  Description of Artificial Sequence: Synthetic oligonucleotide
  Antisense strand to SEQ ID NO: 1359750
auccuaauuacagaggcuc

SEQ ID NO: 1359752 - RNA, 19 nt, Artificial Sequence
  Description of Artificial Sequence: Synthetic oligonucleotide
  Sense strand starting at position 3482 of SEQ ID NO: 1242597
aguggaaauuucugucuug

SEQ ID NO: 1359753 - RNA, 19 nt, Artificial Sequence
  Description of Artificial Sequence: Synthetic oligonucleotide
  Antisense strand to SEQ ID NO: 1359752
caagacagaaauuuccacu

SEQ ID NO: 1359754 - RNA, 19 nt, Artificial Sequence
  Description of Artificial Sequence: Synthetic oligonucleotide
  Sense strand starting at position 3483 of SEQ ID NO: 1242597
guggaaauuucugucuugu

SEQ ID NO: 1359755 - RNA, 19 nt, Artificial Sequence
  Description of Artificial Sequence: Synthetic oligonucleotide
  Antisense strand to SEQ ID NO: 1359754
acaagacagaaauuuccac

SEQ ID NO: 1359756 - RNA, 19 nt, Artificial Sequence
  Description of Artificial Sequence: Synthetic oligonucleotide
  Sense strand starting at position 3561 of SEQ ID NO: 1242597
ccugcuguuccguuucuua

SEQ ID NO: 1359757 - RNA, 19 nt, Artificial Sequence
  Description of Artificial Sequence: Synthetic oligonucleotide
  Antisense strand to SEQ ID NO: 1359756
uaagaaacggaacagcagg

SEQ ID NO: 1359758 - RNA, 19 nt, Artificial Sequence
  Description of Artificial Sequence: Synthetic oligonucleotide
  Sense strand starting at position 3568 of SEQ ID NO: 1242597
uuccguuucuuaugcccaa

SEQ ID NO: 1359759 - RNA, 19 nt, Artificial Sequence
  Description of Artificial Sequence: Synthetic oligonucleotide
  Antisense strand to SEQ ID NO: 1359758
uugggcauaagaaacggaa

SEQ ID NO: 1359760 - RNA, 19 nt, Artificial Sequence
  Description of Artificial Sequence: Synthetic oligonucleotide
  Sense strand starting at position 3898 of SEQ ID NO: 1242597
guacucugccuccaagaaa

SEQ ID NO: 1359761 - RNA, 19 nt, Artificial Sequence
  Description of Artificial Sequence: Synthetic oligonucleotide
  Antisense strand to SEQ ID NO: 1359760
uuucuuggaggcagaguac

SEQ ID NO: 1359762 - RNA, 19 nt, Artificial Sequence
  Description of Artificial Sequence: Synthetic oligonucleotide
  Sense strand starting at position 41 of SEQ ID NO: 1242598
accaaauaacaguguucuu

SEQ ID NO: 1359763 - RNA, 19 nt, Artificial Sequence
  Description of Artificial Sequence: Synthetic oligonucleotide
  Antisense strand to SEQ ID NO: 1359762
aagaacacuguuauuuggu

SEQ ID NO: 1359764 - RNA, 19 nt, Artificial Sequence
  Description of Artificial Sequence: Synthetic oligonucleotide
  Sense strand starting at position 775 of SEQ ID NO: 1242598
ugaaucuaugcuuauuaga

SEQ ID NO: 1359765 - RNA, 19 nt, Artificial Sequence
  Description of Artificial Sequence: Synthetic oligonucleotide
  Antisense strand to SEQ ID NO: 1359764
ucuaauaagcauagauuca

SEQ ID NO: 1359766 - RNA, 19 nt, Artificial Sequence
  Description of Artificial Sequence: Synthetic oligonucleotide
  Sense strand starting at position 835 of SEQ ID NO: 1242598
gcaguaagccuuuacuuaa

SEQ ID NO: 1359767 - RNA, 19 nt, Artificial Sequence
  Description of Artificial Sequence: Synthetic oligonucleotide
  Antisense strand to SEQ ID NO: 1359766
uuaaguaaaggcuuacugc

SEQ ID NO: 1359768 - RNA, 19 nt, Artificial Sequence
  Description of Artificial Sequence: Synthetic oligonucleotide
  Sense strand starting at position 838 of SEQ ID NO: 1242598
guaagccuuuacuuaagua

SEQ ID NO: 1359769 - RNA, 19 nt, Artificial Sequence
  Description of Artificial Sequence: Synthetic oligonucleotide
  Antisense strand to SEQ ID NO: 1359768
uacuuaaguaaaggcuuac

SEQ ID NO: 1359770 - RNA, 19 nt, Artificial Sequence
  Description of Artificial Sequence: Synthetic oligonucleotide
  Sense strand starting at position 854 of SEQ ID NO: 1242598
guauuacauugugcuacau

SEQ ID NO: 1359771 - RNA, 19 nt, Artificial Sequence
  Description of Artificial Sequence: Synthetic oligonucleotide
  Antisense strand to SEQ ID NO: 1359770
auguagcacaauguaauac

SEQ ID NO: 1359772 - RNA, 19 nt, Artificial Sequence
  Description of Artificial Sequence: Synthetic oligonucleotide
  Sense strand starting at position 1187 of SEQ ID NO: 1242598
augacugacugaucuagua

SEQ ID NO: 1359773 - RNA, 19 nt, Artificial Sequence
  Description of Artificial Sequence: Synthetic oligonucleotide
  Antisense strand to SEQ ID NO: 1359772
uacuagaucagucagucau

SEQ ID NO: 1359774 - RNA, 19 nt, Artificial Sequence
  Description of Artificial Sequence: Synthetic oligonucleotide
  Sense strand starting at position 1195 of SEQ ID NO: 1242598
cugaucuaguaaguccaaa

SEQ ID NO: 1359775 - RNA, 19 nt, Artificial Sequence
  Description of Artificial Sequence: Synthetic oligonucleotide
  Antisense strand to SEQ ID NO: 1359774
uuuggacuuacuagaucag

SEQ ID NO: 1359776 - RNA, 19 nt, Artificial Sequence
  Description of Artificial Sequence: Synthetic oligonucleotide
  Sense strand starting at position 1256 of SEQ ID NO: 1242598
augucaugacuccacuuua

SEQ ID NO: 1359777 - RNA, 19 nt, Artificial Sequence
  Description of Artificial Sequence: Synthetic oligonucleotide
  Antisense strand to SEQ ID NO: 1359776
uaaaguggagucaugacau

SEQ ID NO: 1359778 - RNA, 19 nt, Artificial Sequence
  Description of Artificial Sequence: Synthetic oligonucleotide
  Sense strand starting at position 2257 of SEQ ID NO: 1242598
cucgcaacucgagaauaaa

SEQ ID NO: 1359779 - RNA, 19 nt, Artificial Sequence
  Description of Artificial Sequence: Synthetic oligonucleotide
  Antisense strand to SEQ ID NO: 1359778
uuuauucucgaguugcgag

SEQ ID NO: 1359780 - RNA, 19 nt, Artificial Sequence
  Description of Artificial Sequence: Synthetic oligonucleotide
  Sense strand starting at position 2308 of SEQ ID NO: 1242598
guaguuuaaggcguguuua

SEQ ID NO: 1359781 - RNA, 19 nt, Artificial Sequence
  Description of Artificial Sequence: Synthetic oligonucleotide
  Antisense strand to SEQ ID NO: 1359780
uaaacacgccuuaaacuac

SEQ ID NO: 1359782 - RNA, 19 nt, Artificial Sequence
  Description of Artificial Sequence: Synthetic oligonucleotide
  Sense strand starting at position 2390 of SEQ ID NO: 1242598
gcugacgucugauuucaag

SEQ ID NO: 1359783 - RNA, 19 nt, Artificial Sequence
  Description of Artificial Sequence: Synthetic oligonucleotide
  Antisense strand to SEQ ID NO: 1359782
cuugaaaucagacgucagc

SEQ ID NO: 1359784 - RNA, 19 nt, Artificial Sequence
  Description of Artificial Sequence: Synthetic oligonucleotide
  Sense strand starting at position 2444 of SEQ ID NO: 1242598
gcaagaagucgauguccug

SEQ ID NO: 1359785 - RNA, 19 nt, Artificial Sequence
  Description of Artificial Sequence: Synthetic oligonucleotide
  Antisense strand to SEQ ID NO: 1359784
caggacaucgacuucuugc

SEQ ID NO: 1359786 - RNA, 19 nt, Artificial Sequence
  Description of Artificial Sequence: Synthetic oligonucleotide
  Sense strand starting at position 2447 of SEQ ID NO: 1242598
agaagucgauguccuguaa

SEQ ID NO: 1359787 - RNA, 19 nt, Artificial Sequence
  Description of Artificial Sequence: Synthetic oligonucleotide
  Antisense strand to SEQ ID NO: 1359786
uuacaggacaucgacuucu

SEQ ID NO: 1359788 - RNA, 19 nt, Artificial Sequence
  Description of Artificial Sequence: Synthetic oligonucleotide
  Sense strand starting at position 2456 of SEQ ID NO: 1242598
uguccuguaauuuacguua

SEQ ID NO: 1359789 - RNA, 19 nt, Artificial Sequence
  Description of Artificial Sequence: Synthetic oligonucleotide
  Antisense strand to SEQ ID NO: 1359788
uaacguaaauuacaggaca

SEQ ID NO: 1359790 - RNA, 19 nt, Artificial Sequence
  Description of Artificial Sequence: Synthetic oligonucleotide
  Sense strand starting at position 2489 of SEQ ID NO: 1242598
uaaagauuacucggcagua

SEQ ID NO: 1359791 - RNA, 19 nt, Artificial Sequence
  Description of Artificial Sequence: Synthetic oligonucleotide
  Antisense strand to SEQ ID NO: 1359790
uacugccgaguaaucuuua

SEQ ID NO: 1359792 - RNA, 19 nt, Artificial Sequence
  Description of Artificial Sequence: Synthetic oligonucleotide
  Sense strand starting at position 2490 of SEQ ID NO: 1242598
aaagauuacucggcaguaa

SEQ ID NO: 1359793 - RNA, 19 nt, Artificial Sequence
  Description of Artificial Sequence: Synthetic oligonucleotide
  Antisense strand to SEQ ID NO: 1359792
uuacugccgaguaaucuuu

SEQ ID NO: 1359794 - RNA, 19 nt, Artificial Sequence
  Description of Artificial Sequence: Synthetic oligonucleotide
  Sense strand starting at position 2491 of SEQ ID NO: 1242598
aagauuacucggcaguaau

SEQ ID NO: 1359795 - RNA, 19 nt, Artificial Sequence
  Description of Artificial Sequence: Synthetic oligonucleotide
  Antisense strand to SEQ ID NO: 1359794
auuacugccgaguaaucuu

SEQ ID NO: 1359796 - RNA, 19 nt, Artificial Sequence
  Description of Artificial Sequence: Synthetic oligonucleotide
  Sense strand starting at position 2504 of SEQ ID NO: 1242598
aguaauugguuucuugacu

SEQ ID NO: 1359797 - RNA, 19 nt, Artificial Sequence
  Description of Artificial Sequence: Synthetic oligonucleotide
  Antisense strand to SEQ ID NO: 1359796
agucaagaaaccaauuacu

SEQ ID NO: 1359798 - RNA, 19 nt, Artificial Sequence
  Description of Artificial Sequence: Synthetic oligonucleotide
  Sense strand starting at position 2505 of SEQ ID NO: 1242598
guaauugguuucuugacua

SEQ ID NO: 1359799 - RNA, 19 nt, Artificial Sequence
  Description of Artificial Sequence: Synthetic oligonucleotide
  Antisense strand to SEQ ID NO: 1359798
uagucaagaaaccaauuac

SEQ ID NO: 1359800 - RNA, 19 nt, Artificial Sequence
  Description of Artificial Sequence: Synthetic oligonucleotide
  Sense strand starting at position 2509 of SEQ ID NO: 1242598
uugguuucuugacuaauua

SEQ ID NO: 1359801 - RNA, 19 nt, Artificial Sequence
  Description of Artificial Sequence: Synthetic oligonucleotide
  Antisense strand to SEQ ID NO: 1359800
uaauuagucaagaaaccaa

SEQ ID NO: 1359802 - RNA, 19 nt, Artificial Sequence
  Description of Artificial Sequence: Synthetic oligonucleotide
  Sense strand starting at position 2510 of SEQ ID NO: 1242598
ugguuucuugacuaauuau

SEQ ID NO: 1359803 - RNA, 19 nt, Artificial Sequence
  Description of Artificial Sequence: Synthetic oligonucleotide
  Antisense strand to SEQ ID NO: 1359802
auaauuagucaagaaacca

SEQ ID NO: 1359804 - RNA, 19 nt, Artificial Sequence
  Description of Artificial Sequence: Synthetic oligonucleotide
  Sense strand starting at position 2622 of SEQ ID NO: 1242598
aaaggauucguuugagcug

SEQ ID NO: 1359805 - RNA, 19 nt, Artificial Sequence
  Description of Artificial Sequence: Synthetic oligonucleotide
  Antisense strand to SEQ ID NO: 1359804
cagcucaaacgaauccuuu

SEQ ID NO: 1359806 - RNA, 19 nt, Artificial Sequence
  Description of Artificial Sequence: Synthetic oligonucleotide
  Sense strand starting at position 2625 of SEQ ID NO: 1242598
ggauucguuugagcugauu

SEQ ID NO: 1359807 - RNA, 19 nt, Artificial Sequence
  Description of Artificial Sequence: Synthetic oligonucleotide
  Antisense strand to SEQ ID NO: 1359806
aaucagcucaaacgaaucc

SEQ ID NO: 1359808 - RNA, 19 nt, Artificial Sequence
  Description of Artificial Sequence: Synthetic oligonucleotide
  Sense strand starting at position 2687 of SEQ ID NO: 1242598
gauaccuuauggccaaagu

SEQ ID NO: 1359809 - RNA, 19 nt, Artificial Sequence
  Description of Artificial Sequence: Synthetic oligonucleotide
  Antisense strand to SEQ ID NO: 1359808
acuuuggccauaagguauc

SEQ ID NO: 1359810 - RNA, 19 nt, Artificial Sequence
  Description of Artificial Sequence: Synthetic oligonucleotide
  Sense strand starting at position 2700 of SEQ ID NO: 1242598
caaagugugguauaugacu

SEQ ID NO: 1359811 - RNA, 19 nt, Artificial Sequence
  Description of Artificial Sequence: Synthetic oligonucleotide
  Antisense strand to SEQ ID NO: 1359810
agucauauaccacacuuug

SEQ ID NO: 1359812 - RNA, 19 nt, Artificial Sequence
  Description of Artificial Sequence: Synthetic oligonucleotide
  Sense strand starting at position 2766 of SEQ ID NO: 1242598
gucagaauggguuagcaga

SEQ ID NO: 1359813 - RNA, 19 nt, Artificial Sequence
  Description of Artificial Sequence: Synthetic oligonucleotide
  Antisense strand to SEQ ID NO: 1359812
ucugcuaacccauucugac

SEQ ID NO: 1359814 - RNA, 19 nt, Artificial Sequence
  Description of Artificial Sequence: Synthetic oligonucleotide
  Sense strand starting at position 2842 of SEQ ID NO: 1242598
gcacgaucucggcuggcua

SEQ ID NO: 1359815 - RNA, 19 nt, Artificial Sequence
  Description of Artificial Sequence: Synthetic oligonucleotide
  Antisense strand to SEQ ID NO: 1359814
uagccagccgagaucgugc

SEQ ID NO: 1359816 - RNA, 19 nt, Artificial Sequence
  Description of Artificial Sequence: Synthetic oligonucleotide
  Sense strand starting at position 3108 of SEQ ID NO: 1242598
aauagauauccgugggauc

SEQ ID NO: 1359817 - RNA, 19 nt, Artificial Sequence
  Description of Artificial Sequence: Synthetic oligonucleotide
  Antisense strand to SEQ ID NO: 1359816
gaucccacggauaucuauu

SEQ ID NO: 1359818 - RNA, 19 nt, Artificial Sequence
  Description of Artificial Sequence: Synthetic oligonucleotide
  Sense strand starting at position 3109 of SEQ ID NO: 1242598
auagauauccgugggaucu

SEQ ID NO: 1359819 - RNA, 19 nt, Artificial Sequence
  Description of Artificial Sequence: Synthetic oligonucleotide
  Antisense strand to SEQ ID NO: 1359818
agaucccacggauaucuau

SEQ ID NO: 1359820 - RNA, 19 nt, Artificial Sequence
  Description of Artificial Sequence: Synthetic oligonucleotide
  Sense strand starting at position 3110 of SEQ ID NO: 1242598
uagauauccgugggaucug

SEQ ID NO: 1359821 - RNA, 19 nt, Artificial Sequence
  Description of Artificial Sequence: Synthetic oligonucleotide
  Antisense strand to SEQ ID NO: 1359820
cagaucccacggauaucua

SEQ ID NO: 1359822 - RNA, 19 nt, Artificial Sequence
  Description of Artificial Sequence: Synthetic oligonucleotide
  Sense strand starting at position 3115 of SEQ ID NO: 1242598
auccgugggaucugaaaca

SEQ ID NO: 1359823 - RNA, 19 nt, Artificial Sequence
  Description of Artificial Sequence: Synthetic oligonucleotide
  Antisense strand to SEQ ID NO: 1359822
uguuucagaucccacggau

SEQ ID NO: 1359824 - RNA, 19 nt, Artificial Sequence
  Description of Artificial Sequence: Synthetic oligonucleotide
  Sense strand starting at position 3159 of SEQ ID NO: 1242598
gugugacagcugugaccaa

SEQ ID NO: 1359825 - RNA, 19 nt, Artificial Sequence
  Description of Artificial Sequence: Synthetic oligonucleotide
  Antisense strand to SEQ ID NO: 1359824
uuggucacagcugucacac

SEQ ID NO: 1359826 - RNA, 19 nt, Artificial Sequence
  Description of Artificial Sequence: Synthetic oligonucleotide
  Sense strand starting at position 3168 of SEQ ID NO: 1242598
cugugaccaaggugacaua

SEQ ID NO: 1359827 - RNA, 19 nt, Artificial Sequence
  Description of Artificial Sequence: Synthetic oligonucleotide
  Antisense strand to SEQ ID NO: 1359826
uaugucaccuuggucacag

SEQ ID NO: 1359828 - RNA, 19 nt, Artificial Sequence
  Description of Artificial Sequence: Synthetic oligonucleotide
  Sense strand starting at position 3171 of SEQ ID NO: 1242598
ugaccaaggugacauaaau

SEQ ID NO: 1359829 - RNA, 19 nt, Artificial Sequence
  Description of Artificial Sequence: Synthetic oligonucleotide
  Antisense strand to SEQ ID NO: 1359828
auuuaugucaccuugguca

SEQ ID NO: 1359830 - RNA, 19 nt, Artificial Sequence
  Description of Artificial Sequence: Synthetic oligonucleotide
  Sense strand starting at position 3482 of SEQ ID NO: 1242598
cugcgcucggccuauuuau

SEQ ID NO: 1359831 - RNA, 19 nt, Artificial Sequence
  Description of Artificial Sequence: Synthetic oligonucleotide
  Antisense strand to SEQ ID NO: 1359830
auaaauaggccgagcgcag

SEQ ID NO: 1359832 - RNA, 19 nt, Artificial Sequence
  Description of Artificial Sequence: Synthetic oligonucleotide
  Sense strand starting at position 3804 of SEQ ID NO: 1242598
gaguuacucuguuuagcac

SEQ ID NO: 1359833 - RNA, 19 nt, Artificial Sequence
  Description of Artificial Sequence: Synthetic oligonucleotide
  Antisense strand to SEQ ID NO: 1359832
gugcuaaacagaguaacuc

SEQ ID NO: 1359834 - RNA, 19 nt, Artificial Sequence
  Description of Artificial Sequence: Synthetic oligonucleotide
  Sense strand starting at position 3852 of SEQ ID NO: 1242598
ugcugaauuacuggacuga

SEQ ID NO: 1359835 - RNA, 19 nt, Artificial Sequence
  Description of Artificial Sequence: Synthetic oligonucleotide
  Antisense strand to SEQ ID NO: 1359834
ucaguccaguaauucagca

SEQ ID NO: 1359836 - RNA, 19 nt, Artificial Sequence
  Description of Artificial Sequence: Synthetic oligonucleotide
  Sense strand starting at position 3856 of SEQ ID NO: 1242598
gaauuacuggacugaguug

SEQ ID NO: 1359837 - RNA, 19 nt, Artificial Sequence
  Description of Artificial Sequence: Synthetic oligonucleotide
  Antisense strand to SEQ ID NO: 1359836
caacucaguccaguaauuc

SEQ ID NO: 1359838 - RNA, 19 nt, Artificial Sequence
  Description of Artificial Sequence: Synthetic oligonucleotide
  Sense strand starting at position 3865 of SEQ ID NO: 1242598
gacugaguuguuuagucaa

SEQ ID NO: 1359839 - RNA, 19 nt, Artificial Sequence
  Description of Artificial Sequence: Synthetic oligonucleotide
  Antisense strand to SEQ ID NO: 1359838
uugacuaaacaacucaguc

SEQ ID NO: 1359840 - RNA, 19 nt, Artificial Sequence
  Description of Artificial Sequence: Synthetic oligonucleotide
  Sense strand starting at position 3982 of SEQ ID NO: 1242598
uuccuaagucauugaugga

SEQ ID NO: 1359841 - RNA, 19 nt, Artificial Sequence
  Description of Artificial Sequence: Synthetic oligonucleotide
  Antisense strand to SEQ ID NO: 1359840
uccaucaaugacuuaggaa

SEQ ID NO: 1359842 - RNA, 19 nt, Artificial Sequence
  Description of Artificial Sequence: Synthetic oligonucleotide
  Sense strand starting at position 12 of SEQ ID NO: 1242599
uuagaauugauccguuguu

SEQ ID NO: 1359843 - RNA, 19 nt, Artificial Sequence
  Description of Artificial Sequence: Synthetic oligonucleotide
  Antisense strand to SEQ ID NO: 1359842
aacaacggaucaauucuaa

SEQ ID NO: 1359844 - RNA, 19 nt, Artificial Sequence
  Description of Artificial Sequence: Synthetic oligonucleotide
  Sense strand starting at position 13 of SEQ ID NO: 1242599
uagaauugauccguuguuu

SEQ ID NO: 1359845 - RNA, 19 nt, Artificial Sequence
  Description of Artificial Sequence: Synthetic oligonucleotide
  Antisense strand to SEQ ID NO: 1359844
aaacaacggaucaauucua

SEQ ID NO: 1359846 - RNA, 19 nt, Artificial Sequence
  Description of Artificial Sequence: Synthetic oligonucleotide
  Sense strand starting at position 107 of SEQ ID NO: 1242599
uagcucuuuguguaaugga

SEQ ID NO: 1359847 - RNA, 19 nt, Artificial Sequence
  Description of Artificial Sequence: Synthetic oligonucleotide
  Antisense strand to SEQ ID NO: 1359846
uccauuacacaaagagcua

SEQ ID NO: 1359848 - RNA, 19 nt, Artificial Sequence
  Description of Artificial Sequence: Synthetic oligonucleotide
  Sense strand starting at position 481 of SEQ ID NO: 1242599
gagaccuugucucuuugua

SEQ ID NO: 1359849 - RNA, 19 nt, Artificial Sequence
  Description of Artificial Sequence: Synthetic oligonucleotide
  Antisense strand to SEQ ID NO: 1359848
uacaaagagacaaggucuc

SEQ ID NO: 1359850 - RNA, 19 nt, Artificial Sequence
  Description of Artificial Sequence: Synthetic oligonucleotide
  Sense strand starting at position 583 of SEQ ID NO: 1242599
gcacuagugugaucucaau

SEQ ID NO: 1359851 - RNA, 19 nt, Artificial Sequence
  Description of Artificial Sequence: Synthetic oligonucleotide
  Antisense strand to SEQ ID NO: 1359850
auugagaucacacuagugc

SEQ ID NO: 1359852 - RNA, 19 nt, Artificial Sequence
  Description of Artificial Sequence: Synthetic oligonucleotide
  Sense strand starting at position 655 of SEQ ID NO: 1242599
gggcacucugcugagcauu

SEQ ID NO: 1359853 - RNA, 19 nt, Artificial Sequence
  Description of Artificial Sequence: Synthetic oligonucleotide
  Antisense strand to SEQ ID NO: 1359852
aaugcucagcagagugccc

SEQ ID NO: 1359854 - RNA, 19 nt, Artificial Sequence
  Description of Artificial Sequence: Synthetic oligonucleotide
  Sense strand starting at position 762 of SEQ ID NO: 1242599
gagguuaacugaucugcau

SEQ ID NO: 1359855 - RNA, 19 nt, Artificial Sequence
  Description of Artificial Sequence: Synthetic oligonucleotide
  Antisense strand to SEQ ID NO: 1359854
augcagaucaguuaaccuc

SEQ ID NO: 1359856 - RNA, 19 nt, Artificial Sequence
  Description of Artificial Sequence: Synthetic oligonucleotide
  Sense strand starting at position 820 of SEQ ID NO: 1242599
uuauauugcucugcuggaa

SEQ ID NO: 1359857 - RNA, 19 nt, Artificial Sequence
  Description of Artificial Sequence: Synthetic oligonucleotide
  Antisense strand to SEQ ID NO: 1359856
uuccagcagagcaauauaa

SEQ ID NO: 1359858 - RNA, 19 nt, Artificial Sequence
  Description of Artificial Sequence: Synthetic oligonucleotide
  Sense strand starting at position 823 of SEQ ID NO: 1242599
uauugcucugcuggaagga

SEQ ID NO: 1359859 - RNA, 19 nt, Artificial Sequence
  Description of Artificial Sequence: Synthetic oligonucleotide
  Antisense strand to SEQ ID NO: 1359858
uccuuccagcagagcaaua

SEQ ID NO: 1359860 - RNA, 19 nt, Artificial Sequence
  Description of Artificial Sequence: Synthetic oligonucleotide
  Sense strand starting at position 855 of SEQ ID NO: 1242599
ggagcucuagcccaggauu

SEQ ID NO: 1359861 - RNA, 19 nt, Artificial Sequence
  Description of Artificial Sequence: Synthetic oligonucleotide
  Antisense strand to SEQ ID NO: 1359860
aauccugggcuagagcucc

SEQ ID NO: 1359862 - RNA, 19 nt, Artificial Sequence
  Description of Artificial Sequence: Synthetic oligonucleotide
  Sense strand starting at position 961 of SEQ ID NO: 1242599
ggagcguguguuuaaagga

SEQ ID NO: 1359863 - RNA, 19 nt, Artificial Sequence
  Description of Artificial Sequence: Synthetic oligonucleotide
  Antisense strand to SEQ ID NO: 1359862
uccuuuaaacacacgcucc

SEQ ID NO: 1359864 - RNA, 19 nt, Artificial Sequence
  Description of Artificial Sequence: Synthetic oligonucleotide
  Sense strand starting at position 1424 of SEQ ID NO: 1242599
uuguaccagcucuaagaua

SEQ ID NO: 1359865 - RNA, 19 nt, Artificial Sequence
  Description of Artificial Sequence: Synthetic oligonucleotide
  Antisense strand to SEQ ID NO: 1359864
uaucuuagagcugguacaa

SEQ ID NO: 1359866 - RNA, 19 nt, Artificial Sequence
  Description of Artificial Sequence: Synthetic oligonucleotide
  Sense strand starting at position 1438 of SEQ ID NO: 1242599
agauaaauucugggcagua

SEQ ID NO: 1359867 - RNA, 19 nt, Artificial Sequence
  Description of Artificial Sequence: Synthetic oligonucleotide
  Antisense strand to SEQ ID NO: 1359866
uacugcccagaauuuaucu

SEQ ID NO: 1359868 - RNA, 19 nt, Artificial Sequence
  Description of Artificial Sequence: Synthetic oligonucleotide
  Sense strand starting at position 1439 of SEQ ID NO: 1242599
gauaaauucugggcaguag

SEQ ID NO: 1359869 - RNA, 19 nt, Artificial Sequence
  Description of Artificial Sequence: Synthetic oligonucleotide
  Antisense strand to SEQ ID NO: 1359868
cuacugcccagaauuuauc

SEQ ID NO: 1359870 - RNA, 19 nt, Artificial Sequence
  Description of Artificial Sequence: Synthetic oligonucleotide
  Sense strand starting at position 1659 of SEQ ID NO: 1242599
ccuacucgcggugaugaau

SEQ ID NO: 1359871 - RNA, 19 nt, Artificial Sequence
  Description of Artificial Sequence: Synthetic oligonucleotide
  Antisense strand to SEQ ID NO: 1359870
auucaucaccgcgaguagg

SEQ ID NO: 1359872 - RNA, 19 nt, Artificial Sequence
  Description of Artificial Sequence: Synthetic oligonucleotide
  Sense strand starting at position 2099 of SEQ ID NO: 1242599
gagcuuacgccucaaggaa

SEQ ID NO: 1359873 - RNA, 19 nt, Artificial Sequence
  Description of Artificial Sequence: Synthetic oligonucleotide
  Antisense strand to SEQ ID NO: 1359872
uuccuugaggcguaagcuc

SEQ ID NO: 1359874 - RNA, 19 nt, Artificial Sequence
  Description of Artificial Sequence: Synthetic oligonucleotide
  Sense strand starting at position 2145 of SEQ ID NO: 1242599
gcuugaaaucgaggucaaa

SEQ ID NO: 1359875 - RNA, 19 nt, Artificial Sequence
  Description of Artificial Sequence: Synthetic oligonucleotide
  Antisense strand to SEQ ID NO: 1359874
uuugaccucgauuucaagc

SEQ ID NO: 1359876 - RNA, 19 nt, Artificial Sequence
  Description of Artificial Sequence: Synthetic oligonucleotide
  Sense strand starting at position 2600 of SEQ ID NO: 1242599
ucuccuacccaguaggaau

SEQ ID NO: 1359877 - RNA, 19 nt, Artificial Sequence
  Description of Artificial Sequence: Synthetic oligonucleotide
  Antisense strand to SEQ ID NO: 1359876
auuccuacuggguaggaga

SEQ ID NO: 1359878 - RNA, 19 nt, Artificial Sequence
  Description of Artificial Sequence: Synthetic oligonucleotide
  Sense strand starting at position 2650 of SEQ ID NO: 1242599
cugguuugagaacguguga

SEQ ID NO: 1359879 - RNA, 19 nt, Artificial Sequence
  Description of Artificial Sequence: Synthetic oligonucleotide
  Antisense strand to SEQ ID NO: 1359878
ucacacguucucaaaccag

SEQ ID NO: 1359880 - RNA, 19 nt, Artificial Sequence
  Description of Artificial Sequence: Synthetic oligonucleotide
  Sense strand starting at position 2690 of SEQ ID NO: 1242599
gcuuuauuauacguggaug

SEQ ID NO: 1359881 - RNA, 19 nt, Artificial Sequence
  Description of Artificial Sequence: Synthetic oligonucleotide
  Antisense strand to SEQ ID NO: 1359880
cauccacguauaauaaagc

SEQ ID NO: 1359882 - RNA, 19 nt, Artificial Sequence
  Description of Artificial Sequence: Synthetic oligonucleotide
  Sense strand starting at position 2691 of SEQ ID NO: 1242599
cuuuauuauacguggaugu

SEQ ID NO: 1359883 - RNA, 19 nt, Artificial Sequence
  Description of Artificial Sequence: Synthetic oligonucleotide
  Antisense strand to SEQ ID NO: 1359882
acauccacguauaauaaag

SEQ ID NO: 1359884 - RNA, 19 nt, Artificial Sequence
  Description of Artificial Sequence: Synthetic oligonucleotide
  Sense strand starting at position 2692 of SEQ ID NO: 1242599
uuuauuauacguggauguu

SEQ ID NO: 1359885 - RNA, 19 nt, Artificial Sequence
  Description of Artificial Sequence: Synthetic oligonucleotide
  Antisense strand to SEQ ID NO: 1359884
aacauccacguauaauaaa

SEQ ID NO: 1359886 - RNA, 19 nt, Artificial Sequence
  Description of Artificial Sequence: Synthetic oligonucleotide
  Sense strand starting at position 2693 of SEQ ID NO: 1242599
uuauuauacguggauguuu

SEQ ID NO: 1359887 - RNA, 19 nt, Artificial Sequence
  Description of Artificial Sequence: Synthetic oligonucleotide
  Antisense strand to SEQ ID NO: 1359886
aaacauccacguauaauaa

SEQ ID NO: 1359888 - RNA, 19 nt, Artificial Sequence
  Description of Artificial Sequence: Synthetic oligonucleotide
  Sense strand starting at position 2695 of SEQ ID NO: 1242599
auuauacguggauguuuaa

SEQ ID NO: 1359889 - RNA, 19 nt, Artificial Sequence
  Description of Artificial Sequence: Synthetic oligonucleotide
  Antisense strand to SEQ ID NO: 1359888
uuaaacauccacguauaau

SEQ ID NO: 1359890 - RNA, 19 nt, Artificial Sequence
  Description of Artificial Sequence: Synthetic oligonucleotide
  Sense strand starting at position 2702 of SEQ ID NO: 1242599
guggauguuuaaguuacuu

SEQ ID NO: 1359891 - RNA, 19 nt, Artificial Sequence
  Description of Artificial Sequence: Synthetic oligonucleotide
  Antisense strand to SEQ ID NO: 1359890
aaguaacuuaaacauccac

SEQ ID NO: 1359892 - RNA, 19 nt, Artificial Sequence
  Description of Artificial Sequence: Synthetic oligonucleotide
  Sense strand starting at position 3064 of SEQ ID NO: 1242599
guuuguuugagacgaagga

SEQ ID NO: 1359893 - RNA, 19 nt, Artificial Sequence
  Description of Artificial Sequence: Synthetic oligonucleotide
  Antisense strand to SEQ ID NO: 1359892
uccuucgucucaaacaaac

SEQ ID NO: 1359894 - RNA, 19 nt, Artificial Sequence
  Description of Artificial Sequence: Synthetic oligonucleotide
  Sense strand starting at position 3359 of SEQ ID NO: 1242599
aaaggauaguucuugacac

SEQ ID NO: 1359895 - RNA, 19 nt, Artificial Sequence
  Description of Artificial Sequence: Synthetic oligonucleotide
  Antisense strand to SEQ ID NO: 1359894
gugucaagaacuauccuuu

SEQ ID NO: 1359896 - RNA, 19 nt, Artificial Sequence
  Description of Artificial Sequence: Synthetic oligonucleotide
  Sense strand starting at position 3380 of SEQ ID NO: 1242599
ccuuucuuccauuagaggu

SEQ ID NO: 1359897 - RNA, 19 nt, Artificial Sequence
  Description of Artificial Sequence: Synthetic oligonucleotide
  Antisense strand to SEQ ID NO: 1359896
accucuaauggaagaaagg

SEQ ID NO: 1359898 - RNA, 19 nt, Artificial Sequence
  Description of Artificial Sequence: Synthetic oligonucleotide
  Sense strand starting at position 3387 of SEQ ID NO: 1242599
uccauuagaggucaagcua

SEQ ID NO: 1359899 - RNA, 19 nt, Artificial Sequence
  Description of Artificial Sequence: Synthetic oligonucleotide
  Antisense strand to SEQ ID NO: 1359898
uagcuugaccucuaaugga

SEQ ID NO: 1359900 - RNA, 19 nt, Artificial Sequence
  Description of Artificial Sequence: Synthetic oligonucleotide
  Sense strand starting at position 3423 of SEQ ID NO: 1242599
ucucacaagcaguagaauu

SEQ ID NO: 1359901 - RNA, 19 nt, Artificial Sequence
  Description of Artificial Sequence: Synthetic oligonucleotide
  Antisense strand to SEQ ID NO: 1359900
aauucuacugcuugugaga

SEQ ID NO: 1359902 - RNA, 19 nt, Artificial Sequence
  Description of Artificial Sequence: Synthetic oligonucleotide
  Sense strand starting at position 3431 of SEQ ID NO: 1242599
gcaguagaauuccuaggca

SEQ ID NO: 1359903 - RNA, 19 nt, Artificial Sequence
  Description of Artificial Sequence: Synthetic oligonucleotide
  Antisense strand to SEQ ID NO: 1359902
ugccuaggaauucuacugc

SEQ ID NO: 1359904 - RNA, 19 nt, Artificial Sequence
  Description of Artificial Sequence: Synthetic oligonucleotide
  Sense strand starting at position 3434 of SEQ ID NO: 1242599
guagaauuccuaggcaguu

SEQ ID NO: 1359905 - RNA, 19 nt, Artificial Sequence
  Description of Artificial Sequence: Synthetic oligonucleotide
  Antisense strand to SEQ ID NO: 1359904
aacugccuaggaauucuac

SEQ ID NO: 1359906 - RNA, 19 nt, Artificial Sequence
  Description of Artificial Sequence: Synthetic oligonucleotide
  Sense strand starting at position 3435 of SEQ ID NO: 1242599
uagaauuccuaggcaguuu

SEQ ID NO: 1359907 - RNA, 19 nt, Artificial Sequence
  Description of Artificial Sequence: Synthetic oligonucleotide
  Antisense strand to SEQ ID NO: 1359906
aaacugccuaggaauucua

SEQ ID NO: 1359908 - RNA, 19 nt, Artificial Sequence
  Description of Artificial Sequence: Synthetic oligonucleotide
  Sense strand starting at position 3651 of SEQ ID NO: 1242599
augccaaauguccggauca

SEQ ID NO: 1359909 - RNA, 19 nt, Artificial Sequence
  Description of Artificial Sequence: Synthetic oligonucleotide
  Antisense strand to SEQ ID NO: 1359908
ugauccggacauuuggcau

SEQ ID NO: 1359910 - RNA, 19 nt, Artificial Sequence
  Description of Artificial Sequence: Synthetic oligonucleotide
  Sense strand starting at position 3653 of SEQ ID NO: 1242599
gccaaauguccggaucaga

SEQ ID NO: 1359911 - RNA, 19 nt, Artificial Sequence
  Description of Artificial Sequence: Synthetic oligonucleotide
  Antisense strand to SEQ ID NO: 1359910
ucugauccggacauuuggc

SEQ ID NO: 1359912 - RNA, 19 nt, Artificial Sequence
  Description of Artificial Sequence: Synthetic oligonucleotide
  Sense strand starting at position 3751 of SEQ ID NO: 1242599
ggucauuuguauucggcca

SEQ ID NO: 1359913 - RNA, 19 nt, Artificial Sequence
  Description of Artificial Sequence: Synthetic oligonucleotide
  Antisense strand to SEQ ID NO: 1359912
uggccgaauacaaaugacc

SEQ ID NO: 1359914 - RNA, 19 nt, Artificial Sequence
  Description of Artificial Sequence: Synthetic oligonucleotide
  Sense strand starting at position 3752 of SEQ ID NO: 1242599
gucauuuguauucggccau

SEQ ID NO: 1359915 - RNA, 19 nt, Artificial Sequence
  Description of Artificial Sequence: Synthetic oligonucleotide
  Antisense strand to SEQ ID NO: 1359914
auggccgaauacaaaugac

SEQ ID NO: 1359916 - RNA, 19 nt, Artificial Sequence
  Description of Artificial Sequence: Synthetic oligonucleotide
  Sense strand starting at position 3756 of SEQ ID NO: 1242599
uuuguauucggccauugaa

SEQ ID NO: 1359917 - RNA, 19 nt, Artificial Sequence
  Description of Artificial Sequence: Synthetic oligonucleotide
  Antisense strand to SEQ ID NO: 1359916
uucaauggccgaauacaaa

SEQ ID NO: 1359918 - RNA, 19 nt, Artificial Sequence
  Description of Artificial Sequence: Synthetic oligonucleotide
  Sense strand starting at position 3759 of SEQ ID NO: 1242599
guauucggccauugaauuu

SEQ ID NO: 1359919 - RNA, 19 nt, Artificial Sequence
  Description of Artificial Sequence: Synthetic oligonucleotide
  Antisense strand to SEQ ID NO: 1359918
aaauucaauggccgaauac

SEQ ID NO: 1359920 - RNA, 19 nt, Artificial Sequence
  Description of Artificial Sequence: Synthetic oligonucleotide
  Sense strand starting at position 3836 of SEQ ID NO: 1242599
ucauaaaugugagagaaca

SEQ ID NO: 1359921 - RNA, 19 nt, Artificial Sequence
  Description of Artificial Sequence: Synthetic oligonucleotide
  Antisense strand to SEQ ID NO: 1359920
uguucucucacauuuauga

SEQ ID NO: 1359922 - RNA, 19 nt, Artificial Sequence
  Description of Artificial Sequence: Synthetic oligonucleotide
  Sense strand starting at position 64 of SEQ ID NO: 1242600
cuagcauaauuucguggaa

SEQ ID NO: 1359923 - RNA, 19 nt, Artificial Sequence
  Description of Artificial Sequence: Synthetic oligonucleotide
  Antisense strand to SEQ ID NO: 1359922
uuccacgaaauuaugcuag

SEQ ID NO: 1359924 - RNA, 19 nt, Artificial Sequence
  Description of Artificial Sequence: Synthetic oligonucleotide
  Sense strand starting at position 66 of SEQ ID NO: 1242600
agcauaauuucguggaagg

SEQ ID NO: 1359925 - RNA, 19 nt, Artificial Sequence
  Description of Artificial Sequence: Synthetic oligonucleotide
  Antisense strand to SEQ ID NO: 1359924
ccuuccacgaaauuaugcu

SEQ ID NO: 1359926 - RNA, 19 nt, Artificial Sequence
  Description of Artificial Sequence: Synthetic oligonucleotide
  Sense strand starting at position 87 of SEQ ID NO: 1242600
gguagugacauguaaacug

SEQ ID NO: 1359927 - RNA, 19 nt, Artificial Sequence
  Description of Artificial Sequence: Synthetic oligonucleotide
  Antisense strand to SEQ ID NO: 1359926
caguuuacaugucacuacc

SEQ ID NO: 1359928 - RNA, 19 nt, Artificial Sequence
  Description of Artificial Sequence: Synthetic oligonucleotide
  Sense strand starting at position 129 of SEQ ID NO: 1242600
gcaccaauuuagcugguaa

SEQ ID NO: 1359929 - RNA, 19 nt, Artificial Sequence
  Description of Artificial Sequence: Synthetic oligonucleotide
  Antisense strand to SEQ ID NO: 1359928
uuaccagcuaaauuggugc

SEQ ID NO: 1359930 - RNA, 19 nt, Artificial Sequence
  Description of Artificial Sequence: Synthetic oligonucleotide
  Sense strand starting at position 133 of SEQ ID NO: 1242600
caauuuagcugguaaacag

SEQ ID NO: 1359931 - RNA, 19 nt, Artificial Sequence
  Description of Artificial Sequence: Synthetic oligonucleotide
  Antisense strand to SEQ ID NO: 1359930
cuguuuaccagcuaaauug

SEQ ID NO: 1359932 - RNA, 19 nt, Artificial Sequence
  Description of Artificial Sequence: Synthetic oligonucleotide
  Sense strand starting at position 165 of SEQ ID NO: 1242600
uugcuaggauuuguucuua

SEQ ID NO: 1359933 - RNA, 19 nt, Artificial Sequence
  Description of Artificial Sequence: Synthetic oligonucleotide
  Antisense strand to SEQ ID NO: 1359932
uaagaacaaauccuagcaa

SEQ ID NO: 1359934 - RNA, 19 nt, Artificial Sequence
  Description of Artificial Sequence: Synthetic oligonucleotide
  Sense strand starting at position 434 of SEQ ID NO: 1242600
ugaaauacguaucaugcuu

SEQ ID NO: 1359935 - RNA, 19 nt, Artificial Sequence
  Description of Artificial Sequence: Synthetic oligonucleotide
  Antisense strand to SEQ ID NO: 1359934
aagcaugauacguauuuca

SEQ ID NO: 1359936 - RNA, 19 nt, Artificial Sequence
  Description of Artificial Sequence: Synthetic oligonucleotide
  Sense strand starting at position 439 of SEQ ID NO: 1242600
uacguaucaugcuuagaau

SEQ ID NO: 1359937 - RNA, 19 nt, Artificial Sequence
  Description of Artificial Sequence: Synthetic oligonucleotide
  Antisense strand to SEQ ID NO: 1359936
auucuaagcaugauacgua

SEQ ID NO: 1359938 - RNA, 19 nt, Artificial Sequence
  Description of Artificial Sequence: Synthetic oligonucleotide
  Sense strand starting at position 440 of SEQ ID NO: 1242600
acguaucaugcuuagaaua

SEQ ID NO: 1359939 - RNA, 19 nt, Artificial Sequence
  Description of Artificial Sequence: Synthetic oligonucleotide
  Antisense strand to SEQ ID NO: 1359938
uauucuaagcaugauacgu

SEQ ID NO: 1359940 - RNA, 19 nt, Artificial Sequence
  Description of Artificial Sequence: Synthetic oligonucleotide
  Sense strand starting at position 442 of SEQ ID NO: 1242600
guaucaugcuuagaauauu

SEQ ID NO: 1359941 - RNA, 19 nt, Artificial Sequence
  Description of Artificial Sequence: Synthetic oligonucleotide
  Antisense strand to SEQ ID NO: 1359940
aauauucuaagcaugauac

SEQ ID NO: 1359942 - RNA, 19 nt, Artificial Sequence
  Description of Artificial Sequence: Synthetic oligonucleotide
  Sense strand starting at position 462 of SEQ ID NO: 1242600
gcauauucgugccauauuu

SEQ ID NO: 1359943 - RNA, 19 nt, Artificial Sequence
  Description of Artificial Sequence: Synthetic oligonucleotide
  Antisense strand to SEQ ID NO: 1359942
aaauauggcacgaauaugc

SEQ ID NO: 1359944 - RNA, 19 nt, Artificial Sequence
  Description of Artificial Sequence: Synthetic oligonucleotide
  Sense strand starting at position 464 of SEQ ID NO: 1242600
auauucgugccauauuugu

SEQ ID NO: 1359945 - RNA, 19 nt, Artificial Sequence
  Description of Artificial Sequence: Synthetic oligonucleotide
  Antisense strand to SEQ ID NO: 1359944
acaaauauggcacgaauau

SEQ ID NO: 1359946 - RNA, 19 nt, Artificial Sequence
  Description of Artificial Sequence: Synthetic oligonucleotide
  Sense strand starting at position 473 of SEQ ID NO: 1242600
ccauauuuguacuucguuu

SEQ ID NO: 1359947 - RNA, 19 nt, Artificial Sequence
  Description of Artificial Sequence: Synthetic oligonucleotide
  Antisense strand to SEQ ID NO: 1359946
aaacgaaguacaaauaugg

SEQ ID NO: 1359948 - RNA, 19 nt, Artificial Sequence
  Description of Artificial Sequence: Synthetic oligonucleotide
  Sense strand starting at position 660 of SEQ ID NO: 1242600
cacugaaugucugcuauga

SEQ ID NO: 1359949 - RNA, 19 nt, Artificial Sequence
  Description of Artificial Sequence: Synthetic oligonucleotide
  Antisense strand to SEQ ID NO: 1359948
ucauagcagacauucagug

SEQ ID NO: 1359950 - RNA, 19 nt, Artificial Sequence
  Description of Artificial Sequence: Synthetic oligonucleotide
  Sense strand starting at position 662 of SEQ ID NO: 1242600
cugaaugucugcuaugaac

SEQ ID NO: 1359951 - RNA, 19 nt, Artificial Sequence
  Description of Artificial Sequence: Synthetic oligonucleotide
  Antisense strand to SEQ ID NO: 1359950
guucauagcagacauucag

SEQ ID NO: 1359952 - RNA, 19 nt, Artificial Sequence
  Description of Artificial Sequence: Synthetic oligonucleotide
  Sense strand starting at position 664 of SEQ ID NO: 1242600
gaaugucugcuaugaacau

SEQ ID NO: 1359953 - RNA, 19 nt, Artificial Sequence
  Description of Artificial Sequence: Synthetic oligonucleotide
  Antisense strand to SEQ ID NO: 1359952
auguucauagcagacauuc

SEQ ID NO: 1359954 - RNA, 19 nt, Artificial Sequence
  Description of Artificial Sequence: Synthetic oligonucleotide
  Sense strand starting at position 668 of SEQ ID NO: 1242600
gucugcuaugaacaucaua

SEQ ID NO: 1359955 - RNA, 19 nt, Artificial Sequence
  Description of Artificial Sequence: Synthetic oligonucleotide
  Antisense strand to SEQ ID NO: 1359954
uaugauguucauagcagac

SEQ ID NO: 1359956 - RNA, 19 nt, Artificial Sequence
  Description of Artificial Sequence: Synthetic oligonucleotide
  Sense strand starting at position 693 of SEQ ID NO: 1242600
cgguaagaaucaucugaaa

SEQ ID NO: 1359957 - RNA, 19 nt, Artificial Sequence
  Description of Artificial Sequence: Synthetic oligonucleotide
  Antisense strand to SEQ ID NO: 1359956
uuucagaugauucuuaccg

SEQ ID NO: 1359958 - RNA, 19 nt, Artificial Sequence
  Description of Artificial Sequence: Synthetic oligonucleotide
  Sense strand starting at position 741 of SEQ ID NO: 1242600
uaguccagcuucgaaagaa

SEQ ID NO: 1359959 - RNA, 19 nt, Artificial Sequence
  Description of Artificial Sequence: Synthetic oligonucleotide
  Antisense strand to SEQ ID NO: 1359958
uucuuucgaagcuggacua

SEQ ID NO: 1359960 - RNA, 19 nt, Artificial Sequence
  Description of Artificial Sequence: Synthetic oligonucleotide
  Sense strand starting at position 777 of SEQ ID NO: 1242600
ccuagauaauggcuacaau

SEQ ID NO: 1359961 - RNA, 19 nt, Artificial Sequence
  Description of Artificial Sequence: Synthetic oligonucleotide
  Antisense strand to SEQ ID NO: 1359960
auuguagccauuaucuagg

SEQ ID NO: 1359962 - RNA, 19 nt, Artificial Sequence
  Description of Artificial Sequence: Synthetic oligonucleotide
  Sense strand starting at position 791 of SEQ ID NO: 1242600
acaauuaucuggucuggga

SEQ ID NO: 1359963 - RNA, 19 nt, Artificial Sequence
  Description of Artificial Sequence: Synthetic oligonucleotide
  Antisense strand to SEQ ID NO: 1359962
ucccagaccagauaauugu

SEQ ID NO: 1359964 - RNA, 19 nt, Artificial Sequence
  Description of Artificial Sequence: Synthetic oligonucleotide
  Sense strand starting at position 894 of SEQ ID NO: 1242600
acguuauuccgggauagga

SEQ ID NO: 1359965 - RNA, 19 nt, Artificial Sequence
  Description of Artificial Sequence: Synthetic oligonucleotide
  Antisense strand to SEQ ID NO: 1359964
uccuaucccggaauaacgu

SEQ ID NO: 1359966 - RNA, 19 nt, Artificial Sequence
  Description of Artificial Sequence: Synthetic oligonucleotide
  Sense strand starting at position 896 of SEQ ID NO: 1242600
guuauuccgggauaggaca

SEQ ID NO: 1359967 - RNA, 19 nt, Artificial Sequence
  Description of Artificial Sequence: Synthetic oligonucleotide
  Antisense strand to SEQ ID NO: 1359966
uguccuaucccggaauaac

SEQ ID NO: 1359968 - RNA, 19 nt, Artificial Sequence
  Description of Artificial Sequence: Synthetic oligonucleotide
  Sense strand starting at position 2009 of SEQ ID NO: 1242600
gguuaaaccuaccgagaac

SEQ ID NO: 1359969 - RNA, 19 nt, Artificial Sequence
  Description of Artificial Sequence: Synthetic oligonucleotide
  Antisense strand to SEQ ID NO: 1359968
guucucgguagguuuaacc

SEQ ID NO: 1359970 - RNA, 19 nt, Artificial Sequence
  Description of Artificial Sequence: Synthetic oligonucleotide
  Sense strand starting at position 2133 of SEQ ID NO: 1242600
ggagcuggcaucuaggaaa

SEQ ID NO: 1359971 - RNA, 19 nt, Artificial Sequence
  Description of Artificial Sequence: Synthetic oligonucleotide
  Antisense strand to SEQ ID NO: 1359970
uuuccuagaugccagcucc

SEQ ID NO: 1359972 - RNA, 19 nt, Artificial Sequence
  Description of Artificial Sequence: Synthetic oligonucleotide
  Sense strand starting at position 2364 of SEQ ID NO: 1242600
ggaagaagccuuugccaag

SEQ ID NO: 1359973 - RNA, 19 nt, Artificial Sequence
  Description of Artificial Sequence: Synthetic oligonucleotide
  Antisense strand to SEQ ID NO: 1359972
cuuggcaaaggcuucuucc

SEQ ID NO: 1359974 - RNA, 19 nt, Artificial Sequence
  Description of Artificial Sequence: Synthetic oligonucleotide
  Sense strand starting at position 2365 of SEQ ID NO: 1242600
gaagaagccuuugccaaga

SEQ ID NO: 1359975 - RNA, 19 nt, Artificial Sequence
  Description of Artificial Sequence: Synthetic oligonucleotide
  Antisense strand to SEQ ID NO: 1359974
ucuuggcaaaggcuucuuc

SEQ ID NO: 1359976 - RNA, 19 nt, Artificial Sequence
  Description of Artificial Sequence: Synthetic oligonucleotide
  Sense strand starting at position 2408 of SEQ ID NO: 1242600
cugcgagugccggaaaugu

SEQ ID NO: 1359977 - RNA, 19 nt, Artificial Sequence
  Description of Artificial Sequence: Synthetic oligonucleotide
  Antisense strand to SEQ ID NO: 1359976
acauuuccggcacucgcag

SEQ ID NO: 1359978 - RNA, 19 nt, Artificial Sequence
  Description of Artificial Sequence: Synthetic oligonucleotide
  Sense strand starting at position 2781 of SEQ ID NO: 1242600
aagugccuuguuuguagua

SEQ ID NO: 1359979 - RNA, 19 nt, Artificial Sequence
  Description of Artificial Sequence: Synthetic oligonucleotide
  Antisense strand to SEQ ID NO: 1359978
uacuacaaacaaggcacuu

SEQ ID NO: 1359980 - RNA, 19 nt, Artificial Sequence
  Description of Artificial Sequence: Synthetic oligonucleotide
  Sense strand starting at position 2782 of SEQ ID NO: 1242600
agugccuuguuuguaguaa

SEQ ID NO: 1359981 - RNA, 19 nt, Artificial Sequence
  Description of Artificial Sequence: Synthetic oligonucleotide
  Antisense strand to SEQ ID NO: 1359980
uuacuacaaacaaggcacu

SEQ ID NO: 1359982 - RNA, 19 nt, Artificial Sequence
  Description of Artificial Sequence: Synthetic oligonucleotide
  Sense strand starting at position 2786 of SEQ ID NO: 1242600
ccuuguuuguaguaagagu

SEQ ID NO: 1359983 - RNA, 19 nt, Artificial Sequence
  Description of Artificial Sequence: Synthetic oligonucleotide
  Antisense strand to SEQ ID NO: 1359982
acucuuacuacaaacaagg

SEQ ID NO: 1359984 - RNA, 19 nt, Artificial Sequence
  Description of Artificial Sequence: Synthetic oligonucleotide
  Sense strand starting at position 3016 of SEQ ID NO: 1242600
gcggcagccucugcaaaua

SEQ ID NO: 1359985 - RNA, 19 nt, Artificial Sequence
  Description of Artificial Sequence: Synthetic oligonucleotide
  Antisense strand to SEQ ID NO: 1359984
uauuugcagaggcugccgc

SEQ ID NO: 1359986 - RNA, 19 nt, Artificial Sequence
  Description of Artificial Sequence: Synthetic oligonucleotide
  Sense strand starting at position 3153 of SEQ ID NO: 1242600
uagagcuaaugaugggauu

SEQ ID NO: 1359987 - RNA, 19 nt, Artificial Sequence
  Description of Artificial Sequence: Synthetic oligonucleotide
  Antisense strand to SEQ ID NO: 1359986
aaucccaucauuagcucua

SEQ ID NO: 1359988 - RNA, 19 nt, Artificial Sequence
  Description of Artificial Sequence: Synthetic oligonucleotide
  Sense strand starting at position 3559 of SEQ ID NO: 1242600
cuggaagaaucagaacacu

SEQ ID NO: 1359989 - RNA, 19 nt, Artificial Sequence
  Description of Artificial Sequence: Synthetic oligonucleotide
  Antisense strand to SEQ ID NO: 1359988
aguguucugauucuuccag

SEQ ID NO: 1359990 - RNA, 19 nt, Artificial Sequence
  Description of Artificial Sequence: Synthetic oligonucleotide
  Sense strand starting at position 3573 of SEQ ID NO: 1242600
acacuagaucugugaucac

SEQ ID NO: 1359991 - RNA, 19 nt, Artificial Sequence
  Description of Artificial Sequence: Synthetic oligonucleotide
  Antisense strand to SEQ ID NO: 1359990
gugaucacagaucuagugu

SEQ ID NO: 1359992 - RNA, 19 nt, Artificial Sequence
  Description of Artificial Sequence: Synthetic oligonucleotide
  Sense strand starting at position 3620 of SEQ ID NO: 1242600
gggcuuagguuuguucuuu

SEQ ID NO: 1359993 - RNA, 19 nt, Artificial Sequence
  Description of Artificial Sequence: Synthetic oligonucleotide
  Antisense strand to SEQ ID NO: 1359992
aaagaacaaaccuaagccc

SEQ ID NO: 1359994 - RNA, 19 nt, Artificial Sequence
  Description of Artificial Sequence: Synthetic oligonucleotide
  Sense strand starting at position 3624 of SEQ ID NO: 1242600
uuagguuuguucuuugaag

SEQ ID NO: 1359995 - RNA, 19 nt, Artificial Sequence
  Description of Artificial Sequence: Synthetic oligonucleotide
  Antisense strand to SEQ ID NO: 1359994
cuucaaagaacaaaccuaa

SEQ ID NO: 1359996 - RNA, 19 nt, Artificial Sequence
  Description of Artificial Sequence: Synthetic oligonucleotide
  Sense strand starting at position 3625 of SEQ ID NO: 1242600
uagguuuguucuuugaagu

SEQ ID NO: 1359997 - RNA, 19 nt, Artificial Sequence
  Description of Artificial Sequence: Synthetic oligonucleotide
  Antisense strand to SEQ ID NO: 1359996
acuucaaagaacaaaccua

SEQ ID NO: 1359998 - RNA, 19 nt, Artificial Sequence
  Description of Artificial Sequence: Synthetic oligonucleotide
  Sense strand starting at position 3626 of SEQ ID NO: 1242600
agguuuguucuuugaaguu

SEQ ID NO: 1359999 - RNA, 19 nt, Artificial Sequence
  Description of Artificial Sequence: Synthetic oligonucleotide
  Antisense strand to SEQ ID NO: 1359998
aacuucaaagaacaaaccu

SEQ ID NO: 1360000 - RNA, 19 nt, Artificial Sequence
  Description of Artificial Sequence: Synthetic oligonucleotide
  Sense strand starting at position 3918 of SEQ ID NO: 1242600
gcagaugggccagagaauu

SEQ ID NO: 1360001 - RNA, 19 nt, Artificial Sequence
  Description of Artificial Sequence: Synthetic oligonucleotide
  Antisense strand to SEQ ID NO: 1360000
aauucucuggcccaucugc

SEQ ID NO: 1360002 - RNA, 19 nt, Artificial Sequence
  Description of Artificial Sequence: Synthetic oligonucleotide
  Sense strand starting at position 18 of SEQ ID NO: 1242601
uaguccagcuucgaaagaa

SEQ ID NO: 1360003 - RNA, 19 nt, Artificial Sequence
  Description of Artificial Sequence: Synthetic oligonucleotide
  Antisense strand to SEQ ID NO: 1360002
uucuuucgaagcuggacua

SEQ ID NO: 1360004 - RNA, 19 nt, Artificial Sequence
  Description of Artificial Sequence: Synthetic oligonucleotide
  Sense strand starting at position 54 of SEQ ID NO: 1242601
ccuagauaauggcuacaau

SEQ ID NO: 1360005 - RNA, 19 nt, Artificial Sequence
  Description of Artificial Sequence: Synthetic oligonucleotide
  Antisense strand to SEQ ID NO: 1360004
auuguagccauuaucuagg

SEQ ID NO: 1360006 - RNA, 19 nt, Artificial Sequence
  Description of Artificial Sequence: Synthetic oligonucleotide
  Sense strand starting at position 68 of SEQ ID NO: 1242601
acaauuaucuggucuggga

SEQ ID NO: 1360007 - RNA, 19 nt, Artificial Sequence
  Description of Artificial Sequence: Synthetic oligonucleotide
  Antisense strand to SEQ ID NO: 1360006
ucccagaccagauaauugu

SEQ ID NO: 1360008 - RNA, 19 nt, Artificial Sequence
  Description of Artificial Sequence: Synthetic oligonucleotide
  Sense strand starting at position 169 of SEQ ID NO: 1242601
gcacguuauuccgggauag

SEQ ID NO: 1360009 - RNA, 19 nt, Artificial Sequence
  Description of Artificial Sequence: Synthetic oligonucleotide
  Antisense strand to SEQ ID NO: 1360008
cuaucccggaauaacgugc

SEQ ID NO: 1360010 - RNA, 19 nt, Artificial Sequence
  Description of Artificial Sequence: Synthetic oligonucleotide
  Sense strand starting at position 171 of SEQ ID NO: 1242601
acguuauuccgggauagga

SEQ ID NO: 1360011 - RNA, 19 nt, Artificial Sequence
  Description of Artificial Sequence: Synthetic oligonucleotide
  Antisense strand to SEQ ID NO: 1360010
uccuaucccggaauaacgu

SEQ ID NO: 1360012 - RNA, 19 nt, Artificial Sequence
  Description of Artificial Sequence: Synthetic oligonucleotide
  Sense strand starting at position 173 of SEQ ID NO: 1242601
guuauuccgggauaggaca

SEQ ID NO: 1360013 - RNA, 19 nt, Artificial Sequence
  Description of Artificial Sequence: Synthetic oligonucleotide
  Antisense strand to SEQ ID NO: 1360012
uguccuaucccggaauaac

SEQ ID NO: 1360014 - RNA, 19 nt, Artificial Sequence
  Description of Artificial Sequence: Synthetic oligonucleotide
  Sense strand starting at position 1286 of SEQ ID NO: 1242601
gguuaaaccuaccgagaac

SEQ ID NO: 1360015 - RNA, 19 nt, Artificial Sequence
  Description of Artificial Sequence: Synthetic oligonucleotide
  Antisense strand to SEQ ID NO: 1360014
guucucgguagguuuaacc

SEQ ID NO: 1360016 - RNA, 19 nt, Artificial Sequence
  Description of Artificial Sequence: Synthetic oligonucleotide
  Sense strand starting at position 1410 of SEQ ID NO: 1242601
ggagcuggcaucuaggaaa

SEQ ID NO: 1360017 - RNA, 19 nt, Artificial Sequence
  Description of Artificial Sequence: Synthetic oligonucleotide
  Antisense strand to SEQ ID NO: 1360016
uuuccuagaugccagcucc

SEQ ID NO: 1360018 - RNA, 19 nt, Artificial Sequence
  Description of Artificial Sequence: Synthetic oligonucleotide
  Sense strand starting at position 1641 of SEQ ID NO: 1242601
ggaagaagccuuugccaag

SEQ ID NO: 1360019 - RNA, 19 nt, Artificial Sequence
  Description of Artificial Sequence: Synthetic oligonucleotide
  Antisense strand to SEQ ID NO: 1360018
cuuggcaaaggcuucuucc

SEQ ID NO: 1360020 - RNA, 19 nt, Artificial Sequence
  Description of Artificial Sequence: Synthetic oligonucleotide
  Sense strand starting at position 1642 of SEQ ID NO: 1242601
gaagaagccuuugccaaga

SEQ ID NO: 1360021 - RNA, 19 nt, Artificial Sequence
  Description of Artificial Sequence: Synthetic oligonucleotide
  Antisense strand to SEQ ID NO: 1360020
ucuuggcaaaggcuucuuc

SEQ ID NO: 1360022 - RNA, 19 nt, Artificial Sequence
  Description of Artificial Sequence: Synthetic oligonucleotide
  Sense strand starting at position 1685 of SEQ ID NO: 1242601
cugcgagugccggaaaugu

SEQ ID NO: 1360023 - RNA, 19 nt, Artificial Sequence
  Description of Artificial Sequence: Synthetic oligonucleotide
  Antisense strand to SEQ ID NO: 1360022
acauuuccggcacucgcag

SEQ ID NO: 1360024 - RNA, 19 nt, Artificial Sequence
  Description of Artificial Sequence: Synthetic oligonucleotide
  Sense strand starting at position 2058 of SEQ ID NO: 1242601
aagugccuuguuuguagua

SEQ ID NO: 1360025 - RNA, 19 nt, Artificial Sequence
  Description of Artificial Sequence: Synthetic oligonucleotide
  Antisense strand to SEQ ID NO: 1360024
uacuacaaacaaggcacuu

SEQ ID NO: 1360026 - RNA, 19 nt, Artificial Sequence
  Description of Artificial Sequence: Synthetic oligonucleotide
  Sense strand starting at position 2059 of SEQ ID NO: 1242601
agugccuuguuuguaguaa

SEQ ID NO: 1360027 - RNA, 19 nt, Artificial Sequence
  Description of Artificial Sequence: Synthetic oligonucleotide
  Antisense strand to SEQ ID NO: 1360026
uuacuacaaacaaggcacu

SEQ ID NO: 1360028 - RNA, 19 nt, Artificial Sequence
  Description of Artificial Sequence: Synthetic oligonucleotide
  Sense strand starting at position 2060 of SEQ ID NO: 1242601
gugccuuguuuguaguaag

SEQ ID NO: 1360029 - RNA, 19 nt, Artificial Sequence
  Description of Artificial Sequence: Synthetic oligonucleotide
  Antisense strand to SEQ ID NO: 1360028
cuuacuacaaacaaggcac

SEQ ID NO: 1360030 - RNA, 19 nt, Artificial Sequence
  Description of Artificial Sequence: Synthetic oligonucleotide
  Sense strand starting at position 2063 of SEQ ID NO: 1242601
ccuuguuuguaguaagagu

SEQ ID NO: 1360031 - RNA, 19 nt, Artificial Sequence
  Description of Artificial Sequence: Synthetic oligonucleotide
  Antisense strand to SEQ ID NO: 1360030
acucuuacuacaaacaagg

SEQ ID NO: 1360032 - RNA, 19 nt, Artificial Sequence
  Description of Artificial Sequence: Synthetic oligonucleotide
  Sense strand starting at position 2293 of SEQ ID NO: 1242601
gcggcagccucugcaaaua

SEQ ID NO: 1360033 - RNA, 19 nt, Artificial Sequence
  Description of Artificial Sequence: Synthetic oligonucleotide
  Antisense strand to SEQ ID NO: 1360032
uauuugcagaggcugccgc

SEQ ID NO: 1360034 - RNA, 19 nt, Artificial Sequence
  Description of Artificial Sequence: Synthetic oligonucleotide
  Sense strand starting at position 2430 of SEQ ID NO: 1242601
uagagcuaaugaugggauu

SEQ ID NO: 1360035 - RNA, 19 nt, Artificial Sequence
  Description of Artificial Sequence: Synthetic oligonucleotide
  Antisense strand to SEQ ID NO: 1360034
aaucccaucauuagcucua

SEQ ID NO: 1360036 - RNA, 19 nt, Artificial Sequence
  Description of Artificial Sequence: Synthetic oligonucleotide
  Sense strand starting at position 2836 of SEQ ID NO: 1242601
cuggaagaaucagaacacu

SEQ ID NO: 1360037 - RNA, 19 nt, Artificial Sequence
  Description of Artificial Sequence: Synthetic oligonucleotide
  Antisense strand to SEQ ID NO: 1360036
aguguucugauucuuccag

SEQ ID NO: 1360038 - RNA, 19 nt, Artificial Sequence
  Description of Artificial Sequence: Synthetic oligonucleotide
  Sense strand starting at position 2850 of SEQ ID NO: 1242601
acacuagaucugugaucac

SEQ ID NO: 1360039 - RNA, 19 nt, Artificial Sequence
  Description of Artificial Sequence: Synthetic oligonucleotide
  Antisense strand to SEQ ID NO: 1360038
gugaucacagaucuagugu

SEQ ID NO: 1360040 - RNA, 19 nt, Artificial Sequence
  Description of Artificial Sequence: Synthetic oligonucleotide
  Sense strand starting at position 2897 of SEQ ID NO: 1242601
gggcuuagguuuguucuuu

SEQ ID NO: 1360041 - RNA, 19 nt, Artificial Sequence
  Description of Artificial Sequence: Synthetic oligonucleotide
  Antisense strand to SEQ ID NO: 1360040
aaagaacaaaccuaagccc

SEQ ID NO: 1360042 - RNA, 19 nt, Artificial Sequence
  Description of Artificial Sequence: Synthetic oligonucleotide
  Sense strand starting at position 2901 of SEQ ID NO: 1242601
uuagguuuguucuuugaag

SEQ ID NO: 1360043 - RNA, 19 nt, Artificial Sequence
  Description of Artificial Sequence: Synthetic oligonucleotide
  Antisense strand to SEQ ID NO: 1360042
cuucaaagaacaaaccuaa

SEQ ID NO: 1360044 - RNA, 19 nt, Artificial Sequence
  Description of Artificial Sequence: Synthetic oligonucleotide
  Sense strand starting at position 2902 of SEQ ID NO: 1242601
uagguuuguucuuugaagu

SEQ ID NO: 1360045 - RNA, 19 nt, Artificial Sequence
  Description of Artificial Sequence: Synthetic oligonucleotide
  Antisense strand to SEQ ID NO: 1360044
acuucaaagaacaaaccua

SEQ ID NO: 1360046 - RNA, 19 nt, Artificial Sequence
  Description of Artificial Sequence: Synthetic oligonucleotide
  Sense strand starting at position 2903 of SEQ ID NO: 1242601
agguuuguucuuugaaguu

SEQ ID NO: 1360047 - RNA, 19 nt, Artificial Sequence
  Description of Artificial Sequence: Synthetic oligonucleotide
  Antisense strand to SEQ ID NO: 1360046
aacuucaaagaacaaaccu

SEQ ID NO: 1360048 - RNA, 19 nt, Artificial Sequence
  Description of Artificial Sequence: Synthetic oligonucleotide
  Sense strand starting at position 3181 of SEQ ID NO: 1242601
gauccuguguucuggcaga

SEQ ID NO: 1360049 - RNA, 19 nt, Artificial Sequence
  Description of Artificial Sequence: Synthetic oligonucleotide
  Antisense strand to SEQ ID NO: 1360048
ucugccagaacacaggauc

SEQ ID NO: 1360050 - RNA, 19 nt, Artificial Sequence
  Description of Artificial Sequence: Synthetic oligonucleotide
  Sense strand starting at position 3195 of SEQ ID NO: 1242601
gcagaugggccagagaauu

SEQ ID NO: 1360051 - RNA, 19 nt, Artificial Sequence
  Description of Artificial Sequence: Synthetic oligonucleotide
  Antisense strand to SEQ ID NO: 1360050
aauucucuggcccaucugc

SEQ ID NO: 1360052 - RNA, 19 nt, Artificial Sequence
  Description of Artificial Sequence: Synthetic oligonucleotide
  Sense strand starting at position 3271 of SEQ ID NO: 1242601
gcacgugagaacuaucauu

SEQ ID NO: 1360053 - RNA, 19 nt, Artificial Sequence
  Description of Artificial Sequence: Synthetic oligonucleotide
  Antisense strand to SEQ ID NO: 1360052
aaugauaguucucacgugc

SEQ ID NO: 1360054 - RNA, 19 nt, Artificial Sequence
  Description of Artificial Sequence: Synthetic oligonucleotide
  Sense strand starting at position 3451 of SEQ ID NO: 1242601
cugccagucugucaagaga

SEQ ID NO: 1360055 - RNA, 19 nt, Artificial Sequence
  Description of Artificial Sequence: Synthetic oligonucleotide
  Antisense strand to SEQ ID NO: 1360054
ucucuugacagacuggcag

SEQ ID NO: 1360056 - RNA, 19 nt, Artificial Sequence
  Description of Artificial Sequence: Synthetic oligonucleotide
  Sense strand starting at position 3481 of SEQ ID NO: 1242601
cgaagaguccuuugugccu

SEQ ID NO: 1360057 - RNA, 19 nt, Artificial Sequence
  Description of Artificial Sequence: Synthetic oligonucleotide
  Antisense strand to SEQ ID NO: 1360056
aggcacaaaggacucuucg

SEQ ID NO: 1360058 - RNA, 19 nt, Artificial Sequence
  Description of Artificial Sequence: Synthetic oligonucleotide
  Sense strand starting at position 3486 of SEQ ID NO: 1242601
aguccuuugugccuggaca

SEQ ID NO: 1360059 - RNA, 19 nt, Artificial Sequence
  Description of Artificial Sequence: Synthetic oligonucleotide
  Antisense strand to SEQ ID NO: 1360058
uguccaggcacaaaggacu

SEQ ID NO: 1360060 - RNA, 19 nt, Artificial Sequence
  Description of Artificial Sequence: Synthetic oligonucleotide
  Sense strand starting at position 3487 of SEQ ID NO: 1242601
guccuuugugccuggacau

SEQ ID NO: 1360061 - RNA, 19 nt, Artificial Sequence
  Description of Artificial Sequence: Synthetic oligonucleotide
  Antisense strand to SEQ ID NO: 1360060
auguccaggcacaaaggac

SEQ ID NO: 1360062 - RNA, 19 nt, Artificial Sequence
  Description of Artificial Sequence: Synthetic oligonucleotide
  Sense strand starting at position 3488 of SEQ ID NO: 1242601
uccuuugugccuggacauu

SEQ ID NO: 1360063 - RNA, 19 nt, Artificial Sequence
  Description of Artificial Sequence: Synthetic oligonucleotide
  Antisense strand to SEQ ID NO: 1360062
aauguccaggcacaaagga

SEQ ID NO: 1360064 - RNA, 19 nt, Artificial Sequence
  Description of Artificial Sequence: Synthetic oligonucleotide
  Sense strand starting at position 3531 of SEQ ID NO: 1242601
cugggcauugcccaaacau

SEQ ID NO: 1360065 - RNA, 19 nt, Artificial Sequence
  Description of Artificial Sequence: Synthetic oligonucleotide
  Antisense strand to SEQ ID NO: 1360064
auguuugggcaaugcccag

SEQ ID NO: 1360066 - RNA, 19 nt, Artificial Sequence
  Description of Artificial Sequence: Synthetic oligonucleotide
  Sense strand starting at position 3559 of SEQ ID NO: 1242601
cuggcauaacuuuguguau

SEQ ID NO: 1360067 - RNA, 19 nt, Artificial Sequence
  Description of Artificial Sequence: Synthetic oligonucleotide
  Antisense strand to SEQ ID NO: 1360066
auacacaaaguuaugccag

SEQ ID NO: 1360068 - RNA, 19 nt, Artificial Sequence
  Description of Artificial Sequence: Synthetic oligonucleotide
  Sense strand starting at position 3561 of SEQ ID NO: 1242601
ggcauaacuuuguguaugu

SEQ ID NO: 1360069 - RNA, 19 nt, Artificial Sequence
  Description of Artificial Sequence: Synthetic oligonucleotide
  Antisense strand to SEQ ID NO: 1360068
acauacacaaaguuaugcc

SEQ ID NO: 1360070 - RNA, 19 nt, Artificial Sequence
  Description of Artificial Sequence: Synthetic oligonucleotide
  Sense strand starting at position 3563 of SEQ ID NO: 1242601
cauaacuuuguguauguga

SEQ ID NO: 1360071 - RNA, 19 nt, Artificial Sequence
  Description of Artificial Sequence: Synthetic oligonucleotide
  Antisense strand to SEQ ID NO: 1360070
ucacauacacaaaguuaug

SEQ ID NO: 1360072 - RNA, 19 nt, Artificial Sequence
  Description of Artificial Sequence: Synthetic oligonucleotide
  Sense strand starting at position 3565 of SEQ ID NO: 1242601
uaacuuuguguaugugaga

SEQ ID NO: 1360073 - RNA, 19 nt, Artificial Sequence
  Description of Artificial Sequence: Synthetic oligonucleotide
  Antisense strand to SEQ ID NO: 1360072
ucucacauacacaaaguua

SEQ ID NO: 1360074 - RNA, 19 nt, Artificial Sequence
  Description of Artificial Sequence: Synthetic oligonucleotide
  Sense strand starting at position 3608 of SEQ ID NO: 1242601
ccugccugugcucagagua

SEQ ID NO: 1360075 - RNA, 19 nt, Artificial Sequence
  Description of Artificial Sequence: Synthetic oligonucleotide
  Antisense strand to SEQ ID NO: 1360074
uacucugagcacaggcagg

SEQ ID NO: 1360076 - RNA, 19 nt, Artificial Sequence
  Description of Artificial Sequence: Synthetic oligonucleotide
  Sense strand starting at position 3663 of SEQ ID NO: 1242601
gggagggaguugucuguuu

SEQ ID NO: 1360077 - RNA, 19 nt, Artificial Sequence
  Description of Artificial Sequence: Synthetic oligonucleotide
  Antisense strand to SEQ ID NO: 1360076
aaacagacaacucccuccc

SEQ ID NO: 1360078 - RNA, 19 nt, Artificial Sequence
  Description of Artificial Sequence: Synthetic oligonucleotide
  Sense strand starting at position 3665 of SEQ ID NO: 1242601
gagggaguugucuguuuca

SEQ ID NO: 1360079 - RNA, 19 nt, Artificial Sequence
  Description of Artificial Sequence: Synthetic oligonucleotide
  Antisense strand to SEQ ID NO: 1360078
ugaaacagacaacucccuc

SEQ ID NO: 1360080 - RNA, 19 nt, Artificial Sequence
  Description of Artificial Sequence: Synthetic oligonucleotide
  Sense strand starting at position 3668 of SEQ ID NO: 1242601
ggaguugucuguuucaagg

SEQ ID NO: 1360081 - RNA, 19 nt, Artificial Sequence
  Description of Artificial Sequence: Synthetic oligonucleotide
  Antisense strand to SEQ ID NO: 1360080
ccuugaaacagacaacucc

SEQ ID NO: 1360082 - RNA, 19 nt, Artificial Sequence
  Description of Artificial Sequence: Synthetic oligonucleotide
  Sense strand starting at position 23 of SEQ ID NO: 1242602
uugcuaggauuuguucuua

SEQ ID NO: 1360083 - RNA, 19 nt, Artificial Sequence
  Description of Artificial Sequence: Synthetic oligonucleotide
  Antisense strand to SEQ ID NO: 1360082
uaagaacaaauccuagcaa

SEQ ID NO: 1360084 - RNA, 19 nt, Artificial Sequence
  Description of Artificial Sequence: Synthetic oligonucleotide
  Sense strand starting at position 292 of SEQ ID NO: 1242602
ugaaauacguaucaugcuu

SEQ ID NO: 1360085 - RNA, 19 nt, Artificial Sequence
  Description of Artificial Sequence: Synthetic oligonucleotide
  Antisense strand to SEQ ID NO: 1360084
aagcaugauacguauuuca

SEQ ID NO: 1360086 - RNA, 19 nt, Artificial Sequence
  Description of Artificial Sequence: Synthetic oligonucleotide
  Sense strand starting at position 297 of SEQ ID NO: 1242602
uacguaucaugcuuagaau

SEQ ID NO: 1360087 - RNA, 19 nt, Artificial Sequence
  Description of Artificial Sequence: Synthetic oligonucleotide
  Antisense strand to SEQ ID NO: 1360086
auucuaagcaugauacgua

SEQ ID NO: 1360088 - RNA, 19 nt, Artificial Sequence
  Description of Artificial Sequence: Synthetic oligonucleotide
  Sense strand starting at position 298 of SEQ ID NO: 1242602
acguaucaugcuuagaaua

SEQ ID NO: 1360089 - RNA, 19 nt, Artificial Sequence
  Description of Artificial Sequence: Synthetic oligonucleotide
  Antisense strand to SEQ ID NO: 1360088
uauucuaagcaugauacgu

SEQ ID NO: 1360090 - RNA, 19 nt, Artificial Sequence
  Description of Artificial Sequence: Synthetic oligonucleotide
  Sense strand starting at position 300 of SEQ ID NO: 1242602
guaucaugcuuagaauauu

SEQ ID NO: 1360091 - RNA, 19 nt, Artificial Sequence
  Description of Artificial Sequence: Synthetic oligonucleotide
  Antisense strand to SEQ ID NO: 1360090
aauauucuaagcaugauac

SEQ ID NO: 1360092 - RNA, 19 nt, Artificial Sequence
  Description of Artificial Sequence: Synthetic oligonucleotide
  Sense strand starting at position 317 of SEQ ID NO: 1242602
uuugcauauucgugccaua

SEQ ID NO: 1360093 - RNA, 19 nt, Artificial Sequence
  Description of Artificial Sequence: Synthetic oligonucleotide
  Antisense strand to SEQ ID NO: 1360092
uauggcacgaauaugcaaa

SEQ ID NO: 1360094 - RNA, 19 nt, Artificial Sequence
  Description of Artificial Sequence: Synthetic oligonucleotide
  Sense strand starting at position 320 of SEQ ID NO: 1242602
gcauauucgugccauauuu

SEQ ID NO: 1360095 - RNA, 19 nt, Artificial Sequence
  Description of Artificial Sequence: Synthetic oligonucleotide
  Antisense strand to SEQ ID NO: 1360094
aaauauggcacgaauaugc

SEQ ID NO: 1360096 - RNA, 19 nt, Artificial Sequence
  Description of Artificial Sequence: Synthetic oligonucleotide
  Sense strand starting at position 322 of SEQ ID NO: 1242602
auauucgugccauauuugu

SEQ ID NO: 1360097 - RNA, 19 nt, Artificial Sequence
  Description of Artificial Sequence: Synthetic oligonucleotide
  Antisense strand to SEQ ID NO: 1360096
acaaauauggcacgaauau

SEQ ID NO: 1360098 - RNA, 19 nt, Artificial Sequence
  Description of Artificial Sequence: Synthetic oligonucleotide
  Sense strand starting at position 331 of SEQ ID NO: 1242602
ccauauuuguacuucguuu

SEQ ID NO: 1360099 - RNA, 19 nt, Artificial Sequence
  Description of Artificial Sequence: Synthetic oligonucleotide
  Antisense strand to SEQ ID NO: 1360098
aaacgaaguacaaauaugg

SEQ ID NO: 1360100 - RNA, 19 nt, Artificial Sequence
  Description of Artificial Sequence: Synthetic oligonucleotide
  Sense strand starting at position 518 of SEQ ID NO: 1242602
cacugaaugucugcuauga

SEQ ID NO: 1360101 - RNA, 19 nt, Artificial Sequence
  Description of Artificial Sequence: Synthetic oligonucleotide
  Antisense strand to SEQ ID NO: 1360100
ucauagcagacauucagug

SEQ ID NO: 1360102 - RNA, 19 nt, Artificial Sequence
  Description of Artificial Sequence: Synthetic oligonucleotide
  Sense strand starting at position 520 of SEQ ID NO: 1242602
cugaaugucugcuaugaac

SEQ ID NO: 1360103 - RNA, 19 nt, Artificial Sequence
  Description of Artificial Sequence: Synthetic oligonucleotide
  Antisense strand to SEQ ID NO: 1360102
guucauagcagacauucag

SEQ ID NO: 1360104 - RNA, 19 nt, Artificial Sequence
  Description of Artificial Sequence: Synthetic oligonucleotide
  Sense strand starting at position 522 of SEQ ID NO: 1242602
gaaugucugcuaugaacau

SEQ ID NO: 1360105 - RNA, 19 nt, Artificial Sequence
  Description of Artificial Sequence: Synthetic oligonucleotide
  Antisense strand to SEQ ID NO: 1360104
auguucauagcagacauuc

SEQ ID NO: 1360106 - RNA, 19 nt, Artificial Sequence
  Description of Artificial Sequence: Synthetic oligonucleotide
  Sense strand starting at position 526 of SEQ ID NO: 1242602
gucugcuaugaacaucaua

SEQ ID NO: 1360107 - RNA, 19 nt, Artificial Sequence
  Description of Artificial Sequence: Synthetic oligonucleotide
  Antisense strand to SEQ ID NO: 1360106
uaugauguucauagcagac

SEQ ID NO: 1360108 - RNA, 19 nt, Artificial Sequence
  Description of Artificial Sequence: Synthetic oligonucleotide
  Sense strand starting at position 551 of SEQ ID NO: 1242602
cgguaagaaucaucugaaa

SEQ ID NO: 1360109 - RNA, 19 nt, Artificial Sequence
  Description of Artificial Sequence: Synthetic oligonucleotide
  Antisense strand to SEQ ID NO: 1360108
uuucagaugauucuuaccg

SEQ ID NO: 1360110 - RNA, 19 nt, Artificial Sequence
  Description of Artificial Sequence: Synthetic oligonucleotide
  Sense strand starting at position 599 of SEQ ID NO: 1242602
uaguccagcuucgaaagaa

SEQ ID NO: 1360111 - RNA, 19 nt, Artificial Sequence
  Description of Artificial Sequence: Synthetic oligonucleotide
  Antisense strand to SEQ ID NO: 1360110
uucuuucgaagcuggacua

SEQ ID NO: 1360112 - RNA, 19 nt, Artificial Sequence
  Description of Artificial Sequence: Synthetic oligonucleotide
  Sense strand starting at position 635 of SEQ ID NO: 1242602
ccuagauaauggcuacaau

SEQ ID NO: 1360113 - RNA, 19 nt, Artificial Sequence
  Description of Artificial Sequence: Synthetic oligonucleotide
  Antisense strand to SEQ ID NO: 1360112
auuguagccauuaucuagg

SEQ ID NO: 1360114 - RNA, 19 nt, Artificial Sequence
  Description of Artificial Sequence: Synthetic oligonucleotide
  Sense strand starting at position 649 of SEQ ID NO: 1242602
acaauuaucuggucuggga

SEQ ID NO: 1360115 - RNA, 19 nt, Artificial Sequence
  Description of Artificial Sequence: Synthetic oligonucleotide
  Antisense strand to SEQ ID NO: 1360114
ucccagaccagauaauugu

SEQ ID NO: 1360116 - RNA, 19 nt, Artificial Sequence
  Description of Artificial Sequence: Synthetic oligonucleotide
  Sense strand starting at position 750 of SEQ ID NO: 1242602
gcacguuauuccgggauag

SEQ ID NO: 1360117 - RNA, 19 nt, Artificial Sequence
  Description of Artificial Sequence: Synthetic oligonucleotide
  Antisense strand to SEQ ID NO: 1360116
cuaucccggaauaacgugc

SEQ ID NO: 1360118 - RNA, 19 nt, Artificial Sequence
  Description of Artificial Sequence: Synthetic oligonucleotide
  Sense strand starting at position 752 of SEQ ID NO: 1242602
acguuauuccgggauagga

SEQ ID NO: 1360119 - RNA, 19 nt, Artificial Sequence
  Description of Artificial Sequence: Synthetic oligonucleotide
  Antisense strand to SEQ ID NO: 1360118
uccuaucccggaauaacgu

SEQ ID NO: 1360120 - RNA, 19 nt, Artificial Sequence
  Description of Artificial Sequence: Synthetic oligonucleotide
  Sense strand starting at position 754 of SEQ ID NO: 1242602
guuauuccgggauaggaca

SEQ ID NO: 1360121 - RNA, 19 nt, Artificial Sequence
  Description of Artificial Sequence: Synthetic oligonucleotide
  Antisense strand to SEQ ID NO: 1360120
uguccuaucccggaauaac

SEQ ID NO: 1360122 - RNA, 19 nt, Artificial Sequence
  Description of Artificial Sequence: Synthetic oligonucleotide
  Sense strand starting at position 1867 of SEQ ID NO: 1242602
gguuaaaccuaccgagaac

SEQ ID NO: 1360123 - RNA, 19 nt, Artificial Sequence
  Description of Artificial Sequence: Synthetic oligonucleotide
  Antisense strand to SEQ ID NO: 1360122
guucucgguagguuuaacc

SEQ ID NO: 1360124 - RNA, 19 nt, Artificial Sequence
  Description of Artificial Sequence: Synthetic oligonucleotide
  Sense strand starting at position 1991 of SEQ ID NO: 1242602
ggagcuggcaucuaggaaa

SEQ ID NO: 1360125 - RNA, 19 nt, Artificial Sequence
  Description of Artificial Sequence: Synthetic oligonucleotide
  Antisense strand to SEQ ID NO: 1360124
uuuccuagaugccagcucc

SEQ ID NO: 1360126 - RNA, 19 nt, Artificial Sequence
  Description of Artificial Sequence: Synthetic oligonucleotide
  Sense strand starting at position 2222 of SEQ ID NO: 1242602
ggaagaagccuuugccaag

SEQ ID NO: 1360127 - RNA, 19 nt, Artificial Sequence
  Description of Artificial Sequence: Synthetic oligonucleotide
  Antisense strand to SEQ ID NO: 1360126
cuuggcaaaggcuucuucc

SEQ ID NO: 1360128 - RNA, 19 nt, Artificial Sequence
  Description of Artificial Sequence: Synthetic oligonucleotide
  Sense strand starting at position 2223 of SEQ ID NO: 1242602
gaagaagccuuugccaaga

SEQ ID NO: 1360129 - RNA, 19 nt, Artificial Sequence
  Description of Artificial Sequence: Synthetic oligonucleotide
  Antisense strand to SEQ ID NO: 1360128
ucuuggcaaaggcuucuuc

SEQ ID NO: 1360130 - RNA, 19 nt, Artificial Sequence
  Description of Artificial Sequence: Synthetic oligonucleotide
  Sense strand starting at position 2266 of SEQ ID NO: 1242602
cugcgagugccggaaaugu

SEQ ID NO: 1360131 - RNA, 19 nt, Artificial Sequence
  Description of Artificial Sequence: Synthetic oligonucleotide
  Antisense strand to SEQ ID NO: 1360130
acauuuccggcacucgcag

SEQ ID NO: 1360132 - RNA, 19 nt, Artificial Sequence
  Description of Artificial Sequence: Synthetic oligonucleotide
  Sense strand starting at position 2639 of SEQ ID NO: 1242602
aagugccuuguuuguagua

SEQ ID NO: 1360133 - RNA, 19 nt, Artificial Sequence
  Description of Artificial Sequence: Synthetic oligonucleotide
  Antisense strand to SEQ ID NO: 1360132
uacuacaaacaaggcacuu

SEQ ID NO: 1360134 - RNA, 19 nt, Artificial Sequence
  Description of Artificial Sequence: Synthetic oligonucleotide
  Sense strand starting at position 2640 of SEQ ID NO: 1242602
agugccuuguuuguaguaa

SEQ ID NO: 1360135 - RNA, 19 nt, Artificial Sequence
  Description of Artificial Sequence: Synthetic oligonucleotide
  Antisense strand to SEQ ID NO: 1360134
uuacuacaaacaaggcacu

SEQ ID NO: 1360136 - RNA, 19 nt, Artificial Sequence
  Description of Artificial Sequence: Synthetic oligonucleotide
  Sense strand starting at position 2641 of SEQ ID NO: 1242602
gugccuuguuuguaguaag

SEQ ID NO: 1360137 - RNA, 19 nt, Artificial Sequence
  Description of Artificial Sequence: Synthetic oligonucleotide
  Antisense strand to SEQ ID NO: 1360136
cuuacuacaaacaaggcac

SEQ ID NO: 1360138 - RNA, 19 nt, Artificial Sequence
  Description of Artificial Sequence: Synthetic oligonucleotide
  Sense strand starting at position 2644 of SEQ ID NO: 1242602
ccuuguuuguaguaagagu

SEQ ID NO: 1360139 - RNA, 19 nt, Artificial Sequence
  Description of Artificial Sequence: Synthetic oligonucleotide
  Antisense strand to SEQ ID NO: 1360138
acucuuacuacaaacaagg

SEQ ID NO: 1360140 - RNA, 19 nt, Artificial Sequence
  Description of Artificial Sequence: Synthetic oligonucleotide
  Sense strand starting at position 2874 of SEQ ID NO: 1242602
gcggcagccucugcaaaua

SEQ ID NO: 1360141 - RNA, 19 nt, Artificial Sequence
  Description of Artificial Sequence: Synthetic oligonucleotide
  Antisense strand to SEQ ID NO: 1360140
uauuugcagaggcugccgc

SEQ ID NO: 1360142 - RNA, 19 nt, Artificial Sequence
  Description of Artificial Sequence: Synthetic oligonucleotide
  Sense strand starting at position 3011 of SEQ ID NO: 1242602
uagagcuaaugaugggauu

SEQ ID NO: 1360143 - RNA, 19 nt, Artificial Sequence
  Description of Artificial Sequence: Synthetic oligonucleotide
  Antisense strand to SEQ ID NO: 1360142
aaucccaucauuagcucua

SEQ ID NO: 1360144 - RNA, 19 nt, Artificial Sequence
  Description of Artificial Sequence: Synthetic oligonucleotide
  Sense strand starting at position 3417 of SEQ ID NO: 1242602
cuggaagaaucagaacacu

SEQ ID NO: 1360145 - RNA, 19 nt, Artificial Sequence
  Description of Artificial Sequence: Synthetic oligonucleotide
  Antisense strand to SEQ ID NO: 1360144
aguguucugauucuuccag

SEQ ID NO: 1360146 - RNA, 19 nt, Artificial Sequence
  Description of Artificial Sequence: Synthetic oligonucleotide
  Sense strand starting at position 3431 of SEQ ID NO: 1242602
acacuagaucugugaucac

SEQ ID NO: 1360147 - RNA, 19 nt, Artificial Sequence
  Description of Artificial Sequence: Synthetic oligonucleotide
  Antisense strand to SEQ ID NO: 1360146
gugaucacagaucuagugu

SEQ ID NO: 1360148 - RNA, 19 nt, Artificial Sequence
  Description of Artificial Sequence: Synthetic oligonucleotide
  Sense strand starting at position 3478 of SEQ ID NO: 1242602
gggcuuagguuuguucuuu

SEQ ID NO: 1360149 - RNA, 19 nt, Artificial Sequence
  Description of Artificial Sequence: Synthetic oligonucleotide
  Antisense strand to SEQ ID NO: 1360148
aaagaacaaaccuaagccc

SEQ ID NO: 1360150 - RNA, 19 nt, Artificial Sequence
  Description of Artificial Sequence: Synthetic oligonucleotide
  Sense strand starting at position 3482 of SEQ ID NO: 1242602
uuagguuuguucuuugaag

SEQ ID NO: 1360151 - RNA, 19 nt, Artificial Sequence
  Description of Artificial Sequence: Synthetic oligonucleotide
  Antisense strand to SEQ ID NO: 1360150
cuucaaagaacaaaccuaa

SEQ ID NO: 1360152 - RNA, 19 nt, Artificial Sequence
  Description of Artificial Sequence: Synthetic oligonucleotide
  Sense strand starting at position 3483 of SEQ ID NO: 1242602
uagguuuguucuuugaagu

SEQ ID NO: 1360153 - RNA, 19 nt, Artificial Sequence
  Description of Artificial Sequence: Synthetic oligonucleotide
  Antisense strand to SEQ ID NO: 1360152
acuucaaagaacaaaccua

SEQ ID NO: 1360154 - RNA, 19 nt, Artificial Sequence
  Description of Artificial Sequence: Synthetic oligonucleotide
  Sense strand starting at position 3484 of SEQ ID NO: 1242602
agguuuguucuuugaaguu

SEQ ID NO: 1360155 - RNA, 19 nt, Artificial Sequence
  Description of Artificial Sequence: Synthetic oligonucleotide
  Antisense strand to SEQ ID NO: 1360154
aacuucaaagaacaaaccu

SEQ ID NO: 1360156 - RNA, 19 nt, Artificial Sequence
  Description of Artificial Sequence: Synthetic oligonucleotide
  Sense strand starting at position 3762 of SEQ ID NO: 1242602
gauccuguguucuggcaga

SEQ ID NO: 1360157 - RNA, 19 nt, Artificial Sequence
  Description of Artificial Sequence: Synthetic oligonucleotide
  Antisense strand to SEQ ID NO: 1360156
ucugccagaacacaggauc

SEQ ID NO: 1360158 - RNA, 19 nt, Artificial Sequence
  Description of Artificial Sequence: Synthetic oligonucleotide
  Sense strand starting at position 3776 of SEQ ID NO: 1242602
gcagaugggccagagaauu

SEQ ID NO: 1360159 - RNA, 19 nt, Artificial Sequence
  Description of Artificial Sequence: Synthetic oligonucleotide
  Antisense strand to SEQ ID NO: 1360158
aauucucuggcccaucugc

SEQ ID NO: 1360160 - RNA, 19 nt, Artificial Sequence
  Description of Artificial Sequence: Synthetic oligonucleotide
  Sense strand starting at position 3852 of SEQ ID NO: 1242602
gcacgugagaacuaucauu

SEQ ID NO: 1360161 - RNA, 19 nt, Artificial Sequence
  Description of Artificial Sequence: Synthetic oligonucleotide
  Antisense strand to SEQ ID NO: 1360160
aaugauaguucucacgugc

SEQ ID NO: 1360162 - RNA, 19 nt, Artificial Sequence
  Description of Artificial Sequence: Synthetic oligonucleotide
  Sense strand starting at position 340 of SEQ ID NO: 1242603
agcacuuaacuagaauguu

SEQ ID NO: 1360163 - RNA, 19 nt, Artificial Sequence
  Description of Artificial Sequence: Synthetic oligonucleotide
  Antisense strand to SEQ ID NO: 1360162
aacauucuaguuaagugcu

SEQ ID NO: 1360164 - RNA, 19 nt, Artificial Sequence
  Description of Artificial Sequence: Synthetic oligonucleotide
  Sense strand starting at position 348 of SEQ ID NO: 1242603
acuagaauguucuagacug

SEQ ID NO: 1360165 - RNA, 19 nt, Artificial Sequence
  Description of Artificial Sequence: Synthetic oligonucleotide
  Antisense strand to SEQ ID NO: 1360164
cagucuagaacauucuagu

SEQ ID NO: 1360166 - RNA, 19 nt, Artificial Sequence
  Description of Artificial Sequence: Synthetic oligonucleotide
  Sense strand starting at position 350 of SEQ ID NO: 1242603
uagaauguucuagacuguu

SEQ ID NO: 1360167 - RNA, 19 nt, Artificial Sequence
  Description of Artificial Sequence: Synthetic oligonucleotide
  Antisense strand to SEQ ID NO: 1360166
aacagucuagaacauucua

SEQ ID NO: 1360168 - RNA, 19 nt, Artificial Sequence
  Description of Artificial Sequence: Synthetic oligonucleotide
  Sense strand starting at position 353 of SEQ ID NO: 1242603
aauguucuagacuguugaa

SEQ ID NO: 1360169 - RNA, 19 nt, Artificial Sequence
  Description of Artificial Sequence: Synthetic oligonucleotide
  Antisense strand to SEQ ID NO: 1360168
uucaacagucuagaacauu

SEQ ID NO: 1360170 - RNA, 19 nt, Artificial Sequence
  Description of Artificial Sequence: Synthetic oligonucleotide
  Sense strand starting at position 356 of SEQ ID NO: 1242603
guucuagacuguugaaagc

SEQ ID NO: 1360171 - RNA, 19 nt, Artificial Sequence
  Description of Artificial Sequence: Synthetic oligonucleotide
  Antisense strand to SEQ ID NO: 1360170
gcuuucaacagucuagaac

SEQ ID NO: 1360172 - RNA, 19 nt, Artificial Sequence
  Description of Artificial Sequence: Synthetic oligonucleotide
  Sense strand starting at position 390 of SEQ ID NO: 1242603
ucagcuuguguuuaugagu

SEQ ID NO: 1360173 - RNA, 19 nt, Artificial Sequence
  Description of Artificial Sequence: Synthetic oligonucleotide
  Antisense strand to SEQ ID NO: 1360172
acucauaaacacaagcuga

SEQ ID NO: 1360174 - RNA, 19 nt, Artificial Sequence
  Description of Artificial Sequence: Synthetic oligonucleotide
  Sense strand starting at position 393 of SEQ ID NO: 1242603
gcuuguguuuaugaguacu

SEQ ID NO: 1360175 - RNA, 19 nt, Artificial Sequence
  Description of Artificial Sequence: Synthetic oligonucleotide
  Antisense strand to SEQ ID NO: 1360174
aguacucauaaacacaagc

SEQ ID NO: 1360176 - RNA, 19 nt, Artificial Sequence
  Description of Artificial Sequence: Synthetic oligonucleotide
  Sense strand starting at position 395 of SEQ ID NO: 1242603
uuguguuuaugaguacuuu

SEQ ID NO: 1360177 - RNA, 19 nt, Artificial Sequence
  Description of Artificial Sequence: Synthetic oligonucleotide
  Antisense strand to SEQ ID NO: 1360176
aaaguacucauaaacacaa

SEQ ID NO: 1360178 - RNA, 19 nt, Artificial Sequence
  Description of Artificial Sequence: Synthetic oligonucleotide
  Sense strand starting at position 396 of SEQ ID NO: 1242603
uguguuuaugaguacuuuc

SEQ ID NO: 1360179 - RNA, 19 nt, Artificial Sequence
  Description of Artificial Sequence: Synthetic oligonucleotide
  Antisense strand to SEQ ID NO: 1360178
gaaaguacucauaaacaca

SEQ ID NO: 1360180 - RNA, 19 nt, Artificial Sequence
  Description of Artificial Sequence: Synthetic oligonucleotide
  Sense strand starting at position 399 of SEQ ID NO: 1242603
guuuaugaguacuuucuug

SEQ ID NO: 1360181 - RNA, 19 nt, Artificial Sequence
  Description of Artificial Sequence: Synthetic oligonucleotide
  Antisense strand to SEQ ID NO: 1360180
caagaaaguacucauaaac

SEQ ID NO: 1360182 - RNA, 19 nt, Artificial Sequence
  Description of Artificial Sequence: Synthetic oligonucleotide
  Sense strand starting at position 406 of SEQ ID NO: 1242603
aguacuuucuugucaccca

SEQ ID NO: 1360183 - RNA, 19 nt, Artificial Sequence
  Description of Artificial Sequence: Synthetic oligonucleotide
  Antisense strand to SEQ ID NO: 1360182
ugggugacaagaaaguacu

SEQ ID NO: 1360184 - RNA, 19 nt, Artificial Sequence
  Description of Artificial Sequence: Synthetic oligonucleotide
  Sense strand starting at position 468 of SEQ ID NO: 1242603
acugcugagcuccagugaa

SEQ ID NO: 1360185 - RNA, 19 nt, Artificial Sequence
  Description of Artificial Sequence: Synthetic oligonucleotide
  Antisense strand to SEQ ID NO: 1360184
uucacuggagcucagcagu

SEQ ID NO: 1360186 - RNA, 19 nt, Artificial Sequence
  Description of Artificial Sequence: Synthetic oligonucleotide
  Sense strand starting at position 602 of SEQ ID NO: 1242603
aguacuauuuagggcaagu

SEQ ID NO: 1360187 - RNA, 19 nt, Artificial Sequence
  Description of Artificial Sequence: Synthetic oligonucleotide
  Antisense strand to SEQ ID NO: 1360186
acuugcccuaaauaguacu

SEQ ID NO: 1360188 - RNA, 19 nt, Artificial Sequence
  Description of Artificial Sequence: Synthetic oligonucleotide
  Sense strand starting at position 615 of SEQ ID NO: 1242603
gcaaguaauacugauagug

SEQ ID NO: 1360189 - RNA, 19 nt, Artificial Sequence
  Description of Artificial Sequence: Synthetic oligonucleotide
  Antisense strand to SEQ ID NO: 1360188
cacuaucaguauuacuugc

SEQ ID NO: 1360190 - RNA, 19 nt, Artificial Sequence
  Description of Artificial Sequence: Synthetic oligonucleotide
  Sense strand starting at position 617 of SEQ ID NO: 1242603
aaguaauacugauagugcu

SEQ ID NO: 1360191 - RNA, 19 nt, Artificial Sequence
  Description of Artificial Sequence: Synthetic oligonucleotide
  Antisense strand to SEQ ID NO: 1360190
agcacuaucaguauuacuu

SEQ ID NO: 1360192 - RNA, 19 nt, Artificial Sequence
  Description of Artificial Sequence: Synthetic oligonucleotide
  Sense strand starting at position 625 of SEQ ID NO: 1242603
cugauagugcuauaaauau

SEQ ID NO: 1360193 - RNA, 19 nt, Artificial Sequence
  Description of Artificial Sequence: Synthetic oligonucleotide
  Antisense strand to SEQ ID NO: 1360192
auauuuauagcacuaucag

SEQ ID NO: 1360194 - RNA, 19 nt, Artificial Sequence
  Description of Artificial Sequence: Synthetic oligonucleotide
  Sense strand starting at position 719 of SEQ ID NO: 1242603
cggcaaagcuuaugaaggu

SEQ ID NO: 1360195 - RNA, 19 nt, Artificial Sequence
  Description of Artificial Sequence: Synthetic oligonucleotide
  Antisense strand to SEQ ID NO: 1360194
accuucauaagcuuugccg

SEQ ID NO: 1360196 - RNA, 19 nt, Artificial Sequence
  Description of Artificial Sequence: Synthetic oligonucleotide
  Sense strand starting at position 732 of SEQ ID NO: 1242603
gaagguggugugcagauaa

SEQ ID NO: 1360197 - RNA, 19 nt, Artificial Sequence
  Description of Artificial Sequence: Synthetic oligonucleotide
  Antisense strand to SEQ ID NO: 1360196
uuaucugcacaccaccuuc

SEQ ID NO: 1360198 - RNA, 19 nt, Artificial Sequence
  Description of Artificial Sequence: Synthetic oligonucleotide
  Sense strand starting at position 898 of SEQ ID NO: 1242603
gcuacuuacccagauggca

SEQ ID NO: 1360199 - RNA, 19 nt, Artificial Sequence
  Description of Artificial Sequence: Synthetic oligonucleotide
  Antisense strand to SEQ ID NO: 1360198
ugccaucuggguaaguagc

SEQ ID NO: 1360200 - RNA, 19 nt, Artificial Sequence
  Description of Artificial Sequence: Synthetic oligonucleotide
  Sense strand starting at position 2354 of SEQ ID NO: 1242603
gagaguugucgcuggaggu

SEQ ID NO: 1360201 - RNA, 19 nt, Artificial Sequence
  Description of Artificial Sequence: Synthetic oligonucleotide
  Antisense strand to SEQ ID NO: 1360200
accuccagcgacaacucuc

SEQ ID NO: 1360202 - RNA, 19 nt, Artificial Sequence
  Description of Artificial Sequence: Synthetic oligonucleotide
  Sense strand starting at position 2861 of SEQ ID NO: 1242603
ccacgagacuugucacaau

SEQ ID NO: 1360203 - RNA, 19 nt, Artificial Sequence
  Description of Artificial Sequence: Synthetic oligonucleotide
  Antisense strand to SEQ ID NO: 1360202
auugugacaagucucgugg

SEQ ID NO: 1360204 - RNA, 19 nt, Artificial Sequence
  Description of Artificial Sequence: Synthetic oligonucleotide
  Sense strand starting at position 2864 of SEQ ID NO: 1242603
cgagacuugucacaaucgu

SEQ ID NO: 1360205 - RNA, 19 nt, Artificial Sequence
  Description of Artificial Sequence: Synthetic oligonucleotide
  Antisense strand to SEQ ID NO: 1360204
acgauugugacaagucucg

SEQ ID NO: 1360206 - RNA, 19 nt, Artificial Sequence
  Description of Artificial Sequence: Synthetic oligonucleotide
  Sense strand starting at position 2868 of SEQ ID NO: 1242603
acuugucacaaucguggaa

SEQ ID NO: 1360207 - RNA, 19 nt, Artificial Sequence
  Description of Artificial Sequence: Synthetic oligonucleotide
  Antisense strand to SEQ ID NO: 1360206
uuccacgauugugacaagu

SEQ ID NO: 1360208 - RNA, 19 nt, Artificial Sequence
  Description of Artificial Sequence: Synthetic oligonucleotide
  Sense strand starting at position 3106 of SEQ ID NO: 1242603
cagagaguuuccuuugccu

SEQ ID NO: 1360209 - RNA, 19 nt, Artificial Sequence
  Description of Artificial Sequence: Synthetic oligonucleotide
  Antisense strand to SEQ ID NO: 1360208
aggcaaaggaaacucucug

SEQ ID NO: 1360210 - RNA, 19 nt, Artificial Sequence
  Description of Artificial Sequence: Synthetic oligonucleotide
  Sense strand starting at position 3266 of SEQ ID NO: 1242603
ucgauaccuuucucagcuu

SEQ ID NO: 1360211 - RNA, 19 nt, Artificial Sequence
  Description of Artificial Sequence: Synthetic oligonucleotide
  Antisense strand to SEQ ID NO: 1360210
aagcugagaaagguaucga

SEQ ID NO: 1360212 - RNA, 19 nt, Artificial Sequence
  Description of Artificial Sequence: Synthetic oligonucleotide
  Sense strand starting at position 3679 of SEQ ID NO: 1242603
gcugacuccuacgaggaaa

SEQ ID NO: 1360213 - RNA, 19 nt, Artificial Sequence
  Description of Artificial Sequence: Synthetic oligonucleotide
  Antisense strand to SEQ ID NO: 1360212
uuuccucguaggagucagc

SEQ ID NO: 1360214 - RNA, 19 nt, Artificial Sequence
  Description of Artificial Sequence: Synthetic oligonucleotide
  Sense strand starting at position 3757 of SEQ ID NO: 1242603
cagccagauuacuuagaga

SEQ ID NO: 1360215 - RNA, 19 nt, Artificial Sequence
  Description of Artificial Sequence: Synthetic oligonucleotide
  Antisense strand to SEQ ID NO: 1360214
ucucuaaguaaucuggcug

SEQ ID NO: 1360216 - RNA, 19 nt, Artificial Sequence
  Description of Artificial Sequence: Synthetic oligonucleotide
  Sense strand starting at position 3953 of SEQ ID NO: 1242603
cucuuaauauccugggucu

SEQ ID NO: 1360217 - RNA, 19 nt, Artificial Sequence
  Description of Artificial Sequence: Synthetic oligonucleotide
  Antisense strand to SEQ ID NO: 1360216
agacccaggauauuaagag

SEQ ID NO: 1360218 - RNA, 19 nt, Artificial Sequence
  Description of Artificial Sequence: Synthetic oligonucleotide
  Sense strand starting at position 3954 of SEQ ID NO: 1242603
ucuuaauauccugggucuu

SEQ ID NO: 1360219 - RNA, 19 nt, Artificial Sequence
  Description of Artificial Sequence: Synthetic oligonucleotide
  Antisense strand to SEQ ID NO: 1360218
aagacccaggauauuaaga

SEQ ID NO: 1360220 - RNA, 19 nt, Artificial Sequence
  Description of Artificial Sequence: Synthetic oligonucleotide
  Sense strand starting at position 121 of SEQ ID NO: 1242604
gcgaaucucugccucacaa

SEQ ID NO: 1360221 - RNA, 19 nt, Artificial Sequence
  Description of Artificial Sequence: Synthetic oligonucleotide
  Antisense strand to SEQ ID NO: 1360220
uugugaggcagagauucgc

SEQ ID NO: 1360222 - RNA, 19 nt, Artificial Sequence
  Description of Artificial Sequence: Synthetic oligonucleotide
  Sense strand starting at position 178 of SEQ ID NO: 1242604
auagauaagucaccgcagu

SEQ ID NO: 1360223 - RNA, 19 nt, Artificial Sequence
  Description of Artificial Sequence: Synthetic oligonucleotide
  Antisense strand to SEQ ID NO: 1360222
acugcggugacuuaucuau

SEQ ID NO: 1360224 - RNA, 19 nt, Artificial Sequence
  Description of Artificial Sequence: Synthetic oligonucleotide
  Sense strand starting at position 245 of SEQ ID NO: 1242604
gacauagaaugagagaaua

SEQ ID NO: 1360225 - RNA, 19 nt, Artificial Sequence
  Description of Artificial Sequence: Synthetic oligonucleotide
  Antisense strand to SEQ ID NO: 1360224
uauucucucauucuauguc

SEQ ID NO: 1360226 - RNA, 19 nt, Artificial Sequence
  Description of Artificial Sequence: Synthetic oligonucleotide
  Sense strand starting at position 280 of SEQ ID NO: 1242604
uguaucaucucgcucaaca

SEQ ID NO: 1360227 - RNA, 19 nt, Artificial Sequence
  Description of Artificial Sequence: Synthetic oligonucleotide
  Antisense strand to SEQ ID NO: 1360226
uguugagcgagaugauaca

SEQ ID NO: 1360228 - RNA, 19 nt, Artificial Sequence
  Description of Artificial Sequence: Synthetic oligonucleotide
  Sense strand starting at position 291 of SEQ ID NO: 1242604
gcucaacaaugagaacuaa

SEQ ID NO: 1360229 - RNA, 19 nt, Artificial Sequence
  Description of Artificial Sequence: Synthetic oligonucleotide
  Antisense strand to SEQ ID NO: 1360228
uuaguucucauuguugagc

SEQ ID NO: 1360230 - RNA, 19 nt, Artificial Sequence
  Description of Artificial Sequence: Synthetic oligonucleotide
  Sense strand starting at position 380 of SEQ ID NO: 1242604
gaaauagauugugcacacu

SEQ ID NO: 1360231 - RNA, 19 nt, Artificial Sequence
  Description of Artificial Sequence: Synthetic oligonucleotide
  Antisense strand to SEQ ID NO: 1360230
agugugcacaaucuauuuc

SEQ ID NO: 1360232 - RNA, 19 nt, Artificial Sequence
  Description of Artificial Sequence: Synthetic oligonucleotide
  Sense strand starting at position 390 of SEQ ID NO: 1242604
gugcacacucacuauaaga

SEQ ID NO: 1360233 - RNA, 19 nt, Artificial Sequence
  Description of Artificial Sequence: Synthetic oligonucleotide
  Antisense strand to SEQ ID NO: 1360232
ucuuauagugagugugcac

SEQ ID NO: 1360234 - RNA, 19 nt, Artificial Sequence
  Description of Artificial Sequence: Synthetic oligonucleotide
  Sense strand starting at position 513 of SEQ ID NO: 1242604
aggugaaguacaggcauaa

SEQ ID NO: 1360235 - RNA, 19 nt, Artificial Sequence
  Description of Artificial Sequence: Synthetic oligonucleotide
  Antisense strand to SEQ ID NO: 1360234
uuaugccuguacuucaccu

SEQ ID NO: 1360236 - RNA, 19 nt, Artificial Sequence
  Description of Artificial Sequence: Synthetic oligonucleotide
  Sense strand starting at position 612 of SEQ ID NO: 1242604
gcucauguauuucuguuga

SEQ ID NO: 1360237 - RNA, 19 nt, Artificial Sequence
  Description of Artificial Sequence: Synthetic oligonucleotide
  Antisense strand to SEQ ID NO: 1360236
ucaacagaaauacaugagc

SEQ ID NO: 1360238 - RNA, 19 nt, Artificial Sequence
  Description of Artificial Sequence: Synthetic oligonucleotide
  Sense strand starting at position 646 of SEQ ID NO: 1242604
uaggauguggucuguacau

SEQ ID NO: 1360239 - RNA, 19 nt, Artificial Sequence
  Description of Artificial Sequence: Synthetic oligonucleotide
  Antisense strand to SEQ ID NO: 1360238
auguacagaccacauccua

SEQ ID NO: 1360240 - RNA, 19 nt, Artificial Sequence
  Description of Artificial Sequence: Synthetic oligonucleotide
  Sense strand starting at position 655 of SEQ ID NO: 1242604
gucuguacauaucugcaga

SEQ ID NO: 1360241 - RNA, 19 nt, Artificial Sequence
  Description of Artificial Sequence: Synthetic oligonucleotide
  Antisense strand to SEQ ID NO: 1360240
ucugcagauauguacagac

SEQ ID NO: 1360242 - RNA, 19 nt, Artificial Sequence
  Description of Artificial Sequence: Synthetic oligonucleotide
  Sense strand starting at position 657 of SEQ ID NO: 1242604
cuguacauaucugcagaua

SEQ ID NO: 1360243 - RNA, 19 nt, Artificial Sequence
  Description of Artificial Sequence: Synthetic oligonucleotide
  Antisense strand to SEQ ID NO: 1360242
uaucugcagauauguacag

SEQ ID NO: 1360244 - RNA, 19 nt, Artificial Sequence
  Description of Artificial Sequence: Synthetic oligonucleotide
  Sense strand starting at position 658 of SEQ ID NO: 1242604
uguacauaucugcagauaa

SEQ ID NO: 1360245 - RNA, 19 nt, Artificial Sequence
  Description of Artificial Sequence: Synthetic oligonucleotide
  Antisense strand to SEQ ID NO: 1360244
uuaucugcagauauguaca

SEQ ID NO: 1360246 - RNA, 19 nt, Artificial Sequence
  Description of Artificial Sequence: Synthetic oligonucleotide
  Sense strand starting at position 668 of SEQ ID NO: 1242604
ugcagauaagacugagagu

SEQ ID NO: 1360247 - RNA, 19 nt, Artificial Sequence
  Description of Artificial Sequence: Synthetic oligonucleotide
  Antisense strand to SEQ ID NO: 1360246
acucucagucuuaucugca

SEQ ID NO: 1360248 - RNA, 19 nt, Artificial Sequence
  Description of Artificial Sequence: Synthetic oligonucleotide
  Sense strand starting at position 671 of SEQ ID NO: 1242604
agauaagacugagagugaa

SEQ ID NO: 1360249 - RNA, 19 nt, Artificial Sequence
  Description of Artificial Sequence: Synthetic oligonucleotide
  Antisense strand to SEQ ID NO: 1360248
uucacucucagucuuaucu

SEQ ID NO: 1360250 - RNA, 19 nt, Artificial Sequence
  Description of Artificial Sequence: Synthetic oligonucleotide
  Sense strand starting at position 692 of SEQ ID NO: 1242604
aaauuugauuaagaucgga

SEQ ID NO: 1360251 - RNA, 19 nt, Artificial Sequence
  Description of Artificial Sequence: Synthetic oligonucleotide
  Antisense strand to SEQ ID NO: 1360250
uccgaucuuaaucaaauuu

SEQ ID NO: 1360252 - RNA, 19 nt, Artificial Sequence
  Description of Artificial Sequence: Synthetic oligonucleotide
  Sense strand starting at position 696 of SEQ ID NO: 1242604
uugauuaagaucggaguca

SEQ ID NO: 1360253 - RNA, 19 nt, Artificial Sequence
  Description of Artificial Sequence: Synthetic oligonucleotide
  Antisense strand to SEQ ID NO: 1360252
ugacuccgaucuuaaucaa

SEQ ID NO: 1360254 - RNA, 19 nt, Artificial Sequence
  Description of Artificial Sequence: Synthetic oligonucleotide
  Sense strand starting at position 728 of SEQ ID NO: 1242604
cguauugcagaauaaacga

SEQ ID NO: 1360255 - RNA, 19 nt, Artificial Sequence
  Description of Artificial Sequence: Synthetic oligonucleotide
  Antisense strand to SEQ ID NO: 1360254
ucguuuauucugcaauacg

SEQ ID NO: 1360256 - RNA, 19 nt, Artificial Sequence
  Description of Artificial Sequence: Synthetic oligonucleotide
  Sense strand starting at position 1016 of SEQ ID NO: 1242604
guacaacuguccucuucuu

SEQ ID NO: 1360257 - RNA, 19 nt, Artificial Sequence
  Description of Artificial Sequence: Synthetic oligonucleotide
  Antisense strand to SEQ ID NO: 1360256
aagaagaggacaguuguac

SEQ ID NO: 1360258 - RNA, 19 nt, Artificial Sequence
  Description of Artificial Sequence: Synthetic oligonucleotide
  Sense strand starting at position 1093 of SEQ ID NO: 1242604
gaaggaacacgugguuaga

SEQ ID NO: 1360259 - RNA, 19 nt, Artificial Sequence
  Description of Artificial Sequence: Synthetic oligonucleotide
  Antisense strand to SEQ ID NO: 1360258
ucuaaccacguguuccuuc

SEQ ID NO: 1360260 - RNA, 19 nt, Artificial Sequence
  Description of Artificial Sequence: Synthetic oligonucleotide
  Sense strand starting at position 1095 of SEQ ID NO: 1242604
aggaacacgugguuagaaa

SEQ ID NO: 1360261 - RNA, 19 nt, Artificial Sequence
  Description of Artificial Sequence: Synthetic oligonucleotide
  Antisense strand to SEQ ID NO: 1360260
uuucuaaccacguguuccu

SEQ ID NO: 1360262 - RNA, 19 nt, Artificial Sequence
  Description of Artificial Sequence: Synthetic oligonucleotide
  Sense strand starting at position 1142 of SEQ ID NO: 1242604
gguagaaaguccguuuccu

SEQ ID NO: 1360263 - RNA, 19 nt, Artificial Sequence
  Description of Artificial Sequence: Synthetic oligonucleotide
  Antisense strand to SEQ ID NO: 1360262
aggaaacggacuuucuacc

SEQ ID NO: 1360264 - RNA, 19 nt, Artificial Sequence
  Description of Artificial Sequence: Synthetic oligonucleotide
  Sense strand starting at position 1146 of SEQ ID NO: 1242604
gaaaguccguuuccuuaag

SEQ ID NO: 1360265 - RNA, 19 nt, Artificial Sequence
  Description of Artificial Sequence: Synthetic oligonucleotide
  Antisense strand to SEQ ID NO: 1360264
cuuaaggaaacggacuuuc

SEQ ID NO: 1360266 - RNA, 19 nt, Artificial Sequence
  Description of Artificial Sequence: Synthetic oligonucleotide
  Sense strand starting at position 1158 of SEQ ID NO: 1242604
ccuuaagugcgguaagguu

SEQ ID NO: 1360267 - RNA, 19 nt, Artificial Sequence
  Description of Artificial Sequence: Synthetic oligonucleotide
  Antisense strand to SEQ ID NO: 1360266
aaccuuaccgcacuuaagg

SEQ ID NO: 1360268 - RNA, 19 nt, Artificial Sequence
  Description of Artificial Sequence: Synthetic oligonucleotide
  Sense strand starting at position 1229 of SEQ ID NO: 1242604
cuugccaaacuuggagaaa

SEQ ID NO: 1360269 - RNA, 19 nt, Artificial Sequence
  Description of Artificial Sequence: Synthetic oligonucleotide
  Antisense strand to SEQ ID NO: 1360268
uuucuccaaguuuggcaag

SEQ ID NO: 1360270 - RNA, 19 nt, Artificial Sequence
  Description of Artificial Sequence: Synthetic oligonucleotide
  Sense strand starting at position 1318 of SEQ ID NO: 1242604
aggaaaucgucuuccuuaa

SEQ ID NO: 1360271 - RNA, 19 nt, Artificial Sequence
  Description of Artificial Sequence: Synthetic oligonucleotide
  Antisense strand to SEQ ID NO: 1360270
uuaaggaagacgauuuccu

SEQ ID NO: 1360272 - RNA, 19 nt, Artificial Sequence
  Description of Artificial Sequence: Synthetic oligonucleotide
  Sense strand starting at position 1695 of SEQ ID NO: 1242604
ccaguaucccucugcgaaa

SEQ ID NO: 1360273 - RNA, 19 nt, Artificial Sequence
  Description of Artificial Sequence: Synthetic oligonucleotide
  Antisense strand to SEQ ID NO: 1360272
uuucgcagagggauacugg

SEQ ID NO: 1360274 - RNA, 19 nt, Artificial Sequence
  Description of Artificial Sequence: Synthetic oligonucleotide
  Sense strand starting at position 2260 of SEQ ID NO: 1242604
gagugacucgugugaagau

SEQ ID NO: 1360275 - RNA, 19 nt, Artificial Sequence
  Description of Artificial Sequence: Synthetic oligonucleotide
  Antisense strand to SEQ ID NO: 1360274
aucuucacacgagucacuc

SEQ ID NO: 1360276 - RNA, 19 nt, Artificial Sequence
  Description of Artificial Sequence: Synthetic oligonucleotide
  Sense strand starting at position 2285 of SEQ ID NO: 1242604
uuucgaaacuuauuaggaa

SEQ ID NO: 1360277 - RNA, 19 nt, Artificial Sequence
  Description of Artificial Sequence: Synthetic oligonucleotide
  Antisense strand to SEQ ID NO: 1360276
uuccuaauaaguuucgaaa

SEQ ID NO: 1360278 - RNA, 19 nt, Artificial Sequence
  Description of Artificial Sequence: Synthetic oligonucleotide
  Sense strand starting at position 2400 of SEQ ID NO: 1242604
uuggacgacuccuuaaauu

SEQ ID NO: 1360279 - RNA, 19 nt, Artificial Sequence
  Description of Artificial Sequence: Synthetic oligonucleotide
  Antisense strand to SEQ ID NO: 1360278
aauuuaaggagucguccaa

SEQ ID NO: 1360280 - RNA, 19 nt, Artificial Sequence
  Description of Artificial Sequence: Synthetic oligonucleotide
  Sense strand starting at position 2765 of SEQ ID NO: 1242604
gcaccauagccuugaguuu

SEQ ID NO: 1360281 - RNA, 19 nt, Artificial Sequence
  Description of Artificial Sequence: Synthetic oligonucleotide
  Antisense strand to SEQ ID NO: 1360280
aaacucaaggcuauggugc

SEQ ID NO: 1360282 - RNA, 19 nt, Artificial Sequence
  Description of Artificial Sequence: Synthetic oligonucleotide
  Sense strand starting at position 2771 of SEQ ID NO: 1242604
uagccuugaguuugcuaaa

SEQ ID NO: 1360283 - RNA, 19 nt, Artificial Sequence
  Description of Artificial Sequence: Synthetic oligonucleotide
  Antisense strand to SEQ ID NO: 1360282
uuuagcaaacucaaggcua

SEQ ID NO: 1360284 - RNA, 19 nt, Artificial Sequence
  Description of Artificial Sequence: Synthetic oligonucleotide
  Sense strand starting at position 2772 of SEQ ID NO: 1242604
agccuugaguuugcuaaau

SEQ ID NO: 1360285 - RNA, 19 nt, Artificial Sequence
  Description of Artificial Sequence: Synthetic oligonucleotide
  Antisense strand to SEQ ID NO: 1360284
auuuagcaaacucaaggcu

SEQ ID NO: 1360286 - RNA, 19 nt, Artificial Sequence
  Description of Artificial Sequence: Synthetic oligonucleotide
  Sense strand starting at position 2782 of SEQ ID NO: 1242604
uugcuaaauugucccagga

SEQ ID NO: 1360287 - RNA, 19 nt, Artificial Sequence
  Description of Artificial Sequence: Synthetic oligonucleotide
  Antisense strand to SEQ ID NO: 1360286
uccugggacaauuuagcaa

SEQ ID NO: 1360288 - RNA, 19 nt, Artificial Sequence
  Description of Artificial Sequence: Synthetic oligonucleotide
  Sense strand starting at position 2814 of SEQ ID NO: 1242604
ggcugcuugugauuucaug

SEQ ID NO: 1360289 - RNA, 19 nt, Artificial Sequence
  Description of Artificial Sequence: Synthetic oligonucleotide
  Antisense strand to SEQ ID NO: 1360288
caugaaaucacaagcagcc

SEQ ID NO: 1360290 - RNA, 19 nt, Artificial Sequence
  Description of Artificial Sequence: Synthetic oligonucleotide
  Sense strand starting at position 3263 of SEQ ID NO: 1242604
cacgcuugucaugaggcua

SEQ ID NO: 1360291 - RNA, 19 nt, Artificial Sequence
  Description of Artificial Sequence: Synthetic oligonucleotide
  Antisense strand to SEQ ID NO: 1360290
uagccucaugacaagcgug

SEQ ID NO: 1360292 - RNA, 19 nt, Artificial Sequence
  Description of Artificial Sequence: Synthetic oligonucleotide
  Sense strand starting at position 3296 of SEQ ID NO: 1242604
gucacuuccaguuaggaga

SEQ ID NO: 1360293 - RNA, 19 nt, Artificial Sequence
  Description of Artificial Sequence: Synthetic oligonucleotide
  Antisense strand to SEQ ID NO: 1360292
ucuccuaacuggaagugac

SEQ ID NO: 1360294 - RNA, 19 nt, Artificial Sequence
  Description of Artificial Sequence: Synthetic oligonucleotide
  Sense strand starting at position 3343 of SEQ ID NO: 1242604
uugggucaucaauggaaua

SEQ ID NO: 1360295 - RNA, 19 nt, Artificial Sequence
  Description of Artificial Sequence: Synthetic oligonucleotide
  Antisense strand to SEQ ID NO: 1360294
uauuccauugaugacccaa

SEQ ID NO: 1360296 - RNA, 19 nt, Artificial Sequence
  Description of Artificial Sequence: Synthetic oligonucleotide
  Sense strand starting at position 3542 of SEQ ID NO: 1242604
gugauauugcuacagauug

SEQ ID NO: 1360297 - RNA, 19 nt, Artificial Sequence
  Description of Artificial Sequence: Synthetic oligonucleotide
  Antisense strand to SEQ ID NO: 1360296
caaucuguagcaauaucac

SEQ ID NO: 1360298 - RNA, 19 nt, Artificial Sequence
  Description of Artificial Sequence: Synthetic oligonucleotide
  Sense strand starting at position 3763 of SEQ ID NO: 1242604
agagcaagagacugucuua

SEQ ID NO: 1360299 - RNA, 19 nt, Artificial Sequence
  Description of Artificial Sequence: Synthetic oligonucleotide
  Antisense strand to SEQ ID NO: 1360298
uaagacagucucuugcucu

SEQ ID NO: 1360300 - RNA, 19 nt, Artificial Sequence
  Description of Artificial Sequence: Synthetic oligonucleotide
  Sense strand starting at position 66 of SEQ ID NO: 1242605
agguaucaacauugauguu

SEQ ID NO: 1360301 - RNA, 19 nt, Artificial Sequence
  Description of Artificial Sequence: Synthetic oligonucleotide
  Antisense strand to SEQ ID NO: 1360300
aacaucaauguugauaccu

SEQ ID NO: 1360302 - RNA, 19 nt, Artificial Sequence
  Description of Artificial Sequence: Synthetic oligonucleotide
  Sense strand starting at position 538 of SEQ ID NO: 1242605
agguacagaucuccauacu

SEQ ID NO: 1360303 - RNA, 19 nt, Artificial Sequence
  Description of Artificial Sequence: Synthetic oligonucleotide
  Antisense strand to SEQ ID NO: 1360302
aguauggagaucuguaccu

SEQ ID NO: 1360304 - RNA, 19 nt, Artificial Sequence
  Description of Artificial Sequence: Synthetic oligonucleotide
  Sense strand starting at position 566 of SEQ ID NO: 1242605
cauauagauggcuauugca

SEQ ID NO: 1360305 - RNA, 19 nt, Artificial Sequence
  Description of Artificial Sequence: Synthetic oligonucleotide
  Antisense strand to SEQ ID NO: 1360304
ugcaauagccaucuauaug

SEQ ID NO: 1360306 - RNA, 19 nt, Artificial Sequence
  Description of Artificial Sequence: Synthetic oligonucleotide
  Sense strand starting at position 682 of SEQ ID NO: 1242605
ucagucugcuugucaagaa

SEQ ID NO: 1360307 - RNA, 19 nt, Artificial Sequence
  Description of Artificial Sequence: Synthetic oligonucleotide
  Antisense strand to SEQ ID NO: 1360306
uucuugacaagcagacuga

SEQ ID NO: 1360308 - RNA, 19 nt, Artificial Sequence
  Description of Artificial Sequence: Synthetic oligonucleotide
  Sense strand starting at position 719 of SEQ ID NO: 1242605
gagguauaauuccugcuaa

SEQ ID NO: 1360309 - RNA, 19 nt, Artificial Sequence
  Description of Artificial Sequence: Synthetic oligonucleotide
  Antisense strand to SEQ ID NO: 1360308
uuagcaggaauuauaccuc

SEQ ID NO: 1360310 - RNA, 19 nt, Artificial Sequence
  Description of Artificial Sequence: Synthetic oligonucleotide
  Sense strand starting at position 1100 of SEQ ID NO: 1242605
ggcaaaugguaucuuuaug

SEQ ID NO: 1360311 - RNA, 19 nt, Artificial Sequence
  Description of Artificial Sequence: Synthetic oligonucleotide
  Antisense strand to SEQ ID NO: 1360310
cauaaagauaccauuugcc

SEQ ID NO: 1360312 - RNA, 19 nt, Artificial Sequence
  Description of Artificial Sequence: Synthetic oligonucleotide
  Sense strand starting at position 1125 of SEQ ID NO: 1242605
agauguuuaccagggucuu

SEQ ID NO: 1360313 - RNA, 19 nt, Artificial Sequence
  Description of Artificial Sequence: Synthetic oligonucleotide
  Antisense strand to SEQ ID NO: 1360312
aagacccugguaaacaucu

SEQ ID NO: 1360314 - RNA, 19 nt, Artificial Sequence
  Description of Artificial Sequence: Synthetic oligonucleotide
  Sense strand starting at position 1126 of SEQ ID NO: 1242605
gauguuuaccagggucuuu

SEQ ID NO: 1360315 - RNA, 19 nt, Artificial Sequence
  Description of Artificial Sequence: Synthetic oligonucleotide
  Antisense strand to SEQ ID NO: 1360314
aaagacccugguaaacauc

SEQ ID NO: 1360316 - RNA, 19 nt, Artificial Sequence
  Description of Artificial Sequence: Synthetic oligonucleotide
  Sense strand starting at position 1131 of SEQ ID NO: 1242605
uuaccagggucuuuaaaga

SEQ ID NO: 1360317 - RNA, 19 nt, Artificial Sequence
  Description of Artificial Sequence: Synthetic oligonucleotide
  Antisense strand to SEQ ID NO: 1360316
ucuuuaaagacccugguaa

SEQ ID NO: 1360318 - RNA, 19 nt, Artificial Sequence
  Description of Artificial Sequence: Synthetic oligonucleotide
  Sense strand starting at position 1627 of SEQ ID NO: 1242605
guuacacuugagugcugaa

SEQ ID NO: 1360319 - RNA, 19 nt, Artificial Sequence
  Description of Artificial Sequence: Synthetic oligonucleotide
  Antisense strand to SEQ ID NO: 1360318
uucagcacucaaguguaac

SEQ ID NO: 1360320 - RNA, 19 nt, Artificial Sequence
  Description of Artificial Sequence: Synthetic oligonucleotide
  Sense strand starting at position 1688 of SEQ ID NO: 1242605
cacggucuuccucagcaua

SEQ ID NO: 1360321 - RNA, 19 nt, Artificial Sequence
  Description of Artificial Sequence: Synthetic oligonucleotide
  Antisense strand to SEQ ID NO: 1360320
uaugcugaggaagaccgug

SEQ ID NO: 1360322 - RNA, 19 nt, Artificial Sequence
  Description of Artificial Sequence: Synthetic oligonucleotide
  Sense strand starting at position 2006 of SEQ ID NO: 1242605
gaaggaaacuugccauugu

SEQ ID NO: 1360323 - RNA, 19 nt, Artificial Sequence
  Description of Artificial Sequence: Synthetic oligonucleotide
  Antisense strand to SEQ ID NO: 1360322
acaauggcaaguuuccuuc

SEQ ID NO: 1360324 - RNA, 19 nt, Artificial Sequence
  Description of Artificial Sequence: Synthetic oligonucleotide
  Sense strand starting at position 2010 of SEQ ID NO: 1242605
gaaacuugccauuguaaug

SEQ ID NO: 1360325 - RNA, 19 nt, Artificial Sequence
  Description of Artificial Sequence: Synthetic oligonucleotide
  Antisense strand to SEQ ID NO: 1360324
cauuacaauggcaaguuuc

SEQ ID NO: 1360326 - RNA, 19 nt, Artificial Sequence
  Description of Artificial Sequence: Synthetic oligonucleotide
  Sense strand starting at position 2081 of SEQ ID NO: 1242605
uuaauaagcuugucacaga

SEQ ID NO: 1360327 - RNA, 19 nt, Artificial Sequence
  Description of Artificial Sequence: Synthetic oligonucleotide
  Antisense strand to SEQ ID NO: 1360326
ucugugacaagcuuauuaa

SEQ ID NO: 1360328 - RNA, 19 nt, Artificial Sequence
  Description of Artificial Sequence: Synthetic oligonucleotide
  Sense strand starting at position 2152 of SEQ ID NO: 1242605
uugagacuauugucauggu

SEQ ID NO: 1360329 - RNA, 19 nt, Artificial Sequence
  Description of Artificial Sequence: Synthetic oligonucleotide
  Antisense strand to SEQ ID NO: 1360328
accaugacaauagucucaa

SEQ ID NO: 1360330 - RNA, 19 nt, Artificial Sequence
  Description of Artificial Sequence: Synthetic oligonucleotide
  Sense strand starting at position 2156 of SEQ ID NO: 1242605
gacuauugucaugguguau

SEQ ID NO: 1360331 - RNA, 19 nt, Artificial Sequence
  Description of Artificial Sequence: Synthetic oligonucleotide
  Antisense strand to SEQ ID NO: 1360330
auacaccaugacaauaguc

SEQ ID NO: 1360332 - RNA, 19 nt, Artificial Sequence
  Description of Artificial Sequence: Synthetic oligonucleotide
  Sense strand starting at position 2223 of SEQ ID NO: 1242605
ggucucaguccugagcuga

SEQ ID NO: 1360333 - RNA, 19 nt, Artificial Sequence
  Description of Artificial Sequence: Synthetic oligonucleotide
  Antisense strand to SEQ ID NO: 1360332
ucagcucaggacugagacc

SEQ ID NO: 1360334 - RNA, 19 nt, Artificial Sequence
  Description of Artificial Sequence: Synthetic oligonucleotide
  Sense strand starting at position 2228 of SEQ ID NO: 1242605
caguccugagcugaucuua

SEQ ID NO: 1360335 - RNA, 19 nt, Artificial Sequence
  Description of Artificial Sequence: Synthetic oligonucleotide
  Antisense strand to SEQ ID NO: 1360334
uaagaucagcucaggacug

SEQ ID NO: 1360336 - RNA, 19 nt, Artificial Sequence
  Description of Artificial Sequence: Synthetic oligonucleotide
  Sense strand starting at position 2244 of SEQ ID NO: 1242605
uuaccaacaccgugaaacu

SEQ ID NO: 1360337 - RNA, 19 nt, Artificial Sequence
  Description of Artificial Sequence: Synthetic oligonucleotide
  Antisense strand to SEQ ID NO: 1360336
aguuucacgguguugguaa

SEQ ID NO: 1360338 - RNA, 19 nt, Artificial Sequence
  Description of Artificial Sequence: Synthetic oligonucleotide
  Sense strand starting at position 2254 of SEQ ID NO: 1242605
cgugaaacugacugauggu

SEQ ID NO: 1360339 - RNA, 19 nt, Artificial Sequence
  Description of Artificial Sequence: Synthetic oligonucleotide
  Antisense strand to SEQ ID NO: 1360338
accaucagucaguuucacg

SEQ ID NO: 1360340 - RNA, 19 nt, Artificial Sequence
  Description of Artificial Sequence: Synthetic oligonucleotide
  Sense strand starting at position 2263 of SEQ ID NO: 1242605
gacugaugguguuuagagg

SEQ ID NO: 1360341 - RNA, 19 nt, Artificial Sequence
  Description of Artificial Sequence: Synthetic oligonucleotide
  Antisense strand to SEQ ID NO: 1360340
ccucuaaacaccaucaguc

SEQ ID NO: 1360342 - RNA, 19 nt, Artificial Sequence
  Description of Artificial Sequence: Synthetic oligonucleotide
  Sense strand starting at position 2270 of SEQ ID NO: 1242605
gguguuuagaggcaaaccu

SEQ ID NO: 1360343 - RNA, 19 nt, Artificial Sequence
  Description of Artificial Sequence: Synthetic oligonucleotide
  Antisense strand to SEQ ID NO: 1360342
agguuugccucuaaacacc

SEQ ID NO: 1360344 - RNA, 19 nt, Artificial Sequence
  Description of Artificial Sequence: Synthetic oligonucleotide
  Sense strand starting at position 2361 of SEQ ID NO: 1242605
gcagcauggauggacauau

SEQ ID NO: 1360345 - RNA, 19 nt, Artificial Sequence
  Description of Artificial Sequence: Synthetic oligonucleotide
  Antisense strand to SEQ ID NO: 1360344
auauguccauccaugcugc

SEQ ID NO: 1360346 - RNA, 19 nt, Artificial Sequence
  Description of Artificial Sequence: Synthetic oligonucleotide
  Sense strand starting at position 2372 of SEQ ID NO: 1242605
ggacauauacauugcauag

SEQ ID NO: 1360347 - RNA, 19 nt, Artificial Sequence
  Description of Artificial Sequence: Synthetic oligonucleotide
  Antisense strand to SEQ ID NO: 1360346
cuaugcaauguauaugucc

SEQ ID NO: 1360348 - RNA, 19 nt, Artificial Sequence
  Description of Artificial Sequence: Synthetic oligonucleotide
  Sense strand starting at position 2376 of SEQ ID NO: 1242605
auauacauugcauagugau

SEQ ID NO: 1360349 - RNA, 19 nt, Artificial Sequence
  Description of Artificial Sequence: Synthetic oligonucleotide
  Antisense strand to SEQ ID NO: 1360348
aucacuaugcaauguauau

SEQ ID NO: 1360350 - RNA, 19 nt, Artificial Sequence
  Description of Artificial Sequence: Synthetic oligonucleotide
  Sense strand starting at position 2382 of SEQ ID NO: 1242605
auugcauagugaucaaguc

SEQ ID NO: 1360351 - RNA, 19 nt, Artificial Sequence
  Description of Artificial Sequence: Synthetic oligonucleotide
  Antisense strand to SEQ ID NO: 1360350
gacuugaucacuaugcaau

SEQ ID NO: 1360352 - RNA, 19 nt, Artificial Sequence
  Description of Artificial Sequence: Synthetic oligonucleotide
  Sense strand starting at position 2383 of SEQ ID NO: 1242605
uugcauagugaucaaguca

SEQ ID NO: 1360353 - RNA, 19 nt, Artificial Sequence
  Description of Artificial Sequence: Synthetic oligonucleotide
  Antisense strand to SEQ ID NO: 1360352
ugacuugaucacuaugcaa

SEQ ID NO: 1360354 - RNA, 19 nt, Artificial Sequence
  Description of Artificial Sequence: Synthetic oligonucleotide
  Sense strand starting at position 2396 of SEQ ID NO: 1242605
aagucagaguguuuaacau

SEQ ID NO: 1360355 - RNA, 19 nt, Artificial Sequence
  Description of Artificial Sequence: Synthetic oligonucleotide
  Antisense strand to SEQ ID NO: 1360354
auguuaaacacucugacuu

SEQ ID NO: 1360356 - RNA, 19 nt, Artificial Sequence
  Description of Artificial Sequence: Synthetic oligonucleotide
  Sense strand starting at position 2434 of SEQ ID NO: 1242605
uugucucuugguggugaga

SEQ ID NO: 1360357 - RNA, 19 nt, Artificial Sequence
  Description of Artificial Sequence: Synthetic oligonucleotide
  Antisense strand to SEQ ID NO: 1360356
ucucaccaccaagagacaa

SEQ ID NO: 1360358 - RNA, 19 nt, Artificial Sequence
  Description of Artificial Sequence: Synthetic oligonucleotide
  Sense strand starting at position 2437 of SEQ ID NO: 1242605
ucucuugguggugagaaca

SEQ ID NO: 1360359 - RNA, 19 nt, Artificial Sequence
  Description of Artificial Sequence: Synthetic oligonucleotide
  Antisense strand to SEQ ID NO: 1360358
uguucucaccaccaagaga

SEQ ID NO: 1360360 - RNA, 19 nt, Artificial Sequence
  Description of Artificial Sequence: Synthetic oligonucleotide
  Sense strand starting at position 3547 of SEQ ID NO: 1242605
ccauucuuccuaggaaagu

SEQ ID NO: 1360361 - RNA, 19 nt, Artificial Sequence
  Description of Artificial Sequence: Synthetic oligonucleotide
  Antisense strand to SEQ ID NO: 1360360
acuuuccuaggaagaaugg

SEQ ID NO: 1360362 - RNA, 19 nt, Artificial Sequence
  Description of Artificial Sequence: Synthetic oligonucleotide
  Sense strand starting at position 3594 of SEQ ID NO: 1242605
aaagcaauacguugagcaa

SEQ ID NO: 1360363 - RNA, 19 nt, Artificial Sequence
  Description of Artificial Sequence: Synthetic oligonucleotide
  Antisense strand to SEQ ID NO: 1360362
uugcucaacguauugcuuu

SEQ ID NO: 1360364 - RNA, 19 nt, Artificial Sequence
  Description of Artificial Sequence: Synthetic oligonucleotide
  Sense strand starting at position 3595 of SEQ ID NO: 1242605
aagcaauacguugagcaau

SEQ ID NO: 1360365 - RNA, 19 nt, Artificial Sequence
  Description of Artificial Sequence: Synthetic oligonucleotide
  Antisense strand to SEQ ID NO: 1360364
auugcucaacguauugcuu

SEQ ID NO: 1360366 - RNA, 19 nt, Artificial Sequence
  Description of Artificial Sequence: Synthetic oligonucleotide
  Sense strand starting at position 3613 of SEQ ID NO: 1242605
ugcguuuacuucccaaaga

SEQ ID NO: 1360367 - RNA, 19 nt, Artificial Sequence
  Description of Artificial Sequence: Synthetic oligonucleotide
  Antisense strand to SEQ ID NO: 1360366
ucuuugggaaguaaacgca

SEQ ID NO: 1360368 - RNA, 19 nt, Artificial Sequence
  Description of Artificial Sequence: Synthetic oligonucleotide
  Sense strand starting at position 3676 of SEQ ID NO: 1242605
acugauuuccgccguuguu

SEQ ID NO: 1360369 - RNA, 19 nt, Artificial Sequence
  Description of Artificial Sequence: Synthetic oligonucleotide
  Antisense strand to SEQ ID NO: 1360368
aacaacggcggaaaucagu

SEQ ID NO: 1360370 - RNA, 19 nt, Artificial Sequence
  Description of Artificial Sequence: Synthetic oligonucleotide
  Sense strand starting at position 3692 of SEQ ID NO: 1242605
guuuauuaccuaggccuua

SEQ ID NO: 1360371 - RNA, 19 nt, Artificial Sequence
  Description of Artificial Sequence: Synthetic oligonucleotide
  Antisense strand to SEQ ID NO: 1360370
uaaggccuagguaauaaac

SEQ ID NO: 1360372 - RNA, 19 nt, Artificial Sequence
  Description of Artificial Sequence: Synthetic oligonucleotide
  Sense strand starting at position 3918 of SEQ ID NO: 1242605
gcuggauuugcuugcuucu

SEQ ID NO: 1360373 - RNA, 19 nt, Artificial Sequence
  Description of Artificial Sequence: Synthetic oligonucleotide
  Antisense strand to SEQ ID NO: 1360372
agaagcaagcaaauccagc

SEQ ID NO: 1360374 - RNA, 19 nt, Artificial Sequence
  Description of Artificial Sequence: Synthetic oligonucleotide
  Sense strand starting at position 3920 of SEQ ID NO: 1242605
uggauuugcuugcuucuau

SEQ ID NO: 1360375 - RNA, 19 nt, Artificial Sequence
  Description of Artificial Sequence: Synthetic oligonucleotide
  Antisense strand to SEQ ID NO: 1360374
auagaagcaagcaaaucca

SEQ ID NO: 1360376 - RNA, 19 nt, Artificial Sequence
  Description of Artificial Sequence: Synthetic oligonucleotide
  Sense strand starting at position 3921 of SEQ ID NO: 1242605
ggauuugcuugcuucuauu

SEQ ID NO: 1360377 - RNA, 19 nt, Artificial Sequence
  Description of Artificial Sequence: Synthetic oligonucleotide
  Antisense strand to SEQ ID NO: 1360376
aauagaagcaagcaaaucc

SEQ ID NO: 1360378 - RNA, 19 nt, Artificial Sequence
  Description of Artificial Sequence: Synthetic oligonucleotide
  Sense strand starting at position 3955 of SEQ ID NO: 1242605
aggauuacuguuugggaga

SEQ ID NO: 1360379 - RNA, 19 nt, Artificial Sequence
  Description of Artificial Sequence: Synthetic oligonucleotide
  Antisense strand to SEQ ID NO: 1360378
ucucccaaacaguaauccu

SEQ ID NO: 1360380 - RNA, 19 nt, Artificial Sequence
  Description of Artificial Sequence: Synthetic oligonucleotide
  Sense strand starting at position 677 of SEQ ID NO: 1242606
gaaggaaacuugccauugu

SEQ ID NO: 1360381 - RNA, 19 nt, Artificial Sequence
  Description of Artificial Sequence: Synthetic oligonucleotide
  Antisense strand to SEQ ID NO: 1360380
acaauggcaaguuuccuuc

SEQ ID NO: 1360382 - RNA, 19 nt, Artificial Sequence
  Description of Artificial Sequence: Synthetic oligonucleotide
  Sense strand starting at position 752 of SEQ ID NO: 1242606
uuaauaagcuugucacaga

SEQ ID NO: 1360383 - RNA, 19 nt, Artificial Sequence
  Description of Artificial Sequence: Synthetic oligonucleotide
  Antisense strand to SEQ ID NO: 1360382
ucugugacaagcuuauuaa

SEQ ID NO: 1360384 - RNA, 19 nt, Artificial Sequence
  Description of Artificial Sequence: Synthetic oligonucleotide
  Sense strand starting at position 899 of SEQ ID NO: 1242606
caguccugagcugaucuua

SEQ ID NO: 1360385 - RNA, 19 nt, Artificial Sequence
  Description of Artificial Sequence: Synthetic oligonucleotide
  Antisense strand to SEQ ID NO: 1360384
uaagaucagcucaggacug

SEQ ID NO: 1360386 - RNA, 19 nt, Artificial Sequence
  Description of Artificial Sequence: Synthetic oligonucleotide
  Sense strand starting at position 915 of SEQ ID NO: 1242606
uuaccaacaccgugaaacu

SEQ ID NO: 1360387 - RNA, 19 nt, Artificial Sequence
  Description of Artificial Sequence: Synthetic oligonucleotide
  Antisense strand to SEQ ID NO: 1360386
aguuucacgguguugguaa

SEQ ID NO: 1360388 - RNA, 19 nt, Artificial Sequence
  Description of Artificial Sequence: Synthetic oligonucleotide
  Sense strand starting at position 934 of SEQ ID NO: 1242606
gacugaugguguuuagagg

SEQ ID NO: 1360389 - RNA, 19 nt, Artificial Sequence
  Description of Artificial Sequence: Synthetic oligonucleotide
  Antisense strand to SEQ ID NO: 1360388
ccucuaaacaccaucaguc

SEQ ID NO: 1360390 - RNA, 19 nt, Artificial Sequence
  Description of Artificial Sequence: Synthetic oligonucleotide
  Sense strand starting at position 941 of SEQ ID NO: 1242606
gguguuuagaggcaaaccu

SEQ ID NO: 1360391 - RNA, 19 nt, Artificial Sequence
  Description of Artificial Sequence: Synthetic oligonucleotide
  Antisense strand to SEQ ID NO: 1360390
agguuugccucuaaacacc

SEQ ID NO: 1360392 - RNA, 19 nt, Artificial Sequence
  Description of Artificial Sequence: Synthetic oligonucleotide
  Sense strand starting at position 1032 of SEQ ID NO: 1242606
gcagcauggauggacauau

SEQ ID NO: 1360393 - RNA, 19 nt, Artificial Sequence
  Description of Artificial Sequence: Synthetic oligonucleotide
  Antisense strand to SEQ ID NO: 1360392
auauguccauccaugcugc

SEQ ID NO: 1360394 - RNA, 19 nt, Artificial Sequence
  Description of Artificial Sequence: Synthetic oligonucleotide
  Sense strand starting at position 1043 of SEQ ID NO: 1242606
ggacauauacauugcauag

SEQ ID NO: 1360395 - RNA, 19 nt, Artificial Sequence
  Description of Artificial Sequence: Synthetic oligonucleotide
  Antisense strand to SEQ ID NO: 1360394
cuaugcaauguauaugucc

SEQ ID NO: 1360396 - RNA, 19 nt, Artificial Sequence
  Description of Artificial Sequence: Synthetic oligonucleotide
  Sense strand starting at position 1047 of SEQ ID NO: 1242606
auauacauugcauagugau

SEQ ID NO: 1360397 - RNA, 19 nt, Artificial Sequence
  Description of Artificial Sequence: Synthetic oligonucleotide
  Antisense strand to SEQ ID NO: 1360396
aucacuaugcaauguauau

SEQ ID NO: 1360398 - RNA, 19 nt, Artificial Sequence
  Description of Artificial Sequence: Synthetic oligonucleotide
  Sense strand starting at position 1054 of SEQ ID NO: 1242606
uugcauagugaucaaguca

SEQ ID NO: 1360399 - RNA, 19 nt, Artificial Sequence
  Description of Artificial Sequence: Synthetic oligonucleotide
  Antisense strand to SEQ ID NO: 1360398
ugacuugaucacuaugcaa

SEQ ID NO: 1360400 - RNA, 19 nt, Artificial Sequence
  Description of Artificial Sequence: Synthetic oligonucleotide
  Sense strand starting at position 1067 of SEQ ID NO: 1242606
aagucagaguguuuaacau

SEQ ID NO: 1360401 - RNA, 19 nt, Artificial Sequence
  Description of Artificial Sequence: Synthetic oligonucleotide
  Antisense strand to SEQ ID NO: 1360400
auguuaaacacucugacuu

SEQ ID NO: 1360402 - RNA, 19 nt, Artificial Sequence
  Description of Artificial Sequence: Synthetic oligonucleotide
  Sense strand starting at position 1108 of SEQ ID NO: 1242606
ucucuugguggugagaaca

SEQ ID NO: 1360403 - RNA, 19 nt, Artificial Sequence
  Description of Artificial Sequence: Synthetic oligonucleotide
  Antisense strand to SEQ ID NO: 1360402
uguucucaccaccaagaga

SEQ ID NO: 1360404 - RNA, 19 nt, Artificial Sequence
  Description of Artificial Sequence: Synthetic oligonucleotide
  Sense strand starting at position 2218 of SEQ ID NO: 1242606
ccauucuuccuaggaaagu

SEQ ID NO: 1360405 - RNA, 19 nt, Artificial Sequence
  Description of Artificial Sequence: Synthetic oligonucleotide
  Antisense strand to SEQ ID NO: 1360404
acuuuccuaggaagaaugg

SEQ ID NO: 1360406 - RNA, 19 nt, Artificial Sequence
  Description of Artificial Sequence: Synthetic oligonucleotide
  Sense strand starting at position 2266 of SEQ ID NO: 1242606
aagcaauacguugagcaau

SEQ ID NO: 1360407 - RNA, 19 nt, Artificial Sequence
  Description of Artificial Sequence: Synthetic oligonucleotide
  Antisense strand to SEQ ID NO: 1360406
auugcucaacguauugcuu

SEQ ID NO: 1360408 - RNA, 19 nt, Artificial Sequence
  Description of Artificial Sequence: Synthetic oligonucleotide
  Sense strand starting at position 2591 of SEQ ID NO: 1242606
uggauuugcuugcuucuau

SEQ ID NO: 1360409 - RNA, 19 nt, Artificial Sequence
  Description of Artificial Sequence: Synthetic oligonucleotide
  Antisense strand to SEQ ID NO: 1360408
auagaagcaagcaaaucca

SEQ ID NO: 1360410 - RNA, 19 nt, Artificial Sequence
  Description of Artificial Sequence: Synthetic oligonucleotide
  Sense strand starting at position 2592 of SEQ ID NO: 1242606
ggauuugcuugcuucuauu

SEQ ID NO: 1360411 - RNA, 19 nt, Artificial Sequence
  Description of Artificial Sequence: Synthetic oligonucleotide
  Antisense strand to SEQ ID NO: 1360410
aauagaagcaagcaaaucc

SEQ ID NO: 1360412 - RNA, 19 nt, Artificial Sequence
  Description of Artificial Sequence: Synthetic oligonucleotide
  Sense strand starting at position 2626 of SEQ ID NO: 1242606
aggauuacuguuugggaga

SEQ ID NO: 1360413 - RNA, 19 nt, Artificial Sequence
  Description of Artificial Sequence: Synthetic oligonucleotide
  Antisense strand to SEQ ID NO: 1360412
ucucccaaacaguaauccu

SEQ ID NO: 1360414 - RNA, 19 nt, Artificial Sequence
  Description of Artificial Sequence: Synthetic oligonucleotide
  Sense strand starting at position 2677 of SEQ ID NO: 1242606
auacuuagacuggguaguu

SEQ ID NO: 1360415 - RNA, 19 nt, Artificial Sequence
  Description of Artificial Sequence: Synthetic oligonucleotide
  Antisense strand to SEQ ID NO: 1360414
aacuacccagucuaaguau

SEQ ID NO: 1360416 - RNA, 19 nt, Artificial Sequence
  Description of Artificial Sequence: Synthetic oligonucleotide
  Sense strand starting at position 2740 of SEQ ID NO: 1242606
ugaggacugcagugaaauu

SEQ ID NO: 1360417 - RNA, 19 nt, Artificial Sequence
  Description of Artificial Sequence: Synthetic oligonucleotide
  Antisense strand to SEQ ID NO: 1360416
aauuucacugcaguccuca

SEQ ID NO: 1360418 - RNA, 19 nt, Artificial Sequence
  Description of Artificial Sequence: Synthetic oligonucleotide
  Sense strand starting at position 2747 of SEQ ID NO: 1242606
ugcagugaaauuggaaaca

SEQ ID NO: 1360419 - RNA, 19 nt, Artificial Sequence
  Description of Artificial Sequence: Synthetic oligonucleotide
  Antisense strand to SEQ ID NO: 1360418
uguuuccaauuucacugca

SEQ ID NO: 1360420 - RNA, 19 nt, Artificial Sequence
  Description of Artificial Sequence: Synthetic oligonucleotide
  Sense strand starting at position 2947 of SEQ ID NO: 1242606
ugagacugcugggcuaaga

SEQ ID NO: 1360421 - RNA, 19 nt, Artificial Sequence
  Description of Artificial Sequence: Synthetic oligonucleotide
  Antisense strand to SEQ ID NO: 1360420
ucuuagcccagcagucuca

SEQ ID NO: 1360422 - RNA, 19 nt, Artificial Sequence
  Description of Artificial Sequence: Synthetic oligonucleotide
  Sense strand starting at position 3007 of SEQ ID NO: 1242606
gggagaaucuguucacuug

SEQ ID NO: 1360423 - RNA, 19 nt, Artificial Sequence
  Description of Artificial Sequence: Synthetic oligonucleotide
  Antisense strand to SEQ ID NO: 1360422
caagugaacagauucuccc

SEQ ID NO: 1360424 - RNA, 19 nt, Artificial Sequence
  Description of Artificial Sequence: Synthetic oligonucleotide
  Sense strand starting at position 3090 of SEQ ID NO: 1242606
aucaguaacggugaguuga

SEQ ID NO: 1360425 - RNA, 19 nt, Artificial Sequence
  Description of Artificial Sequence: Synthetic oligonucleotide
  Antisense strand to SEQ ID NO: 1360424
ucaacucaccguuacugau

SEQ ID NO: 1360426 - RNA, 19 nt, Artificial Sequence
  Description of Artificial Sequence: Synthetic oligonucleotide
  Sense strand starting at position 3098 of SEQ ID NO: 1242606
cggugaguugagucuucgu

SEQ ID NO: 1360427 - RNA, 19 nt, Artificial Sequence
  Description of Artificial Sequence: Synthetic oligonucleotide
  Antisense strand to SEQ ID NO: 1360426
acgaagacucaacucaccg

SEQ ID NO: 1360428 - RNA, 19 nt, Artificial Sequence
  Description of Artificial Sequence: Synthetic oligonucleotide
  Sense strand starting at position 3240 of SEQ ID NO: 1242606
uuugccuugcaagauaacu

SEQ ID NO: 1360429 - RNA, 19 nt, Artificial Sequence
  Description of Artificial Sequence: Synthetic oligonucleotide
  Antisense strand to SEQ ID NO: 1360428
aguuaucuugcaaggcaaa

SEQ ID NO: 1360430 - RNA, 19 nt, Artificial Sequence
  Description of Artificial Sequence: Synthetic oligonucleotide
  Sense strand starting at position 3245 of SEQ ID NO: 1242606
cuugcaagauaacugugau

SEQ ID NO: 1360431 - RNA, 19 nt, Artificial Sequence
  Description of Artificial Sequence: Synthetic oligonucleotide
  Antisense strand to SEQ ID NO: 1360430
aucacaguuaucuugcaag

SEQ ID NO: 1360432 - RNA, 19 nt, Artificial Sequence
  Description of Artificial Sequence: Synthetic oligonucleotide
  Sense strand starting at position 3248 of SEQ ID NO: 1242606
gcaagauaacugugauaau

SEQ ID NO: 1360433 - RNA, 19 nt, Artificial Sequence
  Description of Artificial Sequence: Synthetic oligonucleotide
  Antisense strand to SEQ ID NO: 1360432
auuaucacaguuaucuugc

SEQ ID NO: 1360434 - RNA, 19 nt, Artificial Sequence
  Description of Artificial Sequence: Synthetic oligonucleotide
  Sense strand starting at position 3283 of SEQ ID NO: 1242606
gucuuuguccuggcaugca

SEQ ID NO: 1360435 - RNA, 19 nt, Artificial Sequence
  Description of Artificial Sequence: Synthetic oligonucleotide
  Antisense strand to SEQ ID NO: 1360434
ugcaugccaggacaaagac

SEQ ID NO: 1360436 - RNA, 19 nt, Artificial Sequence
  Description of Artificial Sequence: Synthetic oligonucleotide
  Sense strand starting at position 3345 of SEQ ID NO: 1242606
ugcuaauuaguugacugau

SEQ ID NO: 1360437 - RNA, 19 nt, Artificial Sequence
  Description of Artificial Sequence: Synthetic oligonucleotide
  Antisense strand to SEQ ID NO: 1360436
aucagucaacuaauuagca

SEQ ID NO: 1360438 - RNA, 19 nt, Artificial Sequence
  Description of Artificial Sequence: Synthetic oligonucleotide
  Sense strand starting at position 3347 of SEQ ID NO: 1242606
cuaauuaguugacugauga

SEQ ID NO: 1360439 - RNA, 19 nt, Artificial Sequence
  Description of Artificial Sequence: Synthetic oligonucleotide
  Antisense strand to SEQ ID NO: 1360438
ucaucagucaacuaauuag

SEQ ID NO: 1360440 - RNA, 19 nt, Artificial Sequence
  Description of Artificial Sequence: Synthetic oligonucleotide
  Sense strand starting at position 3348 of SEQ ID NO: 1242606
uaauuaguugacugaugac

SEQ ID NO: 1360441 - RNA, 19 nt, Artificial Sequence
  Description of Artificial Sequence: Synthetic oligonucleotide
  Antisense strand to SEQ ID NO: 1360440
gucaucagucaacuaauua

SEQ ID NO: 1360442 - RNA, 19 nt, Artificial Sequence
  Description of Artificial Sequence: Synthetic oligonucleotide
  Sense strand starting at position 3380 of SEQ ID NO: 1242606
guagcuuuaggaugggacu

SEQ ID NO: 1360443 - RNA, 19 nt, Artificial Sequence
  Description of Artificial Sequence: Synthetic oligonucleotide
  Antisense strand to SEQ ID NO: 1360442
agucccauccuaaagcuac

SEQ ID NO: 1360444 - RNA, 19 nt, Artificial Sequence
  Description of Artificial Sequence: Synthetic oligonucleotide
  Sense strand starting at position 3421 of SEQ ID NO: 1242606
ggauuagaggcuugagacu

SEQ ID NO: 1360445 - RNA, 19 nt, Artificial Sequence
  Description of Artificial Sequence: Synthetic oligonucleotide
  Antisense strand to SEQ ID NO: 1360444
agucucaagccucuaaucc

SEQ ID NO: 1360446 - RNA, 19 nt, Artificial Sequence
  Description of Artificial Sequence: Synthetic oligonucleotide
  Sense strand starting at position 3484 of SEQ ID NO: 1242606
gcuuaagcugaucaaucau

SEQ ID NO: 1360447 - RNA, 19 nt, Artificial Sequence
  Description of Artificial Sequence: Synthetic oligonucleotide
  Antisense strand to SEQ ID NO: 1360446
augauugaucagcuuaagc

SEQ ID NO: 1360448 - RNA, 19 nt, Artificial Sequence
  Description of Artificial Sequence: Synthetic oligonucleotide
  Sense strand starting at position 3655 of SEQ ID NO: 1242606
uguaacaucccuuguaaga

SEQ ID NO: 1360449 - RNA, 19 nt, Artificial Sequence
  Description of Artificial Sequence: Synthetic oligonucleotide
  Antisense strand to SEQ ID NO: 1360448
ucuuacaagggauguuaca

SEQ ID NO: 1360450 - RNA, 19 nt, Artificial Sequence
  Description of Artificial Sequence: Synthetic oligonucleotide
  Sense strand starting at position 3752 of SEQ ID NO: 1242606
ugcaauuuauagcugguua

SEQ ID NO: 1360451 - RNA, 19 nt, Artificial Sequence
  Description of Artificial Sequence: Synthetic oligonucleotide
  Antisense strand to SEQ ID NO: 1360450
uaaccagcuauaaauugca

SEQ ID NO: 1360452 - RNA, 19 nt, Artificial Sequence
  Description of Artificial Sequence: Synthetic oligonucleotide
  Sense strand starting at position 3753 of SEQ ID NO: 1242606
gcaauuuauagcugguuag

SEQ ID NO: 1360453 - RNA, 19 nt, Artificial Sequence
  Description of Artificial Sequence: Synthetic oligonucleotide
  Antisense strand to SEQ ID NO: 1360452
cuaaccagcuauaaauugc

SEQ ID NO: 1360454 - RNA, 19 nt, Artificial Sequence
  Description of Artificial Sequence: Synthetic oligonucleotide
  Sense strand starting at position 3802 of SEQ ID NO: 1242606
ggcaacuggccucagaagu

SEQ ID NO: 1360455 - RNA, 19 nt, Artificial Sequence
  Description of Artificial Sequence: Synthetic oligonucleotide
  Antisense strand to SEQ ID NO: 1360454
acuucugaggccaguugcc

SEQ ID NO: 1360456 - RNA, 19 nt, Artificial Sequence
  Description of Artificial Sequence: Synthetic oligonucleotide
  Sense strand starting at position 3863 of SEQ ID NO: 1242606
ugaugauaucgccagguag

SEQ ID NO: 1360457 - RNA, 19 nt, Artificial Sequence
  Description of Artificial Sequence: Synthetic oligonucleotide
  Antisense strand to SEQ ID NO: 1360456
cuaccuggcgauaucauca

SEQ ID NO: 1360458 - RNA, 19 nt, Artificial Sequence
  Description of Artificial Sequence: Synthetic oligonucleotide
  Sense strand starting at position 3917 of SEQ ID NO: 1242606
guaucugcuguagaacuga

SEQ ID NO: 1360459 - RNA, 19 nt, Artificial Sequence
  Description of Artificial Sequence: Synthetic oligonucleotide
  Antisense strand to SEQ ID NO: 1360458
ucaguucuacagcagauac

SEQ ID NO: 1360460 - RNA, 19 nt, Artificial Sequence
  Description of Artificial Sequence: Synthetic oligonucleotide
  Sense strand starting at position 207 of SEQ ID NO: 1242607
aagagaaagugcuauuucu

SEQ ID NO: 1360461 - RNA, 19 nt, Artificial Sequence
  Description of Artificial Sequence: Synthetic oligonucleotide
  Antisense strand to SEQ ID NO: 1360460
agaaauagcacuuucucuu

SEQ ID NO: 1360462 - RNA, 19 nt, Artificial Sequence
  Description of Artificial Sequence: Synthetic oligonucleotide
  Sense strand starting at position 499 of SEQ ID NO: 1242607
ggcuauuucuauccucagu

SEQ ID NO: 1360463 - RNA, 19 nt, Artificial Sequence
  Description of Artificial Sequence: Synthetic oligonucleotide
  Antisense strand to SEQ ID NO: 1360462
acugaggauagaaauagcc

SEQ ID NO: 1360464 - RNA, 19 nt, Artificial Sequence
  Description of Artificial Sequence: Synthetic oligonucleotide
  Sense strand starting at position 501 of SEQ ID NO: 1242607
cuauuucuauccucagugu

SEQ ID NO: 1360465 - RNA, 19 nt, Artificial Sequence
  Description of Artificial Sequence: Synthetic oligonucleotide
  Antisense strand to SEQ ID NO: 1360464
acacugaggauagaaauag

SEQ ID NO: 1360466 - RNA, 19 nt, Artificial Sequence
  Description of Artificial Sequence: Synthetic oligonucleotide
  Sense strand starting at position 545 of SEQ ID NO: 1242607
uggcuuauagccugacauu

SEQ ID NO: 1360467 - RNA, 19 nt, Artificial Sequence
  Description of Artificial Sequence: Synthetic oligonucleotide
  Antisense strand to SEQ ID NO: 1360466
aaugucaggcuauaagcca

SEQ ID NO: 1360468 - RNA, 19 nt, Artificial Sequence
  Description of Artificial Sequence: Synthetic oligonucleotide
  Sense strand starting at position 670 of SEQ ID NO: 1242607
uggucaggucaguggaaga

SEQ ID NO: 1360469 - RNA, 19 nt, Artificial Sequence
  Description of Artificial Sequence: Synthetic oligonucleotide
  Antisense strand to SEQ ID NO: 1360468
ucuuccacugaccugacca

SEQ ID NO: 1360470 - RNA, 19 nt, Artificial Sequence
  Description of Artificial Sequence: Synthetic oligonucleotide
  Sense strand starting at position 696 of SEQ ID NO: 1242607
caagcuagcgucuauugaa

SEQ ID NO: 1360471 - RNA, 19 nt, Artificial Sequence
  Description of Artificial Sequence: Synthetic oligonucleotide
  Antisense strand to SEQ ID NO: 1360470
uucaauagacgcuagcuug

SEQ ID NO: 1360472 - RNA, 19 nt, Artificial Sequence
  Description of Artificial Sequence: Synthetic oligonucleotide
  Sense strand starting at position 719 of SEQ ID NO: 1242607
uacugugugccaggaacau

SEQ ID NO: 1360473 - RNA, 19 nt, Artificial Sequence
  Description of Artificial Sequence: Synthetic oligonucleotide
  Antisense strand to SEQ ID NO: 1360472
auguuccuggcacacagua

SEQ ID NO: 1360474 - RNA, 19 nt, Artificial Sequence
  Description of Artificial Sequence: Synthetic oligonucleotide
  Sense strand starting at position 735 of SEQ ID NO: 1242607
caugcaucaucuuagucga

SEQ ID NO: 1360475 - RNA, 19 nt, Artificial Sequence
  Description of Artificial Sequence: Synthetic oligonucleotide
  Antisense strand to SEQ ID NO: 1360474
ucgacuaagaugaugcaug

SEQ ID NO: 1360476 - RNA, 19 nt, Artificial Sequence
  Description of Artificial Sequence: Synthetic oligonucleotide
  Sense strand starting at position 737 of SEQ ID NO: 1242607
ugcaucaucuuagucgauu

SEQ ID NO: 1360477 - RNA, 19 nt, Artificial Sequence
  Description of Artificial Sequence: Synthetic oligonucleotide
  Antisense strand to SEQ ID NO: 1360476
aaucgacuaagaugaugca

SEQ ID NO: 1360478 - RNA, 19 nt, Artificial Sequence
  Description of Artificial Sequence: Synthetic oligonucleotide
  Sense strand starting at position 738 of SEQ ID NO: 1242607
gcaucaucuuagucgauuu

SEQ ID NO: 1360479 - RNA, 19 nt, Artificial Sequence
  Description of Artificial Sequence: Synthetic oligonucleotide
  Antisense strand to SEQ ID NO: 1360478
aaaucgacuaagaugaugc

SEQ ID NO: 1360480 - RNA, 19 nt, Artificial Sequence
  Description of Artificial Sequence: Synthetic oligonucleotide
  Sense strand starting at position 1210 of SEQ ID NO: 1242607
gagaacugugcaggagagu

SEQ ID NO: 1360481 - RNA, 19 nt, Artificial Sequence
  Description of Artificial Sequence: Synthetic oligonucleotide
  Antisense strand to SEQ ID NO: 1360480
acucuccugcacaguucuc

SEQ ID NO: 1360482 - RNA, 19 nt, Artificial Sequence
  Description of Artificial Sequence: Synthetic oligonucleotide
  Sense strand starting at position 1364 of SEQ ID NO: 1242607
gggauuagcugggaaugcu

SEQ ID NO: 1360483 - RNA, 19 nt, Artificial Sequence
  Description of Artificial Sequence: Synthetic oligonucleotide
  Antisense strand to SEQ ID NO: 1360482
agcauucccagcuaauccc

SEQ ID NO: 1360484 - RNA, 19 nt, Artificial Sequence
  Description of Artificial Sequence: Synthetic oligonucleotide
  Sense strand starting at position 1384 of SEQ ID NO: 1242607
ucagguuucccugaccaag

SEQ ID NO: 1360485 - RNA, 19 nt, Artificial Sequence
  Description of Artificial Sequence: Synthetic oligonucleotide
  Antisense strand to SEQ ID NO: 1360484
cuuggucagggaaaccuga

SEQ ID NO: 1360486 - RNA, 19 nt, Artificial Sequence
  Description of Artificial Sequence: Synthetic oligonucleotide
  Sense strand starting at position 1637 of SEQ ID NO: 1242607
ggcaaaugucaaggagcaa

SEQ ID NO: 1360487 - RNA, 19 nt, Artificial Sequence
  Description of Artificial Sequence: Synthetic oligonucleotide
  Antisense strand to SEQ ID NO: 1360486
uugcuccuugacauuugcc

SEQ ID NO: 1360488 - RNA, 19 nt, Artificial Sequence
  Description of Artificial Sequence: Synthetic oligonucleotide
  Sense strand starting at position 1638 of SEQ ID NO: 1242607
gcaaaugucaaggagcaaa

SEQ ID NO: 1360489 - RNA, 19 nt, Artificial Sequence
  Description of Artificial Sequence: Synthetic oligonucleotide
  Antisense strand to SEQ ID NO: 1360488
uuugcuccuugacauuugc

SEQ ID NO: 1360490 - RNA, 19 nt, Artificial Sequence
  Description of Artificial Sequence: Synthetic oligonucleotide
  Sense strand starting at position 1650 of SEQ ID NO: 1242607
gagcaaaucugagaaggga

SEQ ID NO: 1360491 - RNA, 19 nt, Artificial Sequence
  Description of Artificial Sequence: Synthetic oligonucleotide
  Antisense strand to SEQ ID NO: 1360490
ucccuucucagauuugcuc

SEQ ID NO: 1360492 - RNA, 19 nt, Artificial Sequence
  Description of Artificial Sequence: Synthetic oligonucleotide
  Sense strand starting at position 1736 of SEQ ID NO: 1242607
ggcuuucguugccuccaga

SEQ ID NO: 1360493 - RNA, 19 nt, Artificial Sequence
  Description of Artificial Sequence: Synthetic oligonucleotide
  Antisense strand to SEQ ID NO: 1360492
ucuggaggcaacgaaagcc

SEQ ID NO: 1360494 - RNA, 19 nt, Artificial Sequence
  Description of Artificial Sequence: Synthetic oligonucleotide
  Sense strand starting at position 1919 of SEQ ID NO: 1242607
gguaaugagggaugccagu

SEQ ID NO: 1360495 - RNA, 19 nt, Artificial Sequence
  Description of Artificial Sequence: Synthetic oligonucleotide
  Antisense strand to SEQ ID NO: 1360494
acuggcaucccucauuacc

SEQ ID NO: 1360496 - RNA, 19 nt, Artificial Sequence
  Description of Artificial Sequence: Synthetic oligonucleotide
  Sense strand starting at position 2167 of SEQ ID NO: 1242607
ccggaguucggguggguaa

SEQ ID NO: 1360497 - RNA, 19 nt, Artificial Sequence
  Description of Artificial Sequence: Synthetic oligonucleotide
  Antisense strand to SEQ ID NO: 1360496
uuacccacccgaacuccgg

SEQ ID NO: 1360498 - RNA, 19 nt, Artificial Sequence
  Description of Artificial Sequence: Synthetic oligonucleotide
  Sense strand starting at position 2572 of SEQ ID NO: 1242607
ggguuaaggucuagugggu

SEQ ID NO: 1360499 - RNA, 19 nt, Artificial Sequence
  Description of Artificial Sequence: Synthetic oligonucleotide
  Antisense strand to SEQ ID NO: 1360498
acccacuagaccuuaaccc

SEQ ID NO: 1360500 - RNA, 19 nt, Artificial Sequence
  Description of Artificial Sequence: Synthetic oligonucleotide
  Sense strand starting at position 2657 of SEQ ID NO: 1242607
cagcuuggugcccagagaa

SEQ ID NO: 1360501 - RNA, 19 nt, Artificial Sequence
  Description of Artificial Sequence: Synthetic oligonucleotide
  Antisense strand to SEQ ID NO: 1360500
uucucugggcaccaagcug

SEQ ID NO: 1360502 - RNA, 19 nt, Artificial Sequence
  Description of Artificial Sequence: Synthetic oligonucleotide
  Sense strand starting at position 2702 of SEQ ID NO: 1242607
gaaacagacucggcaaagu

SEQ ID NO: 1360503 - RNA, 19 nt, Artificial Sequence
  Description of Artificial Sequence: Synthetic oligonucleotide
  Antisense strand to SEQ ID NO: 1360502
acuuugccgagucuguuuc

SEQ ID NO: 1360504 - RNA, 19 nt, Artificial Sequence
  Description of Artificial Sequence: Synthetic oligonucleotide
  Sense strand starting at position 2888 of SEQ ID NO: 1242607
gguggucauuuaugagagu

SEQ ID NO: 1360505 - RNA, 19 nt, Artificial Sequence
  Description of Artificial Sequence: Synthetic oligonucleotide
  Antisense strand to SEQ ID NO: 1360504
acucucauaaaugaccacc

SEQ ID NO: 1360506 - RNA, 19 nt, Artificial Sequence
  Description of Artificial Sequence: Synthetic oligonucleotide
  Sense strand starting at position 2889 of SEQ ID NO: 1242607
guggucauuuaugagaguu

SEQ ID NO: 1360507 - RNA, 19 nt, Artificial Sequence
  Description of Artificial Sequence: Synthetic oligonucleotide
  Antisense strand to SEQ ID NO: 1360506
aacucucauaaaugaccac

SEQ ID NO: 1360508 - RNA, 19 nt, Artificial Sequence
  Description of Artificial Sequence: Synthetic oligonucleotide
  Sense strand starting at position 3668 of SEQ ID NO: 1242607
gagagauauuucugcugac

SEQ ID NO: 1360509 - RNA, 19 nt, Artificial Sequence
  Description of Artificial Sequence: Synthetic oligonucleotide
  Antisense strand to SEQ ID NO: 1360508
gucagcagaaauaucucuc

SEQ ID NO: 1360510 - RNA, 19 nt, Artificial Sequence
  Description of Artificial Sequence: Synthetic oligonucleotide
  Sense strand starting at position 3671 of SEQ ID NO: 1242607
agauauuucugcugacaga

SEQ ID NO: 1360511 - RNA, 19 nt, Artificial Sequence
  Description of Artificial Sequence: Synthetic oligonucleotide
  Antisense strand to SEQ ID NO: 1360510
ucugucagcagaaauaucu

SEQ ID NO: 1360512 - RNA, 19 nt, Artificial Sequence
  Description of Artificial Sequence: Synthetic oligonucleotide
  Sense strand starting at position 3715 of SEQ ID NO: 1242607
agaugucacucaugaggga

SEQ ID NO: 1360513 - RNA, 19 nt, Artificial Sequence
  Description of Artificial Sequence: Synthetic oligonucleotide
  Antisense strand to SEQ ID NO: 1360512
ucccucaugagugacaucu

SEQ ID NO: 1360514 - RNA, 19 nt, Artificial Sequence
  Description of Artificial Sequence: Synthetic oligonucleotide
  Sense strand starting at position 82 of SEQ ID NO: 1242608
ggcaaaugucaaggagcaa

SEQ ID NO: 1360515 - RNA, 19 nt, Artificial Sequence
  Description of Artificial Sequence: Synthetic oligonucleotide
  Antisense strand to SEQ ID NO: 1360514
uugcuccuugacauuugcc

SEQ ID NO: 1360516 - RNA, 19 nt, Artificial Sequence
  Description of Artificial Sequence: Synthetic oligonucleotide
  Sense strand starting at position 83 of SEQ ID NO: 1242608
gcaaaugucaaggagcaaa

SEQ ID NO: 1360517 - RNA, 19 nt, Artificial Sequence
  Description of Artificial Sequence: Synthetic oligonucleotide
  Antisense strand to SEQ ID NO: 1360516
uuugcuccuugacauuugc

SEQ ID NO: 1360518 - RNA, 19 nt, Artificial Sequence
  Description of Artificial Sequence: Synthetic oligonucleotide
  Sense strand starting at position 95 of SEQ ID NO: 1242608
gagcaaaucugagaaggga

SEQ ID NO: 1360519 - RNA, 19 nt, Artificial Sequence
  Description of Artificial Sequence: Synthetic oligonucleotide
  Antisense strand to SEQ ID NO: 1360518
ucccuucucagauuugcuc

SEQ ID NO: 1360520 - RNA, 19 nt, Artificial Sequence
  Description of Artificial Sequence: Synthetic oligonucleotide
  Sense strand starting at position 181 of SEQ ID NO: 1242608
ggcuuucguugccuccaga

SEQ ID NO: 1360521 - RNA, 19 nt, Artificial Sequence
  Description of Artificial Sequence: Synthetic oligonucleotide
  Antisense strand to SEQ ID NO: 1360520
ucuggaggcaacgaaagcc

SEQ ID NO: 1360522 - RNA, 19 nt, Artificial Sequence
  Description of Artificial Sequence: Synthetic oligonucleotide
  Sense strand starting at position 364 of SEQ ID NO: 1242608
gguaaugagggaugccagu

SEQ ID NO: 1360523 - RNA, 19 nt, Artificial Sequence
  Description of Artificial Sequence: Synthetic oligonucleotide
  Antisense strand to SEQ ID NO: 1360522
acuggcaucccucauuacc

SEQ ID NO: 1360524 - RNA, 19 nt, Artificial Sequence
  Description of Artificial Sequence: Synthetic oligonucleotide
  Sense strand starting at position 612 of SEQ ID NO: 1242608
ccggaguucggguggguaa

SEQ ID NO: 1360525 - RNA, 19 nt, Artificial Sequence
  Description of Artificial Sequence: Synthetic oligonucleotide
  Antisense strand to SEQ ID NO: 1360524
uuacccacccgaacuccgg

SEQ ID NO: 1360526 - RNA, 19 nt, Artificial Sequence
  Description of Artificial Sequence: Synthetic oligonucleotide
  Sense strand starting at position 1017 of SEQ ID NO: 1242608
ggguuaaggucuagugggu

SEQ ID NO: 1360527 - RNA, 19 nt, Artificial Sequence
  Description of Artificial Sequence: Synthetic oligonucleotide
  Antisense strand to SEQ ID NO: 1360526
acccacuagaccuuaaccc

SEQ ID NO: 1360528 - RNA, 19 nt, Artificial Sequence
  Description of Artificial Sequence: Synthetic oligonucleotide
  Sense strand starting at position 1102 of SEQ ID NO: 1242608
cagcuuggugcccagagaa

SEQ ID NO: 1360529 - RNA, 19 nt, Artificial Sequence
  Description of Artificial Sequence: Synthetic oligonucleotide
  Antisense strand to SEQ ID NO: 1360528
uucucugggcaccaagcug

SEQ ID NO: 1360530 - RNA, 19 nt, Artificial Sequence
  Description of Artificial Sequence: Synthetic oligonucleotide
  Sense strand starting at position 1147 of SEQ ID NO: 1242608
gaaacagacucggcaaagu

SEQ ID NO: 1360531 - RNA, 19 nt, Artificial Sequence
  Description of Artificial Sequence: Synthetic oligonucleotide
  Antisense strand to SEQ ID NO: 1360530
acuuugccgagucuguuuc

SEQ ID NO: 1360532 - RNA, 19 nt, Artificial Sequence
  Description of Artificial Sequence: Synthetic oligonucleotide
  Sense strand starting at position 1333 of SEQ ID NO: 1242608
gguggucauuuaugagagu

SEQ ID NO: 1360533 - RNA, 19 nt, Artificial Sequence
  Description of Artificial Sequence: Synthetic oligonucleotide
  Antisense strand to SEQ ID NO: 1360532
acucucauaaaugaccacc

SEQ ID NO: 1360534 - RNA, 19 nt, Artificial Sequence
  Description of Artificial Sequence: Synthetic oligonucleotide
  Sense strand starting at position 1334 of SEQ ID NO: 1242608
guggucauuuaugagaguu

SEQ ID NO: 1360535 - RNA, 19 nt, Artificial Sequence
  Description of Artificial Sequence: Synthetic oligonucleotide
  Antisense strand to SEQ ID NO: 1360534
aacucucauaaaugaccac

SEQ ID NO: 1360536 - RNA, 19 nt, Artificial Sequence
  Description of Artificial Sequence: Synthetic oligonucleotide
  Sense strand starting at position 2113 of SEQ ID NO: 1242608
gagagauauuucugcugac

SEQ ID NO: 1360537 - RNA, 19 nt, Artificial Sequence
  Description of Artificial Sequence: Synthetic oligonucleotide
  Antisense strand to SEQ ID NO: 1360536
gucagcagaaauaucucuc

SEQ ID NO: 1360538 - RNA, 19 nt, Artificial Sequence
  Description of Artificial Sequence: Synthetic oligonucleotide
  Sense strand starting at position 2116 of SEQ ID NO: 1242608
agauauuucugcugacaga

SEQ ID NO: 1360539 - RNA, 19 nt, Artificial Sequence
  Description of Artificial Sequence: Synthetic oligonucleotide
  Antisense strand to SEQ ID NO: 1360538
ucugucagcagaaauaucu

SEQ ID NO: 1360540 - RNA, 19 nt, Artificial Sequence
  Description of Artificial Sequence: Synthetic oligonucleotide
  Sense strand starting at position 2160 of SEQ ID NO: 1242608
agaugucacucaugaggga

SEQ ID NO: 1360541 - RNA, 19 nt, Artificial Sequence
  Description of Artificial Sequence: Synthetic oligonucleotide
  Antisense strand to SEQ ID NO: 1360540
ucccucaugagugacaucu

SEQ ID NO: 1360542 - RNA, 19 nt, Artificial Sequence
  Description of Artificial Sequence: Synthetic oligonucleotide
  Sense strand starting at position 2844 of SEQ ID NO: 1242608
ggguaacugucucaggaug

SEQ ID NO: 1360543 - RNA, 19 nt, Artificial Sequence
  Description of Artificial Sequence: Synthetic oligonucleotide
  Antisense strand to SEQ ID NO: 1360542
cauccugagacaguuaccc

SEQ ID NO: 1360544 - RNA, 19 nt, Artificial Sequence
  Description of Artificial Sequence: Synthetic oligonucleotide
  Sense strand starting at position 3285 of SEQ ID NO: 1242608
gccacaaguuguugcugaa

SEQ ID NO: 1360545 - RNA, 19 nt, Artificial Sequence
  Description of Artificial Sequence: Synthetic oligonucleotide
  Antisense strand to SEQ ID NO: 1360544
uucagcaacaacuuguggc

SEQ ID NO: 1360546 - RNA, 19 nt, Artificial Sequence
  Description of Artificial Sequence: Synthetic oligonucleotide
  Sense strand starting at position 3315 of SEQ ID NO: 1242608
gugucagcuuccucagaga

SEQ ID NO: 1360547 - RNA, 19 nt, Artificial Sequence
  Description of Artificial Sequence: Synthetic oligonucleotide
  Antisense strand to SEQ ID NO: 1360546
ucucugaggaagcugacac

SEQ ID NO: 1360548 - RNA, 19 nt, Artificial Sequence
  Description of Artificial Sequence: Synthetic oligonucleotide
  Sense strand starting at position 3379 of SEQ ID NO: 1242608
gggcgucucuugguuacca

SEQ ID NO: 1360549 - RNA, 19 nt, Artificial Sequence
  Description of Artificial Sequence: Synthetic oligonucleotide
  Antisense strand to SEQ ID NO: 1360548
ugguaaccaagagacgccc

SEQ ID NO: 1360550 - RNA, 19 nt, Artificial Sequence
  Description of Artificial Sequence: Synthetic oligonucleotide
  Sense strand starting at position 3473 of SEQ ID NO: 1242608
ggaugagagucagggugaa

SEQ ID NO: 1360551 - RNA, 19 nt, Artificial Sequence
  Description of Artificial Sequence: Synthetic oligonucleotide
  Antisense strand to SEQ ID NO: 1360550
uucacccugacucucaucc

SEQ ID NO: 1360552 - RNA, 19 nt, Artificial Sequence
  Description of Artificial Sequence: Synthetic oligonucleotide
  Sense strand starting at position 3544 of SEQ ID NO: 1242608
cuaggccuguuuccugaaa

SEQ ID NO: 1360553 - RNA, 19 nt, Artificial Sequence
  Description of Artificial Sequence: Synthetic oligonucleotide
  Antisense strand to SEQ ID NO: 1360552
uuucaggaaacaggccuag

SEQ ID NO: 1360554 - RNA, 19 nt, Artificial Sequence
  Description of Artificial Sequence: Synthetic oligonucleotide
  Sense strand starting at position 3545 of SEQ ID NO: 1242608
uaggccuguuuccugaaau

SEQ ID NO: 1360555 - RNA, 19 nt, Artificial Sequence
  Description of Artificial Sequence: Synthetic oligonucleotide
  Antisense strand to SEQ ID NO: 1360554
auuucaggaaacaggccua

SEQ ID NO: 1360556 - RNA, 19 nt, Artificial Sequence
  Description of Artificial Sequence: Synthetic oligonucleotide
  Sense strand starting at position 3546 of SEQ ID NO: 1242608
aggccuguuuccugaaaug

SEQ ID NO: 1360557 - RNA, 19 nt, Artificial Sequence
  Description of Artificial Sequence: Synthetic oligonucleotide
  Antisense strand to SEQ ID NO: 1360556
cauuucaggaaacaggccu

SEQ ID NO: 1360558 - RNA, 19 nt, Artificial Sequence
  Description of Artificial Sequence: Synthetic oligonucleotide
  Sense strand starting at position 3583 of SEQ ID NO: 1242608
uccuaaguguggcuucuua

SEQ ID NO: 1360559 - RNA, 19 nt, Artificial Sequence
  Description of Artificial Sequence: Synthetic oligonucleotide
  Antisense strand to SEQ ID NO: 1360558
uaagaagccacacuuagga

SEQ ID NO: 1360560 - RNA, 19 nt, Artificial Sequence
  Description of Artificial Sequence: Synthetic oligonucleotide
  Sense strand starting at position 3853 of SEQ ID NO: 1242608
gcagaauccugcugugacc

SEQ ID NO: 1360561 - RNA, 19 nt, Artificial Sequence
  Description of Artificial Sequence: Synthetic oligonucleotide
  Antisense strand to SEQ ID NO: 1360560
ggucacagcaggauucugc

SEQ ID NO: 1360562 - RNA, 19 nt, Artificial Sequence
  Description of Artificial Sequence: Synthetic oligonucleotide
  Sense strand starting at position 58 of SEQ ID NO: 1242609
gccauuuccuggguuugca

SEQ ID NO: 1360563 - RNA, 19 nt, Artificial Sequence
  Description of Artificial Sequence: Synthetic oligonucleotide
  Antisense strand to SEQ ID NO: 1360562
ugcaaacccaggaaauggc

SEQ ID NO: 1360564 - RNA, 19 nt, Artificial Sequence
  Description of Artificial Sequence: Synthetic oligonucleotide
  Sense strand starting at position 138 of SEQ ID NO: 1242609
uuuggugucagugcuggua

SEQ ID NO: 1360565 - RNA, 19 nt, Artificial Sequence
  Description of Artificial Sequence: Synthetic oligonucleotide
  Antisense strand to SEQ ID NO: 1360564
uaccagcacugacaccaaa

SEQ ID NO: 1360566 - RNA, 19 nt, Artificial Sequence
  Description of Artificial Sequence: Synthetic oligonucleotide
  Sense strand starting at position 351 of SEQ ID NO: 1242609
cagcaucucccuugagguu

SEQ ID NO: 1360567 - RNA, 19 nt, Artificial Sequence
  Description of Artificial Sequence: Synthetic oligonucleotide
  Antisense strand to SEQ ID NO: 1360566
aaccucaagggagaugcug

SEQ ID NO: 1360568 - RNA, 19 nt, Artificial Sequence
  Description of Artificial Sequence: Synthetic oligonucleotide
  Sense strand starting at position 352 of SEQ ID NO: 1242609
agcaucucccuugagguua

SEQ ID NO: 1360569 - RNA, 19 nt, Artificial Sequence
  Description of Artificial Sequence: Synthetic oligonucleotide
  Antisense strand to SEQ ID NO: 1360568
uaaccucaagggagaugcu

SEQ ID NO: 1360570 - RNA, 19 nt, Artificial Sequence
  Description of Artificial Sequence: Synthetic oligonucleotide
  Sense strand starting at position 400 of SEQ ID NO: 1242609
uccugugaaaccugauggu

SEQ ID NO: 1360571 - RNA, 19 nt, Artificial Sequence
  Description of Artificial Sequence: Synthetic oligonucleotide
  Antisense strand to SEQ ID NO: 1360570
accaucagguuucacagga

SEQ ID NO: 1360572 - RNA, 19 nt, Artificial Sequence
  Description of Artificial Sequence: Synthetic oligonucleotide
  Sense strand starting at position 514 of SEQ ID NO: 1242609
gcaaccugugauggcaaau

SEQ ID NO: 1360573 - RNA, 19 nt, Artificial Sequence
  Description of Artificial Sequence: Synthetic oligonucleotide
  Antisense strand to SEQ ID NO: 1360572
auuugccaucacagguugc

SEQ ID NO: 1360574 - RNA, 19 nt, Artificial Sequence
  Description of Artificial Sequence: Synthetic oligonucleotide
  Sense strand starting at position 542 of SEQ ID NO: 1242609
acuccuuuagcagaaugua

SEQ ID NO: 1360575 - RNA, 19 nt, Artificial Sequence
  Description of Artificial Sequence: Synthetic oligonucleotide
  Antisense strand to SEQ ID NO: 1360574
uacauucugcuaaaggagu

SEQ ID NO: 1360576 - RNA, 19 nt, Artificial Sequence
  Description of Artificial Sequence: Synthetic oligonucleotide
  Sense strand starting at position 554 of SEQ ID NO: 1242609
gaauguaucgcagaagcag

SEQ ID NO: 1360577 - RNA, 19 nt, Artificial Sequence
  Description of Artificial Sequence: Synthetic oligonucleotide
  Antisense strand to SEQ ID NO: 1360576
cugcuucugcgauacauuc

SEQ ID NO: 1360578 - RNA, 19 nt, Artificial Sequence
  Description of Artificial Sequence: Synthetic oligonucleotide
  Sense strand starting at position 705 of SEQ ID NO: 1242609
uuacaucaacagggaugua

SEQ ID NO: 1360579 - RNA, 19 nt, Artificial Sequence
  Description of Artificial Sequence: Synthetic oligonucleotide
  Antisense strand to SEQ ID NO: 1360578
uacaucccuguugauguaa

SEQ ID NO: 1360580 - RNA, 19 nt, Artificial Sequence
  Description of Artificial Sequence: Synthetic oligonucleotide
  Sense strand starting at position 805 of SEQ ID NO: 1242609
ccauuaguauucuuuggga

SEQ ID NO: 1360581 - RNA, 19 nt, Artificial Sequence
  Description of Artificial Sequence: Synthetic oligonucleotide
  Antisense strand to SEQ ID NO: 1360580
ucccaaagaauacuaaugg

SEQ ID NO: 1360582 - RNA, 19 nt, Artificial Sequence
  Description of Artificial Sequence: Synthetic oligonucleotide
  Sense strand starting at position 807 of SEQ ID NO: 1242609
auuaguauucuuugggaga

SEQ ID NO: 1360583 - RNA, 19 nt, Artificial Sequence
  Description of Artificial Sequence: Synthetic oligonucleotide
  Antisense strand to SEQ ID NO: 1360582
ucucccaaagaauacuaau

SEQ ID NO: 1360584 - RNA, 19 nt, Artificial Sequence
  Description of Artificial Sequence: Synthetic oligonucleotide
  Sense strand starting at position 881 of SEQ ID NO: 1242609
aagguaaguuuaccuuuga

SEQ ID NO: 1360585 - RNA, 19 nt, Artificial Sequence
  Description of Artificial Sequence: Synthetic oligonucleotide
  Antisense strand to SEQ ID NO: 1360584
ucaaagguaaacuuaccuu

SEQ ID NO: 1360586 - RNA, 19 nt, Artificial Sequence
  Description of Artificial Sequence: Synthetic oligonucleotide
  Sense strand starting at position 882 of SEQ ID NO: 1242609
agguaaguuuaccuuugaa

SEQ ID NO: 1360587 - RNA, 19 nt, Artificial Sequence
  Description of Artificial Sequence: Synthetic oligonucleotide
  Antisense strand to SEQ ID NO: 1360586
uucaaagguaaacuuaccu

SEQ ID NO: 1360588 - RNA, 19 nt, Artificial Sequence
  Description of Artificial Sequence: Synthetic oligonucleotide
  Sense strand starting at position 990 of SEQ ID NO: 1242609
acugcuuaagcguaaauga

SEQ ID NO: 1360589 - RNA, 19 nt, Artificial Sequence
  Description of Artificial Sequence: Synthetic oligonucleotide
  Antisense strand to SEQ ID NO: 1360588
ucauuuacgcuuaagcagu

SEQ ID NO: 1360590 - RNA, 19 nt, Artificial Sequence
  Description of Artificial Sequence: Synthetic oligonucleotide
  Sense strand starting at position 1044 of SEQ ID NO: 1242609
agaaacgcuucugcagaaa

SEQ ID NO: 1360591 - RNA, 19 nt, Artificial Sequence
  Description of Artificial Sequence: Synthetic oligonucleotide
  Antisense strand to SEQ ID NO: 1360590
uuucugcagaagcguuucu

SEQ ID NO: 1360592 - RNA, 19 nt, Artificial Sequence
  Description of Artificial Sequence: Synthetic oligonucleotide
  Sense strand starting at position 1086 of SEQ ID NO: 1242609
gcaugcaacgaguucuguu

SEQ ID NO: 1360593 - RNA, 19 nt, Artificial Sequence
  Description of Artificial Sequence: Synthetic oligonucleotide
  Antisense strand to SEQ ID NO: 1360592
aacagaacucguugcaugc

SEQ ID NO: 1360594 - RNA, 19 nt, Artificial Sequence
  Description of Artificial Sequence: Synthetic oligonucleotide
  Sense strand starting at position 1285 of SEQ ID NO: 1242609
ggcauacagcucugaguga

SEQ ID NO: 1360595 - RNA, 19 nt, Artificial Sequence
  Description of Artificial Sequence: Synthetic oligonucleotide
  Antisense strand to SEQ ID NO: 1360594
ucacucagagcuguaugcc

SEQ ID NO: 1360596 - RNA, 19 nt, Artificial Sequence
  Description of Artificial Sequence: Synthetic oligonucleotide
  Sense strand starting at position 1289 of SEQ ID NO: 1242609
uacagcucugagugacuuu

SEQ ID NO: 1360597 - RNA, 19 nt, Artificial Sequence
  Description of Artificial Sequence: Synthetic oligonucleotide
  Antisense strand to SEQ ID NO: 1360596
aaagucacucagagcugua

SEQ ID NO: 1360598 - RNA, 19 nt, Artificial Sequence
  Description of Artificial Sequence: Synthetic oligonucleotide
  Sense strand starting at position 1292 of SEQ ID NO: 1242609
agcucugagugacuuucua

SEQ ID NO: 1360599 - RNA, 19 nt, Artificial Sequence
  Description of Artificial Sequence: Synthetic oligonucleotide
  Antisense strand to SEQ ID NO: 1360598
uagaaagucacucagagcu

SEQ ID NO: 1360600 - RNA, 19 nt, Artificial Sequence
  Description of Artificial Sequence: Synthetic oligonucleotide
  Sense strand starting at position 1499 of SEQ ID NO: 1242609
agagaaaccuagguuaagu

SEQ ID NO: 1360601 - RNA, 19 nt, Artificial Sequence
  Description of Artificial Sequence: Synthetic oligonucleotide
  Antisense strand to SEQ ID NO: 1360600
acuuaaccuagguuucucu

SEQ ID NO: 1360602 - RNA, 19 nt, Artificial Sequence
  Description of Artificial Sequence: Synthetic oligonucleotide
  Sense strand starting at position 1668 of SEQ ID NO: 1242609
aggacagcuucuuuccaga

SEQ ID NO: 1360603 - RNA, 19 nt, Artificial Sequence
  Description of Artificial Sequence: Synthetic oligonucleotide
  Antisense strand to SEQ ID NO: 1360602
ucuggaaagaagcuguccu

SEQ ID NO: 1360604 - RNA, 19 nt, Artificial Sequence
  Description of Artificial Sequence: Synthetic oligonucleotide
  Sense strand starting at position 2209 of SEQ ID NO: 1242609
cuaagaaucaccuggagug

SEQ ID NO: 1360605 - RNA, 19 nt, Artificial Sequence
  Description of Artificial Sequence: Synthetic oligonucleotide
  Antisense strand to SEQ ID NO: 1360604
cacuccaggugauucuuag

SEQ ID NO: 1360606 - RNA, 19 nt, Artificial Sequence
  Description of Artificial Sequence: Synthetic oligonucleotide
  Sense strand starting at position 2239 of SEQ ID NO: 1242609
ggagcaaaugcugguuuaa

SEQ ID NO: 1360607 - RNA, 19 nt, Artificial Sequence
  Description of Artificial Sequence: Synthetic oligonucleotide
  Antisense strand to SEQ ID NO: 1360606
uuaaaccagcauuugcucc

SEQ ID NO: 1360608 - RNA, 19 nt, Artificial Sequence
  Description of Artificial Sequence: Synthetic oligonucleotide
  Sense strand starting at position 2523 of SEQ ID NO: 1242609
gggagugaguccaggaaca

SEQ ID NO: 1360609 - RNA, 19 nt, Artificial Sequence
  Description of Artificial Sequence: Synthetic oligonucleotide
  Antisense strand to SEQ ID NO: 1360608
uguuccuggacucacuccc

SEQ ID NO: 1360610 - RNA, 19 nt, Artificial Sequence
  Description of Artificial Sequence: Synthetic oligonucleotide
  Sense strand starting at position 2647 of SEQ ID NO: 1242609
cugagcagguuucuuauau

SEQ ID NO: 1360611 - RNA, 19 nt, Artificial Sequence
  Description of Artificial Sequence: Synthetic oligonucleotide
  Antisense strand to SEQ ID NO: 1360610
auauaagaaaccugcucag

SEQ ID NO: 1360612 - RNA, 19 nt, Artificial Sequence
  Description of Artificial Sequence: Synthetic oligonucleotide
  Sense strand starting at position 2648 of SEQ ID NO: 1242609
ugagcagguuucuuauauu

SEQ ID NO: 1360613 - RNA, 19 nt, Artificial Sequence
  Description of Artificial Sequence: Synthetic oligonucleotide
  Antisense strand to SEQ ID NO: 1360612
aauauaagaaaccugcuca

SEQ ID NO: 1360614 - RNA, 19 nt, Artificial Sequence
  Description of Artificial Sequence: Synthetic oligonucleotide
  Sense strand starting at position 2863 of SEQ ID NO: 1242609
caaaguaugugaguccaua

SEQ ID NO: 1360615 - RNA, 19 nt, Artificial Sequence
  Description of Artificial Sequence: Synthetic oligonucleotide
  Antisense strand to SEQ ID NO: 1360614
uauggacucacauacuuug

SEQ ID NO: 1360616 - RNA, 19 nt, Artificial Sequence
  Description of Artificial Sequence: Synthetic oligonucleotide
  Sense strand starting at position 2951 of SEQ ID NO: 1242609
aggacuagauccguaacua

SEQ ID NO: 1360617 - RNA, 19 nt, Artificial Sequence
  Description of Artificial Sequence: Synthetic oligonucleotide
  Antisense strand to SEQ ID NO: 1360616
uaguuacggaucuaguccu

SEQ ID NO: 1360618 - RNA, 19 nt, Artificial Sequence
  Description of Artificial Sequence: Synthetic oligonucleotide
  Sense strand starting at position 3036 of SEQ ID NO: 1242609
ucaucucuacagggaaguu

SEQ ID NO: 1360619 - RNA, 19 nt, Artificial Sequence
  Description of Artificial Sequence: Synthetic oligonucleotide
  Antisense strand to SEQ ID NO: 1360618
aacuucccuguagagauga

SEQ ID NO: 1360620 - RNA, 19 nt, Artificial Sequence
  Description of Artificial Sequence: Synthetic oligonucleotide
  Sense strand starting at position 3069 of SEQ ID NO: 1242609
ggaggugcccucugcauuu

SEQ ID NO: 1360621 - RNA, 19 nt, Artificial Sequence
  Description of Artificial Sequence: Synthetic oligonucleotide
  Antisense strand to SEQ ID NO: 1360620
aaaugcagagggcaccucc

SEQ ID NO: 1360622 - RNA, 19 nt, Artificial Sequence
  Description of Artificial Sequence: Synthetic oligonucleotide
  Sense strand starting at position 3078 of SEQ ID NO: 1242609
cucugcauuuguccacgaa

SEQ ID NO: 1360623 - RNA, 19 nt, Artificial Sequence
  Description of Artificial Sequence: Synthetic oligonucleotide
  Antisense strand to SEQ ID NO: 1360622
uucguggacaaaugcagag

SEQ ID NO: 1360624 - RNA, 19 nt, Artificial Sequence
  Description of Artificial Sequence: Synthetic oligonucleotide
  Sense strand starting at position 3081 of SEQ ID NO: 1242609
ugcauuuguccacgaaauu

SEQ ID NO: 1360625 - RNA, 19 nt, Artificial Sequence
  Description of Artificial Sequence: Synthetic oligonucleotide
  Antisense strand to SEQ ID NO: 1360624
aauuucguggacaaaugca

SEQ ID NO: 1360626 - RNA, 19 nt, Artificial Sequence
  Description of Artificial Sequence: Synthetic oligonucleotide
  Sense strand starting at position 3136 of SEQ ID NO: 1242609
ucaauugcucccgaggguu

SEQ ID NO: 1360627 - RNA, 19 nt, Artificial Sequence
  Description of Artificial Sequence: Synthetic oligonucleotide
  Antisense strand to SEQ ID NO: 1360626
aacccucgggagcaauuga

SEQ ID NO: 1360628 - RNA, 19 nt, Artificial Sequence
  Description of Artificial Sequence: Synthetic oligonucleotide
  Sense strand starting at position 3309 of SEQ ID NO: 1242609
ugaugugagugaguccaga

SEQ ID NO: 1360629 - RNA, 19 nt, Artificial Sequence
  Description of Artificial Sequence: Synthetic oligonucleotide
  Antisense strand to SEQ ID NO: 1360628
ucuggacucacucacauca

SEQ ID NO: 1360630 - RNA, 19 nt, Artificial Sequence
  Description of Artificial Sequence: Synthetic oligonucleotide
  Sense strand starting at position 3325 of SEQ ID NO: 1242609
agauuugaaucccaggaau

SEQ ID NO: 1360631 - RNA, 19 nt, Artificial Sequence
  Description of Artificial Sequence: Synthetic oligonucleotide
  Antisense strand to SEQ ID NO: 1360630
auuccugggauucaaaucu

SEQ ID NO: 1360632 - RNA, 19 nt, Artificial Sequence
  Description of Artificial Sequence: Synthetic oligonucleotide
  Sense strand starting at position 3337 of SEQ ID NO: 1242609
caggaauguuccuuuccga

SEQ ID NO: 1360633 - RNA, 19 nt, Artificial Sequence
  Description of Artificial Sequence: Synthetic oligonucleotide
  Antisense strand to SEQ ID NO: 1360632
ucggaaaggaacauuccug

SEQ ID NO: 1360634 - RNA, 19 nt, Artificial Sequence
  Description of Artificial Sequence: Synthetic oligonucleotide
  Sense strand starting at position 3454 of SEQ ID NO: 1242609
auaguaauuugaggagagu

SEQ ID NO: 1360635 - RNA, 19 nt, Artificial Sequence
  Description of Artificial Sequence: Synthetic oligonucleotide
  Antisense strand to SEQ ID NO: 1360634
acucuccucaaauuacuau

SEQ ID NO: 1360636 - RNA, 19 nt, Artificial Sequence
  Description of Artificial Sequence: Synthetic oligonucleotide
  Sense strand starting at position 3521 of SEQ ID NO: 1242609
agaagugcuugugucauua

SEQ ID NO: 1360637 - RNA, 19 nt, Artificial Sequence
  Description of Artificial Sequence: Synthetic oligonucleotide
  Antisense strand to SEQ ID NO: 1360636
uaaugacacaagcacuucu

SEQ ID NO: 1360638 - RNA, 19 nt, Artificial Sequence
  Description of Artificial Sequence: Synthetic oligonucleotide
  Sense strand starting at position 3530 of SEQ ID NO: 1242609
ugugucauuaacgaagacu

SEQ ID NO: 1360639 - RNA, 19 nt, Artificial Sequence
  Description of Artificial Sequence: Synthetic oligonucleotide
  Antisense strand to SEQ ID NO: 1360638
agucuucguuaaugacaca

SEQ ID NO: 1360640 - RNA, 19 nt, Artificial Sequence
  Description of Artificial Sequence: Synthetic oligonucleotide
  Sense strand starting at position 3653 of SEQ ID NO: 1242609
agggcaacugcuuagauca

SEQ ID NO: 1360641 - RNA, 19 nt, Artificial Sequence
  Description of Artificial Sequence: Synthetic oligonucleotide
  Antisense strand to SEQ ID NO: 1360640
ugaucuaagcaguugcccu

SEQ ID NO: 1360642 - RNA, 19 nt, Artificial Sequence
  Description of Artificial Sequence: Synthetic oligonucleotide
  Sense strand starting at position 240 of SEQ ID NO: 1242610
guuucuuacugugcagaag

SEQ ID NO: 1360643 - RNA, 19 nt, Artificial Sequence
  Description of Artificial Sequence: Synthetic oligonucleotide
  Antisense strand to SEQ ID NO: 1360642
cuucugcacaguaagaaac

SEQ ID NO: 1360644 - RNA, 19 nt, Artificial Sequence
  Description of Artificial Sequence: Synthetic oligonucleotide
  Sense strand starting at position 243 of SEQ ID NO: 1242610
ucuuacugugcagaaguuu

SEQ ID NO: 1360645 - RNA, 19 nt, Artificial Sequence
  Description of Artificial Sequence: Synthetic oligonucleotide
  Antisense strand to SEQ ID NO: 1360644
aaacuucugcacaguaaga

SEQ ID NO: 1360646 - RNA, 19 nt, Artificial Sequence
  Description of Artificial Sequence: Synthetic oligonucleotide
  Sense strand starting at position 252 of SEQ ID NO: 1242610
gcagaaguuugugugacag

SEQ ID NO: 1360647 - RNA, 19 nt, Artificial Sequence
  Description of Artificial Sequence: Synthetic oligonucleotide
  Antisense strand to SEQ ID NO: 1360646
cugucacacaaacuucugc

SEQ ID NO: 1360648 - RNA, 19 nt, Artificial Sequence
  Description of Artificial Sequence: Synthetic oligonucleotide
  Sense strand starting at position 477 of SEQ ID NO: 1242610
ccgggacuuucggcaagau

SEQ ID NO: 1360649 - RNA, 19 nt, Artificial Sequence
  Description of Artificial Sequence: Synthetic oligonucleotide
  Antisense strand to SEQ ID NO: 1360648
aucuugccgaaagucccgg

SEQ ID NO: 1360650 - RNA, 19 nt, Artificial Sequence
  Description of Artificial Sequence: Synthetic oligonucleotide
  Sense strand starting at position 478 of SEQ ID NO: 1242610
cgggacuuucggcaagaug

SEQ ID NO: 1360651 - RNA, 19 nt, Artificial Sequence
  Description of Artificial Sequence: Synthetic oligonucleotide
  Antisense strand to SEQ ID NO: 1360650
caucuugccgaaagucccg

SEQ ID NO: 1360652 - RNA, 19 nt, Artificial Sequence
  Description of Artificial Sequence: Synthetic oligonucleotide
  Sense strand starting at position 701 of SEQ ID NO: 1242610
gagacaucucaugguagcu

SEQ ID NO: 1360653 - RNA, 19 nt, Artificial Sequence
  Description of Artificial Sequence: Synthetic oligonucleotide
  Antisense strand to SEQ ID NO: 1360652
agcuaccaugagaugucuc

SEQ ID NO: 1360654 - RNA, 19 nt, Artificial Sequence
  Description of Artificial Sequence: Synthetic oligonucleotide
  Sense strand starting at position 717 of SEQ ID NO: 1242610
gcucauguuacagaggauu

SEQ ID NO: 1360655 - RNA, 19 nt, Artificial Sequence
  Description of Artificial Sequence: Synthetic oligonucleotide
  Antisense strand to SEQ ID NO: 1360654
aauccucuguaacaugagc

SEQ ID NO: 1360656 - RNA, 19 nt, Artificial Sequence
  Description of Artificial Sequence: Synthetic oligonucleotide
  Sense strand starting at position 719 of SEQ ID NO: 1242610
ucauguuacagaggauuga

SEQ ID NO: 1360657 - RNA, 19 nt, Artificial Sequence
  Description of Artificial Sequence: Synthetic oligonucleotide
  Antisense strand to SEQ ID NO: 1360656
ucaauccucuguaacauga

SEQ ID NO: 1360658 - RNA, 19 nt, Artificial Sequence
  Description of Artificial Sequence: Synthetic oligonucleotide
  Sense strand starting at position 776 of SEQ ID NO: 1242610
gaccaaagaucaggauaag

SEQ ID NO: 1360659 - RNA, 19 nt, Artificial Sequence
  Description of Artificial Sequence: Synthetic oligonucleotide
  Antisense strand to SEQ ID NO: 1360658
cuuauccugaucuuugguc

SEQ ID NO: 1360660 - RNA, 19 nt, Artificial Sequence
  Description of Artificial Sequence: Synthetic oligonucleotide
  Sense strand starting at position 1310 of SEQ ID NO: 1242610
gagccuuacgccgugcuaa

SEQ ID NO: 1360661 - RNA, 19 nt, Artificial Sequence
  Description of Artificial Sequence: Synthetic oligonucleotide
  Antisense strand to SEQ ID NO: 1360660
uuagcacggcguaaggcuc

SEQ ID NO: 1360662 - RNA, 19 nt, Artificial Sequence
  Description of Artificial Sequence: Synthetic oligonucleotide
  Sense strand starting at position 1318 of SEQ ID NO: 1242610
cgccgugcuaagguagaau

SEQ ID NO: 1360663 - RNA, 19 nt, Artificial Sequence
  Description of Artificial Sequence: Synthetic oligonucleotide
  Antisense strand to SEQ ID NO: 1360662
auucuaccuuagcacggcg

SEQ ID NO: 1360664 - RNA, 19 nt, Artificial Sequence
  Description of Artificial Sequence: Synthetic oligonucleotide
  Sense strand starting at position 1384 of SEQ ID NO: 1242610
ggugaugaguucccuguca

SEQ ID NO: 1360665 - RNA, 19 nt, Artificial Sequence
  Description of Artificial Sequence: Synthetic oligonucleotide
  Antisense strand to SEQ ID NO: 1360664
ugacagggaacucaucacc

SEQ ID NO: 1360666 - RNA, 19 nt, Artificial Sequence
  Description of Artificial Sequence: Synthetic oligonucleotide
  Sense strand starting at position 1386 of SEQ ID NO: 1242610
ugaugaguucccugucacu

SEQ ID NO: 1360667 - RNA, 19 nt, Artificial Sequence
  Description of Artificial Sequence: Synthetic oligonucleotide
  Antisense strand to SEQ ID NO: 1360666
agugacagggaacucauca

SEQ ID NO: 1360668 - RNA, 19 nt, Artificial Sequence
  Description of Artificial Sequence: Synthetic oligonucleotide
  Sense strand starting at position 1533 of SEQ ID NO: 1242610
cguccaguccuacaaggau

SEQ ID NO: 1360669 - RNA, 19 nt, Artificial Sequence
  Description of Artificial Sequence: Synthetic oligonucleotide
  Antisense strand to SEQ ID NO: 1360668
auccuuguaggacuggacg

SEQ ID NO: 1360670 - RNA, 19 nt, Artificial Sequence
  Description of Artificial Sequence: Synthetic oligonucleotide
  Sense strand starting at position 1695 of SEQ ID NO: 1242610
gguggguuucgacagagca

SEQ ID NO: 1360671 - RNA, 19 nt, Artificial Sequence
  Description of Artificial Sequence: Synthetic oligonucleotide
  Antisense strand to SEQ ID NO: 1360670
ugcucugucgaaacccacc

SEQ ID NO: 1360672 - RNA, 19 nt, Artificial Sequence
  Description of Artificial Sequence: Synthetic oligonucleotide
  Sense strand starting at position 1697 of SEQ ID NO: 1242610
uggguuucgacagagcaga

SEQ ID NO: 1360673 - RNA, 19 nt, Artificial Sequence
  Description of Artificial Sequence: Synthetic oligonucleotide
  Antisense strand to SEQ ID NO: 1360672
ucugcucugucgaaaccca

SEQ ID NO: 1360674 - RNA, 19 nt, Artificial Sequence
  Description of Artificial Sequence: Synthetic oligonucleotide
  Sense strand starting at position 1996 of SEQ ID NO: 1242610
agaacugagccuugaucag

SEQ ID NO: 1360675 - RNA, 19 nt, Artificial Sequence
  Description of Artificial Sequence: Synthetic oligonucleotide
  Antisense strand to SEQ ID NO: 1360674
cugaucaaggcucaguucu

SEQ ID NO: 1360676 - RNA, 19 nt, Artificial Sequence
  Description of Artificial Sequence: Synthetic oligonucleotide
  Sense strand starting at position 2060 of SEQ ID NO: 1242610
gacugugauugguuccgga

SEQ ID NO: 1360677 - RNA, 19 nt, Artificial Sequence
  Description of Artificial Sequence: Synthetic oligonucleotide
  Antisense strand to SEQ ID NO: 1360676
uccggaaccaaucacaguc

SEQ ID NO: 1360678 - RNA, 19 nt, Artificial Sequence
  Description of Artificial Sequence: Synthetic oligonucleotide
  Sense strand starting at position 2305 of SEQ ID NO: 1242610
ugccgacuucuagaaugga

SEQ ID NO: 1360679 - RNA, 19 nt, Artificial Sequence
  Description of Artificial Sequence: Synthetic oligonucleotide
  Antisense strand to SEQ ID NO: 1360678
uccauucuagaagucggca

SEQ ID NO: 1360680 - RNA, 19 nt, Artificial Sequence
  Description of Artificial Sequence: Synthetic oligonucleotide
  Sense strand starting at position 2308 of SEQ ID NO: 1242610
cgacuucuagaauggaacu

SEQ ID NO: 1360681 - RNA, 19 nt, Artificial Sequence
  Description of Artificial Sequence: Synthetic oligonucleotide
  Antisense strand to SEQ ID NO: 1360680
aguuccauucuagaagucg

SEQ ID NO: 1360682 - RNA, 19 nt, Artificial Sequence
  Description of Artificial Sequence: Synthetic oligonucleotide
  Sense strand starting at position 2378 of SEQ ID NO: 1242610
gcauuugauugugugccau

SEQ ID NO: 1360683 - RNA, 19 nt, Artificial Sequence
  Description of Artificial Sequence: Synthetic oligonucleotide
  Antisense strand to SEQ ID NO: 1360682
auggcacacaaucaaaugc

SEQ ID NO: 1360684 - RNA, 19 nt, Artificial Sequence
  Description of Artificial Sequence: Synthetic oligonucleotide
  Sense strand starting at position 2500 of SEQ ID NO: 1242610
ugacuuugggcucagguua

SEQ ID NO: 1360685 - RNA, 19 nt, Artificial Sequence
  Description of Artificial Sequence: Synthetic oligonucleotide
  Antisense strand to SEQ ID NO: 1360684
uaaccugagcccaaaguca

SEQ ID NO: 1360686 - RNA, 19 nt, Artificial Sequence
  Description of Artificial Sequence: Synthetic oligonucleotide
  Sense strand starting at position 2598 of SEQ ID NO: 1242610
gggacacacuuauacuaga

SEQ ID NO: 1360687 - RNA, 19 nt, Artificial Sequence
  Description of Artificial Sequence: Synthetic oligonucleotide
  Antisense strand to SEQ ID NO: 1360686
ucuaguauaaguguguccc

SEQ ID NO: 1360688 - RNA, 19 nt, Artificial Sequence
  Description of Artificial Sequence: Synthetic oligonucleotide
  Sense strand starting at position 2611 of SEQ ID NO: 1242610
acuagaaauugcuucuugu

SEQ ID NO: 1360689 - RNA, 19 nt, Artificial Sequence
  Description of Artificial Sequence: Synthetic oligonucleotide
  Antisense strand to SEQ ID NO: 1360688
acaagaagcaauuucuagu

SEQ ID NO: 1360690 - RNA, 19 nt, Artificial Sequence
  Description of Artificial Sequence: Synthetic oligonucleotide
  Sense strand starting at position 2614 of SEQ ID NO: 1242610
agaaauugcuucuuguuua

SEQ ID NO: 1360691 - RNA, 19 nt, Artificial Sequence
  Description of Artificial Sequence: Synthetic oligonucleotide
  Antisense strand to SEQ ID NO: 1360690
uaaacaagaagcaauuucu

SEQ ID NO: 1360692 - RNA, 19 nt, Artificial Sequence
  Description of Artificial Sequence: Synthetic oligonucleotide
  Sense strand starting at position 2619 of SEQ ID NO: 1242610
uugcuucuuguuuaucuau

SEQ ID NO: 1360693 - RNA, 19 nt, Artificial Sequence
  Description of Artificial Sequence: Synthetic oligonucleotide
  Antisense strand to SEQ ID NO: 1360692
auagauaaacaagaagcaa

SEQ ID NO: 1360694 - RNA, 19 nt, Artificial Sequence
  Description of Artificial Sequence: Synthetic oligonucleotide
  Sense strand starting at position 2658 of SEQ ID NO: 1242610
guuguuguuguggagacaa

SEQ ID NO: 1360695 - RNA, 19 nt, Artificial Sequence
  Description of Artificial Sequence: Synthetic oligonucleotide
  Antisense strand to SEQ ID NO: 1360694
uugucuccacaacaacaac

SEQ ID NO: 1360696 - RNA, 19 nt, Artificial Sequence
  Description of Artificial Sequence: Synthetic oligonucleotide
  Sense strand starting at position 2968 of SEQ ID NO: 1242610
cagggcauccuauauuguu

SEQ ID NO: 1360697 - RNA, 19 nt, Artificial Sequence
  Description of Artificial Sequence: Synthetic oligonucleotide
  Antisense strand to SEQ ID NO: 1360696
aacaauauaggaugcccug

SEQ ID NO: 1360698 - RNA, 19 nt, Artificial Sequence
  Description of Artificial Sequence: Synthetic oligonucleotide
  Sense strand starting at position 2976 of SEQ ID NO: 1242610
ccuauauuguuauuugcua

SEQ ID NO: 1360699 - RNA, 19 nt, Artificial Sequence
  Description of Artificial Sequence: Synthetic oligonucleotide
  Antisense strand to SEQ ID NO: 1360698
uagcaaauaacaauauagg

SEQ ID NO: 1360700 - RNA, 19 nt, Artificial Sequence
  Description of Artificial Sequence: Synthetic oligonucleotide
  Sense strand starting at position 3128 of SEQ ID NO: 1242610
ugcucaacugucuacgaaa

SEQ ID NO: 1360701 - RNA, 19 nt, Artificial Sequence
  Description of Artificial Sequence: Synthetic oligonucleotide
  Antisense strand to SEQ ID NO: 1360700
uuucguagacaguugagca

SEQ ID NO: 1360702 - RNA, 19 nt, Artificial Sequence
  Description of Artificial Sequence: Synthetic oligonucleotide
  Sense strand starting at position 3130 of SEQ ID NO: 1242610
cucaacugucuacgaaagu

SEQ ID NO: 1360703 - RNA, 19 nt, Artificial Sequence
  Description of Artificial Sequence: Synthetic oligonucleotide
  Antisense strand to SEQ ID NO: 1360702
acuuucguagacaguugag

SEQ ID NO: 1360704 - RNA, 19 nt, Artificial Sequence
  Description of Artificial Sequence: Synthetic oligonucleotide
  Sense strand starting at position 3139 of SEQ ID NO: 1242610
cuacgaaagugaucacugu

SEQ ID NO: 1360705 - RNA, 19 nt, Artificial Sequence
  Description of Artificial Sequence: Synthetic oligonucleotide
  Antisense strand to SEQ ID NO: 1360704
acagugaucacuuucguag

SEQ ID NO: 1360706 - RNA, 19 nt, Artificial Sequence
  Description of Artificial Sequence: Synthetic oligonucleotide
  Sense strand starting at position 3140 of SEQ ID NO: 1242610
uacgaaagugaucacuguu

SEQ ID NO: 1360707 - RNA, 19 nt, Artificial Sequence
  Description of Artificial Sequence: Synthetic oligonucleotide
  Antisense strand to SEQ ID NO: 1360706
aacagugaucacuuucgua

SEQ ID NO: 1360708 - RNA, 19 nt, Artificial Sequence
  Description of Artificial Sequence: Synthetic oligonucleotide
  Sense strand starting at position 3183 of SEQ ID NO: 1242610
guuggugauuugcucauga

SEQ ID NO: 1360709 - RNA, 19 nt, Artificial Sequence
  Description of Artificial Sequence: Synthetic oligonucleotide
  Antisense strand to SEQ ID NO: 1360708
ucaugagcaaaucaccaac

SEQ ID NO: 1360710 - RNA, 19 nt, Artificial Sequence
  Description of Artificial Sequence: Synthetic oligonucleotide
  Sense strand starting at position 3237 of SEQ ID NO: 1242610
gcgggagcuguccaaggau

SEQ ID NO: 1360711 - RNA, 19 nt, Artificial Sequence
  Description of Artificial Sequence: Synthetic oligonucleotide
  Antisense strand to SEQ ID NO: 1360710
auccuuggacagcucccgc

SEQ ID NO: 1360712 - RNA, 19 nt, Artificial Sequence
  Description of Artificial Sequence: Synthetic oligonucleotide
  Sense strand starting at position 3651 of SEQ ID NO: 1242610
gccagugaccauuauaauu

SEQ ID NO: 1360713 - RNA, 19 nt, Artificial Sequence
  Description of Artificial Sequence: Synthetic oligonucleotide
  Antisense strand to SEQ ID NO: 1360712
aauuauaauggucacuggc

SEQ ID NO: 1360714 - RNA, 19 nt, Artificial Sequence
  Description of Artificial Sequence: Synthetic oligonucleotide
  Sense strand starting at position 3680 of SEQ ID NO: 1242610
agacgacucuggucuuaaa

SEQ ID NO: 1360715 - RNA, 19 nt, Artificial Sequence
  Description of Artificial Sequence: Synthetic oligonucleotide
  Antisense strand to SEQ ID NO: 1360714
uuuaagaccagagucgucu

SEQ ID NO: 1360716 - RNA, 19 nt, Artificial Sequence
  Description of Artificial Sequence: Synthetic oligonucleotide
  Sense strand starting at position 3710 of SEQ ID NO: 1242610
ggaaaugcagcauagacuu

SEQ ID NO: 1360717 - RNA, 19 nt, Artificial Sequence
  Description of Artificial Sequence: Synthetic oligonucleotide
  Antisense strand to SEQ ID NO: 1360716
aagucuaugcugcauuucc

SEQ ID NO: 1360718 - RNA, 19 nt, Artificial Sequence
  Description of Artificial Sequence: Synthetic oligonucleotide
  Sense strand starting at position 3908 of SEQ ID NO: 1242610
ggcuccaagagauguuugu

SEQ ID NO: 1360719 - RNA, 19 nt, Artificial Sequence
  Description of Artificial Sequence: Synthetic oligonucleotide
  Antisense strand to SEQ ID NO: 1360718
acaaacaucucuuggagcc

SEQ ID NO: 1360720 - RNA, 19 nt, Artificial Sequence
  Description of Artificial Sequence: Synthetic oligonucleotide
  Sense strand starting at position 3912 of SEQ ID NO: 1242610
ccaagagauguuuguacaa

SEQ ID NO: 1360721 - RNA, 19 nt, Artificial Sequence
  Description of Artificial Sequence: Synthetic oligonucleotide
  Antisense strand to SEQ ID NO: 1360720
uuguacaaacaucucuugg

SEQ ID NO: 1360722 - RNA, 19 nt, Artificial Sequence
  Description of Artificial Sequence: Synthetic oligonucleotide
  Sense strand starting at position 29 of SEQ ID NO: 1242611
aauggaaucucugaaggca

SEQ ID NO: 1360723 - RNA, 19 nt, Artificial Sequence
  Description of Artificial Sequence: Synthetic oligonucleotide
  Antisense strand to SEQ ID NO: 1360722
ugccuucagagauuccauu

SEQ ID NO: 1360724 - RNA, 19 nt, Artificial Sequence
  Description of Artificial Sequence: Synthetic oligonucleotide
  Sense strand starting at position 42 of SEQ ID NO: 1242611
aaggcauucugagggcaaa

SEQ ID NO: 1360725 - RNA, 19 nt, Artificial Sequence
  Description of Artificial Sequence: Synthetic oligonucleotide
  Antisense strand to SEQ ID NO: 1360724
uuugcccucagaaugccuu

SEQ ID NO: 1360726 - RNA, 19 nt, Artificial Sequence
  Description of Artificial Sequence: Synthetic oligonucleotide
  Sense strand starting at position 105 of SEQ ID NO: 1242611
aagccuugagucuguggaa

SEQ ID NO: 1360727 - RNA, 19 nt, Artificial Sequence
  Description of Artificial Sequence: Synthetic oligonucleotide
  Antisense strand to SEQ ID NO: 1360726
uuccacagacucaaggcuu

SEQ ID NO: 1360728 - RNA, 19 nt, Artificial Sequence
  Description of Artificial Sequence: Synthetic oligonucleotide
  Sense strand starting at position 106 of SEQ ID NO: 1242611
agccuugagucuguggaaa

SEQ ID NO: 1360729 - RNA, 19 nt, Artificial Sequence
  Description of Artificial Sequence: Synthetic oligonucleotide
  Antisense strand to SEQ ID NO: 1360728
uuuccacagacucaaggcu

SEQ ID NO: 1360730 - RNA, 19 nt, Artificial Sequence
  Description of Artificial Sequence: Synthetic oligonucleotide
  Sense strand starting at position 108 of SEQ ID NO: 1242611
ccuugagucuguggaaaga

SEQ ID NO: 1360731 - RNA, 19 nt, Artificial Sequence
  Description of Artificial Sequence: Synthetic oligonucleotide
  Antisense strand to SEQ ID NO: 1360730
ucuuuccacagacucaagg

SEQ ID NO: 1360732 - RNA, 19 nt, Artificial Sequence
  Description of Artificial Sequence: Synthetic oligonucleotide
  Sense strand starting at position 293 of SEQ ID NO: 1242611
gguguuuacagucagcaga

SEQ ID NO: 1360733 - RNA, 19 nt, Artificial Sequence
  Description of Artificial Sequence: Synthetic oligonucleotide
  Antisense strand to SEQ ID NO: 1360732
ucugcugacuguaaacacc

SEQ ID NO: 1360734 - RNA, 19 nt, Artificial Sequence
  Description of Artificial Sequence: Synthetic oligonucleotide
  Sense strand starting at position 295 of SEQ ID NO: 1242611
uguuuacagucagcagaga

SEQ ID NO: 1360735 - RNA, 19 nt, Artificial Sequence
  Description of Artificial Sequence: Synthetic oligonucleotide
  Antisense strand to SEQ ID NO: 1360734
ucucugcugacuguaaaca

SEQ ID NO: 1360736 - RNA, 19 nt, Artificial Sequence
  Description of Artificial Sequence: Synthetic oligonucleotide
  Sense strand starting at position 306 of SEQ ID NO: 1242611
agcagagacuguuuggagu

SEQ ID NO: 1360737 - RNA, 19 nt, Artificial Sequence
  Description of Artificial Sequence: Synthetic oligonucleotide
  Antisense strand to SEQ ID NO: 1360736
acuccaaacagucucugcu

SEQ ID NO: 1360738 - RNA, 19 nt, Artificial Sequence
  Description of Artificial Sequence: Synthetic oligonucleotide
  Sense strand starting at position 537 of SEQ ID NO: 1242611
ggagaccaauugucacuaa

SEQ ID NO: 1360739 - RNA, 19 nt, Artificial Sequence
  Description of Artificial Sequence: Synthetic oligonucleotide
  Antisense strand to SEQ ID NO: 1360738
uuagugacaauuggucucc

SEQ ID NO: 1360740 - RNA, 19 nt, Artificial Sequence
  Description of Artificial Sequence: Synthetic oligonucleotide
  Sense strand starting at position 1145 of SEQ ID NO: 1242611
gggccuucgaggugugaug

SEQ ID NO: 1360741 - RNA, 19 nt, Artificial Sequence
  Description of Artificial Sequence: Synthetic oligonucleotide
  Antisense strand to SEQ ID NO: 1360740
caucacaccucgaaggccc

SEQ ID NO: 1360742 - RNA, 19 nt, Artificial Sequence
  Description of Artificial Sequence: Synthetic oligonucleotide
  Sense strand starting at position 1441 of SEQ ID NO: 1242611
ucgggauuacgucagagug

SEQ ID NO: 1360743 - RNA, 19 nt, Artificial Sequence
  Description of Artificial Sequence: Synthetic oligonucleotide
  Antisense strand to SEQ ID NO: 1360742
cacucugacguaaucccga

SEQ ID NO: 1360744 - RNA, 19 nt, Artificial Sequence
  Description of Artificial Sequence: Synthetic oligonucleotide
  Sense strand starting at position 1443 of SEQ ID NO: 1242611
gggauuacgucagagugac

SEQ ID NO: 1360745 - RNA, 19 nt, Artificial Sequence
  Description of Artificial Sequence: Synthetic oligonucleotide
  Antisense strand to SEQ ID NO: 1360744
gucacucugacguaauccc

SEQ ID NO: 1360746 - RNA, 19 nt, Artificial Sequence
  Description of Artificial Sequence: Synthetic oligonucleotide
  Sense strand starting at position 2028 of SEQ ID NO: 1242611
uguggugugugcuucauua

SEQ ID NO: 1360747 - RNA, 19 nt, Artificial Sequence
  Description of Artificial Sequence: Synthetic oligonucleotide
  Antisense strand to SEQ ID NO: 1360746
uaaugaagcacacaccaca

SEQ ID NO: 1360748 - RNA, 19 nt, Artificial Sequence
  Description of Artificial Sequence: Synthetic oligonucleotide
  Sense strand starting at position 2420 of SEQ ID NO: 1242611
accucucgcuucggagaaa

SEQ ID NO: 1360749 - RNA, 19 nt, Artificial Sequence
  Description of Artificial Sequence: Synthetic oligonucleotide
  Antisense strand to SEQ ID NO: 1360748
uuucuccgaagcgagaggu

SEQ ID NO: 1360750 - RNA, 19 nt, Artificial Sequence
  Description of Artificial Sequence: Synthetic oligonucleotide
  Sense strand starting at position 2513 of SEQ ID NO: 1242611
ucaagauguaggcaugacu

SEQ ID NO: 1360751 - RNA, 19 nt, Artificial Sequence
  Description of Artificial Sequence: Synthetic oligonucleotide
  Antisense strand to SEQ ID NO: 1360750
agucaugccuacaucuuga

SEQ ID NO: 1360752 - RNA, 19 nt, Artificial Sequence
  Description of Artificial Sequence: Synthetic oligonucleotide
  Sense strand starting at position 2650 of SEQ ID NO: 1242611
gggccaucuuucugucuuu

SEQ ID NO: 1360753 - RNA, 19 nt, Artificial Sequence
  Description of Artificial Sequence: Synthetic oligonucleotide
  Antisense strand to SEQ ID NO: 1360752
aaagacagaaagauggccc

SEQ ID NO: 1360754 - RNA, 19 nt, Artificial Sequence
  Description of Artificial Sequence: Synthetic oligonucleotide
  Sense strand starting at position 2660 of SEQ ID NO: 1242611
ucugucuuucuggagcagu

SEQ ID NO: 1360755 - RNA, 19 nt, Artificial Sequence
  Description of Artificial Sequence: Synthetic oligonucleotide
  Antisense strand to SEQ ID NO: 1360754
acugcuccagaaagacaga

SEQ ID NO: 1360756 - RNA, 19 nt, Artificial Sequence
  Description of Artificial Sequence: Synthetic oligonucleotide
  Sense strand starting at position 2839 of SEQ ID NO: 1242611
ggccucauccuggguuaga

SEQ ID NO: 1360757 - RNA, 19 nt, Artificial Sequence
  Description of Artificial Sequence: Synthetic oligonucleotide
  Antisense strand to SEQ ID NO: 1360756
ucuaacccaggaugaggcc

SEQ ID NO: 1360758 - RNA, 19 nt, Artificial Sequence
  Description of Artificial Sequence: Synthetic oligonucleotide
  Sense strand starting at position 2840 of SEQ ID NO: 1242611
gccucauccuggguuagag

SEQ ID NO: 1360759 - RNA, 19 nt, Artificial Sequence
  Description of Artificial Sequence: Synthetic oligonucleotide
  Antisense strand to SEQ ID NO: 1360758
cucuaacccaggaugaggc

SEQ ID NO: 1360760 - RNA, 19 nt, Artificial Sequence
  Description of Artificial Sequence: Synthetic oligonucleotide
  Sense strand starting at position 3019 of SEQ ID NO: 1242611
gaacuugcagcccgugaaa

SEQ ID NO: 1360761 - RNA, 19 nt, Artificial Sequence
  Description of Artificial Sequence: Synthetic oligonucleotide
  Antisense strand to SEQ ID NO: 1360760
uuucacgggcugcaaguuc

SEQ ID NO: 1360762 - RNA, 19 nt, Artificial Sequence
  Description of Artificial Sequence: Synthetic oligonucleotide
  Sense strand starting at position 3021 of SEQ ID NO: 1242611
acuugcagcccgugaaagu

SEQ ID NO: 1360763 - RNA, 19 nt, Artificial Sequence
  Description of Artificial Sequence: Synthetic oligonucleotide
  Antisense strand to SEQ ID NO: 1360762
acuuucacgggcugcaagu

SEQ ID NO: 1360764 - RNA, 19 nt, Artificial Sequence
  Description of Artificial Sequence: Synthetic oligonucleotide
  Sense strand starting at position 3031 of SEQ ID NO: 1242611
cgugaaagucccuaagucu

SEQ ID NO: 1360765 - RNA, 19 nt, Artificial Sequence
  Description of Artificial Sequence: Synthetic oligonucleotide
  Antisense strand to SEQ ID NO: 1360764
agacuuagggacuuucacg

SEQ ID NO: 1360766 - RNA, 19 nt, Artificial Sequence
  Description of Artificial Sequence: Synthetic oligonucleotide
  Sense strand starting at position 3120 of SEQ ID NO: 1242611
cggcccuuguuucugagaa

SEQ ID NO: 1360767 - RNA, 19 nt, Artificial Sequence
  Description of Artificial Sequence: Synthetic oligonucleotide
  Antisense strand to SEQ ID NO: 1360766
uucucagaaacaagggccg

SEQ ID NO: 1360768 - RNA, 19 nt, Artificial Sequence
  Description of Artificial Sequence: Synthetic oligonucleotide
  Sense strand starting at position 3121 of SEQ ID NO: 1242611
ggcccuuguuucugagaag

SEQ ID NO: 1360769 - RNA, 19 nt, Artificial Sequence
  Description of Artificial Sequence: Synthetic oligonucleotide
  Antisense strand to SEQ ID NO: 1360768
cuucucagaaacaagggcc

SEQ ID NO: 1360770 - RNA, 19 nt, Artificial Sequence
  Description of Artificial Sequence: Synthetic oligonucleotide
  Sense strand starting at position 3122 of SEQ ID NO: 1242611
gcccuuguuucugagaaga

SEQ ID NO: 1360771 - RNA, 19 nt, Artificial Sequence
  Description of Artificial Sequence: Synthetic oligonucleotide
  Antisense strand to SEQ ID NO: 1360770
ucuucucagaaacaagggc

SEQ ID NO: 1360772 - RNA, 19 nt, Artificial Sequence
  Description of Artificial Sequence: Synthetic oligonucleotide
  Sense strand starting at position 3124 of SEQ ID NO: 1242611
ccuuguuucugagaagacg

SEQ ID NO: 1360773 - RNA, 19 nt, Artificial Sequence
  Description of Artificial Sequence: Synthetic oligonucleotide
  Antisense strand to SEQ ID NO: 1360772
cgucuucucagaaacaagg

SEQ ID NO: 1360774 - RNA, 19 nt, Artificial Sequence
  Description of Artificial Sequence: Synthetic oligonucleotide
  Sense strand starting at position 3218 of SEQ ID NO: 1242611
ccgccauuucucuaagcag

SEQ ID NO: 1360775 - RNA, 19 nt, Artificial Sequence
  Description of Artificial Sequence: Synthetic oligonucleotide
  Antisense strand to SEQ ID NO: 1360774
cugcuuagagaaauggcgg

SEQ ID NO: 1360776 - RNA, 19 nt, Artificial Sequence
  Description of Artificial Sequence: Synthetic oligonucleotide
  Sense strand starting at position 3339 of SEQ ID NO: 1242611
cccucauucuuccuggagu

SEQ ID NO: 1360777 - RNA, 19 nt, Artificial Sequence
  Description of Artificial Sequence: Synthetic oligonucleotide
  Antisense strand to SEQ ID NO: 1360776
acuccaggaagaaugaggg

SEQ ID NO: 1360778 - RNA, 19 nt, Artificial Sequence
  Description of Artificial Sequence: Synthetic oligonucleotide
  Sense strand starting at position 3341 of SEQ ID NO: 1242611
cucauucuuccuggaguca

SEQ ID NO: 1360779 - RNA, 19 nt, Artificial Sequence
  Description of Artificial Sequence: Synthetic oligonucleotide
  Antisense strand to SEQ ID NO: 1360778
ugacuccaggaagaaugag

SEQ ID NO: 1360780 - RNA, 19 nt, Artificial Sequence
  Description of Artificial Sequence: Synthetic oligonucleotide
  Sense strand starting at position 3826 of SEQ ID NO: 1242611
cuccauuguggcugaaaca

SEQ ID NO: 1360781 - RNA, 19 nt, Artificial Sequence
  Description of Artificial Sequence: Synthetic oligonucleotide
  Antisense strand to SEQ ID NO: 1360780
uguuucagccacaauggag

SEQ ID NO: 1360782 - RNA, 19 nt, Artificial Sequence
  Description of Artificial Sequence: Synthetic oligonucleotide
  Sense strand starting at position 3948 of SEQ ID NO: 1242611
guucuagugugagagguca

SEQ ID NO: 1360783 - RNA, 19 nt, Artificial Sequence
  Description of Artificial Sequence: Synthetic oligonucleotide
  Antisense strand to SEQ ID NO: 1360782
ugaccucucacacuagaac

SEQ ID NO: 1360784 - RNA, 19 nt, Artificial Sequence
  Description of Artificial Sequence: Synthetic oligonucleotide
  Sense strand starting at position 3950 of SEQ ID NO: 1242611
ucuagugugagaggucaca

SEQ ID NO: 1360785 - RNA, 19 nt, Artificial Sequence
  Description of Artificial Sequence: Synthetic oligonucleotide
  Antisense strand to SEQ ID NO: 1360784
ugugaccucucacacuaga

SEQ ID NO: 1360786 - RNA, 19 nt, Artificial Sequence
  Description of Artificial Sequence: Synthetic oligonucleotide
  Sense strand starting at position 3978 of SEQ ID NO: 1242611
caguguggcuccugacacu

SEQ ID NO: 1360787 - RNA, 19 nt, Artificial Sequence
  Description of Artificial Sequence: Synthetic oligonucleotide
  Antisense strand to SEQ ID NO: 1360786
agugucaggagccacacug

SEQ ID NO: 1360788 - RNA, 19 nt, Artificial Sequence
  Description of Artificial Sequence: Synthetic oligonucleotide
  Sense strand starting at position 96 of SEQ ID NO: 1242612
auaguaagcgcucaaucaa

SEQ ID NO: 1360789 - RNA, 19 nt, Artificial Sequence
  Description of Artificial Sequence: Synthetic oligonucleotide
  Antisense strand to SEQ ID NO: 1360788
uugauugagcgcuuacuau

SEQ ID NO: 1360790 - RNA, 19 nt, Artificial Sequence
  Description of Artificial Sequence: Synthetic oligonucleotide
  Sense strand starting at position 103 of SEQ ID NO: 1242612
gcgcucaaucaagauuguu

SEQ ID NO: 1360791 - RNA, 19 nt, Artificial Sequence
  Description of Artificial Sequence: Synthetic oligonucleotide
  Antisense strand to SEQ ID NO: 1360790
aacaaucuugauugagcgc

SEQ ID NO: 1360792 - RNA, 19 nt, Artificial Sequence
  Description of Artificial Sequence: Synthetic oligonucleotide
  Sense strand starting at position 108 of SEQ ID NO: 1242612
caaucaagauuguuuggau

SEQ ID NO: 1360793 - RNA, 19 nt, Artificial Sequence
  Description of Artificial Sequence: Synthetic oligonucleotide
  Antisense strand to SEQ ID NO: 1360792
auccaaacaaucuugauug

SEQ ID NO: 1360794 - RNA, 19 nt, Artificial Sequence
  Description of Artificial Sequence: Synthetic oligonucleotide
  Sense strand starting at position 109 of SEQ ID NO: 1242612
aaucaagauuguuuggaug

SEQ ID NO: 1360795 - RNA, 19 nt, Artificial Sequence
  Description of Artificial Sequence: Synthetic oligonucleotide
  Antisense strand to SEQ ID NO: 1360794
cauccaaacaaucuugauu

SEQ ID NO: 1360796 - RNA, 19 nt, Artificial Sequence
  Description of Artificial Sequence: Synthetic oligonucleotide
  Sense strand starting at position 111 of SEQ ID NO: 1242612
ucaagauuguuuggaugaa

SEQ ID NO: 1360797 - RNA, 19 nt, Artificial Sequence
  Description of Artificial Sequence: Synthetic oligonucleotide
  Antisense strand to SEQ ID NO: 1360796
uucauccaaacaaucuuga

SEQ ID NO: 1360798 - RNA, 19 nt, Artificial Sequence
  Description of Artificial Sequence: Synthetic oligonucleotide
  Sense strand starting at position 112 of SEQ ID NO: 1242612
caagauuguuuggaugaau

SEQ ID NO: 1360799 - RNA, 19 nt, Artificial Sequence
  Description of Artificial Sequence: Synthetic oligonucleotide
  Antisense strand to SEQ ID NO: 1360798
auucauccaaacaaucuug

SEQ ID NO: 1360800 - RNA, 19 nt, Artificial Sequence
  Description of Artificial Sequence: Synthetic oligonucleotide
  Sense strand starting at position 173 of SEQ ID NO: 1242612
aauggaaucucugaaggca

SEQ ID NO: 1360801 - RNA, 19 nt, Artificial Sequence
  Description of Artificial Sequence: Synthetic oligonucleotide
  Antisense strand to SEQ ID NO: 1360800
ugccuucagagauuccauu

SEQ ID NO: 1360802 - RNA, 19 nt, Artificial Sequence
  Description of Artificial Sequence: Synthetic oligonucleotide
  Sense strand starting at position 186 of SEQ ID NO: 1242612
aaggcauucugagggcaaa

SEQ ID NO: 1360803 - RNA, 19 nt, Artificial Sequence
  Description of Artificial Sequence: Synthetic oligonucleotide
  Antisense strand to SEQ ID NO: 1360802
uuugcccucagaaugccuu

SEQ ID NO: 1360804 - RNA, 19 nt, Artificial Sequence
  Description of Artificial Sequence: Synthetic oligonucleotide
  Sense strand starting at position 249 of SEQ ID NO: 1242612
aagccuugagucuguggaa

SEQ ID NO: 1360805 - RNA, 19 nt, Artificial Sequence
  Description of Artificial Sequence: Synthetic oligonucleotide
  Antisense strand to SEQ ID NO: 1360804
uuccacagacucaaggcuu

SEQ ID NO: 1360806 - RNA, 19 nt, Artificial Sequence
  Description of Artificial Sequence: Synthetic oligonucleotide
  Sense strand starting at position 250 of SEQ ID NO: 1242612
agccuugagucuguggaaa

SEQ ID NO: 1360807 - RNA, 19 nt, Artificial Sequence
  Description of Artificial Sequence: Synthetic oligonucleotide
  Antisense strand to SEQ ID NO: 1360806
uuuccacagacucaaggcu

SEQ ID NO: 1360808 - RNA, 19 nt, Artificial Sequence
  Description of Artificial Sequence: Synthetic oligonucleotide
  Sense strand starting at position 252 of SEQ ID NO: 1242612
ccuugagucuguggaaaga

SEQ ID NO: 1360809 - RNA, 19 nt, Artificial Sequence
  Description of Artificial Sequence: Synthetic oligonucleotide
  Antisense strand to SEQ ID NO: 1360808
ucuuuccacagacucaagg

SEQ ID NO: 1360810 - RNA, 19 nt, Artificial Sequence
  Description of Artificial Sequence: Synthetic oligonucleotide
  Sense strand starting at position 437 of SEQ ID NO: 1242612
gguguuuacagucagcaga

SEQ ID NO: 1360811 - RNA, 19 nt, Artificial Sequence
  Description of Artificial Sequence: Synthetic oligonucleotide
  Antisense strand to SEQ ID NO: 1360810
ucugcugacuguaaacacc

SEQ ID NO: 1360812 - RNA, 19 nt, Artificial Sequence
  Description of Artificial Sequence: Synthetic oligonucleotide
  Sense strand starting at position 439 of SEQ ID NO: 1242612
uguuuacagucagcagaga

SEQ ID NO: 1360813 - RNA, 19 nt, Artificial Sequence
  Description of Artificial Sequence: Synthetic oligonucleotide
  Antisense strand to SEQ ID NO: 1360812
ucucugcugacuguaaaca

SEQ ID NO: 1360814 - RNA, 19 nt, Artificial Sequence
  Description of Artificial Sequence: Synthetic oligonucleotide
  Sense strand starting at position 450 of SEQ ID NO: 1242612
agcagagacuguuuggagu

SEQ ID NO: 1360815 - RNA, 19 nt, Artificial Sequence
  Description of Artificial Sequence: Synthetic oligonucleotide
  Antisense strand to SEQ ID NO: 1360814
acuccaaacagucucugcu

SEQ ID NO: 1360816 - RNA, 19 nt, Artificial Sequence
  Description of Artificial Sequence: Synthetic oligonucleotide
  Sense strand starting at position 681 of SEQ ID NO: 1242612
ggagaccaauugucacuaa

SEQ ID NO: 1360817 - RNA, 19 nt, Artificial Sequence
  Description of Artificial Sequence: Synthetic oligonucleotide
  Antisense strand to SEQ ID NO: 1360816
uuagugacaauuggucucc

SEQ ID NO: 1360818 - RNA, 19 nt, Artificial Sequence
  Description of Artificial Sequence: Synthetic oligonucleotide
  Sense strand starting at position 1289 of SEQ ID NO: 1242612
gggccuucgaggugugaug

SEQ ID NO: 1360819 - RNA, 19 nt, Artificial Sequence
  Description of Artificial Sequence: Synthetic oligonucleotide
  Antisense strand to SEQ ID NO: 1360818
caucacaccucgaaggccc

SEQ ID NO: 1360820 - RNA, 19 nt, Artificial Sequence
  Description of Artificial Sequence: Synthetic oligonucleotide
  Sense strand starting at position 1585 of SEQ ID NO: 1242612
ucgggauuacgucagagug

SEQ ID NO: 1360821 - RNA, 19 nt, Artificial Sequence
  Description of Artificial Sequence: Synthetic oligonucleotide
  Antisense strand to SEQ ID NO: 1360820
cacucugacguaaucccga

SEQ ID NO: 1360822 - RNA, 19 nt, Artificial Sequence
  Description of Artificial Sequence: Synthetic oligonucleotide
  Sense strand starting at position 1587 of SEQ ID NO: 1242612
gggauuacgucagagugac

SEQ ID NO: 1360823 - RNA, 19 nt, Artificial Sequence
  Description of Artificial Sequence: Synthetic oligonucleotide
  Antisense strand to SEQ ID NO: 1360822
gucacucugacguaauccc

SEQ ID NO: 1360824 - RNA, 19 nt, Artificial Sequence
  Description of Artificial Sequence: Synthetic oligonucleotide
  Sense strand starting at position 2172 of SEQ ID NO: 1242612
uguggugugugcuucauua

SEQ ID NO: 1360825 - RNA, 19 nt, Artificial Sequence
  Description of Artificial Sequence: Synthetic oligonucleotide
  Antisense strand to SEQ ID NO: 1360824
uaaugaagcacacaccaca

SEQ ID NO: 1360826 - RNA, 19 nt, Artificial Sequence
  Description of Artificial Sequence: Synthetic oligonucleotide
  Sense strand starting at position 2564 of SEQ ID NO: 1242612
accucucgcuucggagaaa

SEQ ID NO: 1360827 - RNA, 19 nt, Artificial Sequence
  Description of Artificial Sequence: Synthetic oligonucleotide
  Antisense strand to SEQ ID NO: 1360826
uuucuccgaagcgagaggu

SEQ ID NO: 1360828 - RNA, 19 nt, Artificial Sequence
  Description of Artificial Sequence: Synthetic oligonucleotide
  Sense strand starting at position 2657 of SEQ ID NO: 1242612
ucaagauguaggcaugacu

SEQ ID NO: 1360829 - RNA, 19 nt, Artificial Sequence
  Description of Artificial Sequence: Synthetic oligonucleotide
  Antisense strand to SEQ ID NO: 1360828
agucaugccuacaucuuga

SEQ ID NO: 1360830 - RNA, 19 nt, Artificial Sequence
  Description of Artificial Sequence: Synthetic oligonucleotide
  Sense strand starting at position 2794 of SEQ ID NO: 1242612
gggccaucuuucugucuuu

SEQ ID NO: 1360831 - RNA, 19 nt, Artificial Sequence
  Description of Artificial Sequence: Synthetic oligonucleotide
  Antisense strand to SEQ ID NO: 1360830
aaagacagaaagauggccc

SEQ ID NO: 1360832 - RNA, 19 nt, Artificial Sequence
  Description of Artificial Sequence: Synthetic oligonucleotide
  Sense strand starting at position 2804 of SEQ ID NO: 1242612
ucugucuuucuggagcagu

SEQ ID NO: 1360833 - RNA, 19 nt, Artificial Sequence
  Description of Artificial Sequence: Synthetic oligonucleotide
  Antisense strand to SEQ ID NO: 1360832
acugcuccagaaagacaga

SEQ ID NO: 1360834 - RNA, 19 nt, Artificial Sequence
  Description of Artificial Sequence: Synthetic oligonucleotide
  Sense strand starting at position 2983 of SEQ ID NO: 1242612
ggccucauccuggguuaga

SEQ ID NO: 1360835 - RNA, 19 nt, Artificial Sequence
  Description of Artificial Sequence: Synthetic oligonucleotide
  Antisense strand to SEQ ID NO: 1360834
ucuaacccaggaugaggcc

SEQ ID NO: 1360836 - RNA, 19 nt, Artificial Sequence
  Description of Artificial Sequence: Synthetic oligonucleotide
  Sense strand starting at position 2984 of SEQ ID NO: 1242612
gccucauccuggguuagag

SEQ ID NO: 1360837 - RNA, 19 nt, Artificial Sequence
  Description of Artificial Sequence: Synthetic oligonucleotide
  Antisense strand to SEQ ID NO: 1360836
cucuaacccaggaugaggc

SEQ ID NO: 1360838 - RNA, 19 nt, Artificial Sequence
  Description of Artificial Sequence: Synthetic oligonucleotide
  Sense strand starting at position 3163 of SEQ ID NO: 1242612
gaacuugcagcccgugaaa

SEQ ID NO: 1360839 - RNA, 19 nt, Artificial Sequence
  Description of Artificial Sequence: Synthetic oligonucleotide
  Antisense strand to SEQ ID NO: 1360838
uuucacgggcugcaaguuc

SEQ ID NO: 1360840 - RNA, 19 nt, Artificial Sequence
  Description of Artificial Sequence: Synthetic oligonucleotide
  Sense strand starting at position 3165 of SEQ ID NO: 1242612
acuugcagcccgugaaagu

SEQ ID NO: 1360841 - RNA, 19 nt, Artificial Sequence
  Description of Artificial Sequence: Synthetic oligonucleotide
  Antisense strand to SEQ ID NO: 1360840
acuuucacgggcugcaagu

SEQ ID NO: 1360842 - RNA, 19 nt, Artificial Sequence
  Description of Artificial Sequence: Synthetic oligonucleotide
  Sense strand starting at position 3175 of SEQ ID NO: 1242612
cgugaaagucccuaagucu

SEQ ID NO: 1360843 - RNA, 19 nt, Artificial Sequence
  Description of Artificial Sequence: Synthetic oligonucleotide
  Antisense strand to SEQ ID NO: 1360842
agacuuagggacuuucacg

SEQ ID NO: 1360844 - RNA, 19 nt, Artificial Sequence
  Description of Artificial Sequence: Synthetic oligonucleotide
  Sense strand starting at position 3264 of SEQ ID NO: 1242612
cggcccuuguuucugagaa

SEQ ID NO: 1360845 - RNA, 19 nt, Artificial Sequence
  Description of Artificial Sequence: Synthetic oligonucleotide
  Antisense strand to SEQ ID NO: 1360844
uucucagaaacaagggccg

SEQ ID NO: 1360846 - RNA, 19 nt, Artificial Sequence
  Description of Artificial Sequence: Synthetic oligonucleotide
  Sense strand starting at position 3265 of SEQ ID NO: 1242612
ggcccuuguuucugagaag

SEQ ID NO: 1360847 - RNA, 19 nt, Artificial Sequence
  Description of Artificial Sequence: Synthetic oligonucleotide
  Antisense strand to SEQ ID NO: 1360846
cuucucagaaacaagggcc

SEQ ID NO: 1360848 - RNA, 19 nt, Artificial Sequence
  Description of Artificial Sequence: Synthetic oligonucleotide
  Sense strand starting at position 3266 of SEQ ID NO: 1242612
gcccuuguuucugagaaga

SEQ ID NO: 1360849 - RNA, 19 nt, Artificial Sequence
  Description of Artificial Sequence: Synthetic oligonucleotide
  Antisense strand to SEQ ID NO: 1360848
ucuucucagaaacaagggc

SEQ ID NO: 1360850 - RNA, 19 nt, Artificial Sequence
  Description of Artificial Sequence: Synthetic oligonucleotide
  Sense strand starting at position 3268 of SEQ ID NO: 1242612
ccuuguuucugagaagacg

SEQ ID NO: 1360851 - RNA, 19 nt, Artificial Sequence
  Description of Artificial Sequence: Synthetic oligonucleotide
  Antisense strand to SEQ ID NO: 1360850
cgucuucucagaaacaagg

SEQ ID NO: 1360852 - RNA, 19 nt, Artificial Sequence
  Description of Artificial Sequence: Synthetic oligonucleotide
  Sense strand starting at position 3362 of SEQ ID NO: 1242612
ccgccauuucucuaagcag

SEQ ID NO: 1360853 - RNA, 19 nt, Artificial Sequence
  Description of Artificial Sequence: Synthetic oligonucleotide
  Antisense strand to SEQ ID NO: 1360852
cugcuuagagaaauggcgg

SEQ ID NO: 1360854 - RNA, 19 nt, Artificial Sequence
  Description of Artificial Sequence: Synthetic oligonucleotide
  Sense strand starting at position 3483 of SEQ ID NO: 1242612
cccucauucuuccuggagu

SEQ ID NO: 1360855 - RNA, 19 nt, Artificial Sequence
  Description of Artificial Sequence: Synthetic oligonucleotide
  Antisense strand to SEQ ID NO: 1360854
acuccaggaagaaugaggg

SEQ ID NO: 1360856 - RNA, 19 nt, Artificial Sequence
  Description of Artificial Sequence: Synthetic oligonucleotide
  Sense strand starting at position 3485 of SEQ ID NO: 1242612
cucauucuuccuggaguca

SEQ ID NO: 1360857 - RNA, 19 nt, Artificial Sequence
  Description of Artificial Sequence: Synthetic oligonucleotide
  Antisense strand to SEQ ID NO: 1360856
ugacuccaggaagaaugag

SEQ ID NO: 1360858 - RNA, 19 nt, Artificial Sequence
  Description of Artificial Sequence: Synthetic oligonucleotide
  Sense strand starting at position 3970 of SEQ ID NO: 1242612
cuccauuguggcugaaaca

SEQ ID NO: 1360859 - RNA, 19 nt, Artificial Sequence
  Description of Artificial Sequence: Synthetic oligonucleotide
  Antisense strand to SEQ ID NO: 1360858
uguuucagccacaauggag

SEQ ID NO: 1360860 - RNA, 19 nt, Artificial Sequence
  Description of Artificial Sequence: Synthetic oligonucleotide
  Sense strand starting at position 411 of SEQ ID NO: 1242613
ucacuuuacugguccaguu

SEQ ID NO: 1360861 - RNA, 19 nt, Artificial Sequence
  Description of Artificial Sequence: Synthetic oligonucleotide
  Antisense strand to SEQ ID NO: 1360860
aacuggaccaguaaaguga

SEQ ID NO: 1360862 - RNA, 19 nt, Artificial Sequence
  Description of Artificial Sequence: Synthetic oligonucleotide
  Sense strand starting at position 500 of SEQ ID NO: 1242613
auguucucuagugggugaa

SEQ ID NO: 1360863 - RNA, 19 nt, Artificial Sequence
  Description of Artificial Sequence: Synthetic oligonucleotide
  Antisense strand to SEQ ID NO: 1360862
uucacccacuagagaacau

SEQ ID NO: 1360864 - RNA, 19 nt, Artificial Sequence
  Description of Artificial Sequence: Synthetic oligonucleotide
  Sense strand starting at position 501 of SEQ ID NO: 1242613
uguucucuagugggugaaa

SEQ ID NO: 1360865 - RNA, 19 nt, Artificial Sequence
  Description of Artificial Sequence: Synthetic oligonucleotide
  Antisense strand to SEQ ID NO: 1360864
uuucacccacuagagaaca

SEQ ID NO: 1360866 - RNA, 19 nt, Artificial Sequence
  Description of Artificial Sequence: Synthetic oligonucleotide
  Sense strand starting at position 503 of SEQ ID NO: 1242613
uucucuagugggugaaaca

SEQ ID NO: 1360867 - RNA, 19 nt, Artificial Sequence
  Description of Artificial Sequence: Synthetic oligonucleotide
  Antisense strand to SEQ ID NO: 1360866
uguuucacccacuagagaa

SEQ ID NO: 1360868 - RNA, 19 nt, Artificial Sequence
  Description of Artificial Sequence: Synthetic oligonucleotide
  Sense strand starting at position 504 of SEQ ID NO: 1242613
ucucuagugggugaaacau

SEQ ID NO: 1360869 - RNA, 19 nt, Artificial Sequence
  Description of Artificial Sequence: Synthetic oligonucleotide
  Antisense strand to SEQ ID NO: 1360868
auguuucacccacuagaga

SEQ ID NO: 1360870 - RNA, 19 nt, Artificial Sequence
  Description of Artificial Sequence: Synthetic oligonucleotide
  Sense strand starting at position 512 of SEQ ID NO: 1242613
gggugaaacaucuggccau

SEQ ID NO: 1360871 - RNA, 19 nt, Artificial Sequence
  Description of Artificial Sequence: Synthetic oligonucleotide
  Antisense strand to SEQ ID NO: 1360870
auggccagauguuucaccc

SEQ ID NO: 1360872 - RNA, 19 nt, Artificial Sequence
  Description of Artificial Sequence: Synthetic oligonucleotide
  Sense strand starting at position 648 of SEQ ID NO: 1242613
cgggagugguuggcaaaga

SEQ ID NO: 1360873 - RNA, 19 nt, Artificial Sequence
  Description of Artificial Sequence: Synthetic oligonucleotide
  Antisense strand to SEQ ID NO: 1360872
ucuuugccaaccacucccg

SEQ ID NO: 1360874 - RNA, 19 nt, Artificial Sequence
  Description of Artificial Sequence: Synthetic oligonucleotide
  Sense strand starting at position 1077 of SEQ ID NO: 1242613
ggaacucgguuucucauua

SEQ ID NO: 1360875 - RNA, 19 nt, Artificial Sequence
  Description of Artificial Sequence: Synthetic oligonucleotide
  Antisense strand to SEQ ID NO: 1360874
uaaugagaaaccgaguucc

SEQ ID NO: 1360876 - RNA, 19 nt, Artificial Sequence
  Description of Artificial Sequence: Synthetic oligonucleotide
  Sense strand starting at position 1082 of SEQ ID NO: 1242613
ucgguuucucauuacucuu

SEQ ID NO: 1360877 - RNA, 19 nt, Artificial Sequence
  Description of Artificial Sequence: Synthetic oligonucleotide
  Antisense strand to SEQ ID NO: 1360876
aagaguaaugagaaaccga

SEQ ID NO: 1360878 - RNA, 19 nt, Artificial Sequence
  Description of Artificial Sequence: Synthetic oligonucleotide
  Sense strand starting at position 1093 of SEQ ID NO: 1242613
uuacucuugugcucagaaa

SEQ ID NO: 1360879 - RNA, 19 nt, Artificial Sequence
  Description of Artificial Sequence: Synthetic oligonucleotide
  Antisense strand to SEQ ID NO: 1360878
uuucugagcacaagaguaa

SEQ ID NO: 1360880 - RNA, 19 nt, Artificial Sequence
  Description of Artificial Sequence: Synthetic oligonucleotide
  Sense strand starting at position 1146 of SEQ ID NO: 1242613
gugggauuaauuggccaaa

SEQ ID NO: 1360881 - RNA, 19 nt, Artificial Sequence
  Description of Artificial Sequence: Synthetic oligonucleotide
  Antisense strand to SEQ ID NO: 1360880
uuuggccaauuaaucccac

SEQ ID NO: 1360882 - RNA, 19 nt, Artificial Sequence
  Description of Artificial Sequence: Synthetic oligonucleotide
  Sense strand starting at position 1147 of SEQ ID NO: 1242613
ugggauuaauuggccaaau

SEQ ID NO: 1360883 - RNA, 19 nt, Artificial Sequence
  Description of Artificial Sequence: Synthetic oligonucleotide
  Antisense strand to SEQ ID NO: 1360882
auuuggccaauuaauccca

SEQ ID NO: 1360884 - RNA, 19 nt, Artificial Sequence
  Description of Artificial Sequence: Synthetic oligonucleotide
  Sense strand starting at position 1148 of SEQ ID NO: 1242613
gggauuaauuggccaaaua

SEQ ID NO: 1360885 - RNA, 19 nt, Artificial Sequence
  Description of Artificial Sequence: Synthetic oligonucleotide
  Antisense strand to SEQ ID NO: 1360884
uauuuggccaauuaauccc

SEQ ID NO: 1360886 - RNA, 19 nt, Artificial Sequence
  Description of Artificial Sequence: Synthetic oligonucleotide
  Sense strand starting at position 1156 of SEQ ID NO: 1242613
uuggccaaauacuuguaua

SEQ ID NO: 1360887 - RNA, 19 nt, Artificial Sequence
  Description of Artificial Sequence: Synthetic oligonucleotide
  Antisense strand to SEQ ID NO: 1360886
uauacaaguauuuggccaa

SEQ ID NO: 1360888 - RNA, 19 nt, Artificial Sequence
  Description of Artificial Sequence: Synthetic oligonucleotide
  Sense strand starting at position 1245 of SEQ ID NO: 1242613
gcaguucagaguugggaga

SEQ ID NO: 1360889 - RNA, 19 nt, Artificial Sequence
  Description of Artificial Sequence: Synthetic oligonucleotide
  Antisense strand to SEQ ID NO: 1360888
ucucccaacucugaacugc

SEQ ID NO: 1360890 - RNA, 19 nt, Artificial Sequence
  Description of Artificial Sequence: Synthetic oligonucleotide
  Sense strand starting at position 1566 of SEQ ID NO: 1242613
uucuuaaagccuuguuuga

SEQ ID NO: 1360891 - RNA, 19 nt, Artificial Sequence
  Description of Artificial Sequence: Synthetic oligonucleotide
  Antisense strand to SEQ ID NO: 1360890
ucaaacaaggcuuuaagaa

SEQ ID NO: 1360892 - RNA, 19 nt, Artificial Sequence
  Description of Artificial Sequence: Synthetic oligonucleotide
  Sense strand starting at position 1568 of SEQ ID NO: 1242613
cuuaaagccuuguuugagu

SEQ ID NO: 1360893 - RNA, 19 nt, Artificial Sequence
  Description of Artificial Sequence: Synthetic oligonucleotide
  Antisense strand to SEQ ID NO: 1360892
acucaaacaaggcuuuaag

SEQ ID NO: 1360894 - RNA, 19 nt, Artificial Sequence
  Description of Artificial Sequence: Synthetic oligonucleotide
  Sense strand starting at position 1861 of SEQ ID NO: 1242613
cauuguccacguuaaagua

SEQ ID NO: 1360895 - RNA, 19 nt, Artificial Sequence
  Description of Artificial Sequence: Synthetic oligonucleotide
  Antisense strand to SEQ ID NO: 1360894
uacuuuaacguggacaaug

SEQ ID NO: 1360896 - RNA, 19 nt, Artificial Sequence
  Description of Artificial Sequence: Synthetic oligonucleotide
  Sense strand starting at position 1876 of SEQ ID NO: 1242613
aguaaagcuccgggaagaa

SEQ ID NO: 1360897 - RNA, 19 nt, Artificial Sequence
  Description of Artificial Sequence: Synthetic oligonucleotide
  Antisense strand to SEQ ID NO: 1360896
uucuucccggagcuuuacu

SEQ ID NO: 1360898 - RNA, 19 nt, Artificial Sequence
  Description of Artificial Sequence: Synthetic oligonucleotide
  Sense strand starting at position 2261 of SEQ ID NO: 1242613
cuucucaagcuuggaaagu

SEQ ID NO: 1360899 - RNA, 19 nt, Artificial Sequence
  Description of Artificial Sequence: Synthetic oligonucleotide
  Antisense strand to SEQ ID NO: 1360898
acuuuccaagcuugagaag

SEQ ID NO: 1360900 - RNA, 19 nt, Artificial Sequence
  Description of Artificial Sequence: Synthetic oligonucleotide
  Sense strand starting at position 2270 of SEQ ID NO: 1242613
cuuggaaaguuuccagacu

SEQ ID NO: 1360901 - RNA, 19 nt, Artificial Sequence
  Description of Artificial Sequence: Synthetic oligonucleotide
  Antisense strand to SEQ ID NO: 1360900
agucuggaaacuuuccaag

SEQ ID NO: 1360902 - RNA, 19 nt, Artificial Sequence
  Description of Artificial Sequence: Synthetic oligonucleotide
  Sense strand starting at position 2314 of SEQ ID NO: 1242613
gaaacugagguccgauuga

SEQ ID NO: 1360903 - RNA, 19 nt, Artificial Sequence
  Description of Artificial Sequence: Synthetic oligonucleotide
  Antisense strand to SEQ ID NO: 1360902
ucaaucggaccucaguuuc

SEQ ID NO: 1360904 - RNA, 19 nt, Artificial Sequence
  Description of Artificial Sequence: Synthetic oligonucleotide
  Sense strand starting at position 2323 of SEQ ID NO: 1242613
guccgauugagguaggaga

SEQ ID NO: 1360905 - RNA, 19 nt, Artificial Sequence
  Description of Artificial Sequence: Synthetic oligonucleotide
  Antisense strand to SEQ ID NO: 1360904
ucuccuaccucaaucggac

SEQ ID NO: 1360906 - RNA, 19 nt, Artificial Sequence
  Description of Artificial Sequence: Synthetic oligonucleotide
  Sense strand starting at position 2325 of SEQ ID NO: 1242613
ccgauugagguaggagaau

SEQ ID NO: 1360907 - RNA, 19 nt, Artificial Sequence
  Description of Artificial Sequence: Synthetic oligonucleotide
  Antisense strand to SEQ ID NO: 1360906
auucuccuaccucaaucgg

SEQ ID NO: 1360908 - RNA, 19 nt, Artificial Sequence
  Description of Artificial Sequence: Synthetic oligonucleotide
  Sense strand starting at position 2370 of SEQ ID NO: 1242613
ccaauacgugcugaauucu

SEQ ID NO: 1360909 - RNA, 19 nt, Artificial Sequence
  Description of Artificial Sequence: Synthetic oligonucleotide
  Antisense strand to SEQ ID NO: 1360908
agaauucagcacguauugg

SEQ ID NO: 1360910 - RNA, 19 nt, Artificial Sequence
  Description of Artificial Sequence: Synthetic oligonucleotide
  Sense strand starting at position 2546 of SEQ ID NO: 1242613
caccacgucucaguugaaa

SEQ ID NO: 1360911 - RNA, 19 nt, Artificial Sequence
  Description of Artificial Sequence: Synthetic oligonucleotide
  Antisense strand to SEQ ID NO: 1360910
uuucaacugagacguggug

SEQ ID NO: 1360912 - RNA, 19 nt, Artificial Sequence
  Description of Artificial Sequence: Synthetic oligonucleotide
  Sense strand starting at position 2769 of SEQ ID NO: 1242613
uggauuaauuagccaugga

SEQ ID NO: 1360913 - RNA, 19 nt, Artificial Sequence
  Description of Artificial Sequence: Synthetic oligonucleotide
  Antisense strand to SEQ ID NO: 1360912
uccauggcuaauuaaucca

SEQ ID NO: 1360914 - RNA, 19 nt, Artificial Sequence
  Description of Artificial Sequence: Synthetic oligonucleotide
  Sense strand starting at position 2908 of SEQ ID NO: 1242613
uagugcuuucucgcuuuaa

SEQ ID NO: 1360915 - RNA, 19 nt, Artificial Sequence
  Description of Artificial Sequence: Synthetic oligonucleotide
  Antisense strand to SEQ ID NO: 1360914
uuaaagcgagaaagcacua

SEQ ID NO: 1360916 - RNA, 19 nt, Artificial Sequence
  Description of Artificial Sequence: Synthetic oligonucleotide
  Sense strand starting at position 2910 of SEQ ID NO: 1242613
gugcuuucucgcuuuaaca

SEQ ID NO: 1360917 - RNA, 19 nt, Artificial Sequence
  Description of Artificial Sequence: Synthetic oligonucleotide
  Antisense strand to SEQ ID NO: 1360916
uguuaaagcgagaaagcac

SEQ ID NO: 1360918 - RNA, 19 nt, Artificial Sequence
  Description of Artificial Sequence: Synthetic oligonucleotide
  Sense strand starting at position 2912 of SEQ ID NO: 1242613
gcuuucucgcuuuaacaaa

SEQ ID NO: 1360919 - RNA, 19 nt, Artificial Sequence
  Description of Artificial Sequence: Synthetic oligonucleotide
  Antisense strand to SEQ ID NO: 1360918
uuuguuaaagcgagaaagc

SEQ ID NO: 1360920 - RNA, 19 nt, Artificial Sequence
  Description of Artificial Sequence: Synthetic oligonucleotide
  Sense strand starting at position 3098 of SEQ ID NO: 1242613
gccuaaggcuuauuuguua

SEQ ID NO: 1360921 - RNA, 19 nt, Artificial Sequence
  Description of Artificial Sequence: Synthetic oligonucleotide
  Antisense strand to SEQ ID NO: 1360920
uaacaaauaagccuuaggc

SEQ ID NO: 1360922 - RNA, 19 nt, Artificial Sequence
  Description of Artificial Sequence: Synthetic oligonucleotide
  Sense strand starting at position 3102 of SEQ ID NO: 1242613
aaggcuuauuuguuagcca

SEQ ID NO: 1360923 - RNA, 19 nt, Artificial Sequence
  Description of Artificial Sequence: Synthetic oligonucleotide
  Antisense strand to SEQ ID NO: 1360922
uggcuaacaaauaagccuu

SEQ ID NO: 1360924 - RNA, 19 nt, Artificial Sequence
  Description of Artificial Sequence: Synthetic oligonucleotide
  Sense strand starting at position 3105 of SEQ ID NO: 1242613
gcuuauuuguuagccagga

SEQ ID NO: 1360925 - RNA, 19 nt, Artificial Sequence
  Description of Artificial Sequence: Synthetic oligonucleotide
  Antisense strand to SEQ ID NO: 1360924
uccuggcuaacaaauaagc

SEQ ID NO: 1360926 - RNA, 19 nt, Artificial Sequence
  Description of Artificial Sequence: Synthetic oligonucleotide
  Sense strand starting at position 3110 of SEQ ID NO: 1242613
uuuguuagccaggagugau

SEQ ID NO: 1360927 - RNA, 19 nt, Artificial Sequence
  Description of Artificial Sequence: Synthetic oligonucleotide
  Antisense strand to SEQ ID NO: 1360926
aucacuccuggcuaacaaa

SEQ ID NO: 1360928 - RNA, 19 nt, Artificial Sequence
  Description of Artificial Sequence: Synthetic oligonucleotide
  Sense strand starting at position 3160 of SEQ ID NO: 1242613
ccgcacuugcuguacaaga

SEQ ID NO: 1360929 - RNA, 19 nt, Artificial Sequence
  Description of Artificial Sequence: Synthetic oligonucleotide
  Antisense strand to SEQ ID NO: 1360928
ucuuguacagcaagugcgg

SEQ ID NO: 1360930 - RNA, 19 nt, Artificial Sequence
  Description of Artificial Sequence: Synthetic oligonucleotide
  Sense strand starting at position 3162 of SEQ ID NO: 1242613
gcacuugcuguacaagauu

SEQ ID NO: 1360931 - RNA, 19 nt, Artificial Sequence
  Description of Artificial Sequence: Synthetic oligonucleotide
  Antisense strand to SEQ ID NO: 1360930
aaucuuguacagcaagugc

SEQ ID NO: 1360932 - RNA, 19 nt, Artificial Sequence
  Description of Artificial Sequence: Synthetic oligonucleotide
  Sense strand starting at position 3281 of SEQ ID NO: 1242613
cugggauaagaguaugugu

SEQ ID NO: 1360933 - RNA, 19 nt, Artificial Sequence
  Description of Artificial Sequence: Synthetic oligonucleotide
  Antisense strand to SEQ ID NO: 1360932
acacauacucuuaucccag

SEQ ID NO: 1360934 - RNA, 19 nt, Artificial Sequence
  Description of Artificial Sequence: Synthetic oligonucleotide
  Sense strand starting at position 3286 of SEQ ID NO: 1242613
auaagaguaugugugguuu

SEQ ID NO: 1360935 - RNA, 19 nt, Artificial Sequence
  Description of Artificial Sequence: Synthetic oligonucleotide
  Antisense strand to SEQ ID NO: 1360934
aaaccacacauacucuuau

SEQ ID NO: 1360936 - RNA, 19 nt, Artificial Sequence
  Description of Artificial Sequence: Synthetic oligonucleotide
  Sense strand starting at position 3352 of SEQ ID NO: 1242613
gacggccacguuugaaaua

SEQ ID NO: 1360937 - RNA, 19 nt, Artificial Sequence
  Description of Artificial Sequence: Synthetic oligonucleotide
  Antisense strand to SEQ ID NO: 1360936
uauuucaaacguggccguc

SEQ ID NO: 1360938 - RNA, 19 nt, Artificial Sequence
  Description of Artificial Sequence: Synthetic oligonucleotide
  Sense strand starting at position 3388 of SEQ ID NO: 1242613
ggucccauccuuuauucga

SEQ ID NO: 1360939 - RNA, 19 nt, Artificial Sequence
  Description of Artificial Sequence: Synthetic oligonucleotide
  Antisense strand to SEQ ID NO: 1360938
ucgaauaaaggaugggacc

SEQ ID NO: 1360940 - RNA, 19 nt, Artificial Sequence
  Description of Artificial Sequence: Synthetic oligonucleotide
  Sense strand starting at position 57 of SEQ ID NO: 1242614
auuccaaagcauuagagua

SEQ ID NO: 1360941 - RNA, 19 nt, Artificial Sequence
  Description of Artificial Sequence: Synthetic oligonucleotide
  Antisense strand to SEQ ID NO: 1360940
uacucuaaugcuuuggaau

SEQ ID NO: 1360942 - RNA, 19 nt, Artificial Sequence
  Description of Artificial Sequence: Synthetic oligonucleotide
  Sense strand starting at position 171 of SEQ ID NO: 1242614
uccaacuuguaagaagaca

SEQ ID NO: 1360943 - RNA, 19 nt, Artificial Sequence
  Description of Artificial Sequence: Synthetic oligonucleotide
  Antisense strand to SEQ ID NO: 1360942
ugucuucuuacaaguugga

SEQ ID NO: 1360944 - RNA, 19 nt, Artificial Sequence
  Description of Artificial Sequence: Synthetic oligonucleotide
  Sense strand starting at position 390 of SEQ ID NO: 1242614
cccuuuauucugggccuau

SEQ ID NO: 1360945 - RNA, 19 nt, Artificial Sequence
  Description of Artificial Sequence: Synthetic oligonucleotide
  Antisense strand to SEQ ID NO: 1360944
auaggcccagaauaaaggg

SEQ ID NO: 1360946 - RNA, 19 nt, Artificial Sequence
  Description of Artificial Sequence: Synthetic oligonucleotide
  Sense strand starting at position 394 of SEQ ID NO: 1242614
uuauucugggccuaugaaa

SEQ ID NO: 1360947 - RNA, 19 nt, Artificial Sequence
  Description of Artificial Sequence: Synthetic oligonucleotide
  Antisense strand to SEQ ID NO: 1360946
uuucauaggcccagaauaa

SEQ ID NO: 1360948 - RNA, 19 nt, Artificial Sequence
  Description of Artificial Sequence: Synthetic oligonucleotide
  Sense strand starting at position 612 of SEQ ID NO: 1242614
ugaaucagguaugaaagaa

SEQ ID NO: 1360949 - RNA, 19 nt, Artificial Sequence
  Description of Artificial Sequence: Synthetic oligonucleotide
  Antisense strand to SEQ ID NO: 1360948
uucuuucauaccugauuca

SEQ ID NO: 1360950 - RNA, 19 nt, Artificial Sequence
  Description of Artificial Sequence: Synthetic oligonucleotide
  Sense strand starting at position 779 of SEQ ID NO: 1242614
augagugagugcucugaga

SEQ ID NO: 1360951 - RNA, 19 nt, Artificial Sequence
  Description of Artificial Sequence: Synthetic oligonucleotide
  Antisense strand to SEQ ID NO: 1360950
ucucagagcacucacucau

SEQ ID NO: 1360952 - RNA, 19 nt, Artificial Sequence
  Description of Artificial Sequence: Synthetic oligonucleotide
  Sense strand starting at position 781 of SEQ ID NO: 1242614
gagugagugcucugagaaa

SEQ ID NO: 1360953 - RNA, 19 nt, Artificial Sequence
  Description of Artificial Sequence: Synthetic oligonucleotide
  Antisense strand to SEQ ID NO: 1360952
uuucucagagcacucacuc

SEQ ID NO: 1360954 - RNA, 19 nt, Artificial Sequence
  Description of Artificial Sequence: Synthetic oligonucleotide
  Sense strand starting at position 811 of SEQ ID NO: 1242614
guccaaguccuauagaaca

SEQ ID NO: 1360955 - RNA, 19 nt, Artificial Sequence
  Description of Artificial Sequence: Synthetic oligonucleotide
  Antisense strand to SEQ ID NO: 1360954
uguucuauaggacuuggac

SEQ ID NO: 1360956 - RNA, 19 nt, Artificial Sequence
  Description of Artificial Sequence: Synthetic oligonucleotide
  Sense strand starting at position 957 of SEQ ID NO: 1242614
auuauuacacaguggcaua

SEQ ID NO: 1360957 - RNA, 19 nt, Artificial Sequence
  Description of Artificial Sequence: Synthetic oligonucleotide
  Antisense strand to SEQ ID NO: 1360956
uaugccacuguguaauaau

SEQ ID NO: 1360958 - RNA, 19 nt, Artificial Sequence
  Description of Artificial Sequence: Synthetic oligonucleotide
  Sense strand starting at position 1081 of SEQ ID NO: 1242614
ccuugcuuucuguaacgaa

SEQ ID NO: 1360959 - RNA, 19 nt, Artificial Sequence
  Description of Artificial Sequence: Synthetic oligonucleotide
  Antisense strand to SEQ ID NO: 1360958
uucguuacagaaagcaagg

SEQ ID NO: 1360960 - RNA, 19 nt, Artificial Sequence
  Description of Artificial Sequence: Synthetic oligonucleotide
  Sense strand starting at position 1121 of SEQ ID NO: 1242614
ccaggucaccgagaaguua

SEQ ID NO: 1360961 - RNA, 19 nt, Artificial Sequence
  Description of Artificial Sequence: Synthetic oligonucleotide
  Antisense strand to SEQ ID NO: 1360960
uaacuucucggugaccugg

SEQ ID NO: 1360962 - RNA, 19 nt, Artificial Sequence
  Description of Artificial Sequence: Synthetic oligonucleotide
  Sense strand starting at position 1267 of SEQ ID NO: 1242614
cgagaaccucacugagcau

SEQ ID NO: 1360963 - RNA, 19 nt, Artificial Sequence
  Description of Artificial Sequence: Synthetic oligonucleotide
  Antisense strand to SEQ ID NO: 1360962
augcucagugagguucucg

SEQ ID NO: 1360964 - RNA, 19 nt, Artificial Sequence
  Description of Artificial Sequence: Synthetic oligonucleotide
  Sense strand starting at position 1428 of SEQ ID NO: 1242614
aaauucucugcgggcgaga

SEQ ID NO: 1360965 - RNA, 19 nt, Artificial Sequence
  Description of Artificial Sequence: Synthetic oligonucleotide
  Antisense strand to SEQ ID NO: 1360964
ucucgcccgcagagaauuu

SEQ ID NO: 1360966 - RNA, 19 nt, Artificial Sequence
  Description of Artificial Sequence: Synthetic oligonucleotide
  Sense strand starting at position 1462 of SEQ ID NO: 1242614
aagggagaagcuugucaga

SEQ ID NO: 1360967 - RNA, 19 nt, Artificial Sequence
  Description of Artificial Sequence: Synthetic oligonucleotide
  Antisense strand to SEQ ID NO: 1360966
ucugacaagcuucucccuu

SEQ ID NO: 1360968 - RNA, 19 nt, Artificial Sequence
  Description of Artificial Sequence: Synthetic oligonucleotide
  Sense strand starting at position 1464 of SEQ ID NO: 1242614
gggagaagcuugucagaga

SEQ ID NO: 1360969 - RNA, 19 nt, Artificial Sequence
  Description of Artificial Sequence: Synthetic oligonucleotide
  Antisense strand to SEQ ID NO: 1360968
ucucugacaagcuucuccc

SEQ ID NO: 1360970 - RNA, 19 nt, Artificial Sequence
  Description of Artificial Sequence: Synthetic oligonucleotide
  Sense strand starting at position 1505 of SEQ ID NO: 1242614
ucccgcaauccuugaucca

SEQ ID NO: 1360971 - RNA, 19 nt, Artificial Sequence
  Description of Artificial Sequence: Synthetic oligonucleotide
  Antisense strand to SEQ ID NO: 1360970
uggaucaaggauugcggga

SEQ ID NO: 1360972 - RNA, 19 nt, Artificial Sequence
  Description of Artificial Sequence: Synthetic oligonucleotide
  Sense strand starting at position 1506 of SEQ ID NO: 1242614
cccgcaauccuugauccaa

SEQ ID NO: 1360973 - RNA, 19 nt, Artificial Sequence
  Description of Artificial Sequence: Synthetic oligonucleotide
  Antisense strand to SEQ ID NO: 1360972
uuggaucaaggauugcggg

SEQ ID NO: 1360974 - RNA, 19 nt, Artificial Sequence
  Description of Artificial Sequence: Synthetic oligonucleotide
  Sense strand starting at position 1508 of SEQ ID NO: 1242614
cgcaauccuugauccaaca

SEQ ID NO: 1360975 - RNA, 19 nt, Artificial Sequence
  Description of Artificial Sequence: Synthetic oligonucleotide
  Antisense strand to SEQ ID NO: 1360974
uguuggaucaaggauugcg

SEQ ID NO: 1360976 - RNA, 19 nt, Artificial Sequence
  Description of Artificial Sequence: Synthetic oligonucleotide
  Sense strand starting at position 1526 of SEQ ID NO: 1242614
aaggguagggcucgaaauu

SEQ ID NO: 1360977 - RNA, 19 nt, Artificial Sequence
  Description of Artificial Sequence: Synthetic oligonucleotide
  Antisense strand to SEQ ID NO: 1360976
aauuucgagcccuacccuu

SEQ ID NO: 1360978 - RNA, 19 nt, Artificial Sequence
  Description of Artificial Sequence: Synthetic oligonucleotide
  Sense strand starting at position 1543 of SEQ ID NO: 1242614
uugggaauucugcguuuag

SEQ ID NO: 1360979 - RNA, 19 nt, Artificial Sequence
  Description of Artificial Sequence: Synthetic oligonucleotide
  Antisense strand to SEQ ID NO: 1360978
cuaaacgcagaauucccaa

SEQ ID NO: 1360980 - RNA, 19 nt, Artificial Sequence
  Description of Artificial Sequence: Synthetic oligonucleotide
  Sense strand starting at position 1544 of SEQ ID NO: 1242614
ugggaauucugcguuuaga

SEQ ID NO: 1360981 - RNA, 19 nt, Artificial Sequence
  Description of Artificial Sequence: Synthetic oligonucleotide
  Antisense strand to SEQ ID NO: 1360980
ucuaaacgcagaauuccca

SEQ ID NO: 1360982 - RNA, 19 nt, Artificial Sequence
  Description of Artificial Sequence: Synthetic oligonucleotide
  Sense strand starting at position 1547 of SEQ ID NO: 1242614
gaauucugcguuuagagag

SEQ ID NO: 1360983 - RNA, 19 nt, Artificial Sequence
  Description of Artificial Sequence: Synthetic oligonucleotide
  Antisense strand to SEQ ID NO: 1360982
cucucuaaacgcagaauuc

SEQ ID NO: 1360984 - RNA, 19 nt, Artificial Sequence
  Description of Artificial Sequence: Synthetic oligonucleotide
  Sense strand starting at position 2306 of SEQ ID NO: 1242614
uggacuucuuguccugacu

SEQ ID NO: 1360985 - RNA, 19 nt, Artificial Sequence
  Description of Artificial Sequence: Synthetic oligonucleotide
  Antisense strand to SEQ ID NO: 1360984
agucaggacaagaagucca

SEQ ID NO: 1360986 - RNA, 19 nt, Artificial Sequence
  Description of Artificial Sequence: Synthetic oligonucleotide
  Sense strand starting at position 2742 of SEQ ID NO: 1242614
auaggagcucuguaagugu

SEQ ID NO: 1360987 - RNA, 19 nt, Artificial Sequence
  Description of Artificial Sequence: Synthetic oligonucleotide
  Antisense strand to SEQ ID NO: 1360986
acacuuacagagcuccuau

SEQ ID NO: 1360988 - RNA, 19 nt, Artificial Sequence
  Description of Artificial Sequence: Synthetic oligonucleotide
  Sense strand starting at position 2745 of SEQ ID NO: 1242614
ggagcucuguaaguguuga

SEQ ID NO: 1360989 - RNA, 19 nt, Artificial Sequence
  Description of Artificial Sequence: Synthetic oligonucleotide
  Antisense strand to SEQ ID NO: 1360988
ucaacacuuacagagcucc

SEQ ID NO: 1360990 - RNA, 19 nt, Artificial Sequence
  Description of Artificial Sequence: Synthetic oligonucleotide
  Sense strand starting at position 2750 of SEQ ID NO: 1242614
ucuguaaguguugagaagu

SEQ ID NO: 1360991 - RNA, 19 nt, Artificial Sequence
  Description of Artificial Sequence: Synthetic oligonucleotide
  Antisense strand to SEQ ID NO: 1360990
acuucucaacacuuacaga

SEQ ID NO: 1360992 - RNA, 19 nt, Artificial Sequence
  Description of Artificial Sequence: Synthetic oligonucleotide
  Sense strand starting at position 2859 of SEQ ID NO: 1242614
gguuuaguacagugagaag

SEQ ID NO: 1360993 - RNA, 19 nt, Artificial Sequence
  Description of Artificial Sequence: Synthetic oligonucleotide
  Antisense strand to SEQ ID NO: 1360992
cuucucacuguacuaaacc

SEQ ID NO: 1360994 - RNA, 19 nt, Artificial Sequence
  Description of Artificial Sequence: Synthetic oligonucleotide
  Sense strand starting at position 2871 of SEQ ID NO: 1242614
ugagaagcagcuugguuua

SEQ ID NO: 1360995 - RNA, 19 nt, Artificial Sequence
  Description of Artificial Sequence: Synthetic oligonucleotide
  Antisense strand to SEQ ID NO: 1360994
uaaaccaagcugcuucuca

SEQ ID NO: 1360996 - RNA, 19 nt, Artificial Sequence
  Description of Artificial Sequence: Synthetic oligonucleotide
  Sense strand starting at position 2878 of SEQ ID NO: 1242614
cagcuugguuuaguggaaa

SEQ ID NO: 1360997 - RNA, 19 nt, Artificial Sequence
  Description of Artificial Sequence: Synthetic oligonucleotide
  Antisense strand to SEQ ID NO: 1360996
uuuccacuaaaccaagcug

SEQ ID NO: 1360998 - RNA, 19 nt, Artificial Sequence
  Description of Artificial Sequence: Synthetic oligonucleotide
  Sense strand starting at position 2899 of SEQ ID NO: 1242614
gggcuugacuacucaguga

SEQ ID NO: 1360999 - RNA, 19 nt, Artificial Sequence
  Description of Artificial Sequence: Synthetic oligonucleotide
  Antisense strand to SEQ ID NO: 1360998
ucacugaguagucaagccc

SEQ ID NO: 1361000 - RNA, 19 nt, Artificial Sequence
  Description of Artificial Sequence: Synthetic oligonucleotide
  Sense strand starting at position 2902 of SEQ ID NO: 1242614
cuugacuacucagugaaau

SEQ ID NO: 1361001 - RNA, 19 nt, Artificial Sequence
  Description of Artificial Sequence: Synthetic oligonucleotide
  Antisense strand to SEQ ID NO: 1361000
auuucacugaguagucaag

SEQ ID NO: 1361002 - RNA, 19 nt, Artificial Sequence
  Description of Artificial Sequence: Synthetic oligonucleotide
  Sense strand starting at position 2903 of SEQ ID NO: 1242614
uugacuacucagugaaaua

SEQ ID NO: 1361003 - RNA, 19 nt, Artificial Sequence
  Description of Artificial Sequence: Synthetic oligonucleotide
  Antisense strand to SEQ ID NO: 1361002
uauuucacugaguagucaa

SEQ ID NO: 1361004 - RNA, 19 nt, Artificial Sequence
  Description of Artificial Sequence: Synthetic oligonucleotide
  Sense strand starting at position 3015 of SEQ ID NO: 1242614
gugagcgccaguugaauuu

SEQ ID NO: 1361005 - RNA, 19 nt, Artificial Sequence
  Description of Artificial Sequence: Synthetic oligonucleotide
  Antisense strand to SEQ ID NO: 1361004
aaauucaacuggcgcucac

SEQ ID NO: 1361006 - RNA, 19 nt, Artificial Sequence
  Description of Artificial Sequence: Synthetic oligonucleotide
  Sense strand starting at position 3469 of SEQ ID NO: 1242614
aaagauaugucauugcagu

SEQ ID NO: 1361007 - RNA, 19 nt, Artificial Sequence
  Description of Artificial Sequence: Synthetic oligonucleotide
  Antisense strand to SEQ ID NO: 1361006
acugcaaugacauaucuuu

SEQ ID NO: 1361008 - RNA, 19 nt, Artificial Sequence
  Description of Artificial Sequence: Synthetic oligonucleotide
  Sense strand starting at position 3470 of SEQ ID NO: 1242614
aagauaugucauugcaguu

SEQ ID NO: 1361009 - RNA, 19 nt, Artificial Sequence
  Description of Artificial Sequence: Synthetic oligonucleotide
  Antisense strand to SEQ ID NO: 1361008
aacugcaaugacauaucuu

SEQ ID NO: 1361010 - RNA, 19 nt, Artificial Sequence
  Description of Artificial Sequence: Synthetic oligonucleotide
  Sense strand starting at position 3640 of SEQ ID NO: 1242614
cgaugauaggcaugcacua

SEQ ID NO: 1361011 - RNA, 19 nt, Artificial Sequence
  Description of Artificial Sequence: Synthetic oligonucleotide
  Antisense strand to SEQ ID NO: 1361010
uagugcaugccuaucaucg

SEQ ID NO: 1361012 - RNA, 19 nt, Artificial Sequence
  Description of Artificial Sequence: Synthetic oligonucleotide
  Sense strand starting at position 3806 of SEQ ID NO: 1242614
gcgucgguuguauguauuu

SEQ ID NO: 1361013 - RNA, 19 nt, Artificial Sequence
  Description of Artificial Sequence: Synthetic oligonucleotide
  Antisense strand to SEQ ID NO: 1361012
aaauacauacaaccgacgc

SEQ ID NO: 1361014 - RNA, 19 nt, Artificial Sequence
  Description of Artificial Sequence: Synthetic oligonucleotide
  Sense strand starting at position 3815 of SEQ ID NO: 1242614
guauguauuucuguguauc

SEQ ID NO: 1361015 - RNA, 19 nt, Artificial Sequence
  Description of Artificial Sequence: Synthetic oligonucleotide
  Antisense strand to SEQ ID NO: 1361014
gauacacagaaauacauac

SEQ ID NO: 1361016 - RNA, 19 nt, Artificial Sequence
  Description of Artificial Sequence: Synthetic oligonucleotide
  Sense strand starting at position 3816 of SEQ ID NO: 1242614
uauguauuucuguguaucu

SEQ ID NO: 1361017 - RNA, 19 nt, Artificial Sequence
  Description of Artificial Sequence: Synthetic oligonucleotide
  Antisense strand to SEQ ID NO: 1361016
agauacacagaaauacaua

SEQ ID NO: 1361018 - RNA, 19 nt, Artificial Sequence
  Description of Artificial Sequence: Synthetic oligonucleotide
  Sense strand starting at position 3823 of SEQ ID NO: 1242614
uucuguguaucuguacaga

SEQ ID NO: 1361019 - RNA, 19 nt, Artificial Sequence
  Description of Artificial Sequence: Synthetic oligonucleotide
  Antisense strand to SEQ ID NO: 1361018
ucuguacagauacacagaa

SEQ ID NO: 1361020 - RNA, 19 nt, Artificial Sequence
  Description of Artificial Sequence: Synthetic oligonucleotide
  Sense strand starting at position 9 of SEQ ID NO: 1242615
ggauuucccaucuguguug

SEQ ID NO: 1361021 - RNA, 19 nt, Artificial Sequence
  Description of Artificial Sequence: Synthetic oligonucleotide
  Antisense strand to SEQ ID NO: 1361020
caacacagaugggaaaucc

SEQ ID NO: 1361022 - RNA, 19 nt, Artificial Sequence
  Description of Artificial Sequence: Synthetic oligonucleotide
  Sense strand starting at position 225 of SEQ ID NO: 1242615
aucaacaaugguugucaau

SEQ ID NO: 1361023 - RNA, 19 nt, Artificial Sequence
  Description of Artificial Sequence: Synthetic oligonucleotide
  Antisense strand to SEQ ID NO: 1361022
auugacaaccauuguugau

SEQ ID NO: 1361024 - RNA, 19 nt, Artificial Sequence
  Description of Artificial Sequence: Synthetic oligonucleotide
  Sense strand starting at position 227 of SEQ ID NO: 1242615
caacaaugguugucaauug

SEQ ID NO: 1361025 - RNA, 19 nt, Artificial Sequence
  Description of Artificial Sequence: Synthetic oligonucleotide
  Antisense strand to SEQ ID NO: 1361024
caauugacaaccauuguug

SEQ ID NO: 1361026 - RNA, 19 nt, Artificial Sequence
  Description of Artificial Sequence: Synthetic oligonucleotide
  Sense strand starting at position 237 of SEQ ID NO: 1242615
ugucaauugcucuaagaac

SEQ ID NO: 1361027 - RNA, 19 nt, Artificial Sequence
  Description of Artificial Sequence: Synthetic oligonucleotide
  Antisense strand to SEQ ID NO: 1361026
guucuuagagcaauugaca

SEQ ID NO: 1361028 - RNA, 19 nt, Artificial Sequence
  Description of Artificial Sequence: Synthetic oligonucleotide
  Sense strand starting at position 291 of SEQ ID NO: 1242615
agaucaaugcuacaguauu

SEQ ID NO: 1361029 - RNA, 19 nt, Artificial Sequence
  Description of Artificial Sequence: Synthetic oligonucleotide
  Antisense strand to SEQ ID NO: 1361028
aauacuguagcauugaucu

SEQ ID NO: 1361030 - RNA, 19 nt, Artificial Sequence
  Description of Artificial Sequence: Synthetic oligonucleotide
  Sense strand starting at position 721 of SEQ ID NO: 1242615
gugugcugccacucuuaau

SEQ ID NO: 1361031 - RNA, 19 nt, Artificial Sequence
  Description of Artificial Sequence: Synthetic oligonucleotide
  Antisense strand to SEQ ID NO: 1361030
auuaagaguggcagcacac

SEQ ID NO: 1361032 - RNA, 19 nt, Artificial Sequence
  Description of Artificial Sequence: Synthetic oligonucleotide
  Sense strand starting at position 868 of SEQ ID NO: 1242615
gggucaugagaccgagcau

SEQ ID NO: 1361033 - RNA, 19 nt, Artificial Sequence
  Description of Artificial Sequence: Synthetic oligonucleotide
  Antisense strand to SEQ ID NO: 1361032
augcucggucucaugaccc

SEQ ID NO: 1361034 - RNA, 19 nt, Artificial Sequence
  Description of Artificial Sequence: Synthetic oligonucleotide
  Sense strand starting at position 2181 of SEQ ID NO: 1242615
agagaaucaagucggugaa

SEQ ID NO: 1361035 - RNA, 19 nt, Artificial Sequence
  Description of Artificial Sequence: Synthetic oligonucleotide
  Antisense strand to SEQ ID NO: 1361034
uucaccgacuugauucucu

SEQ ID NO: 1361036 - RNA, 19 nt, Artificial Sequence
  Description of Artificial Sequence: Synthetic oligonucleotide
  Sense strand starting at position 2184 of SEQ ID NO: 1242615
gaaucaagucggugaaccu

SEQ ID NO: 1361037 - RNA, 19 nt, Artificial Sequence
  Description of Artificial Sequence: Synthetic oligonucleotide
  Antisense strand to SEQ ID NO: 1361036
agguucaccgacuugauuc

SEQ ID NO: 1361038 - RNA, 19 nt, Artificial Sequence
  Description of Artificial Sequence: Synthetic oligonucleotide
  Sense strand starting at position 2260 of SEQ ID NO: 1242615
gauuuagggucuuaagguc

SEQ ID NO: 1361039 - RNA, 19 nt, Artificial Sequence
  Description of Artificial Sequence: Synthetic oligonucleotide
  Antisense strand to SEQ ID NO: 1361038
gaccuuaagacccuaaauc

SEQ ID NO: 1361040 - RNA, 19 nt, Artificial Sequence
  Description of Artificial Sequence: Synthetic oligonucleotide
  Sense strand starting at position 2302 of SEQ ID NO: 1242615
gccgcugucgcuucacaau

SEQ ID NO: 1361041 - RNA, 19 nt, Artificial Sequence
  Description of Artificial Sequence: Synthetic oligonucleotide
  Antisense strand to SEQ ID NO: 1361040
auugugaagcgacagcggc

SEQ ID NO: 1361042 - RNA, 19 nt, Artificial Sequence
  Description of Artificial Sequence: Synthetic oligonucleotide
  Sense strand starting at position 2485 of SEQ ID NO: 1242615
caagaaagucuccgggacu

SEQ ID NO: 1361043 - RNA, 19 nt, Artificial Sequence
  Description of Artificial Sequence: Synthetic oligonucleotide
  Antisense strand to SEQ ID NO: 1361042
agucccggagacuuucuug

SEQ ID NO: 1361044 - RNA, 19 nt, Artificial Sequence
  Description of Artificial Sequence: Synthetic oligonucleotide
  Sense strand starting at position 2538 of SEQ ID NO: 1242615
guagguuucgcaaggagcu

SEQ ID NO: 1361045 - RNA, 19 nt, Artificial Sequence
  Description of Artificial Sequence: Synthetic oligonucleotide
  Antisense strand to SEQ ID NO: 1361044
agcuccuugcgaaaccuac

SEQ ID NO: 1361046 - RNA, 19 nt, Artificial Sequence
  Description of Artificial Sequence: Synthetic oligonucleotide
  Sense strand starting at position 2565 of SEQ ID NO: 1242615
ccuuguuugcuuuaaguaa

SEQ ID NO: 1361047 - RNA, 19 nt, Artificial Sequence
  Description of Artificial Sequence: Synthetic oligonucleotide
  Antisense strand to SEQ ID NO: 1361046
uuacuuaaagcaaacaagg

SEQ ID NO: 1361048 - RNA, 19 nt, Artificial Sequence
  Description of Artificial Sequence: Synthetic oligonucleotide
  Sense strand starting at position 2587 of SEQ ID NO: 1242615
acugaugagcauuagugau

SEQ ID NO: 1361049 - RNA, 19 nt, Artificial Sequence
  Description of Artificial Sequence: Synthetic oligonucleotide
  Antisense strand to SEQ ID NO: 1361048
aucacuaaugcucaucagu

SEQ ID NO: 1361050 - RNA, 19 nt, Artificial Sequence
  Description of Artificial Sequence: Synthetic oligonucleotide
  Sense strand starting at position 2604 of SEQ ID NO: 1242615
auucguuugagcguguuga

SEQ ID NO: 1361051 - RNA, 19 nt, Artificial Sequence
  Description of Artificial Sequence: Synthetic oligonucleotide
  Antisense strand to SEQ ID NO: 1361050
ucaacacgcucaaacgaau

SEQ ID NO: 1361052 - RNA, 19 nt, Artificial Sequence
  Description of Artificial Sequence: Synthetic oligonucleotide
  Sense strand starting at position 2606 of SEQ ID NO: 1242615
ucguuugagcguguugauc

SEQ ID NO: 1361053 - RNA, 19 nt, Artificial Sequence
  Description of Artificial Sequence: Synthetic oligonucleotide
  Antisense strand to SEQ ID NO: 1361052
gaucaacacgcucaaacga

SEQ ID NO: 1361054 - RNA, 19 nt, Artificial Sequence
  Description of Artificial Sequence: Synthetic oligonucleotide
  Sense strand starting at position 2612 of SEQ ID NO: 1242615
gagcguguugaucuuugca

SEQ ID NO: 1361055 - RNA, 19 nt, Artificial Sequence
  Description of Artificial Sequence: Synthetic oligonucleotide
  Antisense strand to SEQ ID NO: 1361054
ugcaaagaucaacacgcuc

SEQ ID NO: 1361056 - RNA, 19 nt, Artificial Sequence
  Description of Artificial Sequence: Synthetic oligonucleotide
  Sense strand starting at position 2619 of SEQ ID NO: 1242615
uugaucuuugcagauaaau

SEQ ID NO: 1361057 - RNA, 19 nt, Artificial Sequence
  Description of Artificial Sequence: Synthetic oligonucleotide
  Antisense strand to SEQ ID NO: 1361056
auuuaucugcaaagaucaa

SEQ ID NO: 1361058 - RNA, 19 nt, Artificial Sequence
  Description of Artificial Sequence: Synthetic oligonucleotide
  Sense strand starting at position 2634 of SEQ ID NO: 1242615
aaauuuacgccucguccua

SEQ ID NO: 1361059 - RNA, 19 nt, Artificial Sequence
  Description of Artificial Sequence: Synthetic oligonucleotide
  Antisense strand to SEQ ID NO: 1361058
uaggacgaggcguaaauuu

SEQ ID NO: 1361060 - RNA, 19 nt, Artificial Sequence
  Description of Artificial Sequence: Synthetic oligonucleotide
  Sense strand starting at position 2636 of SEQ ID NO: 1242615
auuuacgccucguccuaaa

SEQ ID NO: 1361061 - RNA, 19 nt, Artificial Sequence
  Description of Artificial Sequence: Synthetic oligonucleotide
  Antisense strand to SEQ ID NO: 1361060
uuuaggacgaggcguaaau

SEQ ID NO: 1361062 - RNA, 19 nt, Artificial Sequence
  Description of Artificial Sequence: Synthetic oligonucleotide
  Sense strand starting at position 2692 of SEQ ID NO: 1242615
cuccaugcccgagaaugaa

SEQ ID NO: 1361063 - RNA, 19 nt, Artificial Sequence
  Description of Artificial Sequence: Synthetic oligonucleotide
  Antisense strand to SEQ ID NO: 1361062
uucauucucgggcauggag

SEQ ID NO: 1361064 - RNA, 19 nt, Artificial Sequence
  Description of Artificial Sequence: Synthetic oligonucleotide
  Sense strand starting at position 2806 of SEQ ID NO: 1242615
ugaguugggcauuggagua

SEQ ID NO: 1361065 - RNA, 19 nt, Artificial Sequence
  Description of Artificial Sequence: Synthetic oligonucleotide
  Antisense strand to SEQ ID NO: 1361064
uacuccaaugcccaacuca

SEQ ID NO: 1361066 - RNA, 19 nt, Artificial Sequence
  Description of Artificial Sequence: Synthetic oligonucleotide
  Sense strand starting at position 2871 of SEQ ID NO: 1242615
ucuggaggaguucaugcua

SEQ ID NO: 1361067 - RNA, 19 nt, Artificial Sequence
  Description of Artificial Sequence: Synthetic oligonucleotide
  Antisense strand to SEQ ID NO: 1361066
uagcaugaacuccuccaga

SEQ ID NO: 1361068 - RNA, 19 nt, Artificial Sequence
  Description of Artificial Sequence: Synthetic oligonucleotide
  Sense strand starting at position 2900 of SEQ ID NO: 1242615
cagagaauuugacgagauc

SEQ ID NO: 1361069 - RNA, 19 nt, Artificial Sequence
  Description of Artificial Sequence: Synthetic oligonucleotide
  Antisense strand to SEQ ID NO: 1361068
gaucucgucaaauucucug

SEQ ID NO: 1361070 - RNA, 19 nt, Artificial Sequence
  Description of Artificial Sequence: Synthetic oligonucleotide
  Sense strand starting at position 2914 of SEQ ID NO: 1242615
agaucuaguaggugaagca

SEQ ID NO: 1361071 - RNA, 19 nt, Artificial Sequence
  Description of Artificial Sequence: Synthetic oligonucleotide
  Antisense strand to SEQ ID NO: 1361070
ugcuucaccuacuagaucu

SEQ ID NO: 1361072 - RNA, 19 nt, Artificial Sequence
  Description of Artificial Sequence: Synthetic oligonucleotide
  Sense strand starting at position 3060 of SEQ ID NO: 1242615
gcagaaggaucguuuaagg

SEQ ID NO: 1361073 - RNA, 19 nt, Artificial Sequence
  Description of Artificial Sequence: Synthetic oligonucleotide
  Antisense strand to SEQ ID NO: 1361072
ccuuaaacgauccuucugc

SEQ ID NO: 1361074 - RNA, 19 nt, Artificial Sequence
  Description of Artificial Sequence: Synthetic oligonucleotide
  Sense strand starting at position 3177 of SEQ ID NO: 1242615
ggagauggguuucuaggca

SEQ ID NO: 1361075 - RNA, 19 nt, Artificial Sequence
  Description of Artificial Sequence: Synthetic oligonucleotide
  Antisense strand to SEQ ID NO: 1361074
ugccuagaaacccaucucc

SEQ ID NO: 1361076 - RNA, 19 nt, Artificial Sequence
  Description of Artificial Sequence: Synthetic oligonucleotide
  Sense strand starting at position 3182 of SEQ ID NO: 1242615
uggguuucuaggcagggaa

SEQ ID NO: 1361077 - RNA, 19 nt, Artificial Sequence
  Description of Artificial Sequence: Synthetic oligonucleotide
  Antisense strand to SEQ ID NO: 1361076
uucccugccuagaaaccca

SEQ ID NO: 1361078 - RNA, 19 nt, Artificial Sequence
  Description of Artificial Sequence: Synthetic oligonucleotide
  Sense strand starting at position 3184 of SEQ ID NO: 1242615
gguuucuaggcagggaaau

SEQ ID NO: 1361079 - RNA, 19 nt, Artificial Sequence
  Description of Artificial Sequence: Synthetic oligonucleotide
  Antisense strand to SEQ ID NO: 1361078
auuucccugccuagaaacc

SEQ ID NO: 1361080 - RNA, 19 nt, Artificial Sequence
  Description of Artificial Sequence: Synthetic oligonucleotide
  Sense strand starting at position 3185 of SEQ ID NO: 1242615
guuucuaggcagggaaaua

SEQ ID NO: 1361081 - RNA, 19 nt, Artificial Sequence
  Description of Artificial Sequence: Synthetic oligonucleotide
  Antisense strand to SEQ ID NO: 1361080
uauuucccugccuagaaac

SEQ ID NO: 1361082 - RNA, 19 nt, Artificial Sequence
  Description of Artificial Sequence: Synthetic oligonucleotide
  Sense strand starting at position 3261 of SEQ ID NO: 1242615
agagguagcuaaucuggga

SEQ ID NO: 1361083 - RNA, 19 nt, Artificial Sequence
  Description of Artificial Sequence: Synthetic oligonucleotide
  Antisense strand to SEQ ID NO: 1361082
ucccagauuagcuaccucu

SEQ ID NO: 1361084 - RNA, 19 nt, Artificial Sequence
  Description of Artificial Sequence: Synthetic oligonucleotide
  Sense strand starting at position 3341 of SEQ ID NO: 1242615
gagcuuauuuaagaaagug

SEQ ID NO: 1361085 - RNA, 19 nt, Artificial Sequence
  Description of Artificial Sequence: Synthetic oligonucleotide
  Antisense strand to SEQ ID NO: 1361084
cacuuucuuaaauaagcuc

SEQ ID NO: 1361086 - RNA, 19 nt, Artificial Sequence
  Description of Artificial Sequence: Synthetic oligonucleotide
  Sense strand starting at position 3389 of SEQ ID NO: 1242615
aguacuuugggagguuuga

SEQ ID NO: 1361087 - RNA, 19 nt, Artificial Sequence
  Description of Artificial Sequence: Synthetic oligonucleotide
  Antisense strand to SEQ ID NO: 1361086
ucaaaccucccaaaguacu

SEQ ID NO: 1361088 - RNA, 19 nt, Artificial Sequence
  Description of Artificial Sequence: Synthetic oligonucleotide
  Sense strand starting at position 3680 of SEQ ID NO: 1242615
cucuuugcaacguggagaa

SEQ ID NO: 1361089 - RNA, 19 nt, Artificial Sequence
  Description of Artificial Sequence: Synthetic oligonucleotide
  Antisense strand to SEQ ID NO: 1361088
uucuccacguugcaaagag

SEQ ID NO: 1361090 - RNA, 19 nt, Artificial Sequence
  Description of Artificial Sequence: Synthetic oligonucleotide
  Sense strand starting at position 3714 of SEQ ID NO: 1242615
aaguccauguggucuuaau

SEQ ID NO: 1361091 - RNA, 19 nt, Artificial Sequence
  Description of Artificial Sequence: Synthetic oligonucleotide
  Antisense strand to SEQ ID NO: 1361090
auuaagaccacauggacuu

SEQ ID NO: 1361092 - RNA, 19 nt, Artificial Sequence
  Description of Artificial Sequence: Synthetic oligonucleotide
  Sense strand starting at position 3726 of SEQ ID NO: 1242615
ucuuaaucccagcgaaacu

SEQ ID NO: 1361093 - RNA, 19 nt, Artificial Sequence
  Description of Artificial Sequence: Synthetic oligonucleotide
  Antisense strand to SEQ ID NO: 1361092
aguuucgcugggauuaaga

SEQ ID NO: 1361094 - RNA, 19 nt, Artificial Sequence
  Description of Artificial Sequence: Synthetic oligonucleotide
  Sense strand starting at position 3738 of SEQ ID NO: 1242615
cgaaacucucaaugucuca

SEQ ID NO: 1361095 - RNA, 19 nt, Artificial Sequence
  Description of Artificial Sequence: Synthetic oligonucleotide
  Antisense strand to SEQ ID NO: 1361094
ugagacauugagaguuucg

SEQ ID NO: 1361096 - RNA, 19 nt, Artificial Sequence
  Description of Artificial Sequence: Synthetic oligonucleotide
  Sense strand starting at position 3770 of SEQ ID NO: 1242615
aaauguuagcauuggaacu

SEQ ID NO: 1361097 - RNA, 19 nt, Artificial Sequence
  Description of Artificial Sequence: Synthetic oligonucleotide
  Antisense strand to SEQ ID NO: 1361096
aguuccaaugcuaacauuu

SEQ ID NO: 1361098 - RNA, 19 nt, Artificial Sequence
  Description of Artificial Sequence: Synthetic oligonucleotide
  Sense strand starting at position 3908 of SEQ ID NO: 1242615
gugcucgccgagcaauuua

SEQ ID NO: 1361099 - RNA, 19 nt, Artificial Sequence
  Description of Artificial Sequence: Synthetic oligonucleotide
  Antisense strand to SEQ ID NO: 1361098
uaaauugcucggcgagcac

SEQ ID NO: 1361100 - RNA, 19 nt, Artificial Sequence
  Description of Artificial Sequence: Synthetic oligonucleotide
  Sense strand starting at position 24 of SEQ ID NO: 1242616
ugaccaauguaauccgaaa

SEQ ID NO: 1361101 - RNA, 19 nt, Artificial Sequence
  Description of Artificial Sequence: Synthetic oligonucleotide
  Antisense strand to SEQ ID NO: 1361100
uuucggauuacauugguca

SEQ ID NO: 1361102 - RNA, 19 nt, Artificial Sequence
  Description of Artificial Sequence: Synthetic oligonucleotide
  Sense strand starting at position 135 of SEQ ID NO: 1242616
auccuugucccugaaugga

SEQ ID NO: 1361103 - RNA, 19 nt, Artificial Sequence
  Description of Artificial Sequence: Synthetic oligonucleotide
  Antisense strand to SEQ ID NO: 1361102
uccauucagggacaaggau

SEQ ID NO: 1361104 - RNA, 19 nt, Artificial Sequence
  Description of Artificial Sequence: Synthetic oligonucleotide
  Sense strand starting at position 403 of SEQ ID NO: 1242616
cggagaucacgccauugga

SEQ ID NO: 1361105 - RNA, 19 nt, Artificial Sequence
  Description of Artificial Sequence: Synthetic oligonucleotide
  Antisense strand to SEQ ID NO: 1361104
uccaauggcgugaucuccg

SEQ ID NO: 1361106 - RNA, 19 nt, Artificial Sequence
  Description of Artificial Sequence: Synthetic oligonucleotide
  Sense strand starting at position 478 of SEQ ID NO: 1242616
ccgagcuauugcugaguau

SEQ ID NO: 1361107 - RNA, 19 nt, Artificial Sequence
  Description of Artificial Sequence: Synthetic oligonucleotide
  Antisense strand to SEQ ID NO: 1361106
auacucagcaauagcucgg

SEQ ID NO: 1361108 - RNA, 19 nt, Artificial Sequence
  Description of Artificial Sequence: Synthetic oligonucleotide
  Sense strand starting at position 479 of SEQ ID NO: 1242616
cgagcuauugcugaguauc

SEQ ID NO: 1361109 - RNA, 19 nt, Artificial Sequence
  Description of Artificial Sequence: Synthetic oligonucleotide
  Antisense strand to SEQ ID NO: 1361108
gauacucagcaauagcucg

SEQ ID NO: 1361110 - RNA, 19 nt, Artificial Sequence
  Description of Artificial Sequence: Synthetic oligonucleotide
  Sense strand starting at position 505 of SEQ ID NO: 1242616
gccgguuuagacuguguuu

SEQ ID NO: 1361111 - RNA, 19 nt, Artificial Sequence
  Description of Artificial Sequence: Synthetic oligonucleotide
  Antisense strand to SEQ ID NO: 1361110
aaacacagucuaaaccggc

SEQ ID NO: 1361112 - RNA, 19 nt, Artificial Sequence
  Description of Artificial Sequence: Synthetic oligonucleotide
  Sense strand starting at position 547 of SEQ ID NO: 1242616
ccaaguaagcucgagauuc

SEQ ID NO: 1361113 - RNA, 19 nt, Artificial Sequence
  Description of Artificial Sequence: Synthetic oligonucleotide
  Antisense strand to SEQ ID NO: 1361112
gaaucucgagcuuacuugg

SEQ ID NO: 1361114 - RNA, 19 nt, Artificial Sequence
  Description of Artificial Sequence: Synthetic oligonucleotide
  Sense strand starting at position 549 of SEQ ID NO: 1242616
aaguaagcucgagauucuu

SEQ ID NO: 1361115 - RNA, 19 nt, Artificial Sequence
  Description of Artificial Sequence: Synthetic oligonucleotide
  Antisense strand to SEQ ID NO: 1361114
aagaaucucgagcuuacuu

SEQ ID NO: 1361116 - RNA, 19 nt, Artificial Sequence
  Description of Artificial Sequence: Synthetic oligonucleotide
  Sense strand starting at position 555 of SEQ ID NO: 1242616
gcucgagauucuuccugaa

SEQ ID NO: 1361117 - RNA, 19 nt, Artificial Sequence
  Description of Artificial Sequence: Synthetic oligonucleotide
  Antisense strand to SEQ ID NO: 1361116
uucaggaagaaucucgagc

SEQ ID NO: 1361118 - RNA, 19 nt, Artificial Sequence
  Description of Artificial Sequence: Synthetic oligonucleotide
  Sense strand starting at position 557 of SEQ ID NO: 1242616
ucgagauucuuccugaaga

SEQ ID NO: 1361119 - RNA, 19 nt, Artificial Sequence
  Description of Artificial Sequence: Synthetic oligonucleotide
  Antisense strand to SEQ ID NO: 1361118
ucuucaggaagaaucucga

SEQ ID NO: 1361120 - RNA, 19 nt, Artificial Sequence
  Description of Artificial Sequence: Synthetic oligonucleotide
  Sense strand starting at position 558 of SEQ ID NO: 1242616
cgagauucuuccugaagaa

SEQ ID NO: 1361121 - RNA, 19 nt, Artificial Sequence
  Description of Artificial Sequence: Synthetic oligonucleotide
  Antisense strand to SEQ ID NO: 1361120
uucuucaggaagaaucucg

SEQ ID NO: 1361122 - RNA, 19 nt, Artificial Sequence
  Description of Artificial Sequence: Synthetic oligonucleotide
  Sense strand starting at position 608 of SEQ ID NO: 1242616
ggcugacaugcacauaaga

SEQ ID NO: 1361123 - RNA, 19 nt, Artificial Sequence
  Description of Artificial Sequence: Synthetic oligonucleotide
  Antisense strand to SEQ ID NO: 1361122
ucuuaugugcaugucagcc

SEQ ID NO: 1361124 - RNA, 19 nt, Artificial Sequence
  Description of Artificial Sequence: Synthetic oligonucleotide
  Sense strand starting at position 1030 of SEQ ID NO: 1242616
acaccugcugggcaauaua

SEQ ID NO: 1361125 - RNA, 19 nt, Artificial Sequence
  Description of Artificial Sequence: Synthetic oligonucleotide
  Antisense strand to SEQ ID NO: 1361124
uauauugcccagcaggugu

SEQ ID NO: 1361126 - RNA, 19 nt, Artificial Sequence
  Description of Artificial Sequence: Synthetic oligonucleotide
  Sense strand starting at position 1087 of SEQ ID NO: 1242616
ucuuauagaugggcugaga

SEQ ID NO: 1361127 - RNA, 19 nt, Artificial Sequence
  Description of Artificial Sequence: Synthetic oligonucleotide
  Antisense strand to SEQ ID NO: 1361126
ucucagcccaucuauaaga

SEQ ID NO: 1361128 - RNA, 19 nt, Artificial Sequence
  Description of Artificial Sequence: Synthetic oligonucleotide
  Sense strand starting at position 1226 of SEQ ID NO: 1242616
gguagaaucuaagaaccac

SEQ ID NO: 1361129 - RNA, 19 nt, Artificial Sequence
  Description of Artificial Sequence: Synthetic oligonucleotide
  Antisense strand to SEQ ID NO: 1361128
gugguucuuagauucuacc

SEQ ID NO: 1361130 - RNA, 19 nt, Artificial Sequence
  Description of Artificial Sequence: Synthetic oligonucleotide
  Sense strand starting at position 1258 of SEQ ID NO: 1242616
accaguguuugggcagcaa

SEQ ID NO: 1361131 - RNA, 19 nt, Artificial Sequence
  Description of Artificial Sequence: Synthetic oligonucleotide
  Antisense strand to SEQ ID NO: 1361130
uugcugcccaaacacuggu

SEQ ID NO: 1361132 - RNA, 19 nt, Artificial Sequence
  Description of Artificial Sequence: Synthetic oligonucleotide
  Sense strand starting at position 2171 of SEQ ID NO: 1242616
ggcugaaagcgcgaggaua

SEQ ID NO: 1361133 - RNA, 19 nt, Artificial Sequence
  Description of Artificial Sequence: Synthetic oligonucleotide
  Antisense strand to SEQ ID NO: 1361132
uauccucgcgcuuucagcc

SEQ ID NO: 1361134 - RNA, 19 nt, Artificial Sequence
  Description of Artificial Sequence: Synthetic oligonucleotide
  Sense strand starting at position 2172 of SEQ ID NO: 1242616
gcugaaagcgcgaggauaa

SEQ ID NO: 1361135 - RNA, 19 nt, Artificial Sequence
  Description of Artificial Sequence: Synthetic oligonucleotide
  Antisense strand to SEQ ID NO: 1361134
uuauccucgcgcuuucagc

SEQ ID NO: 1361136 - RNA, 19 nt, Artificial Sequence
  Description of Artificial Sequence: Synthetic oligonucleotide
  Sense strand starting at position 2550 of SEQ ID NO: 1242616
ggcuuuggcuucccagaga

SEQ ID NO: 1361137 - RNA, 19 nt, Artificial Sequence
  Description of Artificial Sequence: Synthetic oligonucleotide
  Antisense strand to SEQ ID NO: 1361136
ucucugggaagccaaagcc

SEQ ID NO: 1361138 - RNA, 19 nt, Artificial Sequence
  Description of Artificial Sequence: Synthetic oligonucleotide
  Sense strand starting at position 2587 of SEQ ID NO: 1242616
cguugcagguccuuggaau

SEQ ID NO: 1361139 - RNA, 19 nt, Artificial Sequence
  Description of Artificial Sequence: Synthetic oligonucleotide
  Antisense strand to SEQ ID NO: 1361138
auuccaaggaccugcaacg

SEQ ID NO: 1361140 - RNA, 19 nt, Artificial Sequence
  Description of Artificial Sequence: Synthetic oligonucleotide
  Sense strand starting at position 2993 of SEQ ID NO: 1242616
cuugauuucucccaggcac

SEQ ID NO: 1361141 - RNA, 19 nt, Artificial Sequence
  Description of Artificial Sequence: Synthetic oligonucleotide
  Antisense strand to SEQ ID NO: 1361140
gugccugggagaaaucaag

SEQ ID NO: 1361142 - RNA, 19 nt, Artificial Sequence
  Description of Artificial Sequence: Synthetic oligonucleotide
  Sense strand starting at position 3007 of SEQ ID NO: 1242616
ggcaccaucuaguaucaga

SEQ ID NO: 1361143 - RNA, 19 nt, Artificial Sequence
  Description of Artificial Sequence: Synthetic oligonucleotide
  Antisense strand to SEQ ID NO: 1361142
ucugauacuagauggugcc

SEQ ID NO: 1361144 - RNA, 19 nt, Artificial Sequence
  Description of Artificial Sequence: Synthetic oligonucleotide
  Sense strand starting at position 3010 of SEQ ID NO: 1242616
accaucuaguaucagagaa

SEQ ID NO: 1361145 - RNA, 19 nt, Artificial Sequence
  Description of Artificial Sequence: Synthetic oligonucleotide
  Antisense strand to SEQ ID NO: 1361144
uucucugauacuagauggu

SEQ ID NO: 1361146 - RNA, 19 nt, Artificial Sequence
  Description of Artificial Sequence: Synthetic oligonucleotide
  Sense strand starting at position 3165 of SEQ ID NO: 1242616
ugcccagauccgugucacu

SEQ ID NO: 1361147 - RNA, 19 nt, Artificial Sequence
  Description of Artificial Sequence: Synthetic oligonucleotide
  Antisense strand to SEQ ID NO: 1361146
agugacacggaucugggca

SEQ ID NO: 1361148 - RNA, 19 nt, Artificial Sequence
  Description of Artificial Sequence: Synthetic oligonucleotide
  Sense strand starting at position 47 of SEQ ID NO: 1242617
aagagauggucaucuacca

SEQ ID NO: 1361149 - RNA, 19 nt, Artificial Sequence
  Description of Artificial Sequence: Synthetic oligonucleotide
  Antisense strand to SEQ ID NO: 1361148
ugguagaugaccaucucuu

SEQ ID NO: 1361150 - RNA, 19 nt, Artificial Sequence
  Description of Artificial Sequence: Synthetic oligonucleotide
  Sense strand starting at position 160 of SEQ ID NO: 1242617
cugggauccuguggagaca

SEQ ID NO: 1361151 - RNA, 19 nt, Artificial Sequence
  Description of Artificial Sequence: Synthetic oligonucleotide
  Antisense strand to SEQ ID NO: 1361150
ugucuccacaggaucccag

SEQ ID NO: 1361152 - RNA, 19 nt, Artificial Sequence
  Description of Artificial Sequence: Synthetic oligonucleotide
  Sense strand starting at position 202 of SEQ ID NO: 1242617
ccacauacacggcaauaau

SEQ ID NO: 1361153 - RNA, 19 nt, Artificial Sequence
  Description of Artificial Sequence: Synthetic oligonucleotide
  Antisense strand to SEQ ID NO: 1361152
auuauugccguguaugugg

SEQ ID NO: 1361154 - RNA, 19 nt, Artificial Sequence
  Description of Artificial Sequence: Synthetic oligonucleotide
  Sense strand starting at position 210 of SEQ ID NO: 1242617
acggcaauaaucugggaaa

SEQ ID NO: 1361155 - RNA, 19 nt, Artificial Sequence
  Description of Artificial Sequence: Synthetic oligonucleotide
  Antisense strand to SEQ ID NO: 1361154
uuucccagauuauugccgu

SEQ ID NO: 1361156 - RNA, 19 nt, Artificial Sequence
  Description of Artificial Sequence: Synthetic oligonucleotide
  Sense strand starting at position 211 of SEQ ID NO: 1242617
cggcaauaaucugggaaac

SEQ ID NO: 1361157 - RNA, 19 nt, Artificial Sequence
  Description of Artificial Sequence: Synthetic oligonucleotide
  Antisense strand to SEQ ID NO: 1361156
guuucccagauuauugccg

SEQ ID NO: 1361158 - RNA, 19 nt, Artificial Sequence
  Description of Artificial Sequence: Synthetic oligonucleotide
  Sense strand starting at position 235 of SEQ ID NO: 1242617
ccauucugggucugaguua

SEQ ID NO: 1361159 - RNA, 19 nt, Artificial Sequence
  Description of Artificial Sequence: Synthetic oligonucleotide
  Antisense strand to SEQ ID NO: 1361158
uaacucagacccagaaugg

SEQ ID NO: 1361160 - RNA, 19 nt, Artificial Sequence
  Description of Artificial Sequence: Synthetic oligonucleotide
  Sense strand starting at position 359 of SEQ ID NO: 1242617
ccacauaagccagauguca

SEQ ID NO: 1361161 - RNA, 19 nt, Artificial Sequence
  Description of Artificial Sequence: Synthetic oligonucleotide
  Antisense strand to SEQ ID NO: 1361160
ugacaucuggcuuaugugg

SEQ ID NO: 1361162 - RNA, 19 nt, Artificial Sequence
  Description of Artificial Sequence: Synthetic oligonucleotide
  Sense strand starting at position 424 of SEQ ID NO: 1242617
ggucgaaggugcucaaaug

SEQ ID NO: 1361163 - RNA, 19 nt, Artificial Sequence
  Description of Artificial Sequence: Synthetic oligonucleotide
  Antisense strand to SEQ ID NO: 1361162
cauuugagcaccuucgacc

SEQ ID NO: 1361164 - RNA, 19 nt, Artificial Sequence
  Description of Artificial Sequence: Synthetic oligonucleotide
  Sense strand starting at position 529 of SEQ ID NO: 1242617
ccagaaagacgucgucgau

SEQ ID NO: 1361165 - RNA, 19 nt, Artificial Sequence
  Description of Artificial Sequence: Synthetic oligonucleotide
  Antisense strand to SEQ ID NO: 1361164
aucgacgacgucuuucugg

SEQ ID NO: 1361166 - RNA, 19 nt, Artificial Sequence
  Description of Artificial Sequence: Synthetic oligonucleotide
  Sense strand starting at position 711 of SEQ ID NO: 1242617
acaauuacgucaccagcaa

SEQ ID NO: 1361167 - RNA, 19 nt, Artificial Sequence
  Description of Artificial Sequence: Synthetic oligonucleotide
  Antisense strand to SEQ ID NO: 1361166
uugcuggugacguaauugu

SEQ ID NO: 1361168 - RNA, 19 nt, Artificial Sequence
  Description of Artificial Sequence: Synthetic oligonucleotide
  Sense strand starting at position 856 of SEQ ID NO: 1242617
aguggaucuccuugagcgu

SEQ ID NO: 1361169 - RNA, 19 nt, Artificial Sequence
  Description of Artificial Sequence: Synthetic oligonucleotide
  Antisense strand to SEQ ID NO: 1361168
acgcucaaggagauccacu

SEQ ID NO: 1361170 - RNA, 19 nt, Artificial Sequence
  Description of Artificial Sequence: Synthetic oligonucleotide
  Sense strand starting at position 857 of SEQ ID NO: 1242617
guggaucuccuugagcguu

SEQ ID NO: 1361171 - RNA, 19 nt, Artificial Sequence
  Description of Artificial Sequence: Synthetic oligonucleotide
  Antisense strand to SEQ ID NO: 1361170
aacgcucaaggagauccac

SEQ ID NO: 1361172 - RNA, 19 nt, Artificial Sequence
  Description of Artificial Sequence: Synthetic oligonucleotide
  Sense strand starting at position 863 of SEQ ID NO: 1242617
cuccuugagcguuagguua

SEQ ID NO: 1361173 - RNA, 19 nt, Artificial Sequence
  Description of Artificial Sequence: Synthetic oligonucleotide
  Antisense strand to SEQ ID NO: 1361172
uaaccuaacgcucaaggag

SEQ ID NO: 1361174 - RNA, 19 nt, Artificial Sequence
  Description of Artificial Sequence: Synthetic oligonucleotide
  Sense strand starting at position 865 of SEQ ID NO: 1242617
ccuugagcguuagguuaaa

SEQ ID NO: 1361175 - RNA, 19 nt, Artificial Sequence
  Description of Artificial Sequence: Synthetic oligonucleotide
  Antisense strand to SEQ ID NO: 1361174
uuuaaccuaacgcucaagg

SEQ ID NO: 1361176 - RNA, 19 nt, Artificial Sequence
  Description of Artificial Sequence: Synthetic oligonucleotide
  Sense strand starting at position 1169 of SEQ ID NO: 1242617
gcacuugugcggcugguua

SEQ ID NO: 1361177 - RNA, 19 nt, Artificial Sequence
  Description of Artificial Sequence: Synthetic oligonucleotide
  Antisense strand to SEQ ID NO: 1361176
uaaccagccgcacaagugc

SEQ ID NO: 1361178 - RNA, 19 nt, Artificial Sequence
  Description of Artificial Sequence: Synthetic oligonucleotide
  Sense strand starting at position 1171 of SEQ ID NO: 1242617
acuugugcggcugguuaau

SEQ ID NO: 1361179 - RNA, 19 nt, Artificial Sequence
  Description of Artificial Sequence: Synthetic oligonucleotide
  Antisense strand to SEQ ID NO: 1361178
auuaaccagccgcacaagu

SEQ ID NO: 1361180 - RNA, 19 nt, Artificial Sequence
  Description of Artificial Sequence: Synthetic oligonucleotide
  Sense strand starting at position 1184 of SEQ ID NO: 1242617
guuaaugagcaguggaaac

SEQ ID NO: 1361181 - RNA, 19 nt, Artificial Sequence
  Description of Artificial Sequence: Synthetic oligonucleotide
  Antisense strand to SEQ ID NO: 1361180
guuuccacugcucauuaac

SEQ ID NO: 1361182 - RNA, 19 nt, Artificial Sequence
  Description of Artificial Sequence: Synthetic oligonucleotide
  Sense strand starting at position 1210 of SEQ ID NO: 1242617
gguccuuggcgcgcaaaua

SEQ ID NO: 1361183 - RNA, 19 nt, Artificial Sequence
  Description of Artificial Sequence: Synthetic oligonucleotide
  Antisense strand to SEQ ID NO: 1361182
uauuugcgcgccaaggacc

SEQ ID NO: 1361184 - RNA, 19 nt, Artificial Sequence
  Description of Artificial Sequence: Synthetic oligonucleotide
  Sense strand starting at position 2376 of SEQ ID NO: 1242617
acacauggcugucuucuua

SEQ ID NO: 1361185 - RNA, 19 nt, Artificial Sequence
  Description of Artificial Sequence: Synthetic oligonucleotide
  Antisense strand to SEQ ID NO: 1361184
uaagaagacagccaugugu

SEQ ID NO: 1361186 - RNA, 19 nt, Artificial Sequence
  Description of Artificial Sequence: Synthetic oligonucleotide
  Sense strand starting at position 2538 of SEQ ID NO: 1242617
gugacuugcccaggaucca

SEQ ID NO: 1361187 - RNA, 19 nt, Artificial Sequence
  Description of Artificial Sequence: Synthetic oligonucleotide
  Antisense strand to SEQ ID NO: 1361186
uggauccugggcaagucac

SEQ ID NO: 1361188 - RNA, 19 nt, Artificial Sequence
  Description of Artificial Sequence: Synthetic oligonucleotide
  Sense strand starting at position 2771 of SEQ ID NO: 1242617
gccuacugcagguagaaau

SEQ ID NO: 1361189 - RNA, 19 nt, Artificial Sequence
  Description of Artificial Sequence: Synthetic oligonucleotide
  Antisense strand to SEQ ID NO: 1361188
auuucuaccugcaguaggc

SEQ ID NO: 1361190 - RNA, 19 nt, Artificial Sequence
  Description of Artificial Sequence: Synthetic oligonucleotide
  Sense strand starting at position 2857 of SEQ ID NO: 1242617
ggcggaggccuuggcuaaa

SEQ ID NO: 1361191 - RNA, 19 nt, Artificial Sequence
  Description of Artificial Sequence: Synthetic oligonucleotide
  Antisense strand to SEQ ID NO: 1361190
uuuagccaaggccuccgcc

SEQ ID NO: 1361192 - RNA, 19 nt, Artificial Sequence
  Description of Artificial Sequence: Synthetic oligonucleotide
  Sense strand starting at position 2873 of SEQ ID NO: 1242617
aaaggauugcucugggaug

SEQ ID NO: 1361193 - RNA, 19 nt, Artificial Sequence
  Description of Artificial Sequence: Synthetic oligonucleotide
  Antisense strand to SEQ ID NO: 1361192
caucccagagcaauccuuu

SEQ ID NO: 1361194 - RNA, 19 nt, Artificial Sequence
  Description of Artificial Sequence: Synthetic oligonucleotide
  Sense strand starting at position 2875 of SEQ ID NO: 1242617
aggauugcucugggaugca

SEQ ID NO: 1361195 - RNA, 19 nt, Artificial Sequence
  Description of Artificial Sequence: Synthetic oligonucleotide
  Antisense strand to SEQ ID NO: 1361194
ugcaucccagagcaauccu

SEQ ID NO: 1361196 - RNA, 19 nt, Artificial Sequence
  Description of Artificial Sequence: Synthetic oligonucleotide
  Sense strand starting at position 2901 of SEQ ID NO: 1242617
agaggugcucugcaaugga

SEQ ID NO: 1361197 - RNA, 19 nt, Artificial Sequence
  Description of Artificial Sequence: Synthetic oligonucleotide
  Antisense strand to SEQ ID NO: 1361196
uccauugcagagcaccucu

SEQ ID NO: 1361198 - RNA, 19 nt, Artificial Sequence
  Description of Artificial Sequence: Synthetic oligonucleotide
  Sense strand starting at position 2919 of SEQ ID NO: 1242617
agagcuaaguccuugcgca

SEQ ID NO: 1361199 - RNA, 19 nt, Artificial Sequence
  Description of Artificial Sequence: Synthetic oligonucleotide
  Antisense strand to SEQ ID NO: 1361198
ugcgcaaggacuuagcucu

SEQ ID NO: 1361200 - RNA, 19 nt, Artificial Sequence
  Description of Artificial Sequence: Synthetic oligonucleotide
  Sense strand starting at position 2920 of SEQ ID NO: 1242617
gagcuaaguccuugcgcag

SEQ ID NO: 1361201 - RNA, 19 nt, Artificial Sequence
  Description of Artificial Sequence: Synthetic oligonucleotide
  Antisense strand to SEQ ID NO: 1361200
cugcgcaaggacuuagcuc

SEQ ID NO: 1361202 - RNA, 19 nt, Artificial Sequence
  Description of Artificial Sequence: Synthetic oligonucleotide
  Sense strand starting at position 2976 of SEQ ID NO: 1242617
ugugguggagccuggaaua

SEQ ID NO: 1361203 - RNA, 19 nt, Artificial Sequence
  Description of Artificial Sequence: Synthetic oligonucleotide
  Antisense strand to SEQ ID NO: 1361202
uauuccaggcuccaccaca

SEQ ID NO: 1361204 - RNA, 19 nt, Artificial Sequence
  Description of Artificial Sequence: Synthetic oligonucleotide
  Sense strand starting at position 2998 of SEQ ID NO: 1242617
agccucuacuggucucuua

SEQ ID NO: 1361205 - RNA, 19 nt, Artificial Sequence
  Description of Artificial Sequence: Synthetic oligonucleotide
  Antisense strand to SEQ ID NO: 1361204
uaagagaccaguagaggcu

SEQ ID NO: 1361206 - RNA, 19 nt, Artificial Sequence
  Description of Artificial Sequence: Synthetic oligonucleotide
  Sense strand starting at position 3001 of SEQ ID NO: 1242617
cucuacuggucucuuaaga

SEQ ID NO: 1361207 - RNA, 19 nt, Artificial Sequence
  Description of Artificial Sequence: Synthetic oligonucleotide
  Antisense strand to SEQ ID NO: 1361206
ucuuaagagaccaguagag

SEQ ID NO: 1361208 - RNA, 19 nt, Artificial Sequence
  Description of Artificial Sequence: Synthetic oligonucleotide
  Sense strand starting at position 3044 of SEQ ID NO: 1242617
ggcuauaucugcuccugac

SEQ ID NO: 1361209 - RNA, 19 nt, Artificial Sequence
  Description of Artificial Sequence: Synthetic oligonucleotide
  Antisense strand to SEQ ID NO: 1361208
gucaggagcagauauagcc

SEQ ID NO: 1361210 - RNA, 19 nt, Artificial Sequence
  Description of Artificial Sequence: Synthetic oligonucleotide
  Sense strand starting at position 3061 of SEQ ID NO: 1242617
acggcuucuucccaccaau

SEQ ID NO: 1361211 - RNA, 19 nt, Artificial Sequence
  Description of Artificial Sequence: Synthetic oligonucleotide
  Antisense strand to SEQ ID NO: 1361210
auuggugggaagaagccgu

SEQ ID NO: 1361212 - RNA, 19 nt, Artificial Sequence
  Description of Artificial Sequence: Synthetic oligonucleotide
  Sense strand starting at position 3787 of SEQ ID NO: 1242617
uccauucccuccugugaua

SEQ ID NO: 1361213 - RNA, 19 nt, Artificial Sequence
  Description of Artificial Sequence: Synthetic oligonucleotide
  Antisense strand to SEQ ID NO: 1361212
uaucacaggagggaaugga

SEQ ID NO: 1361214 - RNA, 19 nt, Artificial Sequence
  Description of Artificial Sequence: Synthetic oligonucleotide
  Sense strand starting at position 3905 of SEQ ID NO: 1242617
ccauuauagugggugggua

SEQ ID NO: 1361215 - RNA, 19 nt, Artificial Sequence
  Description of Artificial Sequence: Synthetic oligonucleotide
  Antisense strand to SEQ ID NO: 1361214
uacccacccacuauaaugg

SEQ ID NO: 1361216 - RNA, 19 nt, Artificial Sequence
  Description of Artificial Sequence: Synthetic oligonucleotide
  Sense strand starting at position 3906 of SEQ ID NO: 1242617
cauuauaguggguggguaa

SEQ ID NO: 1361217 - RNA, 19 nt, Artificial Sequence
  Description of Artificial Sequence: Synthetic oligonucleotide
  Antisense strand to SEQ ID NO: 1361216
uuacccacccacuauaaug

SEQ ID NO: 1361218 - RNA, 19 nt, Artificial Sequence
  Description of Artificial Sequence: Synthetic oligonucleotide
  Sense strand starting at position 3907 of SEQ ID NO: 1242617
auuauaguggguggguaau

SEQ ID NO: 1361219 - RNA, 19 nt, Artificial Sequence
  Description of Artificial Sequence: Synthetic oligonucleotide
  Antisense strand to SEQ ID NO: 1361218
auuacccacccacuauaau

SEQ ID NO: 1361220 - RNA, 19 nt, Artificial Sequence
  Description of Artificial Sequence: Synthetic oligonucleotide
  Sense strand starting at position 3983 of SEQ ID NO: 1242617
guugguguccuucaggaca

SEQ ID NO: 1361221 - RNA, 19 nt, Artificial Sequence
  Description of Artificial Sequence: Synthetic oligonucleotide
  Antisense strand to SEQ ID NO: 1361220
uguccugaaggacaccaac

SEQ ID NO: 1361222 - RNA, 19 nt, Artificial Sequence
  Description of Artificial Sequence: Synthetic oligonucleotide
  Sense strand starting at position 136 of SEQ ID NO: 1242618
ccagcucuccuauguagga

SEQ ID NO: 1361223 - RNA, 19 nt, Artificial Sequence
  Description of Artificial Sequence: Synthetic oligonucleotide
  Antisense strand to SEQ ID NO: 1361222
uccuacauaggagagcugg

SEQ ID NO: 1361224 - RNA, 19 nt, Artificial Sequence
  Description of Artificial Sequence: Synthetic oligonucleotide
  Sense strand starting at position 141 of SEQ ID NO: 1242618
ucuccuauguaggagguaa

SEQ ID NO: 1361225 - RNA, 19 nt, Artificial Sequence
  Description of Artificial Sequence: Synthetic oligonucleotide
  Antisense strand to SEQ ID NO: 1361224
uuaccuccuacauaggaga

SEQ ID NO: 1361226 - RNA, 19 nt, Artificial Sequence
  Description of Artificial Sequence: Synthetic oligonucleotide
  Sense strand starting at position 459 of SEQ ID NO: 1242618
cccucauguugccaugaca

SEQ ID NO: 1361227 - RNA, 19 nt, Artificial Sequence
  Description of Artificial Sequence: Synthetic oligonucleotide
  Antisense strand to SEQ ID NO: 1361226
ugucauggcaacaugaggg

SEQ ID NO: 1361228 - RNA, 19 nt, Artificial Sequence
  Description of Artificial Sequence: Synthetic oligonucleotide
  Sense strand starting at position 462 of SEQ ID NO: 1242618
ucauguugccaugacaacu

SEQ ID NO: 1361229 - RNA, 19 nt, Artificial Sequence
  Description of Artificial Sequence: Synthetic oligonucleotide
  Antisense strand to SEQ ID NO: 1361228
aguugucauggcaacauga

SEQ ID NO: 1361230 - RNA, 19 nt, Artificial Sequence
  Description of Artificial Sequence: Synthetic oligonucleotide
  Sense strand starting at position 531 of SEQ ID NO: 1242618
agaugucaccgcugggaca

SEQ ID NO: 1361231 - RNA, 19 nt, Artificial Sequence
  Description of Artificial Sequence: Synthetic oligonucleotide
  Antisense strand to SEQ ID NO: 1361230
ugucccagcggugacaucu

SEQ ID NO: 1361232 - RNA, 19 nt, Artificial Sequence
  Description of Artificial Sequence: Synthetic oligonucleotide
  Sense strand starting at position 1235 of SEQ ID NO: 1242618
gccucugauuucuaggaca

SEQ ID NO: 1361233 - RNA, 19 nt, Artificial Sequence
  Description of Artificial Sequence: Synthetic oligonucleotide
  Antisense strand to SEQ ID NO: 1361232
uguccuagaaaucagaggc

SEQ ID NO: 1361234 - RNA, 19 nt, Artificial Sequence
  Description of Artificial Sequence: Synthetic oligonucleotide
  Sense strand starting at position 1375 of SEQ ID NO: 1242618
cauagucauucucacggga

SEQ ID NO: 1361235 - RNA, 19 nt, Artificial Sequence
  Description of Artificial Sequence: Synthetic oligonucleotide
  Antisense strand to SEQ ID NO: 1361234
ucccgugagaaugacuaug

SEQ ID NO: 1361236 - RNA, 19 nt, Artificial Sequence
  Description of Artificial Sequence: Synthetic oligonucleotide
  Sense strand starting at position 1377 of SEQ ID NO: 1242618
uagucauucucacgggaca

SEQ ID NO: 1361237 - RNA, 19 nt, Artificial Sequence
  Description of Artificial Sequence: Synthetic oligonucleotide
  Antisense strand to SEQ ID NO: 1361236
ugucccgugagaaugacua

SEQ ID NO: 1361238 - RNA, 19 nt, Artificial Sequence
  Description of Artificial Sequence: Synthetic oligonucleotide
  Sense strand starting at position 1485 of SEQ ID NO: 1242618
gcacuagacucauaagcuc

SEQ ID NO: 1361239 - RNA, 19 nt, Artificial Sequence
  Description of Artificial Sequence: Synthetic oligonucleotide
  Antisense strand to SEQ ID NO: 1361238
gagcuuaugagucuagugc

SEQ ID NO: 1361240 - RNA, 19 nt, Artificial Sequence
  Description of Artificial Sequence: Synthetic oligonucleotide
  Sense strand starting at position 1640 of SEQ ID NO: 1242618
agacaccauucccggauau

SEQ ID NO: 1361241 - RNA, 19 nt, Artificial Sequence
  Description of Artificial Sequence: Synthetic oligonucleotide
  Antisense strand to SEQ ID NO: 1361240
auauccgggaauggugucu

SEQ ID NO: 1361242 - RNA, 19 nt, Artificial Sequence
  Description of Artificial Sequence: Synthetic oligonucleotide
  Sense strand starting at position 1642 of SEQ ID NO: 1242618
acaccauucccggauaucu

SEQ ID NO: 1361243 - RNA, 19 nt, Artificial Sequence
  Description of Artificial Sequence: Synthetic oligonucleotide
  Antisense strand to SEQ ID NO: 1361242
agauauccgggaauggugu

SEQ ID NO: 1361244 - RNA, 19 nt, Artificial Sequence
  Description of Artificial Sequence: Synthetic oligonucleotide
  Sense strand starting at position 1651 of SEQ ID NO: 1242618
ccggauaucucgucuugau

SEQ ID NO: 1361245 - RNA, 19 nt, Artificial Sequence
  Description of Artificial Sequence: Synthetic oligonucleotide
  Antisense strand to SEQ ID NO: 1361244
aucaagacgagauauccgg

SEQ ID NO: 1361246 - RNA, 19 nt, Artificial Sequence
  Description of Artificial Sequence: Synthetic oligonucleotide
  Sense strand starting at position 2017 of SEQ ID NO: 1242618
ggagcuguugccagggcaa

SEQ ID NO: 1361247 - RNA, 19 nt, Artificial Sequence
  Description of Artificial Sequence: Synthetic oligonucleotide
  Antisense strand to SEQ ID NO: 1361246
uugcccuggcaacagcucc

SEQ ID NO: 1361248 - RNA, 19 nt, Artificial Sequence
  Description of Artificial Sequence: Synthetic oligonucleotide
  Sense strand starting at position 2041 of SEQ ID NO: 1242618
gcggcaugugcgugugaca

SEQ ID NO: 1361249 - RNA, 19 nt, Artificial Sequence
  Description of Artificial Sequence: Synthetic oligonucleotide
  Antisense strand to SEQ ID NO: 1361248
ugucacacgcacaugccgc

SEQ ID NO: 1361250 - RNA, 19 nt, Artificial Sequence
  Description of Artificial Sequence: Synthetic oligonucleotide
  Sense strand starting at position 2072 of SEQ ID NO: 1242618
gcucgcaguccuggagaca

SEQ ID NO: 1361251 - RNA, 19 nt, Artificial Sequence
  Description of Artificial Sequence: Synthetic oligonucleotide
  Antisense strand to SEQ ID NO: 1361250
ugucuccaggacugcgagc

SEQ ID NO: 1361252 - RNA, 19 nt, Artificial Sequence
  Description of Artificial Sequence: Synthetic oligonucleotide
  Sense strand starting at position 2073 of SEQ ID NO: 1242618
cucgcaguccuggagacaa

SEQ ID NO: 1361253 - RNA, 19 nt, Artificial Sequence
  Description of Artificial Sequence: Synthetic oligonucleotide
  Antisense strand to SEQ ID NO: 1361252
uugucuccaggacugcgag

SEQ ID NO: 1361254 - RNA, 19 nt, Artificial Sequence
  Description of Artificial Sequence: Synthetic oligonucleotide
  Sense strand starting at position 2075 of SEQ ID NO: 1242618
cgcaguccuggagacaaau

SEQ ID NO: 1361255 - RNA, 19 nt, Artificial Sequence
  Description of Artificial Sequence: Synthetic oligonucleotide
  Antisense strand to SEQ ID NO: 1361254
auuugucuccaggacugcg

SEQ ID NO: 1361256 - RNA, 19 nt, Artificial Sequence
  Description of Artificial Sequence: Synthetic oligonucleotide
  Sense strand starting at position 2137 of SEQ ID NO: 1242618
gggugucuuugugauaaca

SEQ ID NO: 1361257 - RNA, 19 nt, Artificial Sequence
  Description of Artificial Sequence: Synthetic oligonucleotide
  Antisense strand to SEQ ID NO: 1361256
uguuaucacaaagacaccc

SEQ ID NO: 1361258 - RNA, 19 nt, Artificial Sequence
  Description of Artificial Sequence: Synthetic oligonucleotide
  Sense strand starting at position 2139 of SEQ ID NO: 1242618
gugucuuugugauaacaag

SEQ ID NO: 1361259 - RNA, 19 nt, Artificial Sequence
  Description of Artificial Sequence: Synthetic oligonucleotide
  Antisense strand to SEQ ID NO: 1361258
cuuguuaucacaaagacac

SEQ ID NO: 1361260 - RNA, 19 nt, Artificial Sequence
  Description of Artificial Sequence: Synthetic oligonucleotide
  Sense strand starting at position 2145 of SEQ ID NO: 1242618
uugugauaacaagauguuc

SEQ ID NO: 1361261 - RNA, 19 nt, Artificial Sequence
  Description of Artificial Sequence: Synthetic oligonucleotide
  Antisense strand to SEQ ID NO: 1361260
gaacaucuuguuaucacaa

SEQ ID NO: 1361262 - RNA, 19 nt, Artificial Sequence
  Description of Artificial Sequence: Synthetic oligonucleotide
  Sense strand starting at position 2261 of SEQ ID NO: 1242618
cugcaucucagaugggcaa

SEQ ID NO: 1361263 - RNA, 19 nt, Artificial Sequence
  Description of Artificial Sequence: Synthetic oligonucleotide
  Antisense strand to SEQ ID NO: 1361262
uugcccaucugagaugcag

SEQ ID NO: 1361264 - RNA, 19 nt, Artificial Sequence
  Description of Artificial Sequence: Synthetic oligonucleotide
  Sense strand starting at position 2467 of SEQ ID NO: 1242618
gcgucuuggcacaggugua

SEQ ID NO: 1361265 - RNA, 19 nt, Artificial Sequence
  Description of Artificial Sequence: Synthetic oligonucleotide
  Antisense strand to SEQ ID NO: 1361264
uacaccugugccaagacgc

SEQ ID NO: 1361266 - RNA, 19 nt, Artificial Sequence
  Description of Artificial Sequence: Synthetic oligonucleotide
  Sense strand starting at position 2485 of SEQ ID NO: 1242618
acagaagacuuggcucauc

SEQ ID NO: 1361267 - RNA, 19 nt, Artificial Sequence
  Description of Artificial Sequence: Synthetic oligonucleotide
  Antisense strand to SEQ ID NO: 1361266
gaugagccaagucuucugu

SEQ ID NO: 1361268 - RNA, 19 nt, Artificial Sequence
  Description of Artificial Sequence: Synthetic oligonucleotide
  Sense strand starting at position 2624 of SEQ ID NO: 1242618
cugugaauggugggcauau

SEQ ID NO: 1361269 - RNA, 19 nt, Artificial Sequence
  Description of Artificial Sequence: Synthetic oligonucleotide
  Antisense strand to SEQ ID NO: 1361268
auaugcccaccauucacag

SEQ ID NO: 1361270 - RNA, 19 nt, Artificial Sequence
  Description of Artificial Sequence: Synthetic oligonucleotide
  Sense strand starting at position 2636 of SEQ ID NO: 1242618
ggcauaugcaucugucugu

SEQ ID NO: 1361271 - RNA, 19 nt, Artificial Sequence
  Description of Artificial Sequence: Synthetic oligonucleotide
  Antisense strand to SEQ ID NO: 1361270
acagacagaugcauaugcc

SEQ ID NO: 1361272 - RNA, 19 nt, Artificial Sequence
  Description of Artificial Sequence: Synthetic oligonucleotide
  Sense strand starting at position 2643 of SEQ ID NO: 1242618
gcaucugucugugaccagu

SEQ ID NO: 1361273 - RNA, 19 nt, Artificial Sequence
  Description of Artificial Sequence: Synthetic oligonucleotide
  Antisense strand to SEQ ID NO: 1361272
acuggucacagacagaugc

SEQ ID NO: 1361274 - RNA, 19 nt, Artificial Sequence
  Description of Artificial Sequence: Synthetic oligonucleotide
  Sense strand starting at position 2649 of SEQ ID NO: 1242618
gucugugaccaguacagga

SEQ ID NO: 1361275 - RNA, 19 nt, Artificial Sequence
  Description of Artificial Sequence: Synthetic oligonucleotide
  Antisense strand to SEQ ID NO: 1361274
uccuguacuggucacagac

SEQ ID NO: 1361276 - RNA, 19 nt, Artificial Sequence
  Description of Artificial Sequence: Synthetic oligonucleotide
  Sense strand starting at position 2747 of SEQ ID NO: 1242618
gggcccagacgugauguaa

SEQ ID NO: 1361277 - RNA, 19 nt, Artificial Sequence
  Description of Artificial Sequence: Synthetic oligonucleotide
  Antisense strand to SEQ ID NO: 1361276
uuacaucacgucugggccc

SEQ ID NO: 1361278 - RNA, 19 nt, Artificial Sequence
  Description of Artificial Sequence: Synthetic oligonucleotide
  Sense strand starting at position 3187 of SEQ ID NO: 1242618
gcaggcugucuaggaacaa

SEQ ID NO: 1361279 - RNA, 19 nt, Artificial Sequence
  Description of Artificial Sequence: Synthetic oligonucleotide
  Antisense strand to SEQ ID NO: 1361278
uuguuccuagacagccugc

SEQ ID NO: 1361280 - RNA, 19 nt, Artificial Sequence
  Description of Artificial Sequence: Synthetic oligonucleotide
  Sense strand starting at position 3188 of SEQ ID NO: 1242618
caggcugucuaggaacaaa

SEQ ID NO: 1361281 - RNA, 19 nt, Artificial Sequence
  Description of Artificial Sequence: Synthetic oligonucleotide
  Antisense strand to SEQ ID NO: 1361280
uuuguuccuagacagccug

SEQ ID NO: 1361282 - RNA, 19 nt, Artificial Sequence
  Description of Artificial Sequence: Synthetic oligonucleotide
  Sense strand starting at position 3418 of SEQ ID NO: 1242618
gcaggaaucucucccuggu

SEQ ID NO: 1361283 - RNA, 19 nt, Artificial Sequence
  Description of Artificial Sequence: Synthetic oligonucleotide
  Antisense strand to SEQ ID NO: 1361282
accagggagagauuccugc

SEQ ID NO: 1361284 - RNA, 19 nt, Artificial Sequence
  Description of Artificial Sequence: Synthetic oligonucleotide
  Sense strand starting at position 3857 of SEQ ID NO: 1242618
ggucuagugugucacuuua

SEQ ID NO: 1361285 - RNA, 19 nt, Artificial Sequence
  Description of Artificial Sequence: Synthetic oligonucleotide
  Antisense strand to SEQ ID NO: 1361284
uaaagugacacacuagacc

SEQ ID NO: 1361286 - RNA, 19 nt, Artificial Sequence
  Description of Artificial Sequence: Synthetic oligonucleotide
  Sense strand starting at position 3859 of SEQ ID NO: 1242618
ucuagugugucacuuuaaa

SEQ ID NO: 1361287 - RNA, 19 nt, Artificial Sequence
  Description of Artificial Sequence: Synthetic oligonucleotide
  Antisense strand to SEQ ID NO: 1361286
uuuaaagugacacacuaga

SEQ ID NO: 1361288 - RNA, 19 nt, Artificial Sequence
  Description of Artificial Sequence: Synthetic oligonucleotide
  Sense strand starting at position 32 of SEQ ID NO: 1242619
cugugaauggugggcauau

SEQ ID NO: 1361289 - RNA, 19 nt, Artificial Sequence
  Description of Artificial Sequence: Synthetic oligonucleotide
  Antisense strand to SEQ ID NO: 1361288
auaugcccaccauucacag

SEQ ID NO: 1361290 - RNA, 19 nt, Artificial Sequence
  Description of Artificial Sequence: Synthetic oligonucleotide
  Sense strand starting at position 44 of SEQ ID NO: 1242619
ggcauaugcaucugucugu

SEQ ID NO: 1361291 - RNA, 19 nt, Artificial Sequence
  Description of Artificial Sequence: Synthetic oligonucleotide
  Antisense strand to SEQ ID NO: 1361290
acagacagaugcauaugcc

SEQ ID NO: 1361292 - RNA, 19 nt, Artificial Sequence
  Description of Artificial Sequence: Synthetic oligonucleotide
  Sense strand starting at position 51 of SEQ ID NO: 1242619
gcaucugucugugaccagu

SEQ ID NO: 1361293 - RNA, 19 nt, Artificial Sequence
  Description of Artificial Sequence: Synthetic oligonucleotide
  Antisense strand to SEQ ID NO: 1361292
acuggucacagacagaugc

SEQ ID NO: 1361294 - RNA, 19 nt, Artificial Sequence
  Description of Artificial Sequence: Synthetic oligonucleotide
  Sense strand starting at position 57 of SEQ ID NO: 1242619
gucugugaccaguacagga

SEQ ID NO: 1361295 - RNA, 19 nt, Artificial Sequence
  Description of Artificial Sequence: Synthetic oligonucleotide
  Antisense strand to SEQ ID NO: 1361294
uccuguacuggucacagac

SEQ ID NO: 1361296 - RNA, 19 nt, Artificial Sequence
  Description of Artificial Sequence: Synthetic oligonucleotide
  Sense strand starting at position 155 of SEQ ID NO: 1242619
gggcccagacgugauguaa

SEQ ID NO: 1361297 - RNA, 19 nt, Artificial Sequence
  Description of Artificial Sequence: Synthetic oligonucleotide
  Antisense strand to SEQ ID NO: 1361296
uuacaucacgucugggccc

SEQ ID NO: 1361298 - RNA, 19 nt, Artificial Sequence
  Description of Artificial Sequence: Synthetic oligonucleotide
  Sense strand starting at position 595 of SEQ ID NO: 1242619
gcaggcugucuaggaacaa

SEQ ID NO: 1361299 - RNA, 19 nt, Artificial Sequence
  Description of Artificial Sequence: Synthetic oligonucleotide
  Antisense strand to SEQ ID NO: 1361298
uuguuccuagacagccugc

SEQ ID NO: 1361300 - RNA, 19 nt, Artificial Sequence
  Description of Artificial Sequence: Synthetic oligonucleotide
  Sense strand starting at position 596 of SEQ ID NO: 1242619
caggcugucuaggaacaaa

SEQ ID NO: 1361301 - RNA, 19 nt, Artificial Sequence
  Description of Artificial Sequence: Synthetic oligonucleotide
  Antisense strand to SEQ ID NO: 1361300
uuuguuccuagacagccug

SEQ ID NO: 1361302 - RNA, 19 nt, Artificial Sequence
  Description of Artificial Sequence: Synthetic oligonucleotide
  Sense strand starting at position 826 of SEQ ID NO: 1242619
gcaggaaucucucccuggu

SEQ ID NO: 1361303 - RNA, 19 nt, Artificial Sequence
  Description of Artificial Sequence: Synthetic oligonucleotide
  Antisense strand to SEQ ID NO: 1361302
accagggagagauuccugc

SEQ ID NO: 1361304 - RNA, 19 nt, Artificial Sequence
  Description of Artificial Sequence: Synthetic oligonucleotide
  Sense strand starting at position 1265 of SEQ ID NO: 1242619
ggucuagugugucacuuua

SEQ ID NO: 1361305 - RNA, 19 nt, Artificial Sequence
  Description of Artificial Sequence: Synthetic oligonucleotide
  Antisense strand to SEQ ID NO: 1361304
uaaagugacacacuagacc

SEQ ID NO: 1361306 - RNA, 19 nt, Artificial Sequence
  Description of Artificial Sequence: Synthetic oligonucleotide
  Sense strand starting at position 1267 of SEQ ID NO: 1242619
ucuagugugucacuuuaaa

SEQ ID NO: 1361307 - RNA, 19 nt, Artificial Sequence
  Description of Artificial Sequence: Synthetic oligonucleotide
  Antisense strand to SEQ ID NO: 1361306
uuuaaagugacacacuaga

SEQ ID NO: 1361308 - RNA, 19 nt, Artificial Sequence
  Description of Artificial Sequence: Synthetic oligonucleotide
  Sense strand starting at position 2382 of SEQ ID NO: 1242619
ggaugcguccugcagggau

SEQ ID NO: 1361309 - RNA, 19 nt, Artificial Sequence
  Description of Artificial Sequence: Synthetic oligonucleotide
  Antisense strand to SEQ ID NO: 1361308
aucccugcaggacgcaucc

SEQ ID NO: 1361310 - RNA, 19 nt, Artificial Sequence
  Description of Artificial Sequence: Synthetic oligonucleotide
  Sense strand starting at position 3047 of SEQ ID NO: 1242619
cuuugagaaguccgugcua

SEQ ID NO: 1361311 - RNA, 19 nt, Artificial Sequence
  Description of Artificial Sequence: Synthetic oligonucleotide
  Antisense strand to SEQ ID NO: 1361310
uagcacggacuucucaaag

SEQ ID NO: 1361312 - RNA, 19 nt, Artificial Sequence
  Description of Artificial Sequence: Synthetic oligonucleotide
  Sense strand starting at position 3049 of SEQ ID NO: 1242619
uugagaaguccgugcuaag

SEQ ID NO: 1361313 - RNA, 19 nt, Artificial Sequence
  Description of Artificial Sequence: Synthetic oligonucleotide
  Antisense strand to SEQ ID NO: 1361312
cuuagcacggacuucucaa

SEQ ID NO: 1361314 - RNA, 19 nt, Artificial Sequence
  Description of Artificial Sequence: Synthetic oligonucleotide
  Sense strand starting at position 3052 of SEQ ID NO: 1242619
agaaguccgugcuaagcau

SEQ ID NO: 1361315 - RNA, 19 nt, Artificial Sequence
  Description of Artificial Sequence: Synthetic oligonucleotide
  Antisense strand to SEQ ID NO: 1361314
augcuuagcacggacuucu

SEQ ID NO: 1361316 - RNA, 19 nt, Artificial Sequence
  Description of Artificial Sequence: Synthetic oligonucleotide
  Sense strand starting at position 3084 of SEQ ID NO: 1242619
gccugaggcucucagacuu

SEQ ID NO: 1361317 - RNA, 19 nt, Artificial Sequence
  Description of Artificial Sequence: Synthetic oligonucleotide
  Antisense strand to SEQ ID NO: 1361316
aagucugagagccucaggc

SEQ ID NO: 1361318 - RNA, 19 nt, Artificial Sequence
  Description of Artificial Sequence: Synthetic oligonucleotide
  Sense strand starting at position 3191 of SEQ ID NO: 1242619
guggucagacuuuggaguu

SEQ ID NO: 1361319 - RNA, 19 nt, Artificial Sequence
  Description of Artificial Sequence: Synthetic oligonucleotide
  Antisense strand to SEQ ID NO: 1361318
aacuccaaagucugaccac

SEQ ID NO: 1361320 - RNA, 19 nt, Artificial Sequence
  Description of Artificial Sequence: Synthetic oligonucleotide
  Sense strand starting at position 3670 of SEQ ID NO: 1242619
ggugaucacacuggcuuua

SEQ ID NO: 1361321 - RNA, 19 nt, Artificial Sequence
  Description of Artificial Sequence: Synthetic oligonucleotide
  Antisense strand to SEQ ID NO: 1361320
uaaagccagugugaucacc

SEQ ID NO: 1361322 - RNA, 19 nt, Artificial Sequence
  Description of Artificial Sequence: Synthetic oligonucleotide
  Sense strand starting at position 3892 of SEQ ID NO: 1242619
gugauagguugagucccaa

SEQ ID NO: 1361323 - RNA, 19 nt, Artificial Sequence
  Description of Artificial Sequence: Synthetic oligonucleotide
  Antisense strand to SEQ ID NO: 1361322
uugggacucaaccuaucac

SEQ ID NO: 1361324 - RNA, 19 nt, Artificial Sequence
  Description of Artificial Sequence: Synthetic oligonucleotide
  Sense strand starting at position 3896 of SEQ ID NO: 1242619
uagguugagucccaaacca

SEQ ID NO: 1361325 - RNA, 19 nt, Artificial Sequence
  Description of Artificial Sequence: Synthetic oligonucleotide
  Antisense strand to SEQ ID NO: 1361324
ugguuugggacucaaccua

SEQ ID NO: 1361326 - RNA, 19 nt, Artificial Sequence
  Description of Artificial Sequence: Synthetic oligonucleotide
  Sense strand starting at position 3977 of SEQ ID NO: 1242619
uggugaggagucgaggaau

SEQ ID NO: 1361327 - RNA, 19 nt, Artificial Sequence
  Description of Artificial Sequence: Synthetic oligonucleotide
  Antisense strand to SEQ ID NO: 1361326
auuccucgacuccucacca

SEQ ID NO: 1361328 - RNA, 19 nt, Artificial Sequence
  Description of Artificial Sequence: Synthetic oligonucleotide
  Sense strand starting at position 3979 of SEQ ID NO: 1242619
gugaggagucgaggaauga

SEQ ID NO: 1361329 - RNA, 19 nt, Artificial Sequence
  Description of Artificial Sequence: Synthetic oligonucleotide
  Antisense strand to SEQ ID NO: 1361328
ucauuccucgacuccucac

SEQ ID NO: 1361330 - RNA, 19 nt, Artificial Sequence
  Description of Artificial Sequence: Synthetic oligonucleotide
  Sense strand starting at position 324 of SEQ ID NO: 1242620
ggagcuguugccagggcaa

SEQ ID NO: 1361331 - RNA, 19 nt, Artificial Sequence
  Description of Artificial Sequence: Synthetic oligonucleotide
  Antisense strand to SEQ ID NO: 1361330
uugcccuggcaacagcucc

SEQ ID NO: 1361332 - RNA, 19 nt, Artificial Sequence
  Description of Artificial Sequence: Synthetic oligonucleotide
  Sense strand starting at position 348 of SEQ ID NO: 1242620
gcggcaugugcgugugaca

SEQ ID NO: 1361333 - RNA, 19 nt, Artificial Sequence
  Description of Artificial Sequence: Synthetic oligonucleotide
  Antisense strand to SEQ ID NO: 1361332
ugucacacgcacaugccgc

SEQ ID NO: 1361334 - RNA, 19 nt, Artificial Sequence
  Description of Artificial Sequence: Synthetic oligonucleotide
  Sense strand starting at position 379 of SEQ ID NO: 1242620
gcucgcaguccuggagaca

SEQ ID NO: 1361335 - RNA, 19 nt, Artificial Sequence
  Description of Artificial Sequence: Synthetic oligonucleotide
  Antisense strand to SEQ ID NO: 1361334
ugucuccaggacugcgagc

SEQ ID NO: 1361336 - RNA, 19 nt, Artificial Sequence
  Description of Artificial Sequence: Synthetic oligonucleotide
  Sense strand starting at position 380 of SEQ ID NO: 1242620
cucgcaguccuggagacaa

SEQ ID NO: 1361337 - RNA, 19 nt, Artificial Sequence
  Description of Artificial Sequence: Synthetic oligonucleotide
  Antisense strand to SEQ ID NO: 1361336
uugucuccaggacugcgag

SEQ ID NO: 1361338 - RNA, 19 nt, Artificial Sequence
  Description of Artificial Sequence: Synthetic oligonucleotide
  Sense strand starting at position 382 of SEQ ID NO: 1242620
cgcaguccuggagacaaau

SEQ ID NO: 1361339 - RNA, 19 nt, Artificial Sequence
  Description of Artificial Sequence: Synthetic oligonucleotide
  Antisense strand to SEQ ID NO: 1361338
auuugucuccaggacugcg

SEQ ID NO: 1361340 - RNA, 19 nt, Artificial Sequence
  Description of Artificial Sequence: Synthetic oligonucleotide
  Sense strand starting at position 444 of SEQ ID NO: 1242620
gggugucuuugugauaaca

SEQ ID NO: 1361341 - RNA, 19 nt, Artificial Sequence
  Description of Artificial Sequence: Synthetic oligonucleotide
  Antisense strand to SEQ ID NO: 1361340
uguuaucacaaagacaccc

SEQ ID NO: 1361342 - RNA, 19 nt, Artificial Sequence
  Description of Artificial Sequence: Synthetic oligonucleotide
  Sense strand starting at position 446 of SEQ ID NO: 1242620
gugucuuugugauaacaag

SEQ ID NO: 1361343 - RNA, 19 nt, Artificial Sequence
  Description of Artificial Sequence: Synthetic oligonucleotide
  Antisense strand to SEQ ID NO: 1361342
cuuguuaucacaaagacac

SEQ ID NO: 1361344 - RNA, 19 nt, Artificial Sequence
  Description of Artificial Sequence: Synthetic oligonucleotide
  Sense strand starting at position 452 of SEQ ID NO: 1242620
uugugauaacaagauguuc

SEQ ID NO: 1361345 - RNA, 19 nt, Artificial Sequence
  Description of Artificial Sequence: Synthetic oligonucleotide
  Antisense strand to SEQ ID NO: 1361344
gaacaucuuguuaucacaa

SEQ ID NO: 1361346 - RNA, 19 nt, Artificial Sequence
  Description of Artificial Sequence: Synthetic oligonucleotide
  Sense strand starting at position 568 of SEQ ID NO: 1242620
cugcaucucagaugggcaa

SEQ ID NO: 1361347 - RNA, 19 nt, Artificial Sequence
  Description of Artificial Sequence: Synthetic oligonucleotide
  Antisense strand to SEQ ID NO: 1361346
uugcccaucugagaugcag

SEQ ID NO: 1361348 - RNA, 19 nt, Artificial Sequence
  Description of Artificial Sequence: Synthetic oligonucleotide
  Sense strand starting at position 774 of SEQ ID NO: 1242620
gcgucuuggcacaggugua

SEQ ID NO: 1361349 - RNA, 19 nt, Artificial Sequence
  Description of Artificial Sequence: Synthetic oligonucleotide
  Antisense strand to SEQ ID NO: 1361348
uacaccugugccaagacgc

SEQ ID NO: 1361350 - RNA, 19 nt, Artificial Sequence
  Description of Artificial Sequence: Synthetic oligonucleotide
  Sense strand starting at position 792 of SEQ ID NO: 1242620
acagaagacuuggcucauc

SEQ ID NO: 1361351 - RNA, 19 nt, Artificial Sequence
  Description of Artificial Sequence: Synthetic oligonucleotide
  Antisense strand to SEQ ID NO: 1361350
gaugagccaagucuucugu

SEQ ID NO: 1361352 - RNA, 19 nt, Artificial Sequence
  Description of Artificial Sequence: Synthetic oligonucleotide
  Sense strand starting at position 931 of SEQ ID NO: 1242620
cugugaauggugggcauau

SEQ ID NO: 1361353 - RNA, 19 nt, Artificial Sequence
  Description of Artificial Sequence: Synthetic oligonucleotide
  Antisense strand to SEQ ID NO: 1361352
auaugcccaccauucacag

SEQ ID NO: 1361354 - RNA, 19 nt, Artificial Sequence
  Description of Artificial Sequence: Synthetic oligonucleotide
  Sense strand starting at position 943 of SEQ ID NO: 1242620
ggcauaugcaucugucugu

SEQ ID NO: 1361355 - RNA, 19 nt, Artificial Sequence
  Description of Artificial Sequence: Synthetic oligonucleotide
  Antisense strand to SEQ ID NO: 1361354
acagacagaugcauaugcc

SEQ ID NO: 1361356 - RNA, 19 nt, Artificial Sequence
  Description of Artificial Sequence: Synthetic oligonucleotide
  Sense strand starting at position 950 of SEQ ID NO: 1242620
gcaucugucugugaccagu

SEQ ID NO: 1361357 - RNA, 19 nt, Artificial Sequence
  Description of Artificial Sequence: Synthetic oligonucleotide
  Antisense strand to SEQ ID NO: 1361356
acuggucacagacagaugc

SEQ ID NO: 1361358 - RNA, 19 nt, Artificial Sequence
  Description of Artificial Sequence: Synthetic oligonucleotide
  Sense strand starting at position 956 of SEQ ID NO: 1242620
gucugugaccaguacagga

SEQ ID NO: 1361359 - RNA, 19 nt, Artificial Sequence
  Description of Artificial Sequence: Synthetic oligonucleotide
  Antisense strand to SEQ ID NO: 1361358
uccuguacuggucacagac

SEQ ID NO: 1361360 - RNA, 19 nt, Artificial Sequence
  Description of Artificial Sequence: Synthetic oligonucleotide
  Sense strand starting at position 1054 of SEQ ID NO: 1242620
gggcccagacgugauguaa

SEQ ID NO: 1361361 - RNA, 19 nt, Artificial Sequence
  Description of Artificial Sequence: Synthetic oligonucleotide
  Antisense strand to SEQ ID NO: 1361360
uuacaucacgucugggccc

SEQ ID NO: 1361362 - RNA, 19 nt, Artificial Sequence
  Description of Artificial Sequence: Synthetic oligonucleotide
  Sense strand starting at position 1494 of SEQ ID NO: 1242620
gcaggcugucuaggaacaa

SEQ ID NO: 1361363 - RNA, 19 nt, Artificial Sequence
  Description of Artificial Sequence: Synthetic oligonucleotide
  Antisense strand to SEQ ID NO: 1361362
uuguuccuagacagccugc

SEQ ID NO: 1361364 - RNA, 19 nt, Artificial Sequence
  Description of Artificial Sequence: Synthetic oligonucleotide
  Sense strand starting at position 1495 of SEQ ID NO: 1242620
caggcugucuaggaacaaa

SEQ ID NO: 1361365 - RNA, 19 nt, Artificial Sequence
  Description of Artificial Sequence: Synthetic oligonucleotide
  Antisense strand to SEQ ID NO: 1361364
uuuguuccuagacagccug

SEQ ID NO: 1361366 - RNA, 19 nt, Artificial Sequence
  Description of Artificial Sequence: Synthetic oligonucleotide
  Sense strand starting at position 1725 of SEQ ID NO: 1242620
gcaggaaucucucccuggu

SEQ ID NO: 1361367 - RNA, 19 nt, Artificial Sequence
  Description of Artificial Sequence: Synthetic oligonucleotide
  Antisense strand to SEQ ID NO: 1361366
accagggagagauuccugc

SEQ ID NO: 1361368 - RNA, 19 nt, Artificial Sequence
  Description of Artificial Sequence: Synthetic oligonucleotide
  Sense strand starting at position 2164 of SEQ ID NO: 1242620
ggucuagugugucacuuua

SEQ ID NO: 1361369 - RNA, 19 nt, Artificial Sequence
  Description of Artificial Sequence: Synthetic oligonucleotide
  Antisense strand to SEQ ID NO: 1361368
uaaagugacacacuagacc

SEQ ID NO: 1361370 - RNA, 19 nt, Artificial Sequence
  Description of Artificial Sequence: Synthetic oligonucleotide
  Sense strand starting at position 2166 of SEQ ID NO: 1242620
ucuagugugucacuuuaaa

SEQ ID NO: 1361371 - RNA, 19 nt, Artificial Sequence
  Description of Artificial Sequence: Synthetic oligonucleotide
  Antisense strand to SEQ ID NO: 1361370
uuuaaagugacacacuaga

SEQ ID NO: 1361372 - RNA, 19 nt, Artificial Sequence
  Description of Artificial Sequence: Synthetic oligonucleotide
  Sense strand starting at position 3281 of SEQ ID NO: 1242620
ggaugcguccugcagggau

SEQ ID NO: 1361373 - RNA, 19 nt, Artificial Sequence
  Description of Artificial Sequence: Synthetic oligonucleotide
  Antisense strand to SEQ ID NO: 1361372
aucccugcaggacgcaucc

SEQ ID NO: 1361374 - RNA, 19 nt, Artificial Sequence
  Description of Artificial Sequence: Synthetic oligonucleotide
  Sense strand starting at position 3946 of SEQ ID NO: 1242620
cuuugagaaguccgugcua

SEQ ID NO: 1361375 - RNA, 19 nt, Artificial Sequence
  Description of Artificial Sequence: Synthetic oligonucleotide
  Antisense strand to SEQ ID NO: 1361374
uagcacggacuucucaaag

SEQ ID NO: 1361376 - RNA, 19 nt, Artificial Sequence
  Description of Artificial Sequence: Synthetic oligonucleotide
  Sense strand starting at position 3948 of SEQ ID NO: 1242620
uugagaaguccgugcuaag

SEQ ID NO: 1361377 - RNA, 19 nt, Artificial Sequence
  Description of Artificial Sequence: Synthetic oligonucleotide
  Antisense strand to SEQ ID NO: 1361376
cuuagcacggacuucucaa

SEQ ID NO: 1361378 - RNA, 19 nt, Artificial Sequence
  Description of Artificial Sequence: Synthetic oligonucleotide
  Sense strand starting at position 3951 of SEQ ID NO: 1242620
agaaguccgugcuaagcau

SEQ ID NO: 1361379 - RNA, 19 nt, Artificial Sequence
  Description of Artificial Sequence: Synthetic oligonucleotide
  Antisense strand to SEQ ID NO: 1361378
augcuuagcacggacuucu

SEQ ID NO: 1361380 - RNA, 19 nt, Artificial Sequence
  Description of Artificial Sequence: Synthetic oligonucleotide
  Sense strand starting at position 3983 of SEQ ID NO: 1242620
gccugaggcucucagacuu

SEQ ID NO: 1361381 - RNA, 19 nt, Artificial Sequence
  Description of Artificial Sequence: Synthetic oligonucleotide
  Antisense strand to SEQ ID NO: 1361380
aagucugagagccucaggc

SEQ ID NO: 1361382 - RNA, 19 nt, Artificial Sequence
  Description of Artificial Sequence: Synthetic oligonucleotide
  Sense strand starting at position 28 of SEQ ID NO: 1242621
gggauccuaucucaagaaa

SEQ ID NO: 1361383 - RNA, 19 nt, Artificial Sequence
  Description of Artificial Sequence: Synthetic oligonucleotide
  Antisense strand to SEQ ID NO: 1361382
uuucuugagauaggauccc

SEQ ID NO: 1361384 - RNA, 19 nt, Artificial Sequence
  Description of Artificial Sequence: Synthetic oligonucleotide
  Sense strand starting at position 66 of SEQ ID NO: 1242621
uacucagagcuguggagaa

SEQ ID NO: 1361385 - RNA, 19 nt, Artificial Sequence
  Description of Artificial Sequence: Synthetic oligonucleotide
  Antisense strand to SEQ ID NO: 1361384
uucuccacagcucugagua

SEQ ID NO: 1361386 - RNA, 19 nt, Artificial Sequence
  Description of Artificial Sequence: Synthetic oligonucleotide
  Sense strand starting at position 107 of SEQ ID NO: 1242621
auguaaaccucuuugaaga

SEQ ID NO: 1361387 - RNA, 19 nt, Artificial Sequence
  Description of Artificial Sequence: Synthetic oligonucleotide
  Antisense strand to SEQ ID NO: 1361386
ucuucaaagagguuuacau

SEQ ID NO: 1361388 - RNA, 19 nt, Artificial Sequence
  Description of Artificial Sequence: Synthetic oligonucleotide
  Sense strand starting at position 108 of SEQ ID NO: 1242621
uguaaaccucuuugaagaa

SEQ ID NO: 1361389 - RNA, 19 nt, Artificial Sequence
  Description of Artificial Sequence: Synthetic oligonucleotide
  Antisense strand to SEQ ID NO: 1361388
uucuucaaagagguuuaca

SEQ ID NO: 1361390 - RNA, 19 nt, Artificial Sequence
  Description of Artificial Sequence: Synthetic oligonucleotide
  Sense strand starting at position 184 of SEQ ID NO: 1242621
guuccuauuguauacauua

SEQ ID NO: 1361391 - RNA, 19 nt, Artificial Sequence
  Description of Artificial Sequence: Synthetic oligonucleotide
  Antisense strand to SEQ ID NO: 1361390
uaauguauacaauaggaac

SEQ ID NO: 1361392 - RNA, 19 nt, Artificial Sequence
  Description of Artificial Sequence: Synthetic oligonucleotide
  Sense strand starting at position 271 of SEQ ID NO: 1242621
gaacccuggcucuguaaau

SEQ ID NO: 1361393 - RNA, 19 nt, Artificial Sequence
  Description of Artificial Sequence: Synthetic oligonucleotide
  Antisense strand to SEQ ID NO: 1361392
auuuacagagccaggguuc

SEQ ID NO: 1361394 - RNA, 19 nt, Artificial Sequence
  Description of Artificial Sequence: Synthetic oligonucleotide
  Sense strand starting at position 282 of SEQ ID NO: 1242621
cuguaaaucugagcaaguc

SEQ ID NO: 1361395 - RNA, 19 nt, Artificial Sequence
  Description of Artificial Sequence: Synthetic oligonucleotide
  Antisense strand to SEQ ID NO: 1361394
gacuugcucagauuuacag

SEQ ID NO: 1361396 - RNA, 19 nt, Artificial Sequence
  Description of Artificial Sequence: Synthetic oligonucleotide
  Sense strand starting at position 292 of SEQ ID NO: 1242621
gagcaagucccuuaguguc

SEQ ID NO: 1361397 - RNA, 19 nt, Artificial Sequence
  Description of Artificial Sequence: Synthetic oligonucleotide
  Antisense strand to SEQ ID NO: 1361396
gacacuaagggacuugcuc

SEQ ID NO: 1361398 - RNA, 19 nt, Artificial Sequence
  Description of Artificial Sequence: Synthetic oligonucleotide
  Sense strand starting at position 764 of SEQ ID NO: 1242621
uucuucuagcacuggauau

SEQ ID NO: 1361399 - RNA, 19 nt, Artificial Sequence
  Description of Artificial Sequence: Synthetic oligonucleotide
  Antisense strand to SEQ ID NO: 1361398
auauccagugcuagaagaa

SEQ ID NO: 1361400 - RNA, 19 nt, Artificial Sequence
  Description of Artificial Sequence: Synthetic oligonucleotide
  Sense strand starting at position 785 of SEQ ID NO: 1242621
gcgagcugcguguuaaaug

SEQ ID NO: 1361401 - RNA, 19 nt, Artificial Sequence
  Description of Artificial Sequence: Synthetic oligonucleotide
  Antisense strand to SEQ ID NO: 1361400
cauuuaacacgcagcucgc

SEQ ID NO: 1361402 - RNA, 19 nt, Artificial Sequence
  Description of Artificial Sequence: Synthetic oligonucleotide
  Sense strand starting at position 793 of SEQ ID NO: 1242621
cguguuaaaugaccagauc

SEQ ID NO: 1361403 - RNA, 19 nt, Artificial Sequence
  Description of Artificial Sequence: Synthetic oligonucleotide
  Antisense strand to SEQ ID NO: 1361402
gaucuggucauuuaacacg

SEQ ID NO: 1361404 - RNA, 19 nt, Artificial Sequence
  Description of Artificial Sequence: Synthetic oligonucleotide
  Sense strand starting at position 824 of SEQ ID NO: 1242621
gacguuuccugagcuuacu

SEQ ID NO: 1361405 - RNA, 19 nt, Artificial Sequence
  Description of Artificial Sequence: Synthetic oligonucleotide
  Antisense strand to SEQ ID NO: 1361404
aguaagcucaggaaacguc

SEQ ID NO: 1361406 - RNA, 19 nt, Artificial Sequence
  Description of Artificial Sequence: Synthetic oligonucleotide
  Sense strand starting at position 830 of SEQ ID NO: 1242621
uccugagcuuacucagaac

SEQ ID NO: 1361407 - RNA, 19 nt, Artificial Sequence
  Description of Artificial Sequence: Synthetic oligonucleotide
  Antisense strand to SEQ ID NO: 1361406
guucugaguaagcucagga

SEQ ID NO: 1361408 - RNA, 19 nt, Artificial Sequence
  Description of Artificial Sequence: Synthetic oligonucleotide
  Sense strand starting at position 973 of SEQ ID NO: 1242621
gaguacauuccugggcaga

SEQ ID NO: 1361409 - RNA, 19 nt, Artificial Sequence
  Description of Artificial Sequence: Synthetic oligonucleotide
  Antisense strand to SEQ ID NO: 1361408
ucugcccaggaauguacuc

SEQ ID NO: 1361410 - RNA, 19 nt, Artificial Sequence
  Description of Artificial Sequence: Synthetic oligonucleotide
  Sense strand starting at position 974 of SEQ ID NO: 1242621
aguacauuccugggcagaa

SEQ ID NO: 1361411 - RNA, 19 nt, Artificial Sequence
  Description of Artificial Sequence: Synthetic oligonucleotide
  Antisense strand to SEQ ID NO: 1361410
uucugcccaggaauguacu

SEQ ID NO: 1361412 - RNA, 19 nt, Artificial Sequence
  Description of Artificial Sequence: Synthetic oligonucleotide
  Sense strand starting at position 975 of SEQ ID NO: 1242621
guacauuccugggcagaac

SEQ ID NO: 1361413 - RNA, 19 nt, Artificial Sequence
  Description of Artificial Sequence: Synthetic oligonucleotide
  Antisense strand to SEQ ID NO: 1361412
guucugcccaggaauguac

SEQ ID NO: 1361414 - RNA, 19 nt, Artificial Sequence
  Description of Artificial Sequence: Synthetic oligonucleotide
  Sense strand starting at position 1114 of SEQ ID NO: 1242621
guucuucagggaugaugua

SEQ ID NO: 1361415 - RNA, 19 nt, Artificial Sequence
  Description of Artificial Sequence: Synthetic oligonucleotide
  Antisense strand to SEQ ID NO: 1361414
uacaucaucccugaagaac

SEQ ID NO: 1361416 - RNA, 19 nt, Artificial Sequence
  Description of Artificial Sequence: Synthetic oligonucleotide
  Sense strand starting at position 1155 of SEQ ID NO: 1242621
ccuaccaucucaucaguga

SEQ ID NO: 1361417 - RNA, 19 nt, Artificial Sequence
  Description of Artificial Sequence: Synthetic oligonucleotide
  Antisense strand to SEQ ID NO: 1361416
ucacugaugagaugguagg

SEQ ID NO: 1361418 - RNA, 19 nt, Artificial Sequence
  Description of Artificial Sequence: Synthetic oligonucleotide
  Sense strand starting at position 1226 of SEQ ID NO: 1242621
gauggaaugucaucuacuu

SEQ ID NO: 1361419 - RNA, 19 nt, Artificial Sequence
  Description of Artificial Sequence: Synthetic oligonucleotide
  Antisense strand to SEQ ID NO: 1361418
aaguagaugacauuccauc

SEQ ID NO: 1361420 - RNA, 19 nt, Artificial Sequence
  Description of Artificial Sequence: Synthetic oligonucleotide
  Sense strand starting at position 1287 of SEQ ID NO: 1242621
aggacuagaucacagaaau

SEQ ID NO: 1361421 - RNA, 19 nt, Artificial Sequence
  Description of Artificial Sequence: Synthetic oligonucleotide
  Antisense strand to SEQ ID NO: 1361420
auuucugugaucuaguccu

SEQ ID NO: 1361422 - RNA, 19 nt, Artificial Sequence
  Description of Artificial Sequence: Synthetic oligonucleotide
  Sense strand starting at position 1298 of SEQ ID NO: 1242621
acagaaaucgcacaaacgu

SEQ ID NO: 1361423 - RNA, 19 nt, Artificial Sequence
  Description of Artificial Sequence: Synthetic oligonucleotide
  Antisense strand to SEQ ID NO: 1361422
acguuugugcgauuucugu

SEQ ID NO: 1361424 - RNA, 19 nt, Artificial Sequence
  Description of Artificial Sequence: Synthetic oligonucleotide
  Sense strand starting at position 2228 of SEQ ID NO: 1242621
ugagaacaaucaccucagu

SEQ ID NO: 1361425 - RNA, 19 nt, Artificial Sequence
  Description of Artificial Sequence: Synthetic oligonucleotide
  Antisense strand to SEQ ID NO: 1361424
acugaggugauuguucuca

SEQ ID NO: 1361426 - RNA, 19 nt, Artificial Sequence
  Description of Artificial Sequence: Synthetic oligonucleotide
  Sense strand starting at position 2262 of SEQ ID NO: 1242621
uuugcaucuucuuugagac

SEQ ID NO: 1361427 - RNA, 19 nt, Artificial Sequence
  Description of Artificial Sequence: Synthetic oligonucleotide
  Antisense strand to SEQ ID NO: 1361426
gucucaaagaagaugcaaa

SEQ ID NO: 1361428 - RNA, 19 nt, Artificial Sequence
  Description of Artificial Sequence: Synthetic oligonucleotide
  Sense strand starting at position 2269 of SEQ ID NO: 1242621
cuucuuugagacggaauga

SEQ ID NO: 1361429 - RNA, 19 nt, Artificial Sequence
  Description of Artificial Sequence: Synthetic oligonucleotide
  Antisense strand to SEQ ID NO: 1361428
ucauuccgucucaaagaag

SEQ ID NO: 1361430 - RNA, 19 nt, Artificial Sequence
  Description of Artificial Sequence: Synthetic oligonucleotide
  Sense strand starting at position 2279 of SEQ ID NO: 1242621
acggaaugaauacgcauua

SEQ ID NO: 1361431 - RNA, 19 nt, Artificial Sequence
  Description of Artificial Sequence: Synthetic oligonucleotide
  Antisense strand to SEQ ID NO: 1361430
uaaugcguauucauuccgu

SEQ ID NO: 1361432 - RNA, 19 nt, Artificial Sequence
  Description of Artificial Sequence: Synthetic oligonucleotide
  Sense strand starting at position 2451 of SEQ ID NO: 1242621
ugggacuuguaguuacgau

SEQ ID NO: 1361433 - RNA, 19 nt, Artificial Sequence
  Description of Artificial Sequence: Synthetic oligonucleotide
  Antisense strand to SEQ ID NO: 1361432
aucguaacuacaaguccca

SEQ ID NO: 1361434 - RNA, 19 nt, Artificial Sequence
  Description of Artificial Sequence: Synthetic oligonucleotide
  Sense strand starting at position 2452 of SEQ ID NO: 1242621
gggacuuguaguuacgaug

SEQ ID NO: 1361435 - RNA, 19 nt, Artificial Sequence
  Description of Artificial Sequence: Synthetic oligonucleotide
  Antisense strand to SEQ ID NO: 1361434
caucguaacuacaaguccc

SEQ ID NO: 1361436 - RNA, 19 nt, Artificial Sequence
  Description of Artificial Sequence: Synthetic oligonucleotide
  Sense strand starting at position 2649 of SEQ ID NO: 1242621
ggucuuagauaaguccuau

SEQ ID NO: 1361437 - RNA, 19 nt, Artificial Sequence
  Description of Artificial Sequence: Synthetic oligonucleotide
  Antisense strand to SEQ ID NO: 1361436
auaggacuuaucuaagacc

SEQ ID NO: 1361438 - RNA, 19 nt, Artificial Sequence
  Description of Artificial Sequence: Synthetic oligonucleotide
  Sense strand starting at position 2991 of SEQ ID NO: 1242621
aagugaugacgugaaugug

SEQ ID NO: 1361439 - RNA, 19 nt, Artificial Sequence
  Description of Artificial Sequence: Synthetic oligonucleotide
  Antisense strand to SEQ ID NO: 1361438
cacauucacgucaucacuu

SEQ ID NO: 1361440 - RNA, 19 nt, Artificial Sequence
  Description of Artificial Sequence: Synthetic oligonucleotide
  Sense strand starting at position 3006 of SEQ ID NO: 1242621
ugugcacacguagaauaaa

SEQ ID NO: 1361441 - RNA, 19 nt, Artificial Sequence
  Description of Artificial Sequence: Synthetic oligonucleotide
  Antisense strand to SEQ ID NO: 1361440
uuuauucuacgugugcaca

SEQ ID NO: 1361442 - RNA, 19 nt, Artificial Sequence
  Description of Artificial Sequence: Synthetic oligonucleotide
  Sense strand starting at position 3017 of SEQ ID NO: 1242621
agaauaaaugugcaaaugu

SEQ ID NO: 1361443 - RNA, 19 nt, Artificial Sequence
  Description of Artificial Sequence: Synthetic oligonucleotide
  Antisense strand to SEQ ID NO: 1361442
acauuugcacauuuauucu

SEQ ID NO: 1361444 - RNA, 19 nt, Artificial Sequence
  Description of Artificial Sequence: Synthetic oligonucleotide
  Sense strand starting at position 3035 of SEQ ID NO: 1242621
ugcguuuguggguaaucac

SEQ ID NO: 1361445 - RNA, 19 nt, Artificial Sequence
  Description of Artificial Sequence: Synthetic oligonucleotide
  Antisense strand to SEQ ID NO: 1361444
gugauuacccacaaacgca

SEQ ID NO: 1361446 - RNA, 19 nt, Artificial Sequence
  Description of Artificial Sequence: Synthetic oligonucleotide
  Sense strand starting at position 3092 of SEQ ID NO: 1242621
ugucauuccugguuaucuc

SEQ ID NO: 1361447 - RNA, 19 nt, Artificial Sequence
  Description of Artificial Sequence: Synthetic oligonucleotide
  Antisense strand to SEQ ID NO: 1361446
gagauaaccaggaaugaca

SEQ ID NO: 1361448 - RNA, 19 nt, Artificial Sequence
  Description of Artificial Sequence: Synthetic oligonucleotide
  Sense strand starting at position 3122 of SEQ ID NO: 1242621
cuaggauuaccuugccuuu

SEQ ID NO: 1361449 - RNA, 19 nt, Artificial Sequence
  Description of Artificial Sequence: Synthetic oligonucleotide
  Antisense strand to SEQ ID NO: 1361448
aaaggcaagguaauccuag

SEQ ID NO: 1361450 - RNA, 19 nt, Artificial Sequence
  Description of Artificial Sequence: Synthetic oligonucleotide
  Sense strand starting at position 3637 of SEQ ID NO: 1242621
gcagucaugggcuaugcga

SEQ ID NO: 1361451 - RNA, 19 nt, Artificial Sequence
  Description of Artificial Sequence: Synthetic oligonucleotide
  Antisense strand to SEQ ID NO: 1361450
ucgcauagcccaugacugc

SEQ ID NO: 1361452 - RNA, 19 nt, Artificial Sequence
  Description of Artificial Sequence: Synthetic oligonucleotide
  Sense strand starting at position 3661 of SEQ ID NO: 1242621
ggcaaccuuaccgaguuaa

SEQ ID NO: 1361453 - RNA, 19 nt, Artificial Sequence
  Description of Artificial Sequence: Synthetic oligonucleotide
  Antisense strand to SEQ ID NO: 1361452
uuaacucgguaagguugcc

SEQ ID NO: 1361454 - RNA, 19 nt, Artificial Sequence
  Description of Artificial Sequence: Synthetic oligonucleotide
  Sense strand starting at position 3673 of SEQ ID NO: 1242621
gaguuaaagucuccuccag

SEQ ID NO: 1361455 - RNA, 19 nt, Artificial Sequence
  Description of Artificial Sequence: Synthetic oligonucleotide
  Antisense strand to SEQ ID NO: 1361454
cuggaggagacuuuaacuc

SEQ ID NO: 1361456 - RNA, 19 nt, Artificial Sequence
  Description of Artificial Sequence: Synthetic oligonucleotide
  Sense strand starting at position 3675 of SEQ ID NO: 1242621
guuaaagucuccuccagaa

SEQ ID NO: 1361457 - RNA, 19 nt, Artificial Sequence
  Description of Artificial Sequence: Synthetic oligonucleotide
  Antisense strand to SEQ ID NO: 1361456
uucuggaggagacuuuaac

SEQ ID NO: 1361458 - RNA, 19 nt, Artificial Sequence
  Description of Artificial Sequence: Synthetic oligonucleotide
  Sense strand starting at position 3689 of SEQ ID NO: 1242621
cagaauuaggcuuggaggu

SEQ ID NO: 1361459 - RNA, 19 nt, Artificial Sequence
  Description of Artificial Sequence: Synthetic oligonucleotide
  Antisense strand to SEQ ID NO: 1361458
accuccaagccuaauucug

SEQ ID NO: 1361460 - RNA, 19 nt, Artificial Sequence
  Description of Artificial Sequence: Synthetic oligonucleotide
  Sense strand starting at position 3690 of SEQ ID NO: 1242621
agaauuaggcuuggagguu

SEQ ID NO: 1361461 - RNA, 19 nt, Artificial Sequence
  Description of Artificial Sequence: Synthetic oligonucleotide
  Antisense strand to SEQ ID NO: 1361460
aaccuccaagccuaauucu

SEQ ID NO: 1361462 - RNA, 19 nt, Artificial Sequence
  Description of Artificial Sequence: Synthetic oligonucleotide
  Sense strand starting at position 65 of SEQ ID NO: 1242622
aggagagcccauuagucua

SEQ ID NO: 1361463 - RNA, 19 nt, Artificial Sequence
  Description of Artificial Sequence: Synthetic oligonucleotide
  Antisense strand to SEQ ID NO: 1361462
uagacuaaugggcucuccu

SEQ ID NO: 1361464 - RNA, 19 nt, Artificial Sequence
  Description of Artificial Sequence: Synthetic oligonucleotide
  Sense strand starting at position 67 of SEQ ID NO: 1242622
gagagcccauuagucuaua

SEQ ID NO: 1361465 - RNA, 19 nt, Artificial Sequence
  Description of Artificial Sequence: Synthetic oligonucleotide
  Antisense strand to SEQ ID NO: 1361464
uauagacuaaugggcucuc

SEQ ID NO: 1361466 - RNA, 19 nt, Artificial Sequence
  Description of Artificial Sequence: Synthetic oligonucleotide
  Sense strand starting at position 68 of SEQ ID NO: 1242622
agagcccauuagucuauaa

SEQ ID NO: 1361467 - RNA, 19 nt, Artificial Sequence
  Description of Artificial Sequence: Synthetic oligonucleotide
  Antisense strand to SEQ ID NO: 1361466
uuauagacuaaugggcucu

SEQ ID NO: 1361468 - RNA, 19 nt, Artificial Sequence
  Description of Artificial Sequence: Synthetic oligonucleotide
  Sense strand starting at position 297 of SEQ ID NO: 1242622
auuucuaaugcccggcuua

SEQ ID NO: 1361469 - RNA, 19 nt, Artificial Sequence
  Description of Artificial Sequence: Synthetic oligonucleotide
  Antisense strand to SEQ ID NO: 1361468
uaagccgggcauuagaaau

SEQ ID NO: 1361470 - RNA, 19 nt, Artificial Sequence
  Description of Artificial Sequence: Synthetic oligonucleotide
  Sense strand starting at position 376 of SEQ ID NO: 1242622
uuggucgaugcauaugaca

SEQ ID NO: 1361471 - RNA, 19 nt, Artificial Sequence
  Description of Artificial Sequence: Synthetic oligonucleotide
  Antisense strand to SEQ ID NO: 1361470
ugucauaugcaucgaccaa

SEQ ID NO: 1361472 - RNA, 19 nt, Artificial Sequence
  Description of Artificial Sequence: Synthetic oligonucleotide
  Sense strand starting at position 378 of SEQ ID NO: 1242622
ggucgaugcauaugacaaa

SEQ ID NO: 1361473 - RNA, 19 nt, Artificial Sequence
  Description of Artificial Sequence: Synthetic oligonucleotide
  Antisense strand to SEQ ID NO: 1361472
uuugucauaugcaucgacc

SEQ ID NO: 1361474 - RNA, 19 nt, Artificial Sequence
  Description of Artificial Sequence: Synthetic oligonucleotide
  Sense strand starting at position 618 of SEQ ID NO: 1242622
uauggagauuccucuuuga

SEQ ID NO: 1361475 - RNA, 19 nt, Artificial Sequence
  Description of Artificial Sequence: Synthetic oligonucleotide
  Antisense strand to SEQ ID NO: 1361474
ucaaagaggaaucuccaua

SEQ ID NO: 1361476 - RNA, 19 nt, Artificial Sequence
  Description of Artificial Sequence: Synthetic oligonucleotide
  Sense strand starting at position 621 of SEQ ID NO: 1242622
ggagauuccucuuugacac

SEQ ID NO: 1361477 - RNA, 19 nt, Artificial Sequence
  Description of Artificial Sequence: Synthetic oligonucleotide
  Antisense strand to SEQ ID NO: 1361476
gugucaaagaggaaucucc

SEQ ID NO: 1361478 - RNA, 19 nt, Artificial Sequence
  Description of Artificial Sequence: Synthetic oligonucleotide
  Sense strand starting at position 680 of SEQ ID NO: 1242622
ggcuguuugcaauauggaa

SEQ ID NO: 1361479 - RNA, 19 nt, Artificial Sequence
  Description of Artificial Sequence: Synthetic oligonucleotide
  Antisense strand to SEQ ID NO: 1361478
uuccauauugcaaacagcc

SEQ ID NO: 1361480 - RNA, 19 nt, Artificial Sequence
  Description of Artificial Sequence: Synthetic oligonucleotide
  Sense strand starting at position 696 of SEQ ID NO: 1242622
gaaugugaacuguauccau

SEQ ID NO: 1361481 - RNA, 19 nt, Artificial Sequence
  Description of Artificial Sequence: Synthetic oligonucleotide
  Antisense strand to SEQ ID NO: 1361480
auggauacaguucacauuc

SEQ ID NO: 1361482 - RNA, 19 nt, Artificial Sequence
  Description of Artificial Sequence: Synthetic oligonucleotide
  Sense strand starting at position 725 of SEQ ID NO: 1242622
acuuuauggcuuuaagauc

SEQ ID NO: 1361483 - RNA, 19 nt, Artificial Sequence
  Description of Artificial Sequence: Synthetic oligonucleotide
  Antisense strand to SEQ ID NO: 1361482
gaucuuaaagccauaaagu

SEQ ID NO: 1361484 - RNA, 19 nt, Artificial Sequence
  Description of Artificial Sequence: Synthetic oligonucleotide
  Sense strand starting at position 740 of SEQ ID NO: 1242622
gauccauuggcuugacuug

SEQ ID NO: 1361485 - RNA, 19 nt, Artificial Sequence
  Description of Artificial Sequence: Synthetic oligonucleotide
  Antisense strand to SEQ ID NO: 1361484
caagucaagccaauggauc

SEQ ID NO: 1361486 - RNA, 19 nt, Artificial Sequence
  Description of Artificial Sequence: Synthetic oligonucleotide
  Sense strand starting at position 782 of SEQ ID NO: 1242622
aggcgugaucccgcaucga

SEQ ID NO: 1361487 - RNA, 19 nt, Artificial Sequence
  Description of Artificial Sequence: Synthetic oligonucleotide
  Antisense strand to SEQ ID NO: 1361486
ucgaugcgggaucacgccu

SEQ ID NO: 1361488 - RNA, 19 nt, Artificial Sequence
  Description of Artificial Sequence: Synthetic oligonucleotide
  Sense strand starting at position 1036 of SEQ ID NO: 1242622
ucacucauuuaguaagaga

SEQ ID NO: 1361489 - RNA, 19 nt, Artificial Sequence
  Description of Artificial Sequence: Synthetic oligonucleotide
  Antisense strand to SEQ ID NO: 1361488
ucucuuacuaaaugaguga

SEQ ID NO: 1361490 - RNA, 19 nt, Artificial Sequence
  Description of Artificial Sequence: Synthetic oligonucleotide
  Sense strand starting at position 1039 of SEQ ID NO: 1242622
cucauuuaguaagagaugu

SEQ ID NO: 1361491 - RNA, 19 nt, Artificial Sequence
  Description of Artificial Sequence: Synthetic oligonucleotide
  Antisense strand to SEQ ID NO: 1361490
acaucucuuacuaaaugag

SEQ ID NO: 1361492 - RNA, 19 nt, Artificial Sequence
  Description of Artificial Sequence: Synthetic oligonucleotide
  Sense strand starting at position 1043 of SEQ ID NO: 1242622
uuuaguaagagaugucagu

SEQ ID NO: 1361493 - RNA, 19 nt, Artificial Sequence
  Description of Artificial Sequence: Synthetic oligonucleotide
  Antisense strand to SEQ ID NO: 1361492
acugacaucucuuacuaaa

SEQ ID NO: 1361494 - RNA, 19 nt, Artificial Sequence
  Description of Artificial Sequence: Synthetic oligonucleotide
  Sense strand starting at position 1052 of SEQ ID NO: 1242622
agaugucaguaaucuguaa

SEQ ID NO: 1361495 - RNA, 19 nt, Artificial Sequence
  Description of Artificial Sequence: Synthetic oligonucleotide
  Antisense strand to SEQ ID NO: 1361494
uuacagauuacugacaucu

SEQ ID NO: 1361496 - RNA, 19 nt, Artificial Sequence
  Description of Artificial Sequence: Synthetic oligonucleotide
  Sense strand starting at position 1056 of SEQ ID NO: 1242622
gucaguaaucuguaaauua

SEQ ID NO: 1361497 - RNA, 19 nt, Artificial Sequence
  Description of Artificial Sequence: Synthetic oligonucleotide
  Antisense strand to SEQ ID NO: 1361496
uaauuuacagauuacugac

SEQ ID NO: 1361498 - RNA, 19 nt, Artificial Sequence
  Description of Artificial Sequence: Synthetic oligonucleotide
  Sense strand starting at position 1270 of SEQ ID NO: 1242622
ugcugucaugcgucuuguu

SEQ ID NO: 1361499 - RNA, 19 nt, Artificial Sequence
  Description of Artificial Sequence: Synthetic oligonucleotide
  Antisense strand to SEQ ID NO: 1361498
aacaagacgcaugacagca

SEQ ID NO: 1361500 - RNA, 19 nt, Artificial Sequence
  Description of Artificial Sequence: Synthetic oligonucleotide
  Sense strand starting at position 1271 of SEQ ID NO: 1242622
gcugucaugcgucuuguua

SEQ ID NO: 1361501 - RNA, 19 nt, Artificial Sequence
  Description of Artificial Sequence: Synthetic oligonucleotide
  Antisense strand to SEQ ID NO: 1361500
uaacaagacgcaugacagc

SEQ ID NO: 1361502 - RNA, 19 nt, Artificial Sequence
  Description of Artificial Sequence: Synthetic oligonucleotide
  Sense strand starting at position 1283 of SEQ ID NO: 1242622
cuuguuagcaacgggagaa

SEQ ID NO: 1361503 - RNA, 19 nt, Artificial Sequence
  Description of Artificial Sequence: Synthetic oligonucleotide
  Antisense strand to SEQ ID NO: 1361502
uucucccguugcuaacaag

SEQ ID NO: 1361504 - RNA, 19 nt, Artificial Sequence
  Description of Artificial Sequence: Synthetic oligonucleotide
  Sense strand starting at position 1284 of SEQ ID NO: 1242622
uuguuagcaacgggagaaa

SEQ ID NO: 1361505 - RNA, 19 nt, Artificial Sequence
  Description of Artificial Sequence: Synthetic oligonucleotide
  Antisense strand to SEQ ID NO: 1361504
uuucucccguugcuaacaa

SEQ ID NO: 1361506 - RNA, 19 nt, Artificial Sequence
  Description of Artificial Sequence: Synthetic oligonucleotide
  Sense strand starting at position 1386 of SEQ ID NO: 1242622
gcaaauaaguaugucuuua

SEQ ID NO: 1361507 - RNA, 19 nt, Artificial Sequence
  Description of Artificial Sequence: Synthetic oligonucleotide
  Antisense strand to SEQ ID NO: 1361506
uaaagacauacuuauuugc

SEQ ID NO: 1361508 - RNA, 19 nt, Artificial Sequence
  Description of Artificial Sequence: Synthetic oligonucleotide
  Sense strand starting at position 1390 of SEQ ID NO: 1242622
auaaguaugucuuuaggau

SEQ ID NO: 1361509 - RNA, 19 nt, Artificial Sequence
  Description of Artificial Sequence: Synthetic oligonucleotide
  Antisense strand to SEQ ID NO: 1361508
auccuaaagacauacuuau

SEQ ID NO: 1361510 - RNA, 19 nt, Artificial Sequence
  Description of Artificial Sequence: Synthetic oligonucleotide
  Sense strand starting at position 1391 of SEQ ID NO: 1242622
uaaguaugucuuuaggaua

SEQ ID NO: 1361511 - RNA, 19 nt, Artificial Sequence
  Description of Artificial Sequence: Synthetic oligonucleotide
  Antisense strand to SEQ ID NO: 1361510
uauccuaaagacauacuua

SEQ ID NO: 1361512 - RNA, 19 nt, Artificial Sequence
  Description of Artificial Sequence: Synthetic oligonucleotide
  Sense strand starting at position 2782 of SEQ ID NO: 1242622
ugggauccaucagugaacu

SEQ ID NO: 1361513 - RNA, 19 nt, Artificial Sequence
  Description of Artificial Sequence: Synthetic oligonucleotide
  Antisense strand to SEQ ID NO: 1361512
aguucacugauggauccca

SEQ ID NO: 1361514 - RNA, 19 nt, Artificial Sequence
  Description of Artificial Sequence: Synthetic oligonucleotide
  Sense strand starting at position 2922 of SEQ ID NO: 1242622
ccaugagaauucucuaugu

SEQ ID NO: 1361515 - RNA, 19 nt, Artificial Sequence
  Description of Artificial Sequence: Synthetic oligonucleotide
  Antisense strand to SEQ ID NO: 1361514
acauagagaauucucaugg

SEQ ID NO: 1361516 - RNA, 19 nt, Artificial Sequence
  Description of Artificial Sequence: Synthetic oligonucleotide
  Sense strand starting at position 2924 of SEQ ID NO: 1242622
augagaauucucuaugucu

SEQ ID NO: 1361517 - RNA, 19 nt, Artificial Sequence
  Description of Artificial Sequence: Synthetic oligonucleotide
  Antisense strand to SEQ ID NO: 1361516
agacauagagaauucucau

SEQ ID NO: 1361518 - RNA, 19 nt, Artificial Sequence
  Description of Artificial Sequence: Synthetic oligonucleotide
  Sense strand starting at position 2932 of SEQ ID NO: 1242622
ucucuaugucugcaaagga

SEQ ID NO: 1361519 - RNA, 19 nt, Artificial Sequence
  Description of Artificial Sequence: Synthetic oligonucleotide
  Antisense strand to SEQ ID NO: 1361518
uccuuugcagacauagaga

SEQ ID NO: 1361520 - RNA, 19 nt, Artificial Sequence
  Description of Artificial Sequence: Synthetic oligonucleotide
  Sense strand starting at position 3049 of SEQ ID NO: 1242622
ugagguuauuagucugauc

SEQ ID NO: 1361521 - RNA, 19 nt, Artificial Sequence
  Description of Artificial Sequence: Synthetic oligonucleotide
  Antisense strand to SEQ ID NO: 1361520
gaucagacuaauaaccuca

SEQ ID NO: 1361522 - RNA, 19 nt, Artificial Sequence
  Description of Artificial Sequence: Synthetic oligonucleotide
  Sense strand starting at position 3051 of SEQ ID NO: 1242622
agguuauuagucugaucuc

SEQ ID NO: 1361523 - RNA, 19 nt, Artificial Sequence
  Description of Artificial Sequence: Synthetic oligonucleotide
  Antisense strand to SEQ ID NO: 1361522
gagaucagacuaauaaccu

SEQ ID NO: 1361524 - RNA, 19 nt, Artificial Sequence
  Description of Artificial Sequence: Synthetic oligonucleotide
  Sense strand starting at position 3054 of SEQ ID NO: 1242622
uuauuagucugaucuccau

SEQ ID NO: 1361525 - RNA, 19 nt, Artificial Sequence
  Description of Artificial Sequence: Synthetic oligonucleotide
  Antisense strand to SEQ ID NO: 1361524
auggagaucagacuaauaa

SEQ ID NO: 1361526 - RNA, 19 nt, Artificial Sequence
  Description of Artificial Sequence: Synthetic oligonucleotide
  Sense strand starting at position 3057 of SEQ ID NO: 1242622
uuagucugaucuccauaga

SEQ ID NO: 1361527 - RNA, 19 nt, Artificial Sequence
  Description of Artificial Sequence: Synthetic oligonucleotide
  Antisense strand to SEQ ID NO: 1361526
ucuauggagaucagacuaa

SEQ ID NO: 1361528 - RNA, 19 nt, Artificial Sequence
  Description of Artificial Sequence: Synthetic oligonucleotide
  Sense strand starting at position 3643 of SEQ ID NO: 1242622
agaccaaugucaguuucua

SEQ ID NO: 1361529 - RNA, 19 nt, Artificial Sequence
  Description of Artificial Sequence: Synthetic oligonucleotide
  Antisense strand to SEQ ID NO: 1361528
uagaaacugacauuggucu

SEQ ID NO: 1361530 - RNA, 19 nt, Artificial Sequence
  Description of Artificial Sequence: Synthetic oligonucleotide
  Sense strand starting at position 3647 of SEQ ID NO: 1242622
caaugucaguuucuaggga

SEQ ID NO: 1361531 - RNA, 19 nt, Artificial Sequence
  Description of Artificial Sequence: Synthetic oligonucleotide
  Antisense strand to SEQ ID NO: 1361530
ucccuagaaacugacauug

SEQ ID NO: 1361532 - RNA, 19 nt, Artificial Sequence
  Description of Artificial Sequence: Synthetic oligonucleotide
  Sense strand starting at position 3745 of SEQ ID NO: 1242622
agagccagaaauuguaaga

SEQ ID NO: 1361533 - RNA, 19 nt, Artificial Sequence
  Description of Artificial Sequence: Synthetic oligonucleotide
  Antisense strand to SEQ ID NO: 1361532
ucuuacaauuucuggcucu

SEQ ID NO: 1361534 - RNA, 19 nt, Artificial Sequence
  Description of Artificial Sequence: Synthetic oligonucleotide
  Sense strand starting at position 3807 of SEQ ID NO: 1242622
acaacuguuggcugggaaa

SEQ ID NO: 1361535 - RNA, 19 nt, Artificial Sequence
  Description of Artificial Sequence: Synthetic oligonucleotide
  Antisense strand to SEQ ID NO: 1361534
uuucccagccaacaguugu

SEQ ID NO: 1361536 - RNA, 19 nt, Artificial Sequence
  Description of Artificial Sequence: Synthetic oligonucleotide
  Sense strand starting at position 3809 of SEQ ID NO: 1242622
aacuguuggcugggaaaca

SEQ ID NO: 1361537 - RNA, 19 nt, Artificial Sequence
  Description of Artificial Sequence: Synthetic oligonucleotide
  Antisense strand to SEQ ID NO: 1361536
uguuucccagccaacaguu

SEQ ID NO: 1361538 - RNA, 19 nt, Artificial Sequence
  Description of Artificial Sequence: Synthetic oligonucleotide
  Sense strand starting at position 3848 of SEQ ID NO: 1242622
acacuuagggugugaacuu

SEQ ID NO: 1361539 - RNA, 19 nt, Artificial Sequence
  Description of Artificial Sequence: Synthetic oligonucleotide
  Antisense strand to SEQ ID NO: 1361538
aaguucacacccuaagugu

SEQ ID NO: 1361540 - RNA, 19 nt, Artificial Sequence
  Description of Artificial Sequence: Synthetic oligonucleotide
  Sense strand starting at position 3879 of SEQ ID NO: 1242622
ggacgcauuucggcagaaa

SEQ ID NO: 1361541 - RNA, 19 nt, Artificial Sequence
  Description of Artificial Sequence: Synthetic oligonucleotide
  Antisense strand to SEQ ID NO: 1361540
uuucugccgaaaugcgucc

SEQ ID NO: 1361542 - RNA, 19 nt, Artificial Sequence
  Description of Artificial Sequence: Synthetic oligonucleotide
  Sense strand starting at position 56 of SEQ ID NO: 1242623
uaaauuaacuggguacagu

SEQ ID NO: 1361543 - RNA, 19 nt, Artificial Sequence
  Description of Artificial Sequence: Synthetic oligonucleotide
  Antisense strand to SEQ ID NO: 1361542
acuguacccaguuaauuua

SEQ ID NO: 1361544 - RNA, 19 nt, Artificial Sequence
  Description of Artificial Sequence: Synthetic oligonucleotide
  Sense strand starting at position 291 of SEQ ID NO: 1242623
gcuugaaacuacucguuaa

SEQ ID NO: 1361545 - RNA, 19 nt, Artificial Sequence
  Description of Artificial Sequence: Synthetic oligonucleotide
  Antisense strand to SEQ ID NO: 1361544
uuaacgaguaguuucaagc

SEQ ID NO: 1361546 - RNA, 19 nt, Artificial Sequence
  Description of Artificial Sequence: Synthetic oligonucleotide
  Sense strand starting at position 467 of SEQ ID NO: 1242623
gugacuuauaacggaaaga

SEQ ID NO: 1361547 - RNA, 19 nt, Artificial Sequence
  Description of Artificial Sequence: Synthetic oligonucleotide
  Antisense strand to SEQ ID NO: 1361546
ucuuuccguuauaagucac

SEQ ID NO: 1361548 - RNA, 19 nt, Artificial Sequence
  Description of Artificial Sequence: Synthetic oligonucleotide
  Sense strand starting at position 547 of SEQ ID NO: 1242623
aaagauaugugagccaaga

SEQ ID NO: 1361549 - RNA, 19 nt, Artificial Sequence
  Description of Artificial Sequence: Synthetic oligonucleotide
  Antisense strand to SEQ ID NO: 1361548
ucuuggcucacauaucuuu

SEQ ID NO: 1361550 - RNA, 19 nt, Artificial Sequence
  Description of Artificial Sequence: Synthetic oligonucleotide
  Sense strand starting at position 605 of SEQ ID NO: 1242623
agcauccaguccucagaga

SEQ ID NO: 1361551 - RNA, 19 nt, Artificial Sequence
  Description of Artificial Sequence: Synthetic oligonucleotide
  Antisense strand to SEQ ID NO: 1361550
ucucugaggacuggaugcu

SEQ ID NO: 1361552 - RNA, 19 nt, Artificial Sequence
  Description of Artificial Sequence: Synthetic oligonucleotide
  Sense strand starting at position 606 of SEQ ID NO: 1242623
gcauccaguccucagagaa

SEQ ID NO: 1361553 - RNA, 19 nt, Artificial Sequence
  Description of Artificial Sequence: Synthetic oligonucleotide
  Antisense strand to SEQ ID NO: 1361552
uucucugaggacuggaugc

SEQ ID NO: 1361554 - RNA, 19 nt, Artificial Sequence
  Description of Artificial Sequence: Synthetic oligonucleotide
  Sense strand starting at position 613 of SEQ ID NO: 1242623
guccucagagaacaguauu

SEQ ID NO: 1361555 - RNA, 19 nt, Artificial Sequence
  Description of Artificial Sequence: Synthetic oligonucleotide
  Antisense strand to SEQ ID NO: 1361554
aauacuguucucugaggac

SEQ ID NO: 1361556 - RNA, 19 nt, Artificial Sequence
  Description of Artificial Sequence: Synthetic oligonucleotide
  Sense strand starting at position 754 of SEQ ID NO: 1242623
agaugaaggcuaugugcua

SEQ ID NO: 1361557 - RNA, 19 nt, Artificial Sequence
  Description of Artificial Sequence: Synthetic oligonucleotide
  Antisense strand to SEQ ID NO: 1361556
uagcacauagccuucaucu

SEQ ID NO: 1361558 - RNA, 19 nt, Artificial Sequence
  Description of Artificial Sequence: Synthetic oligonucleotide
  Sense strand starting at position 755 of SEQ ID NO: 1242623
gaugaaggcuaugugcuaa

SEQ ID NO: 1361559 - RNA, 19 nt, Artificial Sequence
  Description of Artificial Sequence: Synthetic oligonucleotide
  Antisense strand to SEQ ID NO: 1361558
uuagcacauagccuucauc

SEQ ID NO: 1361560 - RNA, 19 nt, Artificial Sequence
  Description of Artificial Sequence: Synthetic oligonucleotide
  Sense strand starting at position 888 of SEQ ID NO: 1242623
ggcuauaaggagugguaga

SEQ ID NO: 1361561 - RNA, 19 nt, Artificial Sequence
  Description of Artificial Sequence: Synthetic oligonucleotide
  Antisense strand to SEQ ID NO: 1361560
ucuaccacuccuuauagcc

SEQ ID NO: 1361562 - RNA, 19 nt, Artificial Sequence
  Description of Artificial Sequence: Synthetic oligonucleotide
  Sense strand starting at position 899 of SEQ ID NO: 1242623
gugguagaguucuuucuga

SEQ ID NO: 1361563 - RNA, 19 nt, Artificial Sequence
  Description of Artificial Sequence: Synthetic oligonucleotide
  Antisense strand to SEQ ID NO: 1361562
ucagaaagaacucuaccac

SEQ ID NO: 1361564 - RNA, 19 nt, Artificial Sequence
  Description of Artificial Sequence: Synthetic oligonucleotide
  Sense strand starting at position 906 of SEQ ID NO: 1242623
aguucuuucugagcaauuu

SEQ ID NO: 1361565 - RNA, 19 nt, Artificial Sequence
  Description of Artificial Sequence: Synthetic oligonucleotide
  Antisense strand to SEQ ID NO: 1361564
aaauugcucagaaagaacu

SEQ ID NO: 1361566 - RNA, 19 nt, Artificial Sequence
  Description of Artificial Sequence: Synthetic oligonucleotide
  Sense strand starting at position 957 of SEQ ID NO: 1242623
ucauucaguggcgguaaga

SEQ ID NO: 1361567 - RNA, 19 nt, Artificial Sequence
  Description of Artificial Sequence: Synthetic oligonucleotide
  Antisense strand to SEQ ID NO: 1361566
ucuuaccgccacugaauga

SEQ ID NO: 1361568 - RNA, 19 nt, Artificial Sequence
  Description of Artificial Sequence: Synthetic oligonucleotide
  Sense strand starting at position 966 of SEQ ID NO: 1242623
ggcgguaagaagugguaga

SEQ ID NO: 1361569 - RNA, 19 nt, Artificial Sequence
  Description of Artificial Sequence: Synthetic oligonucleotide
  Antisense strand to SEQ ID NO: 1361568
ucuaccacuucuuaccgcc

SEQ ID NO: 1361570 - RNA, 19 nt, Artificial Sequence
  Description of Artificial Sequence: Synthetic oligonucleotide
  Sense strand starting at position 1284 of SEQ ID NO: 1242623
uagaguucugucugaggac

SEQ ID NO: 1361571 - RNA, 19 nt, Artificial Sequence
  Description of Artificial Sequence: Synthetic oligonucleotide
  Antisense strand to SEQ ID NO: 1361570
guccucagacagaacucua

SEQ ID NO: 1361572 - RNA, 19 nt, Artificial Sequence
  Description of Artificial Sequence: Synthetic oligonucleotide
  Sense strand starting at position 1317 of SEQ ID NO: 1242623
gcaauucugucaucccuga

SEQ ID NO: 1361573 - RNA, 19 nt, Artificial Sequence
  Description of Artificial Sequence: Synthetic oligonucleotide
  Antisense strand to SEQ ID NO: 1361572
ucagggaugacagaauugc

SEQ ID NO: 1361574 - RNA, 19 nt, Artificial Sequence
  Description of Artificial Sequence: Synthetic oligonucleotide
  Sense strand starting at position 1330 of SEQ ID NO: 1242623
cccugaugcccuugugaac

SEQ ID NO: 1361575 - RNA, 19 nt, Artificial Sequence
  Description of Artificial Sequence: Synthetic oligonucleotide
  Antisense strand to SEQ ID NO: 1361574
guucacaagggcaucaggg

SEQ ID NO: 1361576 - RNA, 19 nt, Artificial Sequence
  Description of Artificial Sequence: Synthetic oligonucleotide
  Sense strand starting at position 1336 of SEQ ID NO: 1242623
ugcccuugugaacaagaaa

SEQ ID NO: 1361577 - RNA, 19 nt, Artificial Sequence
  Description of Artificial Sequence: Synthetic oligonucleotide
  Antisense strand to SEQ ID NO: 1361576
uuucuuguucacaagggca

SEQ ID NO: 1361578 - RNA, 19 nt, Artificial Sequence
  Description of Artificial Sequence: Synthetic oligonucleotide
  Sense strand starting at position 1436 of SEQ ID NO: 1242623
gccuuuaauuuguuuaaug

SEQ ID NO: 1361579 - RNA, 19 nt, Artificial Sequence
  Description of Artificial Sequence: Synthetic oligonucleotide
  Antisense strand to SEQ ID NO: 1361578
cauuaaacaaauuaaaggc

SEQ ID NO: 1361580 - RNA, 19 nt, Artificial Sequence
  Description of Artificial Sequence: Synthetic oligonucleotide
  Sense strand starting at position 1532 of SEQ ID NO: 1242623
auagaauguuucucuguau

SEQ ID NO: 1361581 - RNA, 19 nt, Artificial Sequence
  Description of Artificial Sequence: Synthetic oligonucleotide
  Antisense strand to SEQ ID NO: 1361580
auacagagaaacauucuau

SEQ ID NO: 1361582 - RNA, 19 nt, Artificial Sequence
  Description of Artificial Sequence: Synthetic oligonucleotide
  Sense strand starting at position 1582 of SEQ ID NO: 1242623
uuugcaaucccugaugaau

SEQ ID NO: 1361583 - RNA, 19 nt, Artificial Sequence
  Description of Artificial Sequence: Synthetic oligonucleotide
  Antisense strand to SEQ ID NO: 1361582
auucaucagggauugcaaa

SEQ ID NO: 1361584 - RNA, 19 nt, Artificial Sequence
  Description of Artificial Sequence: Synthetic oligonucleotide
  Sense strand starting at position 1717 of SEQ ID NO: 1242623
ugcugaaucuaauuaagcu

SEQ ID NO: 1361585 - RNA, 19 nt, Artificial Sequence
  Description of Artificial Sequence: Synthetic oligonucleotide
  Antisense strand to SEQ ID NO: 1361584
agcuuaauuagauucagca

SEQ ID NO: 1361586 - RNA, 19 nt, Artificial Sequence
  Description of Artificial Sequence: Synthetic oligonucleotide
  Sense strand starting at position 1780 of SEQ ID NO: 1242623
agaagaacaugcuaaacua

SEQ ID NO: 1361587 - RNA, 19 nt, Artificial Sequence
  Description of Artificial Sequence: Synthetic oligonucleotide
  Antisense strand to SEQ ID NO: 1361586
uaguuuagcauguucuucu

SEQ ID NO: 1361588 - RNA, 19 nt, Artificial Sequence
  Description of Artificial Sequence: Synthetic oligonucleotide
  Sense strand starting at position 2482 of SEQ ID NO: 1242623
aaagucaaucucgaugugu

SEQ ID NO: 1361589 - RNA, 19 nt, Artificial Sequence
  Description of Artificial Sequence: Synthetic oligonucleotide
  Antisense strand to SEQ ID NO: 1361588
acacaucgagauugacuuu

SEQ ID NO: 1361590 - RNA, 19 nt, Artificial Sequence
  Description of Artificial Sequence: Synthetic oligonucleotide
  Sense strand starting at position 2484 of SEQ ID NO: 1242623
agucaaucucgauguguaa

SEQ ID NO: 1361591 - RNA, 19 nt, Artificial Sequence
  Description of Artificial Sequence: Synthetic oligonucleotide
  Antisense strand to SEQ ID NO: 1361590
uuacacaucgagauugacu

SEQ ID NO: 1361592 - RNA, 19 nt, Artificial Sequence
  Description of Artificial Sequence: Synthetic oligonucleotide
  Sense strand starting at position 2487 of SEQ ID NO: 1242623
caaucucgauguguaaucu

SEQ ID NO: 1361593 - RNA, 19 nt, Artificial Sequence
  Description of Artificial Sequence: Synthetic oligonucleotide
  Antisense strand to SEQ ID NO: 1361592
agauuacacaucgagauug

SEQ ID NO: 1361594 - RNA, 19 nt, Artificial Sequence
  Description of Artificial Sequence: Synthetic oligonucleotide
  Sense strand starting at position 2488 of SEQ ID NO: 1242623
aaucucgauguguaaucuu

SEQ ID NO: 1361595 - RNA, 19 nt, Artificial Sequence
  Description of Artificial Sequence: Synthetic oligonucleotide
  Antisense strand to SEQ ID NO: 1361594
aagauuacacaucgagauu

SEQ ID NO: 1361596 - RNA, 19 nt, Artificial Sequence
  Description of Artificial Sequence: Synthetic oligonucleotide
  Sense strand starting at position 2570 of SEQ ID NO: 1242623
gacacacuucgccagaaga

SEQ ID NO: 1361597 - RNA, 19 nt, Artificial Sequence
  Description of Artificial Sequence: Synthetic oligonucleotide
  Antisense strand to SEQ ID NO: 1361596
ucuucuggcgaaguguguc

SEQ ID NO: 1361598 - RNA, 19 nt, Artificial Sequence
  Description of Artificial Sequence: Synthetic oligonucleotide
  Sense strand starting at position 2731 of SEQ ID NO: 1242623
ucacauaugugugcaaaga

SEQ ID NO: 1361599 - RNA, 19 nt, Artificial Sequence
  Description of Artificial Sequence: Synthetic oligonucleotide
  Antisense strand to SEQ ID NO: 1361598
ucuuugcacacauauguga

SEQ ID NO: 1361600 - RNA, 19 nt, Artificial Sequence
  Description of Artificial Sequence: Synthetic oligonucleotide
  Sense strand starting at position 2822 of SEQ ID NO: 1242623
aauggaugucagcauugca

SEQ ID NO: 1361601 - RNA, 19 nt, Artificial Sequence
  Description of Artificial Sequence: Synthetic oligonucleotide
  Antisense strand to SEQ ID NO: 1361600
ugcaaugcugacauccauu

SEQ ID NO: 1361602 - RNA, 19 nt, Artificial Sequence
  Description of Artificial Sequence: Synthetic oligonucleotide
  Sense strand starting at position 2825 of SEQ ID NO: 1242623
ggaugucagcauugcauag

SEQ ID NO: 1361603 - RNA, 19 nt, Artificial Sequence
  Description of Artificial Sequence: Synthetic oligonucleotide
  Antisense strand to SEQ ID NO: 1361602
cuaugcaaugcugacaucc

SEQ ID NO: 1361604 - RNA, 19 nt, Artificial Sequence
  Description of Artificial Sequence: Synthetic oligonucleotide
  Sense strand starting at position 2829 of SEQ ID NO: 1242623
gucagcauugcauagcuaa

SEQ ID NO: 1361605 - RNA, 19 nt, Artificial Sequence
  Description of Artificial Sequence: Synthetic oligonucleotide
  Antisense strand to SEQ ID NO: 1361604
uuagcuaugcaaugcugac

SEQ ID NO: 1361606 - RNA, 19 nt, Artificial Sequence
  Description of Artificial Sequence: Synthetic oligonucleotide
  Sense strand starting at position 2832 of SEQ ID NO: 1242623
agcauugcauagcuaagaa

SEQ ID NO: 1361607 - RNA, 19 nt, Artificial Sequence
  Description of Artificial Sequence: Synthetic oligonucleotide
  Antisense strand to SEQ ID NO: 1361606
uucuuagcuaugcaaugcu

SEQ ID NO: 1361608 - RNA, 19 nt, Artificial Sequence
  Description of Artificial Sequence: Synthetic oligonucleotide
  Sense strand starting at position 2911 of SEQ ID NO: 1242623
gcaggaucccgugaauauc

SEQ ID NO: 1361609 - RNA, 19 nt, Artificial Sequence
  Description of Artificial Sequence: Synthetic oligonucleotide
  Antisense strand to SEQ ID NO: 1361608
gauauucacgggauccugc

SEQ ID NO: 1361610 - RNA, 19 nt, Artificial Sequence
  Description of Artificial Sequence: Synthetic oligonucleotide
  Sense strand starting at position 3003 of SEQ ID NO: 1242623
acagaauauuuccagguua

SEQ ID NO: 1361611 - RNA, 19 nt, Artificial Sequence
  Description of Artificial Sequence: Synthetic oligonucleotide
  Antisense strand to SEQ ID NO: 1361610
uaaccuggaaauauucugu

SEQ ID NO: 1361612 - RNA, 19 nt, Artificial Sequence
  Description of Artificial Sequence: Synthetic oligonucleotide
  Sense strand starting at position 3342 of SEQ ID NO: 1242623
gcgcaacuagcaugaaacu

SEQ ID NO: 1361613 - RNA, 19 nt, Artificial Sequence
  Description of Artificial Sequence: Synthetic oligonucleotide
  Antisense strand to SEQ ID NO: 1361612
aguuucaugcuaguugcgc

SEQ ID NO: 1361614 - RNA, 19 nt, Artificial Sequence
  Description of Artificial Sequence: Synthetic oligonucleotide
  Sense strand starting at position 3343 of SEQ ID NO: 1242623
cgcaacuagcaugaaacuu

SEQ ID NO: 1361615 - RNA, 19 nt, Artificial Sequence
  Description of Artificial Sequence: Synthetic oligonucleotide
  Antisense strand to SEQ ID NO: 1361614
aaguuucaugcuaguugcg

SEQ ID NO: 1361616 - RNA, 19 nt, Artificial Sequence
  Description of Artificial Sequence: Synthetic oligonucleotide
  Sense strand starting at position 3352 of SEQ ID NO: 1242623
caugaaacuuaugugguga

SEQ ID NO: 1361617 - RNA, 19 nt, Artificial Sequence
  Description of Artificial Sequence: Synthetic oligonucleotide
  Antisense strand to SEQ ID NO: 1361616
ucaccacauaaguuucaug

SEQ ID NO: 1361618 - RNA, 19 nt, Artificial Sequence
  Description of Artificial Sequence: Synthetic oligonucleotide
  Sense strand starting at position 3357 of SEQ ID NO: 1242623
aacuuauguggugacacua

SEQ ID NO: 1361619 - RNA, 19 nt, Artificial Sequence
  Description of Artificial Sequence: Synthetic oligonucleotide
  Antisense strand to SEQ ID NO: 1361618
uagugucaccacauaaguu

SEQ ID NO: 1361620 - RNA, 19 nt, Artificial Sequence
  Description of Artificial Sequence: Synthetic oligonucleotide
  Sense strand starting at position 3418 of SEQ ID NO: 1242623
aguagucagcuugaagauc

SEQ ID NO: 1361621 - RNA, 19 nt, Artificial Sequence
  Description of Artificial Sequence: Synthetic oligonucleotide
  Antisense strand to SEQ ID NO: 1361620
gaucuucaagcugacuacu

SEQ ID NO: 1361622 - RNA, 19 nt, Artificial Sequence
  Description of Artificial Sequence: Synthetic oligonucleotide
  Sense strand starting at position 25 of SEQ ID NO: 1242624
agugacuucuaacuguaac

SEQ ID NO: 1361623 - RNA, 19 nt, Artificial Sequence
  Description of Artificial Sequence: Synthetic oligonucleotide
  Antisense strand to SEQ ID NO: 1361622
guuacaguuagaagucacu

SEQ ID NO: 1361624 - RNA, 19 nt, Artificial Sequence
  Description of Artificial Sequence: Synthetic oligonucleotide
  Sense strand starting at position 276 of SEQ ID NO: 1242624
cuccaagcacuguauugaa

SEQ ID NO: 1361625 - RNA, 19 nt, Artificial Sequence
  Description of Artificial Sequence: Synthetic oligonucleotide
  Antisense strand to SEQ ID NO: 1361624
uucaauacagugcuuggag

SEQ ID NO: 1361626 - RNA, 19 nt, Artificial Sequence
  Description of Artificial Sequence: Synthetic oligonucleotide
  Sense strand starting at position 454 of SEQ ID NO: 1242624
gcccaaggucaugaaauua

SEQ ID NO: 1361627 - RNA, 19 nt, Artificial Sequence
  Description of Artificial Sequence: Synthetic oligonucleotide
  Antisense strand to SEQ ID NO: 1361626
uaauuucaugaccuugggc

SEQ ID NO: 1361628 - RNA, 19 nt, Artificial Sequence
  Description of Artificial Sequence: Synthetic oligonucleotide
  Sense strand starting at position 517 of SEQ ID NO: 1242624
gccguuggccuugugacaa

SEQ ID NO: 1361629 - RNA, 19 nt, Artificial Sequence
  Description of Artificial Sequence: Synthetic oligonucleotide
  Antisense strand to SEQ ID NO: 1361628
uugucacaaggccaacggc

SEQ ID NO: 1361630 - RNA, 19 nt, Artificial Sequence
  Description of Artificial Sequence: Synthetic oligonucleotide
  Sense strand starting at position 581 of SEQ ID NO: 1242624
guuauuagcguugucacua

SEQ ID NO: 1361631 - RNA, 19 nt, Artificial Sequence
  Description of Artificial Sequence: Synthetic oligonucleotide
  Antisense strand to SEQ ID NO: 1361630
uagugacaacgcuaauaac

SEQ ID NO: 1361632 - RNA, 19 nt, Artificial Sequence
  Description of Artificial Sequence: Synthetic oligonucleotide
  Sense strand starting at position 645 of SEQ ID NO: 1242624
ugauuugccuugucuguua

SEQ ID NO: 1361633 - RNA, 19 nt, Artificial Sequence
  Description of Artificial Sequence: Synthetic oligonucleotide
  Antisense strand to SEQ ID NO: 1361632
uaacagacaaggcaaauca

SEQ ID NO: 1361634 - RNA, 19 nt, Artificial Sequence
  Description of Artificial Sequence: Synthetic oligonucleotide
  Sense strand starting at position 649 of SEQ ID NO: 1242624
uugccuugucuguuagcuu

SEQ ID NO: 1361635 - RNA, 19 nt, Artificial Sequence
  Description of Artificial Sequence: Synthetic oligonucleotide
  Antisense strand to SEQ ID NO: 1361634
aagcuaacagacaaggcaa

SEQ ID NO: 1361636 - RNA, 19 nt, Artificial Sequence
  Description of Artificial Sequence: Synthetic oligonucleotide
  Sense strand starting at position 672 of SEQ ID NO: 1242624
acuauaagcuuucugaaag

SEQ ID NO: 1361637 - RNA, 19 nt, Artificial Sequence
  Description of Artificial Sequence: Synthetic oligonucleotide
  Antisense strand to SEQ ID NO: 1361636
cuuucagaaagcuuauagu

SEQ ID NO: 1361638 - RNA, 19 nt, Artificial Sequence
  Description of Artificial Sequence: Synthetic oligonucleotide
  Sense strand starting at position 728 of SEQ ID NO: 1242624
acagaagguguuuaguaga

SEQ ID NO: 1361639 - RNA, 19 nt, Artificial Sequence
  Description of Artificial Sequence: Synthetic oligonucleotide
  Antisense strand to SEQ ID NO: 1361638
ucuacuaaacaccuucugu

SEQ ID NO: 1361640 - RNA, 19 nt, Artificial Sequence
  Description of Artificial Sequence: Synthetic oligonucleotide
  Sense strand starting at position 733 of SEQ ID NO: 1242624
agguguuuaguagaagucu

SEQ ID NO: 1361641 - RNA, 19 nt, Artificial Sequence
  Description of Artificial Sequence: Synthetic oligonucleotide
  Antisense strand to SEQ ID NO: 1361640
agacuucuacuaaacaccu

SEQ ID NO: 1361642 - RNA, 19 nt, Artificial Sequence
  Description of Artificial Sequence: Synthetic oligonucleotide
  Sense strand starting at position 739 of SEQ ID NO: 1242624
uuaguagaagucuggugaa

SEQ ID NO: 1361643 - RNA, 19 nt, Artificial Sequence
  Description of Artificial Sequence: Synthetic oligonucleotide
  Antisense strand to SEQ ID NO: 1361642
uucaccagacuucuacuaa

SEQ ID NO: 1361644 - RNA, 19 nt, Artificial Sequence
  Description of Artificial Sequence: Synthetic oligonucleotide
  Sense strand starting at position 746 of SEQ ID NO: 1242624
aagucuggugaauguuaca

SEQ ID NO: 1361645 - RNA, 19 nt, Artificial Sequence
  Description of Artificial Sequence: Synthetic oligonucleotide
  Antisense strand to SEQ ID NO: 1361644
uguaacauucaccagacuu

SEQ ID NO: 1361646 - RNA, 19 nt, Artificial Sequence
  Description of Artificial Sequence: Synthetic oligonucleotide
  Sense strand starting at position 934 of SEQ ID NO: 1242624
ucgguaaaggacugugaaa

SEQ ID NO: 1361647 - RNA, 19 nt, Artificial Sequence
  Description of Artificial Sequence: Synthetic oligonucleotide
  Antisense strand to SEQ ID NO: 1361646
uuucacaguccuuuaccga

SEQ ID NO: 1361648 - RNA, 19 nt, Artificial Sequence
  Description of Artificial Sequence: Synthetic oligonucleotide
  Sense strand starting at position 1427 of SEQ ID NO: 1242624
cuccaagugccugaugaca

SEQ ID NO: 1361649 - RNA, 19 nt, Artificial Sequence
  Description of Artificial Sequence: Synthetic oligonucleotide
  Antisense strand to SEQ ID NO: 1361648
ugucaucaggcacuuggag

SEQ ID NO: 1361650 - RNA, 19 nt, Artificial Sequence
  Description of Artificial Sequence: Synthetic oligonucleotide
  Sense strand starting at position 2202 of SEQ ID NO: 1242624
uccagaaggucauuaauuc

SEQ ID NO: 1361651 - RNA, 19 nt, Artificial Sequence
  Description of Artificial Sequence: Synthetic oligonucleotide
  Antisense strand to SEQ ID NO: 1361650
gaauuaaugaccuucugga

SEQ ID NO: 1361652 - RNA, 19 nt, Artificial Sequence
  Description of Artificial Sequence: Synthetic oligonucleotide
  Sense strand starting at position 2221 of SEQ ID NO: 1242624
aagaaauauuccuugagug

SEQ ID NO: 1361653 - RNA, 19 nt, Artificial Sequence
  Description of Artificial Sequence: Synthetic oligonucleotide
  Antisense strand to SEQ ID NO: 1361652
cacucaaggaauauuucuu

SEQ ID NO: 1361654 - RNA, 19 nt, Artificial Sequence
  Description of Artificial Sequence: Synthetic oligonucleotide
  Sense strand starting at position 2222 of SEQ ID NO: 1242624
agaaauauuccuugagugu

SEQ ID NO: 1361655 - RNA, 19 nt, Artificial Sequence
  Description of Artificial Sequence: Synthetic oligonucleotide
  Antisense strand to SEQ ID NO: 1361654
acacucaaggaauauuucu

SEQ ID NO: 1361656 - RNA, 19 nt, Artificial Sequence
  Description of Artificial Sequence: Synthetic oligonucleotide
  Sense strand starting at position 2223 of SEQ ID NO: 1242624
gaaauauuccuugaguguc

SEQ ID NO: 1361657 - RNA, 19 nt, Artificial Sequence
  Description of Artificial Sequence: Synthetic oligonucleotide
  Antisense strand to SEQ ID NO: 1361656
gacacucaaggaauauuuc

SEQ ID NO: 1361658 - RNA, 19 nt, Artificial Sequence
  Description of Artificial Sequence: Synthetic oligonucleotide
  Sense strand starting at position 2252 of SEQ ID NO: 1242624
cuugcuuuagccguuguau

SEQ ID NO: 1361659 - RNA, 19 nt, Artificial Sequence
  Description of Artificial Sequence: Synthetic oligonucleotide
  Antisense strand to SEQ ID NO: 1361658
auacaacggcuaaagcaag

SEQ ID NO: 1361660 - RNA, 19 nt, Artificial Sequence
  Description of Artificial Sequence: Synthetic oligonucleotide
  Sense strand starting at position 2253 of SEQ ID NO: 1242624
uugcuuuagccguuguaug

SEQ ID NO: 1361661 - RNA, 19 nt, Artificial Sequence
  Description of Artificial Sequence: Synthetic oligonucleotide
  Antisense strand to SEQ ID NO: 1361660
cauacaacggcuaaagcaa

SEQ ID NO: 1361662 - RNA, 19 nt, Artificial Sequence
  Description of Artificial Sequence: Synthetic oligonucleotide
  Sense strand starting at position 2255 of SEQ ID NO: 1242624
gcuuuagccguuguaugga

SEQ ID NO: 1361663 - RNA, 19 nt, Artificial Sequence
  Description of Artificial Sequence: Synthetic oligonucleotide
  Antisense strand to SEQ ID NO: 1361662
uccauacaacggcuaaagc

SEQ ID NO: 1361664 - RNA, 19 nt, Artificial Sequence
  Description of Artificial Sequence: Synthetic oligonucleotide
  Sense strand starting at position 2260 of SEQ ID NO: 1242624
agccguuguauggaggaaa

SEQ ID NO: 1361665 - RNA, 19 nt, Artificial Sequence
  Description of Artificial Sequence: Synthetic oligonucleotide
  Antisense strand to SEQ ID NO: 1361664
uuuccuccauacaacggcu

SEQ ID NO: 1361666 - RNA, 19 nt, Artificial Sequence
  Description of Artificial Sequence: Synthetic oligonucleotide
  Sense strand starting at position 2407 of SEQ ID NO: 1242624
gacacugugcuagauaaua

SEQ ID NO: 1361667 - RNA, 19 nt, Artificial Sequence
  Description of Artificial Sequence: Synthetic oligonucleotide
  Antisense strand to SEQ ID NO: 1361666
uauuaucuagcacaguguc

SEQ ID NO: 1361668 - RNA, 19 nt, Artificial Sequence
  Description of Artificial Sequence: Synthetic oligonucleotide
  Sense strand starting at position 2498 of SEQ ID NO: 1242624
acaagaaaugcaugucauu

SEQ ID NO: 1361669 - RNA, 19 nt, Artificial Sequence
  Description of Artificial Sequence: Synthetic oligonucleotide
  Antisense strand to SEQ ID NO: 1361668
aaugacaugcauuucuugu

SEQ ID NO: 1361670 - RNA, 19 nt, Artificial Sequence
  Description of Artificial Sequence: Synthetic oligonucleotide
  Sense strand starting at position 2505 of SEQ ID NO: 1242624
augcaugucauuugguagu

SEQ ID NO: 1361671 - RNA, 19 nt, Artificial Sequence
  Description of Artificial Sequence: Synthetic oligonucleotide
  Antisense strand to SEQ ID NO: 1361670
acuaccaaaugacaugcau

SEQ ID NO: 1361672 - RNA, 19 nt, Artificial Sequence
  Description of Artificial Sequence: Synthetic oligonucleotide
  Sense strand starting at position 2507 of SEQ ID NO: 1242624
gcaugucauuugguaguga

SEQ ID NO: 1361673 - RNA, 19 nt, Artificial Sequence
  Description of Artificial Sequence: Synthetic oligonucleotide
  Antisense strand to SEQ ID NO: 1361672
ucacuaccaaaugacaugc

SEQ ID NO: 1361674 - RNA, 19 nt, Artificial Sequence
  Description of Artificial Sequence: Synthetic oligonucleotide
  Sense strand starting at position 2518 of SEQ ID NO: 1242624
gguagugagcacuagagaa

SEQ ID NO: 1361675 - RNA, 19 nt, Artificial Sequence
  Description of Artificial Sequence: Synthetic oligonucleotide
  Antisense strand to SEQ ID NO: 1361674
uucucuagugcucacuacc

SEQ ID NO: 1361676 - RNA, 19 nt, Artificial Sequence
  Description of Artificial Sequence: Synthetic oligonucleotide
  Sense strand starting at position 2569 of SEQ ID NO: 1242624
gagggaaugcaguguuaag

SEQ ID NO: 1361677 - RNA, 19 nt, Artificial Sequence
  Description of Artificial Sequence: Synthetic oligonucleotide
  Antisense strand to SEQ ID NO: 1361676
cuuaacacugcauucccuc

SEQ ID NO: 1361678 - RNA, 19 nt, Artificial Sequence
  Description of Artificial Sequence: Synthetic oligonucleotide
  Sense strand starting at position 2815 of SEQ ID NO: 1242624
agaguauaguguccuggaa

SEQ ID NO: 1361679 - RNA, 19 nt, Artificial Sequence
  Description of Artificial Sequence: Synthetic oligonucleotide
  Antisense strand to SEQ ID NO: 1361678
uuccaggacacuauacucu

SEQ ID NO: 1361680 - RNA, 19 nt, Artificial Sequence
  Description of Artificial Sequence: Synthetic oligonucleotide
  Sense strand starting at position 3215 of SEQ ID NO: 1242624
ucuggaauauucuugauac

SEQ ID NO: 1361681 - RNA, 19 nt, Artificial Sequence
  Description of Artificial Sequence: Synthetic oligonucleotide
  Antisense strand to SEQ ID NO: 1361680
guaucaagaauauuccaga

SEQ ID NO: 1361682 - RNA, 19 nt, Artificial Sequence
  Description of Artificial Sequence: Synthetic oligonucleotide
  Sense strand starting at position 3290 of SEQ ID NO: 1242624
gucugugacuauuuguaac

SEQ ID NO: 1361683 - RNA, 19 nt, Artificial Sequence
  Description of Artificial Sequence: Synthetic oligonucleotide
  Antisense strand to SEQ ID NO: 1361682
guuacaaauagucacagac

SEQ ID NO: 1361684 - RNA, 19 nt, Artificial Sequence
  Description of Artificial Sequence: Synthetic oligonucleotide
  Sense strand starting at position 3347 of SEQ ID NO: 1242624
aaagacuaaguuugaaagu

SEQ ID NO: 1361685 - RNA, 19 nt, Artificial Sequence
  Description of Artificial Sequence: Synthetic oligonucleotide
  Antisense strand to SEQ ID NO: 1361684
acuuucaaacuuagucuuu

SEQ ID NO: 1361686 - RNA, 19 nt, Artificial Sequence
  Description of Artificial Sequence: Synthetic oligonucleotide
  Sense strand starting at position 3559 of SEQ ID NO: 1242624
aaagaucucgauggaaugu

SEQ ID NO: 1361687 - RNA, 19 nt, Artificial Sequence
  Description of Artificial Sequence: Synthetic oligonucleotide
  Antisense strand to SEQ ID NO: 1361686
acauuccaucgagaucuuu

SEQ ID NO: 1361688 - RNA, 19 nt, Artificial Sequence
  Description of Artificial Sequence: Synthetic oligonucleotide
  Sense strand starting at position 3722 of SEQ ID NO: 1242624
uggaaauuacccuggguca

SEQ ID NO: 1361689 - RNA, 19 nt, Artificial Sequence
  Description of Artificial Sequence: Synthetic oligonucleotide
  Antisense strand to SEQ ID NO: 1361688
ugacccaggguaauuucca

SEQ ID NO: 1361690 - RNA, 19 nt, Artificial Sequence
  Description of Artificial Sequence: Synthetic oligonucleotide
  Sense strand starting at position 3723 of SEQ ID NO: 1242624
ggaaauuacccugggucau

SEQ ID NO: 1361691 - RNA, 19 nt, Artificial Sequence
  Description of Artificial Sequence: Synthetic oligonucleotide
  Antisense strand to SEQ ID NO: 1361690
augacccaggguaauuucc

SEQ ID NO: 1361692 - RNA, 19 nt, Artificial Sequence
  Description of Artificial Sequence: Synthetic oligonucleotide
  Sense strand starting at position 3724 of SEQ ID NO: 1242624
gaaauuacccugggucauu

SEQ ID NO: 1361693 - RNA, 19 nt, Artificial Sequence
  Description of Artificial Sequence: Synthetic oligonucleotide
  Antisense strand to SEQ ID NO: 1361692
aaugacccaggguaauuuc

SEQ ID NO: 1361694 - RNA, 19 nt, Artificial Sequence
  Description of Artificial Sequence: Synthetic oligonucleotide
  Sense strand starting at position 3831 of SEQ ID NO: 1242624
guguuacuagcugaucaca

SEQ ID NO: 1361695 - RNA, 19 nt, Artificial Sequence
  Description of Artificial Sequence: Synthetic oligonucleotide
  Antisense strand to SEQ ID NO: 1361694
ugugaucagcuaguaacac

SEQ ID NO: 1361696 - RNA, 19 nt, Artificial Sequence
  Description of Artificial Sequence: Synthetic oligonucleotide
  Sense strand starting at position 3878 of SEQ ID NO: 1242624
gcuugaaaggaaugacucu

SEQ ID NO: 1361697 - RNA, 19 nt, Artificial Sequence
  Description of Artificial Sequence: Synthetic oligonucleotide
  Antisense strand to SEQ ID NO: 1361696
agagucauuccuuucaagc

SEQ ID NO: 1361698 - RNA, 19 nt, Artificial Sequence
  Description of Artificial Sequence: Synthetic oligonucleotide
  Sense strand starting at position 3941 of SEQ ID NO: 1242624
uauugaggguauccauguu

SEQ ID NO: 1361699 - RNA, 19 nt, Artificial Sequence
  Description of Artificial Sequence: Synthetic oligonucleotide
  Antisense strand to SEQ ID NO: 1361698
aacauggauacccucaaua

SEQ ID NO: 1361700 - RNA, 19 nt, Artificial Sequence
  Description of Artificial Sequence: Synthetic oligonucleotide
  Sense strand starting at position 3947 of SEQ ID NO: 1242624
ggguauccauguucuagac

SEQ ID NO: 1361701 - RNA, 19 nt, Artificial Sequence
  Description of Artificial Sequence: Synthetic oligonucleotide
  Antisense strand to SEQ ID NO: 1361700
gucuagaacauggauaccc

SEQ ID NO: 1361702 - RNA, 19 nt, Artificial Sequence
  Description of Artificial Sequence: Synthetic oligonucleotide
  Sense strand starting at position 3 of SEQ ID NO: 1242625
gcagaauucuccugggcug

SEQ ID NO: 1361703 - RNA, 19 nt, Artificial Sequence
  Description of Artificial Sequence: Synthetic oligonucleotide
  Antisense strand to SEQ ID NO: 1361702
cagcccaggagaauucugc

SEQ ID NO: 1361704 - RNA, 19 nt, Artificial Sequence
  Description of Artificial Sequence: Synthetic oligonucleotide
  Sense strand starting at position 6 of SEQ ID NO: 1242625
gaauucuccugggcuguga

SEQ ID NO: 1361705 - RNA, 19 nt, Artificial Sequence
  Description of Artificial Sequence: Synthetic oligonucleotide
  Antisense strand to SEQ ID NO: 1361704
ucacagcccaggagaauuc

SEQ ID NO: 1361706 - RNA, 19 nt, Artificial Sequence
  Description of Artificial Sequence: Synthetic oligonucleotide
  Sense strand starting at position 124 of SEQ ID NO: 1242625
cgcuguuccucucuuguua

SEQ ID NO: 1361707 - RNA, 19 nt, Artificial Sequence
  Description of Artificial Sequence: Synthetic oligonucleotide
  Antisense strand to SEQ ID NO: 1361706
uaacaagagaggaacagcg

SEQ ID NO: 1361708 - RNA, 19 nt, Artificial Sequence
  Description of Artificial Sequence: Synthetic oligonucleotide
  Sense strand starting at position 126 of SEQ ID NO: 1242625
cuguuccucucuuguuaca

SEQ ID NO: 1361709 - RNA, 19 nt, Artificial Sequence
  Description of Artificial Sequence: Synthetic oligonucleotide
  Antisense strand to SEQ ID NO: 1361708
uguaacaagagaggaacag

SEQ ID NO: 1361710 - RNA, 19 nt, Artificial Sequence
  Description of Artificial Sequence: Synthetic oligonucleotide
  Sense strand starting at position 128 of SEQ ID NO: 1242625
guuccucucuuguuacaga

SEQ ID NO: 1361711 - RNA, 19 nt, Artificial Sequence
  Description of Artificial Sequence: Synthetic oligonucleotide
  Antisense strand to SEQ ID NO: 1361710
ucuguaacaagagaggaac

SEQ ID NO: 1361712 - RNA, 19 nt, Artificial Sequence
  Description of Artificial Sequence: Synthetic oligonucleotide
  Sense strand starting at position 129 of SEQ ID NO: 1242625
uuccucucuuguuacagau

SEQ ID NO: 1361713 - RNA, 19 nt, Artificial Sequence
  Description of Artificial Sequence: Synthetic oligonucleotide
  Antisense strand to SEQ ID NO: 1361712
aucuguaacaagagaggaa

SEQ ID NO: 1361714 - RNA, 19 nt, Artificial Sequence
  Description of Artificial Sequence: Synthetic oligonucleotide
  Sense strand starting at position 131 of SEQ ID NO: 1242625
ccucucuuguuacagauga

SEQ ID NO: 1361715 - RNA, 19 nt, Artificial Sequence
  Description of Artificial Sequence: Synthetic oligonucleotide
  Antisense strand to SEQ ID NO: 1361714
ucaucuguaacaagagagg

SEQ ID NO: 1361716 - RNA, 19 nt, Artificial Sequence
  Description of Artificial Sequence: Synthetic oligonucleotide
  Sense strand starting at position 135 of SEQ ID NO: 1242625
ucuuguuacagaugaggca

SEQ ID NO: 1361717 - RNA, 19 nt, Artificial Sequence
  Description of Artificial Sequence: Synthetic oligonucleotide
  Antisense strand to SEQ ID NO: 1361716
ugccucaucuguaacaaga

SEQ ID NO: 1361718 - RNA, 19 nt, Artificial Sequence
  Description of Artificial Sequence: Synthetic oligonucleotide
  Sense strand starting at position 172 of SEQ ID NO: 1242625
cccaaaguccuguaaggca

SEQ ID NO: 1361719 - RNA, 19 nt, Artificial Sequence
  Description of Artificial Sequence: Synthetic oligonucleotide
  Antisense strand to SEQ ID NO: 1361718
ugccuuacaggacuuuggg

SEQ ID NO: 1361720 - RNA, 19 nt, Artificial Sequence
  Description of Artificial Sequence: Synthetic oligonucleotide
  Sense strand starting at position 324 of SEQ ID NO: 1242625
ucacuacugcccugggaua

SEQ ID NO: 1361721 - RNA, 19 nt, Artificial Sequence
  Description of Artificial Sequence: Synthetic oligonucleotide
  Antisense strand to SEQ ID NO: 1361720
uaucccagggcaguaguga

SEQ ID NO: 1361722 - RNA, 19 nt, Artificial Sequence
  Description of Artificial Sequence: Synthetic oligonucleotide
  Sense strand starting at position 441 of SEQ ID NO: 1242625
uccagaacuuuccaggaga

SEQ ID NO: 1361723 - RNA, 19 nt, Artificial Sequence
  Description of Artificial Sequence: Synthetic oligonucleotide
  Antisense strand to SEQ ID NO: 1361722
ucuccuggaaaguucugga

SEQ ID NO: 1361724 - RNA, 19 nt, Artificial Sequence
  Description of Artificial Sequence: Synthetic oligonucleotide
  Sense strand starting at position 521 of SEQ ID NO: 1242625
agacgauuaugcucugaac

SEQ ID NO: 1361725 - RNA, 19 nt, Artificial Sequence
  Description of Artificial Sequence: Synthetic oligonucleotide
  Antisense strand to SEQ ID NO: 1361724
guucagagcauaaucgucu

SEQ ID NO: 1361726 - RNA, 19 nt, Artificial Sequence
  Description of Artificial Sequence: Synthetic oligonucleotide
  Sense strand starting at position 523 of SEQ ID NO: 1242625
acgauuaugcucugaacca

SEQ ID NO: 1361727 - RNA, 19 nt, Artificial Sequence
  Description of Artificial Sequence: Synthetic oligonucleotide
  Antisense strand to SEQ ID NO: 1361726
ugguucagagcauaaucgu

SEQ ID NO: 1361728 - RNA, 19 nt, Artificial Sequence
  Description of Artificial Sequence: Synthetic oligonucleotide
  Sense strand starting at position 524 of SEQ ID NO: 1242625
cgauuaugcucugaaccag

SEQ ID NO: 1361729 - RNA, 19 nt, Artificial Sequence
  Description of Artificial Sequence: Synthetic oligonucleotide
  Antisense strand to SEQ ID NO: 1361728
cugguucagagcauaaucg

SEQ ID NO: 1361730 - RNA, 19 nt, Artificial Sequence
  Description of Artificial Sequence: Synthetic oligonucleotide
  Sense strand starting at position 691 of SEQ ID NO: 1242625
cugcacucacucugggaua

SEQ ID NO: 1361731 - RNA, 19 nt, Artificial Sequence
  Description of Artificial Sequence: Synthetic oligonucleotide
  Antisense strand to SEQ ID NO: 1361730
uaucccagagugagugcag

SEQ ID NO: 1361732 - RNA, 19 nt, Artificial Sequence
  Description of Artificial Sequence: Synthetic oligonucleotide
  Sense strand starting at position 693 of SEQ ID NO: 1242625
gcacucacucugggauagu

SEQ ID NO: 1361733 - RNA, 19 nt, Artificial Sequence
  Description of Artificial Sequence: Synthetic oligonucleotide
  Antisense strand to SEQ ID NO: 1361732
acuaucccagagugagugc

SEQ ID NO: 1361734 - RNA, 19 nt, Artificial Sequence
  Description of Artificial Sequence: Synthetic oligonucleotide
  Sense strand starting at position 694 of SEQ ID NO: 1242625
cacucacucugggauaguu

SEQ ID NO: 1361735 - RNA, 19 nt, Artificial Sequence
  Description of Artificial Sequence: Synthetic oligonucleotide
  Antisense strand to SEQ ID NO: 1361734
aacuaucccagagugagug

SEQ ID NO: 1361736 - RNA, 19 nt, Artificial Sequence
  Description of Artificial Sequence: Synthetic oligonucleotide
  Sense strand starting at position 703 of SEQ ID NO: 1242625
ugggauaguuaaugaagag

SEQ ID NO: 1361737 - RNA, 19 nt, Artificial Sequence
  Description of Artificial Sequence: Synthetic oligonucleotide
  Antisense strand to SEQ ID NO: 1361736
cucuucauuaacuauccca

SEQ ID NO: 1361738 - RNA, 19 nt, Artificial Sequence
  Description of Artificial Sequence: Synthetic oligonucleotide
  Sense strand starting at position 1006 of SEQ ID NO: 1242625
ugcuguucucaggagguga

SEQ ID NO: 1361739 - RNA, 19 nt, Artificial Sequence
  Description of Artificial Sequence: Synthetic oligonucleotide
  Antisense strand to SEQ ID NO: 1361738
ucaccuccugagaacagca

SEQ ID NO: 1361740 - RNA, 19 nt, Artificial Sequence
  Description of Artificial Sequence: Synthetic oligonucleotide
  Sense strand starting at position 1037 of SEQ ID NO: 1242625
cagagaugccagugcccaa

SEQ ID NO: 1361741 - RNA, 19 nt, Artificial Sequence
  Description of Artificial Sequence: Synthetic oligonucleotide
  Antisense strand to SEQ ID NO: 1361740
uugggcacuggcaucucug

SEQ ID NO: 1361742 - RNA, 19 nt, Artificial Sequence
  Description of Artificial Sequence: Synthetic oligonucleotide
  Sense strand starting at position 1049 of SEQ ID NO: 1242625
ugcccaaguguggaaacau

SEQ ID NO: 1361743 - RNA, 19 nt, Artificial Sequence
  Description of Artificial Sequence: Synthetic oligonucleotide
  Antisense strand to SEQ ID NO: 1361742
auguuuccacacuugggca

SEQ ID NO: 1361744 - RNA, 19 nt, Artificial Sequence
  Description of Artificial Sequence: Synthetic oligonucleotide
  Sense strand starting at position 1598 of SEQ ID NO: 1242625
cgauccagcucuccugaaa

SEQ ID NO: 1361745 - RNA, 19 nt, Artificial Sequence
  Description of Artificial Sequence: Synthetic oligonucleotide
  Antisense strand to SEQ ID NO: 1361744
uuucaggagagcuggaucg

SEQ ID NO: 1361746 - RNA, 19 nt, Artificial Sequence
  Description of Artificial Sequence: Synthetic oligonucleotide
  Sense strand starting at position 2511 of SEQ ID NO: 1242625
cuucgugggccugagacuu

SEQ ID NO: 1361747 - RNA, 19 nt, Artificial Sequence
  Description of Artificial Sequence: Synthetic oligonucleotide
  Antisense strand to SEQ ID NO: 1361746
aagucucaggcccacgaag

SEQ ID NO: 1361748 - RNA, 19 nt, Artificial Sequence
  Description of Artificial Sequence: Synthetic oligonucleotide
  Sense strand starting at position 2561 of SEQ ID NO: 1242625
gcuguuucgcaucuaccau

SEQ ID NO: 1361749 - RNA, 19 nt, Artificial Sequence
  Description of Artificial Sequence: Synthetic oligonucleotide
  Antisense strand to SEQ ID NO: 1361748
augguagaugcgaaacagc

SEQ ID NO: 1361750 - RNA, 19 nt, Artificial Sequence
  Description of Artificial Sequence: Synthetic oligonucleotide
  Sense strand starting at position 2923 of SEQ ID NO: 1242625
agggaaucucugugugggu

SEQ ID NO: 1361751 - RNA, 19 nt, Artificial Sequence
  Description of Artificial Sequence: Synthetic oligonucleotide
  Antisense strand to SEQ ID NO: 1361750
acccacacagagauucccu

SEQ ID NO: 1361752 - RNA, 19 nt, Artificial Sequence
  Description of Artificial Sequence: Synthetic oligonucleotide
  Sense strand starting at position 3107 of SEQ ID NO: 1242625
gcgugcagccuugaucuuu

SEQ ID NO: 1361753 - RNA, 19 nt, Artificial Sequence
  Description of Artificial Sequence: Synthetic oligonucleotide
  Antisense strand to SEQ ID NO: 1361752
aaagaucaaggcugcacgc

SEQ ID NO: 1361754 - RNA, 19 nt, Artificial Sequence
  Description of Artificial Sequence: Synthetic oligonucleotide
  Sense strand starting at position 3132 of SEQ ID NO: 1242625
ggagugucccggugaggau

SEQ ID NO: 1361755 - RNA, 19 nt, Artificial Sequence
  Description of Artificial Sequence: Synthetic oligonucleotide
  Antisense strand to SEQ ID NO: 1361754
auccucaccgggacacucc

SEQ ID NO: 1361756 - RNA, 19 nt, Artificial Sequence
  Description of Artificial Sequence: Synthetic oligonucleotide
  Sense strand starting at position 3264 of SEQ ID NO: 1242625
gcuccaguagaguaugguu

SEQ ID NO: 1361757 - RNA, 19 nt, Artificial Sequence
  Description of Artificial Sequence: Synthetic oligonucleotide
  Antisense strand to SEQ ID NO: 1361756
aaccauacucuacuggagc

SEQ ID NO: 1361758 - RNA, 19 nt, Artificial Sequence
  Description of Artificial Sequence: Synthetic oligonucleotide
  Sense strand starting at position 465 of SEQ ID NO: 1242626
cuucgugggccugagacuu

SEQ ID NO: 1361759 - RNA, 19 nt, Artificial Sequence
  Description of Artificial Sequence: Synthetic oligonucleotide
  Antisense strand to SEQ ID NO: 1361758
aagucucaggcccacgaag

SEQ ID NO: 1361760 - RNA, 19 nt, Artificial Sequence
  Description of Artificial Sequence: Synthetic oligonucleotide
  Sense strand starting at position 515 of SEQ ID NO: 1242626
gcuguuucgcaucuaccau

SEQ ID NO: 1361761 - RNA, 19 nt, Artificial Sequence
  Description of Artificial Sequence: Synthetic oligonucleotide
  Antisense strand to SEQ ID NO: 1361760
augguagaugcgaaacagc

SEQ ID NO: 1361762 - RNA, 19 nt, Artificial Sequence
  Description of Artificial Sequence: Synthetic oligonucleotide
  Sense strand starting at position 877 of SEQ ID NO: 1242626
agggaaucucugugugggu

SEQ ID NO: 1361763 - RNA, 19 nt, Artificial Sequence
  Description of Artificial Sequence: Synthetic oligonucleotide
  Antisense strand to SEQ ID NO: 1361762
acccacacagagauucccu

SEQ ID NO: 1361764 - RNA, 19 nt, Artificial Sequence
  Description of Artificial Sequence: Synthetic oligonucleotide
  Sense strand starting at position 1061 of SEQ ID NO: 1242626
gcgugcagccuugaucuuu

SEQ ID NO: 1361765 - RNA, 19 nt, Artificial Sequence
  Description of Artificial Sequence: Synthetic oligonucleotide
  Antisense strand to SEQ ID NO: 1361764
aaagaucaaggcugcacgc

SEQ ID NO: 1361766 - RNA, 19 nt, Artificial Sequence
  Description of Artificial Sequence: Synthetic oligonucleotide
  Sense strand starting at position 1086 of SEQ ID NO: 1242626
ggagugucccggugaggau

SEQ ID NO: 1361767 - RNA, 19 nt, Artificial Sequence
  Description of Artificial Sequence: Synthetic oligonucleotide
  Antisense strand to SEQ ID NO: 1361766
auccucaccgggacacucc

SEQ ID NO: 1361768 - RNA, 19 nt, Artificial Sequence
  Description of Artificial Sequence: Synthetic oligonucleotide
  Sense strand starting at position 1218 of SEQ ID NO: 1242626
gcuccaguagaguaugguu

SEQ ID NO: 1361769 - RNA, 19 nt, Artificial Sequence
  Description of Artificial Sequence: Synthetic oligonucleotide
  Antisense strand to SEQ ID NO: 1361768
aaccauacucuacuggagc

SEQ ID NO: 1361770 - RNA, 19 nt, Artificial Sequence
  Description of Artificial Sequence: Synthetic oligonucleotide
  Sense strand starting at position 1995 of SEQ ID NO: 1242626
ggcaaaugaucccaggaug

SEQ ID NO: 1361771 - RNA, 19 nt, Artificial Sequence
  Description of Artificial Sequence: Synthetic oligonucleotide
  Antisense strand to SEQ ID NO: 1361770
cauccugggaucauuugcc

SEQ ID NO: 1361772 - RNA, 19 nt, Artificial Sequence
  Description of Artificial Sequence: Synthetic oligonucleotide
  Sense strand starting at position 2114 of SEQ ID NO: 1242626
gaggguccuugagagcuaa

SEQ ID NO: 1361773 - RNA, 19 nt, Artificial Sequence
  Description of Artificial Sequence: Synthetic oligonucleotide
  Antisense strand to SEQ ID NO: 1361772
uuagcucucaaggacccuc

SEQ ID NO: 1361774 - RNA, 19 nt, Artificial Sequence
  Description of Artificial Sequence: Synthetic oligonucleotide
  Sense strand starting at position 2118 of SEQ ID NO: 1242626
guccuugagagcuaagcga

SEQ ID NO: 1361775 - RNA, 19 nt, Artificial Sequence
  Description of Artificial Sequence: Synthetic oligonucleotide
  Antisense strand to SEQ ID NO: 1361774
ucgcuuagcucucaaggac

SEQ ID NO: 1361776 - RNA, 19 nt, Artificial Sequence
  Description of Artificial Sequence: Synthetic oligonucleotide
  Sense strand starting at position 2201 of SEQ ID NO: 1242626
uggaguaaaucugugcaga

SEQ ID NO: 1361777 - RNA, 19 nt, Artificial Sequence
  Description of Artificial Sequence: Synthetic oligonucleotide
  Antisense strand to SEQ ID NO: 1361776
ucugcacagauuuacucca

SEQ ID NO: 1361778 - RNA, 19 nt, Artificial Sequence
  Description of Artificial Sequence: Synthetic oligonucleotide
  Sense strand starting at position 2202 of SEQ ID NO: 1242626
ggaguaaaucugugcagag

SEQ ID NO: 1361779 - RNA, 19 nt, Artificial Sequence
  Description of Artificial Sequence: Synthetic oligonucleotide
  Antisense strand to SEQ ID NO: 1361778
cucugcacagauuuacucc

SEQ ID NO: 1361780 - RNA, 19 nt, Artificial Sequence
  Description of Artificial Sequence: Synthetic oligonucleotide
  Sense strand starting at position 2345 of SEQ ID NO: 1242626
cagggacuucucuggcaaa

SEQ ID NO: 1361781 - RNA, 19 nt, Artificial Sequence
  Description of Artificial Sequence: Synthetic oligonucleotide
  Antisense strand to SEQ ID NO: 1361780
uuugccagagaagucccug

SEQ ID NO: 1361782 - RNA, 19 nt, Artificial Sequence
  Description of Artificial Sequence: Synthetic oligonucleotide
  Sense strand starting at position 2346 of SEQ ID NO: 1242626
agggacuucucuggcaaag

SEQ ID NO: 1361783 - RNA, 19 nt, Artificial Sequence
  Description of Artificial Sequence: Synthetic oligonucleotide
  Antisense strand to SEQ ID NO: 1361782
cuuugccagagaagucccu

SEQ ID NO: 1361784 - RNA, 19 nt, Artificial Sequence
  Description of Artificial Sequence: Synthetic oligonucleotide
  Sense strand starting at position 2348 of SEQ ID NO: 1242626
ggacuucucuggcaaagga

SEQ ID NO: 1361785 - RNA, 19 nt, Artificial Sequence
  Description of Artificial Sequence: Synthetic oligonucleotide
  Antisense strand to SEQ ID NO: 1361784
uccuuugccagagaagucc

SEQ ID NO: 1361786 - RNA, 19 nt, Artificial Sequence
  Description of Artificial Sequence: Synthetic oligonucleotide
  Sense strand starting at position 2378 of SEQ ID NO: 1242626
gggagagugcaaugauuac

SEQ ID NO: 1361787 - RNA, 19 nt, Artificial Sequence
  Description of Artificial Sequence: Synthetic oligonucleotide
  Antisense strand to SEQ ID NO: 1361786
guaaucauugcacucuccc

SEQ ID NO: 1361788 - RNA, 19 nt, Artificial Sequence
  Description of Artificial Sequence: Synthetic oligonucleotide
  Sense strand starting at position 2406 of SEQ ID NO: 1242626
guaauaaucucccgucagg

SEQ ID NO: 1361789 - RNA, 19 nt, Artificial Sequence
  Description of Artificial Sequence: Synthetic oligonucleotide
  Antisense strand to SEQ ID NO: 1361788
ccugacgggagauuauuac

SEQ ID NO: 1361790 - RNA, 19 nt, Artificial Sequence
  Description of Artificial Sequence: Synthetic oligonucleotide
  Sense strand starting at position 2756 of SEQ ID NO: 1242626
uggcauuaguaaugaacca

SEQ ID NO: 1361791 - RNA, 19 nt, Artificial Sequence
  Description of Artificial Sequence: Synthetic oligonucleotide
  Antisense strand to SEQ ID NO: 1361790
ugguucauuacuaaugcca

SEQ ID NO: 1361792 - RNA, 19 nt, Artificial Sequence
  Description of Artificial Sequence: Synthetic oligonucleotide
  Sense strand starting at position 3572 of SEQ ID NO: 1242626
uugaggugugcgggaaaca

SEQ ID NO: 1361793 - RNA, 19 nt, Artificial Sequence
  Description of Artificial Sequence: Synthetic oligonucleotide
  Antisense strand to SEQ ID NO: 1361792
uguuucccgcacaccucaa

SEQ ID NO: 1361794 - RNA, 19 nt, Artificial Sequence
  Description of Artificial Sequence: Synthetic oligonucleotide
  Sense strand starting at position 3573 of SEQ ID NO: 1242626
ugaggugugcgggaaacau

SEQ ID NO: 1361795 - RNA, 19 nt, Artificial Sequence
  Description of Artificial Sequence: Synthetic oligonucleotide
  Antisense strand to SEQ ID NO: 1361794
auguuucccgcacaccuca

SEQ ID NO: 1361796 - RNA, 19 nt, Artificial Sequence
  Description of Artificial Sequence: Synthetic oligonucleotide
  Sense strand starting at position 3630 of SEQ ID NO: 1242626
uuaggauuugucugacguu

SEQ ID NO: 1361797 - RNA, 19 nt, Artificial Sequence
  Description of Artificial Sequence: Synthetic oligonucleotide
  Antisense strand to SEQ ID NO: 1361796
aacgucagacaaauccuaa

SEQ ID NO: 1361798 - RNA, 19 nt, Artificial Sequence
  Description of Artificial Sequence: Synthetic oligonucleotide
  Sense strand starting at position 3631 of SEQ ID NO: 1242626
uaggauuugucugacguuu

SEQ ID NO: 1361799 - RNA, 19 nt, Artificial Sequence
  Description of Artificial Sequence: Synthetic oligonucleotide
  Antisense strand to SEQ ID NO: 1361798
aaacgucagacaaauccua

SEQ ID NO: 1361800 - RNA, 19 nt, Artificial Sequence
  Description of Artificial Sequence: Synthetic oligonucleotide
  Sense strand starting at position 3749 of SEQ ID NO: 1242626
aaguaugaucacuguugag

SEQ ID NO: 1361801 - RNA, 19 nt, Artificial Sequence
  Description of Artificial Sequence: Synthetic oligonucleotide
  Antisense strand to SEQ ID NO: 1361800
cucaacagugaucauacuu

SEQ ID NO: 1361802 - RNA, 19 nt, Artificial Sequence
  Description of Artificial Sequence: Synthetic oligonucleotide
  Sense strand starting at position 3790 of SEQ ID NO: 1242626
agggaguguuugucagggu

SEQ ID NO: 1361803 - RNA, 19 nt, Artificial Sequence
  Description of Artificial Sequence: Synthetic oligonucleotide
  Antisense strand to SEQ ID NO: 1361802
acccugacaaacacucccu

SEQ ID NO: 1361804 - RNA, 19 nt, Artificial Sequence
  Description of Artificial Sequence: Synthetic oligonucleotide
  Sense strand starting at position 3791 of SEQ ID NO: 1242626
gggaguguuugucaggguu

SEQ ID NO: 1361805 - RNA, 19 nt, Artificial Sequence
  Description of Artificial Sequence: Synthetic oligonucleotide
  Antisense strand to SEQ ID NO: 1361804
aacccugacaaacacuccc

SEQ ID NO: 1361806 - RNA, 19 nt, Artificial Sequence
  Description of Artificial Sequence: Synthetic oligonucleotide
  Sense strand starting at position 3793 of SEQ ID NO: 1242626
gaguguuugucaggguucu

SEQ ID NO: 1361807 - RNA, 19 nt, Artificial Sequence
  Description of Artificial Sequence: Synthetic oligonucleotide
  Antisense strand to SEQ ID NO: 1361806
agaacccugacaaacacuc

SEQ ID NO: 1361808 - RNA, 19 nt, Artificial Sequence
  Description of Artificial Sequence: Synthetic oligonucleotide
  Sense strand starting at position 3836 of SEQ ID NO: 1242626
cccugcuuucuguagggua

SEQ ID NO: 1361809 - RNA, 19 nt, Artificial Sequence
  Description of Artificial Sequence: Synthetic oligonucleotide
  Antisense strand to SEQ ID NO: 1361808
uacccuacagaaagcaggg

SEQ ID NO: 1361810 - RNA, 19 nt, Artificial Sequence
  Description of Artificial Sequence: Synthetic oligonucleotide
  Sense strand starting at position 3927 of SEQ ID NO: 1242626
gguggacucuauggagaug

SEQ ID NO: 1361811 - RNA, 19 nt, Artificial Sequence
  Description of Artificial Sequence: Synthetic oligonucleotide
  Antisense strand to SEQ ID NO: 1361810
caucuccauagaguccacc

SEQ ID NO: 1361812 - RNA, 19 nt, Artificial Sequence
  Description of Artificial Sequence: Synthetic oligonucleotide
  Sense strand starting at position 3938 of SEQ ID NO: 1242626
uggagaugauuuggaauuc

SEQ ID NO: 1361813 - RNA, 19 nt, Artificial Sequence
  Description of Artificial Sequence: Synthetic oligonucleotide
  Antisense strand to SEQ ID NO: 1361812
gaauuccaaaucaucucca

SEQ ID NO: 1361814 - RNA, 19 nt, Artificial Sequence
  Description of Artificial Sequence: Synthetic oligonucleotide
  Sense strand starting at position 3939 of SEQ ID NO: 1242626
ggagaugauuuggaauucu

SEQ ID NO: 1361815 - RNA, 19 nt, Artificial Sequence
  Description of Artificial Sequence: Synthetic oligonucleotide
  Antisense strand to SEQ ID NO: 1361814
agaauuccaaaucaucucc

SEQ ID NO: 1361816 - RNA, 19 nt, Artificial Sequence
  Description of Artificial Sequence: Synthetic oligonucleotide
  Sense strand starting at position 3948 of SEQ ID NO: 1242626
uuggaauucuucuggauga

SEQ ID NO: 1361817 - RNA, 19 nt, Artificial Sequence
  Description of Artificial Sequence: Synthetic oligonucleotide
  Antisense strand to SEQ ID NO: 1361816
ucauccagaagaauuccaa

SEQ ID NO: 1361818 - RNA, 19 nt, Artificial Sequence
  Description of Artificial Sequence: Synthetic oligonucleotide
  Sense strand starting at position 3949 of SEQ ID NO: 1242626
uggaauucuucuggaugag

SEQ ID NO: 1361819 - RNA, 19 nt, Artificial Sequence
  Description of Artificial Sequence: Synthetic oligonucleotide
  Antisense strand to SEQ ID NO: 1361818
cucauccagaagaauucca

SEQ ID NO: 1361820 - RNA, 19 nt, Artificial Sequence
  Description of Artificial Sequence: Synthetic oligonucleotide
  Sense strand starting at position 3963 of SEQ ID NO: 1242626
augagagauugccuguucu

SEQ ID NO: 1361821 - RNA, 19 nt, Artificial Sequence
  Description of Artificial Sequence: Synthetic oligonucleotide
  Antisense strand to SEQ ID NO: 1361820
agaacaggcaaucucucau

SEQ ID NO: 1361822 - RNA, 19 nt, Artificial Sequence
  Description of Artificial Sequence: Synthetic oligonucleotide
  Sense strand starting at position 204 of SEQ ID NO: 1242627
ugcuguucucaggagguga

SEQ ID NO: 1361823 - RNA, 19 nt, Artificial Sequence
  Description of Artificial Sequence: Synthetic oligonucleotide
  Antisense strand to SEQ ID NO: 1361822
ucaccuccugagaacagca

SEQ ID NO: 1361824 - RNA, 19 nt, Artificial Sequence
  Description of Artificial Sequence: Synthetic oligonucleotide
  Sense strand starting at position 235 of SEQ ID NO: 1242627
cagagaugccagugcccaa

SEQ ID NO: 1361825 - RNA, 19 nt, Artificial Sequence
  Description of Artificial Sequence: Synthetic oligonucleotide
  Antisense strand to SEQ ID NO: 1361824
uugggcacuggcaucucug

SEQ ID NO: 1361826 - RNA, 19 nt, Artificial Sequence
  Description of Artificial Sequence: Synthetic oligonucleotide
  Sense strand starting at position 247 of SEQ ID NO: 1242627
ugcccaaguguggaaacau

SEQ ID NO: 1361827 - RNA, 19 nt, Artificial Sequence
  Description of Artificial Sequence: Synthetic oligonucleotide
  Antisense strand to SEQ ID NO: 1361826
auguuuccacacuugggca

SEQ ID NO: 1361828 - RNA, 19 nt, Artificial Sequence
  Description of Artificial Sequence: Synthetic oligonucleotide
  Sense strand starting at position 796 of SEQ ID NO: 1242627
cgauccagcucuccugaaa

SEQ ID NO: 1361829 - RNA, 19 nt, Artificial Sequence
  Description of Artificial Sequence: Synthetic oligonucleotide
  Antisense strand to SEQ ID NO: 1361828
uuucaggagagcuggaucg

SEQ ID NO: 1361830 - RNA, 19 nt, Artificial Sequence
  Description of Artificial Sequence: Synthetic oligonucleotide
  Sense strand starting at position 1709 of SEQ ID NO: 1242627
cuucgugggccugagacuu

SEQ ID NO: 1361831 - RNA, 19 nt, Artificial Sequence
  Description of Artificial Sequence: Synthetic oligonucleotide
  Antisense strand to SEQ ID NO: 1361830
aagucucaggcccacgaag

SEQ ID NO: 1361832 - RNA, 19 nt, Artificial Sequence
  Description of Artificial Sequence: Synthetic oligonucleotide
  Sense strand starting at position 1759 of SEQ ID NO: 1242627
gcuguuucgcaucuaccau

SEQ ID NO: 1361833 - RNA, 19 nt, Artificial Sequence
  Description of Artificial Sequence: Synthetic oligonucleotide
  Antisense strand to SEQ ID NO: 1361832
augguagaugcgaaacagc

SEQ ID NO: 1361834 - RNA, 19 nt, Artificial Sequence
  Description of Artificial Sequence: Synthetic oligonucleotide
  Sense strand starting at position 2121 of SEQ ID NO: 1242627
agggaaucucugugugggu

SEQ ID NO: 1361835 - RNA, 19 nt, Artificial Sequence
  Description of Artificial Sequence: Synthetic oligonucleotide
  Antisense strand to SEQ ID NO: 1361834
acccacacagagauucccu

SEQ ID NO: 1361836 - RNA, 19 nt, Artificial Sequence
  Description of Artificial Sequence: Synthetic oligonucleotide
  Sense strand starting at position 2305 of SEQ ID NO: 1242627
gcgugcagccuugaucuuu

SEQ ID NO: 1361837 - RNA, 19 nt, Artificial Sequence
  Description of Artificial Sequence: Synthetic oligonucleotide
  Antisense strand to SEQ ID NO: 1361836
aaagaucaaggcugcacgc

SEQ ID NO: 1361838 - RNA, 19 nt, Artificial Sequence
  Description of Artificial Sequence: Synthetic oligonucleotide
  Sense strand starting at position 2330 of SEQ ID NO: 1242627
ggagugucccggugaggau

SEQ ID NO: 1361839 - RNA, 19 nt, Artificial Sequence
  Description of Artificial Sequence: Synthetic oligonucleotide
  Antisense strand to SEQ ID NO: 1361838
auccucaccgggacacucc

SEQ ID NO: 1361840 - RNA, 19 nt, Artificial Sequence
  Description of Artificial Sequence: Synthetic oligonucleotide
  Sense strand starting at position 2462 of SEQ ID NO: 1242627
gcuccaguagaguaugguu

SEQ ID NO: 1361841 - RNA, 19 nt, Artificial Sequence
  Description of Artificial Sequence: Synthetic oligonucleotide
  Antisense strand to SEQ ID NO: 1361840
aaccauacucuacuggagc

SEQ ID NO: 1361842 - RNA, 19 nt, Artificial Sequence
  Description of Artificial Sequence: Synthetic oligonucleotide
  Sense strand starting at position 3239 of SEQ ID NO: 1242627
ggcaaaugaucccaggaug

SEQ ID NO: 1361843 - RNA, 19 nt, Artificial Sequence
  Description of Artificial Sequence: Synthetic oligonucleotide
  Antisense strand to SEQ ID NO: 1361842
cauccugggaucauuugcc

SEQ ID NO: 1361844 - RNA, 19 nt, Artificial Sequence
  Description of Artificial Sequence: Synthetic oligonucleotide
  Sense strand starting at position 3358 of SEQ ID NO: 1242627
gaggguccuugagagcuaa

SEQ ID NO: 1361845 - RNA, 19 nt, Artificial Sequence
  Description of Artificial Sequence: Synthetic oligonucleotide
  Antisense strand to SEQ ID NO: 1361844
uuagcucucaaggacccuc

SEQ ID NO: 1361846 - RNA, 19 nt, Artificial Sequence
  Description of Artificial Sequence: Synthetic oligonucleotide
  Sense strand starting at position 3362 of SEQ ID NO: 1242627
guccuugagagcuaagcga

SEQ ID NO: 1361847 - RNA, 19 nt, Artificial Sequence
  Description of Artificial Sequence: Synthetic oligonucleotide
  Antisense strand to SEQ ID NO: 1361846
ucgcuuagcucucaaggac

SEQ ID NO: 1361848 - RNA, 19 nt, Artificial Sequence
  Description of Artificial Sequence: Synthetic oligonucleotide
  Sense strand starting at position 3445 of SEQ ID NO: 1242627
uggaguaaaucugugcaga

SEQ ID NO: 1361849 - RNA, 19 nt, Artificial Sequence
  Description of Artificial Sequence: Synthetic oligonucleotide
  Antisense strand to SEQ ID NO: 1361848
ucugcacagauuuacucca

SEQ ID NO: 1361850 - RNA, 19 nt, Artificial Sequence
  Description of Artificial Sequence: Synthetic oligonucleotide
  Sense strand starting at position 3446 of SEQ ID NO: 1242627
ggaguaaaucugugcagag

SEQ ID NO: 1361851 - RNA, 19 nt, Artificial Sequence
  Description of Artificial Sequence: Synthetic oligonucleotide
  Antisense strand to SEQ ID NO: 1361850
cucugcacagauuuacucc

SEQ ID NO: 1361852 - RNA, 19 nt, Artificial Sequence
  Description of Artificial Sequence: Synthetic oligonucleotide
  Sense strand starting at position 3589 of SEQ ID NO: 1242627
cagggacuucucuggcaaa

SEQ ID NO: 1361853 - RNA, 19 nt, Artificial Sequence
  Description of Artificial Sequence: Synthetic oligonucleotide
  Antisense strand to SEQ ID NO: 1361852
uuugccagagaagucccug

SEQ ID NO: 1361854 - RNA, 19 nt, Artificial Sequence
  Description of Artificial Sequence: Synthetic oligonucleotide
  Sense strand starting at position 3590 of SEQ ID NO: 1242627
agggacuucucuggcaaag

SEQ ID NO: 1361855 - RNA, 19 nt, Artificial Sequence
  Description of Artificial Sequence: Synthetic oligonucleotide
  Antisense strand to SEQ ID NO: 1361854
cuuugccagagaagucccu

SEQ ID NO: 1361856 - RNA, 19 nt, Artificial Sequence
  Description of Artificial Sequence: Synthetic oligonucleotide
  Sense strand starting at position 3592 of SEQ ID NO: 1242627
ggacuucucuggcaaagga

SEQ ID NO: 1361857 - RNA, 19 nt, Artificial Sequence
  Description of Artificial Sequence: Synthetic oligonucleotide
  Antisense strand to SEQ ID NO: 1361856
uccuuugccagagaagucc

SEQ ID NO: 1361858 - RNA, 19 nt, Artificial Sequence
  Description of Artificial Sequence: Synthetic oligonucleotide
  Sense strand starting at position 3622 of SEQ ID NO: 1242627
gggagagugcaaugauuac

SEQ ID NO: 1361859 - RNA, 19 nt, Artificial Sequence
  Description of Artificial Sequence: Synthetic oligonucleotide
  Antisense strand to SEQ ID NO: 1361858
guaaucauugcacucuccc

SEQ ID NO: 1361860 - RNA, 19 nt, Artificial Sequence
  Description of Artificial Sequence: Synthetic oligonucleotide
  Sense strand starting at position 3650 of SEQ ID NO: 1242627
guaauaaucucccgucagg

SEQ ID NO: 1361861 - RNA, 19 nt, Artificial Sequence
  Description of Artificial Sequence: Synthetic oligonucleotide
  Antisense strand to SEQ ID NO: 1361860
ccugacgggagauuauuac

SEQ ID NO: 1361862 - RNA, 19 nt, Artificial Sequence
  Description of Artificial Sequence: Synthetic oligonucleotide
  Sense strand starting at position 57 of SEQ ID NO: 1242628
uguccaggcucagaagaaa

SEQ ID NO: 1361863 - RNA, 19 nt, Artificial Sequence
  Description of Artificial Sequence: Synthetic oligonucleotide
  Antisense strand to SEQ ID NO: 1361862
uuucuucugagccuggaca

SEQ ID NO: 1361864 - RNA, 19 nt, Artificial Sequence
  Description of Artificial Sequence: Synthetic oligonucleotide
  Sense strand starting at position 142 of SEQ ID NO: 1242628
accagaggguuccuaccaa

SEQ ID NO: 1361865 - RNA, 19 nt, Artificial Sequence
  Description of Artificial Sequence: Synthetic oligonucleotide
  Antisense strand to SEQ ID NO: 1361864
uugguaggaacccucuggu

SEQ ID NO: 1361866 - RNA, 19 nt, Artificial Sequence
  Description of Artificial Sequence: Synthetic oligonucleotide
  Sense strand starting at position 283 of SEQ ID NO: 1242628
ggauccaauucugaggaca

SEQ ID NO: 1361867 - RNA, 19 nt, Artificial Sequence
  Description of Artificial Sequence: Synthetic oligonucleotide
  Antisense strand to SEQ ID NO: 1361866
uguccucagaauuggaucc

SEQ ID NO: 1361868 - RNA, 19 nt, Artificial Sequence
  Description of Artificial Sequence: Synthetic oligonucleotide
  Sense strand starting at position 285 of SEQ ID NO: 1242628
auccaauucugaggacaac

SEQ ID NO: 1361869 - RNA, 19 nt, Artificial Sequence
  Description of Artificial Sequence: Synthetic oligonucleotide
  Antisense strand to SEQ ID NO: 1361868
guuguccucagaauuggau

SEQ ID NO: 1361870 - RNA, 19 nt, Artificial Sequence
  Description of Artificial Sequence: Synthetic oligonucleotide
  Sense strand starting at position 334 of SEQ ID NO: 1242628
ucugcaccauccguauaau

SEQ ID NO: 1361871 - RNA, 19 nt, Artificial Sequence
  Description of Artificial Sequence: Synthetic oligonucleotide
  Antisense strand to SEQ ID NO: 1361870
auuauacggauggugcaga

SEQ ID NO: 1361872 - RNA, 19 nt, Artificial Sequence
  Description of Artificial Sequence: Synthetic oligonucleotide
  Sense strand starting at position 340 of SEQ ID NO: 1242628
ccauccguauaaugggaaa

SEQ ID NO: 1361873 - RNA, 19 nt, Artificial Sequence
  Description of Artificial Sequence: Synthetic oligonucleotide
  Antisense strand to SEQ ID NO: 1361872
uuucccauuauacggaugg

SEQ ID NO: 1361874 - RNA, 19 nt, Artificial Sequence
  Description of Artificial Sequence: Synthetic oligonucleotide
  Sense strand starting at position 534 of SEQ ID NO: 1242628
aggugacuuuccuggcaga

SEQ ID NO: 1361875 - RNA, 19 nt, Artificial Sequence
  Description of Artificial Sequence: Synthetic oligonucleotide
  Antisense strand to SEQ ID NO: 1361874
ucugccaggaaagucaccu

SEQ ID NO: 1361876 - RNA, 19 nt, Artificial Sequence
  Description of Artificial Sequence: Synthetic oligonucleotide
  Sense strand starting at position 535 of SEQ ID NO: 1242628
ggugacuuuccuggcagaa

SEQ ID NO: 1361877 - RNA, 19 nt, Artificial Sequence
  Description of Artificial Sequence: Synthetic oligonucleotide
  Antisense strand to SEQ ID NO: 1361876
uucugccaggaaagucacc

SEQ ID NO: 1361878 - RNA, 19 nt, Artificial Sequence
  Description of Artificial Sequence: Synthetic oligonucleotide
  Sense strand starting at position 797 of SEQ ID NO: 1242628
ggaaacaucucacuagcaa

SEQ ID NO: 1361879 - RNA, 19 nt, Artificial Sequence
  Description of Artificial Sequence: Synthetic oligonucleotide
  Antisense strand to SEQ ID NO: 1361878
uugcuagugagauguuucc

SEQ ID NO: 1361880 - RNA, 19 nt, Artificial Sequence
  Description of Artificial Sequence: Synthetic oligonucleotide
  Sense strand starting at position 820 of SEQ ID NO: 1242628
gagaucaacccauggucau

SEQ ID NO: 1361881 - RNA, 19 nt, Artificial Sequence
  Description of Artificial Sequence: Synthetic oligonucleotide
  Antisense strand to SEQ ID NO: 1361880
augaccauggguugaucuc

SEQ ID NO: 1361882 - RNA, 19 nt, Artificial Sequence
  Description of Artificial Sequence: Synthetic oligonucleotide
  Sense strand starting at position 821 of SEQ ID NO: 1242628
agaucaacccauggucauu

SEQ ID NO: 1361883 - RNA, 19 nt, Artificial Sequence
  Description of Artificial Sequence: Synthetic oligonucleotide
  Antisense strand to SEQ ID NO: 1361882
aaugaccauggguugaucu

SEQ ID NO: 1361884 - RNA, 19 nt, Artificial Sequence
  Description of Artificial Sequence: Synthetic oligonucleotide
  Sense strand starting at position 832 of SEQ ID NO: 1242628
uggucauucugagaaggug

SEQ ID NO: 1361885 - RNA, 19 nt, Artificial Sequence
  Description of Artificial Sequence: Synthetic oligonucleotide
  Antisense strand to SEQ ID NO: 1361884
caccuucucagaaugacca

SEQ ID NO: 1361886 - RNA, 19 nt, Artificial Sequence
  Description of Artificial Sequence: Synthetic oligonucleotide
  Sense strand starting at position 914 of SEQ ID NO: 1242628
acgggagccuugugguaga

SEQ ID NO: 1361887 - RNA, 19 nt, Artificial Sequence
  Description of Artificial Sequence: Synthetic oligonucleotide
  Antisense strand to SEQ ID NO: 1361886
ucuaccacaaggcucccgu

SEQ ID NO: 1361888 - RNA, 19 nt, Artificial Sequence
  Description of Artificial Sequence: Synthetic oligonucleotide
  Sense strand starting at position 1304 of SEQ ID NO: 1242628
gccggagugaaucauuaac

SEQ ID NO: 1361889 - RNA, 19 nt, Artificial Sequence
  Description of Artificial Sequence: Synthetic oligonucleotide
  Antisense strand to SEQ ID NO: 1361888
guuaaugauucacuccggc

SEQ ID NO: 1361890 - RNA, 19 nt, Artificial Sequence
  Description of Artificial Sequence: Synthetic oligonucleotide
  Sense strand starting at position 1306 of SEQ ID NO: 1242628
cggagugaaucauuaacug

SEQ ID NO: 1361891 - RNA, 19 nt, Artificial Sequence
  Description of Artificial Sequence: Synthetic oligonucleotide
  Antisense strand to SEQ ID NO: 1361890
caguuaaugauucacuccg

SEQ ID NO: 1361892 - RNA, 19 nt, Artificial Sequence
  Description of Artificial Sequence: Synthetic oligonucleotide
  Sense strand starting at position 1760 of SEQ ID NO: 1242628
aggaaaugccgcucgcuua

SEQ ID NO: 1361893 - RNA, 19 nt, Artificial Sequence
  Description of Artificial Sequence: Synthetic oligonucleotide
  Antisense strand to SEQ ID NO: 1361892
uaagcgagcggcauuuccu

SEQ ID NO: 1361894 - RNA, 19 nt, Artificial Sequence
  Description of Artificial Sequence: Synthetic oligonucleotide
  Sense strand starting at position 1761 of SEQ ID NO: 1242628
ggaaaugccgcucgcuuaa

SEQ ID NO: 1361895 - RNA, 19 nt, Artificial Sequence
  Description of Artificial Sequence: Synthetic oligonucleotide
  Antisense strand to SEQ ID NO: 1361894
uuaagcgagcggcauuucc

SEQ ID NO: 1361896 - RNA, 19 nt, Artificial Sequence
  Description of Artificial Sequence: Synthetic oligonucleotide
  Sense strand starting at position 2077 of SEQ ID NO: 1242628
cgccgcucuccaugcaaau

SEQ ID NO: 1361897 - RNA, 19 nt, Artificial Sequence
  Description of Artificial Sequence: Synthetic oligonucleotide
  Antisense strand to SEQ ID NO: 1361896
auuugcauggagagcggcg

SEQ ID NO: 1361898 - RNA, 19 nt, Artificial Sequence
  Description of Artificial Sequence: Synthetic oligonucleotide
  Sense strand starting at position 2367 of SEQ ID NO: 1242628
cgacuugucuuucccgcua

SEQ ID NO: 1361899 - RNA, 19 nt, Artificial Sequence
  Description of Artificial Sequence: Synthetic oligonucleotide
  Antisense strand to SEQ ID NO: 1361898
uagcgggaaagacaagucg

SEQ ID NO: 1361900 - RNA, 19 nt, Artificial Sequence
  Description of Artificial Sequence: Synthetic oligonucleotide
  Sense strand starting at position 2372 of SEQ ID NO: 1242628
ugucuuucccgcuaaccaa

SEQ ID NO: 1361901 - RNA, 19 nt, Artificial Sequence
  Description of Artificial Sequence: Synthetic oligonucleotide
  Antisense strand to SEQ ID NO: 1361900
uugguuagcgggaaagaca

SEQ ID NO: 1361902 - RNA, 19 nt, Artificial Sequence
  Description of Artificial Sequence: Synthetic oligonucleotide
  Sense strand starting at position 2397 of SEQ ID NO: 1242628
ggcauucaucgcgugucca

SEQ ID NO: 1361903 - RNA, 19 nt, Artificial Sequence
  Description of Artificial Sequence: Synthetic oligonucleotide
  Antisense strand to SEQ ID NO: 1361902
uggacacgcgaugaaugcc

SEQ ID NO: 1361904 - RNA, 19 nt, Artificial Sequence
  Description of Artificial Sequence: Synthetic oligonucleotide
  Sense strand starting at position 2398 of SEQ ID NO: 1242628
gcauucaucgcguguccau

SEQ ID NO: 1361905 - RNA, 19 nt, Artificial Sequence
  Description of Artificial Sequence: Synthetic oligonucleotide
  Antisense strand to SEQ ID NO: 1361904
auggacacgcgaugaaugc

SEQ ID NO: 1361906 - RNA, 19 nt, Artificial Sequence
  Description of Artificial Sequence: Synthetic oligonucleotide
  Sense strand starting at position 2425 of SEQ ID NO: 1242628
ggacucaaaucugaaucua

SEQ ID NO: 1361907 - RNA, 19 nt, Artificial Sequence
  Description of Artificial Sequence: Synthetic oligonucleotide
  Antisense strand to SEQ ID NO: 1361906
uagauucagauuugagucc

SEQ ID NO: 1361908 - RNA, 19 nt, Artificial Sequence
  Description of Artificial Sequence: Synthetic oligonucleotide
  Sense strand starting at position 2930 of SEQ ID NO: 1242628
gcacaaucugcagggagau

SEQ ID NO: 1361909 - RNA, 19 nt, Artificial Sequence
  Description of Artificial Sequence: Synthetic oligonucleotide
  Antisense strand to SEQ ID NO: 1361908
aucucccugcagauugugc

SEQ ID NO: 1361910 - RNA, 19 nt, Artificial Sequence
  Description of Artificial Sequence: Synthetic oligonucleotide
  Sense strand starting at position 3078 of SEQ ID NO: 1242628
agcagagaauucucaagca

SEQ ID NO: 1361911 - RNA, 19 nt, Artificial Sequence
  Description of Artificial Sequence: Synthetic oligonucleotide
  Antisense strand to SEQ ID NO: 1361910
ugcuugagaauucucugcu

SEQ ID NO: 1361912 - RNA, 19 nt, Artificial Sequence
  Description of Artificial Sequence: Synthetic oligonucleotide
  Sense strand starting at position 3090 of SEQ ID NO: 1242628
ucaagcauggccuauggaa

SEQ ID NO: 1361913 - RNA, 19 nt, Artificial Sequence
  Description of Artificial Sequence: Synthetic oligonucleotide
  Antisense strand to SEQ ID NO: 1361912
uuccauaggccaugcuuga

SEQ ID NO: 1361914 - RNA, 19 nt, Artificial Sequence
  Description of Artificial Sequence: Synthetic oligonucleotide
  Sense strand starting at position 3092 of SEQ ID NO: 1242628
aagcauggccuauggaaga

SEQ ID NO: 1361915 - RNA, 19 nt, Artificial Sequence
  Description of Artificial Sequence: Synthetic oligonucleotide
  Antisense strand to SEQ ID NO: 1361914
ucuuccauaggccaugcuu

SEQ ID NO: 1361916 - RNA, 19 nt, Artificial Sequence
  Description of Artificial Sequence: Synthetic oligonucleotide
  Sense strand starting at position 3348 of SEQ ID NO: 1242628
auauuuggcuugggaagca

SEQ ID NO: 1361917 - RNA, 19 nt, Artificial Sequence
  Description of Artificial Sequence: Synthetic oligonucleotide
  Antisense strand to SEQ ID NO: 1361916
ugcuucccaagccaaauau

SEQ ID NO: 1361918 - RNA, 19 nt, Artificial Sequence
  Description of Artificial Sequence: Synthetic oligonucleotide
  Sense strand starting at position 3360 of SEQ ID NO: 1242628
ggaagcauuggccagaacu

SEQ ID NO: 1361919 - RNA, 19 nt, Artificial Sequence
  Description of Artificial Sequence: Synthetic oligonucleotide
  Antisense strand to SEQ ID NO: 1361918
aguucuggccaaugcuucc

SEQ ID NO: 1361920 - RNA, 19 nt, Artificial Sequence
  Description of Artificial Sequence: Synthetic oligonucleotide
  Sense strand starting at position 3546 of SEQ ID NO: 1242628
gcuuguucccaagagcugu

SEQ ID NO: 1361921 - RNA, 19 nt, Artificial Sequence
  Description of Artificial Sequence: Synthetic oligonucleotide
  Antisense strand to SEQ ID NO: 1361920
acagcucuugggaacaagc

SEQ ID NO: 1361922 - RNA, 19 nt, Artificial Sequence
  Description of Artificial Sequence: Synthetic oligonucleotide
  Sense strand starting at position 20 of SEQ ID NO: 1242629
ggacaaggccucugucuga

SEQ ID NO: 1361923 - RNA, 19 nt, Artificial Sequence
  Description of Artificial Sequence: Synthetic oligonucleotide
  Antisense strand to SEQ ID NO: 1361922
ucagacagaggccuugucc

SEQ ID NO: 1361924 - RNA, 19 nt, Artificial Sequence
  Description of Artificial Sequence: Synthetic oligonucleotide
  Sense strand starting at position 123 of SEQ ID NO: 1242629
ggagaaggccuuugcauac

SEQ ID NO: 1361925 - RNA, 19 nt, Artificial Sequence
  Description of Artificial Sequence: Synthetic oligonucleotide
  Antisense strand to SEQ ID NO: 1361924
guaugcaaaggccuucucc

SEQ ID NO: 1361926 - RNA, 19 nt, Artificial Sequence
  Description of Artificial Sequence: Synthetic oligonucleotide
  Sense strand starting at position 180 of SEQ ID NO: 1242629
caggauuccugucugagaa

SEQ ID NO: 1361927 - RNA, 19 nt, Artificial Sequence
  Description of Artificial Sequence: Synthetic oligonucleotide
  Antisense strand to SEQ ID NO: 1361926
uucucagacaggaauccug

SEQ ID NO: 1361928 - RNA, 19 nt, Artificial Sequence
  Description of Artificial Sequence: Synthetic oligonucleotide
  Sense strand starting at position 181 of SEQ ID NO: 1242629
aggauuccugucugagaag

SEQ ID NO: 1361929 - RNA, 19 nt, Artificial Sequence
  Description of Artificial Sequence: Synthetic oligonucleotide
  Antisense strand to SEQ ID NO: 1361928
cuucucagacaggaauccu

SEQ ID NO: 1361930 - RNA, 19 nt, Artificial Sequence
  Description of Artificial Sequence: Synthetic oligonucleotide
  Sense strand starting at position 182 of SEQ ID NO: 1242629
ggauuccugucugagaaga

SEQ ID NO: 1361931 - RNA, 19 nt, Artificial Sequence
  Description of Artificial Sequence: Synthetic oligonucleotide
  Antisense strand to SEQ ID NO: 1361930
ucuucucagacaggaaucc

SEQ ID NO: 1361932 - RNA, 19 nt, Artificial Sequence
  Description of Artificial Sequence: Synthetic oligonucleotide
  Sense strand starting at position 284 of SEQ ID NO: 1242629
cgcagacuccauggaugau

SEQ ID NO: 1361933 - RNA, 19 nt, Artificial Sequence
  Description of Artificial Sequence: Synthetic oligonucleotide
  Antisense strand to SEQ ID NO: 1361932
aucauccauggagucugcg

SEQ ID NO: 1361934 - RNA, 19 nt, Artificial Sequence
  Description of Artificial Sequence: Synthetic oligonucleotide
  Sense strand starting at position 390 of SEQ ID NO: 1242629
gcauuccugcucuggacau

SEQ ID NO: 1361935 - RNA, 19 nt, Artificial Sequence
  Description of Artificial Sequence: Synthetic oligonucleotide
  Antisense strand to SEQ ID NO: 1361934
auguccagagcaggaaugc

SEQ ID NO: 1361936 - RNA, 19 nt, Artificial Sequence
  Description of Artificial Sequence: Synthetic oligonucleotide
  Sense strand starting at position 741 of SEQ ID NO: 1242629
gaaggcuccuccugggaca

SEQ ID NO: 1361937 - RNA, 19 nt, Artificial Sequence
  Description of Artificial Sequence: Synthetic oligonucleotide
  Antisense strand to SEQ ID NO: 1361936
ugucccaggaggagccuuc

SEQ ID NO: 1361938 - RNA, 19 nt, Artificial Sequence
  Description of Artificial Sequence: Synthetic oligonucleotide
  Sense strand starting at position 794 of SEQ ID NO: 1242629
ccagcauaucuugacauag

SEQ ID NO: 1361939 - RNA, 19 nt, Artificial Sequence
  Description of Artificial Sequence: Synthetic oligonucleotide
  Antisense strand to SEQ ID NO: 1361938
cuaugucaagauaugcugg

SEQ ID NO: 1361940 - RNA, 19 nt, Artificial Sequence
  Description of Artificial Sequence: Synthetic oligonucleotide
  Sense strand starting at position 1040 of SEQ ID NO: 1242629
ucugccuggcucugagaau

SEQ ID NO: 1361941 - RNA, 19 nt, Artificial Sequence
  Description of Artificial Sequence: Synthetic oligonucleotide
  Antisense strand to SEQ ID NO: 1361940
auucucagagccaggcaga

SEQ ID NO: 1361942 - RNA, 19 nt, Artificial Sequence
  Description of Artificial Sequence: Synthetic oligonucleotide
  Sense strand starting at position 1289 of SEQ ID NO: 1242629
uggugucggcgagugguaa

SEQ ID NO: 1361943 - RNA, 19 nt, Artificial Sequence
  Description of Artificial Sequence: Synthetic oligonucleotide
  Antisense strand to SEQ ID NO: 1361942
uuaccacucgccgacacca

SEQ ID NO: 1361944 - RNA, 19 nt, Artificial Sequence
  Description of Artificial Sequence: Synthetic oligonucleotide
  Sense strand starting at position 1412 of SEQ ID NO: 1242629
agguaucacugcugaccaa

SEQ ID NO: 1361945 - RNA, 19 nt, Artificial Sequence
  Description of Artificial Sequence: Synthetic oligonucleotide
  Antisense strand to SEQ ID NO: 1361944
uuggucagcagugauaccu

SEQ ID NO: 1361946 - RNA, 19 nt, Artificial Sequence
  Description of Artificial Sequence: Synthetic oligonucleotide
  Sense strand starting at position 1413 of SEQ ID NO: 1242629
gguaucacugcugaccaaa

SEQ ID NO: 1361947 - RNA, 19 nt, Artificial Sequence
  Description of Artificial Sequence: Synthetic oligonucleotide
  Antisense strand to SEQ ID NO: 1361946
uuuggucagcagugauacc

SEQ ID NO: 1361948 - RNA, 19 nt, Artificial Sequence
  Description of Artificial Sequence: Synthetic oligonucleotide
  Sense strand starting at position 1592 of SEQ ID NO: 1242629
ggguaauagugccacacuu

SEQ ID NO: 1361949 - RNA, 19 nt, Artificial Sequence
  Description of Artificial Sequence: Synthetic oligonucleotide
  Antisense strand to SEQ ID NO: 1361948
aaguguggcacuauuaccc

SEQ ID NO: 1361950 - RNA, 19 nt, Artificial Sequence
  Description of Artificial Sequence: Synthetic oligonucleotide
  Sense strand starting at position 1594 of SEQ ID NO: 1242629
guaauagugccacacuugu

SEQ ID NO: 1361951 - RNA, 19 nt, Artificial Sequence
  Description of Artificial Sequence: Synthetic oligonucleotide
  Antisense strand to SEQ ID NO: 1361950
acaaguguggcacuauuac

SEQ ID NO: 1361952 - RNA, 19 nt, Artificial Sequence
  Description of Artificial Sequence: Synthetic oligonucleotide
  Sense strand starting at position 1600 of SEQ ID NO: 1242629
gugccacacuugucacuaa

SEQ ID NO: 1361953 - RNA, 19 nt, Artificial Sequence
  Description of Artificial Sequence: Synthetic oligonucleotide
  Antisense strand to SEQ ID NO: 1361952
uuagugacaaguguggcac

SEQ ID NO: 1361954 - RNA, 19 nt, Artificial Sequence
  Description of Artificial Sequence: Synthetic oligonucleotide
  Sense strand starting at position 1603 of SEQ ID NO: 1242629
ccacacuugucacuaaguu

SEQ ID NO: 1361955 - RNA, 19 nt, Artificial Sequence
  Description of Artificial Sequence: Synthetic oligonucleotide
  Antisense strand to SEQ ID NO: 1361954
aacuuagugacaagugugg

SEQ ID NO: 1361956 - RNA, 19 nt, Artificial Sequence
  Description of Artificial Sequence: Synthetic oligonucleotide
  Sense strand starting at position 1869 of SEQ ID NO: 1242629
acgccuggguucguggaaa

SEQ ID NO: 1361957 - RNA, 19 nt, Artificial Sequence
  Description of Artificial Sequence: Synthetic oligonucleotide
  Antisense strand to SEQ ID NO: 1361956
uuuccacgaacccaggcgu

SEQ ID NO: 1361958 - RNA, 19 nt, Artificial Sequence
  Description of Artificial Sequence: Synthetic oligonucleotide
  Sense strand starting at position 1894 of SEQ ID NO: 1242629
gaggaaaugucacaggccu

SEQ ID NO: 1361959 - RNA, 19 nt, Artificial Sequence
  Description of Artificial Sequence: Synthetic oligonucleotide
  Antisense strand to SEQ ID NO: 1361958
aggccugugacauuuccuc

SEQ ID NO: 1361960 - RNA, 19 nt, Artificial Sequence
  Description of Artificial Sequence: Synthetic oligonucleotide
  Sense strand starting at position 1896 of SEQ ID NO: 1242629
ggaaaugucacaggccuuu

SEQ ID NO: 1361961 - RNA, 19 nt, Artificial Sequence
  Description of Artificial Sequence: Synthetic oligonucleotide
  Antisense strand to SEQ ID NO: 1361960
aaaggccugugacauuucc

SEQ ID NO: 1361962 - RNA, 19 nt, Artificial Sequence
  Description of Artificial Sequence: Synthetic oligonucleotide
  Sense strand starting at position 1991 of SEQ ID NO: 1242629
gggaaacacugacuucuuu

SEQ ID NO: 1361963 - RNA, 19 nt, Artificial Sequence
  Description of Artificial Sequence: Synthetic oligonucleotide
  Antisense strand to SEQ ID NO: 1361962
aaagaagucaguguuuccc

SEQ ID NO: 1361964 - RNA, 19 nt, Artificial Sequence
  Description of Artificial Sequence: Synthetic oligonucleotide
  Sense strand starting at position 2056 of SEQ ID NO: 1242629
auucuauuugcuuguccca

SEQ ID NO: 1361965 - RNA, 19 nt, Artificial Sequence
  Description of Artificial Sequence: Synthetic oligonucleotide
  Antisense strand to SEQ ID NO: 1361964
ugggacaagcaaauagaau

SEQ ID NO: 1361966 - RNA, 19 nt, Artificial Sequence
  Description of Artificial Sequence: Synthetic oligonucleotide
  Sense strand starting at position 2436 of SEQ ID NO: 1242629
gggcgugaaucgucggaga

SEQ ID NO: 1361967 - RNA, 19 nt, Artificial Sequence
  Description of Artificial Sequence: Synthetic oligonucleotide
  Antisense strand to SEQ ID NO: 1361966
ucuccgacgauucacgccc

SEQ ID NO: 1361968 - RNA, 19 nt, Artificial Sequence
  Description of Artificial Sequence: Synthetic oligonucleotide
  Sense strand starting at position 2438 of SEQ ID NO: 1242629
gcgugaaucgucggagagg

SEQ ID NO: 1361969 - RNA, 19 nt, Artificial Sequence
  Description of Artificial Sequence: Synthetic oligonucleotide
  Antisense strand to SEQ ID NO: 1361968
ccucuccgacgauucacgc

SEQ ID NO: 1361970 - RNA, 19 nt, Artificial Sequence
  Description of Artificial Sequence: Synthetic oligonucleotide
  Sense strand starting at position 2439 of SEQ ID NO: 1242629
cgugaaucgucggagagga

SEQ ID NO: 1361971 - RNA, 19 nt, Artificial Sequence
  Description of Artificial Sequence: Synthetic oligonucleotide
  Antisense strand to SEQ ID NO: 1361970
uccucuccgacgauucacg

SEQ ID NO: 1361972 - RNA, 19 nt, Artificial Sequence
  Description of Artificial Sequence: Synthetic oligonucleotide
  Sense strand starting at position 2627 of SEQ ID NO: 1242629
cagcuaugggcugaaagca

SEQ ID NO: 1361973 - RNA, 19 nt, Artificial Sequence
  Description of Artificial Sequence: Synthetic oligonucleotide
  Antisense strand to SEQ ID NO: 1361972
ugcuuucagcccauagcug

SEQ ID NO: 1361974 - RNA, 19 nt, Artificial Sequence
  Description of Artificial Sequence: Synthetic oligonucleotide
  Sense strand starting at position 2878 of SEQ ID NO: 1242629
ggcagagagcucgguguga

SEQ ID NO: 1361975 - RNA, 19 nt, Artificial Sequence
  Description of Artificial Sequence: Synthetic oligonucleotide
  Antisense strand to SEQ ID NO: 1361974
ucacaccgagcucucugcc

SEQ ID NO: 1361976 - RNA, 19 nt, Artificial Sequence
  Description of Artificial Sequence: Synthetic oligonucleotide
  Sense strand starting at position 2960 of SEQ ID NO: 1242629
ccaacugugucaucaagga

SEQ ID NO: 1361977 - RNA, 19 nt, Artificial Sequence
  Description of Artificial Sequence: Synthetic oligonucleotide
  Antisense strand to SEQ ID NO: 1361976
uccuugaugacacaguugg

SEQ ID NO: 1361978 - RNA, 19 nt, Artificial Sequence
  Description of Artificial Sequence: Synthetic oligonucleotide
  Sense strand starting at position 2965 of SEQ ID NO: 1242629
ugugucaucaaggaggcua

SEQ ID NO: 1361979 - RNA, 19 nt, Artificial Sequence
  Description of Artificial Sequence: Synthetic oligonucleotide
  Antisense strand to SEQ ID NO: 1361978
uagccuccuugaugacaca

SEQ ID NO: 1361980 - RNA, 19 nt, Artificial Sequence
  Description of Artificial Sequence: Synthetic oligonucleotide
  Sense strand starting at position 3184 of SEQ ID NO: 1242629
agugucuuugcuggagaaa

SEQ ID NO: 1361981 - RNA, 19 nt, Artificial Sequence
  Description of Artificial Sequence: Synthetic oligonucleotide
  Antisense strand to SEQ ID NO: 1361980
uuucuccagcaaagacacu

SEQ ID NO: 1361982 - RNA, 19 nt, Artificial Sequence
  Description of Artificial Sequence: Synthetic oligonucleotide
  Sense strand starting at position 3185 of SEQ ID NO: 1242629
gugucuuugcuggagaaac

SEQ ID NO: 1361983 - RNA, 19 nt, Artificial Sequence
  Description of Artificial Sequence: Synthetic oligonucleotide
  Antisense strand to SEQ ID NO: 1361982
guuucuccagcaaagacac

SEQ ID NO: 1361984 - RNA, 19 nt, Artificial Sequence
  Description of Artificial Sequence: Synthetic oligonucleotide
  Sense strand starting at position 3187 of SEQ ID NO: 1242629
gucuuugcuggagaaacuu

SEQ ID NO: 1361985 - RNA, 19 nt, Artificial Sequence
  Description of Artificial Sequence: Synthetic oligonucleotide
  Antisense strand to SEQ ID NO: 1361984
aaguuucuccagcaaagac

SEQ ID NO: 1361986 - RNA, 19 nt, Artificial Sequence
  Description of Artificial Sequence: Synthetic oligonucleotide
  Sense strand starting at position 3359 of SEQ ID NO: 1242629
uguccaggcucagaagaaa

SEQ ID NO: 1361987 - RNA, 19 nt, Artificial Sequence
  Description of Artificial Sequence: Synthetic oligonucleotide
  Antisense strand to SEQ ID NO: 1361986
uuucuucugagccuggaca

SEQ ID NO: 1361988 - RNA, 19 nt, Artificial Sequence
  Description of Artificial Sequence: Synthetic oligonucleotide
  Sense strand starting at position 3444 of SEQ ID NO: 1242629
accagaggguuccuaccaa

SEQ ID NO: 1361989 - RNA, 19 nt, Artificial Sequence
  Description of Artificial Sequence: Synthetic oligonucleotide
  Antisense strand to SEQ ID NO: 1361988
uugguaggaacccucuggu

SEQ ID NO: 1361990 - RNA, 19 nt, Artificial Sequence
  Description of Artificial Sequence: Synthetic oligonucleotide
  Sense strand starting at position 3585 of SEQ ID NO: 1242629
ggauccaauucugaggaca

SEQ ID NO: 1361991 - RNA, 19 nt, Artificial Sequence
  Description of Artificial Sequence: Synthetic oligonucleotide
  Antisense strand to SEQ ID NO: 1361990
uguccucagaauuggaucc

SEQ ID NO: 1361992 - RNA, 19 nt, Artificial Sequence
  Description of Artificial Sequence: Synthetic oligonucleotide
  Sense strand starting at position 3587 of SEQ ID NO: 1242629
auccaauucugaggacaac

SEQ ID NO: 1361993 - RNA, 19 nt, Artificial Sequence
  Description of Artificial Sequence: Synthetic oligonucleotide
  Antisense strand to SEQ ID NO: 1361992
guuguccucagaauuggau

SEQ ID NO: 1361994 - RNA, 19 nt, Artificial Sequence
  Description of Artificial Sequence: Synthetic oligonucleotide
  Sense strand starting at position 3636 of SEQ ID NO: 1242629
ucugcaccauccguauaau

SEQ ID NO: 1361995 - RNA, 19 nt, Artificial Sequence
  Description of Artificial Sequence: Synthetic oligonucleotide
  Antisense strand to SEQ ID NO: 1361994
auuauacggauggugcaga

SEQ ID NO: 1361996 - RNA, 19 nt, Artificial Sequence
  Description of Artificial Sequence: Synthetic oligonucleotide
  Sense strand starting at position 3642 of SEQ ID NO: 1242629
ccauccguauaaugggaaa

SEQ ID NO: 1361997 - RNA, 19 nt, Artificial Sequence
  Description of Artificial Sequence: Synthetic oligonucleotide
  Antisense strand to SEQ ID NO: 1361996
uuucccauuauacggaugg

SEQ ID NO: 1361998 - RNA, 19 nt, Artificial Sequence
  Description of Artificial Sequence: Synthetic oligonucleotide
  Sense strand starting at position 3836 of SEQ ID NO: 1242629
aggugacuuuccuggcaga

SEQ ID NO: 1361999 - RNA, 19 nt, Artificial Sequence
  Description of Artificial Sequence: Synthetic oligonucleotide
  Antisense strand to SEQ ID NO: 1361998
ucugccaggaaagucaccu

SEQ ID NO: 1362000 - RNA, 19 nt, Artificial Sequence
  Description of Artificial Sequence: Synthetic oligonucleotide
  Sense strand starting at position 3837 of SEQ ID NO: 1242629
ggugacuuuccuggcagaa

SEQ ID NO: 1362001 - RNA, 19 nt, Artificial Sequence
  Description of Artificial Sequence: Synthetic oligonucleotide
  Antisense strand to SEQ ID NO: 1362000
uucugccaggaaagucacc

SEQ ID NO: 1362002 - RNA, 19 nt, Artificial Sequence
  Description of Artificial Sequence: Synthetic oligonucleotide
  Sense strand starting at position 62 of SEQ ID NO: 1242630
gcagaauucuccugggcug

SEQ ID NO: 1362003 - RNA, 19 nt, Artificial Sequence
  Description of Artificial Sequence: Synthetic oligonucleotide
  Antisense strand to SEQ ID NO: 1362002
cagcccaggagaauucugc

SEQ ID NO: 1362004 - RNA, 19 nt, Artificial Sequence
  Description of Artificial Sequence: Synthetic oligonucleotide
  Sense strand starting at position 65 of SEQ ID NO: 1242630
gaauucuccugggcuguga

SEQ ID NO: 1362005 - RNA, 19 nt, Artificial Sequence
  Description of Artificial Sequence: Synthetic oligonucleotide
  Antisense strand to SEQ ID NO: 1362004
ucacagcccaggagaauuc

SEQ ID NO: 1362006 - RNA, 19 nt, Artificial Sequence
  Description of Artificial Sequence: Synthetic oligonucleotide
  Sense strand starting at position 183 of SEQ ID NO: 1242630
cgcuguuccucucuuguua

SEQ ID NO: 1362007 - RNA, 19 nt, Artificial Sequence
  Description of Artificial Sequence: Synthetic oligonucleotide
  Antisense strand to SEQ ID NO: 1362006
uaacaagagaggaacagcg

SEQ ID NO: 1362008 - RNA, 19 nt, Artificial Sequence
  Description of Artificial Sequence: Synthetic oligonucleotide
  Sense strand starting at position 185 of SEQ ID NO: 1242630
cuguuccucucuuguuaca

SEQ ID NO: 1362009 - RNA, 19 nt, Artificial Sequence
  Description of Artificial Sequence: Synthetic oligonucleotide
  Antisense strand to SEQ ID NO: 1362008
uguaacaagagaggaacag

SEQ ID NO: 1362010 - RNA, 19 nt, Artificial Sequence
  Description of Artificial Sequence: Synthetic oligonucleotide
  Sense strand starting at position 187 of SEQ ID NO: 1242630
guuccucucuuguuacaga

SEQ ID NO: 1362011 - RNA, 19 nt, Artificial Sequence
  Description of Artificial Sequence: Synthetic oligonucleotide
  Antisense strand to SEQ ID NO: 1362010
ucuguaacaagagaggaac

SEQ ID NO: 1362012 - RNA, 19 nt, Artificial Sequence
  Description of Artificial Sequence: Synthetic oligonucleotide
  Sense strand starting at position 188 of SEQ ID NO: 1242630
uuccucucuuguuacagau

SEQ ID NO: 1362013 - RNA, 19 nt, Artificial Sequence
  Description of Artificial Sequence: Synthetic oligonucleotide
  Antisense strand to SEQ ID NO: 1362012
aucuguaacaagagaggaa

SEQ ID NO: 1362014 - RNA, 19 nt, Artificial Sequence
  Description of Artificial Sequence: Synthetic oligonucleotide
  Sense strand starting at position 190 of SEQ ID NO: 1242630
ccucucuuguuacagauga

SEQ ID NO: 1362015 - RNA, 19 nt, Artificial Sequence
  Description of Artificial Sequence: Synthetic oligonucleotide
  Antisense strand to SEQ ID NO: 1362014
ucaucuguaacaagagagg

SEQ ID NO: 1362016 - RNA, 19 nt, Artificial Sequence
  Description of Artificial Sequence: Synthetic oligonucleotide
  Sense strand starting at position 194 of SEQ ID NO: 1242630
ucuuguuacagaugaggca

SEQ ID NO: 1362017 - RNA, 19 nt, Artificial Sequence
  Description of Artificial Sequence: Synthetic oligonucleotide
  Antisense strand to SEQ ID NO: 1362016
ugccucaucuguaacaaga

SEQ ID NO: 1362018 - RNA, 19 nt, Artificial Sequence
  Description of Artificial Sequence: Synthetic oligonucleotide
  Sense strand starting at position 231 of SEQ ID NO: 1242630
cccaaaguccuguaaggca

SEQ ID NO: 1362019 - RNA, 19 nt, Artificial Sequence
  Description of Artificial Sequence: Synthetic oligonucleotide
  Antisense strand to SEQ ID NO: 1362018
ugccuuacaggacuuuggg

SEQ ID NO: 1362020 - RNA, 19 nt, Artificial Sequence
  Description of Artificial Sequence: Synthetic oligonucleotide
  Sense strand starting at position 383 of SEQ ID NO: 1242630
ucacuacugcccugggaua

SEQ ID NO: 1362021 - RNA, 19 nt, Artificial Sequence
  Description of Artificial Sequence: Synthetic oligonucleotide
  Antisense strand to SEQ ID NO: 1362020
uaucccagggcaguaguga

SEQ ID NO: 1362022 - RNA, 19 nt, Artificial Sequence
  Description of Artificial Sequence: Synthetic oligonucleotide
  Sense strand starting at position 500 of SEQ ID NO: 1242630
uccagaacuuuccaggaga

SEQ ID NO: 1362023 - RNA, 19 nt, Artificial Sequence
  Description of Artificial Sequence: Synthetic oligonucleotide
  Antisense strand to SEQ ID NO: 1362022
ucuccuggaaaguucugga

SEQ ID NO: 1362024 - RNA, 19 nt, Artificial Sequence
  Description of Artificial Sequence: Synthetic oligonucleotide
  Sense strand starting at position 580 of SEQ ID NO: 1242630
agacgauuaugcucugaac

SEQ ID NO: 1362025 - RNA, 19 nt, Artificial Sequence
  Description of Artificial Sequence: Synthetic oligonucleotide
  Antisense strand to SEQ ID NO: 1362024
guucagagcauaaucgucu

SEQ ID NO: 1362026 - RNA, 19 nt, Artificial Sequence
  Description of Artificial Sequence: Synthetic oligonucleotide
  Sense strand starting at position 582 of SEQ ID NO: 1242630
acgauuaugcucugaacca

SEQ ID NO: 1362027 - RNA, 19 nt, Artificial Sequence
  Description of Artificial Sequence: Synthetic oligonucleotide
  Antisense strand to SEQ ID NO: 1362026
ugguucagagcauaaucgu

SEQ ID NO: 1362028 - RNA, 19 nt, Artificial Sequence
  Description of Artificial Sequence: Synthetic oligonucleotide
  Sense strand starting at position 583 of SEQ ID NO: 1242630
cgauuaugcucugaaccag

SEQ ID NO: 1362029 - RNA, 19 nt, Artificial Sequence
  Description of Artificial Sequence: Synthetic oligonucleotide
  Antisense strand to SEQ ID NO: 1362028
cugguucagagcauaaucg

SEQ ID NO: 1362030 - RNA, 19 nt, Artificial Sequence
  Description of Artificial Sequence: Synthetic oligonucleotide
  Sense strand starting at position 750 of SEQ ID NO: 1242630
cugcacucacucugggaua

SEQ ID NO: 1362031 - RNA, 19 nt, Artificial Sequence
  Description of Artificial Sequence: Synthetic oligonucleotide
  Antisense strand to SEQ ID NO: 1362030
uaucccagagugagugcag

SEQ ID NO: 1362032 - RNA, 19 nt, Artificial Sequence
  Description of Artificial Sequence: Synthetic oligonucleotide
  Sense strand starting at position 752 of SEQ ID NO: 1242630
gcacucacucugggauagu

SEQ ID NO: 1362033 - RNA, 19 nt, Artificial Sequence
  Description of Artificial Sequence: Synthetic oligonucleotide
  Antisense strand to SEQ ID NO: 1362032
acuaucccagagugagugc

SEQ ID NO: 1362034 - RNA, 19 nt, Artificial Sequence
  Description of Artificial Sequence: Synthetic oligonucleotide
  Sense strand starting at position 753 of SEQ ID NO: 1242630
cacucacucugggauaguu

SEQ ID NO: 1362035 - RNA, 19 nt, Artificial Sequence
  Description of Artificial Sequence: Synthetic oligonucleotide
  Antisense strand to SEQ ID NO: 1362034
aacuaucccagagugagug

SEQ ID NO: 1362036 - RNA, 19 nt, Artificial Sequence
  Description of Artificial Sequence: Synthetic oligonucleotide
  Sense strand starting at position 762 of SEQ ID NO: 1242630
ugggauaguuaaugaagag

SEQ ID NO: 1362037 - RNA, 19 nt, Artificial Sequence
  Description of Artificial Sequence: Synthetic oligonucleotide
  Antisense strand to SEQ ID NO: 1362036
cucuucauuaacuauccca

SEQ ID NO: 1362038 - RNA, 19 nt, Artificial Sequence
  Description of Artificial Sequence: Synthetic oligonucleotide
  Sense strand starting at position 1065 of SEQ ID NO: 1242630
ugcuguucucaggagguga

SEQ ID NO: 1362039 - RNA, 19 nt, Artificial Sequence
  Description of Artificial Sequence: Synthetic oligonucleotide
  Antisense strand to SEQ ID NO: 1362038
ucaccuccugagaacagca

SEQ ID NO: 1362040 - RNA, 19 nt, Artificial Sequence
  Description of Artificial Sequence: Synthetic oligonucleotide
  Sense strand starting at position 1096 of SEQ ID NO: 1242630
cagagaugccagugcccaa

SEQ ID NO: 1362041 - RNA, 19 nt, Artificial Sequence
  Description of Artificial Sequence: Synthetic oligonucleotide
  Antisense strand to SEQ ID NO: 1362040
uugggcacuggcaucucug

SEQ ID NO: 1362042 - RNA, 19 nt, Artificial Sequence
  Description of Artificial Sequence: Synthetic oligonucleotide
  Sense strand starting at position 1108 of SEQ ID NO: 1242630
ugcccaaguguggaaacau

SEQ ID NO: 1362043 - RNA, 19 nt, Artificial Sequence
  Description of Artificial Sequence: Synthetic oligonucleotide
  Antisense strand to SEQ ID NO: 1362042
auguuuccacacuugggca

SEQ ID NO: 1362044 - RNA, 19 nt, Artificial Sequence
  Description of Artificial Sequence: Synthetic oligonucleotide
  Sense strand starting at position 1657 of SEQ ID NO: 1242630
cgauccagcucuccugaaa

SEQ ID NO: 1362045 - RNA, 19 nt, Artificial Sequence
  Description of Artificial Sequence: Synthetic oligonucleotide
  Antisense strand to SEQ ID NO: 1362044
uuucaggagagcuggaucg

SEQ ID NO: 1362046 - RNA, 19 nt, Artificial Sequence
  Description of Artificial Sequence: Synthetic oligonucleotide
  Sense strand starting at position 2570 of SEQ ID NO: 1242630
cuucgugggccugagacuu

SEQ ID NO: 1362047 - RNA, 19 nt, Artificial Sequence
  Description of Artificial Sequence: Synthetic oligonucleotide
  Antisense strand to SEQ ID NO: 1362046
aagucucaggcccacgaag

SEQ ID NO: 1362048 - RNA, 19 nt, Artificial Sequence
  Description of Artificial Sequence: Synthetic oligonucleotide
  Sense strand starting at position 2620 of SEQ ID NO: 1242630
gcuguuucgcaucuaccau

SEQ ID NO: 1362049 - RNA, 19 nt, Artificial Sequence
  Description of Artificial Sequence: Synthetic oligonucleotide
  Antisense strand to SEQ ID NO: 1362048
augguagaugcgaaacagc

SEQ ID NO: 1362050 - RNA, 19 nt, Artificial Sequence
  Description of Artificial Sequence: Synthetic oligonucleotide
  Sense strand starting at position 2982 of SEQ ID NO: 1242630
agggaaucucugugugggu

SEQ ID NO: 1362051 - RNA, 19 nt, Artificial Sequence
  Description of Artificial Sequence: Synthetic oligonucleotide
  Antisense strand to SEQ ID NO: 1362050
acccacacagagauucccu

SEQ ID NO: 1362052 - RNA, 19 nt, Artificial Sequence
  Description of Artificial Sequence: Synthetic oligonucleotide
  Sense strand starting at position 3166 of SEQ ID NO: 1242630
gcgugcagccuugaucuuu

SEQ ID NO: 1362053 - RNA, 19 nt, Artificial Sequence
  Description of Artificial Sequence: Synthetic oligonucleotide
  Antisense strand to SEQ ID NO: 1362052
aaagaucaaggcugcacgc

SEQ ID NO: 1362054 - RNA, 19 nt, Artificial Sequence
  Description of Artificial Sequence: Synthetic oligonucleotide
  Sense strand starting at position 3191 of SEQ ID NO: 1242630
ggagugucccggugaggau

SEQ ID NO: 1362055 - RNA, 19 nt, Artificial Sequence
  Description of Artificial Sequence: Synthetic oligonucleotide
  Antisense strand to SEQ ID NO: 1362054
auccucaccgggacacucc

SEQ ID NO: 1362056 - RNA, 19 nt, Artificial Sequence
  Description of Artificial Sequence: Synthetic oligonucleotide
  Sense strand starting at position 3323 of SEQ ID NO: 1242630
gcuccaguagaguaugguu

SEQ ID NO: 1362057 - RNA, 19 nt, Artificial Sequence
  Description of Artificial Sequence: Synthetic oligonucleotide
  Antisense strand to SEQ ID NO: 1362056
aaccauacucuacuggagc

SEQ ID NO: 1362058 - RNA, 19 nt, Artificial Sequence
  Description of Artificial Sequence: Synthetic oligonucleotide
  Sense strand starting at position 423 of SEQ ID NO: 1242631
cugaccuuccucuagcaga

SEQ ID NO: 1362059 - RNA, 19 nt, Artificial Sequence
  Description of Artificial Sequence: Synthetic oligonucleotide
  Antisense strand to SEQ ID NO: 1362058
ucugcuagaggaaggucag

SEQ ID NO: 1362060 - RNA, 19 nt, Artificial Sequence
  Description of Artificial Sequence: Synthetic oligonucleotide
  Sense strand starting at position 457 of SEQ ID NO: 1242631
cggcaagaacucuggguuu

SEQ ID NO: 1362061 - RNA, 19 nt, Artificial Sequence
  Description of Artificial Sequence: Synthetic oligonucleotide
  Antisense strand to SEQ ID NO: 1362060
aaacccagaguucuugccg

SEQ ID NO: 1362062 - RNA, 19 nt, Artificial Sequence
  Description of Artificial Sequence: Synthetic oligonucleotide
  Sense strand starting at position 555 of SEQ ID NO: 1242631
uggguaugagcugaugaca

SEQ ID NO: 1362063 - RNA, 19 nt, Artificial Sequence
  Description of Artificial Sequence: Synthetic oligonucleotide
  Antisense strand to SEQ ID NO: 1362062
ugucaucagcucauaccca

SEQ ID NO: 1362064 - RNA, 19 nt, Artificial Sequence
  Description of Artificial Sequence: Synthetic oligonucleotide
  Sense strand starting at position 712 of SEQ ID NO: 1242631
gcuguagccuccucagaag

SEQ ID NO: 1362065 - RNA, 19 nt, Artificial Sequence
  Description of Artificial Sequence: Synthetic oligonucleotide
  Antisense strand to SEQ ID NO: 1362064
cuucugaggaggcuacagc

SEQ ID NO: 1362066 - RNA, 19 nt, Artificial Sequence
  Description of Artificial Sequence: Synthetic oligonucleotide
  Sense strand starting at position 1251 of SEQ ID NO: 1242631
agcucucuccacugaaaga

SEQ ID NO: 1362067 - RNA, 19 nt, Artificial Sequence
  Description of Artificial Sequence: Synthetic oligonucleotide
  Antisense strand to SEQ ID NO: 1362066
ucuuucaguggagagagcu

SEQ ID NO: 1362068 - RNA, 19 nt, Artificial Sequence
  Description of Artificial Sequence: Synthetic oligonucleotide
  Sense strand starting at position 1675 of SEQ ID NO: 1242631
acuugagucuccuccagaa

SEQ ID NO: 1362069 - RNA, 19 nt, Artificial Sequence
  Description of Artificial Sequence: Synthetic oligonucleotide
  Antisense strand to SEQ ID NO: 1362068
uucuggaggagacucaagu

SEQ ID NO: 1362070 - RNA, 19 nt, Artificial Sequence
  Description of Artificial Sequence: Synthetic oligonucleotide
  Sense strand starting at position 1677 of SEQ ID NO: 1242631
uugagucuccuccagaacu

SEQ ID NO: 1362071 - RNA, 19 nt, Artificial Sequence
  Description of Artificial Sequence: Synthetic oligonucleotide
  Antisense strand to SEQ ID NO: 1362070
aguucuggaggagacucaa

SEQ ID NO: 1362072 - RNA, 19 nt, Artificial Sequence
  Description of Artificial Sequence: Synthetic oligonucleotide
  Sense strand starting at position 2016 of SEQ ID NO: 1242631
gaccaaauguuucuguuag

SEQ ID NO: 1362073 - RNA, 19 nt, Artificial Sequence
  Description of Artificial Sequence: Synthetic oligonucleotide
  Antisense strand to SEQ ID NO: 1362072
cuaacagaaacauuugguc

SEQ ID NO: 1362074 - RNA, 19 nt, Artificial Sequence
  Description of Artificial Sequence: Synthetic oligonucleotide
  Sense strand starting at position 2017 of SEQ ID NO: 1242631
accaaauguuucuguuaga

SEQ ID NO: 1362075 - RNA, 19 nt, Artificial Sequence
  Description of Artificial Sequence: Synthetic oligonucleotide
  Antisense strand to SEQ ID NO: 1362074
ucuaacagaaacauuuggu

SEQ ID NO: 1362076 - RNA, 19 nt, Artificial Sequence
  Description of Artificial Sequence: Synthetic oligonucleotide
  Sense strand starting at position 2018 of SEQ ID NO: 1242631
ccaaauguuucuguuagaa

SEQ ID NO: 1362077 - RNA, 19 nt, Artificial Sequence
  Description of Artificial Sequence: Synthetic oligonucleotide
  Antisense strand to SEQ ID NO: 1362076
uucuaacagaaacauuugg

SEQ ID NO: 1362078 - RNA, 19 nt, Artificial Sequence
  Description of Artificial Sequence: Synthetic oligonucleotide
  Sense strand starting at position 2202 of SEQ ID NO: 1242631
aggcacagucacugacaua

SEQ ID NO: 1362079 - RNA, 19 nt, Artificial Sequence
  Description of Artificial Sequence: Synthetic oligonucleotide
  Antisense strand to SEQ ID NO: 1362078
uaugucagugacugugccu

SEQ ID NO: 1362080 - RNA, 19 nt, Artificial Sequence
  Description of Artificial Sequence: Synthetic oligonucleotide
  Sense strand starting at position 2563 of SEQ ID NO: 1242631
cucguuuccuccuugggaa

SEQ ID NO: 1362081 - RNA, 19 nt, Artificial Sequence
  Description of Artificial Sequence: Synthetic oligonucleotide
  Antisense strand to SEQ ID NO: 1362080
uucccaaggaggaaacgag

SEQ ID NO: 1362082 - RNA, 19 nt, Artificial Sequence
  Description of Artificial Sequence: Synthetic oligonucleotide
  Sense strand starting at position 2564 of SEQ ID NO: 1242631
ucguuuccuccuugggaaa

SEQ ID NO: 1362083 - RNA, 19 nt, Artificial Sequence
  Description of Artificial Sequence: Synthetic oligonucleotide
  Antisense strand to SEQ ID NO: 1362082
uuucccaaggaggaaacga

SEQ ID NO: 1362084 - RNA, 19 nt, Artificial Sequence
  Description of Artificial Sequence: Synthetic oligonucleotide
  Sense strand starting at position 2565 of SEQ ID NO: 1242631
cguuuccuccuugggaaau

SEQ ID NO: 1362085 - RNA, 19 nt, Artificial Sequence
  Description of Artificial Sequence: Synthetic oligonucleotide
  Antisense strand to SEQ ID NO: 1362084
auuucccaaggaggaaacg

SEQ ID NO: 1362086 - RNA, 19 nt, Artificial Sequence
  Description of Artificial Sequence: Synthetic oligonucleotide
  Sense strand starting at position 2566 of SEQ ID NO: 1242631
guuuccuccuugggaaaug

SEQ ID NO: 1362087 - RNA, 19 nt, Artificial Sequence
  Description of Artificial Sequence: Synthetic oligonucleotide
  Antisense strand to SEQ ID NO: 1362086
cauuucccaaggaggaaac

SEQ ID NO: 1362088 - RNA, 19 nt, Artificial Sequence
  Description of Artificial Sequence: Synthetic oligonucleotide
  Sense strand starting at position 2826 of SEQ ID NO: 1242631
auggcugucuccuuagaca

SEQ ID NO: 1362089 - RNA, 19 nt, Artificial Sequence
  Description of Artificial Sequence: Synthetic oligonucleotide
  Antisense strand to SEQ ID NO: 1362088
ugucuaaggagacagccau

SEQ ID NO: 1362090 - RNA, 19 nt, Artificial Sequence
  Description of Artificial Sequence: Synthetic oligonucleotide
  Sense strand starting at position 3188 of SEQ ID NO: 1242631
gacucaguuucccaggcau

SEQ ID NO: 1362091 - RNA, 19 nt, Artificial Sequence
  Description of Artificial Sequence: Synthetic oligonucleotide
  Antisense strand to SEQ ID NO: 1362090
augccugggaaacugaguc

SEQ ID NO: 1362092 - RNA, 19 nt, Artificial Sequence
  Description of Artificial Sequence: Synthetic oligonucleotide
  Sense strand starting at position 3302 of SEQ ID NO: 1242631
gcaugagcaaucggaaacu

SEQ ID NO: 1362093 - RNA, 19 nt, Artificial Sequence
  Description of Artificial Sequence: Synthetic oligonucleotide
  Antisense strand to SEQ ID NO: 1362092
aguuuccgauugcucaugc

SEQ ID NO: 1362094 - RNA, 19 nt, Artificial Sequence
  Description of Artificial Sequence: Synthetic oligonucleotide
  Sense strand starting at position 3451 of SEQ ID NO: 1242631
auguauaaaucugugaaac

SEQ ID NO: 1362095 - RNA, 19 nt, Artificial Sequence
  Description of Artificial Sequence: Synthetic oligonucleotide
  Antisense strand to SEQ ID NO: 1362094
guuucacagauuuauacau

SEQ ID NO: 1362096 - RNA, 19 nt, Artificial Sequence
  Description of Artificial Sequence: Synthetic oligonucleotide
  Sense strand starting at position 3452 of SEQ ID NO: 1242631
uguauaaaucugugaaaca

SEQ ID NO: 1362097 - RNA, 19 nt, Artificial Sequence
  Description of Artificial Sequence: Synthetic oligonucleotide
  Antisense strand to SEQ ID NO: 1362096
uguuucacagauuuauaca

SEQ ID NO: 1362098 - RNA, 19 nt, Artificial Sequence
  Description of Artificial Sequence: Synthetic oligonucleotide
  Sense strand starting at position 3453 of SEQ ID NO: 1242631
guauaaaucugugaaacac

SEQ ID NO: 1362099 - RNA, 19 nt, Artificial Sequence
  Description of Artificial Sequence: Synthetic oligonucleotide
  Antisense strand to SEQ ID NO: 1362098
guguuucacagauuuauac

SEQ ID NO: 1362100 - RNA, 19 nt, Artificial Sequence
  Description of Artificial Sequence: Synthetic oligonucleotide
  Sense strand starting at position 3505 of SEQ ID NO: 1242631
cccagugauuaccgcgauu

SEQ ID NO: 1362101 - RNA, 19 nt, Artificial Sequence
  Description of Artificial Sequence: Synthetic oligonucleotide
  Antisense strand to SEQ ID NO: 1362100
aaucgcgguaaucacuggg

SEQ ID NO: 1362102 - RNA, 19 nt, Artificial Sequence
  Description of Artificial Sequence: Synthetic oligonucleotide
  Sense strand starting at position 3508 of SEQ ID NO: 1242631
agugauuaccgcgauugga

SEQ ID NO: 1362103 - RNA, 19 nt, Artificial Sequence
  Description of Artificial Sequence: Synthetic oligonucleotide
  Antisense strand to SEQ ID NO: 1362102
uccaaucgcgguaaucacu

SEQ ID NO: 1362104 - RNA, 19 nt, Artificial Sequence
  Description of Artificial Sequence: Synthetic oligonucleotide
  Sense strand starting at position 84 of SEQ ID NO: 1242632
ccuugaucugcaggucaca

SEQ ID NO: 1362105 - RNA, 19 nt, Artificial Sequence
  Description of Artificial Sequence: Synthetic oligonucleotide
  Antisense strand to SEQ ID NO: 1362104
ugugaccugcagaucaagg

SEQ ID NO: 1362106 - RNA, 19 nt, Artificial Sequence
  Description of Artificial Sequence: Synthetic oligonucleotide
  Sense strand starting at position 312 of SEQ ID NO: 1242632
ggucgaccacgugaucaaa

SEQ ID NO: 1362107 - RNA, 19 nt, Artificial Sequence
  Description of Artificial Sequence: Synthetic oligonucleotide
  Antisense strand to SEQ ID NO: 1362106
uuugaucacguggucgacc

SEQ ID NO: 1362108 - RNA, 19 nt, Artificial Sequence
  Description of Artificial Sequence: Synthetic oligonucleotide
  Sense strand starting at position 345 of SEQ ID NO: 1242632
cuuccaggcuccgugaaua

SEQ ID NO: 1362109 - RNA, 19 nt, Artificial Sequence
  Description of Artificial Sequence: Synthetic oligonucleotide
  Antisense strand to SEQ ID NO: 1362108
uauucacggagccuggaag

SEQ ID NO: 1362110 - RNA, 19 nt, Artificial Sequence
  Description of Artificial Sequence: Synthetic oligonucleotide
  Sense strand starting at position 407 of SEQ ID NO: 1242632
cccugacaccuuuaggcaa

SEQ ID NO: 1362111 - RNA, 19 nt, Artificial Sequence
  Description of Artificial Sequence: Synthetic oligonucleotide
  Antisense strand to SEQ ID NO: 1362110
uugccuaaaggugucaggg

SEQ ID NO: 1362112 - RNA, 19 nt, Artificial Sequence
  Description of Artificial Sequence: Synthetic oligonucleotide
  Sense strand starting at position 423 of SEQ ID NO: 1242632
caagcaaucgucugccacu

SEQ ID NO: 1362113 - RNA, 19 nt, Artificial Sequence
  Description of Artificial Sequence: Synthetic oligonucleotide
  Antisense strand to SEQ ID NO: 1362112
aguggcagacgauugcuug

SEQ ID NO: 1362114 - RNA, 19 nt, Artificial Sequence
  Description of Artificial Sequence: Synthetic oligonucleotide
  Sense strand starting at position 695 of SEQ ID NO: 1242632
aauagagggcgugaaucuu

SEQ ID NO: 1362115 - RNA, 19 nt, Artificial Sequence
  Description of Artificial Sequence: Synthetic oligonucleotide
  Antisense strand to SEQ ID NO: 1362114
aagauucacgcccucuauu

SEQ ID NO: 1362116 - RNA, 19 nt, Artificial Sequence
  Description of Artificial Sequence: Synthetic oligonucleotide
  Sense strand starting at position 703 of SEQ ID NO: 1242632
gcgugaaucuuaccagaag

SEQ ID NO: 1362117 - RNA, 19 nt, Artificial Sequence
  Description of Artificial Sequence: Synthetic oligonucleotide
  Antisense strand to SEQ ID NO: 1362116
cuucugguaagauucacgc

SEQ ID NO: 1362118 - RNA, 19 nt, Artificial Sequence
  Description of Artificial Sequence: Synthetic oligonucleotide
  Sense strand starting at position 1267 of SEQ ID NO: 1242632
ggaaguuguaaggauccga

SEQ ID NO: 1362119 - RNA, 19 nt, Artificial Sequence
  Description of Artificial Sequence: Synthetic oligonucleotide
  Antisense strand to SEQ ID NO: 1362118
ucggauccuuacaacuucc

SEQ ID NO: 1362120 - RNA, 19 nt, Artificial Sequence
  Description of Artificial Sequence: Synthetic oligonucleotide
  Sense strand starting at position 2121 of SEQ ID NO: 1242632
agauguaaagcgcacagau

SEQ ID NO: 1362121 - RNA, 19 nt, Artificial Sequence
  Description of Artificial Sequence: Synthetic oligonucleotide
  Antisense strand to SEQ ID NO: 1362120
aucugugcgcuuuacaucu

SEQ ID NO: 1362122 - RNA, 19 nt, Artificial Sequence
  Description of Artificial Sequence: Synthetic oligonucleotide
  Sense strand starting at position 2235 of SEQ ID NO: 1242632
uaauaucuggagcaaguua

SEQ ID NO: 1362123 - RNA, 19 nt, Artificial Sequence
  Description of Artificial Sequence: Synthetic oligonucleotide
  Antisense strand to SEQ ID NO: 1362122
uaacuugcuccagauauua

SEQ ID NO: 1362124 - RNA, 19 nt, Artificial Sequence
  Description of Artificial Sequence: Synthetic oligonucleotide
  Sense strand starting at position 2258 of SEQ ID NO: 1242632
acugcucagugcuugguaa

SEQ ID NO: 1362125 - RNA, 19 nt, Artificial Sequence
  Description of Artificial Sequence: Synthetic oligonucleotide
  Antisense strand to SEQ ID NO: 1362124
uuaccaagcacugagcagu

SEQ ID NO: 1362126 - RNA, 19 nt, Artificial Sequence
  Description of Artificial Sequence: Synthetic oligonucleotide
  Sense strand starting at position 2260 of SEQ ID NO: 1242632
ugcucagugcuugguaaga

SEQ ID NO: 1362127 - RNA, 19 nt, Artificial Sequence
  Description of Artificial Sequence: Synthetic oligonucleotide
  Antisense strand to SEQ ID NO: 1362126
ucuuaccaagcacugagca

SEQ ID NO: 1362128 - RNA, 19 nt, Artificial Sequence
  Description of Artificial Sequence: Synthetic oligonucleotide
  Sense strand starting at position 2302 of SEQ ID NO: 1242632
gguuguguggauuacauga

SEQ ID NO: 1362129 - RNA, 19 nt, Artificial Sequence
  Description of Artificial Sequence: Synthetic oligonucleotide
  Antisense strand to SEQ ID NO: 1362128
ucauguaauccacacaacc

SEQ ID NO: 1362130 - RNA, 19 nt, Artificial Sequence
  Description of Artificial Sequence: Synthetic oligonucleotide
  Sense strand starting at position 2323 of SEQ ID NO: 1242632
uuauaugagugccuagaac

SEQ ID NO: 1362131 - RNA, 19 nt, Artificial Sequence
  Description of Artificial Sequence: Synthetic oligonucleotide
  Antisense strand to SEQ ID NO: 1362130
guucuaggcacucauauaa

SEQ ID NO: 1362132 - RNA, 19 nt, Artificial Sequence
  Description of Artificial Sequence: Synthetic oligonucleotide
  Sense strand starting at position 2364 of SEQ ID NO: 1242632
cuauauaaggguuaggcau

SEQ ID NO: 1362133 - RNA, 19 nt, Artificial Sequence
  Description of Artificial Sequence: Synthetic oligonucleotide
  Antisense strand to SEQ ID NO: 1362132
augccuaacccuuauauag

SEQ ID NO: 1362134 - RNA, 19 nt, Artificial Sequence
  Description of Artificial Sequence: Synthetic oligonucleotide
  Sense strand starting at position 2371 of SEQ ID NO: 1242632
aggguuaggcauuauuauu

SEQ ID NO: 1362135 - RNA, 19 nt, Artificial Sequence
  Description of Artificial Sequence: Synthetic oligonucleotide
  Antisense strand to SEQ ID NO: 1362134
aauaauaaugccuaacccu

SEQ ID NO: 1362136 - RNA, 19 nt, Artificial Sequence
  Description of Artificial Sequence: Synthetic oligonucleotide
  Sense strand starting at position 2463 of SEQ ID NO: 1242632
gugaguugaauagaucuuu

SEQ ID NO: 1362137 - RNA, 19 nt, Artificial Sequence
  Description of Artificial Sequence: Synthetic oligonucleotide
  Antisense strand to SEQ ID NO: 1362136
aaagaucuauucaacucac

SEQ ID NO: 1362138 - RNA, 19 nt, Artificial Sequence
  Description of Artificial Sequence: Synthetic oligonucleotide
  Sense strand starting at position 2480 of SEQ ID NO: 1242632
uuccgugcccugcauaaga

SEQ ID NO: 1362139 - RNA, 19 nt, Artificial Sequence
  Description of Artificial Sequence: Synthetic oligonucleotide
  Antisense strand to SEQ ID NO: 1362138
ucuuaugcagggcacggaa

SEQ ID NO: 1362140 - RNA, 19 nt, Artificial Sequence
  Description of Artificial Sequence: Synthetic oligonucleotide
  Sense strand starting at position 2482 of SEQ ID NO: 1242632
ccgugcccugcauaagaaa

SEQ ID NO: 1362141 - RNA, 19 nt, Artificial Sequence
  Description of Artificial Sequence: Synthetic oligonucleotide
  Antisense strand to SEQ ID NO: 1362140
uuucuuaugcagggcacgg

SEQ ID NO: 1362142 - RNA, 19 nt, Artificial Sequence
  Description of Artificial Sequence: Synthetic oligonucleotide
  Sense strand starting at position 2507 of SEQ ID NO: 1242632
ucaguaucauuggcuguga

SEQ ID NO: 1362143 - RNA, 19 nt, Artificial Sequence
  Description of Artificial Sequence: Synthetic oligonucleotide
  Antisense strand to SEQ ID NO: 1362142
ucacagccaaugauacuga

SEQ ID NO: 1362144 - RNA, 19 nt, Artificial Sequence
  Description of Artificial Sequence: Synthetic oligonucleotide
  Sense strand starting at position 2508 of SEQ ID NO: 1242632
caguaucauuggcugugau

SEQ ID NO: 1362145 - RNA, 19 nt, Artificial Sequence
  Description of Artificial Sequence: Synthetic oligonucleotide
  Antisense strand to SEQ ID NO: 1362144
aucacagccaaugauacug

SEQ ID NO: 1362146 - RNA, 19 nt, Artificial Sequence
  Description of Artificial Sequence: Synthetic oligonucleotide
  Sense strand starting at position 2509 of SEQ ID NO: 1242632
aguaucauuggcugugaug

SEQ ID NO: 1362147 - RNA, 19 nt, Artificial Sequence
  Description of Artificial Sequence: Synthetic oligonucleotide
  Antisense strand to SEQ ID NO: 1362146
caucacagccaaugauacu

SEQ ID NO: 1362148 - RNA, 19 nt, Artificial Sequence
  Description of Artificial Sequence: Synthetic oligonucleotide
  Sense strand starting at position 2511 of SEQ ID NO: 1242632
uaucauuggcugugaugag

SEQ ID NO: 1362149 - RNA, 19 nt, Artificial Sequence
  Description of Artificial Sequence: Synthetic oligonucleotide
  Antisense strand to SEQ ID NO: 1362148
cucaucacagccaaugaua

SEQ ID NO: 1362150 - RNA, 19 nt, Artificial Sequence
  Description of Artificial Sequence: Synthetic oligonucleotide
  Sense strand starting at position 2649 of SEQ ID NO: 1242632
cccagauggucugaggaua

SEQ ID NO: 1362151 - RNA, 19 nt, Artificial Sequence
  Description of Artificial Sequence: Synthetic oligonucleotide
  Antisense strand to SEQ ID NO: 1362150
uauccucagaccaucuggg

SEQ ID NO: 1362152 - RNA, 19 nt, Artificial Sequence
  Description of Artificial Sequence: Synthetic oligonucleotide
  Sense strand starting at position 2729 of SEQ ID NO: 1242632
cugcauuuguccuagggua

SEQ ID NO: 1362153 - RNA, 19 nt, Artificial Sequence
  Description of Artificial Sequence: Synthetic oligonucleotide
  Antisense strand to SEQ ID NO: 1362152
uacccuaggacaaaugcag

SEQ ID NO: 1362154 - RNA, 19 nt, Artificial Sequence
  Description of Artificial Sequence: Synthetic oligonucleotide
  Sense strand starting at position 2731 of SEQ ID NO: 1242632
gcauuuguccuaggguagu

SEQ ID NO: 1362155 - RNA, 19 nt, Artificial Sequence
  Description of Artificial Sequence: Synthetic oligonucleotide
  Antisense strand to SEQ ID NO: 1362154
acuacccuaggacaaaugc

SEQ ID NO: 1362156 - RNA, 19 nt, Artificial Sequence
  Description of Artificial Sequence: Synthetic oligonucleotide
  Sense strand starting at position 2737 of SEQ ID NO: 1242632
guccuaggguaguuaggaa

SEQ ID NO: 1362157 - RNA, 19 nt, Artificial Sequence
  Description of Artificial Sequence: Synthetic oligonucleotide
  Antisense strand to SEQ ID NO: 1362156
uuccuaacuacccuaggac

SEQ ID NO: 1362158 - RNA, 19 nt, Artificial Sequence
  Description of Artificial Sequence: Synthetic oligonucleotide
  Sense strand starting at position 2778 of SEQ ID NO: 1242632
gggcucuccuccuuagaca

SEQ ID NO: 1362159 - RNA, 19 nt, Artificial Sequence
  Description of Artificial Sequence: Synthetic oligonucleotide
  Antisense strand to SEQ ID NO: 1362158
ugucuaaggaggagagccc

SEQ ID NO: 1362160 - RNA, 19 nt, Artificial Sequence
  Description of Artificial Sequence: Synthetic oligonucleotide
  Sense strand starting at position 2802 of SEQ ID NO: 1242632
ccuugucugcagugauuua

SEQ ID NO: 1362161 - RNA, 19 nt, Artificial Sequence
  Description of Artificial Sequence: Synthetic oligonucleotide
  Antisense strand to SEQ ID NO: 1362160
uaaaucacugcagacaagg

SEQ ID NO: 1362162 - RNA, 19 nt, Artificial Sequence
  Description of Artificial Sequence: Synthetic oligonucleotide
  Sense strand starting at position 3226 of SEQ ID NO: 1242632
uguaguguguauuuguacu

SEQ ID NO: 1362163 - RNA, 19 nt, Artificial Sequence
  Description of Artificial Sequence: Synthetic oligonucleotide
  Antisense strand to SEQ ID NO: 1362162
aguacaaauacacacuaca

SEQ ID NO: 1362164 - RNA, 19 nt, Artificial Sequence
  Description of Artificial Sequence: Synthetic oligonucleotide
  Sense strand starting at position 3228 of SEQ ID NO: 1242632
uaguguguauuuguacuaa

SEQ ID NO: 1362165 - RNA, 19 nt, Artificial Sequence
  Description of Artificial Sequence: Synthetic oligonucleotide
  Antisense strand to SEQ ID NO: 1362164
uuaguacaaauacacacua

SEQ ID NO: 1362166 - RNA, 19 nt, Artificial Sequence
  Description of Artificial Sequence: Synthetic oligonucleotide
  Sense strand starting at position 3254 of SEQ ID NO: 1242632
uuucuuuaccaugguuaua

SEQ ID NO: 1362167 - RNA, 19 nt, Artificial Sequence
  Description of Artificial Sequence: Synthetic oligonucleotide
  Antisense strand to SEQ ID NO: 1362166
uauaaccaugguaaagaaa

SEQ ID NO: 1362168 - RNA, 19 nt, Artificial Sequence
  Description of Artificial Sequence: Synthetic oligonucleotide
  Sense strand starting at position 3256 of SEQ ID NO: 1242632
ucuuuaccaugguuauaua

SEQ ID NO: 1362169 - RNA, 19 nt, Artificial Sequence
  Description of Artificial Sequence: Synthetic oligonucleotide
  Antisense strand to SEQ ID NO: 1362168
uauauaaccaugguaaaga

SEQ ID NO: 1362170 - RNA, 19 nt, Artificial Sequence
  Description of Artificial Sequence: Synthetic oligonucleotide
  Sense strand starting at position 3257 of SEQ ID NO: 1242632
cuuuaccaugguuauauau

SEQ ID NO: 1362171 - RNA, 19 nt, Artificial Sequence
  Description of Artificial Sequence: Synthetic oligonucleotide
  Antisense strand to SEQ ID NO: 1362170
auauauaaccaugguaaag

SEQ ID NO: 1362172 - RNA, 19 nt, Artificial Sequence
  Description of Artificial Sequence: Synthetic oligonucleotide
  Sense strand starting at position 3323 of SEQ ID NO: 1242632
uuuggaggcuaucuuuauu

SEQ ID NO: 1362173 - RNA, 19 nt, Artificial Sequence
  Description of Artificial Sequence: Synthetic oligonucleotide
  Antisense strand to SEQ ID NO: 1362172
aauaaagauagccuccaaa

SEQ ID NO: 1362174 - RNA, 19 nt, Artificial Sequence
  Description of Artificial Sequence: Synthetic oligonucleotide
  Sense strand starting at position 3371 of SEQ ID NO: 1242632
uugcucaagcuguaauaca

SEQ ID NO: 1362175 - RNA, 19 nt, Artificial Sequence
  Description of Artificial Sequence: Synthetic oligonucleotide
  Antisense strand to SEQ ID NO: 1362174
uguauuacagcuugagcaa

SEQ ID NO: 1362176 - RNA, 19 nt, Artificial Sequence
  Description of Artificial Sequence: Synthetic oligonucleotide
  Sense strand starting at position 3382 of SEQ ID NO: 1242632
guaauacagucgcuccaua

SEQ ID NO: 1362177 - RNA, 19 nt, Artificial Sequence
  Description of Artificial Sequence: Synthetic oligonucleotide
  Antisense strand to SEQ ID NO: 1362176
uauggagcgacuguauuac

SEQ ID NO: 1362178 - RNA, 19 nt, Artificial Sequence
  Description of Artificial Sequence: Synthetic oligonucleotide
  Sense strand starting at position 3678 of SEQ ID NO: 1242632
ggcggcugucuuuaaacuu

SEQ ID NO: 1362179 - RNA, 19 nt, Artificial Sequence
  Description of Artificial Sequence: Synthetic oligonucleotide
  Antisense strand to SEQ ID NO: 1362178
aaguuuaaagacagccgcc

SEQ ID NO: 1362180 - RNA, 19 nt, Artificial Sequence
  Description of Artificial Sequence: Synthetic oligonucleotide
  Sense strand starting at position 3684 of SEQ ID NO: 1242632
ugucuuuaaacuuggaggu

SEQ ID NO: 1362181 - RNA, 19 nt, Artificial Sequence
  Description of Artificial Sequence: Synthetic oligonucleotide
  Antisense strand to SEQ ID NO: 1362180
accuccaaguuuaaagaca

SEQ ID NO: 1362182 - RNA, 19 nt, Artificial Sequence
  Description of Artificial Sequence: Synthetic oligonucleotide
  Sense strand starting at position 3685 of SEQ ID NO: 1242632
gucuuuaaacuuggagguu

SEQ ID NO: 1362183 - RNA, 19 nt, Artificial Sequence
  Description of Artificial Sequence: Synthetic oligonucleotide
  Antisense strand to SEQ ID NO: 1362182
aaccuccaaguuuaaagac

SEQ ID NO: 1362184 - RNA, 19 nt, Artificial Sequence
  Description of Artificial Sequence: Synthetic oligonucleotide
  Sense strand starting at position 2 of SEQ ID NO: 1242633
ucaauaugggcccaacauu

SEQ ID NO: 1362185 - RNA, 19 nt, Artificial Sequence
  Description of Artificial Sequence: Synthetic oligonucleotide
  Antisense strand to SEQ ID NO: 1362184
aauguugggcccauauuga

SEQ ID NO: 1362186 - RNA, 19 nt, Artificial Sequence
  Description of Artificial Sequence: Synthetic oligonucleotide
  Sense strand starting at position 31 of SEQ ID NO: 1242633
acaugagagugaggagaaa

SEQ ID NO: 1362187 - RNA, 19 nt, Artificial Sequence
  Description of Artificial Sequence: Synthetic oligonucleotide
  Antisense strand to SEQ ID NO: 1362186
uuucuccucacucucaugu

SEQ ID NO: 1362188 - RNA, 19 nt, Artificial Sequence
  Description of Artificial Sequence: Synthetic oligonucleotide
  Sense strand starting at position 81 of SEQ ID NO: 1242633
aaucucagacagugauaug

SEQ ID NO: 1362189 - RNA, 19 nt, Artificial Sequence
  Description of Artificial Sequence: Synthetic oligonucleotide
  Antisense strand to SEQ ID NO: 1362188
cauaucacugucugagauu

SEQ ID NO: 1362190 - RNA, 19 nt, Artificial Sequence
  Description of Artificial Sequence: Synthetic oligonucleotide
  Sense strand starting at position 90 of SEQ ID NO: 1242633
cagugauaugucuguauag

SEQ ID NO: 1362191 - RNA, 19 nt, Artificial Sequence
  Description of Artificial Sequence: Synthetic oligonucleotide
  Antisense strand to SEQ ID NO: 1362190
cuauacagacauaucacug

SEQ ID NO: 1362192 - RNA, 19 nt, Artificial Sequence
  Description of Artificial Sequence: Synthetic oligonucleotide
  Sense strand starting at position 91 of SEQ ID NO: 1242633
agugauaugucuguauaga

SEQ ID NO: 1362193 - RNA, 19 nt, Artificial Sequence
  Description of Artificial Sequence: Synthetic oligonucleotide
  Antisense strand to SEQ ID NO: 1362192
ucuauacagacauaucacu

SEQ ID NO: 1362194 - RNA, 19 nt, Artificial Sequence
  Description of Artificial Sequence: Synthetic oligonucleotide
  Sense strand starting at position 92 of SEQ ID NO: 1242633
gugauaugucuguauagau

SEQ ID NO: 1362195 - RNA, 19 nt, Artificial Sequence
  Description of Artificial Sequence: Synthetic oligonucleotide
  Antisense strand to SEQ ID NO: 1362194
aucuauacagacauaucac

SEQ ID NO: 1362196 - RNA, 19 nt, Artificial Sequence
  Description of Artificial Sequence: Synthetic oligonucleotide
  Sense strand starting at position 101 of SEQ ID NO: 1242633
cuguauagauucuaagaga

SEQ ID NO: 1362197 - RNA, 19 nt, Artificial Sequence
  Description of Artificial Sequence: Synthetic oligonucleotide
  Antisense strand to SEQ ID NO: 1362196
ucucuuagaaucuauacag

SEQ ID NO: 1362198 - RNA, 19 nt, Artificial Sequence
  Description of Artificial Sequence: Synthetic oligonucleotide
  Sense strand starting at position 123 of SEQ ID NO: 1242633
gaggaaugagacuguagcu

SEQ ID NO: 1362199 - RNA, 19 nt, Artificial Sequence
  Description of Artificial Sequence: Synthetic oligonucleotide
  Antisense strand to SEQ ID NO: 1362198
agcuacagucucauuccuc

SEQ ID NO: 1362200 - RNA, 19 nt, Artificial Sequence
  Description of Artificial Sequence: Synthetic oligonucleotide
  Sense strand starting at position 409 of SEQ ID NO: 1242633
gaaccuuccgaauggaaac

SEQ ID NO: 1362201 - RNA, 19 nt, Artificial Sequence
  Description of Artificial Sequence: Synthetic oligonucleotide
  Antisense strand to SEQ ID NO: 1362200
guuuccauucggaagguuc

SEQ ID NO: 1362202 - RNA, 19 nt, Artificial Sequence
  Description of Artificial Sequence: Synthetic oligonucleotide
  Sense strand starting at position 439 of SEQ ID NO: 1242633
uucucaucugcgggagcaa

SEQ ID NO: 1362203 - RNA, 19 nt, Artificial Sequence
  Description of Artificial Sequence: Synthetic oligonucleotide
  Antisense strand to SEQ ID NO: 1362202
uugcucccgcagaugagaa

SEQ ID NO: 1362204 - RNA, 19 nt, Artificial Sequence
  Description of Artificial Sequence: Synthetic oligonucleotide
  Sense strand starting at position 462 of SEQ ID NO: 1242633
cgagaugguuggccugaga

SEQ ID NO: 1362205 - RNA, 19 nt, Artificial Sequence
  Description of Artificial Sequence: Synthetic oligonucleotide
  Antisense strand to SEQ ID NO: 1362204
ucucaggccaaccaucucg

SEQ ID NO: 1362206 - RNA, 19 nt, Artificial Sequence
  Description of Artificial Sequence: Synthetic oligonucleotide
  Sense strand starting at position 473 of SEQ ID NO: 1242633
gccugagaucccuaguaca

SEQ ID NO: 1362207 - RNA, 19 nt, Artificial Sequence
  Description of Artificial Sequence: Synthetic oligonucleotide
  Antisense strand to SEQ ID NO: 1362206
uguacuagggaucucaggc

SEQ ID NO: 1362208 - RNA, 19 nt, Artificial Sequence
  Description of Artificial Sequence: Synthetic oligonucleotide
  Sense strand starting at position 852 of SEQ ID NO: 1242633
gaggaacuugccugagguu

SEQ ID NO: 1362209 - RNA, 19 nt, Artificial Sequence
  Description of Artificial Sequence: Synthetic oligonucleotide
  Antisense strand to SEQ ID NO: 1362208
aaccucaggcaaguuccuc

SEQ ID NO: 1362210 - RNA, 19 nt, Artificial Sequence
  Description of Artificial Sequence: Synthetic oligonucleotide
  Sense strand starting at position 1118 of SEQ ID NO: 1242633
ggcauaguuacauggagga

SEQ ID NO: 1362211 - RNA, 19 nt, Artificial Sequence
  Description of Artificial Sequence: Synthetic oligonucleotide
  Antisense strand to SEQ ID NO: 1362210
uccuccauguaacuaugcc

SEQ ID NO: 1362212 - RNA, 19 nt, Artificial Sequence
  Description of Artificial Sequence: Synthetic oligonucleotide
  Sense strand starting at position 1168 of SEQ ID NO: 1242633
gugggugccucuagagaga

SEQ ID NO: 1362213 - RNA, 19 nt, Artificial Sequence
  Description of Artificial Sequence: Synthetic oligonucleotide
  Antisense strand to SEQ ID NO: 1362212
ucucucuagaggcacccac

SEQ ID NO: 1362214 - RNA, 19 nt, Artificial Sequence
  Description of Artificial Sequence: Synthetic oligonucleotide
  Sense strand starting at position 1260 of SEQ ID NO: 1242633
ggaucagagcccugcagau

SEQ ID NO: 1362215 - RNA, 19 nt, Artificial Sequence
  Description of Artificial Sequence: Synthetic oligonucleotide
  Antisense strand to SEQ ID NO: 1362214
aucugcagggcucugaucc

SEQ ID NO: 1362216 - RNA, 19 nt, Artificial Sequence
  Description of Artificial Sequence: Synthetic oligonucleotide
  Sense strand starting at position 1405 of SEQ ID NO: 1242633
gggacagagcccuguggau

SEQ ID NO: 1362217 - RNA, 19 nt, Artificial Sequence
  Description of Artificial Sequence: Synthetic oligonucleotide
  Antisense strand to SEQ ID NO: 1362216
auccacagggcucuguccc

SEQ ID NO: 1362218 - RNA, 19 nt, Artificial Sequence
  Description of Artificial Sequence: Synthetic oligonucleotide
  Sense strand starting at position 2208 of SEQ ID NO: 1242633
ucaacagucuuguuaacug

SEQ ID NO: 1362219 - RNA, 19 nt, Artificial Sequence
  Description of Artificial Sequence: Synthetic oligonucleotide
  Antisense strand to SEQ ID NO: 1362218
caguuaacaagacuguuga

SEQ ID NO: 1362220 - RNA, 19 nt, Artificial Sequence
  Description of Artificial Sequence: Synthetic oligonucleotide
  Sense strand starting at position 2216 of SEQ ID NO: 1242633
cuuguuaacugagugccaa

SEQ ID NO: 1362221 - RNA, 19 nt, Artificial Sequence
  Description of Artificial Sequence: Synthetic oligonucleotide
  Antisense strand to SEQ ID NO: 1362220
uuggcacucaguuaacaag

SEQ ID NO: 1362222 - RNA, 19 nt, Artificial Sequence
  Description of Artificial Sequence: Synthetic oligonucleotide
  Sense strand starting at position 2217 of SEQ ID NO: 1242633
uuguuaacugagugccaau

SEQ ID NO: 1362223 - RNA, 19 nt, Artificial Sequence
  Description of Artificial Sequence: Synthetic oligonucleotide
  Antisense strand to SEQ ID NO: 1362222
auuggcacucaguuaacaa

SEQ ID NO: 1362224 - RNA, 19 nt, Artificial Sequence
  Description of Artificial Sequence: Synthetic oligonucleotide
  Sense strand starting at position 2916 of SEQ ID NO: 1242633
aaaugagugugucuuuguu

SEQ ID NO: 1362225 - RNA, 19 nt, Artificial Sequence
  Description of Artificial Sequence: Synthetic oligonucleotide
  Antisense strand to SEQ ID NO: 1362224
aacaaagacacacucauuu

SEQ ID NO: 1362226 - RNA, 19 nt, Artificial Sequence
  Description of Artificial Sequence: Synthetic oligonucleotide
  Sense strand starting at position 2918 of SEQ ID NO: 1242633
augagugugucuuuguuga

SEQ ID NO: 1362227 - RNA, 19 nt, Artificial Sequence
  Description of Artificial Sequence: Synthetic oligonucleotide
  Antisense strand to SEQ ID NO: 1362226
ucaacaaagacacacucau

SEQ ID NO: 1362228 - RNA, 19 nt, Artificial Sequence
  Description of Artificial Sequence: Synthetic oligonucleotide
  Sense strand starting at position 2923 of SEQ ID NO: 1242633
ugugucuuuguugacuuua

SEQ ID NO: 1362229 - RNA, 19 nt, Artificial Sequence
  Description of Artificial Sequence: Synthetic oligonucleotide
  Antisense strand to SEQ ID NO: 1362228
uaaagucaacaaagacaca

SEQ ID NO: 1362230 - RNA, 19 nt, Artificial Sequence
  Description of Artificial Sequence: Synthetic oligonucleotide
  Sense strand starting at position 2925 of SEQ ID NO: 1242633
ugucuuuguugacuuuauu

SEQ ID NO: 1362231 - RNA, 19 nt, Artificial Sequence
  Description of Artificial Sequence: Synthetic oligonucleotide
  Antisense strand to SEQ ID NO: 1362230
aauaaagucaacaaagaca

SEQ ID NO: 1362232 - RNA, 19 nt, Artificial Sequence
  Description of Artificial Sequence: Synthetic oligonucleotide
  Sense strand starting at position 2949 of SEQ ID NO: 1242633
cuggcuugucagcagauaa

SEQ ID NO: 1362233 - RNA, 19 nt, Artificial Sequence
  Description of Artificial Sequence: Synthetic oligonucleotide
  Antisense strand to SEQ ID NO: 1362232
uuaucugcugacaagccag

SEQ ID NO: 1362234 - RNA, 19 nt, Artificial Sequence
  Description of Artificial Sequence: Synthetic oligonucleotide
  Sense strand starting at position 3019 of SEQ ID NO: 1242633
guggcuguugugucuguga

SEQ ID NO: 1362235 - RNA, 19 nt, Artificial Sequence
  Description of Artificial Sequence: Synthetic oligonucleotide
  Antisense strand to SEQ ID NO: 1362234
ucacagacacaacagccac

SEQ ID NO: 1362236 - RNA, 19 nt, Artificial Sequence
  Description of Artificial Sequence: Synthetic oligonucleotide
  Sense strand starting at position 3035 of SEQ ID NO: 1242633
ugaauuugggcgugaccau

SEQ ID NO: 1362237 - RNA, 19 nt, Artificial Sequence
  Description of Artificial Sequence: Synthetic oligonucleotide
  Antisense strand to SEQ ID NO: 1362236
auggucacgcccaaauuca

SEQ ID NO: 1362238 - RNA, 19 nt, Artificial Sequence
  Description of Artificial Sequence: Synthetic oligonucleotide
  Sense strand starting at position 3047 of SEQ ID NO: 1242633
ugaccauguccagagguua

SEQ ID NO: 1362239 - RNA, 19 nt, Artificial Sequence
  Description of Artificial Sequence: Synthetic oligonucleotide
  Antisense strand to SEQ ID NO: 1362238
uaaccucuggacaugguca

SEQ ID NO: 1362240 - RNA, 19 nt, Artificial Sequence
  Description of Artificial Sequence: Synthetic oligonucleotide
  Sense strand starting at position 3076 of SEQ ID NO: 1242633
ggguuaggagcaugguuaa

SEQ ID NO: 1362241 - RNA, 19 nt, Artificial Sequence
  Description of Artificial Sequence: Synthetic oligonucleotide
  Antisense strand to SEQ ID NO: 1362240
uuaaccaugcuccuaaccc

SEQ ID NO: 1362242 - RNA, 19 nt, Artificial Sequence
  Description of Artificial Sequence: Synthetic oligonucleotide
  Sense strand starting at position 3133 of SEQ ID NO: 1242633
ccaguugugccacaccuaa

SEQ ID NO: 1362243 - RNA, 19 nt, Artificial Sequence
  Description of Artificial Sequence: Synthetic oligonucleotide
  Antisense strand to SEQ ID NO: 1362242
uuagguguggcacaacugg

SEQ ID NO: 1362244 - RNA, 19 nt, Artificial Sequence
  Description of Artificial Sequence: Synthetic oligonucleotide
  Sense strand starting at position 3199 of SEQ ID NO: 1242633
acaggaguuaguuaaugug

SEQ ID NO: 1362245 - RNA, 19 nt, Artificial Sequence
  Description of Artificial Sequence: Synthetic oligonucleotide
  Antisense strand to SEQ ID NO: 1362244
cacauuaacuaacuccugu

SEQ ID NO: 1362246 - RNA, 19 nt, Artificial Sequence
  Description of Artificial Sequence: Synthetic oligonucleotide
  Sense strand starting at position 3205 of SEQ ID NO: 1242633
guuaguuaaugugcauaug

SEQ ID NO: 1362247 - RNA, 19 nt, Artificial Sequence
  Description of Artificial Sequence: Synthetic oligonucleotide
  Antisense strand to SEQ ID NO: 1362246
cauaugcacauuaacuaac

SEQ ID NO: 1362248 - RNA, 19 nt, Artificial Sequence
  Description of Artificial Sequence: Synthetic oligonucleotide
  Sense strand starting at position 3288 of SEQ ID NO: 1242633
gauugugggcccuaccaau

SEQ ID NO: 1362249 - RNA, 19 nt, Artificial Sequence
  Description of Artificial Sequence: Synthetic oligonucleotide
  Antisense strand to SEQ ID NO: 1362248
auugguagggcccacaauc

SEQ ID NO: 1362250 - RNA, 19 nt, Artificial Sequence
  Description of Artificial Sequence: Synthetic oligonucleotide
  Sense strand starting at position 3299 of SEQ ID NO: 1242633
cuaccaauugucuggcuca

SEQ ID NO: 1362251 - RNA, 19 nt, Artificial Sequence
  Description of Artificial Sequence: Synthetic oligonucleotide
  Antisense strand to SEQ ID NO: 1362250
ugagccagacaauugguag

SEQ ID NO: 1362252 - RNA, 19 nt, Artificial Sequence
  Description of Artificial Sequence: Synthetic oligonucleotide
  Sense strand starting at position 3302 of SEQ ID NO: 1242633
ccaauugucuggcucaauu

SEQ ID NO: 1362253 - RNA, 19 nt, Artificial Sequence
  Description of Artificial Sequence: Synthetic oligonucleotide
  Antisense strand to SEQ ID NO: 1362252
aauugagccagacaauugg

SEQ ID NO: 1362254 - RNA, 19 nt, Artificial Sequence
  Description of Artificial Sequence: Synthetic oligonucleotide
  Sense strand starting at position 3655 of SEQ ID NO: 1242633
ggaucaucccuaugugccu

SEQ ID NO: 1362255 - RNA, 19 nt, Artificial Sequence
  Description of Artificial Sequence: Synthetic oligonucleotide
  Antisense strand to SEQ ID NO: 1362254
aggcacauagggaugaucc

SEQ ID NO: 1362256 - RNA, 19 nt, Artificial Sequence
  Description of Artificial Sequence: Synthetic oligonucleotide
  Sense strand starting at position 3680 of SEQ ID NO: 1242633
ccgucuacaccagguuaau

SEQ ID NO: 1362257 - RNA, 19 nt, Artificial Sequence
  Description of Artificial Sequence: Synthetic oligonucleotide
  Antisense strand to SEQ ID NO: 1362256
auuaaccugguguagacgg

SEQ ID NO: 1362258 - RNA, 19 nt, Artificial Sequence
  Description of Artificial Sequence: Synthetic oligonucleotide
  Sense strand starting at position 3705 of SEQ ID NO: 1242633
gacguaugggugugacuuc

SEQ ID NO: 1362259 - RNA, 19 nt, Artificial Sequence
  Description of Artificial Sequence: Synthetic oligonucleotide
  Antisense strand to SEQ ID NO: 1362258
gaagucacacccauacguc

SEQ ID NO: 1362260 - RNA, 19 nt, Artificial Sequence
  Description of Artificial Sequence: Synthetic oligonucleotide
  Sense strand starting at position 3712 of SEQ ID NO: 1242633
gggugugacuuccugucca

SEQ ID NO: 1362261 - RNA, 19 nt, Artificial Sequence
  Description of Artificial Sequence: Synthetic oligonucleotide
  Antisense strand to SEQ ID NO: 1362260
uggacaggaagucacaccc

SEQ ID NO: 1362262 - RNA, 19 nt, Artificial Sequence
  Description of Artificial Sequence: Synthetic oligonucleotide
  Sense strand starting at position 3869 of SEQ ID NO: 1242633
ggagauguaugucuggaca

SEQ ID NO: 1362263 - RNA, 19 nt, Artificial Sequence
  Description of Artificial Sequence: Synthetic oligonucleotide
  Antisense strand to SEQ ID NO: 1362262
uguccagacauacaucucc

SEQ ID NO: 1362264 - RNA, 19 nt, Artificial Sequence
  Description of Artificial Sequence: Synthetic oligonucleotide
  Sense strand starting at position 437 of SEQ ID NO: 1242634
uauuaauagugguuaagag

SEQ ID NO: 1362265 - RNA, 19 nt, Artificial Sequence
  Description of Artificial Sequence: Synthetic oligonucleotide
  Antisense strand to SEQ ID NO: 1362264
cucuuaaccacuauuaaua

SEQ ID NO: 1362266 - RNA, 19 nt, Artificial Sequence
  Description of Artificial Sequence: Synthetic oligonucleotide
  Sense strand starting at position 441 of SEQ ID NO: 1242634
aauagugguuaagagauuu

SEQ ID NO: 1362267 - RNA, 19 nt, Artificial Sequence
  Description of Artificial Sequence: Synthetic oligonucleotide
  Antisense strand to SEQ ID NO: 1362266
aaaucucuuaaccacuauu

SEQ ID NO: 1362268 - RNA, 19 nt, Artificial Sequence
  Description of Artificial Sequence: Synthetic oligonucleotide
  Sense strand starting at position 579 of SEQ ID NO: 1242634
uuaccuuuguaaccaggaa

SEQ ID NO: 1362269 - RNA, 19 nt, Artificial Sequence
  Description of Artificial Sequence: Synthetic oligonucleotide
  Antisense strand to SEQ ID NO: 1362268
uuccugguuacaaagguaa

SEQ ID NO: 1362270 - RNA, 19 nt, Artificial Sequence
  Description of Artificial Sequence: Synthetic oligonucleotide
  Sense strand starting at position 643 of SEQ ID NO: 1242634
aaggcaauugcucaguuga

SEQ ID NO: 1362271 - RNA, 19 nt, Artificial Sequence
  Description of Artificial Sequence: Synthetic oligonucleotide
  Antisense strand to SEQ ID NO: 1362270
ucaacugagcaauugccuu

SEQ ID NO: 1362272 - RNA, 19 nt, Artificial Sequence
  Description of Artificial Sequence: Synthetic oligonucleotide
  Sense strand starting at position 645 of SEQ ID NO: 1242634
ggcaauugcucaguugaaa

SEQ ID NO: 1362273 - RNA, 19 nt, Artificial Sequence
  Description of Artificial Sequence: Synthetic oligonucleotide
  Antisense strand to SEQ ID NO: 1362272
uuucaacugagcaauugcc

SEQ ID NO: 1362274 - RNA, 19 nt, Artificial Sequence
  Description of Artificial Sequence: Synthetic oligonucleotide
  Sense strand starting at position 764 of SEQ ID NO: 1242634
ugacucagcuguucuuaaa

SEQ ID NO: 1362275 - RNA, 19 nt, Artificial Sequence
  Description of Artificial Sequence: Synthetic oligonucleotide
  Antisense strand to SEQ ID NO: 1362274
uuuaagaacagcugaguca

SEQ ID NO: 1362276 - RNA, 19 nt, Artificial Sequence
  Description of Artificial Sequence: Synthetic oligonucleotide
  Sense strand starting at position 831 of SEQ ID NO: 1242634
gcccuuuagagucgaaaug

SEQ ID NO: 1362277 - RNA, 19 nt, Artificial Sequence
  Description of Artificial Sequence: Synthetic oligonucleotide
  Antisense strand to SEQ ID NO: 1362276
cauuucgacucuaaagggc

SEQ ID NO: 1362278 - RNA, 19 nt, Artificial Sequence
  Description of Artificial Sequence: Synthetic oligonucleotide
  Sense strand starting at position 957 of SEQ ID NO: 1242634
ggagcucacaccugugagu

SEQ ID NO: 1362279 - RNA, 19 nt, Artificial Sequence
  Description of Artificial Sequence: Synthetic oligonucleotide
  Antisense strand to SEQ ID NO: 1362278
acucacaggugugagcucc

SEQ ID NO: 1362280 - RNA, 19 nt, Artificial Sequence
  Description of Artificial Sequence: Synthetic oligonucleotide
  Sense strand starting at position 968 of SEQ ID NO: 1242634
cugugaguuccugagagaa

SEQ ID NO: 1362281 - RNA, 19 nt, Artificial Sequence
  Description of Artificial Sequence: Synthetic oligonucleotide
  Antisense strand to SEQ ID NO: 1362280
uucucucaggaacucacag

SEQ ID NO: 1362282 - RNA, 19 nt, Artificial Sequence
  Description of Artificial Sequence: Synthetic oligonucleotide
  Sense strand starting at position 1221 of SEQ ID NO: 1242634
ugcaaacggaguuauaaug

SEQ ID NO: 1362283 - RNA, 19 nt, Artificial Sequence
  Description of Artificial Sequence: Synthetic oligonucleotide
  Antisense strand to SEQ ID NO: 1362282
cauuauaacuccguuugca

SEQ ID NO: 1362284 - RNA, 19 nt, Artificial Sequence
  Description of Artificial Sequence: Synthetic oligonucleotide
  Sense strand starting at position 1686 of SEQ ID NO: 1242634
gaagaaagagcccaguguu

SEQ ID NO: 1362285 - RNA, 19 nt, Artificial Sequence
  Description of Artificial Sequence: Synthetic oligonucleotide
  Antisense strand to SEQ ID NO: 1362284
aacacugggcucuuucuuc

SEQ ID NO: 1362286 - RNA, 19 nt, Artificial Sequence
  Description of Artificial Sequence: Synthetic oligonucleotide
  Sense strand starting at position 1689 of SEQ ID NO: 1242634
gaaagagcccaguguuuau

SEQ ID NO: 1362287 - RNA, 19 nt, Artificial Sequence
  Description of Artificial Sequence: Synthetic oligonucleotide
  Antisense strand to SEQ ID NO: 1362286
auaaacacugggcucuuuc

SEQ ID NO: 1362288 - RNA, 19 nt, Artificial Sequence
  Description of Artificial Sequence: Synthetic oligonucleotide
  Sense strand starting at position 1693 of SEQ ID NO: 1242634
gagcccaguguuuaucaga

SEQ ID NO: 1362289 - RNA, 19 nt, Artificial Sequence
  Description of Artificial Sequence: Synthetic oligonucleotide
  Antisense strand to SEQ ID NO: 1362288
ucugauaaacacugggcuc

SEQ ID NO: 1362290 - RNA, 19 nt, Artificial Sequence
  Description of Artificial Sequence: Synthetic oligonucleotide
  Sense strand starting at position 1707 of SEQ ID NO: 1242634
ucagaaugcucaccuguca

SEQ ID NO: 1362291 - RNA, 19 nt, Artificial Sequence
  Description of Artificial Sequence: Synthetic oligonucleotide
  Antisense strand to SEQ ID NO: 1362290
ugacaggugagcauucuga

SEQ ID NO: 1362292 - RNA, 19 nt, Artificial Sequence
  Description of Artificial Sequence: Synthetic oligonucleotide
  Sense strand starting at position 2016 of SEQ ID NO: 1242634
gcuggcguuacuuauaaga

SEQ ID NO: 1362293 - RNA, 19 nt, Artificial Sequence
  Description of Artificial Sequence: Synthetic oligonucleotide
  Antisense strand to SEQ ID NO: 1362292
ucuuauaaguaacgccagc

SEQ ID NO: 1362294 - RNA, 19 nt, Artificial Sequence
  Description of Artificial Sequence: Synthetic oligonucleotide
  Sense strand starting at position 2026 of SEQ ID NO: 1242634
cuuauaagauguuugguua

SEQ ID NO: 1362295 - RNA, 19 nt, Artificial Sequence
  Description of Artificial Sequence: Synthetic oligonucleotide
  Antisense strand to SEQ ID NO: 1362294
uaaccaaacaucuuauaag

SEQ ID NO: 1362296 - RNA, 19 nt, Artificial Sequence
  Description of Artificial Sequence: Synthetic oligonucleotide
  Sense strand starting at position 2029 of SEQ ID NO: 1242634
auaagauguuugguuaaag

SEQ ID NO: 1362297 - RNA, 19 nt, Artificial Sequence
  Description of Artificial Sequence: Synthetic oligonucleotide
  Antisense strand to SEQ ID NO: 1362296
cuuuaaccaaacaucuuau

SEQ ID NO: 1362298 - RNA, 19 nt, Artificial Sequence
  Description of Artificial Sequence: Synthetic oligonucleotide
  Sense strand starting at position 2030 of SEQ ID NO: 1242634
uaagauguuugguuaaagg

SEQ ID NO: 1362299 - RNA, 19 nt, Artificial Sequence
  Description of Artificial Sequence: Synthetic oligonucleotide
  Antisense strand to SEQ ID NO: 1362298
ccuuuaaccaaacaucuua

SEQ ID NO: 1362300 - RNA, 19 nt, Artificial Sequence
  Description of Artificial Sequence: Synthetic oligonucleotide
  Sense strand starting at position 2167 of SEQ ID NO: 1242634
gguucuaaauaagcagaga

SEQ ID NO: 1362301 - RNA, 19 nt, Artificial Sequence
  Description of Artificial Sequence: Synthetic oligonucleotide
  Antisense strand to SEQ ID NO: 1362300
ucucugcuuauuuagaacc

SEQ ID NO: 1362302 - RNA, 19 nt, Artificial Sequence
  Description of Artificial Sequence: Synthetic oligonucleotide
  Sense strand starting at position 2224 of SEQ ID NO: 1242634
aagagcuggaguuguuuau

SEQ ID NO: 1362303 - RNA, 19 nt, Artificial Sequence
  Description of Artificial Sequence: Synthetic oligonucleotide
  Antisense strand to SEQ ID NO: 1362302
auaaacaacuccagcucuu

SEQ ID NO: 1362304 - RNA, 19 nt, Artificial Sequence
  Description of Artificial Sequence: Synthetic oligonucleotide
  Sense strand starting at position 2228 of SEQ ID NO: 1242634
gcuggaguuguuuaugauc

SEQ ID NO: 1362305 - RNA, 19 nt, Artificial Sequence
  Description of Artificial Sequence: Synthetic oligonucleotide
  Antisense strand to SEQ ID NO: 1362304
gaucauaaacaacuccagc

SEQ ID NO: 1362306 - RNA, 19 nt, Artificial Sequence
  Description of Artificial Sequence: Synthetic oligonucleotide
  Sense strand starting at position 2233 of SEQ ID NO: 1242634
aguuguuuaugaucagaac

SEQ ID NO: 1362307 - RNA, 19 nt, Artificial Sequence
  Description of Artificial Sequence: Synthetic oligonucleotide
  Antisense strand to SEQ ID NO: 1362306
guucugaucauaaacaacu

SEQ ID NO: 1362308 - RNA, 19 nt, Artificial Sequence
  Description of Artificial Sequence: Synthetic oligonucleotide
  Sense strand starting at position 2234 of SEQ ID NO: 1242634
guuguuuaugaucagaaca

SEQ ID NO: 1362309 - RNA, 19 nt, Artificial Sequence
  Description of Artificial Sequence: Synthetic oligonucleotide
  Antisense strand to SEQ ID NO: 1362308
uguucugaucauaaacaac

SEQ ID NO: 1362310 - RNA, 19 nt, Artificial Sequence
  Description of Artificial Sequence: Synthetic oligonucleotide
  Sense strand starting at position 2269 of SEQ ID NO: 1242634
aucagaggugcugggaauu

SEQ ID NO: 1362311 - RNA, 19 nt, Artificial Sequence
  Description of Artificial Sequence: Synthetic oligonucleotide
  Antisense strand to SEQ ID NO: 1362310
aauucccagcaccucugau

SEQ ID NO: 1362312 - RNA, 19 nt, Artificial Sequence
  Description of Artificial Sequence: Synthetic oligonucleotide
  Sense strand starting at position 2286 of SEQ ID NO: 1242634
uuaggagaaacuugagcua

SEQ ID NO: 1362313 - RNA, 19 nt, Artificial Sequence
  Description of Artificial Sequence: Synthetic oligonucleotide
  Antisense strand to SEQ ID NO: 1362312
uagcucaaguuucuccuaa

SEQ ID NO: 1362314 - RNA, 19 nt, Artificial Sequence
  Description of Artificial Sequence: Synthetic oligonucleotide
  Sense strand starting at position 2303 of SEQ ID NO: 1242634
uaagcucugugaucacuga

SEQ ID NO: 1362315 - RNA, 19 nt, Artificial Sequence
  Description of Artificial Sequence: Synthetic oligonucleotide
  Antisense strand to SEQ ID NO: 1362314
ucagugaucacagagcuua

SEQ ID NO: 1362316 - RNA, 19 nt, Artificial Sequence
  Description of Artificial Sequence: Synthetic oligonucleotide
  Sense strand starting at position 2304 of SEQ ID NO: 1242634
aagcucugugaucacugaa

SEQ ID NO: 1362317 - RNA, 19 nt, Artificial Sequence
  Description of Artificial Sequence: Synthetic oligonucleotide
  Antisense strand to SEQ ID NO: 1362316
uucagugaucacagagcuu

SEQ ID NO: 1362318 - RNA, 19 nt, Artificial Sequence
  Description of Artificial Sequence: Synthetic oligonucleotide
  Sense strand starting at position 2307 of SEQ ID NO: 1242634
cucugugaucacugaaugu

SEQ ID NO: 1362319 - RNA, 19 nt, Artificial Sequence
  Description of Artificial Sequence: Synthetic oligonucleotide
  Antisense strand to SEQ ID NO: 1362318
acauucagugaucacagag

SEQ ID NO: 1362320 - RNA, 19 nt, Artificial Sequence
  Description of Artificial Sequence: Synthetic oligonucleotide
  Sense strand starting at position 2715 of SEQ ID NO: 1242634
ccugcaaucccagaugcua

SEQ ID NO: 1362321 - RNA, 19 nt, Artificial Sequence
  Description of Artificial Sequence: Synthetic oligonucleotide
  Antisense strand to SEQ ID NO: 1362320
uagcaucugggauugcagg

SEQ ID NO: 1362322 - RNA, 19 nt, Artificial Sequence
  Description of Artificial Sequence: Synthetic oligonucleotide
  Sense strand starting at position 2890 of SEQ ID NO: 1242634
ggccuaucaagagggcaaa

SEQ ID NO: 1362323 - RNA, 19 nt, Artificial Sequence
  Description of Artificial Sequence: Synthetic oligonucleotide
  Antisense strand to SEQ ID NO: 1362322
uuugcccucuugauaggcc

SEQ ID NO: 1362324 - RNA, 19 nt, Artificial Sequence
  Description of Artificial Sequence: Synthetic oligonucleotide
  Sense strand starting at position 2961 of SEQ ID NO: 1242634
uugccauugccugaaauuc

SEQ ID NO: 1362325 - RNA, 19 nt, Artificial Sequence
  Description of Artificial Sequence: Synthetic oligonucleotide
  Antisense strand to SEQ ID NO: 1362324
gaauuucaggcaauggcaa

SEQ ID NO: 1362326 - RNA, 19 nt, Artificial Sequence
  Description of Artificial Sequence: Synthetic oligonucleotide
  Sense strand starting at position 2990 of SEQ ID NO: 1242634
ugcuauaugcacugauuga

SEQ ID NO: 1362327 - RNA, 19 nt, Artificial Sequence
  Description of Artificial Sequence: Synthetic oligonucleotide
  Antisense strand to SEQ ID NO: 1362326
ucaaucagugcauauagca

SEQ ID NO: 1362328 - RNA, 19 nt, Artificial Sequence
  Description of Artificial Sequence: Synthetic oligonucleotide
  Sense strand starting at position 2994 of SEQ ID NO: 1242634
auaugcacugauugaaguu

SEQ ID NO: 1362329 - RNA, 19 nt, Artificial Sequence
  Description of Artificial Sequence: Synthetic oligonucleotide
  Antisense strand to SEQ ID NO: 1362328
aacuucaaucagugcauau

SEQ ID NO: 1362330 - RNA, 19 nt, Artificial Sequence
  Description of Artificial Sequence: Synthetic oligonucleotide
  Sense strand starting at position 3053 of SEQ ID NO: 1242634
agucauuugcucugugggu

SEQ ID NO: 1362331 - RNA, 19 nt, Artificial Sequence
  Description of Artificial Sequence: Synthetic oligonucleotide
  Antisense strand to SEQ ID NO: 1362330
acccacagagcaaaugacu

SEQ ID NO: 1362332 - RNA, 19 nt, Artificial Sequence
  Description of Artificial Sequence: Synthetic oligonucleotide
  Sense strand starting at position 3054 of SEQ ID NO: 1242634
gucauuugcucugugggua

SEQ ID NO: 1362333 - RNA, 19 nt, Artificial Sequence
  Description of Artificial Sequence: Synthetic oligonucleotide
  Antisense strand to SEQ ID NO: 1362332
uacccacagagcaaaugac

SEQ ID NO: 1362334 - RNA, 19 nt, Artificial Sequence
  Description of Artificial Sequence: Synthetic oligonucleotide
  Sense strand starting at position 3059 of SEQ ID NO: 1242634
uugcucuguggguagagua

SEQ ID NO: 1362335 - RNA, 19 nt, Artificial Sequence
  Description of Artificial Sequence: Synthetic oligonucleotide
  Antisense strand to SEQ ID NO: 1362334
uacucuacccacagagcaa

SEQ ID NO: 1362336 - RNA, 19 nt, Artificial Sequence
  Description of Artificial Sequence: Synthetic oligonucleotide
  Sense strand starting at position 3090 of SEQ ID NO: 1242634
ggcacuggccuuuaugcaa

SEQ ID NO: 1362337 - RNA, 19 nt, Artificial Sequence
  Description of Artificial Sequence: Synthetic oligonucleotide
  Antisense strand to SEQ ID NO: 1362336
uugcauaaaggccagugcc

SEQ ID NO: 1362338 - RNA, 19 nt, Artificial Sequence
  Description of Artificial Sequence: Synthetic oligonucleotide
  Sense strand starting at position 3229 of SEQ ID NO: 1242634
ccugauuggcaguacuaaa

SEQ ID NO: 1362339 - RNA, 19 nt, Artificial Sequence
  Description of Artificial Sequence: Synthetic oligonucleotide
  Antisense strand to SEQ ID NO: 1362338
uuuaguacugccaaucagg

SEQ ID NO: 1362340 - RNA, 19 nt, Artificial Sequence
  Description of Artificial Sequence: Synthetic oligonucleotide
  Sense strand starting at position 3299 of SEQ ID NO: 1242634
guggaucucagccaucagu

SEQ ID NO: 1362341 - RNA, 19 nt, Artificial Sequence
  Description of Artificial Sequence: Synthetic oligonucleotide
  Antisense strand to SEQ ID NO: 1362340
acugauggcugagauccac

SEQ ID NO: 1362342 - RNA, 19 nt, Artificial Sequence
  Description of Artificial Sequence: Synthetic oligonucleotide
  Sense strand starting at position 3952 of SEQ ID NO: 1242634
cuacaugccugaguugaaa

SEQ ID NO: 1362343 - RNA, 19 nt, Artificial Sequence
  Description of Artificial Sequence: Synthetic oligonucleotide
  Antisense strand to SEQ ID NO: 1362342
uuucaacucaggcauguag

SEQ ID NO: 1362344 - RNA, 19 nt, Artificial Sequence
  Description of Artificial Sequence: Synthetic oligonucleotide
  Sense strand starting at position 33 of SEQ ID NO: 1242635
cccaguugccuggacgaau

SEQ ID NO: 1362345 - RNA, 19 nt, Artificial Sequence
  Description of Artificial Sequence: Synthetic oligonucleotide
  Antisense strand to SEQ ID NO: 1362344
auucguccaggcaacuggg

SEQ ID NO: 1362346 - RNA, 19 nt, Artificial Sequence
  Description of Artificial Sequence: Synthetic oligonucleotide
  Sense strand starting at position 52 of SEQ ID NO: 1242635
acaucauagucugcgaaga

SEQ ID NO: 1362347 - RNA, 19 nt, Artificial Sequence
  Description of Artificial Sequence: Synthetic oligonucleotide
  Antisense strand to SEQ ID NO: 1362346
ucuucgcagacuaugaugu

SEQ ID NO: 1362348 - RNA, 19 nt, Artificial Sequence
  Description of Artificial Sequence: Synthetic oligonucleotide
  Sense strand starting at position 53 of SEQ ID NO: 1242635
caucauagucugcgaagaa

SEQ ID NO: 1362349 - RNA, 19 nt, Artificial Sequence
  Description of Artificial Sequence: Synthetic oligonucleotide
  Antisense strand to SEQ ID NO: 1362348
uucuucgcagacuaugaug

SEQ ID NO: 1362350 - RNA, 19 nt, Artificial Sequence
  Description of Artificial Sequence: Synthetic oligonucleotide
  Sense strand starting at position 57 of SEQ ID NO: 1242635
auagucugcgaagaaucaa

SEQ ID NO: 1362351 - RNA, 19 nt, Artificial Sequence
  Description of Artificial Sequence: Synthetic oligonucleotide
  Antisense strand to SEQ ID NO: 1362350
uugauucuucgcagacuau

SEQ ID NO: 1362352 - RNA, 19 nt, Artificial Sequence
  Description of Artificial Sequence: Synthetic oligonucleotide
  Sense strand starting at position 207 of SEQ ID NO: 1242635
aguggagggagguguuaaa

SEQ ID NO: 1362353 - RNA, 19 nt, Artificial Sequence
  Description of Artificial Sequence: Synthetic oligonucleotide
  Antisense strand to SEQ ID NO: 1362352
uuuaacaccucccuccacu

SEQ ID NO: 1362354 - RNA, 19 nt, Artificial Sequence
  Description of Artificial Sequence: Synthetic oligonucleotide
  Sense strand starting at position 218 of SEQ ID NO: 1242635
guguuaaauucccuuguac

SEQ ID NO: 1362355 - RNA, 19 nt, Artificial Sequence
  Description of Artificial Sequence: Synthetic oligonucleotide
  Antisense strand to SEQ ID NO: 1362354
guacaagggaauuuaacac

SEQ ID NO: 1362356 - RNA, 19 nt, Artificial Sequence
  Description of Artificial Sequence: Synthetic oligonucleotide
  Sense strand starting at position 398 of SEQ ID NO: 1242635
ggagggagcgucugagaaa

SEQ ID NO: 1362357 - RNA, 19 nt, Artificial Sequence
  Description of Artificial Sequence: Synthetic oligonucleotide
  Antisense strand to SEQ ID NO: 1362356
uuucucagacgcucccucc

SEQ ID NO: 1362358 - RNA, 19 nt, Artificial Sequence
  Description of Artificial Sequence: Synthetic oligonucleotide
  Sense strand starting at position 695 of SEQ ID NO: 1242635
agagguuugugucuugcuu

SEQ ID NO: 1362359 - RNA, 19 nt, Artificial Sequence
  Description of Artificial Sequence: Synthetic oligonucleotide
  Antisense strand to SEQ ID NO: 1362358
aagcaagacacaaaccucu

SEQ ID NO: 1362360 - RNA, 19 nt, Artificial Sequence
  Description of Artificial Sequence: Synthetic oligonucleotide
  Sense strand starting at position 701 of SEQ ID NO: 1242635
uugugucuugcuuaagguu

SEQ ID NO: 1362361 - RNA, 19 nt, Artificial Sequence
  Description of Artificial Sequence: Synthetic oligonucleotide
  Antisense strand to SEQ ID NO: 1362360
aaccuuaagcaagacacaa

SEQ ID NO: 1362362 - RNA, 19 nt, Artificial Sequence
  Description of Artificial Sequence: Synthetic oligonucleotide
  Sense strand starting at position 852 of SEQ ID NO: 1242635
agcaguuauguuugaggag

SEQ ID NO: 1362363 - RNA, 19 nt, Artificial Sequence
  Description of Artificial Sequence: Synthetic oligonucleotide
  Antisense strand to SEQ ID NO: 1362362
cuccucaaacauaacugcu

SEQ ID NO: 1362364 - RNA, 19 nt, Artificial Sequence
  Description of Artificial Sequence: Synthetic oligonucleotide
  Sense strand starting at position 905 of SEQ ID NO: 1242635
aucggaaaucguggcucaa

SEQ ID NO: 1362365 - RNA, 19 nt, Artificial Sequence
  Description of Artificial Sequence: Synthetic oligonucleotide
  Antisense strand to SEQ ID NO: 1362364
uugagccacgauuuccgau

SEQ ID NO: 1362366 - RNA, 19 nt, Artificial Sequence
  Description of Artificial Sequence: Synthetic oligonucleotide
  Sense strand starting at position 907 of SEQ ID NO: 1242635
cggaaaucguggcucaaga

SEQ ID NO: 1362367 - RNA, 19 nt, Artificial Sequence
  Description of Artificial Sequence: Synthetic oligonucleotide
  Antisense strand to SEQ ID NO: 1362366
ucuugagccacgauuuccg

SEQ ID NO: 1362368 - RNA, 19 nt, Artificial Sequence
  Description of Artificial Sequence: Synthetic oligonucleotide
  Sense strand starting at position 1228 of SEQ ID NO: 1242635
aagggaaagucugucccaa

SEQ ID NO: 1362369 - RNA, 19 nt, Artificial Sequence
  Description of Artificial Sequence: Synthetic oligonucleotide
  Antisense strand to SEQ ID NO: 1362368
uugggacagacuuucccuu

SEQ ID NO: 1362370 - RNA, 19 nt, Artificial Sequence
  Description of Artificial Sequence: Synthetic oligonucleotide
  Sense strand starting at position 1230 of SEQ ID NO: 1242635
gggaaagucugucccaaag

SEQ ID NO: 1362371 - RNA, 19 nt, Artificial Sequence
  Description of Artificial Sequence: Synthetic oligonucleotide
  Antisense strand to SEQ ID NO: 1362370
cuuugggacagacuuuccc

SEQ ID NO: 1362372 - RNA, 19 nt, Artificial Sequence
  Description of Artificial Sequence: Synthetic oligonucleotide
  Sense strand starting at position 1433 of SEQ ID NO: 1242635
ccgagagugcgcccuaguu

SEQ ID NO: 1362373 - RNA, 19 nt, Artificial Sequence
  Description of Artificial Sequence: Synthetic oligonucleotide
  Antisense strand to SEQ ID NO: 1362372
aacuagggcgcacucucgg

SEQ ID NO: 1362374 - RNA, 19 nt, Artificial Sequence
  Description of Artificial Sequence: Synthetic oligonucleotide
  Sense strand starting at position 2432 of SEQ ID NO: 1242635
cagucagacgugugaagag

SEQ ID NO: 1362375 - RNA, 19 nt, Artificial Sequence
  Description of Artificial Sequence: Synthetic oligonucleotide
  Antisense strand to SEQ ID NO: 1362374
cucuucacacgucugacug

SEQ ID NO: 1362376 - RNA, 19 nt, Artificial Sequence
  Description of Artificial Sequence: Synthetic oligonucleotide
  Sense strand starting at position 2969 of SEQ ID NO: 1242635
cccuguccucauuaggaua

SEQ ID NO: 1362377 - RNA, 19 nt, Artificial Sequence
  Description of Artificial Sequence: Synthetic oligonucleotide
  Antisense strand to SEQ ID NO: 1362376
uauccuaaugaggacaggg

SEQ ID NO: 1362378 - RNA, 19 nt, Artificial Sequence
  Description of Artificial Sequence: Synthetic oligonucleotide
  Sense strand starting at position 2980 of SEQ ID NO: 1242635
uuaggauauugcucccaau

SEQ ID NO: 1362379 - RNA, 19 nt, Artificial Sequence
  Description of Artificial Sequence: Synthetic oligonucleotide
  Antisense strand to SEQ ID NO: 1362378
auugggagcaauauccuaa

SEQ ID NO: 1362380 - RNA, 19 nt, Artificial Sequence
  Description of Artificial Sequence: Synthetic oligonucleotide
  Sense strand starting at position 2983 of SEQ ID NO: 1242635
ggauauugcucccaaugau

SEQ ID NO: 1362381 - RNA, 19 nt, Artificial Sequence
  Description of Artificial Sequence: Synthetic oligonucleotide
  Antisense strand to SEQ ID NO: 1362380
aucauugggagcaauaucc

SEQ ID NO: 1362382 - RNA, 19 nt, Artificial Sequence
  Description of Artificial Sequence: Synthetic oligonucleotide
  Sense strand starting at position 3150 of SEQ ID NO: 1242635
auugaugaaauguguuguu

SEQ ID NO: 1362383 - RNA, 19 nt, Artificial Sequence
  Description of Artificial Sequence: Synthetic oligonucleotide
  Antisense strand to SEQ ID NO: 1362382
aacaacacauuucaucaau

SEQ ID NO: 1362384 - RNA, 19 nt, Artificial Sequence
  Description of Artificial Sequence: Synthetic oligonucleotide
  Sense strand starting at position 3155 of SEQ ID NO: 1242635
ugaaauguguuguugcuaa

SEQ ID NO: 1362385 - RNA, 19 nt, Artificial Sequence
  Description of Artificial Sequence: Synthetic oligonucleotide
  Antisense strand to SEQ ID NO: 1362384
uuagcaacaacacauuuca

SEQ ID NO: 1362386 - RNA, 19 nt, Artificial Sequence
  Description of Artificial Sequence: Synthetic oligonucleotide
  Sense strand starting at position 3186 of SEQ ID NO: 1242635
cacuacuguugaugaggaa

SEQ ID NO: 1362387 - RNA, 19 nt, Artificial Sequence
  Description of Artificial Sequence: Synthetic oligonucleotide
  Antisense strand to SEQ ID NO: 1362386
uuccucaucaacaguagug

SEQ ID NO: 1362388 - RNA, 19 nt, Artificial Sequence
  Description of Artificial Sequence: Synthetic oligonucleotide
  Sense strand starting at position 3189 of SEQ ID NO: 1242635
uacuguugaugaggaaacu

SEQ ID NO: 1362389 - RNA, 19 nt, Artificial Sequence
  Description of Artificial Sequence: Synthetic oligonucleotide
  Antisense strand to SEQ ID NO: 1362388
aguuuccucaucaacagua

SEQ ID NO: 1362390 - RNA, 19 nt, Artificial Sequence
  Description of Artificial Sequence: Synthetic oligonucleotide
  Sense strand starting at position 3272 of SEQ ID NO: 1242635
gcgggaaagugguucucaa

SEQ ID NO: 1362391 - RNA, 19 nt, Artificial Sequence
  Description of Artificial Sequence: Synthetic oligonucleotide
  Antisense strand to SEQ ID NO: 1362390
uugagaaccacuuucccgc

SEQ ID NO: 1362392 - RNA, 19 nt, Artificial Sequence
  Description of Artificial Sequence: Synthetic oligonucleotide
  Sense strand starting at position 3303 of SEQ ID NO: 1242635
gugacaaagggcugaacau

SEQ ID NO: 1362393 - RNA, 19 nt, Artificial Sequence
  Description of Artificial Sequence: Synthetic oligonucleotide
  Antisense strand to SEQ ID NO: 1362392
auguucagcccuuugucac

SEQ ID NO: 1362394 - RNA, 19 nt, Artificial Sequence
  Description of Artificial Sequence: Synthetic oligonucleotide
  Sense strand starting at position 3639 of SEQ ID NO: 1242635
ggacaucagcucugaguaa

SEQ ID NO: 1362395 - RNA, 19 nt, Artificial Sequence
  Description of Artificial Sequence: Synthetic oligonucleotide
  Antisense strand to SEQ ID NO: 1362394
uuacucagagcugaugucc

SEQ ID NO: 1362396 - RNA, 19 nt, Artificial Sequence
  Description of Artificial Sequence: Synthetic oligonucleotide
  Sense strand starting at position 3678 of SEQ ID NO: 1242635
ggaaacaauucucagagaa

SEQ ID NO: 1362397 - RNA, 19 nt, Artificial Sequence
  Description of Artificial Sequence: Synthetic oligonucleotide
  Antisense strand to SEQ ID NO: 1362396
uucucugagaauuguuucc

SEQ ID NO: 1362398 - RNA, 19 nt, Artificial Sequence
  Description of Artificial Sequence: Synthetic oligonucleotide
  Sense strand starting at position 3759 of SEQ ID NO: 1242635
aaugaaggaucagagaaag

SEQ ID NO: 1362399 - RNA, 19 nt, Artificial Sequence
  Description of Artificial Sequence: Synthetic oligonucleotide
  Antisense strand to SEQ ID NO: 1362398
cuuucucugauccuucauu

SEQ ID NO: 1362400 - RNA, 19 nt, Artificial Sequence
  Description of Artificial Sequence: Synthetic oligonucleotide
  Sense strand starting at position 3836 of SEQ ID NO: 1242635
ggcugugcccacgguauaa

SEQ ID NO: 1362401 - RNA, 19 nt, Artificial Sequence
  Description of Artificial Sequence: Synthetic oligonucleotide
  Antisense strand to SEQ ID NO: 1362400
uuauaccgugggcacagcc

SEQ ID NO: 1362402 - RNA, 19 nt, Artificial Sequence
  Description of Artificial Sequence: Synthetic oligonucleotide
  Sense strand starting at position 3846 of SEQ ID NO: 1242635
acgguauaaccuugaucuc

SEQ ID NO: 1362403 - RNA, 19 nt, Artificial Sequence
  Description of Artificial Sequence: Synthetic oligonucleotide
  Antisense strand to SEQ ID NO: 1362402
gagaucaagguuauaccgu

SEQ ID NO: 1362404 - RNA, 19 nt, Artificial Sequence
  Description of Artificial Sequence: Synthetic oligonucleotide
  Sense strand starting at position 3847 of SEQ ID NO: 1242635
cgguauaaccuugaucucu

SEQ ID NO: 1362405 - RNA, 19 nt, Artificial Sequence
  Description of Artificial Sequence: Synthetic oligonucleotide
  Antisense strand to SEQ ID NO: 1362404
agagaucaagguuauaccg

SEQ ID NO: 1362406 - RNA, 19 nt, Artificial Sequence
  Description of Artificial Sequence: Synthetic oligonucleotide
  Sense strand starting at position 3855 of SEQ ID NO: 1242635
ccuugaucucucugaggac

SEQ ID NO: 1362407 - RNA, 19 nt, Artificial Sequence
  Description of Artificial Sequence: Synthetic oligonucleotide
  Antisense strand to SEQ ID NO: 1362406
guccucagagagaucaagg

SEQ ID NO: 1362408 - RNA, 19 nt, Artificial Sequence
  Description of Artificial Sequence: Synthetic oligonucleotide
  Sense strand starting at position 3856 of SEQ ID NO: 1242635
cuugaucucucugaggaca

SEQ ID NO: 1362409 - RNA, 19 nt, Artificial Sequence
  Description of Artificial Sequence: Synthetic oligonucleotide
  Antisense strand to SEQ ID NO: 1362408
uguccucagagagaucaag

SEQ ID NO: 1362410 - RNA, 19 nt, Artificial Sequence
  Description of Artificial Sequence: Synthetic oligonucleotide
  Sense strand starting at position 3882 of SEQ ID NO: 1242635
acccuuccaggauggauau

SEQ ID NO: 1362411 - RNA, 19 nt, Artificial Sequence
  Description of Artificial Sequence: Synthetic oligonucleotide
  Antisense strand to SEQ ID NO: 1362410
auauccauccuggaagggu

SEQ ID NO: 1362412 - RNA, 19 nt, Artificial Sequence
  Description of Artificial Sequence: Synthetic oligonucleotide
  Sense strand starting at position 3889 of SEQ ID NO: 1242635
caggauggauauucuaguu

SEQ ID NO: 1362413 - RNA, 19 nt, Artificial Sequence
  Description of Artificial Sequence: Synthetic oligonucleotide
  Antisense strand to SEQ ID NO: 1362412
aacuagaauauccauccug

SEQ ID NO: 1362414 - RNA, 19 nt, Artificial Sequence
  Description of Artificial Sequence: Synthetic oligonucleotide
  Sense strand starting at position 3894 of SEQ ID NO: 1242635
uggauauucuaguuguuga

SEQ ID NO: 1362415 - RNA, 19 nt, Artificial Sequence
  Description of Artificial Sequence: Synthetic oligonucleotide
  Antisense strand to SEQ ID NO: 1362414
ucaacaacuagaauaucca

SEQ ID NO: 1362416 - RNA, 19 nt, Artificial Sequence
  Description of Artificial Sequence: Synthetic oligonucleotide
  Sense strand starting at position 3895 of SEQ ID NO: 1242635
ggauauucuaguuguugag

SEQ ID NO: 1362417 - RNA, 19 nt, Artificial Sequence
  Description of Artificial Sequence: Synthetic oligonucleotide
  Antisense strand to SEQ ID NO: 1362416
cucaacaacuagaauaucc

SEQ ID NO: 1362418 - RNA, 19 nt, Artificial Sequence
  Description of Artificial Sequence: Synthetic oligonucleotide
  Sense strand starting at position 3901 of SEQ ID NO: 1242635
ucuaguuguugagugguuu

SEQ ID NO: 1362419 - RNA, 19 nt, Artificial Sequence
  Description of Artificial Sequence: Synthetic oligonucleotide
  Antisense strand to SEQ ID NO: 1362418
aaaccacucaacaacuaga

SEQ ID NO: 1362420 - RNA, 19 nt, Artificial Sequence
  Description of Artificial Sequence: Synthetic oligonucleotide
  Sense strand starting at position 3940 of SEQ ID NO: 1242635
uggcaagacucuguguguu

SEQ ID NO: 1362421 - RNA, 19 nt, Artificial Sequence
  Description of Artificial Sequence: Synthetic oligonucleotide
  Antisense strand to SEQ ID NO: 1362420
aacacacagagucuugcca

SEQ ID NO: 1362422 - RNA, 19 nt, Artificial Sequence
  Description of Artificial Sequence: Synthetic oligonucleotide
  Sense strand starting at position 3942 of SEQ ID NO: 1242635
gcaagacucuguguguuug

SEQ ID NO: 1362423 - RNA, 19 nt, Artificial Sequence
  Description of Artificial Sequence: Synthetic oligonucleotide
  Antisense strand to SEQ ID NO: 1362422
caaacacacagagucuugc

SEQ ID NO: 1362424 - RNA, 19 nt, Artificial Sequence
  Description of Artificial Sequence: Synthetic oligonucleotide
  Sense strand starting at position 5 of SEQ ID NO: 1242636
uggucuuaggagugacacu

SEQ ID NO: 1362425 - RNA, 19 nt, Artificial Sequence
  Description of Artificial Sequence: Synthetic oligonucleotide
  Antisense strand to SEQ ID NO: 1362424
agugucacuccuaagacca

SEQ ID NO: 1362426 - RNA, 19 nt, Artificial Sequence
  Description of Artificial Sequence: Synthetic oligonucleotide
  Sense strand starting at position 14 of SEQ ID NO: 1242636
gagugacacugaucugggu

SEQ ID NO: 1362427 - RNA, 19 nt, Artificial Sequence
  Description of Artificial Sequence: Synthetic oligonucleotide
  Antisense strand to SEQ ID NO: 1362426
acccagaucagugucacuc

SEQ ID NO: 1362428 - RNA, 19 nt, Artificial Sequence
  Description of Artificial Sequence: Synthetic oligonucleotide
  Sense strand starting at position 33 of SEQ ID NO: 1242636
uccaaaucgcgucacgauu

SEQ ID NO: 1362429 - RNA, 19 nt, Artificial Sequence
  Description of Artificial Sequence: Synthetic oligonucleotide
  Antisense strand to SEQ ID NO: 1362428
aaucgugacgcgauuugga

SEQ ID NO: 1362430 - RNA, 19 nt, Artificial Sequence
  Description of Artificial Sequence: Synthetic oligonucleotide
  Sense strand starting at position 77 of SEQ ID NO: 1242636
cacugauccgucuaggaua

SEQ ID NO: 1362431 - RNA, 19 nt, Artificial Sequence
  Description of Artificial Sequence: Synthetic oligonucleotide
  Antisense strand to SEQ ID NO: 1362430
uauccuagacggaucagug

SEQ ID NO: 1362432 - RNA, 19 nt, Artificial Sequence
  Description of Artificial Sequence: Synthetic oligonucleotide
  Sense strand starting at position 79 of SEQ ID NO: 1242636
cugauccgucuaggauaau

SEQ ID NO: 1362433 - RNA, 19 nt, Artificial Sequence
  Description of Artificial Sequence: Synthetic oligonucleotide
  Antisense strand to SEQ ID NO: 1362432
auuauccuagacggaucag

SEQ ID NO: 1362434 - RNA, 19 nt, Artificial Sequence
  Description of Artificial Sequence: Synthetic oligonucleotide
  Sense strand starting at position 82 of SEQ ID NO: 1242636
auccgucuaggauaaucau

SEQ ID NO: 1362435 - RNA, 19 nt, Artificial Sequence
  Description of Artificial Sequence: Synthetic oligonucleotide
  Antisense strand to SEQ ID NO: 1362434
augauuauccuagacggau

SEQ ID NO: 1362436 - RNA, 19 nt, Artificial Sequence
  Description of Artificial Sequence: Synthetic oligonucleotide
  Sense strand starting at position 119 of SEQ ID NO: 1242636
uugggagguuuacuuuaaa

SEQ ID NO: 1362437 - RNA, 19 nt, Artificial Sequence
  Description of Artificial Sequence: Synthetic oligonucleotide
  Antisense strand to SEQ ID NO: 1362436
uuuaaaguaaaccucccaa

SEQ ID NO: 1362438 - RNA, 19 nt, Artificial Sequence
  Description of Artificial Sequence: Synthetic oligonucleotide
  Sense strand starting at position 267 of SEQ ID NO: 1242636
ugcugugagguuuagauga

SEQ ID NO: 1362439 - RNA, 19 nt, Artificial Sequence
  Description of Artificial Sequence: Synthetic oligonucleotide
  Antisense strand to SEQ ID NO: 1362438
ucaucuaaaccucacagca

SEQ ID NO: 1362440 - RNA, 19 nt, Artificial Sequence
  Description of Artificial Sequence: Synthetic oligonucleotide
  Sense strand starting at position 274 of SEQ ID NO: 1242636
agguuuagaugacaaacua

SEQ ID NO: 1362441 - RNA, 19 nt, Artificial Sequence
  Description of Artificial Sequence: Synthetic oligonucleotide
  Antisense strand to SEQ ID NO: 1362440
uaguuugucaucuaaaccu

SEQ ID NO: 1362442 - RNA, 19 nt, Artificial Sequence
  Description of Artificial Sequence: Synthetic oligonucleotide
  Sense strand starting at position 323 of SEQ ID NO: 1242636
gcugaucggcauuauuaac

SEQ ID NO: 1362443 - RNA, 19 nt, Artificial Sequence
  Description of Artificial Sequence: Synthetic oligonucleotide
  Antisense strand to SEQ ID NO: 1362442
guuaauaaugccgaucagc

SEQ ID NO: 1362444 - RNA, 19 nt, Artificial Sequence
  Description of Artificial Sequence: Synthetic oligonucleotide
  Sense strand starting at position 368 of SEQ ID NO: 1242636
agugauggcuaccuacuua

SEQ ID NO: 1362445 - RNA, 19 nt, Artificial Sequence
  Description of Artificial Sequence: Synthetic oligonucleotide
  Antisense strand to SEQ ID NO: 1362444
uaaguagguagccaucacu

SEQ ID NO: 1362446 - RNA, 19 nt, Artificial Sequence
  Description of Artificial Sequence: Synthetic oligonucleotide
  Sense strand starting at position 587 of SEQ ID NO: 1242636
ggguguguccugggaagag

SEQ ID NO: 1362447 - RNA, 19 nt, Artificial Sequence
  Description of Artificial Sequence: Synthetic oligonucleotide
  Antisense strand to SEQ ID NO: 1362446
cucuucccaggacacaccc

SEQ ID NO: 1362448 - RNA, 19 nt, Artificial Sequence
  Description of Artificial Sequence: Synthetic oligonucleotide
  Sense strand starting at position 1169 of SEQ ID NO: 1242636
uugccuaaguuauuuccga

SEQ ID NO: 1362449 - RNA, 19 nt, Artificial Sequence
  Description of Artificial Sequence: Synthetic oligonucleotide
  Antisense strand to SEQ ID NO: 1362448
ucggaaauaacuuaggcaa

SEQ ID NO: 1362450 - RNA, 19 nt, Artificial Sequence
  Description of Artificial Sequence: Synthetic oligonucleotide
  Sense strand starting at position 1234 of SEQ ID NO: 1242636
gugugacuuugggauuuca

SEQ ID NO: 1362451 - RNA, 19 nt, Artificial Sequence
  Description of Artificial Sequence: Synthetic oligonucleotide
  Antisense strand to SEQ ID NO: 1362450
ugaaaucccaaagucacac

SEQ ID NO: 1362452 - RNA, 19 nt, Artificial Sequence
  Description of Artificial Sequence: Synthetic oligonucleotide
  Sense strand starting at position 1319 of SEQ ID NO: 1242636
aggaacgugccucgacaau

SEQ ID NO: 1362453 - RNA, 19 nt, Artificial Sequence
  Description of Artificial Sequence: Synthetic oligonucleotide
  Antisense strand to SEQ ID NO: 1362452
auugucgaggcacguuccu

SEQ ID NO: 1362454 - RNA, 19 nt, Artificial Sequence
  Description of Artificial Sequence: Synthetic oligonucleotide
  Sense strand starting at position 1331 of SEQ ID NO: 1242636
cgacaauuagaccguaaac

SEQ ID NO: 1362455 - RNA, 19 nt, Artificial Sequence
  Description of Artificial Sequence: Synthetic oligonucleotide
  Antisense strand to SEQ ID NO: 1362454
guuuacggucuaauugucg

SEQ ID NO: 1362456 - RNA, 19 nt, Artificial Sequence
  Description of Artificial Sequence: Synthetic oligonucleotide
  Sense strand starting at position 2139 of SEQ ID NO: 1242636
uguucuuguauccggagga

SEQ ID NO: 1362457 - RNA, 19 nt, Artificial Sequence
  Description of Artificial Sequence: Synthetic oligonucleotide
  Antisense strand to SEQ ID NO: 1362456
uccuccggauacaagaaca

SEQ ID NO: 1362458 - RNA, 19 nt, Artificial Sequence
  Description of Artificial Sequence: Synthetic oligonucleotide
  Sense strand starting at position 2143 of SEQ ID NO: 1242636
cuuguauccggaggauaca

SEQ ID NO: 1362459 - RNA, 19 nt, Artificial Sequence
  Description of Artificial Sequence: Synthetic oligonucleotide
  Antisense strand to SEQ ID NO: 1362458
uguauccuccggauacaag

SEQ ID NO: 1362460 - RNA, 19 nt, Artificial Sequence
  Description of Artificial Sequence: Synthetic oligonucleotide
  Sense strand starting at position 2157 of SEQ ID NO: 1242636
auacaagcuuugccuagaa

SEQ ID NO: 1362461 - RNA, 19 nt, Artificial Sequence
  Description of Artificial Sequence: Synthetic oligonucleotide
  Antisense strand to SEQ ID NO: 1362460
uucuaggcaaagcuuguau

SEQ ID NO: 1362462 - RNA, 19 nt, Artificial Sequence
  Description of Artificial Sequence: Synthetic oligonucleotide
  Sense strand starting at position 2159 of SEQ ID NO: 1242636
acaagcuuugccuagaaau

SEQ ID NO: 1362463 - RNA, 19 nt, Artificial Sequence
  Description of Artificial Sequence: Synthetic oligonucleotide
  Antisense strand to SEQ ID NO: 1362462
auuucuaggcaaagcuugu

SEQ ID NO: 1362464 - RNA, 19 nt, Artificial Sequence
  Description of Artificial Sequence: Synthetic oligonucleotide
  Sense strand starting at position 2198 of SEQ ID NO: 1242636
ccguacucucuacaguuau

SEQ ID NO: 1362465 - RNA, 19 nt, Artificial Sequence
  Description of Artificial Sequence: Synthetic oligonucleotide
  Antisense strand to SEQ ID NO: 1362464
auaacuguagagaguacgg

SEQ ID NO: 1362466 - RNA, 19 nt, Artificial Sequence
  Description of Artificial Sequence: Synthetic oligonucleotide
  Sense strand starting at position 2263 of SEQ ID NO: 1242636
aauuuacgguguuaagaau

SEQ ID NO: 1362467 - RNA, 19 nt, Artificial Sequence
  Description of Artificial Sequence: Synthetic oligonucleotide
  Antisense strand to SEQ ID NO: 1362466
auucuuaacaccguaaauu

SEQ ID NO: 1362468 - RNA, 19 nt, Artificial Sequence
  Description of Artificial Sequence: Synthetic oligonucleotide
  Sense strand starting at position 2270 of SEQ ID NO: 1242636
gguguuaagaaucggaauu

SEQ ID NO: 1362469 - RNA, 19 nt, Artificial Sequence
  Description of Artificial Sequence: Synthetic oligonucleotide
  Antisense strand to SEQ ID NO: 1362468
aauuccgauucuuaacacc

SEQ ID NO: 1362470 - RNA, 19 nt, Artificial Sequence
  Description of Artificial Sequence: Synthetic oligonucleotide
  Sense strand starting at position 2271 of SEQ ID NO: 1242636
guguuaagaaucggaauua

SEQ ID NO: 1362471 - RNA, 19 nt, Artificial Sequence
  Description of Artificial Sequence: Synthetic oligonucleotide
  Antisense strand to SEQ ID NO: 1362470
uaauuccgauucuuaacac

SEQ ID NO: 1362472 - RNA, 19 nt, Artificial Sequence
  Description of Artificial Sequence: Synthetic oligonucleotide
  Sense strand starting at position 2366 of SEQ ID NO: 1242636
aacauauggcgucaaggga

SEQ ID NO: 1362473 - RNA, 19 nt, Artificial Sequence
  Description of Artificial Sequence: Synthetic oligonucleotide
  Antisense strand to SEQ ID NO: 1362472
ucccuugacgccauauguu

SEQ ID NO: 1362474 - RNA, 19 nt, Artificial Sequence
  Description of Artificial Sequence: Synthetic oligonucleotide
  Sense strand starting at position 2433 of SEQ ID NO: 1242636
ccucguacagcuugaaaug

SEQ ID NO: 1362475 - RNA, 19 nt, Artificial Sequence
  Description of Artificial Sequence: Synthetic oligonucleotide
  Antisense strand to SEQ ID NO: 1362474
cauuucaagcuguacgagg

SEQ ID NO: 1362476 - RNA, 19 nt, Artificial Sequence
  Description of Artificial Sequence: Synthetic oligonucleotide
  Sense strand starting at position 2491 of SEQ ID NO: 1242636
ggucacagcgucuagaacu

SEQ ID NO: 1362477 - RNA, 19 nt, Artificial Sequence
  Description of Artificial Sequence: Synthetic oligonucleotide
  Antisense strand to SEQ ID NO: 1362476
aguucuagacgcugugacc

SEQ ID NO: 1362478 - RNA, 19 nt, Artificial Sequence
  Description of Artificial Sequence: Synthetic oligonucleotide
  Sense strand starting at position 2501 of SEQ ID NO: 1242636
ucuagaacuuaugcugauu

SEQ ID NO: 1362479 - RNA, 19 nt, Artificial Sequence
  Description of Artificial Sequence: Synthetic oligonucleotide
  Antisense strand to SEQ ID NO: 1362478
aaucagcauaaguucuaga

SEQ ID NO: 1362480 - RNA, 19 nt, Artificial Sequence
  Description of Artificial Sequence: Synthetic oligonucleotide
  Sense strand starting at position 2504 of SEQ ID NO: 1242636
agaacuuaugcugauuauu

SEQ ID NO: 1362481 - RNA, 19 nt, Artificial Sequence
  Description of Artificial Sequence: Synthetic oligonucleotide
  Antisense strand to SEQ ID NO: 1362480
aauaaucagcauaaguucu

SEQ ID NO: 1362482 - RNA, 19 nt, Artificial Sequence
  Description of Artificial Sequence: Synthetic oligonucleotide
  Sense strand starting at position 2658 of SEQ ID NO: 1242636
ucgugaauaguugggacua

SEQ ID NO: 1362483 - RNA, 19 nt, Artificial Sequence
  Description of Artificial Sequence: Synthetic oligonucleotide
  Antisense strand to SEQ ID NO: 1362482
uagucccaacuauucacga

SEQ ID NO: 1362484 - RNA, 19 nt, Artificial Sequence
  Description of Artificial Sequence: Synthetic oligonucleotide
  Sense strand starting at position 2941 of SEQ ID NO: 1242636
gagguuuaggaagguuuaa

SEQ ID NO: 1362485 - RNA, 19 nt, Artificial Sequence
  Description of Artificial Sequence: Synthetic oligonucleotide
  Antisense strand to SEQ ID NO: 1362484
uuaaaccuuccuaaaccuc

SEQ ID NO: 1362486 - RNA, 19 nt, Artificial Sequence
  Description of Artificial Sequence: Synthetic oligonucleotide
  Sense strand starting at position 2971 of SEQ ID NO: 1242636
acuaauaaguggcugagau

SEQ ID NO: 1362487 - RNA, 19 nt, Artificial Sequence
  Description of Artificial Sequence: Synthetic oligonucleotide
  Antisense strand to SEQ ID NO: 1362486
aucucagccacuuauuagu

SEQ ID NO: 1362488 - RNA, 19 nt, Artificial Sequence
  Description of Artificial Sequence: Synthetic oligonucleotide
  Sense strand starting at position 2972 of SEQ ID NO: 1242636
cuaauaaguggcugagaua

SEQ ID NO: 1362489 - RNA, 19 nt, Artificial Sequence
  Description of Artificial Sequence: Synthetic oligonucleotide
  Antisense strand to SEQ ID NO: 1362488
uaucucagccacuuauuag

SEQ ID NO: 1362490 - RNA, 19 nt, Artificial Sequence
  Description of Artificial Sequence: Synthetic oligonucleotide
  Sense strand starting at position 3388 of SEQ ID NO: 1242636
caugcuuauugagugucua

SEQ ID NO: 1362491 - RNA, 19 nt, Artificial Sequence
  Description of Artificial Sequence: Synthetic oligonucleotide
  Antisense strand to SEQ ID NO: 1362490
uagacacucaauaagcaug

SEQ ID NO: 1362492 - RNA, 19 nt, Artificial Sequence
  Description of Artificial Sequence: Synthetic oligonucleotide
  Sense strand starting at position 3421 of SEQ ID NO: 1242636
agugcuaggcauuggagaa

SEQ ID NO: 1362493 - RNA, 19 nt, Artificial Sequence
  Description of Artificial Sequence: Synthetic oligonucleotide
  Antisense strand to SEQ ID NO: 1362492
uucuccaaugccuagcacu

SEQ ID NO: 1362494 - RNA, 19 nt, Artificial Sequence
  Description of Artificial Sequence: Synthetic oligonucleotide
  Sense strand starting at position 3487 of SEQ ID NO: 1242636
uguugcacucgacauagua

SEQ ID NO: 1362495 - RNA, 19 nt, Artificial Sequence
  Description of Artificial Sequence: Synthetic oligonucleotide
  Antisense strand to SEQ ID NO: 1362494
uacuaugucgagugcaaca

SEQ ID NO: 1362496 - RNA, 19 nt, Artificial Sequence
  Description of Artificial Sequence: Synthetic oligonucleotide
  Sense strand starting at position 3495 of SEQ ID NO: 1242636
ucgacauaguauucccaga

SEQ ID NO: 1362497 - RNA, 19 nt, Artificial Sequence
  Description of Artificial Sequence: Synthetic oligonucleotide
  Antisense strand to SEQ ID NO: 1362496
ucugggaauacuaugucga

SEQ ID NO: 1362498 - RNA, 19 nt, Artificial Sequence
  Description of Artificial Sequence: Synthetic oligonucleotide
  Sense strand starting at position 3500 of SEQ ID NO: 1242636
auaguauucccagaggcua

SEQ ID NO: 1362499 - RNA, 19 nt, Artificial Sequence
  Description of Artificial Sequence: Synthetic oligonucleotide
  Antisense strand to SEQ ID NO: 1362498
uagccucugggaauacuau

SEQ ID NO: 1362500 - RNA, 19 nt, Artificial Sequence
  Description of Artificial Sequence: Synthetic oligonucleotide
  Sense strand starting at position 3537 of SEQ ID NO: 1242636
ucagcuuugcuuuccguga

SEQ ID NO: 1362501 - RNA, 19 nt, Artificial Sequence
  Description of Artificial Sequence: Synthetic oligonucleotide
  Antisense strand to SEQ ID NO: 1362500
ucacggaaagcaaagcuga

SEQ ID NO: 1362502 - RNA, 19 nt, Artificial Sequence
  Description of Artificial Sequence: Synthetic oligonucleotide
  Sense strand starting at position 3552 of SEQ ID NO: 1242636
gugaucaccuaaguaacaa

SEQ ID NO: 1362503 - RNA, 19 nt, Artificial Sequence
  Description of Artificial Sequence: Synthetic oligonucleotide
  Antisense strand to SEQ ID NO: 1362502
uuguuacuuaggugaucac

SEQ ID NO: 1362504 - RNA, 19 nt, Artificial Sequence
  Description of Artificial Sequence: Synthetic oligonucleotide
  Sense strand starting at position 113 of SEQ ID NO: 1242641
ucucuaagacuuggugacu

SEQ ID NO: 1362505 - RNA, 19 nt, Artificial Sequence
  Description of Artificial Sequence: Synthetic oligonucleotide
  Antisense strand to SEQ ID NO: 1362504
agucaccaagucuuagaga

SEQ ID NO: 1362506 - RNA, 19 nt, Artificial Sequence
  Description of Artificial Sequence: Synthetic oligonucleotide
  Sense strand starting at position 114 of SEQ ID NO: 1242641
cucuaagacuuggugacuu

SEQ ID NO: 1362507 - RNA, 19 nt, Artificial Sequence
  Description of Artificial Sequence: Synthetic oligonucleotide
  Antisense strand to SEQ ID NO: 1362506
aagucaccaagucuuagag

SEQ ID NO: 1362508 - RNA, 19 nt, Artificial Sequence
  Description of Artificial Sequence: Synthetic oligonucleotide
  Sense strand starting at position 156 of SEQ ID NO: 1242641
agagaaagcuccucuugua

SEQ ID NO: 1362509 - RNA, 19 nt, Artificial Sequence
  Description of Artificial Sequence: Synthetic oligonucleotide
  Antisense strand to SEQ ID NO: 1362508
uacaagaggagcuuucucu

SEQ ID NO: 1362510 - RNA, 19 nt, Artificial Sequence
  Description of Artificial Sequence: Synthetic oligonucleotide
  Sense strand starting at position 256 of SEQ ID NO: 1242641
cagguuaaauuuggaaagu

SEQ ID NO: 1362511 - RNA, 19 nt, Artificial Sequence
  Description of Artificial Sequence: Synthetic oligonucleotide
  Antisense strand to SEQ ID NO: 1362510
acuuuccaaauuuaaccug

SEQ ID NO: 1362512 - RNA, 19 nt, Artificial Sequence
  Description of Artificial Sequence: Synthetic oligonucleotide
  Sense strand starting at position 257 of SEQ ID NO: 1242641
agguuaaauuuggaaaguu

SEQ ID NO: 1362513 - RNA, 19 nt, Artificial Sequence
  Description of Artificial Sequence: Synthetic oligonucleotide
  Antisense strand to SEQ ID NO: 1362512
aacuuuccaaauuuaaccu

SEQ ID NO: 1362514 - RNA, 19 nt, Artificial Sequence
  Description of Artificial Sequence: Synthetic oligonucleotide
  Sense strand starting at position 580 of SEQ ID NO: 1242641
gggcccagccauuaauuau

SEQ ID NO: 1362515 - RNA, 19 nt, Artificial Sequence
  Description of Artificial Sequence: Synthetic oligonucleotide
  Antisense strand to SEQ ID NO: 1362514
auaauuaauggcugggccc

SEQ ID NO: 1362516 - RNA, 19 nt, Artificial Sequence
  Description of Artificial Sequence: Synthetic oligonucleotide
  Sense strand starting at position 623 of SEQ ID NO: 1242641
gaugguagcuacucauucu

SEQ ID NO: 1362517 - RNA, 19 nt, Artificial Sequence
  Description of Artificial Sequence: Synthetic oligonucleotide
  Antisense strand to SEQ ID NO: 1362516
agaaugaguagcuaccauc

SEQ ID NO: 1362518 - RNA, 19 nt, Artificial Sequence
  Description of Artificial Sequence: Synthetic oligonucleotide
  Sense strand starting at position 683 of SEQ ID NO: 1242641
acagguuucugaccaaauu

SEQ ID NO: 1362519 - RNA, 19 nt, Artificial Sequence
  Description of Artificial Sequence: Synthetic oligonucleotide
  Antisense strand to SEQ ID NO: 1362518
aauuuggucagaaaccugu

SEQ ID NO: 1362520 - RNA, 19 nt, Artificial Sequence
  Description of Artificial Sequence: Synthetic oligonucleotide
  Sense strand starting at position 851 of SEQ ID NO: 1242641
ggcuuucuugagcaugacu

SEQ ID NO: 1362521 - RNA, 19 nt, Artificial Sequence
  Description of Artificial Sequence: Synthetic oligonucleotide
  Antisense strand to SEQ ID NO: 1362520
agucaugcucaagaaagcc

SEQ ID NO: 1362522 - RNA, 19 nt, Artificial Sequence
  Description of Artificial Sequence: Synthetic oligonucleotide
  Sense strand starting at position 853 of SEQ ID NO: 1242641
cuuucuugagcaugacuuu

SEQ ID NO: 1362523 - RNA, 19 nt, Artificial Sequence
  Description of Artificial Sequence: Synthetic oligonucleotide
  Antisense strand to SEQ ID NO: 1362522
aaagucaugcucaagaaag

SEQ ID NO: 1362524 - RNA, 19 nt, Artificial Sequence
  Description of Artificial Sequence: Synthetic oligonucleotide
  Sense strand starting at position 951 of SEQ ID NO: 1242641
cgaguacaauugccuaaga

SEQ ID NO: 1362525 - RNA, 19 nt, Artificial Sequence
  Description of Artificial Sequence: Synthetic oligonucleotide
  Antisense strand to SEQ ID NO: 1362524
ucuuaggcaauuguacucg

SEQ ID NO: 1362526 - RNA, 19 nt, Artificial Sequence
  Description of Artificial Sequence: Synthetic oligonucleotide
  Sense strand starting at position 953 of SEQ ID NO: 1242641
aguacaauugccuaagagu

SEQ ID NO: 1362527 - RNA, 19 nt, Artificial Sequence
  Description of Artificial Sequence: Synthetic oligonucleotide
  Antisense strand to SEQ ID NO: 1362526
acucuuaggcaauuguacu

SEQ ID NO: 1362528 - RNA, 19 nt, Artificial Sequence
  Description of Artificial Sequence: Synthetic oligonucleotide
  Sense strand starting at position 961 of SEQ ID NO: 1242641
ugccuaagaguauaaucca

SEQ ID NO: 1362529 - RNA, 19 nt, Artificial Sequence
  Description of Artificial Sequence: Synthetic oligonucleotide
  Antisense strand to SEQ ID NO: 1362528
uggauuauacucuuaggca

SEQ ID NO: 1362530 - RNA, 19 nt, Artificial Sequence
  Description of Artificial Sequence: Synthetic oligonucleotide
  Sense strand starting at position 1037 of SEQ ID NO: 1242641
ucaaacgagccagaucuua

SEQ ID NO: 1362531 - RNA, 19 nt, Artificial Sequence
  Description of Artificial Sequence: Synthetic oligonucleotide
  Antisense strand to SEQ ID NO: 1362530
uaagaucuggcucguuuga

SEQ ID NO: 1362532 - RNA, 19 nt, Artificial Sequence
  Description of Artificial Sequence: Synthetic oligonucleotide
  Sense strand starting at position 1094 of SEQ ID NO: 1242641
gagguuggcaccuggaaga

SEQ ID NO: 1362533 - RNA, 19 nt, Artificial Sequence
  Description of Artificial Sequence: Synthetic oligonucleotide
  Antisense strand to SEQ ID NO: 1362532
ucuuccaggugccaaccuc

SEQ ID NO: 1362534 - RNA, 19 nt, Artificial Sequence
  Description of Artificial Sequence: Synthetic oligonucleotide
  Sense strand starting at position 1299 of SEQ ID NO: 1242641
uggagaguucggugacuuc

SEQ ID NO: 1362535 - RNA, 19 nt, Artificial Sequence
  Description of Artificial Sequence: Synthetic oligonucleotide
  Antisense strand to SEQ ID NO: 1362534
gaagucaccgaacucucca

SEQ ID NO: 1362536 - RNA, 19 nt, Artificial Sequence
  Description of Artificial Sequence: Synthetic oligonucleotide
  Sense strand starting at position 2597 of SEQ ID NO: 1242641
gcacauuggugacugaaga

SEQ ID NO: 1362537 - RNA, 19 nt, Artificial Sequence
  Description of Artificial Sequence: Synthetic oligonucleotide
  Antisense strand to SEQ ID NO: 1362536
ucuucagucaccaaugugc

SEQ ID NO: 1362538 - RNA, 19 nt, Artificial Sequence
  Description of Artificial Sequence: Synthetic oligonucleotide
  Sense strand starting at position 2598 of SEQ ID NO: 1242641
cacauuggugacugaagau

SEQ ID NO: 1362539 - RNA, 19 nt, Artificial Sequence
  Description of Artificial Sequence: Synthetic oligonucleotide
  Antisense strand to SEQ ID NO: 1362538
aucuucagucaccaaugug

SEQ ID NO: 1362540 - RNA, 19 nt, Artificial Sequence
  Description of Artificial Sequence: Synthetic oligonucleotide
  Sense strand starting at position 2632 of SEQ ID NO: 1242641
aacuuaugugcugauaggu

SEQ ID NO: 1362541 - RNA, 19 nt, Artificial Sequence
  Description of Artificial Sequence: Synthetic oligonucleotide
  Antisense strand to SEQ ID NO: 1362540
accuaucagcacauaaguu

SEQ ID NO: 1362542 - RNA, 19 nt, Artificial Sequence
  Description of Artificial Sequence: Synthetic oligonucleotide
  Sense strand starting at position 2745 of SEQ ID NO: 1242641
aaggaucuguuaucaguca

SEQ ID NO: 1362543 - RNA, 19 nt, Artificial Sequence
  Description of Artificial Sequence: Synthetic oligonucleotide
  Antisense strand to SEQ ID NO: 1362542
ugacugauaacagauccuu

SEQ ID NO: 1362544 - RNA, 19 nt, Artificial Sequence
  Description of Artificial Sequence: Synthetic oligonucleotide
  Sense strand starting at position 2796 of SEQ ID NO: 1242641
ucaccucucccaggaagau

SEQ ID NO: 1362545 - RNA, 19 nt, Artificial Sequence
  Description of Artificial Sequence: Synthetic oligonucleotide
  Antisense strand to SEQ ID NO: 1362544
aucuuccugggagagguga

SEQ ID NO: 1362546 - RNA, 19 nt, Artificial Sequence
  Description of Artificial Sequence: Synthetic oligonucleotide
  Sense strand starting at position 2840 of SEQ ID NO: 1242641
ggugaaauuauaggcuuau

SEQ ID NO: 1362547 - RNA, 19 nt, Artificial Sequence
  Description of Artificial Sequence: Synthetic oligonucleotide
  Antisense strand to SEQ ID NO: 1362546
auaagccuauaauuucacc

SEQ ID NO: 1362548 - RNA, 19 nt, Artificial Sequence
  Description of Artificial Sequence: Synthetic oligonucleotide
  Sense strand starting at position 2841 of SEQ ID NO: 1242641
gugaaauuauaggcuuaua

SEQ ID NO: 1362549 - RNA, 19 nt, Artificial Sequence
  Description of Artificial Sequence: Synthetic oligonucleotide
  Antisense strand to SEQ ID NO: 1362548
uauaagccuauaauuucac

SEQ ID NO: 1362550 - RNA, 19 nt, Artificial Sequence
  Description of Artificial Sequence: Synthetic oligonucleotide
  Sense strand starting at position 2867 of SEQ ID NO: 1242641
acccuauuguuggcaacua

SEQ ID NO: 1362551 - RNA, 19 nt, Artificial Sequence
  Description of Artificial Sequence: Synthetic oligonucleotide
  Antisense strand to SEQ ID NO: 1362550
uaguugccaacaauagggu

SEQ ID NO: 1362552 - RNA, 19 nt, Artificial Sequence
  Description of Artificial Sequence: Synthetic oligonucleotide
  Sense strand starting at position 2932 of SEQ ID NO: 1242641
ugguuuacaugucuagaaa

SEQ ID NO: 1362553 - RNA, 19 nt, Artificial Sequence
  Description of Artificial Sequence: Synthetic oligonucleotide
  Antisense strand to SEQ ID NO: 1362552
uuucuagacauguaaacca

SEQ ID NO: 1362554 - RNA, 19 nt, Artificial Sequence
  Description of Artificial Sequence: Synthetic oligonucleotide
  Sense strand starting at position 3070 of SEQ ID NO: 1242641
uuuccuauauggcuggaaa

SEQ ID NO: 1362555 - RNA, 19 nt, Artificial Sequence
  Description of Artificial Sequence: Synthetic oligonucleotide
  Antisense strand to SEQ ID NO: 1362554
uuuccagccauauaggaaa

SEQ ID NO: 1362556 - RNA, 19 nt, Artificial Sequence
  Description of Artificial Sequence: Synthetic oligonucleotide
  Sense strand starting at position 3071 of SEQ ID NO: 1242641
uuccuauauggcuggaaac

SEQ ID NO: 1362557 - RNA, 19 nt, Artificial Sequence
  Description of Artificial Sequence: Synthetic oligonucleotide
  Antisense strand to SEQ ID NO: 1362556
guuuccagccauauaggaa

SEQ ID NO: 1362558 - RNA, 19 nt, Artificial Sequence
  Description of Artificial Sequence: Synthetic oligonucleotide
  Sense strand starting at position 3072 of SEQ ID NO: 1242641
uccuauauggcuggaaaca

SEQ ID NO: 1362559 - RNA, 19 nt, Artificial Sequence
  Description of Artificial Sequence: Synthetic oligonucleotide
  Antisense strand to SEQ ID NO: 1362558
uguuuccagccauauagga

SEQ ID NO: 1362560 - RNA, 19 nt, Artificial Sequence
  Description of Artificial Sequence: Synthetic oligonucleotide
  Sense strand starting at position 3243 of SEQ ID NO: 1242641
gagauugauucggccugga

SEQ ID NO: 1362561 - RNA, 19 nt, Artificial Sequence
  Description of Artificial Sequence: Synthetic oligonucleotide
  Antisense strand to SEQ ID NO: 1362560
uccaggccgaaucaaucuc

SEQ ID NO: 1362562 - RNA, 19 nt, Artificial Sequence
  Description of Artificial Sequence: Synthetic oligonucleotide
  Sense strand starting at position 3295 of SEQ ID NO: 1242641
agaaguggagucugugauu

SEQ ID NO: 1362563 - RNA, 19 nt, Artificial Sequence
  Description of Artificial Sequence: Synthetic oligonucleotide
  Antisense strand to SEQ ID NO: 1362562
aaucacagacuccacuucu

SEQ ID NO: 1362564 - RNA, 19 nt, Artificial Sequence
  Description of Artificial Sequence: Synthetic oligonucleotide
  Sense strand starting at position 3324 of SEQ ID NO: 1242641
gccagacuucuaugguuag

SEQ ID NO: 1362565 - RNA, 19 nt, Artificial Sequence
  Description of Artificial Sequence: Synthetic oligonucleotide
  Antisense strand to SEQ ID NO: 1362564
cuaaccauagaagucuggc

SEQ ID NO: 1362566 - RNA, 19 nt, Artificial Sequence
  Description of Artificial Sequence: Synthetic oligonucleotide
  Sense strand starting at position 3327 of SEQ ID NO: 1242641
agacuucuaugguuagcca

SEQ ID NO: 1362567 - RNA, 19 nt, Artificial Sequence
  Description of Artificial Sequence: Synthetic oligonucleotide
  Antisense strand to SEQ ID NO: 1362566
uggcuaaccauagaagucu

SEQ ID NO: 1362568 - RNA, 19 nt, Artificial Sequence
  Description of Artificial Sequence: Synthetic oligonucleotide
  Sense strand starting at position 3334 of SEQ ID NO: 1242641
uaugguuagccagggaaga

SEQ ID NO: 1362569 - RNA, 19 nt, Artificial Sequence
  Description of Artificial Sequence: Synthetic oligonucleotide
  Antisense strand to SEQ ID NO: 1362568
ucuucccuggcuaaccaua

SEQ ID NO: 1362570 - RNA, 19 nt, Artificial Sequence
  Description of Artificial Sequence: Synthetic oligonucleotide
  Sense strand starting at position 3335 of SEQ ID NO: 1242641
augguuagccagggaagau

SEQ ID NO: 1362571 - RNA, 19 nt, Artificial Sequence
  Description of Artificial Sequence: Synthetic oligonucleotide
  Antisense strand to SEQ ID NO: 1362570
aucuucccuggcuaaccau

SEQ ID NO: 1362572 - RNA, 19 nt, Artificial Sequence
  Description of Artificial Sequence: Synthetic oligonucleotide
  Sense strand starting at position 3350 of SEQ ID NO: 1242641
agaugagguucuucuaaug

SEQ ID NO: 1362573 - RNA, 19 nt, Artificial Sequence
  Description of Artificial Sequence: Synthetic oligonucleotide
  Antisense strand to SEQ ID NO: 1362572
cauuagaagaaccucaucu

SEQ ID NO: 1362574 - RNA, 19 nt, Artificial Sequence
  Description of Artificial Sequence: Synthetic oligonucleotide
  Sense strand starting at position 3448 of SEQ ID NO: 1242641
cagagaucaggguguggga

SEQ ID NO: 1362575 - RNA, 19 nt, Artificial Sequence
  Description of Artificial Sequence: Synthetic oligonucleotide
  Antisense strand to SEQ ID NO: 1362574
ucccacacccugaucucug

SEQ ID NO: 1362576 - RNA, 19 nt, Artificial Sequence
  Description of Artificial Sequence: Synthetic oligonucleotide
  Sense strand starting at position 3570 of SEQ ID NO: 1242641
auccacugucuguaacuua

SEQ ID NO: 1362577 - RNA, 19 nt, Artificial Sequence
  Description of Artificial Sequence: Synthetic oligonucleotide
  Antisense strand to SEQ ID NO: 1362576
uaaguuacagacaguggau

SEQ ID NO: 1362578 - RNA, 19 nt, Artificial Sequence
  Description of Artificial Sequence: Synthetic oligonucleotide
  Sense strand starting at position 3813 of SEQ ID NO: 1242641
cuacccucucaagagugau

SEQ ID NO: 1362579 - RNA, 19 nt, Artificial Sequence
  Description of Artificial Sequence: Synthetic oligonucleotide
  Antisense strand to SEQ ID NO: 1362578
aucacucuugagaggguag

SEQ ID NO: 1362580 - RNA, 19 nt, Artificial Sequence
  Description of Artificial Sequence: Synthetic oligonucleotide
  Sense strand starting at position 3819 of SEQ ID NO: 1242641
ucucaagagugauucuaca

SEQ ID NO: 1362581 - RNA, 19 nt, Artificial Sequence
  Description of Artificial Sequence: Synthetic oligonucleotide
  Antisense strand to SEQ ID NO: 1362580
uguagaaucacucuugaga

SEQ ID NO: 1362582 - RNA, 19 nt, Artificial Sequence
  Description of Artificial Sequence: Synthetic oligonucleotide
  Sense strand starting at position 3851 of SEQ ID NO: 1242641
ggucacaucaauggaaagu

SEQ ID NO: 1362583 - RNA, 19 nt, Artificial Sequence
  Description of Artificial Sequence: Synthetic oligonucleotide
  Antisense strand to SEQ ID NO: 1362582
acuuuccauugaugugacc

SEQ ID NO: 1362584 - RNA, 19 nt, Artificial Sequence
  Description of Artificial Sequence: Synthetic oligonucleotide
  Sense strand starting at position 338 of SEQ ID NO: 1242642
ucgggaagcagaugucgau

SEQ ID NO: 1362585 - RNA, 19 nt, Artificial Sequence
  Description of Artificial Sequence: Synthetic oligonucleotide
  Antisense strand to SEQ ID NO: 1362584
aucgacaucugcuucccga

SEQ ID NO: 1362586 - RNA, 19 nt, Artificial Sequence
  Description of Artificial Sequence: Synthetic oligonucleotide
  Sense strand starting at position 348 of SEQ ID NO: 1242642
gaugucgaugcagagauaa

SEQ ID NO: 1362587 - RNA, 19 nt, Artificial Sequence
  Description of Artificial Sequence: Synthetic oligonucleotide
  Antisense strand to SEQ ID NO: 1362586
uuaucucugcaucgacauc

SEQ ID NO: 1362588 - RNA, 19 nt, Artificial Sequence
  Description of Artificial Sequence: Synthetic oligonucleotide
  Sense strand starting at position 350 of SEQ ID NO: 1242642
ugucgaugcagagauaaau

SEQ ID NO: 1362589 - RNA, 19 nt, Artificial Sequence
  Description of Artificial Sequence: Synthetic oligonucleotide
  Antisense strand to SEQ ID NO: 1362588
auuuaucucugcaucgaca

SEQ ID NO: 1362590 - RNA, 19 nt, Artificial Sequence
  Description of Artificial Sequence: Synthetic oligonucleotide
  Sense strand starting at position 1604 of SEQ ID NO: 1242642
aagggucaugaggguuaga

SEQ ID NO: 1362591 - RNA, 19 nt, Artificial Sequence
  Description of Artificial Sequence: Synthetic oligonucleotide
  Antisense strand to SEQ ID NO: 1362590
ucuaacccucaugacccuu

SEQ ID NO: 1362592 - RNA, 19 nt, Artificial Sequence
  Description of Artificial Sequence: Synthetic oligonucleotide
  Sense strand starting at position 1609 of SEQ ID NO: 1242642
ucaugaggguuagacauca

SEQ ID NO: 1362593 - RNA, 19 nt, Artificial Sequence
  Description of Artificial Sequence: Synthetic oligonucleotide
  Antisense strand to SEQ ID NO: 1362592
ugaugucuaacccucauga

SEQ ID NO: 1362594 - RNA, 19 nt, Artificial Sequence
  Description of Artificial Sequence: Synthetic oligonucleotide
  Sense strand starting at position 1617 of SEQ ID NO: 1242642
guuagacaucagggagcaa

SEQ ID NO: 1362595 - RNA, 19 nt, Artificial Sequence
  Description of Artificial Sequence: Synthetic oligonucleotide
  Antisense strand to SEQ ID NO: 1362594
uugcucccugaugucuaac

SEQ ID NO: 1362596 - RNA, 19 nt, Artificial Sequence
  Description of Artificial Sequence: Synthetic oligonucleotide
  Sense strand starting at position 1682 of SEQ ID NO: 1242642
guccuugcugcaggaguaa

SEQ ID NO: 1362597 - RNA, 19 nt, Artificial Sequence
  Description of Artificial Sequence: Synthetic oligonucleotide
  Antisense strand to SEQ ID NO: 1362596
uuacuccugcagcaaggac

SEQ ID NO: 1362598 - RNA, 19 nt, Artificial Sequence
  Description of Artificial Sequence: Synthetic oligonucleotide
  Sense strand starting at position 1885 of SEQ ID NO: 1242642
aucugauauccaggucaga

SEQ ID NO: 1362599 - RNA, 19 nt, Artificial Sequence
  Description of Artificial Sequence: Synthetic oligonucleotide
  Antisense strand to SEQ ID NO: 1362598
ucugaccuggauaucagau

SEQ ID NO: 1362600 - RNA, 19 nt, Artificial Sequence
  Description of Artificial Sequence: Synthetic oligonucleotide
  Sense strand starting at position 2114 of SEQ ID NO: 1242642
gccugagucugucagguua

SEQ ID NO: 1362601 - RNA, 19 nt, Artificial Sequence
  Description of Artificial Sequence: Synthetic oligonucleotide
  Antisense strand to SEQ ID NO: 1362600
uaaccugacagacucaggc

SEQ ID NO: 1362602 - RNA, 19 nt, Artificial Sequence
  Description of Artificial Sequence: Synthetic oligonucleotide
  Sense strand starting at position 2116 of SEQ ID NO: 1242642
cugagucugucagguuauc

SEQ ID NO: 1362603 - RNA, 19 nt, Artificial Sequence
  Description of Artificial Sequence: Synthetic oligonucleotide
  Antisense strand to SEQ ID NO: 1362602
gauaaccugacagacucag

SEQ ID NO: 1362604 - RNA, 19 nt, Artificial Sequence
  Description of Artificial Sequence: Synthetic oligonucleotide
  Sense strand starting at position 2132 of SEQ ID NO: 1242642
auccuugacucccagaguu

SEQ ID NO: 1362605 - RNA, 19 nt, Artificial Sequence
  Description of Artificial Sequence: Synthetic oligonucleotide
  Antisense strand to SEQ ID NO: 1362604
aacucugggagucaaggau

SEQ ID NO: 1362606 - RNA, 19 nt, Artificial Sequence
  Description of Artificial Sequence: Synthetic oligonucleotide
  Sense strand starting at position 2183 of SEQ ID NO: 1242642
auacgugccuguucaguga

SEQ ID NO: 1362607 - RNA, 19 nt, Artificial Sequence
  Description of Artificial Sequence: Synthetic oligonucleotide
  Antisense strand to SEQ ID NO: 1362606
ucacugaacaggcacguau

SEQ ID NO: 1362608 - RNA, 19 nt, Artificial Sequence
  Description of Artificial Sequence: Synthetic oligonucleotide
  Sense strand starting at position 2187 of SEQ ID NO: 1242642
gugccuguucagugaauga

SEQ ID NO: 1362609 - RNA, 19 nt, Artificial Sequence
  Description of Artificial Sequence: Synthetic oligonucleotide
  Antisense strand to SEQ ID NO: 1362608
ucauucacugaacaggcac

SEQ ID NO: 1362610 - RNA, 19 nt, Artificial Sequence
  Description of Artificial Sequence: Synthetic oligonucleotide
  Sense strand starting at position 2651 of SEQ ID NO: 1242642
agcauuacuucugagcucu

SEQ ID NO: 1362611 - RNA, 19 nt, Artificial Sequence
  Description of Artificial Sequence: Synthetic oligonucleotide
  Antisense strand to SEQ ID NO: 1362610
agagcucagaaguaaugcu

SEQ ID NO: 1362612 - RNA, 19 nt, Artificial Sequence
  Description of Artificial Sequence: Synthetic oligonucleotide
  Sense strand starting at position 2811 of SEQ ID NO: 1242642
gcauuccagcucuggaguu

SEQ ID NO: 1362613 - RNA, 19 nt, Artificial Sequence
  Description of Artificial Sequence: Synthetic oligonucleotide
  Antisense strand to SEQ ID NO: 1362612
aacuccagagcuggaaugc

SEQ ID NO: 1362614 - RNA, 19 nt, Artificial Sequence
  Description of Artificial Sequence: Synthetic oligonucleotide
  Sense strand starting at position 2924 of SEQ ID NO: 1242642
caguguggguuugagaguu

SEQ ID NO: 1362615 - RNA, 19 nt, Artificial Sequence
  Description of Artificial Sequence: Synthetic oligonucleotide
  Antisense strand to SEQ ID NO: 1362614
aacucucaaacccacacug

SEQ ID NO: 1362616 - RNA, 19 nt, Artificial Sequence
  Description of Artificial Sequence: Synthetic oligonucleotide
  Sense strand starting at position 2937 of SEQ ID NO: 1242642
agaguuuaaucugugcucu

SEQ ID NO: 1362617 - RNA, 19 nt, Artificial Sequence
  Description of Artificial Sequence: Synthetic oligonucleotide
  Antisense strand to SEQ ID NO: 1362616
agagcacagauuaaacucu

SEQ ID NO: 1362618 - RNA, 19 nt, Artificial Sequence
  Description of Artificial Sequence: Synthetic oligonucleotide
  Sense strand starting at position 2938 of SEQ ID NO: 1242642
gaguuuaaucugugcucug

SEQ ID NO: 1362619 - RNA, 19 nt, Artificial Sequence
  Description of Artificial Sequence: Synthetic oligonucleotide
  Antisense strand to SEQ ID NO: 1362618
cagagcacagauuaaacuc

SEQ ID NO: 1362620 - RNA, 19 nt, Artificial Sequence
  Description of Artificial Sequence: Synthetic oligonucleotide
  Sense strand starting at position 3224 of SEQ ID NO: 1242642
cgccucuuauugcucugaa

SEQ ID NO: 1362621 - RNA, 19 nt, Artificial Sequence
  Description of Artificial Sequence: Synthetic oligonucleotide
  Antisense strand to SEQ ID NO: 1362620
uucagagcaauaagaggcg

SEQ ID NO: 1362622 - RNA, 19 nt, Artificial Sequence
  Description of Artificial Sequence: Synthetic oligonucleotide
  Sense strand starting at position 3225 of SEQ ID NO: 1242642
gccucuuauugcucugaag

SEQ ID NO: 1362623 - RNA, 19 nt, Artificial Sequence
  Description of Artificial Sequence: Synthetic oligonucleotide
  Antisense strand to SEQ ID NO: 1362622
cuucagagcaauaagaggc

SEQ ID NO: 1362624 - RNA, 19 nt, Artificial Sequence
  Description of Artificial Sequence: Synthetic oligonucleotide
  Sense strand starting at position 3227 of SEQ ID NO: 1242642
cucuuauugcucugaaguc

SEQ ID NO: 1362625 - RNA, 19 nt, Artificial Sequence
  Description of Artificial Sequence: Synthetic oligonucleotide
  Antisense strand to SEQ ID NO: 1362624
gacuucagagcaauaagag

SEQ ID NO: 1362626 - RNA, 19 nt, Artificial Sequence
  Description of Artificial Sequence: Synthetic oligonucleotide
  Sense strand starting at position 3228 of SEQ ID NO: 1242642
ucuuauugcucugaagucu

SEQ ID NO: 1362627 - RNA, 19 nt, Artificial Sequence
  Description of Artificial Sequence: Synthetic oligonucleotide
  Antisense strand to SEQ ID NO: 1362626
agacuucagagcaauaaga

SEQ ID NO: 1362628 - RNA, 19 nt, Artificial Sequence
  Description of Artificial Sequence: Synthetic oligonucleotide
  Sense strand starting at position 3237 of SEQ ID NO: 1242642
ucugaagucuuugugacca

SEQ ID NO: 1362629 - RNA, 19 nt, Artificial Sequence
  Description of Artificial Sequence: Synthetic oligonucleotide
  Antisense strand to SEQ ID NO: 1362628
uggucacaaagacuucaga

SEQ ID NO: 1362630 - RNA, 19 nt, Artificial Sequence
  Description of Artificial Sequence: Synthetic oligonucleotide
  Sense strand starting at position 3256 of SEQ ID NO: 1242642
aguggagugcugugacugu

SEQ ID NO: 1362631 - RNA, 19 nt, Artificial Sequence
  Description of Artificial Sequence: Synthetic oligonucleotide
  Antisense strand to SEQ ID NO: 1362630
acagucacagcacuccacu

SEQ ID NO: 1362632 - RNA, 19 nt, Artificial Sequence
  Description of Artificial Sequence: Synthetic oligonucleotide
  Sense strand starting at position 3366 of SEQ ID NO: 1242642
ugcugucaggccugugaaa

SEQ ID NO: 1362633 - RNA, 19 nt, Artificial Sequence
  Description of Artificial Sequence: Synthetic oligonucleotide
  Antisense strand to SEQ ID NO: 1362632
uuucacaggccugacagca

SEQ ID NO: 1362634 - RNA, 19 nt, Artificial Sequence
  Description of Artificial Sequence: Synthetic oligonucleotide
  Sense strand starting at position 3563 of SEQ ID NO: 1242642
gagacuggaugcuuuguaa

SEQ ID NO: 1362635 - RNA, 19 nt, Artificial Sequence
  Description of Artificial Sequence: Synthetic oligonucleotide
  Antisense strand to SEQ ID NO: 1362634
uuacaaagcauccagucuc

SEQ ID NO: 1362636 - RNA, 19 nt, Artificial Sequence
  Description of Artificial Sequence: Synthetic oligonucleotide
  Sense strand starting at position 3567 of SEQ ID NO: 1242642
cuggaugcuuuguaaagga

SEQ ID NO: 1362637 - RNA, 19 nt, Artificial Sequence
  Description of Artificial Sequence: Synthetic oligonucleotide
  Antisense strand to SEQ ID NO: 1362636
uccuuuacaaagcauccag

SEQ ID NO: 1362638 - RNA, 19 nt, Artificial Sequence
  Description of Artificial Sequence: Synthetic oligonucleotide
  Sense strand starting at position 3640 of SEQ ID NO: 1242642
acaggcauuccuuggccaa

SEQ ID NO: 1362639 - RNA, 19 nt, Artificial Sequence
  Description of Artificial Sequence: Synthetic oligonucleotide
  Antisense strand to SEQ ID NO: 1362638
uuggccaaggaaugccugu

SEQ ID NO: 1362640 - RNA, 19 nt, Artificial Sequence
  Description of Artificial Sequence: Synthetic oligonucleotide
  Sense strand starting at position 3642 of SEQ ID NO: 1242642
aggcauuccuuggccaaca

SEQ ID NO: 1362641 - RNA, 19 nt, Artificial Sequence
  Description of Artificial Sequence: Synthetic oligonucleotide
  Antisense strand to SEQ ID NO: 1362640
uguuggccaaggaaugccu

SEQ ID NO: 1362642 - RNA, 19 nt, Artificial Sequence
  Description of Artificial Sequence: Synthetic oligonucleotide
  Sense strand starting at position 3923 of SEQ ID NO: 1242642
gguagcugcuccguccaaa

SEQ ID NO: 1362643 - RNA, 19 nt, Artificial Sequence
  Description of Artificial Sequence: Synthetic oligonucleotide
  Antisense strand to SEQ ID NO: 1362642
uuuggacggagcagcuacc

SEQ ID NO: 1362644 - RNA, 19 nt, Artificial Sequence
  Description of Artificial Sequence: Synthetic oligonucleotide
  Sense strand starting at position 3924 of SEQ ID NO: 1242642
guagcugcuccguccaaau

SEQ ID NO: 1362645 - RNA, 19 nt, Artificial Sequence
  Description of Artificial Sequence: Synthetic oligonucleotide
  Antisense strand to SEQ ID NO: 1362644
auuuggacggagcagcuac

SEQ ID NO: 1362646 - RNA, 19 nt, Artificial Sequence
  Description of Artificial Sequence: Synthetic oligonucleotide
  Sense strand starting at position 3936 of SEQ ID NO: 1242642
uccaaaucaccuggguaua

SEQ ID NO: 1362647 - RNA, 19 nt, Artificial Sequence
  Description of Artificial Sequence: Synthetic oligonucleotide
  Antisense strand to SEQ ID NO: 1362646
uauacccaggugauuugga

SEQ ID NO: 1362648 - RNA, 19 nt, Artificial Sequence
  Description of Artificial Sequence: Synthetic oligonucleotide
  Sense strand starting at position 3937 of SEQ ID NO: 1242642
ccaaaucaccuggguauaa

SEQ ID NO: 1362649 - RNA, 19 nt, Artificial Sequence
  Description of Artificial Sequence: Synthetic oligonucleotide
  Antisense strand to SEQ ID NO: 1362648
uuauacccaggugauuugg

SEQ ID NO: 1362650 - RNA, 19 nt, Artificial Sequence
  Description of Artificial Sequence: Synthetic oligonucleotide
  Sense strand starting at position 3949 of SEQ ID NO: 1242642
gguauaaaugcacacuuga

SEQ ID NO: 1362651 - RNA, 19 nt, Artificial Sequence
  Description of Artificial Sequence: Synthetic oligonucleotide
  Antisense strand to SEQ ID NO: 1362650
ucaagugugcauuuauacc

SEQ ID NO: 1362652 - RNA, 19 nt, Artificial Sequence
  Description of Artificial Sequence: Synthetic oligonucleotide
  Sense strand starting at position 79 of SEQ ID NO: 1242643
gcuuuauucugagcaggcu

SEQ ID NO: 1362653 - RNA, 19 nt, Artificial Sequence
  Description of Artificial Sequence: Synthetic oligonucleotide
  Antisense strand to SEQ ID NO: 1362652
agccugcucagaauaaagc

SEQ ID NO: 1362654 - RNA, 19 nt, Artificial Sequence
  Description of Artificial Sequence: Synthetic oligonucleotide
  Sense strand starting at position 239 of SEQ ID NO: 1242643
uccggaagaucaggcauuu

SEQ ID NO: 1362655 - RNA, 19 nt, Artificial Sequence
  Description of Artificial Sequence: Synthetic oligonucleotide
  Antisense strand to SEQ ID NO: 1362654
aaaugccugaucuuccgga

SEQ ID NO: 1362656 - RNA, 19 nt, Artificial Sequence
  Description of Artificial Sequence: Synthetic oligonucleotide
  Sense strand starting at position 269 of SEQ ID NO: 1242643
gcauguccaccuggagaaa

SEQ ID NO: 1362657 - RNA, 19 nt, Artificial Sequence
  Description of Artificial Sequence: Synthetic oligonucleotide
  Antisense strand to SEQ ID NO: 1362656
uuucuccagguggacaugc

SEQ ID NO: 1362658 - RNA, 19 nt, Artificial Sequence
  Description of Artificial Sequence: Synthetic oligonucleotide
  Sense strand starting at position 281 of SEQ ID NO: 1242643
ggagaaacacuuugcugga

SEQ ID NO: 1362659 - RNA, 19 nt, Artificial Sequence
  Description of Artificial Sequence: Synthetic oligonucleotide
  Antisense strand to SEQ ID NO: 1362658
uccagcaaaguguuucucc

SEQ ID NO: 1362660 - RNA, 19 nt, Artificial Sequence
  Description of Artificial Sequence: Synthetic oligonucleotide
  Sense strand starting at position 284 of SEQ ID NO: 1242643
gaaacacuuugcuggagga

SEQ ID NO: 1362661 - RNA, 19 nt, Artificial Sequence
  Description of Artificial Sequence: Synthetic oligonucleotide
  Antisense strand to SEQ ID NO: 1362660
uccuccagcaaaguguuuc

SEQ ID NO: 1362662 - RNA, 19 nt, Artificial Sequence
  Description of Artificial Sequence: Synthetic oligonucleotide
  Sense strand starting at position 563 of SEQ ID NO: 1242643
gggagaucuucccauugau

SEQ ID NO: 1362663 - RNA, 19 nt, Artificial Sequence
  Description of Artificial Sequence: Synthetic oligonucleotide
  Antisense strand to SEQ ID NO: 1362662
aucaaugggaagaucuccc

SEQ ID NO: 1362664 - RNA, 19 nt, Artificial Sequence
  Description of Artificial Sequence: Synthetic oligonucleotide
  Sense strand starting at position 1166 of SEQ ID NO: 1242643
gggcaaaucuggcauccca

SEQ ID NO: 1362665 - RNA, 19 nt, Artificial Sequence
  Description of Artificial Sequence: Synthetic oligonucleotide
  Antisense strand to SEQ ID NO: 1362664
ugggaugccagauuugccc

SEQ ID NO: 1362666 - RNA, 19 nt, Artificial Sequence
  Description of Artificial Sequence: Synthetic oligonucleotide
  Sense strand starting at position 1266 of SEQ ID NO: 1242643
ugacaugggccauguugau

SEQ ID NO: 1362667 - RNA, 19 nt, Artificial Sequence
  Description of Artificial Sequence: Synthetic oligonucleotide
  Antisense strand to SEQ ID NO: 1362666
aucaacauggcccauguca

SEQ ID NO: 1362668 - RNA, 19 nt, Artificial Sequence
  Description of Artificial Sequence: Synthetic oligonucleotide
  Sense strand starting at position 2005 of SEQ ID NO: 1242643
ggagcuguaguccagauac

SEQ ID NO: 1362669 - RNA, 19 nt, Artificial Sequence
  Description of Artificial Sequence: Synthetic oligonucleotide
  Antisense strand to SEQ ID NO: 1362668
guaucuggacuacagcucc

SEQ ID NO: 1362670 - RNA, 19 nt, Artificial Sequence
  Description of Artificial Sequence: Synthetic oligonucleotide
  Sense strand starting at position 2034 of SEQ ID NO: 1242643
gucggaagcugauaaacua

SEQ ID NO: 1362671 - RNA, 19 nt, Artificial Sequence
  Description of Artificial Sequence: Synthetic oligonucleotide
  Antisense strand to SEQ ID NO: 1362670
uaguuuaucagcuuccgac

SEQ ID NO: 1362672 - RNA, 19 nt, Artificial Sequence
  Description of Artificial Sequence: Synthetic oligonucleotide
  Sense strand starting at position 2067 of SEQ ID NO: 1242643
acgcgcgccuccuguuaaa

SEQ ID NO: 1362673 - RNA, 19 nt, Artificial Sequence
  Description of Artificial Sequence: Synthetic oligonucleotide
  Antisense strand to SEQ ID NO: 1362672
uuuaacaggaggcgcgcgu

SEQ ID NO: 1362674 - RNA, 19 nt, Artificial Sequence
  Description of Artificial Sequence: Synthetic oligonucleotide
  Sense strand starting at position 2239 of SEQ ID NO: 1242643
cugugucacucuccgaaau

SEQ ID NO: 1362675 - RNA, 19 nt, Artificial Sequence
  Description of Artificial Sequence: Synthetic oligonucleotide
  Antisense strand to SEQ ID NO: 1362674
auuucggagagugacacag

SEQ ID NO: 1362676 - RNA, 19 nt, Artificial Sequence
  Description of Artificial Sequence: Synthetic oligonucleotide
  Sense strand starting at position 2240 of SEQ ID NO: 1242643
ugugucacucuccgaaauu

SEQ ID NO: 1362677 - RNA, 19 nt, Artificial Sequence
  Description of Artificial Sequence: Synthetic oligonucleotide
  Antisense strand to SEQ ID NO: 1362676
aauuucggagagugacaca

SEQ ID NO: 1362678 - RNA, 19 nt, Artificial Sequence
  Description of Artificial Sequence: Synthetic oligonucleotide
  Sense strand starting at position 2241 of SEQ ID NO: 1242643
gugucacucuccgaaauuu

SEQ ID NO: 1362679 - RNA, 19 nt, Artificial Sequence
  Description of Artificial Sequence: Synthetic oligonucleotide
  Antisense strand to SEQ ID NO: 1362678
aaauuucggagagugacac

SEQ ID NO: 1362680 - RNA, 19 nt, Artificial Sequence
  Description of Artificial Sequence: Synthetic oligonucleotide
  Sense strand starting at position 2252 of SEQ ID NO: 1242643
cgaaauuugugucagcgcu

SEQ ID NO: 1362681 - RNA, 19 nt, Artificial Sequence
  Description of Artificial Sequence: Synthetic oligonucleotide
  Antisense strand to SEQ ID NO: 1362680
agcgcugacacaaauuucg

SEQ ID NO: 1362682 - RNA, 19 nt, Artificial Sequence
  Description of Artificial Sequence: Synthetic oligonucleotide
  Sense strand starting at position 2326 of SEQ ID NO: 1242643
ggcguuagcgagaguucga

SEQ ID NO: 1362683 - RNA, 19 nt, Artificial Sequence
  Description of Artificial Sequence: Synthetic oligonucleotide
  Antisense strand to SEQ ID NO: 1362682
ucgaacucucgcuaacgcc

SEQ ID NO: 1362684 - RNA, 19 nt, Artificial Sequence
  Description of Artificial Sequence: Synthetic oligonucleotide
  Sense strand starting at position 2327 of SEQ ID NO: 1242643
gcguuagcgagaguucgau

SEQ ID NO: 1362685 - RNA, 19 nt, Artificial Sequence
  Description of Artificial Sequence: Synthetic oligonucleotide
  Antisense strand to SEQ ID NO: 1362684
aucgaacucucgcuaacgc

SEQ ID NO: 1362686 - RNA, 19 nt, Artificial Sequence
  Description of Artificial Sequence: Synthetic oligonucleotide
  Sense strand starting at position 2333 of SEQ ID NO: 1242643
gcgagaguucgauguucaa

SEQ ID NO: 1362687 - RNA, 19 nt, Artificial Sequence
  Description of Artificial Sequence: Synthetic oligonucleotide
  Antisense strand to SEQ ID NO: 1362686
uugaacaucgaacucucgc

SEQ ID NO: 1362688 - RNA, 19 nt, Artificial Sequence
  Description of Artificial Sequence: Synthetic oligonucleotide
  Sense strand starting at position 2336 of SEQ ID NO: 1242643
agaguucgauguucaaaug

SEQ ID NO: 1362689 - RNA, 19 nt, Artificial Sequence
  Description of Artificial Sequence: Synthetic oligonucleotide
  Antisense strand to SEQ ID NO: 1362688
cauuugaacaucgaacucu

SEQ ID NO: 1362690 - RNA, 19 nt, Artificial Sequence
  Description of Artificial Sequence: Synthetic oligonucleotide
  Sense strand starting at position 2435 of SEQ ID NO: 1242643
cggcgcugucuaagacagu

SEQ ID NO: 1362691 - RNA, 19 nt, Artificial Sequence
  Description of Artificial Sequence: Synthetic oligonucleotide
  Antisense strand to SEQ ID NO: 1362690
acugucuuagacagcgccg

SEQ ID NO: 1362692 - RNA, 19 nt, Artificial Sequence
  Description of Artificial Sequence: Synthetic oligonucleotide
  Sense strand starting at position 2436 of SEQ ID NO: 1242643
ggcgcugucuaagacaguu

SEQ ID NO: 1362693 - RNA, 19 nt, Artificial Sequence
  Description of Artificial Sequence: Synthetic oligonucleotide
  Antisense strand to SEQ ID NO: 1362692
aacugucuuagacagcgcc

SEQ ID NO: 1362694 - RNA, 19 nt, Artificial Sequence
  Description of Artificial Sequence: Synthetic oligonucleotide
  Sense strand starting at position 2757 of SEQ ID NO: 1242643
cccuguugguccgaguuua

SEQ ID NO: 1362695 - RNA, 19 nt, Artificial Sequence
  Description of Artificial Sequence: Synthetic oligonucleotide
  Antisense strand to SEQ ID NO: 1362694
uaaacucggaccaacaggg

SEQ ID NO: 1362696 - RNA, 19 nt, Artificial Sequence
  Description of Artificial Sequence: Synthetic oligonucleotide
  Sense strand starting at position 3001 of SEQ ID NO: 1242643
caggguuucucugugacac

SEQ ID NO: 1362697 - RNA, 19 nt, Artificial Sequence
  Description of Artificial Sequence: Synthetic oligonucleotide
  Antisense strand to SEQ ID NO: 1362696
gugucacagagaaacccug

SEQ ID NO: 1362698 - RNA, 19 nt, Artificial Sequence
  Description of Artificial Sequence: Synthetic oligonucleotide
  Sense strand starting at position 3002 of SEQ ID NO: 1242643
aggguuucucugugacacu

SEQ ID NO: 1362699 - RNA, 19 nt, Artificial Sequence
  Description of Artificial Sequence: Synthetic oligonucleotide
  Antisense strand to SEQ ID NO: 1362698
agugucacagagaaacccu

SEQ ID NO: 1362700 - RNA, 19 nt, Artificial Sequence
  Description of Artificial Sequence: Synthetic oligonucleotide
  Sense strand starting at position 3088 of SEQ ID NO: 1242643
gucacaggccgcgauuuau

SEQ ID NO: 1362701 - RNA, 19 nt, Artificial Sequence
  Description of Artificial Sequence: Synthetic oligonucleotide
  Antisense strand to SEQ ID NO: 1362700
auaaaucgcggccugugac

SEQ ID NO: 1362702 - RNA, 19 nt, Artificial Sequence
  Description of Artificial Sequence: Synthetic oligonucleotide
  Sense strand starting at position 3098 of SEQ ID NO: 1242643
gcgauuuaugugcgcccga

SEQ ID NO: 1362703 - RNA, 19 nt, Artificial Sequence
  Description of Artificial Sequence: Synthetic oligonucleotide
  Antisense strand to SEQ ID NO: 1362702
ucgggcgcacauaaaucgc

SEQ ID NO: 1362704 - RNA, 19 nt, Artificial Sequence
  Description of Artificial Sequence: Synthetic oligonucleotide
  Sense strand starting at position 3140 of SEQ ID NO: 1242643
ccgggcucuucuccagaaa

SEQ ID NO: 1362705 - RNA, 19 nt, Artificial Sequence
  Description of Artificial Sequence: Synthetic oligonucleotide
  Antisense strand to SEQ ID NO: 1362704
uuucuggagaagagcccgg

SEQ ID NO: 1362706 - RNA, 19 nt, Artificial Sequence
  Description of Artificial Sequence: Synthetic oligonucleotide
  Sense strand starting at position 3143 of SEQ ID NO: 1242643
ggcucuucuccagaaagug

SEQ ID NO: 1362707 - RNA, 19 nt, Artificial Sequence
  Description of Artificial Sequence: Synthetic oligonucleotide
  Antisense strand to SEQ ID NO: 1362706
cacuuucuggagaagagcc

SEQ ID NO: 1362708 - RNA, 19 nt, Artificial Sequence
  Description of Artificial Sequence: Synthetic oligonucleotide
  Sense strand starting at position 3758 of SEQ ID NO: 1242643
cagguuuaguguugccuga

SEQ ID NO: 1362709 - RNA, 19 nt, Artificial Sequence
  Description of Artificial Sequence: Synthetic oligonucleotide
  Antisense strand to SEQ ID NO: 1362708
ucaggcaacacuaaaccug

SEQ ID NO: 1362710 - RNA, 19 nt, Artificial Sequence
  Description of Artificial Sequence: Synthetic oligonucleotide
  Sense strand starting at position 3760 of SEQ ID NO: 1242643
gguuuaguguugccugacu

SEQ ID NO: 1362711 - RNA, 19 nt, Artificial Sequence
  Description of Artificial Sequence: Synthetic oligonucleotide
  Antisense strand to SEQ ID NO: 1362710
agucaggcaacacuaaacc

SEQ ID NO: 1362712 - RNA, 19 nt, Artificial Sequence
  Description of Artificial Sequence: Synthetic oligonucleotide
  Sense strand starting at position 3762 of SEQ ID NO: 1242643
uuuaguguugccugacuuc

SEQ ID NO: 1362713 - RNA, 19 nt, Artificial Sequence
  Description of Artificial Sequence: Synthetic oligonucleotide
  Antisense strand to SEQ ID NO: 1362712
gaagucaggcaacacuaaa

SEQ ID NO: 1362714 - RNA, 19 nt, Artificial Sequence
  Description of Artificial Sequence: Synthetic oligonucleotide
  Sense strand starting at position 3779 of SEQ ID NO: 1242643
ucagauauggccuauuguu

SEQ ID NO: 1362715 - RNA, 19 nt, Artificial Sequence
  Description of Artificial Sequence: Synthetic oligonucleotide
  Antisense strand to SEQ ID NO: 1362714
aacaauaggccauaucuga

SEQ ID NO: 1362716 - RNA, 19 nt, Artificial Sequence
  Description of Artificial Sequence: Synthetic oligonucleotide
  Sense strand starting at position 3934 of SEQ ID NO: 1242643
cugugugagcucggguuau

SEQ ID NO: 1362717 - RNA, 19 nt, Artificial Sequence
  Description of Artificial Sequence: Synthetic oligonucleotide
  Antisense strand to SEQ ID NO: 1362716
auaacccgagcucacacag

SEQ ID NO: 1362718 - RNA, 19 nt, Artificial Sequence
  Description of Artificial Sequence: Synthetic oligonucleotide
  Sense strand starting at position 229 of SEQ ID NO: 1242644
acagaaaguucucuguaac

SEQ ID NO: 1362719 - RNA, 19 nt, Artificial Sequence
  Description of Artificial Sequence: Synthetic oligonucleotide
  Antisense strand to SEQ ID NO: 1362718
guuacagagaacuuucugu

SEQ ID NO: 1362720 - RNA, 19 nt, Artificial Sequence
  Description of Artificial Sequence: Synthetic oligonucleotide
  Sense strand starting at position 246 of SEQ ID NO: 1242644
acauauguuugcucuuaua

SEQ ID NO: 1362721 - RNA, 19 nt, Artificial Sequence
  Description of Artificial Sequence: Synthetic oligonucleotide
  Antisense strand to SEQ ID NO: 1362720
uauaagagcaaacauaugu

SEQ ID NO: 1362722 - RNA, 19 nt, Artificial Sequence
  Description of Artificial Sequence: Synthetic oligonucleotide
  Sense strand starting at position 273 of SEQ ID NO: 1242644
auaacuaugcauugagaac

SEQ ID NO: 1362723 - RNA, 19 nt, Artificial Sequence
  Description of Artificial Sequence: Synthetic oligonucleotide
  Antisense strand to SEQ ID NO: 1362722
guucucaaugcauaguuau

SEQ ID NO: 1362724 - RNA, 19 nt, Artificial Sequence
  Description of Artificial Sequence: Synthetic oligonucleotide
  Sense strand starting at position 395 of SEQ ID NO: 1242644
cacuguuguggagaacagu

SEQ ID NO: 1362725 - RNA, 19 nt, Artificial Sequence
  Description of Artificial Sequence: Synthetic oligonucleotide
  Antisense strand to SEQ ID NO: 1362724
acuguucuccacaacagug

SEQ ID NO: 1362726 - RNA, 19 nt, Artificial Sequence
  Description of Artificial Sequence: Synthetic oligonucleotide
  Sense strand starting at position 404 of SEQ ID NO: 1242644
ggagaacaguugcucuaau

SEQ ID NO: 1362727 - RNA, 19 nt, Artificial Sequence
  Description of Artificial Sequence: Synthetic oligonucleotide
  Antisense strand to SEQ ID NO: 1362726
auuagagcaacuguucucc

SEQ ID NO: 1362728 - RNA, 19 nt, Artificial Sequence
  Description of Artificial Sequence: Synthetic oligonucleotide
  Sense strand starting at position 405 of SEQ ID NO: 1242644
gagaacaguugcucuaaua

SEQ ID NO: 1362729 - RNA, 19 nt, Artificial Sequence
  Description of Artificial Sequence: Synthetic oligonucleotide
  Antisense strand to SEQ ID NO: 1362728
uauuagagcaacuguucuc

SEQ ID NO: 1362730 - RNA, 19 nt, Artificial Sequence
  Description of Artificial Sequence: Synthetic oligonucleotide
  Sense strand starting at position 432 of SEQ ID NO: 1242644
gggucauuggcuuaagaca

SEQ ID NO: 1362731 - RNA, 19 nt, Artificial Sequence
  Description of Artificial Sequence: Synthetic oligonucleotide
  Antisense strand to SEQ ID NO: 1362730
ugucuuaagccaaugaccc

SEQ ID NO: 1362732 - RNA, 19 nt, Artificial Sequence
  Description of Artificial Sequence: Synthetic oligonucleotide
  Sense strand starting at position 468 of SEQ ID NO: 1242644
uggcucuaucacuaauugu

SEQ ID NO: 1362733 - RNA, 19 nt, Artificial Sequence
  Description of Artificial Sequence: Synthetic oligonucleotide
  Antisense strand to SEQ ID NO: 1362732
acaauuagugauagagcca

SEQ ID NO: 1362734 - RNA, 19 nt, Artificial Sequence
  Description of Artificial Sequence: Synthetic oligonucleotide
  Sense strand starting at position 485 of SEQ ID NO: 1242644
gugcgaccugggcaaauua

SEQ ID NO: 1362735 - RNA, 19 nt, Artificial Sequence
  Description of Artificial Sequence: Synthetic oligonucleotide
  Antisense strand to SEQ ID NO: 1362734
uaauuugcccaggucgcac

SEQ ID NO: 1362736 - RNA, 19 nt, Artificial Sequence
  Description of Artificial Sequence: Synthetic oligonucleotide
  Sense strand starting at position 571 of SEQ ID NO: 1242644
ugcugcuguagggaugaaa

SEQ ID NO: 1362737 - RNA, 19 nt, Artificial Sequence
  Description of Artificial Sequence: Synthetic oligonucleotide
  Antisense strand to SEQ ID NO: 1362736
uuucaucccuacagcagca

SEQ ID NO: 1362738 - RNA, 19 nt, Artificial Sequence
  Description of Artificial Sequence: Synthetic oligonucleotide
  Sense strand starting at position 594 of SEQ ID NO: 1242644
augauauacuugucccuca

SEQ ID NO: 1362739 - RNA, 19 nt, Artificial Sequence
  Description of Artificial Sequence: Synthetic oligonucleotide
  Antisense strand to SEQ ID NO: 1362738
ugagggacaaguauaucau

SEQ ID NO: 1362740 - RNA, 19 nt, Artificial Sequence
  Description of Artificial Sequence: Synthetic oligonucleotide
  Sense strand starting at position 597 of SEQ ID NO: 1242644
auauacuugucccucagua

SEQ ID NO: 1362741 - RNA, 19 nt, Artificial Sequence
  Description of Artificial Sequence: Synthetic oligonucleotide
  Antisense strand to SEQ ID NO: 1362740
uacugagggacaaguauau

SEQ ID NO: 1362742 - RNA, 19 nt, Artificial Sequence
  Description of Artificial Sequence: Synthetic oligonucleotide
  Sense strand starting at position 599 of SEQ ID NO: 1242644
auacuugucccucaguauc

SEQ ID NO: 1362743 - RNA, 19 nt, Artificial Sequence
  Description of Artificial Sequence: Synthetic oligonucleotide
  Antisense strand to SEQ ID NO: 1362742
gauacugagggacaaguau

SEQ ID NO: 1362744 - RNA, 19 nt, Artificial Sequence
  Description of Artificial Sequence: Synthetic oligonucleotide
  Sense strand starting at position 999 of SEQ ID NO: 1242644
ccggauauaacagggugaa

SEQ ID NO: 1362745 - RNA, 19 nt, Artificial Sequence
  Description of Artificial Sequence: Synthetic oligonucleotide
  Antisense strand to SEQ ID NO: 1362744
uucacccuguuauauccgg

SEQ ID NO: 1362746 - RNA, 19 nt, Artificial Sequence
  Description of Artificial Sequence: Synthetic oligonucleotide
  Sense strand starting at position 1013 of SEQ ID NO: 1242644
gugaaauauuugcauagaa

SEQ ID NO: 1362747 - RNA, 19 nt, Artificial Sequence
  Description of Artificial Sequence: Synthetic oligonucleotide
  Antisense strand to SEQ ID NO: 1362746
uucuaugcaaauauuucac

SEQ ID NO: 1362748 - RNA, 19 nt, Artificial Sequence
  Description of Artificial Sequence: Synthetic oligonucleotide
  Sense strand starting at position 1045 of SEQ ID NO: 1242644
uccuguagacuuuaaguca

SEQ ID NO: 1362749 - RNA, 19 nt, Artificial Sequence
  Description of Artificial Sequence: Synthetic oligonucleotide
  Antisense strand to SEQ ID NO: 1362748
ugacuuaaagucuacagga

SEQ ID NO: 1362750 - RNA, 19 nt, Artificial Sequence
  Description of Artificial Sequence: Synthetic oligonucleotide
  Sense strand starting at position 1149 of SEQ ID NO: 1242644
cuugguaauuuguggauuu

SEQ ID NO: 1362751 - RNA, 19 nt, Artificial Sequence
  Description of Artificial Sequence: Synthetic oligonucleotide
  Antisense strand to SEQ ID NO: 1362750
aaauccacaaauuaccaag

SEQ ID NO: 1362752 - RNA, 19 nt, Artificial Sequence
  Description of Artificial Sequence: Synthetic oligonucleotide
  Sense strand starting at position 1257 of SEQ ID NO: 1242644
ugguguagugccuagacau

SEQ ID NO: 1362753 - RNA, 19 nt, Artificial Sequence
  Description of Artificial Sequence: Synthetic oligonucleotide
  Antisense strand to SEQ ID NO: 1362752
augucuaggcacuacacca

SEQ ID NO: 1362754 - RNA, 19 nt, Artificial Sequence
  Description of Artificial Sequence: Synthetic oligonucleotide
  Sense strand starting at position 1280 of SEQ ID NO: 1242644
aagaguggucaguagcauu

SEQ ID NO: 1362755 - RNA, 19 nt, Artificial Sequence
  Description of Artificial Sequence: Synthetic oligonucleotide
  Antisense strand to SEQ ID NO: 1362754
aaugcuacugaccacucuu

SEQ ID NO: 1362756 - RNA, 19 nt, Artificial Sequence
  Description of Artificial Sequence: Synthetic oligonucleotide
  Sense strand starting at position 1313 of SEQ ID NO: 1242644
agugccuuucccugaaaga

SEQ ID NO: 1362757 - RNA, 19 nt, Artificial Sequence
  Description of Artificial Sequence: Synthetic oligonucleotide
  Antisense strand to SEQ ID NO: 1362756
ucuuucagggaaaggcacu

SEQ ID NO: 1362758 - RNA, 19 nt, Artificial Sequence
  Description of Artificial Sequence: Synthetic oligonucleotide
  Sense strand starting at position 1314 of SEQ ID NO: 1242644
gugccuuucccugaaagaa

SEQ ID NO: 1362759 - RNA, 19 nt, Artificial Sequence
  Description of Artificial Sequence: Synthetic oligonucleotide
  Antisense strand to SEQ ID NO: 1362758
uucuuucagggaaaggcac

SEQ ID NO: 1362760 - RNA, 19 nt, Artificial Sequence
  Description of Artificial Sequence: Synthetic oligonucleotide
  Sense strand starting at position 1633 of SEQ ID NO: 1242644
uagacuucguugucaucaa

SEQ ID NO: 1362761 - RNA, 19 nt, Artificial Sequence
  Description of Artificial Sequence: Synthetic oligonucleotide
  Antisense strand to SEQ ID NO: 1362760
uugaugacaacgaagucua

SEQ ID NO: 1362762 - RNA, 19 nt, Artificial Sequence
  Description of Artificial Sequence: Synthetic oligonucleotide
  Sense strand starting at position 1637 of SEQ ID NO: 1242644
cuucguugucaucaaucau

SEQ ID NO: 1362763 - RNA, 19 nt, Artificial Sequence
  Description of Artificial Sequence: Synthetic oligonucleotide
  Antisense strand to SEQ ID NO: 1362762
augauugaugacaacgaag

SEQ ID NO: 1362764 - RNA, 19 nt, Artificial Sequence
  Description of Artificial Sequence: Synthetic oligonucleotide
  Sense strand starting at position 1726 of SEQ ID NO: 1242644
uugcuauaacgugaaugua

SEQ ID NO: 1362765 - RNA, 19 nt, Artificial Sequence
  Description of Artificial Sequence: Synthetic oligonucleotide
  Antisense strand to SEQ ID NO: 1362764
uacauucacguuauagcaa

SEQ ID NO: 1362766 - RNA, 19 nt, Artificial Sequence
  Description of Artificial Sequence: Synthetic oligonucleotide
  Sense strand starting at position 1729 of SEQ ID NO: 1242644
cuauaacgugaauguaaug

SEQ ID NO: 1362767 - RNA, 19 nt, Artificial Sequence
  Description of Artificial Sequence: Synthetic oligonucleotide
  Antisense strand to SEQ ID NO: 1362766
cauuacauucacguuauag

SEQ ID NO: 1362768 - RNA, 19 nt, Artificial Sequence
  Description of Artificial Sequence: Synthetic oligonucleotide
  Sense strand starting at position 1777 of SEQ ID NO: 1242644
ccguuucccaaagagauga

SEQ ID NO: 1362769 - RNA, 19 nt, Artificial Sequence
  Description of Artificial Sequence: Synthetic oligonucleotide
  Antisense strand to SEQ ID NO: 1362768
ucaucucuuugggaaacgg

SEQ ID NO: 1362770 - RNA, 19 nt, Artificial Sequence
  Description of Artificial Sequence: Synthetic oligonucleotide
  Sense strand starting at position 1879 of SEQ ID NO: 1242644
gagcgaucauaccuuucuu

SEQ ID NO: 1362771 - RNA, 19 nt, Artificial Sequence
  Description of Artificial Sequence: Synthetic oligonucleotide
  Antisense strand to SEQ ID NO: 1362770
aagaaagguaugaucgcuc

SEQ ID NO: 1362772 - RNA, 19 nt, Artificial Sequence
  Description of Artificial Sequence: Synthetic oligonucleotide
  Sense strand starting at position 1985 of SEQ ID NO: 1242644
ccuggcuaugauuguuauu

SEQ ID NO: 1362773 - RNA, 19 nt, Artificial Sequence
  Description of Artificial Sequence: Synthetic oligonucleotide
  Antisense strand to SEQ ID NO: 1362772
aauaacaaucauagccagg

SEQ ID NO: 1362774 - RNA, 19 nt, Artificial Sequence
  Description of Artificial Sequence: Synthetic oligonucleotide
  Sense strand starting at position 1987 of SEQ ID NO: 1242644
uggcuaugauuguuauucu

SEQ ID NO: 1362775 - RNA, 19 nt, Artificial Sequence
  Description of Artificial Sequence: Synthetic oligonucleotide
  Antisense strand to SEQ ID NO: 1362774
agaauaacaaucauagcca

SEQ ID NO: 1362776 - RNA, 19 nt, Artificial Sequence
  Description of Artificial Sequence: Synthetic oligonucleotide
  Sense strand starting at position 1990 of SEQ ID NO: 1242644
cuaugauuguuauucucca

SEQ ID NO: 1362777 - RNA, 19 nt, Artificial Sequence
  Description of Artificial Sequence: Synthetic oligonucleotide
  Antisense strand to SEQ ID NO: 1362776
uggagaauaacaaucauag

SEQ ID NO: 1362778 - RNA, 19 nt, Artificial Sequence
  Description of Artificial Sequence: Synthetic oligonucleotide
  Sense strand starting at position 2067 of SEQ ID NO: 1242644
ugacgugucaaaggacaca

SEQ ID NO: 1362779 - RNA, 19 nt, Artificial Sequence
  Description of Artificial Sequence: Synthetic oligonucleotide
  Antisense strand to SEQ ID NO: 1362778
uguguccuuugacacguca

SEQ ID NO: 1362780 - RNA, 19 nt, Artificial Sequence
  Description of Artificial Sequence: Synthetic oligonucleotide
  Sense strand starting at position 2115 of SEQ ID NO: 1242644
acgugaagacgcaggcauu

SEQ ID NO: 1362781 - RNA, 19 nt, Artificial Sequence
  Description of Artificial Sequence: Synthetic oligonucleotide
  Antisense strand to SEQ ID NO: 1362780
aaugccugcgucuucacgu

SEQ ID NO: 1362782 - RNA, 19 nt, Artificial Sequence
  Description of Artificial Sequence: Synthetic oligonucleotide
  Sense strand starting at position 2135 of SEQ ID NO: 1242644
gcgucaagcagacaugagu

SEQ ID NO: 1362783 - RNA, 19 nt, Artificial Sequence
  Description of Artificial Sequence: Synthetic oligonucleotide
  Antisense strand to SEQ ID NO: 1362782
acucaugucugcuugacgc

SEQ ID NO: 1362784 - RNA, 19 nt, Artificial Sequence
  Description of Artificial Sequence: Synthetic oligonucleotide
  Sense strand starting at position 2194 of SEQ ID NO: 1242644
gcccuaaccucuuugagac

SEQ ID NO: 1362785 - RNA, 19 nt, Artificial Sequence
  Description of Artificial Sequence: Synthetic oligonucleotide
  Antisense strand to SEQ ID NO: 1362784
gucucaaagagguuagggc

SEQ ID NO: 1362786 - RNA, 19 nt, Artificial Sequence
  Description of Artificial Sequence: Synthetic oligonucleotide
  Sense strand starting at position 2595 of SEQ ID NO: 1242644
gcgaaagcccgucuuccua

SEQ ID NO: 1362787 - RNA, 19 nt, Artificial Sequence
  Description of Artificial Sequence: Synthetic oligonucleotide
  Antisense strand to SEQ ID NO: 1362786
uaggaagacgggcuuucgc

SEQ ID NO: 1362788 - RNA, 19 nt, Artificial Sequence
  Description of Artificial Sequence: Synthetic oligonucleotide
  Sense strand starting at position 2597 of SEQ ID NO: 1242644
gaaagcccgucuuccuaaa

SEQ ID NO: 1362789 - RNA, 19 nt, Artificial Sequence
  Description of Artificial Sequence: Synthetic oligonucleotide
  Antisense strand to SEQ ID NO: 1362788
uuuaggaagacgggcuuuc

SEQ ID NO: 1362790 - RNA, 19 nt, Artificial Sequence
  Description of Artificial Sequence: Synthetic oligonucleotide
  Sense strand starting at position 3061 of SEQ ID NO: 1242644
ggaguuuaaguccaaccua

SEQ ID NO: 1362791 - RNA, 19 nt, Artificial Sequence
  Description of Artificial Sequence: Synthetic oligonucleotide
  Antisense strand to SEQ ID NO: 1362790
uagguuggacuuaaacucc

SEQ ID NO: 1362792 - RNA, 19 nt, Artificial Sequence
  Description of Artificial Sequence: Synthetic oligonucleotide
  Sense strand starting at position 3268 of SEQ ID NO: 1242644
ucuuaaguccaguauguau

SEQ ID NO: 1362793 - RNA, 19 nt, Artificial Sequence
  Description of Artificial Sequence: Synthetic oligonucleotide
  Antisense strand to SEQ ID NO: 1362792
auacauacuggacuuaaga

SEQ ID NO: 1362794 - RNA, 19 nt, Artificial Sequence
  Description of Artificial Sequence: Synthetic oligonucleotide
  Sense strand starting at position 3270 of SEQ ID NO: 1242644
uuaaguccaguauguauau

SEQ ID NO: 1362795 - RNA, 19 nt, Artificial Sequence
  Description of Artificial Sequence: Synthetic oligonucleotide
  Antisense strand to SEQ ID NO: 1362794
auauacauacuggacuuaa

SEQ ID NO: 1362796 - RNA, 19 nt, Artificial Sequence
  Description of Artificial Sequence: Synthetic oligonucleotide
  Sense strand starting at position 3755 of SEQ ID NO: 1242644
ugagguguuucuccauuuc

SEQ ID NO: 1362797 - RNA, 19 nt, Artificial Sequence
  Description of Artificial Sequence: Synthetic oligonucleotide
  Antisense strand to SEQ ID NO: 1362796
gaaauggagaaacaccuca

SEQ ID NO: 1362798 - RNA, 19 nt, Artificial Sequence
  Description of Artificial Sequence: Synthetic oligonucleotide
  Sense strand starting at position 446 of SEQ ID NO: 1242645
cccugacgcccugauauua

SEQ ID NO: 1362799 - RNA, 19 nt, Artificial Sequence
  Description of Artificial Sequence: Synthetic oligonucleotide
  Antisense strand to SEQ ID NO: 1362798
uaauaucagggcgucaggg

SEQ ID NO: 1362800 - RNA, 19 nt, Artificial Sequence
  Description of Artificial Sequence: Synthetic oligonucleotide
  Sense strand starting at position 475 of SEQ ID NO: 1242645
ccaagucauugggucuuga

SEQ ID NO: 1362801 - RNA, 19 nt, Artificial Sequence
  Description of Artificial Sequence: Synthetic oligonucleotide
  Antisense strand to SEQ ID NO: 1362800
ucaagacccaaugacuugg

SEQ ID NO: 1362802 - RNA, 19 nt, Artificial Sequence
  Description of Artificial Sequence: Synthetic oligonucleotide
  Sense strand starting at position 557 of SEQ ID NO: 1242645
uuggcagugcuaugacauc

SEQ ID NO: 1362803 - RNA, 19 nt, Artificial Sequence
  Description of Artificial Sequence: Synthetic oligonucleotide
  Antisense strand to SEQ ID NO: 1362802
gaugucauagcacugccaa

SEQ ID NO: 1362804 - RNA, 19 nt, Artificial Sequence
  Description of Artificial Sequence: Synthetic oligonucleotide
  Sense strand starting at position 597 of SEQ ID NO: 1242645
aagacauuggauugugauu

SEQ ID NO: 1362805 - RNA, 19 nt, Artificial Sequence
  Description of Artificial Sequence: Synthetic oligonucleotide
  Antisense strand to SEQ ID NO: 1362804
aaucacaauccaaugucuu

SEQ ID NO: 1362806 - RNA, 19 nt, Artificial Sequence
  Description of Artificial Sequence: Synthetic oligonucleotide
  Sense strand starting at position 599 of SEQ ID NO: 1242645
gacauuggauugugauuuc

SEQ ID NO: 1362807 - RNA, 19 nt, Artificial Sequence
  Description of Artificial Sequence: Synthetic oligonucleotide
  Antisense strand to SEQ ID NO: 1362806
gaaaucacaauccaauguc

SEQ ID NO: 1362808 - RNA, 19 nt, Artificial Sequence
  Description of Artificial Sequence: Synthetic oligonucleotide
  Sense strand starting at position 648 of SEQ ID NO: 1242645
ugagcccuucuaggaagau

SEQ ID NO: 1362809 - RNA, 19 nt, Artificial Sequence
  Description of Artificial Sequence: Synthetic oligonucleotide
  Antisense strand to SEQ ID NO: 1362808
aucuuccuagaagggcuca

SEQ ID NO: 1362810 - RNA, 19 nt, Artificial Sequence
  Description of Artificial Sequence: Synthetic oligonucleotide
  Sense strand starting at position 649 of SEQ ID NO: 1242645
gagcccuucuaggaagauu

SEQ ID NO: 1362811 - RNA, 19 nt, Artificial Sequence
  Description of Artificial Sequence: Synthetic oligonucleotide
  Antisense strand to SEQ ID NO: 1362810
aaucuuccuagaagggcuc

SEQ ID NO: 1362812 - RNA, 19 nt, Artificial Sequence
  Description of Artificial Sequence: Synthetic oligonucleotide
  Sense strand starting at position 765 of SEQ ID NO: 1242645
cccuacaucgcucagagau

SEQ ID NO: 1362813 - RNA, 19 nt, Artificial Sequence
  Description of Artificial Sequence: Synthetic oligonucleotide
  Antisense strand to SEQ ID NO: 1362812
aucucugagcgauguaggg

SEQ ID NO: 1362814 - RNA, 19 nt, Artificial Sequence
  Description of Artificial Sequence: Synthetic oligonucleotide
  Sense strand starting at position 872 of SEQ ID NO: 1242645
gugggcaagccaugugaga

SEQ ID NO: 1362815 - RNA, 19 nt, Artificial Sequence
  Description of Artificial Sequence: Synthetic oligonucleotide
  Antisense strand to SEQ ID NO: 1362814
ucucacauggcuugcccac

SEQ ID NO: 1362816 - RNA, 19 nt, Artificial Sequence
  Description of Artificial Sequence: Synthetic oligonucleotide
  Sense strand starting at position 1013 of SEQ ID NO: 1242645
auccuucguuuacuuagaa

SEQ ID NO: 1362817 - RNA, 19 nt, Artificial Sequence
  Description of Artificial Sequence: Synthetic oligonucleotide
  Antisense strand to SEQ ID NO: 1362816
uucuaaguaaacgaaggau

SEQ ID NO: 1362818 - RNA, 19 nt, Artificial Sequence
  Description of Artificial Sequence: Synthetic oligonucleotide
  Sense strand starting at position 1014 of SEQ ID NO: 1242645
uccuucguuuacuuagaaa

SEQ ID NO: 1362819 - RNA, 19 nt, Artificial Sequence
  Description of Artificial Sequence: Synthetic oligonucleotide
  Antisense strand to SEQ ID NO: 1362818
uuucuaaguaaacgaagga

SEQ ID NO: 1362820 - RNA, 19 nt, Artificial Sequence
  Description of Artificial Sequence: Synthetic oligonucleotide
  Sense strand starting at position 1120 of SEQ ID NO: 1242645
gacuuuaacugagucaaga

SEQ ID NO: 1362821 - RNA, 19 nt, Artificial Sequence
  Description of Artificial Sequence: Synthetic oligonucleotide
  Antisense strand to SEQ ID NO: 1362820
ucuugacucaguuaaaguc

SEQ ID NO: 1362822 - RNA, 19 nt, Artificial Sequence
  Description of Artificial Sequence: Synthetic oligonucleotide
  Sense strand starting at position 2190 of SEQ ID NO: 1242645
ggcggcuugcgagcuguaa

SEQ ID NO: 1362823 - RNA, 19 nt, Artificial Sequence
  Description of Artificial Sequence: Synthetic oligonucleotide
  Antisense strand to SEQ ID NO: 1362822
uuacagcucgcaagccgcc

SEQ ID NO: 1362824 - RNA, 19 nt, Artificial Sequence
  Description of Artificial Sequence: Synthetic oligonucleotide
  Sense strand starting at position 2303 of SEQ ID NO: 1242645
gaccuagaucuauggguuc

SEQ ID NO: 1362825 - RNA, 19 nt, Artificial Sequence
  Description of Artificial Sequence: Synthetic oligonucleotide
  Antisense strand to SEQ ID NO: 1362824
gaacccauagaucuagguc

SEQ ID NO: 1362826 - RNA, 19 nt, Artificial Sequence
  Description of Artificial Sequence: Synthetic oligonucleotide
  Sense strand starting at position 2345 of SEQ ID NO: 1242645
gugagaauaucugucgugu

SEQ ID NO: 1362827 - RNA, 19 nt, Artificial Sequence
  Description of Artificial Sequence: Synthetic oligonucleotide
  Antisense strand to SEQ ID NO: 1362826
acacgacagauauucucac

SEQ ID NO: 1362828 - RNA, 19 nt, Artificial Sequence
  Description of Artificial Sequence: Synthetic oligonucleotide
  Sense strand starting at position 2356 of SEQ ID NO: 1242645
ugucgugugcgucuguuua

SEQ ID NO: 1362829 - RNA, 19 nt, Artificial Sequence
  Description of Artificial Sequence: Synthetic oligonucleotide
  Antisense strand to SEQ ID NO: 1362828
uaaacagacgcacacgaca

SEQ ID NO: 1362830 - RNA, 19 nt, Artificial Sequence
  Description of Artificial Sequence: Synthetic oligonucleotide
  Sense strand starting at position 2360 of SEQ ID NO: 1242645
gugugcgucuguuuaauuu

SEQ ID NO: 1362831 - RNA, 19 nt, Artificial Sequence
  Description of Artificial Sequence: Synthetic oligonucleotide
  Antisense strand to SEQ ID NO: 1362830
aaauuaaacagacgcacac

SEQ ID NO: 1362832 - RNA, 19 nt, Artificial Sequence
  Description of Artificial Sequence: Synthetic oligonucleotide
  Sense strand starting at position 2364 of SEQ ID NO: 1242645
gcgucuguuuaauuugaag

SEQ ID NO: 1362833 - RNA, 19 nt, Artificial Sequence
  Description of Artificial Sequence: Synthetic oligonucleotide
  Antisense strand to SEQ ID NO: 1362832
cuucaaauuaaacagacgc

SEQ ID NO: 1362834 - RNA, 19 nt, Artificial Sequence
  Description of Artificial Sequence: Synthetic oligonucleotide
  Sense strand starting at position 2366 of SEQ ID NO: 1242645
gucuguuuaauuugaagug

SEQ ID NO: 1362835 - RNA, 19 nt, Artificial Sequence
  Description of Artificial Sequence: Synthetic oligonucleotide
  Antisense strand to SEQ ID NO: 1362834
cacuucaaauuaaacagac

SEQ ID NO: 1362836 - RNA, 19 nt, Artificial Sequence
  Description of Artificial Sequence: Synthetic oligonucleotide
  Sense strand starting at position 2389 of SEQ ID NO: 1242645
aguggaugccuaugucagu

SEQ ID NO: 1362837 - RNA, 19 nt, Artificial Sequence
  Description of Artificial Sequence: Synthetic oligonucleotide
  Antisense strand to SEQ ID NO: 1362836
acugacauaggcauccacu

SEQ ID NO: 1362838 - RNA, 19 nt, Artificial Sequence
  Description of Artificial Sequence: Synthetic oligonucleotide
  Sense strand starting at position 2400 of SEQ ID NO: 1242645
augucaguuccauaugugu

SEQ ID NO: 1362839 - RNA, 19 nt, Artificial Sequence
  Description of Artificial Sequence: Synthetic oligonucleotide
  Antisense strand to SEQ ID NO: 1362838
acacauauggaacugacau

SEQ ID NO: 1362840 - RNA, 19 nt, Artificial Sequence
  Description of Artificial Sequence: Synthetic oligonucleotide
  Sense strand starting at position 2402 of SEQ ID NO: 1242645
gucaguuccauauguguuu

SEQ ID NO: 1362841 - RNA, 19 nt, Artificial Sequence
  Description of Artificial Sequence: Synthetic oligonucleotide
  Antisense strand to SEQ ID NO: 1362840
aaacacauauggaacugac

SEQ ID NO: 1362842 - RNA, 19 nt, Artificial Sequence
  Description of Artificial Sequence: Synthetic oligonucleotide
  Sense strand starting at position 2409 of SEQ ID NO: 1242645
ccauauguguuugcaugca

SEQ ID NO: 1362843 - RNA, 19 nt, Artificial Sequence
  Description of Artificial Sequence: Synthetic oligonucleotide
  Antisense strand to SEQ ID NO: 1362842
ugcaugcaaacacauaugg

SEQ ID NO: 1362844 - RNA, 19 nt, Artificial Sequence
  Description of Artificial Sequence: Synthetic oligonucleotide
  Sense strand starting at position 2413 of SEQ ID NO: 1242645
auguguuugcaugcacuuu

SEQ ID NO: 1362845 - RNA, 19 nt, Artificial Sequence
  Description of Artificial Sequence: Synthetic oligonucleotide
  Antisense strand to SEQ ID NO: 1362844
aaagugcaugcaaacacau

SEQ ID NO: 1362846 - RNA, 19 nt, Artificial Sequence
  Description of Artificial Sequence: Synthetic oligonucleotide
  Sense strand starting at position 2496 of SEQ ID NO: 1242645
gggcuuuacuuuccagaaa

SEQ ID NO: 1362847 - RNA, 19 nt, Artificial Sequence
  Description of Artificial Sequence: Synthetic oligonucleotide
  Antisense strand to SEQ ID NO: 1362846
uuucuggaaaguaaagccc

SEQ ID NO: 1362848 - RNA, 19 nt, Artificial Sequence
  Description of Artificial Sequence: Synthetic oligonucleotide
  Sense strand starting at position 2497 of SEQ ID NO: 1242645
ggcuuuacuuuccagaaac

SEQ ID NO: 1362849 - RNA, 19 nt, Artificial Sequence
  Description of Artificial Sequence: Synthetic oligonucleotide
  Antisense strand to SEQ ID NO: 1362848
guuucuggaaaguaaagcc

SEQ ID NO: 1362850 - RNA, 19 nt, Artificial Sequence
  Description of Artificial Sequence: Synthetic oligonucleotide
  Sense strand starting at position 2516 of SEQ ID NO: 1242645
cccagagguuuaucuuuaa

SEQ ID NO: 1362851 - RNA, 19 nt, Artificial Sequence
  Description of Artificial Sequence: Synthetic oligonucleotide
  Antisense strand to SEQ ID NO: 1362850
uuaaagauaaaccucuggg

SEQ ID NO: 1362852 - RNA, 19 nt, Artificial Sequence
  Description of Artificial Sequence: Synthetic oligonucleotide
  Sense strand starting at position 2789 of SEQ ID NO: 1242645
agguuucagucauccgaga

SEQ ID NO: 1362853 - RNA, 19 nt, Artificial Sequence
  Description of Artificial Sequence: Synthetic oligonucleotide
  Antisense strand to SEQ ID NO: 1362852
ucucggaugacugaaaccu

SEQ ID NO: 1362854 - RNA, 19 nt, Artificial Sequence
  Description of Artificial Sequence: Synthetic oligonucleotide
  Sense strand starting at position 2794 of SEQ ID NO: 1242645
ucagucauccgagaucaug

SEQ ID NO: 1362855 - RNA, 19 nt, Artificial Sequence
  Description of Artificial Sequence: Synthetic oligonucleotide
  Antisense strand to SEQ ID NO: 1362854
caugaucucggaugacuga

SEQ ID NO: 1362856 - RNA, 19 nt, Artificial Sequence
  Description of Artificial Sequence: Synthetic oligonucleotide
  Sense strand starting at position 2906 of SEQ ID NO: 1242645
gggaaagaauaugaauagu

SEQ ID NO: 1362857 - RNA, 19 nt, Artificial Sequence
  Description of Artificial Sequence: Synthetic oligonucleotide
  Antisense strand to SEQ ID NO: 1362856
acuauucauauucuuuccc

SEQ ID NO: 1362858 - RNA, 19 nt, Artificial Sequence
  Description of Artificial Sequence: Synthetic oligonucleotide
  Sense strand starting at position 2912 of SEQ ID NO: 1242645
gaauaugaauagucauguc

SEQ ID NO: 1362859 - RNA, 19 nt, Artificial Sequence
  Description of Artificial Sequence: Synthetic oligonucleotide
  Antisense strand to SEQ ID NO: 1362858
gacaugacuauucauauuc

SEQ ID NO: 1362860 - RNA, 19 nt, Artificial Sequence
  Description of Artificial Sequence: Synthetic oligonucleotide
  Sense strand starting at position 3005 of SEQ ID NO: 1242645
auaagaauauaucauccga

SEQ ID NO: 1362861 - RNA, 19 nt, Artificial Sequence
  Description of Artificial Sequence: Synthetic oligonucleotide
  Antisense strand to SEQ ID NO: 1362860
ucggaugauauauucuuau

SEQ ID NO: 1362862 - RNA, 19 nt, Artificial Sequence
  Description of Artificial Sequence: Synthetic oligonucleotide
  Sense strand starting at position 3151 of SEQ ID NO: 1242645
ucuaaugcuagugggagua

SEQ ID NO: 1362863 - RNA, 19 nt, Artificial Sequence
  Description of Artificial Sequence: Synthetic oligonucleotide
  Antisense strand to SEQ ID NO: 1362862
uacucccacuagcauuaga

SEQ ID NO: 1362864 - RNA, 19 nt, Artificial Sequence
  Description of Artificial Sequence: Synthetic oligonucleotide
  Sense strand starting at position 3441 of SEQ ID NO: 1242645
gcugcaugaauguaauguu

SEQ ID NO: 1362865 - RNA, 19 nt, Artificial Sequence
  Description of Artificial Sequence: Synthetic oligonucleotide
  Antisense strand to SEQ ID NO: 1362864
aacauuacauucaugcagc

SEQ ID NO: 1362866 - RNA, 19 nt, Artificial Sequence
  Description of Artificial Sequence: Synthetic oligonucleotide
  Sense strand starting at position 3456 of SEQ ID NO: 1242645
uguuuauuguucucaggua

SEQ ID NO: 1362867 - RNA, 19 nt, Artificial Sequence
  Description of Artificial Sequence: Synthetic oligonucleotide
  Antisense strand to SEQ ID NO: 1362866
uaccugagaacaauaaaca

SEQ ID NO: 1362868 - RNA, 19 nt, Artificial Sequence
  Description of Artificial Sequence: Synthetic oligonucleotide
  Sense strand starting at position 3471 of SEQ ID NO: 1242645
gguauauauguauaacucu

SEQ ID NO: 1362869 - RNA, 19 nt, Artificial Sequence
  Description of Artificial Sequence: Synthetic oligonucleotide
  Antisense strand to SEQ ID NO: 1362868
agaguuauacauauauacc

SEQ ID NO: 1362870 - RNA, 19 nt, Artificial Sequence
  Description of Artificial Sequence: Synthetic oligonucleotide
  Sense strand starting at position 3552 of SEQ ID NO: 1242645
uuuauaauucugcaaguug

SEQ ID NO: 1362871 - RNA, 19 nt, Artificial Sequence
  Description of Artificial Sequence: Synthetic oligonucleotide
  Antisense strand to SEQ ID NO: 1362870
caacuugcagaauuauaaa

SEQ ID NO: 1362872 - RNA, 19 nt, Artificial Sequence
  Description of Artificial Sequence: Synthetic oligonucleotide
  Sense strand starting at position 3580 of SEQ ID NO: 1242645
guuguuguuccacaauaug

SEQ ID NO: 1362873 - RNA, 19 nt, Artificial Sequence
  Description of Artificial Sequence: Synthetic oligonucleotide
  Antisense strand to SEQ ID NO: 1362872
cauauuguggaacaacaac

SEQ ID NO: 1362874 - RNA, 19 nt, Artificial Sequence
  Description of Artificial Sequence: Synthetic oligonucleotide
  Sense strand starting at position 3795 of SEQ ID NO: 1242645
acuguauaguauucuacau

SEQ ID NO: 1362875 - RNA, 19 nt, Artificial Sequence
  Description of Artificial Sequence: Synthetic oligonucleotide
  Antisense strand to SEQ ID NO: 1362874
auguagaauacuauacagu

SEQ ID NO: 1362876 - RNA, 19 nt, Artificial Sequence
  Description of Artificial Sequence: Synthetic oligonucleotide
  Sense strand starting at position 3797 of SEQ ID NO: 1242645
uguauaguauucuacauga

SEQ ID NO: 1362877 - RNA, 19 nt, Artificial Sequence
  Description of Artificial Sequence: Synthetic oligonucleotide
  Antisense strand to SEQ ID NO: 1362876
ucauguagaauacuauaca

SEQ ID NO: 1362878 - RNA, 19 nt, Artificial Sequence
  Description of Artificial Sequence: Synthetic oligonucleotide
  Sense strand starting at position 11 of SEQ ID NO: 1242646
ugccuagaucagggauaaa

SEQ ID NO: 1362879 - RNA, 19 nt, Artificial Sequence
  Description of Artificial Sequence: Synthetic oligonucleotide
  Antisense strand to SEQ ID NO: 1362878
uuuaucccugaucuaggca

SEQ ID NO: 1362880 - RNA, 19 nt, Artificial Sequence
  Description of Artificial Sequence: Synthetic oligonucleotide
  Sense strand starting at position 51 of SEQ ID NO: 1242646
gguagcucacaccaauaau

SEQ ID NO: 1362881 - RNA, 19 nt, Artificial Sequence
  Description of Artificial Sequence: Synthetic oligonucleotide
  Antisense strand to SEQ ID NO: 1362880
auuauuggugugagcuacc

SEQ ID NO: 1362882 - RNA, 19 nt, Artificial Sequence
  Description of Artificial Sequence: Synthetic oligonucleotide
  Sense strand starting at position 374 of SEQ ID NO: 1242646
gaguguuguauugagaagg

SEQ ID NO: 1362883 - RNA, 19 nt, Artificial Sequence
  Description of Artificial Sequence: Synthetic oligonucleotide
  Antisense strand to SEQ ID NO: 1362882
ccuucucaauacaacacuc

SEQ ID NO: 1362884 - RNA, 19 nt, Artificial Sequence
  Description of Artificial Sequence: Synthetic oligonucleotide
  Sense strand starting at position 379 of SEQ ID NO: 1242646
uuguauugagaaggaucuu

SEQ ID NO: 1362885 - RNA, 19 nt, Artificial Sequence
  Description of Artificial Sequence: Synthetic oligonucleotide
  Antisense strand to SEQ ID NO: 1362884
aagauccuucucaauacaa

SEQ ID NO: 1362886 - RNA, 19 nt, Artificial Sequence
  Description of Artificial Sequence: Synthetic oligonucleotide
  Sense strand starting at position 433 of SEQ ID NO: 1242646
gauuaauuaugucugccag

SEQ ID NO: 1362887 - RNA, 19 nt, Artificial Sequence
  Description of Artificial Sequence: Synthetic oligonucleotide
  Antisense strand to SEQ ID NO: 1362886
cuggcagacauaauuaauc

SEQ ID NO: 1362888 - RNA, 19 nt, Artificial Sequence
  Description of Artificial Sequence: Synthetic oligonucleotide
  Sense strand starting at position 434 of SEQ ID NO: 1242646
auuaauuaugucugccaga

SEQ ID NO: 1362889 - RNA, 19 nt, Artificial Sequence
  Description of Artificial Sequence: Synthetic oligonucleotide
  Antisense strand to SEQ ID NO: 1362888
ucuggcagacauaauuaau

SEQ ID NO: 1362890 - RNA, 19 nt, Artificial Sequence
  Description of Artificial Sequence: Synthetic oligonucleotide
  Sense strand starting at position 435 of SEQ ID NO: 1242646
uuaauuaugucugccagaa

SEQ ID NO: 1362891 - RNA, 19 nt, Artificial Sequence
  Description of Artificial Sequence: Synthetic oligonucleotide
  Antisense strand to SEQ ID NO: 1362890
uucuggcagacauaauuaa

SEQ ID NO: 1362892 - RNA, 19 nt, Artificial Sequence
  Description of Artificial Sequence: Synthetic oligonucleotide
  Sense strand starting at position 456 of SEQ ID NO: 1242646
uagagugugccacauguuu

SEQ ID NO: 1362893 - RNA, 19 nt, Artificial Sequence
  Description of Artificial Sequence: Synthetic oligonucleotide
  Antisense strand to SEQ ID NO: 1362892
aaacauguggcacacucua

SEQ ID NO: 1362894 - RNA, 19 nt, Artificial Sequence
  Description of Artificial Sequence: Synthetic oligonucleotide
  Sense strand starting at position 481 of SEQ ID NO: 1242646
cugucuauauagucagauu

SEQ ID NO: 1362895 - RNA, 19 nt, Artificial Sequence
  Description of Artificial Sequence: Synthetic oligonucleotide
  Antisense strand to SEQ ID NO: 1362894
aaucugacuauauagacag

SEQ ID NO: 1362896 - RNA, 19 nt, Artificial Sequence
  Description of Artificial Sequence: Synthetic oligonucleotide
  Sense strand starting at position 521 of SEQ ID NO: 1242646
ccuauaccugguugacaga

SEQ ID NO: 1362897 - RNA, 19 nt, Artificial Sequence
  Description of Artificial Sequence: Synthetic oligonucleotide
  Antisense strand to SEQ ID NO: 1362896
ucugucaaccagguauagg

SEQ ID NO: 1362898 - RNA, 19 nt, Artificial Sequence
  Description of Artificial Sequence: Synthetic oligonucleotide
  Sense strand starting at position 635 of SEQ ID NO: 1242646
gauagaugguaaucucuca

SEQ ID NO: 1362899 - RNA, 19 nt, Artificial Sequence
  Description of Artificial Sequence: Synthetic oligonucleotide
  Antisense strand to SEQ ID NO: 1362898
ugagagauuaccaucuauc

SEQ ID NO: 1362900 - RNA, 19 nt, Artificial Sequence
  Description of Artificial Sequence: Synthetic oligonucleotide
  Sense strand starting at position 811 of SEQ ID NO: 1242646
ugggucggcuccuuaacaa

SEQ ID NO: 1362901 - RNA, 19 nt, Artificial Sequence
  Description of Artificial Sequence: Synthetic oligonucleotide
  Antisense strand to SEQ ID NO: 1362900
uuguuaaggagccgaccca

SEQ ID NO: 1362902 - RNA, 19 nt, Artificial Sequence
  Description of Artificial Sequence: Synthetic oligonucleotide
  Sense strand starting at position 855 of SEQ ID NO: 1242646
uuagaaauauuguuagcca

SEQ ID NO: 1362903 - RNA, 19 nt, Artificial Sequence
  Description of Artificial Sequence: Synthetic oligonucleotide
  Antisense strand to SEQ ID NO: 1362902
uggcuaacaauauuucuaa

SEQ ID NO: 1362904 - RNA, 19 nt, Artificial Sequence
  Description of Artificial Sequence: Synthetic oligonucleotide
  Sense strand starting at position 862 of SEQ ID NO: 1242646
uauuguuagccauggcaga

SEQ ID NO: 1362905 - RNA, 19 nt, Artificial Sequence
  Description of Artificial Sequence: Synthetic oligonucleotide
  Antisense strand to SEQ ID NO: 1362904
ucugccauggcuaacaaua

SEQ ID NO: 1362906 - RNA, 19 nt, Artificial Sequence
  Description of Artificial Sequence: Synthetic oligonucleotide
  Sense strand starting at position 863 of SEQ ID NO: 1242646
auuguuagccauggcagaa

SEQ ID NO: 1362907 - RNA, 19 nt, Artificial Sequence
  Description of Artificial Sequence: Synthetic oligonucleotide
  Antisense strand to SEQ ID NO: 1362906
uucugccauggcuaacaau

SEQ ID NO: 1362908 - RNA, 19 nt, Artificial Sequence
  Description of Artificial Sequence: Synthetic oligonucleotide
  Sense strand starting at position 867 of SEQ ID NO: 1242646
uuagccauggcagaaguua

SEQ ID NO: 1362909 - RNA, 19 nt, Artificial Sequence
  Description of Artificial Sequence: Synthetic oligonucleotide
  Antisense strand to SEQ ID NO: 1362908
uaacuucugccauggcuaa

SEQ ID NO: 1362910 - RNA, 19 nt, Artificial Sequence
  Description of Artificial Sequence: Synthetic oligonucleotide
  Sense strand starting at position 875 of SEQ ID NO: 1242646
ggcagaaguuaaguuucuu

SEQ ID NO: 1362911 - RNA, 19 nt, Artificial Sequence
  Description of Artificial Sequence: Synthetic oligonucleotide
  Antisense strand to SEQ ID NO: 1362910
aagaaacuuaacuucugcc

SEQ ID NO: 1362912 - RNA, 19 nt, Artificial Sequence
  Description of Artificial Sequence: Synthetic oligonucleotide
  Sense strand starting at position 939 of SEQ ID NO: 1242646
ugaagacugaccugggcau

SEQ ID NO: 1362913 - RNA, 19 nt, Artificial Sequence
  Description of Artificial Sequence: Synthetic oligonucleotide
  Antisense strand to SEQ ID NO: 1362912
augcccaggucagucuuca

SEQ ID NO: 1362914 - RNA, 19 nt, Artificial Sequence
  Description of Artificial Sequence: Synthetic oligonucleotide
  Sense strand starting at position 961 of SEQ ID NO: 1242646
gaucauuugugacacaguu

SEQ ID NO: 1362915 - RNA, 19 nt, Artificial Sequence
  Description of Artificial Sequence: Synthetic oligonucleotide
  Antisense strand to SEQ ID NO: 1362914
aacugugucacaaaugauc

SEQ ID NO: 1362916 - RNA, 19 nt, Artificial Sequence
  Description of Artificial Sequence: Synthetic oligonucleotide
  Sense strand starting at position 992 of SEQ ID NO: 1242646
ugaguugggagucgcauuu

SEQ ID NO: 1362917 - RNA, 19 nt, Artificial Sequence
  Description of Artificial Sequence: Synthetic oligonucleotide
  Antisense strand to SEQ ID NO: 1362916
aaaugcgacucccaacuca

SEQ ID NO: 1362918 - RNA, 19 nt, Artificial Sequence
  Description of Artificial Sequence: Synthetic oligonucleotide
  Sense strand starting at position 1028 of SEQ ID NO: 1242646
agcugaaccuuugucugaa

SEQ ID NO: 1362919 - RNA, 19 nt, Artificial Sequence
  Description of Artificial Sequence: Synthetic oligonucleotide
  Antisense strand to SEQ ID NO: 1362918
uucagacaaagguucagcu

SEQ ID NO: 1362920 - RNA, 19 nt, Artificial Sequence
  Description of Artificial Sequence: Synthetic oligonucleotide
  Sense strand starting at position 1029 of SEQ ID NO: 1242646
gcugaaccuuugucugaaa

SEQ ID NO: 1362921 - RNA, 19 nt, Artificial Sequence
  Description of Artificial Sequence: Synthetic oligonucleotide
  Antisense strand to SEQ ID NO: 1362920
uuucagacaaagguucagc

SEQ ID NO: 1362922 - RNA, 19 nt, Artificial Sequence
  Description of Artificial Sequence: Synthetic oligonucleotide
  Sense strand starting at position 1031 of SEQ ID NO: 1242646
ugaaccuuugucugaaagu

SEQ ID NO: 1362923 - RNA, 19 nt, Artificial Sequence
  Description of Artificial Sequence: Synthetic oligonucleotide
  Antisense strand to SEQ ID NO: 1362922
acuuucagacaaagguuca

SEQ ID NO: 1362924 - RNA, 19 nt, Artificial Sequence
  Description of Artificial Sequence: Synthetic oligonucleotide
  Sense strand starting at position 1140 of SEQ ID NO: 1242646
uuauuauaugccuacaggu

SEQ ID NO: 1362925 - RNA, 19 nt, Artificial Sequence
  Description of Artificial Sequence: Synthetic oligonucleotide
  Antisense strand to SEQ ID NO: 1362924
accuguaggcauauaauaa

SEQ ID NO: 1362926 - RNA, 19 nt, Artificial Sequence
  Description of Artificial Sequence: Synthetic oligonucleotide
  Sense strand starting at position 1296 of SEQ ID NO: 1242646
aguaccuagcacugagaau

SEQ ID NO: 1362927 - RNA, 19 nt, Artificial Sequence
  Description of Artificial Sequence: Synthetic oligonucleotide
  Antisense strand to SEQ ID NO: 1362926
auucucagugcuagguacu

SEQ ID NO: 1362928 - RNA, 19 nt, Artificial Sequence
  Description of Artificial Sequence: Synthetic oligonucleotide
  Sense strand starting at position 1326 of SEQ ID NO: 1242646
gcagcauccgucuucucua

SEQ ID NO: 1362929 - RNA, 19 nt, Artificial Sequence
  Description of Artificial Sequence: Synthetic oligonucleotide
  Antisense strand to SEQ ID NO: 1362928
uagagaagacggaugcugc

SEQ ID NO: 1362930 - RNA, 19 nt, Artificial Sequence
  Description of Artificial Sequence: Synthetic oligonucleotide
  Sense strand starting at position 2195 of SEQ ID NO: 1242646
ccagaaacguccucacuuu

SEQ ID NO: 1362931 - RNA, 19 nt, Artificial Sequence
  Description of Artificial Sequence: Synthetic oligonucleotide
  Antisense strand to SEQ ID NO: 1362930
aaagugaggacguuucugg

SEQ ID NO: 1362932 - RNA, 19 nt, Artificial Sequence
  Description of Artificial Sequence: Synthetic oligonucleotide
  Sense strand starting at position 2293 of SEQ ID NO: 1242646
acgcguugugagccucaaa

SEQ ID NO: 1362933 - RNA, 19 nt, Artificial Sequence
  Description of Artificial Sequence: Synthetic oligonucleotide
  Antisense strand to SEQ ID NO: 1362932
uuugaggcucacaacgcgu

SEQ ID NO: 1362934 - RNA, 19 nt, Artificial Sequence
  Description of Artificial Sequence: Synthetic oligonucleotide
  Sense strand starting at position 2296 of SEQ ID NO: 1242646
cguugugagccucaaagag

SEQ ID NO: 1362935 - RNA, 19 nt, Artificial Sequence
  Description of Artificial Sequence: Synthetic oligonucleotide
  Antisense strand to SEQ ID NO: 1362934
cucuuugaggcucacaacg

SEQ ID NO: 1362936 - RNA, 19 nt, Artificial Sequence
  Description of Artificial Sequence: Synthetic oligonucleotide
  Sense strand starting at position 2448 of SEQ ID NO: 1242646
cagcuugcugaagagagau

SEQ ID NO: 1362937 - RNA, 19 nt, Artificial Sequence
  Description of Artificial Sequence: Synthetic oligonucleotide
  Antisense strand to SEQ ID NO: 1362936
aucucucuucagcaagcug

SEQ ID NO: 1362938 - RNA, 19 nt, Artificial Sequence
  Description of Artificial Sequence: Synthetic oligonucleotide
  Sense strand starting at position 2507 of SEQ ID NO: 1242646
gcccuucugcuuuagaaag

SEQ ID NO: 1362939 - RNA, 19 nt, Artificial Sequence
  Description of Artificial Sequence: Synthetic oligonucleotide
  Antisense strand to SEQ ID NO: 1362938
cuuucuaaagcagaagggc

SEQ ID NO: 1362940 - RNA, 19 nt, Artificial Sequence
  Description of Artificial Sequence: Synthetic oligonucleotide
  Sense strand starting at position 2514 of SEQ ID NO: 1242646
ugcuuuagaaagugugacu

SEQ ID NO: 1362941 - RNA, 19 nt, Artificial Sequence
  Description of Artificial Sequence: Synthetic oligonucleotide
  Antisense strand to SEQ ID NO: 1362940
agucacacuuucuaaagca

SEQ ID NO: 1362942 - RNA, 19 nt, Artificial Sequence
  Description of Artificial Sequence: Synthetic oligonucleotide
  Sense strand starting at position 2527 of SEQ ID NO: 1242646
gugacuauuucugcuguag

SEQ ID NO: 1362943 - RNA, 19 nt, Artificial Sequence
  Description of Artificial Sequence: Synthetic oligonucleotide
  Antisense strand to SEQ ID NO: 1362942
cuacagcagaaauagucac

SEQ ID NO: 1362944 - RNA, 19 nt, Artificial Sequence
  Description of Artificial Sequence: Synthetic oligonucleotide
  Sense strand starting at position 2867 of SEQ ID NO: 1242646
cacugugauugcuccaaug

SEQ ID NO: 1362945 - RNA, 19 nt, Artificial Sequence
  Description of Artificial Sequence: Synthetic oligonucleotide
  Antisense strand to SEQ ID NO: 1362944
cauuggagcaaucacagug

SEQ ID NO: 1362946 - RNA, 19 nt, Artificial Sequence
  Description of Artificial Sequence: Synthetic oligonucleotide
  Sense strand starting at position 2869 of SEQ ID NO: 1242646
cugugauugcuccaaugag

SEQ ID NO: 1362947 - RNA, 19 nt, Artificial Sequence
  Description of Artificial Sequence: Synthetic oligonucleotide
  Antisense strand to SEQ ID NO: 1362946
cucauuggagcaaucacag

SEQ ID NO: 1362948 - RNA, 19 nt, Artificial Sequence
  Description of Artificial Sequence: Synthetic oligonucleotide
  Sense strand starting at position 2992 of SEQ ID NO: 1242646
ucaagcuaguaaguauuaa

SEQ ID NO: 1362949 - RNA, 19 nt, Artificial Sequence
  Description of Artificial Sequence: Synthetic oligonucleotide
  Antisense strand to SEQ ID NO: 1362948
uuaauacuuacuagcuuga

SEQ ID NO: 1362950 - RNA, 19 nt, Artificial Sequence
  Description of Artificial Sequence: Synthetic oligonucleotide
  Sense strand starting at position 3195 of SEQ ID NO: 1242646
agugcaagaccuugcauau

SEQ ID NO: 1362951 - RNA, 19 nt, Artificial Sequence
  Description of Artificial Sequence: Synthetic oligonucleotide
  Antisense strand to SEQ ID NO: 1362950
auaugcaaggucuugcacu

SEQ ID NO: 1362952 - RNA, 19 nt, Artificial Sequence
  Description of Artificial Sequence: Synthetic oligonucleotide
  Sense strand starting at position 3369 of SEQ ID NO: 1242646
gcccgauagcaugauugag

SEQ ID NO: 1362953 - RNA, 19 nt, Artificial Sequence
  Description of Artificial Sequence: Synthetic oligonucleotide
  Antisense strand to SEQ ID NO: 1362952
cucaaucaugcuaucgggc

SEQ ID NO: 1362954 - RNA, 19 nt, Artificial Sequence
  Description of Artificial Sequence: Synthetic oligonucleotide
  Sense strand starting at position 3375 of SEQ ID NO: 1242646
uagcaugauugaguggaaa

SEQ ID NO: 1362955 - RNA, 19 nt, Artificial Sequence
  Description of Artificial Sequence: Synthetic oligonucleotide
  Antisense strand to SEQ ID NO: 1362954
uuuccacucaaucaugcua

SEQ ID NO: 1362956 - RNA, 19 nt, Artificial Sequence
  Description of Artificial Sequence: Synthetic oligonucleotide
  Sense strand starting at position 3377 of SEQ ID NO: 1242646
gcaugauugaguggaaaca

SEQ ID NO: 1362957 - RNA, 19 nt, Artificial Sequence
  Description of Artificial Sequence: Synthetic oligonucleotide
  Antisense strand to SEQ ID NO: 1362956
uguuuccacucaaucaugc

SEQ ID NO: 1362958 - RNA, 19 nt, Artificial Sequence
  Description of Artificial Sequence: Synthetic oligonucleotide
  Sense strand starting at position 77 of SEQ ID NO: 1242647
cuucuuccuguacagagaa

SEQ ID NO: 1362959 - RNA, 19 nt, Artificial Sequence
  Description of Artificial Sequence: Synthetic oligonucleotide
  Antisense strand to SEQ ID NO: 1362958
uucucuguacaggaagaag

SEQ ID NO: 1362960 - RNA, 19 nt, Artificial Sequence
  Description of Artificial Sequence: Synthetic oligonucleotide
  Sense strand starting at position 353 of SEQ ID NO: 1242647
gucauaauauccuuauagg

SEQ ID NO: 1362961 - RNA, 19 nt, Artificial Sequence
  Description of Artificial Sequence: Synthetic oligonucleotide
  Antisense strand to SEQ ID NO: 1362960
ccuauaaggauauuaugac

SEQ ID NO: 1362962 - RNA, 19 nt, Artificial Sequence
  Description of Artificial Sequence: Synthetic oligonucleotide
  Sense strand starting at position 359 of SEQ ID NO: 1242647
auauccuuauaggucagau

SEQ ID NO: 1362963 - RNA, 19 nt, Artificial Sequence
  Description of Artificial Sequence: Synthetic oligonucleotide
  Antisense strand to SEQ ID NO: 1362962
aucugaccuauaaggauau

SEQ ID NO: 1362964 - RNA, 19 nt, Artificial Sequence
  Description of Artificial Sequence: Synthetic oligonucleotide
  Sense strand starting at position 374 of SEQ ID NO: 1242647
agauacuacuauguccauu

SEQ ID NO: 1362965 - RNA, 19 nt, Artificial Sequence
  Description of Artificial Sequence: Synthetic oligonucleotide
  Antisense strand to SEQ ID NO: 1362964
aauggacauaguaguaucu

SEQ ID NO: 1362966 - RNA, 19 nt, Artificial Sequence
  Description of Artificial Sequence: Synthetic oligonucleotide
  Sense strand starting at position 414 of SEQ ID NO: 1242647
uccagaaaggcccagugau

SEQ ID NO: 1362967 - RNA, 19 nt, Artificial Sequence
  Description of Artificial Sequence: Synthetic oligonucleotide
  Antisense strand to SEQ ID NO: 1362966
aucacugggccuuucugga

SEQ ID NO: 1362968 - RNA, 19 nt, Artificial Sequence
  Description of Artificial Sequence: Synthetic oligonucleotide
  Sense strand starting at position 426 of SEQ ID NO: 1242647
cagugauugguccauauua

SEQ ID NO: 1362969 - RNA, 19 nt, Artificial Sequence
  Description of Artificial Sequence: Synthetic oligonucleotide
  Antisense strand to SEQ ID NO: 1362968
uaauauggaccaaucacug

SEQ ID NO: 1362970 - RNA, 19 nt, Artificial Sequence
  Description of Artificial Sequence: Synthetic oligonucleotide
  Sense strand starting at position 428 of SEQ ID NO: 1242647
gugauugguccauauuaac

SEQ ID NO: 1362971 - RNA, 19 nt, Artificial Sequence
  Description of Artificial Sequence: Synthetic oligonucleotide
  Antisense strand to SEQ ID NO: 1362970
guuaauauggaccaaucac

SEQ ID NO: 1362972 - RNA, 19 nt, Artificial Sequence
  Description of Artificial Sequence: Synthetic oligonucleotide
  Sense strand starting at position 504 of SEQ ID NO: 1242647
uuccaugauucugccagga

SEQ ID NO: 1362973 - RNA, 19 nt, Artificial Sequence
  Description of Artificial Sequence: Synthetic oligonucleotide
  Antisense strand to SEQ ID NO: 1362972
uccuggcagaaucauggaa

SEQ ID NO: 1362974 - RNA, 19 nt, Artificial Sequence
  Description of Artificial Sequence: Synthetic oligonucleotide
  Sense strand starting at position 508 of SEQ ID NO: 1242647
augauucugccaggauaca

SEQ ID NO: 1362975 - RNA, 19 nt, Artificial Sequence
  Description of Artificial Sequence: Synthetic oligonucleotide
  Antisense strand to SEQ ID NO: 1362974
uguauccuggcagaaucau

SEQ ID NO: 1362976 - RNA, 19 nt, Artificial Sequence
  Description of Artificial Sequence: Synthetic oligonucleotide
  Sense strand starting at position 560 of SEQ ID NO: 1242647
ggugcuuaaguagaaccau

SEQ ID NO: 1362977 - RNA, 19 nt, Artificial Sequence
  Description of Artificial Sequence: Synthetic oligonucleotide
  Antisense strand to SEQ ID NO: 1362976
augguucuacuuaagcacc

SEQ ID NO: 1362978 - RNA, 19 nt, Artificial Sequence
  Description of Artificial Sequence: Synthetic oligonucleotide
  Sense strand starting at position 642 of SEQ ID NO: 1242647
uuuaacugagucugagaau

SEQ ID NO: 1362979 - RNA, 19 nt, Artificial Sequence
  Description of Artificial Sequence: Synthetic oligonucleotide
  Antisense strand to SEQ ID NO: 1362978
auucucagacucaguuaaa

SEQ ID NO: 1362980 - RNA, 19 nt, Artificial Sequence
  Description of Artificial Sequence: Synthetic oligonucleotide
  Sense strand starting at position 685 of SEQ ID NO: 1242647
cuucucuaggauugguuua

SEQ ID NO: 1362981 - RNA, 19 nt, Artificial Sequence
  Description of Artificial Sequence: Synthetic oligonucleotide
  Antisense strand to SEQ ID NO: 1362980
uaaaccaauccuagagaag

SEQ ID NO: 1362982 - RNA, 19 nt, Artificial Sequence
  Description of Artificial Sequence: Synthetic oligonucleotide
  Sense strand starting at position 690 of SEQ ID NO: 1242647
cuaggauugguuuaagcuc

SEQ ID NO: 1362983 - RNA, 19 nt, Artificial Sequence
  Description of Artificial Sequence: Synthetic oligonucleotide
  Antisense strand to SEQ ID NO: 1362982
gagcuuaaaccaauccuag

SEQ ID NO: 1362984 - RNA, 19 nt, Artificial Sequence
  Description of Artificial Sequence: Synthetic oligonucleotide
  Sense strand starting at position 784 of SEQ ID NO: 1242647
uaaggaaagcaugacguua

SEQ ID NO: 1362985 - RNA, 19 nt, Artificial Sequence
  Description of Artificial Sequence: Synthetic oligonucleotide
  Antisense strand to SEQ ID NO: 1362984
uaacgucaugcuuuccuua

SEQ ID NO: 1362986 - RNA, 19 nt, Artificial Sequence
  Description of Artificial Sequence: Synthetic oligonucleotide
  Sense strand starting at position 837 of SEQ ID NO: 1242647
gagaacucaccaggcuaga

SEQ ID NO: 1362987 - RNA, 19 nt, Artificial Sequence
  Description of Artificial Sequence: Synthetic oligonucleotide
  Antisense strand to SEQ ID NO: 1362986
ucuagccuggugaguucuc

SEQ ID NO: 1362988 - RNA, 19 nt, Artificial Sequence
  Description of Artificial Sequence: Synthetic oligonucleotide
  Sense strand starting at position 945 of SEQ ID NO: 1242647
auaguagggugggugaaau

SEQ ID NO: 1362989 - RNA, 19 nt, Artificial Sequence
  Description of Artificial Sequence: Synthetic oligonucleotide
  Antisense strand to SEQ ID NO: 1362988
auuucacccacccuacuau

SEQ ID NO: 1362990 - RNA, 19 nt, Artificial Sequence
  Description of Artificial Sequence: Synthetic oligonucleotide
  Sense strand starting at position 1053 of SEQ ID NO: 1242647
ugcuguugucuugcagcaa

SEQ ID NO: 1362991 - RNA, 19 nt, Artificial Sequence
  Description of Artificial Sequence: Synthetic oligonucleotide
  Antisense strand to SEQ ID NO: 1362990
uugcugcaagacaacagca

SEQ ID NO: 1362992 - RNA, 19 nt, Artificial Sequence
  Description of Artificial Sequence: Synthetic oligonucleotide
  Sense strand starting at position 1247 of SEQ ID NO: 1242647
guuaacucaccugguauaa

SEQ ID NO: 1362993 - RNA, 19 nt, Artificial Sequence
  Description of Artificial Sequence: Synthetic oligonucleotide
  Antisense strand to SEQ ID NO: 1362992
uuauaccaggugaguuaac

SEQ ID NO: 1362994 - RNA, 19 nt, Artificial Sequence
  Description of Artificial Sequence: Synthetic oligonucleotide
  Sense strand starting at position 1457 of SEQ ID NO: 1242647
augaaugauucucccauug

SEQ ID NO: 1362995 - RNA, 19 nt, Artificial Sequence
  Description of Artificial Sequence: Synthetic oligonucleotide
  Antisense strand to SEQ ID NO: 1362994
caaugggagaaucauucau

SEQ ID NO: 1362996 - RNA, 19 nt, Artificial Sequence
  Description of Artificial Sequence: Synthetic oligonucleotide
  Sense strand starting at position 1588 of SEQ ID NO: 1242647
uguuuccuaggcuauagaa

SEQ ID NO: 1362997 - RNA, 19 nt, Artificial Sequence
  Description of Artificial Sequence: Synthetic oligonucleotide
  Antisense strand to SEQ ID NO: 1362996
uucuauagccuaggaaaca

SEQ ID NO: 1362998 - RNA, 19 nt, Artificial Sequence
  Description of Artificial Sequence: Synthetic oligonucleotide
  Sense strand starting at position 1768 of SEQ ID NO: 1242647
gaaaucuuguacucaugga

SEQ ID NO: 1362999 - RNA, 19 nt, Artificial Sequence
  Description of Artificial Sequence: Synthetic oligonucleotide
  Antisense strand to SEQ ID NO: 1362998
uccaugaguacaagauuuc

SEQ ID NO: 1363000 - RNA, 19 nt, Artificial Sequence
  Description of Artificial Sequence: Synthetic oligonucleotide
  Sense strand starting at position 1772 of SEQ ID NO: 1242647
ucuuguacucauggaauuc

SEQ ID NO: 1363001 - RNA, 19 nt, Artificial Sequence
  Description of Artificial Sequence: Synthetic oligonucleotide
  Antisense strand to SEQ ID NO: 1363000
gaauuccaugaguacaaga

SEQ ID NO: 1363002 - RNA, 19 nt, Artificial Sequence
  Description of Artificial Sequence: Synthetic oligonucleotide
  Sense strand starting at position 1812 of SEQ ID NO: 1242647
ccgucuaucccagggaaag

SEQ ID NO: 1363003 - RNA, 19 nt, Artificial Sequence
  Description of Artificial Sequence: Synthetic oligonucleotide
  Antisense strand to SEQ ID NO: 1363002
cuuucccugggauagacgg

SEQ ID NO: 1363004 - RNA, 19 nt, Artificial Sequence
  Description of Artificial Sequence: Synthetic oligonucleotide
  Sense strand starting at position 1913 of SEQ ID NO: 1242647
agauguagcccugaaccua

SEQ ID NO: 1363005 - RNA, 19 nt, Artificial Sequence
  Description of Artificial Sequence: Synthetic oligonucleotide
  Antisense strand to SEQ ID NO: 1363004
uagguucagggcuacaucu

SEQ ID NO: 1363006 - RNA, 19 nt, Artificial Sequence
  Description of Artificial Sequence: Synthetic oligonucleotide
  Sense strand starting at position 1964 of SEQ ID NO: 1242647
ggcaaacauuaucuggaau

SEQ ID NO: 1363007 - RNA, 19 nt, Artificial Sequence
  Description of Artificial Sequence: Synthetic oligonucleotide
  Antisense strand to SEQ ID NO: 1363006
auuccagauaauguuugcc

SEQ ID NO: 1363008 - RNA, 19 nt, Artificial Sequence
  Description of Artificial Sequence: Synthetic oligonucleotide
  Sense strand starting at position 2117 of SEQ ID NO: 1242647
gggaaaguggcagauuguu

SEQ ID NO: 1363009 - RNA, 19 nt, Artificial Sequence
  Description of Artificial Sequence: Synthetic oligonucleotide
  Antisense strand to SEQ ID NO: 1363008
aacaaucugccacuuuccc

SEQ ID NO: 1363010 - RNA, 19 nt, Artificial Sequence
  Description of Artificial Sequence: Synthetic oligonucleotide
  Sense strand starting at position 2364 of SEQ ID NO: 1242647
ugaagagcauaucuuaauu

SEQ ID NO: 1363011 - RNA, 19 nt, Artificial Sequence
  Description of Artificial Sequence: Synthetic oligonucleotide
  Antisense strand to SEQ ID NO: 1363010
aauuaagauaugcucuuca

SEQ ID NO: 1363012 - RNA, 19 nt, Artificial Sequence
  Description of Artificial Sequence: Synthetic oligonucleotide
  Sense strand starting at position 2380 of SEQ ID NO: 1242647
auugaacaacuguguuaua

SEQ ID NO: 1363013 - RNA, 19 nt, Artificial Sequence
  Description of Artificial Sequence: Synthetic oligonucleotide
  Antisense strand to SEQ ID NO: 1363012
uauaacacaguuguucaau

SEQ ID NO: 1363014 - RNA, 19 nt, Artificial Sequence
  Description of Artificial Sequence: Synthetic oligonucleotide
  Sense strand starting at position 2412 of SEQ ID NO: 1242647
gcugacauuccugggauaa

SEQ ID NO: 1363015 - RNA, 19 nt, Artificial Sequence
  Description of Artificial Sequence: Synthetic oligonucleotide
  Antisense strand to SEQ ID NO: 1363014
uuaucccaggaaugucagc

SEQ ID NO: 1363016 - RNA, 19 nt, Artificial Sequence
  Description of Artificial Sequence: Synthetic oligonucleotide
  Sense strand starting at position 2413 of SEQ ID NO: 1242647
cugacauuccugggauaau

SEQ ID NO: 1363017 - RNA, 19 nt, Artificial Sequence
  Description of Artificial Sequence: Synthetic oligonucleotide
  Antisense strand to SEQ ID NO: 1363016
auuaucccaggaaugucag

SEQ ID NO: 1363018 - RNA, 19 nt, Artificial Sequence
  Description of Artificial Sequence: Synthetic oligonucleotide
  Sense strand starting at position 2926 of SEQ ID NO: 1242647
aauagagugucagcuaaca

SEQ ID NO: 1363019 - RNA, 19 nt, Artificial Sequence
  Description of Artificial Sequence: Synthetic oligonucleotide
  Antisense strand to SEQ ID NO: 1363018
uguuagcugacacucuauu

SEQ ID NO: 1363020 - RNA, 19 nt, Artificial Sequence
  Description of Artificial Sequence: Synthetic oligonucleotide
  Sense strand starting at position 3070 of SEQ ID NO: 1242647
acagcuaaagacuguuuga

SEQ ID NO: 1363021 - RNA, 19 nt, Artificial Sequence
  Description of Artificial Sequence: Synthetic oligonucleotide
  Antisense strand to SEQ ID NO: 1363020
ucaaacagucuuuagcugu

SEQ ID NO: 1363022 - RNA, 19 nt, Artificial Sequence
  Description of Artificial Sequence: Synthetic oligonucleotide
  Sense strand starting at position 3073 of SEQ ID NO: 1242647
gcuaaagacuguuugauug

SEQ ID NO: 1363023 - RNA, 19 nt, Artificial Sequence
  Description of Artificial Sequence: Synthetic oligonucleotide
  Antisense strand to SEQ ID NO: 1363022
caaucaaacagucuuuagc

SEQ ID NO: 1363024 - RNA, 19 nt, Artificial Sequence
  Description of Artificial Sequence: Synthetic oligonucleotide
  Sense strand starting at position 3077 of SEQ ID NO: 1242647
aagacuguuugauuguuga

SEQ ID NO: 1363025 - RNA, 19 nt, Artificial Sequence
  Description of Artificial Sequence: Synthetic oligonucleotide
  Antisense strand to SEQ ID NO: 1363024
ucaacaaucaaacagucuu

SEQ ID NO: 1363026 - RNA, 19 nt, Artificial Sequence
  Description of Artificial Sequence: Synthetic oligonucleotide
  Sense strand starting at position 3111 of SEQ ID NO: 1242647
gugguuggucccuaacuga

SEQ ID NO: 1363027 - RNA, 19 nt, Artificial Sequence
  Description of Artificial Sequence: Synthetic oligonucleotide
  Antisense strand to SEQ ID NO: 1363026
ucaguuagggaccaaccac

SEQ ID NO: 1363028 - RNA, 19 nt, Artificial Sequence
  Description of Artificial Sequence: Synthetic oligonucleotide
  Sense strand starting at position 3146 of SEQ ID NO: 1242647
cuuauugaugacugaguuu

SEQ ID NO: 1363029 - RNA, 19 nt, Artificial Sequence
  Description of Artificial Sequence: Synthetic oligonucleotide
  Antisense strand to SEQ ID NO: 1363028
aaacucagucaucaauaag

SEQ ID NO: 1363030 - RNA, 19 nt, Artificial Sequence
  Description of Artificial Sequence: Synthetic oligonucleotide
  Sense strand starting at position 3269 of SEQ ID NO: 1242647
agagcuaugagaggugaua

SEQ ID NO: 1363031 - RNA, 19 nt, Artificial Sequence
  Description of Artificial Sequence: Synthetic oligonucleotide
  Antisense strand to SEQ ID NO: 1363030
uaucaccucucauagcucu

SEQ ID NO: 1363032 - RNA, 19 nt, Artificial Sequence
  Description of Artificial Sequence: Synthetic oligonucleotide
  Sense strand starting at position 3400 of SEQ ID NO: 1242647
cugcaaguccaagacaguu

SEQ ID NO: 1363033 - RNA, 19 nt, Artificial Sequence
  Description of Artificial Sequence: Synthetic oligonucleotide
  Antisense strand to SEQ ID NO: 1363032
aacugucuuggacuugcag

SEQ ID NO: 1363034 - RNA, 19 nt, Artificial Sequence
  Description of Artificial Sequence: Synthetic oligonucleotide
  Sense strand starting at position 3439 of SEQ ID NO: 1242647
caaucaauguguucuggaa

SEQ ID NO: 1363035 - RNA, 19 nt, Artificial Sequence
  Description of Artificial Sequence: Synthetic oligonucleotide
  Antisense strand to SEQ ID NO: 1363034
uuccagaacacauugauug

SEQ ID NO: 1363036 - RNA, 19 nt, Artificial Sequence
  Description of Artificial Sequence: Synthetic oligonucleotide
  Sense strand starting at position 3628 of SEQ ID NO: 1242647
ccaagauaguaugaauuua

SEQ ID NO: 1363037 - RNA, 19 nt, Artificial Sequence
  Description of Artificial Sequence: Synthetic oligonucleotide
  Antisense strand to SEQ ID NO: 1363036
uaaauucauacuaucuugg

SEQ ID NO: 1363038 - RNA, 19 nt, Artificial Sequence
  Description of Artificial Sequence: Synthetic oligonucleotide
  Sense strand starting at position 579 of SEQ ID NO: 1242648
ccugacagcuguuuacauu

SEQ ID NO: 1363039 - RNA, 19 nt, Artificial Sequence
  Description of Artificial Sequence: Synthetic oligonucleotide
  Antisense strand to SEQ ID NO: 1363038
aauguaaacagcugucagg

SEQ ID NO: 1363040 - RNA, 19 nt, Artificial Sequence
  Description of Artificial Sequence: Synthetic oligonucleotide
  Sense strand starting at position 580 of SEQ ID NO: 1242648
cugacagcuguuuacauua

SEQ ID NO: 1363041 - RNA, 19 nt, Artificial Sequence
  Description of Artificial Sequence: Synthetic oligonucleotide
  Antisense strand to SEQ ID NO: 1363040
uaauguaaacagcugucag

SEQ ID NO: 1363042 - RNA, 19 nt, Artificial Sequence
  Description of Artificial Sequence: Synthetic oligonucleotide
  Sense strand starting at position 872 of SEQ ID NO: 1242648
uuaagagcucuccagcguu

SEQ ID NO: 1363043 - RNA, 19 nt, Artificial Sequence
  Description of Artificial Sequence: Synthetic oligonucleotide
  Antisense strand to SEQ ID NO: 1363042
aacgcuggagagcucuuaa

SEQ ID NO: 1363044 - RNA, 19 nt, Artificial Sequence
  Description of Artificial Sequence: Synthetic oligonucleotide
  Sense strand starting at position 893 of SEQ ID NO: 1242648
ugugaugcgcuggaaugaa

SEQ ID NO: 1363045 - RNA, 19 nt, Artificial Sequence
  Description of Artificial Sequence: Synthetic oligonucleotide
  Antisense strand to SEQ ID NO: 1363044
uucauuccagcgcaucaca

SEQ ID NO: 1363046 - RNA, 19 nt, Artificial Sequence
  Description of Artificial Sequence: Synthetic oligonucleotide
  Sense strand starting at position 927 of SEQ ID NO: 1242648
ugagguuuauuauuaguag

SEQ ID NO: 1363047 - RNA, 19 nt, Artificial Sequence
  Description of Artificial Sequence: Synthetic oligonucleotide
  Antisense strand to SEQ ID NO: 1363046
cuacuaauaauaaaccuca

SEQ ID NO: 1363048 - RNA, 19 nt, Artificial Sequence
  Description of Artificial Sequence: Synthetic oligonucleotide
  Sense strand starting at position 1323 of SEQ ID NO: 1242648
uucuaauucccuugcagga

SEQ ID NO: 1363049 - RNA, 19 nt, Artificial Sequence
  Description of Artificial Sequence: Synthetic oligonucleotide
  Antisense strand to SEQ ID NO: 1363048
uccugcaagggaauuagaa

SEQ ID NO: 1363050 - RNA, 19 nt, Artificial Sequence
  Description of Artificial Sequence: Synthetic oligonucleotide
  Sense strand starting at position 2264 of SEQ ID NO: 1242648
uuggcuuucugcccacuaa

SEQ ID NO: 1363051 - RNA, 19 nt, Artificial Sequence
  Description of Artificial Sequence: Synthetic oligonucleotide
  Antisense strand to SEQ ID NO: 1363050
uuagugggcagaaagccaa

SEQ ID NO: 1363052 - RNA, 19 nt, Artificial Sequence
  Description of Artificial Sequence: Synthetic oligonucleotide
  Sense strand starting at position 2265 of SEQ ID NO: 1242648
uggcuuucugcccacuaau

SEQ ID NO: 1363053 - RNA, 19 nt, Artificial Sequence
  Description of Artificial Sequence: Synthetic oligonucleotide
  Antisense strand to SEQ ID NO: 1363052
auuagugggcagaaagcca

SEQ ID NO: 1363054 - RNA, 19 nt, Artificial Sequence
  Description of Artificial Sequence: Synthetic oligonucleotide
  Sense strand starting at position 2279 of SEQ ID NO: 1242648
cuaauaagauuguugaugu

SEQ ID NO: 1363055 - RNA, 19 nt, Artificial Sequence
  Description of Artificial Sequence: Synthetic oligonucleotide
  Antisense strand to SEQ ID NO: 1363054
acaucaacaaucuuauuag

SEQ ID NO: 1363056 - RNA, 19 nt, Artificial Sequence
  Description of Artificial Sequence: Synthetic oligonucleotide
  Sense strand starting at position 2435 of SEQ ID NO: 1242648
gucaccuuguauucucauu

SEQ ID NO: 1363057 - RNA, 19 nt, Artificial Sequence
  Description of Artificial Sequence: Synthetic oligonucleotide
  Antisense strand to SEQ ID NO: 1363056
aaugagaauacaaggugac

SEQ ID NO: 1363058 - RNA, 19 nt, Artificial Sequence
  Description of Artificial Sequence: Synthetic oligonucleotide
  Sense strand starting at position 2586 of SEQ ID NO: 1242648
ucacguucuggugggaaga

SEQ ID NO: 1363059 - RNA, 19 nt, Artificial Sequence
  Description of Artificial Sequence: Synthetic oligonucleotide
  Antisense strand to SEQ ID NO: 1363058
ucuucccaccagaacguga

SEQ ID NO: 1363060 - RNA, 19 nt, Artificial Sequence
  Description of Artificial Sequence: Synthetic oligonucleotide
  Sense strand starting at position 2650 of SEQ ID NO: 1242648
aggugcagaucccugaauu

SEQ ID NO: 1363061 - RNA, 19 nt, Artificial Sequence
  Description of Artificial Sequence: Synthetic oligonucleotide
  Antisense strand to SEQ ID NO: 1363060
aauucagggaucugcaccu

SEQ ID NO: 1363062 - RNA, 19 nt, Artificial Sequence
  Description of Artificial Sequence: Synthetic oligonucleotide
  Sense strand starting at position 2651 of SEQ ID NO: 1242648
ggugcagaucccugaauuc

SEQ ID NO: 1363063 - RNA, 19 nt, Artificial Sequence
  Description of Artificial Sequence: Synthetic oligonucleotide
  Antisense strand to SEQ ID NO: 1363062
gaauucagggaucugcacc

SEQ ID NO: 1363064 - RNA, 19 nt, Artificial Sequence
  Description of Artificial Sequence: Synthetic oligonucleotide
  Sense strand starting at position 2670 of SEQ ID NO: 1242648
aauggaggucagugugaug

SEQ ID NO: 1363065 - RNA, 19 nt, Artificial Sequence
  Description of Artificial Sequence: Synthetic oligonucleotide
  Antisense strand to SEQ ID NO: 1363064
caucacacugaccuccauu

SEQ ID NO: 1363066 - RNA, 19 nt, Artificial Sequence
  Description of Artificial Sequence: Synthetic oligonucleotide
  Sense strand starting at position 2718 of SEQ ID NO: 1242648
ggaugcauuuccgcugaga

SEQ ID NO: 1363067 - RNA, 19 nt, Artificial Sequence
  Description of Artificial Sequence: Synthetic oligonucleotide
  Antisense strand to SEQ ID NO: 1363066
ucucagcggaaaugcaucc

SEQ ID NO: 1363068 - RNA, 19 nt, Artificial Sequence
  Description of Artificial Sequence: Synthetic oligonucleotide
  Sense strand starting at position 2746 of SEQ ID NO: 1242648
ucguaaagaucugcacuuu

SEQ ID NO: 1363069 - RNA, 19 nt, Artificial Sequence
  Description of Artificial Sequence: Synthetic oligonucleotide
  Antisense strand to SEQ ID NO: 1363068
aaagugcagaucuuuacga

SEQ ID NO: 1363070 - RNA, 19 nt, Artificial Sequence
  Description of Artificial Sequence: Synthetic oligonucleotide
  Sense strand starting at position 2832 of SEQ ID NO: 1242648
aagagaucagcguguccaa

SEQ ID NO: 1363071 - RNA, 19 nt, Artificial Sequence
  Description of Artificial Sequence: Synthetic oligonucleotide
  Antisense strand to SEQ ID NO: 1363070
uuggacacgcugaucucuu

SEQ ID NO: 1363072 - RNA, 19 nt, Artificial Sequence
  Description of Artificial Sequence: Synthetic oligonucleotide
  Sense strand starting at position 2839 of SEQ ID NO: 1242648
cagcguguccaaggaauug

SEQ ID NO: 1363073 - RNA, 19 nt, Artificial Sequence
  Description of Artificial Sequence: Synthetic oligonucleotide
  Antisense strand to SEQ ID NO: 1363072
caauuccuuggacacgcug

SEQ ID NO: 1363074 - RNA, 19 nt, Artificial Sequence
  Description of Artificial Sequence: Synthetic oligonucleotide
  Sense strand starting at position 2941 of SEQ ID NO: 1242648
uucugagugcaaugagaag

SEQ ID NO: 1363075 - RNA, 19 nt, Artificial Sequence
  Description of Artificial Sequence: Synthetic oligonucleotide
  Antisense strand to SEQ ID NO: 1363074
cuucucauugcacucagaa

SEQ ID NO: 1363076 - RNA, 19 nt, Artificial Sequence
  Description of Artificial Sequence: Synthetic oligonucleotide
  Sense strand starting at position 2975 of SEQ ID NO: 1242648
ugcagaaucccaugaucuu

SEQ ID NO: 1363077 - RNA, 19 nt, Artificial Sequence
  Description of Artificial Sequence: Synthetic oligonucleotide
  Antisense strand to SEQ ID NO: 1363076
aagaucaugggauucugca

SEQ ID NO: 1363078 - RNA, 19 nt, Artificial Sequence
  Description of Artificial Sequence: Synthetic oligonucleotide
  Sense strand starting at position 2976 of SEQ ID NO: 1242648
gcagaaucccaugaucuua

SEQ ID NO: 1363079 - RNA, 19 nt, Artificial Sequence
  Description of Artificial Sequence: Synthetic oligonucleotide
  Antisense strand to SEQ ID NO: 1363078
uaagaucaugggauucugc

SEQ ID NO: 1363080 - RNA, 19 nt, Artificial Sequence
  Description of Artificial Sequence: Synthetic oligonucleotide
  Sense strand starting at position 2991 of SEQ ID NO: 1242648
cuuacuuaaucugugaaga

SEQ ID NO: 1363081 - RNA, 19 nt, Artificial Sequence
  Description of Artificial Sequence: Synthetic oligonucleotide
  Antisense strand to SEQ ID NO: 1363080
ucuucacagauuaaguaag

SEQ ID NO: 1363082 - RNA, 19 nt, Artificial Sequence
  Description of Artificial Sequence: Synthetic oligonucleotide
  Sense strand starting at position 2992 of SEQ ID NO: 1242648
uuacuuaaucugugaagau

SEQ ID NO: 1363083 - RNA, 19 nt, Artificial Sequence
  Description of Artificial Sequence: Synthetic oligonucleotide
  Antisense strand to SEQ ID NO: 1363082
aucuucacagauuaaguaa

SEQ ID NO: 1363084 - RNA, 19 nt, Artificial Sequence
  Description of Artificial Sequence: Synthetic oligonucleotide
  Sense strand starting at position 3002 of SEQ ID NO: 1242648
ugugaagauccauagugua

SEQ ID NO: 1363085 - RNA, 19 nt, Artificial Sequence
  Description of Artificial Sequence: Synthetic oligonucleotide
  Antisense strand to SEQ ID NO: 1363084
uacacuauggaucuucaca

SEQ ID NO: 1363086 - RNA, 19 nt, Artificial Sequence
  Description of Artificial Sequence: Synthetic oligonucleotide
  Sense strand starting at position 3071 of SEQ ID NO: 1242648
ccaaguaguccacgagaga

SEQ ID NO: 1363087 - RNA, 19 nt, Artificial Sequence
  Description of Artificial Sequence: Synthetic oligonucleotide
  Antisense strand to SEQ ID NO: 1363086
ucucucguggacuacuugg

SEQ ID NO: 1363088 - RNA, 19 nt, Artificial Sequence
  Description of Artificial Sequence: Synthetic oligonucleotide
  Sense strand starting at position 3072 of SEQ ID NO: 1242648
caaguaguccacgagagag

SEQ ID NO: 1363089 - RNA, 19 nt, Artificial Sequence
  Description of Artificial Sequence: Synthetic oligonucleotide
  Antisense strand to SEQ ID NO: 1363088
cucucucguggacuacuug

SEQ ID NO: 1363090 - RNA, 19 nt, Artificial Sequence
  Description of Artificial Sequence: Synthetic oligonucleotide
  Sense strand starting at position 3136 of SEQ ID NO: 1242648
uggacagauuuggauguuu

SEQ ID NO: 1363091 - RNA, 19 nt, Artificial Sequence
  Description of Artificial Sequence: Synthetic oligonucleotide
  Antisense strand to SEQ ID NO: 1363090
aaacauccaaaucugucca

SEQ ID NO: 1363092 - RNA, 19 nt, Artificial Sequence
  Description of Artificial Sequence: Synthetic oligonucleotide
  Sense strand starting at position 3227 of SEQ ID NO: 1242648
ugagcaaccagguguuaug

SEQ ID NO: 1363093 - RNA, 19 nt, Artificial Sequence
  Description of Artificial Sequence: Synthetic oligonucleotide
  Antisense strand to SEQ ID NO: 1363092
cauaacaccugguugcuca

SEQ ID NO: 1363094 - RNA, 19 nt, Artificial Sequence
  Description of Artificial Sequence: Synthetic oligonucleotide
  Sense strand starting at position 3265 of SEQ ID NO: 1242648
gugugcagcgucuuaaguu

SEQ ID NO: 1363095 - RNA, 19 nt, Artificial Sequence
  Description of Artificial Sequence: Synthetic oligonucleotide
  Antisense strand to SEQ ID NO: 1363094
aacuuaagacgcugcacac

SEQ ID NO: 1363096 - RNA, 19 nt, Artificial Sequence
  Description of Artificial Sequence: Synthetic oligonucleotide
  Sense strand starting at position 3272 of SEQ ID NO: 1242648
gcgucuuaaguuggaugaa

SEQ ID NO: 1363097 - RNA, 19 nt, Artificial Sequence
  Description of Artificial Sequence: Synthetic oligonucleotide
  Antisense strand to SEQ ID NO: 1363096
uucauccaacuuaagacgc

SEQ ID NO: 1363098 - RNA, 19 nt, Artificial Sequence
  Description of Artificial Sequence: Synthetic oligonucleotide
  Sense strand starting at position 3275 of SEQ ID NO: 1242648
ucuuaaguuggaugaauaa

SEQ ID NO: 1363099 - RNA, 19 nt, Artificial Sequence
  Description of Artificial Sequence: Synthetic oligonucleotide
  Antisense strand to SEQ ID NO: 1363098
uuauucauccaacuuaaga

SEQ ID NO: 1363100 - RNA, 19 nt, Artificial Sequence
  Description of Artificial Sequence: Synthetic oligonucleotide
  Sense strand starting at position 3311 of SEQ ID NO: 1242648
uugcauaauuugucagcau

SEQ ID NO: 1363101 - RNA, 19 nt, Artificial Sequence
  Description of Artificial Sequence: Synthetic oligonucleotide
  Antisense strand to SEQ ID NO: 1363100
augcugacaaauuaugcaa

SEQ ID NO: 1363102 - RNA, 19 nt, Artificial Sequence
  Description of Artificial Sequence: Synthetic oligonucleotide
  Sense strand starting at position 3497 of SEQ ID NO: 1242648
agugacaucugucucuauu

SEQ ID NO: 1363103 - RNA, 19 nt, Artificial Sequence
  Description of Artificial Sequence: Synthetic oligonucleotide
  Antisense strand to SEQ ID NO: 1363102
aauagagacagaugucacu

SEQ ID NO: 1363104 - RNA, 19 nt, Artificial Sequence
  Description of Artificial Sequence: Synthetic oligonucleotide
  Sense strand starting at position 3579 of SEQ ID NO: 1242648
ugcagaaaugugcaacaga

SEQ ID NO: 1363105 - RNA, 19 nt, Artificial Sequence
  Description of Artificial Sequence: Synthetic oligonucleotide
  Antisense strand to SEQ ID NO: 1363104
ucuguugcacauuucugca

SEQ ID NO: 1363106 - RNA, 19 nt, Artificial Sequence
  Description of Artificial Sequence: Synthetic oligonucleotide
  Sense strand starting at position 3598 of SEQ ID NO: 1242648
guaucagugucacuacaua

SEQ ID NO: 1363107 - RNA, 19 nt, Artificial Sequence
  Description of Artificial Sequence: Synthetic oligonucleotide
  Antisense strand to SEQ ID NO: 1363106
uauguagugacacugauac

SEQ ID NO: 1363108 - RNA, 19 nt, Artificial Sequence
  Description of Artificial Sequence: Synthetic oligonucleotide
  Sense strand starting at position 3634 of SEQ ID NO: 1242648
uuugauugcuggucuauau

SEQ ID NO: 1363109 - RNA, 19 nt, Artificial Sequence
  Description of Artificial Sequence: Synthetic oligonucleotide
  Antisense strand to SEQ ID NO: 1363108
auauagaccagcaaucaaa

SEQ ID NO: 1363110 - RNA, 19 nt, Artificial Sequence
  Description of Artificial Sequence: Synthetic oligonucleotide
  Sense strand starting at position 3863 of SEQ ID NO: 1242648
gagucauauuuggcuucuu

SEQ ID NO: 1363111 - RNA, 19 nt, Artificial Sequence
  Description of Artificial Sequence: Synthetic oligonucleotide
  Antisense strand to SEQ ID NO: 1363110
aagaagccaaauaugacuc

SEQ ID NO: 1363112 - RNA, 19 nt, Artificial Sequence
  Description of Artificial Sequence: Synthetic oligonucleotide
  Sense strand starting at position 3892 of SEQ ID NO: 1242648
ucuauugcccagugauaga

SEQ ID NO: 1363113 - RNA, 19 nt, Artificial Sequence
  Description of Artificial Sequence: Synthetic oligonucleotide
  Antisense strand to SEQ ID NO: 1363112
ucuaucacugggcaauaga

SEQ ID NO: 1363114 - RNA, 19 nt, Artificial Sequence
  Description of Artificial Sequence: Synthetic oligonucleotide
  Sense strand starting at position 3929 of SEQ ID NO: 1242648
ggacuaaauucccagauaa

SEQ ID NO: 1363115 - RNA, 19 nt, Artificial Sequence
  Description of Artificial Sequence: Synthetic oligonucleotide
  Antisense strand to SEQ ID NO: 1363114
uuaucugggaauuuagucc

SEQ ID NO: 1363116 - RNA, 19 nt, Artificial Sequence
  Description of Artificial Sequence: Synthetic oligonucleotide
  Sense strand starting at position 3982 of SEQ ID NO: 1242648
gaauccuagggcugaaugu

SEQ ID NO: 1363117 - RNA, 19 nt, Artificial Sequence
  Description of Artificial Sequence: Synthetic oligonucleotide
  Antisense strand to SEQ ID NO: 1363116
acauucagcccuaggauuc

SEQ ID NO: 1363118 - RNA, 19 nt, Artificial Sequence
  Description of Artificial Sequence: Synthetic oligonucleotide
  Sense strand starting at position 1480 of SEQ ID NO: 1242649
cagggugccucagacaaga

SEQ ID NO: 1363119 - RNA, 19 nt, Artificial Sequence
  Description of Artificial Sequence: Synthetic oligonucleotide
  Antisense strand to SEQ ID NO: 1363118
ucuugucugaggcacccug

SEQ ID NO: 1363120 - RNA, 19 nt, Artificial Sequence
  Description of Artificial Sequence: Synthetic oligonucleotide
  Sense strand starting at position 1561 of SEQ ID NO: 1242649
ggaaguggugggugaagaa

SEQ ID NO: 1363121 - RNA, 19 nt, Artificial Sequence
  Description of Artificial Sequence: Synthetic oligonucleotide
  Antisense strand to SEQ ID NO: 1363120
uucuucacccaccacuucc

SEQ ID NO: 1363122 - RNA, 19 nt, Artificial Sequence
  Description of Artificial Sequence: Synthetic oligonucleotide
  Sense strand starting at position 1674 of SEQ ID NO: 1242649
ucaccauucuccucggacu

SEQ ID NO: 1363123 - RNA, 19 nt, Artificial Sequence
  Description of Artificial Sequence: Synthetic oligonucleotide
  Antisense strand to SEQ ID NO: 1363122
aguccgaggagaaugguga

SEQ ID NO: 1363124 - RNA, 19 nt, Artificial Sequence
  Description of Artificial Sequence: Synthetic oligonucleotide
  Sense strand starting at position 1816 of SEQ ID NO: 1242649
ucucguuugucucugcaca

SEQ ID NO: 1363125 - RNA, 19 nt, Artificial Sequence
  Description of Artificial Sequence: Synthetic oligonucleotide
  Antisense strand to SEQ ID NO: 1363124
ugugcagagacaaacgaga

SEQ ID NO: 1363126 - RNA, 19 nt, Artificial Sequence
  Description of Artificial Sequence: Synthetic oligonucleotide
  Sense strand starting at position 2077 of SEQ ID NO: 1242649
gggaguguuuguuuccaaa

SEQ ID NO: 1363127 - RNA, 19 nt, Artificial Sequence
  Description of Artificial Sequence: Synthetic oligonucleotide
  Antisense strand to SEQ ID NO: 1363126
uuuggaaacaaacacuccc

SEQ ID NO: 1363128 - RNA, 19 nt, Artificial Sequence
  Description of Artificial Sequence: Synthetic oligonucleotide
  Sense strand starting at position 2079 of SEQ ID NO: 1242649
gaguguuuguuuccaaagc

SEQ ID NO: 1363129 - RNA, 19 nt, Artificial Sequence
  Description of Artificial Sequence: Synthetic oligonucleotide
  Antisense strand to SEQ ID NO: 1363128
gcuuuggaaacaaacacuc

SEQ ID NO: 1363130 - RNA, 19 nt, Artificial Sequence
  Description of Artificial Sequence: Synthetic oligonucleotide
  Sense strand starting at position 2080 of SEQ ID NO: 1242649
aguguuuguuuccaaagca

SEQ ID NO: 1363131 - RNA, 19 nt, Artificial Sequence
  Description of Artificial Sequence: Synthetic oligonucleotide
  Antisense strand to SEQ ID NO: 1363130
ugcuuuggaaacaaacacu

SEQ ID NO: 1363132 - RNA, 19 nt, Artificial Sequence
  Description of Artificial Sequence: Synthetic oligonucleotide
  Sense strand starting at position 2161 of SEQ ID NO: 1242649
gggcaaugguucuguugaa

SEQ ID NO: 1363133 - RNA, 19 nt, Artificial Sequence
  Description of Artificial Sequence: Synthetic oligonucleotide
  Antisense strand to SEQ ID NO: 1363132
uucaacagaaccauugccc

SEQ ID NO: 1363134 - RNA, 19 nt, Artificial Sequence
  Description of Artificial Sequence: Synthetic oligonucleotide
  Sense strand starting at position 2162 of SEQ ID NO: 1242649
ggcaaugguucuguugaac

SEQ ID NO: 1363135 - RNA, 19 nt, Artificial Sequence
  Description of Artificial Sequence: Synthetic oligonucleotide
  Antisense strand to SEQ ID NO: 1363134
guucaacagaaccauugcc

SEQ ID NO: 1363136 - RNA, 19 nt, Artificial Sequence
  Description of Artificial Sequence: Synthetic oligonucleotide
  Sense strand starting at position 2165 of SEQ ID NO: 1242649
aaugguucuguugaacuua

SEQ ID NO: 1363137 - RNA, 19 nt, Artificial Sequence
  Description of Artificial Sequence: Synthetic oligonucleotide
  Antisense strand to SEQ ID NO: 1363136
uaaguucaacagaaccauu

SEQ ID NO: 1363138 - RNA, 19 nt, Artificial Sequence
  Description of Artificial Sequence: Synthetic oligonucleotide
  Sense strand starting at position 2577 of SEQ ID NO: 1242649
gggacuuuagcccguacau

SEQ ID NO: 1363139 - RNA, 19 nt, Artificial Sequence
  Description of Artificial Sequence: Synthetic oligonucleotide
  Antisense strand to SEQ ID NO: 1363138
auguacgggcuaaaguccc

SEQ ID NO: 1363140 - RNA, 19 nt, Artificial Sequence
  Description of Artificial Sequence: Synthetic oligonucleotide
  Sense strand starting at position 2586 of SEQ ID NO: 1242649
gcccguacauucccagaga

SEQ ID NO: 1363141 - RNA, 19 nt, Artificial Sequence
  Description of Artificial Sequence: Synthetic oligonucleotide
  Antisense strand to SEQ ID NO: 1363140
ucucugggaauguacgggc

SEQ ID NO: 1363142 - RNA, 19 nt, Artificial Sequence
  Description of Artificial Sequence: Synthetic oligonucleotide
  Sense strand starting at position 2587 of SEQ ID NO: 1242649
cccguacauucccagagaa

SEQ ID NO: 1363143 - RNA, 19 nt, Artificial Sequence
  Description of Artificial Sequence: Synthetic oligonucleotide
  Antisense strand to SEQ ID NO: 1363142
uucucugggaauguacggg

SEQ ID NO: 1363144 - RNA, 19 nt, Artificial Sequence
  Description of Artificial Sequence: Synthetic oligonucleotide
  Sense strand starting at position 2956 of SEQ ID NO: 1242649
ugaggugaggcuuggguaa

SEQ ID NO: 1363145 - RNA, 19 nt, Artificial Sequence
  Description of Artificial Sequence: Synthetic oligonucleotide
  Antisense strand to SEQ ID NO: 1363144
uuacccaagccucaccuca

SEQ ID NO: 1363146 - RNA, 19 nt, Artificial Sequence
  Description of Artificial Sequence: Synthetic oligonucleotide
  Sense strand starting at position 2958 of SEQ ID NO: 1242649
aggugaggcuuggguaaca

SEQ ID NO: 1363147 - RNA, 19 nt, Artificial Sequence
  Description of Artificial Sequence: Synthetic oligonucleotide
  Antisense strand to SEQ ID NO: 1363146
uguuacccaagccucaccu

SEQ ID NO: 1363148 - RNA, 19 nt, Artificial Sequence
  Description of Artificial Sequence: Synthetic oligonucleotide
  Sense strand starting at position 2994 of SEQ ID NO: 1242649
agaggaguccaggguauaa

SEQ ID NO: 1363149 - RNA, 19 nt, Artificial Sequence
  Description of Artificial Sequence: Synthetic oligonucleotide
  Antisense strand to SEQ ID NO: 1363148
uuauacccuggacuccucu

SEQ ID NO: 1363150 - RNA, 19 nt, Artificial Sequence
  Description of Artificial Sequence: Synthetic oligonucleotide
  Sense strand starting at position 3133 of SEQ ID NO: 1242649
ccaggugacuuucugagau

SEQ ID NO: 1363151 - RNA, 19 nt, Artificial Sequence
  Description of Artificial Sequence: Synthetic oligonucleotide
  Antisense strand to SEQ ID NO: 1363150
aucucagaaagucaccugg

SEQ ID NO: 1363152 - RNA, 19 nt, Artificial Sequence
  Description of Artificial Sequence: Synthetic oligonucleotide
  Sense strand starting at position 3135 of SEQ ID NO: 1242649
aggugacuuucugagauuc

SEQ ID NO: 1363153 - RNA, 19 nt, Artificial Sequence
  Description of Artificial Sequence: Synthetic oligonucleotide
  Antisense strand to SEQ ID NO: 1363152
gaaucucagaaagucaccu

SEQ ID NO: 1363154 - RNA, 19 nt, Artificial Sequence
  Description of Artificial Sequence: Synthetic oligonucleotide
  Sense strand starting at position 3137 of SEQ ID NO: 1242649
gugacuuucugagauucuc

SEQ ID NO: 1363155 - RNA, 19 nt, Artificial Sequence
  Description of Artificial Sequence: Synthetic oligonucleotide
  Antisense strand to SEQ ID NO: 1363154
gagaaucucagaaagucac

SEQ ID NO: 1363156 - RNA, 19 nt, Artificial Sequence
  Description of Artificial Sequence: Synthetic oligonucleotide
  Sense strand starting at position 3143 of SEQ ID NO: 1242649
uucugagauucucuaguuu

SEQ ID NO: 1363157 - RNA, 19 nt, Artificial Sequence
  Description of Artificial Sequence: Synthetic oligonucleotide
  Antisense strand to SEQ ID NO: 1363156
aaacuagagaaucucagaa

SEQ ID NO: 1363158 - RNA, 19 nt, Artificial Sequence
  Description of Artificial Sequence: Synthetic oligonucleotide
  Sense strand starting at position 3147 of SEQ ID NO: 1242649
gagauucucuaguuugacu

SEQ ID NO: 1363159 - RNA, 19 nt, Artificial Sequence
  Description of Artificial Sequence: Synthetic oligonucleotide
  Antisense strand to SEQ ID NO: 1363158
agucaaacuagagaaucuc

SEQ ID NO: 1363160 - RNA, 19 nt, Artificial Sequence
  Description of Artificial Sequence: Synthetic oligonucleotide
  Sense strand starting at position 3219 of SEQ ID NO: 1242649
ucgcaugaccaauguaugu

SEQ ID NO: 1363161 - RNA, 19 nt, Artificial Sequence
  Description of Artificial Sequence: Synthetic oligonucleotide
  Antisense strand to SEQ ID NO: 1363160
acauacauuggucaugcga

SEQ ID NO: 1363162 - RNA, 19 nt, Artificial Sequence
  Description of Artificial Sequence: Synthetic oligonucleotide
  Sense strand starting at position 3276 of SEQ ID NO: 1242649
gauagaaaucccugggcug

SEQ ID NO: 1363163 - RNA, 19 nt, Artificial Sequence
  Description of Artificial Sequence: Synthetic oligonucleotide
  Antisense strand to SEQ ID NO: 1363162
cagcccagggauuucuauc

SEQ ID NO: 1363164 - RNA, 19 nt, Artificial Sequence
  Description of Artificial Sequence: Synthetic oligonucleotide
  Sense strand starting at position 2 of SEQ ID NO: 1242650
ggcaacauguuggugacau

SEQ ID NO: 1363165 - RNA, 19 nt, Artificial Sequence
  Description of Artificial Sequence: Synthetic oligonucleotide
  Antisense strand to SEQ ID NO: 1363164
augucaccaacauguugcc

SEQ ID NO: 1363166 - RNA, 19 nt, Artificial Sequence
  Description of Artificial Sequence: Synthetic oligonucleotide
  Sense strand starting at position 4 of SEQ ID NO: 1242650
caacauguuggugacauca

SEQ ID NO: 1363167 - RNA, 19 nt, Artificial Sequence
  Description of Artificial Sequence: Synthetic oligonucleotide
  Antisense strand to SEQ ID NO: 1363166
ugaugucaccaacauguug

SEQ ID NO: 1363168 - RNA, 19 nt, Artificial Sequence
  Description of Artificial Sequence: Synthetic oligonucleotide
  Sense strand starting at position 427 of SEQ ID NO: 1242650
cccaaaguacgaggauuaa

SEQ ID NO: 1363169 - RNA, 19 nt, Artificial Sequence
  Description of Artificial Sequence: Synthetic oligonucleotide
  Antisense strand to SEQ ID NO: 1363168
uuaauccucguacuuuggg

SEQ ID NO: 1363170 - RNA, 19 nt, Artificial Sequence
  Description of Artificial Sequence: Synthetic oligonucleotide
  Sense strand starting at position 483 of SEQ ID NO: 1242650
cuuaaugguaaagguguaa

SEQ ID NO: 1363171 - RNA, 19 nt, Artificial Sequence
  Description of Artificial Sequence: Synthetic oligonucleotide
  Antisense strand to SEQ ID NO: 1363170
uuacaccuuuaccauuaag

SEQ ID NO: 1363172 - RNA, 19 nt, Artificial Sequence
  Description of Artificial Sequence: Synthetic oligonucleotide
  Sense strand starting at position 593 of SEQ ID NO: 1242650
gaucuauuagguuggcuca

SEQ ID NO: 1363173 - RNA, 19 nt, Artificial Sequence
  Description of Artificial Sequence: Synthetic oligonucleotide
  Antisense strand to SEQ ID NO: 1363172
ugagccaaccuaauagauc

SEQ ID NO: 1363174 - RNA, 19 nt, Artificial Sequence
  Description of Artificial Sequence: Synthetic oligonucleotide
  Sense strand starting at position 594 of SEQ ID NO: 1242650
aucuauuagguuggcucaa

SEQ ID NO: 1363175 - RNA, 19 nt, Artificial Sequence
  Description of Artificial Sequence: Synthetic oligonucleotide
  Antisense strand to SEQ ID NO: 1363174
uugagccaaccuaauagau

SEQ ID NO: 1363176 - RNA, 19 nt, Artificial Sequence
  Description of Artificial Sequence: Synthetic oligonucleotide
  Sense strand starting at position 595 of SEQ ID NO: 1242650
ucuauuagguuggcucaaa

SEQ ID NO: 1363177 - RNA, 19 nt, Artificial Sequence
  Description of Artificial Sequence: Synthetic oligonucleotide
  Antisense strand to SEQ ID NO: 1363176
uuugagccaaccuaauaga

SEQ ID NO: 1363178 - RNA, 19 nt, Artificial Sequence
  Description of Artificial Sequence: Synthetic oligonucleotide
  Sense strand starting at position 596 of SEQ ID NO: 1242650
cuauuagguuggcucaaau

SEQ ID NO: 1363179 - RNA, 19 nt, Artificial Sequence
  Description of Artificial Sequence: Synthetic oligonucleotide
  Antisense strand to SEQ ID NO: 1363178
auuugagccaaccuaauag

SEQ ID NO: 1363180 - RNA, 19 nt, Artificial Sequence
  Description of Artificial Sequence: Synthetic oligonucleotide
  Sense strand starting at position 746 of SEQ ID NO: 1242650
ggccuccucguguagaaca

SEQ ID NO: 1363181 - RNA, 19 nt, Artificial Sequence
  Description of Artificial Sequence: Synthetic oligonucleotide
  Antisense strand to SEQ ID NO: 1363180
uguucuacacgaggaggcc

SEQ ID NO: 1363182 - RNA, 19 nt, Artificial Sequence
  Description of Artificial Sequence: Synthetic oligonucleotide
  Sense strand starting at position 751 of SEQ ID NO: 1242650
ccucguguagaacauguaa

SEQ ID NO: 1363183 - RNA, 19 nt, Artificial Sequence
  Description of Artificial Sequence: Synthetic oligonucleotide
  Antisense strand to SEQ ID NO: 1363182
uuacauguucuacacgagg

SEQ ID NO: 1363184 - RNA, 19 nt, Artificial Sequence
  Description of Artificial Sequence: Synthetic oligonucleotide
  Sense strand starting at position 753 of SEQ ID NO: 1242650
ucguguagaacauguaaca

SEQ ID NO: 1363185 - RNA, 19 nt, Artificial Sequence
  Description of Artificial Sequence: Synthetic oligonucleotide
  Antisense strand to SEQ ID NO: 1363184
uguuacauguucuacacga

SEQ ID NO: 1363186 - RNA, 19 nt, Artificial Sequence
  Description of Artificial Sequence: Synthetic oligonucleotide
  Sense strand starting at position 866 of SEQ ID NO: 1242650
agcagauagucacucuauu

SEQ ID NO: 1363187 - RNA, 19 nt, Artificial Sequence
  Description of Artificial Sequence: Synthetic oligonucleotide
  Antisense strand to SEQ ID NO: 1363186
aauagagugacuaucugcu

SEQ ID NO: 1363188 - RNA, 19 nt, Artificial Sequence
  Description of Artificial Sequence: Synthetic oligonucleotide
  Sense strand starting at position 898 of SEQ ID NO: 1242650
ucugguaucccagagcaua

SEQ ID NO: 1363189 - RNA, 19 nt, Artificial Sequence
  Description of Artificial Sequence: Synthetic oligonucleotide
  Antisense strand to SEQ ID NO: 1363188
uaugcucugggauaccaga

SEQ ID NO: 1363190 - RNA, 19 nt, Artificial Sequence
  Description of Artificial Sequence: Synthetic oligonucleotide
  Sense strand starting at position 1060 of SEQ ID NO: 1242650
caaagagaauagggauaaa

SEQ ID NO: 1363191 - RNA, 19 nt, Artificial Sequence
  Description of Artificial Sequence: Synthetic oligonucleotide
  Antisense strand to SEQ ID NO: 1363190
uuuaucccuauucucuuug

SEQ ID NO: 1363192 - RNA, 19 nt, Artificial Sequence
  Description of Artificial Sequence: Synthetic oligonucleotide
  Sense strand starting at position 1108 of SEQ ID NO: 1242650
gauugagacucagaagucu

SEQ ID NO: 1363193 - RNA, 19 nt, Artificial Sequence
  Description of Artificial Sequence: Synthetic oligonucleotide
  Antisense strand to SEQ ID NO: 1363192
agacuucugagucucaauc

SEQ ID NO: 1363194 - RNA, 19 nt, Artificial Sequence
  Description of Artificial Sequence: Synthetic oligonucleotide
  Sense strand starting at position 1165 of SEQ ID NO: 1242650
ggaugagggucuuccagau

SEQ ID NO: 1363195 - RNA, 19 nt, Artificial Sequence
  Description of Artificial Sequence: Synthetic oligonucleotide
  Antisense strand to SEQ ID NO: 1363194
aucuggaagacccucaucc

SEQ ID NO: 1363196 - RNA, 19 nt, Artificial Sequence
  Description of Artificial Sequence: Synthetic oligonucleotide
  Sense strand starting at position 1171 of SEQ ID NO: 1242650
gggucuuccagauguggga

SEQ ID NO: 1363197 - RNA, 19 nt, Artificial Sequence
  Description of Artificial Sequence: Synthetic oligonucleotide
  Antisense strand to SEQ ID NO: 1363196
ucccacaucuggaagaccc

SEQ ID NO: 1363198 - RNA, 19 nt, Artificial Sequence
  Description of Artificial Sequence: Synthetic oligonucleotide
  Sense strand starting at position 1175 of SEQ ID NO: 1242650
cuuccagaugugggaagua

SEQ ID NO: 1363199 - RNA, 19 nt, Artificial Sequence
  Description of Artificial Sequence: Synthetic oligonucleotide
  Antisense strand to SEQ ID NO: 1363198
uacuucccacaucuggaag

SEQ ID NO: 1363200 - RNA, 19 nt, Artificial Sequence
  Description of Artificial Sequence: Synthetic oligonucleotide
  Sense strand starting at position 1188 of SEQ ID NO: 1242650
gaaguaagacuggguuaca

SEQ ID NO: 1363201 - RNA, 19 nt, Artificial Sequence
  Description of Artificial Sequence: Synthetic oligonucleotide
  Antisense strand to SEQ ID NO: 1363200
uguaacccagucuuacuuc

SEQ ID NO: 1363202 - RNA, 19 nt, Artificial Sequence
  Description of Artificial Sequence: Synthetic oligonucleotide
  Sense strand starting at position 1189 of SEQ ID NO: 1242650
aaguaagacuggguuacaa

SEQ ID NO: 1363203 - RNA, 19 nt, Artificial Sequence
  Description of Artificial Sequence: Synthetic oligonucleotide
  Antisense strand to SEQ ID NO: 1363202
uuguaacccagucuuacuu

SEQ ID NO: 1363204 - RNA, 19 nt, Artificial Sequence
  Description of Artificial Sequence: Synthetic oligonucleotide
  Sense strand starting at position 1227 of SEQ ID NO: 1242650
gggagaccugccugaauuc

SEQ ID NO: 1363205 - RNA, 19 nt, Artificial Sequence
  Description of Artificial Sequence: Synthetic oligonucleotide
  Antisense strand to SEQ ID NO: 1363204
gaauucaggcaggucuccc

SEQ ID NO: 1363206 - RNA, 19 nt, Artificial Sequence
  Description of Artificial Sequence: Synthetic oligonucleotide
  Sense strand starting at position 1537 of SEQ ID NO: 1242650
ugguguaugaggcauguca

SEQ ID NO: 1363207 - RNA, 19 nt, Artificial Sequence
  Description of Artificial Sequence: Synthetic oligonucleotide
  Antisense strand to SEQ ID NO: 1363206
ugacaugccucauacacca

SEQ ID NO: 1363208 - RNA, 19 nt, Artificial Sequence
  Description of Artificial Sequence: Synthetic oligonucleotide
  Sense strand starting at position 1539 of SEQ ID NO: 1242650
guguaugaggcaugucaga

SEQ ID NO: 1363209 - RNA, 19 nt, Artificial Sequence
  Description of Artificial Sequence: Synthetic oligonucleotide
  Antisense strand to SEQ ID NO: 1363208
ucugacaugccucauacac

SEQ ID NO: 1363210 - RNA, 19 nt, Artificial Sequence
  Description of Artificial Sequence: Synthetic oligonucleotide
  Sense strand starting at position 2198 of SEQ ID NO: 1242650
ccgccaguuguguucgaga

SEQ ID NO: 1363211 - RNA, 19 nt, Artificial Sequence
  Description of Artificial Sequence: Synthetic oligonucleotide
  Antisense strand to SEQ ID NO: 1363210
ucucgaacacaacuggcgg

SEQ ID NO: 1363212 - RNA, 19 nt, Artificial Sequence
  Description of Artificial Sequence: Synthetic oligonucleotide
  Sense strand starting at position 2520 of SEQ ID NO: 1242650
gcgagacugcaggaacauu

SEQ ID NO: 1363213 - RNA, 19 nt, Artificial Sequence
  Description of Artificial Sequence: Synthetic oligonucleotide
  Antisense strand to SEQ ID NO: 1363212
aauguuccugcagucucgc

SEQ ID NO: 1363214 - RNA, 19 nt, Artificial Sequence
  Description of Artificial Sequence: Synthetic oligonucleotide
  Sense strand starting at position 2581 of SEQ ID NO: 1242650
aagagauugcaaugauguc

SEQ ID NO: 1363215 - RNA, 19 nt, Artificial Sequence
  Description of Artificial Sequence: Synthetic oligonucleotide
  Antisense strand to SEQ ID NO: 1363214
gacaucauugcaaucucuu

SEQ ID NO: 1363216 - RNA, 19 nt, Artificial Sequence
  Description of Artificial Sequence: Synthetic oligonucleotide
  Sense strand starting at position 2681 of SEQ ID NO: 1242650
gggaguguuucuguccuug

SEQ ID NO: 1363217 - RNA, 19 nt, Artificial Sequence
  Description of Artificial Sequence: Synthetic oligonucleotide
  Antisense strand to SEQ ID NO: 1363216
caaggacagaaacacuccc

SEQ ID NO: 1363218 - RNA, 19 nt, Artificial Sequence
  Description of Artificial Sequence: Synthetic oligonucleotide
  Sense strand starting at position 2683 of SEQ ID NO: 1242650
gaguguuucuguccuugga

SEQ ID NO: 1363219 - RNA, 19 nt, Artificial Sequence
  Description of Artificial Sequence: Synthetic oligonucleotide
  Antisense strand to SEQ ID NO: 1363218
uccaaggacagaaacacuc

SEQ ID NO: 1363220 - RNA, 19 nt, Artificial Sequence
  Description of Artificial Sequence: Synthetic oligonucleotide
  Sense strand starting at position 2685 of SEQ ID NO: 1242650
guguuucuguccuuggaac

SEQ ID NO: 1363221 - RNA, 19 nt, Artificial Sequence
  Description of Artificial Sequence: Synthetic oligonucleotide
  Antisense strand to SEQ ID NO: 1363220
guuccaaggacagaaacac

SEQ ID NO: 1363222 - RNA, 19 nt, Artificial Sequence
  Description of Artificial Sequence: Synthetic oligonucleotide
  Sense strand starting at position 2980 of SEQ ID NO: 1242650
cucucugacugagauaaac

SEQ ID NO: 1363223 - RNA, 19 nt, Artificial Sequence
  Description of Artificial Sequence: Synthetic oligonucleotide
  Antisense strand to SEQ ID NO: 1363222
guuuaucucagucagagag

SEQ ID NO: 1363224 - RNA, 19 nt, Artificial Sequence
  Description of Artificial Sequence: Synthetic oligonucleotide
  Sense strand starting at position 3077 of SEQ ID NO: 1242650
ucuguaauguugucuaaau

SEQ ID NO: 1363225 - RNA, 19 nt, Artificial Sequence
  Description of Artificial Sequence: Synthetic oligonucleotide
  Antisense strand to SEQ ID NO: 1363224
auuuagacaacauuacaga

SEQ ID NO: 1363226 - RNA, 19 nt, Artificial Sequence
  Description of Artificial Sequence: Synthetic oligonucleotide
  Sense strand starting at position 3078 of SEQ ID NO: 1242650
cuguaauguugucuaaauu

SEQ ID NO: 1363227 - RNA, 19 nt, Artificial Sequence
  Description of Artificial Sequence: Synthetic oligonucleotide
  Antisense strand to SEQ ID NO: 1363226
aauuuagacaacauuacag

SEQ ID NO: 1363228 - RNA, 19 nt, Artificial Sequence
  Description of Artificial Sequence: Synthetic oligonucleotide
  Sense strand starting at position 3079 of SEQ ID NO: 1242650
uguaauguugucuaaauuc

SEQ ID NO: 1363229 - RNA, 19 nt, Artificial Sequence
  Description of Artificial Sequence: Synthetic oligonucleotide
  Antisense strand to SEQ ID NO: 1363228
gaauuuagacaacauuaca

SEQ ID NO: 1363230 - RNA, 19 nt, Artificial Sequence
  Description of Artificial Sequence: Synthetic oligonucleotide
  Sense strand starting at position 3529 of SEQ ID NO: 1242650
cuaugugcucauugggaua

SEQ ID NO: 1363231 - RNA, 19 nt, Artificial Sequence
  Description of Artificial Sequence: Synthetic oligonucleotide
  Antisense strand to SEQ ID NO: 1363230
uaucccaaugagcacauag

SEQ ID NO: 1363232 - RNA, 19 nt, Artificial Sequence
  Description of Artificial Sequence: Synthetic oligonucleotide
  Sense strand starting at position 3580 of SEQ ID NO: 1242650
uggaacuuauauuagggaa

SEQ ID NO: 1363233 - RNA, 19 nt, Artificial Sequence
  Description of Artificial Sequence: Synthetic oligonucleotide
  Antisense strand to SEQ ID NO: 1363232
uucccuaauauaaguucca

SEQ ID NO: 1363234 - RNA, 19 nt, Artificial Sequence
  Description of Artificial Sequence: Synthetic oligonucleotide
  Sense strand starting at position 3583 of SEQ ID NO: 1242650
aacuuauauuagggaagga

SEQ ID NO: 1363235 - RNA, 19 nt, Artificial Sequence
  Description of Artificial Sequence: Synthetic oligonucleotide
  Antisense strand to SEQ ID NO: 1363234
uccuucccuaauauaaguu

SEQ ID NO: 1363236 - RNA, 19 nt, Artificial Sequence
  Description of Artificial Sequence: Synthetic oligonucleotide
  Sense strand starting at position 3593 of SEQ ID NO: 1242650
agggaaggauauugaucaa

SEQ ID NO: 1363237 - RNA, 19 nt, Artificial Sequence
  Description of Artificial Sequence: Synthetic oligonucleotide
  Antisense strand to SEQ ID NO: 1363236
uugaucaauauccuucccu

SEQ ID NO: 1363238 - RNA, 19 nt, Artificial Sequence
  Description of Artificial Sequence: Synthetic oligonucleotide
  Sense strand starting at position 3667 of SEQ ID NO: 1242650
guuauuuaauaugaggacu

SEQ ID NO: 1363239 - RNA, 19 nt, Artificial Sequence
  Description of Artificial Sequence: Synthetic oligonucleotide
  Antisense strand to SEQ ID NO: 1363238
aguccucauauuaaauaac

SEQ ID NO: 1363240 - RNA, 19 nt, Artificial Sequence
  Description of Artificial Sequence: Synthetic oligonucleotide
  Sense strand starting at position 3699 of SEQ ID NO: 1242650
uugagcuaaucaguggaau

SEQ ID NO: 1363241 - RNA, 19 nt, Artificial Sequence
  Description of Artificial Sequence: Synthetic oligonucleotide
  Antisense strand to SEQ ID NO: 1363240
auuccacugauuagcucaa

SEQ ID NO: 1363242 - RNA, 19 nt, Artificial Sequence
  Description of Artificial Sequence: Synthetic oligonucleotide
  Sense strand starting at position 3700 of SEQ ID NO: 1242650
ugagcuaaucaguggaauc

SEQ ID NO: 1363243 - RNA, 19 nt, Artificial Sequence
  Description of Artificial Sequence: Synthetic oligonucleotide
  Antisense strand to SEQ ID NO: 1363242
gauuccacugauuagcuca

SEQ ID NO: 1363244 - RNA, 19 nt, Artificial Sequence
  Description of Artificial Sequence: Synthetic oligonucleotide
  Sense strand starting at position 12 of SEQ ID NO: 1242651
gguuauuccagccaguaag

SEQ ID NO: 1363245 - RNA, 19 nt, Artificial Sequence
  Description of Artificial Sequence: Synthetic oligonucleotide
  Antisense strand to SEQ ID NO: 1363244
cuuacuggcuggaauaacc

SEQ ID NO: 1363246 - RNA, 19 nt, Artificial Sequence
  Description of Artificial Sequence: Synthetic oligonucleotide
  Sense strand starting at position 79 of SEQ ID NO: 1242651
gcgucuggcucugcugaau

SEQ ID NO: 1363247 - RNA, 19 nt, Artificial Sequence
  Description of Artificial Sequence: Synthetic oligonucleotide
  Antisense strand to SEQ ID NO: 1363246
auucagcagagccagacgc

SEQ ID NO: 1363248 - RNA, 19 nt, Artificial Sequence
  Description of Artificial Sequence: Synthetic oligonucleotide
  Sense strand starting at position 230 of SEQ ID NO: 1242651
uggaaaguaucucgaaccu

SEQ ID NO: 1363249 - RNA, 19 nt, Artificial Sequence
  Description of Artificial Sequence: Synthetic oligonucleotide
  Antisense strand to SEQ ID NO: 1363248
agguucgagauacuuucca

SEQ ID NO: 1363250 - RNA, 19 nt, Artificial Sequence
  Description of Artificial Sequence: Synthetic oligonucleotide
  Sense strand starting at position 361 of SEQ ID NO: 1242651
gcaggugccugucggagaa

SEQ ID NO: 1363251 - RNA, 19 nt, Artificial Sequence
  Description of Artificial Sequence: Synthetic oligonucleotide
  Antisense strand to SEQ ID NO: 1363250
uucuccgacaggcaccugc

SEQ ID NO: 1363252 - RNA, 19 nt, Artificial Sequence
  Description of Artificial Sequence: Synthetic oligonucleotide
  Sense strand starting at position 1289 of SEQ ID NO: 1242651
gggugugcaugcugugaaa

SEQ ID NO: 1363253 - RNA, 19 nt, Artificial Sequence
  Description of Artificial Sequence: Synthetic oligonucleotide
  Antisense strand to SEQ ID NO: 1363252
uuucacagcaugcacaccc

SEQ ID NO: 1363254 - RNA, 19 nt, Artificial Sequence
  Description of Artificial Sequence: Synthetic oligonucleotide
  Sense strand starting at position 1298 of SEQ ID NO: 1242651
ugcugugaaagccaagaau

SEQ ID NO: 1363255 - RNA, 19 nt, Artificial Sequence
  Description of Artificial Sequence: Synthetic oligonucleotide
  Antisense strand to SEQ ID NO: 1363254
auucuuggcuuucacagca

SEQ ID NO: 1363256 - RNA, 19 nt, Artificial Sequence
  Description of Artificial Sequence: Synthetic oligonucleotide
  Sense strand starting at position 1311 of SEQ ID NO: 1242651
aagaauuaugcagggaucu

SEQ ID NO: 1363257 - RNA, 19 nt, Artificial Sequence
  Description of Artificial Sequence: Synthetic oligonucleotide
  Antisense strand to SEQ ID NO: 1363256
agaucccugcauaauucuu

SEQ ID NO: 1363258 - RNA, 19 nt, Artificial Sequence
  Description of Artificial Sequence: Synthetic oligonucleotide
  Sense strand starting at position 1344 of SEQ ID NO: 1242651
ccaggaggguuccucacaa

SEQ ID NO: 1363259 - RNA, 19 nt, Artificial Sequence
  Description of Artificial Sequence: Synthetic oligonucleotide
  Antisense strand to SEQ ID NO: 1363258
uugugaggaacccuccugg

SEQ ID NO: 1363260 - RNA, 19 nt, Artificial Sequence
  Description of Artificial Sequence: Synthetic oligonucleotide
  Sense strand starting at position 1409 of SEQ ID NO: 1242651
gguggagguuuaccuggaa

SEQ ID NO: 1363261 - RNA, 19 nt, Artificial Sequence
  Description of Artificial Sequence: Synthetic oligonucleotide
  Antisense strand to SEQ ID NO: 1363260
uuccagguaaaccuccacc

SEQ ID NO: 1363262 - RNA, 19 nt, Artificial Sequence
  Description of Artificial Sequence: Synthetic oligonucleotide
  Sense strand starting at position 1481 of SEQ ID NO: 1242651
ccaguugguucccugcaaa

SEQ ID NO: 1363263 - RNA, 19 nt, Artificial Sequence
  Description of Artificial Sequence: Synthetic oligonucleotide
  Antisense strand to SEQ ID NO: 1363262
uuugcagggaaccaacugg

SEQ ID NO: 1363264 - RNA, 19 nt, Artificial Sequence
  Description of Artificial Sequence: Synthetic oligonucleotide
  Sense strand starting at position 1484 of SEQ ID NO: 1242651
guugguucccugcaaagac

SEQ ID NO: 1363265 - RNA, 19 nt, Artificial Sequence
  Description of Artificial Sequence: Synthetic oligonucleotide
  Antisense strand to SEQ ID NO: 1363264
gucuuugcagggaaccaac

SEQ ID NO: 1363266 - RNA, 19 nt, Artificial Sequence
  Description of Artificial Sequence: Synthetic oligonucleotide
  Sense strand starting at position 2256 of SEQ ID NO: 1242651
ccauuaucgcgcuucucuu

SEQ ID NO: 1363267 - RNA, 19 nt, Artificial Sequence
  Description of Artificial Sequence: Synthetic oligonucleotide
  Antisense strand to SEQ ID NO: 1363266
aagagaagcgcgauaaugg

SEQ ID NO: 1363268 - RNA, 19 nt, Artificial Sequence
  Description of Artificial Sequence: Synthetic oligonucleotide
  Sense strand starting at position 2284 of SEQ ID NO: 1242651
cggugaagguuauacgaga

SEQ ID NO: 1363269 - RNA, 19 nt, Artificial Sequence
  Description of Artificial Sequence: Synthetic oligonucleotide
  Antisense strand to SEQ ID NO: 1363268
ucucguauaaccuucaccg

SEQ ID NO: 1363270 - RNA, 19 nt, Artificial Sequence
  Description of Artificial Sequence: Synthetic oligonucleotide
  Sense strand starting at position 2303 of SEQ ID NO: 1242651
ggcuccaucuguccuuauu

SEQ ID NO: 1363271 - RNA, 19 nt, Artificial Sequence
  Description of Artificial Sequence: Synthetic oligonucleotide
  Antisense strand to SEQ ID NO: 1363270
aauaaggacagauggagcc

SEQ ID NO: 1363272 - RNA, 19 nt, Artificial Sequence
  Description of Artificial Sequence: Synthetic oligonucleotide
  Sense strand starting at position 2305 of SEQ ID NO: 1242651
cuccaucuguccuuauuga

SEQ ID NO: 1363273 - RNA, 19 nt, Artificial Sequence
  Description of Artificial Sequence: Synthetic oligonucleotide
  Antisense strand to SEQ ID NO: 1363272
ucaauaaggacagauggag

SEQ ID NO: 1363274 - RNA, 19 nt, Artificial Sequence
  Description of Artificial Sequence: Synthetic oligonucleotide
  Sense strand starting at position 2309 of SEQ ID NO: 1242651
aucuguccuuauugaaagu

SEQ ID NO: 1363275 - RNA, 19 nt, Artificial Sequence
  Description of Artificial Sequence: Synthetic oligonucleotide
  Antisense strand to SEQ ID NO: 1363274
acuuucaauaaggacagau

SEQ ID NO: 1363276 - RNA, 19 nt, Artificial Sequence
  Description of Artificial Sequence: Synthetic oligonucleotide
  Sense strand starting at position 2403 of SEQ ID NO: 1242651
gugaggauuccgcguguca

SEQ ID NO: 1363277 - RNA, 19 nt, Artificial Sequence
  Description of Artificial Sequence: Synthetic oligonucleotide
  Antisense strand to SEQ ID NO: 1363276
ugacacgcggaauccucac

SEQ ID NO: 1363278 - RNA, 19 nt, Artificial Sequence
  Description of Artificial Sequence: Synthetic oligonucleotide
  Sense strand starting at position 2405 of SEQ ID NO: 1242651
gaggauuccgcgugucagg

SEQ ID NO: 1363279 - RNA, 19 nt, Artificial Sequence
  Description of Artificial Sequence: Synthetic oligonucleotide
  Antisense strand to SEQ ID NO: 1363278
ccugacacgcggaauccuc

SEQ ID NO: 1363280 - RNA, 19 nt, Artificial Sequence
  Description of Artificial Sequence: Synthetic oligonucleotide
  Sense strand starting at position 2456 of SEQ ID NO: 1242651
uuggacaugugacgugaua

SEQ ID NO: 1363281 - RNA, 19 nt, Artificial Sequence
  Description of Artificial Sequence: Synthetic oligonucleotide
  Antisense strand to SEQ ID NO: 1363280
uaucacgucacauguccaa

SEQ ID NO: 1363282 - RNA, 19 nt, Artificial Sequence
  Description of Artificial Sequence: Synthetic oligonucleotide
  Sense strand starting at position 2774 of SEQ ID NO: 1242651
ccauguaguugguguuaac

SEQ ID NO: 1363283 - RNA, 19 nt, Artificial Sequence
  Description of Artificial Sequence: Synthetic oligonucleotide
  Antisense strand to SEQ ID NO: 1363282
guuaacaccaacuacaugg

SEQ ID NO: 1363284 - RNA, 19 nt, Artificial Sequence
  Description of Artificial Sequence: Synthetic oligonucleotide
  Sense strand starting at position 2777 of SEQ ID NO: 1242651
uguaguugguguuaacaag

SEQ ID NO: 1363285 - RNA, 19 nt, Artificial Sequence
  Description of Artificial Sequence: Synthetic oligonucleotide
  Antisense strand to SEQ ID NO: 1363284
cuuguuaacaccaacuaca

SEQ ID NO: 1363286 - RNA, 19 nt, Artificial Sequence
  Description of Artificial Sequence: Synthetic oligonucleotide
  Sense strand starting at position 2813 of SEQ ID NO: 1242651
caagaaaucccaggcggua

SEQ ID NO: 1363287 - RNA, 19 nt, Artificial Sequence
  Description of Artificial Sequence: Synthetic oligonucleotide
  Antisense strand to SEQ ID NO: 1363286
uaccgccugggauuucuug

SEQ ID NO: 1363288 - RNA, 19 nt, Artificial Sequence
  Description of Artificial Sequence: Synthetic oligonucleotide
  Sense strand starting at position 2859 of SEQ ID NO: 1242651
gcuguuuaaagaugggaca

SEQ ID NO: 1363289 - RNA, 19 nt, Artificial Sequence
  Description of Artificial Sequence: Synthetic oligonucleotide
  Antisense strand to SEQ ID NO: 1363288
ugucccaucuuuaaacagc

SEQ ID NO: 1363290 - RNA, 19 nt, Artificial Sequence
  Description of Artificial Sequence: Synthetic oligonucleotide
  Sense strand starting at position 2941 of SEQ ID NO: 1242651
gggaguugucagggagguu

SEQ ID NO: 1363291 - RNA, 19 nt, Artificial Sequence
  Description of Artificial Sequence: Synthetic oligonucleotide
  Antisense strand to SEQ ID NO: 1363290
aaccucccugacaacuccc

SEQ ID NO: 1363292 - RNA, 19 nt, Artificial Sequence
  Description of Artificial Sequence: Synthetic oligonucleotide
  Sense strand starting at position 2942 of SEQ ID NO: 1242651
ggaguugucagggagguug

SEQ ID NO: 1363293 - RNA, 19 nt, Artificial Sequence
  Description of Artificial Sequence: Synthetic oligonucleotide
  Antisense strand to SEQ ID NO: 1363292
caaccucccugacaacucc

SEQ ID NO: 1363294 - RNA, 19 nt, Artificial Sequence
  Description of Artificial Sequence: Synthetic oligonucleotide
  Sense strand starting at position 3040 of SEQ ID NO: 1242651
ccuggagauucucugugaa

SEQ ID NO: 1363295 - RNA, 19 nt, Artificial Sequence
  Description of Artificial Sequence: Synthetic oligonucleotide
  Antisense strand to SEQ ID NO: 1363294
uucacagagaaucuccagg

SEQ ID NO: 1363296 - RNA, 19 nt, Artificial Sequence
  Description of Artificial Sequence: Synthetic oligonucleotide
  Sense strand starting at position 3042 of SEQ ID NO: 1242651
uggagauucucugugaagg

SEQ ID NO: 1363297 - RNA, 19 nt, Artificial Sequence
  Description of Artificial Sequence: Synthetic oligonucleotide
  Antisense strand to SEQ ID NO: 1363296
ccuucacagagaaucucca

SEQ ID NO: 1363298 - RNA, 19 nt, Artificial Sequence
  Description of Artificial Sequence: Synthetic oligonucleotide
  Sense strand starting at position 3043 of SEQ ID NO: 1242651
ggagauucucugugaagga

SEQ ID NO: 1363299 - RNA, 19 nt, Artificial Sequence
  Description of Artificial Sequence: Synthetic oligonucleotide
  Antisense strand to SEQ ID NO: 1363298
uccuucacagagaaucucc

SEQ ID NO: 1363300 - RNA, 19 nt, Artificial Sequence
  Description of Artificial Sequence: Synthetic oligonucleotide
  Sense strand starting at position 3044 of SEQ ID NO: 1242651
gagauucucugugaaggag

SEQ ID NO: 1363301 - RNA, 19 nt, Artificial Sequence
  Description of Artificial Sequence: Synthetic oligonucleotide
  Antisense strand to SEQ ID NO: 1363300
cuccuucacagagaaucuc

SEQ ID NO: 1363302 - RNA, 19 nt, Artificial Sequence
  Description of Artificial Sequence: Synthetic oligonucleotide
  Sense strand starting at position 3069 of SEQ ID NO: 1242651
gggaaaugcucagucagca

SEQ ID NO: 1363303 - RNA, 19 nt, Artificial Sequence
  Description of Artificial Sequence: Synthetic oligonucleotide
  Antisense strand to SEQ ID NO: 1363302
ugcugacugagcauuuccc

SEQ ID NO: 1363304 - RNA, 19 nt, Artificial Sequence
  Description of Artificial Sequence: Synthetic oligonucleotide
  Sense strand starting at position 3193 of SEQ ID NO: 1242651
caugcagaguugggauuaa

SEQ ID NO: 1363305 - RNA, 19 nt, Artificial Sequence
  Description of Artificial Sequence: Synthetic oligonucleotide
  Antisense strand to SEQ ID NO: 1363304
uuaaucccaacucugcaug

SEQ ID NO: 1363306 - RNA, 19 nt, Artificial Sequence
  Description of Artificial Sequence: Synthetic oligonucleotide
  Sense strand starting at position 87 of SEQ ID NO: 1242652
accuguuugccugcuugua

SEQ ID NO: 1363307 - RNA, 19 nt, Artificial Sequence
  Description of Artificial Sequence: Synthetic oligonucleotide
  Antisense strand to SEQ ID NO: 1363306
uacaagcaggcaaacaggu

SEQ ID NO: 1363308 - RNA, 19 nt, Artificial Sequence
  Description of Artificial Sequence: Synthetic oligonucleotide
  Sense strand starting at position 88 of SEQ ID NO: 1242652
ccuguuugccugcuuguaa

SEQ ID NO: 1363309 - RNA, 19 nt, Artificial Sequence
  Description of Artificial Sequence: Synthetic oligonucleotide
  Antisense strand to SEQ ID NO: 1363308
uuacaagcaggcaaacagg

SEQ ID NO: 1363310 - RNA, 19 nt, Artificial Sequence
  Description of Artificial Sequence: Synthetic oligonucleotide
  Sense strand starting at position 91 of SEQ ID NO: 1242652
guuugccugcuuguaauau

SEQ ID NO: 1363311 - RNA, 19 nt, Artificial Sequence
  Description of Artificial Sequence: Synthetic oligonucleotide
  Antisense strand to SEQ ID NO: 1363310
auauuacaagcaggcaaac

SEQ ID NO: 1363312 - RNA, 19 nt, Artificial Sequence
  Description of Artificial Sequence: Synthetic oligonucleotide
  Sense strand starting at position 208 of SEQ ID NO: 1242652
agucaaauguuucucaugu

SEQ ID NO: 1363313 - RNA, 19 nt, Artificial Sequence
  Description of Artificial Sequence: Synthetic oligonucleotide
  Antisense strand to SEQ ID NO: 1363312
acaugagaaacauuugacu

SEQ ID NO: 1363314 - RNA, 19 nt, Artificial Sequence
  Description of Artificial Sequence: Synthetic oligonucleotide
  Sense strand starting at position 209 of SEQ ID NO: 1242652
gucaaauguuucucauguu

SEQ ID NO: 1363315 - RNA, 19 nt, Artificial Sequence
  Description of Artificial Sequence: Synthetic oligonucleotide
  Antisense strand to SEQ ID NO: 1363314
aacaugagaaacauuugac

SEQ ID NO: 1363316 - RNA, 19 nt, Artificial Sequence
  Description of Artificial Sequence: Synthetic oligonucleotide
  Sense strand starting at position 412 of SEQ ID NO: 1242652
gcgugccaccacuaauuua

SEQ ID NO: 1363317 - RNA, 19 nt, Artificial Sequence
  Description of Artificial Sequence: Synthetic oligonucleotide
  Antisense strand to SEQ ID NO: 1363316
uaaauuagugguggcacgc

SEQ ID NO: 1363318 - RNA, 19 nt, Artificial Sequence
  Description of Artificial Sequence: Synthetic oligonucleotide
  Sense strand starting at position 639 of SEQ ID NO: 1242652
ugcugauguagcgugucaa

SEQ ID NO: 1363319 - RNA, 19 nt, Artificial Sequence
  Description of Artificial Sequence: Synthetic oligonucleotide
  Antisense strand to SEQ ID NO: 1363318
uugacacgcuacaucagca

SEQ ID NO: 1363320 - RNA, 19 nt, Artificial Sequence
  Description of Artificial Sequence: Synthetic oligonucleotide
  Sense strand starting at position 667 of SEQ ID NO: 1242652
cucuuaaguguugggcaaa

SEQ ID NO: 1363321 - RNA, 19 nt, Artificial Sequence
  Description of Artificial Sequence: Synthetic oligonucleotide
  Antisense strand to SEQ ID NO: 1363320
uuugcccaacacuuaagag

SEQ ID NO: 1363322 - RNA, 19 nt, Artificial Sequence
  Description of Artificial Sequence: Synthetic oligonucleotide
  Sense strand starting at position 670 of SEQ ID NO: 1242652
uuaaguguugggcaaauga

SEQ ID NO: 1363323 - RNA, 19 nt, Artificial Sequence
  Description of Artificial Sequence: Synthetic oligonucleotide
  Antisense strand to SEQ ID NO: 1363322
ucauuugcccaacacuuaa

SEQ ID NO: 1363324 - RNA, 19 nt, Artificial Sequence
  Description of Artificial Sequence: Synthetic oligonucleotide
  Sense strand starting at position 732 of SEQ ID NO: 1242652
aagguuguaccugauuauu

SEQ ID NO: 1363325 - RNA, 19 nt, Artificial Sequence
  Description of Artificial Sequence: Synthetic oligonucleotide
  Antisense strand to SEQ ID NO: 1363324
aauaaucagguacaaccuu

SEQ ID NO: 1363326 - RNA, 19 nt, Artificial Sequence
  Description of Artificial Sequence: Synthetic oligonucleotide
  Sense strand starting at position 741 of SEQ ID NO: 1242652
ccugauuauuucuaagguc

SEQ ID NO: 1363327 - RNA, 19 nt, Artificial Sequence
  Description of Artificial Sequence: Synthetic oligonucleotide
  Antisense strand to SEQ ID NO: 1363326
gaccuuagaaauaaucagg

SEQ ID NO: 1363328 - RNA, 19 nt, Artificial Sequence
  Description of Artificial Sequence: Synthetic oligonucleotide
  Sense strand starting at position 814 of SEQ ID NO: 1242652
uuaucucgcuuucugagau

SEQ ID NO: 1363329 - RNA, 19 nt, Artificial Sequence
  Description of Artificial Sequence: Synthetic oligonucleotide
  Antisense strand to SEQ ID NO: 1363328
aucucagaaagcgagauaa

SEQ ID NO: 1363330 - RNA, 19 nt, Artificial Sequence
  Description of Artificial Sequence: Synthetic oligonucleotide
  Sense strand starting at position 820 of SEQ ID NO: 1242652
cgcuuucugagaugcagga

SEQ ID NO: 1363331 - RNA, 19 nt, Artificial Sequence
  Description of Artificial Sequence: Synthetic oligonucleotide
  Antisense strand to SEQ ID NO: 1363330
uccugcaucucagaaagcg

SEQ ID NO: 1363332 - RNA, 19 nt, Artificial Sequence
  Description of Artificial Sequence: Synthetic oligonucleotide
  Sense strand starting at position 1101 of SEQ ID NO: 1242652
cuuggugccucauccgaau

SEQ ID NO: 1363333 - RNA, 19 nt, Artificial Sequence
  Description of Artificial Sequence: Synthetic oligonucleotide
  Antisense strand to SEQ ID NO: 1363332
auucggaugaggcaccaag

SEQ ID NO: 1363334 - RNA, 19 nt, Artificial Sequence
  Description of Artificial Sequence: Synthetic oligonucleotide
  Sense strand starting at position 1114 of SEQ ID NO: 1242652
ccgaaugccuucuuuagac

SEQ ID NO: 1363335 - RNA, 19 nt, Artificial Sequence
  Description of Artificial Sequence: Synthetic oligonucleotide
  Antisense strand to SEQ ID NO: 1363334
gucuaaagaaggcauucgg

SEQ ID NO: 1363336 - RNA, 19 nt, Artificial Sequence
  Description of Artificial Sequence: Synthetic oligonucleotide
  Sense strand starting at position 1172 of SEQ ID NO: 1242652
ccuugaggccaaggaauaa

SEQ ID NO: 1363337 - RNA, 19 nt, Artificial Sequence
  Description of Artificial Sequence: Synthetic oligonucleotide
  Antisense strand to SEQ ID NO: 1363336
uuauuccuuggccucaagg

SEQ ID NO: 1363338 - RNA, 19 nt, Artificial Sequence
  Description of Artificial Sequence: Synthetic oligonucleotide
  Sense strand starting at position 1195 of SEQ ID NO: 1242652
gagggcugugccuaggaua

SEQ ID NO: 1363339 - RNA, 19 nt, Artificial Sequence
  Description of Artificial Sequence: Synthetic oligonucleotide
  Antisense strand to SEQ ID NO: 1363338
uauccuaggcacagcccuc

SEQ ID NO: 1363340 - RNA, 19 nt, Artificial Sequence
  Description of Artificial Sequence: Synthetic oligonucleotide
  Sense strand starting at position 1291 of SEQ ID NO: 1242652
gccagaucucccgacucgu

SEQ ID NO: 1363341 - RNA, 19 nt, Artificial Sequence
  Description of Artificial Sequence: Synthetic oligonucleotide
  Antisense strand to SEQ ID NO: 1363340
acgagucgggagaucuggc

SEQ ID NO: 1363342 - RNA, 19 nt, Artificial Sequence
  Description of Artificial Sequence: Synthetic oligonucleotide
  Sense strand starting at position 1301 of SEQ ID NO: 1242652
ccgacucguccagacuuua

SEQ ID NO: 1363343 - RNA, 19 nt, Artificial Sequence
  Description of Artificial Sequence: Synthetic oligonucleotide
  Antisense strand to SEQ ID NO: 1363342
uaaagucuggacgagucgg

SEQ ID NO: 1363344 - RNA, 19 nt, Artificial Sequence
  Description of Artificial Sequence: Synthetic oligonucleotide
  Sense strand starting at position 1992 of SEQ ID NO: 1242652
uaguuucuaugagucauga

SEQ ID NO: 1363345 - RNA, 19 nt, Artificial Sequence
  Description of Artificial Sequence: Synthetic oligonucleotide
  Antisense strand to SEQ ID NO: 1363344
ucaugacucauagaaacua

SEQ ID NO: 1363346 - RNA, 19 nt, Artificial Sequence
  Description of Artificial Sequence: Synthetic oligonucleotide
  Sense strand starting at position 2000 of SEQ ID NO: 1242652
augagucaugauuguaaag

SEQ ID NO: 1363347 - RNA, 19 nt, Artificial Sequence
  Description of Artificial Sequence: Synthetic oligonucleotide
  Antisense strand to SEQ ID NO: 1363346
cuuuacaaucaugacucau

SEQ ID NO: 1363348 - RNA, 19 nt, Artificial Sequence
  Description of Artificial Sequence: Synthetic oligonucleotide
  Sense strand starting at position 2295 of SEQ ID NO: 1242652
agggcugcccuagaucuaa

SEQ ID NO: 1363349 - RNA, 19 nt, Artificial Sequence
  Description of Artificial Sequence: Synthetic oligonucleotide
  Antisense strand to SEQ ID NO: 1363348
uuagaucuagggcagcccu

SEQ ID NO: 1363350 - RNA, 19 nt, Artificial Sequence
  Description of Artificial Sequence: Synthetic oligonucleotide
  Sense strand starting at position 2352 of SEQ ID NO: 1242652
guucgcauuucguccaacu

SEQ ID NO: 1363351 - RNA, 19 nt, Artificial Sequence
  Description of Artificial Sequence: Synthetic oligonucleotide
  Antisense strand to SEQ ID NO: 1363350
aguuggacgaaaugcgaac

SEQ ID NO: 1363352 - RNA, 19 nt, Artificial Sequence
  Description of Artificial Sequence: Synthetic oligonucleotide
  Sense strand starting at position 2375 of SEQ ID NO: 1242652
aaagcaguguuucuaggaa

SEQ ID NO: 1363353 - RNA, 19 nt, Artificial Sequence
  Description of Artificial Sequence: Synthetic oligonucleotide
  Antisense strand to SEQ ID NO: 1363352
uuccuagaaacacugcuuu

SEQ ID NO: 1363354 - RNA, 19 nt, Artificial Sequence
  Description of Artificial Sequence: Synthetic oligonucleotide
  Sense strand starting at position 2459 of SEQ ID NO: 1242652
ggccuaugaucccagaacu

SEQ ID NO: 1363355 - RNA, 19 nt, Artificial Sequence
  Description of Artificial Sequence: Synthetic oligonucleotide
  Antisense strand to SEQ ID NO: 1363354
aguucugggaucauaggcc

SEQ ID NO: 1363356 - RNA, 19 nt, Artificial Sequence
  Description of Artificial Sequence: Synthetic oligonucleotide
  Sense strand starting at position 2765 of SEQ ID NO: 1242652
uuagauauccauuaugguc

SEQ ID NO: 1363357 - RNA, 19 nt, Artificial Sequence
  Description of Artificial Sequence: Synthetic oligonucleotide
  Antisense strand to SEQ ID NO: 1363356
gaccauaauggauaucuaa

SEQ ID NO: 1363358 - RNA, 19 nt, Artificial Sequence
  Description of Artificial Sequence: Synthetic oligonucleotide
  Sense strand starting at position 2773 of SEQ ID NO: 1242652
ccauuauggucccuuagag

SEQ ID NO: 1363359 - RNA, 19 nt, Artificial Sequence
  Description of Artificial Sequence: Synthetic oligonucleotide
  Antisense strand to SEQ ID NO: 1363358
cucuaagggaccauaaugg

SEQ ID NO: 1363360 - RNA, 19 nt, Artificial Sequence
  Description of Artificial Sequence: Synthetic oligonucleotide
  Sense strand starting at position 2777 of SEQ ID NO: 1242652
uauggucccuuagagagaa

SEQ ID NO: 1363361 - RNA, 19 nt, Artificial Sequence
  Description of Artificial Sequence: Synthetic oligonucleotide
  Antisense strand to SEQ ID NO: 1363360
uucucucuaagggaccaua

SEQ ID NO: 1363362 - RNA, 19 nt, Artificial Sequence
  Description of Artificial Sequence: Synthetic oligonucleotide
  Sense strand starting at position 2790 of SEQ ID NO: 1242652
agagaaagcauucgauguu

SEQ ID NO: 1363363 - RNA, 19 nt, Artificial Sequence
  Description of Artificial Sequence: Synthetic oligonucleotide
  Antisense strand to SEQ ID NO: 1363362
aacaucgaaugcuuucucu

SEQ ID NO: 1363364 - RNA, 19 nt, Artificial Sequence
  Description of Artificial Sequence: Synthetic oligonucleotide
  Sense strand starting at position 2916 of SEQ ID NO: 1242652
agcucaguaugaguaggaa

SEQ ID NO: 1363365 - RNA, 19 nt, Artificial Sequence
  Description of Artificial Sequence: Synthetic oligonucleotide
  Antisense strand to SEQ ID NO: 1363364
uuccuacucauacugagcu

SEQ ID NO: 1363366 - RNA, 19 nt, Artificial Sequence
  Description of Artificial Sequence: Synthetic oligonucleotide
  Sense strand starting at position 2919 of SEQ ID NO: 1242652
ucaguaugaguaggaaagu

SEQ ID NO: 1363367 - RNA, 19 nt, Artificial Sequence
  Description of Artificial Sequence: Synthetic oligonucleotide
  Antisense strand to SEQ ID NO: 1363366
acuuuccuacucauacuga

SEQ ID NO: 1363368 - RNA, 19 nt, Artificial Sequence
  Description of Artificial Sequence: Synthetic oligonucleotide
  Sense strand starting at position 2920 of SEQ ID NO: 1242652
caguaugaguaggaaagua

SEQ ID NO: 1363369 - RNA, 19 nt, Artificial Sequence
  Description of Artificial Sequence: Synthetic oligonucleotide
  Antisense strand to SEQ ID NO: 1363368
uacuuuccuacucauacug

SEQ ID NO: 1363370 - RNA, 19 nt, Artificial Sequence
  Description of Artificial Sequence: Synthetic oligonucleotide
  Sense strand starting at position 3095 of SEQ ID NO: 1242652
cugcaugauuaggcaguaa

SEQ ID NO: 1363371 - RNA, 19 nt, Artificial Sequence
  Description of Artificial Sequence: Synthetic oligonucleotide
  Antisense strand to SEQ ID NO: 1363370
uuacugccuaaucaugcag

SEQ ID NO: 1363372 - RNA, 19 nt, Artificial Sequence
  Description of Artificial Sequence: Synthetic oligonucleotide
  Sense strand starting at position 3126 of SEQ ID NO: 1242652
ucuuaaaguugugcaaauu

SEQ ID NO: 1363373 - RNA, 19 nt, Artificial Sequence
  Description of Artificial Sequence: Synthetic oligonucleotide
  Antisense strand to SEQ ID NO: 1363372
aauuugcacaacuuuaaga

SEQ ID NO: 1363374 - RNA, 19 nt, Artificial Sequence
  Description of Artificial Sequence: Synthetic oligonucleotide
  Sense strand starting at position 3127 of SEQ ID NO: 1242652
cuuaaaguugugcaaauua

SEQ ID NO: 1363375 - RNA, 19 nt, Artificial Sequence
  Description of Artificial Sequence: Synthetic oligonucleotide
  Antisense strand to SEQ ID NO: 1363374
uaauuugcacaacuuuaag

SEQ ID NO: 1363376 - RNA, 19 nt, Artificial Sequence
  Description of Artificial Sequence: Synthetic oligonucleotide
  Sense strand starting at position 3146 of SEQ ID NO: 1242652
acagcuuugaugugagcuu

SEQ ID NO: 1363377 - RNA, 19 nt, Artificial Sequence
  Description of Artificial Sequence: Synthetic oligonucleotide
  Antisense strand to SEQ ID NO: 1363376
aagcucacaucaaagcugu

SEQ ID NO: 1363378 - RNA, 19 nt, Artificial Sequence
  Description of Artificial Sequence: Synthetic oligonucleotide
  Sense strand starting at position 3203 of SEQ ID NO: 1242652
gcaggcuucuaucucuuaa

SEQ ID NO: 1363379 - RNA, 19 nt, Artificial Sequence
  Description of Artificial Sequence: Synthetic oligonucleotide
  Antisense strand to SEQ ID NO: 1363378
uuaagagauagaagccugc

SEQ ID NO: 1363380 - RNA, 19 nt, Artificial Sequence
  Description of Artificial Sequence: Synthetic oligonucleotide
  Sense strand starting at position 3231 of SEQ ID NO: 1242652
acauuuccagccugaguuu

SEQ ID NO: 1363381 - RNA, 19 nt, Artificial Sequence
  Description of Artificial Sequence: Synthetic oligonucleotide
  Antisense strand to SEQ ID NO: 1363380
aaacucaggcuggaaaugu

SEQ ID NO: 1363382 - RNA, 19 nt, Artificial Sequence
  Description of Artificial Sequence: Synthetic oligonucleotide
  Sense strand starting at position 3648 of SEQ ID NO: 1242652
uggcuaauaucgguuucuu

SEQ ID NO: 1363383 - RNA, 19 nt, Artificial Sequence
  Description of Artificial Sequence: Synthetic oligonucleotide
  Antisense strand to SEQ ID NO: 1363382
aagaaaccgauauuagcca

SEQ ID NO: 1363384 - RNA, 19 nt, Artificial Sequence
  Description of Artificial Sequence: Synthetic oligonucleotide
  Sense strand starting at position 3955 of SEQ ID NO: 1242652
cggccuauuucuuaauagu

SEQ ID NO: 1363385 - RNA, 19 nt, Artificial Sequence
  Description of Artificial Sequence: Synthetic oligonucleotide
  Antisense strand to SEQ ID NO: 1363384
acuauuaagaaauaggccg

SEQ ID NO: 1363386 - RNA, 19 nt, Artificial Sequence
  Description of Artificial Sequence: Synthetic oligonucleotide
  Sense strand starting at position 416 of SEQ ID NO: 1242653
ggacauauguagccacuaa

SEQ ID NO: 1363387 - RNA, 19 nt, Artificial Sequence
  Description of Artificial Sequence: Synthetic oligonucleotide
  Antisense strand to SEQ ID NO: 1363386
uuaguggcuacauaugucc

SEQ ID NO: 1363388 - RNA, 19 nt, Artificial Sequence
  Description of Artificial Sequence: Synthetic oligonucleotide
  Sense strand starting at position 420 of SEQ ID NO: 1242653
auauguagccacuaagcau

SEQ ID NO: 1363389 - RNA, 19 nt, Artificial Sequence
  Description of Artificial Sequence: Synthetic oligonucleotide
  Antisense strand to SEQ ID NO: 1363388
augcuuaguggcuacauau

SEQ ID NO: 1363390 - RNA, 19 nt, Artificial Sequence
  Description of Artificial Sequence: Synthetic oligonucleotide
  Sense strand starting at position 496 of SEQ ID NO: 1242653
agacauaagucuuccagag

SEQ ID NO: 1363391 - RNA, 19 nt, Artificial Sequence
  Description of Artificial Sequence: Synthetic oligonucleotide
  Antisense strand to SEQ ID NO: 1363390
cucuggaagacuuaugucu

SEQ ID NO: 1363392 - RNA, 19 nt, Artificial Sequence
  Description of Artificial Sequence: Synthetic oligonucleotide
  Sense strand starting at position 500 of SEQ ID NO: 1242653
auaagucuuccagagucaa

SEQ ID NO: 1363393 - RNA, 19 nt, Artificial Sequence
  Description of Artificial Sequence: Synthetic oligonucleotide
  Antisense strand to SEQ ID NO: 1363392
uugacucuggaagacuuau

SEQ ID NO: 1363394 - RNA, 19 nt, Artificial Sequence
  Description of Artificial Sequence: Synthetic oligonucleotide
  Sense strand starting at position 504 of SEQ ID NO: 1242653
gucuuccagagucaaggau

SEQ ID NO: 1363395 - RNA, 19 nt, Artificial Sequence
  Description of Artificial Sequence: Synthetic oligonucleotide
  Antisense strand to SEQ ID NO: 1363394
auccuugacucuggaagac

SEQ ID NO: 1363396 - RNA, 19 nt, Artificial Sequence
  Description of Artificial Sequence: Synthetic oligonucleotide
  Sense strand starting at position 565 of SEQ ID NO: 1242653
acacuagagugacuaaagu

SEQ ID NO: 1363397 - RNA, 19 nt, Artificial Sequence
  Description of Artificial Sequence: Synthetic oligonucleotide
  Antisense strand to SEQ ID NO: 1363396
acuuuagucacucuagugu

SEQ ID NO: 1363398 - RNA, 19 nt, Artificial Sequence
  Description of Artificial Sequence: Synthetic oligonucleotide
  Sense strand starting at position 629 of SEQ ID NO: 1242653
uuucuuagugcugggacau

SEQ ID NO: 1363399 - RNA, 19 nt, Artificial Sequence
  Description of Artificial Sequence: Synthetic oligonucleotide
  Antisense strand to SEQ ID NO: 1363398
augucccagcacuaagaaa

SEQ ID NO: 1363400 - RNA, 19 nt, Artificial Sequence
  Description of Artificial Sequence: Synthetic oligonucleotide
  Sense strand starting at position 630 of SEQ ID NO: 1242653
uucuuagugcugggacauc

SEQ ID NO: 1363401 - RNA, 19 nt, Artificial Sequence
  Description of Artificial Sequence: Synthetic oligonucleotide
  Antisense strand to SEQ ID NO: 1363400
gaugucccagcacuaagaa

SEQ ID NO: 1363402 - RNA, 19 nt, Artificial Sequence
  Description of Artificial Sequence: Synthetic oligonucleotide
  Sense strand starting at position 699 of SEQ ID NO: 1242653
aguagugaugcuggaaaug

SEQ ID NO: 1363403 - RNA, 19 nt, Artificial Sequence
  Description of Artificial Sequence: Synthetic oligonucleotide
  Antisense strand to SEQ ID NO: 1363402
cauuuccagcaucacuacu

SEQ ID NO: 1363404 - RNA, 19 nt, Artificial Sequence
  Description of Artificial Sequence: Synthetic oligonucleotide
  Sense strand starting at position 838 of SEQ ID NO: 1242653
gaggucuggguuuaggauu

SEQ ID NO: 1363405 - RNA, 19 nt, Artificial Sequence
  Description of Artificial Sequence: Synthetic oligonucleotide
  Antisense strand to SEQ ID NO: 1363404
aauccuaaacccagaccuc

SEQ ID NO: 1363406 - RNA, 19 nt, Artificial Sequence
  Description of Artificial Sequence: Synthetic oligonucleotide
  Sense strand starting at position 1210 of SEQ ID NO: 1242653
gcaagucagcuguuccuuu

SEQ ID NO: 1363407 - RNA, 19 nt, Artificial Sequence
  Description of Artificial Sequence: Synthetic oligonucleotide
  Antisense strand to SEQ ID NO: 1363406
aaaggaacagcugacuugc

SEQ ID NO: 1363408 - RNA, 19 nt, Artificial Sequence
  Description of Artificial Sequence: Synthetic oligonucleotide
  Sense strand starting at position 1214 of SEQ ID NO: 1242653
gucagcuguuccuuuaaua

SEQ ID NO: 1363409 - RNA, 19 nt, Artificial Sequence
  Description of Artificial Sequence: Synthetic oligonucleotide
  Antisense strand to SEQ ID NO: 1363408
uauuaaaggaacagcugac

SEQ ID NO: 1363410 - RNA, 19 nt, Artificial Sequence
  Description of Artificial Sequence: Synthetic oligonucleotide
  Sense strand starting at position 1268 of SEQ ID NO: 1242653
aucugaucauggguuccaa

SEQ ID NO: 1363411 - RNA, 19 nt, Artificial Sequence
  Description of Artificial Sequence: Synthetic oligonucleotide
  Antisense strand to SEQ ID NO: 1363410
uuggaacccaugaucagau

SEQ ID NO: 1363412 - RNA, 19 nt, Artificial Sequence
  Description of Artificial Sequence: Synthetic oligonucleotide
  Sense strand starting at position 1392 of SEQ ID NO: 1242653
agccauuauuuagucugua

SEQ ID NO: 1363413 - RNA, 19 nt, Artificial Sequence
  Description of Artificial Sequence: Synthetic oligonucleotide
  Antisense strand to SEQ ID NO: 1363412
uacagacuaaauaauggcu

SEQ ID NO: 1363414 - RNA, 19 nt, Artificial Sequence
  Description of Artificial Sequence: Synthetic oligonucleotide
  Sense strand starting at position 1393 of SEQ ID NO: 1242653
gccauuauuuagucuguaa

SEQ ID NO: 1363415 - RNA, 19 nt, Artificial Sequence
  Description of Artificial Sequence: Synthetic oligonucleotide
  Antisense strand to SEQ ID NO: 1363414
uuacagacuaaauaauggc

SEQ ID NO: 1363416 - RNA, 19 nt, Artificial Sequence
  Description of Artificial Sequence: Synthetic oligonucleotide
  Sense strand starting at position 1513 of SEQ ID NO: 1242653
gggagagcaagcuauuauu

SEQ ID NO: 1363417 - RNA, 19 nt, Artificial Sequence
  Description of Artificial Sequence: Synthetic oligonucleotide
  Antisense strand to SEQ ID NO: 1363416
aauaauagcuugcucuccc

SEQ ID NO: 1363418 - RNA, 19 nt, Artificial Sequence
  Description of Artificial Sequence: Synthetic oligonucleotide
  Sense strand starting at position 1522 of SEQ ID NO: 1242653
agcuauuauugucuuuacu

SEQ ID NO: 1363419 - RNA, 19 nt, Artificial Sequence
  Description of Artificial Sequence: Synthetic oligonucleotide
  Antisense strand to SEQ ID NO: 1363418
aguaaagacaauaauagcu

SEQ ID NO: 1363420 - RNA, 19 nt, Artificial Sequence
  Description of Artificial Sequence: Synthetic oligonucleotide
  Sense strand starting at position 1766 of SEQ ID NO: 1242653
aaacucacccagcgugaau

SEQ ID NO: 1363421 - RNA, 19 nt, Artificial Sequence
  Description of Artificial Sequence: Synthetic oligonucleotide
  Antisense strand to SEQ ID NO: 1363420
auucacgcugggugaguuu

SEQ ID NO: 1363422 - RNA, 19 nt, Artificial Sequence
  Description of Artificial Sequence: Synthetic oligonucleotide
  Sense strand starting at position 2218 of SEQ ID NO: 1242653
ggcuguaacguugggaacu

SEQ ID NO: 1363423 - RNA, 19 nt, Artificial Sequence
  Description of Artificial Sequence: Synthetic oligonucleotide
  Antisense strand to SEQ ID NO: 1363422
aguucccaacguuacagcc

SEQ ID NO: 1363424 - RNA, 19 nt, Artificial Sequence
  Description of Artificial Sequence: Synthetic oligonucleotide
  Sense strand starting at position 2779 of SEQ ID NO: 1242653
gcgcuuucugugccacagu

SEQ ID NO: 1363425 - RNA, 19 nt, Artificial Sequence
  Description of Artificial Sequence: Synthetic oligonucleotide
  Antisense strand to SEQ ID NO: 1363424
acuguggcacagaaagcgc

SEQ ID NO: 1363426 - RNA, 19 nt, Artificial Sequence
  Description of Artificial Sequence: Synthetic oligonucleotide
  Sense strand starting at position 2798 of SEQ ID NO: 1242653
uuuccuaaucugcaaggga

SEQ ID NO: 1363427 - RNA, 19 nt, Artificial Sequence
  Description of Artificial Sequence: Synthetic oligonucleotide
  Antisense strand to SEQ ID NO: 1363426
ucccuugcagauuaggaaa

SEQ ID NO: 1363428 - RNA, 19 nt, Artificial Sequence
  Description of Artificial Sequence: Synthetic oligonucleotide
  Sense strand starting at position 2817 of SEQ ID NO: 1242653
caggaagguuccucuagca

SEQ ID NO: 1363429 - RNA, 19 nt, Artificial Sequence
  Description of Artificial Sequence: Synthetic oligonucleotide
  Antisense strand to SEQ ID NO: 1363428
ugcuagaggaaccuuccug

SEQ ID NO: 1363430 - RNA, 19 nt, Artificial Sequence
  Description of Artificial Sequence: Synthetic oligonucleotide
  Sense strand starting at position 2959 of SEQ ID NO: 1242653
cgagauuauaccgacuuua

SEQ ID NO: 1363431 - RNA, 19 nt, Artificial Sequence
  Description of Artificial Sequence: Synthetic oligonucleotide
  Antisense strand to SEQ ID NO: 1363430
uaaagucgguauaaucucg

SEQ ID NO: 1363432 - RNA, 19 nt, Artificial Sequence
  Description of Artificial Sequence: Synthetic oligonucleotide
  Sense strand starting at position 2970 of SEQ ID NO: 1242653
cgacuuuacauaggcgaau

SEQ ID NO: 1363433 - RNA, 19 nt, Artificial Sequence
  Description of Artificial Sequence: Synthetic oligonucleotide
  Antisense strand to SEQ ID NO: 1363432
auucgccuauguaaagucg

SEQ ID NO: 1363434 - RNA, 19 nt, Artificial Sequence
  Description of Artificial Sequence: Synthetic oligonucleotide
  Sense strand starting at position 2971 of SEQ ID NO: 1242653
gacuuuacauaggcgaaua

SEQ ID NO: 1363435 - RNA, 19 nt, Artificial Sequence
  Description of Artificial Sequence: Synthetic oligonucleotide
  Antisense strand to SEQ ID NO: 1363434
uauucgccuauguaaaguc

SEQ ID NO: 1363436 - RNA, 19 nt, Artificial Sequence
  Description of Artificial Sequence: Synthetic oligonucleotide
  Sense strand starting at position 3024 of SEQ ID NO: 1242653
cuugguucuaggcgcagaa

SEQ ID NO: 1363437 - RNA, 19 nt, Artificial Sequence
  Description of Artificial Sequence: Synthetic oligonucleotide
  Antisense strand to SEQ ID NO: 1363436
uucugcgccuagaaccaag

SEQ ID NO: 1363438 - RNA, 19 nt, Artificial Sequence
  Description of Artificial Sequence: Synthetic oligonucleotide
  Sense strand starting at position 3111 of SEQ ID NO: 1242653
uucucaaacuggcuugaua

SEQ ID NO: 1363439 - RNA, 19 nt, Artificial Sequence
  Description of Artificial Sequence: Synthetic oligonucleotide
  Antisense strand to SEQ ID NO: 1363438
uaucaagccaguuugagaa

SEQ ID NO: 1363440 - RNA, 19 nt, Artificial Sequence
  Description of Artificial Sequence: Synthetic oligonucleotide
  Sense strand starting at position 3113 of SEQ ID NO: 1242653
cucaaacuggcuugauacu

SEQ ID NO: 1363441 - RNA, 19 nt, Artificial Sequence
  Description of Artificial Sequence: Synthetic oligonucleotide
  Antisense strand to SEQ ID NO: 1363440
aguaucaagccaguuugag

SEQ ID NO: 1363442 - RNA, 19 nt, Artificial Sequence
  Description of Artificial Sequence: Synthetic oligonucleotide
  Sense strand starting at position 3114 of SEQ ID NO: 1242653
ucaaacuggcuugauacua

SEQ ID NO: 1363443 - RNA, 19 nt, Artificial Sequence
  Description of Artificial Sequence: Synthetic oligonucleotide
  Antisense strand to SEQ ID NO: 1363442
uaguaucaagccaguuuga

SEQ ID NO: 1363444 - RNA, 19 nt, Artificial Sequence
  Description of Artificial Sequence: Synthetic oligonucleotide
  Sense strand starting at position 3158 of SEQ ID NO: 1242653
auuugaagucgcuguuuga

SEQ ID NO: 1363445 - RNA, 19 nt, Artificial Sequence
  Description of Artificial Sequence: Synthetic oligonucleotide
  Antisense strand to SEQ ID NO: 1363444
ucaaacagcgacuucaaau

SEQ ID NO: 1363446 - RNA, 19 nt, Artificial Sequence
  Description of Artificial Sequence: Synthetic oligonucleotide
  Sense strand starting at position 3161 of SEQ ID NO: 1242653
ugaagucgcuguuugauua

SEQ ID NO: 1363447 - RNA, 19 nt, Artificial Sequence
  Description of Artificial Sequence: Synthetic oligonucleotide
  Antisense strand to SEQ ID NO: 1363446
uaaucaaacagcgacuuca

SEQ ID NO: 1363448 - RNA, 19 nt, Artificial Sequence
  Description of Artificial Sequence: Synthetic oligonucleotide
  Sense strand starting at position 3162 of SEQ ID NO: 1242653
gaagucgcuguuugauuaa

SEQ ID NO: 1363449 - RNA, 19 nt, Artificial Sequence
  Description of Artificial Sequence: Synthetic oligonucleotide
  Antisense strand to SEQ ID NO: 1363448
uuaaucaaacagcgacuuc

SEQ ID NO: 1363450 - RNA, 19 nt, Artificial Sequence
  Description of Artificial Sequence: Synthetic oligonucleotide
  Sense strand starting at position 3267 of SEQ ID NO: 1242653
ggcuaaauaaaccgugaua

SEQ ID NO: 1363451 - RNA, 19 nt, Artificial Sequence
  Description of Artificial Sequence: Synthetic oligonucleotide
  Antisense strand to SEQ ID NO: 1363450
uaucacgguuuauuuagcc

SEQ ID NO: 1363452 - RNA, 19 nt, Artificial Sequence
  Description of Artificial Sequence: Synthetic oligonucleotide
  Sense strand starting at position 3269 of SEQ ID NO: 1242653
cuaaauaaaccgugauaua

SEQ ID NO: 1363453 - RNA, 19 nt, Artificial Sequence
  Description of Artificial Sequence: Synthetic oligonucleotide
  Antisense strand to SEQ ID NO: 1363452
uauaucacgguuuauuuag

SEQ ID NO: 1363454 - RNA, 19 nt, Artificial Sequence
  Description of Artificial Sequence: Synthetic oligonucleotide
  Sense strand starting at position 3677 of SEQ ID NO: 1242653
ugaaguaggucucuauguu

SEQ ID NO: 1363455 - RNA, 19 nt, Artificial Sequence
  Description of Artificial Sequence: Synthetic oligonucleotide
  Antisense strand to SEQ ID NO: 1363454
aacauagagaccuacuuca

SEQ ID NO: 1363456 - RNA, 19 nt, Artificial Sequence
  Description of Artificial Sequence: Synthetic oligonucleotide
  Sense strand starting at position 3678 of SEQ ID NO: 1242653
gaaguaggucucuauguug

SEQ ID NO: 1363457 - RNA, 19 nt, Artificial Sequence
  Description of Artificial Sequence: Synthetic oligonucleotide
  Antisense strand to SEQ ID NO: 1363456
caacauagagaccuacuuc

SEQ ID NO: 1363458 - RNA, 19 nt, Artificial Sequence
  Description of Artificial Sequence: Synthetic oligonucleotide
  Sense strand starting at position 3681 of SEQ ID NO: 1242653
guaggucucuauguugaug

SEQ ID NO: 1363459 - RNA, 19 nt, Artificial Sequence
  Description of Artificial Sequence: Synthetic oligonucleotide
  Antisense strand to SEQ ID NO: 1363458
caucaacauagagaccuac

SEQ ID NO: 1363460 - RNA, 19 nt, Artificial Sequence
  Description of Artificial Sequence: Synthetic oligonucleotide
  Sense strand starting at position 3898 of SEQ ID NO: 1242653
gggucauuauuccuuauca

SEQ ID NO: 1363461 - RNA, 19 nt, Artificial Sequence
  Description of Artificial Sequence: Synthetic oligonucleotide
  Antisense strand to SEQ ID NO: 1363460
ugauaaggaauaaugaccc

SEQ ID NO: 1363462 - RNA, 19 nt, Artificial Sequence
  Description of Artificial Sequence: Synthetic oligonucleotide
  Sense strand starting at position 3899 of SEQ ID NO: 1242653
ggucauuauuccuuaucau

SEQ ID NO: 1363463 - RNA, 19 nt, Artificial Sequence
  Description of Artificial Sequence: Synthetic oligonucleotide
  Antisense strand to SEQ ID NO: 1363462
augauaaggaauaaugacc

SEQ ID NO: 1363464 - RNA, 19 nt, Artificial Sequence
  Description of Artificial Sequence: Synthetic oligonucleotide
  Sense strand starting at position 3900 of SEQ ID NO: 1242653
gucauuauuccuuaucaug

SEQ ID NO: 1363465 - RNA, 19 nt, Artificial Sequence
  Description of Artificial Sequence: Synthetic oligonucleotide
  Antisense strand to SEQ ID NO: 1363464
caugauaaggaauaaugac

SEQ ID NO: 1363466 - RNA, 19 nt, Artificial Sequence
  Description of Artificial Sequence: Synthetic oligonucleotide
  Sense strand starting at position 29 of SEQ ID NO: 1242654
ggagccugcagguauauaa

SEQ ID NO: 1363467 - RNA, 19 nt, Artificial Sequence
  Description of Artificial Sequence: Synthetic oligonucleotide
  Antisense strand to SEQ ID NO: 1363466
uuauauaccugcaggcucc

SEQ ID NO: 1363468 - RNA, 19 nt, Artificial Sequence
  Description of Artificial Sequence: Synthetic oligonucleotide
  Sense strand starting at position 108 of SEQ ID NO: 1242654
uguagauauauguacaugu

SEQ ID NO: 1363469 - RNA, 19 nt, Artificial Sequence
  Description of Artificial Sequence: Synthetic oligonucleotide
  Antisense strand to SEQ ID NO: 1363468
acauguacauauaucuaca

SEQ ID NO: 1363470 - RNA, 19 nt, Artificial Sequence
  Description of Artificial Sequence: Synthetic oligonucleotide
  Sense strand starting at position 124 of SEQ ID NO: 1242654
uguuauauagaaugccaua

SEQ ID NO: 1363471 - RNA, 19 nt, Artificial Sequence
  Description of Artificial Sequence: Synthetic oligonucleotide
  Antisense strand to SEQ ID NO: 1363470
uauggcauucuauauaaca

SEQ ID NO: 1363472 - RNA, 19 nt, Artificial Sequence
  Description of Artificial Sequence: Synthetic oligonucleotide
  Sense strand starting at position 135 of SEQ ID NO: 1242654
augccauauguacgauaua

SEQ ID NO: 1363473 - RNA, 19 nt, Artificial Sequence
  Description of Artificial Sequence: Synthetic oligonucleotide
  Antisense strand to SEQ ID NO: 1363472
uauaucguacauauggcau

SEQ ID NO: 1363474 - RNA, 19 nt, Artificial Sequence
  Description of Artificial Sequence: Synthetic oligonucleotide
  Sense strand starting at position 217 of SEQ ID NO: 1242654
ggcucaggguguuuaguaa

SEQ ID NO: 1363475 - RNA, 19 nt, Artificial Sequence
  Description of Artificial Sequence: Synthetic oligonucleotide
  Antisense strand to SEQ ID NO: 1363474
uuacuaaacacccugagcc

SEQ ID NO: 1363476 - RNA, 19 nt, Artificial Sequence
  Description of Artificial Sequence: Synthetic oligonucleotide
  Sense strand starting at position 221 of SEQ ID NO: 1242654
caggguguuuaguaaauag

SEQ ID NO: 1363477 - RNA, 19 nt, Artificial Sequence
  Description of Artificial Sequence: Synthetic oligonucleotide
  Antisense strand to SEQ ID NO: 1363476
cuauuuacuaaacacccug

SEQ ID NO: 1363478 - RNA, 19 nt, Artificial Sequence
  Description of Artificial Sequence: Synthetic oligonucleotide
  Sense strand starting at position 241 of SEQ ID NO: 1242654
aacaguggacucugaauca

SEQ ID NO: 1363479 - RNA, 19 nt, Artificial Sequence
  Description of Artificial Sequence: Synthetic oligonucleotide
  Antisense strand to SEQ ID NO: 1363478
ugauucagaguccacuguu

SEQ ID NO: 1363480 - RNA, 19 nt, Artificial Sequence
  Description of Artificial Sequence: Synthetic oligonucleotide
  Sense strand starting at position 677 of SEQ ID NO: 1242654
gcauuuauaucuuagaguc

SEQ ID NO: 1363481 - RNA, 19 nt, Artificial Sequence
  Description of Artificial Sequence: Synthetic oligonucleotide
  Antisense strand to SEQ ID NO: 1363480
gacucuaagauauaaaugc

SEQ ID NO: 1363482 - RNA, 19 nt, Artificial Sequence
  Description of Artificial Sequence: Synthetic oligonucleotide
  Sense strand starting at position 685 of SEQ ID NO: 1242654
aucuuagagucuuaaagga

SEQ ID NO: 1363483 - RNA, 19 nt, Artificial Sequence
  Description of Artificial Sequence: Synthetic oligonucleotide
  Antisense strand to SEQ ID NO: 1363482
uccuuuaagacucuaagau

SEQ ID NO: 1363484 - RNA, 19 nt, Artificial Sequence
  Description of Artificial Sequence: Synthetic oligonucleotide
  Sense strand starting at position 700 of SEQ ID NO: 1242654
aggagaugguccuguuauu

SEQ ID NO: 1363485 - RNA, 19 nt, Artificial Sequence
  Description of Artificial Sequence: Synthetic oligonucleotide
  Antisense strand to SEQ ID NO: 1363484
aauaacaggaccaucuccu

SEQ ID NO: 1363486 - RNA, 19 nt, Artificial Sequence
  Description of Artificial Sequence: Synthetic oligonucleotide
  Sense strand starting at position 753 of SEQ ID NO: 1242654
gggugaggguccucuagag

SEQ ID NO: 1363487 - RNA, 19 nt, Artificial Sequence
  Description of Artificial Sequence: Synthetic oligonucleotide
  Antisense strand to SEQ ID NO: 1363486
cucuagaggacccucaccc

SEQ ID NO: 1363488 - RNA, 19 nt, Artificial Sequence
  Description of Artificial Sequence: Synthetic oligonucleotide
  Sense strand starting at position 823 of SEQ ID NO: 1242654
gcagucagugcccguucau

SEQ ID NO: 1363489 - RNA, 19 nt, Artificial Sequence
  Description of Artificial Sequence: Synthetic oligonucleotide
  Antisense strand to SEQ ID NO: 1363488
augaacgggcacugacugc

SEQ ID NO: 1363490 - RNA, 19 nt, Artificial Sequence
  Description of Artificial Sequence: Synthetic oligonucleotide
  Sense strand starting at position 882 of SEQ ID NO: 1242654
gcuugcuuccucuguacuu

SEQ ID NO: 1363491 - RNA, 19 nt, Artificial Sequence
  Description of Artificial Sequence: Synthetic oligonucleotide
  Antisense strand to SEQ ID NO: 1363490
aaguacagaggaagcaagc

SEQ ID NO: 1363492 - RNA, 19 nt, Artificial Sequence
  Description of Artificial Sequence: Synthetic oligonucleotide
  Sense strand starting at position 891 of SEQ ID NO: 1242654
cucuguacuucugggaaua

SEQ ID NO: 1363493 - RNA, 19 nt, Artificial Sequence
  Description of Artificial Sequence: Synthetic oligonucleotide
  Antisense strand to SEQ ID NO: 1363492
uauucccagaaguacagag

SEQ ID NO: 1363494 - RNA, 19 nt, Artificial Sequence
  Description of Artificial Sequence: Synthetic oligonucleotide
  Sense strand starting at position 892 of SEQ ID NO: 1242654
ucuguacuucugggaauag

SEQ ID NO: 1363495 - RNA, 19 nt, Artificial Sequence
  Description of Artificial Sequence: Synthetic oligonucleotide
  Antisense strand to SEQ ID NO: 1363494
cuauucccagaaguacaga

SEQ ID NO: 1363496 - RNA, 19 nt, Artificial Sequence
  Description of Artificial Sequence: Synthetic oligonucleotide
  Sense strand starting at position 1020 of SEQ ID NO: 1242654
cacaguauuucuuagggca

SEQ ID NO: 1363497 - RNA, 19 nt, Artificial Sequence
  Description of Artificial Sequence: Synthetic oligonucleotide
  Antisense strand to SEQ ID NO: 1363496
ugcccuaagaaauacugug

SEQ ID NO: 1363498 - RNA, 19 nt, Artificial Sequence
  Description of Artificial Sequence: Synthetic oligonucleotide
  Sense strand starting at position 1022 of SEQ ID NO: 1242654
caguauuucuuagggcaac

SEQ ID NO: 1363499 - RNA, 19 nt, Artificial Sequence
  Description of Artificial Sequence: Synthetic oligonucleotide
  Antisense strand to SEQ ID NO: 1363498
guugcccuaagaaauacug

SEQ ID NO: 1363500 - RNA, 19 nt, Artificial Sequence
  Description of Artificial Sequence: Synthetic oligonucleotide
  Sense strand starting at position 1023 of SEQ ID NO: 1242654
aguauuucuuagggcaaca

SEQ ID NO: 1363501 - RNA, 19 nt, Artificial Sequence
  Description of Artificial Sequence: Synthetic oligonucleotide
  Antisense strand to SEQ ID NO: 1363500
uguugcccuaagaaauacu

SEQ ID NO: 1363502 - RNA, 19 nt, Artificial Sequence
  Description of Artificial Sequence: Synthetic oligonucleotide
  Sense strand starting at position 1036 of SEQ ID NO: 1242654
gcaacagaaucgucgggau

SEQ ID NO: 1363503 - RNA, 19 nt, Artificial Sequence
  Description of Artificial Sequence: Synthetic oligonucleotide
  Antisense strand to SEQ ID NO: 1363502
aucccgacgauucuguugc

SEQ ID NO: 1363504 - RNA, 19 nt, Artificial Sequence
  Description of Artificial Sequence: Synthetic oligonucleotide
  Sense strand starting at position 1038 of SEQ ID NO: 1242654
aacagaaucgucgggauga

SEQ ID NO: 1363505 - RNA, 19 nt, Artificial Sequence
  Description of Artificial Sequence: Synthetic oligonucleotide
  Antisense strand to SEQ ID NO: 1363504
ucaucccgacgauucuguu

SEQ ID NO: 1363506 - RNA, 19 nt, Artificial Sequence
  Description of Artificial Sequence: Synthetic oligonucleotide
  Sense strand starting at position 1039 of SEQ ID NO: 1242654
acagaaucgucgggaugaa

SEQ ID NO: 1363507 - RNA, 19 nt, Artificial Sequence
  Description of Artificial Sequence: Synthetic oligonucleotide
  Antisense strand to SEQ ID NO: 1363506
uucaucccgacgauucugu

SEQ ID NO: 1363508 - RNA, 19 nt, Artificial Sequence
  Description of Artificial Sequence: Synthetic oligonucleotide
  Sense strand starting at position 1040 of SEQ ID NO: 1242654
cagaaucgucgggaugaag

SEQ ID NO: 1363509 - RNA, 19 nt, Artificial Sequence
  Description of Artificial Sequence: Synthetic oligonucleotide
  Antisense strand to SEQ ID NO: 1363508
cuucaucccgacgauucug

SEQ ID NO: 1363510 - RNA, 19 nt, Artificial Sequence
  Description of Artificial Sequence: Synthetic oligonucleotide
  Sense strand starting at position 1065 of SEQ ID NO: 1242654
uccagagacucugauaaac

SEQ ID NO: 1363511 - RNA, 19 nt, Artificial Sequence
  Description of Artificial Sequence: Synthetic oligonucleotide
  Antisense strand to SEQ ID NO: 1363510
guuuaucagagucucugga

SEQ ID NO: 1363512 - RNA, 19 nt, Artificial Sequence
  Description of Artificial Sequence: Synthetic oligonucleotide
  Sense strand starting at position 1188 of SEQ ID NO: 1242654
gaaagugucaguugcugga

SEQ ID NO: 1363513 - RNA, 19 nt, Artificial Sequence
  Description of Artificial Sequence: Synthetic oligonucleotide
  Antisense strand to SEQ ID NO: 1363512
uccagcaacugacacuuuc

SEQ ID NO: 1363514 - RNA, 19 nt, Artificial Sequence
  Description of Artificial Sequence: Synthetic oligonucleotide
  Sense strand starting at position 1293 of SEQ ID NO: 1242654
cggagccgccucugaauaa

SEQ ID NO: 1363515 - RNA, 19 nt, Artificial Sequence
  Description of Artificial Sequence: Synthetic oligonucleotide
  Antisense strand to SEQ ID NO: 1363514
uuauucagaggcggcuccg

SEQ ID NO: 1363516 - RNA, 19 nt, Artificial Sequence
  Description of Artificial Sequence: Synthetic oligonucleotide
  Sense strand starting at position 1416 of SEQ ID NO: 1242654
cgaggcugccgguuguuau

SEQ ID NO: 1363517 - RNA, 19 nt, Artificial Sequence
  Description of Artificial Sequence: Synthetic oligonucleotide
  Antisense strand to SEQ ID NO: 1363516
auaacaaccggcagccucg

SEQ ID NO: 1363518 - RNA, 19 nt, Artificial Sequence
  Description of Artificial Sequence: Synthetic oligonucleotide
  Sense strand starting at position 2341 of SEQ ID NO: 1242654
gcgucacugcugugaguua

SEQ ID NO: 1363519 - RNA, 19 nt, Artificial Sequence
  Description of Artificial Sequence: Synthetic oligonucleotide
  Antisense strand to SEQ ID NO: 1363518
uaacucacagcagugacgc

SEQ ID NO: 1363520 - RNA, 19 nt, Artificial Sequence
  Description of Artificial Sequence: Synthetic oligonucleotide
  Sense strand starting at position 2350 of SEQ ID NO: 1242654
cugugaguuacggguuugu

SEQ ID NO: 1363521 - RNA, 19 nt, Artificial Sequence
  Description of Artificial Sequence: Synthetic oligonucleotide
  Antisense strand to SEQ ID NO: 1363520
acaaacccguaacucacag

SEQ ID NO: 1363522 - RNA, 19 nt, Artificial Sequence
  Description of Artificial Sequence: Synthetic oligonucleotide
  Sense strand starting at position 2555 of SEQ ID NO: 1242654
uggcguauaugagagauuu

SEQ ID NO: 1363523 - RNA, 19 nt, Artificial Sequence
  Description of Artificial Sequence: Synthetic oligonucleotide
  Antisense strand to SEQ ID NO: 1363522
aaaucucucauauacgcca

SEQ ID NO: 1363524 - RNA, 19 nt, Artificial Sequence
  Description of Artificial Sequence: Synthetic oligonucleotide
  Sense strand starting at position 2580 of SEQ ID NO: 1242654
aggcaugcaguucguaaua

SEQ ID NO: 1363525 - RNA, 19 nt, Artificial Sequence
  Description of Artificial Sequence: Synthetic oligonucleotide
  Antisense strand to SEQ ID NO: 1363524
uauuacgaacugcaugccu

SEQ ID NO: 1363526 - RNA, 19 nt, Artificial Sequence
  Description of Artificial Sequence: Synthetic oligonucleotide
  Sense strand starting at position 2591 of SEQ ID NO: 1242654
ucguaauaaucacauguaa

SEQ ID NO: 1363527 - RNA, 19 nt, Artificial Sequence
  Description of Artificial Sequence: Synthetic oligonucleotide
  Antisense strand to SEQ ID NO: 1363526
uuacaugugauuauuacga

SEQ ID NO: 1363528 - RNA, 19 nt, Artificial Sequence
  Description of Artificial Sequence: Synthetic oligonucleotide
  Sense strand starting at position 3008 of SEQ ID NO: 1242654
gugcaauuagauuauauug

SEQ ID NO: 1363529 - RNA, 19 nt, Artificial Sequence
  Description of Artificial Sequence: Synthetic oligonucleotide
  Antisense strand to SEQ ID NO: 1363528
caauauaaucuaauugcac

SEQ ID NO: 1363530 - RNA, 19 nt, Artificial Sequence
  Description of Artificial Sequence: Synthetic oligonucleotide
  Sense strand starting at position 3037 of SEQ ID NO: 1242654
cccuguugugcggucaaau

SEQ ID NO: 1363531 - RNA, 19 nt, Artificial Sequence
  Description of Artificial Sequence: Synthetic oligonucleotide
  Antisense strand to SEQ ID NO: 1363530
auuugaccgcacaacaggg

SEQ ID NO: 1363532 - RNA, 19 nt, Artificial Sequence
  Description of Artificial Sequence: Synthetic oligonucleotide
  Sense strand starting at position 3460 of SEQ ID NO: 1242654
gguaacagauacuuagcau

SEQ ID NO: 1363533 - RNA, 19 nt, Artificial Sequence
  Description of Artificial Sequence: Synthetic oligonucleotide
  Antisense strand to SEQ ID NO: 1363532
augcuaaguaucuguuacc

SEQ ID NO: 1363534 - RNA, 19 nt, Artificial Sequence
  Description of Artificial Sequence: Synthetic oligonucleotide
  Sense strand starting at position 3520 of SEQ ID NO: 1242654
acgucuuaucucuaaugcu

SEQ ID NO: 1363535 - RNA, 19 nt, Artificial Sequence
  Description of Artificial Sequence: Synthetic oligonucleotide
  Antisense strand to SEQ ID NO: 1363534
agcauuagagauaagacgu

SEQ ID NO: 1363536 - RNA, 19 nt, Artificial Sequence
  Description of Artificial Sequence: Synthetic oligonucleotide
  Sense strand starting at position 3873 of SEQ ID NO: 1242654
ggaugucagauaugcaagu

SEQ ID NO: 1363537 - RNA, 19 nt, Artificial Sequence
  Description of Artificial Sequence: Synthetic oligonucleotide
  Antisense strand to SEQ ID NO: 1363536
acuugcauaucugacaucc

SEQ ID NO: 1363538 - RNA, 19 nt, Artificial Sequence
  Description of Artificial Sequence: Synthetic oligonucleotide
  Sense strand starting at position 3882 of SEQ ID NO: 1242654
auaugcaagucuccaguaa

SEQ ID NO: 1363539 - RNA, 19 nt, Artificial Sequence
  Description of Artificial Sequence: Synthetic oligonucleotide
  Antisense strand to SEQ ID NO: 1363538
uuacuggagacuugcauau

SEQ ID NO: 1363540 - RNA, 19 nt, Artificial Sequence
  Description of Artificial Sequence: Synthetic oligonucleotide
  Sense strand starting at position 3886 of SEQ ID NO: 1242654
gcaagucuccaguaaauag

SEQ ID NO: 1363541 - RNA, 19 nt, Artificial Sequence
  Description of Artificial Sequence: Synthetic oligonucleotide
  Antisense strand to SEQ ID NO: 1363540
cuauuuacuggagacuugc

SEQ ID NO: 1363542 - RNA, 19 nt, Artificial Sequence
  Description of Artificial Sequence: Synthetic oligonucleotide
  Sense strand starting at position 3928 of SEQ ID NO: 1242654
aggccuuuggcguggaaga

SEQ ID NO: 1363543 - RNA, 19 nt, Artificial Sequence
  Description of Artificial Sequence: Synthetic oligonucleotide
  Antisense strand to SEQ ID NO: 1363542
ucuuccacgccaaaggccu

SEQ ID NO: 1363544 - RNA, 19 nt, Artificial Sequence
  Description of Artificial Sequence: Synthetic oligonucleotide
  Sense strand starting at position 3930 of SEQ ID NO: 1242654
gccuuuggcguggaagaga

SEQ ID NO: 1363545 - RNA, 19 nt, Artificial Sequence
  Description of Artificial Sequence: Synthetic oligonucleotide
  Antisense strand to SEQ ID NO: 1363544
ucucuuccacgccaaaggc

SEQ ID NO: 1363546 - RNA, 19 nt, Artificial Sequence
  Description of Artificial Sequence: Synthetic oligonucleotide
  Sense strand starting at position 76 of SEQ ID NO: 1242655
uugaucaaauugcuagaga

SEQ ID NO: 1363547 - RNA, 19 nt, Artificial Sequence
  Description of Artificial Sequence: Synthetic oligonucleotide
  Antisense strand to SEQ ID NO: 1363546
ucucuagcaauuugaucaa

SEQ ID NO: 1363548 - RNA, 19 nt, Artificial Sequence
  Description of Artificial Sequence: Synthetic oligonucleotide
  Sense strand starting at position 77 of SEQ ID NO: 1242655
ugaucaaauugcuagagaa

SEQ ID NO: 1363549 - RNA, 19 nt, Artificial Sequence
  Description of Artificial Sequence: Synthetic oligonucleotide
  Antisense strand to SEQ ID NO: 1363548
uucucuagcaauuugauca

SEQ ID NO: 1363550 - RNA, 19 nt, Artificial Sequence
  Description of Artificial Sequence: Synthetic oligonucleotide
  Sense strand starting at position 114 of SEQ ID NO: 1242655
cgcgcagaugacuccgauu

SEQ ID NO: 1363551 - RNA, 19 nt, Artificial Sequence
  Description of Artificial Sequence: Synthetic oligonucleotide
  Antisense strand to SEQ ID NO: 1363550
aaucggagucaucugcgcg

SEQ ID NO: 1363552 - RNA, 19 nt, Artificial Sequence
  Description of Artificial Sequence: Synthetic oligonucleotide
  Sense strand starting at position 116 of SEQ ID NO: 1242655
cgcagaugacuccgauuag

SEQ ID NO: 1363553 - RNA, 19 nt, Artificial Sequence
  Description of Artificial Sequence: Synthetic oligonucleotide
  Antisense strand to SEQ ID NO: 1363552
cuaaucggagucaucugcg

SEQ ID NO: 1363554 - RNA, 19 nt, Artificial Sequence
  Description of Artificial Sequence: Synthetic oligonucleotide
  Sense strand starting at position 203 of SEQ ID NO: 1242655
ccauaaaguucgucccacu

SEQ ID NO: 1363555 - RNA, 19 nt, Artificial Sequence
  Description of Artificial Sequence: Synthetic oligonucleotide
  Antisense strand to SEQ ID NO: 1363554
agugggacgaacuuuaugg

SEQ ID NO: 1363556 - RNA, 19 nt, Artificial Sequence
  Description of Artificial Sequence: Synthetic oligonucleotide
  Sense strand starting at position 216 of SEQ ID NO: 1242655
cccacuuccgacuguagua

SEQ ID NO: 1363557 - RNA, 19 nt, Artificial Sequence
  Description of Artificial Sequence: Synthetic oligonucleotide
  Antisense strand to SEQ ID NO: 1363556
uacuacagucggaaguggg

SEQ ID NO: 1363558 - RNA, 19 nt, Artificial Sequence
  Description of Artificial Sequence: Synthetic oligonucleotide
  Sense strand starting at position 343 of SEQ ID NO: 1242655
gcaugauaauucuucgcug

SEQ ID NO: 1363559 - RNA, 19 nt, Artificial Sequence
  Description of Artificial Sequence: Synthetic oligonucleotide
  Antisense strand to SEQ ID NO: 1363558
cagcgaagaauuaucaugc

SEQ ID NO: 1363560 - RNA, 19 nt, Artificial Sequence
  Description of Artificial Sequence: Synthetic oligonucleotide
  Sense strand starting at position 345 of SEQ ID NO: 1242655
augauaauucuucgcugag

SEQ ID NO: 1363561 - RNA, 19 nt, Artificial Sequence
  Description of Artificial Sequence: Synthetic oligonucleotide
  Antisense strand to SEQ ID NO: 1363560
cucagcgaagaauuaucau

SEQ ID NO: 1363562 - RNA, 19 nt, Artificial Sequence
  Description of Artificial Sequence: Synthetic oligonucleotide
  Sense strand starting at position 346 of SEQ ID NO: 1242655
ugauaauucuucgcugaga

SEQ ID NO: 1363563 - RNA, 19 nt, Artificial Sequence
  Description of Artificial Sequence: Synthetic oligonucleotide
  Antisense strand to SEQ ID NO: 1363562
ucucagcgaagaauuauca

SEQ ID NO: 1363564 - RNA, 19 nt, Artificial Sequence
  Description of Artificial Sequence: Synthetic oligonucleotide
  Sense strand starting at position 347 of SEQ ID NO: 1242655
gauaauucuucgcugagag

SEQ ID NO: 1363565 - RNA, 19 nt, Artificial Sequence
  Description of Artificial Sequence: Synthetic oligonucleotide
  Antisense strand to SEQ ID NO: 1363564
cucucagcgaagaauuauc

SEQ ID NO: 1363566 - RNA, 19 nt, Artificial Sequence
  Description of Artificial Sequence: Synthetic oligonucleotide
  Sense strand starting at position 348 of SEQ ID NO: 1242655
auaauucuucgcugagagg

SEQ ID NO: 1363567 - RNA, 19 nt, Artificial Sequence
  Description of Artificial Sequence: Synthetic oligonucleotide
  Antisense strand to SEQ ID NO: 1363566
ccucucagcgaagaauuau

SEQ ID NO: 1363568 - RNA, 19 nt, Artificial Sequence
  Description of Artificial Sequence: Synthetic oligonucleotide
  Sense strand starting at position 374 of SEQ ID NO: 1242655
ggcgguuaucuugggcacu

SEQ ID NO: 1363569 - RNA, 19 nt, Artificial Sequence
  Description of Artificial Sequence: Synthetic oligonucleotide
  Antisense strand to SEQ ID NO: 1363568
agugcccaagauaaccgcc

SEQ ID NO: 1363570 - RNA, 19 nt, Artificial Sequence
  Description of Artificial Sequence: Synthetic oligonucleotide
  Sense strand starting at position 494 of SEQ ID NO: 1242655
ggcggagggaggugucaaa

SEQ ID NO: 1363571 - RNA, 19 nt, Artificial Sequence
  Description of Artificial Sequence: Synthetic oligonucleotide
  Antisense strand to SEQ ID NO: 1363570
uuugacaccucccuccgcc

SEQ ID NO: 1363572 - RNA, 19 nt, Artificial Sequence
  Description of Artificial Sequence: Synthetic oligonucleotide
  Sense strand starting at position 522 of SEQ ID NO: 1242655
gguggaucuagcuagagca

SEQ ID NO: 1363573 - RNA, 19 nt, Artificial Sequence
  Description of Artificial Sequence: Synthetic oligonucleotide
  Antisense strand to SEQ ID NO: 1363572
ugcucuagcuagauccacc

SEQ ID NO: 1363574 - RNA, 19 nt, Artificial Sequence
  Description of Artificial Sequence: Synthetic oligonucleotide
  Sense strand starting at position 545 of SEQ ID NO: 1242655
cgcgauucucaaguugcaa

SEQ ID NO: 1363575 - RNA, 19 nt, Artificial Sequence
  Description of Artificial Sequence: Synthetic oligonucleotide
  Antisense strand to SEQ ID NO: 1363574
uugcaacuugagaaucgcg

SEQ ID NO: 1363576 - RNA, 19 nt, Artificial Sequence
  Description of Artificial Sequence: Synthetic oligonucleotide
  Sense strand starting at position 557 of SEQ ID NO: 1242655
guugcaagguauucaaggu

SEQ ID NO: 1363577 - RNA, 19 nt, Artificial Sequence
  Description of Artificial Sequence: Synthetic oligonucleotide
  Antisense strand to SEQ ID NO: 1363576
accuugaauaccuugcaac

SEQ ID NO: 1363578 - RNA, 19 nt, Artificial Sequence
  Description of Artificial Sequence: Synthetic oligonucleotide
  Sense strand starting at position 668 of SEQ ID NO: 1242655
gguuaucuuuaccuuugua

SEQ ID NO: 1363579 - RNA, 19 nt, Artificial Sequence
  Description of Artificial Sequence: Synthetic oligonucleotide
  Antisense strand to SEQ ID NO: 1363578
uacaaagguaaagauaacc

SEQ ID NO: 1363580 - RNA, 19 nt, Artificial Sequence
  Description of Artificial Sequence: Synthetic oligonucleotide
  Sense strand starting at position 672 of SEQ ID NO: 1242655
aucuuuaccuuuguagaga

SEQ ID NO: 1363581 - RNA, 19 nt, Artificial Sequence
  Description of Artificial Sequence: Synthetic oligonucleotide
  Antisense strand to SEQ ID NO: 1363580
ucucuacaaagguaaagau

SEQ ID NO: 1363582 - RNA, 19 nt, Artificial Sequence
  Description of Artificial Sequence: Synthetic oligonucleotide
  Sense strand starting at position 838 of SEQ ID NO: 1242655
aauguuauuugcgcgucaa

SEQ ID NO: 1363583 - RNA, 19 nt, Artificial Sequence
  Description of Artificial Sequence: Synthetic oligonucleotide
  Antisense strand to SEQ ID NO: 1363582
uugacgcgcaaauaacauu

SEQ ID NO: 1363584 - RNA, 19 nt, Artificial Sequence
  Description of Artificial Sequence: Synthetic oligonucleotide
  Sense strand starting at position 839 of SEQ ID NO: 1242655
auguuauuugcgcgucaau

SEQ ID NO: 1363585 - RNA, 19 nt, Artificial Sequence
  Description of Artificial Sequence: Synthetic oligonucleotide
  Antisense strand to SEQ ID NO: 1363584
auugacgcgcaaauaacau

SEQ ID NO: 1363586 - RNA, 19 nt, Artificial Sequence
  Description of Artificial Sequence: Synthetic oligonucleotide
  Sense strand starting at position 873 of SEQ ID NO: 1242655
auauuagguuucgccauuu

SEQ ID NO: 1363587 - RNA, 19 nt, Artificial Sequence
  Description of Artificial Sequence: Synthetic oligonucleotide
  Antisense strand to SEQ ID NO: 1363586
aaauggcgaaaccuaauau

SEQ ID NO: 1363588 - RNA, 19 nt, Artificial Sequence
  Description of Artificial Sequence: Synthetic oligonucleotide
  Sense strand starting at position 2247 of SEQ ID NO: 1242655
gccugucugccugacguaa

SEQ ID NO: 1363589 - RNA, 19 nt, Artificial Sequence
  Description of Artificial Sequence: Synthetic oligonucleotide
  Antisense strand to SEQ ID NO: 1363588
uuacgucaggcagacaggc

SEQ ID NO: 1363590 - RNA, 19 nt, Artificial Sequence
  Description of Artificial Sequence: Synthetic oligonucleotide
  Sense strand starting at position 2551 of SEQ ID NO: 1242655
agagguauaguggguggua

SEQ ID NO: 1363591 - RNA, 19 nt, Artificial Sequence
  Description of Artificial Sequence: Synthetic oligonucleotide
  Antisense strand to SEQ ID NO: 1363590
uaccacccacuauaccucu

SEQ ID NO: 1363592 - RNA, 19 nt, Artificial Sequence
  Description of Artificial Sequence: Synthetic oligonucleotide
  Sense strand starting at position 2634 of SEQ ID NO: 1242655
gcccaacucguguccaagu

SEQ ID NO: 1363593 - RNA, 19 nt, Artificial Sequence
  Description of Artificial Sequence: Synthetic oligonucleotide
  Antisense strand to SEQ ID NO: 1363592
acuuggacacgaguugggc

SEQ ID NO: 1363594 - RNA, 19 nt, Artificial Sequence
  Description of Artificial Sequence: Synthetic oligonucleotide
  Sense strand starting at position 2636 of SEQ ID NO: 1242655
ccaacucguguccaaguuu

SEQ ID NO: 1363595 - RNA, 19 nt, Artificial Sequence
  Description of Artificial Sequence: Synthetic oligonucleotide
  Antisense strand to SEQ ID NO: 1363594
aaacuuggacacgaguugg

SEQ ID NO: 1363596 - RNA, 19 nt, Artificial Sequence
  Description of Artificial Sequence: Synthetic oligonucleotide
  Sense strand starting at position 2652 of SEQ ID NO: 1242655
uuugcaaagcgcuuuccua

SEQ ID NO: 1363597 - RNA, 19 nt, Artificial Sequence
  Description of Artificial Sequence: Synthetic oligonucleotide
  Antisense strand to SEQ ID NO: 1363596
uaggaaagcgcuuugcaaa

SEQ ID NO: 1363598 - RNA, 19 nt, Artificial Sequence
  Description of Artificial Sequence: Synthetic oligonucleotide
  Sense strand starting at position 2653 of SEQ ID NO: 1242655
uugcaaagcgcuuuccuau

SEQ ID NO: 1363599 - RNA, 19 nt, Artificial Sequence
  Description of Artificial Sequence: Synthetic oligonucleotide
  Antisense strand to SEQ ID NO: 1363598
auaggaaagcgcuuugcaa

SEQ ID NO: 1363600 - RNA, 19 nt, Artificial Sequence
  Description of Artificial Sequence: Synthetic oligonucleotide
  Sense strand starting at position 2654 of SEQ ID NO: 1242655
ugcaaagcgcuuuccuauu

SEQ ID NO: 1363601 - RNA, 19 nt, Artificial Sequence
  Description of Artificial Sequence: Synthetic oligonucleotide
  Antisense strand to SEQ ID NO: 1363600
aauaggaaagcgcuuugca

SEQ ID NO: 1363602 - RNA, 19 nt, Artificial Sequence
  Description of Artificial Sequence: Synthetic oligonucleotide
  Sense strand starting at position 2833 of SEQ ID NO: 1242655
gggcaaaucgaccaucaca

SEQ ID NO: 1363603 - RNA, 19 nt, Artificial Sequence
  Description of Artificial Sequence: Synthetic oligonucleotide
  Antisense strand to SEQ ID NO: 1363602
ugugauggucgauuugccc

SEQ ID NO: 1363604 - RNA, 19 nt, Artificial Sequence
  Description of Artificial Sequence: Synthetic oligonucleotide
  Sense strand starting at position 2872 of SEQ ID NO: 1242655
uugcgaagucggcucaguu

SEQ ID NO: 1363605 - RNA, 19 nt, Artificial Sequence
  Description of Artificial Sequence: Synthetic oligonucleotide
  Antisense strand to SEQ ID NO: 1363604
aacugagccgacuucgcaa

SEQ ID NO: 1363606 - RNA, 19 nt, Artificial Sequence
  Description of Artificial Sequence: Synthetic oligonucleotide
  Sense strand starting at position 3220 of SEQ ID NO: 1242655
ggcuuucuccagggucuga

SEQ ID NO: 1363607 - RNA, 19 nt, Artificial Sequence
  Description of Artificial Sequence: Synthetic oligonucleotide
  Antisense strand to SEQ ID NO: 1363606
ucagacccuggagaaagcc

SEQ ID NO: 1363608 - RNA, 19 nt, Artificial Sequence
  Description of Artificial Sequence: Synthetic oligonucleotide
  Sense strand starting at position 3381 of SEQ ID NO: 1242655
gcgauagugcgcuugcaca

SEQ ID NO: 1363609 - RNA, 19 nt, Artificial Sequence
  Description of Artificial Sequence: Synthetic oligonucleotide
  Antisense strand to SEQ ID NO: 1363608
ugugcaagcgcacuaucgc

SEQ ID NO: 1363610 - RNA, 19 nt, Artificial Sequence
  Description of Artificial Sequence: Synthetic oligonucleotide
  Sense strand starting at position 3561 of SEQ ID NO: 1242655
uuauuucccugggacacua

SEQ ID NO: 1363611 - RNA, 19 nt, Artificial Sequence
  Description of Artificial Sequence: Synthetic oligonucleotide
  Antisense strand to SEQ ID NO: 1363610
uagugucccagggaaauaa

SEQ ID NO: 1363612 - RNA, 19 nt, Artificial Sequence
  Description of Artificial Sequence: Synthetic oligonucleotide
  Sense strand starting at position 3638 of SEQ ID NO: 1242655
gauagcuccuguuuaggaa

SEQ ID NO: 1363613 - RNA, 19 nt, Artificial Sequence
  Description of Artificial Sequence: Synthetic oligonucleotide
  Antisense strand to SEQ ID NO: 1363612
uuccuaaacaggagcuauc

SEQ ID NO: 1363614 - RNA, 19 nt, Artificial Sequence
  Description of Artificial Sequence: Synthetic oligonucleotide
  Sense strand starting at position 3699 of SEQ ID NO: 1242655
cguauugccugguuauauu

SEQ ID NO: 1363615 - RNA, 19 nt, Artificial Sequence
  Description of Artificial Sequence: Synthetic oligonucleotide
  Antisense strand to SEQ ID NO: 1363614
aauauaaccaggcaauacg

SEQ ID NO: 1363616 - RNA, 19 nt, Artificial Sequence
  Description of Artificial Sequence: Synthetic oligonucleotide
  Sense strand starting at position 3783 of SEQ ID NO: 1242655
uuuccaauuguagggaaga

SEQ ID NO: 1363617 - RNA, 19 nt, Artificial Sequence
  Description of Artificial Sequence: Synthetic oligonucleotide
  Antisense strand to SEQ ID NO: 1363616
ucuucccuacaauuggaaa

SEQ ID NO: 1363618 - RNA, 19 nt, Artificial Sequence
  Description of Artificial Sequence: Synthetic oligonucleotide
  Sense strand starting at position 3894 of SEQ ID NO: 1242655
aacggaguuauguguacgu

SEQ ID NO: 1363619 - RNA, 19 nt, Artificial Sequence
  Description of Artificial Sequence: Synthetic oligonucleotide
  Antisense strand to SEQ ID NO: 1363618
acguacacauaacuccguu

SEQ ID NO: 1363620 - RNA, 19 nt, Artificial Sequence
  Description of Artificial Sequence: Synthetic oligonucleotide
  Sense strand starting at position 3897 of SEQ ID NO: 1242655
ggaguuauguguacgucga

SEQ ID NO: 1363621 - RNA, 19 nt, Artificial Sequence
  Description of Artificial Sequence: Synthetic oligonucleotide
  Antisense strand to SEQ ID NO: 1363620
ucgacguacacauaacucc

SEQ ID NO: 1363622 - RNA, 19 nt, Artificial Sequence
  Description of Artificial Sequence: Synthetic oligonucleotide
  Sense strand starting at position 3942 of SEQ ID NO: 1242655
acaaguaugucccuucuua

SEQ ID NO: 1363623 - RNA, 19 nt, Artificial Sequence
  Description of Artificial Sequence: Synthetic oligonucleotide
  Antisense strand to SEQ ID NO: 1363622
uaagaagggacauacuugu

SEQ ID NO: 1363624 - RNA, 19 nt, Artificial Sequence
  Description of Artificial Sequence: Synthetic oligonucleotide
  Sense strand starting at position 3946 of SEQ ID NO: 1242655
guaugucccuucuuaagga

SEQ ID NO: 1363625 - RNA, 19 nt, Artificial Sequence
  Description of Artificial Sequence: Synthetic oligonucleotide
  Antisense strand to SEQ ID NO: 1363624
uccuuaagaagggacauac

SEQ ID NO: 1363626 - RNA, 19 nt, Artificial Sequence
  Description of Artificial Sequence: Synthetic oligonucleotide
  Sense strand starting at position 143 of SEQ ID NO: 1242656
aaccuugugucagugacuu

SEQ ID NO: 1363627 - RNA, 19 nt, Artificial Sequence
  Description of Artificial Sequence: Synthetic oligonucleotide
  Antisense strand to SEQ ID NO: 1363626
aagucacugacacaagguu

SEQ ID NO: 1363628 - RNA, 19 nt, Artificial Sequence
  Description of Artificial Sequence: Synthetic oligonucleotide
  Sense strand starting at position 151 of SEQ ID NO: 1242656
gucagugacuuugccuuua

SEQ ID NO: 1363629 - RNA, 19 nt, Artificial Sequence
  Description of Artificial Sequence: Synthetic oligonucleotide
  Antisense strand to SEQ ID NO: 1363628
uaaaggcaaagucacugac

SEQ ID NO: 1363630 - RNA, 19 nt, Artificial Sequence
  Description of Artificial Sequence: Synthetic oligonucleotide
  Sense strand starting at position 530 of SEQ ID NO: 1242656
aguauuugguuggagaguu

SEQ ID NO: 1363631 - RNA, 19 nt, Artificial Sequence
  Description of Artificial Sequence: Synthetic oligonucleotide
  Antisense strand to SEQ ID NO: 1363630
aacucuccaaccaaauacu

SEQ ID NO: 1363632 - RNA, 19 nt, Artificial Sequence
  Description of Artificial Sequence: Synthetic oligonucleotide
  Sense strand starting at position 531 of SEQ ID NO: 1242656
guauuugguuggagaguug

SEQ ID NO: 1363633 - RNA, 19 nt, Artificial Sequence
  Description of Artificial Sequence: Synthetic oligonucleotide
  Antisense strand to SEQ ID NO: 1363632
caacucuccaaccaaauac

SEQ ID NO: 1363634 - RNA, 19 nt, Artificial Sequence
  Description of Artificial Sequence: Synthetic oligonucleotide
  Sense strand starting at position 590 of SEQ ID NO: 1242656
aggagugcuccguaagcau

SEQ ID NO: 1363635 - RNA, 19 nt, Artificial Sequence
  Description of Artificial Sequence: Synthetic oligonucleotide
  Antisense strand to SEQ ID NO: 1363634
augcuuacggagcacuccu

SEQ ID NO: 1363636 - RNA, 19 nt, Artificial Sequence
  Description of Artificial Sequence: Synthetic oligonucleotide
  Sense strand starting at position 597 of SEQ ID NO: 1242656
cuccguaagcaugaacuau

SEQ ID NO: 1363637 - RNA, 19 nt, Artificial Sequence
  Description of Artificial Sequence: Synthetic oligonucleotide
  Antisense strand to SEQ ID NO: 1363636
auaguucaugcuuacggag

SEQ ID NO: 1363638 - RNA, 19 nt, Artificial Sequence
  Description of Artificial Sequence: Synthetic oligonucleotide
  Sense strand starting at position 609 of SEQ ID NO: 1242656
gaacuaucagugcgcucuu

SEQ ID NO: 1363639 - RNA, 19 nt, Artificial Sequence
  Description of Artificial Sequence: Synthetic oligonucleotide
  Antisense strand to SEQ ID NO: 1363638
aagagcgcacugauaguuc

SEQ ID NO: 1363640 - RNA, 19 nt, Artificial Sequence
  Description of Artificial Sequence: Synthetic oligonucleotide
  Sense strand starting at position 612 of SEQ ID NO: 1242656
cuaucagugcgcucuucuu

SEQ ID NO: 1363641 - RNA, 19 nt, Artificial Sequence
  Description of Artificial Sequence: Synthetic oligonucleotide
  Antisense strand to SEQ ID NO: 1363640
aagaagagcgcacugauag

SEQ ID NO: 1363642 - RNA, 19 nt, Artificial Sequence
  Description of Artificial Sequence: Synthetic oligonucleotide
  Sense strand starting at position 800 of SEQ ID NO: 1242656
gggauuaaguguuuccaua

SEQ ID NO: 1363643 - RNA, 19 nt, Artificial Sequence
  Description of Artificial Sequence: Synthetic oligonucleotide
  Antisense strand to SEQ ID NO: 1363642
uauggaaacacuuaauccc

SEQ ID NO: 1363644 - RNA, 19 nt, Artificial Sequence
  Description of Artificial Sequence: Synthetic oligonucleotide
  Sense strand starting at position 1333 of SEQ ID NO: 1242656
cgcccuucgcgguugcaaa

SEQ ID NO: 1363645 - RNA, 19 nt, Artificial Sequence
  Description of Artificial Sequence: Synthetic oligonucleotide
  Antisense strand to SEQ ID NO: 1363644
uuugcaaccgcgaagggcg

SEQ ID NO: 1363646 - RNA, 19 nt, Artificial Sequence
  Description of Artificial Sequence: Synthetic oligonucleotide
  Sense strand starting at position 1345 of SEQ ID NO: 1242656
uugcaaaccugcuuugaug

SEQ ID NO: 1363647 - RNA, 19 nt, Artificial Sequence
  Description of Artificial Sequence: Synthetic oligonucleotide
  Antisense strand to SEQ ID NO: 1363646
caucaaagcagguuugcaa

SEQ ID NO: 1363648 - RNA, 19 nt, Artificial Sequence
  Description of Artificial Sequence: Synthetic oligonucleotide
  Sense strand starting at position 1414 of SEQ ID NO: 1242656
uuuggaaauacucgauaga

SEQ ID NO: 1363649 - RNA, 19 nt, Artificial Sequence
  Description of Artificial Sequence: Synthetic oligonucleotide
  Antisense strand to SEQ ID NO: 1363648
ucuaucgaguauuuccaaa

SEQ ID NO: 1363650 - RNA, 19 nt, Artificial Sequence
  Description of Artificial Sequence: Synthetic oligonucleotide
  Sense strand starting at position 1423 of SEQ ID NO: 1242656
acucgauagaguggaaaug

SEQ ID NO: 1363651 - RNA, 19 nt, Artificial Sequence
  Description of Artificial Sequence: Synthetic oligonucleotide
  Antisense strand to SEQ ID NO: 1363650
cauuuccacucuaucgagu

SEQ ID NO: 1363652 - RNA, 19 nt, Artificial Sequence
  Description of Artificial Sequence: Synthetic oligonucleotide
  Sense strand starting at position 1434 of SEQ ID NO: 1242656
uggaaaugguuccucggga

SEQ ID NO: 1363653 - RNA, 19 nt, Artificial Sequence
  Description of Artificial Sequence: Synthetic oligonucleotide
  Antisense strand to SEQ ID NO: 1363652
ucccgaggaaccauuucca

SEQ ID NO: 1363654 - RNA, 19 nt, Artificial Sequence
  Description of Artificial Sequence: Synthetic oligonucleotide
  Sense strand starting at position 1656 of SEQ ID NO: 1242656
gcagcaaagucugcaagaa

SEQ ID NO: 1363655 - RNA, 19 nt, Artificial Sequence
  Description of Artificial Sequence: Synthetic oligonucleotide
  Antisense strand to SEQ ID NO: 1363654
uucuugcagacuuugcugc

SEQ ID NO: 1363656 - RNA, 19 nt, Artificial Sequence
  Description of Artificial Sequence: Synthetic oligonucleotide
  Sense strand starting at position 1657 of SEQ ID NO: 1242656
cagcaaagucugcaagaag

SEQ ID NO: 1363657 - RNA, 19 nt, Artificial Sequence
  Description of Artificial Sequence: Synthetic oligonucleotide
  Antisense strand to SEQ ID NO: 1363656
cuucuugcagacuuugcug

SEQ ID NO: 1363658 - RNA, 19 nt, Artificial Sequence
  Description of Artificial Sequence: Synthetic oligonucleotide
  Sense strand starting at position 2615 of SEQ ID NO: 1242656
gcuucagguguuuggugau

SEQ ID NO: 1363659 - RNA, 19 nt, Artificial Sequence
  Description of Artificial Sequence: Synthetic oligonucleotide
  Antisense strand to SEQ ID NO: 1363658
aucaccaaacaccugaagc

SEQ ID NO: 1363660 - RNA, 19 nt, Artificial Sequence
  Description of Artificial Sequence: Synthetic oligonucleotide
  Sense strand starting at position 2630 of SEQ ID NO: 1242656
ugaugaccuugaugagcau

SEQ ID NO: 1363661 - RNA, 19 nt, Artificial Sequence
  Description of Artificial Sequence: Synthetic oligonucleotide
  Antisense strand to SEQ ID NO: 1363660
augcucaucaaggucauca

SEQ ID NO: 1363662 - RNA, 19 nt, Artificial Sequence
  Description of Artificial Sequence: Synthetic oligonucleotide
  Sense strand starting at position 2830 of SEQ ID NO: 1242656
cugugcuuucuaugucauu

SEQ ID NO: 1363663 - RNA, 19 nt, Artificial Sequence
  Description of Artificial Sequence: Synthetic oligonucleotide
  Antisense strand to SEQ ID NO: 1363662
aaugacauagaaagcacag

SEQ ID NO: 1363664 - RNA, 19 nt, Artificial Sequence
  Description of Artificial Sequence: Synthetic oligonucleotide
  Sense strand starting at position 2832 of SEQ ID NO: 1242656
gugcuuucuaugucauugu

SEQ ID NO: 1363665 - RNA, 19 nt, Artificial Sequence
  Description of Artificial Sequence: Synthetic oligonucleotide
  Antisense strand to SEQ ID NO: 1363664
acaaugacauagaaagcac

SEQ ID NO: 1363666 - RNA, 19 nt, Artificial Sequence
  Description of Artificial Sequence: Synthetic oligonucleotide
  Sense strand starting at position 2836 of SEQ ID NO: 1242656
uuucuaugucauugucaca

SEQ ID NO: 1363667 - RNA, 19 nt, Artificial Sequence
  Description of Artificial Sequence: Synthetic oligonucleotide
  Antisense strand to SEQ ID NO: 1363666
ugugacaaugacauagaaa

SEQ ID NO: 1363668 - RNA, 19 nt, Artificial Sequence
  Description of Artificial Sequence: Synthetic oligonucleotide
  Sense strand starting at position 2908 of SEQ ID NO: 1242656
cuauauauuucuggaggcu

SEQ ID NO: 1363669 - RNA, 19 nt, Artificial Sequence
  Description of Artificial Sequence: Synthetic oligonucleotide
  Antisense strand to SEQ ID NO: 1363668
agccuccagaaauauauag

SEQ ID NO: 1363670 - RNA, 19 nt, Artificial Sequence
  Description of Artificial Sequence: Synthetic oligonucleotide
  Sense strand starting at position 2957 of SEQ ID NO: 1242656
aagugacauuccuuuagug

SEQ ID NO: 1363671 - RNA, 19 nt, Artificial Sequence
  Description of Artificial Sequence: Synthetic oligonucleotide
  Antisense strand to SEQ ID NO: 1363670
cacuaaaggaaugucacuu

SEQ ID NO: 1363672 - RNA, 19 nt, Artificial Sequence
  Description of Artificial Sequence: Synthetic oligonucleotide
  Sense strand starting at position 2961 of SEQ ID NO: 1242656
gacauuccuuuagugaaug

SEQ ID NO: 1363673 - RNA, 19 nt, Artificial Sequence
  Description of Artificial Sequence: Synthetic oligonucleotide
  Antisense strand to SEQ ID NO: 1363672
cauucacuaaaggaauguc

SEQ ID NO: 1363674 - RNA, 19 nt, Artificial Sequence
  Description of Artificial Sequence: Synthetic oligonucleotide
  Sense strand starting at position 2966 of SEQ ID NO: 1242656
uccuuuagugaauguggca

SEQ ID NO: 1363675 - RNA, 19 nt, Artificial Sequence
  Description of Artificial Sequence: Synthetic oligonucleotide
  Antisense strand to SEQ ID NO: 1363674
ugccacauucacuaaagga

SEQ ID NO: 1363676 - RNA, 19 nt, Artificial Sequence
  Description of Artificial Sequence: Synthetic oligonucleotide
  Sense strand starting at position 2981 of SEQ ID NO: 1242656
ggcaaagaguugcaggaaa

SEQ ID NO: 1363677 - RNA, 19 nt, Artificial Sequence
  Description of Artificial Sequence: Synthetic oligonucleotide
  Antisense strand to SEQ ID NO: 1363676
uuuccugcaacucuuugcc

SEQ ID NO: 1363678 - RNA, 19 nt, Artificial Sequence
  Description of Artificial Sequence: Synthetic oligonucleotide
  Sense strand starting at position 2983 of SEQ ID NO: 1242656
caaagaguugcaggaaaug

SEQ ID NO: 1363679 - RNA, 19 nt, Artificial Sequence
  Description of Artificial Sequence: Synthetic oligonucleotide
  Antisense strand to SEQ ID NO: 1363678
cauuuccugcaacucuuug

SEQ ID NO: 1363680 - RNA, 19 nt, Artificial Sequence
  Description of Artificial Sequence: Synthetic oligonucleotide
  Sense strand starting at position 3027 of SEQ ID NO: 1242656
cugcuugagucauuccuaa

SEQ ID NO: 1363681 - RNA, 19 nt, Artificial Sequence
  Description of Artificial Sequence: Synthetic oligonucleotide
  Antisense strand to SEQ ID NO: 1363680
uuaggaaugacucaagcag

SEQ ID NO: 1363682 - RNA, 19 nt, Artificial Sequence
  Description of Artificial Sequence: Synthetic oligonucleotide
  Sense strand starting at position 3159 of SEQ ID NO: 1242656
gcaggacguuccuuccauu

SEQ ID NO: 1363683 - RNA, 19 nt, Artificial Sequence
  Description of Artificial Sequence: Synthetic oligonucleotide
  Antisense strand to SEQ ID NO: 1363682
aauggaaggaacguccugc

SEQ ID NO: 1363684 - RNA, 19 nt, Artificial Sequence
  Description of Artificial Sequence: Synthetic oligonucleotide
  Sense strand starting at position 3455 of SEQ ID NO: 1242656
gaccuaggcuucugaggaa

SEQ ID NO: 1363685 - RNA, 19 nt, Artificial Sequence
  Description of Artificial Sequence: Synthetic oligonucleotide
  Antisense strand to SEQ ID NO: 1363684
uuccucagaagccuagguc

SEQ ID NO: 1363686 - RNA, 19 nt, Artificial Sequence
  Description of Artificial Sequence: Synthetic oligonucleotide
  Sense strand starting at position 3458 of SEQ ID NO: 1242656
cuaggcuucugaggaacua

SEQ ID NO: 1363687 - RNA, 19 nt, Artificial Sequence
  Description of Artificial Sequence: Synthetic oligonucleotide
  Antisense strand to SEQ ID NO: 1363686
uaguuccucagaagccuag

SEQ ID NO: 1363688 - RNA, 19 nt, Artificial Sequence
  Description of Artificial Sequence: Synthetic oligonucleotide
  Sense strand starting at position 3603 of SEQ ID NO: 1242656
gugcaaagauuugauuaau

SEQ ID NO: 1363689 - RNA, 19 nt, Artificial Sequence
  Description of Artificial Sequence: Synthetic oligonucleotide
  Antisense strand to SEQ ID NO: 1363688
auuaaucaaaucuuugcac

SEQ ID NO: 1363690 - RNA, 19 nt, Artificial Sequence
  Description of Artificial Sequence: Synthetic oligonucleotide
  Sense strand starting at position 3804 of SEQ ID NO: 1242656
ugugaacugucuccucuaa

SEQ ID NO: 1363691 - RNA, 19 nt, Artificial Sequence
  Description of Artificial Sequence: Synthetic oligonucleotide
  Antisense strand to SEQ ID NO: 1363690
uuagaggagacaguucaca

SEQ ID NO: 1363692 - RNA, 19 nt, Artificial Sequence
  Description of Artificial Sequence: Synthetic oligonucleotide
  Sense strand starting at position 3806 of SEQ ID NO: 1242656
ugaacugucuccucuaaug

SEQ ID NO: 1363693 - RNA, 19 nt, Artificial Sequence
  Description of Artificial Sequence: Synthetic oligonucleotide
  Antisense strand to SEQ ID NO: 1363692
cauuagaggagacaguuca

SEQ ID NO: 1363694 - RNA, 19 nt, Artificial Sequence
  Description of Artificial Sequence: Synthetic oligonucleotide
  Sense strand starting at position 3830 of SEQ ID NO: 1242656
agcggaagucccuagggau

SEQ ID NO: 1363695 - RNA, 19 nt, Artificial Sequence
  Description of Artificial Sequence: Synthetic oligonucleotide
  Antisense strand to SEQ ID NO: 1363694
aucccuagggacuuccgcu

SEQ ID NO: 1363696 - RNA, 19 nt, Artificial Sequence
  Description of Artificial Sequence: Synthetic oligonucleotide
  Sense strand starting at position 3904 of SEQ ID NO: 1242656
gagugacacugguggagau

SEQ ID NO: 1363697 - RNA, 19 nt, Artificial Sequence
  Description of Artificial Sequence: Synthetic oligonucleotide
  Antisense strand to SEQ ID NO: 1363696
aucuccaccagugucacuc

SEQ ID NO: 1363698 - RNA, 19 nt, Artificial Sequence
  Description of Artificial Sequence: Synthetic oligonucleotide
  Sense strand starting at position 3916 of SEQ ID NO: 1242656
uggagaucagcuugucucu

SEQ ID NO: 1363699 - RNA, 19 nt, Artificial Sequence
  Description of Artificial Sequence: Synthetic oligonucleotide
  Antisense strand to SEQ ID NO: 1363698
agagacaagcugaucucca

SEQ ID NO: 1363700 - RNA, 19 nt, Artificial Sequence
  Description of Artificial Sequence: Synthetic oligonucleotide
  Sense strand starting at position 3970 of SEQ ID NO: 1242656
acuuauuuaucagguuaug

SEQ ID NO: 1363701 - RNA, 19 nt, Artificial Sequence
  Description of Artificial Sequence: Synthetic oligonucleotide
  Antisense strand to SEQ ID NO: 1363700
cauaaccugauaaauaagu

SEQ ID NO: 1363702 - RNA, 19 nt, Artificial Sequence
  Description of Artificial Sequence: Synthetic oligonucleotide
  Sense strand starting at position 3976 of SEQ ID NO: 1242656
uuaucagguuauguguuua

SEQ ID NO: 1363703 - RNA, 19 nt, Artificial Sequence
  Description of Artificial Sequence: Synthetic oligonucleotide
  Antisense strand to SEQ ID NO: 1363702
uaaacacauaaccugauaa

SEQ ID NO: 1363704 - RNA, 19 nt, Artificial Sequence
  Description of Artificial Sequence: Synthetic oligonucleotide
  Sense strand starting at position 3980 of SEQ ID NO: 1242656
cagguuauguguuuaaccu

SEQ ID NO: 1363705 - RNA, 19 nt, Artificial Sequence
  Description of Artificial Sequence: Synthetic oligonucleotide
  Antisense strand to SEQ ID NO: 1363704
agguuaaacacauaaccug

SEQ ID NO: 1363706 - RNA, 19 nt, Artificial Sequence
  Description of Artificial Sequence: Synthetic oligonucleotide
  Sense strand starting at position 22 of SEQ ID NO: 1242657
cagggaagugaauguaauu

SEQ ID NO: 1363707 - RNA, 19 nt, Artificial Sequence
  Description of Artificial Sequence: Synthetic oligonucleotide
  Antisense strand to SEQ ID NO: 1363706
aauuacauucacuucccug

SEQ ID NO: 1363708 - RNA, 19 nt, Artificial Sequence
  Description of Artificial Sequence: Synthetic oligonucleotide
  Sense strand starting at position 117 of SEQ ID NO: 1242657
guaggcuaucuguaaauca

SEQ ID NO: 1363709 - RNA, 19 nt, Artificial Sequence
  Description of Artificial Sequence: Synthetic oligonucleotide
  Antisense strand to SEQ ID NO: 1363708
ugauuuacagauagccuac

SEQ ID NO: 1363710 - RNA, 19 nt, Artificial Sequence
  Description of Artificial Sequence: Synthetic oligonucleotide
  Sense strand starting at position 133 of SEQ ID NO: 1242657
ucauuagcaccuuagagua

SEQ ID NO: 1363711 - RNA, 19 nt, Artificial Sequence
  Description of Artificial Sequence: Synthetic oligonucleotide
  Antisense strand to SEQ ID NO: 1363710
uacucuaaggugcuaauga

SEQ ID NO: 1363712 - RNA, 19 nt, Artificial Sequence
  Description of Artificial Sequence: Synthetic oligonucleotide
  Sense strand starting at position 181 of SEQ ID NO: 1242657
auuggcacucgagaucuuu

SEQ ID NO: 1363713 - RNA, 19 nt, Artificial Sequence
  Description of Artificial Sequence: Synthetic oligonucleotide
  Antisense strand to SEQ ID NO: 1363712
aaagaucucgagugccaau

SEQ ID NO: 1363714 - RNA, 19 nt, Artificial Sequence
  Description of Artificial Sequence: Synthetic oligonucleotide
  Sense strand starting at position 205 of SEQ ID NO: 1242657
uauaaaugguaagugguau

SEQ ID NO: 1363715 - RNA, 19 nt, Artificial Sequence
  Description of Artificial Sequence: Synthetic oligonucleotide
  Antisense strand to SEQ ID NO: 1363714
auaccacuuaccauuuaua

SEQ ID NO: 1363716 - RNA, 19 nt, Artificial Sequence
  Description of Artificial Sequence: Synthetic oligonucleotide
  Sense strand starting at position 356 of SEQ ID NO: 1242657
ucaugaaggcgagaguucu

SEQ ID NO: 1363717 - RNA, 19 nt, Artificial Sequence
  Description of Artificial Sequence: Synthetic oligonucleotide
  Antisense strand to SEQ ID NO: 1363716
agaacucucgccuucauga

SEQ ID NO: 1363718 - RNA, 19 nt, Artificial Sequence
  Description of Artificial Sequence: Synthetic oligonucleotide
  Sense strand starting at position 366 of SEQ ID NO: 1242657
gagaguucucgugagaucc

SEQ ID NO: 1363719 - RNA, 19 nt, Artificial Sequence
  Description of Artificial Sequence: Synthetic oligonucleotide
  Antisense strand to SEQ ID NO: 1363718
ggaucucacgagaacucuc

SEQ ID NO: 1363720 - RNA, 19 nt, Artificial Sequence
  Description of Artificial Sequence: Synthetic oligonucleotide
  Sense strand starting at position 668 of SEQ ID NO: 1242657
aggugcugaccuggauaaa

SEQ ID NO: 1363721 - RNA, 19 nt, Artificial Sequence
  Description of Artificial Sequence: Synthetic oligonucleotide
  Antisense strand to SEQ ID NO: 1363720
uuuauccaggucagcaccu

SEQ ID NO: 1363722 - RNA, 19 nt, Artificial Sequence
  Description of Artificial Sequence: Synthetic oligonucleotide
  Sense strand starting at position 669 of SEQ ID NO: 1242657
ggugcugaccuggauaaag

SEQ ID NO: 1363723 - RNA, 19 nt, Artificial Sequence
  Description of Artificial Sequence: Synthetic oligonucleotide
  Antisense strand to SEQ ID NO: 1363722
cuuuauccaggucagcacc

SEQ ID NO: 1363724 - RNA, 19 nt, Artificial Sequence
  Description of Artificial Sequence: Synthetic oligonucleotide
  Sense strand starting at position 686 of SEQ ID NO: 1242657
agcagaggagucuaugcau

SEQ ID NO: 1363725 - RNA, 19 nt, Artificial Sequence
  Description of Artificial Sequence: Synthetic oligonucleotide
  Antisense strand to SEQ ID NO: 1363724
augcauagacuccucugcu

SEQ ID NO: 1363726 - RNA, 19 nt, Artificial Sequence
  Description of Artificial Sequence: Synthetic oligonucleotide
  Sense strand starting at position 840 of SEQ ID NO: 1242657
gggagcaauugaccacaua

SEQ ID NO: 1363727 - RNA, 19 nt, Artificial Sequence
  Description of Artificial Sequence: Synthetic oligonucleotide
  Antisense strand to SEQ ID NO: 1363726
uauguggucaauugcuccc

SEQ ID NO: 1363728 - RNA, 19 nt, Artificial Sequence
  Description of Artificial Sequence: Synthetic oligonucleotide
  Sense strand starting at position 882 of SEQ ID NO: 1242657
gggccuugaccacaguaaa

SEQ ID NO: 1363729 - RNA, 19 nt, Artificial Sequence
  Description of Artificial Sequence: Synthetic oligonucleotide
  Antisense strand to SEQ ID NO: 1363728
uuuacuguggucaaggccc

SEQ ID NO: 1363730 - RNA, 19 nt, Artificial Sequence
  Description of Artificial Sequence: Synthetic oligonucleotide
  Sense strand starting at position 990 of SEQ ID NO: 1242657
uggcaucuucugcagagga

SEQ ID NO: 1363731 - RNA, 19 nt, Artificial Sequence
  Description of Artificial Sequence: Synthetic oligonucleotide
  Antisense strand to SEQ ID NO: 1363730
uccucugcagaagaugcca

SEQ ID NO: 1363732 - RNA, 19 nt, Artificial Sequence
  Description of Artificial Sequence: Synthetic oligonucleotide
  Sense strand starting at position 992 of SEQ ID NO: 1242657
gcaucuucugcagaggaca

SEQ ID NO: 1363733 - RNA, 19 nt, Artificial Sequence
  Description of Artificial Sequence: Synthetic oligonucleotide
  Antisense strand to SEQ ID NO: 1363732
uguccucugcagaagaugc

SEQ ID NO: 1363734 - RNA, 19 nt, Artificial Sequence
  Description of Artificial Sequence: Synthetic oligonucleotide
  Sense strand starting at position 1094 of SEQ ID NO: 1242657
cuacauuucuuggagaaag

SEQ ID NO: 1363735 - RNA, 19 nt, Artificial Sequence
  Description of Artificial Sequence: Synthetic oligonucleotide
  Antisense strand to SEQ ID NO: 1363734
cuuucuccaagaaauguag

SEQ ID NO: 1363736 - RNA, 19 nt, Artificial Sequence
  Description of Artificial Sequence: Synthetic oligonucleotide
  Sense strand starting at position 1185 of SEQ ID NO: 1242657
caguaauggcagugaggaa

SEQ ID NO: 1363737 - RNA, 19 nt, Artificial Sequence
  Description of Artificial Sequence: Synthetic oligonucleotide
  Antisense strand to SEQ ID NO: 1363736
uuccucacugccauuacug

SEQ ID NO: 1363738 - RNA, 19 nt, Artificial Sequence
  Description of Artificial Sequence: Synthetic oligonucleotide
  Sense strand starting at position 1186 of SEQ ID NO: 1242657
aguaauggcagugaggaau

SEQ ID NO: 1363739 - RNA, 19 nt, Artificial Sequence
  Description of Artificial Sequence: Synthetic oligonucleotide
  Antisense strand to SEQ ID NO: 1363738
auuccucacugccauuacu

SEQ ID NO: 1363740 - RNA, 19 nt, Artificial Sequence
  Description of Artificial Sequence: Synthetic oligonucleotide
  Sense strand starting at position 1201 of SEQ ID NO: 1242657
gaaugaauguucuuugauu

SEQ ID NO: 1363741 - RNA, 19 nt, Artificial Sequence
  Description of Artificial Sequence: Synthetic oligonucleotide
  Antisense strand to SEQ ID NO: 1363740
aaucaaagaacauucauuc

SEQ ID NO: 1363742 - RNA, 19 nt, Artificial Sequence
  Description of Artificial Sequence: Synthetic oligonucleotide
  Sense strand starting at position 1213 of SEQ ID NO: 1242657
uuugauucugaaggcauca

SEQ ID NO: 1363743 - RNA, 19 nt, Artificial Sequence
  Description of Artificial Sequence: Synthetic oligonucleotide
  Antisense strand to SEQ ID NO: 1363742
ugaugccuucagaaucaaa

SEQ ID NO: 1363744 - RNA, 19 nt, Artificial Sequence
  Description of Artificial Sequence: Synthetic oligonucleotide
  Sense strand starting at position 1361 of SEQ ID NO: 1242657
acagguuucuuccugauga

SEQ ID NO: 1363745 - RNA, 19 nt, Artificial Sequence
  Description of Artificial Sequence: Synthetic oligonucleotide
  Antisense strand to SEQ ID NO: 1363744
ucaucaggaagaaaccugu

SEQ ID NO: 1363746 - RNA, 19 nt, Artificial Sequence
  Description of Artificial Sequence: Synthetic oligonucleotide
  Sense strand starting at position 1363 of SEQ ID NO: 1242657
agguuucuuccugaugaua

SEQ ID NO: 1363747 - RNA, 19 nt, Artificial Sequence
  Description of Artificial Sequence: Synthetic oligonucleotide
  Antisense strand to SEQ ID NO: 1363746
uaucaucaggaagaaaccu

SEQ ID NO: 1363748 - RNA, 19 nt, Artificial Sequence
  Description of Artificial Sequence: Synthetic oligonucleotide
  Sense strand starting at position 1757 of SEQ ID NO: 1242657
ugcaacuaccuugaguaaa

SEQ ID NO: 1363749 - RNA, 19 nt, Artificial Sequence
  Description of Artificial Sequence: Synthetic oligonucleotide
  Antisense strand to SEQ ID NO: 1363748
uuuacucaagguaguugca

SEQ ID NO: 1363750 - RNA, 19 nt, Artificial Sequence
  Description of Artificial Sequence: Synthetic oligonucleotide
  Sense strand starting at position 1784 of SEQ ID NO: 1242657
gccauuucucuuggauggu

SEQ ID NO: 1363751 - RNA, 19 nt, Artificial Sequence
  Description of Artificial Sequence: Synthetic oligonucleotide
  Antisense strand to SEQ ID NO: 1363750
accauccaagagaaauggc

SEQ ID NO: 1363752 - RNA, 19 nt, Artificial Sequence
  Description of Artificial Sequence: Synthetic oligonucleotide
  Sense strand starting at position 2017 of SEQ ID NO: 1242657
ucccuuugucuggacuuga

SEQ ID NO: 1363753 - RNA, 19 nt, Artificial Sequence
  Description of Artificial Sequence: Synthetic oligonucleotide
  Antisense strand to SEQ ID NO: 1363752
ucaaguccagacaaaggga

SEQ ID NO: 1363754 - RNA, 19 nt, Artificial Sequence
  Description of Artificial Sequence: Synthetic oligonucleotide
  Sense strand starting at position 2095 of SEQ ID NO: 1242657
gagccaagacccugggaua

SEQ ID NO: 1363755 - RNA, 19 nt, Artificial Sequence
  Description of Artificial Sequence: Synthetic oligonucleotide
  Antisense strand to SEQ ID NO: 1363754
uaucccagggucuuggcuc

SEQ ID NO: 1363756 - RNA, 19 nt, Artificial Sequence
  Description of Artificial Sequence: Synthetic oligonucleotide
  Sense strand starting at position 2096 of SEQ ID NO: 1242657
agccaagacccugggauau

SEQ ID NO: 1363757 - RNA, 19 nt, Artificial Sequence
  Description of Artificial Sequence: Synthetic oligonucleotide
  Antisense strand to SEQ ID NO: 1363756
auaucccagggucuuggcu

SEQ ID NO: 1363758 - RNA, 19 nt, Artificial Sequence
  Description of Artificial Sequence: Synthetic oligonucleotide
  Sense strand starting at position 2106 of SEQ ID NO: 1242657
cugggauauuggccuuaaa

SEQ ID NO: 1363759 - RNA, 19 nt, Artificial Sequence
  Description of Artificial Sequence: Synthetic oligonucleotide
  Antisense strand to SEQ ID NO: 1363758
uuuaaggccaauaucccag

SEQ ID NO: 1363760 - RNA, 19 nt, Artificial Sequence
  Description of Artificial Sequence: Synthetic oligonucleotide
  Sense strand starting at position 2251 of SEQ ID NO: 1242657
gcgcuaugucuccucugga

SEQ ID NO: 1363761 - RNA, 19 nt, Artificial Sequence
  Description of Artificial Sequence: Synthetic oligonucleotide
  Antisense strand to SEQ ID NO: 1363760
uccagaggagacauagcgc

SEQ ID NO: 1363762 - RNA, 19 nt, Artificial Sequence
  Description of Artificial Sequence: Synthetic oligonucleotide
  Sense strand starting at position 2398 of SEQ ID NO: 1242657
aucugaauucuuuaguuug

SEQ ID NO: 1363763 - RNA, 19 nt, Artificial Sequence
  Description of Artificial Sequence: Synthetic oligonucleotide
  Antisense strand to SEQ ID NO: 1363762
caaacuaaagaauucagau

SEQ ID NO: 1363764 - RNA, 19 nt, Artificial Sequence
  Description of Artificial Sequence: Synthetic oligonucleotide
  Sense strand starting at position 2431 of SEQ ID NO: 1242657
uguaguguacucuaauuag

SEQ ID NO: 1363765 - RNA, 19 nt, Artificial Sequence
  Description of Artificial Sequence: Synthetic oligonucleotide
  Antisense strand to SEQ ID NO: 1363764
cuaauuagaguacacuaca

SEQ ID NO: 1363766 - RNA, 19 nt, Artificial Sequence
  Description of Artificial Sequence: Synthetic oligonucleotide
  Sense strand starting at position 2434 of SEQ ID NO: 1242657
aguguacucuaauuagaag

SEQ ID NO: 1363767 - RNA, 19 nt, Artificial Sequence
  Description of Artificial Sequence: Synthetic oligonucleotide
  Antisense strand to SEQ ID NO: 1363766
cuucuaauuagaguacacu

SEQ ID NO: 1363768 - RNA, 19 nt, Artificial Sequence
  Description of Artificial Sequence: Synthetic oligonucleotide
  Sense strand starting at position 2518 of SEQ ID NO: 1242657
cuacuaaguauugggaaug

SEQ ID NO: 1363769 - RNA, 19 nt, Artificial Sequence
  Description of Artificial Sequence: Synthetic oligonucleotide
  Antisense strand to SEQ ID NO: 1363768
cauucccaauacuuaguag

SEQ ID NO: 1363770 - RNA, 19 nt, Artificial Sequence
  Description of Artificial Sequence: Synthetic oligonucleotide
  Sense strand starting at position 2665 of SEQ ID NO: 1242657
aaaggaauguaguucuaug

SEQ ID NO: 1363771 - RNA, 19 nt, Artificial Sequence
  Description of Artificial Sequence: Synthetic oligonucleotide
  Antisense strand to SEQ ID NO: 1363770
cauagaacuacauuccuuu

SEQ ID NO: 1363772 - RNA, 19 nt, Artificial Sequence
  Description of Artificial Sequence: Synthetic oligonucleotide
  Sense strand starting at position 2670 of SEQ ID NO: 1242657
aauguaguucuaugaaagg

SEQ ID NO: 1363773 - RNA, 19 nt, Artificial Sequence
  Description of Artificial Sequence: Synthetic oligonucleotide
  Antisense strand to SEQ ID NO: 1363772
ccuuucauagaacuacauu

SEQ ID NO: 1363774 - RNA, 19 nt, Artificial Sequence
  Description of Artificial Sequence: Synthetic oligonucleotide
  Sense strand starting at position 2737 of SEQ ID NO: 1242657
ugagcucugagcuaaagga

SEQ ID NO: 1363775 - RNA, 19 nt, Artificial Sequence
  Description of Artificial Sequence: Synthetic oligonucleotide
  Antisense strand to SEQ ID NO: 1363774
uccuuuagcucagagcuca

SEQ ID NO: 1363776 - RNA, 19 nt, Artificial Sequence
  Description of Artificial Sequence: Synthetic oligonucleotide
  Sense strand starting at position 2886 of SEQ ID NO: 1242657
caguucucucaugauugga

SEQ ID NO: 1363777 - RNA, 19 nt, Artificial Sequence
  Description of Artificial Sequence: Synthetic oligonucleotide
  Antisense strand to SEQ ID NO: 1363776
uccaaucaugagagaacug

SEQ ID NO: 1363778 - RNA, 19 nt, Artificial Sequence
  Description of Artificial Sequence: Synthetic oligonucleotide
  Sense strand starting at position 2888 of SEQ ID NO: 1242657
guucucucaugauuggaau

SEQ ID NO: 1363779 - RNA, 19 nt, Artificial Sequence
  Description of Artificial Sequence: Synthetic oligonucleotide
  Antisense strand to SEQ ID NO: 1363778
auuccaaucaugagagaac

SEQ ID NO: 1363780 - RNA, 19 nt, Artificial Sequence
  Description of Artificial Sequence: Synthetic oligonucleotide
  Sense strand starting at position 2889 of SEQ ID NO: 1242657
uucucucaugauuggaauu

SEQ ID NO: 1363781 - RNA, 19 nt, Artificial Sequence
  Description of Artificial Sequence: Synthetic oligonucleotide
  Antisense strand to SEQ ID NO: 1363780
aauuccaaucaugagagaa

SEQ ID NO: 1363782 - RNA, 19 nt, Artificial Sequence
  Description of Artificial Sequence: Synthetic oligonucleotide
  Sense strand starting at position 3435 of SEQ ID NO: 1242657
ugaagacaucuauguaacc

SEQ ID NO: 1363783 - RNA, 19 nt, Artificial Sequence
  Description of Artificial Sequence: Synthetic oligonucleotide
  Antisense strand to SEQ ID NO: 1363782
gguuacauagaugucuuca

SEQ ID NO: 1363784 - RNA, 19 nt, Artificial Sequence
  Description of Artificial Sequence: Synthetic oligonucleotide
  Sense strand starting at position 3505 of SEQ ID NO: 1242657
ggguaaacaucaucuuauc

SEQ ID NO: 1363785 - RNA, 19 nt, Artificial Sequence
  Description of Artificial Sequence: Synthetic oligonucleotide
  Antisense strand to SEQ ID NO: 1363784
gauaagaugauguuuaccc

SEQ ID NO: 1363786 - RNA, 19 nt, Artificial Sequence
  Description of Artificial Sequence: Synthetic oligonucleotide
  Sense strand starting at position 2167 of SEQ ID NO: 1242658
gggagccuuucugaggagu

SEQ ID NO: 1363787 - RNA, 19 nt, Artificial Sequence
  Description of Artificial Sequence: Synthetic oligonucleotide
  Antisense strand to SEQ ID NO: 1363786
acuccucagaaaggcuccc

SEQ ID NO: 1363788 - RNA, 19 nt, Artificial Sequence
  Description of Artificial Sequence: Synthetic oligonucleotide
  Sense strand starting at position 2169 of SEQ ID NO: 1242658
gagccuuucugaggagucu

SEQ ID NO: 1363789 - RNA, 19 nt, Artificial Sequence
  Description of Artificial Sequence: Synthetic oligonucleotide
  Antisense strand to SEQ ID NO: 1363788
agacuccucagaaaggcuc

SEQ ID NO: 1363790 - RNA, 19 nt, Artificial Sequence
  Description of Artificial Sequence: Synthetic oligonucleotide
  Sense strand starting at position 2217 of SEQ ID NO: 1242658
gcgugugucccagccgaga

SEQ ID NO: 1363791 - RNA, 19 nt, Artificial Sequence
  Description of Artificial Sequence: Synthetic oligonucleotide
  Antisense strand to SEQ ID NO: 1363790
ucucggcugggacacacgc

SEQ ID NO: 1363792 - RNA, 19 nt, Artificial Sequence
  Description of Artificial Sequence: Synthetic oligonucleotide
  Sense strand starting at position 2245 of SEQ ID NO: 1242658
ccgaguuucuucucuccca

SEQ ID NO: 1363793 - RNA, 19 nt, Artificial Sequence
  Description of Artificial Sequence: Synthetic oligonucleotide
  Antisense strand to SEQ ID NO: 1363792
ugggagagaagaaacucgg

SEQ ID NO: 1363794 - RNA, 19 nt, Artificial Sequence
  Description of Artificial Sequence: Synthetic oligonucleotide
  Sense strand starting at position 2246 of SEQ ID NO: 1242658
cgaguuucuucucucccaa

SEQ ID NO: 1363795 - RNA, 19 nt, Artificial Sequence
  Description of Artificial Sequence: Synthetic oligonucleotide
  Antisense strand to SEQ ID NO: 1363794
uugggagagaagaaacucg

SEQ ID NO: 1363796 - RNA, 19 nt, Artificial Sequence
  Description of Artificial Sequence: Synthetic oligonucleotide
  Sense strand starting at position 2750 of SEQ ID NO: 1242658
ugagcacucucuuauugca

SEQ ID NO: 1363797 - RNA, 19 nt, Artificial Sequence
  Description of Artificial Sequence: Synthetic oligonucleotide
  Antisense strand to SEQ ID NO: 1363796
ugcaauaagagagugcuca

SEQ ID NO: 1363798 - RNA, 19 nt, Artificial Sequence
  Description of Artificial Sequence: Synthetic oligonucleotide
  Sense strand starting at position 2937 of SEQ ID NO: 1242658
uucugagauuaguagguua

SEQ ID NO: 1363799 - RNA, 19 nt, Artificial Sequence
  Description of Artificial Sequence: Synthetic oligonucleotide
  Antisense strand to SEQ ID NO: 1363798
uaaccuacuaaucucagaa

SEQ ID NO: 1363800 - RNA, 19 nt, Artificial Sequence
  Description of Artificial Sequence: Synthetic oligonucleotide
  Sense strand starting at position 2939 of SEQ ID NO: 1242658
cugagauuaguagguuauu

SEQ ID NO: 1363801 - RNA, 19 nt, Artificial Sequence
  Description of Artificial Sequence: Synthetic oligonucleotide
  Antisense strand to SEQ ID NO: 1363800
aauaaccuacuaaucucag

SEQ ID NO: 1363802 - RNA, 19 nt, Artificial Sequence
  Description of Artificial Sequence: Synthetic oligonucleotide
  Sense strand starting at position 2950 of SEQ ID NO: 1242658
agguuauuggugcaaggag

SEQ ID NO: 1363803 - RNA, 19 nt, Artificial Sequence
  Description of Artificial Sequence: Synthetic oligonucleotide
  Antisense strand to SEQ ID NO: 1363802
cuccuugcaccaauaaccu

SEQ ID NO: 1363804 - RNA, 19 nt, Artificial Sequence
  Description of Artificial Sequence: Synthetic oligonucleotide
  Sense strand starting at position 2951 of SEQ ID NO: 1242658
gguuauuggugcaaggaga

SEQ ID NO: 1363805 - RNA, 19 nt, Artificial Sequence
  Description of Artificial Sequence: Synthetic oligonucleotide
  Antisense strand to SEQ ID NO: 1363804
ucuccuugcaccaauaacc

SEQ ID NO: 1363806 - RNA, 19 nt, Artificial Sequence
  Description of Artificial Sequence: Synthetic oligonucleotide
  Sense strand starting at position 2969 of SEQ ID NO: 1242658
aagugaggucugcaaagac

SEQ ID NO: 1363807 - RNA, 19 nt, Artificial Sequence
  Description of Artificial Sequence: Synthetic oligonucleotide
  Antisense strand to SEQ ID NO: 1363806
gucuuugcagaccucacuu

SEQ ID NO: 1363808 - RNA, 19 nt, Artificial Sequence
  Description of Artificial Sequence: Synthetic oligonucleotide
  Sense strand starting at position 3044 of SEQ ID NO: 1242658
ggagggagugagugugaaa

SEQ ID NO: 1363809 - RNA, 19 nt, Artificial Sequence
  Description of Artificial Sequence: Synthetic oligonucleotide
  Antisense strand to SEQ ID NO: 1363808
uuucacacucacucccucc

SEQ ID NO: 1363810 - RNA, 19 nt, Artificial Sequence
  Description of Artificial Sequence: Synthetic oligonucleotide
  Sense strand starting at position 3047 of SEQ ID NO: 1242658
gggagugagugugaaacau

SEQ ID NO: 1363811 - RNA, 19 nt, Artificial Sequence
  Description of Artificial Sequence: Synthetic oligonucleotide
  Antisense strand to SEQ ID NO: 1363810
auguuucacacucacuccc

SEQ ID NO: 1363812 - RNA, 19 nt, Artificial Sequence
  Description of Artificial Sequence: Synthetic oligonucleotide
  Sense strand starting at position 3093 of SEQ ID NO: 1242658
gcaagcuggucuugcacua

SEQ ID NO: 1363813 - RNA, 19 nt, Artificial Sequence
  Description of Artificial Sequence: Synthetic oligonucleotide
  Antisense strand to SEQ ID NO: 1363812
uagugcaagaccagcuugc

SEQ ID NO: 1363814 - RNA, 19 nt, Artificial Sequence
  Description of Artificial Sequence: Synthetic oligonucleotide
  Sense strand starting at position 3123 of SEQ ID NO: 1242658
ccauauugcuuccagcuga

SEQ ID NO: 1363815 - RNA, 19 nt, Artificial Sequence
  Description of Artificial Sequence: Synthetic oligonucleotide
  Antisense strand to SEQ ID NO: 1363814
ucagcuggaagcaauaugg

SEQ ID NO: 1363816 - RNA, 19 nt, Artificial Sequence
  Description of Artificial Sequence: Synthetic oligonucleotide
  Sense strand starting at position 3157 of SEQ ID NO: 1242658
uuauaagugaaaggaguuu

SEQ ID NO: 1363817 - RNA, 19 nt, Artificial Sequence
  Description of Artificial Sequence: Synthetic oligonucleotide
  Antisense strand to SEQ ID NO: 1363816
aaacuccuuucacuuauaa

SEQ ID NO: 1363818 - RNA, 19 nt, Artificial Sequence
  Description of Artificial Sequence: Synthetic oligonucleotide
  Sense strand starting at position 3214 of SEQ ID NO: 1242658
aagaauuucuguuaguggu

SEQ ID NO: 1363819 - RNA, 19 nt, Artificial Sequence
  Description of Artificial Sequence: Synthetic oligonucleotide
  Antisense strand to SEQ ID NO: 1363818
accacuaacagaaauucuu

SEQ ID NO: 1363820 - RNA, 19 nt, Artificial Sequence
  Description of Artificial Sequence: Synthetic oligonucleotide
  Sense strand starting at position 3216 of SEQ ID NO: 1242658
gaauuucuguuagugguuu

SEQ ID NO: 1363821 - RNA, 19 nt, Artificial Sequence
  Description of Artificial Sequence: Synthetic oligonucleotide
  Antisense strand to SEQ ID NO: 1363820
aaaccacuaacagaaauuc

SEQ ID NO: 1363822 - RNA, 19 nt, Artificial Sequence
  Description of Artificial Sequence: Synthetic oligonucleotide
  Sense strand starting at position 3220 of SEQ ID NO: 1242658
uucuguuagugguuucuuu

SEQ ID NO: 1363823 - RNA, 19 nt, Artificial Sequence
  Description of Artificial Sequence: Synthetic oligonucleotide
  Antisense strand to SEQ ID NO: 1363822
aaagaaaccacuaacagaa

SEQ ID NO: 1363824 - RNA, 19 nt, Artificial Sequence
  Description of Artificial Sequence: Synthetic oligonucleotide
  Sense strand starting at position 3224 of SEQ ID NO: 1242658
guuagugguuucuuuagcu

SEQ ID NO: 1363825 - RNA, 19 nt, Artificial Sequence
  Description of Artificial Sequence: Synthetic oligonucleotide
  Antisense strand to SEQ ID NO: 1363824
agcuaaagaaaccacuaac

SEQ ID NO: 1363826 - RNA, 19 nt, Artificial Sequence
  Description of Artificial Sequence: Synthetic oligonucleotide
  Sense strand starting at position 3247 of SEQ ID NO: 1242658
ggagcauggucucaugauu

SEQ ID NO: 1363827 - RNA, 19 nt, Artificial Sequence
  Description of Artificial Sequence: Synthetic oligonucleotide
  Antisense strand to SEQ ID NO: 1363826
aaucaugagaccaugcucc

SEQ ID NO: 1363828 - RNA, 19 nt, Artificial Sequence
  Description of Artificial Sequence: Synthetic oligonucleotide
  Sense strand starting at position 3511 of SEQ ID NO: 1242658
acgauuucuccauguuggu

SEQ ID NO: 1363829 - RNA, 19 nt, Artificial Sequence
  Description of Artificial Sequence: Synthetic oligonucleotide
  Antisense strand to SEQ ID NO: 1363828
accaacauggagaaaucgu

SEQ ID NO: 1363830 - RNA, 19 nt, Artificial Sequence
  Description of Artificial Sequence: Synthetic oligonucleotide
  Sense strand starting at position 3771 of SEQ ID NO: 1242658
gccagauaaucuuuguauu

SEQ ID NO: 1363831 - RNA, 19 nt, Artificial Sequence
  Description of Artificial Sequence: Synthetic oligonucleotide
  Antisense strand to SEQ ID NO: 1363830
aauacaaagauuaucuggc

SEQ ID NO: 1363832 - RNA, 19 nt, Artificial Sequence
  Description of Artificial Sequence: Synthetic oligonucleotide
  Sense strand starting at position 3895 of SEQ ID NO: 1242658
gcugucauccuuuaugcca

SEQ ID NO: 1363833 - RNA, 19 nt, Artificial Sequence
  Description of Artificial Sequence: Synthetic oligonucleotide
  Antisense strand to SEQ ID NO: 1363832
uggcauaaaggaugacagc

SEQ ID NO: 1363834 - RNA, 19 nt, Artificial Sequence
  Description of Artificial Sequence: Synthetic oligonucleotide
  Sense strand starting at position 3910 of SEQ ID NO: 1242658
gccacuuccuaauugaugu

SEQ ID NO: 1363835 - RNA, 19 nt, Artificial Sequence
  Description of Artificial Sequence: Synthetic oligonucleotide
  Antisense strand to SEQ ID NO: 1363834
acaucaauuaggaaguggc

SEQ ID NO: 1363836 - RNA, 19 nt, Artificial Sequence
  Description of Artificial Sequence: Synthetic oligonucleotide
  Sense strand starting at position 3920 of SEQ ID NO: 1242658
aauugauguuccuugugac

SEQ ID NO: 1363837 - RNA, 19 nt, Artificial Sequence
  Description of Artificial Sequence: Synthetic oligonucleotide
  Antisense strand to SEQ ID NO: 1363836
gucacaaggaacaucaauu

SEQ ID NO: 1363838 - RNA, 19 nt, Artificial Sequence
  Description of Artificial Sequence: Synthetic oligonucleotide
  Sense strand starting at position 3921 of SEQ ID NO: 1242658
auugauguuccuugugaca

SEQ ID NO: 1363839 - RNA, 19 nt, Artificial Sequence
  Description of Artificial Sequence: Synthetic oligonucleotide
  Antisense strand to SEQ ID NO: 1363838
ugucacaaggaacaucaau

SEQ ID NO: 1363840 - RNA, 19 nt, Artificial Sequence
  Description of Artificial Sequence: Synthetic oligonucleotide
  Sense strand starting at position 3923 of SEQ ID NO: 1242658
ugauguuccuugugacaug

SEQ ID NO: 1363841 - RNA, 19 nt, Artificial Sequence
  Description of Artificial Sequence: Synthetic oligonucleotide
  Antisense strand to SEQ ID NO: 1363840
caugucacaaggaacauca

SEQ ID NO: 1363842 - RNA, 19 nt, Artificial Sequence
  Description of Artificial Sequence: Synthetic oligonucleotide
  Sense strand starting at position 3924 of SEQ ID NO: 1242658
gauguuccuugugacauga

SEQ ID NO: 1363843 - RNA, 19 nt, Artificial Sequence
  Description of Artificial Sequence: Synthetic oligonucleotide
  Antisense strand to SEQ ID NO: 1363842
ucaugucacaaggaacauc

SEQ ID NO: 1363844 - RNA, 19 nt, Artificial Sequence
  Description of Artificial Sequence: Synthetic oligonucleotide
  Sense strand starting at position 3926 of SEQ ID NO: 1242658
uguuccuugugacaugaau

SEQ ID NO: 1363845 - RNA, 19 nt, Artificial Sequence
  Description of Artificial Sequence: Synthetic oligonucleotide
  Antisense strand to SEQ ID NO: 1363844
auucaugucacaaggaaca

SEQ ID NO: 1363846 - RNA, 19 nt, Artificial Sequence
  Description of Artificial Sequence: Synthetic oligonucleotide
  Sense strand starting at position 3932 of SEQ ID NO: 1242658
uugugacaugaaugaauua

SEQ ID NO: 1363847 - RNA, 19 nt, Artificial Sequence
  Description of Artificial Sequence: Synthetic oligonucleotide
  Antisense strand to SEQ ID NO: 1363846
uaauucauucaugucacaa

SEQ ID NO: 1363848 - RNA, 19 nt, Artificial Sequence
  Description of Artificial Sequence: Synthetic oligonucleotide
  Sense strand starting at position 3944 of SEQ ID NO: 1242658
ugaauuauguacugguuau

SEQ ID NO: 1363849 - RNA, 19 nt, Artificial Sequence
  Description of Artificial Sequence: Synthetic oligonucleotide
  Antisense strand to SEQ ID NO: 1363848
auaaccaguacauaauuca

SEQ ID NO: 1363850 - RNA, 19 nt, Artificial Sequence
  Description of Artificial Sequence: Synthetic oligonucleotide
  Sense strand starting at position 3972 of SEQ ID NO: 1242658
gguccucagccagaauaua

SEQ ID NO: 1363851 - RNA, 19 nt, Artificial Sequence
  Description of Artificial Sequence: Synthetic oligonucleotide
  Antisense strand to SEQ ID NO: 1363850
uauauucuggcugaggacc

SEQ ID NO: 1363852 - RNA, 19 nt, Artificial Sequence
  Description of Artificial Sequence: Synthetic oligonucleotide
  Sense strand starting at position 607 of SEQ ID NO: 1242659
gggccuuuccugcaaagac

SEQ ID NO: 1363853 - RNA, 19 nt, Artificial Sequence
  Description of Artificial Sequence: Synthetic oligonucleotide
  Antisense strand to SEQ ID NO: 1363852
gucuuugcaggaaaggccc

SEQ ID NO: 1363854 - RNA, 19 nt, Artificial Sequence
  Description of Artificial Sequence: Synthetic oligonucleotide
  Sense strand starting at position 1041 of SEQ ID NO: 1242659
ucccguuccuggucaauga

SEQ ID NO: 1363855 - RNA, 19 nt, Artificial Sequence
  Description of Artificial Sequence: Synthetic oligonucleotide
  Antisense strand to SEQ ID NO: 1363854
ucauugaccaggaacggga

SEQ ID NO: 1363856 - RNA, 19 nt, Artificial Sequence
  Description of Artificial Sequence: Synthetic oligonucleotide
  Sense strand starting at position 1163 of SEQ ID NO: 1242659
ggaggagagugaugguagu

SEQ ID NO: 1363857 - RNA, 19 nt, Artificial Sequence
  Description of Artificial Sequence: Synthetic oligonucleotide
  Antisense strand to SEQ ID NO: 1363856
acuaccaucacucuccucc

SEQ ID NO: 1363858 - RNA, 19 nt, Artificial Sequence
  Description of Artificial Sequence: Synthetic oligonucleotide
  Sense strand starting at position 1192 of SEQ ID NO: 1242659
gagaauccucccugcagga

SEQ ID NO: 1363859 - RNA, 19 nt, Artificial Sequence
  Description of Artificial Sequence: Synthetic oligonucleotide
  Antisense strand to SEQ ID NO: 1363858
uccugcagggaggauucuc

SEQ ID NO: 1363860 - RNA, 19 nt, Artificial Sequence
  Description of Artificial Sequence: Synthetic oligonucleotide
  Sense strand starting at position 1569 of SEQ ID NO: 1242659
agggauccgucacugaaca

SEQ ID NO: 1363861 - RNA, 19 nt, Artificial Sequence
  Description of Artificial Sequence: Synthetic oligonucleotide
  Antisense strand to SEQ ID NO: 1363860
uguucagugacggaucccu

SEQ ID NO: 1363862 - RNA, 19 nt, Artificial Sequence
  Description of Artificial Sequence: Synthetic oligonucleotide
  Sense strand starting at position 1706 of SEQ ID NO: 1242659
ggcccuguguuugaagguu

SEQ ID NO: 1363863 - RNA, 19 nt, Artificial Sequence
  Description of Artificial Sequence: Synthetic oligonucleotide
  Antisense strand to SEQ ID NO: 1363862
aaccuucaaacacagggcc

SEQ ID NO: 1363864 - RNA, 19 nt, Artificial Sequence
  Description of Artificial Sequence: Synthetic oligonucleotide
  Sense strand starting at position 2420 of SEQ ID NO: 1242659
gacgcucuguccugacaac

SEQ ID NO: 1363865 - RNA, 19 nt, Artificial Sequence
  Description of Artificial Sequence: Synthetic oligonucleotide
  Antisense strand to SEQ ID NO: 1363864
guugucaggacagagcguc

SEQ ID NO: 1363866 - RNA, 19 nt, Artificial Sequence
  Description of Artificial Sequence: Synthetic oligonucleotide
  Sense strand starting at position 2421 of SEQ ID NO: 1242659
acgcucuguccugacaacu

SEQ ID NO: 1363867 - RNA, 19 nt, Artificial Sequence
  Description of Artificial Sequence: Synthetic oligonucleotide
  Antisense strand to SEQ ID NO: 1363866
aguugucaggacagagcgu

SEQ ID NO: 1363868 - RNA, 19 nt, Artificial Sequence
  Description of Artificial Sequence: Synthetic oligonucleotide
  Sense strand starting at position 2731 of SEQ ID NO: 1242659
ggccucucucaagaguaag

SEQ ID NO: 1363869 - RNA, 19 nt, Artificial Sequence
  Description of Artificial Sequence: Synthetic oligonucleotide
  Antisense strand to SEQ ID NO: 1363868
cuuacucuugagagaggcc

SEQ ID NO: 1363870 - RNA, 19 nt, Artificial Sequence
  Description of Artificial Sequence: Synthetic oligonucleotide
  Sense strand starting at position 2741 of SEQ ID NO: 1242659
aagaguaagucccaggaau

SEQ ID NO: 1363871 - RNA, 19 nt, Artificial Sequence
  Description of Artificial Sequence: Synthetic oligonucleotide
  Antisense strand to SEQ ID NO: 1363870
auuccugggacuuacucuu

SEQ ID NO: 1363872 - RNA, 19 nt, Artificial Sequence
  Description of Artificial Sequence: Synthetic oligonucleotide
  Sense strand starting at position 2837 of SEQ ID NO: 1242659
ggcuuugcaucucuugagu

SEQ ID NO: 1363873 - RNA, 19 nt, Artificial Sequence
  Description of Artificial Sequence: Synthetic oligonucleotide
  Antisense strand to SEQ ID NO: 1363872
acucaagagaugcaaagcc

SEQ ID NO: 1363874 - RNA, 19 nt, Artificial Sequence
  Description of Artificial Sequence: Synthetic oligonucleotide
  Sense strand starting at position 2839 of SEQ ID NO: 1242659
cuuugcaucucuugagucu

SEQ ID NO: 1363875 - RNA, 19 nt, Artificial Sequence
  Description of Artificial Sequence: Synthetic oligonucleotide
  Antisense strand to SEQ ID NO: 1363874
agacucaagagaugcaaag

SEQ ID NO: 1363876 - RNA, 19 nt, Artificial Sequence
  Description of Artificial Sequence: Synthetic oligonucleotide
  Sense strand starting at position 2881 of SEQ ID NO: 1242659
ggagaaauaugcuaccuuc

SEQ ID NO: 1363877 - RNA, 19 nt, Artificial Sequence
  Description of Artificial Sequence: Synthetic oligonucleotide
  Antisense strand to SEQ ID NO: 1363876
gaagguagcauauuucucc

SEQ ID NO: 1363878 - RNA, 19 nt, Artificial Sequence
  Description of Artificial Sequence: Synthetic oligonucleotide
  Sense strand starting at position 2907 of SEQ ID NO: 1242659
aggugaacugaaugaggua

SEQ ID NO: 1363879 - RNA, 19 nt, Artificial Sequence
  Description of Artificial Sequence: Synthetic oligonucleotide
  Antisense strand to SEQ ID NO: 1363878
uaccucauucaguucaccu

SEQ ID NO: 1363880 - RNA, 19 nt, Artificial Sequence
  Description of Artificial Sequence: Synthetic oligonucleotide
  Sense strand starting at position 2936 of SEQ ID NO: 1242659
agcccuagcucugcuuuau

SEQ ID NO: 1363881 - RNA, 19 nt, Artificial Sequence
  Description of Artificial Sequence: Synthetic oligonucleotide
  Antisense strand to SEQ ID NO: 1363880
auaaagcagagcuagggcu

SEQ ID NO: 1363882 - RNA, 19 nt, Artificial Sequence
  Description of Artificial Sequence: Synthetic oligonucleotide
  Sense strand starting at position 2996 of SEQ ID NO: 1242659
ugugccaggccauauagau

SEQ ID NO: 1363883 - RNA, 19 nt, Artificial Sequence
  Description of Artificial Sequence: Synthetic oligonucleotide
  Antisense strand to SEQ ID NO: 1363882
aucuauauggccuggcaca

SEQ ID NO: 1363884 - RNA, 19 nt, Artificial Sequence
  Description of Artificial Sequence: Synthetic oligonucleotide
  Sense strand starting at position 3002 of SEQ ID NO: 1242659
aggccauauagaugcuaga

SEQ ID NO: 1363885 - RNA, 19 nt, Artificial Sequence
  Description of Artificial Sequence: Synthetic oligonucleotide
  Antisense strand to SEQ ID NO: 1363884
ucuagcaucuauauggccu

SEQ ID NO: 1363886 - RNA, 19 nt, Artificial Sequence
  Description of Artificial Sequence: Synthetic oligonucleotide
  Sense strand starting at position 3005 of SEQ ID NO: 1242659
ccauauagaugcuagaaca

SEQ ID NO: 1363887 - RNA, 19 nt, Artificial Sequence
  Description of Artificial Sequence: Synthetic oligonucleotide
  Antisense strand to SEQ ID NO: 1363886
uguucuagcaucuauaugg

SEQ ID NO: 1363888 - RNA, 19 nt, Artificial Sequence
  Description of Artificial Sequence: Synthetic oligonucleotide
  Sense strand starting at position 3054 of SEQ ID NO: 1242659
gagucaaggugggauacaa

SEQ ID NO: 1363889 - RNA, 19 nt, Artificial Sequence
  Description of Artificial Sequence: Synthetic oligonucleotide
  Antisense strand to SEQ ID NO: 1363888
uuguaucccaccuugacuc

SEQ ID NO: 1363890 - RNA, 19 nt, Artificial Sequence
  Description of Artificial Sequence: Synthetic oligonucleotide
  Sense strand starting at position 3079 of SEQ ID NO: 1242659
agagaugaaugucauauau

SEQ ID NO: 1363891 - RNA, 19 nt, Artificial Sequence
  Description of Artificial Sequence: Synthetic oligonucleotide
  Antisense strand to SEQ ID NO: 1363890
auauaugacauucaucucu

SEQ ID NO: 1363892 - RNA, 19 nt, Artificial Sequence
  Description of Artificial Sequence: Synthetic oligonucleotide
  Sense strand starting at position 3081 of SEQ ID NO: 1242659
agaugaaugucauauauga

SEQ ID NO: 1363893 - RNA, 19 nt, Artificial Sequence
  Description of Artificial Sequence: Synthetic oligonucleotide
  Antisense strand to SEQ ID NO: 1363892
ucauauaugacauucaucu

SEQ ID NO: 1363894 - RNA, 19 nt, Artificial Sequence
  Description of Artificial Sequence: Synthetic oligonucleotide
  Sense strand starting at position 3086 of SEQ ID NO: 1242659
aaugucauauaugagauga

SEQ ID NO: 1363895 - RNA, 19 nt, Artificial Sequence
  Description of Artificial Sequence: Synthetic oligonucleotide
  Antisense strand to SEQ ID NO: 1363894
ucaucucauauaugacauu

SEQ ID NO: 1363896 - RNA, 19 nt, Artificial Sequence
  Description of Artificial Sequence: Synthetic oligonucleotide
  Sense strand starting at position 3088 of SEQ ID NO: 1242659
ugucauauaugagaugauc

SEQ ID NO: 1363897 - RNA, 19 nt, Artificial Sequence
  Description of Artificial Sequence: Synthetic oligonucleotide
  Antisense strand to SEQ ID NO: 1363896
gaucaucucauauaugaca

SEQ ID NO: 1363898 - RNA, 19 nt, Artificial Sequence
  Description of Artificial Sequence: Synthetic oligonucleotide
  Sense strand starting at position 3097 of SEQ ID NO: 1242659
ugagaugaucuauggugua

SEQ ID NO: 1363899 - RNA, 19 nt, Artificial Sequence
  Description of Artificial Sequence: Synthetic oligonucleotide
  Antisense strand to SEQ ID NO: 1363898
uacaccauagaucaucuca

SEQ ID NO: 1363900 - RNA, 19 nt, Artificial Sequence
  Description of Artificial Sequence: Synthetic oligonucleotide
  Sense strand starting at position 3100 of SEQ ID NO: 1242659
gaugaucuaugguguacuu

SEQ ID NO: 1363901 - RNA, 19 nt, Artificial Sequence
  Description of Artificial Sequence: Synthetic oligonucleotide
  Antisense strand to SEQ ID NO: 1363900
aaguacaccauagaucauc

SEQ ID NO: 1363902 - RNA, 19 nt, Artificial Sequence
  Description of Artificial Sequence: Synthetic oligonucleotide
  Sense strand starting at position 3110 of SEQ ID NO: 1242659
gguguacuucaauggugua

SEQ ID NO: 1363903 - RNA, 19 nt, Artificial Sequence
  Description of Artificial Sequence: Synthetic oligonucleotide
  Antisense strand to SEQ ID NO: 1363902
uacaccauugaaguacacc

SEQ ID NO: 1363904 - RNA, 19 nt, Artificial Sequence
  Description of Artificial Sequence: Synthetic oligonucleotide
  Sense strand starting at position 3299 of SEQ ID NO: 1242659
gguggagugugucuguaau

SEQ ID NO: 1363905 - RNA, 19 nt, Artificial Sequence
  Description of Artificial Sequence: Synthetic oligonucleotide
  Antisense strand to SEQ ID NO: 1363904
auuacagacacacuccacc

SEQ ID NO: 1363906 - RNA, 19 nt, Artificial Sequence
  Description of Artificial Sequence: Synthetic oligonucleotide
  Sense strand starting at position 3460 of SEQ ID NO: 1242659
cugugauacuuacuacaug

SEQ ID NO: 1363907 - RNA, 19 nt, Artificial Sequence
  Description of Artificial Sequence: Synthetic oligonucleotide
  Antisense strand to SEQ ID NO: 1363906
cauguaguaaguaucacag

SEQ ID NO: 1363908 - RNA, 19 nt, Artificial Sequence
  Description of Artificial Sequence: Synthetic oligonucleotide
  Sense strand starting at position 3461 of SEQ ID NO: 1242659
ugugauacuuacuacauga

SEQ ID NO: 1363909 - RNA, 19 nt, Artificial Sequence
  Description of Artificial Sequence: Synthetic oligonucleotide
  Antisense strand to SEQ ID NO: 1363908
ucauguaguaaguaucaca

SEQ ID NO: 1363910 - RNA, 19 nt, Artificial Sequence
  Description of Artificial Sequence: Synthetic oligonucleotide
  Sense strand starting at position 3508 of SEQ ID NO: 1242659
guguguagggucuaaggua

SEQ ID NO: 1363911 - RNA, 19 nt, Artificial Sequence
  Description of Artificial Sequence: Synthetic oligonucleotide
  Antisense strand to SEQ ID NO: 1363910
uaccuuagacccuacacac

SEQ ID NO: 1363912 - RNA, 19 nt, Artificial Sequence
  Description of Artificial Sequence: Synthetic oligonucleotide
  Sense strand starting at position 3516 of SEQ ID NO: 1242659
ggucuaagguaguuggaga

SEQ ID NO: 1363913 - RNA, 19 nt, Artificial Sequence
  Description of Artificial Sequence: Synthetic oligonucleotide
  Antisense strand to SEQ ID NO: 1363912
ucuccaacuaccuuagacc

SEQ ID NO: 1363914 - RNA, 19 nt, Artificial Sequence
  Description of Artificial Sequence: Synthetic oligonucleotide
  Sense strand starting at position 3540 of SEQ ID NO: 1242659
gggagcucuuucuguagga

SEQ ID NO: 1363915 - RNA, 19 nt, Artificial Sequence
  Description of Artificial Sequence: Synthetic oligonucleotide
  Antisense strand to SEQ ID NO: 1363914
uccuacagaaagagcuccc

SEQ ID NO: 1363916 - RNA, 19 nt, Artificial Sequence
  Description of Artificial Sequence: Synthetic oligonucleotide
  Sense strand starting at position 3577 of SEQ ID NO: 1242659
gugugaacuaguggaaguu

SEQ ID NO: 1363917 - RNA, 19 nt, Artificial Sequence
  Description of Artificial Sequence: Synthetic oligonucleotide
  Antisense strand to SEQ ID NO: 1363916
aacuuccacuaguucacac

SEQ ID NO: 1363918 - RNA, 19 nt, Artificial Sequence
  Description of Artificial Sequence: Synthetic oligonucleotide
  Sense strand starting at position 3872 of SEQ ID NO: 1242659
acuguacccugaucugagu

SEQ ID NO: 1363919 - RNA, 19 nt, Artificial Sequence
  Description of Artificial Sequence: Synthetic oligonucleotide
  Antisense strand to SEQ ID NO: 1363918
acucagaucaggguacagu

SEQ ID NO: 1363920 - RNA, 19 nt, Artificial Sequence
  Description of Artificial Sequence: Synthetic oligonucleotide
  Sense strand starting at position 3967 of SEQ ID NO: 1242659
gcuucucagaaguagugau

SEQ ID NO: 1363921 - RNA, 19 nt, Artificial Sequence
  Description of Artificial Sequence: Synthetic oligonucleotide
  Antisense strand to SEQ ID NO: 1363920
aucacuacuucugagaagc

SEQ ID NO: 1363922 - RNA, 19 nt, Artificial Sequence
  Description of Artificial Sequence: Synthetic oligonucleotide
  Sense strand starting at position 340 of SEQ ID NO: 1242660
auacuugugccuuacagaa

SEQ ID NO: 1363923 - RNA, 19 nt, Artificial Sequence
  Description of Artificial Sequence: Synthetic oligonucleotide
  Antisense strand to SEQ ID NO: 1363922
uucuguaaggcacaaguau

SEQ ID NO: 1363924 - RNA, 19 nt, Artificial Sequence
  Description of Artificial Sequence: Synthetic oligonucleotide
  Sense strand starting at position 342 of SEQ ID NO: 1242660
acuugugccuuacagaaau

SEQ ID NO: 1363925 - RNA, 19 nt, Artificial Sequence
  Description of Artificial Sequence: Synthetic oligonucleotide
  Antisense strand to SEQ ID NO: 1363924
auuucuguaaggcacaagu

SEQ ID NO: 1363926 - RNA, 19 nt, Artificial Sequence
  Description of Artificial Sequence: Synthetic oligonucleotide
  Sense strand starting at position 410 of SEQ ID NO: 1242660
cuggaauaauuggaaauga

SEQ ID NO: 1363927 - RNA, 19 nt, Artificial Sequence
  Description of Artificial Sequence: Synthetic oligonucleotide
  Antisense strand to SEQ ID NO: 1363926
ucauuuccaauuauuccag

SEQ ID NO: 1363928 - RNA, 19 nt, Artificial Sequence
  Description of Artificial Sequence: Synthetic oligonucleotide
  Sense strand starting at position 437 of SEQ ID NO: 1242660
cugaaauaaucucccgcaa

SEQ ID NO: 1363929 - RNA, 19 nt, Artificial Sequence
  Description of Artificial Sequence: Synthetic oligonucleotide
  Antisense strand to SEQ ID NO: 1363928
uugcgggagauuauuucag

SEQ ID NO: 1363930 - RNA, 19 nt, Artificial Sequence
  Description of Artificial Sequence: Synthetic oligonucleotide
  Sense strand starting at position 858 of SEQ ID NO: 1242660
gaucuacauguugguaaca

SEQ ID NO: 1363931 - RNA, 19 nt, Artificial Sequence
  Description of Artificial Sequence: Synthetic oligonucleotide
  Antisense strand to SEQ ID NO: 1363930
uguuaccaacauguagauc

SEQ ID NO: 1363932 - RNA, 19 nt, Artificial Sequence
  Description of Artificial Sequence: Synthetic oligonucleotide
  Sense strand starting at position 860 of SEQ ID NO: 1242660
ucuacauguugguaacaaa

SEQ ID NO: 1363933 - RNA, 19 nt, Artificial Sequence
  Description of Artificial Sequence: Synthetic oligonucleotide
  Antisense strand to SEQ ID NO: 1363932
uuuguuaccaacauguaga

SEQ ID NO: 1363934 - RNA, 19 nt, Artificial Sequence
  Description of Artificial Sequence: Synthetic oligonucleotide
  Sense strand starting at position 876 of SEQ ID NO: 1242660
aaacgagggccuuacgaau

SEQ ID NO: 1363935 - RNA, 19 nt, Artificial Sequence
  Description of Artificial Sequence: Synthetic oligonucleotide
  Antisense strand to SEQ ID NO: 1363934
auucguaaggcccucguuu

SEQ ID NO: 1363936 - RNA, 19 nt, Artificial Sequence
  Description of Artificial Sequence: Synthetic oligonucleotide
  Sense strand starting at position 921 of SEQ ID NO: 1242660
auuagauguuaaggcuuaa

SEQ ID NO: 1363937 - RNA, 19 nt, Artificial Sequence
  Description of Artificial Sequence: Synthetic oligonucleotide
  Antisense strand to SEQ ID NO: 1363936
uuaagccuuaacaucuaau

SEQ ID NO: 1363938 - RNA, 19 nt, Artificial Sequence
  Description of Artificial Sequence: Synthetic oligonucleotide
  Sense strand starting at position 933 of SEQ ID NO: 1242660
ggcuuaaaggaaugucuau

SEQ ID NO: 1363939 - RNA, 19 nt, Artificial Sequence
  Description of Artificial Sequence: Synthetic oligonucleotide
  Antisense strand to SEQ ID NO: 1363938
auagacauuccuuuaagcc

SEQ ID NO: 1363940 - RNA, 19 nt, Artificial Sequence
  Description of Artificial Sequence: Synthetic oligonucleotide
  Sense strand starting at position 940 of SEQ ID NO: 1242660
aggaaugucuauuauucca

SEQ ID NO: 1363941 - RNA, 19 nt, Artificial Sequence
  Description of Artificial Sequence: Synthetic oligonucleotide
  Antisense strand to SEQ ID NO: 1363940
uggaauaauagacauuccu

SEQ ID NO: 1363942 - RNA, 19 nt, Artificial Sequence
  Description of Artificial Sequence: Synthetic oligonucleotide
  Sense strand starting at position 945 of SEQ ID NO: 1242660
ugucuauuauuccaguaaa

SEQ ID NO: 1363943 - RNA, 19 nt, Artificial Sequence
  Description of Artificial Sequence: Synthetic oligonucleotide
  Antisense strand to SEQ ID NO: 1363942
uuuacuggaauaauagaca

SEQ ID NO: 1363944 - RNA, 19 nt, Artificial Sequence
  Description of Artificial Sequence: Synthetic oligonucleotide
  Sense strand starting at position 1195 of SEQ ID NO: 1242660
aggccaaauuuguaacagu

SEQ ID NO: 1363945 - RNA, 19 nt, Artificial Sequence
  Description of Artificial Sequence: Synthetic oligonucleotide
  Antisense strand to SEQ ID NO: 1363944
acuguuacaaauuuggccu

SEQ ID NO: 1363946 - RNA, 19 nt, Artificial Sequence
  Description of Artificial Sequence: Synthetic oligonucleotide
  Sense strand starting at position 1198 of SEQ ID NO: 1242660
ccaaauuuguaacagugga

SEQ ID NO: 1363947 - RNA, 19 nt, Artificial Sequence
  Description of Artificial Sequence: Synthetic oligonucleotide
  Antisense strand to SEQ ID NO: 1363946
uccacuguuacaaauuugg

SEQ ID NO: 1363948 - RNA, 19 nt, Artificial Sequence
  Description of Artificial Sequence: Synthetic oligonucleotide
  Sense strand starting at position 1371 of SEQ ID NO: 1242660
cuccaaauucgccgaaacu

SEQ ID NO: 1363949 - RNA, 19 nt, Artificial Sequence
  Description of Artificial Sequence: Synthetic oligonucleotide
  Antisense strand to SEQ ID NO: 1363948
aguuucggcgaauuuggag

SEQ ID NO: 1363950 - RNA, 19 nt, Artificial Sequence
  Description of Artificial Sequence: Synthetic oligonucleotide
  Sense strand starting at position 1940 of SEQ ID NO: 1242660
gcaugauuugguggccauc

SEQ ID NO: 1363951 - RNA, 19 nt, Artificial Sequence
  Description of Artificial Sequence: Synthetic oligonucleotide
  Antisense strand to SEQ ID NO: 1363950
gauggccaccaaaucaugc

SEQ ID NO: 1363952 - RNA, 19 nt, Artificial Sequence
  Description of Artificial Sequence: Synthetic oligonucleotide
  Sense strand starting at position 2230 of SEQ ID NO: 1242660
gcgagcucgcccagaguau

SEQ ID NO: 1363953 - RNA, 19 nt, Artificial Sequence
  Description of Artificial Sequence: Synthetic oligonucleotide
  Antisense strand to SEQ ID NO: 1363952
auacucugggcgagcucgc

SEQ ID NO: 1363954 - RNA, 19 nt, Artificial Sequence
  Description of Artificial Sequence: Synthetic oligonucleotide
  Sense strand starting at position 2486 of SEQ ID NO: 1242660
cguggauccuggcauuuaa

SEQ ID NO: 1363955 - RNA, 19 nt, Artificial Sequence
  Description of Artificial Sequence: Synthetic oligonucleotide
  Antisense strand to SEQ ID NO: 1363954
uuaaaugccaggauccacg

SEQ ID NO: 1363956 - RNA, 19 nt, Artificial Sequence
  Description of Artificial Sequence: Synthetic oligonucleotide
  Sense strand starting at position 2513 of SEQ ID NO: 1242660
aguagauguuaccaaggcu

SEQ ID NO: 1363957 - RNA, 19 nt, Artificial Sequence
  Description of Artificial Sequence: Synthetic oligonucleotide
  Antisense strand to SEQ ID NO: 1363956
agccuugguaacaucuacu

SEQ ID NO: 1363958 - RNA, 19 nt, Artificial Sequence
  Description of Artificial Sequence: Synthetic oligonucleotide
  Sense strand starting at position 2516 of SEQ ID NO: 1242660
agauguuaccaaggcuaau

SEQ ID NO: 1363959 - RNA, 19 nt, Artificial Sequence
  Description of Artificial Sequence: Synthetic oligonucleotide
  Antisense strand to SEQ ID NO: 1363958
auuagccuugguaacaucu

SEQ ID NO: 1363960 - RNA, 19 nt, Artificial Sequence
  Description of Artificial Sequence: Synthetic oligonucleotide
  Sense strand starting at position 2529 of SEQ ID NO: 1242660
gcuaaucauugagaaauua

SEQ ID NO: 1363961 - RNA, 19 nt, Artificial Sequence
  Description of Artificial Sequence: Synthetic oligonucleotide
  Antisense strand to SEQ ID NO: 1363960
uaauuucucaaugauuagc

SEQ ID NO: 1363962 - RNA, 19 nt, Artificial Sequence
  Description of Artificial Sequence: Synthetic oligonucleotide
  Sense strand starting at position 2537 of SEQ ID NO: 1242660
uugagaaauuaugauagac

SEQ ID NO: 1363963 - RNA, 19 nt, Artificial Sequence
  Description of Artificial Sequence: Synthetic oligonucleotide
  Antisense strand to SEQ ID NO: 1363962
gucuaucauaauuucucaa

SEQ ID NO: 1363964 - RNA, 19 nt, Artificial Sequence
  Description of Artificial Sequence: Synthetic oligonucleotide
  Sense strand starting at position 2686 of SEQ ID NO: 1242660
uguguaaaccagugcuacu

SEQ ID NO: 1363965 - RNA, 19 nt, Artificial Sequence
  Description of Artificial Sequence: Synthetic oligonucleotide
  Antisense strand to SEQ ID NO: 1363964
aguagcacugguuuacaca

SEQ ID NO: 1363966 - RNA, 19 nt, Artificial Sequence
  Description of Artificial Sequence: Synthetic oligonucleotide
  Sense strand starting at position 2739 of SEQ ID NO: 1242660
uuccaaucuguccgugacu

SEQ ID NO: 1363967 - RNA, 19 nt, Artificial Sequence
  Description of Artificial Sequence: Synthetic oligonucleotide
  Antisense strand to SEQ ID NO: 1363966
agucacggacagauuggaa

SEQ ID NO: 1363968 - RNA, 19 nt, Artificial Sequence
  Description of Artificial Sequence: Synthetic oligonucleotide
  Sense strand starting at position 2741 of SEQ ID NO: 1242660
ccaaucuguccgugacuga

SEQ ID NO: 1363969 - RNA, 19 nt, Artificial Sequence
  Description of Artificial Sequence: Synthetic oligonucleotide
  Antisense strand to SEQ ID NO: 1363968
ucagucacggacagauugg

SEQ ID NO: 1363970 - RNA, 19 nt, Artificial Sequence
  Description of Artificial Sequence: Synthetic oligonucleotide
  Sense strand starting at position 2742 of SEQ ID NO: 1242660
caaucuguccgugacugau

SEQ ID NO: 1363971 - RNA, 19 nt, Artificial Sequence
  Description of Artificial Sequence: Synthetic oligonucleotide
  Antisense strand to SEQ ID NO: 1363970
aucagucacggacagauug

SEQ ID NO: 1363972 - RNA, 19 nt, Artificial Sequence
  Description of Artificial Sequence: Synthetic oligonucleotide
  Sense strand starting at position 2751 of SEQ ID NO: 1242660
cgugacugauacuuacuaa

SEQ ID NO: 1363973 - RNA, 19 nt, Artificial Sequence
  Description of Artificial Sequence: Synthetic oligonucleotide
  Antisense strand to SEQ ID NO: 1363972
uuaguaaguaucagucacg

SEQ ID NO: 1363974 - RNA, 19 nt, Artificial Sequence
  Description of Artificial Sequence: Synthetic oligonucleotide
  Sense strand starting at position 2964 of SEQ ID NO: 1242660
uggaguccuagcuaguaga

SEQ ID NO: 1363975 - RNA, 19 nt, Artificial Sequence
  Description of Artificial Sequence: Synthetic oligonucleotide
  Antisense strand to SEQ ID NO: 1363974
ucuacuagcuaggacucca

SEQ ID NO: 1363976 - RNA, 19 nt, Artificial Sequence
  Description of Artificial Sequence: Synthetic oligonucleotide
  Sense strand starting at position 3000 of SEQ ID NO: 1242660
aucgcuugagccuaugaga

SEQ ID NO: 1363977 - RNA, 19 nt, Artificial Sequence
  Description of Artificial Sequence: Synthetic oligonucleotide
  Antisense strand to SEQ ID NO: 1363976
ucucauaggcucaagcgau

SEQ ID NO: 1363978 - RNA, 19 nt, Artificial Sequence
  Description of Artificial Sequence: Synthetic oligonucleotide
  Sense strand starting at position 3009 of SEQ ID NO: 1242660
gccuaugagauugaggcuu

SEQ ID NO: 1363979 - RNA, 19 nt, Artificial Sequence
  Description of Artificial Sequence: Synthetic oligonucleotide
  Antisense strand to SEQ ID NO: 1363978
aagccucaaucucauaggc

SEQ ID NO: 1363980 - RNA, 19 nt, Artificial Sequence
  Description of Artificial Sequence: Synthetic oligonucleotide
  Sense strand starting at position 3234 of SEQ ID NO: 1242660
guacacuuggcucagagaa

SEQ ID NO: 1363981 - RNA, 19 nt, Artificial Sequence
  Description of Artificial Sequence: Synthetic oligonucleotide
  Antisense strand to SEQ ID NO: 1363980
uucucugagccaaguguac

SEQ ID NO: 1363982 - RNA, 19 nt, Artificial Sequence
  Description of Artificial Sequence: Synthetic oligonucleotide
  Sense strand starting at position 3283 of SEQ ID NO: 1242660
uggcuauuccacugauaac

SEQ ID NO: 1363983 - RNA, 19 nt, Artificial Sequence
  Description of Artificial Sequence: Synthetic oligonucleotide
  Antisense strand to SEQ ID NO: 1363982
guuaucaguggaauagcca

SEQ ID NO: 1363984 - RNA, 19 nt, Artificial Sequence
  Description of Artificial Sequence: Synthetic oligonucleotide
  Sense strand starting at position 3325 of SEQ ID NO: 1242660
aaagcaaaguuaugaguua

SEQ ID NO: 1363985 - RNA, 19 nt, Artificial Sequence
  Description of Artificial Sequence: Synthetic oligonucleotide
  Antisense strand to SEQ ID NO: 1363984
uaacucauaacuuugcuuu

SEQ ID NO: 1363986 - RNA, 19 nt, Artificial Sequence
  Description of Artificial Sequence: Synthetic oligonucleotide
  Sense strand starting at position 3355 of SEQ ID NO: 1242660
aguaaaugccuguaagcac

SEQ ID NO: 1363987 - RNA, 19 nt, Artificial Sequence
  Description of Artificial Sequence: Synthetic oligonucleotide
  Antisense strand to SEQ ID NO: 1363986
gugcuuacaggcauuuacu

SEQ ID NO: 1363988 - RNA, 19 nt, Artificial Sequence
  Description of Artificial Sequence: Synthetic oligonucleotide
  Sense strand starting at position 3366 of SEQ ID NO: 1242660
guaagcacacuuuguauaa

SEQ ID NO: 1363989 - RNA, 19 nt, Artificial Sequence
  Description of Artificial Sequence: Synthetic oligonucleotide
  Antisense strand to SEQ ID NO: 1363988
uuauacaaagugugcuuac

SEQ ID NO: 1363990 - RNA, 19 nt, Artificial Sequence
  Description of Artificial Sequence: Synthetic oligonucleotide
  Sense strand starting at position 3425 of SEQ ID NO: 1242660
ccacgaaauugcuuccugu

SEQ ID NO: 1363991 - RNA, 19 nt, Artificial Sequence
  Description of Artificial Sequence: Synthetic oligonucleotide
  Antisense strand to SEQ ID NO: 1363990
acaggaagcaauuucgugg

SEQ ID NO: 1363992 - RNA, 19 nt, Artificial Sequence
  Description of Artificial Sequence: Synthetic oligonucleotide
  Sense strand starting at position 3535 of SEQ ID NO: 1242660
uuucccaguguauauaaua

SEQ ID NO: 1363993 - RNA, 19 nt, Artificial Sequence
  Description of Artificial Sequence: Synthetic oligonucleotide
  Antisense strand to SEQ ID NO: 1363992
uauuauauacacugggaaa

SEQ ID NO: 1363994 - RNA, 19 nt, Artificial Sequence
  Description of Artificial Sequence: Synthetic oligonucleotide
  Sense strand starting at position 3555 of SEQ ID NO: 1242660
acauguuuccacuauacug

SEQ ID NO: 1363995 - RNA, 19 nt, Artificial Sequence
  Description of Artificial Sequence: Synthetic oligonucleotide
  Antisense strand to SEQ ID NO: 1363994
caguauaguggaaacaugu

SEQ ID NO: 1363996 - RNA, 19 nt, Artificial Sequence
  Description of Artificial Sequence: Synthetic oligonucleotide
  Sense strand starting at position 3617 of SEQ ID NO: 1242660
uacacacguugauguuaaa

SEQ ID NO: 1363997 - RNA, 19 nt, Artificial Sequence
  Description of Artificial Sequence: Synthetic oligonucleotide
  Antisense strand to SEQ ID NO: 1363996
uuuaacaucaacgugugua

SEQ ID NO: 1363998 - RNA, 19 nt, Artificial Sequence
  Description of Artificial Sequence: Synthetic oligonucleotide
  Sense strand starting at position 3737 of SEQ ID NO: 1242660
agagguugaguuggaggau

SEQ ID NO: 1363999 - RNA, 19 nt, Artificial Sequence
  Description of Artificial Sequence: Synthetic oligonucleotide
  Antisense strand to SEQ ID NO: 1363998
auccuccaacucaaccucu

SEQ ID NO: 1364000 - RNA, 19 nt, Artificial Sequence
  Description of Artificial Sequence: Synthetic oligonucleotide
  Sense strand starting at position 3740 of SEQ ID NO: 1242660
gguugaguuggaggaucca

SEQ ID NO: 1364001 - RNA, 19 nt, Artificial Sequence
  Description of Artificial Sequence: Synthetic oligonucleotide
  Antisense strand to SEQ ID NO: 1364000
uggauccuccaacucaacc

SEQ ID NO: 1364002 - RNA, 19 nt, Artificial Sequence
  Description of Artificial Sequence: Synthetic oligonucleotide
  Sense strand starting at position 44 of SEQ ID NO: 1242661
gugaauuguccugaaaccc

SEQ ID NO: 1364003 - RNA, 19 nt, Artificial Sequence
  Description of Artificial Sequence: Synthetic oligonucleotide
  Antisense strand to SEQ ID NO: 1364002
ggguuucaggacaauucac

SEQ ID NO: 1364004 - RNA, 19 nt, Artificial Sequence
  Description of Artificial Sequence: Synthetic oligonucleotide
  Sense strand starting at position 163 of SEQ ID NO: 1242661
cugggagcucauuguuuag

SEQ ID NO: 1364005 - RNA, 19 nt, Artificial Sequence
  Description of Artificial Sequence: Synthetic oligonucleotide
  Antisense strand to SEQ ID NO: 1364004
cuaaacaaugagcucccag

SEQ ID NO: 1364006 - RNA, 19 nt, Artificial Sequence
  Description of Artificial Sequence: Synthetic oligonucleotide
  Sense strand starting at position 165 of SEQ ID NO: 1242661
gggagcucauuguuuagag

SEQ ID NO: 1364007 - RNA, 19 nt, Artificial Sequence
  Description of Artificial Sequence: Synthetic oligonucleotide
  Antisense strand to SEQ ID NO: 1364006
cucuaaacaaugagcuccc

SEQ ID NO: 1364008 - RNA, 19 nt, Artificial Sequence
  Description of Artificial Sequence: Synthetic oligonucleotide
  Sense strand starting at position 166 of SEQ ID NO: 1242661
ggagcucauuguuuagaga

SEQ ID NO: 1364009 - RNA, 19 nt, Artificial Sequence
  Description of Artificial Sequence: Synthetic oligonucleotide
  Antisense strand to SEQ ID NO: 1364008
ucucuaaacaaugagcucc

SEQ ID NO: 1364010 - RNA, 19 nt, Artificial Sequence
  Description of Artificial Sequence: Synthetic oligonucleotide
  Sense strand starting at position 167 of SEQ ID NO: 1242661
gagcucauuguuuagagag

SEQ ID NO: 1364011 - RNA, 19 nt, Artificial Sequence
  Description of Artificial Sequence: Synthetic oligonucleotide
  Antisense strand to SEQ ID NO: 1364010
cucucuaaacaaugagcuc

SEQ ID NO: 1364012 - RNA, 19 nt, Artificial Sequence
  Description of Artificial Sequence: Synthetic oligonucleotide
  Sense strand starting at position 228 of SEQ ID NO: 1242661
ugcuuugauagauggaaac

SEQ ID NO: 1364013 - RNA, 19 nt, Artificial Sequence
  Description of Artificial Sequence: Synthetic oligonucleotide
  Antisense strand to SEQ ID NO: 1364012
guuuccaucuaucaaagca

SEQ ID NO: 1364014 - RNA, 19 nt, Artificial Sequence
  Description of Artificial Sequence: Synthetic oligonucleotide
  Sense strand starting at position 244 of SEQ ID NO: 1242661
aacaguaauggcugacaag

SEQ ID NO: 1364015 - RNA, 19 nt, Artificial Sequence
  Description of Artificial Sequence: Synthetic oligonucleotide
  Antisense strand to SEQ ID NO: 1364014
cuugucagccauuacuguu

SEQ ID NO: 1364016 - RNA, 19 nt, Artificial Sequence
  Description of Artificial Sequence: Synthetic oligonucleotide
  Sense strand starting at position 245 of SEQ ID NO: 1242661
acaguaauggcugacaagu

SEQ ID NO: 1364017 - RNA, 19 nt, Artificial Sequence
  Description of Artificial Sequence: Synthetic oligonucleotide
  Antisense strand to SEQ ID NO: 1364016
acuugucagccauuacugu

SEQ ID NO: 1364018 - RNA, 19 nt, Artificial Sequence
  Description of Artificial Sequence: Synthetic oligonucleotide
  Sense strand starting at position 514 of SEQ ID NO: 1242661
gguuguauuaagcacugaa

SEQ ID NO: 1364019 - RNA, 19 nt, Artificial Sequence
  Description of Artificial Sequence: Synthetic oligonucleotide
  Antisense strand to SEQ ID NO: 1364018
uucagugcuuaauacaacc

SEQ ID NO: 1364020 - RNA, 19 nt, Artificial Sequence
  Description of Artificial Sequence: Synthetic oligonucleotide
  Sense strand starting at position 517 of SEQ ID NO: 1242661
uguauuaagcacugaauuc

SEQ ID NO: 1364021 - RNA, 19 nt, Artificial Sequence
  Description of Artificial Sequence: Synthetic oligonucleotide
  Antisense strand to SEQ ID NO: 1364020
gaauucagugcuuaauaca

SEQ ID NO: 1364022 - RNA, 19 nt, Artificial Sequence
  Description of Artificial Sequence: Synthetic oligonucleotide
  Sense strand starting at position 544 of SEQ ID NO: 1242661
ucuguuauggagcaagauu

SEQ ID NO: 1364023 - RNA, 19 nt, Artificial Sequence
  Description of Artificial Sequence: Synthetic oligonucleotide
  Antisense strand to SEQ ID NO: 1364022
aaucuugcuccauaacaga

SEQ ID NO: 1364024 - RNA, 19 nt, Artificial Sequence
  Description of Artificial Sequence: Synthetic oligonucleotide
  Sense strand starting at position 556 of SEQ ID NO: 1242661
caagauuauugagaggaga

SEQ ID NO: 1364025 - RNA, 19 nt, Artificial Sequence
  Description of Artificial Sequence: Synthetic oligonucleotide
  Antisense strand to SEQ ID NO: 1364024
ucuccucucaauaaucuug

SEQ ID NO: 1364026 - RNA, 19 nt, Artificial Sequence
  Description of Artificial Sequence: Synthetic oligonucleotide
  Sense strand starting at position 816 of SEQ ID NO: 1242661
ccacauugagcagauacuu

SEQ ID NO: 1364027 - RNA, 19 nt, Artificial Sequence
  Description of Artificial Sequence: Synthetic oligonucleotide
  Antisense strand to SEQ ID NO: 1364026
aaguaucugcucaaugugg

SEQ ID NO: 1364028 - RNA, 19 nt, Artificial Sequence
  Description of Artificial Sequence: Synthetic oligonucleotide
  Sense strand starting at position 824 of SEQ ID NO: 1242661
agcagauacuuagugaacu

SEQ ID NO: 1364029 - RNA, 19 nt, Artificial Sequence
  Description of Artificial Sequence: Synthetic oligonucleotide
  Antisense strand to SEQ ID NO: 1364028
aguucacuaaguaucugcu

SEQ ID NO: 1364030 - RNA, 19 nt, Artificial Sequence
  Description of Artificial Sequence: Synthetic oligonucleotide
  Sense strand starting at position 913 of SEQ ID NO: 1242661
gugugugauaugcuugugu

SEQ ID NO: 1364031 - RNA, 19 nt, Artificial Sequence
  Description of Artificial Sequence: Synthetic oligonucleotide
  Antisense strand to SEQ ID NO: 1364030
acacaagcauaucacacac

SEQ ID NO: 1364032 - RNA, 19 nt, Artificial Sequence
  Description of Artificial Sequence: Synthetic oligonucleotide
  Sense strand starting at position 916 of SEQ ID NO: 1242661
ugugauaugcuugugugca

SEQ ID NO: 1364033 - RNA, 19 nt, Artificial Sequence
  Description of Artificial Sequence: Synthetic oligonucleotide
  Antisense strand to SEQ ID NO: 1364032
ugcacacaagcauaucaca

SEQ ID NO: 1364034 - RNA, 19 nt, Artificial Sequence
  Description of Artificial Sequence: Synthetic oligonucleotide
  Sense strand starting at position 1061 of SEQ ID NO: 1242661
gggaucuuauagcucucaa

SEQ ID NO: 1364035 - RNA, 19 nt, Artificial Sequence
  Description of Artificial Sequence: Synthetic oligonucleotide
  Antisense strand to SEQ ID NO: 1364034
uugagagcuauaagauccc

SEQ ID NO: 1364036 - RNA, 19 nt, Artificial Sequence
  Description of Artificial Sequence: Synthetic oligonucleotide
  Sense strand starting at position 1278 of SEQ ID NO: 1242661
ggcugucaaauggaucauu

SEQ ID NO: 1364037 - RNA, 19 nt, Artificial Sequence
  Description of Artificial Sequence: Synthetic oligonucleotide
  Antisense strand to SEQ ID NO: 1364036
aaugauccauuugacagcc

SEQ ID NO: 1364038 - RNA, 19 nt, Artificial Sequence
  Description of Artificial Sequence: Synthetic oligonucleotide
  Sense strand starting at position 1604 of SEQ ID NO: 1242661
gccucuguucuaggaagac

SEQ ID NO: 1364039 - RNA, 19 nt, Artificial Sequence
  Description of Artificial Sequence: Synthetic oligonucleotide
  Antisense strand to SEQ ID NO: 1364038
gucuuccuagaacagaggc

SEQ ID NO: 1364040 - RNA, 19 nt, Artificial Sequence
  Description of Artificial Sequence: Synthetic oligonucleotide
  Sense strand starting at position 1646 of SEQ ID NO: 1242661
ggaucaggucugcaauggu

SEQ ID NO: 1364041 - RNA, 19 nt, Artificial Sequence
  Description of Artificial Sequence: Synthetic oligonucleotide
  Antisense strand to SEQ ID NO: 1364040
accauugcagaccugaucc

SEQ ID NO: 1364042 - RNA, 19 nt, Artificial Sequence
  Description of Artificial Sequence: Synthetic oligonucleotide
  Sense strand starting at position 1714 of SEQ ID NO: 1242661
gguggcagugcugucagua

SEQ ID NO: 1364043 - RNA, 19 nt, Artificial Sequence
  Description of Artificial Sequence: Synthetic oligonucleotide
  Antisense strand to SEQ ID NO: 1364042
uacugacagcacugccacc

SEQ ID NO: 1364044 - RNA, 19 nt, Artificial Sequence
  Description of Artificial Sequence: Synthetic oligonucleotide
  Sense strand starting at position 1715 of SEQ ID NO: 1242661
guggcagugcugucaguaa

SEQ ID NO: 1364045 - RNA, 19 nt, Artificial Sequence
  Description of Artificial Sequence: Synthetic oligonucleotide
  Antisense strand to SEQ ID NO: 1364044
uuacugacagcacugccac

SEQ ID NO: 1364046 - RNA, 19 nt, Artificial Sequence
  Description of Artificial Sequence: Synthetic oligonucleotide
  Sense strand starting at position 2074 of SEQ ID NO: 1242661
caggcuagaucuuugaucu

SEQ ID NO: 1364047 - RNA, 19 nt, Artificial Sequence
  Description of Artificial Sequence: Synthetic oligonucleotide
  Antisense strand to SEQ ID NO: 1364046
agaucaaagaucuagccug

SEQ ID NO: 1364048 - RNA, 19 nt, Artificial Sequence
  Description of Artificial Sequence: Synthetic oligonucleotide
  Sense strand starting at position 2075 of SEQ ID NO: 1242661
aggcuagaucuuugaucua

SEQ ID NO: 1364049 - RNA, 19 nt, Artificial Sequence
  Description of Artificial Sequence: Synthetic oligonucleotide
  Antisense strand to SEQ ID NO: 1364048
uagaucaaagaucuagccu

SEQ ID NO: 1364050 - RNA, 19 nt, Artificial Sequence
  Description of Artificial Sequence: Synthetic oligonucleotide
  Sense strand starting at position 2078 of SEQ ID NO: 1242661
cuagaucuuugaucuagca

SEQ ID NO: 1364051 - RNA, 19 nt, Artificial Sequence
  Description of Artificial Sequence: Synthetic oligonucleotide
  Antisense strand to SEQ ID NO: 1364050
ugcuagaucaaagaucuag

SEQ ID NO: 1364052 - RNA, 19 nt, Artificial Sequence
  Description of Artificial Sequence: Synthetic oligonucleotide
  Sense strand starting at position 2730 of SEQ ID NO: 1242661
agucuuugaaauugaugag

SEQ ID NO: 1364053 - RNA, 19 nt, Artificial Sequence
  Description of Artificial Sequence: Synthetic oligonucleotide
  Antisense strand to SEQ ID NO: 1364052
cucaucaauuucaaagacu

SEQ ID NO: 1364054 - RNA, 19 nt, Artificial Sequence
  Description of Artificial Sequence: Synthetic oligonucleotide
  Sense strand starting at position 2731 of SEQ ID NO: 1242661
gucuuugaaauugaugagu

SEQ ID NO: 1364055 - RNA, 19 nt, Artificial Sequence
  Description of Artificial Sequence: Synthetic oligonucleotide
  Antisense strand to SEQ ID NO: 1364054
acucaucaauuucaaagac

SEQ ID NO: 1364056 - RNA, 19 nt, Artificial Sequence
  Description of Artificial Sequence: Synthetic oligonucleotide
  Sense strand starting at position 2736 of SEQ ID NO: 1242661
ugaaauugaugaguaguuu

SEQ ID NO: 1364057 - RNA, 19 nt, Artificial Sequence
  Description of Artificial Sequence: Synthetic oligonucleotide
  Antisense strand to SEQ ID NO: 1364056
aaacuacucaucaauuuca

SEQ ID NO: 1364058 - RNA, 19 nt, Artificial Sequence
  Description of Artificial Sequence: Synthetic oligonucleotide
  Sense strand starting at position 2740 of SEQ ID NO: 1242661
auugaugaguaguuuaugu

SEQ ID NO: 1364059 - RNA, 19 nt, Artificial Sequence
  Description of Artificial Sequence: Synthetic oligonucleotide
  Antisense strand to SEQ ID NO: 1364058
acauaaacuacucaucaau

SEQ ID NO: 1364060 - RNA, 19 nt, Artificial Sequence
  Description of Artificial Sequence: Synthetic oligonucleotide
  Sense strand starting at position 2742 of SEQ ID NO: 1242661
ugaugaguaguuuauguuc

SEQ ID NO: 1364061 - RNA, 19 nt, Artificial Sequence
  Description of Artificial Sequence: Synthetic oligonucleotide
  Antisense strand to SEQ ID NO: 1364060
gaacauaaacuacucauca

SEQ ID NO: 1364062 - RNA, 19 nt, Artificial Sequence
  Description of Artificial Sequence: Synthetic oligonucleotide
  Sense strand starting at position 2834 of SEQ ID NO: 1242661
cagugauguggucauaguu

SEQ ID NO: 1364063 - RNA, 19 nt, Artificial Sequence
  Description of Artificial Sequence: Synthetic oligonucleotide
  Antisense strand to SEQ ID NO: 1364062
aacuaugaccacaucacug

SEQ ID NO: 1364064 - RNA, 19 nt, Artificial Sequence
  Description of Artificial Sequence: Synthetic oligonucleotide
  Sense strand starting at position 2910 of SEQ ID NO: 1242661
gcuggcacuccagauguaa

SEQ ID NO: 1364065 - RNA, 19 nt, Artificial Sequence
  Description of Artificial Sequence: Synthetic oligonucleotide
  Antisense strand to SEQ ID NO: 1364064
uuacaucuggagugccagc

SEQ ID NO: 1364066 - RNA, 19 nt, Artificial Sequence
  Description of Artificial Sequence: Synthetic oligonucleotide
  Sense strand starting at position 2979 of SEQ ID NO: 1242661
gggcuugauagucacaugu

SEQ ID NO: 1364067 - RNA, 19 nt, Artificial Sequence
  Description of Artificial Sequence: Synthetic oligonucleotide
  Antisense strand to SEQ ID NO: 1364066
acaugugacuaucaagccc

SEQ ID NO: 1364068 - RNA, 19 nt, Artificial Sequence
  Description of Artificial Sequence: Synthetic oligonucleotide
  Sense strand starting at position 3314 of SEQ ID NO: 1242661
ugcauugagaauuaagguu

SEQ ID NO: 1364069 - RNA, 19 nt, Artificial Sequence
  Description of Artificial Sequence: Synthetic oligonucleotide
  Antisense strand to SEQ ID NO: 1364068
aaccuuaauucucaaugca

SEQ ID NO: 1364070 - RNA, 19 nt, Artificial Sequence
  Description of Artificial Sequence: Synthetic oligonucleotide
  Sense strand starting at position 3411 of SEQ ID NO: 1242661
ugugaaugcgcaucuguuu

SEQ ID NO: 1364071 - RNA, 19 nt, Artificial Sequence
  Description of Artificial Sequence: Synthetic oligonucleotide
  Antisense strand to SEQ ID NO: 1364070
aaacagaugcgcauucaca

SEQ ID NO: 1364072 - RNA, 19 nt, Artificial Sequence
  Description of Artificial Sequence: Synthetic oligonucleotide
  Sense strand starting at position 3425 of SEQ ID NO: 1242661
uguuuccuugcagaaaugu

SEQ ID NO: 1364073 - RNA, 19 nt, Artificial Sequence
  Description of Artificial Sequence: Synthetic oligonucleotide
  Antisense strand to SEQ ID NO: 1364072
acauuucugcaaggaaaca

SEQ ID NO: 1364074 - RNA, 19 nt, Artificial Sequence
  Description of Artificial Sequence: Synthetic oligonucleotide
  Sense strand starting at position 3492 of SEQ ID NO: 1242661
auguaugugcaccacauua

SEQ ID NO: 1364075 - RNA, 19 nt, Artificial Sequence
  Description of Artificial Sequence: Synthetic oligonucleotide
  Antisense strand to SEQ ID NO: 1364074
uaauguggugcacauacau

SEQ ID NO: 1364076 - RNA, 19 nt, Artificial Sequence
  Description of Artificial Sequence: Synthetic oligonucleotide
  Sense strand starting at position 3610 of SEQ ID NO: 1242661
cacuaaaguguguauguga

SEQ ID NO: 1364077 - RNA, 19 nt, Artificial Sequence
  Description of Artificial Sequence: Synthetic oligonucleotide
  Antisense strand to SEQ ID NO: 1364076
ucacauacacacuuuagug

SEQ ID NO: 1364078 - RNA, 19 nt, Artificial Sequence
  Description of Artificial Sequence: Synthetic oligonucleotide
  Sense strand starting at position 3671 of SEQ ID NO: 1242661
uuaauuucgucauuguucu

SEQ ID NO: 1364079 - RNA, 19 nt, Artificial Sequence
  Description of Artificial Sequence: Synthetic oligonucleotide
  Antisense strand to SEQ ID NO: 1364078
agaacaaugacgaaauuaa

SEQ ID NO: 1364080 - RNA, 19 nt, Artificial Sequence
  Description of Artificial Sequence: Synthetic oligonucleotide
  Sense strand starting at position 3741 of SEQ ID NO: 1242661
guaagaggcuuauugagau

SEQ ID NO: 1364081 - RNA, 19 nt, Artificial Sequence
  Description of Artificial Sequence: Synthetic oligonucleotide
  Antisense strand to SEQ ID NO: 1364080
aucucaauaagccucuuac

SEQ ID NO: 1364082 - RNA, 19 nt, Artificial Sequence
  Description of Artificial Sequence: Synthetic oligonucleotide
  Sense strand starting at position 132 of SEQ ID NO: 1242662
gggccugauucugcacuca

SEQ ID NO: 1364083 - RNA, 19 nt, Artificial Sequence
  Description of Artificial Sequence: Synthetic oligonucleotide
  Antisense strand to SEQ ID NO: 1364082
ugagugcagaaucaggccc

SEQ ID NO: 1364084 - RNA, 19 nt, Artificial Sequence
  Description of Artificial Sequence: Synthetic oligonucleotide
  Sense strand starting at position 445 of SEQ ID NO: 1242662
gguucucuugcacaaggga

SEQ ID NO: 1364085 - RNA, 19 nt, Artificial Sequence
  Description of Artificial Sequence: Synthetic oligonucleotide
  Antisense strand to SEQ ID NO: 1364084
ucccuugugcaagagaacc

SEQ ID NO: 1364086 - RNA, 19 nt, Artificial Sequence
  Description of Artificial Sequence: Synthetic oligonucleotide
  Sense strand starting at position 651 of SEQ ID NO: 1242662
agaauccgauauucuugaa

SEQ ID NO: 1364087 - RNA, 19 nt, Artificial Sequence
  Description of Artificial Sequence: Synthetic oligonucleotide
  Antisense strand to SEQ ID NO: 1364086
uucaagaauaucggauucu

SEQ ID NO: 1364088 - RNA, 19 nt, Artificial Sequence
  Description of Artificial Sequence: Synthetic oligonucleotide
  Sense strand starting at position 684 of SEQ ID NO: 1242662
gggcaaugcuuccuccuua

SEQ ID NO: 1364089 - RNA, 19 nt, Artificial Sequence
  Description of Artificial Sequence: Synthetic oligonucleotide
  Antisense strand to SEQ ID NO: 1364088
uaaggaggaagcauugccc

SEQ ID NO: 1364090 - RNA, 19 nt, Artificial Sequence
  Description of Artificial Sequence: Synthetic oligonucleotide
  Sense strand starting at position 685 of SEQ ID NO: 1242662
ggcaaugcuuccuccuuaa

SEQ ID NO: 1364091 - RNA, 19 nt, Artificial Sequence
  Description of Artificial Sequence: Synthetic oligonucleotide
  Antisense strand to SEQ ID NO: 1364090
uuaaggaggaagcauugcc

SEQ ID NO: 1364092 - RNA, 19 nt, Artificial Sequence
  Description of Artificial Sequence: Synthetic oligonucleotide
  Sense strand starting at position 901 of SEQ ID NO: 1242662
ccgcuuugucccuggugga

SEQ ID NO: 1364093 - RNA, 19 nt, Artificial Sequence
  Description of Artificial Sequence: Synthetic oligonucleotide
  Antisense strand to SEQ ID NO: 1364092
uccaccagggacaaagcgg

SEQ ID NO: 1364094 - RNA, 19 nt, Artificial Sequence
  Description of Artificial Sequence: Synthetic oligonucleotide
  Sense strand starting at position 902 of SEQ ID NO: 1242662
cgcuuugucccugguggau

SEQ ID NO: 1364095 - RNA, 19 nt, Artificial Sequence
  Description of Artificial Sequence: Synthetic oligonucleotide
  Antisense strand to SEQ ID NO: 1364094
auccaccagggacaaagcg

SEQ ID NO: 1364096 - RNA, 19 nt, Artificial Sequence
  Description of Artificial Sequence: Synthetic oligonucleotide
  Sense strand starting at position 931 of SEQ ID NO: 1242662
ccgcuuagcugugcgugau

SEQ ID NO: 1364097 - RNA, 19 nt, Artificial Sequence
  Description of Artificial Sequence: Synthetic oligonucleotide
  Antisense strand to SEQ ID NO: 1364096
aucacgcacagcuaagcgg

SEQ ID NO: 1364098 - RNA, 19 nt, Artificial Sequence
  Description of Artificial Sequence: Synthetic oligonucleotide
  Sense strand starting at position 934 of SEQ ID NO: 1242662
cuuagcugugcgugaugca

SEQ ID NO: 1364099 - RNA, 19 nt, Artificial Sequence
  Description of Artificial Sequence: Synthetic oligonucleotide
  Antisense strand to SEQ ID NO: 1364098
ugcaucacgcacagcuaag

SEQ ID NO: 1364100 - RNA, 19 nt, Artificial Sequence
  Description of Artificial Sequence: Synthetic oligonucleotide
  Sense strand starting at position 1078 of SEQ ID NO: 1242662
ccaguccugccuugacaga

SEQ ID NO: 1364101 - RNA, 19 nt, Artificial Sequence
  Description of Artificial Sequence: Synthetic oligonucleotide
  Antisense strand to SEQ ID NO: 1364100
ucugucaaggcaggacugg

SEQ ID NO: 1364102 - RNA, 19 nt, Artificial Sequence
  Description of Artificial Sequence: Synthetic oligonucleotide
  Sense strand starting at position 1328 of SEQ ID NO: 1242662
gccggaaguucuugggcuu

SEQ ID NO: 1364103 - RNA, 19 nt, Artificial Sequence
  Description of Artificial Sequence: Synthetic oligonucleotide
  Antisense strand to SEQ ID NO: 1364102
aagcccaagaacuuccggc

SEQ ID NO: 1364104 - RNA, 19 nt, Artificial Sequence
  Description of Artificial Sequence: Synthetic oligonucleotide
  Sense strand starting at position 1578 of SEQ ID NO: 1242662
ucaguuuaccuguguguca

SEQ ID NO: 1364105 - RNA, 19 nt, Artificial Sequence
  Description of Artificial Sequence: Synthetic oligonucleotide
  Antisense strand to SEQ ID NO: 1364104
ugacacacagguaaacuga

SEQ ID NO: 1364106 - RNA, 19 nt, Artificial Sequence
  Description of Artificial Sequence: Synthetic oligonucleotide
  Sense strand starting at position 1579 of SEQ ID NO: 1242662
caguuuaccugugugucaa

SEQ ID NO: 1364107 - RNA, 19 nt, Artificial Sequence
  Description of Artificial Sequence: Synthetic oligonucleotide
  Antisense strand to SEQ ID NO: 1364106
uugacacacagguaaacug

SEQ ID NO: 1364108 - RNA, 19 nt, Artificial Sequence
  Description of Artificial Sequence: Synthetic oligonucleotide
  Sense strand starting at position 1580 of SEQ ID NO: 1242662
aguuuaccugugugucaaa

SEQ ID NO: 1364109 - RNA, 19 nt, Artificial Sequence
  Description of Artificial Sequence: Synthetic oligonucleotide
  Antisense strand to SEQ ID NO: 1364108
uuugacacacagguaaacu

SEQ ID NO: 1364110 - RNA, 19 nt, Artificial Sequence
  Description of Artificial Sequence: Synthetic oligonucleotide
  Sense strand starting at position 1581 of SEQ ID NO: 1242662
guuuaccugugugucaaau

SEQ ID NO: 1364111 - RNA, 19 nt, Artificial Sequence
  Description of Artificial Sequence: Synthetic oligonucleotide
  Antisense strand to SEQ ID NO: 1364110
auuugacacacagguaaac

SEQ ID NO: 1364112 - RNA, 19 nt, Artificial Sequence
  Description of Artificial Sequence: Synthetic oligonucleotide
  Sense strand starting at position 1583 of SEQ ID NO: 1242662
uuaccugugugucaaauag

SEQ ID NO: 1364113 - RNA, 19 nt, Artificial Sequence
  Description of Artificial Sequence: Synthetic oligonucleotide
  Antisense strand to SEQ ID NO: 1364112
cuauuugacacacagguaa

SEQ ID NO: 1364114 - RNA, 19 nt, Artificial Sequence
  Description of Artificial Sequence: Synthetic oligonucleotide
  Sense strand starting at position 1590 of SEQ ID NO: 1242662
ugugucaaauagucucagu

SEQ ID NO: 1364115 - RNA, 19 nt, Artificial Sequence
  Description of Artificial Sequence: Synthetic oligonucleotide
  Antisense strand to SEQ ID NO: 1364114
acugagacuauuugacaca

SEQ ID NO: 1364116 - RNA, 19 nt, Artificial Sequence
  Description of Artificial Sequence: Synthetic oligonucleotide
  Sense strand starting at position 1593 of SEQ ID NO: 1242662
gucaaauagucucagucca

SEQ ID NO: 1364117 - RNA, 19 nt, Artificial Sequence
  Description of Artificial Sequence: Synthetic oligonucleotide
  Antisense strand to SEQ ID NO: 1364116
uggacugagacuauuugac

SEQ ID NO: 1364118 - RNA, 19 nt, Artificial Sequence
  Description of Artificial Sequence: Synthetic oligonucleotide
  Sense strand starting at position 1686 of SEQ ID NO: 1242662
gggccuugguacuaagagu

SEQ ID NO: 1364119 - RNA, 19 nt, Artificial Sequence
  Description of Artificial Sequence: Synthetic oligonucleotide
  Antisense strand to SEQ ID NO: 1364118
acucuuaguaccaaggccc

SEQ ID NO: 1364120 - RNA, 19 nt, Artificial Sequence
  Description of Artificial Sequence: Synthetic oligonucleotide
  Sense strand starting at position 1788 of SEQ ID NO: 1242662
cacaguggguuugagagaa

SEQ ID NO: 1364121 - RNA, 19 nt, Artificial Sequence
  Description of Artificial Sequence: Synthetic oligonucleotide
  Antisense strand to SEQ ID NO: 1364120
uucucucaaacccacugug

SEQ ID NO: 1364122 - RNA, 19 nt, Artificial Sequence
  Description of Artificial Sequence: Synthetic oligonucleotide
  Sense strand starting at position 1792 of SEQ ID NO: 1242662
guggguuugagagaaagug

SEQ ID NO: 1364123 - RNA, 19 nt, Artificial Sequence
  Description of Artificial Sequence: Synthetic oligonucleotide
  Antisense strand to SEQ ID NO: 1364122
cacuuucucucaaacccac

SEQ ID NO: 1364124 - RNA, 19 nt, Artificial Sequence
  Description of Artificial Sequence: Synthetic oligonucleotide
  Sense strand starting at position 2096 of SEQ ID NO: 1242662
gcaacugguucuuaugaca

SEQ ID NO: 1364125 - RNA, 19 nt, Artificial Sequence
  Description of Artificial Sequence: Synthetic oligonucleotide
  Antisense strand to SEQ ID NO: 1364124
ugucauaagaaccaguugc

SEQ ID NO: 1364126 - RNA, 19 nt, Artificial Sequence
  Description of Artificial Sequence: Synthetic oligonucleotide
  Sense strand starting at position 2099 of SEQ ID NO: 1242662
acugguucuuaugacauca

SEQ ID NO: 1364127 - RNA, 19 nt, Artificial Sequence
  Description of Artificial Sequence: Synthetic oligonucleotide
  Antisense strand to SEQ ID NO: 1364126
ugaugucauaagaaccagu

SEQ ID NO: 1364128 - RNA, 19 nt, Artificial Sequence
  Description of Artificial Sequence: Synthetic oligonucleotide
  Sense strand starting at position 2284 of SEQ ID NO: 1242662
gagaguccuucucucaggu

SEQ ID NO: 1364129 - RNA, 19 nt, Artificial Sequence
  Description of Artificial Sequence: Synthetic oligonucleotide
  Antisense strand to SEQ ID NO: 1364128
accugagagaaggacucuc

SEQ ID NO: 1364130 - RNA, 19 nt, Artificial Sequence
  Description of Artificial Sequence: Synthetic oligonucleotide
  Sense strand starting at position 2286 of SEQ ID NO: 1242662
gaguccuucucucagguga

SEQ ID NO: 1364131 - RNA, 19 nt, Artificial Sequence
  Description of Artificial Sequence: Synthetic oligonucleotide
  Antisense strand to SEQ ID NO: 1364130
ucaccugagagaaggacuc

SEQ ID NO: 1364132 - RNA, 19 nt, Artificial Sequence
  Description of Artificial Sequence: Synthetic oligonucleotide
  Sense strand starting at position 2288 of SEQ ID NO: 1242662
guccuucucucaggugauc

SEQ ID NO: 1364133 - RNA, 19 nt, Artificial Sequence
  Description of Artificial Sequence: Synthetic oligonucleotide
  Antisense strand to SEQ ID NO: 1364132
gaucaccugagagaaggac

SEQ ID NO: 1364134 - RNA, 19 nt, Artificial Sequence
  Description of Artificial Sequence: Synthetic oligonucleotide
  Sense strand starting at position 2372 of SEQ ID NO: 1242662
cuaggucgguacuuugaaa

SEQ ID NO: 1364135 - RNA, 19 nt, Artificial Sequence
  Description of Artificial Sequence: Synthetic oligonucleotide
  Antisense strand to SEQ ID NO: 1364134
uuucaaaguaccgaccuag

SEQ ID NO: 1364136 - RNA, 19 nt, Artificial Sequence
  Description of Artificial Sequence: Synthetic oligonucleotide
  Sense strand starting at position 2809 of SEQ ID NO: 1242662
ccuaaagguucggcgcaaa

SEQ ID NO: 1364137 - RNA, 19 nt, Artificial Sequence
  Description of Artificial Sequence: Synthetic oligonucleotide
  Antisense strand to SEQ ID NO: 1364136
uuugcgccgaaccuuuagg

SEQ ID NO: 1364138 - RNA, 19 nt, Artificial Sequence
  Description of Artificial Sequence: Synthetic oligonucleotide
  Sense strand starting at position 2854 of SEQ ID NO: 1242662
gaggcuguuuguuggucaa

SEQ ID NO: 1364139 - RNA, 19 nt, Artificial Sequence
  Description of Artificial Sequence: Synthetic oligonucleotide
  Antisense strand to SEQ ID NO: 1364138
uugaccaacaaacagccuc

SEQ ID NO: 1364140 - RNA, 19 nt, Artificial Sequence
  Description of Artificial Sequence: Synthetic oligonucleotide
  Sense strand starting at position 2857 of SEQ ID NO: 1242662
gcuguuuguuggucaagcu

SEQ ID NO: 1364141 - RNA, 19 nt, Artificial Sequence
  Description of Artificial Sequence: Synthetic oligonucleotide
  Antisense strand to SEQ ID NO: 1364140
agcuugaccaacaaacagc

SEQ ID NO: 1364142 - RNA, 19 nt, Artificial Sequence
  Description of Artificial Sequence: Synthetic oligonucleotide
  Sense strand starting at position 3133 of SEQ ID NO: 1242662
gggccaagauccugacuuu

SEQ ID NO: 1364143 - RNA, 19 nt, Artificial Sequence
  Description of Artificial Sequence: Synthetic oligonucleotide
  Antisense strand to SEQ ID NO: 1364142
aaagucaggaucuuggccc

SEQ ID NO: 1364144 - RNA, 19 nt, Artificial Sequence
  Description of Artificial Sequence: Synthetic oligonucleotide
  Sense strand starting at position 3136 of SEQ ID NO: 1242662
ccaagauccugacuuucga

SEQ ID NO: 1364145 - RNA, 19 nt, Artificial Sequence
  Description of Artificial Sequence: Synthetic oligonucleotide
  Antisense strand to SEQ ID NO: 1364144
ucgaaagucaggaucuugg

SEQ ID NO: 1364146 - RNA, 19 nt, Artificial Sequence
  Description of Artificial Sequence: Synthetic oligonucleotide
  Sense strand starting at position 3608 of SEQ ID NO: 1242662
cccaacggaucuuuguauu

SEQ ID NO: 1364147 - RNA, 19 nt, Artificial Sequence
  Description of Artificial Sequence: Synthetic oligonucleotide
  Antisense strand to SEQ ID NO: 1364146
aauacaaagauccguuggg

SEQ ID NO: 1364148 - RNA, 19 nt, Artificial Sequence
  Description of Artificial Sequence: Synthetic oligonucleotide
  Sense strand starting at position 3744 of SEQ ID NO: 1242662
ccagcaaccugaucuugua

SEQ ID NO: 1364149 - RNA, 19 nt, Artificial Sequence
  Description of Artificial Sequence: Synthetic oligonucleotide
  Antisense strand to SEQ ID NO: 1364148
uacaagaucagguugcugg

SEQ ID NO: 1364150 - RNA, 19 nt, Artificial Sequence
  Description of Artificial Sequence: Synthetic oligonucleotide
  Sense strand starting at position 3747 of SEQ ID NO: 1242662
gcaaccugaucuuguaugu

SEQ ID NO: 1364151 - RNA, 19 nt, Artificial Sequence
  Description of Artificial Sequence: Synthetic oligonucleotide
  Antisense strand to SEQ ID NO: 1364150
acauacaagaucagguugc

SEQ ID NO: 1364152 - RNA, 19 nt, Artificial Sequence
  Description of Artificial Sequence: Synthetic oligonucleotide
  Sense strand starting at position 3751 of SEQ ID NO: 1242662
ccugaucuuguauguagga

SEQ ID NO: 1364153 - RNA, 19 nt, Artificial Sequence
  Description of Artificial Sequence: Synthetic oligonucleotide
  Antisense strand to SEQ ID NO: 1364152
uccuacauacaagaucagg

SEQ ID NO: 1364154 - RNA, 19 nt, Artificial Sequence
  Description of Artificial Sequence: Synthetic oligonucleotide
  Sense strand starting at position 3756 of SEQ ID NO: 1242662
ucuuguauguaggaaauau

SEQ ID NO: 1364155 - RNA, 19 nt, Artificial Sequence
  Description of Artificial Sequence: Synthetic oligonucleotide
  Antisense strand to SEQ ID NO: 1364154
auauuuccuacauacaaga

SEQ ID NO: 1364156 - RNA, 19 nt, Artificial Sequence
  Description of Artificial Sequence: Synthetic oligonucleotide
  Sense strand starting at position 348 of SEQ ID NO: 1242663
agaaauacucacuaguugu

SEQ ID NO: 1364157 - RNA, 19 nt, Artificial Sequence
  Description of Artificial Sequence: Synthetic oligonucleotide
  Antisense strand to SEQ ID NO: 1364156
acaacuagugaguauuucu

SEQ ID NO: 1364158 - RNA, 19 nt, Artificial Sequence
  Description of Artificial Sequence: Synthetic oligonucleotide
  Sense strand starting at position 354 of SEQ ID NO: 1242663
acucacuaguuguauucua

SEQ ID NO: 1364159 - RNA, 19 nt, Artificial Sequence
  Description of Artificial Sequence: Synthetic oligonucleotide
  Antisense strand to SEQ ID NO: 1364158
uagaauacaacuagugagu

SEQ ID NO: 1364160 - RNA, 19 nt, Artificial Sequence
  Description of Artificial Sequence: Synthetic oligonucleotide
  Sense strand starting at position 423 of SEQ ID NO: 1242663
uuccucauuucugguacua

SEQ ID NO: 1364161 - RNA, 19 nt, Artificial Sequence
  Description of Artificial Sequence: Synthetic oligonucleotide
  Antisense strand to SEQ ID NO: 1364160
uaguaccagaaaugaggaa

SEQ ID NO: 1364162 - RNA, 19 nt, Artificial Sequence
  Description of Artificial Sequence: Synthetic oligonucleotide
  Sense strand starting at position 432 of SEQ ID NO: 1242663
ucugguacuauucgguaau

SEQ ID NO: 1364163 - RNA, 19 nt, Artificial Sequence
  Description of Artificial Sequence: Synthetic oligonucleotide
  Antisense strand to SEQ ID NO: 1364162
auuaccgaauaguaccaga

SEQ ID NO: 1364164 - RNA, 19 nt, Artificial Sequence
  Description of Artificial Sequence: Synthetic oligonucleotide
  Sense strand starting at position 433 of SEQ ID NO: 1242663
cugguacuauucgguaaua

SEQ ID NO: 1364165 - RNA, 19 nt, Artificial Sequence
  Description of Artificial Sequence: Synthetic oligonucleotide
  Antisense strand to SEQ ID NO: 1364164
uauuaccgaauaguaccag

SEQ ID NO: 1364166 - RNA, 19 nt, Artificial Sequence
  Description of Artificial Sequence: Synthetic oligonucleotide
  Sense strand starting at position 434 of SEQ ID NO: 1242663
ugguacuauucgguaauau

SEQ ID NO: 1364167 - RNA, 19 nt, Artificial Sequence
  Description of Artificial Sequence: Synthetic oligonucleotide
  Antisense strand to SEQ ID NO: 1364166
auauuaccgaauaguacca

SEQ ID NO: 1364168 - RNA, 19 nt, Artificial Sequence
  Description of Artificial Sequence: Synthetic oligonucleotide
  Sense strand starting at position 435 of SEQ ID NO: 1242663
gguacuauucgguaauaua

SEQ ID NO: 1364169 - RNA, 19 nt, Artificial Sequence
  Description of Artificial Sequence: Synthetic oligonucleotide
  Antisense strand to SEQ ID NO: 1364168
uauauuaccgaauaguacc

SEQ ID NO: 1364170 - RNA, 19 nt, Artificial Sequence
  Description of Artificial Sequence: Synthetic oligonucleotide
  Sense strand starting at position 457 of SEQ ID NO: 1242663
guagguuucuuuccucagu

SEQ ID NO: 1364171 - RNA, 19 nt, Artificial Sequence
  Description of Artificial Sequence: Synthetic oligonucleotide
  Antisense strand to SEQ ID NO: 1364170
acugaggaaagaaaccuac

SEQ ID NO: 1364172 - RNA, 19 nt, Artificial Sequence
  Description of Artificial Sequence: Synthetic oligonucleotide
  Sense strand starting at position 848 of SEQ ID NO: 1242663
uaacuuacgugcucuggua

SEQ ID NO: 1364173 - RNA, 19 nt, Artificial Sequence
  Description of Artificial Sequence: Synthetic oligonucleotide
  Antisense strand to SEQ ID NO: 1364172
uaccagagcacguaaguua

SEQ ID NO: 1364174 - RNA, 19 nt, Artificial Sequence
  Description of Artificial Sequence: Synthetic oligonucleotide
  Sense strand starting at position 850 of SEQ ID NO: 1242663
acuuacgugcucugguaaa

SEQ ID NO: 1364175 - RNA, 19 nt, Artificial Sequence
  Description of Artificial Sequence: Synthetic oligonucleotide
  Antisense strand to SEQ ID NO: 1364174
uuuaccagagcacguaagu

SEQ ID NO: 1364176 - RNA, 19 nt, Artificial Sequence
  Description of Artificial Sequence: Synthetic oligonucleotide
  Sense strand starting at position 1009 of SEQ ID NO: 1242663
ggaaguguuccuugcacag

SEQ ID NO: 1364177 - RNA, 19 nt, Artificial Sequence
  Description of Artificial Sequence: Synthetic oligonucleotide
  Antisense strand to SEQ ID NO: 1364176
cugugcaaggaacacuucc

SEQ ID NO: 1364178 - RNA, 19 nt, Artificial Sequence
  Description of Artificial Sequence: Synthetic oligonucleotide
  Sense strand starting at position 1106 of SEQ ID NO: 1242663
gaugacaagugucaccaga

SEQ ID NO: 1364179 - RNA, 19 nt, Artificial Sequence
  Description of Artificial Sequence: Synthetic oligonucleotide
  Antisense strand to SEQ ID NO: 1364178
ucuggugacacuugucauc

SEQ ID NO: 1364180 - RNA, 19 nt, Artificial Sequence
  Description of Artificial Sequence: Synthetic oligonucleotide
  Sense strand starting at position 1108 of SEQ ID NO: 1242663
ugacaagugucaccagaag

SEQ ID NO: 1364181 - RNA, 19 nt, Artificial Sequence
  Description of Artificial Sequence: Synthetic oligonucleotide
  Antisense strand to SEQ ID NO: 1364180
cuucuggugacacuuguca

SEQ ID NO: 1364182 - RNA, 19 nt, Artificial Sequence
  Description of Artificial Sequence: Synthetic oligonucleotide
  Sense strand starting at position 1120 of SEQ ID NO: 1242663
ccagaagugcuuuggaaac

SEQ ID NO: 1364183 - RNA, 19 nt, Artificial Sequence
  Description of Artificial Sequence: Synthetic oligonucleotide
  Antisense strand to SEQ ID NO: 1364182
guuuccaaagcacuucugg

SEQ ID NO: 1364184 - RNA, 19 nt, Artificial Sequence
  Description of Artificial Sequence: Synthetic oligonucleotide
  Sense strand starting at position 1122 of SEQ ID NO: 1242663
agaagugcuuuggaaacau

SEQ ID NO: 1364185 - RNA, 19 nt, Artificial Sequence
  Description of Artificial Sequence: Synthetic oligonucleotide
  Antisense strand to SEQ ID NO: 1364184
auguuuccaaagcacuucu

SEQ ID NO: 1364186 - RNA, 19 nt, Artificial Sequence
  Description of Artificial Sequence: Synthetic oligonucleotide
  Sense strand starting at position 1131 of SEQ ID NO: 1242663
uuggaaacaugauuauguu

SEQ ID NO: 1364187 - RNA, 19 nt, Artificial Sequence
  Description of Artificial Sequence: Synthetic oligonucleotide
  Antisense strand to SEQ ID NO: 1364186
aacauaaucauguuuccaa

SEQ ID NO: 1364188 - RNA, 19 nt, Artificial Sequence
  Description of Artificial Sequence: Synthetic oligonucleotide
  Sense strand starting at position 1211 of SEQ ID NO: 1242663
agaagucuugccgauggaa

SEQ ID NO: 1364189 - RNA, 19 nt, Artificial Sequence
  Description of Artificial Sequence: Synthetic oligonucleotide
  Antisense strand to SEQ ID NO: 1364188
uuccaucggcaagacuucu

SEQ ID NO: 1364190 - RNA, 19 nt, Artificial Sequence
  Description of Artificial Sequence: Synthetic oligonucleotide
  Sense strand starting at position 1213 of SEQ ID NO: 1242663
aagucuugccgauggaauc

SEQ ID NO: 1364191 - RNA, 19 nt, Artificial Sequence
  Description of Artificial Sequence: Synthetic oligonucleotide
  Antisense strand to SEQ ID NO: 1364190
gauuccaucggcaagacuu

SEQ ID NO: 1364192 - RNA, 19 nt, Artificial Sequence
  Description of Artificial Sequence: Synthetic oligonucleotide
  Sense strand starting at position 1224 of SEQ ID NO: 1242663
auggaauccuuggacauca

SEQ ID NO: 1364193 - RNA, 19 nt, Artificial Sequence
  Description of Artificial Sequence: Synthetic oligonucleotide
  Antisense strand to SEQ ID NO: 1364192
ugauguccaaggauuccau

SEQ ID NO: 1364194 - RNA, 19 nt, Artificial Sequence
  Description of Artificial Sequence: Synthetic oligonucleotide
  Sense strand starting at position 1376 of SEQ ID NO: 1242663
gggcaaacgugacaucaaa

SEQ ID NO: 1364195 - RNA, 19 nt, Artificial Sequence
  Description of Artificial Sequence: Synthetic oligonucleotide
  Antisense strand to SEQ ID NO: 1364194
uuugaugucacguuugccc

SEQ ID NO: 1364196 - RNA, 19 nt, Artificial Sequence
  Description of Artificial Sequence: Synthetic oligonucleotide
  Sense strand starting at position 1477 of SEQ ID NO: 1242663
ucaggcuccucagaacgau

SEQ ID NO: 1364197 - RNA, 19 nt, Artificial Sequence
  Description of Artificial Sequence: Synthetic oligonucleotide
  Antisense strand to SEQ ID NO: 1364196
aucguucugaggagccuga

SEQ ID NO: 1364198 - RNA, 19 nt, Artificial Sequence
  Description of Artificial Sequence: Synthetic oligonucleotide
  Sense strand starting at position 1671 of SEQ ID NO: 1242663
guuggcuuugcuggaggaa

SEQ ID NO: 1364199 - RNA, 19 nt, Artificial Sequence
  Description of Artificial Sequence: Synthetic oligonucleotide
  Antisense strand to SEQ ID NO: 1364198
uuccuccagcaaagccaac

SEQ ID NO: 1364200 - RNA, 19 nt, Artificial Sequence
  Description of Artificial Sequence: Synthetic oligonucleotide
  Sense strand starting at position 1672 of SEQ ID NO: 1242663
uuggcuuugcuggaggaaa

SEQ ID NO: 1364201 - RNA, 19 nt, Artificial Sequence
  Description of Artificial Sequence: Synthetic oligonucleotide
  Antisense strand to SEQ ID NO: 1364200
uuuccuccagcaaagccaa

SEQ ID NO: 1364202 - RNA, 19 nt, Artificial Sequence
  Description of Artificial Sequence: Synthetic oligonucleotide
  Sense strand starting at position 2059 of SEQ ID NO: 1242663
ugacguucggcugcgaaga

SEQ ID NO: 1364203 - RNA, 19 nt, Artificial Sequence
  Description of Artificial Sequence: Synthetic oligonucleotide
  Antisense strand to SEQ ID NO: 1364202
ucuucgcagccgaacguca

SEQ ID NO: 1364204 - RNA, 19 nt, Artificial Sequence
  Description of Artificial Sequence: Synthetic oligonucleotide
  Sense strand starting at position 2108 of SEQ ID NO: 1242663
auggcaugccgggaaaugu

SEQ ID NO: 1364205 - RNA, 19 nt, Artificial Sequence
  Description of Artificial Sequence: Synthetic oligonucleotide
  Antisense strand to SEQ ID NO: 1364204
acauuucccggcaugccau

SEQ ID NO: 1364206 - RNA, 19 nt, Artificial Sequence
  Description of Artificial Sequence: Synthetic oligonucleotide
  Sense strand starting at position 2200 of SEQ ID NO: 1242663
ggacguuguccucagagag

SEQ ID NO: 1364207 - RNA, 19 nt, Artificial Sequence
  Description of Artificial Sequence: Synthetic oligonucleotide
  Antisense strand to SEQ ID NO: 1364206
cucucugaggacaacgucc

SEQ ID NO: 1364208 - RNA, 19 nt, Artificial Sequence
  Description of Artificial Sequence: Synthetic oligonucleotide
  Sense strand starting at position 2210 of SEQ ID NO: 1242663
cucagagaguugucugagu

SEQ ID NO: 1364209 - RNA, 19 nt, Artificial Sequence
  Description of Artificial Sequence: Synthetic oligonucleotide
  Antisense strand to SEQ ID NO: 1364208
acucagacaacucucugag

SEQ ID NO: 1364210 - RNA, 19 nt, Artificial Sequence
  Description of Artificial Sequence: Synthetic oligonucleotide
  Sense strand starting at position 2212 of SEQ ID NO: 1242663
cagagaguugucugaguuu

SEQ ID NO: 1364211 - RNA, 19 nt, Artificial Sequence
  Description of Artificial Sequence: Synthetic oligonucleotide
  Antisense strand to SEQ ID NO: 1364210
aaacucagacaacucucug

SEQ ID NO: 1364212 - RNA, 19 nt, Artificial Sequence
  Description of Artificial Sequence: Synthetic oligonucleotide
  Sense strand starting at position 2223 of SEQ ID NO: 1242663
cugaguuugccucggagca

SEQ ID NO: 1364213 - RNA, 19 nt, Artificial Sequence
  Description of Artificial Sequence: Synthetic oligonucleotide
  Antisense strand to SEQ ID NO: 1364212
ugcuccgaggcaaacucag

SEQ ID NO: 1364214 - RNA, 19 nt, Artificial Sequence
  Description of Artificial Sequence: Synthetic oligonucleotide
  Sense strand starting at position 2225 of SEQ ID NO: 1242663
gaguuugccucggagcagu

SEQ ID NO: 1364215 - RNA, 19 nt, Artificial Sequence
  Description of Artificial Sequence: Synthetic oligonucleotide
  Antisense strand to SEQ ID NO: 1364214
acugcuccgaggcaaacuc

SEQ ID NO: 1364216 - RNA, 19 nt, Artificial Sequence
  Description of Artificial Sequence: Synthetic oligonucleotide
  Sense strand starting at position 2593 of SEQ ID NO: 1242663
agcuaacuuugggaaggau

SEQ ID NO: 1364217 - RNA, 19 nt, Artificial Sequence
  Description of Artificial Sequence: Synthetic oligonucleotide
  Antisense strand to SEQ ID NO: 1364216
auccuucccaaaguuagcu

SEQ ID NO: 1364218 - RNA, 19 nt, Artificial Sequence
  Description of Artificial Sequence: Synthetic oligonucleotide
  Sense strand starting at position 2689 of SEQ ID NO: 1242663
cugccuuugcaggacuaau

SEQ ID NO: 1364219 - RNA, 19 nt, Artificial Sequence
  Description of Artificial Sequence: Synthetic oligonucleotide
  Antisense strand to SEQ ID NO: 1364218
auuaguccugcaaaggcag

SEQ ID NO: 1364220 - RNA, 19 nt, Artificial Sequence
  Description of Artificial Sequence: Synthetic oligonucleotide
  Sense strand starting at position 2996 of SEQ ID NO: 1242663
gagcgaggcucagucugaa

SEQ ID NO: 1364221 - RNA, 19 nt, Artificial Sequence
  Description of Artificial Sequence: Synthetic oligonucleotide
  Antisense strand to SEQ ID NO: 1364220
uucagacugagccucgcuc

SEQ ID NO: 1364222 - RNA, 19 nt, Artificial Sequence
  Description of Artificial Sequence: Synthetic oligonucleotide
  Sense strand starting at position 3397 of SEQ ID NO: 1242663
aaagaucagugccugaaau

SEQ ID NO: 1364223 - RNA, 19 nt, Artificial Sequence
  Description of Artificial Sequence: Synthetic oligonucleotide
  Antisense strand to SEQ ID NO: 1364222
auuucaggcacugaucuuu

SEQ ID NO: 1364224 - RNA, 19 nt, Artificial Sequence
  Description of Artificial Sequence: Synthetic oligonucleotide
  Sense strand starting at position 3398 of SEQ ID NO: 1242663
aagaucagugccugaaaua

SEQ ID NO: 1364225 - RNA, 19 nt, Artificial Sequence
  Description of Artificial Sequence: Synthetic oligonucleotide
  Antisense strand to SEQ ID NO: 1364224
uauuucaggcacugaucuu

SEQ ID NO: 1364226 - RNA, 19 nt, Artificial Sequence
  Description of Artificial Sequence: Synthetic oligonucleotide
  Sense strand starting at position 3399 of SEQ ID NO: 1242663
agaucagugccugaaauau

SEQ ID NO: 1364227 - RNA, 19 nt, Artificial Sequence
  Description of Artificial Sequence: Synthetic oligonucleotide
  Antisense strand to SEQ ID NO: 1364226
auauuucaggcacugaucu

SEQ ID NO: 1364228 - RNA, 19 nt, Artificial Sequence
  Description of Artificial Sequence: Synthetic oligonucleotide
  Sense strand starting at position 3611 of SEQ ID NO: 1242663
ccggcugacugauuugagu

SEQ ID NO: 1364229 - RNA, 19 nt, Artificial Sequence
  Description of Artificial Sequence: Synthetic oligonucleotide
  Antisense strand to SEQ ID NO: 1364228
acucaaaucagucagccgg

SEQ ID NO: 1364230 - RNA, 19 nt, Artificial Sequence
  Description of Artificial Sequence: Synthetic oligonucleotide
  Sense strand starting at position 3614 of SEQ ID NO: 1242663
gcugacugauuugaguaau

SEQ ID NO: 1364231 - RNA, 19 nt, Artificial Sequence
  Description of Artificial Sequence: Synthetic oligonucleotide
  Antisense strand to SEQ ID NO: 1364230
auuacucaaaucagucagc

SEQ ID NO: 1364232 - RNA, 19 nt, Artificial Sequence
  Description of Artificial Sequence: Synthetic oligonucleotide
  Sense strand starting at position 238 of SEQ ID NO: 1242664
gguccucuugcccggacaa

SEQ ID NO: 1364233 - RNA, 19 nt, Artificial Sequence
  Description of Artificial Sequence: Synthetic oligonucleotide
  Antisense strand to SEQ ID NO: 1364232
uuguccgggcaagaggacc

SEQ ID NO: 1364234 - RNA, 19 nt, Artificial Sequence
  Description of Artificial Sequence: Synthetic oligonucleotide
  Sense strand starting at position 1244 of SEQ ID NO: 1242664
cuuacaugugggugcagaa

SEQ ID NO: 1364235 - RNA, 19 nt, Artificial Sequence
  Description of Artificial Sequence: Synthetic oligonucleotide
  Antisense strand to SEQ ID NO: 1364234
uucugcacccacauguaag

SEQ ID NO: 1364236 - RNA, 19 nt, Artificial Sequence
  Description of Artificial Sequence: Synthetic oligonucleotide
  Sense strand starting at position 1329 of SEQ ID NO: 1242664
gcuggaaccugcuagacaa

SEQ ID NO: 1364237 - RNA, 19 nt, Artificial Sequence
  Description of Artificial Sequence: Synthetic oligonucleotide
  Antisense strand to SEQ ID NO: 1364236
uugucuagcagguuccagc

SEQ ID NO: 1364238 - RNA, 19 nt, Artificial Sequence
  Description of Artificial Sequence: Synthetic oligonucleotide
  Sense strand starting at position 1876 of SEQ ID NO: 1242664
acuuuaugcucccagagcu

SEQ ID NO: 1364239 - RNA, 19 nt, Artificial Sequence
  Description of Artificial Sequence: Synthetic oligonucleotide
  Antisense strand to SEQ ID NO: 1364238
agcucugggagcauaaagu

SEQ ID NO: 1364240 - RNA, 19 nt, Artificial Sequence
  Description of Artificial Sequence: Synthetic oligonucleotide
  Sense strand starting at position 2035 of SEQ ID NO: 1242664
cagagcuguucugauggca

SEQ ID NO: 1364241 - RNA, 19 nt, Artificial Sequence
  Description of Artificial Sequence: Synthetic oligonucleotide
  Antisense strand to SEQ ID NO: 1364240
ugccaucagaacagcucug

SEQ ID NO: 1364242 - RNA, 19 nt, Artificial Sequence
  Description of Artificial Sequence: Synthetic oligonucleotide
  Sense strand starting at position 2158 of SEQ ID NO: 1242664
ccuggaaugucgcugauga

SEQ ID NO: 1364243 - RNA, 19 nt, Artificial Sequence
  Description of Artificial Sequence: Synthetic oligonucleotide
  Antisense strand to SEQ ID NO: 1364242
ucaucagcgacauuccagg

SEQ ID NO: 1364244 - RNA, 19 nt, Artificial Sequence
  Description of Artificial Sequence: Synthetic oligonucleotide
  Sense strand starting at position 2160 of SEQ ID NO: 1242664
uggaaugucgcugaugaua

SEQ ID NO: 1364245 - RNA, 19 nt, Artificial Sequence
  Description of Artificial Sequence: Synthetic oligonucleotide
  Antisense strand to SEQ ID NO: 1364244
uaucaucagcgacauucca

SEQ ID NO: 1364246 - RNA, 19 nt, Artificial Sequence
  Description of Artificial Sequence: Synthetic oligonucleotide
  Sense strand starting at position 2162 of SEQ ID NO: 1242664
gaaugucgcugaugauaaa

SEQ ID NO: 1364247 - RNA, 19 nt, Artificial Sequence
  Description of Artificial Sequence: Synthetic oligonucleotide
  Antisense strand to SEQ ID NO: 1364246
uuuaucaucagcgacauuc

SEQ ID NO: 1364248 - RNA, 19 nt, Artificial Sequence
  Description of Artificial Sequence: Synthetic oligonucleotide
  Sense strand starting at position 2238 of SEQ ID NO: 1242664
ugcugaaagcccgaacuaa

SEQ ID NO: 1364249 - RNA, 19 nt, Artificial Sequence
  Description of Artificial Sequence: Synthetic oligonucleotide
  Antisense strand to SEQ ID NO: 1364248
uuaguucgggcuuucagca

SEQ ID NO: 1364250 - RNA, 19 nt, Artificial Sequence
  Description of Artificial Sequence: Synthetic oligonucleotide
  Sense strand starting at position 2255 of SEQ ID NO: 1242664
aaaggaagcuguguuugga

SEQ ID NO: 1364251 - RNA, 19 nt, Artificial Sequence
  Description of Artificial Sequence: Synthetic oligonucleotide
  Antisense strand to SEQ ID NO: 1364250
uccaaacacagcuuccuuu

SEQ ID NO: 1364252 - RNA, 19 nt, Artificial Sequence
  Description of Artificial Sequence: Synthetic oligonucleotide
  Sense strand starting at position 2258 of SEQ ID NO: 1242664
ggaagcuguguuuggacaa

SEQ ID NO: 1364253 - RNA, 19 nt, Artificial Sequence
  Description of Artificial Sequence: Synthetic oligonucleotide
  Antisense strand to SEQ ID NO: 1364252
uuguccaaacacagcuucc

SEQ ID NO: 1364254 - RNA, 19 nt, Artificial Sequence
  Description of Artificial Sequence: Synthetic oligonucleotide
  Sense strand starting at position 2491 of SEQ ID NO: 1242664
ggauuacagcuuuggauaa

SEQ ID NO: 1364255 - RNA, 19 nt, Artificial Sequence
  Description of Artificial Sequence: Synthetic oligonucleotide
  Antisense strand to SEQ ID NO: 1364254
uuauccaaagcuguaaucc

SEQ ID NO: 1364256 - RNA, 19 nt, Artificial Sequence
  Description of Artificial Sequence: Synthetic oligonucleotide
  Sense strand starting at position 2493 of SEQ ID NO: 1242664
auuacagcuuuggauaaau

SEQ ID NO: 1364257 - RNA, 19 nt, Artificial Sequence
  Description of Artificial Sequence: Synthetic oligonucleotide
  Antisense strand to SEQ ID NO: 1364256
auuuauccaaagcuguaau

SEQ ID NO: 1364258 - RNA, 19 nt, Artificial Sequence
  Description of Artificial Sequence: Synthetic oligonucleotide
  Sense strand starting at position 2713 of SEQ ID NO: 1242664
guaugauuacugcagccuu

SEQ ID NO: 1364259 - RNA, 19 nt, Artificial Sequence
  Description of Artificial Sequence: Synthetic oligonucleotide
  Antisense strand to SEQ ID NO: 1364258
aaggcugcaguaaucauac

SEQ ID NO: 1364260 - RNA, 19 nt, Artificial Sequence
  Description of Artificial Sequence: Synthetic oligonucleotide
  Sense strand starting at position 3219 of SEQ ID NO: 1242664
caucacuguucggcugauu

SEQ ID NO: 1364261 - RNA, 19 nt, Artificial Sequence
  Description of Artificial Sequence: Synthetic oligonucleotide
  Antisense strand to SEQ ID NO: 1364260
aaucagccgaacagugaug

SEQ ID NO: 1364262 - RNA, 19 nt, Artificial Sequence
  Description of Artificial Sequence: Synthetic oligonucleotide
  Sense strand starting at position 3390 of SEQ ID NO: 1242664
cccuuauacacgggaggaa

SEQ ID NO: 1364263 - RNA, 19 nt, Artificial Sequence
  Description of Artificial Sequence: Synthetic oligonucleotide
  Antisense strand to SEQ ID NO: 1364262
uuccucccguguauaaggg

SEQ ID NO: 1364264 - RNA, 19 nt, Artificial Sequence
  Description of Artificial Sequence: Synthetic oligonucleotide
  Sense strand starting at position 1054 of SEQ ID NO: 1242665
cggagaagccgcuguaacu

SEQ ID NO: 1364265 - RNA, 19 nt, Artificial Sequence
  Description of Artificial Sequence: Synthetic oligonucleotide
  Antisense strand to SEQ ID NO: 1364264
aguuacagcggcuucuccg

SEQ ID NO: 1364266 - RNA, 19 nt, Artificial Sequence
  Description of Artificial Sequence: Synthetic oligonucleotide
  Sense strand starting at position 1201 of SEQ ID NO: 1242665
gggagacgucccgaacguu

SEQ ID NO: 1364267 - RNA, 19 nt, Artificial Sequence
  Description of Artificial Sequence: Synthetic oligonucleotide
  Antisense strand to SEQ ID NO: 1364266
aacguucgggacgucuccc

SEQ ID NO: 1364268 - RNA, 19 nt, Artificial Sequence
  Description of Artificial Sequence: Synthetic oligonucleotide
  Sense strand starting at position 1213 of SEQ ID NO: 1242665
gaacguuaguaagcauaau

SEQ ID NO: 1364269 - RNA, 19 nt, Artificial Sequence
  Description of Artificial Sequence: Synthetic oligonucleotide
  Antisense strand to SEQ ID NO: 1364268
auuaugcuuacuaacguuc

SEQ ID NO: 1364270 - RNA, 19 nt, Artificial Sequence
  Description of Artificial Sequence: Synthetic oligonucleotide
  Sense strand starting at position 2481 of SEQ ID NO: 1242665
ucuguucucuggccaaacu

SEQ ID NO: 1364271 - RNA, 19 nt, Artificial Sequence
  Description of Artificial Sequence: Synthetic oligonucleotide
  Antisense strand to SEQ ID NO: 1364270
aguuuggccagagaacaga

SEQ ID NO: 1364272 - RNA, 19 nt, Artificial Sequence
  Description of Artificial Sequence: Synthetic oligonucleotide
  Sense strand starting at position 2558 of SEQ ID NO: 1242665
aaagaaagguuagaaagaa

SEQ ID NO: 1364273 - RNA, 19 nt, Artificial Sequence
  Description of Artificial Sequence: Synthetic oligonucleotide
  Antisense strand to SEQ ID NO: 1364272
uucuuucuaaccuuucuuu

SEQ ID NO: 1364274 - RNA, 19 nt, Artificial Sequence
  Description of Artificial Sequence: Synthetic oligonucleotide
  Sense strand starting at position 2631 of SEQ ID NO: 1242665
gggcgugugacuugucaaa

SEQ ID NO: 1364275 - RNA, 19 nt, Artificial Sequence
  Description of Artificial Sequence: Synthetic oligonucleotide
  Antisense strand to SEQ ID NO: 1364274
uuugacaagucacacgccc

SEQ ID NO: 1364276 - RNA, 19 nt, Artificial Sequence
  Description of Artificial Sequence: Synthetic oligonucleotide
  Sense strand starting at position 2633 of SEQ ID NO: 1242665
gcgugugacuugucaaaga

SEQ ID NO: 1364277 - RNA, 19 nt, Artificial Sequence
  Description of Artificial Sequence: Synthetic oligonucleotide
  Antisense strand to SEQ ID NO: 1364276
ucuuugacaagucacacgc

SEQ ID NO: 1364278 - RNA, 19 nt, Artificial Sequence
  Description of Artificial Sequence: Synthetic oligonucleotide
  Sense strand starting at position 2644 of SEQ ID NO: 1242665
gucaaagacuaaggauuua

SEQ ID NO: 1364279 - RNA, 19 nt, Artificial Sequence
  Description of Artificial Sequence: Synthetic oligonucleotide
  Antisense strand to SEQ ID NO: 1364278
uaaauccuuagucuuugac

SEQ ID NO: 1364280 - RNA, 19 nt, Artificial Sequence
  Description of Artificial Sequence: Synthetic oligonucleotide
  Sense strand starting at position 2705 of SEQ ID NO: 1242665
gacacuuucgcuguguguu

SEQ ID NO: 1364281 - RNA, 19 nt, Artificial Sequence
  Description of Artificial Sequence: Synthetic oligonucleotide
  Antisense strand to SEQ ID NO: 1364280
aacacacagcgaaaguguc

SEQ ID NO: 1364282 - RNA, 19 nt, Artificial Sequence
  Description of Artificial Sequence: Synthetic oligonucleotide
  Sense strand starting at position 2724 of SEQ ID NO: 1242665
gucugagccuccuuagauu

SEQ ID NO: 1364283 - RNA, 19 nt, Artificial Sequence
  Description of Artificial Sequence: Synthetic oligonucleotide
  Antisense strand to SEQ ID NO: 1364282
aaucuaaggaggcucagac

SEQ ID NO: 1364284 - RNA, 19 nt, Artificial Sequence
  Description of Artificial Sequence: Synthetic oligonucleotide
  Sense strand starting at position 2737 of SEQ ID NO: 1242665
uagauucuguuagcgguua

SEQ ID NO: 1364285 - RNA, 19 nt, Artificial Sequence
  Description of Artificial Sequence: Synthetic oligonucleotide
  Antisense strand to SEQ ID NO: 1364284
uaaccgcuaacagaaucua

SEQ ID NO: 1364286 - RNA, 19 nt, Artificial Sequence
  Description of Artificial Sequence: Synthetic oligonucleotide
  Sense strand starting at position 2739 of SEQ ID NO: 1242665
gauucuguuagcgguuagu

SEQ ID NO: 1364287 - RNA, 19 nt, Artificial Sequence
  Description of Artificial Sequence: Synthetic oligonucleotide
  Antisense strand to SEQ ID NO: 1364286
acuaaccgcuaacagaauc

SEQ ID NO: 1364288 - RNA, 19 nt, Artificial Sequence
  Description of Artificial Sequence: Synthetic oligonucleotide
  Sense strand starting at position 2741 of SEQ ID NO: 1242665
uucuguuagcgguuagugu

SEQ ID NO: 1364289 - RNA, 19 nt, Artificial Sequence
  Description of Artificial Sequence: Synthetic oligonucleotide
  Antisense strand to SEQ ID NO: 1364288
acacuaaccgcuaacagaa

SEQ ID NO: 1364290 - RNA, 19 nt, Artificial Sequence
  Description of Artificial Sequence: Synthetic oligonucleotide
  Sense strand starting at position 2854 of SEQ ID NO: 1242665
cccuuuguuuccuuuggua

SEQ ID NO: 1364291 - RNA, 19 nt, Artificial Sequence
  Description of Artificial Sequence: Synthetic oligonucleotide
  Antisense strand to SEQ ID NO: 1364290
uaccaaaggaaacaaaggg

SEQ ID NO: 1364292 - RNA, 19 nt, Artificial Sequence
  Description of Artificial Sequence: Synthetic oligonucleotide
  Sense strand starting at position 3110 of SEQ ID NO: 1242665
aaaggaguaucauguugga

SEQ ID NO: 1364293 - RNA, 19 nt, Artificial Sequence
  Description of Artificial Sequence: Synthetic oligonucleotide
  Antisense strand to SEQ ID NO: 1364292
uccaacaugauacuccuuu

SEQ ID NO: 1364294 - RNA, 19 nt, Artificial Sequence
  Description of Artificial Sequence: Synthetic oligonucleotide
  Sense strand starting at position 3113 of SEQ ID NO: 1242665
ggaguaucauguuggaaag

SEQ ID NO: 1364295 - RNA, 19 nt, Artificial Sequence
  Description of Artificial Sequence: Synthetic oligonucleotide
  Antisense strand to SEQ ID NO: 1364294
cuuuccaacaugauacucc

SEQ ID NO: 1364296 - RNA, 19 nt, Artificial Sequence
  Description of Artificial Sequence: Synthetic oligonucleotide
  Sense strand starting at position 3344 of SEQ ID NO: 1242665
gcuuaaguucugggagaag

SEQ ID NO: 1364297 - RNA, 19 nt, Artificial Sequence
  Description of Artificial Sequence: Synthetic oligonucleotide
  Antisense strand to SEQ ID NO: 1364296
cuucucccagaacuuaagc

SEQ ID NO: 1364298 - RNA, 19 nt, Artificial Sequence
  Description of Artificial Sequence: Synthetic oligonucleotide
  Sense strand starting at position 3472 of SEQ ID NO: 1242665
ggcuuuagacucugacuaa

SEQ ID NO: 1364299 - RNA, 19 nt, Artificial Sequence
  Description of Artificial Sequence: Synthetic oligonucleotide
  Antisense strand to SEQ ID NO: 1364298
uuagucagagucuaaagcc

SEQ ID NO: 1364300 - RNA, 19 nt, Artificial Sequence
  Description of Artificial Sequence: Synthetic oligonucleotide
  Sense strand starting at position 3473 of SEQ ID NO: 1242665
gcuuuagacucugacuaac

SEQ ID NO: 1364301 - RNA, 19 nt, Artificial Sequence
  Description of Artificial Sequence: Synthetic oligonucleotide
  Antisense strand to SEQ ID NO: 1364300
guuagucagagucuaaagc

SEQ ID NO: 1364302 - RNA, 19 nt, Artificial Sequence
  Description of Artificial Sequence: Synthetic oligonucleotide
  Sense strand starting at position 3483 of SEQ ID NO: 1242665
cugacuaacuugguuuaua

SEQ ID NO: 1364303 - RNA, 19 nt, Artificial Sequence
  Description of Artificial Sequence: Synthetic oligonucleotide
  Antisense strand to SEQ ID NO: 1364302
uauaaaccaaguuagucag

SEQ ID NO: 1364304 - RNA, 19 nt, Artificial Sequence
  Description of Artificial Sequence: Synthetic oligonucleotide
  Sense strand starting at position 3484 of SEQ ID NO: 1242665
ugacuaacuugguuuauag

SEQ ID NO: 1364305 - RNA, 19 nt, Artificial Sequence
  Description of Artificial Sequence: Synthetic oligonucleotide
  Antisense strand to SEQ ID NO: 1364304
cuauaaaccaaguuaguca

SEQ ID NO: 1364306 - RNA, 19 nt, Artificial Sequence
  Description of Artificial Sequence: Synthetic oligonucleotide
  Sense strand starting at position 3537 of SEQ ID NO: 1242665
acaguauuaugguugagua

SEQ ID NO: 1364307 - RNA, 19 nt, Artificial Sequence
  Description of Artificial Sequence: Synthetic oligonucleotide
  Antisense strand to SEQ ID NO: 1364306
uacucaaccauaauacugu

SEQ ID NO: 1364308 - RNA, 19 nt, Artificial Sequence
  Description of Artificial Sequence: Synthetic oligonucleotide
  Sense strand starting at position 3538 of SEQ ID NO: 1242665
caguauuaugguugaguau

SEQ ID NO: 1364309 - RNA, 19 nt, Artificial Sequence
  Description of Artificial Sequence: Synthetic oligonucleotide
  Antisense strand to SEQ ID NO: 1364308
auacucaaccauaauacug

SEQ ID NO: 1364310 - RNA, 19 nt, Artificial Sequence
  Description of Artificial Sequence: Synthetic oligonucleotide
  Sense strand starting at position 3539 of SEQ ID NO: 1242665
aguauuaugguugaguauu

SEQ ID NO: 1364311 - RNA, 19 nt, Artificial Sequence
  Description of Artificial Sequence: Synthetic oligonucleotide
  Antisense strand to SEQ ID NO: 1364310
aauacucaaccauaauacu

SEQ ID NO: 1364312 - RNA, 19 nt, Artificial Sequence
  Description of Artificial Sequence: Synthetic oligonucleotide
  Sense strand starting at position 3569 of SEQ ID NO: 1242665
ugacgcuuccuagaaauga

SEQ ID NO: 1364313 - RNA, 19 nt, Artificial Sequence
  Description of Artificial Sequence: Synthetic oligonucleotide
  Antisense strand to SEQ ID NO: 1364312
ucauuucuaggaagcguca

SEQ ID NO: 1364314 - RNA, 19 nt, Artificial Sequence
  Description of Artificial Sequence: Synthetic oligonucleotide
  Sense strand starting at position 3573 of SEQ ID NO: 1242665
gcuuccuagaaaugagugu

SEQ ID NO: 1364315 - RNA, 19 nt, Artificial Sequence
  Description of Artificial Sequence: Synthetic oligonucleotide
  Antisense strand to SEQ ID NO: 1364314
acacucauuucuaggaagc

SEQ ID NO: 1364316 - RNA, 19 nt, Artificial Sequence
  Description of Artificial Sequence: Synthetic oligonucleotide
  Sense strand starting at position 3577 of SEQ ID NO: 1242665
ccuagaaaugaguguugca

SEQ ID NO: 1364317 - RNA, 19 nt, Artificial Sequence
  Description of Artificial Sequence: Synthetic oligonucleotide
  Antisense strand to SEQ ID NO: 1364316
ugcaacacucauuucuagg

SEQ ID NO: 1364318 - RNA, 19 nt, Artificial Sequence
  Description of Artificial Sequence: Synthetic oligonucleotide
  Sense strand starting at position 3645 of SEQ ID NO: 1242665
gcuccugaaacggaaugau

SEQ ID NO: 1364319 - RNA, 19 nt, Artificial Sequence
  Description of Artificial Sequence: Synthetic oligonucleotide
  Antisense strand to SEQ ID NO: 1364318
aucauuccguuucaggagc

SEQ ID NO: 1364320 - RNA, 19 nt, Artificial Sequence
  Description of Artificial Sequence: Synthetic oligonucleotide
  Sense strand starting at position 3648 of SEQ ID NO: 1242665
ccugaaacggaaugauugu

SEQ ID NO: 1364321 - RNA, 19 nt, Artificial Sequence
  Description of Artificial Sequence: Synthetic oligonucleotide
  Antisense strand to SEQ ID NO: 1364320
acaaucauuccguuucagg

SEQ ID NO: 1364322 - RNA, 19 nt, Artificial Sequence
  Description of Artificial Sequence: Synthetic oligonucleotide
  Sense strand starting at position 3677 of SEQ ID NO: 1242665
augugcgugugauucuaau

SEQ ID NO: 1364323 - RNA, 19 nt, Artificial Sequence
  Description of Artificial Sequence: Synthetic oligonucleotide
  Antisense strand to SEQ ID NO: 1364322
auuagaaucacacgcacau

SEQ ID NO: 1364324 - RNA, 19 nt, Artificial Sequence
  Description of Artificial Sequence: Synthetic oligonucleotide
  Sense strand starting at position 3718 of SEQ ID NO: 1242665
cuucccugaggaugugaua

SEQ ID NO: 1364325 - RNA, 19 nt, Artificial Sequence
  Description of Artificial Sequence: Synthetic oligonucleotide
  Antisense strand to SEQ ID NO: 1364324
uaucacauccucagggaag

SEQ ID NO: 1364326 - RNA, 19 nt, Artificial Sequence
  Description of Artificial Sequence: Synthetic oligonucleotide
  Sense strand starting at position 3727 of SEQ ID NO: 1242665
ggaugugauacgcaacucu

SEQ ID NO: 1364327 - RNA, 19 nt, Artificial Sequence
  Description of Artificial Sequence: Synthetic oligonucleotide
  Antisense strand to SEQ ID NO: 1364326
agaguugcguaucacaucc

SEQ ID NO: 1364328 - RNA, 19 nt, Artificial Sequence
  Description of Artificial Sequence: Synthetic oligonucleotide
  Sense strand starting at position 3745 of SEQ ID NO: 1242665
uguagcuuugaggaaauua

SEQ ID NO: 1364329 - RNA, 19 nt, Artificial Sequence
  Description of Artificial Sequence: Synthetic oligonucleotide
  Antisense strand to SEQ ID NO: 1364328
uaauuuccucaaagcuaca

SEQ ID NO: 1364330 - RNA, 19 nt, Artificial Sequence
  Description of Artificial Sequence: Synthetic oligonucleotide
  Sense strand starting at position 3817 of SEQ ID NO: 1242665
acuauagguuguguugauu

SEQ ID NO: 1364331 - RNA, 19 nt, Artificial Sequence
  Description of Artificial Sequence: Synthetic oligonucleotide
  Antisense strand to SEQ ID NO: 1364330
aaucaacacaaccuauagu

SEQ ID NO: 1364332 - RNA, 19 nt, Artificial Sequence
  Description of Artificial Sequence: Synthetic oligonucleotide
  Sense strand starting at position 3820 of SEQ ID NO: 1242665
auagguuguguugauuaag

SEQ ID NO: 1364333 - RNA, 19 nt, Artificial Sequence
  Description of Artificial Sequence: Synthetic oligonucleotide
  Antisense strand to SEQ ID NO: 1364332
cuuaaucaacacaaccuau

SEQ ID NO: 1364334 - RNA, 19 nt, Artificial Sequence
  Description of Artificial Sequence: Synthetic oligonucleotide
  Sense strand starting at position 3823 of SEQ ID NO: 1242665
gguuguguugauuaaguga

SEQ ID NO: 1364335 - RNA, 19 nt, Artificial Sequence
  Description of Artificial Sequence: Synthetic oligonucleotide
  Antisense strand to SEQ ID NO: 1364334
ucacuuaaucaacacaacc

SEQ ID NO: 1364336 - RNA, 19 nt, Artificial Sequence
  Description of Artificial Sequence: Synthetic oligonucleotide
  Sense strand starting at position 3834 of SEQ ID NO: 1242665
uuaagugaaccaugaguau

SEQ ID NO: 1364337 - RNA, 19 nt, Artificial Sequence
  Description of Artificial Sequence: Synthetic oligonucleotide
  Antisense strand to SEQ ID NO: 1364336
auacucaugguucacuuaa

SEQ ID NO: 1364338 - RNA, 19 nt, Artificial Sequence
  Description of Artificial Sequence: Synthetic oligonucleotide
  Sense strand starting at position 3845 of SEQ ID NO: 1242665
augaguauugaagggcuca

SEQ ID NO: 1364339 - RNA, 19 nt, Artificial Sequence
  Description of Artificial Sequence: Synthetic oligonucleotide
  Antisense strand to SEQ ID NO: 1364338
ugagcccuucaauacucau

SEQ ID NO: 1364340 - RNA, 19 nt, Artificial Sequence
  Description of Artificial Sequence: Synthetic oligonucleotide
  Sense strand starting at position 3873 of SEQ ID NO: 1242665
uugguacagagugguagua

SEQ ID NO: 1364341 - RNA, 19 nt, Artificial Sequence
  Description of Artificial Sequence: Synthetic oligonucleotide
  Antisense strand to SEQ ID NO: 1364340
uacuaccacucuguaccaa

SEQ ID NO: 1364342 - RNA, 19 nt, Artificial Sequence
  Description of Artificial Sequence: Synthetic oligonucleotide
  Sense strand starting at position 3908 of SEQ ID NO: 1242665
ucaugagggucuguccauu

SEQ ID NO: 1364343 - RNA, 19 nt, Artificial Sequence
  Description of Artificial Sequence: Synthetic oligonucleotide
  Antisense strand to SEQ ID NO: 1364342
aauggacagacccucauga

SEQ ID NO: 1364344 - RNA, 19 nt, Artificial Sequence
  Description of Artificial Sequence: Synthetic oligonucleotide
  Sense strand starting at position 321 of SEQ ID NO: 1242666
gggccaguggcugaggauu

SEQ ID NO: 1364345 - RNA, 19 nt, Artificial Sequence
  Description of Artificial Sequence: Synthetic oligonucleotide
  Antisense strand to SEQ ID NO: 1364344
aauccucagccacuggccc

SEQ ID NO: 1364346 - RNA, 19 nt, Artificial Sequence
  Description of Artificial Sequence: Synthetic oligonucleotide
  Sense strand starting at position 374 of SEQ ID NO: 1242666
ucuuucuuguagguuugaa

SEQ ID NO: 1364347 - RNA, 19 nt, Artificial Sequence
  Description of Artificial Sequence: Synthetic oligonucleotide
  Antisense strand to SEQ ID NO: 1364346
uucaaaccuacaagaaaga

SEQ ID NO: 1364348 - RNA, 19 nt, Artificial Sequence
  Description of Artificial Sequence: Synthetic oligonucleotide
  Sense strand starting at position 384 of SEQ ID NO: 1242666
agguuugaaaugugcuauu

SEQ ID NO: 1364349 - RNA, 19 nt, Artificial Sequence
  Description of Artificial Sequence: Synthetic oligonucleotide
  Antisense strand to SEQ ID NO: 1364348
aauagcacauuucaaaccu

SEQ ID NO: 1364350 - RNA, 19 nt, Artificial Sequence
  Description of Artificial Sequence: Synthetic oligonucleotide
  Sense strand starting at position 395 of SEQ ID NO: 1242666
gugcuauuccuagaagaga

SEQ ID NO: 1364351 - RNA, 19 nt, Artificial Sequence
  Description of Artificial Sequence: Synthetic oligonucleotide
  Antisense strand to SEQ ID NO: 1364350
ucucuucuaggaauagcac

SEQ ID NO: 1364352 - RNA, 19 nt, Artificial Sequence
  Description of Artificial Sequence: Synthetic oligonucleotide
  Sense strand starting at position 474 of SEQ ID NO: 1242666
ggaccugucuucucagaac

SEQ ID NO: 1364353 - RNA, 19 nt, Artificial Sequence
  Description of Artificial Sequence: Synthetic oligonucleotide
  Antisense strand to SEQ ID NO: 1364352
guucugagaagacaggucc

SEQ ID NO: 1364354 - RNA, 19 nt, Artificial Sequence
  Description of Artificial Sequence: Synthetic oligonucleotide
  Sense strand starting at position 538 of SEQ ID NO: 1242666
cucugagcccaagaagagu

SEQ ID NO: 1364355 - RNA, 19 nt, Artificial Sequence
  Description of Artificial Sequence: Synthetic oligonucleotide
  Antisense strand to SEQ ID NO: 1364354
acucuucuugggcucagag

SEQ ID NO: 1364356 - RNA, 19 nt, Artificial Sequence
  Description of Artificial Sequence: Synthetic oligonucleotide
  Sense strand starting at position 583 of SEQ ID NO: 1242666
gugcuagcucaugcgugaa

SEQ ID NO: 1364357 - RNA, 19 nt, Artificial Sequence
  Description of Artificial Sequence: Synthetic oligonucleotide
  Antisense strand to SEQ ID NO: 1364356
uucacgcaugagcuagcac

SEQ ID NO: 1364358 - RNA, 19 nt, Artificial Sequence
  Description of Artificial Sequence: Synthetic oligonucleotide
  Sense strand starting at position 756 of SEQ ID NO: 1242666
ucacaucaccuaggaugau

SEQ ID NO: 1364359 - RNA, 19 nt, Artificial Sequence
  Description of Artificial Sequence: Synthetic oligonucleotide
  Antisense strand to SEQ ID NO: 1364358
aucauccuaggugauguga

SEQ ID NO: 1364360 - RNA, 19 nt, Artificial Sequence
  Description of Artificial Sequence: Synthetic oligonucleotide
  Sense strand starting at position 765 of SEQ ID NO: 1242666
cuaggaugaucugucagac

SEQ ID NO: 1364361 - RNA, 19 nt, Artificial Sequence
  Description of Artificial Sequence: Synthetic oligonucleotide
  Antisense strand to SEQ ID NO: 1364360
gucugacagaucauccuag

SEQ ID NO: 1364362 - RNA, 19 nt, Artificial Sequence
  Description of Artificial Sequence: Synthetic oligonucleotide
  Sense strand starting at position 818 of SEQ ID NO: 1242666
ucgucaaacuguccauuaa

SEQ ID NO: 1364363 - RNA, 19 nt, Artificial Sequence
  Description of Artificial Sequence: Synthetic oligonucleotide
  Antisense strand to SEQ ID NO: 1364362
uuaauggacaguuugacga

SEQ ID NO: 1364364 - RNA, 19 nt, Artificial Sequence
  Description of Artificial Sequence: Synthetic oligonucleotide
  Sense strand starting at position 819 of SEQ ID NO: 1242666
cgucaaacuguccauuaau

SEQ ID NO: 1364365 - RNA, 19 nt, Artificial Sequence
  Description of Artificial Sequence: Synthetic oligonucleotide
  Antisense strand to SEQ ID NO: 1364364
auuaauggacaguuugacg

SEQ ID NO: 1364366 - RNA, 19 nt, Artificial Sequence
  Description of Artificial Sequence: Synthetic oligonucleotide
  Sense strand starting at position 947 of SEQ ID NO: 1242666
uugaauguuggcuggauga

SEQ ID NO: 1364367 - RNA, 19 nt, Artificial Sequence
  Description of Artificial Sequence: Synthetic oligonucleotide
  Antisense strand to SEQ ID NO: 1364366
ucauccagccaacauucaa

SEQ ID NO: 1364368 - RNA, 19 nt, Artificial Sequence
  Description of Artificial Sequence: Synthetic oligonucleotide
  Sense strand starting at position 988 of SEQ ID NO: 1242666
cccugcuucccugacagua

SEQ ID NO: 1364369 - RNA, 19 nt, Artificial Sequence
  Description of Artificial Sequence: Synthetic oligonucleotide
  Antisense strand to SEQ ID NO: 1364368
uacugucagggaagcaggg

SEQ ID NO: 1364370 - RNA, 19 nt, Artificial Sequence
  Description of Artificial Sequence: Synthetic oligonucleotide
  Sense strand starting at position 998 of SEQ ID NO: 1242666
cugacaguagugggucaaa

SEQ ID NO: 1364371 - RNA, 19 nt, Artificial Sequence
  Description of Artificial Sequence: Synthetic oligonucleotide
  Antisense strand to SEQ ID NO: 1364370
uuugacccacuacugucag

SEQ ID NO: 1364372 - RNA, 19 nt, Artificial Sequence
  Description of Artificial Sequence: Synthetic oligonucleotide
  Sense strand starting at position 1024 of SEQ ID NO: 1242666
guauguggaaaccguaaga

SEQ ID NO: 1364373 - RNA, 19 nt, Artificial Sequence
  Description of Artificial Sequence: Synthetic oligonucleotide
  Antisense strand to SEQ ID NO: 1364372
ucuuacgguuuccacauac

SEQ ID NO: 1364374 - RNA, 19 nt, Artificial Sequence
  Description of Artificial Sequence: Synthetic oligonucleotide
  Sense strand starting at position 1035 of SEQ ID NO: 1242666
ccguaagagcgauauaagu

SEQ ID NO: 1364375 - RNA, 19 nt, Artificial Sequence
  Description of Artificial Sequence: Synthetic oligonucleotide
  Antisense strand to SEQ ID NO: 1364374
acuuauaucgcucuuacgg

SEQ ID NO: 1364376 - RNA, 19 nt, Artificial Sequence
  Description of Artificial Sequence: Synthetic oligonucleotide
  Sense strand starting at position 1037 of SEQ ID NO: 1242666
guaagagcgauauaagugu

SEQ ID NO: 1364377 - RNA, 19 nt, Artificial Sequence
  Description of Artificial Sequence: Synthetic oligonucleotide
  Antisense strand to SEQ ID NO: 1364376
acacuuauaucgcucuuac

SEQ ID NO: 1364378 - RNA, 19 nt, Artificial Sequence
  Description of Artificial Sequence: Synthetic oligonucleotide
  Sense strand starting at position 1121 of SEQ ID NO: 1242666
cgcaucaacucucccagau

SEQ ID NO: 1364379 - RNA, 19 nt, Artificial Sequence
  Description of Artificial Sequence: Synthetic oligonucleotide
  Antisense strand to SEQ ID NO: 1364378
aucugggagaguugaugcg

SEQ ID NO: 1364380 - RNA, 19 nt, Artificial Sequence
  Description of Artificial Sequence: Synthetic oligonucleotide
  Sense strand starting at position 1325 of SEQ ID NO: 1242666
uuuguugagguugauaauc

SEQ ID NO: 1364381 - RNA, 19 nt, Artificial Sequence
  Description of Artificial Sequence: Synthetic oligonucleotide
  Antisense strand to SEQ ID NO: 1364380
gauuaucaaccucaacaaa

SEQ ID NO: 1364382 - RNA, 19 nt, Artificial Sequence
  Description of Artificial Sequence: Synthetic oligonucleotide
  Sense strand starting at position 1330 of SEQ ID NO: 1242666
ugagguugauaaucugaua

SEQ ID NO: 1364383 - RNA, 19 nt, Artificial Sequence
  Description of Artificial Sequence: Synthetic oligonucleotide
  Antisense strand to SEQ ID NO: 1364382
uaucagauuaucaaccuca

SEQ ID NO: 1364384 - RNA, 19 nt, Artificial Sequence
  Description of Artificial Sequence: Synthetic oligonucleotide
  Sense strand starting at position 1452 of SEQ ID NO: 1242666
gucaauguguaccuggaua

SEQ ID NO: 1364385 - RNA, 19 nt, Artificial Sequence
  Description of Artificial Sequence: Synthetic oligonucleotide
  Antisense strand to SEQ ID NO: 1364384
uauccagguacacauugac

SEQ ID NO: 1364386 - RNA, 19 nt, Artificial Sequence
  Description of Artificial Sequence: Synthetic oligonucleotide
  Sense strand starting at position 1454 of SEQ ID NO: 1242666
caauguguaccuggauaca

SEQ ID NO: 1364387 - RNA, 19 nt, Artificial Sequence
  Description of Artificial Sequence: Synthetic oligonucleotide
  Antisense strand to SEQ ID NO: 1364386
uguauccagguacacauug

SEQ ID NO: 1364388 - RNA, 19 nt, Artificial Sequence
  Description of Artificial Sequence: Synthetic oligonucleotide
  Sense strand starting at position 1465 of SEQ ID NO: 1242666
uggauacauccaugccuga

SEQ ID NO: 1364389 - RNA, 19 nt, Artificial Sequence
  Description of Artificial Sequence: Synthetic oligonucleotide
  Antisense strand to SEQ ID NO: 1364388
ucaggcauggauguaucca

SEQ ID NO: 1364390 - RNA, 19 nt, Artificial Sequence
  Description of Artificial Sequence: Synthetic oligonucleotide
  Sense strand starting at position 1587 of SEQ ID NO: 1242666
ugcauaggucauggagcaa

SEQ ID NO: 1364391 - RNA, 19 nt, Artificial Sequence
  Description of Artificial Sequence: Synthetic oligonucleotide
  Antisense strand to SEQ ID NO: 1364390
uugcuccaugaccuaugca

SEQ ID NO: 1364392 - RNA, 19 nt, Artificial Sequence
  Description of Artificial Sequence: Synthetic oligonucleotide
  Sense strand starting at position 2025 of SEQ ID NO: 1242666
uggccuucuagguauguga

SEQ ID NO: 1364393 - RNA, 19 nt, Artificial Sequence
  Description of Artificial Sequence: Synthetic oligonucleotide
  Antisense strand to SEQ ID NO: 1364392
ucacauaccuagaaggcca

SEQ ID NO: 1364394 - RNA, 19 nt, Artificial Sequence
  Description of Artificial Sequence: Synthetic oligonucleotide
  Sense strand starting at position 2274 of SEQ ID NO: 1242666
gggcccugcgucuugcaua

SEQ ID NO: 1364395 - RNA, 19 nt, Artificial Sequence
  Description of Artificial Sequence: Synthetic oligonucleotide
  Antisense strand to SEQ ID NO: 1364394
uaugcaagacgcagggccc

SEQ ID NO: 1364396 - RNA, 19 nt, Artificial Sequence
  Description of Artificial Sequence: Synthetic oligonucleotide
  Sense strand starting at position 2534 of SEQ ID NO: 1242666
gcuggaacgcguguacuuu

SEQ ID NO: 1364397 - RNA, 19 nt, Artificial Sequence
  Description of Artificial Sequence: Synthetic oligonucleotide
  Antisense strand to SEQ ID NO: 1364396
aaaguacacgcguuccagc

SEQ ID NO: 1364398 - RNA, 19 nt, Artificial Sequence
  Description of Artificial Sequence: Synthetic oligonucleotide
  Sense strand starting at position 2623 of SEQ ID NO: 1242666
cugauuauguucuuuaagu

SEQ ID NO: 1364399 - RNA, 19 nt, Artificial Sequence
  Description of Artificial Sequence: Synthetic oligonucleotide
  Antisense strand to SEQ ID NO: 1364398
acuuaaagaacauaaucag

SEQ ID NO: 1364400 - RNA, 19 nt, Artificial Sequence
  Description of Artificial Sequence: Synthetic oligonucleotide
  Sense strand starting at position 2843 of SEQ ID NO: 1242666
ucggauuucuugccuuguu

SEQ ID NO: 1364401 - RNA, 19 nt, Artificial Sequence
  Description of Artificial Sequence: Synthetic oligonucleotide
  Antisense strand to SEQ ID NO: 1364400
aacaaggcaagaaauccga

SEQ ID NO: 1364402 - RNA, 19 nt, Artificial Sequence
  Description of Artificial Sequence: Synthetic oligonucleotide
  Sense strand starting at position 2844 of SEQ ID NO: 1242666
cggauuucuugccuuguua

SEQ ID NO: 1364403 - RNA, 19 nt, Artificial Sequence
  Description of Artificial Sequence: Synthetic oligonucleotide
  Antisense strand to SEQ ID NO: 1364402
uaacaaggcaagaaauccg

SEQ ID NO: 1364404 - RNA, 19 nt, Artificial Sequence
  Description of Artificial Sequence: Synthetic oligonucleotide
  Sense strand starting at position 2848 of SEQ ID NO: 1242666
uuucuugccuuguuauuua

SEQ ID NO: 1364405 - RNA, 19 nt, Artificial Sequence
  Description of Artificial Sequence: Synthetic oligonucleotide
  Antisense strand to SEQ ID NO: 1364404
uaaauaacaaggcaagaaa

SEQ ID NO: 1364406 - RNA, 19 nt, Artificial Sequence
  Description of Artificial Sequence: Synthetic oligonucleotide
  Sense strand starting at position 2869 of SEQ ID NO: 1242666
cauuaagaucgugaccuau

SEQ ID NO: 1364407 - RNA, 19 nt, Artificial Sequence
  Description of Artificial Sequence: Synthetic oligonucleotide
  Antisense strand to SEQ ID NO: 1364406
auaggucacgaucuuaaug

SEQ ID NO: 1364408 - RNA, 19 nt, Artificial Sequence
  Description of Artificial Sequence: Synthetic oligonucleotide
  Sense strand starting at position 2871 of SEQ ID NO: 1242666
uuaagaucgugaccuauga

SEQ ID NO: 1364409 - RNA, 19 nt, Artificial Sequence
  Description of Artificial Sequence: Synthetic oligonucleotide
  Antisense strand to SEQ ID NO: 1364408
ucauaggucacgaucuuaa

SEQ ID NO: 1364410 - RNA, 19 nt, Artificial Sequence
  Description of Artificial Sequence: Synthetic oligonucleotide
  Sense strand starting at position 2935 of SEQ ID NO: 1242666
agcauccaugcugauuaga

SEQ ID NO: 1364411 - RNA, 19 nt, Artificial Sequence
  Description of Artificial Sequence: Synthetic oligonucleotide
  Antisense strand to SEQ ID NO: 1364410
ucuaaucagcauggaugcu

SEQ ID NO: 1364412 - RNA, 19 nt, Artificial Sequence
  Description of Artificial Sequence: Synthetic oligonucleotide
  Sense strand starting at position 3234 of SEQ ID NO: 1242666
cuugucauuccaugucaag

SEQ ID NO: 1364413 - RNA, 19 nt, Artificial Sequence
  Description of Artificial Sequence: Synthetic oligonucleotide
  Antisense strand to SEQ ID NO: 1364412
cuugacauggaaugacaag

SEQ ID NO: 1364414 - RNA, 19 nt, Artificial Sequence
  Description of Artificial Sequence: Synthetic oligonucleotide
  Sense strand starting at position 3310 of SEQ ID NO: 1242666
auaccuaguuugucgagga

SEQ ID NO: 1364415 - RNA, 19 nt, Artificial Sequence
  Description of Artificial Sequence: Synthetic oligonucleotide
  Antisense strand to SEQ ID NO: 1364414
uccucgacaaacuagguau

SEQ ID NO: 1364416 - RNA, 19 nt, Artificial Sequence
  Description of Artificial Sequence: Synthetic oligonucleotide
  Sense strand starting at position 3315 of SEQ ID NO: 1242666
uaguuugucgaggauguca

SEQ ID NO: 1364417 - RNA, 19 nt, Artificial Sequence
  Description of Artificial Sequence: Synthetic oligonucleotide
  Antisense strand to SEQ ID NO: 1364416
ugacauccucgacaaacua

SEQ ID NO: 1364418 - RNA, 19 nt, Artificial Sequence
  Description of Artificial Sequence: Synthetic oligonucleotide
  Sense strand starting at position 3462 of SEQ ID NO: 1242666
agagcuuauguguaccaga

SEQ ID NO: 1364419 - RNA, 19 nt, Artificial Sequence
  Description of Artificial Sequence: Synthetic oligonucleotide
  Antisense strand to SEQ ID NO: 1364418
ucugguacacauaagcucu

SEQ ID NO: 1364420 - RNA, 19 nt, Artificial Sequence
  Description of Artificial Sequence: Synthetic oligonucleotide
  Sense strand starting at position 3693 of SEQ ID NO: 1242666
cagacaauuccaugugugu

SEQ ID NO: 1364421 - RNA, 19 nt, Artificial Sequence
  Description of Artificial Sequence: Synthetic oligonucleotide
  Antisense strand to SEQ ID NO: 1364420
acacacauggaauugucug

SEQ ID NO: 1364422 - RNA, 19 nt, Artificial Sequence
  Description of Artificial Sequence: Synthetic oligonucleotide
  Sense strand starting at position 3825 of SEQ ID NO: 1242666
cucugccucuuaucagaga

SEQ ID NO: 1364423 - RNA, 19 nt, Artificial Sequence
  Description of Artificial Sequence: Synthetic oligonucleotide
  Antisense strand to SEQ ID NO: 1364422
ucucugauaagaggcagag

SEQ ID NO: 1364424 - RNA, 19 nt, Artificial Sequence
  Description of Artificial Sequence: Synthetic oligonucleotide
  Sense strand starting at position 345 of SEQ ID NO: 1242667
ccucuucuguaaggcagaa

SEQ ID NO: 1364425 - RNA, 19 nt, Artificial Sequence
  Description of Artificial Sequence: Synthetic oligonucleotide
  Antisense strand to SEQ ID NO: 1364424
uucugccuuacagaagagg

SEQ ID NO: 1364426 - RNA, 19 nt, Artificial Sequence
  Description of Artificial Sequence: Synthetic oligonucleotide
  Sense strand starting at position 389 of SEQ ID NO: 1242667
agggcugguucuuggagau

SEQ ID NO: 1364427 - RNA, 19 nt, Artificial Sequence
  Description of Artificial Sequence: Synthetic oligonucleotide
  Antisense strand to SEQ ID NO: 1364426
aucuccaagaaccagcccu

SEQ ID NO: 1364428 - RNA, 19 nt, Artificial Sequence
  Description of Artificial Sequence: Synthetic oligonucleotide
  Sense strand starting at position 401 of SEQ ID NO: 1242667
uggagauucucacucacuu

SEQ ID NO: 1364429 - RNA, 19 nt, Artificial Sequence
  Description of Artificial Sequence: Synthetic oligonucleotide
  Antisense strand to SEQ ID NO: 1364428
aagugagugagaaucucca

SEQ ID NO: 1364430 - RNA, 19 nt, Artificial Sequence
  Description of Artificial Sequence: Synthetic oligonucleotide
  Sense strand starting at position 409 of SEQ ID NO: 1242667
cucacucacuugugucuau

SEQ ID NO: 1364431 - RNA, 19 nt, Artificial Sequence
  Description of Artificial Sequence: Synthetic oligonucleotide
  Antisense strand to SEQ ID NO: 1364430
auagacacaagugagugag

SEQ ID NO: 1364432 - RNA, 19 nt, Artificial Sequence
  Description of Artificial Sequence: Synthetic oligonucleotide
  Sense strand starting at position 456 of SEQ ID NO: 1242667
caccgugacuacucuggua

SEQ ID NO: 1364433 - RNA, 19 nt, Artificial Sequence
  Description of Artificial Sequence: Synthetic oligonucleotide
  Antisense strand to SEQ ID NO: 1364432
uaccagaguagucacggug

SEQ ID NO: 1364434 - RNA, 19 nt, Artificial Sequence
  Description of Artificial Sequence: Synthetic oligonucleotide
  Sense strand starting at position 458 of SEQ ID NO: 1242667
ccgugacuacucugguacu

SEQ ID NO: 1364435 - RNA, 19 nt, Artificial Sequence
  Description of Artificial Sequence: Synthetic oligonucleotide
  Antisense strand to SEQ ID NO: 1364434
aguaccagaguagucacgg

SEQ ID NO: 1364436 - RNA, 19 nt, Artificial Sequence
  Description of Artificial Sequence: Synthetic oligonucleotide
  Sense strand starting at position 459 of SEQ ID NO: 1242667
cgugacuacucugguacuu

SEQ ID NO: 1364437 - RNA, 19 nt, Artificial Sequence
  Description of Artificial Sequence: Synthetic oligonucleotide
  Antisense strand to SEQ ID NO: 1364436
aaguaccagaguagucacg

SEQ ID NO: 1364438 - RNA, 19 nt, Artificial Sequence
  Description of Artificial Sequence: Synthetic oligonucleotide
  Sense strand starting at position 865 of SEQ ID NO: 1242667
agugucauuuaguacauca

SEQ ID NO: 1364439 - RNA, 19 nt, Artificial Sequence
  Description of Artificial Sequence: Synthetic oligonucleotide
  Antisense strand to SEQ ID NO: 1364438
ugauguacuaaaugacacu

SEQ ID NO: 1364440 - RNA, 19 nt, Artificial Sequence
  Description of Artificial Sequence: Synthetic oligonucleotide
  Sense strand starting at position 873 of SEQ ID NO: 1242667
uuaguacaucagugagguu

SEQ ID NO: 1364441 - RNA, 19 nt, Artificial Sequence
  Description of Artificial Sequence: Synthetic oligonucleotide
  Antisense strand to SEQ ID NO: 1364440
aaccucacugauguacuaa

SEQ ID NO: 1364442 - RNA, 19 nt, Artificial Sequence
  Description of Artificial Sequence: Synthetic oligonucleotide
  Sense strand starting at position 876 of SEQ ID NO: 1242667
guacaucagugagguugua

SEQ ID NO: 1364443 - RNA, 19 nt, Artificial Sequence
  Description of Artificial Sequence: Synthetic oligonucleotide
  Antisense strand to SEQ ID NO: 1364442
uacaaccucacugauguac

SEQ ID NO: 1364444 - RNA, 19 nt, Artificial Sequence
  Description of Artificial Sequence: Synthetic oligonucleotide
  Sense strand starting at position 1080 of SEQ ID NO: 1242667
gugucuggcuucuuugcaa

SEQ ID NO: 1364445 - RNA, 19 nt, Artificial Sequence
  Description of Artificial Sequence: Synthetic oligonucleotide
  Antisense strand to SEQ ID NO: 1364444
uugcaaagaagccagacac

SEQ ID NO: 1364446 - RNA, 19 nt, Artificial Sequence
  Description of Artificial Sequence: Synthetic oligonucleotide
  Sense strand starting at position 1084 of SEQ ID NO: 1242667
cuggcuucuuugcaauacu

SEQ ID NO: 1364447 - RNA, 19 nt, Artificial Sequence
  Description of Artificial Sequence: Synthetic oligonucleotide
  Antisense strand to SEQ ID NO: 1364446
aguauugcaaagaagccag

SEQ ID NO: 1364448 - RNA, 19 nt, Artificial Sequence
  Description of Artificial Sequence: Synthetic oligonucleotide
  Sense strand starting at position 1087 of SEQ ID NO: 1242667
gcuucuuugcaauacuuga

SEQ ID NO: 1364449 - RNA, 19 nt, Artificial Sequence
  Description of Artificial Sequence: Synthetic oligonucleotide
  Antisense strand to SEQ ID NO: 1364448
ucaaguauugcaaagaagc

SEQ ID NO: 1364450 - RNA, 19 nt, Artificial Sequence
  Description of Artificial Sequence: Synthetic oligonucleotide
  Sense strand starting at position 1128 of SEQ ID NO: 1242667
uugguugugccugacucua

SEQ ID NO: 1364451 - RNA, 19 nt, Artificial Sequence
  Description of Artificial Sequence: Synthetic oligonucleotide
  Antisense strand to SEQ ID NO: 1364450
uagagucaggcacaaccaa

SEQ ID NO: 1364452 - RNA, 19 nt, Artificial Sequence
  Description of Artificial Sequence: Synthetic oligonucleotide
  Sense strand starting at position 1130 of SEQ ID NO: 1242667
gguugugccugacucuaaa

SEQ ID NO: 1364453 - RNA, 19 nt, Artificial Sequence
  Description of Artificial Sequence: Synthetic oligonucleotide
  Antisense strand to SEQ ID NO: 1364452
uuuagagucaggcacaacc

SEQ ID NO: 1364454 - RNA, 19 nt, Artificial Sequence
  Description of Artificial Sequence: Synthetic oligonucleotide
  Sense strand starting at position 1181 of SEQ ID NO: 1242667
gcccaucguaggugaguaa

SEQ ID NO: 1364455 - RNA, 19 nt, Artificial Sequence
  Description of Artificial Sequence: Synthetic oligonucleotide
  Antisense strand to SEQ ID NO: 1364454
uuacucaccuacgaugggc

SEQ ID NO: 1364456 - RNA, 19 nt, Artificial Sequence
  Description of Artificial Sequence: Synthetic oligonucleotide
  Sense strand starting at position 1527 of SEQ ID NO: 1242667
ggagagagccaguggugaa

SEQ ID NO: 1364457 - RNA, 19 nt, Artificial Sequence
  Description of Artificial Sequence: Synthetic oligonucleotide
  Antisense strand to SEQ ID NO: 1364456
uucaccacuggcucucucc

SEQ ID NO: 1364458 - RNA, 19 nt, Artificial Sequence
  Description of Artificial Sequence: Synthetic oligonucleotide
  Sense strand starting at position 2189 of SEQ ID NO: 1242667
accaaagaaugugaugaaa

SEQ ID NO: 1364459 - RNA, 19 nt, Artificial Sequence
  Description of Artificial Sequence: Synthetic oligonucleotide
  Antisense strand to SEQ ID NO: 1364458
uuucaucacauucuuuggu

SEQ ID NO: 1364460 - RNA, 19 nt, Artificial Sequence
  Description of Artificial Sequence: Synthetic oligonucleotide
  Sense strand starting at position 2200 of SEQ ID NO: 1242667
ugaugaaacgggcgcaauu

SEQ ID NO: 1364461 - RNA, 19 nt, Artificial Sequence
  Description of Artificial Sequence: Synthetic oligonucleotide
  Antisense strand to SEQ ID NO: 1364460
aauugcgcccguuucauca

SEQ ID NO: 1364462 - RNA, 19 nt, Artificial Sequence
  Description of Artificial Sequence: Synthetic oligonucleotide
  Sense strand starting at position 2269 of SEQ ID NO: 1242667
gugcucaguuaauauugga

SEQ ID NO: 1364463 - RNA, 19 nt, Artificial Sequence
  Description of Artificial Sequence: Synthetic oligonucleotide
  Antisense strand to SEQ ID NO: 1364462
uccaauauuaacugagcac

SEQ ID NO: 1364464 - RNA, 19 nt, Artificial Sequence
  Description of Artificial Sequence: Synthetic oligonucleotide
  Sense strand starting at position 2272 of SEQ ID NO: 1242667
cucaguuaauauuggauga

SEQ ID NO: 1364465 - RNA, 19 nt, Artificial Sequence
  Description of Artificial Sequence: Synthetic oligonucleotide
  Antisense strand to SEQ ID NO: 1364464
ucauccaauauuaacugag

SEQ ID NO: 1364466 - RNA, 19 nt, Artificial Sequence
  Description of Artificial Sequence: Synthetic oligonucleotide
  Sense strand starting at position 2274 of SEQ ID NO: 1242667
caguuaauauuggaugaau

SEQ ID NO: 1364467 - RNA, 19 nt, Artificial Sequence
  Description of Artificial Sequence: Synthetic oligonucleotide
  Antisense strand to SEQ ID NO: 1364466
auucauccaauauuaacug

SEQ ID NO: 1364468 - RNA, 19 nt, Artificial Sequence
  Description of Artificial Sequence: Synthetic oligonucleotide
  Sense strand starting at position 2276 of SEQ ID NO: 1242667
guuaauauuggaugaaugu

SEQ ID NO: 1364469 - RNA, 19 nt, Artificial Sequence
  Description of Artificial Sequence: Synthetic oligonucleotide
  Antisense strand to SEQ ID NO: 1364468
acauucauccaauauuaac

SEQ ID NO: 1364470 - RNA, 19 nt, Artificial Sequence
  Description of Artificial Sequence: Synthetic oligonucleotide
  Sense strand starting at position 2285 of SEQ ID NO: 1242667
ggaugaauguuugaauagc

SEQ ID NO: 1364471 - RNA, 19 nt, Artificial Sequence
  Description of Artificial Sequence: Synthetic oligonucleotide
  Antisense strand to SEQ ID NO: 1364470
gcuauucaaacauucaucc

SEQ ID NO: 1364472 - RNA, 19 nt, Artificial Sequence
  Description of Artificial Sequence: Synthetic oligonucleotide
  Sense strand starting at position 2293 of SEQ ID NO: 1242667
guuugaauagcugauggca

SEQ ID NO: 1364473 - RNA, 19 nt, Artificial Sequence
  Description of Artificial Sequence: Synthetic oligonucleotide
  Antisense strand to SEQ ID NO: 1364472
ugccaucagcuauucaaac

SEQ ID NO: 1364474 - RNA, 19 nt, Artificial Sequence
  Description of Artificial Sequence: Synthetic oligonucleotide
  Sense strand starting at position 2326 of SEQ ID NO: 1242667
gcccucuggugaugugaga

SEQ ID NO: 1364475 - RNA, 19 nt, Artificial Sequence
  Description of Artificial Sequence: Synthetic oligonucleotide
  Antisense strand to SEQ ID NO: 1364474
ucucacaucaccagagggc

SEQ ID NO: 1364476 - RNA, 19 nt, Artificial Sequence
  Description of Artificial Sequence: Synthetic oligonucleotide
  Sense strand starting at position 2335 of SEQ ID NO: 1242667
ugaugugagacugguaacu

SEQ ID NO: 1364477 - RNA, 19 nt, Artificial Sequence
  Description of Artificial Sequence: Synthetic oligonucleotide
  Antisense strand to SEQ ID NO: 1364476
aguuaccagucucacauca

SEQ ID NO: 1364478 - RNA, 19 nt, Artificial Sequence
  Description of Artificial Sequence: Synthetic oligonucleotide
  Sense strand starting at position 2337 of SEQ ID NO: 1242667
augugagacugguaacuuu

SEQ ID NO: 1364479 - RNA, 19 nt, Artificial Sequence
  Description of Artificial Sequence: Synthetic oligonucleotide
  Antisense strand to SEQ ID NO: 1364478
aaaguuaccagucucacau

SEQ ID NO: 1364480 - RNA, 19 nt, Artificial Sequence
  Description of Artificial Sequence: Synthetic oligonucleotide
  Sense strand starting at position 2388 of SEQ ID NO: 1242667
gcagcucccuccuuggaau

SEQ ID NO: 1364481 - RNA, 19 nt, Artificial Sequence
  Description of Artificial Sequence: Synthetic oligonucleotide
  Antisense strand to SEQ ID NO: 1364480
auuccaaggagggagcugc

SEQ ID NO: 1364482 - RNA, 19 nt, Artificial Sequence
  Description of Artificial Sequence: Synthetic oligonucleotide
  Sense strand starting at position 2410 of SEQ ID NO: 1242667
cucgaauccgggcagaaga

SEQ ID NO: 1364483 - RNA, 19 nt, Artificial Sequence
  Description of Artificial Sequence: Synthetic oligonucleotide
  Antisense strand to SEQ ID NO: 1364482
ucuucugcccggauucgag

SEQ ID NO: 1364484 - RNA, 19 nt, Artificial Sequence
  Description of Artificial Sequence: Synthetic oligonucleotide
  Sense strand starting at position 2425 of SEQ ID NO: 1242667
aagacagguuucuuggagu

SEQ ID NO: 1364485 - RNA, 19 nt, Artificial Sequence
  Description of Artificial Sequence: Synthetic oligonucleotide
  Antisense strand to SEQ ID NO: 1364484
acuccaagaaaccugucuu

SEQ ID NO: 1364486 - RNA, 19 nt, Artificial Sequence
  Description of Artificial Sequence: Synthetic oligonucleotide
  Sense strand starting at position 2428 of SEQ ID NO: 1242667
acagguuucuuggaguuag

SEQ ID NO: 1364487 - RNA, 19 nt, Artificial Sequence
  Description of Artificial Sequence: Synthetic oligonucleotide
  Antisense strand to SEQ ID NO: 1364486
cuaacuccaagaaaccugu

SEQ ID NO: 1364488 - RNA, 19 nt, Artificial Sequence
  Description of Artificial Sequence: Synthetic oligonucleotide
  Sense strand starting at position 2468 of SEQ ID NO: 1242667
agauaagaaucugaaguac

SEQ ID NO: 1364489 - RNA, 19 nt, Artificial Sequence
  Description of Artificial Sequence: Synthetic oligonucleotide
  Antisense strand to SEQ ID NO: 1364488
guacuucagauucuuaucu

SEQ ID NO: 1364490 - RNA, 19 nt, Artificial Sequence
  Description of Artificial Sequence: Synthetic oligonucleotide
  Sense strand starting at position 2621 of SEQ ID NO: 1242667
uuuguaauuagcuggaugu

SEQ ID NO: 1364491 - RNA, 19 nt, Artificial Sequence
  Description of Artificial Sequence: Synthetic oligonucleotide
  Antisense strand to SEQ ID NO: 1364490
acauccagcuaauuacaaa

SEQ ID NO: 1364492 - RNA, 19 nt, Artificial Sequence
  Description of Artificial Sequence: Synthetic oligonucleotide
  Sense strand starting at position 2826 of SEQ ID NO: 1242667
ggcacaguggcugacauau

SEQ ID NO: 1364493 - RNA, 19 nt, Artificial Sequence
  Description of Artificial Sequence: Synthetic oligonucleotide
  Antisense strand to SEQ ID NO: 1364492
auaugucagccacugugcc

SEQ ID NO: 1364494 - RNA, 19 nt, Artificial Sequence
  Description of Artificial Sequence: Synthetic oligonucleotide
  Sense strand starting at position 3923 of SEQ ID NO: 1242667
cuuggcuaacagugugaaa

SEQ ID NO: 1364495 - RNA, 19 nt, Artificial Sequence
  Description of Artificial Sequence: Synthetic oligonucleotide
  Antisense strand to SEQ ID NO: 1364494
uuucacacuguuagccaag

SEQ ID NO: 1364496 - RNA, 19 nt, Artificial Sequence
  Description of Artificial Sequence: Synthetic oligonucleotide
  Sense strand starting at position 37 of SEQ ID NO: 1242668
aggcaagaaugugcauaaa

SEQ ID NO: 1364497 - RNA, 19 nt, Artificial Sequence
  Description of Artificial Sequence: Synthetic oligonucleotide
  Antisense strand to SEQ ID NO: 1364496
uuuaugcacauucuugccu

SEQ ID NO: 1364498 - RNA, 19 nt, Artificial Sequence
  Description of Artificial Sequence: Synthetic oligonucleotide
  Sense strand starting at position 418 of SEQ ID NO: 1242668
ugccacacuuuguuaaaga

SEQ ID NO: 1364499 - RNA, 19 nt, Artificial Sequence
  Description of Artificial Sequence: Synthetic oligonucleotide
  Antisense strand to SEQ ID NO: 1364498
ucuuuaacaaaguguggca

SEQ ID NO: 1364500 - RNA, 19 nt, Artificial Sequence
  Description of Artificial Sequence: Synthetic oligonucleotide
  Sense strand starting at position 427 of SEQ ID NO: 1242668
uuguuaaagagcuaaaggu

SEQ ID NO: 1364501 - RNA, 19 nt, Artificial Sequence
  Description of Artificial Sequence: Synthetic oligonucleotide
  Antisense strand to SEQ ID NO: 1364500
accuuuagcucuuuaacaa

SEQ ID NO: 1364502 - RNA, 19 nt, Artificial Sequence
  Description of Artificial Sequence: Synthetic oligonucleotide
  Sense strand starting at position 479 of SEQ ID NO: 1242668
agagcugaauuugagagaa

SEQ ID NO: 1364503 - RNA, 19 nt, Artificial Sequence
  Description of Artificial Sequence: Synthetic oligonucleotide
  Antisense strand to SEQ ID NO: 1364502
uucucucaaauucagcucu

SEQ ID NO: 1364504 - RNA, 19 nt, Artificial Sequence
  Description of Artificial Sequence: Synthetic oligonucleotide
  Sense strand starting at position 746 of SEQ ID NO: 1242668
ggcauacauuggguuggau

SEQ ID NO: 1364505 - RNA, 19 nt, Artificial Sequence
  Description of Artificial Sequence: Synthetic oligonucleotide
  Antisense strand to SEQ ID NO: 1364504
auccaacccaauguaugcc

SEQ ID NO: 1364506 - RNA, 19 nt, Artificial Sequence
  Description of Artificial Sequence: Synthetic oligonucleotide
  Sense strand starting at position 781 of SEQ ID NO: 1242668
aucaaucauguccagggua

SEQ ID NO: 1364507 - RNA, 19 nt, Artificial Sequence
  Description of Artificial Sequence: Synthetic oligonucleotide
  Antisense strand to SEQ ID NO: 1364506
uacccuggacaugauugau

SEQ ID NO: 1364508 - RNA, 19 nt, Artificial Sequence
  Description of Artificial Sequence: Synthetic oligonucleotide
  Sense strand starting at position 783 of SEQ ID NO: 1242668
caaucauguccaggguaua

SEQ ID NO: 1364509 - RNA, 19 nt, Artificial Sequence
  Description of Artificial Sequence: Synthetic oligonucleotide
  Antisense strand to SEQ ID NO: 1364508
uauacccuggacaugauug

SEQ ID NO: 1364510 - RNA, 19 nt, Artificial Sequence
  Description of Artificial Sequence: Synthetic oligonucleotide
  Sense strand starting at position 784 of SEQ ID NO: 1242668
aaucauguccaggguauaa

SEQ ID NO: 1364511 - RNA, 19 nt, Artificial Sequence
  Description of Artificial Sequence: Synthetic oligonucleotide
  Antisense strand to SEQ ID NO: 1364510
uuauacccuggacaugauu

SEQ ID NO: 1364512 - RNA, 19 nt, Artificial Sequence
  Description of Artificial Sequence: Synthetic oligonucleotide
  Sense strand starting at position 795 of SEQ ID NO: 1242668
ggguauaaggucugauaaa

SEQ ID NO: 1364513 - RNA, 19 nt, Artificial Sequence
  Description of Artificial Sequence: Synthetic oligonucleotide
  Antisense strand to SEQ ID NO: 1364512
uuuaucagaccuuauaccc

SEQ ID NO: 1364514 - RNA, 19 nt, Artificial Sequence
  Description of Artificial Sequence: Synthetic oligonucleotide
  Sense strand starting at position 839 of SEQ ID NO: 1242668
uguaguugggaauguaaga

SEQ ID NO: 1364515 - RNA, 19 nt, Artificial Sequence
  Description of Artificial Sequence: Synthetic oligonucleotide
  Antisense strand to SEQ ID NO: 1364514
ucuuacauucccaacuaca

SEQ ID NO: 1364516 - RNA, 19 nt, Artificial Sequence
  Description of Artificial Sequence: Synthetic oligonucleotide
  Sense strand starting at position 957 of SEQ ID NO: 1242668
aaggcagaguuaguaaaga

SEQ ID NO: 1364517 - RNA, 19 nt, Artificial Sequence
  Description of Artificial Sequence: Synthetic oligonucleotide
  Antisense strand to SEQ ID NO: 1364516
ucuuuacuaacucugccuu

SEQ ID NO: 1364518 - RNA, 19 nt, Artificial Sequence
  Description of Artificial Sequence: Synthetic oligonucleotide
  Sense strand starting at position 1022 of SEQ ID NO: 1242668
guccgagauuuguuuacuc

SEQ ID NO: 1364519 - RNA, 19 nt, Artificial Sequence
  Description of Artificial Sequence: Synthetic oligonucleotide
  Antisense strand to SEQ ID NO: 1364518
gaguaaacaaaucucggac

SEQ ID NO: 1364520 - RNA, 19 nt, Artificial Sequence
  Description of Artificial Sequence: Synthetic oligonucleotide
  Sense strand starting at position 1159 of SEQ ID NO: 1242668
cuaucuauauagguuacua

SEQ ID NO: 1364521 - RNA, 19 nt, Artificial Sequence
  Description of Artificial Sequence: Synthetic oligonucleotide
  Antisense strand to SEQ ID NO: 1364520
uaguaaccuauauagauag

SEQ ID NO: 1364522 - RNA, 19 nt, Artificial Sequence
  Description of Artificial Sequence: Synthetic oligonucleotide
  Sense strand starting at position 1220 of SEQ ID NO: 1242668
cagcaaguaguuugaauaa

SEQ ID NO: 1364523 - RNA, 19 nt, Artificial Sequence
  Description of Artificial Sequence: Synthetic oligonucleotide
  Antisense strand to SEQ ID NO: 1364522
uuauucaaacuacuugcug

SEQ ID NO: 1364524 - RNA, 19 nt, Artificial Sequence
  Description of Artificial Sequence: Synthetic oligonucleotide
  Sense strand starting at position 1286 of SEQ ID NO: 1242668
gccauauugccguccagcu

SEQ ID NO: 1364525 - RNA, 19 nt, Artificial Sequence
  Description of Artificial Sequence: Synthetic oligonucleotide
  Antisense strand to SEQ ID NO: 1364524
agcuggacggcaauauggc

SEQ ID NO: 1364526 - RNA, 19 nt, Artificial Sequence
  Description of Artificial Sequence: Synthetic oligonucleotide
  Sense strand starting at position 1415 of SEQ ID NO: 1242668
accucugauuagucuacuu

SEQ ID NO: 1364527 - RNA, 19 nt, Artificial Sequence
  Description of Artificial Sequence: Synthetic oligonucleotide
  Antisense strand to SEQ ID NO: 1364526
aaguagacuaaucagaggu

SEQ ID NO: 1364528 - RNA, 19 nt, Artificial Sequence
  Description of Artificial Sequence: Synthetic oligonucleotide
  Sense strand starting at position 1420 of SEQ ID NO: 1242668
ugauuagucuacuuccuag

SEQ ID NO: 1364529 - RNA, 19 nt, Artificial Sequence
  Description of Artificial Sequence: Synthetic oligonucleotide
  Antisense strand to SEQ ID NO: 1364528
cuaggaaguagacuaauca

SEQ ID NO: 1364530 - RNA, 19 nt, Artificial Sequence
  Description of Artificial Sequence: Synthetic oligonucleotide
  Sense strand starting at position 1423 of SEQ ID NO: 1242668
uuagucuacuuccuagaga

SEQ ID NO: 1364531 - RNA, 19 nt, Artificial Sequence
  Description of Artificial Sequence: Synthetic oligonucleotide
  Antisense strand to SEQ ID NO: 1364530
ucucuaggaaguagacuaa

SEQ ID NO: 1364532 - RNA, 19 nt, Artificial Sequence
  Description of Artificial Sequence: Synthetic oligonucleotide
  Sense strand starting at position 1507 of SEQ ID NO: 1242668
uuuccaugcggacaaagau

SEQ ID NO: 1364533 - RNA, 19 nt, Artificial Sequence
  Description of Artificial Sequence: Synthetic oligonucleotide
  Antisense strand to SEQ ID NO: 1364532
aucuuuguccgcauggaaa

SEQ ID NO: 1364534 - RNA, 19 nt, Artificial Sequence
  Description of Artificial Sequence: Synthetic oligonucleotide
  Sense strand starting at position 1546 of SEQ ID NO: 1242668
guguaucaccuugaaguga

SEQ ID NO: 1364535 - RNA, 19 nt, Artificial Sequence
  Description of Artificial Sequence: Synthetic oligonucleotide
  Antisense strand to SEQ ID NO: 1364534
ucacuucaaggugauacac

SEQ ID NO: 1364536 - RNA, 19 nt, Artificial Sequence
  Description of Artificial Sequence: Synthetic oligonucleotide
  Sense strand starting at position 1623 of SEQ ID NO: 1242668
cuaagucaacacugggaau

SEQ ID NO: 1364537 - RNA, 19 nt, Artificial Sequence
  Description of Artificial Sequence: Synthetic oligonucleotide
  Antisense strand to SEQ ID NO: 1364536
auucccaguguugacuuag

SEQ ID NO: 1364538 - RNA, 19 nt, Artificial Sequence
  Description of Artificial Sequence: Synthetic oligonucleotide
  Sense strand starting at position 1671 of SEQ ID NO: 1242668
cugcuaaugaaugaugagu

SEQ ID NO: 1364539 - RNA, 19 nt, Artificial Sequence
  Description of Artificial Sequence: Synthetic oligonucleotide
  Antisense strand to SEQ ID NO: 1364538
acucaucauucauuagcag

SEQ ID NO: 1364540 - RNA, 19 nt, Artificial Sequence
  Description of Artificial Sequence: Synthetic oligonucleotide
  Sense strand starting at position 1684 of SEQ ID NO: 1242668
augagugacugacuauaau

SEQ ID NO: 1364541 - RNA, 19 nt, Artificial Sequence
  Description of Artificial Sequence: Synthetic oligonucleotide
  Antisense strand to SEQ ID NO: 1364540
auuauagucagucacucau

SEQ ID NO: 1364542 - RNA, 19 nt, Artificial Sequence
  Description of Artificial Sequence: Synthetic oligonucleotide
  Sense strand starting at position 1845 of SEQ ID NO: 1242668
guacuuacagucuauuaga

SEQ ID NO: 1364543 - RNA, 19 nt, Artificial Sequence
  Description of Artificial Sequence: Synthetic oligonucleotide
  Antisense strand to SEQ ID NO: 1364542
ucuaauagacuguaaguac

SEQ ID NO: 1364544 - RNA, 19 nt, Artificial Sequence
  Description of Artificial Sequence: Synthetic oligonucleotide
  Sense strand starting at position 1859 of SEQ ID NO: 1242668
uuagaaacauugcugaacu

SEQ ID NO: 1364545 - RNA, 19 nt, Artificial Sequence
  Description of Artificial Sequence: Synthetic oligonucleotide
  Antisense strand to SEQ ID NO: 1364544
aguucagcaauguuucuaa

SEQ ID NO: 1364546 - RNA, 19 nt, Artificial Sequence
  Description of Artificial Sequence: Synthetic oligonucleotide
  Sense strand starting at position 1993 of SEQ ID NO: 1242668
gaggcuugacugcaaggau

SEQ ID NO: 1364547 - RNA, 19 nt, Artificial Sequence
  Description of Artificial Sequence: Synthetic oligonucleotide
  Antisense strand to SEQ ID NO: 1364546
auccuugcagucaagccuc

SEQ ID NO: 1364548 - RNA, 19 nt, Artificial Sequence
  Description of Artificial Sequence: Synthetic oligonucleotide
  Sense strand starting at position 2014 of SEQ ID NO: 1242668
auaaguuaucuguaaagug

SEQ ID NO: 1364549 - RNA, 19 nt, Artificial Sequence
  Description of Artificial Sequence: Synthetic oligonucleotide
  Antisense strand to SEQ ID NO: 1364548
cacuuuacagauaacuuau

SEQ ID NO: 1364550 - RNA, 19 nt, Artificial Sequence
  Description of Artificial Sequence: Synthetic oligonucleotide
  Sense strand starting at position 2021 of SEQ ID NO: 1242668
aucuguaaagugugacaua

SEQ ID NO: 1364551 - RNA, 19 nt, Artificial Sequence
  Description of Artificial Sequence: Synthetic oligonucleotide
  Antisense strand to SEQ ID NO: 1364550
uaugucacacuuuacagau

SEQ ID NO: 1364552 - RNA, 19 nt, Artificial Sequence
  Description of Artificial Sequence: Synthetic oligonucleotide
  Sense strand starting at position 2149 of SEQ ID NO: 1242668
aggaguugacccgaaguca

SEQ ID NO: 1364553 - RNA, 19 nt, Artificial Sequence
  Description of Artificial Sequence: Synthetic oligonucleotide
  Antisense strand to SEQ ID NO: 1364552
ugacuucgggucaacuccu

SEQ ID NO: 1364554 - RNA, 19 nt, Artificial Sequence
  Description of Artificial Sequence: Synthetic oligonucleotide
  Sense strand starting at position 2246 of SEQ ID NO: 1242668
ggugaacgucaauaucuuu

SEQ ID NO: 1364555 - RNA, 19 nt, Artificial Sequence
  Description of Artificial Sequence: Synthetic oligonucleotide
  Antisense strand to SEQ ID NO: 1364554
aaagauauugacguucacc

SEQ ID NO: 1364556 - RNA, 19 nt, Artificial Sequence
  Description of Artificial Sequence: Synthetic oligonucleotide
  Sense strand starting at position 2328 of SEQ ID NO: 1242668
uagaaugagucauccagca

SEQ ID NO: 1364557 - RNA, 19 nt, Artificial Sequence
  Description of Artificial Sequence: Synthetic oligonucleotide
  Antisense strand to SEQ ID NO: 1364556
ugcuggaugacucauucua

SEQ ID NO: 1364558 - RNA, 19 nt, Artificial Sequence
  Description of Artificial Sequence: Synthetic oligonucleotide
  Sense strand starting at position 2333 of SEQ ID NO: 1242668
ugagucauccagcaauuag

SEQ ID NO: 1364559 - RNA, 19 nt, Artificial Sequence
  Description of Artificial Sequence: Synthetic oligonucleotide
  Antisense strand to SEQ ID NO: 1364558
cuaauugcuggaugacuca

SEQ ID NO: 1364560 - RNA, 19 nt, Artificial Sequence
  Description of Artificial Sequence: Synthetic oligonucleotide
  Sense strand starting at position 2383 of SEQ ID NO: 1242668
gaacaauggcuguauugcu

SEQ ID NO: 1364561 - RNA, 19 nt, Artificial Sequence
  Description of Artificial Sequence: Synthetic oligonucleotide
  Antisense strand to SEQ ID NO: 1364560
agcaauacagccauuguuc

SEQ ID NO: 1364562 - RNA, 19 nt, Artificial Sequence
  Description of Artificial Sequence: Synthetic oligonucleotide
  Sense strand starting at position 2475 of SEQ ID NO: 1242668
ccuauaagguagguaugau

SEQ ID NO: 1364563 - RNA, 19 nt, Artificial Sequence
  Description of Artificial Sequence: Synthetic oligonucleotide
  Antisense strand to SEQ ID NO: 1364562
aucauaccuaccuuauagg

SEQ ID NO: 1364564 - RNA, 19 nt, Artificial Sequence
  Description of Artificial Sequence: Synthetic oligonucleotide
  Sense strand starting at position 3147 of SEQ ID NO: 1242668
uagaccgugcuauacauua

SEQ ID NO: 1364565 - RNA, 19 nt, Artificial Sequence
  Description of Artificial Sequence: Synthetic oligonucleotide
  Antisense strand to SEQ ID NO: 1364564
uaauguauagcacggucua

SEQ ID NO: 1364566 - RNA, 19 nt, Artificial Sequence
  Description of Artificial Sequence: Synthetic oligonucleotide
  Sense strand starting at position 3152 of SEQ ID NO: 1242668
cgugcuauacauuagaauc

SEQ ID NO: 1364567 - RNA, 19 nt, Artificial Sequence
  Description of Artificial Sequence: Synthetic oligonucleotide
  Antisense strand to SEQ ID NO: 1364566
gauucuaauguauagcacg

SEQ ID NO: 1364568 - RNA, 19 nt, Artificial Sequence
  Description of Artificial Sequence: Synthetic oligonucleotide
  Sense strand starting at position 3254 of SEQ ID NO: 1242668
cuuuaaauccugcaggcau

SEQ ID NO: 1364569 - RNA, 19 nt, Artificial Sequence
  Description of Artificial Sequence: Synthetic oligonucleotide
  Antisense strand to SEQ ID NO: 1364568
augccugcaggauuuaaag

SEQ ID NO: 1364570 - RNA, 19 nt, Artificial Sequence
  Description of Artificial Sequence: Synthetic oligonucleotide
  Sense strand starting at position 3422 of SEQ ID NO: 1242668
ugcuaaacauuaccgaaua

SEQ ID NO: 1364571 - RNA, 19 nt, Artificial Sequence
  Description of Artificial Sequence: Synthetic oligonucleotide
  Antisense strand to SEQ ID NO: 1364570
uauucgguaauguuuagca

SEQ ID NO: 1364572 - RNA, 19 nt, Artificial Sequence
  Description of Artificial Sequence: Synthetic oligonucleotide
  Sense strand starting at position 3811 of SEQ ID NO: 1242668
gucccuuuccaggaauagu

SEQ ID NO: 1364573 - RNA, 19 nt, Artificial Sequence
  Description of Artificial Sequence: Synthetic oligonucleotide
  Antisense strand to SEQ ID NO: 1364572
acuauuccuggaaagggac

SEQ ID NO: 1364574 - RNA, 19 nt, Artificial Sequence
  Description of Artificial Sequence: Synthetic oligonucleotide
  Sense strand starting at position 3828 of SEQ ID NO: 1242668
gugucacagaugggaguua

SEQ ID NO: 1364575 - RNA, 19 nt, Artificial Sequence
  Description of Artificial Sequence: Synthetic oligonucleotide
  Antisense strand to SEQ ID NO: 1364574
uaacucccaucugugacac

SEQ ID NO: 1364576 - RNA, 19 nt, Artificial Sequence
  Description of Artificial Sequence: Synthetic oligonucleotide
  Sense strand starting at position 67 of SEQ ID NO: 1242669
gucugcguuggguguuaaa

SEQ ID NO: 1364577 - RNA, 19 nt, Artificial Sequence
  Description of Artificial Sequence: Synthetic oligonucleotide
  Antisense strand to SEQ ID NO: 1364576
uuuaacacccaacgcagac

SEQ ID NO: 1364578 - RNA, 19 nt, Artificial Sequence
  Description of Artificial Sequence: Synthetic oligonucleotide
  Sense strand starting at position 70 of SEQ ID NO: 1242669
ugcguuggguguuaaagaa

SEQ ID NO: 1364579 - RNA, 19 nt, Artificial Sequence
  Description of Artificial Sequence: Synthetic oligonucleotide
  Antisense strand to SEQ ID NO: 1364578
uucuuuaacacccaacgca

SEQ ID NO: 1364580 - RNA, 19 nt, Artificial Sequence
  Description of Artificial Sequence: Synthetic oligonucleotide
  Sense strand starting at position 462 of SEQ ID NO: 1242669
gggccucaccuuugaggau

SEQ ID NO: 1364581 - RNA, 19 nt, Artificial Sequence
  Description of Artificial Sequence: Synthetic oligonucleotide
  Antisense strand to SEQ ID NO: 1364580
auccucaaaggugaggccc

SEQ ID NO: 1364582 - RNA, 19 nt, Artificial Sequence
  Description of Artificial Sequence: Synthetic oligonucleotide
  Sense strand starting at position 463 of SEQ ID NO: 1242669
ggccucaccuuugaggauu

SEQ ID NO: 1364583 - RNA, 19 nt, Artificial Sequence
  Description of Artificial Sequence: Synthetic oligonucleotide
  Antisense strand to SEQ ID NO: 1364582
aauccucaaaggugaggcc

SEQ ID NO: 1364584 - RNA, 19 nt, Artificial Sequence
  Description of Artificial Sequence: Synthetic oligonucleotide
  Sense strand starting at position 977 of SEQ ID NO: 1242669
cacagaggucucugagaca

SEQ ID NO: 1364585 - RNA, 19 nt, Artificial Sequence
  Description of Artificial Sequence: Synthetic oligonucleotide
  Antisense strand to SEQ ID NO: 1364584
ugucucagagaccucugug

SEQ ID NO: 1364586 - RNA, 19 nt, Artificial Sequence
  Description of Artificial Sequence: Synthetic oligonucleotide
  Sense strand starting at position 1071 of SEQ ID NO: 1242669
gcuggucugcuccagggaa

SEQ ID NO: 1364587 - RNA, 19 nt, Artificial Sequence
  Description of Artificial Sequence: Synthetic oligonucleotide
  Antisense strand to SEQ ID NO: 1364586
uucccuggagcagaccagc

SEQ ID NO: 1364588 - RNA, 19 nt, Artificial Sequence
  Description of Artificial Sequence: Synthetic oligonucleotide
  Sense strand starting at position 1405 of SEQ ID NO: 1242669
ccaggagugucuuccgcua

SEQ ID NO: 1364589 - RNA, 19 nt, Artificial Sequence
  Description of Artificial Sequence: Synthetic oligonucleotide
  Antisense strand to SEQ ID NO: 1364588
uagcggaagacacuccugg

SEQ ID NO: 1364590 - RNA, 19 nt, Artificial Sequence
  Description of Artificial Sequence: Synthetic oligonucleotide
  Sense strand starting at position 1464 of SEQ ID NO: 1242669
augggcucugcuggacaaa

SEQ ID NO: 1364591 - RNA, 19 nt, Artificial Sequence
  Description of Artificial Sequence: Synthetic oligonucleotide
  Antisense strand to SEQ ID NO: 1364590
uuuguccagcagagcccau

SEQ ID NO: 1364592 - RNA, 19 nt, Artificial Sequence
  Description of Artificial Sequence: Synthetic oligonucleotide
  Sense strand starting at position 1467 of SEQ ID NO: 1242669
ggcucugcuggacaaagau

SEQ ID NO: 1364593 - RNA, 19 nt, Artificial Sequence
  Description of Artificial Sequence: Synthetic oligonucleotide
  Antisense strand to SEQ ID NO: 1364592
aucuuuguccagcagagcc

SEQ ID NO: 1364594 - RNA, 19 nt, Artificial Sequence
  Description of Artificial Sequence: Synthetic oligonucleotide
  Sense strand starting at position 1504 of SEQ ID NO: 1242669
gaagcccucugggauugua

SEQ ID NO: 1364595 - RNA, 19 nt, Artificial Sequence
  Description of Artificial Sequence: Synthetic oligonucleotide
  Antisense strand to SEQ ID NO: 1364594
uacaaucccagagggcuuc

SEQ ID NO: 1364596 - RNA, 19 nt, Artificial Sequence
  Description of Artificial Sequence: Synthetic oligonucleotide
  Sense strand starting at position 1567 of SEQ ID NO: 1242669
gguggaaugucucuggcag

SEQ ID NO: 1364597 - RNA, 19 nt, Artificial Sequence
  Description of Artificial Sequence: Synthetic oligonucleotide
  Antisense strand to SEQ ID NO: 1364596
cugccagagacauuccacc

SEQ ID NO: 1364598 - RNA, 19 nt, Artificial Sequence
  Description of Artificial Sequence: Synthetic oligonucleotide
  Sense strand starting at position 1568 of SEQ ID NO: 1242669
guggaaugucucuggcagu

SEQ ID NO: 1364599 - RNA, 19 nt, Artificial Sequence
  Description of Artificial Sequence: Synthetic oligonucleotide
  Antisense strand to SEQ ID NO: 1364598
acugccagagacauuccac

SEQ ID NO: 1364600 - RNA, 19 nt, Artificial Sequence
  Description of Artificial Sequence: Synthetic oligonucleotide
  Sense strand starting at position 1569 of SEQ ID NO: 1242669
uggaaugucucuggcaguu

SEQ ID NO: 1364601 - RNA, 19 nt, Artificial Sequence
  Description of Artificial Sequence: Synthetic oligonucleotide
  Antisense strand to SEQ ID NO: 1364600
aacugccagagacauucca

SEQ ID NO: 1364602 - RNA, 19 nt, Artificial Sequence
  Description of Artificial Sequence: Synthetic oligonucleotide
  Sense strand starting at position 1571 of SEQ ID NO: 1242669
gaaugucucuggcaguuga

SEQ ID NO: 1364603 - RNA, 19 nt, Artificial Sequence
  Description of Artificial Sequence: Synthetic oligonucleotide
  Antisense strand to SEQ ID NO: 1364602
ucaacugccagagacauuc

SEQ ID NO: 1364604 - RNA, 19 nt, Artificial Sequence
  Description of Artificial Sequence: Synthetic oligonucleotide
  Sense strand starting at position 1575 of SEQ ID NO: 1242669
gucucuggcaguugagaca

SEQ ID NO: 1364605 - RNA, 19 nt, Artificial Sequence
  Description of Artificial Sequence: Synthetic oligonucleotide
  Antisense strand to SEQ ID NO: 1364604
ugucucaacugccagagac

SEQ ID NO: 1364606 - RNA, 19 nt, Artificial Sequence
  Description of Artificial Sequence: Synthetic oligonucleotide
  Sense strand starting at position 1871 of SEQ ID NO: 1242669
ggcccugugcuuccuguua

SEQ ID NO: 1364607 - RNA, 19 nt, Artificial Sequence
  Description of Artificial Sequence: Synthetic oligonucleotide
  Antisense strand to SEQ ID NO: 1364606
uaacaggaagcacagggcc

SEQ ID NO: 1364608 - RNA, 19 nt, Artificial Sequence
  Description of Artificial Sequence: Synthetic oligonucleotide
  Sense strand starting at position 1884 of SEQ ID NO: 1242669
cuguuaccgucucagggau

SEQ ID NO: 1364609 - RNA, 19 nt, Artificial Sequence
  Description of Artificial Sequence: Synthetic oligonucleotide
  Antisense strand to SEQ ID NO: 1364608
aucccugagacgguaacag

SEQ ID NO: 1364610 - RNA, 19 nt, Artificial Sequence
  Description of Artificial Sequence: Synthetic oligonucleotide
  Sense strand starting at position 1924 of SEQ ID NO: 1242669
cuguguuacugucccagca

SEQ ID NO: 1364611 - RNA, 19 nt, Artificial Sequence
  Description of Artificial Sequence: Synthetic oligonucleotide
  Antisense strand to SEQ ID NO: 1364610
ugcugggacaguaacacag

SEQ ID NO: 1364612 - RNA, 19 nt, Artificial Sequence
  Description of Artificial Sequence: Synthetic oligonucleotide
  Sense strand starting at position 1926 of SEQ ID NO: 1242669
guguuacugucccagcaac

SEQ ID NO: 1364613 - RNA, 19 nt, Artificial Sequence
  Description of Artificial Sequence: Synthetic oligonucleotide
  Antisense strand to SEQ ID NO: 1364612
guugcugggacaguaacac

SEQ ID NO: 1364614 - RNA, 19 nt, Artificial Sequence
  Description of Artificial Sequence: Synthetic oligonucleotide
  Sense strand starting at position 2189 of SEQ ID NO: 1242669
gcucuccuccaucgggaaa

SEQ ID NO: 1364615 - RNA, 19 nt, Artificial Sequence
  Description of Artificial Sequence: Synthetic oligonucleotide
  Antisense strand to SEQ ID NO: 1364614
uuucccgauggaggagagc

SEQ ID NO: 1364616 - RNA, 19 nt, Artificial Sequence
  Description of Artificial Sequence: Synthetic oligonucleotide
  Sense strand starting at position 2529 of SEQ ID NO: 1242669
ggacgacucgcgggaauga

SEQ ID NO: 1364617 - RNA, 19 nt, Artificial Sequence
  Description of Artificial Sequence: Synthetic oligonucleotide
  Antisense strand to SEQ ID NO: 1364616
ucauucccgcgagucgucc

SEQ ID NO: 1364618 - RNA, 19 nt, Artificial Sequence
  Description of Artificial Sequence: Synthetic oligonucleotide
  Sense strand starting at position 2540 of SEQ ID NO: 1242669
gggaaugacuucuaggccu

SEQ ID NO: 1364619 - RNA, 19 nt, Artificial Sequence
  Description of Artificial Sequence: Synthetic oligonucleotide
  Antisense strand to SEQ ID NO: 1364618
aggccuagaagucauuccc

SEQ ID NO: 1364620 - RNA, 19 nt, Artificial Sequence
  Description of Artificial Sequence: Synthetic oligonucleotide
  Sense strand starting at position 2733 of SEQ ID NO: 1242669
ggagaauuguggcggccuu

SEQ ID NO: 1364621 - RNA, 19 nt, Artificial Sequence
  Description of Artificial Sequence: Synthetic oligonucleotide
  Antisense strand to SEQ ID NO: 1364620
aaggccgccacaauucucc

SEQ ID NO: 1364622 - RNA, 19 nt, Artificial Sequence
  Description of Artificial Sequence: Synthetic oligonucleotide
  Sense strand starting at position 2803 of SEQ ID NO: 1242669
ucggcagauuugugugcga

SEQ ID NO: 1364623 - RNA, 19 nt, Artificial Sequence
  Description of Artificial Sequence: Synthetic oligonucleotide
  Antisense strand to SEQ ID NO: 1364622
ucgcacacaaaucugccga

SEQ ID NO: 1364624 - RNA, 19 nt, Artificial Sequence
  Description of Artificial Sequence: Synthetic oligonucleotide
  Sense strand starting at position 2806 of SEQ ID NO: 1242669
gcagauuugugugcgaccu

SEQ ID NO: 1364625 - RNA, 19 nt, Artificial Sequence
  Description of Artificial Sequence: Synthetic oligonucleotide
  Antisense strand to SEQ ID NO: 1364624
aggucgcacacaaaucugc

SEQ ID NO: 1364626 - RNA, 19 nt, Artificial Sequence
  Description of Artificial Sequence: Synthetic oligonucleotide
  Sense strand starting at position 3332 of SEQ ID NO: 1242669
cucccaugcccgugaaaug

SEQ ID NO: 1364627 - RNA, 19 nt, Artificial Sequence
  Description of Artificial Sequence: Synthetic oligonucleotide
  Antisense strand to SEQ ID NO: 1364626
cauuucacgggcaugggag

SEQ ID NO: 1364628 - RNA, 19 nt, Artificial Sequence
  Description of Artificial Sequence: Synthetic oligonucleotide
  Sense strand starting at position 3459 of SEQ ID NO: 1242669
gaggcauguuccugacagu

SEQ ID NO: 1364629 - RNA, 19 nt, Artificial Sequence
  Description of Artificial Sequence: Synthetic oligonucleotide
  Antisense strand to SEQ ID NO: 1364628
acugucaggaacaugccuc

SEQ ID NO: 1364630 - RNA, 19 nt, Artificial Sequence
  Description of Artificial Sequence: Synthetic oligonucleotide
  Sense strand starting at position 3460 of SEQ ID NO: 1242669
aggcauguuccugacaguc

SEQ ID NO: 1364631 - RNA, 19 nt, Artificial Sequence
  Description of Artificial Sequence: Synthetic oligonucleotide
  Antisense strand to SEQ ID NO: 1364630
gacugucaggaacaugccu

SEQ ID NO: 1364632 - RNA, 19 nt, Artificial Sequence
  Description of Artificial Sequence: Synthetic oligonucleotide
  Sense strand starting at position 3649 of SEQ ID NO: 1242669
gccugaacuauguggcaca

SEQ ID NO: 1364633 - RNA, 19 nt, Artificial Sequence
  Description of Artificial Sequence: Synthetic oligonucleotide
  Antisense strand to SEQ ID NO: 1364632
ugugccacauaguucaggc

SEQ ID NO: 1364634 - RNA, 19 nt, Artificial Sequence
  Description of Artificial Sequence: Synthetic oligonucleotide
  Sense strand starting at position 3652 of SEQ ID NO: 1242669
ugaacuauguggcacagaa

SEQ ID NO: 1364635 - RNA, 19 nt, Artificial Sequence
  Description of Artificial Sequence: Synthetic oligonucleotide
  Antisense strand to SEQ ID NO: 1364634
uucugugccacauaguuca

SEQ ID NO: 1364636 - RNA, 19 nt, Artificial Sequence
  Description of Artificial Sequence: Synthetic oligonucleotide
  Sense strand starting at position 3735 of SEQ ID NO: 1242669
gcaugucuccuggacagaa

SEQ ID NO: 1364637 - RNA, 19 nt, Artificial Sequence
  Description of Artificial Sequence: Synthetic oligonucleotide
  Antisense strand to SEQ ID NO: 1364636
uucuguccaggagacaugc

SEQ ID NO: 1364638 - RNA, 19 nt, Artificial Sequence
  Description of Artificial Sequence: Synthetic oligonucleotide
  Sense strand starting at position 109 of SEQ ID NO: 1242670
gggccaagauuccaaucua

SEQ ID NO: 1364639 - RNA, 19 nt, Artificial Sequence
  Description of Artificial Sequence: Synthetic oligonucleotide
  Antisense strand to SEQ ID NO: 1364638
uagauuggaaucuuggccc

SEQ ID NO: 1364640 - RNA, 19 nt, Artificial Sequence
  Description of Artificial Sequence: Synthetic oligonucleotide
  Sense strand starting at position 139 of SEQ ID NO: 1242670
gcucuugacggucguacua

SEQ ID NO: 1364641 - RNA, 19 nt, Artificial Sequence
  Description of Artificial Sequence: Synthetic oligonucleotide
  Antisense strand to SEQ ID NO: 1364640
uaguacgaccgucaagagc

SEQ ID NO: 1364642 - RNA, 19 nt, Artificial Sequence
  Description of Artificial Sequence: Synthetic oligonucleotide
  Sense strand starting at position 449 of SEQ ID NO: 1242670
gaggaaugaguguagcuca

SEQ ID NO: 1364643 - RNA, 19 nt, Artificial Sequence
  Description of Artificial Sequence: Synthetic oligonucleotide
  Antisense strand to SEQ ID NO: 1364642
ugagcuacacucauuccuc

SEQ ID NO: 1364644 - RNA, 19 nt, Artificial Sequence
  Description of Artificial Sequence: Synthetic oligonucleotide
  Sense strand starting at position 729 of SEQ ID NO: 1242670
gcucucauucuacggagga

SEQ ID NO: 1364645 - RNA, 19 nt, Artificial Sequence
  Description of Artificial Sequence: Synthetic oligonucleotide
  Antisense strand to SEQ ID NO: 1364644
uccuccguagaaugagagc

SEQ ID NO: 1364646 - RNA, 19 nt, Artificial Sequence
  Description of Artificial Sequence: Synthetic oligonucleotide
  Sense strand starting at position 767 of SEQ ID NO: 1242670
gaggaagggccucguucaa

SEQ ID NO: 1364647 - RNA, 19 nt, Artificial Sequence
  Description of Artificial Sequence: Synthetic oligonucleotide
  Antisense strand to SEQ ID NO: 1364646
uugaacgaggcccuuccuc

SEQ ID NO: 1364648 - RNA, 19 nt, Artificial Sequence
  Description of Artificial Sequence: Synthetic oligonucleotide
  Sense strand starting at position 847 of SEQ ID NO: 1242670
cuggcugagugguuuauuu

SEQ ID NO: 1364649 - RNA, 19 nt, Artificial Sequence
  Description of Artificial Sequence: Synthetic oligonucleotide
  Antisense strand to SEQ ID NO: 1364648
aaauaaaccacucagccag

SEQ ID NO: 1364650 - RNA, 19 nt, Artificial Sequence
  Description of Artificial Sequence: Synthetic oligonucleotide
  Sense strand starting at position 849 of SEQ ID NO: 1242670
ggcugagugguuuauuugu

SEQ ID NO: 1364651 - RNA, 19 nt, Artificial Sequence
  Description of Artificial Sequence: Synthetic oligonucleotide
  Antisense strand to SEQ ID NO: 1364650
acaaauaaaccacucagcc

SEQ ID NO: 1364652 - RNA, 19 nt, Artificial Sequence
  Description of Artificial Sequence: Synthetic oligonucleotide
  Sense strand starting at position 851 of SEQ ID NO: 1242670
cugagugguuuauuuguua

SEQ ID NO: 1364653 - RNA, 19 nt, Artificial Sequence
  Description of Artificial Sequence: Synthetic oligonucleotide
  Antisense strand to SEQ ID NO: 1364652
uaacaaauaaaccacucag

SEQ ID NO: 1364654 - RNA, 19 nt, Artificial Sequence
  Description of Artificial Sequence: Synthetic oligonucleotide
  Sense strand starting at position 856 of SEQ ID NO: 1242670
ugguuuauuuguuacaggu

SEQ ID NO: 1364655 - RNA, 19 nt, Artificial Sequence
  Description of Artificial Sequence: Synthetic oligonucleotide
  Antisense strand to SEQ ID NO: 1364654
accuguaacaaauaaacca

SEQ ID NO: 1364656 - RNA, 19 nt, Artificial Sequence
  Description of Artificial Sequence: Synthetic oligonucleotide
  Sense strand starting at position 866 of SEQ ID NO: 1242670
guuacagguuugcuugaaa

SEQ ID NO: 1364657 - RNA, 19 nt, Artificial Sequence
  Description of Artificial Sequence: Synthetic oligonucleotide
  Antisense strand to SEQ ID NO: 1364656
uuucaagcaaaccuguaac

SEQ ID NO: 1364658 - RNA, 19 nt, Artificial Sequence
  Description of Artificial Sequence: Synthetic oligonucleotide
  Sense strand starting at position 881 of SEQ ID NO: 1242670
gaaagcguucucugccgaa

SEQ ID NO: 1364659 - RNA, 19 nt, Artificial Sequence
  Description of Artificial Sequence: Synthetic oligonucleotide
  Antisense strand to SEQ ID NO: 1364658
uucggcagagaacgcuuuc

SEQ ID NO: 1364660 - RNA, 19 nt, Artificial Sequence
  Description of Artificial Sequence: Synthetic oligonucleotide
  Sense strand starting at position 885 of SEQ ID NO: 1242670
gcguucucugccgaagagu

SEQ ID NO: 1364661 - RNA, 19 nt, Artificial Sequence
  Description of Artificial Sequence: Synthetic oligonucleotide
  Antisense strand to SEQ ID NO: 1364660
acucuucggcagagaacgc

SEQ ID NO: 1364662 - RNA, 19 nt, Artificial Sequence
  Description of Artificial Sequence: Synthetic oligonucleotide
  Sense strand starting at position 888 of SEQ ID NO: 1242670
uucucugccgaagaguuua

SEQ ID NO: 1364663 - RNA, 19 nt, Artificial Sequence
  Description of Artificial Sequence: Synthetic oligonucleotide
  Antisense strand to SEQ ID NO: 1364662
uaaacucuucggcagagaa

SEQ ID NO: 1364664 - RNA, 19 nt, Artificial Sequence
  Description of Artificial Sequence: Synthetic oligonucleotide
  Sense strand starting at position 899 of SEQ ID NO: 1242670
agaguuuaggagcgaucgu

SEQ ID NO: 1364665 - RNA, 19 nt, Artificial Sequence
  Description of Artificial Sequence: Synthetic oligonucleotide
  Antisense strand to SEQ ID NO: 1364664
acgaucgcuccuaaacucu

SEQ ID NO: 1364666 - RNA, 19 nt, Artificial Sequence
  Description of Artificial Sequence: Synthetic oligonucleotide
  Sense strand starting at position 908 of SEQ ID NO: 1242670
gagcgaucgugacugguua

SEQ ID NO: 1364667 - RNA, 19 nt, Artificial Sequence
  Description of Artificial Sequence: Synthetic oligonucleotide
  Antisense strand to SEQ ID NO: 1364666
uaaccagucacgaucgcuc

SEQ ID NO: 1364668 - RNA, 19 nt, Artificial Sequence
  Description of Artificial Sequence: Synthetic oligonucleotide
  Sense strand starting at position 910 of SEQ ID NO: 1242670
gcgaucgugacugguuagu

SEQ ID NO: 1364669 - RNA, 19 nt, Artificial Sequence
  Description of Artificial Sequence: Synthetic oligonucleotide
  Antisense strand to SEQ ID NO: 1364668
acuaaccagucacgaucgc

SEQ ID NO: 1364670 - RNA, 19 nt, Artificial Sequence
  Description of Artificial Sequence: Synthetic oligonucleotide
  Sense strand starting at position 953 of SEQ ID NO: 1242670
uggugagucgugccagugu

SEQ ID NO: 1364671 - RNA, 19 nt, Artificial Sequence
  Description of Artificial Sequence: Synthetic oligonucleotide
  Antisense strand to SEQ ID NO: 1364670
acacuggcacgacucacca

SEQ ID NO: 1364672 - RNA, 19 nt, Artificial Sequence
  Description of Artificial Sequence: Synthetic oligonucleotide
  Sense strand starting at position 955 of SEQ ID NO: 1242670
gugagucgugccagugugu

SEQ ID NO: 1364673 - RNA, 19 nt, Artificial Sequence
  Description of Artificial Sequence: Synthetic oligonucleotide
  Antisense strand to SEQ ID NO: 1364672
acacacuggcacgacucac

SEQ ID NO: 1364674 - RNA, 19 nt, Artificial Sequence
  Description of Artificial Sequence: Synthetic oligonucleotide
  Sense strand starting at position 1770 of SEQ ID NO: 1242670
gucgcaucuuaggaaauuu

SEQ ID NO: 1364675 - RNA, 19 nt, Artificial Sequence
  Description of Artificial Sequence: Synthetic oligonucleotide
  Antisense strand to SEQ ID NO: 1364674
aaauuuccuaagaugcgac

SEQ ID NO: 1364676 - RNA, 19 nt, Artificial Sequence
  Description of Artificial Sequence: Synthetic oligonucleotide
  Sense strand starting at position 1779 of SEQ ID NO: 1242670
uaggaaauuugaggcucua

SEQ ID NO: 1364677 - RNA, 19 nt, Artificial Sequence
  Description of Artificial Sequence: Synthetic oligonucleotide
  Antisense strand to SEQ ID NO: 1364676
uagagccucaaauuuccua

SEQ ID NO: 1364678 - RNA, 19 nt, Artificial Sequence
  Description of Artificial Sequence: Synthetic oligonucleotide
  Sense strand starting at position 1806 of SEQ ID NO: 1242670
uguuauugcugguuugcca

SEQ ID NO: 1364679 - RNA, 19 nt, Artificial Sequence
  Description of Artificial Sequence: Synthetic oligonucleotide
  Antisense strand to SEQ ID NO: 1364678
uggcaaaccagcaauaaca

SEQ ID NO: 1364680 - RNA, 19 nt, Artificial Sequence
  Description of Artificial Sequence: Synthetic oligonucleotide
  Sense strand starting at position 1970 of SEQ ID NO: 1242670
gucugaagagggugauguu

SEQ ID NO: 1364681 - RNA, 19 nt, Artificial Sequence
  Description of Artificial Sequence: Synthetic oligonucleotide
  Antisense strand to SEQ ID NO: 1364680
aacaucacccucuucagac

SEQ ID NO: 1364682 - RNA, 19 nt, Artificial Sequence
  Description of Artificial Sequence: Synthetic oligonucleotide
  Sense strand starting at position 1979 of SEQ ID NO: 1242670
gggugauguucccugcugu

SEQ ID NO: 1364683 - RNA, 19 nt, Artificial Sequence
  Description of Artificial Sequence: Synthetic oligonucleotide
  Antisense strand to SEQ ID NO: 1364682
acagcagggaacaucaccc

SEQ ID NO: 1364684 - RNA, 19 nt, Artificial Sequence
  Description of Artificial Sequence: Synthetic oligonucleotide
  Sense strand starting at position 1992 of SEQ ID NO: 1242670
ugcugucuguucucacuuu

SEQ ID NO: 1364685 - RNA, 19 nt, Artificial Sequence
  Description of Artificial Sequence: Synthetic oligonucleotide
  Antisense strand to SEQ ID NO: 1364684
aaagugagaacagacagca

SEQ ID NO: 1364686 - RNA, 19 nt, Artificial Sequence
  Description of Artificial Sequence: Synthetic oligonucleotide
  Sense strand starting at position 2073 of SEQ ID NO: 1242670
ugagccuaaugguuaaagu

SEQ ID NO: 1364687 - RNA, 19 nt, Artificial Sequence
  Description of Artificial Sequence: Synthetic oligonucleotide
  Antisense strand to SEQ ID NO: 1364686
acuuuaaccauuaggcuca

SEQ ID NO: 1364688 - RNA, 19 nt, Artificial Sequence
  Description of Artificial Sequence: Synthetic oligonucleotide
  Sense strand starting at position 2074 of SEQ ID NO: 1242670
gagccuaaugguuaaaguu

SEQ ID NO: 1364689 - RNA, 19 nt, Artificial Sequence
  Description of Artificial Sequence: Synthetic oligonucleotide
  Antisense strand to SEQ ID NO: 1364688
aacuuuaaccauuaggcuc

SEQ ID NO: 1364690 - RNA, 19 nt, Artificial Sequence
  Description of Artificial Sequence: Synthetic oligonucleotide
  Sense strand starting at position 2168 of SEQ ID NO: 1242670
ugggcuuugaucuggcaaa

SEQ ID NO: 1364691 - RNA, 19 nt, Artificial Sequence
  Description of Artificial Sequence: Synthetic oligonucleotide
  Antisense strand to SEQ ID NO: 1364690
uuugccagaucaaagccca

SEQ ID NO: 1364692 - RNA, 19 nt, Artificial Sequence
  Description of Artificial Sequence: Synthetic oligonucleotide
  Sense strand starting at position 2491 of SEQ ID NO: 1242670
ggaguccuugcuugccuua

SEQ ID NO: 1364693 - RNA, 19 nt, Artificial Sequence
  Description of Artificial Sequence: Synthetic oligonucleotide
  Antisense strand to SEQ ID NO: 1364692
uaaggcaagcaaggacucc

SEQ ID NO: 1364694 - RNA, 19 nt, Artificial Sequence
  Description of Artificial Sequence: Synthetic oligonucleotide
  Sense strand starting at position 2493 of SEQ ID NO: 1242670
aguccuugcuugccuuaaa

SEQ ID NO: 1364695 - RNA, 19 nt, Artificial Sequence
  Description of Artificial Sequence: Synthetic oligonucleotide
  Antisense strand to SEQ ID NO: 1364694
uuuaaggcaagcaaggacu

SEQ ID NO: 1364696 - RNA, 19 nt, Artificial Sequence
  Description of Artificial Sequence: Synthetic oligonucleotide
  Sense strand starting at position 2584 of SEQ ID NO: 1242670
gccugcugucuuggcauaa

SEQ ID NO: 1364697 - RNA, 19 nt, Artificial Sequence
  Description of Artificial Sequence: Synthetic oligonucleotide
  Antisense strand to SEQ ID NO: 1364696
uuaugccaagacagcaggc

SEQ ID NO: 1364698 - RNA, 19 nt, Artificial Sequence
  Description of Artificial Sequence: Synthetic oligonucleotide
  Sense strand starting at position 2585 of SEQ ID NO: 1242670
ccugcugucuuggcauaaa

SEQ ID NO: 1364699 - RNA, 19 nt, Artificial Sequence
  Description of Artificial Sequence: Synthetic oligonucleotide
  Antisense strand to SEQ ID NO: 1364698
uuuaugccaagacagcagg

SEQ ID NO: 1364700 - RNA, 19 nt, Artificial Sequence
  Description of Artificial Sequence: Synthetic oligonucleotide
  Sense strand starting at position 2588 of SEQ ID NO: 1242670
gcugucuuggcauaaacau

SEQ ID NO: 1364701 - RNA, 19 nt, Artificial Sequence
  Description of Artificial Sequence: Synthetic oligonucleotide
  Antisense strand to SEQ ID NO: 1364700
auguuuaugccaagacagc

SEQ ID NO: 1364702 - RNA, 19 nt, Artificial Sequence
  Description of Artificial Sequence: Synthetic oligonucleotide
  Sense strand starting at position 3440 of SEQ ID NO: 1242670
augccauuauguccagcua

SEQ ID NO: 1364703 - RNA, 19 nt, Artificial Sequence
  Description of Artificial Sequence: Synthetic oligonucleotide
  Antisense strand to SEQ ID NO: 1364702
uagcuggacauaauggcau

SEQ ID NO: 1364704 - RNA, 19 nt, Artificial Sequence
  Description of Artificial Sequence: Synthetic oligonucleotide
  Sense strand starting at position 3616 of SEQ ID NO: 1242670
gguccacauggguauguua

SEQ ID NO: 1364705 - RNA, 19 nt, Artificial Sequence
  Description of Artificial Sequence: Synthetic oligonucleotide
  Antisense strand to SEQ ID NO: 1364704
uaacauacccauguggacc

SEQ ID NO: 1364706 - RNA, 19 nt, Artificial Sequence
  Description of Artificial Sequence: Synthetic oligonucleotide
  Sense strand starting at position 3782 of SEQ ID NO: 1242670
guuugugacuucuuguugu

SEQ ID NO: 1364707 - RNA, 19 nt, Artificial Sequence
  Description of Artificial Sequence: Synthetic oligonucleotide
  Antisense strand to SEQ ID NO: 1364706
acaacaagaagucacaaac

SEQ ID NO: 1364708 - RNA, 19 nt, Artificial Sequence
  Description of Artificial Sequence: Synthetic oligonucleotide
  Sense strand starting at position 3792 of SEQ ID NO: 1242670
ucuuguuguuguuuaaacu

SEQ ID NO: 1364709 - RNA, 19 nt, Artificial Sequence
  Description of Artificial Sequence: Synthetic oligonucleotide
  Antisense strand to SEQ ID NO: 1364708
aguuuaaacaacaacaaga

SEQ ID NO: 1364710 - RNA, 19 nt, Artificial Sequence
  Description of Artificial Sequence: Synthetic oligonucleotide
  Sense strand starting at position 3793 of SEQ ID NO: 1242670
cuuguuguuguuuaaacuu

SEQ ID NO: 1364711 - RNA, 19 nt, Artificial Sequence
  Description of Artificial Sequence: Synthetic oligonucleotide
  Antisense strand to SEQ ID NO: 1364710
aaguuuaaacaacaacaag

SEQ ID NO: 1364712 - RNA, 19 nt, Artificial Sequence
  Description of Artificial Sequence: Synthetic oligonucleotide
  Sense strand starting at position 3855 of SEQ ID NO: 1242670
ccuggaaucuuagaucuag

SEQ ID NO: 1364713 - RNA, 19 nt, Artificial Sequence
  Description of Artificial Sequence: Synthetic oligonucleotide
  Antisense strand to SEQ ID NO: 1364712
cuagaucuaagauuccagg

SEQ ID NO: 1364714 - RNA, 19 nt, Artificial Sequence
  Description of Artificial Sequence: Synthetic oligonucleotide
  Sense strand starting at position 3882 of SEQ ID NO: 1242670
acagaacacagguguugaa

SEQ ID NO: 1364715 - RNA, 19 nt, Artificial Sequence
  Description of Artificial Sequence: Synthetic oligonucleotide
  Antisense strand to SEQ ID NO: 1364714
uucaacaccuguguucugu

SEQ ID NO: 1364716 - RNA, 19 nt, Artificial Sequence
  Description of Artificial Sequence: Synthetic oligonucleotide
  Sense strand starting at position 3929 of SEQ ID NO: 1242670
gcccaagaaucccacugaa

SEQ ID NO: 1364717 - RNA, 19 nt, Artificial Sequence
  Description of Artificial Sequence: Synthetic oligonucleotide
  Antisense strand to SEQ ID NO: 1364716
uucagugggauucuugggc

SEQ ID NO: 1364718 - RNA, 19 nt, Artificial Sequence
  Description of Artificial Sequence: Synthetic oligonucleotide
  Sense strand starting at position 81 of SEQ ID NO: 1242671
uccauuucuuugucuguga

SEQ ID NO: 1364719 - RNA, 19 nt, Artificial Sequence
  Description of Artificial Sequence: Synthetic oligonucleotide
  Antisense strand to SEQ ID NO: 1364718
ucacagacaaagaaaugga

SEQ ID NO: 1364720 - RNA, 19 nt, Artificial Sequence
  Description of Artificial Sequence: Synthetic oligonucleotide
  Sense strand starting at position 82 of SEQ ID NO: 1242671
ccauuucuuugucugugaa

SEQ ID NO: 1364721 - RNA, 19 nt, Artificial Sequence
  Description of Artificial Sequence: Synthetic oligonucleotide
  Antisense strand to SEQ ID NO: 1364720
uucacagacaaagaaaugg

SEQ ID NO: 1364722 - RNA, 19 nt, Artificial Sequence
  Description of Artificial Sequence: Synthetic oligonucleotide
  Sense strand starting at position 96 of SEQ ID NO: 1242671
gugaaauggucucacuaaa

SEQ ID NO: 1364723 - RNA, 19 nt, Artificial Sequence
  Description of Artificial Sequence: Synthetic oligonucleotide
  Antisense strand to SEQ ID NO: 1364722
uuuagugagaccauuucac

SEQ ID NO: 1364724 - RNA, 19 nt, Artificial Sequence
  Description of Artificial Sequence: Synthetic oligonucleotide
  Sense strand starting at position 188 of SEQ ID NO: 1242671
gguggcucagaguaauaag

SEQ ID NO: 1364725 - RNA, 19 nt, Artificial Sequence
  Description of Artificial Sequence: Synthetic oligonucleotide
  Antisense strand to SEQ ID NO: 1364724
cuuauuacucugagccacc

SEQ ID NO: 1364726 - RNA, 19 nt, Artificial Sequence
  Description of Artificial Sequence: Synthetic oligonucleotide
  Sense strand starting at position 191 of SEQ ID NO: 1242671
ggcucagaguaauaagucu

SEQ ID NO: 1364727 - RNA, 19 nt, Artificial Sequence
  Description of Artificial Sequence: Synthetic oligonucleotide
  Antisense strand to SEQ ID NO: 1364726
agacuuauuacucugagcc

SEQ ID NO: 1364728 - RNA, 19 nt, Artificial Sequence
  Description of Artificial Sequence: Synthetic oligonucleotide
  Sense strand starting at position 287 of SEQ ID NO: 1242671
gcaauuugguguugguguu

SEQ ID NO: 1364729 - RNA, 19 nt, Artificial Sequence
  Description of Artificial Sequence: Synthetic oligonucleotide
  Antisense strand to SEQ ID NO: 1364728
aacaccaacaccaaauugc

SEQ ID NO: 1364730 - RNA, 19 nt, Artificial Sequence
  Description of Artificial Sequence: Synthetic oligonucleotide
  Sense strand starting at position 293 of SEQ ID NO: 1242671
ugguguugguguuugugau

SEQ ID NO: 1364731 - RNA, 19 nt, Artificial Sequence
  Description of Artificial Sequence: Synthetic oligonucleotide
  Antisense strand to SEQ ID NO: 1364730
aucacaaacaccaacacca

SEQ ID NO: 1364732 - RNA, 19 nt, Artificial Sequence
  Description of Artificial Sequence: Synthetic oligonucleotide
  Sense strand starting at position 294 of SEQ ID NO: 1242671
gguguugguguuugugaua

SEQ ID NO: 1364733 - RNA, 19 nt, Artificial Sequence
  Description of Artificial Sequence: Synthetic oligonucleotide
  Antisense strand to SEQ ID NO: 1364732
uaucacaaacaccaacacc

SEQ ID NO: 1364734 - RNA, 19 nt, Artificial Sequence
  Description of Artificial Sequence: Synthetic oligonucleotide
  Sense strand starting at position 297 of SEQ ID NO: 1242671
guugguguuugugauaaau

SEQ ID NO: 1364735 - RNA, 19 nt, Artificial Sequence
  Description of Artificial Sequence: Synthetic oligonucleotide
  Antisense strand to SEQ ID NO: 1364734
auuuaucacaaacaccaac

SEQ ID NO: 1364736 - RNA, 19 nt, Artificial Sequence
  Description of Artificial Sequence: Synthetic oligonucleotide
  Sense strand starting at position 299 of SEQ ID NO: 1242671
ugguguuugugauaaauaa

SEQ ID NO: 1364737 - RNA, 19 nt, Artificial Sequence
  Description of Artificial Sequence: Synthetic oligonucleotide
  Antisense strand to SEQ ID NO: 1364736
uuauuuaucacaaacacca

SEQ ID NO: 1364738 - RNA, 19 nt, Artificial Sequence
  Description of Artificial Sequence: Synthetic oligonucleotide
  Sense strand starting at position 339 of SEQ ID NO: 1242671
uagcuuugacucugugaca

SEQ ID NO: 1364739 - RNA, 19 nt, Artificial Sequence
  Description of Artificial Sequence: Synthetic oligonucleotide
  Antisense strand to SEQ ID NO: 1364738
ugucacagagucaaagcua

SEQ ID NO: 1364740 - RNA, 19 nt, Artificial Sequence
  Description of Artificial Sequence: Synthetic oligonucleotide
  Sense strand starting at position 340 of SEQ ID NO: 1242671
agcuuugacucugugacau

SEQ ID NO: 1364741 - RNA, 19 nt, Artificial Sequence
  Description of Artificial Sequence: Synthetic oligonucleotide
  Antisense strand to SEQ ID NO: 1364740
augucacagagucaaagcu

SEQ ID NO: 1364742 - RNA, 19 nt, Artificial Sequence
  Description of Artificial Sequence: Synthetic oligonucleotide
  Sense strand starting at position 342 of SEQ ID NO: 1242671
cuuugacucugugacaugu

SEQ ID NO: 1364743 - RNA, 19 nt, Artificial Sequence
  Description of Artificial Sequence: Synthetic oligonucleotide
  Antisense strand to SEQ ID NO: 1364742
acaugucacagagucaaag

SEQ ID NO: 1364744 - RNA, 19 nt, Artificial Sequence
  Description of Artificial Sequence: Synthetic oligonucleotide
  Sense strand starting at position 520 of SEQ ID NO: 1242671
ccugcaaguccauagagau

SEQ ID NO: 1364745 - RNA, 19 nt, Artificial Sequence
  Description of Artificial Sequence: Synthetic oligonucleotide
  Antisense strand to SEQ ID NO: 1364744
aucucuauggacuugcagg

SEQ ID NO: 1364746 - RNA, 19 nt, Artificial Sequence
  Description of Artificial Sequence: Synthetic oligonucleotide
  Sense strand starting at position 691 of SEQ ID NO: 1242671
agacccaaguuugcauaaa

SEQ ID NO: 1364747 - RNA, 19 nt, Artificial Sequence
  Description of Artificial Sequence: Synthetic oligonucleotide
  Antisense strand to SEQ ID NO: 1364746
uuuaugcaaacuugggucu

SEQ ID NO: 1364748 - RNA, 19 nt, Artificial Sequence
  Description of Artificial Sequence: Synthetic oligonucleotide
  Sense strand starting at position 964 of SEQ ID NO: 1242671
auggaugacucagaaucgu

SEQ ID NO: 1364749 - RNA, 19 nt, Artificial Sequence
  Description of Artificial Sequence: Synthetic oligonucleotide
  Antisense strand to SEQ ID NO: 1364748
acgauucugagucauccau

SEQ ID NO: 1364750 - RNA, 19 nt, Artificial Sequence
  Description of Artificial Sequence: Synthetic oligonucleotide
  Sense strand starting at position 1310 of SEQ ID NO: 1242671
gcuugucuauaucaucuuu

SEQ ID NO: 1364751 - RNA, 19 nt, Artificial Sequence
  Description of Artificial Sequence: Synthetic oligonucleotide
  Antisense strand to SEQ ID NO: 1364750
aaagaugauauagacaagc

SEQ ID NO: 1364752 - RNA, 19 nt, Artificial Sequence
  Description of Artificial Sequence: Synthetic oligonucleotide
  Sense strand starting at position 1535 of SEQ ID NO: 1242671
ggauguuccucccaucauu

SEQ ID NO: 1364753 - RNA, 19 nt, Artificial Sequence
  Description of Artificial Sequence: Synthetic oligonucleotide
  Antisense strand to SEQ ID NO: 1364752
aaugaugggaggaacaucc

SEQ ID NO: 1364754 - RNA, 19 nt, Artificial Sequence
  Description of Artificial Sequence: Synthetic oligonucleotide
  Sense strand starting at position 2313 of SEQ ID NO: 1242671
agcuuuccggucugggaaa

SEQ ID NO: 1364755 - RNA, 19 nt, Artificial Sequence
  Description of Artificial Sequence: Synthetic oligonucleotide
  Antisense strand to SEQ ID NO: 1364754
uuucccagaccggaaagcu

SEQ ID NO: 1364756 - RNA, 19 nt, Artificial Sequence
  Description of Artificial Sequence: Synthetic oligonucleotide
  Sense strand starting at position 2982 of SEQ ID NO: 1242671
uuggguccuuccuauggua

SEQ ID NO: 1364757 - RNA, 19 nt, Artificial Sequence
  Description of Artificial Sequence: Synthetic oligonucleotide
  Antisense strand to SEQ ID NO: 1364756
uaccauaggaaggacccaa

SEQ ID NO: 1364758 - RNA, 19 nt, Artificial Sequence
  Description of Artificial Sequence: Synthetic oligonucleotide
  Sense strand starting at position 2984 of SEQ ID NO: 1242671
ggguccuuccuaugguaua

SEQ ID NO: 1364759 - RNA, 19 nt, Artificial Sequence
  Description of Artificial Sequence: Synthetic oligonucleotide
  Antisense strand to SEQ ID NO: 1364758
uauaccauaggaaggaccc

SEQ ID NO: 1364760 - RNA, 19 nt, Artificial Sequence
  Description of Artificial Sequence: Synthetic oligonucleotide
  Sense strand starting at position 2985 of SEQ ID NO: 1242671
gguccuuccuaugguauaa

SEQ ID NO: 1364761 - RNA, 19 nt, Artificial Sequence
  Description of Artificial Sequence: Synthetic oligonucleotide
  Antisense strand to SEQ ID NO: 1364760
uuauaccauaggaaggacc

SEQ ID NO: 1364762 - RNA, 19 nt, Artificial Sequence
  Description of Artificial Sequence: Synthetic oligonucleotide
  Sense strand starting at position 3009 of SEQ ID NO: 1242671
ucuguuacccuacaagguu

SEQ ID NO: 1364763 - RNA, 19 nt, Artificial Sequence
  Description of Artificial Sequence: Synthetic oligonucleotide
  Antisense strand to SEQ ID NO: 1364762
aaccuuguaggguaacaga

SEQ ID NO: 1364764 - RNA, 19 nt, Artificial Sequence
  Description of Artificial Sequence: Synthetic oligonucleotide
  Sense strand starting at position 3041 of SEQ ID NO: 1242671
agcccuaucugacagagga

SEQ ID NO: 1364765 - RNA, 19 nt, Artificial Sequence
  Description of Artificial Sequence: Synthetic oligonucleotide
  Antisense strand to SEQ ID NO: 1364764
uccucugucagauagggcu

SEQ ID NO: 1364766 - RNA, 19 nt, Artificial Sequence
  Description of Artificial Sequence: Synthetic oligonucleotide
  Sense strand starting at position 3571 of SEQ ID NO: 1242671
caggaauggcaaugugaac

SEQ ID NO: 1364767 - RNA, 19 nt, Artificial Sequence
  Description of Artificial Sequence: Synthetic oligonucleotide
  Antisense strand to SEQ ID NO: 1364766
guucacauugccauuccug

SEQ ID NO: 1364768 - RNA, 19 nt, Artificial Sequence
  Description of Artificial Sequence: Synthetic oligonucleotide
  Sense strand starting at position 3762 of SEQ ID NO: 1242671
ucugcuuugucccuccaua

SEQ ID NO: 1364769 - RNA, 19 nt, Artificial Sequence
  Description of Artificial Sequence: Synthetic oligonucleotide
  Antisense strand to SEQ ID NO: 1364768
uauggagggacaaagcaga

SEQ ID NO: 1364770 - RNA, 19 nt, Artificial Sequence
  Description of Artificial Sequence: Synthetic oligonucleotide
  Sense strand starting at position 132 of SEQ ID NO: 1242672
agacccaaguuugcauaaa

SEQ ID NO: 1364771 - RNA, 19 nt, Artificial Sequence
  Description of Artificial Sequence: Synthetic oligonucleotide
  Antisense strand to SEQ ID NO: 1364770
uuuaugcaaacuugggucu

SEQ ID NO: 1364772 - RNA, 19 nt, Artificial Sequence
  Description of Artificial Sequence: Synthetic oligonucleotide
  Sense strand starting at position 405 of SEQ ID NO: 1242672
auggaugacucagaaucgu

SEQ ID NO: 1364773 - RNA, 19 nt, Artificial Sequence
  Description of Artificial Sequence: Synthetic oligonucleotide
  Antisense strand to SEQ ID NO: 1364772
acgauucugagucauccau

SEQ ID NO: 1364774 - RNA, 19 nt, Artificial Sequence
  Description of Artificial Sequence: Synthetic oligonucleotide
  Sense strand starting at position 751 of SEQ ID NO: 1242672
gcuugucuauaucaucuuu

SEQ ID NO: 1364775 - RNA, 19 nt, Artificial Sequence
  Description of Artificial Sequence: Synthetic oligonucleotide
  Antisense strand to SEQ ID NO: 1364774
aaagaugauauagacaagc

SEQ ID NO: 1364776 - RNA, 19 nt, Artificial Sequence
  Description of Artificial Sequence: Synthetic oligonucleotide
  Sense strand starting at position 976 of SEQ ID NO: 1242672
ggauguuccucccaucauu

SEQ ID NO: 1364777 - RNA, 19 nt, Artificial Sequence
  Description of Artificial Sequence: Synthetic oligonucleotide
  Antisense strand to SEQ ID NO: 1364776
aaugaugggaggaacaucc

SEQ ID NO: 1364778 - RNA, 19 nt, Artificial Sequence
  Description of Artificial Sequence: Synthetic oligonucleotide
  Sense strand starting at position 1754 of SEQ ID NO: 1242672
agcuuuccggucugggaaa

SEQ ID NO: 1364779 - RNA, 19 nt, Artificial Sequence
  Description of Artificial Sequence: Synthetic oligonucleotide
  Antisense strand to SEQ ID NO: 1364778
uuucccagaccggaaagcu

SEQ ID NO: 1364780 - RNA, 19 nt, Artificial Sequence
  Description of Artificial Sequence: Synthetic oligonucleotide
  Sense strand starting at position 2423 of SEQ ID NO: 1242672
uuggguccuuccuauggua

SEQ ID NO: 1364781 - RNA, 19 nt, Artificial Sequence
  Description of Artificial Sequence: Synthetic oligonucleotide
  Antisense strand to SEQ ID NO: 1364780
uaccauaggaaggacccaa

SEQ ID NO: 1364782 - RNA, 19 nt, Artificial Sequence
  Description of Artificial Sequence: Synthetic oligonucleotide
  Sense strand starting at position 2425 of SEQ ID NO: 1242672
ggguccuuccuaugguaua

SEQ ID NO: 1364783 - RNA, 19 nt, Artificial Sequence
  Description of Artificial Sequence: Synthetic oligonucleotide
  Antisense strand to SEQ ID NO: 1364782
uauaccauaggaaggaccc

SEQ ID NO: 1364784 - RNA, 19 nt, Artificial Sequence
  Description of Artificial Sequence: Synthetic oligonucleotide
  Sense strand starting at position 2426 of SEQ ID NO: 1242672
gguccuuccuaugguauaa

SEQ ID NO: 1364785 - RNA, 19 nt, Artificial Sequence
  Description of Artificial Sequence: Synthetic oligonucleotide
  Antisense strand to SEQ ID NO: 1364784
uuauaccauaggaaggacc

SEQ ID NO: 1364786 - RNA, 19 nt, Artificial Sequence
  Description of Artificial Sequence: Synthetic oligonucleotide
  Sense strand starting at position 2450 of SEQ ID NO: 1242672
ucuguuacccuacaagguu

SEQ ID NO: 1364787 - RNA, 19 nt, Artificial Sequence
  Description of Artificial Sequence: Synthetic oligonucleotide
  Antisense strand to SEQ ID NO: 1364786
aaccuuguaggguaacaga

SEQ ID NO: 1364788 - RNA, 19 nt, Artificial Sequence
  Description of Artificial Sequence: Synthetic oligonucleotide
  Sense strand starting at position 2482 of SEQ ID NO: 1242672
agcccuaucugacagagga

SEQ ID NO: 1364789 - RNA, 19 nt, Artificial Sequence
  Description of Artificial Sequence: Synthetic oligonucleotide
  Antisense strand to SEQ ID NO: 1364788
uccucugucagauagggcu

SEQ ID NO: 1364790 - RNA, 19 nt, Artificial Sequence
  Description of Artificial Sequence: Synthetic oligonucleotide
  Sense strand starting at position 3012 of SEQ ID NO: 1242672
caggaauggcaaugugaac

SEQ ID NO: 1364791 - RNA, 19 nt, Artificial Sequence
  Description of Artificial Sequence: Synthetic oligonucleotide
  Antisense strand to SEQ ID NO: 1364790
guucacauugccauuccug

SEQ ID NO: 1364792 - RNA, 19 nt, Artificial Sequence
  Description of Artificial Sequence: Synthetic oligonucleotide
  Sense strand starting at position 3203 of SEQ ID NO: 1242672
ucugcuuugucccuccaua

SEQ ID NO: 1364793 - RNA, 19 nt, Artificial Sequence
  Description of Artificial Sequence: Synthetic oligonucleotide
  Antisense strand to SEQ ID NO: 1364792
uauggagggacaaagcaga

SEQ ID NO: 1364794 - RNA, 19 nt, Artificial Sequence
  Description of Artificial Sequence: Synthetic oligonucleotide
  Sense strand starting at position 3454 of SEQ ID NO: 1242672
gagggcuugucucuggcua

SEQ ID NO: 1364795 - RNA, 19 nt, Artificial Sequence
  Description of Artificial Sequence: Synthetic oligonucleotide
  Antisense strand to SEQ ID NO: 1364794
uagccagagacaagcccuc

SEQ ID NO: 1364796 - RNA, 19 nt, Artificial Sequence
  Description of Artificial Sequence: Synthetic oligonucleotide
  Sense strand starting at position 3456 of SEQ ID NO: 1242672
gggcuugucucuggcuagu

SEQ ID NO: 1364797 - RNA, 19 nt, Artificial Sequence
  Description of Artificial Sequence: Synthetic oligonucleotide
  Antisense strand to SEQ ID NO: 1364796
acuagccagagacaagccc

SEQ ID NO: 1364798 - RNA, 19 nt, Artificial Sequence
  Description of Artificial Sequence: Synthetic oligonucleotide
  Sense strand starting at position 3546 of SEQ ID NO: 1242672
uccuguacucagcaggagu

SEQ ID NO: 1364799 - RNA, 19 nt, Artificial Sequence
  Description of Artificial Sequence: Synthetic oligonucleotide
  Antisense strand to SEQ ID NO: 1364798
acuccugcugaguacagga

SEQ ID NO: 1364800 - RNA, 19 nt, Artificial Sequence
  Description of Artificial Sequence: Synthetic oligonucleotide
  Sense strand starting at position 3590 of SEQ ID NO: 1242672
cuguccagaucuugaauag

SEQ ID NO: 1364801 - RNA, 19 nt, Artificial Sequence
  Description of Artificial Sequence: Synthetic oligonucleotide
  Antisense strand to SEQ ID NO: 1364800
cuauucaagaucuggacag

SEQ ID NO: 1364802 - RNA, 19 nt, Artificial Sequence
  Description of Artificial Sequence: Synthetic oligonucleotide
  Sense strand starting at position 3835 of SEQ ID NO: 1242672
agggauccuuaauauaaau

SEQ ID NO: 1364803 - RNA, 19 nt, Artificial Sequence
  Description of Artificial Sequence: Synthetic oligonucleotide
  Antisense strand to SEQ ID NO: 1364802
auuuauauuaaggaucccu

SEQ ID NO: 1364804 - RNA, 19 nt, Artificial Sequence
  Description of Artificial Sequence: Synthetic oligonucleotide
  Sense strand starting at position 3944 of SEQ ID NO: 1242672
aggucuccaagcuggaaau

SEQ ID NO: 1364805 - RNA, 19 nt, Artificial Sequence
  Description of Artificial Sequence: Synthetic oligonucleotide
  Antisense strand to SEQ ID NO: 1364804
auuuccagcuuggagaccu

SEQ ID NO: 1364806 - RNA, 19 nt, Artificial Sequence
  Description of Artificial Sequence: Synthetic oligonucleotide
  Sense strand starting at position 52 of SEQ ID NO: 1242673
gucugacucacucgauguu

SEQ ID NO: 1364807 - RNA, 19 nt, Artificial Sequence
  Description of Artificial Sequence: Synthetic oligonucleotide
  Antisense strand to SEQ ID NO: 1364806
aacaucgagugagucagac

SEQ ID NO: 1364808 - RNA, 19 nt, Artificial Sequence
  Description of Artificial Sequence: Synthetic oligonucleotide
  Sense strand starting at position 61 of SEQ ID NO: 1242673
acucgauguuuggauuuga

SEQ ID NO: 1364809 - RNA, 19 nt, Artificial Sequence
  Description of Artificial Sequence: Synthetic oligonucleotide
  Antisense strand to SEQ ID NO: 1364808
ucaaauccaaacaucgagu

SEQ ID NO: 1364810 - RNA, 19 nt, Artificial Sequence
  Description of Artificial Sequence: Synthetic oligonucleotide
  Sense strand starting at position 66 of SEQ ID NO: 1242673
auguuuggauuugagaaag

SEQ ID NO: 1364811 - RNA, 19 nt, Artificial Sequence
  Description of Artificial Sequence: Synthetic oligonucleotide
  Antisense strand to SEQ ID NO: 1364810
cuuucucaaauccaaacau

SEQ ID NO: 1364812 - RNA, 19 nt, Artificial Sequence
  Description of Artificial Sequence: Synthetic oligonucleotide
  Sense strand starting at position 115 of SEQ ID NO: 1242673
acagauuccucuuucgugu

SEQ ID NO: 1364813 - RNA, 19 nt, Artificial Sequence
  Description of Artificial Sequence: Synthetic oligonucleotide
  Antisense strand to SEQ ID NO: 1364812
acacgaaagaggaaucugu

SEQ ID NO: 1364814 - RNA, 19 nt, Artificial Sequence
  Description of Artificial Sequence: Synthetic oligonucleotide
  Sense strand starting at position 119 of SEQ ID NO: 1242673
auuccucuuucguguuuaa

SEQ ID NO: 1364815 - RNA, 19 nt, Artificial Sequence
  Description of Artificial Sequence: Synthetic oligonucleotide
  Antisense strand to SEQ ID NO: 1364814
uuaaacacgaaagaggaau

SEQ ID NO: 1364816 - RNA, 19 nt, Artificial Sequence
  Description of Artificial Sequence: Synthetic oligonucleotide
  Sense strand starting at position 122 of SEQ ID NO: 1242673
ccucuuucguguuuaauau

SEQ ID NO: 1364817 - RNA, 19 nt, Artificial Sequence
  Description of Artificial Sequence: Synthetic oligonucleotide
  Antisense strand to SEQ ID NO: 1364816
auauuaaacacgaaagagg

SEQ ID NO: 1364818 - RNA, 19 nt, Artificial Sequence
  Description of Artificial Sequence: Synthetic oligonucleotide
  Sense strand starting at position 123 of SEQ ID NO: 1242673
cucuuucguguuuaauauu

SEQ ID NO: 1364819 - RNA, 19 nt, Artificial Sequence
  Description of Artificial Sequence: Synthetic oligonucleotide
  Antisense strand to SEQ ID NO: 1364818
aauauuaaacacgaaagag

SEQ ID NO: 1364820 - RNA, 19 nt, Artificial Sequence
  Description of Artificial Sequence: Synthetic oligonucleotide
  Sense strand starting at position 129 of SEQ ID NO: 1242673
cguguuuaauauuuguaca

SEQ ID NO: 1364821 - RNA, 19 nt, Artificial Sequence
  Description of Artificial Sequence: Synthetic oligonucleotide
  Antisense strand to SEQ ID NO: 1364820
uguacaaauauuaaacacg

SEQ ID NO: 1364822 - RNA, 19 nt, Artificial Sequence
  Description of Artificial Sequence: Synthetic oligonucleotide
  Sense strand starting at position 402 of SEQ ID NO: 1242673
ccuggaccuccguguacau

SEQ ID NO: 1364823 - RNA, 19 nt, Artificial Sequence
  Description of Artificial Sequence: Synthetic oligonucleotide
  Antisense strand to SEQ ID NO: 1364822
auguacacggagguccagg

SEQ ID NO: 1364824 - RNA, 19 nt, Artificial Sequence
  Description of Artificial Sequence: Synthetic oligonucleotide
  Sense strand starting at position 411 of SEQ ID NO: 1242673
ccguguacaucccacaaau

SEQ ID NO: 1364825 - RNA, 19 nt, Artificial Sequence
  Description of Artificial Sequence: Synthetic oligonucleotide
  Antisense strand to SEQ ID NO: 1364824
auuugugggauguacacgg

SEQ ID NO: 1364826 - RNA, 19 nt, Artificial Sequence
  Description of Artificial Sequence: Synthetic oligonucleotide
  Sense strand starting at position 443 of SEQ ID NO: 1242673
acccaacucuguucuggaa

SEQ ID NO: 1364827 - RNA, 19 nt, Artificial Sequence
  Description of Artificial Sequence: Synthetic oligonucleotide
  Antisense strand to SEQ ID NO: 1364826
uuccagaacagaguugggu

SEQ ID NO: 1364828 - RNA, 19 nt, Artificial Sequence
  Description of Artificial Sequence: Synthetic oligonucleotide
  Sense strand starting at position 479 of SEQ ID NO: 1242673
gccgcucuggccgagagua

SEQ ID NO: 1364829 - RNA, 19 nt, Artificial Sequence
  Description of Artificial Sequence: Synthetic oligonucleotide
  Antisense strand to SEQ ID NO: 1364828
uacucucggccagagcggc

SEQ ID NO: 1364830 - RNA, 19 nt, Artificial Sequence
  Description of Artificial Sequence: Synthetic oligonucleotide
  Sense strand starting at position 595 of SEQ ID NO: 1242673
cugcgcaugacuuaaguca

SEQ ID NO: 1364831 - RNA, 19 nt, Artificial Sequence
  Description of Artificial Sequence: Synthetic oligonucleotide
  Antisense strand to SEQ ID NO: 1364830
ugacuuaagucaugcgcag

SEQ ID NO: 1364832 - RNA, 19 nt, Artificial Sequence
  Description of Artificial Sequence: Synthetic oligonucleotide
  Sense strand starting at position 1021 of SEQ ID NO: 1242673
gcccgccacucucagaaau

SEQ ID NO: 1364833 - RNA, 19 nt, Artificial Sequence
  Description of Artificial Sequence: Synthetic oligonucleotide
  Antisense strand to SEQ ID NO: 1364832
auuucugagaguggcgggc

SEQ ID NO: 1364834 - RNA, 19 nt, Artificial Sequence
  Description of Artificial Sequence: Synthetic oligonucleotide
  Sense strand starting at position 1023 of SEQ ID NO: 1242673
ccgccacucucagaaauua

SEQ ID NO: 1364835 - RNA, 19 nt, Artificial Sequence
  Description of Artificial Sequence: Synthetic oligonucleotide
  Antisense strand to SEQ ID NO: 1364834
uaauuucugagaguggcgg

SEQ ID NO: 1364836 - RNA, 19 nt, Artificial Sequence
  Description of Artificial Sequence: Synthetic oligonucleotide
  Sense strand starting at position 1611 of SEQ ID NO: 1242673
ccgggaugucuuugucuuu

SEQ ID NO: 1364837 - RNA, 19 nt, Artificial Sequence
  Description of Artificial Sequence: Synthetic oligonucleotide
  Antisense strand to SEQ ID NO: 1364836
aaagacaaagacaucccgg

SEQ ID NO: 1364838 - RNA, 19 nt, Artificial Sequence
  Description of Artificial Sequence: Synthetic oligonucleotide
  Sense strand starting at position 1718 of SEQ ID NO: 1242673
ccgcuucgcgcaaguugaa

SEQ ID NO: 1364839 - RNA, 19 nt, Artificial Sequence
  Description of Artificial Sequence: Synthetic oligonucleotide
  Antisense strand to SEQ ID NO: 1364838
uucaacuugcgcgaagcgg

SEQ ID NO: 1364840 - RNA, 19 nt, Artificial Sequence
  Description of Artificial Sequence: Synthetic oligonucleotide
  Sense strand starting at position 2120 of SEQ ID NO: 1242673
gcaggaaacuucgggcuga

SEQ ID NO: 1364841 - RNA, 19 nt, Artificial Sequence
  Description of Artificial Sequence: Synthetic oligonucleotide
  Antisense strand to SEQ ID NO: 1364840
ucagcccgaaguuuccugc

SEQ ID NO: 1364842 - RNA, 19 nt, Artificial Sequence
  Description of Artificial Sequence: Synthetic oligonucleotide
  Sense strand starting at position 2782 of SEQ ID NO: 1242673
cgggcaguuuccgcgaacu

SEQ ID NO: 1364843 - RNA, 19 nt, Artificial Sequence
  Description of Artificial Sequence: Synthetic oligonucleotide
  Antisense strand to SEQ ID NO: 1364842
aguucgcggaaacugcccg

SEQ ID NO: 1364844 - RNA, 19 nt, Artificial Sequence
  Description of Artificial Sequence: Synthetic oligonucleotide
  Sense strand starting at position 3534 of SEQ ID NO: 1242673
uccuguauacgggaacuuu

SEQ ID NO: 1364845 - RNA, 19 nt, Artificial Sequence
  Description of Artificial Sequence: Synthetic oligonucleotide
  Antisense strand to SEQ ID NO: 1364844
aaaguucccguauacagga

SEQ ID NO: 1364846 - RNA, 19 nt, Artificial Sequence
  Description of Artificial Sequence: Synthetic oligonucleotide
  Sense strand starting at position 3585 of SEQ ID NO: 1242673
gcaacuacucagcgaugga

SEQ ID NO: 1364847 - RNA, 19 nt, Artificial Sequence
  Description of Artificial Sequence: Synthetic oligonucleotide
  Antisense strand to SEQ ID NO: 1364846
uccaucgcugaguaguugc

SEQ ID NO: 1364848 - RNA, 19 nt, Artificial Sequence
  Description of Artificial Sequence: Synthetic oligonucleotide
  Sense strand starting at position 3605 of SEQ ID NO: 1242673
ggccacagcuggugaauua

SEQ ID NO: 1364849 - RNA, 19 nt, Artificial Sequence
  Description of Artificial Sequence: Synthetic oligonucleotide
  Antisense strand to SEQ ID NO: 1364848
uaauucaccagcuguggcc

SEQ ID NO: 1364850 - RNA, 19 nt, Artificial Sequence
  Description of Artificial Sequence: Synthetic oligonucleotide
  Sense strand starting at position 3764 of SEQ ID NO: 1242673
cuuggaaccucugaucuuu

SEQ ID NO: 1364851 - RNA, 19 nt, Artificial Sequence
  Description of Artificial Sequence: Synthetic oligonucleotide
  Antisense strand to SEQ ID NO: 1364850
aaagaucagagguuccaag

SEQ ID NO: 1364852 - RNA, 19 nt, Artificial Sequence
  Description of Artificial Sequence: Synthetic oligonucleotide
  Sense strand starting at position 33 of SEQ ID NO: 1242674
gacaauaucuaguuagagc

SEQ ID NO: 1364853 - RNA, 19 nt, Artificial Sequence
  Description of Artificial Sequence: Synthetic oligonucleotide
  Antisense strand to SEQ ID NO: 1364852
gcucuaacuagauauuguc

SEQ ID NO: 1364854 - RNA, 19 nt, Artificial Sequence
  Description of Artificial Sequence: Synthetic oligonucleotide
  Sense strand starting at position 64 of SEQ ID NO: 1242674
aacugauaagucuauguug

SEQ ID NO: 1364855 - RNA, 19 nt, Artificial Sequence
  Description of Artificial Sequence: Synthetic oligonucleotide
  Antisense strand to SEQ ID NO: 1364854
caacauagacuuaucaguu

SEQ ID NO: 1364856 - RNA, 19 nt, Artificial Sequence
  Description of Artificial Sequence: Synthetic oligonucleotide
  Sense strand starting at position 66 of SEQ ID NO: 1242674
cugauaagucuauguugag

SEQ ID NO: 1364857 - RNA, 19 nt, Artificial Sequence
  Description of Artificial Sequence: Synthetic oligonucleotide
  Antisense strand to SEQ ID NO: 1364856
cucaacauagacuuaucag

SEQ ID NO: 1364858 - RNA, 19 nt, Artificial Sequence
  Description of Artificial Sequence: Synthetic oligonucleotide
  Sense strand starting at position 67 of SEQ ID NO: 1242674
ugauaagucuauguugaga

SEQ ID NO: 1364859 - RNA, 19 nt, Artificial Sequence
  Description of Artificial Sequence: Synthetic oligonucleotide
  Antisense strand to SEQ ID NO: 1364858
ucucaacauagacuuauca

SEQ ID NO: 1364860 - RNA, 19 nt, Artificial Sequence
  Description of Artificial Sequence: Synthetic oligonucleotide
  Sense strand starting at position 430 of SEQ ID NO: 1242674
ggcgucagucuugcuguua

SEQ ID NO: 1364861 - RNA, 19 nt, Artificial Sequence
  Description of Artificial Sequence: Synthetic oligonucleotide
  Antisense strand to SEQ ID NO: 1364860
uaacagcaagacugacgcc

SEQ ID NO: 1364862 - RNA, 19 nt, Artificial Sequence
  Description of Artificial Sequence: Synthetic oligonucleotide
  Sense strand starting at position 2008 of SEQ ID NO: 1242674
acaaucacaucuguguaga

SEQ ID NO: 1364863 - RNA, 19 nt, Artificial Sequence
  Description of Artificial Sequence: Synthetic oligonucleotide
  Antisense strand to SEQ ID NO: 1364862
ucuacacagaugugauugu

SEQ ID NO: 1364864 - RNA, 19 nt, Artificial Sequence
  Description of Artificial Sequence: Synthetic oligonucleotide
  Sense strand starting at position 2009 of SEQ ID NO: 1242674
caaucacaucuguguagag

SEQ ID NO: 1364865 - RNA, 19 nt, Artificial Sequence
  Description of Artificial Sequence: Synthetic oligonucleotide
  Antisense strand to SEQ ID NO: 1364864
cucuacacagaugugauug

SEQ ID NO: 1364866 - RNA, 19 nt, Artificial Sequence
  Description of Artificial Sequence: Synthetic oligonucleotide
  Sense strand starting at position 2090 of SEQ ID NO: 1242674
cugguuuacaccgaagaca

SEQ ID NO: 1364867 - RNA, 19 nt, Artificial Sequence
  Description of Artificial Sequence: Synthetic oligonucleotide
  Antisense strand to SEQ ID NO: 1364866
ugucuucgguguaaaccag

SEQ ID NO: 1364868 - RNA, 19 nt, Artificial Sequence
  Description of Artificial Sequence: Synthetic oligonucleotide
  Sense strand starting at position 2183 of SEQ ID NO: 1242674
auacauagacucugucaua

SEQ ID NO: 1364869 - RNA, 19 nt, Artificial Sequence
  Description of Artificial Sequence: Synthetic oligonucleotide
  Antisense strand to SEQ ID NO: 1364868
uaugacagagucuauguau

SEQ ID NO: 1364870 - RNA, 19 nt, Artificial Sequence
  Description of Artificial Sequence: Synthetic oligonucleotide
  Sense strand starting at position 2367 of SEQ ID NO: 1242674
auuguuaucuaagugagac

SEQ ID NO: 1364871 - RNA, 19 nt, Artificial Sequence
  Description of Artificial Sequence: Synthetic oligonucleotide
  Antisense strand to SEQ ID NO: 1364870
gucucacuuagauaacaau

SEQ ID NO: 1364872 - RNA, 19 nt, Artificial Sequence
  Description of Artificial Sequence: Synthetic oligonucleotide
  Sense strand starting at position 2385 of SEQ ID NO: 1242674
ccaugaagcaggugaaguu

SEQ ID NO: 1364873 - RNA, 19 nt, Artificial Sequence
  Description of Artificial Sequence: Synthetic oligonucleotide
  Antisense strand to SEQ ID NO: 1364872
aacuucaccugcuucaugg

SEQ ID NO: 1364874 - RNA, 19 nt, Artificial Sequence
  Description of Artificial Sequence: Synthetic oligonucleotide
  Sense strand starting at position 2455 of SEQ ID NO: 1242674
agcucucuuccuuggaaau

SEQ ID NO: 1364875 - RNA, 19 nt, Artificial Sequence
  Description of Artificial Sequence: Synthetic oligonucleotide
  Antisense strand to SEQ ID NO: 1364874
auuuccaaggaagagagcu

SEQ ID NO: 1364876 - RNA, 19 nt, Artificial Sequence
  Description of Artificial Sequence: Synthetic oligonucleotide
  Sense strand starting at position 2456 of SEQ ID NO: 1242674
gcucucuuccuuggaaaua

SEQ ID NO: 1364877 - RNA, 19 nt, Artificial Sequence
  Description of Artificial Sequence: Synthetic oligonucleotide
  Antisense strand to SEQ ID NO: 1364876
uauuuccaaggaagagagc

SEQ ID NO: 1364878 - RNA, 19 nt, Artificial Sequence
  Description of Artificial Sequence: Synthetic oligonucleotide
  Sense strand starting at position 2468 of SEQ ID NO: 1242674
ggaaauagccaguauugca

SEQ ID NO: 1364879 - RNA, 19 nt, Artificial Sequence
  Description of Artificial Sequence: Synthetic oligonucleotide
  Antisense strand to SEQ ID NO: 1364878
ugcaauacuggcuauuucc

SEQ ID NO: 1364880 - RNA, 19 nt, Artificial Sequence
  Description of Artificial Sequence: Synthetic oligonucleotide
  Sense strand starting at position 2613 of SEQ ID NO: 1242674
cugauauccagaggucaga

SEQ ID NO: 1364881 - RNA, 19 nt, Artificial Sequence
  Description of Artificial Sequence: Synthetic oligonucleotide
  Antisense strand to SEQ ID NO: 1364880
ucugaccucuggauaucag

SEQ ID NO: 1364882 - RNA, 19 nt, Artificial Sequence
  Description of Artificial Sequence: Synthetic oligonucleotide
  Sense strand starting at position 2624 of SEQ ID NO: 1242674
aggucagauaguuggaaau

SEQ ID NO: 1364883 - RNA, 19 nt, Artificial Sequence
  Description of Artificial Sequence: Synthetic oligonucleotide
  Antisense strand to SEQ ID NO: 1364882
auuuccaacuaucugaccu

SEQ ID NO: 1364884 - RNA, 19 nt, Artificial Sequence
  Description of Artificial Sequence: Synthetic oligonucleotide
  Sense strand starting at position 2630 of SEQ ID NO: 1242674
gauaguuggaaaugagguu

SEQ ID NO: 1364885 - RNA, 19 nt, Artificial Sequence
  Description of Artificial Sequence: Synthetic oligonucleotide
  Antisense strand to SEQ ID NO: 1364884
aaccucauuuccaacuauc

SEQ ID NO: 1364886 - RNA, 19 nt, Artificial Sequence
  Description of Artificial Sequence: Synthetic oligonucleotide
  Sense strand starting at position 2659 of SEQ ID NO: 1242674
uuuccacaguuccugagau

SEQ ID NO: 1364887 - RNA, 19 nt, Artificial Sequence
  Description of Artificial Sequence: Synthetic oligonucleotide
  Antisense strand to SEQ ID NO: 1364886
aucucaggaacuguggaaa

SEQ ID NO: 1364888 - RNA, 19 nt, Artificial Sequence
  Description of Artificial Sequence: Synthetic oligonucleotide
  Sense strand starting at position 2661 of SEQ ID NO: 1242674
uccacaguuccugagaugu

SEQ ID NO: 1364889 - RNA, 19 nt, Artificial Sequence
  Description of Artificial Sequence: Synthetic oligonucleotide
  Antisense strand to SEQ ID NO: 1364888
acaucucaggaacugugga

SEQ ID NO: 1364890 - RNA, 19 nt, Artificial Sequence
  Description of Artificial Sequence: Synthetic oligonucleotide
  Sense strand starting at position 2699 of SEQ ID NO: 1242674
guuugaauguuauuuagcu

SEQ ID NO: 1364891 - RNA, 19 nt, Artificial Sequence
  Description of Artificial Sequence: Synthetic oligonucleotide
  Antisense strand to SEQ ID NO: 1364890
agcuaaauaacauucaaac

SEQ ID NO: 1364892 - RNA, 19 nt, Artificial Sequence
  Description of Artificial Sequence: Synthetic oligonucleotide
  Sense strand starting at position 2735 of SEQ ID NO: 1242674
gagguaaucgcagacaaac

SEQ ID NO: 1364893 - RNA, 19 nt, Artificial Sequence
  Description of Artificial Sequence: Synthetic oligonucleotide
  Antisense strand to SEQ ID NO: 1364892
guuugucugcgauuaccuc

SEQ ID NO: 1364894 - RNA, 19 nt, Artificial Sequence
  Description of Artificial Sequence: Synthetic oligonucleotide
  Sense strand starting at position 2737 of SEQ ID NO: 1242674
gguaaucgcagacaaacau

SEQ ID NO: 1364895 - RNA, 19 nt, Artificial Sequence
  Description of Artificial Sequence: Synthetic oligonucleotide
  Antisense strand to SEQ ID NO: 1364894
auguuugucugcgauuacc

SEQ ID NO: 1364896 - RNA, 19 nt, Artificial Sequence
  Description of Artificial Sequence: Synthetic oligonucleotide
  Sense strand starting at position 2844 of SEQ ID NO: 1242674
ucacaacuucuuggugacu

SEQ ID NO: 1364897 - RNA, 19 nt, Artificial Sequence
  Description of Artificial Sequence: Synthetic oligonucleotide
  Antisense strand to SEQ ID NO: 1364896
agucaccaagaaguuguga

SEQ ID NO: 1364898 - RNA, 19 nt, Artificial Sequence
  Description of Artificial Sequence: Synthetic oligonucleotide
  Sense strand starting at position 2878 of SEQ ID NO: 1242674
ugguguuaagacugaagac

SEQ ID NO: 1364899 - RNA, 19 nt, Artificial Sequence
  Description of Artificial Sequence: Synthetic oligonucleotide
  Antisense strand to SEQ ID NO: 1364898
gucuucagucuuaacacca

SEQ ID NO: 1364900 - RNA, 19 nt, Artificial Sequence
  Description of Artificial Sequence: Synthetic oligonucleotide
  Sense strand starting at position 2890 of SEQ ID NO: 1242674
ugaagacuuuauucuuggu

SEQ ID NO: 1364901 - RNA, 19 nt, Artificial Sequence
  Description of Artificial Sequence: Synthetic oligonucleotide
  Antisense strand to SEQ ID NO: 1364900
accaagaauaaagucuuca

SEQ ID NO: 1364902 - RNA, 19 nt, Artificial Sequence
  Description of Artificial Sequence: Synthetic oligonucleotide
  Sense strand starting at position 2919 of SEQ ID NO: 1242674
uacucaugugcaggaggaa

SEQ ID NO: 1364903 - RNA, 19 nt, Artificial Sequence
  Description of Artificial Sequence: Synthetic oligonucleotide
  Antisense strand to SEQ ID NO: 1364902
uuccuccugcacaugagua

SEQ ID NO: 1364904 - RNA, 19 nt, Artificial Sequence
  Description of Artificial Sequence: Synthetic oligonucleotide
  Sense strand starting at position 2945 of SEQ ID NO: 1242674
uauauagcuguggagugau

SEQ ID NO: 1364905 - RNA, 19 nt, Artificial Sequence
  Description of Artificial Sequence: Synthetic oligonucleotide
  Antisense strand to SEQ ID NO: 1364904
aucacuccacagcuauaua

SEQ ID NO: 1364906 - RNA, 19 nt, Artificial Sequence
  Description of Artificial Sequence: Synthetic oligonucleotide
  Sense strand starting at position 2957 of SEQ ID NO: 1242674
gagugauuguguuugaaug

SEQ ID NO: 1364907 - RNA, 19 nt, Artificial Sequence
  Description of Artificial Sequence: Synthetic oligonucleotide
  Antisense strand to SEQ ID NO: 1364906
cauucaaacacaaucacuc

SEQ ID NO: 1364908 - RNA, 19 nt, Artificial Sequence
  Description of Artificial Sequence: Synthetic oligonucleotide
  Sense strand starting at position 3018 of SEQ ID NO: 1242674
cugugaauccgucauagaa

SEQ ID NO: 1364909 - RNA, 19 nt, Artificial Sequence
  Description of Artificial Sequence: Synthetic oligonucleotide
  Antisense strand to SEQ ID NO: 1364908
uucuaugacggauucacag

SEQ ID NO: 1364910 - RNA, 19 nt, Artificial Sequence
  Description of Artificial Sequence: Synthetic oligonucleotide
  Sense strand starting at position 3026 of SEQ ID NO: 1242674
ccgucauagaaguaaagca

SEQ ID NO: 1364911 - RNA, 19 nt, Artificial Sequence
  Description of Artificial Sequence: Synthetic oligonucleotide
  Antisense strand to SEQ ID NO: 1364910
ugcuuuacuucuaugacgg

SEQ ID NO: 1364912 - RNA, 19 nt, Artificial Sequence
  Description of Artificial Sequence: Synthetic oligonucleotide
  Sense strand starting at position 3078 of SEQ ID NO: 1242674
uguuauggaccaugugaac

SEQ ID NO: 1364913 - RNA, 19 nt, Artificial Sequence
  Description of Artificial Sequence: Synthetic oligonucleotide
  Antisense strand to SEQ ID NO: 1364912
guucacaugguccauaaca

SEQ ID NO: 1364914 - RNA, 19 nt, Artificial Sequence
  Description of Artificial Sequence: Synthetic oligonucleotide
  Sense strand starting at position 3091 of SEQ ID NO: 1242674
gugaacauauuugcugcaa

SEQ ID NO: 1364915 - RNA, 19 nt, Artificial Sequence
  Description of Artificial Sequence: Synthetic oligonucleotide
  Antisense strand to SEQ ID NO: 1364914
uugcagcaaauauguucac

SEQ ID NO: 1364916 - RNA, 19 nt, Artificial Sequence
  Description of Artificial Sequence: Synthetic oligonucleotide
  Sense strand starting at position 3217 of SEQ ID NO: 1242674
augagcauuuaguugcaua

SEQ ID NO: 1364917 - RNA, 19 nt, Artificial Sequence
  Description of Artificial Sequence: Synthetic oligonucleotide
  Antisense strand to SEQ ID NO: 1364916
uaugcaacuaaaugcucau

SEQ ID NO: 1364918 - RNA, 19 nt, Artificial Sequence
  Description of Artificial Sequence: Synthetic oligonucleotide
  Sense strand starting at position 3237 of SEQ ID NO: 1242674
gcaugugucgugguucaaa

SEQ ID NO: 1364919 - RNA, 19 nt, Artificial Sequence
  Description of Artificial Sequence: Synthetic oligonucleotide
  Antisense strand to SEQ ID NO: 1364918
uuugaaccacgacacaugc

SEQ ID NO: 1364920 - RNA, 19 nt, Artificial Sequence
  Description of Artificial Sequence: Synthetic oligonucleotide
  Sense strand starting at position 3343 of SEQ ID NO: 1242674
agccguacuccagaagaau

SEQ ID NO: 1364921 - RNA, 19 nt, Artificial Sequence
  Description of Artificial Sequence: Synthetic oligonucleotide
  Antisense strand to SEQ ID NO: 1364920
auucuucuggaguacggcu

SEQ ID NO: 1364922 - RNA, 19 nt, Artificial Sequence
  Description of Artificial Sequence: Synthetic oligonucleotide
  Sense strand starting at position 3493 of SEQ ID NO: 1242674
gggaaagccauauguaaca

SEQ ID NO: 1364923 - RNA, 19 nt, Artificial Sequence
  Description of Artificial Sequence: Synthetic oligonucleotide
  Antisense strand to SEQ ID NO: 1364922
uguuacauauggcuuuccc

SEQ ID NO: 1364924 - RNA, 19 nt, Artificial Sequence
  Description of Artificial Sequence: Synthetic oligonucleotide
  Sense strand starting at position 3525 of SEQ ID NO: 1242674
gguauuucuugggagggau

SEQ ID NO: 1364925 - RNA, 19 nt, Artificial Sequence
  Description of Artificial Sequence: Synthetic oligonucleotide
  Antisense strand to SEQ ID NO: 1364924
aucccucccaagaaauacc

SEQ ID NO: 1364926 - RNA, 19 nt, Artificial Sequence
  Description of Artificial Sequence: Synthetic oligonucleotide
  Sense strand starting at position 3627 of SEQ ID NO: 1242674
ucaggaucuguuugauucu

SEQ ID NO: 1364927 - RNA, 19 nt, Artificial Sequence
  Description of Artificial Sequence: Synthetic oligonucleotide
  Antisense strand to SEQ ID NO: 1364926
agaaucaaacagauccuga

SEQ ID NO: 1364928 - RNA, 19 nt, Artificial Sequence
  Description of Artificial Sequence: Synthetic oligonucleotide
  Sense strand starting at position 3696 of SEQ ID NO: 1242674
guugaugaaaggugaguga

SEQ ID NO: 1364929 - RNA, 19 nt, Artificial Sequence
  Description of Artificial Sequence: Synthetic oligonucleotide
  Antisense strand to SEQ ID NO: 1364928
ucacucaccuuucaucaac

SEQ ID NO: 1364930 - RNA, 19 nt, Artificial Sequence
  Description of Artificial Sequence: Synthetic oligonucleotide
  Sense strand starting at position 3700 of SEQ ID NO: 1242674
augaaaggugagugagcuu

SEQ ID NO: 1364931 - RNA, 19 nt, Artificial Sequence
  Description of Artificial Sequence: Synthetic oligonucleotide
  Antisense strand to SEQ ID NO: 1364930
aagcucacucaccuuucau

SEQ ID NO: 1364932 - RNA, 19 nt, Artificial Sequence
  Description of Artificial Sequence: Synthetic oligonucleotide
  Sense strand starting at position 67 of SEQ ID NO: 1242675
acuauagaguccucuguuu

SEQ ID NO: 1364933 - RNA, 19 nt, Artificial Sequence
  Description of Artificial Sequence: Synthetic oligonucleotide
  Antisense strand to SEQ ID NO: 1364932
aaacagaggacucuauagu

SEQ ID NO: 1364934 - RNA, 19 nt, Artificial Sequence
  Description of Artificial Sequence: Synthetic oligonucleotide
  Sense strand starting at position 80 of SEQ ID NO: 1242675
cuguuuauagcugacucau

SEQ ID NO: 1364935 - RNA, 19 nt, Artificial Sequence
  Description of Artificial Sequence: Synthetic oligonucleotide
  Antisense strand to SEQ ID NO: 1364934
augagucagcuauaaacag

SEQ ID NO: 1364936 - RNA, 19 nt, Artificial Sequence
  Description of Artificial Sequence: Synthetic oligonucleotide
  Sense strand starting at position 131 of SEQ ID NO: 1242675
cuugguaacuuuccuugaa

SEQ ID NO: 1364937 - RNA, 19 nt, Artificial Sequence
  Description of Artificial Sequence: Synthetic oligonucleotide
  Antisense strand to SEQ ID NO: 1364936
uucaaggaaaguuaccaag

SEQ ID NO: 1364938 - RNA, 19 nt, Artificial Sequence
  Description of Artificial Sequence: Synthetic oligonucleotide
  Sense strand starting at position 132 of SEQ ID NO: 1242675
uugguaacuuuccuugaau

SEQ ID NO: 1364939 - RNA, 19 nt, Artificial Sequence
  Description of Artificial Sequence: Synthetic oligonucleotide
  Antisense strand to SEQ ID NO: 1364938
auucaaggaaaguuaccaa

SEQ ID NO: 1364940 - RNA, 19 nt, Artificial Sequence
  Description of Artificial Sequence: Synthetic oligonucleotide
  Sense strand starting at position 133 of SEQ ID NO: 1242675
ugguaacuuuccuugaauc

SEQ ID NO: 1364941 - RNA, 19 nt, Artificial Sequence
  Description of Artificial Sequence: Synthetic oligonucleotide
  Antisense strand to SEQ ID NO: 1364940
gauucaaggaaaguuacca

SEQ ID NO: 1364942 - RNA, 19 nt, Artificial Sequence
  Description of Artificial Sequence: Synthetic oligonucleotide
  Sense strand starting at position 134 of SEQ ID NO: 1242675
gguaacuuuccuugaauca

SEQ ID NO: 1364943 - RNA, 19 nt, Artificial Sequence
  Description of Artificial Sequence: Synthetic oligonucleotide
  Antisense strand to SEQ ID NO: 1364942
ugauucaaggaaaguuacc

SEQ ID NO: 1364944 - RNA, 19 nt, Artificial Sequence
  Description of Artificial Sequence: Synthetic oligonucleotide
  Sense strand starting at position 154 of SEQ ID NO: 1242675
gcaagucuggugcagauaa

SEQ ID NO: 1364945 - RNA, 19 nt, Artificial Sequence
  Description of Artificial Sequence: Synthetic oligonucleotide
  Antisense strand to SEQ ID NO: 1364944
uuaucugcaccagacuugc

SEQ ID NO: 1364946 - RNA, 19 nt, Artificial Sequence
  Description of Artificial Sequence: Synthetic oligonucleotide
  Sense strand starting at position 191 of SEQ ID NO: 1242675
agggaaugugcaugucauc

SEQ ID NO: 1364947 - RNA, 19 nt, Artificial Sequence
  Description of Artificial Sequence: Synthetic oligonucleotide
  Antisense strand to SEQ ID NO: 1364946
gaugacaugcacauucccu

SEQ ID NO: 1364948 - RNA, 19 nt, Artificial Sequence
  Description of Artificial Sequence: Synthetic oligonucleotide
  Sense strand starting at position 196 of SEQ ID NO: 1242675
augugcaugucaucuggaa

SEQ ID NO: 1364949 - RNA, 19 nt, Artificial Sequence
  Description of Artificial Sequence: Synthetic oligonucleotide
  Antisense strand to SEQ ID NO: 1364948
uuccagaugacaugcacau

SEQ ID NO: 1364950 - RNA, 19 nt, Artificial Sequence
  Description of Artificial Sequence: Synthetic oligonucleotide
  Sense strand starting at position 200 of SEQ ID NO: 1242675
gcaugucaucuggaauacu

SEQ ID NO: 1364951 - RNA, 19 nt, Artificial Sequence
  Description of Artificial Sequence: Synthetic oligonucleotide
  Antisense strand to SEQ ID NO: 1364950
aguauuccagaugacaugc

SEQ ID NO: 1364952 - RNA, 19 nt, Artificial Sequence
  Description of Artificial Sequence: Synthetic oligonucleotide
  Sense strand starting at position 415 of SEQ ID NO: 1242675
cucaguuggcuccaaggaa

SEQ ID NO: 1364953 - RNA, 19 nt, Artificial Sequence
  Description of Artificial Sequence: Synthetic oligonucleotide
  Antisense strand to SEQ ID NO: 1364952
uuccuuggagccaacugag

SEQ ID NO: 1364954 - RNA, 19 nt, Artificial Sequence
  Description of Artificial Sequence: Synthetic oligonucleotide
  Sense strand starting at position 614 of SEQ ID NO: 1242675
aggauaaacucccugucau

SEQ ID NO: 1364955 - RNA, 19 nt, Artificial Sequence
  Description of Artificial Sequence: Synthetic oligonucleotide
  Antisense strand to SEQ ID NO: 1364954
augacagggaguuuauccu

SEQ ID NO: 1364956 - RNA, 19 nt, Artificial Sequence
  Description of Artificial Sequence: Synthetic oligonucleotide
  Sense strand starting at position 615 of SEQ ID NO: 1242675
ggauaaacucccugucauc

SEQ ID NO: 1364957 - RNA, 19 nt, Artificial Sequence
  Description of Artificial Sequence: Synthetic oligonucleotide
  Antisense strand to SEQ ID NO: 1364956
gaugacagggaguuuaucc

SEQ ID NO: 1364958 - RNA, 19 nt, Artificial Sequence
  Description of Artificial Sequence: Synthetic oligonucleotide
  Sense strand starting at position 625 of SEQ ID NO: 1242675
ccugucaucccacacagau

SEQ ID NO: 1364959 - RNA, 19 nt, Artificial Sequence
  Description of Artificial Sequence: Synthetic oligonucleotide
  Antisense strand to SEQ ID NO: 1364958
aucugugugggaugacagg

SEQ ID NO: 1364960 - RNA, 19 nt, Artificial Sequence
  Description of Artificial Sequence: Synthetic oligonucleotide
  Sense strand starting at position 655 of SEQ ID NO: 1242675
gccugaaugacagguguca

SEQ ID NO: 1364961 - RNA, 19 nt, Artificial Sequence
  Description of Artificial Sequence: Synthetic oligonucleotide
  Antisense strand to SEQ ID NO: 1364960
ugacaccugucauucaggc

SEQ ID NO: 1364962 - RNA, 19 nt, Artificial Sequence
  Description of Artificial Sequence: Synthetic oligonucleotide
  Sense strand starting at position 657 of SEQ ID NO: 1242675
cugaaugacaggugucaga

SEQ ID NO: 1364963 - RNA, 19 nt, Artificial Sequence
  Description of Artificial Sequence: Synthetic oligonucleotide
  Antisense strand to SEQ ID NO: 1364962
ucugacaccugucauucag

SEQ ID NO: 1364964 - RNA, 19 nt, Artificial Sequence
  Description of Artificial Sequence: Synthetic oligonucleotide
  Sense strand starting at position 741 of SEQ ID NO: 1242675
ggagacagcaucugucuua

SEQ ID NO: 1364965 - RNA, 19 nt, Artificial Sequence
  Description of Artificial Sequence: Synthetic oligonucleotide
  Antisense strand to SEQ ID NO: 1364964
uaagacagaugcugucucc

SEQ ID NO: 1364966 - RNA, 19 nt, Artificial Sequence
  Description of Artificial Sequence: Synthetic oligonucleotide
  Sense strand starting at position 937 of SEQ ID NO: 1242675
gaaacagagucucuaguga

SEQ ID NO: 1364967 - RNA, 19 nt, Artificial Sequence
  Description of Artificial Sequence: Synthetic oligonucleotide
  Antisense strand to SEQ ID NO: 1364966
ucacuagagacucuguuuc

SEQ ID NO: 1364968 - RNA, 19 nt, Artificial Sequence
  Description of Artificial Sequence: Synthetic oligonucleotide
  Sense strand starting at position 1106 of SEQ ID NO: 1242675
aggguuagucacugaggca

SEQ ID NO: 1364969 - RNA, 19 nt, Artificial Sequence
  Description of Artificial Sequence: Synthetic oligonucleotide
  Antisense strand to SEQ ID NO: 1364968
ugccucagugacuaacccu

SEQ ID NO: 1364970 - RNA, 19 nt, Artificial Sequence
  Description of Artificial Sequence: Synthetic oligonucleotide
  Sense strand starting at position 1454 of SEQ ID NO: 1242675
gaaagaaaugaguggucuu

SEQ ID NO: 1364971 - RNA, 19 nt, Artificial Sequence
  Description of Artificial Sequence: Synthetic oligonucleotide
  Antisense strand to SEQ ID NO: 1364970
aagaccacucauuucuuuc

SEQ ID NO: 1364972 - RNA, 19 nt, Artificial Sequence
  Description of Artificial Sequence: Synthetic oligonucleotide
  Sense strand starting at position 1552 of SEQ ID NO: 1242675
aggccaccucucugagaaa

SEQ ID NO: 1364973 - RNA, 19 nt, Artificial Sequence
  Description of Artificial Sequence: Synthetic oligonucleotide
  Antisense strand to SEQ ID NO: 1364972
uuucucagagagguggccu

SEQ ID NO: 1364974 - RNA, 19 nt, Artificial Sequence
  Description of Artificial Sequence: Synthetic oligonucleotide
  Sense strand starting at position 1645 of SEQ ID NO: 1242675
gacaguugugcccagagca

SEQ ID NO: 1364975 - RNA, 19 nt, Artificial Sequence
  Description of Artificial Sequence: Synthetic oligonucleotide
  Antisense strand to SEQ ID NO: 1364974
ugcucugggcacaacuguc

SEQ ID NO: 1364976 - RNA, 19 nt, Artificial Sequence
  Description of Artificial Sequence: Synthetic oligonucleotide
  Sense strand starting at position 2433 of SEQ ID NO: 1242675
ugaugagguacuugugacu

SEQ ID NO: 1364977 - RNA, 19 nt, Artificial Sequence
  Description of Artificial Sequence: Synthetic oligonucleotide
  Antisense strand to SEQ ID NO: 1364976
agucacaaguaccucauca

SEQ ID NO: 1364978 - RNA, 19 nt, Artificial Sequence
  Description of Artificial Sequence: Synthetic oligonucleotide
  Sense strand starting at position 2566 of SEQ ID NO: 1242675
aagaguucucaaggcuuua

SEQ ID NO: 1364979 - RNA, 19 nt, Artificial Sequence
  Description of Artificial Sequence: Synthetic oligonucleotide
  Antisense strand to SEQ ID NO: 1364978
uaaagccuugagaacucuu

SEQ ID NO: 1364980 - RNA, 19 nt, Artificial Sequence
  Description of Artificial Sequence: Synthetic oligonucleotide
  Sense strand starting at position 2616 of SEQ ID NO: 1242675
ggaggauuccgauggaagu

SEQ ID NO: 1364981 - RNA, 19 nt, Artificial Sequence
  Description of Artificial Sequence: Synthetic oligonucleotide
  Antisense strand to SEQ ID NO: 1364980
acuuccaucggaauccucc

SEQ ID NO: 1364982 - RNA, 19 nt, Artificial Sequence
  Description of Artificial Sequence: Synthetic oligonucleotide
  Sense strand starting at position 2617 of SEQ ID NO: 1242675
gaggauuccgauggaagug

SEQ ID NO: 1364983 - RNA, 19 nt, Artificial Sequence
  Description of Artificial Sequence: Synthetic oligonucleotide
  Antisense strand to SEQ ID NO: 1364982
cacuuccaucggaauccuc

SEQ ID NO: 1364984 - RNA, 19 nt, Artificial Sequence
  Description of Artificial Sequence: Synthetic oligonucleotide
  Sense strand starting at position 2665 of SEQ ID NO: 1242675
gucuguuugggucuucgua

SEQ ID NO: 1364985 - RNA, 19 nt, Artificial Sequence
  Description of Artificial Sequence: Synthetic oligonucleotide
  Antisense strand to SEQ ID NO: 1364984
uacgaagacccaaacagac

SEQ ID NO: 1364986 - RNA, 19 nt, Artificial Sequence
  Description of Artificial Sequence: Synthetic oligonucleotide
  Sense strand starting at position 3108 of SEQ ID NO: 1242675
ugagacaugaauuggcgau

SEQ ID NO: 1364987 - RNA, 19 nt, Artificial Sequence
  Description of Artificial Sequence: Synthetic oligonucleotide
  Antisense strand to SEQ ID NO: 1364986
aucgccaauucaugucuca

SEQ ID NO: 1364988 - RNA, 19 nt, Artificial Sequence
  Description of Artificial Sequence: Synthetic oligonucleotide
  Sense strand starting at position 3112 of SEQ ID NO: 1242675
acaugaauuggcgaucuuu

SEQ ID NO: 1364989 - RNA, 19 nt, Artificial Sequence
  Description of Artificial Sequence: Synthetic oligonucleotide
  Antisense strand to SEQ ID NO: 1364988
aaagaucgccaauucaugu

SEQ ID NO: 1364990 - RNA, 19 nt, Artificial Sequence
  Description of Artificial Sequence: Synthetic oligonucleotide
  Sense strand starting at position 3140 of SEQ ID NO: 1242675
uaaugaguguuagcugaac

SEQ ID NO: 1364991 - RNA, 19 nt, Artificial Sequence
  Description of Artificial Sequence: Synthetic oligonucleotide
  Antisense strand to SEQ ID NO: 1364990
guucagcuaacacucauua

SEQ ID NO: 1364992 - RNA, 19 nt, Artificial Sequence
  Description of Artificial Sequence: Synthetic oligonucleotide
  Sense strand starting at position 3142 of SEQ ID NO: 1242675
augaguguuagcugaacca

SEQ ID NO: 1364993 - RNA, 19 nt, Artificial Sequence
  Description of Artificial Sequence: Synthetic oligonucleotide
  Antisense strand to SEQ ID NO: 1364992
ugguucagcuaacacucau

SEQ ID NO: 1364994 - RNA, 19 nt, Artificial Sequence
  Description of Artificial Sequence: Synthetic oligonucleotide
  Sense strand starting at position 3251 of SEQ ID NO: 1242675
aggguugucccuuggagag

SEQ ID NO: 1364995 - RNA, 19 nt, Artificial Sequence
  Description of Artificial Sequence: Synthetic oligonucleotide
  Antisense strand to SEQ ID NO: 1364994
cucuccaagggacaacccu

SEQ ID NO: 1364996 - RNA, 19 nt, Artificial Sequence
  Description of Artificial Sequence: Synthetic oligonucleotide
  Sense strand starting at position 3341 of SEQ ID NO: 1242675
uagggugaauguguuuaga

SEQ ID NO: 1364997 - RNA, 19 nt, Artificial Sequence
  Description of Artificial Sequence: Synthetic oligonucleotide
  Antisense strand to SEQ ID NO: 1364996
ucuaaacacauucacccua

SEQ ID NO: 1364998 - RNA, 19 nt, Artificial Sequence
  Description of Artificial Sequence: Synthetic oligonucleotide
  Sense strand starting at position 3344 of SEQ ID NO: 1242675
ggugaauguguuuagaguu

SEQ ID NO: 1364999 - RNA, 19 nt, Artificial Sequence
  Description of Artificial Sequence: Synthetic oligonucleotide
  Antisense strand to SEQ ID NO: 1364998
aacucuaaacacauucacc

SEQ ID NO: 1365000 - RNA, 19 nt, Artificial Sequence
  Description of Artificial Sequence: Synthetic oligonucleotide
  Sense strand starting at position 3354 of SEQ ID NO: 1242675
uuuagaguuacuugcagga

SEQ ID NO: 1365001 - RNA, 19 nt, Artificial Sequence
  Description of Artificial Sequence: Synthetic oligonucleotide
  Antisense strand to SEQ ID NO: 1365000
uccugcaaguaacucuaaa

SEQ ID NO: 1365002 - RNA, 19 nt, Artificial Sequence
  Description of Artificial Sequence: Synthetic oligonucleotide
  Sense strand starting at position 3459 of SEQ ID NO: 1242675
caggaugacucagugguua

SEQ ID NO: 1365003 - RNA, 19 nt, Artificial Sequence
  Description of Artificial Sequence: Synthetic oligonucleotide
  Antisense strand to SEQ ID NO: 1365002
uaaccacugagucauccug

SEQ ID NO: 1365004 - RNA, 19 nt, Artificial Sequence
  Description of Artificial Sequence: Synthetic oligonucleotide
  Sense strand starting at position 3461 of SEQ ID NO: 1242675
ggaugacucagugguuaag

SEQ ID NO: 1365005 - RNA, 19 nt, Artificial Sequence
  Description of Artificial Sequence: Synthetic oligonucleotide
  Antisense strand to SEQ ID NO: 1365004
cuuaaccacugagucaucc

SEQ ID NO: 1365006 - RNA, 19 nt, Artificial Sequence
  Description of Artificial Sequence: Synthetic oligonucleotide
  Sense strand starting at position 3464 of SEQ ID NO: 1242675
ugacucagugguuaagagu

SEQ ID NO: 1365007 - RNA, 19 nt, Artificial Sequence
  Description of Artificial Sequence: Synthetic oligonucleotide
  Antisense strand to SEQ ID NO: 1365006
acucuuaaccacugaguca

SEQ ID NO: 1365008 - RNA, 19 nt, Artificial Sequence
  Description of Artificial Sequence: Synthetic oligonucleotide
  Sense strand starting at position 3517 of SEQ ID NO: 1242675
cccagaauaagcuguguga

SEQ ID NO: 1365009 - RNA, 19 nt, Artificial Sequence
  Description of Artificial Sequence: Synthetic oligonucleotide
  Antisense strand to SEQ ID NO: 1365008
ucacacagcuuauucuggg

SEQ ID NO: 1365010 - RNA, 19 nt, Artificial Sequence
  Description of Artificial Sequence: Synthetic oligonucleotide
  Sense strand starting at position 3520 of SEQ ID NO: 1242675
agaauaagcugugugaccu

SEQ ID NO: 1365011 - RNA, 19 nt, Artificial Sequence
  Description of Artificial Sequence: Synthetic oligonucleotide
  Antisense strand to SEQ ID NO: 1365010
aggucacacagcuuauucu

SEQ ID NO: 1365012 - RNA, 19 nt, Artificial Sequence
  Description of Artificial Sequence: Synthetic oligonucleotide
  Sense strand starting at position 79 of SEQ ID NO: 1242676
cuggguuucugucacuguu

SEQ ID NO: 1365013 - RNA, 19 nt, Artificial Sequence
  Description of Artificial Sequence: Synthetic oligonucleotide
  Antisense strand to SEQ ID NO: 1365012
aacagugacagaaacccag

SEQ ID NO: 1365014 - RNA, 19 nt, Artificial Sequence
  Description of Artificial Sequence: Synthetic oligonucleotide
  Sense strand starting at position 159 of SEQ ID NO: 1242676
gccuguugccaugaguaga

SEQ ID NO: 1365015 - RNA, 19 nt, Artificial Sequence
  Description of Artificial Sequence: Synthetic oligonucleotide
  Antisense strand to SEQ ID NO: 1365014
ucuacucauggcaacaggc

SEQ ID NO: 1365016 - RNA, 19 nt, Artificial Sequence
  Description of Artificial Sequence: Synthetic oligonucleotide
  Sense strand starting at position 230 of SEQ ID NO: 1242676
ggccgaguucuucacugag

SEQ ID NO: 1365017 - RNA, 19 nt, Artificial Sequence
  Description of Artificial Sequence: Synthetic oligonucleotide
  Antisense strand to SEQ ID NO: 1365016
cucagugaagaacucggcc

SEQ ID NO: 1365018 - RNA, 19 nt, Artificial Sequence
  Description of Artificial Sequence: Synthetic oligonucleotide
  Sense strand starting at position 270 of SEQ ID NO: 1242676
accugugguuccggaggau

SEQ ID NO: 1365019 - RNA, 19 nt, Artificial Sequence
  Description of Artificial Sequence: Synthetic oligonucleotide
  Antisense strand to SEQ ID NO: 1365018
auccuccggaaccacaggu

SEQ ID NO: 1365020 - RNA, 19 nt, Artificial Sequence
  Description of Artificial Sequence: Synthetic oligonucleotide
  Sense strand starting at position 312 of SEQ ID NO: 1242676
cuccaauugccucguguga

SEQ ID NO: 1365021 - RNA, 19 nt, Artificial Sequence
  Description of Artificial Sequence: Synthetic oligonucleotide
  Antisense strand to SEQ ID NO: 1365020
ucacacgaggcaauuggag

SEQ ID NO: 1365022 - RNA, 19 nt, Artificial Sequence
  Description of Artificial Sequence: Synthetic oligonucleotide
  Sense strand starting at position 314 of SEQ ID NO: 1242676
ccaauugccucgugugaac

SEQ ID NO: 1365023 - RNA, 19 nt, Artificial Sequence
  Description of Artificial Sequence: Synthetic oligonucleotide
  Antisense strand to SEQ ID NO: 1365022
guucacacgaggcaauugg

SEQ ID NO: 1365024 - RNA, 19 nt, Artificial Sequence
  Description of Artificial Sequence: Synthetic oligonucleotide
  Sense strand starting at position 547 of SEQ ID NO: 1242676
gccacuuccugcucucaga

SEQ ID NO: 1365025 - RNA, 19 nt, Artificial Sequence
  Description of Artificial Sequence: Synthetic oligonucleotide
  Antisense strand to SEQ ID NO: 1365024
ucugagagcaggaaguggc

SEQ ID NO: 1365026 - RNA, 19 nt, Artificial Sequence
  Description of Artificial Sequence: Synthetic oligonucleotide
  Sense strand starting at position 955 of SEQ ID NO: 1242676
ugaacugugacucacguuu

SEQ ID NO: 1365027 - RNA, 19 nt, Artificial Sequence
  Description of Artificial Sequence: Synthetic oligonucleotide
  Antisense strand to SEQ ID NO: 1365026
aaacgugagucacaguuca

SEQ ID NO: 1365028 - RNA, 19 nt, Artificial Sequence
  Description of Artificial Sequence: Synthetic oligonucleotide
  Sense strand starting at position 996 of SEQ ID NO: 1242676
gaggaagagauccggguuu

SEQ ID NO: 1365029 - RNA, 19 nt, Artificial Sequence
  Description of Artificial Sequence: Synthetic oligonucleotide
  Antisense strand to SEQ ID NO: 1365028
aaacccggaucucuuccuc

SEQ ID NO: 1365030 - RNA, 19 nt, Artificial Sequence
  Description of Artificial Sequence: Synthetic oligonucleotide
  Sense strand starting at position 1136 of SEQ ID NO: 1242676
ccugcaguccgguaacaaa

SEQ ID NO: 1365031 - RNA, 19 nt, Artificial Sequence
  Description of Artificial Sequence: Synthetic oligonucleotide
  Antisense strand to SEQ ID NO: 1365030
uuuguuaccggacugcagg

SEQ ID NO: 1365032 - RNA, 19 nt, Artificial Sequence
  Description of Artificial Sequence: Synthetic oligonucleotide
  Sense strand starting at position 1408 of SEQ ID NO: 1242676
gagugaugcccgcaccaag

SEQ ID NO: 1365033 - RNA, 19 nt, Artificial Sequence
  Description of Artificial Sequence: Synthetic oligonucleotide
  Antisense strand to SEQ ID NO: 1365032
cuuggugcgggcaucacuc

SEQ ID NO: 1365034 - RNA, 19 nt, Artificial Sequence
  Description of Artificial Sequence: Synthetic oligonucleotide
  Sense strand starting at position 1454 of SEQ ID NO: 1242676
gcacgaugggcccggauau

SEQ ID NO: 1365035 - RNA, 19 nt, Artificial Sequence
  Description of Artificial Sequence: Synthetic oligonucleotide
  Antisense strand to SEQ ID NO: 1365034
auauccgggcccaucgugc

SEQ ID NO: 1365036 - RNA, 19 nt, Artificial Sequence
  Description of Artificial Sequence: Synthetic oligonucleotide
  Sense strand starting at position 1455 of SEQ ID NO: 1242676
cacgaugggcccggauaua

SEQ ID NO: 1365037 - RNA, 19 nt, Artificial Sequence
  Description of Artificial Sequence: Synthetic oligonucleotide
  Antisense strand to SEQ ID NO: 1365036
uauauccgggcccaucgug

SEQ ID NO: 1365038 - RNA, 19 nt, Artificial Sequence
  Description of Artificial Sequence: Synthetic oligonucleotide
  Sense strand starting at position 1585 of SEQ ID NO: 1242676
uggguuccucugcgaagca

SEQ ID NO: 1365039 - RNA, 19 nt, Artificial Sequence
  Description of Artificial Sequence: Synthetic oligonucleotide
  Antisense strand to SEQ ID NO: 1365038
ugcuucgcagaggaaccca

SEQ ID NO: 1365040 - RNA, 19 nt, Artificial Sequence
  Description of Artificial Sequence: Synthetic oligonucleotide
  Sense strand starting at position 1586 of SEQ ID NO: 1242676
ggguuccucugcgaagcau

SEQ ID NO: 1365041 - RNA, 19 nt, Artificial Sequence
  Description of Artificial Sequence: Synthetic oligonucleotide
  Antisense strand to SEQ ID NO: 1365040
augcuucgcagaggaaccc

SEQ ID NO: 1365042 - RNA, 19 nt, Artificial Sequence
  Description of Artificial Sequence: Synthetic oligonucleotide
  Sense strand starting at position 2332 of SEQ ID NO: 1242676
ccaggauuaucagggagug

SEQ ID NO: 1365043 - RNA, 19 nt, Artificial Sequence
  Description of Artificial Sequence: Synthetic oligonucleotide
  Antisense strand to SEQ ID NO: 1365042
cacucccugauaauccugg

SEQ ID NO: 1365044 - RNA, 19 nt, Artificial Sequence
  Description of Artificial Sequence: Synthetic oligonucleotide
  Sense strand starting at position 2931 of SEQ ID NO: 1242676
ggccggcucucgggagaau

SEQ ID NO: 1365045 - RNA, 19 nt, Artificial Sequence
  Description of Artificial Sequence: Synthetic oligonucleotide
  Antisense strand to SEQ ID NO: 1365044
auucucccgagagccggcc

SEQ ID NO: 1365046 - RNA, 19 nt, Artificial Sequence
  Description of Artificial Sequence: Synthetic oligonucleotide
  Sense strand starting at position 2942 of SEQ ID NO: 1242676
gggagaaugccuuggcguc

SEQ ID NO: 1365047 - RNA, 19 nt, Artificial Sequence
  Description of Artificial Sequence: Synthetic oligonucleotide
  Antisense strand to SEQ ID NO: 1365046
gacgccaaggcauucuccc

SEQ ID NO: 1365048 - RNA, 19 nt, Artificial Sequence
  Description of Artificial Sequence: Synthetic oligonucleotide
  Sense strand starting at position 2943 of SEQ ID NO: 1242676
ggagaaugccuuggcguca

SEQ ID NO: 1365049 - RNA, 19 nt, Artificial Sequence
  Description of Artificial Sequence: Synthetic oligonucleotide
  Antisense strand to SEQ ID NO: 1365048
ugacgccaaggcauucucc

SEQ ID NO: 1365050 - RNA, 19 nt, Artificial Sequence
  Description of Artificial Sequence: Synthetic oligonucleotide
  Sense strand starting at position 2944 of SEQ ID NO: 1242676
gagaaugccuuggcgucaa

SEQ ID NO: 1365051 - RNA, 19 nt, Artificial Sequence
  Description of Artificial Sequence: Synthetic oligonucleotide
  Antisense strand to SEQ ID NO: 1365050
uugacgccaaggcauucuc

SEQ ID NO: 1365052 - RNA, 19 nt, Artificial Sequence
  Description of Artificial Sequence: Synthetic oligonucleotide
  Sense strand starting at position 3080 of SEQ ID NO: 1242676
gggcugguccgccgagauu

SEQ ID NO: 1365053 - RNA, 19 nt, Artificial Sequence
  Description of Artificial Sequence: Synthetic oligonucleotide
  Antisense strand to SEQ ID NO: 1365052
aaucucggcggaccagccc

SEQ ID NO: 1365054 - RNA, 19 nt, Artificial Sequence
  Description of Artificial Sequence: Synthetic oligonucleotide
  Sense strand starting at position 3089 of SEQ ID NO: 1242676
cgccgagauuccggagaga

SEQ ID NO: 1365055 - RNA, 19 nt, Artificial Sequence
  Description of Artificial Sequence: Synthetic oligonucleotide
  Antisense strand to SEQ ID NO: 1365054
ucucuccggaaucucggcg

SEQ ID NO: 1365056 - RNA, 19 nt, Artificial Sequence
  Description of Artificial Sequence: Synthetic oligonucleotide
  Sense strand starting at position 3116 of SEQ ID NO: 1242676
ggccgauucuguggcgaga

SEQ ID NO: 1365057 - RNA, 19 nt, Artificial Sequence
  Description of Artificial Sequence: Synthetic oligonucleotide
  Antisense strand to SEQ ID NO: 1365056
ucucgccacagaaucggcc

SEQ ID NO: 1365058 - RNA, 19 nt, Artificial Sequence
  Description of Artificial Sequence: Synthetic oligonucleotide
  Sense strand starting at position 3118 of SEQ ID NO: 1242676
ccgauucuguggcgagauu

SEQ ID NO: 1365059 - RNA, 19 nt, Artificial Sequence
  Description of Artificial Sequence: Synthetic oligonucleotide
  Antisense strand to SEQ ID NO: 1365058
aaucucgccacagaaucgg

SEQ ID NO: 1365060 - RNA, 19 nt, Artificial Sequence
  Description of Artificial Sequence: Synthetic oligonucleotide
  Sense strand starting at position 3119 of SEQ ID NO: 1242676
cgauucuguggcgagauuu

SEQ ID NO: 1365061 - RNA, 19 nt, Artificial Sequence
  Description of Artificial Sequence: Synthetic oligonucleotide
  Antisense strand to SEQ ID NO: 1365060
aaaucucgccacagaaucg

SEQ ID NO: 1365062 - RNA, 19 nt, Artificial Sequence
  Description of Artificial Sequence: Synthetic oligonucleotide
  Sense strand starting at position 3144 of SEQ ID NO: 1242676
gggagguugggugacgauu

SEQ ID NO: 1365063 - RNA, 19 nt, Artificial Sequence
  Description of Artificial Sequence: Synthetic oligonucleotide
  Antisense strand to SEQ ID NO: 1365062
aaucgucacccaaccuccc

SEQ ID NO: 1365064 - RNA, 19 nt, Artificial Sequence
  Description of Artificial Sequence: Synthetic oligonucleotide
  Sense strand starting at position 3156 of SEQ ID NO: 1242676
gacgauugcuccugggcca

SEQ ID NO: 1365065 - RNA, 19 nt, Artificial Sequence
  Description of Artificial Sequence: Synthetic oligonucleotide
  Antisense strand to SEQ ID NO: 1365064
uggcccaggagcaaucguc

SEQ ID NO: 1365066 - RNA, 19 nt, Artificial Sequence
  Description of Artificial Sequence: Synthetic oligonucleotide
  Sense strand starting at position 3159 of SEQ ID NO: 1242676
gauugcuccugggccagaa

SEQ ID NO: 1365067 - RNA, 19 nt, Artificial Sequence
  Description of Artificial Sequence: Synthetic oligonucleotide
  Antisense strand to SEQ ID NO: 1365066
uucuggcccaggagcaauc

SEQ ID NO: 1365068 - RNA, 19 nt, Artificial Sequence
  Description of Artificial Sequence: Synthetic oligonucleotide
  Sense strand starting at position 3215 of SEQ ID NO: 1242676
gccagugcuccucagagga

SEQ ID NO: 1365069 - RNA, 19 nt, Artificial Sequence
  Description of Artificial Sequence: Synthetic oligonucleotide
  Antisense strand to SEQ ID NO: 1365068
uccucugaggagcacuggc

SEQ ID NO: 1365070 - RNA, 19 nt, Artificial Sequence
  Description of Artificial Sequence: Synthetic oligonucleotide
  Sense strand starting at position 3217 of SEQ ID NO: 1242676
cagugcuccucagaggaua

SEQ ID NO: 1365071 - RNA, 19 nt, Artificial Sequence
  Description of Artificial Sequence: Synthetic oligonucleotide
  Antisense strand to SEQ ID NO: 1365070
uauccucugaggagcacug

SEQ ID NO: 1365072 - RNA, 19 nt, Artificial Sequence
  Description of Artificial Sequence: Synthetic oligonucleotide
  Sense strand starting at position 3219 of SEQ ID NO: 1242676
gugcuccucagaggauauu

SEQ ID NO: 1365073 - RNA, 19 nt, Artificial Sequence
  Description of Artificial Sequence: Synthetic oligonucleotide
  Antisense strand to SEQ ID NO: 1365072
aauauccucugaggagcac

SEQ ID NO: 1365074 - RNA, 19 nt, Artificial Sequence
  Description of Artificial Sequence: Synthetic oligonucleotide
  Sense strand starting at position 3357 of SEQ ID NO: 1242676
guuuauuucuguccucgga

SEQ ID NO: 1365075 - RNA, 19 nt, Artificial Sequence
  Description of Artificial Sequence: Synthetic oligonucleotide
  Antisense strand to SEQ ID NO: 1365074
uccgaggacagaaauaaac

SEQ ID NO: 1365076 - RNA, 19 nt, Artificial Sequence
  Description of Artificial Sequence: Synthetic oligonucleotide
  Sense strand starting at position 3460 of SEQ ID NO: 1242676
gcuggaugugccguuuguu

SEQ ID NO: 1365077 - RNA, 19 nt, Artificial Sequence
  Description of Artificial Sequence: Synthetic oligonucleotide
  Antisense strand to SEQ ID NO: 1365076
aacaaacggcacauccagc

SEQ ID NO: 1365078 - RNA, 19 nt, Artificial Sequence
  Description of Artificial Sequence: Synthetic oligonucleotide
  Sense strand starting at position 3468 of SEQ ID NO: 1242676
ugccguuuguucccagacu

SEQ ID NO: 1365079 - RNA, 19 nt, Artificial Sequence
  Description of Artificial Sequence: Synthetic oligonucleotide
  Antisense strand to SEQ ID NO: 1365078
agucugggaacaaacggca

SEQ ID NO: 1365080 - RNA, 19 nt, Artificial Sequence
  Description of Artificial Sequence: Synthetic oligonucleotide
  Sense strand starting at position 3469 of SEQ ID NO: 1242676
gccguuuguucccagacua

SEQ ID NO: 1365081 - RNA, 19 nt, Artificial Sequence
  Description of Artificial Sequence: Synthetic oligonucleotide
  Antisense strand to SEQ ID NO: 1365080
uagucugggaacaaacggc

SEQ ID NO: 1365082 - RNA, 19 nt, Artificial Sequence
  Description of Artificial Sequence: Synthetic oligonucleotide
  Sense strand starting at position 3824 of SEQ ID NO: 1242676
ugcaguugaaccuguugau

SEQ ID NO: 1365083 - RNA, 19 nt, Artificial Sequence
  Description of Artificial Sequence: Synthetic oligonucleotide
  Antisense strand to SEQ ID NO: 1365082
aucaacagguucaacugca

SEQ ID NO: 1365084 - RNA, 19 nt, Artificial Sequence
  Description of Artificial Sequence: Synthetic oligonucleotide
  Sense strand starting at position 3953 of SEQ ID NO: 1242676
aguagccugucauggugaa

SEQ ID NO: 1365085 - RNA, 19 nt, Artificial Sequence
  Description of Artificial Sequence: Synthetic oligonucleotide
  Antisense strand to SEQ ID NO: 1365084
uucaccaugacaggcuacu

SEQ ID NO: 1365086 - RNA, 19 nt, Artificial Sequence
  Description of Artificial Sequence: Synthetic oligonucleotide
  Sense strand starting at position 14 of SEQ ID NO: 1242677
cuuggcugaucauuagaau

SEQ ID NO: 1365087 - RNA, 19 nt, Artificial Sequence
  Description of Artificial Sequence: Synthetic oligonucleotide
  Antisense strand to SEQ ID NO: 1365086
auucuaaugaucagccaag

SEQ ID NO: 1365088 - RNA, 19 nt, Artificial Sequence
  Description of Artificial Sequence: Synthetic oligonucleotide
  Sense strand starting at position 15 of SEQ ID NO: 1242677
uuggcugaucauuagaauc

SEQ ID NO: 1365089 - RNA, 19 nt, Artificial Sequence
  Description of Artificial Sequence: Synthetic oligonucleotide
  Antisense strand to SEQ ID NO: 1365088
gauucuaaugaucagccaa

SEQ ID NO: 1365090 - RNA, 19 nt, Artificial Sequence
  Description of Artificial Sequence: Synthetic oligonucleotide
  Sense strand starting at position 110 of SEQ ID NO: 1242677
guauuaguauuccuaaaga

SEQ ID NO: 1365091 - RNA, 19 nt, Artificial Sequence
  Description of Artificial Sequence: Synthetic oligonucleotide
  Antisense strand to SEQ ID NO: 1365090
ucuuuaggaauacuaauac

SEQ ID NO: 1365092 - RNA, 19 nt, Artificial Sequence
  Description of Artificial Sequence: Synthetic oligonucleotide
  Sense strand starting at position 159 of SEQ ID NO: 1242677
ggcugagaauaauugcaau

SEQ ID NO: 1365093 - RNA, 19 nt, Artificial Sequence
  Description of Artificial Sequence: Synthetic oligonucleotide
  Antisense strand to SEQ ID NO: 1365092
auugcaauuauucucagcc

SEQ ID NO: 1365094 - RNA, 19 nt, Artificial Sequence
  Description of Artificial Sequence: Synthetic oligonucleotide
  Sense strand starting at position 171 of SEQ ID NO: 1242677
uugcaauagucagcaauau

SEQ ID NO: 1365095 - RNA, 19 nt, Artificial Sequence
  Description of Artificial Sequence: Synthetic oligonucleotide
  Antisense strand to SEQ ID NO: 1365094
auauugcugacuauugcaa

SEQ ID NO: 1365096 - RNA, 19 nt, Artificial Sequence
  Description of Artificial Sequence: Synthetic oligonucleotide
  Sense strand starting at position 172 of SEQ ID NO: 1242677
ugcaauagucagcaauaug

SEQ ID NO: 1365097 - RNA, 19 nt, Artificial Sequence
  Description of Artificial Sequence: Synthetic oligonucleotide
  Antisense strand to SEQ ID NO: 1365096
cauauugcugacuauugca

SEQ ID NO: 1365098 - RNA, 19 nt, Artificial Sequence
  Description of Artificial Sequence: Synthetic oligonucleotide
  Sense strand starting at position 182 of SEQ ID NO: 1242677
agcaauauguguucucuau

SEQ ID NO: 1365099 - RNA, 19 nt, Artificial Sequence
  Description of Artificial Sequence: Synthetic oligonucleotide
  Antisense strand to SEQ ID NO: 1365098
auagagaacacauauugcu

SEQ ID NO: 1365100 - RNA, 19 nt, Artificial Sequence
  Description of Artificial Sequence: Synthetic oligonucleotide
  Sense strand starting at position 186 of SEQ ID NO: 1242677
auauguguucucuauauug

SEQ ID NO: 1365101 - RNA, 19 nt, Artificial Sequence
  Description of Artificial Sequence: Synthetic oligonucleotide
  Antisense strand to SEQ ID NO: 1365100
caauauagagaacacauau

SEQ ID NO: 1365102 - RNA, 19 nt, Artificial Sequence
  Description of Artificial Sequence: Synthetic oligonucleotide
  Sense strand starting at position 188 of SEQ ID NO: 1242677
auguguucucuauauuggu

SEQ ID NO: 1365103 - RNA, 19 nt, Artificial Sequence
  Description of Artificial Sequence: Synthetic oligonucleotide
  Antisense strand to SEQ ID NO: 1365102
accaauauagagaacacau

SEQ ID NO: 1365104 - RNA, 19 nt, Artificial Sequence
  Description of Artificial Sequence: Synthetic oligonucleotide
  Sense strand starting at position 193 of SEQ ID NO: 1242677
uucucuauauugguuuaca

SEQ ID NO: 1365105 - RNA, 19 nt, Artificial Sequence
  Description of Artificial Sequence: Synthetic oligonucleotide
  Antisense strand to SEQ ID NO: 1365104
uguaaaccaauauagagaa

SEQ ID NO: 1365106 - RNA, 19 nt, Artificial Sequence
  Description of Artificial Sequence: Synthetic oligonucleotide
  Sense strand starting at position 194 of SEQ ID NO: 1242677
ucucuauauugguuuacau

SEQ ID NO: 1365107 - RNA, 19 nt, Artificial Sequence
  Description of Artificial Sequence: Synthetic oligonucleotide
  Antisense strand to SEQ ID NO: 1365106
auguaaaccaauauagaga

SEQ ID NO: 1365108 - RNA, 19 nt, Artificial Sequence
  Description of Artificial Sequence: Synthetic oligonucleotide
  Sense strand starting at position 272 of SEQ ID NO: 1242677
uuauuuccugccuguaguu

SEQ ID NO: 1365109 - RNA, 19 nt, Artificial Sequence
  Description of Artificial Sequence: Synthetic oligonucleotide
  Antisense strand to SEQ ID NO: 1365108
aacuacaggcaggaaauaa

SEQ ID NO: 1365110 - RNA, 19 nt, Artificial Sequence
  Description of Artificial Sequence: Synthetic oligonucleotide
  Sense strand starting at position 381 of SEQ ID NO: 1242677
guaugaaguacguguaaga

SEQ ID NO: 1365111 - RNA, 19 nt, Artificial Sequence
  Description of Artificial Sequence: Synthetic oligonucleotide
  Antisense strand to SEQ ID NO: 1365110
ucuuacacguacuucauac

SEQ ID NO: 1365112 - RNA, 19 nt, Artificial Sequence
  Description of Artificial Sequence: Synthetic oligonucleotide
  Sense strand starting at position 437 of SEQ ID NO: 1242677
uuugaacuaugagcauauu

SEQ ID NO: 1365113 - RNA, 19 nt, Artificial Sequence
  Description of Artificial Sequence: Synthetic oligonucleotide
  Antisense strand to SEQ ID NO: 1365112
aauaugcucauaguucaaa

SEQ ID NO: 1365114 - RNA, 19 nt, Artificial Sequence
  Description of Artificial Sequence: Synthetic oligonucleotide
  Sense strand starting at position 440 of SEQ ID NO: 1242677
gaacuaugagcauauuguu

SEQ ID NO: 1365115 - RNA, 19 nt, Artificial Sequence
  Description of Artificial Sequence: Synthetic oligonucleotide
  Antisense strand to SEQ ID NO: 1365114
aacaauaugcucauaguuc

SEQ ID NO: 1365116 - RNA, 19 nt, Artificial Sequence
  Description of Artificial Sequence: Synthetic oligonucleotide
  Sense strand starting at position 471 of SEQ ID NO: 1242677
gucuuugacucucuuuaca

SEQ ID NO: 1365117 - RNA, 19 nt, Artificial Sequence
  Description of Artificial Sequence: Synthetic oligonucleotide
  Antisense strand to SEQ ID NO: 1365116
uguaaagagagucaaagac

SEQ ID NO: 1365118 - RNA, 19 nt, Artificial Sequence
  Description of Artificial Sequence: Synthetic oligonucleotide
  Sense strand starting at position 620 of SEQ ID NO: 1242677
gucugaaccuguuucuuua

SEQ ID NO: 1365119 - RNA, 19 nt, Artificial Sequence
  Description of Artificial Sequence: Synthetic oligonucleotide
  Antisense strand to SEQ ID NO: 1365118
uaaagaaacagguucagac

SEQ ID NO: 1365120 - RNA, 19 nt, Artificial Sequence
  Description of Artificial Sequence: Synthetic oligonucleotide
  Sense strand starting at position 624 of SEQ ID NO: 1242677
gaaccuguuucuuuauggu

SEQ ID NO: 1365121 - RNA, 19 nt, Artificial Sequence
  Description of Artificial Sequence: Synthetic oligonucleotide
  Antisense strand to SEQ ID NO: 1365120
accauaaagaaacagguuc

SEQ ID NO: 1365122 - RNA, 19 nt, Artificial Sequence
  Description of Artificial Sequence: Synthetic oligonucleotide
  Sense strand starting at position 777 of SEQ ID NO: 1242677
cuugauuuauucuaggauu

SEQ ID NO: 1365123 - RNA, 19 nt, Artificial Sequence
  Description of Artificial Sequence: Synthetic oligonucleotide
  Antisense strand to SEQ ID NO: 1365122
aauccuagaauaaaucaag

SEQ ID NO: 1365124 - RNA, 19 nt, Artificial Sequence
  Description of Artificial Sequence: Synthetic oligonucleotide
  Sense strand starting at position 835 of SEQ ID NO: 1242677
aguuccuacuccuuggaau

SEQ ID NO: 1365125 - RNA, 19 nt, Artificial Sequence
  Description of Artificial Sequence: Synthetic oligonucleotide
  Antisense strand to SEQ ID NO: 1365124
auuccaaggaguaggaacu

SEQ ID NO: 1365126 - RNA, 19 nt, Artificial Sequence
  Description of Artificial Sequence: Synthetic oligonucleotide
  Sense strand starting at position 836 of SEQ ID NO: 1242677
guuccuacuccuuggaauu

SEQ ID NO: 1365127 - RNA, 19 nt, Artificial Sequence
  Description of Artificial Sequence: Synthetic oligonucleotide
  Antisense strand to SEQ ID NO: 1365126
aauuccaaggaguaggaac

SEQ ID NO: 1365128 - RNA, 19 nt, Artificial Sequence
  Description of Artificial Sequence: Synthetic oligonucleotide
  Sense strand starting at position 1988 of SEQ ID NO: 1242677
guaguuuacauguggaaga

SEQ ID NO: 1365129 - RNA, 19 nt, Artificial Sequence
  Description of Artificial Sequence: Synthetic oligonucleotide
  Antisense strand to SEQ ID NO: 1365128
ucuuccacauguaaacuac

SEQ ID NO: 1365130 - RNA, 19 nt, Artificial Sequence
  Description of Artificial Sequence: Synthetic oligonucleotide
  Sense strand starting at position 2067 of SEQ ID NO: 1242677
uacugaagauaccugaguu

SEQ ID NO: 1365131 - RNA, 19 nt, Artificial Sequence
  Description of Artificial Sequence: Synthetic oligonucleotide
  Antisense strand to SEQ ID NO: 1365130
aacucagguaucuucagua

SEQ ID NO: 1365132 - RNA, 19 nt, Artificial Sequence
  Description of Artificial Sequence: Synthetic oligonucleotide
  Sense strand starting at position 2071 of SEQ ID NO: 1242677
gaagauaccugaguuccau

SEQ ID NO: 1365133 - RNA, 19 nt, Artificial Sequence
  Description of Artificial Sequence: Synthetic oligonucleotide
  Antisense strand to SEQ ID NO: 1365132
auggaacucagguaucuuc

SEQ ID NO: 1365134 - RNA, 19 nt, Artificial Sequence
  Description of Artificial Sequence: Synthetic oligonucleotide
  Sense strand starting at position 2077 of SEQ ID NO: 1242677
accugaguuccaugagguc

SEQ ID NO: 1365135 - RNA, 19 nt, Artificial Sequence
  Description of Artificial Sequence: Synthetic oligonucleotide
  Antisense strand to SEQ ID NO: 1365134
gaccucauggaacucaggu

SEQ ID NO: 1365136 - RNA, 19 nt, Artificial Sequence
  Description of Artificial Sequence: Synthetic oligonucleotide
  Sense strand starting at position 2172 of SEQ ID NO: 1242677
aggacaccuuaggauaaua

SEQ ID NO: 1365137 - RNA, 19 nt, Artificial Sequence
  Description of Artificial Sequence: Synthetic oligonucleotide
  Antisense strand to SEQ ID NO: 1365136
uauuauccuaagguguccu

SEQ ID NO: 1365138 - RNA, 19 nt, Artificial Sequence
  Description of Artificial Sequence: Synthetic oligonucleotide
  Sense strand starting at position 2357 of SEQ ID NO: 1242677
ugaagaaaucuugggcauu

SEQ ID NO: 1365139 - RNA, 19 nt, Artificial Sequence
  Description of Artificial Sequence: Synthetic oligonucleotide
  Antisense strand to SEQ ID NO: 1365138
aaugcccaagauuucuuca

SEQ ID NO: 1365140 - RNA, 19 nt, Artificial Sequence
  Description of Artificial Sequence: Synthetic oligonucleotide
  Sense strand starting at position 2515 of SEQ ID NO: 1242677
gugucugugaucgacauug

SEQ ID NO: 1365141 - RNA, 19 nt, Artificial Sequence
  Description of Artificial Sequence: Synthetic oligonucleotide
  Antisense strand to SEQ ID NO: 1365140
caaugucgaucacagacac

SEQ ID NO: 1365142 - RNA, 19 nt, Artificial Sequence
  Description of Artificial Sequence: Synthetic oligonucleotide
  Sense strand starting at position 2517 of SEQ ID NO: 1242677
gucugugaucgacauugcu

SEQ ID NO: 1365143 - RNA, 19 nt, Artificial Sequence
  Description of Artificial Sequence: Synthetic oligonucleotide
  Antisense strand to SEQ ID NO: 1365142
agcaaugucgaucacagac

SEQ ID NO: 1365144 - RNA, 19 nt, Artificial Sequence
  Description of Artificial Sequence: Synthetic oligonucleotide
  Sense strand starting at position 2520 of SEQ ID NO: 1242677
ugugaucgacauugcuaaa

SEQ ID NO: 1365145 - RNA, 19 nt, Artificial Sequence
  Description of Artificial Sequence: Synthetic oligonucleotide
  Antisense strand to SEQ ID NO: 1365144
uuuagcaaugucgaucaca

SEQ ID NO: 1365146 - RNA, 19 nt, Artificial Sequence
  Description of Artificial Sequence: Synthetic oligonucleotide
  Sense strand starting at position 2661 of SEQ ID NO: 1242677
uccgucuuccaaggauaac

SEQ ID NO: 1365147 - RNA, 19 nt, Artificial Sequence
  Description of Artificial Sequence: Synthetic oligonucleotide
  Antisense strand to SEQ ID NO: 1365146
guuauccuuggaagacgga

SEQ ID NO: 1365148 - RNA, 19 nt, Artificial Sequence
  Description of Artificial Sequence: Synthetic oligonucleotide
  Sense strand starting at position 3009 of SEQ ID NO: 1242677
gcucuaugauuugacuacu

SEQ ID NO: 1365149 - RNA, 19 nt, Artificial Sequence
  Description of Artificial Sequence: Synthetic oligonucleotide
  Antisense strand to SEQ ID NO: 1365148
aguagucaaaucauagagc

SEQ ID NO: 1365150 - RNA, 19 nt, Artificial Sequence
  Description of Artificial Sequence: Synthetic oligonucleotide
  Sense strand starting at position 3198 of SEQ ID NO: 1242677
ccauuaucccauuggugaa

SEQ ID NO: 1365151 - RNA, 19 nt, Artificial Sequence
  Description of Artificial Sequence: Synthetic oligonucleotide
  Antisense strand to SEQ ID NO: 1365150
uucaccaaugggauaaugg

SEQ ID NO: 1365152 - RNA, 19 nt, Artificial Sequence
  Description of Artificial Sequence: Synthetic oligonucleotide
  Sense strand starting at position 3200 of SEQ ID NO: 1242677
auuaucccauuggugaaua

SEQ ID NO: 1365153 - RNA, 19 nt, Artificial Sequence
  Description of Artificial Sequence: Synthetic oligonucleotide
  Antisense strand to SEQ ID NO: 1365152
uauucaccaaugggauaau

SEQ ID NO: 1365154 - RNA, 19 nt, Artificial Sequence
  Description of Artificial Sequence: Synthetic oligonucleotide
  Sense strand starting at position 3500 of SEQ ID NO: 1242677
ccauccuaauggcuguaaa

SEQ ID NO: 1365155 - RNA, 19 nt, Artificial Sequence
  Description of Artificial Sequence: Synthetic oligonucleotide
  Antisense strand to SEQ ID NO: 1365154
uuuacagccauuaggaugg

SEQ ID NO: 1365156 - RNA, 19 nt, Artificial Sequence
  Description of Artificial Sequence: Synthetic oligonucleotide
  Sense strand starting at position 3501 of SEQ ID NO: 1242677
cauccuaauggcuguaaag

SEQ ID NO: 1365157 - RNA, 19 nt, Artificial Sequence
  Description of Artificial Sequence: Synthetic oligonucleotide
  Antisense strand to SEQ ID NO: 1365156
cuuuacagccauuaggaug

SEQ ID NO: 1365158 - RNA, 19 nt, Artificial Sequence
  Description of Artificial Sequence: Synthetic oligonucleotide
  Sense strand starting at position 3503 of SEQ ID NO: 1242677
uccuaauggcuguaaagug

SEQ ID NO: 1365159 - RNA, 19 nt, Artificial Sequence
  Description of Artificial Sequence: Synthetic oligonucleotide
  Antisense strand to SEQ ID NO: 1365158
cacuuuacagccauuagga

SEQ ID NO: 1365160 - RNA, 19 nt, Artificial Sequence
  Description of Artificial Sequence: Synthetic oligonucleotide
  Sense strand starting at position 3519 of SEQ ID NO: 1242677
gugguauaacauuguaguu

SEQ ID NO: 1365161 - RNA, 19 nt, Artificial Sequence
  Description of Artificial Sequence: Synthetic oligonucleotide
  Antisense strand to SEQ ID NO: 1365160
aacuacaauguuauaccac

SEQ ID NO: 1365162 - RNA, 19 nt, Artificial Sequence
  Description of Artificial Sequence: Synthetic oligonucleotide
  Sense strand starting at position 3817 of SEQ ID NO: 1242677
auuuguauguggucauauu

SEQ ID NO: 1365163 - RNA, 19 nt, Artificial Sequence
  Description of Artificial Sequence: Synthetic oligonucleotide
  Antisense strand to SEQ ID NO: 1365162
aauaugaccacauacaaau

SEQ ID NO: 1365164 - RNA, 19 nt, Artificial Sequence
  Description of Artificial Sequence: Synthetic oligonucleotide
  Sense strand starting at position 3889 of SEQ ID NO: 1242677
ugagaaauccagugucaug

SEQ ID NO: 1365165 - RNA, 19 nt, Artificial Sequence
  Description of Artificial Sequence: Synthetic oligonucleotide
  Antisense strand to SEQ ID NO: 1365164
caugacacuggauuucuca

SEQ ID NO: 1365166 - RNA, 19 nt, Artificial Sequence
  Description of Artificial Sequence: Synthetic oligonucleotide
  Sense strand starting at position 31 of SEQ ID NO: 1242678
cuggguuccuccuuuguaa

SEQ ID NO: 1365167 - RNA, 19 nt, Artificial Sequence
  Description of Artificial Sequence: Synthetic oligonucleotide
  Antisense strand to SEQ ID NO: 1365166
uuacaaaggaggaacccag

SEQ ID NO: 1365168 - RNA, 19 nt, Artificial Sequence
  Description of Artificial Sequence: Synthetic oligonucleotide
  Sense strand starting at position 33 of SEQ ID NO: 1242678
ggguuccuccuuuguaaac

SEQ ID NO: 1365169 - RNA, 19 nt, Artificial Sequence
  Description of Artificial Sequence: Synthetic oligonucleotide
  Antisense strand to SEQ ID NO: 1365168
guuuacaaaggaggaaccc

SEQ ID NO: 1365170 - RNA, 19 nt, Artificial Sequence
  Description of Artificial Sequence: Synthetic oligonucleotide
  Sense strand starting at position 34 of SEQ ID NO: 1242678
gguuccuccuuuguaaaca

SEQ ID NO: 1365171 - RNA, 19 nt, Artificial Sequence
  Description of Artificial Sequence: Synthetic oligonucleotide
  Antisense strand to SEQ ID NO: 1365170
uguuuacaaaggaggaacc

SEQ ID NO: 1365172 - RNA, 19 nt, Artificial Sequence
  Description of Artificial Sequence: Synthetic oligonucleotide
  Sense strand starting at position 411 of SEQ ID NO: 1242678
agccaacagucacagagaa

SEQ ID NO: 1365173 - RNA, 19 nt, Artificial Sequence
  Description of Artificial Sequence: Synthetic oligonucleotide
  Antisense strand to SEQ ID NO: 1365172
uucucugugacuguuggcu

SEQ ID NO: 1365174 - RNA, 19 nt, Artificial Sequence
  Description of Artificial Sequence: Synthetic oligonucleotide
  Sense strand starting at position 840 of SEQ ID NO: 1242678
uuggcucagaccugagauu

SEQ ID NO: 1365175 - RNA, 19 nt, Artificial Sequence
  Description of Artificial Sequence: Synthetic oligonucleotide
  Antisense strand to SEQ ID NO: 1365174
aaucucaggucugagccaa

SEQ ID NO: 1365176 - RNA, 19 nt, Artificial Sequence
  Description of Artificial Sequence: Synthetic oligonucleotide
  Sense strand starting at position 919 of SEQ ID NO: 1242678
cgaguuuccucaucuguca

SEQ ID NO: 1365177 - RNA, 19 nt, Artificial Sequence
  Description of Artificial Sequence: Synthetic oligonucleotide
  Antisense strand to SEQ ID NO: 1365176
ugacagaugaggaaacucg

SEQ ID NO: 1365178 - RNA, 19 nt, Artificial Sequence
  Description of Artificial Sequence: Synthetic oligonucleotide
  Sense strand starting at position 1013 of SEQ ID NO: 1242678
gcgggcucaguccacaaua

SEQ ID NO: 1365179 - RNA, 19 nt, Artificial Sequence
  Description of Artificial Sequence: Synthetic oligonucleotide
  Antisense strand to SEQ ID NO: 1365178
uauuguggacugagcccgc

SEQ ID NO: 1365180 - RNA, 19 nt, Artificial Sequence
  Description of Artificial Sequence: Synthetic oligonucleotide
  Sense strand starting at position 1015 of SEQ ID NO: 1242678
gggcucaguccacaauagu

SEQ ID NO: 1365181 - RNA, 19 nt, Artificial Sequence
  Description of Artificial Sequence: Synthetic oligonucleotide
  Antisense strand to SEQ ID NO: 1365180
acuauuguggacugagccc

SEQ ID NO: 1365182 - RNA, 19 nt, Artificial Sequence
  Description of Artificial Sequence: Synthetic oligonucleotide
  Sense strand starting at position 1269 of SEQ ID NO: 1242678
cuuucuugcccugaaggga

SEQ ID NO: 1365183 - RNA, 19 nt, Artificial Sequence
  Description of Artificial Sequence: Synthetic oligonucleotide
  Antisense strand to SEQ ID NO: 1365182
ucccuucagggcaagaaag

SEQ ID NO: 1365184 - RNA, 19 nt, Artificial Sequence
  Description of Artificial Sequence: Synthetic oligonucleotide
  Sense strand starting at position 1294 of SEQ ID NO: 1242678
ucgagaacucacggucauc

SEQ ID NO: 1365185 - RNA, 19 nt, Artificial Sequence
  Description of Artificial Sequence: Synthetic oligonucleotide
  Antisense strand to SEQ ID NO: 1365184
gaugaccgugaguucucga

SEQ ID NO: 1365186 - RNA, 19 nt, Artificial Sequence
  Description of Artificial Sequence: Synthetic oligonucleotide
  Sense strand starting at position 1427 of SEQ ID NO: 1242678
aagguaguggcggaagaua

SEQ ID NO: 1365187 - RNA, 19 nt, Artificial Sequence
  Description of Artificial Sequence: Synthetic oligonucleotide
  Antisense strand to SEQ ID NO: 1365186
uaucuuccgccacuaccuu

SEQ ID NO: 1365188 - RNA, 19 nt, Artificial Sequence
  Description of Artificial Sequence: Synthetic oligonucleotide
  Sense strand starting at position 1487 of SEQ ID NO: 1242678
gggacuucgguggacgauu

SEQ ID NO: 1365189 - RNA, 19 nt, Artificial Sequence
  Description of Artificial Sequence: Synthetic oligonucleotide
  Antisense strand to SEQ ID NO: 1365188
aaucguccaccgaaguccc

SEQ ID NO: 1365190 - RNA, 19 nt, Artificial Sequence
  Description of Artificial Sequence: Synthetic oligonucleotide
  Sense strand starting at position 1516 of SEQ ID NO: 1242678
gguagaucuaagcggauug

SEQ ID NO: 1365191 - RNA, 19 nt, Artificial Sequence
  Description of Artificial Sequence: Synthetic oligonucleotide
  Antisense strand to SEQ ID NO: 1365190
caauccgcuuagaucuacc

SEQ ID NO: 1365192 - RNA, 19 nt, Artificial Sequence
  Description of Artificial Sequence: Synthetic oligonucleotide
  Sense strand starting at position 1518 of SEQ ID NO: 1242678
uagaucuaagcggauuguu

SEQ ID NO: 1365193 - RNA, 19 nt, Artificial Sequence
  Description of Artificial Sequence: Synthetic oligonucleotide
  Antisense strand to SEQ ID NO: 1365192
aacaauccgcuuagaucua

SEQ ID NO: 1365194 - RNA, 19 nt, Artificial Sequence
  Description of Artificial Sequence: Synthetic oligonucleotide
  Sense strand starting at position 1598 of SEQ ID NO: 1242678
cagagagacugagaaauau

SEQ ID NO: 1365195 - RNA, 19 nt, Artificial Sequence
  Description of Artificial Sequence: Synthetic oligonucleotide
  Antisense strand to SEQ ID NO: 1365194
auauuucucagucucucug

SEQ ID NO: 1365196 - RNA, 19 nt, Artificial Sequence
  Description of Artificial Sequence: Synthetic oligonucleotide
  Sense strand starting at position 1756 of SEQ ID NO: 1242678
ccuccuauuuggcagagau

SEQ ID NO: 1365197 - RNA, 19 nt, Artificial Sequence
  Description of Artificial Sequence: Synthetic oligonucleotide
  Antisense strand to SEQ ID NO: 1365196
aucucugccaaauaggagg

SEQ ID NO: 1365198 - RNA, 19 nt, Artificial Sequence
  Description of Artificial Sequence: Synthetic oligonucleotide
  Sense strand starting at position 2960 of SEQ ID NO: 1242678
cuguauaaucccggagggu

SEQ ID NO: 1365199 - RNA, 19 nt, Artificial Sequence
  Description of Artificial Sequence: Synthetic oligonucleotide
  Antisense strand to SEQ ID NO: 1365198
acccuccgggauuauacag

SEQ ID NO: 1365200 - RNA, 19 nt, Artificial Sequence
  Description of Artificial Sequence: Synthetic oligonucleotide
  Sense strand starting at position 2961 of SEQ ID NO: 1242678
uguauaaucccggagggug

SEQ ID NO: 1365201 - RNA, 19 nt, Artificial Sequence
  Description of Artificial Sequence: Synthetic oligonucleotide
  Antisense strand to SEQ ID NO: 1365200
cacccuccgggauuauaca

SEQ ID NO: 1365202 - RNA, 19 nt, Artificial Sequence
  Description of Artificial Sequence: Synthetic oligonucleotide
  Sense strand starting at position 3151 of SEQ ID NO: 1242678
uuucuagccuuccuugagu

SEQ ID NO: 1365203 - RNA, 19 nt, Artificial Sequence
  Description of Artificial Sequence: Synthetic oligonucleotide
  Antisense strand to SEQ ID NO: 1365202
acucaaggaaggcuagaaa

SEQ ID NO: 1365204 - RNA, 19 nt, Artificial Sequence
  Description of Artificial Sequence: Synthetic oligonucleotide
  Sense strand starting at position 3160 of SEQ ID NO: 1242678
uuccuugaguccucuguuu

SEQ ID NO: 1365205 - RNA, 19 nt, Artificial Sequence
  Description of Artificial Sequence: Synthetic oligonucleotide
  Antisense strand to SEQ ID NO: 1365204
aaacagaggacucaaggaa

SEQ ID NO: 1365206 - RNA, 19 nt, Artificial Sequence
  Description of Artificial Sequence: Synthetic oligonucleotide
  Sense strand starting at position 3300 of SEQ ID NO: 1242678
cagggucagcuugguauuu

SEQ ID NO: 1365207 - RNA, 19 nt, Artificial Sequence
  Description of Artificial Sequence: Synthetic oligonucleotide
  Antisense strand to SEQ ID NO: 1365206
aaauaccaagcugacccug

SEQ ID NO: 1365208 - RNA, 19 nt, Artificial Sequence
  Description of Artificial Sequence: Synthetic oligonucleotide
  Sense strand starting at position 3302 of SEQ ID NO: 1242678
gggucagcuugguauuuga

SEQ ID NO: 1365209 - RNA, 19 nt, Artificial Sequence
  Description of Artificial Sequence: Synthetic oligonucleotide
  Antisense strand to SEQ ID NO: 1365208
ucaaauaccaagcugaccc

SEQ ID NO: 1365210 - RNA, 19 nt, Artificial Sequence
  Description of Artificial Sequence: Synthetic oligonucleotide
  Sense strand starting at position 229 of SEQ ID NO: 1242679
uuggcucagaccugagauu

SEQ ID NO: 1365211 - RNA, 19 nt, Artificial Sequence
  Description of Artificial Sequence: Synthetic oligonucleotide
  Antisense strand to SEQ ID NO: 1365210
aaucucaggucugagccaa

SEQ ID NO: 1365212 - RNA, 19 nt, Artificial Sequence
  Description of Artificial Sequence: Synthetic oligonucleotide
  Sense strand starting at position 308 of SEQ ID NO: 1242679
cgaguuuccucaucuguca

SEQ ID NO: 1365213 - RNA, 19 nt, Artificial Sequence
  Description of Artificial Sequence: Synthetic oligonucleotide
  Antisense strand to SEQ ID NO: 1365212
ugacagaugaggaaacucg

SEQ ID NO: 1365214 - RNA, 19 nt, Artificial Sequence
  Description of Artificial Sequence: Synthetic oligonucleotide
  Sense strand starting at position 402 of SEQ ID NO: 1242679
gcgggcucaguccacaaua

SEQ ID NO: 1365215 - RNA, 19 nt, Artificial Sequence
  Description of Artificial Sequence: Synthetic oligonucleotide
  Antisense strand to SEQ ID NO: 1365214
uauuguggacugagcccgc

SEQ ID NO: 1365216 - RNA, 19 nt, Artificial Sequence
  Description of Artificial Sequence: Synthetic oligonucleotide
  Sense strand starting at position 404 of SEQ ID NO: 1242679
gggcucaguccacaauagu

SEQ ID NO: 1365217 - RNA, 19 nt, Artificial Sequence
  Description of Artificial Sequence: Synthetic oligonucleotide
  Antisense strand to SEQ ID NO: 1365216
acuauuguggacugagccc

SEQ ID NO: 1365218 - RNA, 19 nt, Artificial Sequence
  Description of Artificial Sequence: Synthetic oligonucleotide
  Sense strand starting at position 658 of SEQ ID NO: 1242679
cuuucuugcccugaaggga

SEQ ID NO: 1365219 - RNA, 19 nt, Artificial Sequence
  Description of Artificial Sequence: Synthetic oligonucleotide
  Antisense strand to SEQ ID NO: 1365218
ucccuucagggcaagaaag

SEQ ID NO: 1365220 - RNA, 19 nt, Artificial Sequence
  Description of Artificial Sequence: Synthetic oligonucleotide
  Sense strand starting at position 683 of SEQ ID NO: 1242679
ucgagaacucacggucauc

SEQ ID NO: 1365221 - RNA, 19 nt, Artificial Sequence
  Description of Artificial Sequence: Synthetic oligonucleotide
  Antisense strand to SEQ ID NO: 1365220
gaugaccgugaguucucga

SEQ ID NO: 1365222 - RNA, 19 nt, Artificial Sequence
  Description of Artificial Sequence: Synthetic oligonucleotide
  Sense strand starting at position 816 of SEQ ID NO: 1242679
aagguaguggcggaagaua

SEQ ID NO: 1365223 - RNA, 19 nt, Artificial Sequence
  Description of Artificial Sequence: Synthetic oligonucleotide
  Antisense strand to SEQ ID NO: 1365222
uaucuuccgccacuaccuu

SEQ ID NO: 1365224 - RNA, 19 nt, Artificial Sequence
  Description of Artificial Sequence: Synthetic oligonucleotide
  Sense strand starting at position 876 of SEQ ID NO: 1242679
gggacuucgguggacgauu

SEQ ID NO: 1365225 - RNA, 19 nt, Artificial Sequence
  Description of Artificial Sequence: Synthetic oligonucleotide
  Antisense strand to SEQ ID NO: 1365224
aaucguccaccgaaguccc

SEQ ID NO: 1365226 - RNA, 19 nt, Artificial Sequence
  Description of Artificial Sequence: Synthetic oligonucleotide
  Sense strand starting at position 905 of SEQ ID NO: 1242679
gguagaucuaagcggauug

SEQ ID NO: 1365227 - RNA, 19 nt, Artificial Sequence
  Description of Artificial Sequence: Synthetic oligonucleotide
  Antisense strand to SEQ ID NO: 1365226
caauccgcuuagaucuacc

SEQ ID NO: 1365228 - RNA, 19 nt, Artificial Sequence
  Description of Artificial Sequence: Synthetic oligonucleotide
  Sense strand starting at position 907 of SEQ ID NO: 1242679
uagaucuaagcggauuguu

SEQ ID NO: 1365229 - RNA, 19 nt, Artificial Sequence
  Description of Artificial Sequence: Synthetic oligonucleotide
  Antisense strand to SEQ ID NO: 1365228
aacaauccgcuuagaucua

SEQ ID NO: 1365230 - RNA, 19 nt, Artificial Sequence
  Description of Artificial Sequence: Synthetic oligonucleotide
  Sense strand starting at position 987 of SEQ ID NO: 1242679
cagagagacugagaaauau

SEQ ID NO: 1365231 - RNA, 19 nt, Artificial Sequence
  Description of Artificial Sequence: Synthetic oligonucleotide
  Antisense strand to SEQ ID NO: 1365230
auauuucucagucucucug

SEQ ID NO: 1365232 - RNA, 19 nt, Artificial Sequence
  Description of Artificial Sequence: Synthetic oligonucleotide
  Sense strand starting at position 1145 of SEQ ID NO: 1242679
ccuccuauuuggcagagau

SEQ ID NO: 1365233 - RNA, 19 nt, Artificial Sequence
  Description of Artificial Sequence: Synthetic oligonucleotide
  Antisense strand to SEQ ID NO: 1365232
aucucugccaaauaggagg

SEQ ID NO: 1365234 - RNA, 19 nt, Artificial Sequence
  Description of Artificial Sequence: Synthetic oligonucleotide
  Sense strand starting at position 2349 of SEQ ID NO: 1242679
cuguauaaucccggagggu

SEQ ID NO: 1365235 - RNA, 19 nt, Artificial Sequence
  Description of Artificial Sequence: Synthetic oligonucleotide
  Antisense strand to SEQ ID NO: 1365234
acccuccgggauuauacag

SEQ ID NO: 1365236 - RNA, 19 nt, Artificial Sequence
  Description of Artificial Sequence: Synthetic oligonucleotide
  Sense strand starting at position 2350 of SEQ ID NO: 1242679
uguauaaucccggagggug

SEQ ID NO: 1365237 - RNA, 19 nt, Artificial Sequence
  Description of Artificial Sequence: Synthetic oligonucleotide
  Antisense strand to SEQ ID NO: 1365236
cacccuccgggauuauaca

SEQ ID NO: 1365238 - RNA, 19 nt, Artificial Sequence
  Description of Artificial Sequence: Synthetic oligonucleotide
  Sense strand starting at position 2540 of SEQ ID NO: 1242679
uuucuagccuuccuugagu

SEQ ID NO: 1365239 - RNA, 19 nt, Artificial Sequence
  Description of Artificial Sequence: Synthetic oligonucleotide
  Antisense strand to SEQ ID NO: 1365238
acucaaggaaggcuagaaa

SEQ ID NO: 1365240 - RNA, 19 nt, Artificial Sequence
  Description of Artificial Sequence: Synthetic oligonucleotide
  Sense strand starting at position 2549 of SEQ ID NO: 1242679
uuccuugaguccucuguuu

SEQ ID NO: 1365241 - RNA, 19 nt, Artificial Sequence
  Description of Artificial Sequence: Synthetic oligonucleotide
  Antisense strand to SEQ ID NO: 1365240
aaacagaggacucaaggaa

SEQ ID NO: 1365242 - RNA, 19 nt, Artificial Sequence
  Description of Artificial Sequence: Synthetic oligonucleotide
  Sense strand starting at position 2689 of SEQ ID NO: 1242679
cagggucagcuugguauuu

SEQ ID NO: 1365243 - RNA, 19 nt, Artificial Sequence
  Description of Artificial Sequence: Synthetic oligonucleotide
  Antisense strand to SEQ ID NO: 1365242
aaauaccaagcugacccug

SEQ ID NO: 1365244 - RNA, 19 nt, Artificial Sequence
  Description of Artificial Sequence: Synthetic oligonucleotide
  Sense strand starting at position 2691 of SEQ ID NO: 1242679
gggucagcuugguauuuga

SEQ ID NO: 1365245 - RNA, 19 nt, Artificial Sequence
  Description of Artificial Sequence: Synthetic oligonucleotide
  Antisense strand to SEQ ID NO: 1365244
ucaaauaccaagcugaccc

SEQ ID NO: 1365246 - RNA, 19 nt, Artificial Sequence
  Description of Artificial Sequence: Synthetic oligonucleotide
  Sense strand starting at position 3884 of SEQ ID NO: 1242679
gcugcugugauccgugacu

SEQ ID NO: 1365247 - RNA, 19 nt, Artificial Sequence
  Description of Artificial Sequence: Synthetic oligonucleotide
  Antisense strand to SEQ ID NO: 1365246
agucacggaucacagcagc

SEQ ID NO: 1365248 - RNA, 19 nt, Artificial Sequence
  Description of Artificial Sequence: Synthetic oligonucleotide
  Sense strand starting at position 3925 of SEQ ID NO: 1242679
gugacagaguaagauuuau

SEQ ID NO: 1365249 - RNA, 19 nt, Artificial Sequence
  Description of Artificial Sequence: Synthetic oligonucleotide
  Antisense strand to SEQ ID NO: 1365248
auaaaucuuacucugucac

SEQ ID NO: 1365250 - RNA, 19 nt, Artificial Sequence
  Description of Artificial Sequence: Synthetic oligonucleotide
  Sense strand starting at position 3931 of SEQ ID NO: 1242679
gaguaagauuuauagcagu

SEQ ID NO: 1365251 - RNA, 19 nt, Artificial Sequence
  Description of Artificial Sequence: Synthetic oligonucleotide
  Antisense strand to SEQ ID NO: 1365250
acugcuauaaaucuuacuc

SEQ ID NO: 1365252 - RNA, 19 nt, Artificial Sequence
  Description of Artificial Sequence: Synthetic oligonucleotide
  Sense strand starting at position 3982 of SEQ ID NO: 1242679
ucagauguccaucaaguga

SEQ ID NO: 1365253 - RNA, 19 nt, Artificial Sequence
  Description of Artificial Sequence: Synthetic oligonucleotide
  Antisense strand to SEQ ID NO: 1365252
ucacuugauggacaucuga

SEQ ID NO: 1365254 - RNA, 19 nt, Artificial Sequence
  Description of Artificial Sequence: Synthetic oligonucleotide
  Sense strand starting at position 93 of SEQ ID NO: 1242680
agccaacagucacagagaa

SEQ ID NO: 1365255 - RNA, 19 nt, Artificial Sequence
  Description of Artificial Sequence: Synthetic oligonucleotide
  Antisense strand to SEQ ID NO: 1365254
uucucugugacuguuggcu

SEQ ID NO: 1365256 - RNA, 19 nt, Artificial Sequence
  Description of Artificial Sequence: Synthetic oligonucleotide
  Sense strand starting at position 522 of SEQ ID NO: 1242680
uuggcucagaccugagauu

SEQ ID NO: 1365257 - RNA, 19 nt, Artificial Sequence
  Description of Artificial Sequence: Synthetic oligonucleotide
  Antisense strand to SEQ ID NO: 1365256
aaucucaggucugagccaa

SEQ ID NO: 1365258 - RNA, 19 nt, Artificial Sequence
  Description of Artificial Sequence: Synthetic oligonucleotide
  Sense strand starting at position 601 of SEQ ID NO: 1242680
cgaguuuccucaucuguca

SEQ ID NO: 1365259 - RNA, 19 nt, Artificial Sequence
  Description of Artificial Sequence: Synthetic oligonucleotide
  Antisense strand to SEQ ID NO: 1365258
ugacagaugaggaaacucg

SEQ ID NO: 1365260 - RNA, 19 nt, Artificial Sequence
  Description of Artificial Sequence: Synthetic oligonucleotide
  Sense strand starting at position 695 of SEQ ID NO: 1242680
gcgggcucaguccacaaua

SEQ ID NO: 1365261 - RNA, 19 nt, Artificial Sequence
  Description of Artificial Sequence: Synthetic oligonucleotide
  Antisense strand to SEQ ID NO: 1365260
uauuguggacugagcccgc

SEQ ID NO: 1365262 - RNA, 19 nt, Artificial Sequence
  Description of Artificial Sequence: Synthetic oligonucleotide
  Sense strand starting at position 697 of SEQ ID NO: 1242680
gggcucaguccacaauagu

SEQ ID NO: 1365263 - RNA, 19 nt, Artificial Sequence
  Description of Artificial Sequence: Synthetic oligonucleotide
  Antisense strand to SEQ ID NO: 1365262
acuauuguggacugagccc

SEQ ID NO: 1365264 - RNA, 19 nt, Artificial Sequence
  Description of Artificial Sequence: Synthetic oligonucleotide
  Sense strand starting at position 951 of SEQ ID NO: 1242680
cuuucuugcccugaaggga

SEQ ID NO: 1365265 - RNA, 19 nt, Artificial Sequence
  Description of Artificial Sequence: Synthetic oligonucleotide
  Antisense strand to SEQ ID NO: 1365264
ucccuucagggcaagaaag

SEQ ID NO: 1365266 - RNA, 19 nt, Artificial Sequence
  Description of Artificial Sequence: Synthetic oligonucleotide
  Sense strand starting at position 976 of SEQ ID NO: 1242680
ucgagaacucacggucauc

SEQ ID NO: 1365267 - RNA, 19 nt, Artificial Sequence
  Description of Artificial Sequence: Synthetic oligonucleotide
  Antisense strand to SEQ ID NO: 1365266
gaugaccgugaguucucga

SEQ ID NO: 1365268 - RNA, 19 nt, Artificial Sequence
  Description of Artificial Sequence: Synthetic oligonucleotide
  Sense strand starting at position 1109 of SEQ ID NO: 1242680
aagguaguggcggaagaua

SEQ ID NO: 1365269 - RNA, 19 nt, Artificial Sequence
  Description of Artificial Sequence: Synthetic oligonucleotide
  Antisense strand to SEQ ID NO: 1365268
uaucuuccgccacuaccuu

SEQ ID NO: 1365270 - RNA, 19 nt, Artificial Sequence
  Description of Artificial Sequence: Synthetic oligonucleotide
  Sense strand starting at position 1169 of SEQ ID NO: 1242680
gggacuucgguggacgauu

SEQ ID NO: 1365271 - RNA, 19 nt, Artificial Sequence
  Description of Artificial Sequence: Synthetic oligonucleotide
  Antisense strand to SEQ ID NO: 1365270
aaucguccaccgaaguccc

SEQ ID NO: 1365272 - RNA, 19 nt, Artificial Sequence
  Description of Artificial Sequence: Synthetic oligonucleotide
  Sense strand starting at position 1198 of SEQ ID NO: 1242680
gguagaucuaagcggauug

SEQ ID NO: 1365273 - RNA, 19 nt, Artificial Sequence
  Description of Artificial Sequence: Synthetic oligonucleotide
  Antisense strand to SEQ ID NO: 1365272
caauccgcuuagaucuacc

SEQ ID NO: 1365274 - RNA, 19 nt, Artificial Sequence
  Description of Artificial Sequence: Synthetic oligonucleotide
  Sense strand starting at position 1200 of SEQ ID NO: 1242680
uagaucuaagcggauuguu

SEQ ID NO: 1365275 - RNA, 19 nt, Artificial Sequence
  Description of Artificial Sequence: Synthetic oligonucleotide
  Antisense strand to SEQ ID NO: 1365274
aacaauccgcuuagaucua

SEQ ID NO: 1365276 - RNA, 19 nt, Artificial Sequence
  Description of Artificial Sequence: Synthetic oligonucleotide
  Sense strand starting at position 1280 of SEQ ID NO: 1242680
cagagagacugagaaauau

SEQ ID NO: 1365277 - RNA, 19 nt, Artificial Sequence
  Description of Artificial Sequence: Synthetic oligonucleotide
  Antisense strand to SEQ ID NO: 1365276
auauuucucagucucucug

SEQ ID NO: 1365278 - RNA, 19 nt, Artificial Sequence
  Description of Artificial Sequence: Synthetic oligonucleotide
  Sense strand starting at position 1438 of SEQ ID NO: 1242680
ccuccuauuuggcagagau

SEQ ID NO: 1365279 - RNA, 19 nt, Artificial Sequence
  Description of Artificial Sequence: Synthetic oligonucleotide
  Antisense strand to SEQ ID NO: 1365278
aucucugccaaauaggagg

SEQ ID NO: 1365280 - RNA, 19 nt, Artificial Sequence
  Description of Artificial Sequence: Synthetic oligonucleotide
  Sense strand starting at position 2642 of SEQ ID NO: 1242680
cuguauaaucccggagggu

SEQ ID NO: 1365281 - RNA, 19 nt, Artificial Sequence
  Description of Artificial Sequence: Synthetic oligonucleotide
  Antisense strand to SEQ ID NO: 1365280
acccuccgggauuauacag

SEQ ID NO: 1365282 - RNA, 19 nt, Artificial Sequence
  Description of Artificial Sequence: Synthetic oligonucleotide
  Sense strand starting at position 2643 of SEQ ID NO: 1242680
uguauaaucccggagggug

SEQ ID NO: 1365283 - RNA, 19 nt, Artificial Sequence
  Description of Artificial Sequence: Synthetic oligonucleotide
  Antisense strand to SEQ ID NO: 1365282
cacccuccgggauuauaca

SEQ ID NO: 1365284 - RNA, 19 nt, Artificial Sequence
  Description of Artificial Sequence: Synthetic oligonucleotide
  Sense strand starting at position 2833 of SEQ ID NO: 1242680
uuucuagccuuccuugagu

SEQ ID NO: 1365285 - RNA, 19 nt, Artificial Sequence
  Description of Artificial Sequence: Synthetic oligonucleotide
  Antisense strand to SEQ ID NO: 1365284
acucaaggaaggcuagaaa

SEQ ID NO: 1365286 - RNA, 19 nt, Artificial Sequence
  Description of Artificial Sequence: Synthetic oligonucleotide
  Sense strand starting at position 2842 of SEQ ID NO: 1242680
uuccuugaguccucuguuu

SEQ ID NO: 1365287 - RNA, 19 nt, Artificial Sequence
  Description of Artificial Sequence: Synthetic oligonucleotide
  Antisense strand to SEQ ID NO: 1365286
aaacagaggacucaaggaa

SEQ ID NO: 1365288 - RNA, 19 nt, Artificial Sequence
  Description of Artificial Sequence: Synthetic oligonucleotide
  Sense strand starting at position 2982 of SEQ ID NO: 1242680
cagggucagcuugguauuu

SEQ ID NO: 1365289 - RNA, 19 nt, Artificial Sequence
  Description of Artificial Sequence: Synthetic oligonucleotide
  Antisense strand to SEQ ID NO: 1365288
aaauaccaagcugacccug

SEQ ID NO: 1365290 - RNA, 19 nt, Artificial Sequence
  Description of Artificial Sequence: Synthetic oligonucleotide
  Sense strand starting at position 2984 of SEQ ID NO: 1242680
gggucagcuugguauuuga

SEQ ID NO: 1365291 - RNA, 19 nt, Artificial Sequence
  Description of Artificial Sequence: Synthetic oligonucleotide
  Antisense strand to SEQ ID NO: 1365290
ucaaauaccaagcugaccc

SEQ ID NO: 1365292 - RNA, 19 nt, Artificial Sequence
  Description of Artificial Sequence: Synthetic oligonucleotide
  Sense strand starting at position 492 of SEQ ID NO: 1242681
ucaccacgcuguuaugaaa

SEQ ID NO: 1365293 - RNA, 19 nt, Artificial Sequence
  Description of Artificial Sequence: Synthetic oligonucleotide
  Antisense strand to SEQ ID NO: 1365292
uuucauaacagcgugguga

SEQ ID NO: 1365294 - RNA, 19 nt, Artificial Sequence
  Description of Artificial Sequence: Synthetic oligonucleotide
  Sense strand starting at position 495 of SEQ ID NO: 1242681
ccacgcuguuaugaaauca

SEQ ID NO: 1365295 - RNA, 19 nt, Artificial Sequence
  Description of Artificial Sequence: Synthetic oligonucleotide
  Antisense strand to SEQ ID NO: 1365294
ugauuucauaacagcgugg

SEQ ID NO: 1365296 - RNA, 19 nt, Artificial Sequence
  Description of Artificial Sequence: Synthetic oligonucleotide
  Sense strand starting at position 530 of SEQ ID NO: 1242681
ccuaguauguaccgguaaa

SEQ ID NO: 1365297 - RNA, 19 nt, Artificial Sequence
  Description of Artificial Sequence: Synthetic oligonucleotide
  Antisense strand to SEQ ID NO: 1365296
uuuaccgguacauacuagg

SEQ ID NO: 1365298 - RNA, 19 nt, Artificial Sequence
  Description of Artificial Sequence: Synthetic oligonucleotide
  Sense strand starting at position 531 of SEQ ID NO: 1242681
cuaguauguaccgguaaau

SEQ ID NO: 1365299 - RNA, 19 nt, Artificial Sequence
  Description of Artificial Sequence: Synthetic oligonucleotide
  Antisense strand to SEQ ID NO: 1365298
auuuaccgguacauacuag

SEQ ID NO: 1365300 - RNA, 19 nt, Artificial Sequence
  Description of Artificial Sequence: Synthetic oligonucleotide
  Sense strand starting at position 712 of SEQ ID NO: 1242681
gucagaggcccuuggguaa

SEQ ID NO: 1365301 - RNA, 19 nt, Artificial Sequence
  Description of Artificial Sequence: Synthetic oligonucleotide
  Antisense strand to SEQ ID NO: 1365300
uuacccaagggccucugac

SEQ ID NO: 1365302 - RNA, 19 nt, Artificial Sequence
  Description of Artificial Sequence: Synthetic oligonucleotide
  Sense strand starting at position 723 of SEQ ID NO: 1242681
uuggguaaguccuuuccca

SEQ ID NO: 1365303 - RNA, 19 nt, Artificial Sequence
  Description of Artificial Sequence: Synthetic oligonucleotide
  Antisense strand to SEQ ID NO: 1365302
ugggaaaggacuuacccaa

SEQ ID NO: 1365304 - RNA, 19 nt, Artificial Sequence
  Description of Artificial Sequence: Synthetic oligonucleotide
  Sense strand starting at position 903 of SEQ ID NO: 1242681
ccuggaucgguuugacuca

SEQ ID NO: 1365305 - RNA, 19 nt, Artificial Sequence
  Description of Artificial Sequence: Synthetic oligonucleotide
  Antisense strand to SEQ ID NO: 1365304
ugagucaaaccgauccagg

SEQ ID NO: 1365306 - RNA, 19 nt, Artificial Sequence
  Description of Artificial Sequence: Synthetic oligonucleotide
  Sense strand starting at position 1555 of SEQ ID NO: 1242681
ccagcugcucauggaaaga

SEQ ID NO: 1365307 - RNA, 19 nt, Artificial Sequence
  Description of Artificial Sequence: Synthetic oligonucleotide
  Antisense strand to SEQ ID NO: 1365306
ucuuuccaugagcagcugg

SEQ ID NO: 1365308 - RNA, 19 nt, Artificial Sequence
  Description of Artificial Sequence: Synthetic oligonucleotide
  Sense strand starting at position 1619 of SEQ ID NO: 1242681
ccucauuuauaggagucuu

SEQ ID NO: 1365309 - RNA, 19 nt, Artificial Sequence
  Description of Artificial Sequence: Synthetic oligonucleotide
  Antisense strand to SEQ ID NO: 1365308
aagacuccuauaaaugagg

SEQ ID NO: 1365310 - RNA, 19 nt, Artificial Sequence
  Description of Artificial Sequence: Synthetic oligonucleotide
  Sense strand starting at position 1983 of SEQ ID NO: 1242681
gucauagaguccuagaaug

SEQ ID NO: 1365311 - RNA, 19 nt, Artificial Sequence
  Description of Artificial Sequence: Synthetic oligonucleotide
  Antisense strand to SEQ ID NO: 1365310
cauucuaggacucuaugac

SEQ ID NO: 1365312 - RNA, 19 nt, Artificial Sequence
  Description of Artificial Sequence: Synthetic oligonucleotide
  Sense strand starting at position 1985 of SEQ ID NO: 1242681
cauagaguccuagaauguu

SEQ ID NO: 1365313 - RNA, 19 nt, Artificial Sequence
  Description of Artificial Sequence: Synthetic oligonucleotide
  Antisense strand to SEQ ID NO: 1365312
aacauucuaggacucuaug

SEQ ID NO: 1365314 - RNA, 19 nt, Artificial Sequence
  Description of Artificial Sequence: Synthetic oligonucleotide
  Sense strand starting at position 2007 of SEQ ID NO: 1242681
cgcccagaguuccaggaaa

SEQ ID NO: 1365315 - RNA, 19 nt, Artificial Sequence
  Description of Artificial Sequence: Synthetic oligonucleotide
  Antisense strand to SEQ ID NO: 1365314
uuuccuggaacucugggcg

SEQ ID NO: 1365316 - RNA, 19 nt, Artificial Sequence
  Description of Artificial Sequence: Synthetic oligonucleotide
  Sense strand starting at position 2149 of SEQ ID NO: 1242681
cuccuuucuccuggaguca

SEQ ID NO: 1365317 - RNA, 19 nt, Artificial Sequence
  Description of Artificial Sequence: Synthetic oligonucleotide
  Antisense strand to SEQ ID NO: 1365316
ugacuccaggagaaaggag

SEQ ID NO: 1365318 - RNA, 19 nt, Artificial Sequence
  Description of Artificial Sequence: Synthetic oligonucleotide
  Sense strand starting at position 2150 of SEQ ID NO: 1242681
uccuuucuccuggagucaa

SEQ ID NO: 1365319 - RNA, 19 nt, Artificial Sequence
  Description of Artificial Sequence: Synthetic oligonucleotide
  Antisense strand to SEQ ID NO: 1365318
uugacuccaggagaaagga

SEQ ID NO: 1365320 - RNA, 19 nt, Artificial Sequence
  Description of Artificial Sequence: Synthetic oligonucleotide
  Sense strand starting at position 2393 of SEQ ID NO: 1242681
ccugcuguguggucuugua

SEQ ID NO: 1365321 - RNA, 19 nt, Artificial Sequence
  Description of Artificial Sequence: Synthetic oligonucleotide
  Antisense strand to SEQ ID NO: 1365320
uacaagaccacacagcagg

SEQ ID NO: 1365322 - RNA, 19 nt, Artificial Sequence
  Description of Artificial Sequence: Synthetic oligonucleotide
  Sense strand starting at position 2395 of SEQ ID NO: 1242681
ugcuguguggucuuguaca

SEQ ID NO: 1365323 - RNA, 19 nt, Artificial Sequence
  Description of Artificial Sequence: Synthetic oligonucleotide
  Antisense strand to SEQ ID NO: 1365322
uguacaagaccacacagca

SEQ ID NO: 1365324 - RNA, 19 nt, Artificial Sequence
  Description of Artificial Sequence: Synthetic oligonucleotide
  Sense strand starting at position 2400 of SEQ ID NO: 1242681
uguggucuuguacaaguua

SEQ ID NO: 1365325 - RNA, 19 nt, Artificial Sequence
  Description of Artificial Sequence: Synthetic oligonucleotide
  Antisense strand to SEQ ID NO: 1365324
uaacuuguacaagaccaca

SEQ ID NO: 1365326 - RNA, 19 nt, Artificial Sequence
  Description of Artificial Sequence: Synthetic oligonucleotide
  Sense strand starting at position 2460 of SEQ ID NO: 1242681
gaauuauaauagucccgau

SEQ ID NO: 1365327 - RNA, 19 nt, Artificial Sequence
  Description of Artificial Sequence: Synthetic oligonucleotide
  Antisense strand to SEQ ID NO: 1365326
aucgggacuauuauaauuc

SEQ ID NO: 1365328 - RNA, 19 nt, Artificial Sequence
  Description of Artificial Sequence: Synthetic oligonucleotide
  Sense strand starting at position 2463 of SEQ ID NO: 1242681
uuauaauagucccgauuuc

SEQ ID NO: 1365329 - RNA, 19 nt, Artificial Sequence
  Description of Artificial Sequence: Synthetic oligonucleotide
  Antisense strand to SEQ ID NO: 1365328
gaaaucgggacuauuauaa

SEQ ID NO: 1365330 - RNA, 19 nt, Artificial Sequence
  Description of Artificial Sequence: Synthetic oligonucleotide
  Sense strand starting at position 2548 of SEQ ID NO: 1242681
uccagugagcaguaauugu

SEQ ID NO: 1365331 - RNA, 19 nt, Artificial Sequence
  Description of Artificial Sequence: Synthetic oligonucleotide
  Antisense strand to SEQ ID NO: 1365330
acaauuacugcucacugga

SEQ ID NO: 1365332 - RNA, 19 nt, Artificial Sequence
  Description of Artificial Sequence: Synthetic oligonucleotide
  Sense strand starting at position 2557 of SEQ ID NO: 1242681
caguaauugucagcuacga

SEQ ID NO: 1365333 - RNA, 19 nt, Artificial Sequence
  Description of Artificial Sequence: Synthetic oligonucleotide
  Antisense strand to SEQ ID NO: 1365332
ucguagcugacaauuacug

SEQ ID NO: 1365334 - RNA, 19 nt, Artificial Sequence
  Description of Artificial Sequence: Synthetic oligonucleotide
  Sense strand starting at position 2559 of SEQ ID NO: 1242681
guaauugucagcuacgacu

SEQ ID NO: 1365335 - RNA, 19 nt, Artificial Sequence
  Description of Artificial Sequence: Synthetic oligonucleotide
  Antisense strand to SEQ ID NO: 1365334
agucguagcugacaauuac

SEQ ID NO: 1365336 - RNA, 19 nt, Artificial Sequence
  Description of Artificial Sequence: Synthetic oligonucleotide
  Sense strand starting at position 2568 of SEQ ID NO: 1242681
agcuacgacuguuguuaua

SEQ ID NO: 1365337 - RNA, 19 nt, Artificial Sequence
  Description of Artificial Sequence: Synthetic oligonucleotide
  Antisense strand to SEQ ID NO: 1365336
uauaacaacagucguagcu

SEQ ID NO: 1365338 - RNA, 19 nt, Artificial Sequence
  Description of Artificial Sequence: Synthetic oligonucleotide
  Sense strand starting at position 2570 of SEQ ID NO: 1242681
cuacgacuguuguuauaau

SEQ ID NO: 1365339 - RNA, 19 nt, Artificial Sequence
  Description of Artificial Sequence: Synthetic oligonucleotide
  Antisense strand to SEQ ID NO: 1365338
auuauaacaacagucguag

SEQ ID NO: 1365340 - RNA, 19 nt, Artificial Sequence
  Description of Artificial Sequence: Synthetic oligonucleotide
  Sense strand starting at position 2571 of SEQ ID NO: 1242681
uacgacuguuguuauaauu

SEQ ID NO: 1365341 - RNA, 19 nt, Artificial Sequence
  Description of Artificial Sequence: Synthetic oligonucleotide
  Antisense strand to SEQ ID NO: 1365340
aauuauaacaacagucgua

SEQ ID NO: 1365342 - RNA, 19 nt, Artificial Sequence
  Description of Artificial Sequence: Synthetic oligonucleotide
  Sense strand starting at position 2844 of SEQ ID NO: 1242681
gaggcuguuccagguauag

SEQ ID NO: 1365343 - RNA, 19 nt, Artificial Sequence
  Description of Artificial Sequence: Synthetic oligonucleotide
  Antisense strand to SEQ ID NO: 1365342
cuauaccuggaacagccuc

SEQ ID NO: 1365344 - RNA, 19 nt, Artificial Sequence
  Description of Artificial Sequence: Synthetic oligonucleotide
  Sense strand starting at position 2987 of SEQ ID NO: 1242681
ggaaucaugccgcgucauc

SEQ ID NO: 1365345 - RNA, 19 nt, Artificial Sequence
  Description of Artificial Sequence: Synthetic oligonucleotide
  Antisense strand to SEQ ID NO: 1365344
gaugacgcggcaugauucc

SEQ ID NO: 1365346 - RNA, 19 nt, Artificial Sequence
  Description of Artificial Sequence: Synthetic oligonucleotide
  Sense strand starting at position 2988 of SEQ ID NO: 1242681
gaaucaugccgcgucauca

SEQ ID NO: 1365347 - RNA, 19 nt, Artificial Sequence
  Description of Artificial Sequence: Synthetic oligonucleotide
  Antisense strand to SEQ ID NO: 1365346
ugaugacgcggcaugauuc

SEQ ID NO: 1365348 - RNA, 19 nt, Artificial Sequence
  Description of Artificial Sequence: Synthetic oligonucleotide
  Sense strand starting at position 2989 of SEQ ID NO: 1242681
aaucaugccgcgucaucau

SEQ ID NO: 1365349 - RNA, 19 nt, Artificial Sequence
  Description of Artificial Sequence: Synthetic oligonucleotide
  Antisense strand to SEQ ID NO: 1365348
augaugacgcggcaugauu

SEQ ID NO: 1365350 - RNA, 19 nt, Artificial Sequence
  Description of Artificial Sequence: Synthetic oligonucleotide
  Sense strand starting at position 32 of SEQ ID NO: 1242682
gugagacucuagcagagua

SEQ ID NO: 1365351 - RNA, 19 nt, Artificial Sequence
  Description of Artificial Sequence: Synthetic oligonucleotide
  Antisense strand to SEQ ID NO: 1365350
uacucugcuagagucucac

SEQ ID NO: 1365352 - RNA, 19 nt, Artificial Sequence
  Description of Artificial Sequence: Synthetic oligonucleotide
  Sense strand starting at position 71 of SEQ ID NO: 1242682
cuggguuccuccuuuguaa

SEQ ID NO: 1365353 - RNA, 19 nt, Artificial Sequence
  Description of Artificial Sequence: Synthetic oligonucleotide
  Antisense strand to SEQ ID NO: 1365352
uuacaaaggaggaacccag

SEQ ID NO: 1365354 - RNA, 19 nt, Artificial Sequence
  Description of Artificial Sequence: Synthetic oligonucleotide
  Sense strand starting at position 73 of SEQ ID NO: 1242682
ggguuccuccuuuguaaac

SEQ ID NO: 1365355 - RNA, 19 nt, Artificial Sequence
  Description of Artificial Sequence: Synthetic oligonucleotide
  Antisense strand to SEQ ID NO: 1365354
guuuacaaaggaggaaccc

SEQ ID NO: 1365356 - RNA, 19 nt, Artificial Sequence
  Description of Artificial Sequence: Synthetic oligonucleotide
  Sense strand starting at position 74 of SEQ ID NO: 1242682
gguuccuccuuuguaaaca

SEQ ID NO: 1365357 - RNA, 19 nt, Artificial Sequence
  Description of Artificial Sequence: Synthetic oligonucleotide
  Antisense strand to SEQ ID NO: 1365356
uguuuacaaaggaggaacc

SEQ ID NO: 1365358 - RNA, 19 nt, Artificial Sequence
  Description of Artificial Sequence: Synthetic oligonucleotide
  Sense strand starting at position 451 of SEQ ID NO: 1242682
agccaacagucacagagaa

SEQ ID NO: 1365359 - RNA, 19 nt, Artificial Sequence
  Description of Artificial Sequence: Synthetic oligonucleotide
  Antisense strand to SEQ ID NO: 1365358
uucucugugacuguuggcu

SEQ ID NO: 1365360 - RNA, 19 nt, Artificial Sequence
  Description of Artificial Sequence: Synthetic oligonucleotide
  Sense strand starting at position 880 of SEQ ID NO: 1242682
uuggcucagaccugagauu

SEQ ID NO: 1365361 - RNA, 19 nt, Artificial Sequence
  Description of Artificial Sequence: Synthetic oligonucleotide
  Antisense strand to SEQ ID NO: 1365360
aaucucaggucugagccaa

SEQ ID NO: 1365362 - RNA, 19 nt, Artificial Sequence
  Description of Artificial Sequence: Synthetic oligonucleotide
  Sense strand starting at position 959 of SEQ ID NO: 1242682
cgaguuuccucaucuguca

SEQ ID NO: 1365363 - RNA, 19 nt, Artificial Sequence
  Description of Artificial Sequence: Synthetic oligonucleotide
  Antisense strand to SEQ ID NO: 1365362
ugacagaugaggaaacucg

SEQ ID NO: 1365364 - RNA, 19 nt, Artificial Sequence
  Description of Artificial Sequence: Synthetic oligonucleotide
  Sense strand starting at position 1053 of SEQ ID NO: 1242682
gcgggcucaguccacaaua

SEQ ID NO: 1365365 - RNA, 19 nt, Artificial Sequence
  Description of Artificial Sequence: Synthetic oligonucleotide
  Antisense strand to SEQ ID NO: 1365364
uauuguggacugagcccgc

SEQ ID NO: 1365366 - RNA, 19 nt, Artificial Sequence
  Description of Artificial Sequence: Synthetic oligonucleotide
  Sense strand starting at position 1055 of SEQ ID NO: 1242682
gggcucaguccacaauagu

SEQ ID NO: 1365367 - RNA, 19 nt, Artificial Sequence
  Description of Artificial Sequence: Synthetic oligonucleotide
  Antisense strand to SEQ ID NO: 1365366
acuauuguggacugagccc

SEQ ID NO: 1365368 - RNA, 19 nt, Artificial Sequence
  Description of Artificial Sequence: Synthetic oligonucleotide
  Sense strand starting at position 1309 of SEQ ID NO: 1242682
cuuucuugcccugaaggga

SEQ ID NO: 1365369 - RNA, 19 nt, Artificial Sequence
  Description of Artificial Sequence: Synthetic oligonucleotide
  Antisense strand to SEQ ID NO: 1365368
ucccuucagggcaagaaag

SEQ ID NO: 1365370 - RNA, 19 nt, Artificial Sequence
  Description of Artificial Sequence: Synthetic oligonucleotide
  Sense strand starting at position 1334 of SEQ ID NO: 1242682
ucgagaacucacggucauc

SEQ ID NO: 1365371 - RNA, 19 nt, Artificial Sequence
  Description of Artificial Sequence: Synthetic oligonucleotide
  Antisense strand to SEQ ID NO: 1365370
gaugaccgugaguucucga

SEQ ID NO: 1365372 - RNA, 19 nt, Artificial Sequence
  Description of Artificial Sequence: Synthetic oligonucleotide
  Sense strand starting at position 1467 of SEQ ID NO: 1242682
aagguaguggcggaagaua

SEQ ID NO: 1365373 - RNA, 19 nt, Artificial Sequence
  Description of Artificial Sequence: Synthetic oligonucleotide
  Antisense strand to SEQ ID NO: 1365372
uaucuuccgccacuaccuu

SEQ ID NO: 1365374 - RNA, 19 nt, Artificial Sequence
  Description of Artificial Sequence: Synthetic oligonucleotide
  Sense strand starting at position 1527 of SEQ ID NO: 1242682
gggacuucgguggacgauu

SEQ ID NO: 1365375 - RNA, 19 nt, Artificial Sequence
  Description of Artificial Sequence: Synthetic oligonucleotide
  Antisense strand to SEQ ID NO: 1365374
aaucguccaccgaaguccc

SEQ ID NO: 1365376 - RNA, 19 nt, Artificial Sequence
  Description of Artificial Sequence: Synthetic oligonucleotide
  Sense strand starting at position 1556 of SEQ ID NO: 1242682
gguagaucuaagcggauug

SEQ ID NO: 1365377 - RNA, 19 nt, Artificial Sequence
  Description of Artificial Sequence: Synthetic oligonucleotide
  Antisense strand to SEQ ID NO: 1365376
caauccgcuuagaucuacc

SEQ ID NO: 1365378 - RNA, 19 nt, Artificial Sequence
  Description of Artificial Sequence: Synthetic oligonucleotide
  Sense strand starting at position 1558 of SEQ ID NO: 1242682
uagaucuaagcggauuguu

SEQ ID NO: 1365379 - RNA, 19 nt, Artificial Sequence
  Description of Artificial Sequence: Synthetic oligonucleotide
  Antisense strand to SEQ ID NO: 1365378
aacaauccgcuuagaucua

SEQ ID NO: 1365380 - RNA, 19 nt, Artificial Sequence
  Description of Artificial Sequence: Synthetic oligonucleotide
  Sense strand starting at position 1638 of SEQ ID NO: 1242682
cagagagacugagaaauau

SEQ ID NO: 1365381 - RNA, 19 nt, Artificial Sequence
  Description of Artificial Sequence: Synthetic oligonucleotide
  Antisense strand to SEQ ID NO: 1365380
auauuucucagucucucug

SEQ ID NO: 1365382 - RNA, 19 nt, Artificial Sequence
  Description of Artificial Sequence: Synthetic oligonucleotide
  Sense strand starting at position 1796 of SEQ ID NO: 1242682
ccuccuauuuggcagagau

SEQ ID NO: 1365383 - RNA, 19 nt, Artificial Sequence
  Description of Artificial Sequence: Synthetic oligonucleotide
  Antisense strand to SEQ ID NO: 1365382
aucucugccaaauaggagg

SEQ ID NO: 1365384 - RNA, 19 nt, Artificial Sequence
  Description of Artificial Sequence: Synthetic oligonucleotide
  Sense strand starting at position 3000 of SEQ ID NO: 1242682
cuguauaaucccggagggu

SEQ ID NO: 1365385 - RNA, 19 nt, Artificial Sequence
  Description of Artificial Sequence: Synthetic oligonucleotide
  Antisense strand to SEQ ID NO: 1365384
acccuccgggauuauacag

SEQ ID NO: 1365386 - RNA, 19 nt, Artificial Sequence
  Description of Artificial Sequence: Synthetic oligonucleotide
  Sense strand starting at position 3001 of SEQ ID NO: 1242682
uguauaaucccggagggug

SEQ ID NO: 1365387 - RNA, 19 nt, Artificial Sequence
  Description of Artificial Sequence: Synthetic oligonucleotide
  Antisense strand to SEQ ID NO: 1365386
cacccuccgggauuauaca

SEQ ID NO: 1365388 - RNA, 19 nt, Artificial Sequence
  Description of Artificial Sequence: Synthetic oligonucleotide
  Sense strand starting at position 3191 of SEQ ID NO: 1242682
uuucuagccuuccuugagu

SEQ ID NO: 1365389 - RNA, 19 nt, Artificial Sequence
  Description of Artificial Sequence: Synthetic oligonucleotide
  Antisense strand to SEQ ID NO: 1365388
acucaaggaaggcuagaaa

SEQ ID NO: 1365390 - RNA, 19 nt, Artificial Sequence
  Description of Artificial Sequence: Synthetic oligonucleotide
  Sense strand starting at position 3200 of SEQ ID NO: 1242682
uuccuugaguccucuguuu

SEQ ID NO: 1365391 - RNA, 19 nt, Artificial Sequence
  Description of Artificial Sequence: Synthetic oligonucleotide
  Antisense strand to SEQ ID NO: 1365390
aaacagaggacucaaggaa

SEQ ID NO: 1365392 - RNA, 19 nt, Artificial Sequence
  Description of Artificial Sequence: Synthetic oligonucleotide
  Sense strand starting at position 3340 of SEQ ID NO: 1242682
cagggucagcuugguauuu

SEQ ID NO: 1365393 - RNA, 19 nt, Artificial Sequence
  Description of Artificial Sequence: Synthetic oligonucleotide
  Antisense strand to SEQ ID NO: 1365392
aaauaccaagcugacccug

SEQ ID NO: 1365394 - RNA, 19 nt, Artificial Sequence
  Description of Artificial Sequence: Synthetic oligonucleotide
  Sense strand starting at position 3342 of SEQ ID NO: 1242682
gggucagcuugguauuuga

SEQ ID NO: 1365395 - RNA, 19 nt, Artificial Sequence
  Description of Artificial Sequence: Synthetic oligonucleotide
  Antisense strand to SEQ ID NO: 1365394
ucaaauaccaagcugaccc

SEQ ID NO: 1365396 - RNA, 19 nt, Artificial Sequence
  Description of Artificial Sequence: Synthetic oligonucleotide
  Sense strand starting at position 412 of SEQ ID NO: 1242683
gaguuaagccagugauucu

SEQ ID NO: 1365397 - RNA, 19 nt, Artificial Sequence
  Description of Artificial Sequence: Synthetic oligonucleotide
  Antisense strand to SEQ ID NO: 1365396
agaaucacuggcuuaacuc

SEQ ID NO: 1365398 - RNA, 19 nt, Artificial Sequence
  Description of Artificial Sequence: Synthetic oligonucleotide
  Sense strand starting at position 804 of SEQ ID NO: 1242683
gcuccagauuccuggccaa

SEQ ID NO: 1365399 - RNA, 19 nt, Artificial Sequence
  Description of Artificial Sequence: Synthetic oligonucleotide
  Antisense strand to SEQ ID NO: 1365398
uuggccaggaaucuggagc

SEQ ID NO: 1365400 - RNA, 19 nt, Artificial Sequence
  Description of Artificial Sequence: Synthetic oligonucleotide
  Sense strand starting at position 807 of SEQ ID NO: 1242683
ccagauuccuggccaagau

SEQ ID NO: 1365401 - RNA, 19 nt, Artificial Sequence
  Description of Artificial Sequence: Synthetic oligonucleotide
  Antisense strand to SEQ ID NO: 1365400
aucuuggccaggaaucugg

SEQ ID NO: 1365402 - RNA, 19 nt, Artificial Sequence
  Description of Artificial Sequence: Synthetic oligonucleotide
  Sense strand starting at position 965 of SEQ ID NO: 1242683
gugagacucuagcagagua

SEQ ID NO: 1365403 - RNA, 19 nt, Artificial Sequence
  Description of Artificial Sequence: Synthetic oligonucleotide
  Antisense strand to SEQ ID NO: 1365402
uacucugcuagagucucac

SEQ ID NO: 1365404 - RNA, 19 nt, Artificial Sequence
  Description of Artificial Sequence: Synthetic oligonucleotide
  Sense strand starting at position 1004 of SEQ ID NO: 1242683
cuggguuccuccuuuguaa

SEQ ID NO: 1365405 - RNA, 19 nt, Artificial Sequence
  Description of Artificial Sequence: Synthetic oligonucleotide
  Antisense strand to SEQ ID NO: 1365404
uuacaaaggaggaacccag

SEQ ID NO: 1365406 - RNA, 19 nt, Artificial Sequence
  Description of Artificial Sequence: Synthetic oligonucleotide
  Sense strand starting at position 1006 of SEQ ID NO: 1242683
ggguuccuccuuuguaaac

SEQ ID NO: 1365407 - RNA, 19 nt, Artificial Sequence
  Description of Artificial Sequence: Synthetic oligonucleotide
  Antisense strand to SEQ ID NO: 1365406
guuuacaaaggaggaaccc

SEQ ID NO: 1365408 - RNA, 19 nt, Artificial Sequence
  Description of Artificial Sequence: Synthetic oligonucleotide
  Sense strand starting at position 1007 of SEQ ID NO: 1242683
gguuccuccuuuguaaaca

SEQ ID NO: 1365409 - RNA, 19 nt, Artificial Sequence
  Description of Artificial Sequence: Synthetic oligonucleotide
  Antisense strand to SEQ ID NO: 1365408
uguuuacaaaggaggaacc

SEQ ID NO: 1365410 - RNA, 19 nt, Artificial Sequence
  Description of Artificial Sequence: Synthetic oligonucleotide
  Sense strand starting at position 1384 of SEQ ID NO: 1242683
agccaacagucacagagaa

SEQ ID NO: 1365411 - RNA, 19 nt, Artificial Sequence
  Description of Artificial Sequence: Synthetic oligonucleotide
  Antisense strand to SEQ ID NO: 1365410
uucucugugacuguuggcu

SEQ ID NO: 1365412 - RNA, 19 nt, Artificial Sequence
  Description of Artificial Sequence: Synthetic oligonucleotide
  Sense strand starting at position 1813 of SEQ ID NO: 1242683
uuggcucagaccugagauu

SEQ ID NO: 1365413 - RNA, 19 nt, Artificial Sequence
  Description of Artificial Sequence: Synthetic oligonucleotide
  Antisense strand to SEQ ID NO: 1365412
aaucucaggucugagccaa

SEQ ID NO: 1365414 - RNA, 19 nt, Artificial Sequence
  Description of Artificial Sequence: Synthetic oligonucleotide
  Sense strand starting at position 1892 of SEQ ID NO: 1242683
cgaguuuccucaucuguca

SEQ ID NO: 1365415 - RNA, 19 nt, Artificial Sequence
  Description of Artificial Sequence: Synthetic oligonucleotide
  Antisense strand to SEQ ID NO: 1365414
ugacagaugaggaaacucg

SEQ ID NO: 1365416 - RNA, 19 nt, Artificial Sequence
  Description of Artificial Sequence: Synthetic oligonucleotide
  Sense strand starting at position 1986 of SEQ ID NO: 1242683
gcgggcucaguccacaaua

SEQ ID NO: 1365417 - RNA, 19 nt, Artificial Sequence
  Description of Artificial Sequence: Synthetic oligonucleotide
  Antisense strand to SEQ ID NO: 1365416
uauuguggacugagcccgc

SEQ ID NO: 1365418 - RNA, 19 nt, Artificial Sequence
  Description of Artificial Sequence: Synthetic oligonucleotide
  Sense strand starting at position 1988 of SEQ ID NO: 1242683
gggcucaguccacaauagu

SEQ ID NO: 1365419 - RNA, 19 nt, Artificial Sequence
  Description of Artificial Sequence: Synthetic oligonucleotide
  Antisense strand to SEQ ID NO: 1365418
acuauuguggacugagccc

SEQ ID NO: 1365420 - RNA, 19 nt, Artificial Sequence
  Description of Artificial Sequence: Synthetic oligonucleotide
  Sense strand starting at position 2242 of SEQ ID NO: 1242683
cuuucuugcccugaaggga

SEQ ID NO: 1365421 - RNA, 19 nt, Artificial Sequence
  Description of Artificial Sequence: Synthetic oligonucleotide
  Antisense strand to SEQ ID NO: 1365420
ucccuucagggcaagaaag

SEQ ID NO: 1365422 - RNA, 19 nt, Artificial Sequence
  Description of Artificial Sequence: Synthetic oligonucleotide
  Sense strand starting at position 2267 of SEQ ID NO: 1242683
ucgagaacucacggucauc

SEQ ID NO: 1365423 - RNA, 19 nt, Artificial Sequence
  Description of Artificial Sequence: Synthetic oligonucleotide
  Antisense strand to SEQ ID NO: 1365422
gaugaccgugaguucucga

SEQ ID NO: 1365424 - RNA, 19 nt, Artificial Sequence
  Description of Artificial Sequence: Synthetic oligonucleotide
  Sense strand starting at position 2400 of SEQ ID NO: 1242683
aagguaguggcggaagaua

SEQ ID NO: 1365425 - RNA, 19 nt, Artificial Sequence
  Description of Artificial Sequence: Synthetic oligonucleotide
  Antisense strand to SEQ ID NO: 1365424
uaucuuccgccacuaccuu

SEQ ID NO: 1365426 - RNA, 19 nt, Artificial Sequence
  Description of Artificial Sequence: Synthetic oligonucleotide
  Sense strand starting at position 2460 of SEQ ID NO: 1242683
gggacuucgguggacgauu

SEQ ID NO: 1365427 - RNA, 19 nt, Artificial Sequence
  Description of Artificial Sequence: Synthetic oligonucleotide
  Antisense strand to SEQ ID NO: 1365426
aaucguccaccgaaguccc

SEQ ID NO: 1365428 - RNA, 19 nt, Artificial Sequence
  Description of Artificial Sequence: Synthetic oligonucleotide
  Sense strand starting at position 2489 of SEQ ID NO: 1242683
gguagaucuaagcggauug

SEQ ID NO: 1365429 - RNA, 19 nt, Artificial Sequence
  Description of Artificial Sequence: Synthetic oligonucleotide
  Antisense strand to SEQ ID NO: 1365428
caauccgcuuagaucuacc

SEQ ID NO: 1365430 - RNA, 19 nt, Artificial Sequence
  Description of Artificial Sequence: Synthetic oligonucleotide
  Sense strand starting at position 2491 of SEQ ID NO: 1242683
uagaucuaagcggauuguu

SEQ ID NO: 1365431 - RNA, 19 nt, Artificial Sequence
  Description of Artificial Sequence: Synthetic oligonucleotide
  Antisense strand to SEQ ID NO: 1365430
aacaauccgcuuagaucua

SEQ ID NO: 1365432 - RNA, 19 nt, Artificial Sequence
  Description of Artificial Sequence: Synthetic oligonucleotide
  Sense strand starting at position 2571 of SEQ ID NO: 1242683
cagagagacugagaaauau

SEQ ID NO: 1365433 - RNA, 19 nt, Artificial Sequence
  Description of Artificial Sequence: Synthetic oligonucleotide
  Antisense strand to SEQ ID NO: 1365432
auauuucucagucucucug

SEQ ID NO: 1365434 - RNA, 19 nt, Artificial Sequence
  Description of Artificial Sequence: Synthetic oligonucleotide
  Sense strand starting at position 2729 of SEQ ID NO: 1242683
ccuccuauuuggcagagau

SEQ ID NO: 1365435 - RNA, 19 nt, Artificial Sequence
  Description of Artificial Sequence: Synthetic oligonucleotide
  Antisense strand to SEQ ID NO: 1365434
aucucugccaaauaggagg

SEQ ID NO: 1365436 - RNA, 19 nt, Artificial Sequence
  Description of Artificial Sequence: Synthetic oligonucleotide
  Sense strand starting at position 3933 of SEQ ID NO: 1242683
cuguauaaucccggagggu

SEQ ID NO: 1365437 - RNA, 19 nt, Artificial Sequence
  Description of Artificial Sequence: Synthetic oligonucleotide
  Antisense strand to SEQ ID NO: 1365436
acccuccgggauuauacag

SEQ ID NO: 1365438 - RNA, 19 nt, Artificial Sequence
  Description of Artificial Sequence: Synthetic oligonucleotide
  Sense strand starting at position 3934 of SEQ ID NO: 1242683
uguauaaucccggagggug

SEQ ID NO: 1365439 - RNA, 19 nt, Artificial Sequence
  Description of Artificial Sequence: Synthetic oligonucleotide
  Antisense strand to SEQ ID NO: 1365438
cacccuccgggauuauaca

SEQ ID NO: 1365440 - RNA, 19 nt, Artificial Sequence
  Description of Artificial Sequence: Synthetic oligonucleotide
  Sense strand starting at position 100 of SEQ ID NO: 1242684
ucagcuguacuuuacugaa

SEQ ID NO: 1365441 - RNA, 19 nt, Artificial Sequence
  Description of Artificial Sequence: Synthetic oligonucleotide
  Antisense strand to SEQ ID NO: 1365440
uucaguaaaguacagcuga

SEQ ID NO: 1365442 - RNA, 19 nt, Artificial Sequence
  Description of Artificial Sequence: Synthetic oligonucleotide
  Sense strand starting at position 103 of SEQ ID NO: 1242684
gcuguacuuuacugaauca

SEQ ID NO: 1365443 - RNA, 19 nt, Artificial Sequence
  Description of Artificial Sequence: Synthetic oligonucleotide
  Antisense strand to SEQ ID NO: 1365442
ugauucaguaaaguacagc

SEQ ID NO: 1365444 - RNA, 19 nt, Artificial Sequence
  Description of Artificial Sequence: Synthetic oligonucleotide
  Sense strand starting at position 400 of SEQ ID NO: 1242684
guccaagacugcggucauu

SEQ ID NO: 1365445 - RNA, 19 nt, Artificial Sequence
  Description of Artificial Sequence: Synthetic oligonucleotide
  Antisense strand to SEQ ID NO: 1365444
aaugaccgcagucuuggac

SEQ ID NO: 1365446 - RNA, 19 nt, Artificial Sequence
  Description of Artificial Sequence: Synthetic oligonucleotide
  Sense strand starting at position 409 of SEQ ID NO: 1242684
ugcggucauugcuggcauu

SEQ ID NO: 1365447 - RNA, 19 nt, Artificial Sequence
  Description of Artificial Sequence: Synthetic oligonucleotide
  Antisense strand to SEQ ID NO: 1365446
aaugccagcaaugaccgca

SEQ ID NO: 1365448 - RNA, 19 nt, Artificial Sequence
  Description of Artificial Sequence: Synthetic oligonucleotide
  Sense strand starting at position 410 of SEQ ID NO: 1242684
gcggucauugcuggcauuu

SEQ ID NO: 1365449 - RNA, 19 nt, Artificial Sequence
  Description of Artificial Sequence: Synthetic oligonucleotide
  Antisense strand to SEQ ID NO: 1365448
aaaugccagcaaugaccgc

SEQ ID NO: 1365450 - RNA, 19 nt, Artificial Sequence
  Description of Artificial Sequence: Synthetic oligonucleotide
  Sense strand starting at position 412 of SEQ ID NO: 1242684
ggucauugcuggcauuuac

SEQ ID NO: 1365451 - RNA, 19 nt, Artificial Sequence
  Description of Artificial Sequence: Synthetic oligonucleotide
  Antisense strand to SEQ ID NO: 1365450
guaaaugccagcaaugacc

SEQ ID NO: 1365452 - RNA, 19 nt, Artificial Sequence
  Description of Artificial Sequence: Synthetic oligonucleotide
  Sense strand starting at position 542 of SEQ ID NO: 1242684
uggaguugucuguguccaa

SEQ ID NO: 1365453 - RNA, 19 nt, Artificial Sequence
  Description of Artificial Sequence: Synthetic oligonucleotide
  Antisense strand to SEQ ID NO: 1365452
uuggacacagacaacucca

SEQ ID NO: 1365454 - RNA, 19 nt, Artificial Sequence
  Description of Artificial Sequence: Synthetic oligonucleotide
  Sense strand starting at position 543 of SEQ ID NO: 1242684
ggaguugucuguguccaag

SEQ ID NO: 1365455 - RNA, 19 nt, Artificial Sequence
  Description of Artificial Sequence: Synthetic oligonucleotide
  Antisense strand to SEQ ID NO: 1365454
cuuggacacagacaacucc

SEQ ID NO: 1365456 - RNA, 19 nt, Artificial Sequence
  Description of Artificial Sequence: Synthetic oligonucleotide
  Sense strand starting at position 1392 of SEQ ID NO: 1242684
cccugcaaagcguguuauu

SEQ ID NO: 1365457 - RNA, 19 nt, Artificial Sequence
  Description of Artificial Sequence: Synthetic oligonucleotide
  Antisense strand to SEQ ID NO: 1365456
aauaacacgcuuugcaggg

SEQ ID NO: 1365458 - RNA, 19 nt, Artificial Sequence
  Description of Artificial Sequence: Synthetic oligonucleotide
  Sense strand starting at position 1393 of SEQ ID NO: 1242684
ccugcaaagcguguuauua

SEQ ID NO: 1365459 - RNA, 19 nt, Artificial Sequence
  Description of Artificial Sequence: Synthetic oligonucleotide
  Antisense strand to SEQ ID NO: 1365458
uaauaacacgcuuugcagg

SEQ ID NO: 1365460 - RNA, 19 nt, Artificial Sequence
  Description of Artificial Sequence: Synthetic oligonucleotide
  Sense strand starting at position 1395 of SEQ ID NO: 1242684
ugcaaagcguguuauuaaa

SEQ ID NO: 1365461 - RNA, 19 nt, Artificial Sequence
  Description of Artificial Sequence: Synthetic oligonucleotide
  Antisense strand to SEQ ID NO: 1365460
uuuaauaacacgcuuugca

SEQ ID NO: 1365462 - RNA, 19 nt, Artificial Sequence
  Description of Artificial Sequence: Synthetic oligonucleotide
  Sense strand starting at position 2626 of SEQ ID NO: 1242684
ggaggugucgagggauugu

SEQ ID NO: 1365463 - RNA, 19 nt, Artificial Sequence
  Description of Artificial Sequence: Synthetic oligonucleotide
  Antisense strand to SEQ ID NO: 1365462
acaaucccucgacaccucc

SEQ ID NO: 1365464 - RNA, 19 nt, Artificial Sequence
  Description of Artificial Sequence: Synthetic oligonucleotide
  Sense strand starting at position 2647 of SEQ ID NO: 1242684
agaggaaucucccaauaau

SEQ ID NO: 1365465 - RNA, 19 nt, Artificial Sequence
  Description of Artificial Sequence: Synthetic oligonucleotide
  Antisense strand to SEQ ID NO: 1365464
auuauugggagauuccucu

SEQ ID NO: 1365466 - RNA, 19 nt, Artificial Sequence
  Description of Artificial Sequence: Synthetic oligonucleotide
  Sense strand starting at position 2660 of SEQ ID NO: 1242684
aauaaugaauucgguguca

SEQ ID NO: 1365467 - RNA, 19 nt, Artificial Sequence
  Description of Artificial Sequence: Synthetic oligonucleotide
  Antisense strand to SEQ ID NO: 1365466
ugacaccgaauucauuauu

SEQ ID NO: 1365468 - RNA, 19 nt, Artificial Sequence
  Description of Artificial Sequence: Synthetic oligonucleotide
  Sense strand starting at position 2662 of SEQ ID NO: 1242684
uaaugaauucggugucagg

SEQ ID NO: 1365469 - RNA, 19 nt, Artificial Sequence
  Description of Artificial Sequence: Synthetic oligonucleotide
  Antisense strand to SEQ ID NO: 1365468
ccugacaccgaauucauua

SEQ ID NO: 1365470 - RNA, 19 nt, Artificial Sequence
  Description of Artificial Sequence: Synthetic oligonucleotide
  Sense strand starting at position 2665 of SEQ ID NO: 1242684
ugaauucggugucagggaa

SEQ ID NO: 1365471 - RNA, 19 nt, Artificial Sequence
  Description of Artificial Sequence: Synthetic oligonucleotide
  Antisense strand to SEQ ID NO: 1365470
uucccugacaccgaauuca

SEQ ID NO: 1365472 - RNA, 19 nt, Artificial Sequence
  Description of Artificial Sequence: Synthetic oligonucleotide
  Sense strand starting at position 2712 of SEQ ID NO: 1242684
cugcuccucuccgcaaaua

SEQ ID NO: 1365473 - RNA, 19 nt, Artificial Sequence
  Description of Artificial Sequence: Synthetic oligonucleotide
  Antisense strand to SEQ ID NO: 1365472
uauuugcggagaggagcag

SEQ ID NO: 1365474 - RNA, 19 nt, Artificial Sequence
  Description of Artificial Sequence: Synthetic oligonucleotide
  Sense strand starting at position 2713 of SEQ ID NO: 1242684
ugcuccucuccgcaaauaa

SEQ ID NO: 1365475 - RNA, 19 nt, Artificial Sequence
  Description of Artificial Sequence: Synthetic oligonucleotide
  Antisense strand to SEQ ID NO: 1365474
uuauuugcggagaggagca

SEQ ID NO: 1365476 - RNA, 19 nt, Artificial Sequence
  Description of Artificial Sequence: Synthetic oligonucleotide
  Sense strand starting at position 3046 of SEQ ID NO: 1242684
gcauucuagaggcagauca

SEQ ID NO: 1365477 - RNA, 19 nt, Artificial Sequence
  Description of Artificial Sequence: Synthetic oligonucleotide
  Antisense strand to SEQ ID NO: 1365476
ugaucugccucuagaaugc

SEQ ID NO: 1365478 - RNA, 19 nt, Artificial Sequence
  Description of Artificial Sequence: Synthetic oligonucleotide
  Sense strand starting at position 3147 of SEQ ID NO: 1242684
gcacccauucuaugaggca

SEQ ID NO: 1365479 - RNA, 19 nt, Artificial Sequence
  Description of Artificial Sequence: Synthetic oligonucleotide
  Antisense strand to SEQ ID NO: 1365478
ugccucauagaaugggugc

SEQ ID NO: 1365480 - RNA, 19 nt, Artificial Sequence
  Description of Artificial Sequence: Synthetic oligonucleotide
  Sense strand starting at position 3441 of SEQ ID NO: 1242684
cuggucaccuccuagauga

SEQ ID NO: 1365481 - RNA, 19 nt, Artificial Sequence
  Description of Artificial Sequence: Synthetic oligonucleotide
  Antisense strand to SEQ ID NO: 1365480
ucaucuaggaggugaccag

SEQ ID NO: 1365482 - RNA, 19 nt, Artificial Sequence
  Description of Artificial Sequence: Synthetic oligonucleotide
  Sense strand starting at position 3531 of SEQ ID NO: 1242684
gucccagagucuugagguu

SEQ ID NO: 1365483 - RNA, 19 nt, Artificial Sequence
  Description of Artificial Sequence: Synthetic oligonucleotide
  Antisense strand to SEQ ID NO: 1365482
aaccucaagacucugggac

SEQ ID NO: 1365484 - RNA, 19 nt, Artificial Sequence
  Description of Artificial Sequence: Synthetic oligonucleotide
  Sense strand starting at position 3537 of SEQ ID NO: 1242684
gagucuugagguuguaagu

SEQ ID NO: 1365485 - RNA, 19 nt, Artificial Sequence
  Description of Artificial Sequence: Synthetic oligonucleotide
  Antisense strand to SEQ ID NO: 1365484
acuuacaaccucaagacuc

SEQ ID NO: 1365486 - RNA, 19 nt, Artificial Sequence
  Description of Artificial Sequence: Synthetic oligonucleotide
  Sense strand starting at position 3546 of SEQ ID NO: 1242684
gguuguaagucugggcuuu

SEQ ID NO: 1365487 - RNA, 19 nt, Artificial Sequence
  Description of Artificial Sequence: Synthetic oligonucleotide
  Antisense strand to SEQ ID NO: 1365486
aaagcccagacuuacaacc

SEQ ID NO: 1365488 - RNA, 19 nt, Artificial Sequence
  Description of Artificial Sequence: Synthetic oligonucleotide
  Sense strand starting at position 3595 of SEQ ID NO: 1242684
cccucuuagugguuuguga

SEQ ID NO: 1365489 - RNA, 19 nt, Artificial Sequence
  Description of Artificial Sequence: Synthetic oligonucleotide
  Antisense strand to SEQ ID NO: 1365488
ucacaaaccacuaagaggg

SEQ ID NO: 1365490 - RNA, 19 nt, Artificial Sequence
  Description of Artificial Sequence: Synthetic oligonucleotide
  Sense strand starting at position 3599 of SEQ ID NO: 1242684
cuuagugguuugugaccau

SEQ ID NO: 1365491 - RNA, 19 nt, Artificial Sequence
  Description of Artificial Sequence: Synthetic oligonucleotide
  Antisense strand to SEQ ID NO: 1365490
auggucacaaaccacuaag

SEQ ID NO: 1365492 - RNA, 19 nt, Artificial Sequence
  Description of Artificial Sequence: Synthetic oligonucleotide
  Sense strand starting at position 3602 of SEQ ID NO: 1242684
agugguuugugaccaugag

SEQ ID NO: 1365493 - RNA, 19 nt, Artificial Sequence
  Description of Artificial Sequence: Synthetic oligonucleotide
  Antisense strand to SEQ ID NO: 1365492
cucauggucacaaaccacu

SEQ ID NO: 1365494 - RNA, 19 nt, Artificial Sequence
  Description of Artificial Sequence: Synthetic oligonucleotide
  Sense strand starting at position 3973 of SEQ ID NO: 1242684
gaggauaaauugugauacu

SEQ ID NO: 1365495 - RNA, 19 nt, Artificial Sequence
  Description of Artificial Sequence: Synthetic oligonucleotide
  Antisense strand to SEQ ID NO: 1365494
aguaucacaauuuauccuc

SEQ ID NO: 1365496 - RNA, 19 nt, Artificial Sequence
  Description of Artificial Sequence: Synthetic oligonucleotide
  Sense strand starting at position 3974 of SEQ ID NO: 1242684
aggauaaauugugauacua

SEQ ID NO: 1365497 - RNA, 19 nt, Artificial Sequence
  Description of Artificial Sequence: Synthetic oligonucleotide
  Antisense strand to SEQ ID NO: 1365496
uaguaucacaauuuauccu

SEQ ID NO: 1365498 - RNA, 19 nt, Artificial Sequence
  Description of Artificial Sequence: Synthetic oligonucleotide
  Sense strand starting at position 360 of SEQ ID NO: 1242685
ucggaagggucugaaccau

SEQ ID NO: 1365499 - RNA, 19 nt, Artificial Sequence
  Description of Artificial Sequence: Synthetic oligonucleotide
  Antisense strand to SEQ ID NO: 1365498
augguucagacccuuccga

SEQ ID NO: 1365500 - RNA, 19 nt, Artificial Sequence
  Description of Artificial Sequence: Synthetic oligonucleotide
  Sense strand starting at position 516 of SEQ ID NO: 1242685
gucacccauucgggagaaa

SEQ ID NO: 1365501 - RNA, 19 nt, Artificial Sequence
  Description of Artificial Sequence: Synthetic oligonucleotide
  Antisense strand to SEQ ID NO: 1365500
uuucucccgaaugggugac

SEQ ID NO: 1365502 - RNA, 19 nt, Artificial Sequence
  Description of Artificial Sequence: Synthetic oligonucleotide
  Sense strand starting at position 594 of SEQ ID NO: 1242685
ggaaguuccugcucacauc

SEQ ID NO: 1365503 - RNA, 19 nt, Artificial Sequence
  Description of Artificial Sequence: Synthetic oligonucleotide
  Antisense strand to SEQ ID NO: 1365502
gaugugagcaggaacuucc

SEQ ID NO: 1365504 - RNA, 19 nt, Artificial Sequence
  Description of Artificial Sequence: Synthetic oligonucleotide
  Sense strand starting at position 702 of SEQ ID NO: 1242685
gaauguggucuccagagau

SEQ ID NO: 1365505 - RNA, 19 nt, Artificial Sequence
  Description of Artificial Sequence: Synthetic oligonucleotide
  Antisense strand to SEQ ID NO: 1365504
aucucuggagaccacauuc

SEQ ID NO: 1365506 - RNA, 19 nt, Artificial Sequence
  Description of Artificial Sequence: Synthetic oligonucleotide
  Sense strand starting at position 819 of SEQ ID NO: 1242685
cugugagcuccugaagguu

SEQ ID NO: 1365507 - RNA, 19 nt, Artificial Sequence
  Description of Artificial Sequence: Synthetic oligonucleotide
  Antisense strand to SEQ ID NO: 1365506
aaccuucaggagcucacag

SEQ ID NO: 1365508 - RNA, 19 nt, Artificial Sequence
  Description of Artificial Sequence: Synthetic oligonucleotide
  Sense strand starting at position 919 of SEQ ID NO: 1242685
ggauccuuguccugggacu

SEQ ID NO: 1365509 - RNA, 19 nt, Artificial Sequence
  Description of Artificial Sequence: Synthetic oligonucleotide
  Antisense strand to SEQ ID NO: 1365508
agucccaggacaaggaucc

SEQ ID NO: 1365510 - RNA, 19 nt, Artificial Sequence
  Description of Artificial Sequence: Synthetic oligonucleotide
  Sense strand starting at position 920 of SEQ ID NO: 1242685
gauccuuguccugggacuu

SEQ ID NO: 1365511 - RNA, 19 nt, Artificial Sequence
  Description of Artificial Sequence: Synthetic oligonucleotide
  Antisense strand to SEQ ID NO: 1365510
aagucccaggacaaggauc

SEQ ID NO: 1365512 - RNA, 19 nt, Artificial Sequence
  Description of Artificial Sequence: Synthetic oligonucleotide
  Sense strand starting at position 1060 of SEQ ID NO: 1242685
uggaaucguuccucggaca

SEQ ID NO: 1365513 - RNA, 19 nt, Artificial Sequence
  Description of Artificial Sequence: Synthetic oligonucleotide
  Antisense strand to SEQ ID NO: 1365512
uguccgaggaacgauucca

SEQ ID NO: 1365514 - RNA, 19 nt, Artificial Sequence
  Description of Artificial Sequence: Synthetic oligonucleotide
  Sense strand starting at position 1161 of SEQ ID NO: 1242685
ccugcugugaggugucaca

SEQ ID NO: 1365515 - RNA, 19 nt, Artificial Sequence
  Description of Artificial Sequence: Synthetic oligonucleotide
  Antisense strand to SEQ ID NO: 1365514
ugugacaccucacagcagg

SEQ ID NO: 1365516 - RNA, 19 nt, Artificial Sequence
  Description of Artificial Sequence: Synthetic oligonucleotide
  Sense strand starting at position 1405 of SEQ ID NO: 1242685
uggcccuguugauaucuga

SEQ ID NO: 1365517 - RNA, 19 nt, Artificial Sequence
  Description of Artificial Sequence: Synthetic oligonucleotide
  Antisense strand to SEQ ID NO: 1365516
ucagauaucaacagggcca

SEQ ID NO: 1365518 - RNA, 19 nt, Artificial Sequence
  Description of Artificial Sequence: Synthetic oligonucleotide
  Sense strand starting at position 1414 of SEQ ID NO: 1242685
ugauaucugaggugaguca

SEQ ID NO: 1365519 - RNA, 19 nt, Artificial Sequence
  Description of Artificial Sequence: Synthetic oligonucleotide
  Antisense strand to SEQ ID NO: 1365518
ugacucaccucagauauca

SEQ ID NO: 1365520 - RNA, 19 nt, Artificial Sequence
  Description of Artificial Sequence: Synthetic oligonucleotide
  Sense strand starting at position 2502 of SEQ ID NO: 1242685
ccugaccuguccucaaagu

SEQ ID NO: 1365521 - RNA, 19 nt, Artificial Sequence
  Description of Artificial Sequence: Synthetic oligonucleotide
  Antisense strand to SEQ ID NO: 1365520
acuuugaggacaggucagg

SEQ ID NO: 1365522 - RNA, 19 nt, Artificial Sequence
  Description of Artificial Sequence: Synthetic oligonucleotide
  Sense strand starting at position 2503 of SEQ ID NO: 1242685
cugaccuguccucaaagua

SEQ ID NO: 1365523 - RNA, 19 nt, Artificial Sequence
  Description of Artificial Sequence: Synthetic oligonucleotide
  Antisense strand to SEQ ID NO: 1365522
uacuuugaggacaggucag

SEQ ID NO: 1365524 - RNA, 19 nt, Artificial Sequence
  Description of Artificial Sequence: Synthetic oligonucleotide
  Sense strand starting at position 2706 of SEQ ID NO: 1242685
gcuucuccagucugggaaa

SEQ ID NO: 1365525 - RNA, 19 nt, Artificial Sequence
  Description of Artificial Sequence: Synthetic oligonucleotide
  Antisense strand to SEQ ID NO: 1365524
uuucccagacuggagaagc

SEQ ID NO: 1365526 - RNA, 19 nt, Artificial Sequence
  Description of Artificial Sequence: Synthetic oligonucleotide
  Sense strand starting at position 2707 of SEQ ID NO: 1242685
cuucuccagucugggaaau

SEQ ID NO: 1365527 - RNA, 19 nt, Artificial Sequence
  Description of Artificial Sequence: Synthetic oligonucleotide
  Antisense strand to SEQ ID NO: 1365526
auuucccagacuggagaag

SEQ ID NO: 1365528 - RNA, 19 nt, Artificial Sequence
  Description of Artificial Sequence: Synthetic oligonucleotide
  Sense strand starting at position 2708 of SEQ ID NO: 1242685
uucuccagucugggaaauu

SEQ ID NO: 1365529 - RNA, 19 nt, Artificial Sequence
  Description of Artificial Sequence: Synthetic oligonucleotide
  Antisense strand to SEQ ID NO: 1365528
aauuucccagacuggagaa

SEQ ID NO: 1365530 - RNA, 19 nt, Artificial Sequence
  Description of Artificial Sequence: Synthetic oligonucleotide
  Sense strand starting at position 2709 of SEQ ID NO: 1242685
ucuccagucugggaaauuc

SEQ ID NO: 1365531 - RNA, 19 nt, Artificial Sequence
  Description of Artificial Sequence: Synthetic oligonucleotide
  Antisense strand to SEQ ID NO: 1365530
gaauuucccagacuggaga

SEQ ID NO: 1365532 - RNA, 19 nt, Artificial Sequence
  Description of Artificial Sequence: Synthetic oligonucleotide
  Sense strand starting at position 2740 of SEQ ID NO: 1242685
cagagcacucuugggacua

SEQ ID NO: 1365533 - RNA, 19 nt, Artificial Sequence
  Description of Artificial Sequence: Synthetic oligonucleotide
  Antisense strand to SEQ ID NO: 1365532
uagucccaagagugcucug

SEQ ID NO: 1365534 - RNA, 19 nt, Artificial Sequence
  Description of Artificial Sequence: Synthetic oligonucleotide
  Sense strand starting at position 3018 of SEQ ID NO: 1242685
acgggcaucugugcuauuu

SEQ ID NO: 1365535 - RNA, 19 nt, Artificial Sequence
  Description of Artificial Sequence: Synthetic oligonucleotide
  Antisense strand to SEQ ID NO: 1365534
aaauagcacagaugcccgu

SEQ ID NO: 1365536 - RNA, 19 nt, Artificial Sequence
  Description of Artificial Sequence: Synthetic oligonucleotide
  Sense strand starting at position 3063 of SEQ ID NO: 1242685
ucacguuugcacgcaguua

SEQ ID NO: 1365537 - RNA, 19 nt, Artificial Sequence
  Description of Artificial Sequence: Synthetic oligonucleotide
  Antisense strand to SEQ ID NO: 1365536
uaacugcgugcaaacguga

SEQ ID NO: 1365538 - RNA, 19 nt, Artificial Sequence
  Description of Artificial Sequence: Synthetic oligonucleotide
  Sense strand starting at position 3064 of SEQ ID NO: 1242685
cacguuugcacgcaguuaa

SEQ ID NO: 1365539 - RNA, 19 nt, Artificial Sequence
  Description of Artificial Sequence: Synthetic oligonucleotide
  Antisense strand to SEQ ID NO: 1365538
uuaacugcgugcaaacgug

SEQ ID NO: 1365540 - RNA, 19 nt, Artificial Sequence
  Description of Artificial Sequence: Synthetic oligonucleotide
  Sense strand starting at position 3143 of SEQ ID NO: 1242685
gggucucccugucccaaua

SEQ ID NO: 1365541 - RNA, 19 nt, Artificial Sequence
  Description of Artificial Sequence: Synthetic oligonucleotide
  Antisense strand to SEQ ID NO: 1365540
uauugggacagggagaccc

SEQ ID NO: 1365542 - RNA, 19 nt, Artificial Sequence
  Description of Artificial Sequence: Synthetic oligonucleotide
  Sense strand starting at position 3156 of SEQ ID NO: 1242685
ccaauagucgagugucuuu

SEQ ID NO: 1365543 - RNA, 19 nt, Artificial Sequence
  Description of Artificial Sequence: Synthetic oligonucleotide
  Antisense strand to SEQ ID NO: 1365542
aaagacacucgacuauugg

SEQ ID NO: 1365544 - RNA, 19 nt, Artificial Sequence
  Description of Artificial Sequence: Synthetic oligonucleotide
  Sense strand starting at position 3161 of SEQ ID NO: 1242685
agucgagugucuuucucga

SEQ ID NO: 1365545 - RNA, 19 nt, Artificial Sequence
  Description of Artificial Sequence: Synthetic oligonucleotide
  Antisense strand to SEQ ID NO: 1365544
ucgagaaagacacucgacu

SEQ ID NO: 1365546 - RNA, 19 nt, Artificial Sequence
  Description of Artificial Sequence: Synthetic oligonucleotide
  Sense strand starting at position 3163 of SEQ ID NO: 1242685
ucgagugucuuucucgagu

SEQ ID NO: 1365547 - RNA, 19 nt, Artificial Sequence
  Description of Artificial Sequence: Synthetic oligonucleotide
  Antisense strand to SEQ ID NO: 1365546
acucgagaaagacacucga

SEQ ID NO: 1365548 - RNA, 19 nt, Artificial Sequence
  Description of Artificial Sequence: Synthetic oligonucleotide
  Sense strand starting at position 3165 of SEQ ID NO: 1242685
gagugucuuucucgaguug

SEQ ID NO: 1365549 - RNA, 19 nt, Artificial Sequence
  Description of Artificial Sequence: Synthetic oligonucleotide
  Antisense strand to SEQ ID NO: 1365548
caacucgagaaagacacuc

SEQ ID NO: 1365550 - RNA, 19 nt, Artificial Sequence
  Description of Artificial Sequence: Synthetic oligonucleotide
  Sense strand starting at position 3167 of SEQ ID NO: 1242685
gugucuuucucgaguuggu

SEQ ID NO: 1365551 - RNA, 19 nt, Artificial Sequence
  Description of Artificial Sequence: Synthetic oligonucleotide
  Antisense strand to SEQ ID NO: 1365550
accaacucgagaaagacac

SEQ ID NO: 1365552 - RNA, 19 nt, Artificial Sequence
  Description of Artificial Sequence: Synthetic oligonucleotide
  Sense strand starting at position 3174 of SEQ ID NO: 1242685
ucucgaguuggugacaaca

SEQ ID NO: 1365553 - RNA, 19 nt, Artificial Sequence
  Description of Artificial Sequence: Synthetic oligonucleotide
  Antisense strand to SEQ ID NO: 1365552
uguugucaccaacucgaga

SEQ ID NO: 1365554 - RNA, 19 nt, Artificial Sequence
  Description of Artificial Sequence: Synthetic oligonucleotide
  Sense strand starting at position 3510 of SEQ ID NO: 1242685
cagcguuuccgggagugga

SEQ ID NO: 1365555 - RNA, 19 nt, Artificial Sequence
  Description of Artificial Sequence: Synthetic oligonucleotide
  Antisense strand to SEQ ID NO: 1365554
uccacucccggaaacgcug

SEQ ID NO: 1365556 - RNA, 19 nt, Artificial Sequence
  Description of Artificial Sequence: Synthetic oligonucleotide
  Sense strand starting at position 3591 of SEQ ID NO: 1242685
gucugugucagugccuauu

SEQ ID NO: 1365557 - RNA, 19 nt, Artificial Sequence
  Description of Artificial Sequence: Synthetic oligonucleotide
  Antisense strand to SEQ ID NO: 1365556
aauaggcacugacacagac

SEQ ID NO: 1365558 - RNA, 19 nt, Artificial Sequence
  Description of Artificial Sequence: Synthetic oligonucleotide
  Sense strand starting at position 3614 of SEQ ID NO: 1242685
agcugugugcagugagagu

SEQ ID NO: 1365559 - RNA, 19 nt, Artificial Sequence
  Description of Artificial Sequence: Synthetic oligonucleotide
  Antisense strand to SEQ ID NO: 1365558
acucucacugcacacagcu

SEQ ID NO: 1365560 - RNA, 19 nt, Artificial Sequence
  Description of Artificial Sequence: Synthetic oligonucleotide
  Sense strand starting at position 3853 of SEQ ID NO: 1242685
cgucuugccuggugucuaa

SEQ ID NO: 1365561 - RNA, 19 nt, Artificial Sequence
  Description of Artificial Sequence: Synthetic oligonucleotide
  Antisense strand to SEQ ID NO: 1365560
uuagacaccaggcaagacg

SEQ ID NO: 1365562 - RNA, 19 nt, Artificial Sequence
  Description of Artificial Sequence: Synthetic oligonucleotide
  Sense strand starting at position 3909 of SEQ ID NO: 1242685
agaagaaaguugcccacaa

SEQ ID NO: 1365563 - RNA, 19 nt, Artificial Sequence
  Description of Artificial Sequence: Synthetic oligonucleotide
  Antisense strand to SEQ ID NO: 1365562
uugugggcaacuuucuucu

SEQ ID NO: 1365564 - RNA, 19 nt, Artificial Sequence
  Description of Artificial Sequence: Synthetic oligonucleotide
  Sense strand starting at position 3911 of SEQ ID NO: 1242685
aagaaaguugcccacaagu

SEQ ID NO: 1365565 - RNA, 19 nt, Artificial Sequence
  Description of Artificial Sequence: Synthetic oligonucleotide
  Antisense strand to SEQ ID NO: 1365564
acuugugggcaacuuucuu

SEQ ID NO: 1365566 - RNA, 19 nt, Artificial Sequence
  Description of Artificial Sequence: Synthetic oligonucleotide
  Sense strand starting at position 3913 of SEQ ID NO: 1242685
gaaaguugcccacaaguug

SEQ ID NO: 1365567 - RNA, 19 nt, Artificial Sequence
  Description of Artificial Sequence: Synthetic oligonucleotide
  Antisense strand to SEQ ID NO: 1365566
caacuugugggcaacuuuc

SEQ ID NO: 1365568 - RNA, 19 nt, Artificial Sequence
  Description of Artificial Sequence: Synthetic oligonucleotide
  Sense strand starting at position 195 of SEQ ID NO: 1242686
ccggaagacugauccugau

SEQ ID NO: 1365569 - RNA, 19 nt, Artificial Sequence
  Description of Artificial Sequence: Synthetic oligonucleotide
  Antisense strand to SEQ ID NO: 1365568
aucaggaucagucuuccgg

SEQ ID NO: 1365570 - RNA, 19 nt, Artificial Sequence
  Description of Artificial Sequence: Synthetic oligonucleotide
  Sense strand starting at position 199 of SEQ ID NO: 1242686
aagacugauccugaugcga

SEQ ID NO: 1365571 - RNA, 19 nt, Artificial Sequence
  Description of Artificial Sequence: Synthetic oligonucleotide
  Antisense strand to SEQ ID NO: 1365570
ucgcaucaggaucagucuu

SEQ ID NO: 1365572 - RNA, 19 nt, Artificial Sequence
  Description of Artificial Sequence: Synthetic oligonucleotide
  Sense strand starting at position 201 of SEQ ID NO: 1242686
gacugauccugaugcgaca

SEQ ID NO: 1365573 - RNA, 19 nt, Artificial Sequence
  Description of Artificial Sequence: Synthetic oligonucleotide
  Antisense strand to SEQ ID NO: 1365572
ugucgcaucaggaucaguc

SEQ ID NO: 1365574 - RNA, 19 nt, Artificial Sequence
  Description of Artificial Sequence: Synthetic oligonucleotide
  Sense strand starting at position 302 of SEQ ID NO: 1242686
ccuuucaguguggaagagu

SEQ ID NO: 1365575 - RNA, 19 nt, Artificial Sequence
  Description of Artificial Sequence: Synthetic oligonucleotide
  Antisense strand to SEQ ID NO: 1365574
acucuuccacacugaaagg

SEQ ID NO: 1365576 - RNA, 19 nt, Artificial Sequence
  Description of Artificial Sequence: Synthetic oligonucleotide
  Sense strand starting at position 446 of SEQ ID NO: 1242686
ggaaguaucugacucccaa

SEQ ID NO: 1365577 - RNA, 19 nt, Artificial Sequence
  Description of Artificial Sequence: Synthetic oligonucleotide
  Antisense strand to SEQ ID NO: 1365576
uugggagucagauacuucc

SEQ ID NO: 1365578 - RNA, 19 nt, Artificial Sequence
  Description of Artificial Sequence: Synthetic oligonucleotide
  Sense strand starting at position 1118 of SEQ ID NO: 1242686
cgccuucugcuccacguaa

SEQ ID NO: 1365579 - RNA, 19 nt, Artificial Sequence
  Description of Artificial Sequence: Synthetic oligonucleotide
  Antisense strand to SEQ ID NO: 1365578
uuacguggagcagaaggcg

SEQ ID NO: 1365580 - RNA, 19 nt, Artificial Sequence
  Description of Artificial Sequence: Synthetic oligonucleotide
  Sense strand starting at position 1120 of SEQ ID NO: 1242686
ccuucugcuccacguaagu

SEQ ID NO: 1365581 - RNA, 19 nt, Artificial Sequence
  Description of Artificial Sequence: Synthetic oligonucleotide
  Antisense strand to SEQ ID NO: 1365580
acuuacguggagcagaagg

SEQ ID NO: 1365582 - RNA, 19 nt, Artificial Sequence
  Description of Artificial Sequence: Synthetic oligonucleotide
  Sense strand starting at position 2894 of SEQ ID NO: 1242686
uugcauaucgugcguuuca

SEQ ID NO: 1365583 - RNA, 19 nt, Artificial Sequence
  Description of Artificial Sequence: Synthetic oligonucleotide
  Antisense strand to SEQ ID NO: 1365582
ugaaacgcacgauaugcaa

SEQ ID NO: 1365584 - RNA, 19 nt, Artificial Sequence
  Description of Artificial Sequence: Synthetic oligonucleotide
  Sense strand starting at position 2895 of SEQ ID NO: 1242686
ugcauaucgugcguuucau

SEQ ID NO: 1365585 - RNA, 19 nt, Artificial Sequence
  Description of Artificial Sequence: Synthetic oligonucleotide
  Antisense strand to SEQ ID NO: 1365584
augaaacgcacgauaugca

SEQ ID NO: 1365586 - RNA, 19 nt, Artificial Sequence
  Description of Artificial Sequence: Synthetic oligonucleotide
  Sense strand starting at position 2896 of SEQ ID NO: 1242686
gcauaucgugcguuucaug

SEQ ID NO: 1365587 - RNA, 19 nt, Artificial Sequence
  Description of Artificial Sequence: Synthetic oligonucleotide
  Antisense strand to SEQ ID NO: 1365586
caugaaacgcacgauaugc

SEQ ID NO: 1365588 - RNA, 19 nt, Artificial Sequence
  Description of Artificial Sequence: Synthetic oligonucleotide
  Sense strand starting at position 2991 of SEQ ID NO: 1242686
cgcuuugccuuucccuaaa

SEQ ID NO: 1365589 - RNA, 19 nt, Artificial Sequence
  Description of Artificial Sequence: Synthetic oligonucleotide
  Antisense strand to SEQ ID NO: 1365588
uuuagggaaaggcaaagcg

SEQ ID NO: 1365590 - RNA, 19 nt, Artificial Sequence
  Description of Artificial Sequence: Synthetic oligonucleotide
  Sense strand starting at position 3093 of SEQ ID NO: 1242686
gcacacgugcucuuacuuu

SEQ ID NO: 1365591 - RNA, 19 nt, Artificial Sequence
  Description of Artificial Sequence: Synthetic oligonucleotide
  Antisense strand to SEQ ID NO: 1365590
aaaguaagagcacgugugc

SEQ ID NO: 1365592 - RNA, 19 nt, Artificial Sequence
  Description of Artificial Sequence: Synthetic oligonucleotide
  Sense strand starting at position 3193 of SEQ ID NO: 1242686
ugccucucauuucgcauaa

SEQ ID NO: 1365593 - RNA, 19 nt, Artificial Sequence
  Description of Artificial Sequence: Synthetic oligonucleotide
  Antisense strand to SEQ ID NO: 1365592
uuaugcgaaaugagaggca

SEQ ID NO: 1365594 - RNA, 19 nt, Artificial Sequence
  Description of Artificial Sequence: Synthetic oligonucleotide
  Sense strand starting at position 3194 of SEQ ID NO: 1242686
gccucucauuucgcauaaa

SEQ ID NO: 1365595 - RNA, 19 nt, Artificial Sequence
  Description of Artificial Sequence: Synthetic oligonucleotide
  Antisense strand to SEQ ID NO: 1365594
uuuaugcgaaaugagaggc

SEQ ID NO: 1365596 - RNA, 19 nt, Artificial Sequence
  Description of Artificial Sequence: Synthetic oligonucleotide
  Sense strand starting at position 3756 of SEQ ID NO: 1242686
ggguguguugccuaagguu

SEQ ID NO: 1365597 - RNA, 19 nt, Artificial Sequence
  Description of Artificial Sequence: Synthetic oligonucleotide
  Antisense strand to SEQ ID NO: 1365596
aaccuuaggcaacacaccc

SEQ ID NO: 1365598 - RNA, 19 nt, Artificial Sequence
  Description of Artificial Sequence: Synthetic oligonucleotide
  Sense strand starting at position 3764 of SEQ ID NO: 1242686
ugccuaagguuaccgauuu

SEQ ID NO: 1365599 - RNA, 19 nt, Artificial Sequence
  Description of Artificial Sequence: Synthetic oligonucleotide
  Antisense strand to SEQ ID NO: 1365598
aaaucgguaaccuuaggca

SEQ ID NO: 1365600 - RNA, 19 nt, Artificial Sequence
  Description of Artificial Sequence: Synthetic oligonucleotide
  Sense strand starting at position 3883 of SEQ ID NO: 1242686
aaacauucugccggugaua

SEQ ID NO: 1365601 - RNA, 19 nt, Artificial Sequence
  Description of Artificial Sequence: Synthetic oligonucleotide
  Antisense strand to SEQ ID NO: 1365600
uaucaccggcagaauguuu

SEQ ID NO: 1365602 - RNA, 19 nt, Artificial Sequence
  Description of Artificial Sequence: Synthetic oligonucleotide
  Sense strand starting at position 3885 of SEQ ID NO: 1242686
acauucugccggugauaau

SEQ ID NO: 1365603 - RNA, 19 nt, Artificial Sequence
  Description of Artificial Sequence: Synthetic oligonucleotide
  Antisense strand to SEQ ID NO: 1365602
auuaucaccggcagaaugu

SEQ ID NO: 1365604 - RNA, 19 nt, Artificial Sequence
  Description of Artificial Sequence: Synthetic oligonucleotide
  Sense strand starting at position 3886 of SEQ ID NO: 1242686
cauucugccggugauaauc

SEQ ID NO: 1365605 - RNA, 19 nt, Artificial Sequence
  Description of Artificial Sequence: Synthetic oligonucleotide
  Antisense strand to SEQ ID NO: 1365604
gauuaucaccggcagaaug

SEQ ID NO: 1365606 - RNA, 19 nt, Artificial Sequence
  Description of Artificial Sequence: Synthetic oligonucleotide
  Sense strand starting at position 3939 of SEQ ID NO: 1242686
gcaacauaaacgugggagu

SEQ ID NO: 1365607 - RNA, 19 nt, Artificial Sequence
  Description of Artificial Sequence: Synthetic oligonucleotide
  Antisense strand to SEQ ID NO: 1365606
acucccacguuuauguugc

SEQ ID NO: 1365608 - RNA, 19 nt, Artificial Sequence
  Description of Artificial Sequence: Synthetic oligonucleotide
  Sense strand starting at position 3968 of SEQ ID NO: 1242686
gggagaauucagcagcgaa

SEQ ID NO: 1365609 - RNA, 19 nt, Artificial Sequence
  Description of Artificial Sequence: Synthetic oligonucleotide
  Antisense strand to SEQ ID NO: 1365608
uucgcugcugaauucuccc

SEQ ID NO: 1365610 - RNA, 19 nt, Artificial Sequence
  Description of Artificial Sequence: Synthetic oligonucleotide
  Sense strand starting at position 121 of SEQ ID NO: 1242687
augucuuccuacuguuaac

SEQ ID NO: 1365611 - RNA, 19 nt, Artificial Sequence
  Description of Artificial Sequence: Synthetic oligonucleotide
  Antisense strand to SEQ ID NO: 1365610
guuaacaguaggaagacau

SEQ ID NO: 1365612 - RNA, 19 nt, Artificial Sequence
  Description of Artificial Sequence: Synthetic oligonucleotide
  Sense strand starting at position 207 of SEQ ID NO: 1242687
guaacagcauuccauuaga

SEQ ID NO: 1365613 - RNA, 19 nt, Artificial Sequence
  Description of Artificial Sequence: Synthetic oligonucleotide
  Antisense strand to SEQ ID NO: 1365612
ucuaauggaaugcuguuac

SEQ ID NO: 1365614 - RNA, 19 nt, Artificial Sequence
  Description of Artificial Sequence: Synthetic oligonucleotide
  Sense strand starting at position 560 of SEQ ID NO: 1242687
uugguuucuuccuaccacu

SEQ ID NO: 1365615 - RNA, 19 nt, Artificial Sequence
  Description of Artificial Sequence: Synthetic oligonucleotide
  Antisense strand to SEQ ID NO: 1365614
agugguaggaagaaaccaa

SEQ ID NO: 1365616 - RNA, 19 nt, Artificial Sequence
  Description of Artificial Sequence: Synthetic oligonucleotide
  Sense strand starting at position 705 of SEQ ID NO: 1242687
cgagaucaaccguggguuu

SEQ ID NO: 1365617 - RNA, 19 nt, Artificial Sequence
  Description of Artificial Sequence: Synthetic oligonucleotide
  Antisense strand to SEQ ID NO: 1365616
aaacccacgguugaucucg

SEQ ID NO: 1365618 - RNA, 19 nt, Artificial Sequence
  Description of Artificial Sequence: Synthetic oligonucleotide
  Sense strand starting at position 777 of SEQ ID NO: 1242687
augguuucuuucugauucu

SEQ ID NO: 1365619 - RNA, 19 nt, Artificial Sequence
  Description of Artificial Sequence: Synthetic oligonucleotide
  Antisense strand to SEQ ID NO: 1365618
agaaucagaaagaaaccau

SEQ ID NO: 1365620 - RNA, 19 nt, Artificial Sequence
  Description of Artificial Sequence: Synthetic oligonucleotide
  Sense strand starting at position 786 of SEQ ID NO: 1242687
uucugauucuccugaagcu

SEQ ID NO: 1365621 - RNA, 19 nt, Artificial Sequence
  Description of Artificial Sequence: Synthetic oligonucleotide
  Antisense strand to SEQ ID NO: 1365620
agcuucaggagaaucagaa

SEQ ID NO: 1365622 - RNA, 19 nt, Artificial Sequence
  Description of Artificial Sequence: Synthetic oligonucleotide
  Sense strand starting at position 787 of SEQ ID NO: 1242687
ucugauucuccugaagcuu

SEQ ID NO: 1365623 - RNA, 19 nt, Artificial Sequence
  Description of Artificial Sequence: Synthetic oligonucleotide
  Antisense strand to SEQ ID NO: 1365622
aagcuucaggagaaucaga

SEQ ID NO: 1365624 - RNA, 19 nt, Artificial Sequence
  Description of Artificial Sequence: Synthetic oligonucleotide
  Sense strand starting at position 893 of SEQ ID NO: 1242687
cggcgaucugguagugaga

SEQ ID NO: 1365625 - RNA, 19 nt, Artificial Sequence
  Description of Artificial Sequence: Synthetic oligonucleotide
  Antisense strand to SEQ ID NO: 1365624
ucucacuaccagaucgccg

SEQ ID NO: 1365626 - RNA, 19 nt, Artificial Sequence
  Description of Artificial Sequence: Synthetic oligonucleotide
  Sense strand starting at position 912 of SEQ ID NO: 1242687
ccgcuugacacagagaauu

SEQ ID NO: 1365627 - RNA, 19 nt, Artificial Sequence
  Description of Artificial Sequence: Synthetic oligonucleotide
  Antisense strand to SEQ ID NO: 1365626
aauucucugugucaagcgg

SEQ ID NO: 1365628 - RNA, 19 nt, Artificial Sequence
  Description of Artificial Sequence: Synthetic oligonucleotide
  Sense strand starting at position 1004 of SEQ ID NO: 1242687
ggguuugcuugcuacaaau

SEQ ID NO: 1365629 - RNA, 19 nt, Artificial Sequence
  Description of Artificial Sequence: Synthetic oligonucleotide
  Antisense strand to SEQ ID NO: 1365628
auuuguagcaagcaaaccc

SEQ ID NO: 1365630 - RNA, 19 nt, Artificial Sequence
  Description of Artificial Sequence: Synthetic oligonucleotide
  Sense strand starting at position 1175 of SEQ ID NO: 1242687
gcggcaucugguuucgcau

SEQ ID NO: 1365631 - RNA, 19 nt, Artificial Sequence
  Description of Artificial Sequence: Synthetic oligonucleotide
  Antisense strand to SEQ ID NO: 1365630
augcgaaaccagaugccgc

SEQ ID NO: 1365632 - RNA, 19 nt, Artificial Sequence
  Description of Artificial Sequence: Synthetic oligonucleotide
  Sense strand starting at position 1409 of SEQ ID NO: 1242687
ccguguacuuaaucugcaa

SEQ ID NO: 1365633 - RNA, 19 nt, Artificial Sequence
  Description of Artificial Sequence: Synthetic oligonucleotide
  Antisense strand to SEQ ID NO: 1365632
uugcagauuaaguacacgg

SEQ ID NO: 1365634 - RNA, 19 nt, Artificial Sequence
  Description of Artificial Sequence: Synthetic oligonucleotide
  Sense strand starting at position 1413 of SEQ ID NO: 1242687
guacuuaaucugcaaggca

SEQ ID NO: 1365635 - RNA, 19 nt, Artificial Sequence
  Description of Artificial Sequence: Synthetic oligonucleotide
  Antisense strand to SEQ ID NO: 1365634
ugccuugcagauuaaguac

SEQ ID NO: 1365636 - RNA, 19 nt, Artificial Sequence
  Description of Artificial Sequence: Synthetic oligonucleotide
  Sense strand starting at position 1416 of SEQ ID NO: 1242687
cuuaaucugcaaggcaaga

SEQ ID NO: 1365637 - RNA, 19 nt, Artificial Sequence
  Description of Artificial Sequence: Synthetic oligonucleotide
  Antisense strand to SEQ ID NO: 1365636
ucuugccuugcagauuaag

SEQ ID NO: 1365638 - RNA, 19 nt, Artificial Sequence
  Description of Artificial Sequence: Synthetic oligonucleotide
  Sense strand starting at position 1437 of SEQ ID NO: 1242687
gcccgaaaucaggagccaa

SEQ ID NO: 1365639 - RNA, 19 nt, Artificial Sequence
  Description of Artificial Sequence: Synthetic oligonucleotide
  Antisense strand to SEQ ID NO: 1365638
uuggcuccugauuucgggc

SEQ ID NO: 1365640 - RNA, 19 nt, Artificial Sequence
  Description of Artificial Sequence: Synthetic oligonucleotide
  Sense strand starting at position 2372 of SEQ ID NO: 1242687
cccagauugucacuugaac

SEQ ID NO: 1365641 - RNA, 19 nt, Artificial Sequence
  Description of Artificial Sequence: Synthetic oligonucleotide
  Antisense strand to SEQ ID NO: 1365640
guucaagugacaaucuggg

SEQ ID NO: 1365642 - RNA, 19 nt, Artificial Sequence
  Description of Artificial Sequence: Synthetic oligonucleotide
  Sense strand starting at position 2380 of SEQ ID NO: 1242687
gucacuugaacgcgaggaa

SEQ ID NO: 1365643 - RNA, 19 nt, Artificial Sequence
  Description of Artificial Sequence: Synthetic oligonucleotide
  Antisense strand to SEQ ID NO: 1365642
uuccucgcguucaagugac

SEQ ID NO: 1365644 - RNA, 19 nt, Artificial Sequence
  Description of Artificial Sequence: Synthetic oligonucleotide
  Sense strand starting at position 2381 of SEQ ID NO: 1242687
ucacuugaacgcgaggaaa

SEQ ID NO: 1365645 - RNA, 19 nt, Artificial Sequence
  Description of Artificial Sequence: Synthetic oligonucleotide
  Antisense strand to SEQ ID NO: 1365644
uuuccucgcguucaaguga

SEQ ID NO: 1365646 - RNA, 19 nt, Artificial Sequence
  Description of Artificial Sequence: Synthetic oligonucleotide
  Sense strand starting at position 2497 of SEQ ID NO: 1242687
cgagucaugguggaaaggu

SEQ ID NO: 1365647 - RNA, 19 nt, Artificial Sequence
  Description of Artificial Sequence: Synthetic oligonucleotide
  Antisense strand to SEQ ID NO: 1365646
accuuuccaccaugacucg

SEQ ID NO: 1365648 - RNA, 19 nt, Artificial Sequence
  Description of Artificial Sequence: Synthetic oligonucleotide
  Sense strand starting at position 2525 of SEQ ID NO: 1242687
uggagucagaugggucuua

SEQ ID NO: 1365649 - RNA, 19 nt, Artificial Sequence
  Description of Artificial Sequence: Synthetic oligonucleotide
  Antisense strand to SEQ ID NO: 1365648
uaagacccaucugacucca

SEQ ID NO: 1365650 - RNA, 19 nt, Artificial Sequence
  Description of Artificial Sequence: Synthetic oligonucleotide
  Sense strand starting at position 2632 of SEQ ID NO: 1242687
ugcagacacuccuagguuu

SEQ ID NO: 1365651 - RNA, 19 nt, Artificial Sequence
  Description of Artificial Sequence: Synthetic oligonucleotide
  Antisense strand to SEQ ID NO: 1365650
aaaccuaggagugucugca

SEQ ID NO: 1365652 - RNA, 19 nt, Artificial Sequence
  Description of Artificial Sequence: Synthetic oligonucleotide
  Sense strand starting at position 2666 of SEQ ID NO: 1242687
gaaccuuuaugugggucua

SEQ ID NO: 1365653 - RNA, 19 nt, Artificial Sequence
  Description of Artificial Sequence: Synthetic oligonucleotide
  Antisense strand to SEQ ID NO: 1365652
uagacccacauaaagguuc

SEQ ID NO: 1365654 - RNA, 19 nt, Artificial Sequence
  Description of Artificial Sequence: Synthetic oligonucleotide
  Sense strand starting at position 2721 of SEQ ID NO: 1242687
agaagaacaagcugaguua

SEQ ID NO: 1365655 - RNA, 19 nt, Artificial Sequence
  Description of Artificial Sequence: Synthetic oligonucleotide
  Antisense strand to SEQ ID NO: 1365654
uaacucagcuuguucuucu

SEQ ID NO: 1365656 - RNA, 19 nt, Artificial Sequence
  Description of Artificial Sequence: Synthetic oligonucleotide
  Sense strand starting at position 2724 of SEQ ID NO: 1242687
agaacaagcugaguuaaga

SEQ ID NO: 1365657 - RNA, 19 nt, Artificial Sequence
  Description of Artificial Sequence: Synthetic oligonucleotide
  Antisense strand to SEQ ID NO: 1365656
ucuuaacucagcuuguucu

SEQ ID NO: 1365658 - RNA, 19 nt, Artificial Sequence
  Description of Artificial Sequence: Synthetic oligonucleotide
  Sense strand starting at position 2742 of SEQ ID NO: 1242687
aauguaaccgauugccagu

SEQ ID NO: 1365659 - RNA, 19 nt, Artificial Sequence
  Description of Artificial Sequence: Synthetic oligonucleotide
  Antisense strand to SEQ ID NO: 1365658
acuggcaaucgguuacauu

SEQ ID NO: 1365660 - RNA, 19 nt, Artificial Sequence
  Description of Artificial Sequence: Synthetic oligonucleotide
  Sense strand starting at position 2802 of SEQ ID NO: 1242687
auccauaaauucuagggaa

SEQ ID NO: 1365661 - RNA, 19 nt, Artificial Sequence
  Description of Artificial Sequence: Synthetic oligonucleotide
  Antisense strand to SEQ ID NO: 1365660
uucccuagaauuuauggau

SEQ ID NO: 1365662 - RNA, 19 nt, Artificial Sequence
  Description of Artificial Sequence: Synthetic oligonucleotide
  Sense strand starting at position 2805 of SEQ ID NO: 1242687
cauaaauucuagggaaguu

SEQ ID NO: 1365663 - RNA, 19 nt, Artificial Sequence
  Description of Artificial Sequence: Synthetic oligonucleotide
  Antisense strand to SEQ ID NO: 1365662
aacuucccuagaauuuaug

SEQ ID NO: 1365664 - RNA, 19 nt, Artificial Sequence
  Description of Artificial Sequence: Synthetic oligonucleotide
  Sense strand starting at position 2817 of SEQ ID NO: 1242687
ggaaguuguuuagcccaaa

SEQ ID NO: 1365665 - RNA, 19 nt, Artificial Sequence
  Description of Artificial Sequence: Synthetic oligonucleotide
  Antisense strand to SEQ ID NO: 1365664
uuugggcuaaacaacuucc

SEQ ID NO: 1365666 - RNA, 19 nt, Artificial Sequence
  Description of Artificial Sequence: Synthetic oligonucleotide
  Sense strand starting at position 2818 of SEQ ID NO: 1242687
gaaguuguuuagcccaaac

SEQ ID NO: 1365667 - RNA, 19 nt, Artificial Sequence
  Description of Artificial Sequence: Synthetic oligonucleotide
  Antisense strand to SEQ ID NO: 1365666
guuugggcuaaacaacuuc

SEQ ID NO: 1365668 - RNA, 19 nt, Artificial Sequence
  Description of Artificial Sequence: Synthetic oligonucleotide
  Sense strand starting at position 2853 of SEQ ID NO: 1242687
ugggauuuauggcagaguu

SEQ ID NO: 1365669 - RNA, 19 nt, Artificial Sequence
  Description of Artificial Sequence: Synthetic oligonucleotide
  Antisense strand to SEQ ID NO: 1365668
aacucugccauaaauccca

SEQ ID NO: 1365670 - RNA, 19 nt, Artificial Sequence
  Description of Artificial Sequence: Synthetic oligonucleotide
  Sense strand starting at position 2863 of SEQ ID NO: 1242687
ggcagaguuugauucaaag

SEQ ID NO: 1365671 - RNA, 19 nt, Artificial Sequence
  Description of Artificial Sequence: Synthetic oligonucleotide
  Antisense strand to SEQ ID NO: 1365670
cuuugaaucaaacucugcc

SEQ ID NO: 1365672 - RNA, 19 nt, Artificial Sequence
  Description of Artificial Sequence: Synthetic oligonucleotide
  Sense strand starting at position 3685 of SEQ ID NO: 1242687
ccaaguugaucuuggccaa

SEQ ID NO: 1365673 - RNA, 19 nt, Artificial Sequence
  Description of Artificial Sequence: Synthetic oligonucleotide
  Antisense strand to SEQ ID NO: 1365672
uuggccaagaucaacuugg

SEQ ID NO: 1365674 - RNA, 19 nt, Artificial Sequence
  Description of Artificial Sequence: Synthetic oligonucleotide
  Sense strand starting at position 3686 of SEQ ID NO: 1242687
caaguugaucuuggccaaa

SEQ ID NO: 1365675 - RNA, 19 nt, Artificial Sequence
  Description of Artificial Sequence: Synthetic oligonucleotide
  Antisense strand to SEQ ID NO: 1365674
uuuggccaagaucaacuug

SEQ ID NO: 1365676 - RNA, 19 nt, Artificial Sequence
  Description of Artificial Sequence: Synthetic oligonucleotide
  Sense strand starting at position 3688 of SEQ ID NO: 1242687
aguugaucuuggccaaaga

SEQ ID NO: 1365677 - RNA, 19 nt, Artificial Sequence
  Description of Artificial Sequence: Synthetic oligonucleotide
  Antisense strand to SEQ ID NO: 1365676
ucuuuggccaagaucaacu

SEQ ID NO: 1365678 - RNA, 19 nt, Artificial Sequence
  Description of Artificial Sequence: Synthetic oligonucleotide
  Sense strand starting at position 3689 of SEQ ID NO: 1242687
guugaucuuggccaaagac

SEQ ID NO: 1365679 - RNA, 19 nt, Artificial Sequence
  Description of Artificial Sequence: Synthetic oligonucleotide
  Antisense strand to SEQ ID NO: 1365678
gucuuuggccaagaucaac

SEQ ID NO: 1365680 - RNA, 19 nt, Artificial Sequence
  Description of Artificial Sequence: Synthetic oligonucleotide
  Sense strand starting at position 3698 of SEQ ID NO: 1242687
ggccaaagacucuagcaau

SEQ ID NO: 1365681 - RNA, 19 nt, Artificial Sequence
  Description of Artificial Sequence: Synthetic oligonucleotide
  Antisense strand to SEQ ID NO: 1365680
auugcuagagucuuuggcc

SEQ ID NO: 1365682 - RNA, 19 nt, Artificial Sequence
  Description of Artificial Sequence: Synthetic oligonucleotide
  Sense strand starting at position 3717 of SEQ ID NO: 1242687
aauuguuucugccauggga

SEQ ID NO: 1365683 - RNA, 19 nt, Artificial Sequence
  Description of Artificial Sequence: Synthetic oligonucleotide
  Antisense strand to SEQ ID NO: 1365682
ucccauggcagaaacaauu

SEQ ID NO: 1365684 - RNA, 19 nt, Artificial Sequence
  Description of Artificial Sequence: Synthetic oligonucleotide
  Sense strand starting at position 3719 of SEQ ID NO: 1242687
uuguuucugccaugggaaa

SEQ ID NO: 1365685 - RNA, 19 nt, Artificial Sequence
  Description of Artificial Sequence: Synthetic oligonucleotide
  Antisense strand to SEQ ID NO: 1365684
uuucccauggcagaaacaa

SEQ ID NO: 1365686 - RNA, 19 nt, Artificial Sequence
  Description of Artificial Sequence: Synthetic oligonucleotide
  Sense strand starting at position 3720 of SEQ ID NO: 1242687
uguuucugccaugggaaau

SEQ ID NO: 1365687 - RNA, 19 nt, Artificial Sequence
  Description of Artificial Sequence: Synthetic oligonucleotide
  Antisense strand to SEQ ID NO: 1365686
auuucccauggcagaaaca

SEQ ID NO: 1365688 - RNA, 19 nt, Artificial Sequence
  Description of Artificial Sequence: Synthetic oligonucleotide
  Sense strand starting at position 3763 of SEQ ID NO: 1242687
ucucuagaauggccuugau

SEQ ID NO: 1365689 - RNA, 19 nt, Artificial Sequence
  Description of Artificial Sequence: Synthetic oligonucleotide
  Antisense strand to SEQ ID NO: 1365688
aucaaggccauucuagaga

SEQ ID NO: 1365690 - RNA, 19 nt, Artificial Sequence
  Description of Artificial Sequence: Synthetic oligonucleotide
  Sense strand starting at position 48 of SEQ ID NO: 1242688
ucgacugugcucugugauc

SEQ ID NO: 1365691 - RNA, 19 nt, Artificial Sequence
  Description of Artificial Sequence: Synthetic oligonucleotide
  Antisense strand to SEQ ID NO: 1365690
gaucacagagcacagucga

SEQ ID NO: 1365692 - RNA, 19 nt, Artificial Sequence
  Description of Artificial Sequence: Synthetic oligonucleotide
  Sense strand starting at position 50 of SEQ ID NO: 1242688
gacugugcucugugaucca

SEQ ID NO: 1365693 - RNA, 19 nt, Artificial Sequence
  Description of Artificial Sequence: Synthetic oligonucleotide
  Antisense strand to SEQ ID NO: 1365692
uggaucacagagcacaguc

SEQ ID NO: 1365694 - RNA, 19 nt, Artificial Sequence
  Description of Artificial Sequence: Synthetic oligonucleotide
  Sense strand starting at position 53 of SEQ ID NO: 1242688
ugugcucugugauccaauu

SEQ ID NO: 1365695 - RNA, 19 nt, Artificial Sequence
  Description of Artificial Sequence: Synthetic oligonucleotide
  Antisense strand to SEQ ID NO: 1365694
aauuggaucacagagcaca

SEQ ID NO: 1365696 - RNA, 19 nt, Artificial Sequence
  Description of Artificial Sequence: Synthetic oligonucleotide
  Sense strand starting at position 71 of SEQ ID NO: 1242688
uuaauaaacccaugaggug

SEQ ID NO: 1365697 - RNA, 19 nt, Artificial Sequence
  Description of Artificial Sequence: Synthetic oligonucleotide
  Antisense strand to SEQ ID NO: 1365696
caccucauggguuuauuaa

SEQ ID NO: 1365698 - RNA, 19 nt, Artificial Sequence
  Description of Artificial Sequence: Synthetic oligonucleotide
  Sense strand starting at position 262 of SEQ ID NO: 1242688
uggagaagccacugugauu

SEQ ID NO: 1365699 - RNA, 19 nt, Artificial Sequence
  Description of Artificial Sequence: Synthetic oligonucleotide
  Antisense strand to SEQ ID NO: 1365698
aaucacaguggcuucucca

SEQ ID NO: 1365700 - RNA, 19 nt, Artificial Sequence
  Description of Artificial Sequence: Synthetic oligonucleotide
  Sense strand starting at position 269 of SEQ ID NO: 1242688
gccacugugauuugugauu

SEQ ID NO: 1365701 - RNA, 19 nt, Artificial Sequence
  Description of Artificial Sequence: Synthetic oligonucleotide
  Antisense strand to SEQ ID NO: 1365700
aaucacaaaucacaguggc

SEQ ID NO: 1365702 - RNA, 19 nt, Artificial Sequence
  Description of Artificial Sequence: Synthetic oligonucleotide
  Sense strand starting at position 271 of SEQ ID NO: 1242688
cacugugauuugugauuag

SEQ ID NO: 1365703 - RNA, 19 nt, Artificial Sequence
  Description of Artificial Sequence: Synthetic oligonucleotide
  Antisense strand to SEQ ID NO: 1365702
cuaaucacaaaucacagug

SEQ ID NO: 1365704 - RNA, 19 nt, Artificial Sequence
  Description of Artificial Sequence: Synthetic oligonucleotide
  Sense strand starting at position 496 of SEQ ID NO: 1242688
gcgagugauugcugggaca

SEQ ID NO: 1365705 - RNA, 19 nt, Artificial Sequence
  Description of Artificial Sequence: Synthetic oligonucleotide
  Antisense strand to SEQ ID NO: 1365704
ugucccagcaaucacucgc

SEQ ID NO: 1365706 - RNA, 19 nt, Artificial Sequence
  Description of Artificial Sequence: Synthetic oligonucleotide
  Sense strand starting at position 585 of SEQ ID NO: 1242688
gcuaaaugcugcuagcuca

SEQ ID NO: 1365707 - RNA, 19 nt, Artificial Sequence
  Description of Artificial Sequence: Synthetic oligonucleotide
  Antisense strand to SEQ ID NO: 1365706
ugagcuagcagcauuuagc

SEQ ID NO: 1365708 - RNA, 19 nt, Artificial Sequence
  Description of Artificial Sequence: Synthetic oligonucleotide
  Sense strand starting at position 1097 of SEQ ID NO: 1242688
ugguuugucuguuguagac

SEQ ID NO: 1365709 - RNA, 19 nt, Artificial Sequence
  Description of Artificial Sequence: Synthetic oligonucleotide
  Antisense strand to SEQ ID NO: 1365708
gucuacaacagacaaacca

SEQ ID NO: 1365710 - RNA, 19 nt, Artificial Sequence
  Description of Artificial Sequence: Synthetic oligonucleotide
  Sense strand starting at position 1099 of SEQ ID NO: 1242688
guuugucuguuguagacuu

SEQ ID NO: 1365711 - RNA, 19 nt, Artificial Sequence
  Description of Artificial Sequence: Synthetic oligonucleotide
  Antisense strand to SEQ ID NO: 1365710
aagucuacaacagacaaac

SEQ ID NO: 1365712 - RNA, 19 nt, Artificial Sequence
  Description of Artificial Sequence: Synthetic oligonucleotide
  Sense strand starting at position 1167 of SEQ ID NO: 1242688
agugcugcguucugaauca

SEQ ID NO: 1365713 - RNA, 19 nt, Artificial Sequence
  Description of Artificial Sequence: Synthetic oligonucleotide
  Antisense strand to SEQ ID NO: 1365712
ugauucagaacgcagcacu

SEQ ID NO: 1365714 - RNA, 19 nt, Artificial Sequence
  Description of Artificial Sequence: Synthetic oligonucleotide
  Sense strand starting at position 1172 of SEQ ID NO: 1242688
ugcguucugaaucaaaguu

SEQ ID NO: 1365715 - RNA, 19 nt, Artificial Sequence
  Description of Artificial Sequence: Synthetic oligonucleotide
  Antisense strand to SEQ ID NO: 1365714
aacuuugauucagaacgca

SEQ ID NO: 1365716 - RNA, 19 nt, Artificial Sequence
  Description of Artificial Sequence: Synthetic oligonucleotide
  Sense strand starting at position 1373 of SEQ ID NO: 1242688
ggucgaaguagaugaucau

SEQ ID NO: 1365717 - RNA, 19 nt, Artificial Sequence
  Description of Artificial Sequence: Synthetic oligonucleotide
  Antisense strand to SEQ ID NO: 1365716
augaucaucuacuucgacc

SEQ ID NO: 1365718 - RNA, 19 nt, Artificial Sequence
  Description of Artificial Sequence: Synthetic oligonucleotide
  Sense strand starting at position 1382 of SEQ ID NO: 1242688
agaugaucauggugcgauu

SEQ ID NO: 1365719 - RNA, 19 nt, Artificial Sequence
  Description of Artificial Sequence: Synthetic oligonucleotide
  Antisense strand to SEQ ID NO: 1365718
aaucgcaccaugaucaucu

SEQ ID NO: 1365720 - RNA, 19 nt, Artificial Sequence
  Description of Artificial Sequence: Synthetic oligonucleotide
  Sense strand starting at position 1385 of SEQ ID NO: 1242688
ugaucauggugcgauuacu

SEQ ID NO: 1365721 - RNA, 19 nt, Artificial Sequence
  Description of Artificial Sequence: Synthetic oligonucleotide
  Antisense strand to SEQ ID NO: 1365720
aguaaucgcaccaugauca

SEQ ID NO: 1365722 - RNA, 19 nt, Artificial Sequence
  Description of Artificial Sequence: Synthetic oligonucleotide
  Sense strand starting at position 1394 of SEQ ID NO: 1242688
ugcgauuacucaucucgga

SEQ ID NO: 1365723 - RNA, 19 nt, Artificial Sequence
  Description of Artificial Sequence: Synthetic oligonucleotide
  Antisense strand to SEQ ID NO: 1365722
uccgagaugaguaaucgca

SEQ ID NO: 1365724 - RNA, 19 nt, Artificial Sequence
  Description of Artificial Sequence: Synthetic oligonucleotide
  Sense strand starting at position 1958 of SEQ ID NO: 1242688
gccgcucugaauuauugau

SEQ ID NO: 1365725 - RNA, 19 nt, Artificial Sequence
  Description of Artificial Sequence: Synthetic oligonucleotide
  Antisense strand to SEQ ID NO: 1365724
aucaauaauucagagcggc

SEQ ID NO: 1365726 - RNA, 19 nt, Artificial Sequence
  Description of Artificial Sequence: Synthetic oligonucleotide
  Sense strand starting at position 2789 of SEQ ID NO: 1242688
gucggaucgagcggucauu

SEQ ID NO: 1365727 - RNA, 19 nt, Artificial Sequence
  Description of Artificial Sequence: Synthetic oligonucleotide
  Antisense strand to SEQ ID NO: 1365726
aaugaccgcucgauccgac

SEQ ID NO: 1365728 - RNA, 19 nt, Artificial Sequence
  Description of Artificial Sequence: Synthetic oligonucleotide
  Sense strand starting at position 3063 of SEQ ID NO: 1242688
ccuccuagccuugagugua

SEQ ID NO: 1365729 - RNA, 19 nt, Artificial Sequence
  Description of Artificial Sequence: Synthetic oligonucleotide
  Antisense strand to SEQ ID NO: 1365728
uacacucaaggcuaggagg

SEQ ID NO: 1365730 - RNA, 19 nt, Artificial Sequence
  Description of Artificial Sequence: Synthetic oligonucleotide
  Sense strand starting at position 3287 of SEQ ID NO: 1242688
agacguagcccugaaggau

SEQ ID NO: 1365731 - RNA, 19 nt, Artificial Sequence
  Description of Artificial Sequence: Synthetic oligonucleotide
  Antisense strand to SEQ ID NO: 1365730
auccuucagggcuacgucu

SEQ ID NO: 1365732 - RNA, 19 nt, Artificial Sequence
  Description of Artificial Sequence: Synthetic oligonucleotide
  Sense strand starting at position 3625 of SEQ ID NO: 1242688
ccacgucucugcuucuaga

SEQ ID NO: 1365733 - RNA, 19 nt, Artificial Sequence
  Description of Artificial Sequence: Synthetic oligonucleotide
  Antisense strand to SEQ ID NO: 1365732
ucuagaagcagagacgugg

SEQ ID NO: 1365734 - RNA, 19 nt, Artificial Sequence
  Description of Artificial Sequence: Synthetic oligonucleotide
  Sense strand starting at position 3658 of SEQ ID NO: 1242688
cuuugagacuuaguugaua

SEQ ID NO: 1365735 - RNA, 19 nt, Artificial Sequence
  Description of Artificial Sequence: Synthetic oligonucleotide
  Antisense strand to SEQ ID NO: 1365734
uaucaacuaagucucaaag

SEQ ID NO: 1365736 - RNA, 19 nt, Artificial Sequence
  Description of Artificial Sequence: Synthetic oligonucleotide
  Sense strand starting at position 3666 of SEQ ID NO: 1242688
cuuaguugauagcuguuua

SEQ ID NO: 1365737 - RNA, 19 nt, Artificial Sequence
  Description of Artificial Sequence: Synthetic oligonucleotide
  Antisense strand to SEQ ID NO: 1365736
uaaacagcuaucaacuaag

SEQ ID NO: 1365738 - RNA, 19 nt, Artificial Sequence
  Description of Artificial Sequence: Synthetic oligonucleotide
  Sense strand starting at position 3670 of SEQ ID NO: 1242688
guugauagcuguuuaagga

SEQ ID NO: 1365739 - RNA, 19 nt, Artificial Sequence
  Description of Artificial Sequence: Synthetic oligonucleotide
  Antisense strand to SEQ ID NO: 1365738
uccuuaaacagcuaucaac

SEQ ID NO: 1365740 - RNA, 19 nt, Artificial Sequence
  Description of Artificial Sequence: Synthetic oligonucleotide
  Sense strand starting at position 3671 of SEQ ID NO: 1242688
uugauagcuguuuaaggaa

SEQ ID NO: 1365741 - RNA, 19 nt, Artificial Sequence
  Description of Artificial Sequence: Synthetic oligonucleotide
  Antisense strand to SEQ ID NO: 1365740
uuccuuaaacagcuaucaa

SEQ ID NO: 1365742 - RNA, 19 nt, Artificial Sequence
  Description of Artificial Sequence: Synthetic oligonucleotide
  Sense strand starting at position 3674 of SEQ ID NO: 1242688
auagcuguuuaaggaauua

SEQ ID NO: 1365743 - RNA, 19 nt, Artificial Sequence
  Description of Artificial Sequence: Synthetic oligonucleotide
  Antisense strand to SEQ ID NO: 1365742
uaauuccuuaaacagcuau

SEQ ID NO: 1365744 - RNA, 19 nt, Artificial Sequence
  Description of Artificial Sequence: Synthetic oligonucleotide
  Sense strand starting at position 3684 of SEQ ID NO: 1242688
aaggaauuauguggaggaa

SEQ ID NO: 1365745 - RNA, 19 nt, Artificial Sequence
  Description of Artificial Sequence: Synthetic oligonucleotide
  Antisense strand to SEQ ID NO: 1365744
uuccuccacauaauuccuu

SEQ ID NO: 1365746 - RNA, 19 nt, Artificial Sequence
  Description of Artificial Sequence: Synthetic oligonucleotide
  Sense strand starting at position 3697 of SEQ ID NO: 1242688
gaggaaaucucaccuccga

SEQ ID NO: 1365747 - RNA, 19 nt, Artificial Sequence
  Description of Artificial Sequence: Synthetic oligonucleotide
  Antisense strand to SEQ ID NO: 1365746
ucggaggugagauuuccuc

SEQ ID NO: 1365748 - RNA, 19 nt, Artificial Sequence
  Description of Artificial Sequence: Synthetic oligonucleotide
  Sense strand starting at position 3836 of SEQ ID NO: 1242688
cucagaucuuucugagaca

SEQ ID NO: 1365749 - RNA, 19 nt, Artificial Sequence
  Description of Artificial Sequence: Synthetic oligonucleotide
  Antisense strand to SEQ ID NO: 1365748
ugucucagaaagaucugag

SEQ ID NO: 1365750 - RNA, 19 nt, Artificial Sequence
  Description of Artificial Sequence: Synthetic oligonucleotide
  Sense strand starting at position 3837 of SEQ ID NO: 1242688
ucagaucuuucugagacau

SEQ ID NO: 1365751 - RNA, 19 nt, Artificial Sequence
  Description of Artificial Sequence: Synthetic oligonucleotide
  Antisense strand to SEQ ID NO: 1365750
augucucagaaagaucuga

SEQ ID NO: 1365752 - RNA, 19 nt, Artificial Sequence
  Description of Artificial Sequence: Synthetic oligonucleotide
  Sense strand starting at position 3864 of SEQ ID NO: 1242688
agcguugcaagcugugauu

SEQ ID NO: 1365753 - RNA, 19 nt, Artificial Sequence
  Description of Artificial Sequence: Synthetic oligonucleotide
  Antisense strand to SEQ ID NO: 1365752
aaucacagcuugcaacgcu

SEQ ID NO: 1365754 - RNA, 19 nt, Artificial Sequence
  Description of Artificial Sequence: Synthetic oligonucleotide
  Sense strand starting at position 3867 of SEQ ID NO: 1242688
guugcaagcugugauuaca

SEQ ID NO: 1365755 - RNA, 19 nt, Artificial Sequence
  Description of Artificial Sequence: Synthetic oligonucleotide
  Antisense strand to SEQ ID NO: 1365754
uguaaucacagcuugcaac

SEQ ID NO: 1365756 - RNA, 19 nt, Artificial Sequence
  Description of Artificial Sequence: Synthetic oligonucleotide
  Sense strand starting at position 3879 of SEQ ID NO: 1242688
gauuacaccuaaugugaga

SEQ ID NO: 1365757 - RNA, 19 nt, Artificial Sequence
  Description of Artificial Sequence: Synthetic oligonucleotide
  Antisense strand to SEQ ID NO: 1365756
ucucacauuagguguaauc

SEQ ID NO: 1365758 - RNA, 19 nt, Artificial Sequence
  Description of Artificial Sequence: Synthetic oligonucleotide
  Sense strand starting at position 3902 of SEQ ID NO: 1242688
gaacuaauuuaagagguga

SEQ ID NO: 1365759 - RNA, 19 nt, Artificial Sequence
  Description of Artificial Sequence: Synthetic oligonucleotide
  Antisense strand to SEQ ID NO: 1365758
ucaccucuuaaauuaguuc

SEQ ID NO: 1365760 - RNA, 19 nt, Artificial Sequence
  Description of Artificial Sequence: Synthetic oligonucleotide
  Sense strand starting at position 3913 of SEQ ID NO: 1242688
agaggugagagcugcauaa

SEQ ID NO: 1365761 - RNA, 19 nt, Artificial Sequence
  Description of Artificial Sequence: Synthetic oligonucleotide
  Antisense strand to SEQ ID NO: 1365760
uuaugcagcucucaccucu

SEQ ID NO: 1365762 - RNA, 19 nt, Artificial Sequence
  Description of Artificial Sequence: Synthetic oligonucleotide
  Sense strand starting at position 3915 of SEQ ID NO: 1242688
aggugagagcugcauaaug

SEQ ID NO: 1365763 - RNA, 19 nt, Artificial Sequence
  Description of Artificial Sequence: Synthetic oligonucleotide
  Antisense strand to SEQ ID NO: 1365762
cauuaugcagcucucaccu

SEQ ID NO: 1365764 - RNA, 19 nt, Artificial Sequence
  Description of Artificial Sequence: Synthetic oligonucleotide
  Sense strand starting at position 3917 of SEQ ID NO: 1242688
gugagagcugcauaaugag

SEQ ID NO: 1365765 - RNA, 19 nt, Artificial Sequence
  Description of Artificial Sequence: Synthetic oligonucleotide
  Antisense strand to SEQ ID NO: 1365764
cucauuaugcagcucucac

SEQ ID NO: 1365766 - RNA, 19 nt, Artificial Sequence
  Description of Artificial Sequence: Synthetic oligonucleotide
  Sense strand starting at position 109 of SEQ ID NO: 1242689
cucaaaguaucaccaguaa

SEQ ID NO: 1365767 - RNA, 19 nt, Artificial Sequence
  Description of Artificial Sequence: Synthetic oligonucleotide
  Antisense strand to SEQ ID NO: 1365766
uuacuggugauacuuugag

SEQ ID NO: 1365768 - RNA, 19 nt, Artificial Sequence
  Description of Artificial Sequence: Synthetic oligonucleotide
  Sense strand starting at position 175 of SEQ ID NO: 1242689
uuaacuuuaugugucaaac

SEQ ID NO: 1365769 - RNA, 19 nt, Artificial Sequence
  Description of Artificial Sequence: Synthetic oligonucleotide
  Antisense strand to SEQ ID NO: 1365768
guuugacacauaaaguuaa

SEQ ID NO: 1365770 - RNA, 19 nt, Artificial Sequence
  Description of Artificial Sequence: Synthetic oligonucleotide
  Sense strand starting at position 186 of SEQ ID NO: 1242689
ugucaaacugauugggcua

SEQ ID NO: 1365771 - RNA, 19 nt, Artificial Sequence
  Description of Artificial Sequence: Synthetic oligonucleotide
  Antisense strand to SEQ ID NO: 1365770
uagcccaaucaguuugaca

SEQ ID NO: 1365772 - RNA, 19 nt, Artificial Sequence
  Description of Artificial Sequence: Synthetic oligonucleotide
  Sense strand starting at position 210 of SEQ ID NO: 1242689
uucccagauagcuggugaa

SEQ ID NO: 1365773 - RNA, 19 nt, Artificial Sequence
  Description of Artificial Sequence: Synthetic oligonucleotide
  Antisense strand to SEQ ID NO: 1365772
uucaccagcuaucugggaa

SEQ ID NO: 1365774 - RNA, 19 nt, Artificial Sequence
  Description of Artificial Sequence: Synthetic oligonucleotide
  Sense strand starting at position 291 of SEQ ID NO: 1242689
auggcaaaucucgggacuu

SEQ ID NO: 1365775 - RNA, 19 nt, Artificial Sequence
  Description of Artificial Sequence: Synthetic oligonucleotide
  Antisense strand to SEQ ID NO: 1365774
aagucccgagauuugccau

SEQ ID NO: 1365776 - RNA, 19 nt, Artificial Sequence
  Description of Artificial Sequence: Synthetic oligonucleotide
  Sense strand starting at position 293 of SEQ ID NO: 1242689
ggcaaaucucgggacuucu

SEQ ID NO: 1365777 - RNA, 19 nt, Artificial Sequence
  Description of Artificial Sequence: Synthetic oligonucleotide
  Antisense strand to SEQ ID NO: 1365776
agaagucccgagauuugcc

SEQ ID NO: 1365778 - RNA, 19 nt, Artificial Sequence
  Description of Artificial Sequence: Synthetic oligonucleotide
  Sense strand starting at position 302 of SEQ ID NO: 1242689
cgggacuucucagccucua

SEQ ID NO: 1365779 - RNA, 19 nt, Artificial Sequence
  Description of Artificial Sequence: Synthetic oligonucleotide
  Antisense strand to SEQ ID NO: 1365778
uagaggcugagaagucccg

SEQ ID NO: 1365780 - RNA, 19 nt, Artificial Sequence
  Description of Artificial Sequence: Synthetic oligonucleotide
  Sense strand starting at position 320 of SEQ ID NO: 1242689
auaauagugucacccaauc

SEQ ID NO: 1365781 - RNA, 19 nt, Artificial Sequence
  Description of Artificial Sequence: Synthetic oligonucleotide
  Antisense strand to SEQ ID NO: 1365780
gauugggugacacuauuau

SEQ ID NO: 1365782 - RNA, 19 nt, Artificial Sequence
  Description of Artificial Sequence: Synthetic oligonucleotide
  Sense strand starting at position 527 of SEQ ID NO: 1242689
cuggguuuaagugauuauu

SEQ ID NO: 1365783 - RNA, 19 nt, Artificial Sequence
  Description of Artificial Sequence: Synthetic oligonucleotide
  Antisense strand to SEQ ID NO: 1365782
aauaaucacuuaaacccag

SEQ ID NO: 1365784 - RNA, 19 nt, Artificial Sequence
  Description of Artificial Sequence: Synthetic oligonucleotide
  Sense strand starting at position 529 of SEQ ID NO: 1242689
ggguuuaagugauuauugu

SEQ ID NO: 1365785 - RNA, 19 nt, Artificial Sequence
  Description of Artificial Sequence: Synthetic oligonucleotide
  Antisense strand to SEQ ID NO: 1365784
acaauaaucacuuaaaccc

SEQ ID NO: 1365786 - RNA, 19 nt, Artificial Sequence
  Description of Artificial Sequence: Synthetic oligonucleotide
  Sense strand starting at position 530 of SEQ ID NO: 1242689
gguuuaagugauuauugug

SEQ ID NO: 1365787 - RNA, 19 nt, Artificial Sequence
  Description of Artificial Sequence: Synthetic oligonucleotide
  Antisense strand to SEQ ID NO: 1365786
cacaauaaucacuuaaacc

SEQ ID NO: 1365788 - RNA, 19 nt, Artificial Sequence
  Description of Artificial Sequence: Synthetic oligonucleotide
  Sense strand starting at position 901 of SEQ ID NO: 1242689
cagagaacgugucucuaau

SEQ ID NO: 1365789 - RNA, 19 nt, Artificial Sequence
  Description of Artificial Sequence: Synthetic oligonucleotide
  Antisense strand to SEQ ID NO: 1365788
auuagagacacguucucug

SEQ ID NO: 1365790 - RNA, 19 nt, Artificial Sequence
  Description of Artificial Sequence: Synthetic oligonucleotide
  Sense strand starting at position 903 of SEQ ID NO: 1242689
gagaacgugucucuaauaa

SEQ ID NO: 1365791 - RNA, 19 nt, Artificial Sequence
  Description of Artificial Sequence: Synthetic oligonucleotide
  Antisense strand to SEQ ID NO: 1365790
uuauuagagacacguucuc

SEQ ID NO: 1365792 - RNA, 19 nt, Artificial Sequence
  Description of Artificial Sequence: Synthetic oligonucleotide
  Sense strand starting at position 935 of SEQ ID NO: 1242689
agaugaugccuagguuaga

SEQ ID NO: 1365793 - RNA, 19 nt, Artificial Sequence
  Description of Artificial Sequence: Synthetic oligonucleotide
  Antisense strand to SEQ ID NO: 1365792
ucuaaccuaggcaucaucu

SEQ ID NO: 1365794 - RNA, 19 nt, Artificial Sequence
  Description of Artificial Sequence: Synthetic oligonucleotide
  Sense strand starting at position 936 of SEQ ID NO: 1242689
gaugaugccuagguuagaa

SEQ ID NO: 1365795 - RNA, 19 nt, Artificial Sequence
  Description of Artificial Sequence: Synthetic oligonucleotide
  Antisense strand to SEQ ID NO: 1365794
uucuaaccuaggcaucauc

SEQ ID NO: 1365796 - RNA, 19 nt, Artificial Sequence
  Description of Artificial Sequence: Synthetic oligonucleotide
  Sense strand starting at position 1037 of SEQ ID NO: 1242689
ggcagugauccacagcauc

SEQ ID NO: 1365797 - RNA, 19 nt, Artificial Sequence
  Description of Artificial Sequence: Synthetic oligonucleotide
  Antisense strand to SEQ ID NO: 1365796
gaugcuguggaucacugcc

SEQ ID NO: 1365798 - RNA, 19 nt, Artificial Sequence
  Description of Artificial Sequence: Synthetic oligonucleotide
  Sense strand starting at position 1040 of SEQ ID NO: 1242689
agugauccacagcaucaaa

SEQ ID NO: 1365799 - RNA, 19 nt, Artificial Sequence
  Description of Artificial Sequence: Synthetic oligonucleotide
  Antisense strand to SEQ ID NO: 1365798
uuugaugcuguggaucacu

SEQ ID NO: 1365800 - RNA, 19 nt, Artificial Sequence
  Description of Artificial Sequence: Synthetic oligonucleotide
  Sense strand starting at position 1298 of SEQ ID NO: 1242689
guucuuaagacgggcauuu

SEQ ID NO: 1365801 - RNA, 19 nt, Artificial Sequence
  Description of Artificial Sequence: Synthetic oligonucleotide
  Antisense strand to SEQ ID NO: 1365800
aaaugcccgucuuaagaac

SEQ ID NO: 1365802 - RNA, 19 nt, Artificial Sequence
  Description of Artificial Sequence: Synthetic oligonucleotide
  Sense strand starting at position 1397 of SEQ ID NO: 1242689
cgacgagcuguuaguguau

SEQ ID NO: 1365803 - RNA, 19 nt, Artificial Sequence
  Description of Artificial Sequence: Synthetic oligonucleotide
  Antisense strand to SEQ ID NO: 1365802
auacacuaacagcucgucg

SEQ ID NO: 1365804 - RNA, 19 nt, Artificial Sequence
  Description of Artificial Sequence: Synthetic oligonucleotide
  Sense strand starting at position 1400 of SEQ ID NO: 1242689
cgagcuguuaguguaucuu

SEQ ID NO: 1365805 - RNA, 19 nt, Artificial Sequence
  Description of Artificial Sequence: Synthetic oligonucleotide
  Antisense strand to SEQ ID NO: 1365804
aagauacacuaacagcucg

SEQ ID NO: 1365806 - RNA, 19 nt, Artificial Sequence
  Description of Artificial Sequence: Synthetic oligonucleotide
  Sense strand starting at position 1403 of SEQ ID NO: 1242689
gcuguuaguguaucuuguu

SEQ ID NO: 1365807 - RNA, 19 nt, Artificial Sequence
  Description of Artificial Sequence: Synthetic oligonucleotide
  Antisense strand to SEQ ID NO: 1365806
aacaagauacacuaacagc

SEQ ID NO: 1365808 - RNA, 19 nt, Artificial Sequence
  Description of Artificial Sequence: Synthetic oligonucleotide
  Sense strand starting at position 1408 of SEQ ID NO: 1242689
uaguguaucuuguuaagaa

SEQ ID NO: 1365809 - RNA, 19 nt, Artificial Sequence
  Description of Artificial Sequence: Synthetic oligonucleotide
  Antisense strand to SEQ ID NO: 1365808
uucuuaacaagauacacua

SEQ ID NO: 1365810 - RNA, 19 nt, Artificial Sequence
  Description of Artificial Sequence: Synthetic oligonucleotide
  Sense strand starting at position 2683 of SEQ ID NO: 1242689
cgcacuucuagggaaucuu

SEQ ID NO: 1365811 - RNA, 19 nt, Artificial Sequence
  Description of Artificial Sequence: Synthetic oligonucleotide
  Antisense strand to SEQ ID NO: 1365810
aagauucccuagaagugcg

SEQ ID NO: 1365812 - RNA, 19 nt, Artificial Sequence
  Description of Artificial Sequence: Synthetic oligonucleotide
  Sense strand starting at position 2703 of SEQ ID NO: 1242689
ucaggaaaguacuaaggau

SEQ ID NO: 1365813 - RNA, 19 nt, Artificial Sequence
  Description of Artificial Sequence: Synthetic oligonucleotide
  Antisense strand to SEQ ID NO: 1365812
auccuuaguacuuuccuga

SEQ ID NO: 1365814 - RNA, 19 nt, Artificial Sequence
  Description of Artificial Sequence: Synthetic oligonucleotide
  Sense strand starting at position 2715 of SEQ ID NO: 1242689
uaaggauauggacgugcaa

SEQ ID NO: 1365815 - RNA, 19 nt, Artificial Sequence
  Description of Artificial Sequence: Synthetic oligonucleotide
  Antisense strand to SEQ ID NO: 1365814
uugcacguccauauccuua

SEQ ID NO: 1365816 - RNA, 19 nt, Artificial Sequence
  Description of Artificial Sequence: Synthetic oligonucleotide
  Sense strand starting at position 2717 of SEQ ID NO: 1242689
aggauauggacgugcaaug

SEQ ID NO: 1365817 - RNA, 19 nt, Artificial Sequence
  Description of Artificial Sequence: Synthetic oligonucleotide
  Antisense strand to SEQ ID NO: 1365816
cauugcacguccauauccu

SEQ ID NO: 1365818 - RNA, 19 nt, Artificial Sequence
  Description of Artificial Sequence: Synthetic oligonucleotide
  Sense strand starting at position 2798 of SEQ ID NO: 1242689
accuacaaaugucuguaau

SEQ ID NO: 1365819 - RNA, 19 nt, Artificial Sequence
  Description of Artificial Sequence: Synthetic oligonucleotide
  Antisense strand to SEQ ID NO: 1365818
auuacagacauuuguaggu

SEQ ID NO: 1365820 - RNA, 19 nt, Artificial Sequence
  Description of Artificial Sequence: Synthetic oligonucleotide
  Sense strand starting at position 2799 of SEQ ID NO: 1242689
ccuacaaaugucuguaauu

SEQ ID NO: 1365821 - RNA, 19 nt, Artificial Sequence
  Description of Artificial Sequence: Synthetic oligonucleotide
  Antisense strand to SEQ ID NO: 1365820
aauuacagacauuuguagg

SEQ ID NO: 1365822 - RNA, 19 nt, Artificial Sequence
  Description of Artificial Sequence: Synthetic oligonucleotide
  Sense strand starting at position 2800 of SEQ ID NO: 1242689
cuacaaaugucuguaauua

SEQ ID NO: 1365823 - RNA, 19 nt, Artificial Sequence
  Description of Artificial Sequence: Synthetic oligonucleotide
  Antisense strand to SEQ ID NO: 1365822
uaauuacagacauuuguag

SEQ ID NO: 1365824 - RNA, 19 nt, Artificial Sequence
  Description of Artificial Sequence: Synthetic oligonucleotide
  Sense strand starting at position 2808 of SEQ ID NO: 1242689
gucuguaauuauuuguuga

SEQ ID NO: 1365825 - RNA, 19 nt, Artificial Sequence
  Description of Artificial Sequence: Synthetic oligonucleotide
  Antisense strand to SEQ ID NO: 1365824
ucaacaaauaauuacagac

SEQ ID NO: 1365826 - RNA, 19 nt, Artificial Sequence
  Description of Artificial Sequence: Synthetic oligonucleotide
  Sense strand starting at position 2840 of SEQ ID NO: 1242689
uugcaaguccuaugagauu

SEQ ID NO: 1365827 - RNA, 19 nt, Artificial Sequence
  Description of Artificial Sequence: Synthetic oligonucleotide
  Antisense strand to SEQ ID NO: 1365826
aaucucauaggacuugcaa

SEQ ID NO: 1365828 - RNA, 19 nt, Artificial Sequence
  Description of Artificial Sequence: Synthetic oligonucleotide
  Sense strand starting at position 2846 of SEQ ID NO: 1242689
guccuaugagauugggauc

SEQ ID NO: 1365829 - RNA, 19 nt, Artificial Sequence
  Description of Artificial Sequence: Synthetic oligonucleotide
  Antisense strand to SEQ ID NO: 1365828
gaucccaaucucauaggac

SEQ ID NO: 1365830 - RNA, 19 nt, Artificial Sequence
  Description of Artificial Sequence: Synthetic oligonucleotide
  Sense strand starting at position 3211 of SEQ ID NO: 1242689
ggcguuagcacugaaacua

SEQ ID NO: 1365831 - RNA, 19 nt, Artificial Sequence
  Description of Artificial Sequence: Synthetic oligonucleotide
  Antisense strand to SEQ ID NO: 1365830
uaguuucagugcuaacgcc

SEQ ID NO: 1365832 - RNA, 19 nt, Artificial Sequence
  Description of Artificial Sequence: Synthetic oligonucleotide
  Sense strand starting at position 3287 of SEQ ID NO: 1242689
gggcgucaggucagugaau

SEQ ID NO: 1365833 - RNA, 19 nt, Artificial Sequence
  Description of Artificial Sequence: Synthetic oligonucleotide
  Antisense strand to SEQ ID NO: 1365832
auucacugaccugacgccc

SEQ ID NO: 1365834 - RNA, 19 nt, Artificial Sequence
  Description of Artificial Sequence: Synthetic oligonucleotide
  Sense strand starting at position 3352 of SEQ ID NO: 1242689
aagguuaugcuuugaggga

SEQ ID NO: 1365835 - RNA, 19 nt, Artificial Sequence
  Description of Artificial Sequence: Synthetic oligonucleotide
  Antisense strand to SEQ ID NO: 1365834
ucccucaaagcauaaccuu

SEQ ID NO: 1365836 - RNA, 19 nt, Artificial Sequence
  Description of Artificial Sequence: Synthetic oligonucleotide
  Sense strand starting at position 3900 of SEQ ID NO: 1242689
uuuagaguguuguccacau

SEQ ID NO: 1365837 - RNA, 19 nt, Artificial Sequence
  Description of Artificial Sequence: Synthetic oligonucleotide
  Antisense strand to SEQ ID NO: 1365836
auguggacaacacucuaaa

SEQ ID NO: 1365838 - RNA, 19 nt, Artificial Sequence
  Description of Artificial Sequence: Synthetic oligonucleotide
  Sense strand starting at position 3902 of SEQ ID NO: 1242689
uagaguguuguccacaugu

SEQ ID NO: 1365839 - RNA, 19 nt, Artificial Sequence
  Description of Artificial Sequence: Synthetic oligonucleotide
  Antisense strand to SEQ ID NO: 1365838
acauguggacaacacucua

SEQ ID NO: 1365840 - RNA, 19 nt, Artificial Sequence
  Description of Artificial Sequence: Synthetic oligonucleotide
  Sense strand starting at position 3904 of SEQ ID NO: 1242689
gaguguuguccacauguaa

SEQ ID NO: 1365841 - RNA, 19 nt, Artificial Sequence
  Description of Artificial Sequence: Synthetic oligonucleotide
  Antisense strand to SEQ ID NO: 1365840
uuacauguggacaacacuc

SEQ ID NO: 1365842 - RNA, 19 nt, Artificial Sequence
  Description of Artificial Sequence: Synthetic oligonucleotide
  Sense strand starting at position 3908 of SEQ ID NO: 1242689
guuguccacauguaaggaa

SEQ ID NO: 1365843 - RNA, 19 nt, Artificial Sequence
  Description of Artificial Sequence: Synthetic oligonucleotide
  Antisense strand to SEQ ID NO: 1365842
uuccuuacauguggacaac

SEQ ID NO: 1365844 - RNA, 19 nt, Artificial Sequence
  Description of Artificial Sequence: Synthetic oligonucleotide
  Sense strand starting at position 3921 of SEQ ID NO: 1242689
aaggaauugcucugucuuc

SEQ ID NO: 1365845 - RNA, 19 nt, Artificial Sequence
  Description of Artificial Sequence: Synthetic oligonucleotide
  Antisense strand to SEQ ID NO: 1365844
gaagacagagcaauuccuu

SEQ ID NO: 1365846 - RNA, 19 nt, Artificial Sequence
  Description of Artificial Sequence: Synthetic oligonucleotide
  Sense strand starting at position 8 of SEQ ID NO: 1242690
cuccguguucuacagcaaa

SEQ ID NO: 1365847 - RNA, 19 nt, Artificial Sequence
  Description of Artificial Sequence: Synthetic oligonucleotide
  Antisense strand to SEQ ID NO: 1365846
uuugcuguagaacacggag

SEQ ID NO: 1365848 - RNA, 19 nt, Artificial Sequence
  Description of Artificial Sequence: Synthetic oligonucleotide
  Sense strand starting at position 86 of SEQ ID NO: 1242690
gcgugauggauggaaggua

SEQ ID NO: 1365849 - RNA, 19 nt, Artificial Sequence
  Description of Artificial Sequence: Synthetic oligonucleotide
  Antisense strand to SEQ ID NO: 1365848
uaccuuccauccaucacgc

SEQ ID NO: 1365850 - RNA, 19 nt, Artificial Sequence
  Description of Artificial Sequence: Synthetic oligonucleotide
  Sense strand starting at position 162 of SEQ ID NO: 1242690
aagguugagucauccuaaa

SEQ ID NO: 1365851 - RNA, 19 nt, Artificial Sequence
  Description of Artificial Sequence: Synthetic oligonucleotide
  Antisense strand to SEQ ID NO: 1365850
uuuaggaugacucaaccuu

SEQ ID NO: 1365852 - RNA, 19 nt, Artificial Sequence
  Description of Artificial Sequence: Synthetic oligonucleotide
  Sense strand starting at position 206 of SEQ ID NO: 1242690
cucugagacagguagguau

SEQ ID NO: 1365853 - RNA, 19 nt, Artificial Sequence
  Description of Artificial Sequence: Synthetic oligonucleotide
  Antisense strand to SEQ ID NO: 1365852
auaccuaccugucucagag

SEQ ID NO: 1365854 - RNA, 19 nt, Artificial Sequence
  Description of Artificial Sequence: Synthetic oligonucleotide
  Sense strand starting at position 244 of SEQ ID NO: 1242690
guuggaauaagaggucauc

SEQ ID NO: 1365855 - RNA, 19 nt, Artificial Sequence
  Description of Artificial Sequence: Synthetic oligonucleotide
  Antisense strand to SEQ ID NO: 1365854
gaugaccucuuauuccaac

SEQ ID NO: 1365856 - RNA, 19 nt, Artificial Sequence
  Description of Artificial Sequence: Synthetic oligonucleotide
  Sense strand starting at position 350 of SEQ ID NO: 1242690
uuggaugggucucuccaua

SEQ ID NO: 1365857 - RNA, 19 nt, Artificial Sequence
  Description of Artificial Sequence: Synthetic oligonucleotide
  Antisense strand to SEQ ID NO: 1365856
uauggagagacccauccaa

SEQ ID NO: 1365858 - RNA, 19 nt, Artificial Sequence
  Description of Artificial Sequence: Synthetic oligonucleotide
  Sense strand starting at position 355 of SEQ ID NO: 1242690
ugggucucuccauaucagu

SEQ ID NO: 1365859 - RNA, 19 nt, Artificial Sequence
  Description of Artificial Sequence: Synthetic oligonucleotide
  Antisense strand to SEQ ID NO: 1365858
acugauauggagagaccca

SEQ ID NO: 1365860 - RNA, 19 nt, Artificial Sequence
  Description of Artificial Sequence: Synthetic oligonucleotide
  Sense strand starting at position 564 of SEQ ID NO: 1242690
aggacagccugauugaaua

SEQ ID NO: 1365861 - RNA, 19 nt, Artificial Sequence
  Description of Artificial Sequence: Synthetic oligonucleotide
  Antisense strand to SEQ ID NO: 1365860
uauucaaucaggcuguccu

SEQ ID NO: 1365862 - RNA, 19 nt, Artificial Sequence
  Description of Artificial Sequence: Synthetic oligonucleotide
  Sense strand starting at position 789 of SEQ ID NO: 1242690
cagagacagccuggaucau

SEQ ID NO: 1365863 - RNA, 19 nt, Artificial Sequence
  Description of Artificial Sequence: Synthetic oligonucleotide
  Antisense strand to SEQ ID NO: 1365862
augauccaggcugucucug

SEQ ID NO: 1365864 - RNA, 19 nt, Artificial Sequence
  Description of Artificial Sequence: Synthetic oligonucleotide
  Sense strand starting at position 1108 of SEQ ID NO: 1242690
acucuuguacagcagacau

SEQ ID NO: 1365865 - RNA, 19 nt, Artificial Sequence
  Description of Artificial Sequence: Synthetic oligonucleotide
  Antisense strand to SEQ ID NO: 1365864
augucugcuguacaagagu

SEQ ID NO: 1365866 - RNA, 19 nt, Artificial Sequence
  Description of Artificial Sequence: Synthetic oligonucleotide
  Sense strand starting at position 1148 of SEQ ID NO: 1242690
acugauaugcugugugaua

SEQ ID NO: 1365867 - RNA, 19 nt, Artificial Sequence
  Description of Artificial Sequence: Synthetic oligonucleotide
  Antisense strand to SEQ ID NO: 1365866
uaucacacagcauaucagu

SEQ ID NO: 1365868 - RNA, 19 nt, Artificial Sequence
  Description of Artificial Sequence: Synthetic oligonucleotide
  Sense strand starting at position 1149 of SEQ ID NO: 1242690
cugauaugcugugugauau

SEQ ID NO: 1365869 - RNA, 19 nt, Artificial Sequence
  Description of Artificial Sequence: Synthetic oligonucleotide
  Antisense strand to SEQ ID NO: 1365868
auaucacacagcauaucag

SEQ ID NO: 1365870 - RNA, 19 nt, Artificial Sequence
  Description of Artificial Sequence: Synthetic oligonucleotide
  Sense strand starting at position 1150 of SEQ ID NO: 1242690
ugauaugcugugugauauc

SEQ ID NO: 1365871 - RNA, 19 nt, Artificial Sequence
  Description of Artificial Sequence: Synthetic oligonucleotide
  Antisense strand to SEQ ID NO: 1365870
gauaucacacagcauauca

SEQ ID NO: 1365872 - RNA, 19 nt, Artificial Sequence
  Description of Artificial Sequence: Synthetic oligonucleotide
  Sense strand starting at position 1159 of SEQ ID NO: 1242690
gugugauaucugcaagucc

SEQ ID NO: 1365873 - RNA, 19 nt, Artificial Sequence
  Description of Artificial Sequence: Synthetic oligonucleotide
  Antisense strand to SEQ ID NO: 1365872
ggacuugcagauaucacac

SEQ ID NO: 1365874 - RNA, 19 nt, Artificial Sequence
  Description of Artificial Sequence: Synthetic oligonucleotide
  Sense strand starting at position 1756 of SEQ ID NO: 1242690
gggaggcgucuagaaaguu

SEQ ID NO: 1365875 - RNA, 19 nt, Artificial Sequence
  Description of Artificial Sequence: Synthetic oligonucleotide
  Antisense strand to SEQ ID NO: 1365874
aacuuucuagacgccuccc

SEQ ID NO: 1365876 - RNA, 19 nt, Artificial Sequence
  Description of Artificial Sequence: Synthetic oligonucleotide
  Sense strand starting at position 2502 of SEQ ID NO: 1242690
gcaaccuugcgcuuguuaa

SEQ ID NO: 1365877 - RNA, 19 nt, Artificial Sequence
  Description of Artificial Sequence: Synthetic oligonucleotide
  Antisense strand to SEQ ID NO: 1365876
uuaacaagcgcaagguugc

SEQ ID NO: 1365878 - RNA, 19 nt, Artificial Sequence
  Description of Artificial Sequence: Synthetic oligonucleotide
  Sense strand starting at position 2666 of SEQ ID NO: 1242690
ggauguuuguggucuugac

SEQ ID NO: 1365879 - RNA, 19 nt, Artificial Sequence
  Description of Artificial Sequence: Synthetic oligonucleotide
  Antisense strand to SEQ ID NO: 1365878
gucaagaccacaaacaucc

SEQ ID NO: 1365880 - RNA, 19 nt, Artificial Sequence
  Description of Artificial Sequence: Synthetic oligonucleotide
  Sense strand starting at position 2670 of SEQ ID NO: 1242690
guuuguggucuugacugga

SEQ ID NO: 1365881 - RNA, 19 nt, Artificial Sequence
  Description of Artificial Sequence: Synthetic oligonucleotide
  Antisense strand to SEQ ID NO: 1365880
uccagucaagaccacaaac

SEQ ID NO: 1365882 - RNA, 19 nt, Artificial Sequence
  Description of Artificial Sequence: Synthetic oligonucleotide
  Sense strand starting at position 2673 of SEQ ID NO: 1242690
uguggucuugacuggaaag

SEQ ID NO: 1365883 - RNA, 19 nt, Artificial Sequence
  Description of Artificial Sequence: Synthetic oligonucleotide
  Antisense strand to SEQ ID NO: 1365882
cuuuccagucaagaccaca

SEQ ID NO: 1365884 - RNA, 19 nt, Artificial Sequence
  Description of Artificial Sequence: Synthetic oligonucleotide
  Sense strand starting at position 2866 of SEQ ID NO: 1242690
ccgugauuaacggaguuua

SEQ ID NO: 1365885 - RNA, 19 nt, Artificial Sequence
  Description of Artificial Sequence: Synthetic oligonucleotide
  Antisense strand to SEQ ID NO: 1365884
uaaacuccguuaaucacgg

SEQ ID NO: 1365886 - RNA, 19 nt, Artificial Sequence
  Description of Artificial Sequence: Synthetic oligonucleotide
  Sense strand starting at position 2876 of SEQ ID NO: 1242690
cggaguuuagauuaugauu

SEQ ID NO: 1365887 - RNA, 19 nt, Artificial Sequence
  Description of Artificial Sequence: Synthetic oligonucleotide
  Antisense strand to SEQ ID NO: 1365886
aaucauaaucuaaacuccg

SEQ ID NO: 1365888 - RNA, 19 nt, Artificial Sequence
  Description of Artificial Sequence: Synthetic oligonucleotide
  Sense strand starting at position 2881 of SEQ ID NO: 1242690
uuuagauuaugauugcaac

SEQ ID NO: 1365889 - RNA, 19 nt, Artificial Sequence
  Description of Artificial Sequence: Synthetic oligonucleotide
  Antisense strand to SEQ ID NO: 1365888
guugcaaucauaaucuaaa

SEQ ID NO: 1365890 - RNA, 19 nt, Artificial Sequence
  Description of Artificial Sequence: Synthetic oligonucleotide
  Sense strand starting at position 2933 of SEQ ID NO: 1242690
agauguuaacacuggaagu

SEQ ID NO: 1365891 - RNA, 19 nt, Artificial Sequence
  Description of Artificial Sequence: Synthetic oligonucleotide
  Antisense strand to SEQ ID NO: 1365890
acuuccaguguuaacaucu

SEQ ID NO: 1365892 - RNA, 19 nt, Artificial Sequence
  Description of Artificial Sequence: Synthetic oligonucleotide
  Sense strand starting at position 2961 of SEQ ID NO: 1242690
ucuuguaauaguugaguau

SEQ ID NO: 1365893 - RNA, 19 nt, Artificial Sequence
  Description of Artificial Sequence: Synthetic oligonucleotide
  Antisense strand to SEQ ID NO: 1365892
auacucaacuauuacaaga

SEQ ID NO: 1365894 - RNA, 19 nt, Artificial Sequence
  Description of Artificial Sequence: Synthetic oligonucleotide
  Sense strand starting at position 2964 of SEQ ID NO: 1242690
uguaauaguugaguaugua

SEQ ID NO: 1365895 - RNA, 19 nt, Artificial Sequence
  Description of Artificial Sequence: Synthetic oligonucleotide
  Antisense strand to SEQ ID NO: 1365894
uacauacucaacuauuaca

SEQ ID NO: 1365896 - RNA, 19 nt, Artificial Sequence
  Description of Artificial Sequence: Synthetic oligonucleotide
  Sense strand starting at position 2965 of SEQ ID NO: 1242690
guaauaguugaguauguag

SEQ ID NO: 1365897 - RNA, 19 nt, Artificial Sequence
  Description of Artificial Sequence: Synthetic oligonucleotide
  Antisense strand to SEQ ID NO: 1365896
cuacauacucaacuauuac

SEQ ID NO: 1365898 - RNA, 19 nt, Artificial Sequence
  Description of Artificial Sequence: Synthetic oligonucleotide
  Sense strand starting at position 3040 of SEQ ID NO: 1242690
uugagagcuuccucaaacu

SEQ ID NO: 1365899 - RNA, 19 nt, Artificial Sequence
  Description of Artificial Sequence: Synthetic oligonucleotide
  Antisense strand to SEQ ID NO: 1365898
aguuugaggaagcucucaa

SEQ ID NO: 1365900 - RNA, 19 nt, Artificial Sequence
  Description of Artificial Sequence: Synthetic oligonucleotide
  Sense strand starting at position 3068 of SEQ ID NO: 1242690
cucugaauccuuugauagu

SEQ ID NO: 1365901 - RNA, 19 nt, Artificial Sequence
  Description of Artificial Sequence: Synthetic oligonucleotide
  Antisense strand to SEQ ID NO: 1365900
acuaucaaaggauucagag

SEQ ID NO: 1365902 - RNA, 19 nt, Artificial Sequence
  Description of Artificial Sequence: Synthetic oligonucleotide
  Sense strand starting at position 3187 of SEQ ID NO: 1242690
caugaaaucccauacguug

SEQ ID NO: 1365903 - RNA, 19 nt, Artificial Sequence
  Description of Artificial Sequence: Synthetic oligonucleotide
  Antisense strand to SEQ ID NO: 1365902
caacguaugggauuucaug

SEQ ID NO: 1365904 - RNA, 19 nt, Artificial Sequence
  Description of Artificial Sequence: Synthetic oligonucleotide
  Sense strand starting at position 3245 of SEQ ID NO: 1242690
auuuguuaugcguggcuga

SEQ ID NO: 1365905 - RNA, 19 nt, Artificial Sequence
  Description of Artificial Sequence: Synthetic oligonucleotide
  Antisense strand to SEQ ID NO: 1365904
ucagccacgcauaacaaau

SEQ ID NO: 1365906 - RNA, 19 nt, Artificial Sequence
  Description of Artificial Sequence: Synthetic oligonucleotide
  Sense strand starting at position 3247 of SEQ ID NO: 1242690
uuguuaugcguggcugaau

SEQ ID NO: 1365907 - RNA, 19 nt, Artificial Sequence
  Description of Artificial Sequence: Synthetic oligonucleotide
  Antisense strand to SEQ ID NO: 1365906
auucagccacgcauaacaa

SEQ ID NO: 1365908 - RNA, 19 nt, Artificial Sequence
  Description of Artificial Sequence: Synthetic oligonucleotide
  Sense strand starting at position 3294 of SEQ ID NO: 1242690
auagauaggagauguaugu

SEQ ID NO: 1365909 - RNA, 19 nt, Artificial Sequence
  Description of Artificial Sequence: Synthetic oligonucleotide
  Antisense strand to SEQ ID NO: 1365908
acauacaucuccuaucuau

SEQ ID NO: 1365910 - RNA, 19 nt, Artificial Sequence
  Description of Artificial Sequence: Synthetic oligonucleotide
  Sense strand starting at position 3440 of SEQ ID NO: 1242690
agaggucuugcccagaguu

SEQ ID NO: 1365911 - RNA, 19 nt, Artificial Sequence
  Description of Artificial Sequence: Synthetic oligonucleotide
  Antisense strand to SEQ ID NO: 1365910
aacucugggcaagaccucu

SEQ ID NO: 1365912 - RNA, 19 nt, Artificial Sequence
  Description of Artificial Sequence: Synthetic oligonucleotide
  Sense strand starting at position 3545 of SEQ ID NO: 1242690
ggccuucucuccuuaggaa

SEQ ID NO: 1365913 - RNA, 19 nt, Artificial Sequence
  Description of Artificial Sequence: Synthetic oligonucleotide
  Antisense strand to SEQ ID NO: 1365912
uuccuaaggagagaaggcc

SEQ ID NO: 1365914 - RNA, 19 nt, Artificial Sequence
  Description of Artificial Sequence: Synthetic oligonucleotide
  Sense strand starting at position 3671 of SEQ ID NO: 1242690
gcucgcaugauguuaucuu

SEQ ID NO: 1365915 - RNA, 19 nt, Artificial Sequence
  Description of Artificial Sequence: Synthetic oligonucleotide
  Antisense strand to SEQ ID NO: 1365914
aagauaacaucaugcgagc

SEQ ID NO: 1365916 - RNA, 19 nt, Artificial Sequence
  Description of Artificial Sequence: Synthetic oligonucleotide
  Sense strand starting at position 3680 of SEQ ID NO: 1242690
auguuaucuuaguuaccua

SEQ ID NO: 1365917 - RNA, 19 nt, Artificial Sequence
  Description of Artificial Sequence: Synthetic oligonucleotide
  Antisense strand to SEQ ID NO: 1365916
uagguaacuaagauaacau

SEQ ID NO: 1365918 - RNA, 19 nt, Artificial Sequence
  Description of Artificial Sequence: Synthetic oligonucleotide
  Sense strand starting at position 3736 of SEQ ID NO: 1242690
aagugaagaucagaaauga

SEQ ID NO: 1365919 - RNA, 19 nt, Artificial Sequence
  Description of Artificial Sequence: Synthetic oligonucleotide
  Antisense strand to SEQ ID NO: 1365918
ucauuucugaucuucacuu

SEQ ID NO: 1365920 - RNA, 19 nt, Artificial Sequence
  Description of Artificial Sequence: Synthetic oligonucleotide
  Sense strand starting at position 3886 of SEQ ID NO: 1242690
aaaguuuagacagguguga

SEQ ID NO: 1365921 - RNA, 19 nt, Artificial Sequence
  Description of Artificial Sequence: Synthetic oligonucleotide
  Antisense strand to SEQ ID NO: 1365920
ucacaccugucuaaacuuu

SEQ ID NO: 1365922 - RNA, 19 nt, Artificial Sequence
  Description of Artificial Sequence: Synthetic oligonucleotide
  Sense strand starting at position 3888 of SEQ ID NO: 1242690
aguuuagacaggugugaug

SEQ ID NO: 1365923 - RNA, 19 nt, Artificial Sequence
  Description of Artificial Sequence: Synthetic oligonucleotide
  Antisense strand to SEQ ID NO: 1365922
caucacaccugucuaaacu

SEQ ID NO: 1365924 - RNA, 19 nt, Artificial Sequence
  Description of Artificial Sequence: Synthetic oligonucleotide
  Sense strand starting at position 3949 of SEQ ID NO: 1242690
gaggaucgucucgaguaac

SEQ ID NO: 1365925 - RNA, 19 nt, Artificial Sequence
  Description of Artificial Sequence: Synthetic oligonucleotide
  Antisense strand to SEQ ID NO: 1365924
guuacucgagacgauccuc

SEQ ID NO: 1365926 - RNA, 19 nt, Artificial Sequence
  Description of Artificial Sequence: Synthetic oligonucleotide
  Sense strand starting at position 129 of SEQ ID NO: 1242691
agagaacagcuuugauguu

SEQ ID NO: 1365927 - RNA, 19 nt, Artificial Sequence
  Description of Artificial Sequence: Synthetic oligonucleotide
  Antisense strand to SEQ ID NO: 1365926
aacaucaaagcuguucucu

SEQ ID NO: 1365928 - RNA, 19 nt, Artificial Sequence
  Description of Artificial Sequence: Synthetic oligonucleotide
  Sense strand starting at position 643 of SEQ ID NO: 1242691
uggagucacaccugaguuu

SEQ ID NO: 1365929 - RNA, 19 nt, Artificial Sequence
  Description of Artificial Sequence: Synthetic oligonucleotide
  Antisense strand to SEQ ID NO: 1365928
aaacucaggugugacucca

SEQ ID NO: 1365930 - RNA, 19 nt, Artificial Sequence
  Description of Artificial Sequence: Synthetic oligonucleotide
  Sense strand starting at position 646 of SEQ ID NO: 1242691
agucacaccugaguuugaa

SEQ ID NO: 1365931 - RNA, 19 nt, Artificial Sequence
  Description of Artificial Sequence: Synthetic oligonucleotide
  Antisense strand to SEQ ID NO: 1365930
uucaaacucaggugugacu

SEQ ID NO: 1365932 - RNA, 19 nt, Artificial Sequence
  Description of Artificial Sequence: Synthetic oligonucleotide
  Sense strand starting at position 772 of SEQ ID NO: 1242691
uauguaaaugcaugguaca

SEQ ID NO: 1365933 - RNA, 19 nt, Artificial Sequence
  Description of Artificial Sequence: Synthetic oligonucleotide
  Antisense strand to SEQ ID NO: 1365932
uguaccaugcauuuacaua

SEQ ID NO: 1365934 - RNA, 19 nt, Artificial Sequence
  Description of Artificial Sequence: Synthetic oligonucleotide
  Sense strand starting at position 773 of SEQ ID NO: 1242691
auguaaaugcaugguacau

SEQ ID NO: 1365935 - RNA, 19 nt, Artificial Sequence
  Description of Artificial Sequence: Synthetic oligonucleotide
  Antisense strand to SEQ ID NO: 1365934
auguaccaugcauuuacau

SEQ ID NO: 1365936 - RNA, 19 nt, Artificial Sequence
  Description of Artificial Sequence: Synthetic oligonucleotide
  Sense strand starting at position 819 of SEQ ID NO: 1242691
guaauaauaccucaguucu

SEQ ID NO: 1365937 - RNA, 19 nt, Artificial Sequence
  Description of Artificial Sequence: Synthetic oligonucleotide
  Antisense strand to SEQ ID NO: 1365936
agaacugagguauuauuac

SEQ ID NO: 1365938 - RNA, 19 nt, Artificial Sequence
  Description of Artificial Sequence: Synthetic oligonucleotide
  Sense strand starting at position 849 of SEQ ID NO: 1242691
uuuguagauguauagaagu

SEQ ID NO: 1365939 - RNA, 19 nt, Artificial Sequence
  Description of Artificial Sequence: Synthetic oligonucleotide
  Antisense strand to SEQ ID NO: 1365938
acuucuauacaucuacaaa

SEQ ID NO: 1365940 - RNA, 19 nt, Artificial Sequence
  Description of Artificial Sequence: Synthetic oligonucleotide
  Sense strand starting at position 879 of SEQ ID NO: 1242691
agcugcuagagcuaggaua

SEQ ID NO: 1365941 - RNA, 19 nt, Artificial Sequence
  Description of Artificial Sequence: Synthetic oligonucleotide
  Antisense strand to SEQ ID NO: 1365940
uauccuagcucuagcagcu

SEQ ID NO: 1365942 - RNA, 19 nt, Artificial Sequence
  Description of Artificial Sequence: Synthetic oligonucleotide
  Sense strand starting at position 881 of SEQ ID NO: 1242691
cugcuagagcuaggauauu

SEQ ID NO: 1365943 - RNA, 19 nt, Artificial Sequence
  Description of Artificial Sequence: Synthetic oligonucleotide
  Antisense strand to SEQ ID NO: 1365942
aauauccuagcucuagcag

SEQ ID NO: 1365944 - RNA, 19 nt, Artificial Sequence
  Description of Artificial Sequence: Synthetic oligonucleotide
  Sense strand starting at position 890 of SEQ ID NO: 1242691
cuaggauauucugugcaag

SEQ ID NO: 1365945 - RNA, 19 nt, Artificial Sequence
  Description of Artificial Sequence: Synthetic oligonucleotide
  Antisense strand to SEQ ID NO: 1365944
cuugcacagaauauccuag

SEQ ID NO: 1365946 - RNA, 19 nt, Artificial Sequence
  Description of Artificial Sequence: Synthetic oligonucleotide
  Sense strand starting at position 891 of SEQ ID NO: 1242691
uaggauauucugugcaaga

SEQ ID NO: 1365947 - RNA, 19 nt, Artificial Sequence
  Description of Artificial Sequence: Synthetic oligonucleotide
  Antisense strand to SEQ ID NO: 1365946
ucuugcacagaauauccua

SEQ ID NO: 1365948 - RNA, 19 nt, Artificial Sequence
  Description of Artificial Sequence: Synthetic oligonucleotide
  Sense strand starting at position 892 of SEQ ID NO: 1242691
aggauauucugugcaagac

SEQ ID NO: 1365949 - RNA, 19 nt, Artificial Sequence
  Description of Artificial Sequence: Synthetic oligonucleotide
  Antisense strand to SEQ ID NO: 1365948
gucuugcacagaauauccu

SEQ ID NO: 1365950 - RNA, 19 nt, Artificial Sequence
  Description of Artificial Sequence: Synthetic oligonucleotide
  Sense strand starting at position 893 of SEQ ID NO: 1242691
ggauauucugugcaagacc

SEQ ID NO: 1365951 - RNA, 19 nt, Artificial Sequence
  Description of Artificial Sequence: Synthetic oligonucleotide
  Antisense strand to SEQ ID NO: 1365950
ggucuugcacagaauaucc

SEQ ID NO: 1365952 - RNA, 19 nt, Artificial Sequence
  Description of Artificial Sequence: Synthetic oligonucleotide
  Sense strand starting at position 966 of SEQ ID NO: 1242691
cuugcuauaguagaauaua

SEQ ID NO: 1365953 - RNA, 19 nt, Artificial Sequence
  Description of Artificial Sequence: Synthetic oligonucleotide
  Antisense strand to SEQ ID NO: 1365952
uauauucuacuauagcaag

SEQ ID NO: 1365954 - RNA, 19 nt, Artificial Sequence
  Description of Artificial Sequence: Synthetic oligonucleotide
  Sense strand starting at position 1489 of SEQ ID NO: 1242691
gaagucaccugguccaaau

SEQ ID NO: 1365955 - RNA, 19 nt, Artificial Sequence
  Description of Artificial Sequence: Synthetic oligonucleotide
  Antisense strand to SEQ ID NO: 1365954
auuuggaccaggugacuuc

SEQ ID NO: 1365956 - RNA, 19 nt, Artificial Sequence
  Description of Artificial Sequence: Synthetic oligonucleotide
  Sense strand starting at position 1517 of SEQ ID NO: 1242691
agaauuguggaucggcuaa

SEQ ID NO: 1365957 - RNA, 19 nt, Artificial Sequence
  Description of Artificial Sequence: Synthetic oligonucleotide
  Antisense strand to SEQ ID NO: 1365956
uuagccgauccacaauucu

SEQ ID NO: 1365958 - RNA, 19 nt, Artificial Sequence
  Description of Artificial Sequence: Synthetic oligonucleotide
  Sense strand starting at position 1554 of SEQ ID NO: 1242691
gagagacuccuccggcuga

SEQ ID NO: 1365959 - RNA, 19 nt, Artificial Sequence
  Description of Artificial Sequence: Synthetic oligonucleotide
  Antisense strand to SEQ ID NO: 1365958
ucagccggaggagucucuc

SEQ ID NO: 1365960 - RNA, 19 nt, Artificial Sequence
  Description of Artificial Sequence: Synthetic oligonucleotide
  Sense strand starting at position 1717 of SEQ ID NO: 1242691
cagugagggcuuggaucuu

SEQ ID NO: 1365961 - RNA, 19 nt, Artificial Sequence
  Description of Artificial Sequence: Synthetic oligonucleotide
  Antisense strand to SEQ ID NO: 1365960
aagauccaagcccucacug

SEQ ID NO: 1365962 - RNA, 19 nt, Artificial Sequence
  Description of Artificial Sequence: Synthetic oligonucleotide
  Sense strand starting at position 1723 of SEQ ID NO: 1242691
gggcuuggaucuucuccau

SEQ ID NO: 1365963 - RNA, 19 nt, Artificial Sequence
  Description of Artificial Sequence: Synthetic oligonucleotide
  Antisense strand to SEQ ID NO: 1365962
auggagaagauccaagccc

SEQ ID NO: 1365964 - RNA, 19 nt, Artificial Sequence
  Description of Artificial Sequence: Synthetic oligonucleotide
  Sense strand starting at position 2127 of SEQ ID NO: 1242691
accuaagcgcguucaguuu

SEQ ID NO: 1365965 - RNA, 19 nt, Artificial Sequence
  Description of Artificial Sequence: Synthetic oligonucleotide
  Antisense strand to SEQ ID NO: 1365964
aaacugaacgcgcuuaggu

SEQ ID NO: 1365966 - RNA, 19 nt, Artificial Sequence
  Description of Artificial Sequence: Synthetic oligonucleotide
  Sense strand starting at position 2214 of SEQ ID NO: 1242691
guccuuggcagcguguuaa

SEQ ID NO: 1365967 - RNA, 19 nt, Artificial Sequence
  Description of Artificial Sequence: Synthetic oligonucleotide
  Antisense strand to SEQ ID NO: 1365966
uuaacacgcugccaaggac

SEQ ID NO: 1365968 - RNA, 19 nt, Artificial Sequence
  Description of Artificial Sequence: Synthetic oligonucleotide
  Sense strand starting at position 2263 of SEQ ID NO: 1242691
uuguaaugguaucuaucaa

SEQ ID NO: 1365969 - RNA, 19 nt, Artificial Sequence
  Description of Artificial Sequence: Synthetic oligonucleotide
  Antisense strand to SEQ ID NO: 1365968
uugauagauaccauuacaa

SEQ ID NO: 1365970 - RNA, 19 nt, Artificial Sequence
  Description of Artificial Sequence: Synthetic oligonucleotide
  Sense strand starting at position 2667 of SEQ ID NO: 1242691
guagucaucuccuuaaauc

SEQ ID NO: 1365971 - RNA, 19 nt, Artificial Sequence
  Description of Artificial Sequence: Synthetic oligonucleotide
  Antisense strand to SEQ ID NO: 1365970
gauuuaaggagaugacuac

SEQ ID NO: 1365972 - RNA, 19 nt, Artificial Sequence
  Description of Artificial Sequence: Synthetic oligonucleotide
  Sense strand starting at position 2705 of SEQ ID NO: 1242691
guugguauuauugccguca

SEQ ID NO: 1365973 - RNA, 19 nt, Artificial Sequence
  Description of Artificial Sequence: Synthetic oligonucleotide
  Antisense strand to SEQ ID NO: 1365972
ugacggcaauaauaccaac

SEQ ID NO: 1365974 - RNA, 19 nt, Artificial Sequence
  Description of Artificial Sequence: Synthetic oligonucleotide
  Sense strand starting at position 2937 of SEQ ID NO: 1242691
gagggugaacucuggaugu

SEQ ID NO: 1365975 - RNA, 19 nt, Artificial Sequence
  Description of Artificial Sequence: Synthetic oligonucleotide
  Antisense strand to SEQ ID NO: 1365974
acauccagaguucacccuc

SEQ ID NO: 1365976 - RNA, 19 nt, Artificial Sequence
  Description of Artificial Sequence: Synthetic oligonucleotide
  Sense strand starting at position 2947 of SEQ ID NO: 1242691
ucuggaugugcuuagaaag

SEQ ID NO: 1365977 - RNA, 19 nt, Artificial Sequence
  Description of Artificial Sequence: Synthetic oligonucleotide
  Antisense strand to SEQ ID NO: 1365976
cuuucuaagcacauccaga

SEQ ID NO: 1365978 - RNA, 19 nt, Artificial Sequence
  Description of Artificial Sequence: Synthetic oligonucleotide
  Sense strand starting at position 2961 of SEQ ID NO: 1242691
gaaagcaagcugugaugaa

SEQ ID NO: 1365979 - RNA, 19 nt, Artificial Sequence
  Description of Artificial Sequence: Synthetic oligonucleotide
  Antisense strand to SEQ ID NO: 1365978
uucaucacagcuugcuuuc

SEQ ID NO: 1365980 - RNA, 19 nt, Artificial Sequence
  Description of Artificial Sequence: Synthetic oligonucleotide
  Sense strand starting at position 3217 of SEQ ID NO: 1242691
guccauauacaaggugaca

SEQ ID NO: 1365981 - RNA, 19 nt, Artificial Sequence
  Description of Artificial Sequence: Synthetic oligonucleotide
  Antisense strand to SEQ ID NO: 1365980
ugucaccuuguauauggac

SEQ ID NO: 1365982 - RNA, 19 nt, Artificial Sequence
  Description of Artificial Sequence: Synthetic oligonucleotide
  Sense strand starting at position 3295 of SEQ ID NO: 1242691
aagaaugggcucuguagca

SEQ ID NO: 1365983 - RNA, 19 nt, Artificial Sequence
  Description of Artificial Sequence: Synthetic oligonucleotide
  Antisense strand to SEQ ID NO: 1365982
ugcuacagagcccauucuu

SEQ ID NO: 1365984 - RNA, 19 nt, Artificial Sequence
  Description of Artificial Sequence: Synthetic oligonucleotide
  Sense strand starting at position 3349 of SEQ ID NO: 1242691
ggcugugugauacaacaga

SEQ ID NO: 1365985 - RNA, 19 nt, Artificial Sequence
  Description of Artificial Sequence: Synthetic oligonucleotide
  Antisense strand to SEQ ID NO: 1365984
ucuguuguaucacacagcc

SEQ ID NO: 1365986 - RNA, 19 nt, Artificial Sequence
  Description of Artificial Sequence: Synthetic oligonucleotide
  Sense strand starting at position 3511 of SEQ ID NO: 1242691
gaaauaacuccuggccugu

SEQ ID NO: 1365987 - RNA, 19 nt, Artificial Sequence
  Description of Artificial Sequence: Synthetic oligonucleotide
  Antisense strand to SEQ ID NO: 1365986
acaggccaggaguuauuuc

SEQ ID NO: 1365988 - RNA, 19 nt, Artificial Sequence
  Description of Artificial Sequence: Synthetic oligonucleotide
  Sense strand starting at position 3528 of SEQ ID NO: 1242691
guuacuauacccugguaga

SEQ ID NO: 1365989 - RNA, 19 nt, Artificial Sequence
  Description of Artificial Sequence: Synthetic oligonucleotide
  Antisense strand to SEQ ID NO: 1365988
ucuaccaggguauaguaac

SEQ ID NO: 1365990 - RNA, 19 nt, Artificial Sequence
  Description of Artificial Sequence: Synthetic oligonucleotide
  Sense strand starting at position 3529 of SEQ ID NO: 1242691
uuacuauacccugguagag

SEQ ID NO: 1365991 - RNA, 19 nt, Artificial Sequence
  Description of Artificial Sequence: Synthetic oligonucleotide
  Antisense strand to SEQ ID NO: 1365990
cucuaccaggguauaguaa

SEQ ID NO: 1365992 - RNA, 19 nt, Artificial Sequence
  Description of Artificial Sequence: Synthetic oligonucleotide
  Sense strand starting at position 3545 of SEQ ID NO: 1242691
gagacagaacgcuggauau

SEQ ID NO: 1365993 - RNA, 19 nt, Artificial Sequence
  Description of Artificial Sequence: Synthetic oligonucleotide
  Antisense strand to SEQ ID NO: 1365992
auauccagcguucugucuc

SEQ ID NO: 1365994 - RNA, 19 nt, Artificial Sequence
  Description of Artificial Sequence: Synthetic oligonucleotide
  Sense strand starting at position 3598 of SEQ ID NO: 1242691
ccucuaccagcugaguuau

SEQ ID NO: 1365995 - RNA, 19 nt, Artificial Sequence
  Description of Artificial Sequence: Synthetic oligonucleotide
  Antisense strand to SEQ ID NO: 1365994
auaacucagcugguagagg

SEQ ID NO: 1365996 - RNA, 19 nt, Artificial Sequence
  Description of Artificial Sequence: Synthetic oligonucleotide
  Sense strand starting at position 3646 of SEQ ID NO: 1242691
ugcaaauggaaaugguuaa

SEQ ID NO: 1365997 - RNA, 19 nt, Artificial Sequence
  Description of Artificial Sequence: Synthetic oligonucleotide
  Antisense strand to SEQ ID NO: 1365996
uuaaccauuuccauuugca

SEQ ID NO: 1365998 - RNA, 19 nt, Artificial Sequence
  Description of Artificial Sequence: Synthetic oligonucleotide
  Sense strand starting at position 3647 of SEQ ID NO: 1242691
gcaaauggaaaugguuaau

SEQ ID NO: 1365999 - RNA, 19 nt, Artificial Sequence
  Description of Artificial Sequence: Synthetic oligonucleotide
  Antisense strand to SEQ ID NO: 1365998
auuaaccauuuccauuugc

SEQ ID NO: 1366000 - RNA, 19 nt, Artificial Sequence
  Description of Artificial Sequence: Synthetic oligonucleotide
  Sense strand starting at position 3653 of SEQ ID NO: 1242691
ggaaaugguuaauccagca

SEQ ID NO: 1366001 - RNA, 19 nt, Artificial Sequence
  Description of Artificial Sequence: Synthetic oligonucleotide
  Antisense strand to SEQ ID NO: 1366000
ugcuggauuaaccauuucc

SEQ ID NO: 1366002 - RNA, 19 nt, Artificial Sequence
  Description of Artificial Sequence: Synthetic oligonucleotide
  Sense strand starting at position 3835 of SEQ ID NO: 1242691
aaggcuugagcucaguuua

SEQ ID NO: 1366003 - RNA, 19 nt, Artificial Sequence
  Description of Artificial Sequence: Synthetic oligonucleotide
  Antisense strand to SEQ ID NO: 1366002
uaaacugagcucaagccuu

SEQ ID NO: 1366004 - RNA, 19 nt, Artificial Sequence
  Description of Artificial Sequence: Synthetic oligonucleotide
  Sense strand starting at position 3973 of SEQ ID NO: 1242691
uguggcuggucaucuauuu

SEQ ID NO: 1366005 - RNA, 19 nt, Artificial Sequence
  Description of Artificial Sequence: Synthetic oligonucleotide
  Antisense strand to SEQ ID NO: 1366004
aaauagaugaccagccaca

SEQ ID NO: 1366006 - RNA, 19 nt, Artificial Sequence
  Description of Artificial Sequence: Synthetic oligonucleotide
  Sense strand starting at position 1530 of SEQ ID NO: 1242692
ggaggcaucuugggagcuu

SEQ ID NO: 1366007 - RNA, 19 nt, Artificial Sequence
  Description of Artificial Sequence: Synthetic oligonucleotide
  Antisense strand to SEQ ID NO: 1366006
aagcucccaagaugccucc

SEQ ID NO: 1366008 - RNA, 19 nt, Artificial Sequence
  Description of Artificial Sequence: Synthetic oligonucleotide
  Sense strand starting at position 1666 of SEQ ID NO: 1242692
gggcuuggcucagacaagu

SEQ ID NO: 1366009 - RNA, 19 nt, Artificial Sequence
  Description of Artificial Sequence: Synthetic oligonucleotide
  Antisense strand to SEQ ID NO: 1366008
acuugucugagccaagccc

SEQ ID NO: 1366010 - RNA, 19 nt, Artificial Sequence
  Description of Artificial Sequence: Synthetic oligonucleotide
  Sense strand starting at position 2192 of SEQ ID NO: 1242692
acacguguccucuggcaaa

SEQ ID NO: 1366011 - RNA, 19 nt, Artificial Sequence
  Description of Artificial Sequence: Synthetic oligonucleotide
  Antisense strand to SEQ ID NO: 1366010
uuugccagaggacacgugu

SEQ ID NO: 1366012 - RNA, 19 nt, Artificial Sequence
  Description of Artificial Sequence: Synthetic oligonucleotide
  Sense strand starting at position 3688 of SEQ ID NO: 1242692
cucccaagucucgaagacu

SEQ ID NO: 1366013 - RNA, 19 nt, Artificial Sequence
  Description of Artificial Sequence: Synthetic oligonucleotide
  Antisense strand to SEQ ID NO: 1366012
agucuucgagacuugggag

SEQ ID NO: 1366014 - RNA, 19 nt, Artificial Sequence
  Description of Artificial Sequence: Synthetic oligonucleotide
  Sense strand starting at position 3871 of SEQ ID NO: 1242692
agcugaucccuggagguaa

SEQ ID NO: 1366015 - RNA, 19 nt, Artificial Sequence
  Description of Artificial Sequence: Synthetic oligonucleotide
  Antisense strand to SEQ ID NO: 1366014
uuaccuccagggaucagcu

SEQ ID NO: 1366016 - RNA, 19 nt, Artificial Sequence
  Description of Artificial Sequence: Synthetic oligonucleotide
  Sense strand starting at position 292 of SEQ ID NO: 1242693
ggcucugguccucaagguu

SEQ ID NO: 1366017 - RNA, 19 nt, Artificial Sequence
  Description of Artificial Sequence: Synthetic oligonucleotide
  Antisense strand to SEQ ID NO: 1366016
aaccuugaggaccagagcc

SEQ ID NO: 1366018 - RNA, 19 nt, Artificial Sequence
  Description of Artificial Sequence: Synthetic oligonucleotide
  Sense strand starting at position 540 of SEQ ID NO: 1242693
gggaacuguuccuaccuca

SEQ ID NO: 1366019 - RNA, 19 nt, Artificial Sequence
  Description of Artificial Sequence: Synthetic oligonucleotide
  Antisense strand to SEQ ID NO: 1366018
ugagguaggaacaguuccc

SEQ ID NO: 1366020 - RNA, 19 nt, Artificial Sequence
  Description of Artificial Sequence: Synthetic oligonucleotide
  Sense strand starting at position 568 of SEQ ID NO: 1242693
gcaagaaucaauggagagu

SEQ ID NO: 1366021 - RNA, 19 nt, Artificial Sequence
  Description of Artificial Sequence: Synthetic oligonucleotide
  Antisense strand to SEQ ID NO: 1366020
acucuccauugauucuugc

SEQ ID NO: 1366022 - RNA, 19 nt, Artificial Sequence
  Description of Artificial Sequence: Synthetic oligonucleotide
  Sense strand starting at position 577 of SEQ ID NO: 1242693
aauggagagucauggaaag

SEQ ID NO: 1366023 - RNA, 19 nt, Artificial Sequence
  Description of Artificial Sequence: Synthetic oligonucleotide
  Antisense strand to SEQ ID NO: 1366022
cuuuccaugacucuccauu

SEQ ID NO: 1366024 - RNA, 19 nt, Artificial Sequence
  Description of Artificial Sequence: Synthetic oligonucleotide
  Sense strand starting at position 641 of SEQ ID NO: 1242693
ccugguguuccgcuauacu

SEQ ID NO: 1366025 - RNA, 19 nt, Artificial Sequence
  Description of Artificial Sequence: Synthetic oligonucleotide
  Antisense strand to SEQ ID NO: 1366024
aguauagcggaacaccagg

SEQ ID NO: 1366026 - RNA, 19 nt, Artificial Sequence
  Description of Artificial Sequence: Synthetic oligonucleotide
  Sense strand starting at position 1048 of SEQ ID NO: 1242693
aggucuuaauccucagagu

SEQ ID NO: 1366027 - RNA, 19 nt, Artificial Sequence
  Description of Artificial Sequence: Synthetic oligonucleotide
  Antisense strand to SEQ ID NO: 1366026
acucugaggauuaagaccu

SEQ ID NO: 1366028 - RNA, 19 nt, Artificial Sequence
  Description of Artificial Sequence: Synthetic oligonucleotide
  Sense strand starting at position 1049 of SEQ ID NO: 1242693
ggucuuaauccucagaguu

SEQ ID NO: 1366029 - RNA, 19 nt, Artificial Sequence
  Description of Artificial Sequence: Synthetic oligonucleotide
  Antisense strand to SEQ ID NO: 1366028
aacucugaggauuaagacc

SEQ ID NO: 1366030 - RNA, 19 nt, Artificial Sequence
  Description of Artificial Sequence: Synthetic oligonucleotide
  Sense strand starting at position 1208 of SEQ ID NO: 1242693
uguagugcaguggaucaua

SEQ ID NO: 1366031 - RNA, 19 nt, Artificial Sequence
  Description of Artificial Sequence: Synthetic oligonucleotide
  Antisense strand to SEQ ID NO: 1366030
uaugauccacugcacuaca

SEQ ID NO: 1366032 - RNA, 19 nt, Artificial Sequence
  Description of Artificial Sequence: Synthetic oligonucleotide
  Sense strand starting at position 1211 of SEQ ID NO: 1242693
agugcaguggaucauagaa

SEQ ID NO: 1366033 - RNA, 19 nt, Artificial Sequence
  Description of Artificial Sequence: Synthetic oligonucleotide
  Antisense strand to SEQ ID NO: 1366032
uucuaugauccacugcacu

SEQ ID NO: 1366034 - RNA, 19 nt, Artificial Sequence
  Description of Artificial Sequence: Synthetic oligonucleotide
  Sense strand starting at position 1213 of SEQ ID NO: 1242693
ugcaguggaucauagaauc

SEQ ID NO: 1366035 - RNA, 19 nt, Artificial Sequence
  Description of Artificial Sequence: Synthetic oligonucleotide
  Antisense strand to SEQ ID NO: 1366034
gauucuaugauccacugca

SEQ ID NO: 1366036 - RNA, 19 nt, Artificial Sequence
  Description of Artificial Sequence: Synthetic oligonucleotide
  Sense strand starting at position 3544 of SEQ ID NO: 1242693
accugcugugguugcaaau

SEQ ID NO: 1366037 - RNA, 19 nt, Artificial Sequence
  Description of Artificial Sequence: Synthetic oligonucleotide
  Antisense strand to SEQ ID NO: 1366036
auuugcaaccacagcaggu

SEQ ID NO: 1366038 - RNA, 19 nt, Artificial Sequence
  Description of Artificial Sequence: Synthetic oligonucleotide
  Sense strand starting at position 3567 of SEQ ID NO: 1242693
cggccaguuaacugagcau

SEQ ID NO: 1366039 - RNA, 19 nt, Artificial Sequence
  Description of Artificial Sequence: Synthetic oligonucleotide
  Antisense strand to SEQ ID NO: 1366038
augcucaguuaacuggccg

SEQ ID NO: 1366040 - RNA, 19 nt, Artificial Sequence
  Description of Artificial Sequence: Synthetic oligonucleotide
  Sense strand starting at position 3581 of SEQ ID NO: 1242693
agcaucuacuguuugcaga

SEQ ID NO: 1366041 - RNA, 19 nt, Artificial Sequence
  Description of Artificial Sequence: Synthetic oligonucleotide
  Antisense strand to SEQ ID NO: 1366040
ucugcaaacaguagaugcu

SEQ ID NO: 1366042 - RNA, 19 nt, Artificial Sequence
  Description of Artificial Sequence: Synthetic oligonucleotide
  Sense strand starting at position 3582 of SEQ ID NO: 1242693
gcaucuacuguuugcagau

SEQ ID NO: 1366043 - RNA, 19 nt, Artificial Sequence
  Description of Artificial Sequence: Synthetic oligonucleotide
  Antisense strand to SEQ ID NO: 1366042
aucugcaaacaguagaugc

SEQ ID NO: 1366044 - RNA, 19 nt, Artificial Sequence
  Description of Artificial Sequence: Synthetic oligonucleotide
  Sense strand starting at position 3596 of SEQ ID NO: 1242693
cagauccuacauugaggua

SEQ ID NO: 1366045 - RNA, 19 nt, Artificial Sequence
  Description of Artificial Sequence: Synthetic oligonucleotide
  Antisense strand to SEQ ID NO: 1366044
uaccucaauguaggaucug

SEQ ID NO: 1366046 - RNA, 19 nt, Artificial Sequence
  Description of Artificial Sequence: Synthetic oligonucleotide
  Sense strand starting at position 3656 of SEQ ID NO: 1242693
gcaggaaauuauuagcaau

SEQ ID NO: 1366047 - RNA, 19 nt, Artificial Sequence
  Description of Artificial Sequence: Synthetic oligonucleotide
  Antisense strand to SEQ ID NO: 1366046
auugcuaauaauuuccugc

SEQ ID NO: 1366048 - RNA, 19 nt, Artificial Sequence
  Description of Artificial Sequence: Synthetic oligonucleotide
  Sense strand starting at position 3659 of SEQ ID NO: 1242693
ggaaauuauuagcaaugac

SEQ ID NO: 1366049 - RNA, 19 nt, Artificial Sequence
  Description of Artificial Sequence: Synthetic oligonucleotide
  Antisense strand to SEQ ID NO: 1366048
gucauugcuaauaauuucc

SEQ ID NO: 1366050 - RNA, 19 nt, Artificial Sequence
  Description of Artificial Sequence: Synthetic oligonucleotide
  Sense strand starting at position 3697 of SEQ ID NO: 1242693
ucuuaagcauucugcuaag

SEQ ID NO: 1366051 - RNA, 19 nt, Artificial Sequence
  Description of Artificial Sequence: Synthetic oligonucleotide
  Antisense strand to SEQ ID NO: 1366050
cuuagcagaaugcuuaaga

SEQ ID NO: 1366052 - RNA, 19 nt, Artificial Sequence
  Description of Artificial Sequence: Synthetic oligonucleotide
  Sense strand starting at position 3703 of SEQ ID NO: 1242693
gcauucugcuaaguaaacu

SEQ ID NO: 1366053 - RNA, 19 nt, Artificial Sequence
  Description of Artificial Sequence: Synthetic oligonucleotide
  Antisense strand to SEQ ID NO: 1366052
aguuuacuuagcagaaugc

SEQ ID NO: 1366054 - RNA, 19 nt, Artificial Sequence
  Description of Artificial Sequence: Synthetic oligonucleotide
  Sense strand starting at position 224 of SEQ ID NO: 1242694
caguguugcagccguagga

SEQ ID NO: 1366055 - RNA, 19 nt, Artificial Sequence
  Description of Artificial Sequence: Synthetic oligonucleotide
  Antisense strand to SEQ ID NO: 1366054
uccuacggcugcaacacug

SEQ ID NO: 1366056 - RNA, 19 nt, Artificial Sequence
  Description of Artificial Sequence: Synthetic oligonucleotide
  Sense strand starting at position 353 of SEQ ID NO: 1242694
ccaccugugcccugagagu

SEQ ID NO: 1366057 - RNA, 19 nt, Artificial Sequence
  Description of Artificial Sequence: Synthetic oligonucleotide
  Antisense strand to SEQ ID NO: 1366056
acucucagggcacaggugg

SEQ ID NO: 1366058 - RNA, 19 nt, Artificial Sequence
  Description of Artificial Sequence: Synthetic oligonucleotide
  Sense strand starting at position 507 of SEQ ID NO: 1242694
caggguugcccugaagaca

SEQ ID NO: 1366059 - RNA, 19 nt, Artificial Sequence
  Description of Artificial Sequence: Synthetic oligonucleotide
  Antisense strand to SEQ ID NO: 1366058
ugucuucagggcaacccug

SEQ ID NO: 1366060 - RNA, 19 nt, Artificial Sequence
  Description of Artificial Sequence: Synthetic oligonucleotide
  Sense strand starting at position 919 of SEQ ID NO: 1242694
ucuccauaugcucauggua

SEQ ID NO: 1366061 - RNA, 19 nt, Artificial Sequence
  Description of Artificial Sequence: Synthetic oligonucleotide
  Antisense strand to SEQ ID NO: 1366060
uaccaugagcauauggaga

SEQ ID NO: 1366062 - RNA, 19 nt, Artificial Sequence
  Description of Artificial Sequence: Synthetic oligonucleotide
  Sense strand starting at position 939 of SEQ ID NO: 1242694
ccuggaaucuguggucauc

SEQ ID NO: 1366063 - RNA, 19 nt, Artificial Sequence
  Description of Artificial Sequence: Synthetic oligonucleotide
  Antisense strand to SEQ ID NO: 1366062
gaugaccacagauuccagg

SEQ ID NO: 1366064 - RNA, 19 nt, Artificial Sequence
  Description of Artificial Sequence: Synthetic oligonucleotide
  Sense strand starting at position 942 of SEQ ID NO: 1242694
ggaaucuguggucaucaga

SEQ ID NO: 1366065 - RNA, 19 nt, Artificial Sequence
  Description of Artificial Sequence: Synthetic oligonucleotide
  Antisense strand to SEQ ID NO: 1366064
ucugaugaccacagauucc

SEQ ID NO: 1366066 - RNA, 19 nt, Artificial Sequence
  Description of Artificial Sequence: Synthetic oligonucleotide
  Sense strand starting at position 1346 of SEQ ID NO: 1242694
gccucaugcugcucaugua

SEQ ID NO: 1366067 - RNA, 19 nt, Artificial Sequence
  Description of Artificial Sequence: Synthetic oligonucleotide
  Antisense strand to SEQ ID NO: 1366066
uacaugagcagcaugaggc

SEQ ID NO: 1366068 - RNA, 19 nt, Artificial Sequence
  Description of Artificial Sequence: Synthetic oligonucleotide
  Sense strand starting at position 1370 of SEQ ID NO: 1242694
uggguugugaucugaaugu

SEQ ID NO: 1366069 - RNA, 19 nt, Artificial Sequence
  Description of Artificial Sequence: Synthetic oligonucleotide
  Antisense strand to SEQ ID NO: 1366068
acauucagaucacaaccca

SEQ ID NO: 1366070 - RNA, 19 nt, Artificial Sequence
  Description of Artificial Sequence: Synthetic oligonucleotide
  Sense strand starting at position 1374 of SEQ ID NO: 1242694
uugugaucugaaugucgac

SEQ ID NO: 1366071 - RNA, 19 nt, Artificial Sequence
  Description of Artificial Sequence: Synthetic oligonucleotide
  Antisense strand to SEQ ID NO: 1366070
gucgacauucagaucacaa

SEQ ID NO: 1366072 - RNA, 19 nt, Artificial Sequence
  Description of Artificial Sequence: Synthetic oligonucleotide
  Sense strand starting at position 1389 of SEQ ID NO: 1242694
cgaccagcuccuuggagau

SEQ ID NO: 1366073 - RNA, 19 nt, Artificial Sequence
  Description of Artificial Sequence: Synthetic oligonucleotide
  Antisense strand to SEQ ID NO: 1366072
aucuccaaggagcuggucg

SEQ ID NO: 1366074 - RNA, 19 nt, Artificial Sequence
  Description of Artificial Sequence: Synthetic oligonucleotide
  Sense strand starting at position 1497 of SEQ ID NO: 1242694
agcugcugcuccuuauuga

SEQ ID NO: 1366075 - RNA, 19 nt, Artificial Sequence
  Description of Artificial Sequence: Synthetic oligonucleotide
  Antisense strand to SEQ ID NO: 1366074
ucaauaaggagcagcagcu

SEQ ID NO: 1366076 - RNA, 19 nt, Artificial Sequence
  Description of Artificial Sequence: Synthetic oligonucleotide
  Sense strand starting at position 1505 of SEQ ID NO: 1242694
cuccuuauugagcgcuaga

SEQ ID NO: 1366077 - RNA, 19 nt, Artificial Sequence
  Description of Artificial Sequence: Synthetic oligonucleotide
  Antisense strand to SEQ ID NO: 1366076
ucuagcgcucaauaaggag

SEQ ID NO: 1366078 - RNA, 19 nt, Artificial Sequence
  Description of Artificial Sequence: Synthetic oligonucleotide
  Sense strand starting at position 1508 of SEQ ID NO: 1242694
cuuauugagcgcuagaucu

SEQ ID NO: 1366079 - RNA, 19 nt, Artificial Sequence
  Description of Artificial Sequence: Synthetic oligonucleotide
  Antisense strand to SEQ ID NO: 1366078
agaucuagcgcucaauaag

SEQ ID NO: 1366080 - RNA, 19 nt, Artificial Sequence
  Description of Artificial Sequence: Synthetic oligonucleotide
  Sense strand starting at position 1882 of SEQ ID NO: 1242694
cugcgugcuccauaggcua

SEQ ID NO: 1366081 - RNA, 19 nt, Artificial Sequence
  Description of Artificial Sequence: Synthetic oligonucleotide
  Antisense strand to SEQ ID NO: 1366080
uagccuauggagcacgcag

SEQ ID NO: 1366082 - RNA, 19 nt, Artificial Sequence
  Description of Artificial Sequence: Synthetic oligonucleotide
  Sense strand starting at position 1975 of SEQ ID NO: 1242694
cugcuaagugcguugccaa

SEQ ID NO: 1366083 - RNA, 19 nt, Artificial Sequence
  Description of Artificial Sequence: Synthetic oligonucleotide
  Antisense strand to SEQ ID NO: 1366082
uuggcaacgcacuuagcag

SEQ ID NO: 1366084 - RNA, 19 nt, Artificial Sequence
  Description of Artificial Sequence: Synthetic oligonucleotide
  Sense strand starting at position 1997 of SEQ ID NO: 1242694
cucuguuggucccagguga

SEQ ID NO: 1366085 - RNA, 19 nt, Artificial Sequence
  Description of Artificial Sequence: Synthetic oligonucleotide
  Antisense strand to SEQ ID NO: 1366084
ucaccugggaccaacagag

SEQ ID NO: 1366086 - RNA, 19 nt, Artificial Sequence
  Description of Artificial Sequence: Synthetic oligonucleotide
  Sense strand starting at position 2134 of SEQ ID NO: 1242694
gcacauacccugugcagau

SEQ ID NO: 1366087 - RNA, 19 nt, Artificial Sequence
  Description of Artificial Sequence: Synthetic oligonucleotide
  Antisense strand to SEQ ID NO: 1366086
aucugcacaggguaugugc

SEQ ID NO: 1366088 - RNA, 19 nt, Artificial Sequence
  Description of Artificial Sequence: Synthetic oligonucleotide
  Sense strand starting at position 2312 of SEQ ID NO: 1242694
gcaccucuggccugagaag

SEQ ID NO: 1366089 - RNA, 19 nt, Artificial Sequence
  Description of Artificial Sequence: Synthetic oligonucleotide
  Antisense strand to SEQ ID NO: 1366088
cuucucaggccagaggugc

SEQ ID NO: 1366090 - RNA, 19 nt, Artificial Sequence
  Description of Artificial Sequence: Synthetic oligonucleotide
  Sense strand starting at position 3228 of SEQ ID NO: 1242694
cucugcucuccggaaguca

SEQ ID NO: 1366091 - RNA, 19 nt, Artificial Sequence
  Description of Artificial Sequence: Synthetic oligonucleotide
  Antisense strand to SEQ ID NO: 1366090
ugacuuccggagagcagag

SEQ ID NO: 1366092 - RNA, 19 nt, Artificial Sequence
  Description of Artificial Sequence: Synthetic oligonucleotide
  Sense strand starting at position 3422 of SEQ ID NO: 1242694
ggcggaucccgauauggag

SEQ ID NO: 1366093 - RNA, 19 nt, Artificial Sequence
  Description of Artificial Sequence: Synthetic oligonucleotide
  Antisense strand to SEQ ID NO: 1366092
cuccauaucgggauccgcc

SEQ ID NO: 1366094 - RNA, 19 nt, Artificial Sequence
  Description of Artificial Sequence: Synthetic oligonucleotide
  Sense strand starting at position 74 of SEQ ID NO: 1242695
uugagaagugcuuacaaac

SEQ ID NO: 1366095 - RNA, 19 nt, Artificial Sequence
  Description of Artificial Sequence: Synthetic oligonucleotide
  Antisense strand to SEQ ID NO: 1366094
guuuguaagcacuucucaa

SEQ ID NO: 1366096 - RNA, 19 nt, Artificial Sequence
  Description of Artificial Sequence: Synthetic oligonucleotide
  Sense strand starting at position 415 of SEQ ID NO: 1242695
auuacuuguuuaccugauu

SEQ ID NO: 1366097 - RNA, 19 nt, Artificial Sequence
  Description of Artificial Sequence: Synthetic oligonucleotide
  Antisense strand to SEQ ID NO: 1366096
aaucagguaaacaaguaau

SEQ ID NO: 1366098 - RNA, 19 nt, Artificial Sequence
  Description of Artificial Sequence: Synthetic oligonucleotide
  Sense strand starting at position 950 of SEQ ID NO: 1242695
aucgaaauauuaucccagu

SEQ ID NO: 1366099 - RNA, 19 nt, Artificial Sequence
  Description of Artificial Sequence: Synthetic oligonucleotide
  Antisense strand to SEQ ID NO: 1366098
acugggauaauauuucgau

SEQ ID NO: 1366100 - RNA, 19 nt, Artificial Sequence
  Description of Artificial Sequence: Synthetic oligonucleotide
  Sense strand starting at position 951 of SEQ ID NO: 1242695
ucgaaauauuaucccagua

SEQ ID NO: 1366101 - RNA, 19 nt, Artificial Sequence
  Description of Artificial Sequence: Synthetic oligonucleotide
  Antisense strand to SEQ ID NO: 1366100
uacugggauaauauuucga

SEQ ID NO: 1366102 - RNA, 19 nt, Artificial Sequence
  Description of Artificial Sequence: Synthetic oligonucleotide
  Sense strand starting at position 963 of SEQ ID NO: 1242695
cccaguauaucagaaagau

SEQ ID NO: 1366103 - RNA, 19 nt, Artificial Sequence
  Description of Artificial Sequence: Synthetic oligonucleotide
  Antisense strand to SEQ ID NO: 1366102
aucuuucugauauacuggg

SEQ ID NO: 1366104 - RNA, 19 nt, Artificial Sequence
  Description of Artificial Sequence: Synthetic oligonucleotide
  Sense strand starting at position 1049 of SEQ ID NO: 1242695
ggauauccagcuuguaauu

SEQ ID NO: 1366105 - RNA, 19 nt, Artificial Sequence
  Description of Artificial Sequence: Synthetic oligonucleotide
  Antisense strand to SEQ ID NO: 1366104
aauuacaagcuggauaucc

SEQ ID NO: 1366106 - RNA, 19 nt, Artificial Sequence
  Description of Artificial Sequence: Synthetic oligonucleotide
  Sense strand starting at position 1133 of SEQ ID NO: 1242695
cguuuaaacggucaagaaa

SEQ ID NO: 1366107 - RNA, 19 nt, Artificial Sequence
  Description of Artificial Sequence: Synthetic oligonucleotide
  Antisense strand to SEQ ID NO: 1366106
uuucuugaccguuuaaacg

SEQ ID NO: 1366108 - RNA, 19 nt, Artificial Sequence
  Description of Artificial Sequence: Synthetic oligonucleotide
  Sense strand starting at position 1356 of SEQ ID NO: 1242695
ccuacagaguuggaugaau

SEQ ID NO: 1366109 - RNA, 19 nt, Artificial Sequence
  Description of Artificial Sequence: Synthetic oligonucleotide
  Antisense strand to SEQ ID NO: 1366108
auucauccaacucuguagg

SEQ ID NO: 1366110 - RNA, 19 nt, Artificial Sequence
  Description of Artificial Sequence: Synthetic oligonucleotide
  Sense strand starting at position 1358 of SEQ ID NO: 1242695
uacagaguuggaugaauuc

SEQ ID NO: 1366111 - RNA, 19 nt, Artificial Sequence
  Description of Artificial Sequence: Synthetic oligonucleotide
  Antisense strand to SEQ ID NO: 1366110
gaauucauccaacucugua

SEQ ID NO: 1366112 - RNA, 19 nt, Artificial Sequence
  Description of Artificial Sequence: Synthetic oligonucleotide
  Sense strand starting at position 1367 of SEQ ID NO: 1242695
ggaugaauuccuugugcag

SEQ ID NO: 1366113 - RNA, 19 nt, Artificial Sequence
  Description of Artificial Sequence: Synthetic oligonucleotide
  Antisense strand to SEQ ID NO: 1366112
cugcacaaggaauucaucc

SEQ ID NO: 1366114 - RNA, 19 nt, Artificial Sequence
  Description of Artificial Sequence: Synthetic oligonucleotide
  Sense strand starting at position 1373 of SEQ ID NO: 1242695
auuccuugugcagagcuua

SEQ ID NO: 1366115 - RNA, 19 nt, Artificial Sequence
  Description of Artificial Sequence: Synthetic oligonucleotide
  Antisense strand to SEQ ID NO: 1366114
uaagcucugcacaaggaau

SEQ ID NO: 1366116 - RNA, 19 nt, Artificial Sequence
  Description of Artificial Sequence: Synthetic oligonucleotide
  Sense strand starting at position 1635 of SEQ ID NO: 1242695
ggaauacugccaggcuuua

SEQ ID NO: 1366117 - RNA, 19 nt, Artificial Sequence
  Description of Artificial Sequence: Synthetic oligonucleotide
  Antisense strand to SEQ ID NO: 1366116
uaaagccuggcaguauucc

SEQ ID NO: 1366118 - RNA, 19 nt, Artificial Sequence
  Description of Artificial Sequence: Synthetic oligonucleotide
  Sense strand starting at position 1649 of SEQ ID NO: 1242695
cuuuacacgucucuaaaug

SEQ ID NO: 1366119 - RNA, 19 nt, Artificial Sequence
  Description of Artificial Sequence: Synthetic oligonucleotide
  Antisense strand to SEQ ID NO: 1366118
cauuuagagacguguaaag

SEQ ID NO: 1366120 - RNA, 19 nt, Artificial Sequence
  Description of Artificial Sequence: Synthetic oligonucleotide
  Sense strand starting at position 1667 of SEQ ID NO: 1242695
ggugcaucacgugaugacu

SEQ ID NO: 1366121 - RNA, 19 nt, Artificial Sequence
  Description of Artificial Sequence: Synthetic oligonucleotide
  Antisense strand to SEQ ID NO: 1366120
agucaucacgugaugcacc

SEQ ID NO: 1366122 - RNA, 19 nt, Artificial Sequence
  Description of Artificial Sequence: Synthetic oligonucleotide
  Sense strand starting at position 2489 of SEQ ID NO: 1242695
gggacugcuaggcgaugaa

SEQ ID NO: 1366123 - RNA, 19 nt, Artificial Sequence
  Description of Artificial Sequence: Synthetic oligonucleotide
  Antisense strand to SEQ ID NO: 1366122
uucaucgccuagcaguccc

SEQ ID NO: 1366124 - RNA, 19 nt, Artificial Sequence
  Description of Artificial Sequence: Synthetic oligonucleotide
  Sense strand starting at position 2698 of SEQ ID NO: 1242695
guuccucagcccuaaguau

SEQ ID NO: 1366125 - RNA, 19 nt, Artificial Sequence
  Description of Artificial Sequence: Synthetic oligonucleotide
  Antisense strand to SEQ ID NO: 1366124
auacuuagggcugaggaac

SEQ ID NO: 1366126 - RNA, 19 nt, Artificial Sequence
  Description of Artificial Sequence: Synthetic oligonucleotide
  Sense strand starting at position 2810 of SEQ ID NO: 1242695
cucuaauaugcuggugaau

SEQ ID NO: 1366127 - RNA, 19 nt, Artificial Sequence
  Description of Artificial Sequence: Synthetic oligonucleotide
  Antisense strand to SEQ ID NO: 1366126
auucaccagcauauuagag

SEQ ID NO: 1366128 - RNA, 19 nt, Artificial Sequence
  Description of Artificial Sequence: Synthetic oligonucleotide
  Sense strand starting at position 2830 of SEQ ID NO: 1242695
cuauuagucccaugugauu

SEQ ID NO: 1366129 - RNA, 19 nt, Artificial Sequence
  Description of Artificial Sequence: Synthetic oligonucleotide
  Antisense strand to SEQ ID NO: 1366128
aaucacaugggacuaauag

SEQ ID NO: 1366130 - RNA, 19 nt, Artificial Sequence
  Description of Artificial Sequence: Synthetic oligonucleotide
  Sense strand starting at position 2835 of SEQ ID NO: 1242695
agucccaugugauuaaauu

SEQ ID NO: 1366131 - RNA, 19 nt, Artificial Sequence
  Description of Artificial Sequence: Synthetic oligonucleotide
  Antisense strand to SEQ ID NO: 1366130
aauuuaaucacaugggacu

SEQ ID NO: 1366132 - RNA, 19 nt, Artificial Sequence
  Description of Artificial Sequence: Synthetic oligonucleotide
  Sense strand starting at position 3078 of SEQ ID NO: 1242695
uauugaagaugguaagaaa

SEQ ID NO: 1366133 - RNA, 19 nt, Artificial Sequence
  Description of Artificial Sequence: Synthetic oligonucleotide
  Antisense strand to SEQ ID NO: 1366132
uuucuuaccaucuucaaua

SEQ ID NO: 1366134 - RNA, 19 nt, Artificial Sequence
  Description of Artificial Sequence: Synthetic oligonucleotide
  Sense strand starting at position 3128 of SEQ ID NO: 1242695
aggauaaucuaugacaagu

SEQ ID NO: 1366135 - RNA, 19 nt, Artificial Sequence
  Description of Artificial Sequence: Synthetic oligonucleotide
  Antisense strand to SEQ ID NO: 1366134
acuugucauagauuauccu

SEQ ID NO: 1366136 - RNA, 19 nt, Artificial Sequence
  Description of Artificial Sequence: Synthetic oligonucleotide
  Sense strand starting at position 3141 of SEQ ID NO: 1242695
acaaguaacuuugaaauag

SEQ ID NO: 1366137 - RNA, 19 nt, Artificial Sequence
  Description of Artificial Sequence: Synthetic oligonucleotide
  Antisense strand to SEQ ID NO: 1366136
cuauuucaaaguuacuugu

SEQ ID NO: 1366138 - RNA, 19 nt, Artificial Sequence
  Description of Artificial Sequence: Synthetic oligonucleotide
  Sense strand starting at position 3156 of SEQ ID NO: 1242695
auagcaagccaauauugau

SEQ ID NO: 1366139 - RNA, 19 nt, Artificial Sequence
  Description of Artificial Sequence: Synthetic oligonucleotide
  Antisense strand to SEQ ID NO: 1366138
aucaauauuggcuugcuau

SEQ ID NO: 1366140 - RNA, 19 nt, Artificial Sequence
  Description of Artificial Sequence: Synthetic oligonucleotide
  Sense strand starting at position 3165 of SEQ ID NO: 1242695
caauauugaugcucaguga

SEQ ID NO: 1366141 - RNA, 19 nt, Artificial Sequence
  Description of Artificial Sequence: Synthetic oligonucleotide
  Antisense strand to SEQ ID NO: 1366140
ucacugagcaucaauauug

SEQ ID NO: 1366142 - RNA, 19 nt, Artificial Sequence
  Description of Artificial Sequence: Synthetic oligonucleotide
  Sense strand starting at position 3168 of SEQ ID NO: 1242695
uauugaugcucagugagaa

SEQ ID NO: 1366143 - RNA, 19 nt, Artificial Sequence
  Description of Artificial Sequence: Synthetic oligonucleotide
  Antisense strand to SEQ ID NO: 1366142
uucucacugagcaucaaua

SEQ ID NO: 1366144 - RNA, 19 nt, Artificial Sequence
  Description of Artificial Sequence: Synthetic oligonucleotide
  Sense strand starting at position 3169 of SEQ ID NO: 1242695
auugaugcucagugagaaa

SEQ ID NO: 1366145 - RNA, 19 nt, Artificial Sequence
  Description of Artificial Sequence: Synthetic oligonucleotide
  Antisense strand to SEQ ID NO: 1366144
uuucucacugagcaucaau

SEQ ID NO: 1366146 - RNA, 19 nt, Artificial Sequence
  Description of Artificial Sequence: Synthetic oligonucleotide
  Sense strand starting at position 3296 of SEQ ID NO: 1242695
gcagcucuccuuuagaauu

SEQ ID NO: 1366147 - RNA, 19 nt, Artificial Sequence
  Description of Artificial Sequence: Synthetic oligonucleotide
  Antisense strand to SEQ ID NO: 1366146
aauucuaaaggagagcugc

SEQ ID NO: 1366148 - RNA, 19 nt, Artificial Sequence
  Description of Artificial Sequence: Synthetic oligonucleotide
  Sense strand starting at position 3376 of SEQ ID NO: 1242695
gugcuugcuuacucuacaa

SEQ ID NO: 1366149 - RNA, 19 nt, Artificial Sequence
  Description of Artificial Sequence: Synthetic oligonucleotide
  Antisense strand to SEQ ID NO: 1366148
uuguagaguaagcaagcac

SEQ ID NO: 1366150 - RNA, 19 nt, Artificial Sequence
  Description of Artificial Sequence: Synthetic oligonucleotide
  Sense strand starting at position 3394 of SEQ ID NO: 1242695
acuggaaaguugcugaagu

SEQ ID NO: 1366151 - RNA, 19 nt, Artificial Sequence
  Description of Artificial Sequence: Synthetic oligonucleotide
  Antisense strand to SEQ ID NO: 1366150
acuucagcaacuuuccagu

SEQ ID NO: 1366152 - RNA, 19 nt, Artificial Sequence
  Description of Artificial Sequence: Synthetic oligonucleotide
  Sense strand starting at position 3396 of SEQ ID NO: 1242695
uggaaaguugcugaaguuu

SEQ ID NO: 1366153 - RNA, 19 nt, Artificial Sequence
  Description of Artificial Sequence: Synthetic oligonucleotide
  Antisense strand to SEQ ID NO: 1366152
aaacuucagcaacuuucca

SEQ ID NO: 1366154 - RNA, 19 nt, Artificial Sequence
  Description of Artificial Sequence: Synthetic oligonucleotide
  Sense strand starting at position 3402 of SEQ ID NO: 1242695
guugcugaaguuugugaca

SEQ ID NO: 1366155 - RNA, 19 nt, Artificial Sequence
  Description of Artificial Sequence: Synthetic oligonucleotide
  Antisense strand to SEQ ID NO: 1366154
ugucacaaacuucagcaac

SEQ ID NO: 1366156 - RNA, 19 nt, Artificial Sequence
  Description of Artificial Sequence: Synthetic oligonucleotide
  Sense strand starting at position 3415 of SEQ ID NO: 1242695
gugacaugccacuguaaau

SEQ ID NO: 1366157 - RNA, 19 nt, Artificial Sequence
  Description of Artificial Sequence: Synthetic oligonucleotide
  Antisense strand to SEQ ID NO: 1366156
auuuacaguggcaugucac

SEQ ID NO: 1366158 - RNA, 19 nt, Artificial Sequence
  Description of Artificial Sequence: Synthetic oligonucleotide
  Sense strand starting at position 3450 of SEQ ID NO: 1242695
auuacaaauuguuugguga

SEQ ID NO: 1366159 - RNA, 19 nt, Artificial Sequence
  Description of Artificial Sequence: Synthetic oligonucleotide
  Antisense strand to SEQ ID NO: 1366158
ucaccaaacaauuuguaau

SEQ ID NO: 1366160 - RNA, 19 nt, Artificial Sequence
  Description of Artificial Sequence: Synthetic oligonucleotide
  Sense strand starting at position 3451 of SEQ ID NO: 1242695
uuacaaauuguuuggugau

SEQ ID NO: 1366161 - RNA, 19 nt, Artificial Sequence
  Description of Artificial Sequence: Synthetic oligonucleotide
  Antisense strand to SEQ ID NO: 1366160
aucaccaaacaauuuguaa

SEQ ID NO: 1366162 - RNA, 19 nt, Artificial Sequence
  Description of Artificial Sequence: Synthetic oligonucleotide
  Sense strand starting at position 3453 of SEQ ID NO: 1242695
acaaauuguuuggugauua

SEQ ID NO: 1366163 - RNA, 19 nt, Artificial Sequence
  Description of Artificial Sequence: Synthetic oligonucleotide
  Antisense strand to SEQ ID NO: 1366162
uaaucaccaaacaauuugu

SEQ ID NO: 1366164 - RNA, 19 nt, Artificial Sequence
  Description of Artificial Sequence: Synthetic oligonucleotide
  Sense strand starting at position 3627 of SEQ ID NO: 1242695
uuagcuuacugagucauau

SEQ ID NO: 1366165 - RNA, 19 nt, Artificial Sequence
  Description of Artificial Sequence: Synthetic oligonucleotide
  Antisense strand to SEQ ID NO: 1366164
auaugacucaguaagcuaa

SEQ ID NO: 1366166 - RNA, 19 nt, Artificial Sequence
  Description of Artificial Sequence: Synthetic oligonucleotide
  Sense strand starting at position 3693 of SEQ ID NO: 1242695
aguagugugguugaccaaa

SEQ ID NO: 1366167 - RNA, 19 nt, Artificial Sequence
  Description of Artificial Sequence: Synthetic oligonucleotide
  Antisense strand to SEQ ID NO: 1366166
uuuggucaaccacacuacu

SEQ ID NO: 1366168 - RNA, 19 nt, Artificial Sequence
  Description of Artificial Sequence: Synthetic oligonucleotide
  Sense strand starting at position 3695 of SEQ ID NO: 1242695
uagugugguugaccaaacu

SEQ ID NO: 1366169 - RNA, 19 nt, Artificial Sequence
  Description of Artificial Sequence: Synthetic oligonucleotide
  Antisense strand to SEQ ID NO: 1366168
aguuuggucaaccacacua

SEQ ID NO: 1366170 - RNA, 19 nt, Artificial Sequence
  Description of Artificial Sequence: Synthetic oligonucleotide
  Sense strand starting at position 3832 of SEQ ID NO: 1242695
uuuguaauuuaggaaggau

SEQ ID NO: 1366171 - RNA, 19 nt, Artificial Sequence
  Description of Artificial Sequence: Synthetic oligonucleotide
  Antisense strand to SEQ ID NO: 1366170
auccuuccuaaauuacaaa

SEQ ID NO: 1366172 - RNA, 19 nt, Artificial Sequence
  Description of Artificial Sequence: Synthetic oligonucleotide
  Sense strand starting at position 3863 of SEQ ID NO: 1242695
ucgccagaccgcuauauuu

SEQ ID NO: 1366173 - RNA, 19 nt, Artificial Sequence
  Description of Artificial Sequence: Synthetic oligonucleotide
  Antisense strand to SEQ ID NO: 1366172
aaauauagcggucuggcga

SEQ ID NO: 1366174 - RNA, 19 nt, Artificial Sequence
  Description of Artificial Sequence: Synthetic oligonucleotide
  Sense strand starting at position 48 of SEQ ID NO: 1242696
ucuauaaaguuccuagucu

SEQ ID NO: 1366175 - RNA, 19 nt, Artificial Sequence
  Description of Artificial Sequence: Synthetic oligonucleotide
  Antisense strand to SEQ ID NO: 1366174
agacuaggaacuuuauaga

SEQ ID NO: 1366176 - RNA, 19 nt, Artificial Sequence
  Description of Artificial Sequence: Synthetic oligonucleotide
  Sense strand starting at position 78 of SEQ ID NO: 1242696
agggaaucgccuugucauc

SEQ ID NO: 1366177 - RNA, 19 nt, Artificial Sequence
  Description of Artificial Sequence: Synthetic oligonucleotide
  Antisense strand to SEQ ID NO: 1366176
gaugacaaggcgauucccu

SEQ ID NO: 1366178 - RNA, 19 nt, Artificial Sequence
  Description of Artificial Sequence: Synthetic oligonucleotide
  Sense strand starting at position 87 of SEQ ID NO: 1242696
ccuugucaucccugggaac

SEQ ID NO: 1366179 - RNA, 19 nt, Artificial Sequence
  Description of Artificial Sequence: Synthetic oligonucleotide
  Antisense strand to SEQ ID NO: 1366178
guucccagggaugacaagg

SEQ ID NO: 1366180 - RNA, 19 nt, Artificial Sequence
  Description of Artificial Sequence: Synthetic oligonucleotide
  Sense strand starting at position 90 of SEQ ID NO: 1242696
ugucaucccugggaaccua

SEQ ID NO: 1366181 - RNA, 19 nt, Artificial Sequence
  Description of Artificial Sequence: Synthetic oligonucleotide
  Antisense strand to SEQ ID NO: 1366180
uagguucccagggaugaca

SEQ ID NO: 1366182 - RNA, 19 nt, Artificial Sequence
  Description of Artificial Sequence: Synthetic oligonucleotide
  Sense strand starting at position 143 of SEQ ID NO: 1242696
ggacaugguucuucccuga

SEQ ID NO: 1366183 - RNA, 19 nt, Artificial Sequence
  Description of Artificial Sequence: Synthetic oligonucleotide
  Antisense strand to SEQ ID NO: 1366182
ucagggaagaaccaugucc

SEQ ID NO: 1366184 - RNA, 19 nt, Artificial Sequence
  Description of Artificial Sequence: Synthetic oligonucleotide
  Sense strand starting at position 183 of SEQ ID NO: 1242696
ucagaaaugucccugagcu

SEQ ID NO: 1366185 - RNA, 19 nt, Artificial Sequence
  Description of Artificial Sequence: Synthetic oligonucleotide
  Antisense strand to SEQ ID NO: 1366184
agcucagggacauuucuga

SEQ ID NO: 1366186 - RNA, 19 nt, Artificial Sequence
  Description of Artificial Sequence: Synthetic oligonucleotide
  Sense strand starting at position 184 of SEQ ID NO: 1242696
cagaaaugucccugagcuc

SEQ ID NO: 1366187 - RNA, 19 nt, Artificial Sequence
  Description of Artificial Sequence: Synthetic oligonucleotide
  Antisense strand to SEQ ID NO: 1366186
gagcucagggacauuucug

SEQ ID NO: 1366188 - RNA, 19 nt, Artificial Sequence
  Description of Artificial Sequence: Synthetic oligonucleotide
  Sense strand starting at position 185 of SEQ ID NO: 1242696
agaaaugucccugagcucu

SEQ ID NO: 1366189 - RNA, 19 nt, Artificial Sequence
  Description of Artificial Sequence: Synthetic oligonucleotide
  Antisense strand to SEQ ID NO: 1366188
agagcucagggacauuucu

SEQ ID NO: 1366190 - RNA, 19 nt, Artificial Sequence
  Description of Artificial Sequence: Synthetic oligonucleotide
  Sense strand starting at position 243 of SEQ ID NO: 1242696
agcaguuaagucuauuagu

SEQ ID NO: 1366191 - RNA, 19 nt, Artificial Sequence
  Description of Artificial Sequence: Synthetic oligonucleotide
  Antisense strand to SEQ ID NO: 1366190
acuaauagacuuaacugcu

SEQ ID NO: 1366192 - RNA, 19 nt, Artificial Sequence
  Description of Artificial Sequence: Synthetic oligonucleotide
  Sense strand starting at position 259 of SEQ ID NO: 1242696
aguuuacuuuguccucaca

SEQ ID NO: 1366193 - RNA, 19 nt, Artificial Sequence
  Description of Artificial Sequence: Synthetic oligonucleotide
  Antisense strand to SEQ ID NO: 1366192
ugugaggacaaaguaaacu

SEQ ID NO: 1366194 - RNA, 19 nt, Artificial Sequence
  Description of Artificial Sequence: Synthetic oligonucleotide
  Sense strand starting at position 297 of SEQ ID NO: 1242696
acuauuaguuucuacagau

SEQ ID NO: 1366195 - RNA, 19 nt, Artificial Sequence
  Description of Artificial Sequence: Synthetic oligonucleotide
  Antisense strand to SEQ ID NO: 1366194
aucuguagaaacuaauagu

SEQ ID NO: 1366196 - RNA, 19 nt, Artificial Sequence
  Description of Artificial Sequence: Synthetic oligonucleotide
  Sense strand starting at position 333 of SEQ ID NO: 1242696
accagaguaguuuaagcaa

SEQ ID NO: 1366197 - RNA, 19 nt, Artificial Sequence
  Description of Artificial Sequence: Synthetic oligonucleotide
  Antisense strand to SEQ ID NO: 1366196
uugcuuaaacuacucuggu

SEQ ID NO: 1366198 - RNA, 19 nt, Artificial Sequence
  Description of Artificial Sequence: Synthetic oligonucleotide
  Sense strand starting at position 619 of SEQ ID NO: 1242696
gggcuucuguccuagacuu

SEQ ID NO: 1366199 - RNA, 19 nt, Artificial Sequence
  Description of Artificial Sequence: Synthetic oligonucleotide
  Antisense strand to SEQ ID NO: 1366198
aagucuaggacagaagccc

SEQ ID NO: 1366200 - RNA, 19 nt, Artificial Sequence
  Description of Artificial Sequence: Synthetic oligonucleotide
  Sense strand starting at position 1046 of SEQ ID NO: 1242696
agcccugaccaguaacuaa

SEQ ID NO: 1366201 - RNA, 19 nt, Artificial Sequence
  Description of Artificial Sequence: Synthetic oligonucleotide
  Antisense strand to SEQ ID NO: 1366200
uuaguuacuggucagggcu

SEQ ID NO: 1366202 - RNA, 19 nt, Artificial Sequence
  Description of Artificial Sequence: Synthetic oligonucleotide
  Sense strand starting at position 1196 of SEQ ID NO: 1242696
gcagaagucuguccugcua

SEQ ID NO: 1366203 - RNA, 19 nt, Artificial Sequence
  Description of Artificial Sequence: Synthetic oligonucleotide
  Antisense strand to SEQ ID NO: 1366202
uagcaggacagacuucugc

SEQ ID NO: 1366204 - RNA, 19 nt, Artificial Sequence
  Description of Artificial Sequence: Synthetic oligonucleotide
  Sense strand starting at position 1799 of SEQ ID NO: 1242696
cccuucuuguauggauuau

SEQ ID NO: 1366205 - RNA, 19 nt, Artificial Sequence
  Description of Artificial Sequence: Synthetic oligonucleotide
  Antisense strand to SEQ ID NO: 1366204
auaauccauacaagaaggg

SEQ ID NO: 1366206 - RNA, 19 nt, Artificial Sequence
  Description of Artificial Sequence: Synthetic oligonucleotide
  Sense strand starting at position 1810 of SEQ ID NO: 1242696
uggauuaucuucccuugau

SEQ ID NO: 1366207 - RNA, 19 nt, Artificial Sequence
  Description of Artificial Sequence: Synthetic oligonucleotide
  Antisense strand to SEQ ID NO: 1366206
aucaagggaagauaaucca

SEQ ID NO: 1366208 - RNA, 19 nt, Artificial Sequence
  Description of Artificial Sequence: Synthetic oligonucleotide
  Sense strand starting at position 1811 of SEQ ID NO: 1242696
ggauuaucuucccuugauc

SEQ ID NO: 1366209 - RNA, 19 nt, Artificial Sequence
  Description of Artificial Sequence: Synthetic oligonucleotide
  Antisense strand to SEQ ID NO: 1366208
gaucaagggaagauaaucc

SEQ ID NO: 1366210 - RNA, 19 nt, Artificial Sequence
  Description of Artificial Sequence: Synthetic oligonucleotide
  Sense strand starting at position 2052 of SEQ ID NO: 1242696
aggcuuugguuugcaucaa

SEQ ID NO: 1366211 - RNA, 19 nt, Artificial Sequence
  Description of Artificial Sequence: Synthetic oligonucleotide
  Antisense strand to SEQ ID NO: 1366210
uugaugcaaaccaaagccu

SEQ ID NO: 1366212 - RNA, 19 nt, Artificial Sequence
  Description of Artificial Sequence: Synthetic oligonucleotide
  Sense strand starting at position 2081 of SEQ ID NO: 1242696
gcuuauaucuggcaaauag

SEQ ID NO: 1366213 - RNA, 19 nt, Artificial Sequence
  Description of Artificial Sequence: Synthetic oligonucleotide
  Antisense strand to SEQ ID NO: 1366212
cuauuugccagauauaagc

SEQ ID NO: 1366214 - RNA, 19 nt, Artificial Sequence
  Description of Artificial Sequence: Synthetic oligonucleotide
  Sense strand starting at position 2099 of SEQ ID NO: 1242696
guacacguuucugacuuua

SEQ ID NO: 1366215 - RNA, 19 nt, Artificial Sequence
  Description of Artificial Sequence: Synthetic oligonucleotide
  Antisense strand to SEQ ID NO: 1366214
uaaagucagaaacguguac

SEQ ID NO: 1366216 - RNA, 19 nt, Artificial Sequence
  Description of Artificial Sequence: Synthetic oligonucleotide
  Sense strand starting at position 2101 of SEQ ID NO: 1242696
acacguuucugacuuuaaa

SEQ ID NO: 1366217 - RNA, 19 nt, Artificial Sequence
  Description of Artificial Sequence: Synthetic oligonucleotide
  Antisense strand to SEQ ID NO: 1366216
uuuaaagucagaaacgugu

SEQ ID NO: 1366218 - RNA, 19 nt, Artificial Sequence
  Description of Artificial Sequence: Synthetic oligonucleotide
  Sense strand starting at position 2104 of SEQ ID NO: 1242696
cguuucugacuuuaaauau

SEQ ID NO: 1366219 - RNA, 19 nt, Artificial Sequence
  Description of Artificial Sequence: Synthetic oligonucleotide
  Antisense strand to SEQ ID NO: 1366218
auauuuaaagucagaaacg

SEQ ID NO: 1366220 - RNA, 19 nt, Artificial Sequence
  Description of Artificial Sequence: Synthetic oligonucleotide
  Sense strand starting at position 2141 of SEQ ID NO: 1242696
ucccaaguuucucucgcaa

SEQ ID NO: 1366221 - RNA, 19 nt, Artificial Sequence
  Description of Artificial Sequence: Synthetic oligonucleotide
  Antisense strand to SEQ ID NO: 1366220
uugcgagagaaacuuggga

SEQ ID NO: 1366222 - RNA, 19 nt, Artificial Sequence
  Description of Artificial Sequence: Synthetic oligonucleotide
  Sense strand starting at position 2186 of SEQ ID NO: 1242696
gccuacucgccauaccaaa

SEQ ID NO: 1366223 - RNA, 19 nt, Artificial Sequence
  Description of Artificial Sequence: Synthetic oligonucleotide
  Antisense strand to SEQ ID NO: 1366222
uuugguauggcgaguaggc

SEQ ID NO: 1366224 - RNA, 19 nt, Artificial Sequence
  Description of Artificial Sequence: Synthetic oligonucleotide
  Sense strand starting at position 2484 of SEQ ID NO: 1242696
guguauucucagcacagca

SEQ ID NO: 1366225 - RNA, 19 nt, Artificial Sequence
  Description of Artificial Sequence: Synthetic oligonucleotide
  Antisense strand to SEQ ID NO: 1366224
ugcugugcugagaauacac

SEQ ID NO: 1366226 - RNA, 19 nt, Artificial Sequence
  Description of Artificial Sequence: Synthetic oligonucleotide
  Sense strand starting at position 3756 of SEQ ID NO: 1242696
gcuuauauccucugacaug

SEQ ID NO: 1366227 - RNA, 19 nt, Artificial Sequence
  Description of Artificial Sequence: Synthetic oligonucleotide
  Antisense strand to SEQ ID NO: 1366226
caugucagaggauauaagc

SEQ ID NO: 1366228 - RNA, 19 nt, Artificial Sequence
  Description of Artificial Sequence: Synthetic oligonucleotide
  Sense strand starting at position 3777 of SEQ ID NO: 1242696
aggccauucgcuuacuuau

SEQ ID NO: 1366229 - RNA, 19 nt, Artificial Sequence
  Description of Artificial Sequence: Synthetic oligonucleotide
  Antisense strand to SEQ ID NO: 1366228
auaaguaagcgaauggccu

SEQ ID NO: 1366230 - RNA, 19 nt, Artificial Sequence
  Description of Artificial Sequence: Synthetic oligonucleotide
  Sense strand starting at position 3788 of SEQ ID NO: 1242696
uuacuuaugucugcuguuu

SEQ ID NO: 1366231 - RNA, 19 nt, Artificial Sequence
  Description of Artificial Sequence: Synthetic oligonucleotide
  Antisense strand to SEQ ID NO: 1366230
aaacagcagacauaaguaa

SEQ ID NO: 1366232 - RNA, 19 nt, Artificial Sequence
  Description of Artificial Sequence: Synthetic oligonucleotide
  Sense strand starting at position 3837 of SEQ ID NO: 1242696
ccauccuacugggauguaa

SEQ ID NO: 1366233 - RNA, 19 nt, Artificial Sequence
  Description of Artificial Sequence: Synthetic oligonucleotide
  Antisense strand to SEQ ID NO: 1366232
uuacaucccaguaggaugg

SEQ ID NO: 1366234 - RNA, 19 nt, Artificial Sequence
  Description of Artificial Sequence: Synthetic oligonucleotide
  Sense strand starting at position 3848 of SEQ ID NO: 1242696
ggauguaaguugcauggga

SEQ ID NO: 1366235 - RNA, 19 nt, Artificial Sequence
  Description of Artificial Sequence: Synthetic oligonucleotide
  Antisense strand to SEQ ID NO: 1366234
ucccaugcaacuuacaucc

SEQ ID NO: 1366236 - RNA, 19 nt, Artificial Sequence
  Description of Artificial Sequence: Synthetic oligonucleotide
  Sense strand starting at position 3850 of SEQ ID NO: 1242696
auguaaguugcaugggaca

SEQ ID NO: 1366237 - RNA, 19 nt, Artificial Sequence
  Description of Artificial Sequence: Synthetic oligonucleotide
  Antisense strand to SEQ ID NO: 1366236
ugucccaugcaacuuacau

SEQ ID NO: 1366238 - RNA, 19 nt, Artificial Sequence
  Description of Artificial Sequence: Synthetic oligonucleotide
  Sense strand starting at position 3852 of SEQ ID NO: 1242696
guaaguugcaugggacaga

SEQ ID NO: 1366239 - RNA, 19 nt, Artificial Sequence
  Description of Artificial Sequence: Synthetic oligonucleotide
  Antisense strand to SEQ ID NO: 1366238
ucugucccaugcaacuuac

SEQ ID NO: 1366240 - RNA, 19 nt, Artificial Sequence
  Description of Artificial Sequence: Synthetic oligonucleotide
  Sense strand starting at position 3893 of SEQ ID NO: 1242696
uggaauauaucucggcaca

SEQ ID NO: 1366241 - RNA, 19 nt, Artificial Sequence
  Description of Artificial Sequence: Synthetic oligonucleotide
  Antisense strand to SEQ ID NO: 1366240
ugugccgagauauauucca

SEQ ID NO: 1366242 - RNA, 19 nt, Artificial Sequence
  Description of Artificial Sequence: Synthetic oligonucleotide
  Sense strand starting at position 3894 of SEQ ID NO: 1242696
ggaauauaucucggcacau

SEQ ID NO: 1366243 - RNA, 19 nt, Artificial Sequence
  Description of Artificial Sequence: Synthetic oligonucleotide
  Antisense strand to SEQ ID NO: 1366242
augugccgagauauauucc

SEQ ID NO: 1366244 - RNA, 19 nt, Artificial Sequence
  Description of Artificial Sequence: Synthetic oligonucleotide
  Sense strand starting at position 3895 of SEQ ID NO: 1242696
gaauauaucucggcacaug

SEQ ID NO: 1366245 - RNA, 19 nt, Artificial Sequence
  Description of Artificial Sequence: Synthetic oligonucleotide
  Antisense strand to SEQ ID NO: 1366244
caugugccgagauauauuc

SEQ ID NO: 1366246 - RNA, 19 nt, Artificial Sequence
  Description of Artificial Sequence: Synthetic oligonucleotide
  Sense strand starting at position 3937 of SEQ ID NO: 1242696
uggauuaagugagugaaug

SEQ ID NO: 1366247 - RNA, 19 nt, Artificial Sequence
  Description of Artificial Sequence: Synthetic oligonucleotide
  Antisense strand to SEQ ID NO: 1366246
cauucacucacuuaaucca

SEQ ID NO: 1366248 - RNA, 19 nt, Artificial Sequence
  Description of Artificial Sequence: Synthetic oligonucleotide
  Sense strand starting at position 3954 of SEQ ID NO: 1242696
uggauaaauggcugguguu

SEQ ID NO: 1366249 - RNA, 19 nt, Artificial Sequence
  Description of Artificial Sequence: Synthetic oligonucleotide
  Antisense strand to SEQ ID NO: 1366248
aacaccagccauuuaucca

SEQ ID NO: 1366250 - RNA, 19 nt, Artificial Sequence
  Description of Artificial Sequence: Synthetic oligonucleotide
  Sense strand starting at position 3955 of SEQ ID NO: 1242696
ggauaaauggcugguguug

SEQ ID NO: 1366251 - RNA, 19 nt, Artificial Sequence
  Description of Artificial Sequence: Synthetic oligonucleotide
  Antisense strand to SEQ ID NO: 1366250
caacaccagccauuuaucc

SEQ ID NO: 1366252 - RNA, 19 nt, Artificial Sequence
  Description of Artificial Sequence: Synthetic oligonucleotide
  Sense strand starting at position 3967 of SEQ ID NO: 1242696
gguguuguuccugaagcag

SEQ ID NO: 1366253 - RNA, 19 nt, Artificial Sequence
  Description of Artificial Sequence: Synthetic oligonucleotide
  Antisense strand to SEQ ID NO: 1366252
cugcuucaggaacaacacc

SEQ ID NO: 1366254 - RNA, 19 nt, Artificial Sequence
  Description of Artificial Sequence: Synthetic oligonucleotide
  Sense strand starting at position 18 of SEQ ID NO: 1242697
uggcuaaacgaucacauua

SEQ ID NO: 1366255 - RNA, 19 nt, Artificial Sequence
  Description of Artificial Sequence: Synthetic oligonucleotide
  Antisense strand to SEQ ID NO: 1366254
uaaugugaucguuuagcca

SEQ ID NO: 1366256 - RNA, 19 nt, Artificial Sequence
  Description of Artificial Sequence: Synthetic oligonucleotide
  Sense strand starting at position 20 of SEQ ID NO: 1242697
gcuaaacgaucacauuauu

SEQ ID NO: 1366257 - RNA, 19 nt, Artificial Sequence
  Description of Artificial Sequence: Synthetic oligonucleotide
  Antisense strand to SEQ ID NO: 1366256
aauaaugugaucguuuagc

SEQ ID NO: 1366258 - RNA, 19 nt, Artificial Sequence
  Description of Artificial Sequence: Synthetic oligonucleotide
  Sense strand starting at position 459 of SEQ ID NO: 1242697
uguucucauguggaaggau

SEQ ID NO: 1366259 - RNA, 19 nt, Artificial Sequence
  Description of Artificial Sequence: Synthetic oligonucleotide
  Antisense strand to SEQ ID NO: 1366258
auccuuccacaugagaaca

SEQ ID NO: 1366260 - RNA, 19 nt, Artificial Sequence
  Description of Artificial Sequence: Synthetic oligonucleotide
  Sense strand starting at position 667 of SEQ ID NO: 1242697
gagggucuuuaaugcauga

SEQ ID NO: 1366261 - RNA, 19 nt, Artificial Sequence
  Description of Artificial Sequence: Synthetic oligonucleotide
  Antisense strand to SEQ ID NO: 1366260
ucaugcauuaaagacccuc

SEQ ID NO: 1366262 - RNA, 19 nt, Artificial Sequence
  Description of Artificial Sequence: Synthetic oligonucleotide
  Sense strand starting at position 669 of SEQ ID NO: 1242697
gggucuuuaaugcaugaaa

SEQ ID NO: 1366263 - RNA, 19 nt, Artificial Sequence
  Description of Artificial Sequence: Synthetic oligonucleotide
  Antisense strand to SEQ ID NO: 1366262
uuucaugcauuaaagaccc

SEQ ID NO: 1366264 - RNA, 19 nt, Artificial Sequence
  Description of Artificial Sequence: Synthetic oligonucleotide
  Sense strand starting at position 713 of SEQ ID NO: 1242697
gagcaauucuuguuuauag

SEQ ID NO: 1366265 - RNA, 19 nt, Artificial Sequence
  Description of Artificial Sequence: Synthetic oligonucleotide
  Antisense strand to SEQ ID NO: 1366264
cuauaaacaagaauugcuc

SEQ ID NO: 1366266 - RNA, 19 nt, Artificial Sequence
  Description of Artificial Sequence: Synthetic oligonucleotide
  Sense strand starting at position 715 of SEQ ID NO: 1242697
gcaauucuuguuuauagcu

SEQ ID NO: 1366267 - RNA, 19 nt, Artificial Sequence
  Description of Artificial Sequence: Synthetic oligonucleotide
  Antisense strand to SEQ ID NO: 1366266
agcuauaaacaagaauugc

SEQ ID NO: 1366268 - RNA, 19 nt, Artificial Sequence
  Description of Artificial Sequence: Synthetic oligonucleotide
  Sense strand starting at position 821 of SEQ ID NO: 1242697
gaggacagguucuggacaa

SEQ ID NO: 1366269 - RNA, 19 nt, Artificial Sequence
  Description of Artificial Sequence: Synthetic oligonucleotide
  Antisense strand to SEQ ID NO: 1366268
uuguccagaaccuguccuc

SEQ ID NO: 1366270 - RNA, 19 nt, Artificial Sequence
  Description of Artificial Sequence: Synthetic oligonucleotide
  Sense strand starting at position 822 of SEQ ID NO: 1242697
aggacagguucuggacaaa

SEQ ID NO: 1366271 - RNA, 19 nt, Artificial Sequence
  Description of Artificial Sequence: Synthetic oligonucleotide
  Antisense strand to SEQ ID NO: 1366270
uuuguccagaaccuguccu

SEQ ID NO: 1366272 - RNA, 19 nt, Artificial Sequence
  Description of Artificial Sequence: Synthetic oligonucleotide
  Sense strand starting at position 906 of SEQ ID NO: 1242697
ggaguuucacuugagguca

SEQ ID NO: 1366273 - RNA, 19 nt, Artificial Sequence
  Description of Artificial Sequence: Synthetic oligonucleotide
  Antisense strand to SEQ ID NO: 1366272
ugaccucaagugaaacucc

SEQ ID NO: 1366274 - RNA, 19 nt, Artificial Sequence
  Description of Artificial Sequence: Synthetic oligonucleotide
  Sense strand starting at position 940 of SEQ ID NO: 1242697
accggucagcauggugaaa

SEQ ID NO: 1366275 - RNA, 19 nt, Artificial Sequence
  Description of Artificial Sequence: Synthetic oligonucleotide
  Antisense strand to SEQ ID NO: 1366274
uuucaccaugcugaccggu

SEQ ID NO: 1366276 - RNA, 19 nt, Artificial Sequence
  Description of Artificial Sequence: Synthetic oligonucleotide
  Sense strand starting at position 1047 of SEQ ID NO: 1242697
ucacuuuaacuccagaggu

SEQ ID NO: 1366277 - RNA, 19 nt, Artificial Sequence
  Description of Artificial Sequence: Synthetic oligonucleotide
  Antisense strand to SEQ ID NO: 1366276
accucuggaguuaaaguga

SEQ ID NO: 1366278 - RNA, 19 nt, Artificial Sequence
  Description of Artificial Sequence: Synthetic oligonucleotide
  Sense strand starting at position 1524 of SEQ ID NO: 1242697
ccagcuuuccaagggagaa

SEQ ID NO: 1366279 - RNA, 19 nt, Artificial Sequence
  Description of Artificial Sequence: Synthetic oligonucleotide
  Antisense strand to SEQ ID NO: 1366278
uucucccuuggaaagcugg

SEQ ID NO: 1366280 - RNA, 19 nt, Artificial Sequence
  Description of Artificial Sequence: Synthetic oligonucleotide
  Sense strand starting at position 1611 of SEQ ID NO: 1242697
gggcccuaugcuugaguuu

SEQ ID NO: 1366281 - RNA, 19 nt, Artificial Sequence
  Description of Artificial Sequence: Synthetic oligonucleotide
  Antisense strand to SEQ ID NO: 1366280
aaacucaagcauagggccc

SEQ ID NO: 1366282 - RNA, 19 nt, Artificial Sequence
  Description of Artificial Sequence: Synthetic oligonucleotide
  Sense strand starting at position 1636 of SEQ ID NO: 1242697
gcaggagaucccgaggcua

SEQ ID NO: 1366283 - RNA, 19 nt, Artificial Sequence
  Description of Artificial Sequence: Synthetic oligonucleotide
  Antisense strand to SEQ ID NO: 1366282
uagccucgggaucuccugc

SEQ ID NO: 1366284 - RNA, 19 nt, Artificial Sequence
  Description of Artificial Sequence: Synthetic oligonucleotide
  Sense strand starting at position 1720 of SEQ ID NO: 1242697
ucaacagacuuguaaacug

SEQ ID NO: 1366285 - RNA, 19 nt, Artificial Sequence
  Description of Artificial Sequence: Synthetic oligonucleotide
  Antisense strand to SEQ ID NO: 1366284
caguuuacaagucuguuga

SEQ ID NO: 1366286 - RNA, 19 nt, Artificial Sequence
  Description of Artificial Sequence: Synthetic oligonucleotide
  Sense strand starting at position 1808 of SEQ ID NO: 1242697
ugguccagugcuuguccaa

SEQ ID NO: 1366287 - RNA, 19 nt, Artificial Sequence
  Description of Artificial Sequence: Synthetic oligonucleotide
  Antisense strand to SEQ ID NO: 1366286
uuggacaagcacuggacca

SEQ ID NO: 1366288 - RNA, 19 nt, Artificial Sequence
  Description of Artificial Sequence: Synthetic oligonucleotide
  Sense strand starting at position 1815 of SEQ ID NO: 1242697
gugcuuguccaagacauga

SEQ ID NO: 1366289 - RNA, 19 nt, Artificial Sequence
  Description of Artificial Sequence: Synthetic oligonucleotide
  Antisense strand to SEQ ID NO: 1366288
ucaugucuuggacaagcac

SEQ ID NO: 1366290 - RNA, 19 nt, Artificial Sequence
  Description of Artificial Sequence: Synthetic oligonucleotide
  Sense strand starting at position 2330 of SEQ ID NO: 1242697
gggagaugguuucacagcu

SEQ ID NO: 1366291 - RNA, 19 nt, Artificial Sequence
  Description of Artificial Sequence: Synthetic oligonucleotide
  Antisense strand to SEQ ID NO: 1366290
agcugugaaaccaucuccc

SEQ ID NO: 1366292 - RNA, 19 nt, Artificial Sequence
  Description of Artificial Sequence: Synthetic oligonucleotide
  Sense strand starting at position 2412 of SEQ ID NO: 1242697
ccugucuuguacccuuaau

SEQ ID NO: 1366293 - RNA, 19 nt, Artificial Sequence
  Description of Artificial Sequence: Synthetic oligonucleotide
  Antisense strand to SEQ ID NO: 1366292
auuaaggguacaagacagg

SEQ ID NO: 1366294 - RNA, 19 nt, Artificial Sequence
  Description of Artificial Sequence: Synthetic oligonucleotide
  Sense strand starting at position 2422 of SEQ ID NO: 1242697
acccuuaaugacggcauua

SEQ ID NO: 1366295 - RNA, 19 nt, Artificial Sequence
  Description of Artificial Sequence: Synthetic oligonucleotide
  Antisense strand to SEQ ID NO: 1366294
uaaugccgucauuaagggu

SEQ ID NO: 1366296 - RNA, 19 nt, Artificial Sequence
  Description of Artificial Sequence: Synthetic oligonucleotide
  Sense strand starting at position 2424 of SEQ ID NO: 1242697
ccuuaaugacggcauuacu

SEQ ID NO: 1366297 - RNA, 19 nt, Artificial Sequence
  Description of Artificial Sequence: Synthetic oligonucleotide
  Antisense strand to SEQ ID NO: 1366296
aguaaugccgucauuaagg

SEQ ID NO: 1366298 - RNA, 19 nt, Artificial Sequence
  Description of Artificial Sequence: Synthetic oligonucleotide
  Sense strand starting at position 2529 of SEQ ID NO: 1242697
uucucaacgguuuauggaa

SEQ ID NO: 1366299 - RNA, 19 nt, Artificial Sequence
  Description of Artificial Sequence: Synthetic oligonucleotide
  Antisense strand to SEQ ID NO: 1366298
uuccauaaaccguugagaa

SEQ ID NO: 1366300 - RNA, 19 nt, Artificial Sequence
  Description of Artificial Sequence: Synthetic oligonucleotide
  Sense strand starting at position 2649 of SEQ ID NO: 1242697
cguugauucugcuuccuaa

SEQ ID NO: 1366301 - RNA, 19 nt, Artificial Sequence
  Description of Artificial Sequence: Synthetic oligonucleotide
  Antisense strand to SEQ ID NO: 1366300
uuaggaagcagaaucaacg

SEQ ID NO: 1366302 - RNA, 19 nt, Artificial Sequence
  Description of Artificial Sequence: Synthetic oligonucleotide
  Sense strand starting at position 2785 of SEQ ID NO: 1242697
gcgugagugguccagagcu

SEQ ID NO: 1366303 - RNA, 19 nt, Artificial Sequence
  Description of Artificial Sequence: Synthetic oligonucleotide
  Antisense strand to SEQ ID NO: 1366302
agcucuggaccacucacgc

SEQ ID NO: 1366304 - RNA, 19 nt, Artificial Sequence
  Description of Artificial Sequence: Synthetic oligonucleotide
  Sense strand starting at position 3031 of SEQ ID NO: 1242697
cuacuuaugcgucaaagcu

SEQ ID NO: 1366305 - RNA, 19 nt, Artificial Sequence
  Description of Artificial Sequence: Synthetic oligonucleotide
  Antisense strand to SEQ ID NO: 1366304
agcuuugacgcauaaguag

SEQ ID NO: 1366306 - RNA, 19 nt, Artificial Sequence
  Description of Artificial Sequence: Synthetic oligonucleotide
  Sense strand starting at position 3037 of SEQ ID NO: 1242697
augcgucaaagcuguuuga

SEQ ID NO: 1366307 - RNA, 19 nt, Artificial Sequence
  Description of Artificial Sequence: Synthetic oligonucleotide
  Antisense strand to SEQ ID NO: 1366306
ucaaacagcuuugacgcau

SEQ ID NO: 1366308 - RNA, 19 nt, Artificial Sequence
  Description of Artificial Sequence: Synthetic oligonucleotide
  Sense strand starting at position 3040 of SEQ ID NO: 1242697
cgucaaagcuguuugaaau

SEQ ID NO: 1366309 - RNA, 19 nt, Artificial Sequence
  Description of Artificial Sequence: Synthetic oligonucleotide
  Antisense strand to SEQ ID NO: 1366308
auuucaaacagcuuugacg

SEQ ID NO: 1366310 - RNA, 19 nt, Artificial Sequence
  Description of Artificial Sequence: Synthetic oligonucleotide
  Sense strand starting at position 3041 of SEQ ID NO: 1242697
gucaaagcuguuugaaaug

SEQ ID NO: 1366311 - RNA, 19 nt, Artificial Sequence
  Description of Artificial Sequence: Synthetic oligonucleotide
  Antisense strand to SEQ ID NO: 1366310
cauuucaaacagcuuugac

SEQ ID NO: 1366312 - RNA, 19 nt, Artificial Sequence
  Description of Artificial Sequence: Synthetic oligonucleotide
  Sense strand starting at position 3046 of SEQ ID NO: 1242697
agcuguuugaaaugucaug

SEQ ID NO: 1366313 - RNA, 19 nt, Artificial Sequence
  Description of Artificial Sequence: Synthetic oligonucleotide
  Antisense strand to SEQ ID NO: 1366312
caugacauuucaaacagcu

SEQ ID NO: 1366314 - RNA, 19 nt, Artificial Sequence
  Description of Artificial Sequence: Synthetic oligonucleotide
  Sense strand starting at position 3056 of SEQ ID NO: 1242697
aaugucauguccuugguaa

SEQ ID NO: 1366315 - RNA, 19 nt, Artificial Sequence
  Description of Artificial Sequence: Synthetic oligonucleotide
  Antisense strand to SEQ ID NO: 1366314
uuaccaaggacaugacauu

SEQ ID NO: 1366316 - RNA, 19 nt, Artificial Sequence
  Description of Artificial Sequence: Synthetic oligonucleotide
  Sense strand starting at position 3057 of SEQ ID NO: 1242697
augucauguccuugguaag

SEQ ID NO: 1366317 - RNA, 19 nt, Artificial Sequence
  Description of Artificial Sequence: Synthetic oligonucleotide
  Antisense strand to SEQ ID NO: 1366316
cuuaccaaggacaugacau

SEQ ID NO: 1366318 - RNA, 19 nt, Artificial Sequence
  Description of Artificial Sequence: Synthetic oligonucleotide
  Sense strand starting at position 3115 of SEQ ID NO: 1242697
gaauguggcccugagcaga

SEQ ID NO: 1366319 - RNA, 19 nt, Artificial Sequence
  Description of Artificial Sequence: Synthetic oligonucleotide
  Antisense strand to SEQ ID NO: 1366318
ucugcucagggccacauuc

SEQ ID NO: 1366320 - RNA, 19 nt, Artificial Sequence
  Description of Artificial Sequence: Synthetic oligonucleotide
  Sense strand starting at position 3474 of SEQ ID NO: 1242697
gcuugaauccggugagagg

SEQ ID NO: 1366321 - RNA, 19 nt, Artificial Sequence
  Description of Artificial Sequence: Synthetic oligonucleotide
  Antisense strand to SEQ ID NO: 1366320
ccucucaccggauucaagc

SEQ ID NO: 1366322 - RNA, 19 nt, Artificial Sequence
  Description of Artificial Sequence: Synthetic oligonucleotide
  Sense strand starting at position 3764 of SEQ ID NO: 1242697
uuuauugaacgcuguggua

SEQ ID NO: 1366323 - RNA, 19 nt, Artificial Sequence
  Description of Artificial Sequence: Synthetic oligonucleotide
  Antisense strand to SEQ ID NO: 1366322
uaccacagcguucaauaaa

SEQ ID NO: 1366324 - RNA, 19 nt, Artificial Sequence
  Description of Artificial Sequence: Synthetic oligonucleotide
  Sense strand starting at position 3766 of SEQ ID NO: 1242697
uauugaacgcugugguaaa

SEQ ID NO: 1366325 - RNA, 19 nt, Artificial Sequence
  Description of Artificial Sequence: Synthetic oligonucleotide
  Antisense strand to SEQ ID NO: 1366324
uuuaccacagcguucaaua

SEQ ID NO: 1366326 - RNA, 19 nt, Artificial Sequence
  Description of Artificial Sequence: Synthetic oligonucleotide
  Sense strand starting at position 3773 of SEQ ID NO: 1242697
cgcugugguaaacagaaua

SEQ ID NO: 1366327 - RNA, 19 nt, Artificial Sequence
  Description of Artificial Sequence: Synthetic oligonucleotide
  Antisense strand to SEQ ID NO: 1366326
uauucuguuuaccacagcg

SEQ ID NO: 1366328 - RNA, 19 nt, Artificial Sequence
  Description of Artificial Sequence: Synthetic oligonucleotide
  Sense strand starting at position 3866 of SEQ ID NO: 1242697
ugcagaugugacuguuuag

SEQ ID NO: 1366329 - RNA, 19 nt, Artificial Sequence
  Description of Artificial Sequence: Synthetic oligonucleotide
  Antisense strand to SEQ ID NO: 1366328
cuaaacagucacaucugca

SEQ ID NO: 1366330 - RNA, 19 nt, Artificial Sequence
  Description of Artificial Sequence: Synthetic oligonucleotide
  Sense strand starting at position 3869 of SEQ ID NO: 1242697
agaugugacuguuuagggu

SEQ ID NO: 1366331 - RNA, 19 nt, Artificial Sequence
  Description of Artificial Sequence: Synthetic oligonucleotide
  Antisense strand to SEQ ID NO: 1366330
acccuaaacagucacaucu

SEQ ID NO: 1366332 - RNA, 19 nt, Artificial Sequence
  Description of Artificial Sequence: Synthetic oligonucleotide
  Sense strand starting at position 3877 of SEQ ID NO: 1242697
cuguuuaggguuuaggauu

SEQ ID NO: 1366333 - RNA, 19 nt, Artificial Sequence
  Description of Artificial Sequence: Synthetic oligonucleotide
  Antisense strand to SEQ ID NO: 1366332
aauccuaaacccuaaacag

SEQ ID NO: 1366334 - RNA, 19 nt, Artificial Sequence
  Description of Artificial Sequence: Synthetic oligonucleotide
  Sense strand starting at position 347 of SEQ ID NO: 1242698
aaaguuacaucugaagaug

SEQ ID NO: 1366335 - RNA, 19 nt, Artificial Sequence
  Description of Artificial Sequence: Synthetic oligonucleotide
  Antisense strand to SEQ ID NO: 1366334
caucuucagauguaacuuu

SEQ ID NO: 1366336 - RNA, 19 nt, Artificial Sequence
  Description of Artificial Sequence: Synthetic oligonucleotide
  Sense strand starting at position 363 of SEQ ID NO: 1242698
augaucuaaugguuacuau

SEQ ID NO: 1366337 - RNA, 19 nt, Artificial Sequence
  Description of Artificial Sequence: Synthetic oligonucleotide
  Antisense strand to SEQ ID NO: 1366336
auaguaaccauuagaucau

SEQ ID NO: 1366338 - RNA, 19 nt, Artificial Sequence
  Description of Artificial Sequence: Synthetic oligonucleotide
  Sense strand starting at position 364 of SEQ ID NO: 1242698
ugaucuaaugguuacuauu

SEQ ID NO: 1366339 - RNA, 19 nt, Artificial Sequence
  Description of Artificial Sequence: Synthetic oligonucleotide
  Antisense strand to SEQ ID NO: 1366338
aauaguaaccauuagauca

SEQ ID NO: 1366340 - RNA, 19 nt, Artificial Sequence
  Description of Artificial Sequence: Synthetic oligonucleotide
  Sense strand starting at position 374 of SEQ ID NO: 1242698
guuacuauucccugugcca

SEQ ID NO: 1366341 - RNA, 19 nt, Artificial Sequence
  Description of Artificial Sequence: Synthetic oligonucleotide
  Antisense strand to SEQ ID NO: 1366340
uggcacagggaauaguaac

SEQ ID NO: 1366342 - RNA, 19 nt, Artificial Sequence
  Description of Artificial Sequence: Synthetic oligonucleotide
  Sense strand starting at position 431 of SEQ ID NO: 1242698
uauguaaaggaguggcauu

SEQ ID NO: 1366343 - RNA, 19 nt, Artificial Sequence
  Description of Artificial Sequence: Synthetic oligonucleotide
  Antisense strand to SEQ ID NO: 1366342
aaugccacuccuuuacaua

SEQ ID NO: 1366344 - RNA, 19 nt, Artificial Sequence
  Description of Artificial Sequence: Synthetic oligonucleotide
  Sense strand starting at position 441 of SEQ ID NO: 1242698
aguggcauugcacaaauua

SEQ ID NO: 1366345 - RNA, 19 nt, Artificial Sequence
  Description of Artificial Sequence: Synthetic oligonucleotide
  Antisense strand to SEQ ID NO: 1366344
uaauuugugcaaugccacu

SEQ ID NO: 1366346 - RNA, 19 nt, Artificial Sequence
  Description of Artificial Sequence: Synthetic oligonucleotide
  Sense strand starting at position 509 of SEQ ID NO: 1242698
agcgcaugucauguaacuu

SEQ ID NO: 1366347 - RNA, 19 nt, Artificial Sequence
  Description of Artificial Sequence: Synthetic oligonucleotide
  Antisense strand to SEQ ID NO: 1366346
aaguuacaugacaugcgcu

SEQ ID NO: 1366348 - RNA, 19 nt, Artificial Sequence
  Description of Artificial Sequence: Synthetic oligonucleotide
  Sense strand starting at position 535 of SEQ ID NO: 1242698
gggaaacuuucugauccag

SEQ ID NO: 1366349 - RNA, 19 nt, Artificial Sequence
  Description of Artificial Sequence: Synthetic oligonucleotide
  Antisense strand to SEQ ID NO: 1366348
cuggaucagaaaguuuccc

SEQ ID NO: 1366350 - RNA, 19 nt, Artificial Sequence
  Description of Artificial Sequence: Synthetic oligonucleotide
  Sense strand starting at position 674 of SEQ ID NO: 1242698
gaccaaggugcauaauguu

SEQ ID NO: 1366351 - RNA, 19 nt, Artificial Sequence
  Description of Artificial Sequence: Synthetic oligonucleotide
  Antisense strand to SEQ ID NO: 1366350
aacauuaugcaccuugguc

SEQ ID NO: 1366352 - RNA, 19 nt, Artificial Sequence
  Description of Artificial Sequence: Synthetic oligonucleotide
  Sense strand starting at position 694 of SEQ ID NO: 1242698
aauaaagaucugugggcuu

SEQ ID NO: 1366353 - RNA, 19 nt, Artificial Sequence
  Description of Artificial Sequence: Synthetic oligonucleotide
  Antisense strand to SEQ ID NO: 1366352
aagcccacagaucuuuauu

SEQ ID NO: 1366354 - RNA, 19 nt, Artificial Sequence
  Description of Artificial Sequence: Synthetic oligonucleotide
  Sense strand starting at position 696 of SEQ ID NO: 1242698
uaaagaucugugggcuuga

SEQ ID NO: 1366355 - RNA, 19 nt, Artificial Sequence
  Description of Artificial Sequence: Synthetic oligonucleotide
  Antisense strand to SEQ ID NO: 1366354
ucaagcccacagaucuuua

SEQ ID NO: 1366356 - RNA, 19 nt, Artificial Sequence
  Description of Artificial Sequence: Synthetic oligonucleotide
  Sense strand starting at position 697 of SEQ ID NO: 1242698
aaagaucugugggcuugaa

SEQ ID NO: 1366357 - RNA, 19 nt, Artificial Sequence
  Description of Artificial Sequence: Synthetic oligonucleotide
  Antisense strand to SEQ ID NO: 1366356
uucaagcccacagaucuuu

SEQ ID NO: 1366358 - RNA, 19 nt, Artificial Sequence
  Description of Artificial Sequence: Synthetic oligonucleotide
  Sense strand starting at position 701 of SEQ ID NO: 1242698
aucugugggcuugaagagu

SEQ ID NO: 1366359 - RNA, 19 nt, Artificial Sequence
  Description of Artificial Sequence: Synthetic oligonucleotide
  Antisense strand to SEQ ID NO: 1366358
acucuucaagcccacagau

SEQ ID NO: 1366360 - RNA, 19 nt, Artificial Sequence
  Description of Artificial Sequence: Synthetic oligonucleotide
  Sense strand starting at position 782 of SEQ ID NO: 1242698
gggcagugugcguccaagu

SEQ ID NO: 1366361 - RNA, 19 nt, Artificial Sequence
  Description of Artificial Sequence: Synthetic oligonucleotide
  Antisense strand to SEQ ID NO: 1366360
acuuggacgcacacugccc

SEQ ID NO: 1366362 - RNA, 19 nt, Artificial Sequence
  Description of Artificial Sequence: Synthetic oligonucleotide
  Sense strand starting at position 819 of SEQ ID NO: 1242698
cagugugcccucuauugua

SEQ ID NO: 1366363 - RNA, 19 nt, Artificial Sequence
  Description of Artificial Sequence: Synthetic oligonucleotide
  Antisense strand to SEQ ID NO: 1366362
uacaauagagggcacacug

SEQ ID NO: 1366364 - RNA, 19 nt, Artificial Sequence
  Description of Artificial Sequence: Synthetic oligonucleotide
  Sense strand starting at position 890 of SEQ ID NO: 1242698
aaccuagaccuguagguuu

SEQ ID NO: 1366365 - RNA, 19 nt, Artificial Sequence
  Description of Artificial Sequence: Synthetic oligonucleotide
  Antisense strand to SEQ ID NO: 1366364
aaaccuacaggucuagguu

SEQ ID NO: 1366366 - RNA, 19 nt, Artificial Sequence
  Description of Artificial Sequence: Synthetic oligonucleotide
  Sense strand starting at position 897 of SEQ ID NO: 1242698
accuguagguuuguguaca

SEQ ID NO: 1366367 - RNA, 19 nt, Artificial Sequence
  Description of Artificial Sequence: Synthetic oligonucleotide
  Antisense strand to SEQ ID NO: 1366366
uguacacaaaccuacaggu

SEQ ID NO: 1366368 - RNA, 19 nt, Artificial Sequence
  Description of Artificial Sequence: Synthetic oligonucleotide
  Sense strand starting at position 919 of SEQ ID NO: 1242698
gcaaucauuaaaggugaga

SEQ ID NO: 1366369 - RNA, 19 nt, Artificial Sequence
  Description of Artificial Sequence: Synthetic oligonucleotide
  Antisense strand to SEQ ID NO: 1366368
ucucaccuuuaaugauugc

SEQ ID NO: 1366370 - RNA, 19 nt, Artificial Sequence
  Description of Artificial Sequence: Synthetic oligonucleotide
  Sense strand starting at position 967 of SEQ ID NO: 1242698
cggacaugcuucucagaug

SEQ ID NO: 1366371 - RNA, 19 nt, Artificial Sequence
  Description of Artificial Sequence: Synthetic oligonucleotide
  Antisense strand to SEQ ID NO: 1366370
caucugagaagcauguccg

SEQ ID NO: 1366372 - RNA, 19 nt, Artificial Sequence
  Description of Artificial Sequence: Synthetic oligonucleotide
  Sense strand starting at position 1262 of SEQ ID NO: 1242698
gucuuccuguuagcaauua

SEQ ID NO: 1366373 - RNA, 19 nt, Artificial Sequence
  Description of Artificial Sequence: Synthetic oligonucleotide
  Antisense strand to SEQ ID NO: 1366372
uaauugcuaacaggaagac

SEQ ID NO: 1366374 - RNA, 19 nt, Artificial Sequence
  Description of Artificial Sequence: Synthetic oligonucleotide
  Sense strand starting at position 1274 of SEQ ID NO: 1242698
gcaauuaaaucagcugcaa

SEQ ID NO: 1366375 - RNA, 19 nt, Artificial Sequence
  Description of Artificial Sequence: Synthetic oligonucleotide
  Antisense strand to SEQ ID NO: 1366374
uugcagcugauuuaauugc

SEQ ID NO: 1366376 - RNA, 19 nt, Artificial Sequence
  Description of Artificial Sequence: Synthetic oligonucleotide
  Sense strand starting at position 1311 of SEQ ID NO: 1242698
ggcgacgaauucucaaaga

SEQ ID NO: 1366377 - RNA, 19 nt, Artificial Sequence
  Description of Artificial Sequence: Synthetic oligonucleotide
  Antisense strand to SEQ ID NO: 1366376
ucuuugagaauucgucgcc

SEQ ID NO: 1366378 - RNA, 19 nt, Artificial Sequence
  Description of Artificial Sequence: Synthetic oligonucleotide
  Sense strand starting at position 1372 of SEQ ID NO: 1242698
caggacagauacuaugaua

SEQ ID NO: 1366379 - RNA, 19 nt, Artificial Sequence
  Description of Artificial Sequence: Synthetic oligonucleotide
  Antisense strand to SEQ ID NO: 1366378
uaucauaguaucuguccug

SEQ ID NO: 1366380 - RNA, 19 nt, Artificial Sequence
  Description of Artificial Sequence: Synthetic oligonucleotide
  Sense strand starting at position 1383 of SEQ ID NO: 1242698
cuaugauaauagcugaaac

SEQ ID NO: 1366381 - RNA, 19 nt, Artificial Sequence
  Description of Artificial Sequence: Synthetic oligonucleotide
  Antisense strand to SEQ ID NO: 1366380
guuucagcuauuaucauag

SEQ ID NO: 1366382 - RNA, 19 nt, Artificial Sequence
  Description of Artificial Sequence: Synthetic oligonucleotide
  Sense strand starting at position 1441 of SEQ ID NO: 1242698
gaacgcugcuuuccacaga

SEQ ID NO: 1366383 - RNA, 19 nt, Artificial Sequence
  Description of Artificial Sequence: Synthetic oligonucleotide
  Antisense strand to SEQ ID NO: 1366382
ucuguggaaagcagcguuc

SEQ ID NO: 1366384 - RNA, 19 nt, Artificial Sequence
  Description of Artificial Sequence: Synthetic oligonucleotide
  Sense strand starting at position 2444 of SEQ ID NO: 1242698
cgacguggcgcuucuaaga

SEQ ID NO: 1366385 - RNA, 19 nt, Artificial Sequence
  Description of Artificial Sequence: Synthetic oligonucleotide
  Antisense strand to SEQ ID NO: 1366384
ucuuagaagcgccacgucg

SEQ ID NO: 1366386 - RNA, 19 nt, Artificial Sequence
  Description of Artificial Sequence: Synthetic oligonucleotide
  Sense strand starting at position 2556 of SEQ ID NO: 1242698
gguggagacccuuggguuu

SEQ ID NO: 1366387 - RNA, 19 nt, Artificial Sequence
  Description of Artificial Sequence: Synthetic oligonucleotide
  Antisense strand to SEQ ID NO: 1366386
aaacccaagggucuccacc

SEQ ID NO: 1366388 - RNA, 19 nt, Artificial Sequence
  Description of Artificial Sequence: Synthetic oligonucleotide
  Sense strand starting at position 2854 of SEQ ID NO: 1242698
ugagcuguccuucaggagu

SEQ ID NO: 1366389 - RNA, 19 nt, Artificial Sequence
  Description of Artificial Sequence: Synthetic oligonucleotide
  Antisense strand to SEQ ID NO: 1366388
acuccugaaggacagcuca

SEQ ID NO: 1366390 - RNA, 19 nt, Artificial Sequence
  Description of Artificial Sequence: Synthetic oligonucleotide
  Sense strand starting at position 3138 of SEQ ID NO: 1242698
agaguaaacaggugaucac

SEQ ID NO: 1366391 - RNA, 19 nt, Artificial Sequence
  Description of Artificial Sequence: Synthetic oligonucleotide
  Antisense strand to SEQ ID NO: 1366390
gugaucaccuguuuacucu

SEQ ID NO: 1366392 - RNA, 19 nt, Artificial Sequence
  Description of Artificial Sequence: Synthetic oligonucleotide
  Sense strand starting at position 3195 of SEQ ID NO: 1242698
ucuggaaguugggaauauu

SEQ ID NO: 1366393 - RNA, 19 nt, Artificial Sequence
  Description of Artificial Sequence: Synthetic oligonucleotide
  Antisense strand to SEQ ID NO: 1366392
aauauucccaacuuccaga

SEQ ID NO: 1366394 - RNA, 19 nt, Artificial Sequence
  Description of Artificial Sequence: Synthetic oligonucleotide
  Sense strand starting at position 3350 of SEQ ID NO: 1242698
ggguuacuguuuccuacuu

SEQ ID NO: 1366395 - RNA, 19 nt, Artificial Sequence
  Description of Artificial Sequence: Synthetic oligonucleotide
  Antisense strand to SEQ ID NO: 1366394
aaguaggaaacaguaaccc

SEQ ID NO: 1366396 - RNA, 19 nt, Artificial Sequence
  Description of Artificial Sequence: Synthetic oligonucleotide
  Sense strand starting at position 3351 of SEQ ID NO: 1242698
gguuacuguuuccuacuuu

SEQ ID NO: 1366397 - RNA, 19 nt, Artificial Sequence
  Description of Artificial Sequence: Synthetic oligonucleotide
  Antisense strand to SEQ ID NO: 1366396
aaaguaggaaacaguaacc

SEQ ID NO: 1366398 - RNA, 19 nt, Artificial Sequence
  Description of Artificial Sequence: Synthetic oligonucleotide
  Sense strand starting at position 3355 of SEQ ID NO: 1242698
acuguuuccuacuuuguca

SEQ ID NO: 1366399 - RNA, 19 nt, Artificial Sequence
  Description of Artificial Sequence: Synthetic oligonucleotide
  Antisense strand to SEQ ID NO: 1366398
ugacaaaguaggaaacagu

SEQ ID NO: 1366400 - RNA, 19 nt, Artificial Sequence
  Description of Artificial Sequence: Synthetic oligonucleotide
  Sense strand starting at position 3426 of SEQ ID NO: 1242698
uagcaucuugaagggauua

SEQ ID NO: 1366401 - RNA, 19 nt, Artificial Sequence
  Description of Artificial Sequence: Synthetic oligonucleotide
  Antisense strand to SEQ ID NO: 1366400
uaaucccuucaagaugcua

SEQ ID NO: 1366402 - RNA, 19 nt, Artificial Sequence
  Description of Artificial Sequence: Synthetic oligonucleotide
  Sense strand starting at position 3541 of SEQ ID NO: 1242698
cugugcuuuguguccugau

SEQ ID NO: 1366403 - RNA, 19 nt, Artificial Sequence
  Description of Artificial Sequence: Synthetic oligonucleotide
  Antisense strand to SEQ ID NO: 1366402
aucaggacacaaagcacag

SEQ ID NO: 1366404 - RNA, 19 nt, Artificial Sequence
  Description of Artificial Sequence: Synthetic oligonucleotide
  Sense strand starting at position 3605 of SEQ ID NO: 1242698
aggaguugucuugacugca

SEQ ID NO: 1366405 - RNA, 19 nt, Artificial Sequence
  Description of Artificial Sequence: Synthetic oligonucleotide
  Antisense strand to SEQ ID NO: 1366404
ugcagucaagacaacuccu

SEQ ID NO: 1366406 - RNA, 19 nt, Artificial Sequence
  Description of Artificial Sequence: Synthetic oligonucleotide
  Sense strand starting at position 3769 of SEQ ID NO: 1242698
uuaggagcucagggaaauu

SEQ ID NO: 1366407 - RNA, 19 nt, Artificial Sequence
  Description of Artificial Sequence: Synthetic oligonucleotide
  Antisense strand to SEQ ID NO: 1366406
aauuucccugagcuccuaa

SEQ ID NO: 1366408 - RNA, 19 nt, Artificial Sequence
  Description of Artificial Sequence: Synthetic oligonucleotide
  Sense strand starting at position 3791 of SEQ ID NO: 1242698
gguggaaugaggugucggu

SEQ ID NO: 1366409 - RNA, 19 nt, Artificial Sequence
  Description of Artificial Sequence: Synthetic oligonucleotide
  Antisense strand to SEQ ID NO: 1366408
accgacaccucauuccacc

SEQ ID NO: 1366410 - RNA, 19 nt, Artificial Sequence
  Description of Artificial Sequence: Synthetic oligonucleotide
  Sense strand starting at position 3795 of SEQ ID NO: 1242698
gaaugaggugucgguugaa

SEQ ID NO: 1366411 - RNA, 19 nt, Artificial Sequence
  Description of Artificial Sequence: Synthetic oligonucleotide
  Antisense strand to SEQ ID NO: 1366410
uucaaccgacaccucauuc

SEQ ID NO: 1366412 - RNA, 19 nt, Artificial Sequence
  Description of Artificial Sequence: Synthetic oligonucleotide
  Sense strand starting at position 3981 of SEQ ID NO: 1242698
ggagcagucaccugaaacg

SEQ ID NO: 1366413 - RNA, 19 nt, Artificial Sequence
  Description of Artificial Sequence: Synthetic oligonucleotide
  Antisense strand to SEQ ID NO: 1366412
cguuucaggugacugcucc

SEQ ID NO: 1366414 - RNA, 19 nt, Artificial Sequence
  Description of Artificial Sequence: Synthetic oligonucleotide
  Sense strand starting at position 220 of SEQ ID NO: 1242699
ggacuauacaccgaagcua

SEQ ID NO: 1366415 - RNA, 19 nt, Artificial Sequence
  Description of Artificial Sequence: Synthetic oligonucleotide
  Antisense strand to SEQ ID NO: 1366414
uagcuucgguguauagucc

SEQ ID NO: 1366416 - RNA, 19 nt, Artificial Sequence
  Description of Artificial Sequence: Synthetic oligonucleotide
  Sense strand starting at position 280 of SEQ ID NO: 1242699
gcucuagucccagagaaac

SEQ ID NO: 1366417 - RNA, 19 nt, Artificial Sequence
  Description of Artificial Sequence: Synthetic oligonucleotide
  Antisense strand to SEQ ID NO: 1366416
guuucucugggacuagagc

SEQ ID NO: 1366418 - RNA, 19 nt, Artificial Sequence
  Description of Artificial Sequence: Synthetic oligonucleotide
  Sense strand starting at position 321 of SEQ ID NO: 1242699
guaaccauuuaagaaguga

SEQ ID NO: 1366419 - RNA, 19 nt, Artificial Sequence
  Description of Artificial Sequence: Synthetic oligonucleotide
  Antisense strand to SEQ ID NO: 1366418
ucacuucuuaaaugguuac

SEQ ID NO: 1366420 - RNA, 19 nt, Artificial Sequence
  Description of Artificial Sequence: Synthetic oligonucleotide
  Sense strand starting at position 336 of SEQ ID NO: 1242699
gugagcagucuguauccca

SEQ ID NO: 1366421 - RNA, 19 nt, Artificial Sequence
  Description of Artificial Sequence: Synthetic oligonucleotide
  Antisense strand to SEQ ID NO: 1366420
ugggauacagacugcucac

SEQ ID NO: 1366422 - RNA, 19 nt, Artificial Sequence
  Description of Artificial Sequence: Synthetic oligonucleotide
  Sense strand starting at position 343 of SEQ ID NO: 1242699
gucuguaucccaugauuaa

SEQ ID NO: 1366423 - RNA, 19 nt, Artificial Sequence
  Description of Artificial Sequence: Synthetic oligonucleotide
  Antisense strand to SEQ ID NO: 1366422
uuaaucaugggauacagac

SEQ ID NO: 1366424 - RNA, 19 nt, Artificial Sequence
  Description of Artificial Sequence: Synthetic oligonucleotide
  Sense strand starting at position 344 of SEQ ID NO: 1242699
ucuguaucccaugauuaag

SEQ ID NO: 1366425 - RNA, 19 nt, Artificial Sequence
  Description of Artificial Sequence: Synthetic oligonucleotide
  Antisense strand to SEQ ID NO: 1366424
cuuaaucaugggauacaga

SEQ ID NO: 1366426 - RNA, 19 nt, Artificial Sequence
  Description of Artificial Sequence: Synthetic oligonucleotide
  Sense strand starting at position 347 of SEQ ID NO: 1242699
guaucccaugauuaagcaa

SEQ ID NO: 1366427 - RNA, 19 nt, Artificial Sequence
  Description of Artificial Sequence: Synthetic oligonucleotide
  Antisense strand to SEQ ID NO: 1366426
uugcuuaaucaugggauac

SEQ ID NO: 1366428 - RNA, 19 nt, Artificial Sequence
  Description of Artificial Sequence: Synthetic oligonucleotide
  Sense strand starting at position 492 of SEQ ID NO: 1242699
guccacuuccaguaauaau

SEQ ID NO: 1366429 - RNA, 19 nt, Artificial Sequence
  Description of Artificial Sequence: Synthetic oligonucleotide
  Antisense strand to SEQ ID NO: 1366428
auuauuacuggaaguggac

SEQ ID NO: 1366430 - RNA, 19 nt, Artificial Sequence
  Description of Artificial Sequence: Synthetic oligonucleotide
  Sense strand starting at position 503 of SEQ ID NO: 1242699
guaauaauuugucagcuac

SEQ ID NO: 1366431 - RNA, 19 nt, Artificial Sequence
  Description of Artificial Sequence: Synthetic oligonucleotide
  Antisense strand to SEQ ID NO: 1366430
guagcugacaaauuauuac

SEQ ID NO: 1366432 - RNA, 19 nt, Artificial Sequence
  Description of Artificial Sequence: Synthetic oligonucleotide
  Sense strand starting at position 536 of SEQ ID NO: 1242699
ugccgucuucuccauuuau

SEQ ID NO: 1366433 - RNA, 19 nt, Artificial Sequence
  Description of Artificial Sequence: Synthetic oligonucleotide
  Antisense strand to SEQ ID NO: 1366432
auaaauggagaagacggca

SEQ ID NO: 1366434 - RNA, 19 nt, Artificial Sequence
  Description of Artificial Sequence: Synthetic oligonucleotide
  Sense strand starting at position 715 of SEQ ID NO: 1242699
uguuucuuugcccaucagu

SEQ ID NO: 1366435 - RNA, 19 nt, Artificial Sequence
  Description of Artificial Sequence: Synthetic oligonucleotide
  Antisense strand to SEQ ID NO: 1366434
acugaugggcaaagaaaca

SEQ ID NO: 1366436 - RNA, 19 nt, Artificial Sequence
  Description of Artificial Sequence: Synthetic oligonucleotide
  Sense strand starting at position 743 of SEQ ID NO: 1242699
gacgcaaacuucuuguaaa

SEQ ID NO: 1366437 - RNA, 19 nt, Artificial Sequence
  Description of Artificial Sequence: Synthetic oligonucleotide
  Antisense strand to SEQ ID NO: 1366436
uuuacaagaaguuugcguc

SEQ ID NO: 1366438 - RNA, 19 nt, Artificial Sequence
  Description of Artificial Sequence: Synthetic oligonucleotide
  Sense strand starting at position 837 of SEQ ID NO: 1242699
accuguuucguccucugua

SEQ ID NO: 1366439 - RNA, 19 nt, Artificial Sequence
  Description of Artificial Sequence: Synthetic oligonucleotide
  Antisense strand to SEQ ID NO: 1366438
uacagaggacgaaacaggu

SEQ ID NO: 1366440 - RNA, 19 nt, Artificial Sequence
  Description of Artificial Sequence: Synthetic oligonucleotide
  Sense strand starting at position 862 of SEQ ID NO: 1242699
ggaugaucacgguauccgu

SEQ ID NO: 1366441 - RNA, 19 nt, Artificial Sequence
  Description of Artificial Sequence: Synthetic oligonucleotide
  Antisense strand to SEQ ID NO: 1366440
acggauaccgugaucaucc

SEQ ID NO: 1366442 - RNA, 19 nt, Artificial Sequence
  Description of Artificial Sequence: Synthetic oligonucleotide
  Sense strand starting at position 879 of SEQ ID NO: 1242699
gucucaaaggaauguugua

SEQ ID NO: 1366443 - RNA, 19 nt, Artificial Sequence
  Description of Artificial Sequence: Synthetic oligonucleotide
  Antisense strand to SEQ ID NO: 1366442
uacaacauuccuuugagac

SEQ ID NO: 1366444 - RNA, 19 nt, Artificial Sequence
  Description of Artificial Sequence: Synthetic oligonucleotide
  Sense strand starting at position 923 of SEQ ID NO: 1242699
gggcaauuaacguagugca

SEQ ID NO: 1366445 - RNA, 19 nt, Artificial Sequence
  Description of Artificial Sequence: Synthetic oligonucleotide
  Antisense strand to SEQ ID NO: 1366444
ugcacuacguuaauugccc

SEQ ID NO: 1366446 - RNA, 19 nt, Artificial Sequence
  Description of Artificial Sequence: Synthetic oligonucleotide
  Sense strand starting at position 984 of SEQ ID NO: 1242699
uuaagaggauaaugaugau

SEQ ID NO: 1366447 - RNA, 19 nt, Artificial Sequence
  Description of Artificial Sequence: Synthetic oligonucleotide
  Antisense strand to SEQ ID NO: 1366446
aucaucauuauccucuuaa

SEQ ID NO: 1366448 - RNA, 19 nt, Artificial Sequence
  Description of Artificial Sequence: Synthetic oligonucleotide
  Sense strand starting at position 1011 of SEQ ID NO: 1242699
uuagcaguagaguaugaau

SEQ ID NO: 1366449 - RNA, 19 nt, Artificial Sequence
  Description of Artificial Sequence: Synthetic oligonucleotide
  Antisense strand to SEQ ID NO: 1366448
auucauacucuacugcuaa

SEQ ID NO: 1366450 - RNA, 19 nt, Artificial Sequence
  Description of Artificial Sequence: Synthetic oligonucleotide
  Sense strand starting at position 1144 of SEQ ID NO: 1242699
aaucaaucucgagauggcu

SEQ ID NO: 1366451 - RNA, 19 nt, Artificial Sequence
  Description of Artificial Sequence: Synthetic oligonucleotide
  Antisense strand to SEQ ID NO: 1366450
agccaucucgagauugauu

SEQ ID NO: 1366452 - RNA, 19 nt, Artificial Sequence
  Description of Artificial Sequence: Synthetic oligonucleotide
  Sense strand starting at position 1150 of SEQ ID NO: 1242699
ucucgagauggcugccauu

SEQ ID NO: 1366453 - RNA, 19 nt, Artificial Sequence
  Description of Artificial Sequence: Synthetic oligonucleotide
  Antisense strand to SEQ ID NO: 1366452
aauggcagccaucucgaga

SEQ ID NO: 1366454 - RNA, 19 nt, Artificial Sequence
  Description of Artificial Sequence: Synthetic oligonucleotide
  Sense strand starting at position 1191 of SEQ ID NO: 1242699
cuuggaucguaaccagaau

SEQ ID NO: 1366455 - RNA, 19 nt, Artificial Sequence
  Description of Artificial Sequence: Synthetic oligonucleotide
  Antisense strand to SEQ ID NO: 1366454
auucugguuacgauccaag

SEQ ID NO: 1366456 - RNA, 19 nt, Artificial Sequence
  Description of Artificial Sequence: Synthetic oligonucleotide
  Sense strand starting at position 1246 of SEQ ID NO: 1242699
ggcaaucgauuacuuuauu

SEQ ID NO: 1366457 - RNA, 19 nt, Artificial Sequence
  Description of Artificial Sequence: Synthetic oligonucleotide
  Antisense strand to SEQ ID NO: 1366456
aauaaaguaaucgauugcc

SEQ ID NO: 1366458 - RNA, 19 nt, Artificial Sequence
  Description of Artificial Sequence: Synthetic oligonucleotide
  Sense strand starting at position 1247 of SEQ ID NO: 1242699
gcaaucgauuacuuuauua

SEQ ID NO: 1366459 - RNA, 19 nt, Artificial Sequence
  Description of Artificial Sequence: Synthetic oligonucleotide
  Antisense strand to SEQ ID NO: 1366458
uaauaaaguaaucgauugc

SEQ ID NO: 1366460 - RNA, 19 nt, Artificial Sequence
  Description of Artificial Sequence: Synthetic oligonucleotide
  Sense strand starting at position 1698 of SEQ ID NO: 1242699
ccaauuucgccucgccaga

SEQ ID NO: 1366461 - RNA, 19 nt, Artificial Sequence
  Description of Artificial Sequence: Synthetic oligonucleotide
  Antisense strand to SEQ ID NO: 1366460
ucuggcgaggcgaaauugg

SEQ ID NO: 1366462 - RNA, 19 nt, Artificial Sequence
  Description of Artificial Sequence: Synthetic oligonucleotide
  Sense strand starting at position 1988 of SEQ ID NO: 1242699
ugauucccgggcuguuaaa

SEQ ID NO: 1366463 - RNA, 19 nt, Artificial Sequence
  Description of Artificial Sequence: Synthetic oligonucleotide
  Antisense strand to SEQ ID NO: 1366462
uuuaacagcccgggaauca

SEQ ID NO: 1366464 - RNA, 19 nt, Artificial Sequence
  Description of Artificial Sequence: Synthetic oligonucleotide
  Sense strand starting at position 2102 of SEQ ID NO: 1242699
aacguagucuuccuugcaa

SEQ ID NO: 1366465 - RNA, 19 nt, Artificial Sequence
  Description of Artificial Sequence: Synthetic oligonucleotide
  Antisense strand to SEQ ID NO: 1366464
uugcaaggaagacuacguu

SEQ ID NO: 1366466 - RNA, 19 nt, Artificial Sequence
  Description of Artificial Sequence: Synthetic oligonucleotide
  Sense strand starting at position 2193 of SEQ ID NO: 1242699
ccugaaguguuccuugaag

SEQ ID NO: 1366467 - RNA, 19 nt, Artificial Sequence
  Description of Artificial Sequence: Synthetic oligonucleotide
  Antisense strand to SEQ ID NO: 1366466
cuucaaggaacacuucagg

SEQ ID NO: 1366468 - RNA, 19 nt, Artificial Sequence
  Description of Artificial Sequence: Synthetic oligonucleotide
  Sense strand starting at position 2195 of SEQ ID NO: 1242699
ugaaguguuccuugaaguu

SEQ ID NO: 1366469 - RNA, 19 nt, Artificial Sequence
  Description of Artificial Sequence: Synthetic oligonucleotide
  Antisense strand to SEQ ID NO: 1366468
aacuucaaggaacacuuca

SEQ ID NO: 1366470 - RNA, 19 nt, Artificial Sequence
  Description of Artificial Sequence: Synthetic oligonucleotide
  Sense strand starting at position 2616 of SEQ ID NO: 1242699
ggcugaauccuagaugcca

SEQ ID NO: 1366471 - RNA, 19 nt, Artificial Sequence
  Description of Artificial Sequence: Synthetic oligonucleotide
  Antisense strand to SEQ ID NO: 1366470
uggcaucuaggauucagcc

SEQ ID NO: 1366472 - RNA, 19 nt, Artificial Sequence
  Description of Artificial Sequence: Synthetic oligonucleotide
  Sense strand starting at position 2663 of SEQ ID NO: 1242699
uuugcaaaucagugggaaa

SEQ ID NO: 1366473 - RNA, 19 nt, Artificial Sequence
  Description of Artificial Sequence: Synthetic oligonucleotide
  Antisense strand to SEQ ID NO: 1366472
uuucccacugauuugcaaa

SEQ ID NO: 1366474 - RNA, 19 nt, Artificial Sequence
  Description of Artificial Sequence: Synthetic oligonucleotide
  Sense strand starting at position 3101 of SEQ ID NO: 1242699
uuauaauccgauugugccu

SEQ ID NO: 1366475 - RNA, 19 nt, Artificial Sequence
  Description of Artificial Sequence: Synthetic oligonucleotide
  Antisense strand to SEQ ID NO: 1366474
aggcacaaucggauuauaa

SEQ ID NO: 1366476 - RNA, 19 nt, Artificial Sequence
  Description of Artificial Sequence: Synthetic oligonucleotide
  Sense strand starting at position 3169 of SEQ ID NO: 1242699
ugaaaucagucuccugaua

SEQ ID NO: 1366477 - RNA, 19 nt, Artificial Sequence
  Description of Artificial Sequence: Synthetic oligonucleotide
  Antisense strand to SEQ ID NO: 1366476
uaucaggagacugauuuca

SEQ ID NO: 1366478 - RNA, 19 nt, Artificial Sequence
  Description of Artificial Sequence: Synthetic oligonucleotide
  Sense strand starting at position 3227 of SEQ ID NO: 1242699
aaguguuugcucgucaagu

SEQ ID NO: 1366479 - RNA, 19 nt, Artificial Sequence
  Description of Artificial Sequence: Synthetic oligonucleotide
  Antisense strand to SEQ ID NO: 1366478
acuugacgagcaaacacuu

SEQ ID NO: 1366480 - RNA, 19 nt, Artificial Sequence
  Description of Artificial Sequence: Synthetic oligonucleotide
  Sense strand starting at position 3238 of SEQ ID NO: 1242699
cgucaaguaccugggacau

SEQ ID NO: 1366481 - RNA, 19 nt, Artificial Sequence
  Description of Artificial Sequence: Synthetic oligonucleotide
  Antisense strand to SEQ ID NO: 1366480
augucccagguacuugacg

SEQ ID NO: 1366482 - RNA, 19 nt, Artificial Sequence
  Description of Artificial Sequence: Synthetic oligonucleotide
  Sense strand starting at position 3256 of SEQ ID NO: 1242699
ugguaagugcucuguaaac

SEQ ID NO: 1366483 - RNA, 19 nt, Artificial Sequence
  Description of Artificial Sequence: Synthetic oligonucleotide
  Antisense strand to SEQ ID NO: 1366482
guuuacagagcacuuacca

SEQ ID NO: 1366484 - RNA, 19 nt, Artificial Sequence
  Description of Artificial Sequence: Synthetic oligonucleotide
  Sense strand starting at position 3303 of SEQ ID NO: 1242699
cucccacaagaaugugaau

SEQ ID NO: 1366485 - RNA, 19 nt, Artificial Sequence
  Description of Artificial Sequence: Synthetic oligonucleotide
  Antisense strand to SEQ ID NO: 1366484
auucacauucuugugggag

SEQ ID NO: 1366486 - RNA, 19 nt, Artificial Sequence
  Description of Artificial Sequence: Synthetic oligonucleotide
  Sense strand starting at position 3314 of SEQ ID NO: 1242699
augugaaucccauaagagc

SEQ ID NO: 1366487 - RNA, 19 nt, Artificial Sequence
  Description of Artificial Sequence: Synthetic oligonucleotide
  Antisense strand to SEQ ID NO: 1366486
gcucuuaugggauucacau

SEQ ID NO: 1366488 - RNA, 19 nt, Artificial Sequence
  Description of Artificial Sequence: Synthetic oligonucleotide
  Sense strand starting at position 3384 of SEQ ID NO: 1242699
uuggcacaucuugaauuga

SEQ ID NO: 1366489 - RNA, 19 nt, Artificial Sequence
  Description of Artificial Sequence: Synthetic oligonucleotide
  Antisense strand to SEQ ID NO: 1366488
ucaauucaagaugugccaa

SEQ ID NO: 1366490 - RNA, 19 nt, Artificial Sequence
  Description of Artificial Sequence: Synthetic oligonucleotide
  Sense strand starting at position 3476 of SEQ ID NO: 1242699
caguuuccucaagggcaga

SEQ ID NO: 1366491 - RNA, 19 nt, Artificial Sequence
  Description of Artificial Sequence: Synthetic oligonucleotide
  Antisense strand to SEQ ID NO: 1366490
ucugcccuugaggaaacug

SEQ ID NO: 1366492 - RNA, 19 nt, Artificial Sequence
  Description of Artificial Sequence: Synthetic oligonucleotide
  Sense strand starting at position 3529 of SEQ ID NO: 1242699
gcuuuaggaugguucuuau

SEQ ID NO: 1366493 - RNA, 19 nt, Artificial Sequence
  Description of Artificial Sequence: Synthetic oligonucleotide
  Antisense strand to SEQ ID NO: 1366492
auaagaaccauccuaaagc

SEQ ID NO: 1366494 - RNA, 19 nt, Artificial Sequence
  Description of Artificial Sequence: Synthetic oligonucleotide
  Sense strand starting at position 290 of SEQ ID NO: 1242700
uggagucaguguucugugu

SEQ ID NO: 1366495 - RNA, 19 nt, Artificial Sequence
  Description of Artificial Sequence: Synthetic oligonucleotide
  Antisense strand to SEQ ID NO: 1366494
acacagaacacugacucca

SEQ ID NO: 1366496 - RNA, 19 nt, Artificial Sequence
  Description of Artificial Sequence: Synthetic oligonucleotide
  Sense strand starting at position 294 of SEQ ID NO: 1242700
gucaguguucuguguggaa

SEQ ID NO: 1366497 - RNA, 19 nt, Artificial Sequence
  Description of Artificial Sequence: Synthetic oligonucleotide
  Antisense strand to SEQ ID NO: 1366496
uuccacacagaacacugac

SEQ ID NO: 1366498 - RNA, 19 nt, Artificial Sequence
  Description of Artificial Sequence: Synthetic oligonucleotide
  Sense strand starting at position 296 of SEQ ID NO: 1242700
caguguucuguguggaagu

SEQ ID NO: 1366499 - RNA, 19 nt, Artificial Sequence
  Description of Artificial Sequence: Synthetic oligonucleotide
  Antisense strand to SEQ ID NO: 1366498
acuuccacacagaacacug

SEQ ID NO: 1366500 - RNA, 19 nt, Artificial Sequence
  Description of Artificial Sequence: Synthetic oligonucleotide
  Sense strand starting at position 297 of SEQ ID NO: 1242700
aguguucuguguggaaguu

SEQ ID NO: 1366501 - RNA, 19 nt, Artificial Sequence
  Description of Artificial Sequence: Synthetic oligonucleotide
  Antisense strand to SEQ ID NO: 1366500
aacuuccacacagaacacu

SEQ ID NO: 1366502 - RNA, 19 nt, Artificial Sequence
  Description of Artificial Sequence: Synthetic oligonucleotide
  Sense strand starting at position 404 of SEQ ID NO: 1242700
augccucccaguugagaga

SEQ ID NO: 1366503 - RNA, 19 nt, Artificial Sequence
  Description of Artificial Sequence: Synthetic oligonucleotide
  Antisense strand to SEQ ID NO: 1366502
ucucucaacugggaggcau

SEQ ID NO: 1366504 - RNA, 19 nt, Artificial Sequence
  Description of Artificial Sequence: Synthetic oligonucleotide
  Sense strand starting at position 1187 of SEQ ID NO: 1242700
ccaggagucugcccaccua

SEQ ID NO: 1366505 - RNA, 19 nt, Artificial Sequence
  Description of Artificial Sequence: Synthetic oligonucleotide
  Antisense strand to SEQ ID NO: 1366504
uaggugggcagacuccugg

SEQ ID NO: 1366506 - RNA, 19 nt, Artificial Sequence
  Description of Artificial Sequence: Synthetic oligonucleotide
  Sense strand starting at position 1207 of SEQ ID NO: 1242700
cuccgaguuucgcccucaa

SEQ ID NO: 1366507 - RNA, 19 nt, Artificial Sequence
  Description of Artificial Sequence: Synthetic oligonucleotide
  Antisense strand to SEQ ID NO: 1366506
uugagggcgaaacucggag

SEQ ID NO: 1366508 - RNA, 19 nt, Artificial Sequence
  Description of Artificial Sequence: Synthetic oligonucleotide
  Sense strand starting at position 1580 of SEQ ID NO: 1242700
cagcguuaucucccucugu

SEQ ID NO: 1366509 - RNA, 19 nt, Artificial Sequence
  Description of Artificial Sequence: Synthetic oligonucleotide
  Antisense strand to SEQ ID NO: 1366508
acagagggagauaacgcug

SEQ ID NO: 1366510 - RNA, 19 nt, Artificial Sequence
  Description of Artificial Sequence: Synthetic oligonucleotide
  Sense strand starting at position 1655 of SEQ ID NO: 1242700
cuccucacaccagguuaua

SEQ ID NO: 1366511 - RNA, 19 nt, Artificial Sequence
  Description of Artificial Sequence: Synthetic oligonucleotide
  Antisense strand to SEQ ID NO: 1366510
uauaaccuggugugaggag

SEQ ID NO: 1366512 - RNA, 19 nt, Artificial Sequence
  Description of Artificial Sequence: Synthetic oligonucleotide
  Sense strand starting at position 1769 of SEQ ID NO: 1242700
ggguaaguuacucagccaa

SEQ ID NO: 1366513 - RNA, 19 nt, Artificial Sequence
  Description of Artificial Sequence: Synthetic oligonucleotide
  Antisense strand to SEQ ID NO: 1366512
uuggcugaguaacuuaccc

SEQ ID NO: 1366514 - RNA, 19 nt, Artificial Sequence
  Description of Artificial Sequence: Synthetic oligonucleotide
  Sense strand starting at position 2155 of SEQ ID NO: 1242700
ucucacuaccacgggaaau

SEQ ID NO: 1366515 - RNA, 19 nt, Artificial Sequence
  Description of Artificial Sequence: Synthetic oligonucleotide
  Antisense strand to SEQ ID NO: 1366514
auuucccgugguagugaga

SEQ ID NO: 1366516 - RNA, 19 nt, Artificial Sequence
  Description of Artificial Sequence: Synthetic oligonucleotide
  Sense strand starting at position 2167 of SEQ ID NO: 1242700
gggaaaugaucuugugugu

SEQ ID NO: 1366517 - RNA, 19 nt, Artificial Sequence
  Description of Artificial Sequence: Synthetic oligonucleotide
  Antisense strand to SEQ ID NO: 1366516
acacacaagaucauuuccc

SEQ ID NO: 1366518 - RNA, 19 nt, Artificial Sequence
  Description of Artificial Sequence: Synthetic oligonucleotide
  Sense strand starting at position 2170 of SEQ ID NO: 1242700
aaaugaucuuguguguuua

SEQ ID NO: 1366519 - RNA, 19 nt, Artificial Sequence
  Description of Artificial Sequence: Synthetic oligonucleotide
  Antisense strand to SEQ ID NO: 1366518
uaaacacacaagaucauuu

SEQ ID NO: 1366520 - RNA, 19 nt, Artificial Sequence
  Description of Artificial Sequence: Synthetic oligonucleotide
  Sense strand starting at position 2171 of SEQ ID NO: 1242700
aaugaucuuguguguuuau

SEQ ID NO: 1366521 - RNA, 19 nt, Artificial Sequence
  Description of Artificial Sequence: Synthetic oligonucleotide
  Antisense strand to SEQ ID NO: 1366520
auaaacacacaagaucauu

SEQ ID NO: 1366522 - RNA, 19 nt, Artificial Sequence
  Description of Artificial Sequence: Synthetic oligonucleotide
  Sense strand starting at position 2174 of SEQ ID NO: 1242700
gaucuuguguguuuauuug

SEQ ID NO: 1366523 - RNA, 19 nt, Artificial Sequence
  Description of Artificial Sequence: Synthetic oligonucleotide
  Antisense strand to SEQ ID NO: 1366522
caaauaaacacacaagauc

SEQ ID NO: 1366524 - RNA, 19 nt, Artificial Sequence
  Description of Artificial Sequence: Synthetic oligonucleotide
  Sense strand starting at position 2259 of SEQ ID NO: 1242700
uugcaagugcucuagaaca

SEQ ID NO: 1366525 - RNA, 19 nt, Artificial Sequence
  Description of Artificial Sequence: Synthetic oligonucleotide
  Antisense strand to SEQ ID NO: 1366524
uguucuagagcacuugcaa

SEQ ID NO: 1366526 - RNA, 19 nt, Artificial Sequence
  Description of Artificial Sequence: Synthetic oligonucleotide
  Sense strand starting at position 2261 of SEQ ID NO: 1242700
gcaagugcucuagaacaau

SEQ ID NO: 1366527 - RNA, 19 nt, Artificial Sequence
  Description of Artificial Sequence: Synthetic oligonucleotide
  Antisense strand to SEQ ID NO: 1366526
auuguucuagagcacuugc

SEQ ID NO: 1366528 - RNA, 19 nt, Artificial Sequence
  Description of Artificial Sequence: Synthetic oligonucleotide
  Sense strand starting at position 2500 of SEQ ID NO: 1242700
acaaauauuguuugugaag

SEQ ID NO: 1366529 - RNA, 19 nt, Artificial Sequence
  Description of Artificial Sequence: Synthetic oligonucleotide
  Antisense strand to SEQ ID NO: 1366528
cuucacaaacaauauuugu

SEQ ID NO: 1366530 - RNA, 19 nt, Artificial Sequence
  Description of Artificial Sequence: Synthetic oligonucleotide
  Sense strand starting at position 2501 of SEQ ID NO: 1242700
caaauauuguuugugaaga

SEQ ID NO: 1366531 - RNA, 19 nt, Artificial Sequence
  Description of Artificial Sequence: Synthetic oligonucleotide
  Antisense strand to SEQ ID NO: 1366530
ucuucacaaacaauauuug

SEQ ID NO: 1366532 - RNA, 19 nt, Artificial Sequence
  Description of Artificial Sequence: Synthetic oligonucleotide
  Sense strand starting at position 2573 of SEQ ID NO: 1242700
gcccucaguuaaugagaua

SEQ ID NO: 1366533 - RNA, 19 nt, Artificial Sequence
  Description of Artificial Sequence: Synthetic oligonucleotide
  Antisense strand to SEQ ID NO: 1366532
uaucucauuaacugagggc

SEQ ID NO: 1366534 - RNA, 19 nt, Artificial Sequence
  Description of Artificial Sequence: Synthetic oligonucleotide
  Sense strand starting at position 2605 of SEQ ID NO: 1242700
ugccuaagagcucaaguca

SEQ ID NO: 1366535 - RNA, 19 nt, Artificial Sequence
  Description of Artificial Sequence: Synthetic oligonucleotide
  Antisense strand to SEQ ID NO: 1366534
ugacuugagcucuuaggca

SEQ ID NO: 1366536 - RNA, 19 nt, Artificial Sequence
  Description of Artificial Sequence: Synthetic oligonucleotide
  Sense strand starting at position 2745 of SEQ ID NO: 1242700
ccaugauuaugccugggaa

SEQ ID NO: 1366537 - RNA, 19 nt, Artificial Sequence
  Description of Artificial Sequence: Synthetic oligonucleotide
  Antisense strand to SEQ ID NO: 1366536
uucccaggcauaaucaugg

SEQ ID NO: 1366538 - RNA, 19 nt, Artificial Sequence
  Description of Artificial Sequence: Synthetic oligonucleotide
  Sense strand starting at position 2746 of SEQ ID NO: 1242700
caugauuaugccugggaau

SEQ ID NO: 1366539 - RNA, 19 nt, Artificial Sequence
  Description of Artificial Sequence: Synthetic oligonucleotide
  Antisense strand to SEQ ID NO: 1366538
auucccaggcauaaucaug

SEQ ID NO: 1366540 - RNA, 19 nt, Artificial Sequence
  Description of Artificial Sequence: Synthetic oligonucleotide
  Sense strand starting at position 2994 of SEQ ID NO: 1242700
ggcugauucccaggcccau

SEQ ID NO: 1366541 - RNA, 19 nt, Artificial Sequence
  Description of Artificial Sequence: Synthetic oligonucleotide
  Antisense strand to SEQ ID NO: 1366540
augggccugggaaucagcc

SEQ ID NO: 1366542 - RNA, 19 nt, Artificial Sequence
  Description of Artificial Sequence: Synthetic oligonucleotide
  Sense strand starting at position 3030 of SEQ ID NO: 1242700
uccuguuugcugugggcaa

SEQ ID NO: 1366543 - RNA, 19 nt, Artificial Sequence
  Description of Artificial Sequence: Synthetic oligonucleotide
  Antisense strand to SEQ ID NO: 1366542
uugcccacagcaaacagga

SEQ ID NO: 1366544 - RNA, 19 nt, Artificial Sequence
  Description of Artificial Sequence: Synthetic oligonucleotide
  Sense strand starting at position 3337 of SEQ ID NO: 1242700
agaggauccuuugaggaca

SEQ ID NO: 1366545 - RNA, 19 nt, Artificial Sequence
  Description of Artificial Sequence: Synthetic oligonucleotide
  Antisense strand to SEQ ID NO: 1366544
uguccucaaaggauccucu

SEQ ID NO: 1366546 - RNA, 19 nt, Artificial Sequence
  Description of Artificial Sequence: Synthetic oligonucleotide
  Sense strand starting at position 109 of SEQ ID NO: 1242701
uccagcuuccggcaauaaa

SEQ ID NO: 1366547 - RNA, 19 nt, Artificial Sequence
  Description of Artificial Sequence: Synthetic oligonucleotide
  Antisense strand to SEQ ID NO: 1366546
uuuauugccggaagcugga

SEQ ID NO: 1366548 - RNA, 19 nt, Artificial Sequence
  Description of Artificial Sequence: Synthetic oligonucleotide
  Sense strand starting at position 340 of SEQ ID NO: 1242701
ccgcgacucugcuucuaaa

SEQ ID NO: 1366549 - RNA, 19 nt, Artificial Sequence
  Description of Artificial Sequence: Synthetic oligonucleotide
  Antisense strand to SEQ ID NO: 1366548
uuuagaagcagagucgcgg

SEQ ID NO: 1366550 - RNA, 19 nt, Artificial Sequence
  Description of Artificial Sequence: Synthetic oligonucleotide
  Sense strand starting at position 476 of SEQ ID NO: 1242701
ccaacuccucagcgaacau

SEQ ID NO: 1366551 - RNA, 19 nt, Artificial Sequence
  Description of Artificial Sequence: Synthetic oligonucleotide
  Antisense strand to SEQ ID NO: 1366550
auguucgcugaggaguugg

SEQ ID NO: 1366552 - RNA, 19 nt, Artificial Sequence
  Description of Artificial Sequence: Synthetic oligonucleotide
  Sense strand starting at position 863 of SEQ ID NO: 1242701
ucaccuguaaugggaagau

SEQ ID NO: 1366553 - RNA, 19 nt, Artificial Sequence
  Description of Artificial Sequence: Synthetic oligonucleotide
  Antisense strand to SEQ ID NO: 1366552
aucuucccauuacagguga

SEQ ID NO: 1366554 - RNA, 19 nt, Artificial Sequence
  Description of Artificial Sequence: Synthetic oligonucleotide
  Sense strand starting at position 872 of SEQ ID NO: 1242701
augggaagauggagugauu

SEQ ID NO: 1366555 - RNA, 19 nt, Artificial Sequence
  Description of Artificial Sequence: Synthetic oligonucleotide
  Antisense strand to SEQ ID NO: 1366554
aaucacuccaucuucccau

SEQ ID NO: 1366556 - RNA, 19 nt, Artificial Sequence
  Description of Artificial Sequence: Synthetic oligonucleotide
  Sense strand starting at position 1223 of SEQ ID NO: 1242701
cagaguguauucuugggua

SEQ ID NO: 1366557 - RNA, 19 nt, Artificial Sequence
  Description of Artificial Sequence: Synthetic oligonucleotide
  Antisense strand to SEQ ID NO: 1366556
uacccaagaauacacucug

SEQ ID NO: 1366558 - RNA, 19 nt, Artificial Sequence
  Description of Artificial Sequence: Synthetic oligonucleotide
  Sense strand starting at position 1225 of SEQ ID NO: 1242701
gaguguauucuuggguaca

SEQ ID NO: 1366559 - RNA, 19 nt, Artificial Sequence
  Description of Artificial Sequence: Synthetic oligonucleotide
  Antisense strand to SEQ ID NO: 1366558
uguacccaagaauacacuc

SEQ ID NO: 1366560 - RNA, 19 nt, Artificial Sequence
  Description of Artificial Sequence: Synthetic oligonucleotide
  Sense strand starting at position 1265 of SEQ ID NO: 1242701
aggccaagaugucauauuu

SEQ ID NO: 1366561 - RNA, 19 nt, Artificial Sequence
  Description of Artificial Sequence: Synthetic oligonucleotide
  Antisense strand to SEQ ID NO: 1366560
aaauaugacaucuuggccu

SEQ ID NO: 1366562 - RNA, 19 nt, Artificial Sequence
  Description of Artificial Sequence: Synthetic oligonucleotide
  Sense strand starting at position 1313 of SEQ ID NO: 1242701
ccucaucgcuauccaaaga

SEQ ID NO: 1366563 - RNA, 19 nt, Artificial Sequence
  Description of Artificial Sequence: Synthetic oligonucleotide
  Antisense strand to SEQ ID NO: 1366562
ucuuuggauagcgaugagg

SEQ ID NO: 1366564 - RNA, 19 nt, Artificial Sequence
  Description of Artificial Sequence: Synthetic oligonucleotide
  Sense strand starting at position 1318 of SEQ ID NO: 1242701
ucgcuauccaaagaguguu

SEQ ID NO: 1366565 - RNA, 19 nt, Artificial Sequence
  Description of Artificial Sequence: Synthetic oligonucleotide
  Antisense strand to SEQ ID NO: 1366564
aacacucuuuggauagcga

SEQ ID NO: 1366566 - RNA, 19 nt, Artificial Sequence
  Description of Artificial Sequence: Synthetic oligonucleotide
  Sense strand starting at position 1324 of SEQ ID NO: 1242701
uccaaagaguguuugccuu

SEQ ID NO: 1366567 - RNA, 19 nt, Artificial Sequence
  Description of Artificial Sequence: Synthetic oligonucleotide
  Antisense strand to SEQ ID NO: 1366566
aaggcaaacacucuuugga

SEQ ID NO: 1366568 - RNA, 19 nt, Artificial Sequence
  Description of Artificial Sequence: Synthetic oligonucleotide
  Sense strand starting at position 1326 of SEQ ID NO: 1242701
caaagaguguuugccuuua

SEQ ID NO: 1366569 - RNA, 19 nt, Artificial Sequence
  Description of Artificial Sequence: Synthetic oligonucleotide
  Antisense strand to SEQ ID NO: 1366568
uaaaggcaaacacucuuug

SEQ ID NO: 1366570 - RNA, 19 nt, Artificial Sequence
  Description of Artificial Sequence: Synthetic oligonucleotide
  Sense strand starting at position 1328 of SEQ ID NO: 1242701
aagaguguuugccuuuaaa

SEQ ID NO: 1366571 - RNA, 19 nt, Artificial Sequence
  Description of Artificial Sequence: Synthetic oligonucleotide
  Antisense strand to SEQ ID NO: 1366570
uuuaaaggcaaacacucuu

SEQ ID NO: 1366572 - RNA, 19 nt, Artificial Sequence
  Description of Artificial Sequence: Synthetic oligonucleotide
  Sense strand starting at position 1408 of SEQ ID NO: 1242701
aguugagaaaugcagguua

SEQ ID NO: 1366573 - RNA, 19 nt, Artificial Sequence
  Description of Artificial Sequence: Synthetic oligonucleotide
  Antisense strand to SEQ ID NO: 1366572
uaaccugcauuucucaacu

SEQ ID NO: 1366574 - RNA, 19 nt, Artificial Sequence
  Description of Artificial Sequence: Synthetic oligonucleotide
  Sense strand starting at position 1410 of SEQ ID NO: 1242701
uugagaaaugcagguuacu

SEQ ID NO: 1366575 - RNA, 19 nt, Artificial Sequence
  Description of Artificial Sequence: Synthetic oligonucleotide
  Antisense strand to SEQ ID NO: 1366574
aguaaccugcauuucucaa

SEQ ID NO: 1366576 - RNA, 19 nt, Artificial Sequence
  Description of Artificial Sequence: Synthetic oligonucleotide
  Sense strand starting at position 1763 of SEQ ID NO: 1242701
uguuucucaagcugaggaa

SEQ ID NO: 1366577 - RNA, 19 nt, Artificial Sequence
  Description of Artificial Sequence: Synthetic oligonucleotide
  Antisense strand to SEQ ID NO: 1366576
uuccucagcuugagaaaca

SEQ ID NO: 1366578 - RNA, 19 nt, Artificial Sequence
  Description of Artificial Sequence: Synthetic oligonucleotide
  Sense strand starting at position 1764 of SEQ ID NO: 1242701
guuucucaagcugaggaaa

SEQ ID NO: 1366579 - RNA, 19 nt, Artificial Sequence
  Description of Artificial Sequence: Synthetic oligonucleotide
  Antisense strand to SEQ ID NO: 1366578
uuuccucagcuugagaaac

SEQ ID NO: 1366580 - RNA, 19 nt, Artificial Sequence
  Description of Artificial Sequence: Synthetic oligonucleotide
  Sense strand starting at position 1854 of SEQ ID NO: 1242701
gucugugacagguacaguu

SEQ ID NO: 1366581 - RNA, 19 nt, Artificial Sequence
  Description of Artificial Sequence: Synthetic oligonucleotide
  Antisense strand to SEQ ID NO: 1366580
aacuguaccugucacagac

SEQ ID NO: 1366582 - RNA, 19 nt, Artificial Sequence
  Description of Artificial Sequence: Synthetic oligonucleotide
  Sense strand starting at position 1943 of SEQ ID NO: 1242701
ucuagcauccgcgaguuaa

SEQ ID NO: 1366583 - RNA, 19 nt, Artificial Sequence
  Description of Artificial Sequence: Synthetic oligonucleotide
  Antisense strand to SEQ ID NO: 1366582
uuaacucgcggaugcuaga

SEQ ID NO: 1366584 - RNA, 19 nt, Artificial Sequence
  Description of Artificial Sequence: Synthetic oligonucleotide
  Sense strand starting at position 2267 of SEQ ID NO: 1242701
cgcgcacucaccugggaau

SEQ ID NO: 1366585 - RNA, 19 nt, Artificial Sequence
  Description of Artificial Sequence: Synthetic oligonucleotide
  Antisense strand to SEQ ID NO: 1366584
auucccaggugagugcgcg

SEQ ID NO: 1366586 - RNA, 19 nt, Artificial Sequence
  Description of Artificial Sequence: Synthetic oligonucleotide
  Sense strand starting at position 2436 of SEQ ID NO: 1242701
gggcggaaguaugcgauaa

SEQ ID NO: 1366587 - RNA, 19 nt, Artificial Sequence
  Description of Artificial Sequence: Synthetic oligonucleotide
  Antisense strand to SEQ ID NO: 1366586
uuaucgcauacuuccgccc

SEQ ID NO: 1366588 - RNA, 19 nt, Artificial Sequence
  Description of Artificial Sequence: Synthetic oligonucleotide
  Sense strand starting at position 2437 of SEQ ID NO: 1242701
ggcggaaguaugcgauaag

SEQ ID NO: 1366589 - RNA, 19 nt, Artificial Sequence
  Description of Artificial Sequence: Synthetic oligonucleotide
  Antisense strand to SEQ ID NO: 1366588
cuuaucgcauacuuccgcc

SEQ ID NO: 1366590 - RNA, 19 nt, Artificial Sequence
  Description of Artificial Sequence: Synthetic oligonucleotide
  Sense strand starting at position 2440 of SEQ ID NO: 1242701
ggaaguaugcgauaagcga

SEQ ID NO: 1366591 - RNA, 19 nt, Artificial Sequence
  Description of Artificial Sequence: Synthetic oligonucleotide
  Antisense strand to SEQ ID NO: 1366590
ucgcuuaucgcauacuucc

SEQ ID NO: 1366592 - RNA, 19 nt, Artificial Sequence
  Description of Artificial Sequence: Synthetic oligonucleotide
  Sense strand starting at position 2535 of SEQ ID NO: 1242701
cuaagaauuccuggacucu

SEQ ID NO: 1366593 - RNA, 19 nt, Artificial Sequence
  Description of Artificial Sequence: Synthetic oligonucleotide
  Antisense strand to SEQ ID NO: 1366592
agaguccaggaauucuuag

SEQ ID NO: 1366594 - RNA, 19 nt, Artificial Sequence
  Description of Artificial Sequence: Synthetic oligonucleotide
  Sense strand starting at position 2551 of SEQ ID NO: 1242701
ucugacugggcgugagaaa

SEQ ID NO: 1366595 - RNA, 19 nt, Artificial Sequence
  Description of Artificial Sequence: Synthetic oligonucleotide
  Antisense strand to SEQ ID NO: 1366594
uuucucacgcccagucaga

SEQ ID NO: 1366596 - RNA, 19 nt, Artificial Sequence
  Description of Artificial Sequence: Synthetic oligonucleotide
  Sense strand starting at position 2552 of SEQ ID NO: 1242701
cugacugggcgugagaaau

SEQ ID NO: 1366597 - RNA, 19 nt, Artificial Sequence
  Description of Artificial Sequence: Synthetic oligonucleotide
  Antisense strand to SEQ ID NO: 1366596
auuucucacgcccagucag

SEQ ID NO: 1366598 - RNA, 19 nt, Artificial Sequence
  Description of Artificial Sequence: Synthetic oligonucleotide
  Sense strand starting at position 2562 of SEQ ID NO: 1242701
gugagaaauggccggaagu

SEQ ID NO: 1366599 - RNA, 19 nt, Artificial Sequence
  Description of Artificial Sequence: Synthetic oligonucleotide
  Antisense strand to SEQ ID NO: 1366598
acuuccggccauuucucac

SEQ ID NO: 1366600 - RNA, 19 nt, Artificial Sequence
  Description of Artificial Sequence: Synthetic oligonucleotide
  Sense strand starting at position 2563 of SEQ ID NO: 1242701
ugagaaauggccggaagua

SEQ ID NO: 1366601 - RNA, 19 nt, Artificial Sequence
  Description of Artificial Sequence: Synthetic oligonucleotide
  Antisense strand to SEQ ID NO: 1366600
uacuuccggccauuucuca

SEQ ID NO: 1366602 - RNA, 19 nt, Artificial Sequence
  Description of Artificial Sequence: Synthetic oligonucleotide
  Sense strand starting at position 2761 of SEQ ID NO: 1242701
ccuaccgucucguuagaaa

SEQ ID NO: 1366603 - RNA, 19 nt, Artificial Sequence
  Description of Artificial Sequence: Synthetic oligonucleotide
  Antisense strand to SEQ ID NO: 1366602
uuucuaacgagacgguagg

SEQ ID NO: 1366604 - RNA, 19 nt, Artificial Sequence
  Description of Artificial Sequence: Synthetic oligonucleotide
  Sense strand starting at position 2969 of SEQ ID NO: 1242701
gggcgaguuccugguuucu

SEQ ID NO: 1366605 - RNA, 19 nt, Artificial Sequence
  Description of Artificial Sequence: Synthetic oligonucleotide
  Antisense strand to SEQ ID NO: 1366604
agaaaccaggaacucgccc

SEQ ID NO: 1366606 - RNA, 19 nt, Artificial Sequence
  Description of Artificial Sequence: Synthetic oligonucleotide
  Sense strand starting at position 2971 of SEQ ID NO: 1242701
gcgaguuccugguuucuga

SEQ ID NO: 1366607 - RNA, 19 nt, Artificial Sequence
  Description of Artificial Sequence: Synthetic oligonucleotide
  Antisense strand to SEQ ID NO: 1366606
ucagaaaccaggaacucgc

SEQ ID NO: 1366608 - RNA, 19 nt, Artificial Sequence
  Description of Artificial Sequence: Synthetic oligonucleotide
  Sense strand starting at position 2980 of SEQ ID NO: 1242701
ugguuucugaggugggaga

SEQ ID NO: 1366609 - RNA, 19 nt, Artificial Sequence
  Description of Artificial Sequence: Synthetic oligonucleotide
  Antisense strand to SEQ ID NO: 1366608
ucucccaccucagaaacca

SEQ ID NO: 1366610 - RNA, 19 nt, Artificial Sequence
  Description of Artificial Sequence: Synthetic oligonucleotide
  Sense strand starting at position 3360 of SEQ ID NO: 1242701
gguuuccucccauauugga

SEQ ID NO: 1366611 - RNA, 19 nt, Artificial Sequence
  Description of Artificial Sequence: Synthetic oligonucleotide
  Antisense strand to SEQ ID NO: 1366610
uccaauaugggaggaaacc

SEQ ID NO: 1366612 - RNA, 19 nt, Artificial Sequence
  Description of Artificial Sequence: Synthetic oligonucleotide
  Sense strand starting at position 3398 of SEQ ID NO: 1242701
gaaaguccgugcucaguuu

SEQ ID NO: 1366613 - RNA, 19 nt, Artificial Sequence
  Description of Artificial Sequence: Synthetic oligonucleotide
  Antisense strand to SEQ ID NO: 1366612
aaacugagcacggacuuuc

SEQ ID NO: 1366614 - RNA, 19 nt, Artificial Sequence
  Description of Artificial Sequence: Synthetic oligonucleotide
  Sense strand starting at position 3412 of SEQ ID NO: 1242701
aguuucuuccaugguuaca

SEQ ID NO: 1366615 - RNA, 19 nt, Artificial Sequence
  Description of Artificial Sequence: Synthetic oligonucleotide
  Antisense strand to SEQ ID NO: 1366614
uguaaccauggaagaaacu

SEQ ID NO: 1366616 - RNA, 19 nt, Artificial Sequence
  Description of Artificial Sequence: Synthetic oligonucleotide
  Sense strand starting at position 3414 of SEQ ID NO: 1242701
uuucuuccaugguuacaga

SEQ ID NO: 1366617 - RNA, 19 nt, Artificial Sequence
  Description of Artificial Sequence: Synthetic oligonucleotide
  Antisense strand to SEQ ID NO: 1366616
ucuguaaccauggaagaaa

SEQ ID NO: 1366618 - RNA, 19 nt, Artificial Sequence
  Description of Artificial Sequence: Synthetic oligonucleotide
  Sense strand starting at position 3502 of SEQ ID NO: 1242701
ugguucauccuccgaggaa

SEQ ID NO: 1366619 - RNA, 19 nt, Artificial Sequence
  Description of Artificial Sequence: Synthetic oligonucleotide
  Antisense strand to SEQ ID NO: 1366618
uuccucggaggaugaacca

SEQ ID NO: 1366620 - RNA, 19 nt, Artificial Sequence
  Description of Artificial Sequence: Synthetic oligonucleotide
  Sense strand starting at position 3579 of SEQ ID NO: 1242701
agagaacugccagguggaa

SEQ ID NO: 1366621 - RNA, 19 nt, Artificial Sequence
  Description of Artificial Sequence: Synthetic oligonucleotide
  Antisense strand to SEQ ID NO: 1366620
uuccaccuggcaguucucu

SEQ ID NO: 1366622 - RNA, 19 nt, Artificial Sequence
  Description of Artificial Sequence: Synthetic oligonucleotide
  Sense strand starting at position 3892 of SEQ ID NO: 1242701
gcaugagcacuuugggaag

SEQ ID NO: 1366623 - RNA, 19 nt, Artificial Sequence
  Description of Artificial Sequence: Synthetic oligonucleotide
  Antisense strand to SEQ ID NO: 1366622
cuucccaaagugcucaugc

SEQ ID NO: 1366624 - RNA, 19 nt, Artificial Sequence
  Description of Artificial Sequence: Synthetic oligonucleotide
  Sense strand starting at position 3972 of SEQ ID NO: 1242701
gcagaucccaggcaaagau

SEQ ID NO: 1366625 - RNA, 19 nt, Artificial Sequence
  Description of Artificial Sequence: Synthetic oligonucleotide
  Antisense strand to SEQ ID NO: 1366624
aucuuugccugggaucugc

SEQ ID NO: 1366626 - RNA, 19 nt, Artificial Sequence
  Description of Artificial Sequence: Synthetic oligonucleotide
  Sense strand starting at position 49 of SEQ ID NO: 1242702
ccaacuccucagcgaacau

SEQ ID NO: 1366627 - RNA, 19 nt, Artificial Sequence
  Description of Artificial Sequence: Synthetic oligonucleotide
  Antisense strand to SEQ ID NO: 1366626
auguucgcugaggaguugg

SEQ ID NO: 1366628 - RNA, 19 nt, Artificial Sequence
  Description of Artificial Sequence: Synthetic oligonucleotide
  Sense strand starting at position 436 of SEQ ID NO: 1242702
ucaccuguaaugggaagau

SEQ ID NO: 1366629 - RNA, 19 nt, Artificial Sequence
  Description of Artificial Sequence: Synthetic oligonucleotide
  Antisense strand to SEQ ID NO: 1366628
aucuucccauuacagguga

SEQ ID NO: 1366630 - RNA, 19 nt, Artificial Sequence
  Description of Artificial Sequence: Synthetic oligonucleotide
  Sense strand starting at position 445 of SEQ ID NO: 1242702
augggaagauggagugauu

SEQ ID NO: 1366631 - RNA, 19 nt, Artificial Sequence
  Description of Artificial Sequence: Synthetic oligonucleotide
  Antisense strand to SEQ ID NO: 1366630
aaucacuccaucuucccau

SEQ ID NO: 1366632 - RNA, 19 nt, Artificial Sequence
  Description of Artificial Sequence: Synthetic oligonucleotide
  Sense strand starting at position 796 of SEQ ID NO: 1242702
cagaguguauucuugggua

SEQ ID NO: 1366633 - RNA, 19 nt, Artificial Sequence
  Description of Artificial Sequence: Synthetic oligonucleotide
  Antisense strand to SEQ ID NO: 1366632
uacccaagaauacacucug

SEQ ID NO: 1366634 - RNA, 19 nt, Artificial Sequence
  Description of Artificial Sequence: Synthetic oligonucleotide
  Sense strand starting at position 798 of SEQ ID NO: 1242702
gaguguauucuuggguaca

SEQ ID NO: 1366635 - RNA, 19 nt, Artificial Sequence
  Description of Artificial Sequence: Synthetic oligonucleotide
  Antisense strand to SEQ ID NO: 1366634
uguacccaagaauacacuc

SEQ ID NO: 1366636 - RNA, 19 nt, Artificial Sequence
  Description of Artificial Sequence: Synthetic oligonucleotide
  Sense strand starting at position 838 of SEQ ID NO: 1242702
aggccaagaugucauauuu

SEQ ID NO: 1366637 - RNA, 19 nt, Artificial Sequence
  Description of Artificial Sequence: Synthetic oligonucleotide
  Antisense strand to SEQ ID NO: 1366636
aaauaugacaucuuggccu

SEQ ID NO: 1366638 - RNA, 19 nt, Artificial Sequence
  Description of Artificial Sequence: Synthetic oligonucleotide
  Sense strand starting at position 886 of SEQ ID NO: 1242702
ccucaucgcuauccaaaga

SEQ ID NO: 1366639 - RNA, 19 nt, Artificial Sequence
  Description of Artificial Sequence: Synthetic oligonucleotide
  Antisense strand to SEQ ID NO: 1366638
ucuuuggauagcgaugagg

SEQ ID NO: 1366640 - RNA, 19 nt, Artificial Sequence
  Description of Artificial Sequence: Synthetic oligonucleotide
  Sense strand starting at position 891 of SEQ ID NO: 1242702
ucgcuauccaaagaguguu

SEQ ID NO: 1366641 - RNA, 19 nt, Artificial Sequence
  Description of Artificial Sequence: Synthetic oligonucleotide
  Antisense strand to SEQ ID NO: 1366640
aacacucuuuggauagcga

SEQ ID NO: 1366642 - RNA, 19 nt, Artificial Sequence
  Description of Artificial Sequence: Synthetic oligonucleotide
  Sense strand starting at position 897 of SEQ ID NO: 1242702
uccaaagaguguuugccuu

SEQ ID NO: 1366643 - RNA, 19 nt, Artificial Sequence
  Description of Artificial Sequence: Synthetic oligonucleotide
  Antisense strand to SEQ ID NO: 1366642
aaggcaaacacucuuugga

SEQ ID NO: 1366644 - RNA, 19 nt, Artificial Sequence
  Description of Artificial Sequence: Synthetic oligonucleotide
  Sense strand starting at position 899 of SEQ ID NO: 1242702
caaagaguguuugccuuua

SEQ ID NO: 1366645 - RNA, 19 nt, Artificial Sequence
  Description of Artificial Sequence: Synthetic oligonucleotide
  Antisense strand to SEQ ID NO: 1366644
uaaaggcaaacacucuuug

SEQ ID NO: 1366646 - RNA, 19 nt, Artificial Sequence
  Description of Artificial Sequence: Synthetic oligonucleotide
  Sense strand starting at position 901 of SEQ ID NO: 1242702
aagaguguuugccuuuaaa

SEQ ID NO: 1366647 - RNA, 19 nt, Artificial Sequence
  Description of Artificial Sequence: Synthetic oligonucleotide
  Antisense strand to SEQ ID NO: 1366646
uuuaaaggcaaacacucuu

SEQ ID NO: 1366648 - RNA, 19 nt, Artificial Sequence
  Description of Artificial Sequence: Synthetic oligonucleotide
  Sense strand starting at position 981 of SEQ ID NO: 1242702
aguugagaaaugcagguua

SEQ ID NO: 1366649 - RNA, 19 nt, Artificial Sequence
  Description of Artificial Sequence: Synthetic oligonucleotide
  Antisense strand to SEQ ID NO: 1366648
uaaccugcauuucucaacu

SEQ ID NO: 1366650 - RNA, 19 nt, Artificial Sequence
  Description of Artificial Sequence: Synthetic oligonucleotide
  Sense strand starting at position 983 of SEQ ID NO: 1242702
uugagaaaugcagguuacu

SEQ ID NO: 1366651 - RNA, 19 nt, Artificial Sequence
  Description of Artificial Sequence: Synthetic oligonucleotide
  Antisense strand to SEQ ID NO: 1366650
aguaaccugcauuucucaa

SEQ ID NO: 1366652 - RNA, 19 nt, Artificial Sequence
  Description of Artificial Sequence: Synthetic oligonucleotide
  Sense strand starting at position 1336 of SEQ ID NO: 1242702
uguuucucaagcugaggaa

SEQ ID NO: 1366653 - RNA, 19 nt, Artificial Sequence
  Description of Artificial Sequence: Synthetic oligonucleotide
  Antisense strand to SEQ ID NO: 1366652
uuccucagcuugagaaaca

SEQ ID NO: 1366654 - RNA, 19 nt, Artificial Sequence
  Description of Artificial Sequence: Synthetic oligonucleotide
  Sense strand starting at position 1337 of SEQ ID NO: 1242702
guuucucaagcugaggaaa

SEQ ID NO: 1366655 - RNA, 19 nt, Artificial Sequence
  Description of Artificial Sequence: Synthetic oligonucleotide
  Antisense strand to SEQ ID NO: 1366654
uuuccucagcuugagaaac

SEQ ID NO: 1366656 - RNA, 19 nt, Artificial Sequence
  Description of Artificial Sequence: Synthetic oligonucleotide
  Sense strand starting at position 1427 of SEQ ID NO: 1242702
gucugugacagguacaguu

SEQ ID NO: 1366657 - RNA, 19 nt, Artificial Sequence
  Description of Artificial Sequence: Synthetic oligonucleotide
  Antisense strand to SEQ ID NO: 1366656
aacuguaccugucacagac

SEQ ID NO: 1366658 - RNA, 19 nt, Artificial Sequence
  Description of Artificial Sequence: Synthetic oligonucleotide
  Sense strand starting at position 1516 of SEQ ID NO: 1242702
ucuagcauccgcgaguuaa

SEQ ID NO: 1366659 - RNA, 19 nt, Artificial Sequence
  Description of Artificial Sequence: Synthetic oligonucleotide
  Antisense strand to SEQ ID NO: 1366658
uuaacucgcggaugcuaga

SEQ ID NO: 1366660 - RNA, 19 nt, Artificial Sequence
  Description of Artificial Sequence: Synthetic oligonucleotide
  Sense strand starting at position 1840 of SEQ ID NO: 1242702
cgcgcacucaccugggaau

SEQ ID NO: 1366661 - RNA, 19 nt, Artificial Sequence
  Description of Artificial Sequence: Synthetic oligonucleotide
  Antisense strand to SEQ ID NO: 1366660
auucccaggugagugcgcg

SEQ ID NO: 1366662 - RNA, 19 nt, Artificial Sequence
  Description of Artificial Sequence: Synthetic oligonucleotide
  Sense strand starting at position 2009 of SEQ ID NO: 1242702
gggcggaaguaugcgauaa

SEQ ID NO: 1366663 - RNA, 19 nt, Artificial Sequence
  Description of Artificial Sequence: Synthetic oligonucleotide
  Antisense strand to SEQ ID NO: 1366662
uuaucgcauacuuccgccc

SEQ ID NO: 1366664 - RNA, 19 nt, Artificial Sequence
  Description of Artificial Sequence: Synthetic oligonucleotide
  Sense strand starting at position 2010 of SEQ ID NO: 1242702
ggcggaaguaugcgauaag

SEQ ID NO: 1366665 - RNA, 19 nt, Artificial Sequence
  Description of Artificial Sequence: Synthetic oligonucleotide
  Antisense strand to SEQ ID NO: 1366664
cuuaucgcauacuuccgcc

SEQ ID NO: 1366666 - RNA, 19 nt, Artificial Sequence
  Description of Artificial Sequence: Synthetic oligonucleotide
  Sense strand starting at position 2013 of SEQ ID NO: 1242702
ggaaguaugcgauaagcga

SEQ ID NO: 1366667 - RNA, 19 nt, Artificial Sequence
  Description of Artificial Sequence: Synthetic oligonucleotide
  Antisense strand to SEQ ID NO: 1366666
ucgcuuaucgcauacuucc

SEQ ID NO: 1366668 - RNA, 19 nt, Artificial Sequence
  Description of Artificial Sequence: Synthetic oligonucleotide
  Sense strand starting at position 2108 of SEQ ID NO: 1242702
cuaagaauuccuggacucu

SEQ ID NO: 1366669 - RNA, 19 nt, Artificial Sequence
  Description of Artificial Sequence: Synthetic oligonucleotide
  Antisense strand to SEQ ID NO: 1366668
agaguccaggaauucuuag

SEQ ID NO: 1366670 - RNA, 19 nt, Artificial Sequence
  Description of Artificial Sequence: Synthetic oligonucleotide
  Sense strand starting at position 2124 of SEQ ID NO: 1242702
ucugacugggcgugagaaa

SEQ ID NO: 1366671 - RNA, 19 nt, Artificial Sequence
  Description of Artificial Sequence: Synthetic oligonucleotide
  Antisense strand to SEQ ID NO: 1366670
uuucucacgcccagucaga

SEQ ID NO: 1366672 - RNA, 19 nt, Artificial Sequence
  Description of Artificial Sequence: Synthetic oligonucleotide
  Sense strand starting at position 2125 of SEQ ID NO: 1242702
cugacugggcgugagaaau

SEQ ID NO: 1366673 - RNA, 19 nt, Artificial Sequence
  Description of Artificial Sequence: Synthetic oligonucleotide
  Antisense strand to SEQ ID NO: 1366672
auuucucacgcccagucag

SEQ ID NO: 1366674 - RNA, 19 nt, Artificial Sequence
  Description of Artificial Sequence: Synthetic oligonucleotide
  Sense strand starting at position 2135 of SEQ ID NO: 1242702
gugagaaauggccggaagu

SEQ ID NO: 1366675 - RNA, 19 nt, Artificial Sequence
  Description of Artificial Sequence: Synthetic oligonucleotide
  Antisense strand to SEQ ID NO: 1366674
acuuccggccauuucucac

SEQ ID NO: 1366676 - RNA, 19 nt, Artificial Sequence
  Description of Artificial Sequence: Synthetic oligonucleotide
  Sense strand starting at position 2136 of SEQ ID NO: 1242702
ugagaaauggccggaagua

SEQ ID NO: 1366677 - RNA, 19 nt, Artificial Sequence
  Description of Artificial Sequence: Synthetic oligonucleotide
  Antisense strand to SEQ ID NO: 1366676
uacuuccggccauuucuca

SEQ ID NO: 1366678 - RNA, 19 nt, Artificial Sequence
  Description of Artificial Sequence: Synthetic oligonucleotide
  Sense strand starting at position 2334 of SEQ ID NO: 1242702
ccuaccgucucguuagaaa

SEQ ID NO: 1366679 - RNA, 19 nt, Artificial Sequence
  Description of Artificial Sequence: Synthetic oligonucleotide
  Antisense strand to SEQ ID NO: 1366678
uuucuaacgagacgguagg

SEQ ID NO: 1366680 - RNA, 19 nt, Artificial Sequence
  Description of Artificial Sequence: Synthetic oligonucleotide
  Sense strand starting at position 2542 of SEQ ID NO: 1242702
gggcgaguuccugguuucu

SEQ ID NO: 1366681 - RNA, 19 nt, Artificial Sequence
  Description of Artificial Sequence: Synthetic oligonucleotide
  Antisense strand to SEQ ID NO: 1366680
agaaaccaggaacucgccc

SEQ ID NO: 1366682 - RNA, 19 nt, Artificial Sequence
  Description of Artificial Sequence: Synthetic oligonucleotide
  Sense strand starting at position 2544 of SEQ ID NO: 1242702
gcgaguuccugguuucuga

SEQ ID NO: 1366683 - RNA, 19 nt, Artificial Sequence
  Description of Artificial Sequence: Synthetic oligonucleotide
  Antisense strand to SEQ ID NO: 1366682
ucagaaaccaggaacucgc

SEQ ID NO: 1366684 - RNA, 19 nt, Artificial Sequence
  Description of Artificial Sequence: Synthetic oligonucleotide
  Sense strand starting at position 2553 of SEQ ID NO: 1242702
ugguuucugaggugggaga

SEQ ID NO: 1366685 - RNA, 19 nt, Artificial Sequence
  Description of Artificial Sequence: Synthetic oligonucleotide
  Antisense strand to SEQ ID NO: 1366684
ucucccaccucagaaacca

SEQ ID NO: 1366686 - RNA, 19 nt, Artificial Sequence
  Description of Artificial Sequence: Synthetic oligonucleotide
  Sense strand starting at position 2933 of SEQ ID NO: 1242702
gguuuccucccauauugga

SEQ ID NO: 1366687 - RNA, 19 nt, Artificial Sequence
  Description of Artificial Sequence: Synthetic oligonucleotide
  Antisense strand to SEQ ID NO: 1366686
uccaauaugggaggaaacc

SEQ ID NO: 1366688 - RNA, 19 nt, Artificial Sequence
  Description of Artificial Sequence: Synthetic oligonucleotide
  Sense strand starting at position 2985 of SEQ ID NO: 1242702
aguuucuuccaugguuaca

SEQ ID NO: 1366689 - RNA, 19 nt, Artificial Sequence
  Description of Artificial Sequence: Synthetic oligonucleotide
  Antisense strand to SEQ ID NO: 1366688
uguaaccauggaagaaacu

SEQ ID NO: 1366690 - RNA, 19 nt, Artificial Sequence
  Description of Artificial Sequence: Synthetic oligonucleotide
  Sense strand starting at position 2987 of SEQ ID NO: 1242702
uuucuuccaugguuacaga

SEQ ID NO: 1366691 - RNA, 19 nt, Artificial Sequence
  Description of Artificial Sequence: Synthetic oligonucleotide
  Antisense strand to SEQ ID NO: 1366690
ucuguaaccauggaagaaa

SEQ ID NO: 1366692 - RNA, 19 nt, Artificial Sequence
  Description of Artificial Sequence: Synthetic oligonucleotide
  Sense strand starting at position 3075 of SEQ ID NO: 1242702
ugguucauccuccgaggaa

SEQ ID NO: 1366693 - RNA, 19 nt, Artificial Sequence
  Description of Artificial Sequence: Synthetic oligonucleotide
  Antisense strand to SEQ ID NO: 1366692
uuccucggaggaugaacca

SEQ ID NO: 1366694 - RNA, 19 nt, Artificial Sequence
  Description of Artificial Sequence: Synthetic oligonucleotide
  Sense strand starting at position 3152 of SEQ ID NO: 1242702
agagaacugccagguggaa

SEQ ID NO: 1366695 - RNA, 19 nt, Artificial Sequence
  Description of Artificial Sequence: Synthetic oligonucleotide
  Antisense strand to SEQ ID NO: 1366694
uuccaccuggcaguucucu

SEQ ID NO: 1366696 - RNA, 19 nt, Artificial Sequence
  Description of Artificial Sequence: Synthetic oligonucleotide
  Sense strand starting at position 3465 of SEQ ID NO: 1242702
gcaugagcacuuugggaag

SEQ ID NO: 1366697 - RNA, 19 nt, Artificial Sequence
  Description of Artificial Sequence: Synthetic oligonucleotide
  Antisense strand to SEQ ID NO: 1366696
cuucccaaagugcucaugc

SEQ ID NO: 1366698 - RNA, 19 nt, Artificial Sequence
  Description of Artificial Sequence: Synthetic oligonucleotide
  Sense strand starting at position 3545 of SEQ ID NO: 1242702
gcagaucccaggcaaagau

SEQ ID NO: 1366699 - RNA, 19 nt, Artificial Sequence
  Description of Artificial Sequence: Synthetic oligonucleotide
  Antisense strand to SEQ ID NO: 1366698
aucuuugccugggaucugc

SEQ ID NO: 1366700 - RNA, 19 nt, Artificial Sequence
  Description of Artificial Sequence: Synthetic oligonucleotide
  Sense strand starting at position 3571 of SEQ ID NO: 1242702
gagcucaaccagugucuga

SEQ ID NO: 1366701 - RNA, 19 nt, Artificial Sequence
  Description of Artificial Sequence: Synthetic oligonucleotide
  Antisense strand to SEQ ID NO: 1366700
ucagacacugguugagcuc

SEQ ID NO: 1366702 - RNA, 19 nt, Artificial Sequence
  Description of Artificial Sequence: Synthetic oligonucleotide
  Sense strand starting at position 3582 of SEQ ID NO: 1242702
gugucugaugagugacuga

SEQ ID NO: 1366703 - RNA, 19 nt, Artificial Sequence
  Description of Artificial Sequence: Synthetic oligonucleotide
  Antisense strand to SEQ ID NO: 1366702
ucagucacucaucagacac

SEQ ID NO: 1366704 - RNA, 19 nt, Artificial Sequence
  Description of Artificial Sequence: Synthetic oligonucleotide
  Sense strand starting at position 3904 of SEQ ID NO: 1242702
gguauggguccuggugaga

SEQ ID NO: 1366705 - RNA, 19 nt, Artificial Sequence
  Description of Artificial Sequence: Synthetic oligonucleotide
  Antisense strand to SEQ ID NO: 1366704
ucucaccaggacccauacc

SEQ ID NO: 1366706 - RNA, 19 nt, Artificial Sequence
  Description of Artificial Sequence: Synthetic oligonucleotide
  Sense strand starting at position 190 of SEQ ID NO: 1242703
guggcacaugcccaugaua

SEQ ID NO: 1366707 - RNA, 19 nt, Artificial Sequence
  Description of Artificial Sequence: Synthetic oligonucleotide
  Antisense strand to SEQ ID NO: 1366706
uaucaugggcaugugccac

SEQ ID NO: 1366708 - RNA, 19 nt, Artificial Sequence
  Description of Artificial Sequence: Synthetic oligonucleotide
  Sense strand starting at position 192 of SEQ ID NO: 1242703
ggcacaugcccaugauaac

SEQ ID NO: 1366709 - RNA, 19 nt, Artificial Sequence
  Description of Artificial Sequence: Synthetic oligonucleotide
  Antisense strand to SEQ ID NO: 1366708
guuaucaugggcaugugcc

SEQ ID NO: 1366710 - RNA, 19 nt, Artificial Sequence
  Description of Artificial Sequence: Synthetic oligonucleotide
  Sense strand starting at position 575 of SEQ ID NO: 1242703
ugcagucugaaaugagaga

SEQ ID NO: 1366711 - RNA, 19 nt, Artificial Sequence
  Description of Artificial Sequence: Synthetic oligonucleotide
  Antisense strand to SEQ ID NO: 1366710
ucucucauuucagacugca

SEQ ID NO: 1366712 - RNA, 19 nt, Artificial Sequence
  Description of Artificial Sequence: Synthetic oligonucleotide
  Sense strand starting at position 588 of SEQ ID NO: 1242703
gagagacugucucuacagu

SEQ ID NO: 1366713 - RNA, 19 nt, Artificial Sequence
  Description of Artificial Sequence: Synthetic oligonucleotide
  Antisense strand to SEQ ID NO: 1366712
acuguagagacagucucuc

SEQ ID NO: 1366714 - RNA, 19 nt, Artificial Sequence
  Description of Artificial Sequence: Synthetic oligonucleotide
  Sense strand starting at position 601 of SEQ ID NO: 1242703
uacagugcugagggcaaua

SEQ ID NO: 1366715 - RNA, 19 nt, Artificial Sequence
  Description of Artificial Sequence: Synthetic oligonucleotide
  Antisense strand to SEQ ID NO: 1366714
uauugcccucagcacugua

SEQ ID NO: 1366716 - RNA, 19 nt, Artificial Sequence
  Description of Artificial Sequence: Synthetic oligonucleotide
  Sense strand starting at position 621 of SEQ ID NO: 1242703
gagaaauacgaaggcuucu

SEQ ID NO: 1366717 - RNA, 19 nt, Artificial Sequence
  Description of Artificial Sequence: Synthetic oligonucleotide
  Antisense strand to SEQ ID NO: 1366716
agaagccuucguauuucuc

SEQ ID NO: 1366718 - RNA, 19 nt, Artificial Sequence
  Description of Artificial Sequence: Synthetic oligonucleotide
  Sense strand starting at position 627 of SEQ ID NO: 1242703
uacgaaggcuucuaguaag

SEQ ID NO: 1366719 - RNA, 19 nt, Artificial Sequence
  Description of Artificial Sequence: Synthetic oligonucleotide
  Antisense strand to SEQ ID NO: 1366718
cuuacuagaagccuucgua

SEQ ID NO: 1366720 - RNA, 19 nt, Artificial Sequence
  Description of Artificial Sequence: Synthetic oligonucleotide
  Sense strand starting at position 710 of SEQ ID NO: 1242703
aguguucagucguaaacgu

SEQ ID NO: 1366721 - RNA, 19 nt, Artificial Sequence
  Description of Artificial Sequence: Synthetic oligonucleotide
  Antisense strand to SEQ ID NO: 1366720
acguuuacgacugaacacu

SEQ ID NO: 1366722 - RNA, 19 nt, Artificial Sequence
  Description of Artificial Sequence: Synthetic oligonucleotide
  Sense strand starting at position 736 of SEQ ID NO: 1242703
cccaaaucugcguaaauuc

SEQ ID NO: 1366723 - RNA, 19 nt, Artificial Sequence
  Description of Artificial Sequence: Synthetic oligonucleotide
  Antisense strand to SEQ ID NO: 1366722
gaauuuacgcagauuuggg

SEQ ID NO: 1366724 - RNA, 19 nt, Artificial Sequence
  Description of Artificial Sequence: Synthetic oligonucleotide
  Sense strand starting at position 1269 of SEQ ID NO: 1242703
uggagaugucuuuauucuc

SEQ ID NO: 1366725 - RNA, 19 nt, Artificial Sequence
  Description of Artificial Sequence: Synthetic oligonucleotide
  Antisense strand to SEQ ID NO: 1366724
gagaauaaagacaucucca

SEQ ID NO: 1366726 - RNA, 19 nt, Artificial Sequence
  Description of Artificial Sequence: Synthetic oligonucleotide
  Sense strand starting at position 1274 of SEQ ID NO: 1242703
augucuuuauucuccagua

SEQ ID NO: 1366727 - RNA, 19 nt, Artificial Sequence
  Description of Artificial Sequence: Synthetic oligonucleotide
  Antisense strand to SEQ ID NO: 1366726
uacuggagaauaaagacau

SEQ ID NO: 1366728 - RNA, 19 nt, Artificial Sequence
  Description of Artificial Sequence: Synthetic oligonucleotide
  Sense strand starting at position 1417 of SEQ ID NO: 1242703
gugccuuuauuucuacgga

SEQ ID NO: 1366729 - RNA, 19 nt, Artificial Sequence
  Description of Artificial Sequence: Synthetic oligonucleotide
  Antisense strand to SEQ ID NO: 1366728
uccguagaaauaaaggcac

SEQ ID NO: 1366730 - RNA, 19 nt, Artificial Sequence
  Description of Artificial Sequence: Synthetic oligonucleotide
  Sense strand starting at position 1418 of SEQ ID NO: 1242703
ugccuuuauuucuacggau

SEQ ID NO: 1366731 - RNA, 19 nt, Artificial Sequence
  Description of Artificial Sequence: Synthetic oligonucleotide
  Antisense strand to SEQ ID NO: 1366730
auccguagaaauaaaggca

SEQ ID NO: 1366732 - RNA, 19 nt, Artificial Sequence
  Description of Artificial Sequence: Synthetic oligonucleotide
  Sense strand starting at position 1441 of SEQ ID NO: 1242703
cucuccuucccucgaagau

SEQ ID NO: 1366733 - RNA, 19 nt, Artificial Sequence
  Description of Artificial Sequence: Synthetic oligonucleotide
  Antisense strand to SEQ ID NO: 1366732
aucuucgagggaaggagag

SEQ ID NO: 1366734 - RNA, 19 nt, Artificial Sequence
  Description of Artificial Sequence: Synthetic oligonucleotide
  Sense strand starting at position 1715 of SEQ ID NO: 1242703
ccgaacuuucuuggaagaa

SEQ ID NO: 1366735 - RNA, 19 nt, Artificial Sequence
  Description of Artificial Sequence: Synthetic oligonucleotide
  Antisense strand to SEQ ID NO: 1366734
uucuuccaagaaaguucgg

SEQ ID NO: 1366736 - RNA, 19 nt, Artificial Sequence
  Description of Artificial Sequence: Synthetic oligonucleotide
  Sense strand starting at position 1716 of SEQ ID NO: 1242703
cgaacuuucuuggaagaag

SEQ ID NO: 1366737 - RNA, 19 nt, Artificial Sequence
  Description of Artificial Sequence: Synthetic oligonucleotide
  Antisense strand to SEQ ID NO: 1366736
cuucuuccaagaaaguucg

SEQ ID NO: 1366738 - RNA, 19 nt, Artificial Sequence
  Description of Artificial Sequence: Synthetic oligonucleotide
  Sense strand starting at position 2549 of SEQ ID NO: 1242703
cgcugugucucccuguauu

SEQ ID NO: 1366739 - RNA, 19 nt, Artificial Sequence
  Description of Artificial Sequence: Synthetic oligonucleotide
  Antisense strand to SEQ ID NO: 1366738
aauacagggagacacagcg

SEQ ID NO: 1366740 - RNA, 19 nt, Artificial Sequence
  Description of Artificial Sequence: Synthetic oligonucleotide
  Sense strand starting at position 3044 of SEQ ID NO: 1242703
cgaggcugaucucaaauuu

SEQ ID NO: 1366741 - RNA, 19 nt, Artificial Sequence
  Description of Artificial Sequence: Synthetic oligonucleotide
  Antisense strand to SEQ ID NO: 1366740
aaauuugagaucagccucg

SEQ ID NO: 1366742 - RNA, 19 nt, Artificial Sequence
  Description of Artificial Sequence: Synthetic oligonucleotide
  Sense strand starting at position 3134 of SEQ ID NO: 1242703
uguagagcuucauggguua

SEQ ID NO: 1366743 - RNA, 19 nt, Artificial Sequence
  Description of Artificial Sequence: Synthetic oligonucleotide
  Antisense strand to SEQ ID NO: 1366742
uaacccaugaagcucuaca

SEQ ID NO: 1366744 - RNA, 19 nt, Artificial Sequence
  Description of Artificial Sequence: Synthetic oligonucleotide
  Sense strand starting at position 3147 of SEQ ID NO: 1242703
ggguuagugagucagcaaa

SEQ ID NO: 1366745 - RNA, 19 nt, Artificial Sequence
  Description of Artificial Sequence: Synthetic oligonucleotide
  Antisense strand to SEQ ID NO: 1366744
uuugcugacucacuaaccc

SEQ ID NO: 1366746 - RNA, 19 nt, Artificial Sequence
  Description of Artificial Sequence: Synthetic oligonucleotide
  Sense strand starting at position 3149 of SEQ ID NO: 1242703
guuagugagucagcaaauu

SEQ ID NO: 1366747 - RNA, 19 nt, Artificial Sequence
  Description of Artificial Sequence: Synthetic oligonucleotide
  Antisense strand to SEQ ID NO: 1366746
aauuugcugacucacuaac

SEQ ID NO: 1366748 - RNA, 19 nt, Artificial Sequence
  Description of Artificial Sequence: Synthetic oligonucleotide
  Sense strand starting at position 3161 of SEQ ID NO: 1242703
gcaaauugauucccuaggu

SEQ ID NO: 1366749 - RNA, 19 nt, Artificial Sequence
  Description of Artificial Sequence: Synthetic oligonucleotide
  Antisense strand to SEQ ID NO: 1366748
accuagggaaucaauuugc

SEQ ID NO: 1366750 - RNA, 19 nt, Artificial Sequence
  Description of Artificial Sequence: Synthetic oligonucleotide
  Sense strand starting at position 3212 of SEQ ID NO: 1242703
cccuccuaaugggaauaau

SEQ ID NO: 1366751 - RNA, 19 nt, Artificial Sequence
  Description of Artificial Sequence: Synthetic oligonucleotide
  Antisense strand to SEQ ID NO: 1366750
auuauucccauuaggaggg

SEQ ID NO: 1366752 - RNA, 19 nt, Artificial Sequence
  Description of Artificial Sequence: Synthetic oligonucleotide
  Sense strand starting at position 3233 of SEQ ID NO: 1242703
ucagaaaugucucccuaug

SEQ ID NO: 1366753 - RNA, 19 nt, Artificial Sequence
  Description of Artificial Sequence: Synthetic oligonucleotide
  Antisense strand to SEQ ID NO: 1366752
cauagggagacauuucuga

SEQ ID NO: 1366754 - RNA, 19 nt, Artificial Sequence
  Description of Artificial Sequence: Synthetic oligonucleotide
  Sense strand starting at position 3235 of SEQ ID NO: 1242703
agaaaugucucccuaugcu

SEQ ID NO: 1366755 - RNA, 19 nt, Artificial Sequence
  Description of Artificial Sequence: Synthetic oligonucleotide
  Antisense strand to SEQ ID NO: 1366754
agcauagggagacauuucu

SEQ ID NO: 1366756 - RNA, 19 nt, Artificial Sequence
  Description of Artificial Sequence: Synthetic oligonucleotide
  Sense strand starting at position 3298 of SEQ ID NO: 1242703
ccauaaaugcucuguacag

SEQ ID NO: 1366757 - RNA, 19 nt, Artificial Sequence
  Description of Artificial Sequence: Synthetic oligonucleotide
  Antisense strand to SEQ ID NO: 1366756
cuguacagagcauuuaugg

SEQ ID NO: 1366758 - RNA, 19 nt, Artificial Sequence
  Description of Artificial Sequence: Synthetic oligonucleotide
  Sense strand starting at position 3300 of SEQ ID NO: 1242703
auaaaugcucuguacagaa

SEQ ID NO: 1366759 - RNA, 19 nt, Artificial Sequence
  Description of Artificial Sequence: Synthetic oligonucleotide
  Antisense strand to SEQ ID NO: 1366758
uucuguacagagcauuuau

SEQ ID NO: 1366760 - RNA, 19 nt, Artificial Sequence
  Description of Artificial Sequence: Synthetic oligonucleotide
  Sense strand starting at position 3302 of SEQ ID NO: 1242703
aaaugcucuguacagaagu

SEQ ID NO: 1366761 - RNA, 19 nt, Artificial Sequence
  Description of Artificial Sequence: Synthetic oligonucleotide
  Antisense strand to SEQ ID NO: 1366760
acuucuguacagagcauuu

SEQ ID NO: 1366762 - RNA, 19 nt, Artificial Sequence
  Description of Artificial Sequence: Synthetic oligonucleotide
  Sense strand starting at position 3304 of SEQ ID NO: 1242703
augcucuguacagaaguga

SEQ ID NO: 1366763 - RNA, 19 nt, Artificial Sequence
  Description of Artificial Sequence: Synthetic oligonucleotide
  Antisense strand to SEQ ID NO: 1366762
ucacuucuguacagagcau

SEQ ID NO: 1366764 - RNA, 19 nt, Artificial Sequence
  Description of Artificial Sequence: Synthetic oligonucleotide
  Sense strand starting at position 3653 of SEQ ID NO: 1242703
acaauaggugcuggacauu

SEQ ID NO: 1366765 - RNA, 19 nt, Artificial Sequence
  Description of Artificial Sequence: Synthetic oligonucleotide
  Antisense strand to SEQ ID NO: 1366764
aauguccagcaccuauugu

SEQ ID NO: 1366766 - RNA, 19 nt, Artificial Sequence
  Description of Artificial Sequence: Synthetic oligonucleotide
  Sense strand starting at position 3659 of SEQ ID NO: 1242703
ggugcuggacauugaagau

SEQ ID NO: 1366767 - RNA, 19 nt, Artificial Sequence
  Description of Artificial Sequence: Synthetic oligonucleotide
  Antisense strand to SEQ ID NO: 1366766
aucuucaauguccagcacc

SEQ ID NO: 1366768 - RNA, 19 nt, Artificial Sequence
  Description of Artificial Sequence: Synthetic oligonucleotide
  Sense strand starting at position 3671 of SEQ ID NO: 1242703
ugaagauuacugugccagu

SEQ ID NO: 1366769 - RNA, 19 nt, Artificial Sequence
  Description of Artificial Sequence: Synthetic oligonucleotide
  Antisense strand to SEQ ID NO: 1366768
acuggcacaguaaucuuca

SEQ ID NO: 1366770 - RNA, 19 nt, Artificial Sequence
  Description of Artificial Sequence: Synthetic oligonucleotide
  Sense strand starting at position 3672 of SEQ ID NO: 1242703
gaagauuacugugccaguc

SEQ ID NO: 1366771 - RNA, 19 nt, Artificial Sequence
  Description of Artificial Sequence: Synthetic oligonucleotide
  Antisense strand to SEQ ID NO: 1366770
gacuggcacaguaaucuuc

SEQ ID NO: 1366772 - RNA, 19 nt, Artificial Sequence
  Description of Artificial Sequence: Synthetic oligonucleotide
  Sense strand starting at position 3686 of SEQ ID NO: 1242703
cagucucugugcuaagcau

SEQ ID NO: 1366773 - RNA, 19 nt, Artificial Sequence
  Description of Artificial Sequence: Synthetic oligonucleotide
  Antisense strand to SEQ ID NO: 1366772
augcuuagcacagagacug

SEQ ID NO: 1366774 - RNA, 19 nt, Artificial Sequence
  Description of Artificial Sequence: Synthetic oligonucleotide
  Sense strand starting at position 3 of SEQ ID NO: 1242704
cagagugcuucucguauug

SEQ ID NO: 1366775 - RNA, 19 nt, Artificial Sequence
  Description of Artificial Sequence: Synthetic oligonucleotide
  Antisense strand to SEQ ID NO: 1366774
caauacgagaagcacucug

SEQ ID NO: 1366776 - RNA, 19 nt, Artificial Sequence
  Description of Artificial Sequence: Synthetic oligonucleotide
  Sense strand starting at position 55 of SEQ ID NO: 1242704
uuuccuuuguccuauugga

SEQ ID NO: 1366777 - RNA, 19 nt, Artificial Sequence
  Description of Artificial Sequence: Synthetic oligonucleotide
  Antisense strand to SEQ ID NO: 1366776
uccaauaggacaaaggaaa

SEQ ID NO: 1366778 - RNA, 19 nt, Artificial Sequence
  Description of Artificial Sequence: Synthetic oligonucleotide
  Sense strand starting at position 125 of SEQ ID NO: 1242704
ggugucugcaccuacguau

SEQ ID NO: 1366779 - RNA, 19 nt, Artificial Sequence
  Description of Artificial Sequence: Synthetic oligonucleotide
  Antisense strand to SEQ ID NO: 1366778
auacguaggugcagacacc

SEQ ID NO: 1366780 - RNA, 19 nt, Artificial Sequence
  Description of Artificial Sequence: Synthetic oligonucleotide
  Sense strand starting at position 238 of SEQ ID NO: 1242704
ggcaaaugugcucaugcga

SEQ ID NO: 1366781 - RNA, 19 nt, Artificial Sequence
  Description of Artificial Sequence: Synthetic oligonucleotide
  Antisense strand to SEQ ID NO: 1366780
ucgcaugagcacauuugcc

SEQ ID NO: 1366782 - RNA, 19 nt, Artificial Sequence
  Description of Artificial Sequence: Synthetic oligonucleotide
  Sense strand starting at position 245 of SEQ ID NO: 1242704
gugcucaugcgaugcuaca

SEQ ID NO: 1366783 - RNA, 19 nt, Artificial Sequence
  Description of Artificial Sequence: Synthetic oligonucleotide
  Antisense strand to SEQ ID NO: 1366782
uguagcaucgcaugagcac

SEQ ID NO: 1366784 - RNA, 19 nt, Artificial Sequence
  Description of Artificial Sequence: Synthetic oligonucleotide
  Sense strand starting at position 265 of SEQ ID NO: 1242704
gauccucgcuccugagaac

SEQ ID NO: 1366785 - RNA, 19 nt, Artificial Sequence
  Description of Artificial Sequence: Synthetic oligonucleotide
  Antisense strand to SEQ ID NO: 1366784
guucucaggagcgaggauc

SEQ ID NO: 1366786 - RNA, 19 nt, Artificial Sequence
  Description of Artificial Sequence: Synthetic oligonucleotide
  Sense strand starting at position 360 of SEQ ID NO: 1242704
ggaaauugauccguccucu

SEQ ID NO: 1366787 - RNA, 19 nt, Artificial Sequence
  Description of Artificial Sequence: Synthetic oligonucleotide
  Antisense strand to SEQ ID NO: 1366786
agaggacggaucaauuucc

SEQ ID NO: 1366788 - RNA, 19 nt, Artificial Sequence
  Description of Artificial Sequence: Synthetic oligonucleotide
  Sense strand starting at position 372 of SEQ ID NO: 1242704
guccucuagccagauuaau

SEQ ID NO: 1366789 - RNA, 19 nt, Artificial Sequence
  Description of Artificial Sequence: Synthetic oligonucleotide
  Antisense strand to SEQ ID NO: 1366788
auuaaucuggcuagaggac

SEQ ID NO: 1366790 - RNA, 19 nt, Artificial Sequence
  Description of Artificial Sequence: Synthetic oligonucleotide
  Sense strand starting at position 392 of SEQ ID NO: 1242704
augguagccucccugugau

SEQ ID NO: 1366791 - RNA, 19 nt, Artificial Sequence
  Description of Artificial Sequence: Synthetic oligonucleotide
  Antisense strand to SEQ ID NO: 1366790
aucacagggaggcuaccau

SEQ ID NO: 1366792 - RNA, 19 nt, Artificial Sequence
  Description of Artificial Sequence: Synthetic oligonucleotide
  Sense strand starting at position 395 of SEQ ID NO: 1242704
guagccucccugugauuaa

SEQ ID NO: 1366793 - RNA, 19 nt, Artificial Sequence
  Description of Artificial Sequence: Synthetic oligonucleotide
  Antisense strand to SEQ ID NO: 1366792
uuaaucacagggaggcuac

SEQ ID NO: 1366794 - RNA, 19 nt, Artificial Sequence
  Description of Artificial Sequence: Synthetic oligonucleotide
  Sense strand starting at position 433 of SEQ ID NO: 1242704
auauuaaaccgauagccau

SEQ ID NO: 1366795 - RNA, 19 nt, Artificial Sequence
  Description of Artificial Sequence: Synthetic oligonucleotide
  Antisense strand to SEQ ID NO: 1366794
auggcuaucgguuuaauau

SEQ ID NO: 1366796 - RNA, 19 nt, Artificial Sequence
  Description of Artificial Sequence: Synthetic oligonucleotide
  Sense strand starting at position 439 of SEQ ID NO: 1242704
aaccgauagccaugauuag

SEQ ID NO: 1366797 - RNA, 19 nt, Artificial Sequence
  Description of Artificial Sequence: Synthetic oligonucleotide
  Antisense strand to SEQ ID NO: 1366796
cuaaucauggcuaucgguu

SEQ ID NO: 1366798 - RNA, 19 nt, Artificial Sequence
  Description of Artificial Sequence: Synthetic oligonucleotide
  Sense strand starting at position 440 of SEQ ID NO: 1242704
accgauagccaugauuaga

SEQ ID NO: 1366799 - RNA, 19 nt, Artificial Sequence
  Description of Artificial Sequence: Synthetic oligonucleotide
  Antisense strand to SEQ ID NO: 1366798
ucuaaucauggcuaucggu

SEQ ID NO: 1366800 - RNA, 19 nt, Artificial Sequence
  Description of Artificial Sequence: Synthetic oligonucleotide
  Sense strand starting at position 483 of SEQ ID NO: 1242704
gagcgaucguagcacgauu

SEQ ID NO: 1366801 - RNA, 19 nt, Artificial Sequence
  Description of Artificial Sequence: Synthetic oligonucleotide
  Antisense strand to SEQ ID NO: 1366800
aaucgugcuacgaucgcuc

SEQ ID NO: 1366802 - RNA, 19 nt, Artificial Sequence
  Description of Artificial Sequence: Synthetic oligonucleotide
  Sense strand starting at position 523 of SEQ ID NO: 1242704
ggaagacuuuagugaaauc

SEQ ID NO: 1366803 - RNA, 19 nt, Artificial Sequence
  Description of Artificial Sequence: Synthetic oligonucleotide
  Antisense strand to SEQ ID NO: 1366802
gauuucacuaaagucuucc

SEQ ID NO: 1366804 - RNA, 19 nt, Artificial Sequence
  Description of Artificial Sequence: Synthetic oligonucleotide
  Sense strand starting at position 613 of SEQ ID NO: 1242704
cagggaugguauuaaauaa

SEQ ID NO: 1366805 - RNA, 19 nt, Artificial Sequence
  Description of Artificial Sequence: Synthetic oligonucleotide
  Antisense strand to SEQ ID NO: 1366804
uuauuuaauaccaucccug

SEQ ID NO: 1366806 - RNA, 19 nt, Artificial Sequence
  Description of Artificial Sequence: Synthetic oligonucleotide
  Sense strand starting at position 641 of SEQ ID NO: 1242704
gcgauuucuuaauagcagu

SEQ ID NO: 1366807 - RNA, 19 nt, Artificial Sequence
  Description of Artificial Sequence: Synthetic oligonucleotide
  Antisense strand to SEQ ID NO: 1366806
acugcuauuaagaaaucgc

SEQ ID NO: 1366808 - RNA, 19 nt, Artificial Sequence
  Description of Artificial Sequence: Synthetic oligonucleotide
  Sense strand starting at position 647 of SEQ ID NO: 1242704
ucuuaauagcagugugaug

SEQ ID NO: 1366809 - RNA, 19 nt, Artificial Sequence
  Description of Artificial Sequence: Synthetic oligonucleotide
  Antisense strand to SEQ ID NO: 1366808
caucacacugcuauuaaga

SEQ ID NO: 1366810 - RNA, 19 nt, Artificial Sequence
  Description of Artificial Sequence: Synthetic oligonucleotide
  Sense strand starting at position 659 of SEQ ID NO: 1242704
ugugauggcccaugaaauu

SEQ ID NO: 1366811 - RNA, 19 nt, Artificial Sequence
  Description of Artificial Sequence: Synthetic oligonucleotide
  Antisense strand to SEQ ID NO: 1366810
aauuucaugggccaucaca

SEQ ID NO: 1366812 - RNA, 19 nt, Artificial Sequence
  Description of Artificial Sequence: Synthetic oligonucleotide
  Sense strand starting at position 1061 of SEQ ID NO: 1242704
aggugugguucucaaaguu

SEQ ID NO: 1366813 - RNA, 19 nt, Artificial Sequence
  Description of Artificial Sequence: Synthetic oligonucleotide
  Antisense strand to SEQ ID NO: 1366812
aacuuugagaaccacaccu

SEQ ID NO: 1366814 - RNA, 19 nt, Artificial Sequence
  Description of Artificial Sequence: Synthetic oligonucleotide
  Sense strand starting at position 1067 of SEQ ID NO: 1242704
gguucucaaaguuaacguu

SEQ ID NO: 1366815 - RNA, 19 nt, Artificial Sequence
  Description of Artificial Sequence: Synthetic oligonucleotide
  Antisense strand to SEQ ID NO: 1366814
aacguuaacuuugagaacc

SEQ ID NO: 1366816 - RNA, 19 nt, Artificial Sequence
  Description of Artificial Sequence: Synthetic oligonucleotide
  Sense strand starting at position 1273 of SEQ ID NO: 1242704
cuauuaaagugcgggcaau

SEQ ID NO: 1366817 - RNA, 19 nt, Artificial Sequence
  Description of Artificial Sequence: Synthetic oligonucleotide
  Antisense strand to SEQ ID NO: 1366816
auugcccgcacuuuaauag

SEQ ID NO: 1366818 - RNA, 19 nt, Artificial Sequence
  Description of Artificial Sequence: Synthetic oligonucleotide
  Sense strand starting at position 1284 of SEQ ID NO: 1242704
cgggcaaucuccuuccgga

SEQ ID NO: 1366819 - RNA, 19 nt, Artificial Sequence
  Description of Artificial Sequence: Synthetic oligonucleotide
  Antisense strand to SEQ ID NO: 1366818
uccggaaggagauugcccg

SEQ ID NO: 1366820 - RNA, 19 nt, Artificial Sequence
  Description of Artificial Sequence: Synthetic oligonucleotide
  Sense strand starting at position 1365 of SEQ ID NO: 1242704
gggagcuuucggcagggau

SEQ ID NO: 1366821 - RNA, 19 nt, Artificial Sequence
  Description of Artificial Sequence: Synthetic oligonucleotide
  Antisense strand to SEQ ID NO: 1366820
aucccugccgaaagcuccc

SEQ ID NO: 1366822 - RNA, 19 nt, Artificial Sequence
  Description of Artificial Sequence: Synthetic oligonucleotide
  Sense strand starting at position 1711 of SEQ ID NO: 1242704
uuugcuuugcguuagugaa

SEQ ID NO: 1366823 - RNA, 19 nt, Artificial Sequence
  Description of Artificial Sequence: Synthetic oligonucleotide
  Antisense strand to SEQ ID NO: 1366822
uucacuaacgcaaagcaaa

SEQ ID NO: 1366824 - RNA, 19 nt, Artificial Sequence
  Description of Artificial Sequence: Synthetic oligonucleotide
  Sense strand starting at position 2511 of SEQ ID NO: 1242704
gaagguaucguccaaguga

SEQ ID NO: 1366825 - RNA, 19 nt, Artificial Sequence
  Description of Artificial Sequence: Synthetic oligonucleotide
  Antisense strand to SEQ ID NO: 1366824
ucacuuggacgauaccuuc

SEQ ID NO: 1366826 - RNA, 19 nt, Artificial Sequence
  Description of Artificial Sequence: Synthetic oligonucleotide
  Sense strand starting at position 2554 of SEQ ID NO: 1242704
cgcguucuauucuuucuca

SEQ ID NO: 1366827 - RNA, 19 nt, Artificial Sequence
  Description of Artificial Sequence: Synthetic oligonucleotide
  Antisense strand to SEQ ID NO: 1366826
ugagaaagaauagaacgcg

SEQ ID NO: 1366828 - RNA, 19 nt, Artificial Sequence
  Description of Artificial Sequence: Synthetic oligonucleotide
  Sense strand starting at position 2928 of SEQ ID NO: 1242704
gguggagugugcguuucua

SEQ ID NO: 1366829 - RNA, 19 nt, Artificial Sequence
  Description of Artificial Sequence: Synthetic oligonucleotide
  Antisense strand to SEQ ID NO: 1366828
uagaaacgcacacuccacc

SEQ ID NO: 1366830 - RNA, 19 nt, Artificial Sequence
  Description of Artificial Sequence: Synthetic oligonucleotide
  Sense strand starting at position 2935 of SEQ ID NO: 1242704
ugugcguuucuacgggaga

SEQ ID NO: 1366831 - RNA, 19 nt, Artificial Sequence
  Description of Artificial Sequence: Synthetic oligonucleotide
  Antisense strand to SEQ ID NO: 1366830
ucucccguagaaacgcaca

SEQ ID NO: 1366832 - RNA, 19 nt, Artificial Sequence
  Description of Artificial Sequence: Synthetic oligonucleotide
  Sense strand starting at position 2936 of SEQ ID NO: 1242704
gugcguuucuacgggagaa

SEQ ID NO: 1366833 - RNA, 19 nt, Artificial Sequence
  Description of Artificial Sequence: Synthetic oligonucleotide
  Antisense strand to SEQ ID NO: 1366832
uucucccguagaaacgcac

SEQ ID NO: 1366834 - RNA, 19 nt, Artificial Sequence
  Description of Artificial Sequence: Synthetic oligonucleotide
  Sense strand starting at position 2937 of SEQ ID NO: 1242704
ugcguuucuacgggagaaa

SEQ ID NO: 1366835 - RNA, 19 nt, Artificial Sequence
  Description of Artificial Sequence: Synthetic oligonucleotide
  Antisense strand to SEQ ID NO: 1366834
uuucucccguagaaacgca

SEQ ID NO: 1366836 - RNA, 19 nt, Artificial Sequence
  Description of Artificial Sequence: Synthetic oligonucleotide
  Sense strand starting at position 2938 of SEQ ID NO: 1242704
gcguuucuacgggagaaag

SEQ ID NO: 1366837 - RNA, 19 nt, Artificial Sequence
  Description of Artificial Sequence: Synthetic oligonucleotide
  Antisense strand to SEQ ID NO: 1366836
cuuucucccguagaaacgc

SEQ ID NO: 1366838 - RNA, 19 nt, Artificial Sequence
  Description of Artificial Sequence: Synthetic oligonucleotide
  Sense strand starting at position 3064 of SEQ ID NO: 1242704
cccgagucgccgggagaaa

SEQ ID NO: 1366839 - RNA, 19 nt, Artificial Sequence
  Description of Artificial Sequence: Synthetic oligonucleotide
  Antisense strand to SEQ ID NO: 1366838
uuucucccggcgacucggg

SEQ ID NO: 1366840 - RNA, 19 nt, Artificial Sequence
  Description of Artificial Sequence: Synthetic oligonucleotide
  Sense strand starting at position 3330 of SEQ ID NO: 1242704
aagagauggacccgcgaaa

SEQ ID NO: 1366841 - RNA, 19 nt, Artificial Sequence
  Description of Artificial Sequence: Synthetic oligonucleotide
  Antisense strand to SEQ ID NO: 1366840
uuucgcggguccaucucuu

SEQ ID NO: 1366842 - RNA, 19 nt, Artificial Sequence
  Description of Artificial Sequence: Synthetic oligonucleotide
  Sense strand starting at position 3396 of SEQ ID NO: 1242704
gcaguuugaaagggcuaga

SEQ ID NO: 1366843 - RNA, 19 nt, Artificial Sequence
  Description of Artificial Sequence: Synthetic oligonucleotide
  Antisense strand to SEQ ID NO: 1366842
ucuagcccuuucaaacugc

SEQ ID NO: 1366844 - RNA, 19 nt, Artificial Sequence
  Description of Artificial Sequence: Synthetic oligonucleotide
  Sense strand starting at position 3464 of SEQ ID NO: 1242704
agagaaagcuugggauccu

SEQ ID NO: 1366845 - RNA, 19 nt, Artificial Sequence
  Description of Artificial Sequence: Synthetic oligonucleotide
  Antisense strand to SEQ ID NO: 1366844
aggaucccaagcuuucucu

SEQ ID NO: 1366846 - RNA, 19 nt, Artificial Sequence
  Description of Artificial Sequence: Synthetic oligonucleotide
  Sense strand starting at position 3837 of SEQ ID NO: 1242704
ccgguuaucuuacuccuca

SEQ ID NO: 1366847 - RNA, 19 nt, Artificial Sequence
  Description of Artificial Sequence: Synthetic oligonucleotide
  Antisense strand to SEQ ID NO: 1366846
ugaggaguaagauaaccgg

SEQ ID NO: 1366848 - RNA, 19 nt, Artificial Sequence
  Description of Artificial Sequence: Synthetic oligonucleotide
  Sense strand starting at position 3870 of SEQ ID NO: 1242704
auagguguccaaggugaua

SEQ ID NO: 1366849 - RNA, 19 nt, Artificial Sequence
  Description of Artificial Sequence: Synthetic oligonucleotide
  Antisense strand to SEQ ID NO: 1366848
uaucaccuuggacaccuau

SEQ ID NO: 1366850 - RNA, 19 nt, Artificial Sequence
  Description of Artificial Sequence: Synthetic oligonucleotide
  Sense strand starting at position 3961 of SEQ ID NO: 1242704
cccggugcuuuccuguaga

SEQ ID NO: 1366851 - RNA, 19 nt, Artificial Sequence
  Description of Artificial Sequence: Synthetic oligonucleotide
  Antisense strand to SEQ ID NO: 1366850
ucuacaggaaagcaccggg

SEQ ID NO: 1366852 - RNA, 19 nt, Artificial Sequence
  Description of Artificial Sequence: Synthetic oligonucleotide
  Sense strand starting at position 183 of SEQ ID NO: 1242705
guccuuaaucgggacugua

SEQ ID NO: 1366853 - RNA, 19 nt, Artificial Sequence
  Description of Artificial Sequence: Synthetic oligonucleotide
  Antisense strand to SEQ ID NO: 1366852
uacagucccgauuaaggac

SEQ ID NO: 1366854 - RNA, 19 nt, Artificial Sequence
  Description of Artificial Sequence: Synthetic oligonucleotide
  Sense strand starting at position 186 of SEQ ID NO: 1242705
cuuaaucgggacuguauau

SEQ ID NO: 1366855 - RNA, 19 nt, Artificial Sequence
  Description of Artificial Sequence: Synthetic oligonucleotide
  Antisense strand to SEQ ID NO: 1366854
auauacagucccgauuaag

SEQ ID NO: 1366856 - RNA, 19 nt, Artificial Sequence
  Description of Artificial Sequence: Synthetic oligonucleotide
  Sense strand starting at position 280 of SEQ ID NO: 1242705
cacugcauuucugagaugu

SEQ ID NO: 1366857 - RNA, 19 nt, Artificial Sequence
  Description of Artificial Sequence: Synthetic oligonucleotide
  Antisense strand to SEQ ID NO: 1366856
acaucucagaaaugcagug

SEQ ID NO: 1366858 - RNA, 19 nt, Artificial Sequence
  Description of Artificial Sequence: Synthetic oligonucleotide
  Sense strand starting at position 282 of SEQ ID NO: 1242705
cugcauuucugagauguua

SEQ ID NO: 1366859 - RNA, 19 nt, Artificial Sequence
  Description of Artificial Sequence: Synthetic oligonucleotide
  Antisense strand to SEQ ID NO: 1366858
uaacaucucagaaaugcag

SEQ ID NO: 1366860 - RNA, 19 nt, Artificial Sequence
  Description of Artificial Sequence: Synthetic oligonucleotide
  Sense strand starting at position 284 of SEQ ID NO: 1242705
gcauuucugagauguuagc

SEQ ID NO: 1366861 - RNA, 19 nt, Artificial Sequence
  Description of Artificial Sequence: Synthetic oligonucleotide
  Antisense strand to SEQ ID NO: 1366860
gcuaacaucucagaaaugc

SEQ ID NO: 1366862 - RNA, 19 nt, Artificial Sequence
  Description of Artificial Sequence: Synthetic oligonucleotide
  Sense strand starting at position 338 of SEQ ID NO: 1242705
aguggucucccuuagaagu

SEQ ID NO: 1366863 - RNA, 19 nt, Artificial Sequence
  Description of Artificial Sequence: Synthetic oligonucleotide
  Antisense strand to SEQ ID NO: 1366862
acuucuaagggagaccacu

SEQ ID NO: 1366864 - RNA, 19 nt, Artificial Sequence
  Description of Artificial Sequence: Synthetic oligonucleotide
  Sense strand starting at position 348 of SEQ ID NO: 1242705
cuuagaagucugcaccagu

SEQ ID NO: 1366865 - RNA, 19 nt, Artificial Sequence
  Description of Artificial Sequence: Synthetic oligonucleotide
  Antisense strand to SEQ ID NO: 1366864
acuggugcagacuucuaag

SEQ ID NO: 1366866 - RNA, 19 nt, Artificial Sequence
  Description of Artificial Sequence: Synthetic oligonucleotide
  Sense strand starting at position 704 of SEQ ID NO: 1242705
gcugcuuuccugcacucaa

SEQ ID NO: 1366867 - RNA, 19 nt, Artificial Sequence
  Description of Artificial Sequence: Synthetic oligonucleotide
  Antisense strand to SEQ ID NO: 1366866
uugagugcaggaaagcagc

SEQ ID NO: 1366868 - RNA, 19 nt, Artificial Sequence
  Description of Artificial Sequence: Synthetic oligonucleotide
  Sense strand starting at position 726 of SEQ ID NO: 1242705
ucccgaaaucucugaggug

SEQ ID NO: 1366869 - RNA, 19 nt, Artificial Sequence
  Description of Artificial Sequence: Synthetic oligonucleotide
  Antisense strand to SEQ ID NO: 1366868
caccucagagauuucggga

SEQ ID NO: 1366870 - RNA, 19 nt, Artificial Sequence
  Description of Artificial Sequence: Synthetic oligonucleotide
  Sense strand starting at position 1268 of SEQ ID NO: 1242705
uggagucgccucuaacuga

SEQ ID NO: 1366871 - RNA, 19 nt, Artificial Sequence
  Description of Artificial Sequence: Synthetic oligonucleotide
  Antisense strand to SEQ ID NO: 1366870
ucaguuagaggcgacucca

SEQ ID NO: 1366872 - RNA, 19 nt, Artificial Sequence
  Description of Artificial Sequence: Synthetic oligonucleotide
  Sense strand starting at position 1284 of SEQ ID NO: 1242705
ugagucuuucuccaaugca

SEQ ID NO: 1366873 - RNA, 19 nt, Artificial Sequence
  Description of Artificial Sequence: Synthetic oligonucleotide
  Antisense strand to SEQ ID NO: 1366872
ugcauuggagaaagacuca

SEQ ID NO: 1366874 - RNA, 19 nt, Artificial Sequence
  Description of Artificial Sequence: Synthetic oligonucleotide
  Sense strand starting at position 1337 of SEQ ID NO: 1242705
acuugaugugggcgagaau

SEQ ID NO: 1366875 - RNA, 19 nt, Artificial Sequence
  Description of Artificial Sequence: Synthetic oligonucleotide
  Antisense strand to SEQ ID NO: 1366874
auucucgcccacaucaagu

SEQ ID NO: 1366876 - RNA, 19 nt, Artificial Sequence
  Description of Artificial Sequence: Synthetic oligonucleotide
  Sense strand starting at position 1600 of SEQ ID NO: 1242705
gggcgauccgaaugcagaa

SEQ ID NO: 1366877 - RNA, 19 nt, Artificial Sequence
  Description of Artificial Sequence: Synthetic oligonucleotide
  Antisense strand to SEQ ID NO: 1366876
uucugcauucggaucgccc

SEQ ID NO: 1366878 - RNA, 19 nt, Artificial Sequence
  Description of Artificial Sequence: Synthetic oligonucleotide
  Sense strand starting at position 2015 of SEQ ID NO: 1242705
acaaaucacgcugggcaau

SEQ ID NO: 1366879 - RNA, 19 nt, Artificial Sequence
  Description of Artificial Sequence: Synthetic oligonucleotide
  Antisense strand to SEQ ID NO: 1366878
auugcccagcgugauuugu

SEQ ID NO: 1366880 - RNA, 19 nt, Artificial Sequence
  Description of Artificial Sequence: Synthetic oligonucleotide
  Sense strand starting at position 2256 of SEQ ID NO: 1242705
ccaagucaugaugguguuu

SEQ ID NO: 1366881 - RNA, 19 nt, Artificial Sequence
  Description of Artificial Sequence: Synthetic oligonucleotide
  Antisense strand to SEQ ID NO: 1366880
aaacaccaucaugacuugg

SEQ ID NO: 1366882 - RNA, 19 nt, Artificial Sequence
  Description of Artificial Sequence: Synthetic oligonucleotide
  Sense strand starting at position 2315 of SEQ ID NO: 1242705
ucaauucgagcuugcagaa

SEQ ID NO: 1366883 - RNA, 19 nt, Artificial Sequence
  Description of Artificial Sequence: Synthetic oligonucleotide
  Antisense strand to SEQ ID NO: 1366882
uucugcaagcucgaauuga

SEQ ID NO: 1366884 - RNA, 19 nt, Artificial Sequence
  Description of Artificial Sequence: Synthetic oligonucleotide
  Sense strand starting at position 2360 of SEQ ID NO: 1242705
uuauuaacugcucagguga

SEQ ID NO: 1366885 - RNA, 19 nt, Artificial Sequence
  Description of Artificial Sequence: Synthetic oligonucleotide
  Antisense strand to SEQ ID NO: 1366884
ucaccugagcaguuaauaa

SEQ ID NO: 1366886 - RNA, 19 nt, Artificial Sequence
  Description of Artificial Sequence: Synthetic oligonucleotide
  Sense strand starting at position 2510 of SEQ ID NO: 1242705
agcaguagucacugcuuaa

SEQ ID NO: 1366887 - RNA, 19 nt, Artificial Sequence
  Description of Artificial Sequence: Synthetic oligonucleotide
  Antisense strand to SEQ ID NO: 1366886
uuaagcagugacuacugcu

SEQ ID NO: 1366888 - RNA, 19 nt, Artificial Sequence
  Description of Artificial Sequence: Synthetic oligonucleotide
  Sense strand starting at position 2514 of SEQ ID NO: 1242705
guagucacugcuuaaggga

SEQ ID NO: 1366889 - RNA, 19 nt, Artificial Sequence
  Description of Artificial Sequence: Synthetic oligonucleotide
  Antisense strand to SEQ ID NO: 1366888
ucccuuaagcagugacuac

SEQ ID NO: 1366890 - RNA, 19 nt, Artificial Sequence
  Description of Artificial Sequence: Synthetic oligonucleotide
  Sense strand starting at position 2578 of SEQ ID NO: 1242705
aggucugccuucccuaaua

SEQ ID NO: 1366891 - RNA, 19 nt, Artificial Sequence
  Description of Artificial Sequence: Synthetic oligonucleotide
  Antisense strand to SEQ ID NO: 1366890
uauuagggaaggcagaccu

SEQ ID NO: 1366892 - RNA, 19 nt, Artificial Sequence
  Description of Artificial Sequence: Synthetic oligonucleotide
  Sense strand starting at position 2642 of SEQ ID NO: 1242705
gcagccuucccuuagaaag

SEQ ID NO: 1366893 - RNA, 19 nt, Artificial Sequence
  Description of Artificial Sequence: Synthetic oligonucleotide
  Antisense strand to SEQ ID NO: 1366892
cuuucuaagggaaggcugc

SEQ ID NO: 1366894 - RNA, 19 nt, Artificial Sequence
  Description of Artificial Sequence: Synthetic oligonucleotide
  Sense strand starting at position 2656 of SEQ ID NO: 1242705
gaaagaauuuaagguguuu

SEQ ID NO: 1366895 - RNA, 19 nt, Artificial Sequence
  Description of Artificial Sequence: Synthetic oligonucleotide
  Antisense strand to SEQ ID NO: 1366894
aaacaccuuaaauucuuuc

SEQ ID NO: 1366896 - RNA, 19 nt, Artificial Sequence
  Description of Artificial Sequence: Synthetic oligonucleotide
  Sense strand starting at position 2681 of SEQ ID NO: 1242705
aaaggacauuugugcaaua

SEQ ID NO: 1366897 - RNA, 19 nt, Artificial Sequence
  Description of Artificial Sequence: Synthetic oligonucleotide
  Antisense strand to SEQ ID NO: 1366896
uauugcacaaauguccuuu

SEQ ID NO: 1366898 - RNA, 19 nt, Artificial Sequence
  Description of Artificial Sequence: Synthetic oligonucleotide
  Sense strand starting at position 2783 of SEQ ID NO: 1242705
ugcucugauuuggauaaga

SEQ ID NO: 1366899 - RNA, 19 nt, Artificial Sequence
  Description of Artificial Sequence: Synthetic oligonucleotide
  Antisense strand to SEQ ID NO: 1366898
ucuuauccaaaucagagca

SEQ ID NO: 1366900 - RNA, 19 nt, Artificial Sequence
  Description of Artificial Sequence: Synthetic oligonucleotide
  Sense strand starting at position 2894 of SEQ ID NO: 1242705
gggcuaaauaccggaauaa

SEQ ID NO: 1366901 - RNA, 19 nt, Artificial Sequence
  Description of Artificial Sequence: Synthetic oligonucleotide
  Antisense strand to SEQ ID NO: 1366900
uuauuccgguauuuagccc

SEQ ID NO: 1366902 - RNA, 19 nt, Artificial Sequence
  Description of Artificial Sequence: Synthetic oligonucleotide
  Sense strand starting at position 3226 of SEQ ID NO: 1242705
uggugaggauuaagugaug

SEQ ID NO: 1366903 - RNA, 19 nt, Artificial Sequence
  Description of Artificial Sequence: Synthetic oligonucleotide
  Antisense strand to SEQ ID NO: 1366902
caucacuuaauccucacca

SEQ ID NO: 1366904 - RNA, 19 nt, Artificial Sequence
  Description of Artificial Sequence: Synthetic oligonucleotide
  Sense strand starting at position 3330 of SEQ ID NO: 1242705
gucccaaggucauugauaa

SEQ ID NO: 1366905 - RNA, 19 nt, Artificial Sequence
  Description of Artificial Sequence: Synthetic oligonucleotide
  Antisense strand to SEQ ID NO: 1366904
uuaucaaugaccuugggac

SEQ ID NO: 1366906 - RNA, 19 nt, Artificial Sequence
  Description of Artificial Sequence: Synthetic oligonucleotide
  Sense strand starting at position 3331 of SEQ ID NO: 1242705
ucccaaggucauugauaaa

SEQ ID NO: 1366907 - RNA, 19 nt, Artificial Sequence
  Description of Artificial Sequence: Synthetic oligonucleotide
  Antisense strand to SEQ ID NO: 1366906
uuuaucaaugaccuuggga

SEQ ID NO: 1366908 - RNA, 19 nt, Artificial Sequence
  Description of Artificial Sequence: Synthetic oligonucleotide
  Sense strand starting at position 3334 of SEQ ID NO: 1242705
caaggucauugauaaagau

SEQ ID NO: 1366909 - RNA, 19 nt, Artificial Sequence
  Description of Artificial Sequence: Synthetic oligonucleotide
  Antisense strand to SEQ ID NO: 1366908
aucuuuaucaaugaccuug

SEQ ID NO: 1366910 - RNA, 19 nt, Artificial Sequence
  Description of Artificial Sequence: Synthetic oligonucleotide
  Sense strand starting at position 3427 of SEQ ID NO: 1242705
agaugaaacugggaaaggu

SEQ ID NO: 1366911 - RNA, 19 nt, Artificial Sequence
  Description of Artificial Sequence: Synthetic oligonucleotide
  Antisense strand to SEQ ID NO: 1366910
accuuucccaguuucaucu

SEQ ID NO: 1366912 - RNA, 19 nt, Artificial Sequence
  Description of Artificial Sequence: Synthetic oligonucleotide
  Sense strand starting at position 3569 of SEQ ID NO: 1242705
gagaucuagccucacguuu

SEQ ID NO: 1366913 - RNA, 19 nt, Artificial Sequence
  Description of Artificial Sequence: Synthetic oligonucleotide
  Antisense strand to SEQ ID NO: 1366912
aaacgugaggcuagaucuc

SEQ ID NO: 1366914 - RNA, 19 nt, Artificial Sequence
  Description of Artificial Sequence: Synthetic oligonucleotide
  Sense strand starting at position 3607 of SEQ ID NO: 1242705
cagagaacuuuggagucaa

SEQ ID NO: 1366915 - RNA, 19 nt, Artificial Sequence
  Description of Artificial Sequence: Synthetic oligonucleotide
  Antisense strand to SEQ ID NO: 1366914
uugacuccaaaguucucug

SEQ ID NO: 1366916 - RNA, 19 nt, Artificial Sequence
  Description of Artificial Sequence: Synthetic oligonucleotide
  Sense strand starting at position 3759 of SEQ ID NO: 1242705
gacagcuugggaggugaua

SEQ ID NO: 1366917 - RNA, 19 nt, Artificial Sequence
  Description of Artificial Sequence: Synthetic oligonucleotide
  Antisense strand to SEQ ID NO: 1366916
uaucaccucccaagcuguc

SEQ ID NO: 1366918 - RNA, 19 nt, Artificial Sequence
  Description of Artificial Sequence: Synthetic oligonucleotide
  Sense strand starting at position 3761 of SEQ ID NO: 1242705
cagcuugggaggugauaaa

SEQ ID NO: 1366919 - RNA, 19 nt, Artificial Sequence
  Description of Artificial Sequence: Synthetic oligonucleotide
  Antisense strand to SEQ ID NO: 1366918
uuuaucaccucccaagcug

SEQ ID NO: 1366920 - RNA, 19 nt, Artificial Sequence
  Description of Artificial Sequence: Synthetic oligonucleotide
  Sense strand starting at position 3808 of SEQ ID NO: 1242705
ugaggaucuagcuagguuu

SEQ ID NO: 1366921 - RNA, 19 nt, Artificial Sequence
  Description of Artificial Sequence: Synthetic oligonucleotide
  Antisense strand to SEQ ID NO: 1366920
aaaccuagcuagauccuca

SEQ ID NO: 1366922 - RNA, 19 nt, Artificial Sequence
  Description of Artificial Sequence: Synthetic oligonucleotide
  Sense strand starting at position 3811 of SEQ ID NO: 1242705
ggaucuagcuagguuucca

SEQ ID NO: 1366923 - RNA, 19 nt, Artificial Sequence
  Description of Artificial Sequence: Synthetic oligonucleotide
  Antisense strand to SEQ ID NO: 1366922
uggaaaccuagcuagaucc

SEQ ID NO: 1366924 - RNA, 19 nt, Artificial Sequence
  Description of Artificial Sequence: Synthetic oligonucleotide
  Sense strand starting at position 3884 of SEQ ID NO: 1242705
cuguguucuaaggacaguu

SEQ ID NO: 1366925 - RNA, 19 nt, Artificial Sequence
  Description of Artificial Sequence: Synthetic oligonucleotide
  Antisense strand to SEQ ID NO: 1366924
aacuguccuuagaacacag

SEQ ID NO: 1366926 - RNA, 19 nt, Artificial Sequence
  Description of Artificial Sequence: Synthetic oligonucleotide
  Sense strand starting at position 3960 of SEQ ID NO: 1242705
cuuagugcugaugaccaaa

SEQ ID NO: 1366927 - RNA, 19 nt, Artificial Sequence
  Description of Artificial Sequence: Synthetic oligonucleotide
  Antisense strand to SEQ ID NO: 1366926
uuuggucaucagcacuaag

SEQ ID NO: 1366928 - RNA, 19 nt, Artificial Sequence
  Description of Artificial Sequence: Synthetic oligonucleotide
  Sense strand starting at position 3962 of SEQ ID NO: 1242705
uagugcugaugaccaaaua

SEQ ID NO: 1366929 - RNA, 19 nt, Artificial Sequence
  Description of Artificial Sequence: Synthetic oligonucleotide
  Antisense strand to SEQ ID NO: 1366928
uauuuggucaucagcacua

SEQ ID NO: 1366930 - RNA, 19 nt, Artificial Sequence
  Description of Artificial Sequence: Synthetic oligonucleotide
  Sense strand starting at position 3963 of SEQ ID NO: 1242705
agugcugaugaccaaauau

SEQ ID NO: 1366931 - RNA, 19 nt, Artificial Sequence
  Description of Artificial Sequence: Synthetic oligonucleotide
  Antisense strand to SEQ ID NO: 1366930
auauuuggucaucagcacu

SEQ ID NO: 1366932 - RNA, 19 nt, Artificial Sequence
  Description of Artificial Sequence: Synthetic oligonucleotide
  Sense strand starting at position 154 of SEQ ID NO: 1242706
ggguccugacacugacaua

SEQ ID NO: 1366933 - RNA, 19 nt, Artificial Sequence
  Description of Artificial Sequence: Synthetic oligonucleotide
  Antisense strand to SEQ ID NO: 1366932
uaugucagugucaggaccc

SEQ ID NO: 1366934 - RNA, 19 nt, Artificial Sequence
  Description of Artificial Sequence: Synthetic oligonucleotide
  Sense strand starting at position 192 of SEQ ID NO: 1242706
gaauuugagccuuggcgau

SEQ ID NO: 1366935 - RNA, 19 nt, Artificial Sequence
  Description of Artificial Sequence: Synthetic oligonucleotide
  Antisense strand to SEQ ID NO: 1366934
aucgccaaggcucaaauuc

SEQ ID NO: 1366936 - RNA, 19 nt, Artificial Sequence
  Description of Artificial Sequence: Synthetic oligonucleotide
  Sense strand starting at position 323 of SEQ ID NO: 1242706
gaaggcuucugaggaggga

SEQ ID NO: 1366937 - RNA, 19 nt, Artificial Sequence
  Description of Artificial Sequence: Synthetic oligonucleotide
  Antisense strand to SEQ ID NO: 1366936
ucccuccucagaagccuuc

SEQ ID NO: 1366938 - RNA, 19 nt, Artificial Sequence
  Description of Artificial Sequence: Synthetic oligonucleotide
  Sense strand starting at position 752 of SEQ ID NO: 1242706
cugggaggccugugggaau

SEQ ID NO: 1366939 - RNA, 19 nt, Artificial Sequence
  Description of Artificial Sequence: Synthetic oligonucleotide
  Antisense strand to SEQ ID NO: 1366938
auucccacaggccucccag

SEQ ID NO: 1366940 - RNA, 19 nt, Artificial Sequence
  Description of Artificial Sequence: Synthetic oligonucleotide
  Sense strand starting at position 870 of SEQ ID NO: 1242706
caaugaauacugugagcac

SEQ ID NO: 1366941 - RNA, 19 nt, Artificial Sequence
  Description of Artificial Sequence: Synthetic oligonucleotide
  Antisense strand to SEQ ID NO: 1366940
gugcucacaguauucauug

SEQ ID NO: 1366942 - RNA, 19 nt, Artificial Sequence
  Description of Artificial Sequence: Synthetic oligonucleotide
  Sense strand starting at position 1676 of SEQ ID NO: 1242706
gauggaguguuugguuaca

SEQ ID NO: 1366943 - RNA, 19 nt, Artificial Sequence
  Description of Artificial Sequence: Synthetic oligonucleotide
  Antisense strand to SEQ ID NO: 1366942
uguaaccaaacacuccauc

SEQ ID NO: 1366944 - RNA, 19 nt, Artificial Sequence
  Description of Artificial Sequence: Synthetic oligonucleotide
  Sense strand starting at position 1678 of SEQ ID NO: 1242706
uggaguguuugguuacacu

SEQ ID NO: 1366945 - RNA, 19 nt, Artificial Sequence
  Description of Artificial Sequence: Synthetic oligonucleotide
  Antisense strand to SEQ ID NO: 1366944
aguguaaccaaacacucca

SEQ ID NO: 1366946 - RNA, 19 nt, Artificial Sequence
  Description of Artificial Sequence: Synthetic oligonucleotide
  Sense strand starting at position 2190 of SEQ ID NO: 1242706
gggcgcaggcugagugaua

SEQ ID NO: 1366947 - RNA, 19 nt, Artificial Sequence
  Description of Artificial Sequence: Synthetic oligonucleotide
  Antisense strand to SEQ ID NO: 1366946
uaucacucagccugcgccc

SEQ ID NO: 1366948 - RNA, 19 nt, Artificial Sequence
  Description of Artificial Sequence: Synthetic oligonucleotide
  Sense strand starting at position 2202 of SEQ ID NO: 1242706
agugauagcccgugugcga

SEQ ID NO: 1366949 - RNA, 19 nt, Artificial Sequence
  Description of Artificial Sequence: Synthetic oligonucleotide
  Antisense strand to SEQ ID NO: 1366948
ucgcacacgggcuaucacu

SEQ ID NO: 1366950 - RNA, 19 nt, Artificial Sequence
  Description of Artificial Sequence: Synthetic oligonucleotide
  Sense strand starting at position 2354 of SEQ ID NO: 1242706
agugacaccuugugagagu

SEQ ID NO: 1366951 - RNA, 19 nt, Artificial Sequence
  Description of Artificial Sequence: Synthetic oligonucleotide
  Antisense strand to SEQ ID NO: 1366950
acucucacaaggugucacu

SEQ ID NO: 1366952 - RNA, 19 nt, Artificial Sequence
  Description of Artificial Sequence: Synthetic oligonucleotide
  Sense strand starting at position 2409 of SEQ ID NO: 1242706
agggcugagugauagcuuu

SEQ ID NO: 1366953 - RNA, 19 nt, Artificial Sequence
  Description of Artificial Sequence: Synthetic oligonucleotide
  Antisense strand to SEQ ID NO: 1366952
aaagcuaucacucagcccu

SEQ ID NO: 1366954 - RNA, 19 nt, Artificial Sequence
  Description of Artificial Sequence: Synthetic oligonucleotide
  Sense strand starting at position 2451 of SEQ ID NO: 1242706
cagggcuaggucggagaua

SEQ ID NO: 1366955 - RNA, 19 nt, Artificial Sequence
  Description of Artificial Sequence: Synthetic oligonucleotide
  Antisense strand to SEQ ID NO: 1366954
uaucuccgaccuagcccug

SEQ ID NO: 1366956 - RNA, 19 nt, Artificial Sequence
  Description of Artificial Sequence: Synthetic oligonucleotide
  Sense strand starting at position 2608 of SEQ ID NO: 1242706
gggaaucugcauuguaguc

SEQ ID NO: 1366957 - RNA, 19 nt, Artificial Sequence
  Description of Artificial Sequence: Synthetic oligonucleotide
  Antisense strand to SEQ ID NO: 1366956
gacuacaaugcagauuccc

SEQ ID NO: 1366958 - RNA, 19 nt, Artificial Sequence
  Description of Artificial Sequence: Synthetic oligonucleotide
  Sense strand starting at position 3126 of SEQ ID NO: 1242706
gcaggaggauccuuucuuu

SEQ ID NO: 1366959 - RNA, 19 nt, Artificial Sequence
  Description of Artificial Sequence: Synthetic oligonucleotide
  Antisense strand to SEQ ID NO: 1366958
aaagaaaggauccuccugc

SEQ ID NO: 1366960 - RNA, 19 nt, Artificial Sequence
  Description of Artificial Sequence: Synthetic oligonucleotide
  Sense strand starting at position 3201 of SEQ ID NO: 1242706
gcccguuccucucugugau

SEQ ID NO: 1366961 - RNA, 19 nt, Artificial Sequence
  Description of Artificial Sequence: Synthetic oligonucleotide
  Antisense strand to SEQ ID NO: 1366960
aucacagagaggaacgggc

SEQ ID NO: 1366962 - RNA, 19 nt, Artificial Sequence
  Description of Artificial Sequence: Synthetic oligonucleotide
  Sense strand starting at position 3205 of SEQ ID NO: 1242706
guuccucucugugauggga

SEQ ID NO: 1366963 - RNA, 19 nt, Artificial Sequence
  Description of Artificial Sequence: Synthetic oligonucleotide
  Antisense strand to SEQ ID NO: 1366962
ucccaucacagagaggaac

SEQ ID NO: 1366964 - RNA, 19 nt, Artificial Sequence
  Description of Artificial Sequence: Synthetic oligonucleotide
  Sense strand starting at position 3352 of SEQ ID NO: 1242706
cgcucacugcuccaagaug

SEQ ID NO: 1366965 - RNA, 19 nt, Artificial Sequence
  Description of Artificial Sequence: Synthetic oligonucleotide
  Antisense strand to SEQ ID NO: 1366964
caucuuggagcagugagcg

SEQ ID NO: 1366966 - RNA, 19 nt, Artificial Sequence
  Description of Artificial Sequence: Synthetic oligonucleotide
  Sense strand starting at position 3452 of SEQ ID NO: 1242706
uguggucagugaccucaaa

SEQ ID NO: 1366967 - RNA, 19 nt, Artificial Sequence
  Description of Artificial Sequence: Synthetic oligonucleotide
  Antisense strand to SEQ ID NO: 1366966
uuugaggucacugaccaca

SEQ ID NO: 1366968 - RNA, 19 nt, Artificial Sequence
  Description of Artificial Sequence: Synthetic oligonucleotide
  Sense strand starting at position 3953 of SEQ ID NO: 1242706
aguuucuccuugugucaga

SEQ ID NO: 1366969 - RNA, 19 nt, Artificial Sequence
  Description of Artificial Sequence: Synthetic oligonucleotide
  Antisense strand to SEQ ID NO: 1366968
ucugacacaaggagaaacu

SEQ ID NO: 1366970 - RNA, 19 nt, Artificial Sequence
  Description of Artificial Sequence: Synthetic oligonucleotide
  Sense strand starting at position 3960 of SEQ ID NO: 1242706
ccuugugucagagguaggu

SEQ ID NO: 1366971 - RNA, 19 nt, Artificial Sequence
  Description of Artificial Sequence: Synthetic oligonucleotide
  Antisense strand to SEQ ID NO: 1366970
accuaccucugacacaagg

SEQ ID NO: 1366972 - RNA, 19 nt, Artificial Sequence
  Description of Artificial Sequence: Synthetic oligonucleotide
  Sense strand starting at position 521 of SEQ ID NO: 1242707
accuguguaacguguacau

SEQ ID NO: 1366973 - RNA, 19 nt, Artificial Sequence
  Description of Artificial Sequence: Synthetic oligonucleotide
  Antisense strand to SEQ ID NO: 1366972
auguacacguuacacaggu

SEQ ID NO: 1366974 - RNA, 19 nt, Artificial Sequence
  Description of Artificial Sequence: Synthetic oligonucleotide
  Sense strand starting at position 533 of SEQ ID NO: 1242707
uguacauacucucuggaaa

SEQ ID NO: 1366975 - RNA, 19 nt, Artificial Sequence
  Description of Artificial Sequence: Synthetic oligonucleotide
  Antisense strand to SEQ ID NO: 1366974
uuuccagagaguauguaca

SEQ ID NO: 1366976 - RNA, 19 nt, Artificial Sequence
  Description of Artificial Sequence: Synthetic oligonucleotide
  Sense strand starting at position 534 of SEQ ID NO: 1242707
guacauacucucuggaaag

SEQ ID NO: 1366977 - RNA, 19 nt, Artificial Sequence
  Description of Artificial Sequence: Synthetic oligonucleotide
  Antisense strand to SEQ ID NO: 1366976
cuuuccagagaguauguac

SEQ ID NO: 1366978 - RNA, 19 nt, Artificial Sequence
  Description of Artificial Sequence: Synthetic oligonucleotide
  Sense strand starting at position 654 of SEQ ID NO: 1242707
ucaccuuggucagguauaa

SEQ ID NO: 1366979 - RNA, 19 nt, Artificial Sequence
  Description of Artificial Sequence: Synthetic oligonucleotide
  Antisense strand to SEQ ID NO: 1366978
uuauaccugaccaagguga

SEQ ID NO: 1366980 - RNA, 19 nt, Artificial Sequence
  Description of Artificial Sequence: Synthetic oligonucleotide
  Sense strand starting at position 744 of SEQ ID NO: 1242707
gugggaggauucucaccuu

SEQ ID NO: 1366981 - RNA, 19 nt, Artificial Sequence
  Description of Artificial Sequence: Synthetic oligonucleotide
  Antisense strand to SEQ ID NO: 1366980
aaggugagaauccucccac

SEQ ID NO: 1366982 - RNA, 19 nt, Artificial Sequence
  Description of Artificial Sequence: Synthetic oligonucleotide
  Sense strand starting at position 747 of SEQ ID NO: 1242707
ggaggauucucaccuuguc

SEQ ID NO: 1366983 - RNA, 19 nt, Artificial Sequence
  Description of Artificial Sequence: Synthetic oligonucleotide
  Antisense strand to SEQ ID NO: 1366982
gacaaggugagaauccucc

SEQ ID NO: 1366984 - RNA, 19 nt, Artificial Sequence
  Description of Artificial Sequence: Synthetic oligonucleotide
  Sense strand starting at position 1170 of SEQ ID NO: 1242707
gaucguacugcagacuagu

SEQ ID NO: 1366985 - RNA, 19 nt, Artificial Sequence
  Description of Artificial Sequence: Synthetic oligonucleotide
  Antisense strand to SEQ ID NO: 1366984
acuagucugcaguacgauc

SEQ ID NO: 1366986 - RNA, 19 nt, Artificial Sequence
  Description of Artificial Sequence: Synthetic oligonucleotide
  Sense strand starting at position 1423 of SEQ ID NO: 1242707
aaguuugaagcuggaaagu

SEQ ID NO: 1366987 - RNA, 19 nt, Artificial Sequence
  Description of Artificial Sequence: Synthetic oligonucleotide
  Antisense strand to SEQ ID NO: 1366986
acuuuccagcuucaaacuu

SEQ ID NO: 1366988 - RNA, 19 nt, Artificial Sequence
  Description of Artificial Sequence: Synthetic oligonucleotide
  Sense strand starting at position 1432 of SEQ ID NO: 1242707
gcuggaaaguuccugaaga

SEQ ID NO: 1366989 - RNA, 19 nt, Artificial Sequence
  Description of Artificial Sequence: Synthetic oligonucleotide
  Antisense strand to SEQ ID NO: 1366988
ucuucaggaacuuuccagc

SEQ ID NO: 1366990 - RNA, 19 nt, Artificial Sequence
  Description of Artificial Sequence: Synthetic oligonucleotide
  Sense strand starting at position 1433 of SEQ ID NO: 1242707
cuggaaaguuccugaagac

SEQ ID NO: 1366991 - RNA, 19 nt, Artificial Sequence
  Description of Artificial Sequence: Synthetic oligonucleotide
  Antisense strand to SEQ ID NO: 1366990
gucuucaggaacuuuccag

SEQ ID NO: 1366992 - RNA, 19 nt, Artificial Sequence
  Description of Artificial Sequence: Synthetic oligonucleotide
  Sense strand starting at position 1455 of SEQ ID NO: 1242707
gagggucacuuccugaagu

SEQ ID NO: 1366993 - RNA, 19 nt, Artificial Sequence
  Description of Artificial Sequence: Synthetic oligonucleotide
  Antisense strand to SEQ ID NO: 1366992
acuucaggaagugacccuc

SEQ ID NO: 1366994 - RNA, 19 nt, Artificial Sequence
  Description of Artificial Sequence: Synthetic oligonucleotide
  Sense strand starting at position 1457 of SEQ ID NO: 1242707
gggucacuuccugaaguca

SEQ ID NO: 1366995 - RNA, 19 nt, Artificial Sequence
  Description of Artificial Sequence: Synthetic oligonucleotide
  Antisense strand to SEQ ID NO: 1366994
ugacuucaggaagugaccc

SEQ ID NO: 1366996 - RNA, 19 nt, Artificial Sequence
  Description of Artificial Sequence: Synthetic oligonucleotide
  Sense strand starting at position 1469 of SEQ ID NO: 1242707
gaagucaccucuuguugca

SEQ ID NO: 1366997 - RNA, 19 nt, Artificial Sequence
  Description of Artificial Sequence: Synthetic oligonucleotide
  Antisense strand to SEQ ID NO: 1366996
ugcaacaagaggugacuuc

SEQ ID NO: 1366998 - RNA, 19 nt, Artificial Sequence
  Description of Artificial Sequence: Synthetic oligonucleotide
  Sense strand starting at position 1628 of SEQ ID NO: 1242707
cggcccuugucucaucauu

SEQ ID NO: 1366999 - RNA, 19 nt, Artificial Sequence
  Description of Artificial Sequence: Synthetic oligonucleotide
  Antisense strand to SEQ ID NO: 1366998
aaugaugagacaagggccg

SEQ ID NO: 1367000 - RNA, 19 nt, Artificial Sequence
  Description of Artificial Sequence: Synthetic oligonucleotide
  Sense strand starting at position 1706 of SEQ ID NO: 1242707
agaugaggcccugggaauu

SEQ ID NO: 1367001 - RNA, 19 nt, Artificial Sequence
  Description of Artificial Sequence: Synthetic oligonucleotide
  Antisense strand to SEQ ID NO: 1367000
aauucccagggccucaucu

SEQ ID NO: 1367002 - RNA, 19 nt, Artificial Sequence
  Description of Artificial Sequence: Synthetic oligonucleotide
  Sense strand starting at position 1718 of SEQ ID NO: 1242707
gggaauucuuucccagaug

SEQ ID NO: 1367003 - RNA, 19 nt, Artificial Sequence
  Description of Artificial Sequence: Synthetic oligonucleotide
  Antisense strand to SEQ ID NO: 1367002
caucugggaaagaauuccc

SEQ ID NO: 1367004 - RNA, 19 nt, Artificial Sequence
  Description of Artificial Sequence: Synthetic oligonucleotide
  Sense strand starting at position 2130 of SEQ ID NO: 1242707
ggagguauuccuuggcccu

SEQ ID NO: 1367005 - RNA, 19 nt, Artificial Sequence
  Description of Artificial Sequence: Synthetic oligonucleotide
  Antisense strand to SEQ ID NO: 1367004
agggccaaggaauaccucc

SEQ ID NO: 1367006 - RNA, 19 nt, Artificial Sequence
  Description of Artificial Sequence: Synthetic oligonucleotide
  Sense strand starting at position 2179 of SEQ ID NO: 1242707
ccagacuuggucugacuua

SEQ ID NO: 1367007 - RNA, 19 nt, Artificial Sequence
  Description of Artificial Sequence: Synthetic oligonucleotide
  Antisense strand to SEQ ID NO: 1367006
uaagucagaccaagucugg

SEQ ID NO: 1367008 - RNA, 19 nt, Artificial Sequence
  Description of Artificial Sequence: Synthetic oligonucleotide
  Sense strand starting at position 2180 of SEQ ID NO: 1242707
cagacuuggucugacuuau

SEQ ID NO: 1367009 - RNA, 19 nt, Artificial Sequence
  Description of Artificial Sequence: Synthetic oligonucleotide
  Antisense strand to SEQ ID NO: 1367008
auaagucagaccaagucug

SEQ ID NO: 1367010 - RNA, 19 nt, Artificial Sequence
  Description of Artificial Sequence: Synthetic oligonucleotide
  Sense strand starting at position 2282 of SEQ ID NO: 1242707
gugguaagcaccugcucau

SEQ ID NO: 1367011 - RNA, 19 nt, Artificial Sequence
  Description of Artificial Sequence: Synthetic oligonucleotide
  Antisense strand to SEQ ID NO: 1367010
augagcaggugcuuaccac

SEQ ID NO: 1367012 - RNA, 19 nt, Artificial Sequence
  Description of Artificial Sequence: Synthetic oligonucleotide
  Sense strand starting at position 2370 of SEQ ID NO: 1242707
aggagccuccucugggaau

SEQ ID NO: 1367013 - RNA, 19 nt, Artificial Sequence
  Description of Artificial Sequence: Synthetic oligonucleotide
  Antisense strand to SEQ ID NO: 1367012
auucccagaggaggcuccu

SEQ ID NO: 1367014 - RNA, 19 nt, Artificial Sequence
  Description of Artificial Sequence: Synthetic oligonucleotide
  Sense strand starting at position 2437 of SEQ ID NO: 1242707
aggacaccagcuugucauu

SEQ ID NO: 1367015 - RNA, 19 nt, Artificial Sequence
  Description of Artificial Sequence: Synthetic oligonucleotide
  Antisense strand to SEQ ID NO: 1367014
aaugacaagcugguguccu

SEQ ID NO: 1367016 - RNA, 19 nt, Artificial Sequence
  Description of Artificial Sequence: Synthetic oligonucleotide
  Sense strand starting at position 2459 of SEQ ID NO: 1242707
ugccucuuccauuagauug

SEQ ID NO: 1367017 - RNA, 19 nt, Artificial Sequence
  Description of Artificial Sequence: Synthetic oligonucleotide
  Antisense strand to SEQ ID NO: 1367016
caaucuaauggaagaggca

SEQ ID NO: 1367018 - RNA, 19 nt, Artificial Sequence
  Description of Artificial Sequence: Synthetic oligonucleotide
  Sense strand starting at position 2481 of SEQ ID NO: 1242707
gcccuuugagagcagaacu

SEQ ID NO: 1367019 - RNA, 19 nt, Artificial Sequence
  Description of Artificial Sequence: Synthetic oligonucleotide
  Antisense strand to SEQ ID NO: 1367018
aguucugcucucaaagggc

SEQ ID NO: 1367020 - RNA, 19 nt, Artificial Sequence
  Description of Artificial Sequence: Synthetic oligonucleotide
  Sense strand starting at position 2573 of SEQ ID NO: 1242707
gcuggagguugcaaaggau

SEQ ID NO: 1367021 - RNA, 19 nt, Artificial Sequence
  Description of Artificial Sequence: Synthetic oligonucleotide
  Antisense strand to SEQ ID NO: 1367020
auccuuugcaaccuccagc

SEQ ID NO: 1367022 - RNA, 19 nt, Artificial Sequence
  Description of Artificial Sequence: Synthetic oligonucleotide
  Sense strand starting at position 2598 of SEQ ID NO: 1242707
gcaguacaugaguggaagu

SEQ ID NO: 1367023 - RNA, 19 nt, Artificial Sequence
  Description of Artificial Sequence: Synthetic oligonucleotide
  Antisense strand to SEQ ID NO: 1367022
acuuccacucauguacugc

SEQ ID NO: 1367024 - RNA, 19 nt, Artificial Sequence
  Description of Artificial Sequence: Synthetic oligonucleotide
  Sense strand starting at position 2938 of SEQ ID NO: 1242707
cgaaguccuucccacugua

SEQ ID NO: 1367025 - RNA, 19 nt, Artificial Sequence
  Description of Artificial Sequence: Synthetic oligonucleotide
  Antisense strand to SEQ ID NO: 1367024
uacagugggaaggacuucg

SEQ ID NO: 1367026 - RNA, 19 nt, Artificial Sequence
  Description of Artificial Sequence: Synthetic oligonucleotide
  Sense strand starting at position 2952 of SEQ ID NO: 1242707
cuguacaucugauuagucu

SEQ ID NO: 1367027 - RNA, 19 nt, Artificial Sequence
  Description of Artificial Sequence: Synthetic oligonucleotide
  Antisense strand to SEQ ID NO: 1367026
agacuaaucagauguacag

SEQ ID NO: 1367028 - RNA, 19 nt, Artificial Sequence
  Description of Artificial Sequence: Synthetic oligonucleotide
  Sense strand starting at position 3150 of SEQ ID NO: 1242707
gccacauacugcguucuga

SEQ ID NO: 1367029 - RNA, 19 nt, Artificial Sequence
  Description of Artificial Sequence: Synthetic oligonucleotide
  Antisense strand to SEQ ID NO: 1367028
ucagaacgcaguauguggc

SEQ ID NO: 1367030 - RNA, 19 nt, Artificial Sequence
  Description of Artificial Sequence: Synthetic oligonucleotide
  Sense strand starting at position 3195 of SEQ ID NO: 1242707
cagagaagcugagugguuu

SEQ ID NO: 1367031 - RNA, 19 nt, Artificial Sequence
  Description of Artificial Sequence: Synthetic oligonucleotide
  Antisense strand to SEQ ID NO: 1367030
aaaccacucagcuucucug

SEQ ID NO: 1367032 - RNA, 19 nt, Artificial Sequence
  Description of Artificial Sequence: Synthetic oligonucleotide
  Sense strand starting at position 3291 of SEQ ID NO: 1242707
uucugcauuccuugaagua

SEQ ID NO: 1367033 - RNA, 19 nt, Artificial Sequence
  Description of Artificial Sequence: Synthetic oligonucleotide
  Antisense strand to SEQ ID NO: 1367032
uacuucaaggaaugcagaa

SEQ ID NO: 1367034 - RNA, 19 nt, Artificial Sequence
  Description of Artificial Sequence: Synthetic oligonucleotide
  Sense strand starting at position 3292 of SEQ ID NO: 1242707
ucugcauuccuugaaguau

SEQ ID NO: 1367035 - RNA, 19 nt, Artificial Sequence
  Description of Artificial Sequence: Synthetic oligonucleotide
  Antisense strand to SEQ ID NO: 1367034
auacuucaaggaaugcaga

SEQ ID NO: 1367036 - RNA, 19 nt, Artificial Sequence
  Description of Artificial Sequence: Synthetic oligonucleotide
  Sense strand starting at position 3439 of SEQ ID NO: 1242707
agcugcaaucaggauucua

SEQ ID NO: 1367037 - RNA, 19 nt, Artificial Sequence
  Description of Artificial Sequence: Synthetic oligonucleotide
  Antisense strand to SEQ ID NO: 1367036
uagaauccugauugcagcu

SEQ ID NO: 1367038 - RNA, 19 nt, Artificial Sequence
  Description of Artificial Sequence: Synthetic oligonucleotide
  Sense strand starting at position 3447 of SEQ ID NO: 1242707
ucaggauucuaaccagguu

SEQ ID NO: 1367039 - RNA, 19 nt, Artificial Sequence
  Description of Artificial Sequence: Synthetic oligonucleotide
  Antisense strand to SEQ ID NO: 1367038
aaccugguuagaauccuga

SEQ ID NO: 1367040 - RNA, 19 nt, Artificial Sequence
  Description of Artificial Sequence: Synthetic oligonucleotide
  Sense strand starting at position 3476 of SEQ ID NO: 1242707
ccuggagucuguggaauga

SEQ ID NO: 1367041 - RNA, 19 nt, Artificial Sequence
  Description of Artificial Sequence: Synthetic oligonucleotide
  Antisense strand to SEQ ID NO: 1367040
ucauuccacagacuccagg

SEQ ID NO: 1367042 - RNA, 19 nt, Artificial Sequence
  Description of Artificial Sequence: Synthetic oligonucleotide
  Sense strand starting at position 3480 of SEQ ID NO: 1242707
gagucuguggaaugaauaa

SEQ ID NO: 1367043 - RNA, 19 nt, Artificial Sequence
  Description of Artificial Sequence: Synthetic oligonucleotide
  Antisense strand to SEQ ID NO: 1367042
uuauucauuccacagacuc

SEQ ID NO: 1367044 - RNA, 19 nt, Artificial Sequence
  Description of Artificial Sequence: Synthetic oligonucleotide
  Sense strand starting at position 3519 of SEQ ID NO: 1242707
gaaggaauguauggaccuu

SEQ ID NO: 1367045 - RNA, 19 nt, Artificial Sequence
  Description of Artificial Sequence: Synthetic oligonucleotide
  Antisense strand to SEQ ID NO: 1367044
aagguccauacauuccuuc

SEQ ID NO: 1367046 - RNA, 19 nt, Artificial Sequence
  Description of Artificial Sequence: Synthetic oligonucleotide
  Sense strand starting at position 3699 of SEQ ID NO: 1242707
gcacuugugccgaggguga

SEQ ID NO: 1367047 - RNA, 19 nt, Artificial Sequence
  Description of Artificial Sequence: Synthetic oligonucleotide
  Antisense strand to SEQ ID NO: 1367046
ucacccucggcacaagugc

SEQ ID NO: 1367048 - RNA, 19 nt, Artificial Sequence
  Description of Artificial Sequence: Synthetic oligonucleotide
  Sense strand starting at position 57 of SEQ ID NO: 1242708
cugucugucggagacacaa

SEQ ID NO: 1367049 - RNA, 19 nt, Artificial Sequence
  Description of Artificial Sequence: Synthetic oligonucleotide
  Antisense strand to SEQ ID NO: 1367048
uugugucuccgacagacag

SEQ ID NO: 1367050 - RNA, 19 nt, Artificial Sequence
  Description of Artificial Sequence: Synthetic oligonucleotide
  Sense strand starting at position 475 of SEQ ID NO: 1242708
gcgguuccacccugaggau

SEQ ID NO: 1367051 - RNA, 19 nt, Artificial Sequence
  Description of Artificial Sequence: Synthetic oligonucleotide
  Antisense strand to SEQ ID NO: 1367050
auccucaggguggaaccgc

SEQ ID NO: 1367052 - RNA, 19 nt, Artificial Sequence
  Description of Artificial Sequence: Synthetic oligonucleotide
  Sense strand starting at position 484 of SEQ ID NO: 1242708
cccugaggaucuuaccuuu

SEQ ID NO: 1367053 - RNA, 19 nt, Artificial Sequence
  Description of Artificial Sequence: Synthetic oligonucleotide
  Antisense strand to SEQ ID NO: 1367052
aaagguaagauccucaggg

SEQ ID NO: 1367054 - RNA, 19 nt, Artificial Sequence
  Description of Artificial Sequence: Synthetic oligonucleotide
  Sense strand starting at position 2008 of SEQ ID NO: 1242708
uugaaauuggucugaaaua

SEQ ID NO: 1367055 - RNA, 19 nt, Artificial Sequence
  Description of Artificial Sequence: Synthetic oligonucleotide
  Antisense strand to SEQ ID NO: 1367054
uauuucagaccaauuucaa

SEQ ID NO: 1367056 - RNA, 19 nt, Artificial Sequence
  Description of Artificial Sequence: Synthetic oligonucleotide
  Sense strand starting at position 2009 of SEQ ID NO: 1242708
ugaaauuggucugaaauac

SEQ ID NO: 1367057 - RNA, 19 nt, Artificial Sequence
  Description of Artificial Sequence: Synthetic oligonucleotide
  Antisense strand to SEQ ID NO: 1367056
guauuucagaccaauuuca

SEQ ID NO: 1367058 - RNA, 19 nt, Artificial Sequence
  Description of Artificial Sequence: Synthetic oligonucleotide
  Sense strand starting at position 2028 of SEQ ID NO: 1242708
uguauauaaucuggguaaa

SEQ ID NO: 1367059 - RNA, 19 nt, Artificial Sequence
  Description of Artificial Sequence: Synthetic oligonucleotide
  Antisense strand to SEQ ID NO: 1367058
uuuacccagauuauauaca

SEQ ID NO: 1367060 - RNA, 19 nt, Artificial Sequence
  Description of Artificial Sequence: Synthetic oligonucleotide
  Sense strand starting at position 2073 of SEQ ID NO: 1242708
cagagagucucccuuggaa

SEQ ID NO: 1367061 - RNA, 19 nt, Artificial Sequence
  Description of Artificial Sequence: Synthetic oligonucleotide
  Antisense strand to SEQ ID NO: 1367060
uuccaagggagacucucug

SEQ ID NO: 1367062 - RNA, 19 nt, Artificial Sequence
  Description of Artificial Sequence: Synthetic oligonucleotide
  Sense strand starting at position 2104 of SEQ ID NO: 1242708
acacccuuccuaggagaua

SEQ ID NO: 1367063 - RNA, 19 nt, Artificial Sequence
  Description of Artificial Sequence: Synthetic oligonucleotide
  Antisense strand to SEQ ID NO: 1367062
uaucuccuaggaagggugu

SEQ ID NO: 1367064 - RNA, 19 nt, Artificial Sequence
  Description of Artificial Sequence: Synthetic oligonucleotide
  Sense strand starting at position 2135 of SEQ ID NO: 1242708
gggauucguuguucuucua

SEQ ID NO: 1367065 - RNA, 19 nt, Artificial Sequence
  Description of Artificial Sequence: Synthetic oligonucleotide
  Antisense strand to SEQ ID NO: 1367064
uagaagaacaacgaauccc

SEQ ID NO: 1367066 - RNA, 19 nt, Artificial Sequence
  Description of Artificial Sequence: Synthetic oligonucleotide
  Sense strand starting at position 2151 of SEQ ID NO: 1242708
cuacguuacucucauucca

SEQ ID NO: 1367067 - RNA, 19 nt, Artificial Sequence
  Description of Artificial Sequence: Synthetic oligonucleotide
  Antisense strand to SEQ ID NO: 1367066
uggaaugagaguaacguag

SEQ ID NO: 1367068 - RNA, 19 nt, Artificial Sequence
  Description of Artificial Sequence: Synthetic oligonucleotide
  Sense strand starting at position 2159 of SEQ ID NO: 1242708
cucucauuccacuacguua

SEQ ID NO: 1367069 - RNA, 19 nt, Artificial Sequence
  Description of Artificial Sequence: Synthetic oligonucleotide
  Antisense strand to SEQ ID NO: 1367068
uaacguaguggaaugagag

SEQ ID NO: 1367070 - RNA, 19 nt, Artificial Sequence
  Description of Artificial Sequence: Synthetic oligonucleotide
  Sense strand starting at position 2161 of SEQ ID NO: 1242708
cucauuccacuacguuaga

SEQ ID NO: 1367071 - RNA, 19 nt, Artificial Sequence
  Description of Artificial Sequence: Synthetic oligonucleotide
  Antisense strand to SEQ ID NO: 1367070
ucuaacguaguggaaugag

SEQ ID NO: 1367072 - RNA, 19 nt, Artificial Sequence
  Description of Artificial Sequence: Synthetic oligonucleotide
  Sense strand starting at position 2210 of SEQ ID NO: 1242708
gugggcucuggccaugaaa

SEQ ID NO: 1367073 - RNA, 19 nt, Artificial Sequence
  Description of Artificial Sequence: Synthetic oligonucleotide
  Antisense strand to SEQ ID NO: 1367072
uuucauggccagagcccac

SEQ ID NO: 1367074 - RNA, 19 nt, Artificial Sequence
  Description of Artificial Sequence: Synthetic oligonucleotide
  Sense strand starting at position 2276 of SEQ ID NO: 1242708
cugagcuuucccggucagu

SEQ ID NO: 1367075 - RNA, 19 nt, Artificial Sequence
  Description of Artificial Sequence: Synthetic oligonucleotide
  Antisense strand to SEQ ID NO: 1367074
acugaccgggaaagcucag

SEQ ID NO: 1367076 - RNA, 19 nt, Artificial Sequence
  Description of Artificial Sequence: Synthetic oligonucleotide
  Sense strand starting at position 2467 of SEQ ID NO: 1242708
gucucacugucguccagua

SEQ ID NO: 1367077 - RNA, 19 nt, Artificial Sequence
  Description of Artificial Sequence: Synthetic oligonucleotide
  Antisense strand to SEQ ID NO: 1367076
uacuggacgacagugagac

SEQ ID NO: 1367078 - RNA, 19 nt, Artificial Sequence
  Description of Artificial Sequence: Synthetic oligonucleotide
  Sense strand starting at position 2743 of SEQ ID NO: 1242708
augacagauucuuugaccu

SEQ ID NO: 1367079 - RNA, 19 nt, Artificial Sequence
  Description of Artificial Sequence: Synthetic oligonucleotide
  Antisense strand to SEQ ID NO: 1367078
aggucaaagaaucugucau

SEQ ID NO: 1367080 - RNA, 19 nt, Artificial Sequence
  Description of Artificial Sequence: Synthetic oligonucleotide
  Sense strand starting at position 2766 of SEQ ID NO: 1242708
gggcuaaccugguaaucua

SEQ ID NO: 1367081 - RNA, 19 nt, Artificial Sequence
  Description of Artificial Sequence: Synthetic oligonucleotide
  Antisense strand to SEQ ID NO: 1367080
uagauuaccagguuagccc

SEQ ID NO: 1367082 - RNA, 19 nt, Artificial Sequence
  Description of Artificial Sequence: Synthetic oligonucleotide
  Sense strand starting at position 2991 of SEQ ID NO: 1242708
cuguuaugaucuuaguauu

SEQ ID NO: 1367083 - RNA, 19 nt, Artificial Sequence
  Description of Artificial Sequence: Synthetic oligonucleotide
  Antisense strand to SEQ ID NO: 1367082
aauacuaagaucauaacag

SEQ ID NO: 1367084 - RNA, 19 nt, Artificial Sequence
  Description of Artificial Sequence: Synthetic oligonucleotide
  Sense strand starting at position 3014 of SEQ ID NO: 1242708
ccucucauagaugaguauu

SEQ ID NO: 1367085 - RNA, 19 nt, Artificial Sequence
  Description of Artificial Sequence: Synthetic oligonucleotide
  Antisense strand to SEQ ID NO: 1367084
aauacucaucuaugagagg

SEQ ID NO: 1367086 - RNA, 19 nt, Artificial Sequence
  Description of Artificial Sequence: Synthetic oligonucleotide
  Sense strand starting at position 3016 of SEQ ID NO: 1242708
ucucauagaugaguauuaa

SEQ ID NO: 1367087 - RNA, 19 nt, Artificial Sequence
  Description of Artificial Sequence: Synthetic oligonucleotide
  Antisense strand to SEQ ID NO: 1367086
uuaauacucaucuaugaga

SEQ ID NO: 1367088 - RNA, 19 nt, Artificial Sequence
  Description of Artificial Sequence: Synthetic oligonucleotide
  Sense strand starting at position 3087 of SEQ ID NO: 1242708
cccaaaugcugccugguau

SEQ ID NO: 1367089 - RNA, 19 nt, Artificial Sequence
  Description of Artificial Sequence: Synthetic oligonucleotide
  Antisense strand to SEQ ID NO: 1367088
auaccaggcagcauuuggg

SEQ ID NO: 1367090 - RNA, 19 nt, Artificial Sequence
  Description of Artificial Sequence: Synthetic oligonucleotide
  Sense strand starting at position 3088 of SEQ ID NO: 1242708
ccaaaugcugccugguauu

SEQ ID NO: 1367091 - RNA, 19 nt, Artificial Sequence
  Description of Artificial Sequence: Synthetic oligonucleotide
  Antisense strand to SEQ ID NO: 1367090
aauaccaggcagcauuugg

SEQ ID NO: 1367092 - RNA, 19 nt, Artificial Sequence
  Description of Artificial Sequence: Synthetic oligonucleotide
  Sense strand starting at position 3091 of SEQ ID NO: 1242708
aaugcugccugguauuauu

SEQ ID NO: 1367093 - RNA, 19 nt, Artificial Sequence
  Description of Artificial Sequence: Synthetic oligonucleotide
  Antisense strand to SEQ ID NO: 1367092
aauaauaccaggcagcauu

SEQ ID NO: 1367094 - RNA, 19 nt, Artificial Sequence
  Description of Artificial Sequence: Synthetic oligonucleotide
  Sense strand starting at position 3100 of SEQ ID NO: 1242708
ugguauuauugcucucaga

SEQ ID NO: 1367095 - RNA, 19 nt, Artificial Sequence
  Description of Artificial Sequence: Synthetic oligonucleotide
  Antisense strand to SEQ ID NO: 1367094
ucugagagcaauaauacca

SEQ ID NO: 1367096 - RNA, 19 nt, Artificial Sequence
  Description of Artificial Sequence: Synthetic oligonucleotide
  Sense strand starting at position 3169 of SEQ ID NO: 1242708
gagaaugagaagcguugua

SEQ ID NO: 1367097 - RNA, 19 nt, Artificial Sequence
  Description of Artificial Sequence: Synthetic oligonucleotide
  Antisense strand to SEQ ID NO: 1367096
uacaacgcuucucauucuc

SEQ ID NO: 1367098 - RNA, 19 nt, Artificial Sequence
  Description of Artificial Sequence: Synthetic oligonucleotide
  Sense strand starting at position 3174 of SEQ ID NO: 1242708
ugagaagcguuguaauccu

SEQ ID NO: 1367099 - RNA, 19 nt, Artificial Sequence
  Description of Artificial Sequence: Synthetic oligonucleotide
  Antisense strand to SEQ ID NO: 1367098
aggauuacaacgcuucuca

SEQ ID NO: 1367100 - RNA, 19 nt, Artificial Sequence
  Description of Artificial Sequence: Synthetic oligonucleotide
  Sense strand starting at position 3230 of SEQ ID NO: 1242708
ucugguaucucgggagcau

SEQ ID NO: 1367101 - RNA, 19 nt, Artificial Sequence
  Description of Artificial Sequence: Synthetic oligonucleotide
  Antisense strand to SEQ ID NO: 1367100
augcucccgagauaccaga

SEQ ID NO: 1367102 - RNA, 19 nt, Artificial Sequence
  Description of Artificial Sequence: Synthetic oligonucleotide
  Sense strand starting at position 3231 of SEQ ID NO: 1242708
cugguaucucgggagcauu

SEQ ID NO: 1367103 - RNA, 19 nt, Artificial Sequence
  Description of Artificial Sequence: Synthetic oligonucleotide
  Antisense strand to SEQ ID NO: 1367102
aaugcucccgagauaccag

SEQ ID NO: 1367104 - RNA, 19 nt, Artificial Sequence
  Description of Artificial Sequence: Synthetic oligonucleotide
  Sense strand starting at position 3547 of SEQ ID NO: 1242708
ggaugcaggcccuaauuaa

SEQ ID NO: 1367105 - RNA, 19 nt, Artificial Sequence
  Description of Artificial Sequence: Synthetic oligonucleotide
  Antisense strand to SEQ ID NO: 1367104
uuaauuagggccugcaucc

SEQ ID NO: 1367106 - RNA, 19 nt, Artificial Sequence
  Description of Artificial Sequence: Synthetic oligonucleotide
  Sense strand starting at position 3554 of SEQ ID NO: 1242708
ggcccuaauuaaguaaaca

SEQ ID NO: 1367107 - RNA, 19 nt, Artificial Sequence
  Description of Artificial Sequence: Synthetic oligonucleotide
  Antisense strand to SEQ ID NO: 1367106
uguuuacuuaauuagggcc

SEQ ID NO: 1367108 - RNA, 19 nt, Artificial Sequence
  Description of Artificial Sequence: Synthetic oligonucleotide
  Sense strand starting at position 3585 of SEQ ID NO: 1242708
gcuguugagcgcgcucauu

SEQ ID NO: 1367109 - RNA, 19 nt, Artificial Sequence
  Description of Artificial Sequence: Synthetic oligonucleotide
  Antisense strand to SEQ ID NO: 1367108
aaugagcgcgcucaacagc

SEQ ID NO: 1367110 - RNA, 19 nt, Artificial Sequence
  Description of Artificial Sequence: Synthetic oligonucleotide
  Sense strand starting at position 3898 of SEQ ID NO: 1242708
uaacauguaccguguacaa

SEQ ID NO: 1367111 - RNA, 19 nt, Artificial Sequence
  Description of Artificial Sequence: Synthetic oligonucleotide
  Antisense strand to SEQ ID NO: 1367110
uuguacacgguacauguua

SEQ ID NO: 1367112 - RNA, 19 nt, Artificial Sequence
  Description of Artificial Sequence: Synthetic oligonucleotide
  Sense strand starting at position 3900 of SEQ ID NO: 1242708
acauguaccguguacaaga

SEQ ID NO: 1367113 - RNA, 19 nt, Artificial Sequence
  Description of Artificial Sequence: Synthetic oligonucleotide
  Antisense strand to SEQ ID NO: 1367112
ucuuguacacgguacaugu

SEQ ID NO: 1367114 - RNA, 19 nt, Artificial Sequence
  Description of Artificial Sequence: Synthetic oligonucleotide
  Sense strand starting at position 8 of SEQ ID NO: 1242709
ggaacagucauggguccau

SEQ ID NO: 1367115 - RNA, 19 nt, Artificial Sequence
  Description of Artificial Sequence: Synthetic oligonucleotide
  Antisense strand to SEQ ID NO: 1367114
auggacccaugacuguucc

SEQ ID NO: 1367116 - RNA, 19 nt, Artificial Sequence
  Description of Artificial Sequence: Synthetic oligonucleotide
  Sense strand starting at position 45 of SEQ ID NO: 1242709
agauucuuccugggauggu

SEQ ID NO: 1367117 - RNA, 19 nt, Artificial Sequence
  Description of Artificial Sequence: Synthetic oligonucleotide
  Antisense strand to SEQ ID NO: 1367116
accaucccaggaagaaucu

SEQ ID NO: 1367118 - RNA, 19 nt, Artificial Sequence
  Description of Artificial Sequence: Synthetic oligonucleotide
  Sense strand starting at position 88 of SEQ ID NO: 1242709
ccaagucagcagugaauca

SEQ ID NO: 1367119 - RNA, 19 nt, Artificial Sequence
  Description of Artificial Sequence: Synthetic oligonucleotide
  Antisense strand to SEQ ID NO: 1367118
ugauucacugcugacuugg

SEQ ID NO: 1367120 - RNA, 19 nt, Artificial Sequence
  Description of Artificial Sequence: Synthetic oligonucleotide
  Sense strand starting at position 95 of SEQ ID NO: 1242709
agcagugaaucauccaacu

SEQ ID NO: 1367121 - RNA, 19 nt, Artificial Sequence
  Description of Artificial Sequence: Synthetic oligonucleotide
  Antisense strand to SEQ ID NO: 1367120
aguuggaugauucacugcu

SEQ ID NO: 1367122 - RNA, 19 nt, Artificial Sequence
  Description of Artificial Sequence: Synthetic oligonucleotide
  Sense strand starting at position 163 of SEQ ID NO: 1242709
cuuguuuggcaacacaaua

SEQ ID NO: 1367123 - RNA, 19 nt, Artificial Sequence
  Description of Artificial Sequence: Synthetic oligonucleotide
  Antisense strand to SEQ ID NO: 1367122
uauuguguugccaaacaag

SEQ ID NO: 1367124 - RNA, 19 nt, Artificial Sequence
  Description of Artificial Sequence: Synthetic oligonucleotide
  Sense strand starting at position 563 of SEQ ID NO: 1242709
ucgcgauguccucucacuu

SEQ ID NO: 1367125 - RNA, 19 nt, Artificial Sequence
  Description of Artificial Sequence: Synthetic oligonucleotide
  Antisense strand to SEQ ID NO: 1367124
aagugagaggacaucgcga

SEQ ID NO: 1367126 - RNA, 19 nt, Artificial Sequence
  Description of Artificial Sequence: Synthetic oligonucleotide
  Sense strand starting at position 853 of SEQ ID NO: 1242709
guacgagauccugguucaa

SEQ ID NO: 1367127 - RNA, 19 nt, Artificial Sequence
  Description of Artificial Sequence: Synthetic oligonucleotide
  Antisense strand to SEQ ID NO: 1367126
uugaaccaggaucucguac

SEQ ID NO: 1367128 - RNA, 19 nt, Artificial Sequence
  Description of Artificial Sequence: Synthetic oligonucleotide
  Sense strand starting at position 1006 of SEQ ID NO: 1242709
uuggaaacucuggguaacu

SEQ ID NO: 1367129 - RNA, 19 nt, Artificial Sequence
  Description of Artificial Sequence: Synthetic oligonucleotide
  Antisense strand to SEQ ID NO: 1367128
aguuacccagaguuuccaa

SEQ ID NO: 1367130 - RNA, 19 nt, Artificial Sequence
  Description of Artificial Sequence: Synthetic oligonucleotide
  Sense strand starting at position 1007 of SEQ ID NO: 1242709
uggaaacucuggguaacuu

SEQ ID NO: 1367131 - RNA, 19 nt, Artificial Sequence
  Description of Artificial Sequence: Synthetic oligonucleotide
  Antisense strand to SEQ ID NO: 1367130
aaguuacccagaguuucca

SEQ ID NO: 1367132 - RNA, 19 nt, Artificial Sequence
  Description of Artificial Sequence: Synthetic oligonucleotide
  Sense strand starting at position 1453 of SEQ ID NO: 1242709
gguaaauccucuccaguaa

SEQ ID NO: 1367133 - RNA, 19 nt, Artificial Sequence
  Description of Artificial Sequence: Synthetic oligonucleotide
  Antisense strand to SEQ ID NO: 1367132
uuacuggagaggauuuacc

SEQ ID NO: 1367134 - RNA, 19 nt, Artificial Sequence
  Description of Artificial Sequence: Synthetic oligonucleotide
  Sense strand starting at position 1454 of SEQ ID NO: 1242709
guaaauccucuccaguaag

SEQ ID NO: 1367135 - RNA, 19 nt, Artificial Sequence
  Description of Artificial Sequence: Synthetic oligonucleotide
  Antisense strand to SEQ ID NO: 1367134
cuuacuggagaggauuuac

SEQ ID NO: 1367136 - RNA, 19 nt, Artificial Sequence
  Description of Artificial Sequence: Synthetic oligonucleotide
  Sense strand starting at position 2049 of SEQ ID NO: 1242709
cugggaugguuuccuguua

SEQ ID NO: 1367137 - RNA, 19 nt, Artificial Sequence
  Description of Artificial Sequence: Synthetic oligonucleotide
  Antisense strand to SEQ ID NO: 1367136
uaacaggaaaccaucccag

SEQ ID NO: 1367138 - RNA, 19 nt, Artificial Sequence
  Description of Artificial Sequence: Synthetic oligonucleotide
  Sense strand starting at position 2050 of SEQ ID NO: 1242709
ugggaugguuuccuguuau

SEQ ID NO: 1367139 - RNA, 19 nt, Artificial Sequence
  Description of Artificial Sequence: Synthetic oligonucleotide
  Antisense strand to SEQ ID NO: 1367138
auaacaggaaaccauccca

SEQ ID NO: 1367140 - RNA, 19 nt, Artificial Sequence
  Description of Artificial Sequence: Synthetic oligonucleotide
  Sense strand starting at position 2442 of SEQ ID NO: 1242709
uggugaucccaugaugucu

SEQ ID NO: 1367141 - RNA, 19 nt, Artificial Sequence
  Description of Artificial Sequence: Synthetic oligonucleotide
  Antisense strand to SEQ ID NO: 1367140
agacaucaugggaucacca

SEQ ID NO: 1367142 - RNA, 19 nt, Artificial Sequence
  Description of Artificial Sequence: Synthetic oligonucleotide
  Sense strand starting at position 2450 of SEQ ID NO: 1242709
ccaugaugucuuuguggga

SEQ ID NO: 1367143 - RNA, 19 nt, Artificial Sequence
  Description of Artificial Sequence: Synthetic oligonucleotide
  Antisense strand to SEQ ID NO: 1367142
ucccacaaagacaucaugg

SEQ ID NO: 1367144 - RNA, 19 nt, Artificial Sequence
  Description of Artificial Sequence: Synthetic oligonucleotide
  Sense strand starting at position 2451 of SEQ ID NO: 1242709
caugaugucuuugugggaa

SEQ ID NO: 1367145 - RNA, 19 nt, Artificial Sequence
  Description of Artificial Sequence: Synthetic oligonucleotide
  Antisense strand to SEQ ID NO: 1367144
uucccacaaagacaucaug

SEQ ID NO: 1367146 - RNA, 19 nt, Artificial Sequence
  Description of Artificial Sequence: Synthetic oligonucleotide
  Sense strand starting at position 2620 of SEQ ID NO: 1242709
uagggauauuggguggagu

SEQ ID NO: 1367147 - RNA, 19 nt, Artificial Sequence
  Description of Artificial Sequence: Synthetic oligonucleotide
  Antisense strand to SEQ ID NO: 1367146
acuccacccaauaucccua

SEQ ID NO: 1367148 - RNA, 19 nt, Artificial Sequence
  Description of Artificial Sequence: Synthetic oligonucleotide
  Sense strand starting at position 2622 of SEQ ID NO: 1242709
gggauauuggguggaguca

SEQ ID NO: 1367149 - RNA, 19 nt, Artificial Sequence
  Description of Artificial Sequence: Synthetic oligonucleotide
  Antisense strand to SEQ ID NO: 1367148
ugacuccacccaauauccc

SEQ ID NO: 1367150 - RNA, 19 nt, Artificial Sequence
  Description of Artificial Sequence: Synthetic oligonucleotide
  Sense strand starting at position 2931 of SEQ ID NO: 1242709
uggaaucucccagggcaga

SEQ ID NO: 1367151 - RNA, 19 nt, Artificial Sequence
  Description of Artificial Sequence: Synthetic oligonucleotide
  Antisense strand to SEQ ID NO: 1367150
ucugcccugggagauucca

SEQ ID NO: 1367152 - RNA, 19 nt, Artificial Sequence
  Description of Artificial Sequence: Synthetic oligonucleotide
  Sense strand starting at position 2932 of SEQ ID NO: 1242709
ggaaucucccagggcagau

SEQ ID NO: 1367153 - RNA, 19 nt, Artificial Sequence
  Description of Artificial Sequence: Synthetic oligonucleotide
  Antisense strand to SEQ ID NO: 1367152
aucugcccugggagauucc

SEQ ID NO: 1367154 - RNA, 19 nt, Artificial Sequence
  Description of Artificial Sequence: Synthetic oligonucleotide
  Sense strand starting at position 2952 of SEQ ID NO: 1242709
cugggaaucuguccuuuga

SEQ ID NO: 1367155 - RNA, 19 nt, Artificial Sequence
  Description of Artificial Sequence: Synthetic oligonucleotide
  Antisense strand to SEQ ID NO: 1367154
ucaaaggacagauucccag

SEQ ID NO: 1367156 - RNA, 19 nt, Artificial Sequence
  Description of Artificial Sequence: Synthetic oligonucleotide
  Sense strand starting at position 2954 of SEQ ID NO: 1242709
gggaaucuguccuuugaag

SEQ ID NO: 1367157 - RNA, 19 nt, Artificial Sequence
  Description of Artificial Sequence: Synthetic oligonucleotide
  Antisense strand to SEQ ID NO: 1367156
cuucaaaggacagauuccc

SEQ ID NO: 1367158 - RNA, 19 nt, Artificial Sequence
  Description of Artificial Sequence: Synthetic oligonucleotide
  Sense strand starting at position 2956 of SEQ ID NO: 1242709
gaaucuguccuuugaagag

SEQ ID NO: 1367159 - RNA, 19 nt, Artificial Sequence
  Description of Artificial Sequence: Synthetic oligonucleotide
  Antisense strand to SEQ ID NO: 1367158
cucuucaaaggacagauuc

SEQ ID NO: 1367160 - RNA, 19 nt, Artificial Sequence
  Description of Artificial Sequence: Synthetic oligonucleotide
  Sense strand starting at position 2991 of SEQ ID NO: 1242709
augggugaaugguugggaa

SEQ ID NO: 1367161 - RNA, 19 nt, Artificial Sequence
  Description of Artificial Sequence: Synthetic oligonucleotide
  Antisense strand to SEQ ID NO: 1367160
uucccaaccauucacccau

SEQ ID NO: 1367162 - RNA, 19 nt, Artificial Sequence
  Description of Artificial Sequence: Synthetic oligonucleotide
  Sense strand starting at position 2993 of SEQ ID NO: 1242709
gggugaaugguugggaagu

SEQ ID NO: 1367163 - RNA, 19 nt, Artificial Sequence
  Description of Artificial Sequence: Synthetic oligonucleotide
  Antisense strand to SEQ ID NO: 1367162
acuucccaaccauucaccc

SEQ ID NO: 1367164 - RNA, 19 nt, Artificial Sequence
  Description of Artificial Sequence: Synthetic oligonucleotide
  Sense strand starting at position 3075 of SEQ ID NO: 1242709
cguuuaguaaaucagagca

SEQ ID NO: 1367165 - RNA, 19 nt, Artificial Sequence
  Description of Artificial Sequence: Synthetic oligonucleotide
  Antisense strand to SEQ ID NO: 1367164
ugcucugauuuacuaaacg

SEQ ID NO: 1367166 - RNA, 19 nt, Artificial Sequence
  Description of Artificial Sequence: Synthetic oligonucleotide
  Sense strand starting at position 3160 of SEQ ID NO: 1242709
gcagguugaguuugagaug

SEQ ID NO: 1367167 - RNA, 19 nt, Artificial Sequence
  Description of Artificial Sequence: Synthetic oligonucleotide
  Antisense strand to SEQ ID NO: 1367166
caucucaaacucaaccugc

SEQ ID NO: 1367168 - RNA, 19 nt, Artificial Sequence
  Description of Artificial Sequence: Synthetic oligonucleotide
  Sense strand starting at position 3172 of SEQ ID NO: 1242709
ugagaugcucguuagauac

SEQ ID NO: 1367169 - RNA, 19 nt, Artificial Sequence
  Description of Artificial Sequence: Synthetic oligonucleotide
  Antisense strand to SEQ ID NO: 1367168
guaucuaacgagcaucuca

SEQ ID NO: 1367170 - RNA, 19 nt, Artificial Sequence
  Description of Artificial Sequence: Synthetic oligonucleotide
  Sense strand starting at position 3319 of SEQ ID NO: 1242709
cuuggacccucugacauuu

SEQ ID NO: 1367171 - RNA, 19 nt, Artificial Sequence
  Description of Artificial Sequence: Synthetic oligonucleotide
  Antisense strand to SEQ ID NO: 1367170
aaaugucagaggguccaag

SEQ ID NO: 1367172 - RNA, 19 nt, Artificial Sequence
  Description of Artificial Sequence: Synthetic oligonucleotide
  Sense strand starting at position 3407 of SEQ ID NO: 1242709
ggaguagucagugggucag

SEQ ID NO: 1367173 - RNA, 19 nt, Artificial Sequence
  Description of Artificial Sequence: Synthetic oligonucleotide
  Antisense strand to SEQ ID NO: 1367172
cugacccacugacuacucc

SEQ ID NO: 1367174 - RNA, 19 nt, Artificial Sequence
  Description of Artificial Sequence: Synthetic oligonucleotide
  Sense strand starting at position 3452 of SEQ ID NO: 1242709
aacuuuggauuuggaagau

SEQ ID NO: 1367175 - RNA, 19 nt, Artificial Sequence
  Description of Artificial Sequence: Synthetic oligonucleotide
  Antisense strand to SEQ ID NO: 1367174
aucuuccaaauccaaaguu

SEQ ID NO: 1367176 - RNA, 19 nt, Artificial Sequence
  Description of Artificial Sequence: Synthetic oligonucleotide
  Sense strand starting at position 3470 of SEQ ID NO: 1242709
ugaggucaucaaugacugu

SEQ ID NO: 1367177 - RNA, 19 nt, Artificial Sequence
  Description of Artificial Sequence: Synthetic oligonucleotide
  Antisense strand to SEQ ID NO: 1367176
acagucauugaugaccuca

SEQ ID NO: 1367178 - RNA, 19 nt, Artificial Sequence
  Description of Artificial Sequence: Synthetic oligonucleotide
  Sense strand starting at position 3487 of SEQ ID NO: 1242709
gugaccagaacagguuaaa

SEQ ID NO: 1367179 - RNA, 19 nt, Artificial Sequence
  Description of Artificial Sequence: Synthetic oligonucleotide
  Antisense strand to SEQ ID NO: 1367178
uuuaaccuguucuggucac

SEQ ID NO: 1367180 - RNA, 19 nt, Artificial Sequence
  Description of Artificial Sequence: Synthetic oligonucleotide
  Sense strand starting at position 3773 of SEQ ID NO: 1242709
gcggaauucugagugggau

SEQ ID NO: 1367181 - RNA, 19 nt, Artificial Sequence
  Description of Artificial Sequence: Synthetic oligonucleotide
  Antisense strand to SEQ ID NO: 1367180
aucccacucagaauuccgc

SEQ ID NO: 1367182 - RNA, 19 nt, Artificial Sequence
  Description of Artificial Sequence: Synthetic oligonucleotide
  Sense strand starting at position 3774 of SEQ ID NO: 1242709
cggaauucugagugggauc

SEQ ID NO: 1367183 - RNA, 19 nt, Artificial Sequence
  Description of Artificial Sequence: Synthetic oligonucleotide
  Antisense strand to SEQ ID NO: 1367182
gaucccacucagaauuccg

SEQ ID NO: 1367184 - RNA, 19 nt, Artificial Sequence
  Description of Artificial Sequence: Synthetic oligonucleotide
  Sense strand starting at position 3776 of SEQ ID NO: 1242709
gaauucugagugggaucca

SEQ ID NO: 1367185 - RNA, 19 nt, Artificial Sequence
  Description of Artificial Sequence: Synthetic oligonucleotide
  Antisense strand to SEQ ID NO: 1367184
uggaucccacucagaauuc

SEQ ID NO: 1367186 - RNA, 19 nt, Artificial Sequence
  Description of Artificial Sequence: Synthetic oligonucleotide
  Sense strand starting at position 3808 of SEQ ID NO: 1242709
ccgauuguggaaugaacaa

SEQ ID NO: 1367187 - RNA, 19 nt, Artificial Sequence
  Description of Artificial Sequence: Synthetic oligonucleotide
  Antisense strand to SEQ ID NO: 1367186
uuguucauuccacaaucgg

SEQ ID NO: 1367188 - RNA, 19 nt, Artificial Sequence
  Description of Artificial Sequence: Synthetic oligonucleotide
  Sense strand starting at position 3842 of SEQ ID NO: 1242709
uuccuucuccaaugggauu

SEQ ID NO: 1367189 - RNA, 19 nt, Artificial Sequence
  Description of Artificial Sequence: Synthetic oligonucleotide
  Antisense strand to SEQ ID NO: 1367188
aaucccauuggagaaggaa

SEQ ID NO: 1367190 - RNA, 19 nt, Artificial Sequence
  Description of Artificial Sequence: Synthetic oligonucleotide
  Sense strand starting at position 3854 of SEQ ID NO: 1242709
ugggauuaacucugcuuuc

SEQ ID NO: 1367191 - RNA, 19 nt, Artificial Sequence
  Description of Artificial Sequence: Synthetic oligonucleotide
  Antisense strand to SEQ ID NO: 1367190
gaaagcagaguuaauccca

SEQ ID NO: 1367192 - RNA, 19 nt, Artificial Sequence
  Description of Artificial Sequence: Synthetic oligonucleotide
  Sense strand starting at position 3855 of SEQ ID NO: 1242709
gggauuaacucugcuuucu

SEQ ID NO: 1367193 - RNA, 19 nt, Artificial Sequence
  Description of Artificial Sequence: Synthetic oligonucleotide
  Antisense strand to SEQ ID NO: 1367192
agaaagcagaguuaauccc

SEQ ID NO: 1367194 - RNA, 19 nt, Artificial Sequence
  Description of Artificial Sequence: Synthetic oligonucleotide
  Sense strand starting at position 11 of SEQ ID NO: 1242710
uaauauugugcguuugcaa

SEQ ID NO: 1367195 - RNA, 19 nt, Artificial Sequence
  Description of Artificial Sequence: Synthetic oligonucleotide
  Antisense strand to SEQ ID NO: 1367194
uugcaaacgcacaauauua

SEQ ID NO: 1367196 - RNA, 19 nt, Artificial Sequence
  Description of Artificial Sequence: Synthetic oligonucleotide
  Sense strand starting at position 12 of SEQ ID NO: 1242710
aauauugugcguuugcaac

SEQ ID NO: 1367197 - RNA, 19 nt, Artificial Sequence
  Description of Artificial Sequence: Synthetic oligonucleotide
  Antisense strand to SEQ ID NO: 1367196
guugcaaacgcacaauauu

SEQ ID NO: 1367198 - RNA, 19 nt, Artificial Sequence
  Description of Artificial Sequence: Synthetic oligonucleotide
  Sense strand starting at position 37 of SEQ ID NO: 1242710
caauuaaugugguuugauu

SEQ ID NO: 1367199 - RNA, 19 nt, Artificial Sequence
  Description of Artificial Sequence: Synthetic oligonucleotide
  Antisense strand to SEQ ID NO: 1367198
aaucaaaccacauuaauug

SEQ ID NO: 1367200 - RNA, 19 nt, Artificial Sequence
  Description of Artificial Sequence: Synthetic oligonucleotide
  Sense strand starting at position 209 of SEQ ID NO: 1242710
ugguguuugggaggaauaa

SEQ ID NO: 1367201 - RNA, 19 nt, Artificial Sequence
  Description of Artificial Sequence: Synthetic oligonucleotide
  Antisense strand to SEQ ID NO: 1367200
uuauuccucccaaacacca

SEQ ID NO: 1367202 - RNA, 19 nt, Artificial Sequence
  Description of Artificial Sequence: Synthetic oligonucleotide
  Sense strand starting at position 233 of SEQ ID NO: 1242710
ggaaauuguggauaccugu

SEQ ID NO: 1367203 - RNA, 19 nt, Artificial Sequence
  Description of Artificial Sequence: Synthetic oligonucleotide
  Antisense strand to SEQ ID NO: 1367202
acagguauccacaauuucc

SEQ ID NO: 1367204 - RNA, 19 nt, Artificial Sequence
  Description of Artificial Sequence: Synthetic oligonucleotide
  Sense strand starting at position 414 of SEQ ID NO: 1242710
aagguucccggaugagaag

SEQ ID NO: 1367205 - RNA, 19 nt, Artificial Sequence
  Description of Artificial Sequence: Synthetic oligonucleotide
  Antisense strand to SEQ ID NO: 1367204
cuucucauccgggaaccuu

SEQ ID NO: 1367206 - RNA, 19 nt, Artificial Sequence
  Description of Artificial Sequence: Synthetic oligonucleotide
  Sense strand starting at position 463 of SEQ ID NO: 1242710
cucagcugucccuaggaga

SEQ ID NO: 1367207 - RNA, 19 nt, Artificial Sequence
  Description of Artificial Sequence: Synthetic oligonucleotide
  Antisense strand to SEQ ID NO: 1367206
ucuccuagggacagcugag

SEQ ID NO: 1367208 - RNA, 19 nt, Artificial Sequence
  Description of Artificial Sequence: Synthetic oligonucleotide
  Sense strand starting at position 1065 of SEQ ID NO: 1242710
cacggauaucgcgaaagac

SEQ ID NO: 1367209 - RNA, 19 nt, Artificial Sequence
  Description of Artificial Sequence: Synthetic oligonucleotide
  Antisense strand to SEQ ID NO: 1367208
gucuuucgcgauauccgug

SEQ ID NO: 1367210 - RNA, 19 nt, Artificial Sequence
  Description of Artificial Sequence: Synthetic oligonucleotide
  Sense strand starting at position 1589 of SEQ ID NO: 1242710
gccaaauguaacugugaag

SEQ ID NO: 1367211 - RNA, 19 nt, Artificial Sequence
  Description of Artificial Sequence: Synthetic oligonucleotide
  Antisense strand to SEQ ID NO: 1367210
cuucacaguuacauuuggc

SEQ ID NO: 1367212 - RNA, 19 nt, Artificial Sequence
  Description of Artificial Sequence: Synthetic oligonucleotide
  Sense strand starting at position 1671 of SEQ ID NO: 1242710
ggucuaccacuuggaaauu

SEQ ID NO: 1367213 - RNA, 19 nt, Artificial Sequence
  Description of Artificial Sequence: Synthetic oligonucleotide
  Antisense strand to SEQ ID NO: 1367212
aauuuccaagugguagacc

SEQ ID NO: 1367214 - RNA, 19 nt, Artificial Sequence
  Description of Artificial Sequence: Synthetic oligonucleotide
  Sense strand starting at position 1891 of SEQ ID NO: 1242710
gaccgagcuccuggauaag

SEQ ID NO: 1367215 - RNA, 19 nt, Artificial Sequence
  Description of Artificial Sequence: Synthetic oligonucleotide
  Antisense strand to SEQ ID NO: 1367214
cuuauccaggagcucgguc

SEQ ID NO: 1367216 - RNA, 19 nt, Artificial Sequence
  Description of Artificial Sequence: Synthetic oligonucleotide
  Sense strand starting at position 1951 of SEQ ID NO: 1242710
gagcuuucucucuagaggu

SEQ ID NO: 1367217 - RNA, 19 nt, Artificial Sequence
  Description of Artificial Sequence: Synthetic oligonucleotide
  Antisense strand to SEQ ID NO: 1367216
accucuagagagaaagcuc

SEQ ID NO: 1367218 - RNA, 19 nt, Artificial Sequence
  Description of Artificial Sequence: Synthetic oligonucleotide
  Sense strand starting at position 2113 of SEQ ID NO: 1242710
uacagaauagggugauugu

SEQ ID NO: 1367219 - RNA, 19 nt, Artificial Sequence
  Description of Artificial Sequence: Synthetic oligonucleotide
  Antisense strand to SEQ ID NO: 1367218
acaaucacccuauucugua

SEQ ID NO: 1367220 - RNA, 19 nt, Artificial Sequence
  Description of Artificial Sequence: Synthetic oligonucleotide
  Sense strand starting at position 2301 of SEQ ID NO: 1242710
agcagaacuugcuugggaa

SEQ ID NO: 1367221 - RNA, 19 nt, Artificial Sequence
  Description of Artificial Sequence: Synthetic oligonucleotide
  Antisense strand to SEQ ID NO: 1367220
uucccaagcaaguucugcu

SEQ ID NO: 1367222 - RNA, 19 nt, Artificial Sequence
  Description of Artificial Sequence: Synthetic oligonucleotide
  Sense strand starting at position 2302 of SEQ ID NO: 1242710
gcagaacuugcuugggaaa

SEQ ID NO: 1367223 - RNA, 19 nt, Artificial Sequence
  Description of Artificial Sequence: Synthetic oligonucleotide
  Antisense strand to SEQ ID NO: 1367222
uuucccaagcaaguucugc

SEQ ID NO: 1367224 - RNA, 19 nt, Artificial Sequence
  Description of Artificial Sequence: Synthetic oligonucleotide
  Sense strand starting at position 2303 of SEQ ID NO: 1242710
cagaacuugcuugggaaau

SEQ ID NO: 1367225 - RNA, 19 nt, Artificial Sequence
  Description of Artificial Sequence: Synthetic oligonucleotide
  Antisense strand to SEQ ID NO: 1367224
auuucccaagcaaguucug

SEQ ID NO: 1367226 - RNA, 19 nt, Artificial Sequence
  Description of Artificial Sequence: Synthetic oligonucleotide
  Sense strand starting at position 2454 of SEQ ID NO: 1242710
cgcucagaucuugagaaau

SEQ ID NO: 1367227 - RNA, 19 nt, Artificial Sequence
  Description of Artificial Sequence: Synthetic oligonucleotide
  Antisense strand to SEQ ID NO: 1367226
auuucucaagaucugagcg

SEQ ID NO: 1367228 - RNA, 19 nt, Artificial Sequence
  Description of Artificial Sequence: Synthetic oligonucleotide
  Sense strand starting at position 2787 of SEQ ID NO: 1242710
ucaaauuaaugagaaagag

SEQ ID NO: 1367229 - RNA, 19 nt, Artificial Sequence
  Description of Artificial Sequence: Synthetic oligonucleotide
  Antisense strand to SEQ ID NO: 1367228
cucuuucucauuaauuuga

SEQ ID NO: 1367230 - RNA, 19 nt, Artificial Sequence
  Description of Artificial Sequence: Synthetic oligonucleotide
  Sense strand starting at position 2826 of SEQ ID NO: 1242710
gcacaacaugcuuaugaua

SEQ ID NO: 1367231 - RNA, 19 nt, Artificial Sequence
  Description of Artificial Sequence: Synthetic oligonucleotide
  Antisense strand to SEQ ID NO: 1367230
uaucauaagcauguugugc

SEQ ID NO: 1367232 - RNA, 19 nt, Artificial Sequence
  Description of Artificial Sequence: Synthetic oligonucleotide
  Sense strand starting at position 2880 of SEQ ID NO: 1242710
cugacaacccauugugaaa

SEQ ID NO: 1367233 - RNA, 19 nt, Artificial Sequence
  Description of Artificial Sequence: Synthetic oligonucleotide
  Antisense strand to SEQ ID NO: 1367232
uuucacaauggguugucag

SEQ ID NO: 1367234 - RNA, 19 nt, Artificial Sequence
  Description of Artificial Sequence: Synthetic oligonucleotide
  Sense strand starting at position 2950 of SEQ ID NO: 1242710
agcugucauaggcaagaaa

SEQ ID NO: 1367235 - RNA, 19 nt, Artificial Sequence
  Description of Artificial Sequence: Synthetic oligonucleotide
  Antisense strand to SEQ ID NO: 1367234
uuucuugccuaugacagcu

SEQ ID NO: 1367236 - RNA, 19 nt, Artificial Sequence
  Description of Artificial Sequence: Synthetic oligonucleotide
  Sense strand starting at position 2953 of SEQ ID NO: 1242710
ugucauaggcaagaaacuu

SEQ ID NO: 1367237 - RNA, 19 nt, Artificial Sequence
  Description of Artificial Sequence: Synthetic oligonucleotide
  Antisense strand to SEQ ID NO: 1367236
aaguuucuugccuaugaca

SEQ ID NO: 1367238 - RNA, 19 nt, Artificial Sequence
  Description of Artificial Sequence: Synthetic oligonucleotide
  Sense strand starting at position 2961 of SEQ ID NO: 1242710
gcaagaaacuuaguggauu

SEQ ID NO: 1367239 - RNA, 19 nt, Artificial Sequence
  Description of Artificial Sequence: Synthetic oligonucleotide
  Antisense strand to SEQ ID NO: 1367238
aauccacuaaguuucuugc

SEQ ID NO: 1367240 - RNA, 19 nt, Artificial Sequence
  Description of Artificial Sequence: Synthetic oligonucleotide
  Sense strand starting at position 2972 of SEQ ID NO: 1242710
aguggauuauuucagagag

SEQ ID NO: 1367241 - RNA, 19 nt, Artificial Sequence
  Description of Artificial Sequence: Synthetic oligonucleotide
  Antisense strand to SEQ ID NO: 1367240
cucucugaaauaauccacu

SEQ ID NO: 1367242 - RNA, 19 nt, Artificial Sequence
  Description of Artificial Sequence: Synthetic oligonucleotide
  Sense strand starting at position 3028 of SEQ ID NO: 1242710
ccaggcagucacuaaguaa

SEQ ID NO: 1367243 - RNA, 19 nt, Artificial Sequence
  Description of Artificial Sequence: Synthetic oligonucleotide
  Antisense strand to SEQ ID NO: 1367242
uuacuuagugacugccugg

SEQ ID NO: 1367244 - RNA, 19 nt, Artificial Sequence
  Description of Artificial Sequence: Synthetic oligonucleotide
  Sense strand starting at position 3082 of SEQ ID NO: 1242710
ggguauuggaauuggcuaa

SEQ ID NO: 1367245 - RNA, 19 nt, Artificial Sequence
  Description of Artificial Sequence: Synthetic oligonucleotide
  Antisense strand to SEQ ID NO: 1367244
uuagccaauuccaauaccc

SEQ ID NO: 1367246 - RNA, 19 nt, Artificial Sequence
  Description of Artificial Sequence: Synthetic oligonucleotide
  Sense strand starting at position 3083 of SEQ ID NO: 1242710
gguauuggaauuggcuaau

SEQ ID NO: 1367247 - RNA, 19 nt, Artificial Sequence
  Description of Artificial Sequence: Synthetic oligonucleotide
  Antisense strand to SEQ ID NO: 1367246
auuagccaauuccaauacc

SEQ ID NO: 1367248 - RNA, 19 nt, Artificial Sequence
  Description of Artificial Sequence: Synthetic oligonucleotide
  Sense strand starting at position 3086 of SEQ ID NO: 1242710
auuggaauuggcuaauucu

SEQ ID NO: 1367249 - RNA, 19 nt, Artificial Sequence
  Description of Artificial Sequence: Synthetic oligonucleotide
  Antisense strand to SEQ ID NO: 1367248
agaauuagccaauuccaau

SEQ ID NO: 1367250 - RNA, 19 nt, Artificial Sequence
  Description of Artificial Sequence: Synthetic oligonucleotide
  Sense strand starting at position 3123 of SEQ ID NO: 1242710
gcagucaaggcucaaucaa

SEQ ID NO: 1367251 - RNA, 19 nt, Artificial Sequence
  Description of Artificial Sequence: Synthetic oligonucleotide
  Antisense strand to SEQ ID NO: 1367250
uugauugagccuugacugc

SEQ ID NO: 1367252 - RNA, 19 nt, Artificial Sequence
  Description of Artificial Sequence: Synthetic oligonucleotide
  Sense strand starting at position 3359 of SEQ ID NO: 1242710
aaagccagauuguuagaca

SEQ ID NO: 1367253 - RNA, 19 nt, Artificial Sequence
  Description of Artificial Sequence: Synthetic oligonucleotide
  Antisense strand to SEQ ID NO: 1367252
ugucuaacaaucuggcuuu

SEQ ID NO: 1367254 - RNA, 19 nt, Artificial Sequence
  Description of Artificial Sequence: Synthetic oligonucleotide
  Sense strand starting at position 3488 of SEQ ID NO: 1242710
uaagaagaguuugcuuuga

SEQ ID NO: 1367255 - RNA, 19 nt, Artificial Sequence
  Description of Artificial Sequence: Synthetic oligonucleotide
  Antisense strand to SEQ ID NO: 1367254
ucaaagcaaacucuucuua

SEQ ID NO: 1367256 - RNA, 19 nt, Artificial Sequence
  Description of Artificial Sequence: Synthetic oligonucleotide
  Sense strand starting at position 3490 of SEQ ID NO: 1242710
agaagaguuugcuuugacu

SEQ ID NO: 1367257 - RNA, 19 nt, Artificial Sequence
  Description of Artificial Sequence: Synthetic oligonucleotide
  Antisense strand to SEQ ID NO: 1367256
agucaaagcaaacucuucu

SEQ ID NO: 1367258 - RNA, 19 nt, Artificial Sequence
  Description of Artificial Sequence: Synthetic oligonucleotide
  Sense strand starting at position 3523 of SEQ ID NO: 1242710
uuacucuuacagcaguuau

SEQ ID NO: 1367259 - RNA, 19 nt, Artificial Sequence
  Description of Artificial Sequence: Synthetic oligonucleotide
  Antisense strand to SEQ ID NO: 1367258
auaacugcuguaagaguaa

SEQ ID NO: 1367260 - RNA, 19 nt, Artificial Sequence
  Description of Artificial Sequence: Synthetic oligonucleotide
  Sense strand starting at position 3581 of SEQ ID NO: 1242710
ggguaaccugucuauaccu

SEQ ID NO: 1367261 - RNA, 19 nt, Artificial Sequence
  Description of Artificial Sequence: Synthetic oligonucleotide
  Antisense strand to SEQ ID NO: 1367260
agguauagacagguuaccc

SEQ ID NO: 1367262 - RNA, 19 nt, Artificial Sequence
  Description of Artificial Sequence: Synthetic oligonucleotide
  Sense strand starting at position 3625 of SEQ ID NO: 1242710
auaggaauuuccugacuaa

SEQ ID NO: 1367263 - RNA, 19 nt, Artificial Sequence
  Description of Artificial Sequence: Synthetic oligonucleotide
  Antisense strand to SEQ ID NO: 1367262
uuagucaggaaauuccuau

SEQ ID NO: 1367264 - RNA, 19 nt, Artificial Sequence
  Description of Artificial Sequence: Synthetic oligonucleotide
  Sense strand starting at position 3654 of SEQ ID NO: 1242710
agguuuggaugauuaagca

SEQ ID NO: 1367265 - RNA, 19 nt, Artificial Sequence
  Description of Artificial Sequence: Synthetic oligonucleotide
  Antisense strand to SEQ ID NO: 1367264
ugcuuaaucauccaaaccu

SEQ ID NO: 1367266 - RNA, 19 nt, Artificial Sequence
  Description of Artificial Sequence: Synthetic oligonucleotide
  Sense strand starting at position 3662 of SEQ ID NO: 1242710
augauuaagcagugugaua

SEQ ID NO: 1367267 - RNA, 19 nt, Artificial Sequence
  Description of Artificial Sequence: Synthetic oligonucleotide
  Antisense strand to SEQ ID NO: 1367266
uaucacacugcuuaaucau

SEQ ID NO: 1367268 - RNA, 19 nt, Artificial Sequence
  Description of Artificial Sequence: Synthetic oligonucleotide
  Sense strand starting at position 3664 of SEQ ID NO: 1242710
gauuaagcagugugauaga

SEQ ID NO: 1367269 - RNA, 19 nt, Artificial Sequence
  Description of Artificial Sequence: Synthetic oligonucleotide
  Antisense strand to SEQ ID NO: 1367268
ucuaucacacugcuuaauc

SEQ ID NO: 1367270 - RNA, 19 nt, Artificial Sequence
  Description of Artificial Sequence: Synthetic oligonucleotide
  Sense strand starting at position 3669 of SEQ ID NO: 1242710
agcagugugauagaggauu

SEQ ID NO: 1367271 - RNA, 19 nt, Artificial Sequence
  Description of Artificial Sequence: Synthetic oligonucleotide
  Antisense strand to SEQ ID NO: 1367270
aauccucuaucacacugcu

SEQ ID NO: 1367272 - RNA, 19 nt, Artificial Sequence
  Description of Artificial Sequence: Synthetic oligonucleotide
  Sense strand starting at position 3980 of SEQ ID NO: 1242710
gcaggaguauaauuggaga

SEQ ID NO: 1367273 - RNA, 19 nt, Artificial Sequence
  Description of Artificial Sequence: Synthetic oligonucleotide
  Antisense strand to SEQ ID NO: 1367272
ucuccaauuauacuccugc

SEQ ID NO: 1367274 - RNA, 19 nt, Artificial Sequence
  Description of Artificial Sequence: Synthetic oligonucleotide
  Sense strand starting at position 14 of SEQ ID NO: 1242711
aauuauugccaacgugauc

SEQ ID NO: 1367275 - RNA, 19 nt, Artificial Sequence
  Description of Artificial Sequence: Synthetic oligonucleotide
  Antisense strand to SEQ ID NO: 1367274
gaucacguuggcaauaauu

SEQ ID NO: 1367276 - RNA, 19 nt, Artificial Sequence
  Description of Artificial Sequence: Synthetic oligonucleotide
  Sense strand starting at position 63 of SEQ ID NO: 1242711
uccguuagcuccuucucaa

SEQ ID NO: 1367277 - RNA, 19 nt, Artificial Sequence
  Description of Artificial Sequence: Synthetic oligonucleotide
  Antisense strand to SEQ ID NO: 1367276
uugagaaggagcuaacgga

SEQ ID NO: 1367278 - RNA, 19 nt, Artificial Sequence
  Description of Artificial Sequence: Synthetic oligonucleotide
  Sense strand starting at position 120 of SEQ ID NO: 1242711
agucaauguucugcucuua

SEQ ID NO: 1367279 - RNA, 19 nt, Artificial Sequence
  Description of Artificial Sequence: Synthetic oligonucleotide
  Antisense strand to SEQ ID NO: 1367278
uaagagcagaacauugacu

SEQ ID NO: 1367280 - RNA, 19 nt, Artificial Sequence
  Description of Artificial Sequence: Synthetic oligonucleotide
  Sense strand starting at position 131 of SEQ ID NO: 1242711
ugcucuuauggugauucua

SEQ ID NO: 1367281 - RNA, 19 nt, Artificial Sequence
  Description of Artificial Sequence: Synthetic oligonucleotide
  Antisense strand to SEQ ID NO: 1367280
uagaaucaccauaagagca

SEQ ID NO: 1367282 - RNA, 19 nt, Artificial Sequence
  Description of Artificial Sequence: Synthetic oligonucleotide
  Sense strand starting at position 133 of SEQ ID NO: 1242711
cucuuauggugauucuaga

SEQ ID NO: 1367283 - RNA, 19 nt, Artificial Sequence
  Description of Artificial Sequence: Synthetic oligonucleotide
  Antisense strand to SEQ ID NO: 1367282
ucuagaaucaccauaagag

SEQ ID NO: 1367284 - RNA, 19 nt, Artificial Sequence
  Description of Artificial Sequence: Synthetic oligonucleotide
  Sense strand starting at position 165 of SEQ ID NO: 1242711
gcucuuaaauccuuguaag

SEQ ID NO: 1367285 - RNA, 19 nt, Artificial Sequence
  Description of Artificial Sequence: Synthetic oligonucleotide
  Antisense strand to SEQ ID NO: 1367284
cuuacaaggauuuaagagc

SEQ ID NO: 1367286 - RNA, 19 nt, Artificial Sequence
  Description of Artificial Sequence: Synthetic oligonucleotide
  Sense strand starting at position 583 of SEQ ID NO: 1242711
cagggcuuccauuaaggua

SEQ ID NO: 1367287 - RNA, 19 nt, Artificial Sequence
  Description of Artificial Sequence: Synthetic oligonucleotide
  Antisense strand to SEQ ID NO: 1367286
uaccuuaauggaagcccug

SEQ ID NO: 1367288 - RNA, 19 nt, Artificial Sequence
  Description of Artificial Sequence: Synthetic oligonucleotide
  Sense strand starting at position 671 of SEQ ID NO: 1242711
caugcuuauuugggaggga

SEQ ID NO: 1367289 - RNA, 19 nt, Artificial Sequence
  Description of Artificial Sequence: Synthetic oligonucleotide
  Antisense strand to SEQ ID NO: 1367288
ucccucccaaauaagcaug

SEQ ID NO: 1367290 - RNA, 19 nt, Artificial Sequence
  Description of Artificial Sequence: Synthetic oligonucleotide
  Sense strand starting at position 672 of SEQ ID NO: 1242711
augcuuauuugggagggaa

SEQ ID NO: 1367291 - RNA, 19 nt, Artificial Sequence
  Description of Artificial Sequence: Synthetic oligonucleotide
  Antisense strand to SEQ ID NO: 1367290
uucccucccaaauaagcau

SEQ ID NO: 1367292 - RNA, 19 nt, Artificial Sequence
  Description of Artificial Sequence: Synthetic oligonucleotide
  Sense strand starting at position 733 of SEQ ID NO: 1242711
gggacugcugguuggacaa

SEQ ID NO: 1367293 - RNA, 19 nt, Artificial Sequence
  Description of Artificial Sequence: Synthetic oligonucleotide
  Antisense strand to SEQ ID NO: 1367292
uuguccaaccagcaguccc

SEQ ID NO: 1367294 - RNA, 19 nt, Artificial Sequence
  Description of Artificial Sequence: Synthetic oligonucleotide
  Sense strand starting at position 746 of SEQ ID NO: 1242711
ggacaaauaugugaugaaa

SEQ ID NO: 1367295 - RNA, 19 nt, Artificial Sequence
  Description of Artificial Sequence: Synthetic oligonucleotide
  Antisense strand to SEQ ID NO: 1367294
uuucaucacauauuugucc

SEQ ID NO: 1367296 - RNA, 19 nt, Artificial Sequence
  Description of Artificial Sequence: Synthetic oligonucleotide
  Sense strand starting at position 774 of SEQ ID NO: 1242711
guguuaacucuacauucua

SEQ ID NO: 1367297 - RNA, 19 nt, Artificial Sequence
  Description of Artificial Sequence: Synthetic oligonucleotide
  Antisense strand to SEQ ID NO: 1367296
uagaauguagaguuaacac

SEQ ID NO: 1367298 - RNA, 19 nt, Artificial Sequence
  Description of Artificial Sequence: Synthetic oligonucleotide
  Sense strand starting at position 890 of SEQ ID NO: 1242711
uggcaagugacugggcaua

SEQ ID NO: 1367299 - RNA, 19 nt, Artificial Sequence
  Description of Artificial Sequence: Synthetic oligonucleotide
  Antisense strand to SEQ ID NO: 1367298
uaugcccagucacuugcca

SEQ ID NO: 1367300 - RNA, 19 nt, Artificial Sequence
  Description of Artificial Sequence: Synthetic oligonucleotide
  Sense strand starting at position 903 of SEQ ID NO: 1242711
ggcauaaccuuuccgauua

SEQ ID NO: 1367301 - RNA, 19 nt, Artificial Sequence
  Description of Artificial Sequence: Synthetic oligonucleotide
  Antisense strand to SEQ ID NO: 1367300
uaaucggaaagguuaugcc

SEQ ID NO: 1367302 - RNA, 19 nt, Artificial Sequence
  Description of Artificial Sequence: Synthetic oligonucleotide
  Sense strand starting at position 2196 of SEQ ID NO: 1242711
cgcgaagccgucuccgaau

SEQ ID NO: 1367303 - RNA, 19 nt, Artificial Sequence
  Description of Artificial Sequence: Synthetic oligonucleotide
  Antisense strand to SEQ ID NO: 1367302
auucggagacggcuucgcg

SEQ ID NO: 1367304 - RNA, 19 nt, Artificial Sequence
  Description of Artificial Sequence: Synthetic oligonucleotide
  Sense strand starting at position 2292 of SEQ ID NO: 1242711
agucgcacuucugucacaa

SEQ ID NO: 1367305 - RNA, 19 nt, Artificial Sequence
  Description of Artificial Sequence: Synthetic oligonucleotide
  Antisense strand to SEQ ID NO: 1367304
uugugacagaagugcgacu

SEQ ID NO: 1367306 - RNA, 19 nt, Artificial Sequence
  Description of Artificial Sequence: Synthetic oligonucleotide
  Sense strand starting at position 2381 of SEQ ID NO: 1242711
acgugaugcgccgugauga

SEQ ID NO: 1367307 - RNA, 19 nt, Artificial Sequence
  Description of Artificial Sequence: Synthetic oligonucleotide
  Antisense strand to SEQ ID NO: 1367306
ucaucacggcgcaucacgu

SEQ ID NO: 1367308 - RNA, 19 nt, Artificial Sequence
  Description of Artificial Sequence: Synthetic oligonucleotide
  Sense strand starting at position 2416 of SEQ ID NO: 1242711
ggcgauuuggccuagagcu

SEQ ID NO: 1367309 - RNA, 19 nt, Artificial Sequence
  Description of Artificial Sequence: Synthetic oligonucleotide
  Antisense strand to SEQ ID NO: 1367308
agcucuaggccaaaucgcc

SEQ ID NO: 1367310 - RNA, 19 nt, Artificial Sequence
  Description of Artificial Sequence: Synthetic oligonucleotide
  Sense strand starting at position 2603 of SEQ ID NO: 1242711
gaguuugggaggugcauua

SEQ ID NO: 1367311 - RNA, 19 nt, Artificial Sequence
  Description of Artificial Sequence: Synthetic oligonucleotide
  Antisense strand to SEQ ID NO: 1367310
uaaugcaccucccaaacuc

SEQ ID NO: 1367312 - RNA, 19 nt, Artificial Sequence
  Description of Artificial Sequence: Synthetic oligonucleotide
  Sense strand starting at position 2788 of SEQ ID NO: 1242711
uugggagcaacuuaguuua

SEQ ID NO: 1367313 - RNA, 19 nt, Artificial Sequence
  Description of Artificial Sequence: Synthetic oligonucleotide
  Antisense strand to SEQ ID NO: 1367312
uaaacuaaguugcucccaa

SEQ ID NO: 1367314 - RNA, 19 nt, Artificial Sequence
  Description of Artificial Sequence: Synthetic oligonucleotide
  Sense strand starting at position 2790 of SEQ ID NO: 1242711
gggagcaacuuaguuuaua

SEQ ID NO: 1367315 - RNA, 19 nt, Artificial Sequence
  Description of Artificial Sequence: Synthetic oligonucleotide
  Antisense strand to SEQ ID NO: 1367314
uauaaacuaaguugcuccc

SEQ ID NO: 1367316 - RNA, 19 nt, Artificial Sequence
  Description of Artificial Sequence: Synthetic oligonucleotide
  Sense strand starting at position 2791 of SEQ ID NO: 1242711
ggagcaacuuaguuuauag

SEQ ID NO: 1367317 - RNA, 19 nt, Artificial Sequence
  Description of Artificial Sequence: Synthetic oligonucleotide
  Antisense strand to SEQ ID NO: 1367316
cuauaaacuaaguugcucc

SEQ ID NO: 1367318 - RNA, 19 nt, Artificial Sequence
  Description of Artificial Sequence: Synthetic oligonucleotide
  Sense strand starting at position 2872 of SEQ ID NO: 1242711
gaaccaggcuuccuuugua

SEQ ID NO: 1367319 - RNA, 19 nt, Artificial Sequence
  Description of Artificial Sequence: Synthetic oligonucleotide
  Antisense strand to SEQ ID NO: 1367318
uacaaaggaagccugguuc

SEQ ID NO: 1367320 - RNA, 19 nt, Artificial Sequence
  Description of Artificial Sequence: Synthetic oligonucleotide
  Sense strand starting at position 2875 of SEQ ID NO: 1242711
ccaggcuuccuuuguaaga

SEQ ID NO: 1367321 - RNA, 19 nt, Artificial Sequence
  Description of Artificial Sequence: Synthetic oligonucleotide
  Antisense strand to SEQ ID NO: 1367320
ucuuacaaaggaagccugg

SEQ ID NO: 1367322 - RNA, 19 nt, Artificial Sequence
  Description of Artificial Sequence: Synthetic oligonucleotide
  Sense strand starting at position 2897 of SEQ ID NO: 1242711
acacguuagcuacaagauu

SEQ ID NO: 1367323 - RNA, 19 nt, Artificial Sequence
  Description of Artificial Sequence: Synthetic oligonucleotide
  Antisense strand to SEQ ID NO: 1367322
aaucuuguagcuaacgugu

SEQ ID NO: 1367324 - RNA, 19 nt, Artificial Sequence
  Description of Artificial Sequence: Synthetic oligonucleotide
  Sense strand starting at position 3289 of SEQ ID NO: 1242711
aguugauccuagguauaau

SEQ ID NO: 1367325 - RNA, 19 nt, Artificial Sequence
  Description of Artificial Sequence: Synthetic oligonucleotide
  Antisense strand to SEQ ID NO: 1367324
auuauaccuaggaucaacu

SEQ ID NO: 1367326 - RNA, 19 nt, Artificial Sequence
  Description of Artificial Sequence: Synthetic oligonucleotide
  Sense strand starting at position 3300 of SEQ ID NO: 1242711
gguauaauaucacuauugu

SEQ ID NO: 1367327 - RNA, 19 nt, Artificial Sequence
  Description of Artificial Sequence: Synthetic oligonucleotide
  Antisense strand to SEQ ID NO: 1367326
acaauagugauauuauacc

SEQ ID NO: 1367328 - RNA, 19 nt, Artificial Sequence
  Description of Artificial Sequence: Synthetic oligonucleotide
  Sense strand starting at position 3391 of SEQ ID NO: 1242711
gcuguaaucugacucaacc

SEQ ID NO: 1367329 - RNA, 19 nt, Artificial Sequence
  Description of Artificial Sequence: Synthetic oligonucleotide
  Antisense strand to SEQ ID NO: 1367328
gguugagucagauuacagc

SEQ ID NO: 1367330 - RNA, 19 nt, Artificial Sequence
  Description of Artificial Sequence: Synthetic oligonucleotide
  Sense strand starting at position 3573 of SEQ ID NO: 1242711
cagcucuguguggauuaaa

SEQ ID NO: 1367331 - RNA, 19 nt, Artificial Sequence
  Description of Artificial Sequence: Synthetic oligonucleotide
  Antisense strand to SEQ ID NO: 1367330
uuuaauccacacagagcug

SEQ ID NO: 1367332 - RNA, 19 nt, Artificial Sequence
  Description of Artificial Sequence: Synthetic oligonucleotide
  Sense strand starting at position 3666 of SEQ ID NO: 1242711
guggcuacuugcucaggua

SEQ ID NO: 1367333 - RNA, 19 nt, Artificial Sequence
  Description of Artificial Sequence: Synthetic oligonucleotide
  Antisense strand to SEQ ID NO: 1367332
uaccugagcaaguagccac

SEQ ID NO: 1367334 - RNA, 19 nt, Artificial Sequence
  Description of Artificial Sequence: Synthetic oligonucleotide
  Sense strand starting at position 3678 of SEQ ID NO: 1242711
ucagguacuuccuuuguua

SEQ ID NO: 1367335 - RNA, 19 nt, Artificial Sequence
  Description of Artificial Sequence: Synthetic oligonucleotide
  Antisense strand to SEQ ID NO: 1367334
uaacaaaggaaguaccuga

SEQ ID NO: 1367336 - RNA, 19 nt, Artificial Sequence
  Description of Artificial Sequence: Synthetic oligonucleotide
  Sense strand starting at position 3680 of SEQ ID NO: 1242711
agguacuuccuuuguuaca

SEQ ID NO: 1367337 - RNA, 19 nt, Artificial Sequence
  Description of Artificial Sequence: Synthetic oligonucleotide
  Antisense strand to SEQ ID NO: 1367336
uguaacaaaggaaguaccu

SEQ ID NO: 1367338 - RNA, 19 nt, Artificial Sequence
  Description of Artificial Sequence: Synthetic oligonucleotide
  Sense strand starting at position 3682 of SEQ ID NO: 1242711
guacuuccuuuguuacaga

SEQ ID NO: 1367339 - RNA, 19 nt, Artificial Sequence
  Description of Artificial Sequence: Synthetic oligonucleotide
  Antisense strand to SEQ ID NO: 1367338
ucuguaacaaaggaaguac

SEQ ID NO: 1367340 - RNA, 19 nt, Artificial Sequence
  Description of Artificial Sequence: Synthetic oligonucleotide
  Sense strand starting at position 3782 of SEQ ID NO: 1242711
cuagacagguugguuagaa

SEQ ID NO: 1367341 - RNA, 19 nt, Artificial Sequence
  Description of Artificial Sequence: Synthetic oligonucleotide
  Antisense strand to SEQ ID NO: 1367340
uucuaaccaaccugucuag

SEQ ID NO: 1367342 - RNA, 19 nt, Artificial Sequence
  Description of Artificial Sequence: Synthetic oligonucleotide
  Sense strand starting at position 3783 of SEQ ID NO: 1242711
uagacagguugguuagaaa

SEQ ID NO: 1367343 - RNA, 19 nt, Artificial Sequence
  Description of Artificial Sequence: Synthetic oligonucleotide
  Antisense strand to SEQ ID NO: 1367342
uuucuaaccaaccugucua

SEQ ID NO: 1367344 - RNA, 19 nt, Artificial Sequence
  Description of Artificial Sequence: Synthetic oligonucleotide
  Sense strand starting at position 3881 of SEQ ID NO: 1242711
gagggauugccuuggguga

SEQ ID NO: 1367345 - RNA, 19 nt, Artificial Sequence
  Description of Artificial Sequence: Synthetic oligonucleotide
  Antisense strand to SEQ ID NO: 1367344
ucacccaaggcaaucccuc

SEQ ID NO: 1367346 - RNA, 19 nt, Artificial Sequence
  Description of Artificial Sequence: Synthetic oligonucleotide
  Sense strand starting at position 3885 of SEQ ID NO: 1242711
gauugccuugggugagaga

SEQ ID NO: 1367347 - RNA, 19 nt, Artificial Sequence
  Description of Artificial Sequence: Synthetic oligonucleotide
  Antisense strand to SEQ ID NO: 1367346
ucucucacccaaggcaauc

SEQ ID NO: 1367348 - RNA, 19 nt, Artificial Sequence
  Description of Artificial Sequence: Synthetic oligonucleotide
  Sense strand starting at position 3896 of SEQ ID NO: 1242711
gugagagagucagaaaggu

SEQ ID NO: 1367349 - RNA, 19 nt, Artificial Sequence
  Description of Artificial Sequence: Synthetic oligonucleotide
  Antisense strand to SEQ ID NO: 1367348
accuuucugacucucucac

SEQ ID NO: 1367350 - RNA, 19 nt, Artificial Sequence
  Description of Artificial Sequence: Synthetic oligonucleotide
  Sense strand starting at position 3943 of SEQ ID NO: 1242711
aagucauguugagauuugu

SEQ ID NO: 1367351 - RNA, 19 nt, Artificial Sequence
  Description of Artificial Sequence: Synthetic oligonucleotide
  Antisense strand to SEQ ID NO: 1367350
acaaaucucaacaugacuu

SEQ ID NO: 1367352 - RNA, 19 nt, Artificial Sequence
  Description of Artificial Sequence: Synthetic oligonucleotide
  Sense strand starting at position 3949 of SEQ ID NO: 1242711
uguugagauuuguagguca

SEQ ID NO: 1367353 - RNA, 19 nt, Artificial Sequence
  Description of Artificial Sequence: Synthetic oligonucleotide
  Antisense strand to SEQ ID NO: 1367352
ugaccuacaaaucucaaca

SEQ ID NO: 1367354 - RNA, 19 nt, Artificial Sequence
  Description of Artificial Sequence: Synthetic oligonucleotide
  Sense strand starting at position 238 of SEQ ID NO: 1242712
cagggcuuccauuaaggua

SEQ ID NO: 1367355 - RNA, 19 nt, Artificial Sequence
  Description of Artificial Sequence: Synthetic oligonucleotide
  Antisense strand to SEQ ID NO: 1367354
uaccuuaauggaagcccug

SEQ ID NO: 1367356 - RNA, 19 nt, Artificial Sequence
  Description of Artificial Sequence: Synthetic oligonucleotide
  Sense strand starting at position 326 of SEQ ID NO: 1242712
caugcuuauuugggaggga

SEQ ID NO: 1367357 - RNA, 19 nt, Artificial Sequence
  Description of Artificial Sequence: Synthetic oligonucleotide
  Antisense strand to SEQ ID NO: 1367356
ucccucccaaauaagcaug

SEQ ID NO: 1367358 - RNA, 19 nt, Artificial Sequence
  Description of Artificial Sequence: Synthetic oligonucleotide
  Sense strand starting at position 327 of SEQ ID NO: 1242712
augcuuauuugggagggaa

SEQ ID NO: 1367359 - RNA, 19 nt, Artificial Sequence
  Description of Artificial Sequence: Synthetic oligonucleotide
  Antisense strand to SEQ ID NO: 1367358
uucccucccaaauaagcau

SEQ ID NO: 1367360 - RNA, 19 nt, Artificial Sequence
  Description of Artificial Sequence: Synthetic oligonucleotide
  Sense strand starting at position 388 of SEQ ID NO: 1242712
gggacugcugguuggacaa

SEQ ID NO: 1367361 - RNA, 19 nt, Artificial Sequence
  Description of Artificial Sequence: Synthetic oligonucleotide
  Antisense strand to SEQ ID NO: 1367360
uuguccaaccagcaguccc

SEQ ID NO: 1367362 - RNA, 19 nt, Artificial Sequence
  Description of Artificial Sequence: Synthetic oligonucleotide
  Sense strand starting at position 390 of SEQ ID NO: 1242712
gacugcugguuggacaaau

SEQ ID NO: 1367363 - RNA, 19 nt, Artificial Sequence
  Description of Artificial Sequence: Synthetic oligonucleotide
  Antisense strand to SEQ ID NO: 1367362
auuuguccaaccagcaguc

SEQ ID NO: 1367364 - RNA, 19 nt, Artificial Sequence
  Description of Artificial Sequence: Synthetic oligonucleotide
  Sense strand starting at position 401 of SEQ ID NO: 1242712
ggacaaauaugugaugaaa

SEQ ID NO: 1367365 - RNA, 19 nt, Artificial Sequence
  Description of Artificial Sequence: Synthetic oligonucleotide
  Antisense strand to SEQ ID NO: 1367364
uuucaucacauauuugucc

SEQ ID NO: 1367366 - RNA, 19 nt, Artificial Sequence
  Description of Artificial Sequence: Synthetic oligonucleotide
  Sense strand starting at position 429 of SEQ ID NO: 1242712
guguuaacucuacauucua

SEQ ID NO: 1367367 - RNA, 19 nt, Artificial Sequence
  Description of Artificial Sequence: Synthetic oligonucleotide
  Antisense strand to SEQ ID NO: 1367366
uagaauguagaguuaacac

SEQ ID NO: 1367368 - RNA, 19 nt, Artificial Sequence
  Description of Artificial Sequence: Synthetic oligonucleotide
  Sense strand starting at position 545 of SEQ ID NO: 1242712
uggcaagugacugggcaua

SEQ ID NO: 1367369 - RNA, 19 nt, Artificial Sequence
  Description of Artificial Sequence: Synthetic oligonucleotide
  Antisense strand to SEQ ID NO: 1367368
uaugcccagucacuugcca

SEQ ID NO: 1367370 - RNA, 19 nt, Artificial Sequence
  Description of Artificial Sequence: Synthetic oligonucleotide
  Sense strand starting at position 558 of SEQ ID NO: 1242712
ggcauaaccuuuccgauua

SEQ ID NO: 1367371 - RNA, 19 nt, Artificial Sequence
  Description of Artificial Sequence: Synthetic oligonucleotide
  Antisense strand to SEQ ID NO: 1367370
uaaucggaaagguuaugcc

SEQ ID NO: 1367372 - RNA, 19 nt, Artificial Sequence
  Description of Artificial Sequence: Synthetic oligonucleotide
  Sense strand starting at position 1851 of SEQ ID NO: 1242712
cgcgaagccgucuccgaau

SEQ ID NO: 1367373 - RNA, 19 nt, Artificial Sequence
  Description of Artificial Sequence: Synthetic oligonucleotide
  Antisense strand to SEQ ID NO: 1367372
auucggagacggcuucgcg

SEQ ID NO: 1367374 - RNA, 19 nt, Artificial Sequence
  Description of Artificial Sequence: Synthetic oligonucleotide
  Sense strand starting at position 1947 of SEQ ID NO: 1242712
agucgcacuucugucacaa

SEQ ID NO: 1367375 - RNA, 19 nt, Artificial Sequence
  Description of Artificial Sequence: Synthetic oligonucleotide
  Antisense strand to SEQ ID NO: 1367374
uugugacagaagugcgacu

SEQ ID NO: 1367376 - RNA, 19 nt, Artificial Sequence
  Description of Artificial Sequence: Synthetic oligonucleotide
  Sense strand starting at position 2036 of SEQ ID NO: 1242712
acgugaugcgccgugauga

SEQ ID NO: 1367377 - RNA, 19 nt, Artificial Sequence
  Description of Artificial Sequence: Synthetic oligonucleotide
  Antisense strand to SEQ ID NO: 1367376
ucaucacggcgcaucacgu

SEQ ID NO: 1367378 - RNA, 19 nt, Artificial Sequence
  Description of Artificial Sequence: Synthetic oligonucleotide
  Sense strand starting at position 2071 of SEQ ID NO: 1242712
ggcgauuuggccuagagcu

SEQ ID NO: 1367379 - RNA, 19 nt, Artificial Sequence
  Description of Artificial Sequence: Synthetic oligonucleotide
  Antisense strand to SEQ ID NO: 1367378
agcucuaggccaaaucgcc

SEQ ID NO: 1367380 - RNA, 19 nt, Artificial Sequence
  Description of Artificial Sequence: Synthetic oligonucleotide
  Sense strand starting at position 2258 of SEQ ID NO: 1242712
gaguuugggaggugcauua

SEQ ID NO: 1367381 - RNA, 19 nt, Artificial Sequence
  Description of Artificial Sequence: Synthetic oligonucleotide
  Antisense strand to SEQ ID NO: 1367380
uaaugcaccucccaaacuc

SEQ ID NO: 1367382 - RNA, 19 nt, Artificial Sequence
  Description of Artificial Sequence: Synthetic oligonucleotide
  Sense strand starting at position 2443 of SEQ ID NO: 1242712
uugggagcaacuuaguuua

SEQ ID NO: 1367383 - RNA, 19 nt, Artificial Sequence
  Description of Artificial Sequence: Synthetic oligonucleotide
  Antisense strand to SEQ ID NO: 1367382
uaaacuaaguugcucccaa

SEQ ID NO: 1367384 - RNA, 19 nt, Artificial Sequence
  Description of Artificial Sequence: Synthetic oligonucleotide
  Sense strand starting at position 2445 of SEQ ID NO: 1242712
gggagcaacuuaguuuaua

SEQ ID NO: 1367385 - RNA, 19 nt, Artificial Sequence
  Description of Artificial Sequence: Synthetic oligonucleotide
  Antisense strand to SEQ ID NO: 1367384
uauaaacuaaguugcuccc

SEQ ID NO: 1367386 - RNA, 19 nt, Artificial Sequence
  Description of Artificial Sequence: Synthetic oligonucleotide
  Sense strand starting at position 2446 of SEQ ID NO: 1242712
ggagcaacuuaguuuauag

SEQ ID NO: 1367387 - RNA, 19 nt, Artificial Sequence
  Description of Artificial Sequence: Synthetic oligonucleotide
  Antisense strand to SEQ ID NO: 1367386
cuauaaacuaaguugcucc

SEQ ID NO: 1367388 - RNA, 19 nt, Artificial Sequence
  Description of Artificial Sequence: Synthetic oligonucleotide
  Sense strand starting at position 2527 of SEQ ID NO: 1242712
gaaccaggcuuccuuugua

SEQ ID NO: 1367389 - RNA, 19 nt, Artificial Sequence
  Description of Artificial Sequence: Synthetic oligonucleotide
  Antisense strand to SEQ ID NO: 1367388
uacaaaggaagccugguuc

SEQ ID NO: 1367390 - RNA, 19 nt, Artificial Sequence
  Description of Artificial Sequence: Synthetic oligonucleotide
  Sense strand starting at position 2530 of SEQ ID NO: 1242712
ccaggcuuccuuuguaaga

SEQ ID NO: 1367391 - RNA, 19 nt, Artificial Sequence
  Description of Artificial Sequence: Synthetic oligonucleotide
  Antisense strand to SEQ ID NO: 1367390
ucuuacaaaggaagccugg

SEQ ID NO: 1367392 - RNA, 19 nt, Artificial Sequence
  Description of Artificial Sequence: Synthetic oligonucleotide
  Sense strand starting at position 2535 of SEQ ID NO: 1242712
cuuccuuuguaagaguaac

SEQ ID NO: 1367393 - RNA, 19 nt, Artificial Sequence
  Description of Artificial Sequence: Synthetic oligonucleotide
  Antisense strand to SEQ ID NO: 1367392
guuacucuuacaaaggaag

SEQ ID NO: 1367394 - RNA, 19 nt, Artificial Sequence
  Description of Artificial Sequence: Synthetic oligonucleotide
  Sense strand starting at position 2552 of SEQ ID NO: 1242712
acacguuagcuacaagauu

SEQ ID NO: 1367395 - RNA, 19 nt, Artificial Sequence
  Description of Artificial Sequence: Synthetic oligonucleotide
  Antisense strand to SEQ ID NO: 1367394
aaucuuguagcuaacgugu

SEQ ID NO: 1367396 - RNA, 19 nt, Artificial Sequence
  Description of Artificial Sequence: Synthetic oligonucleotide
  Sense strand starting at position 2885 of SEQ ID NO: 1242712
gaaagaaauuacgguuuag

SEQ ID NO: 1367397 - RNA, 19 nt, Artificial Sequence
  Description of Artificial Sequence: Synthetic oligonucleotide
  Antisense strand to SEQ ID NO: 1367396
cuaaaccguaauuucuuuc

SEQ ID NO: 1367398 - RNA, 19 nt, Artificial Sequence
  Description of Artificial Sequence: Synthetic oligonucleotide
  Sense strand starting at position 2944 of SEQ ID NO: 1242712
aguugauccuagguauaau

SEQ ID NO: 1367399 - RNA, 19 nt, Artificial Sequence
  Description of Artificial Sequence: Synthetic oligonucleotide
  Antisense strand to SEQ ID NO: 1367398
auuauaccuaggaucaacu

SEQ ID NO: 1367400 - RNA, 19 nt, Artificial Sequence
  Description of Artificial Sequence: Synthetic oligonucleotide
  Sense strand starting at position 2955 of SEQ ID NO: 1242712
gguauaauaucacuauugu

SEQ ID NO: 1367401 - RNA, 19 nt, Artificial Sequence
  Description of Artificial Sequence: Synthetic oligonucleotide
  Antisense strand to SEQ ID NO: 1367400
acaauagugauauuauacc

SEQ ID NO: 1367402 - RNA, 19 nt, Artificial Sequence
  Description of Artificial Sequence: Synthetic oligonucleotide
  Sense strand starting at position 2977 of SEQ ID NO: 1242712
accuaagauugguacucuu

SEQ ID NO: 1367403 - RNA, 19 nt, Artificial Sequence
  Description of Artificial Sequence: Synthetic oligonucleotide
  Antisense strand to SEQ ID NO: 1367402
aagaguaccaaucuuaggu

SEQ ID NO: 1367404 - RNA, 19 nt, Artificial Sequence
  Description of Artificial Sequence: Synthetic oligonucleotide
  Sense strand starting at position 3046 of SEQ ID NO: 1242712
gcuguaaucugacucaacc

SEQ ID NO: 1367405 - RNA, 19 nt, Artificial Sequence
  Description of Artificial Sequence: Synthetic oligonucleotide
  Antisense strand to SEQ ID NO: 1367404
gguugagucagauuacagc

SEQ ID NO: 1367406 - RNA, 19 nt, Artificial Sequence
  Description of Artificial Sequence: Synthetic oligonucleotide
  Sense strand starting at position 3228 of SEQ ID NO: 1242712
cagcucuguguggauuaaa

SEQ ID NO: 1367407 - RNA, 19 nt, Artificial Sequence
  Description of Artificial Sequence: Synthetic oligonucleotide
  Antisense strand to SEQ ID NO: 1367406
uuuaauccacacagagcug

SEQ ID NO: 1367408 - RNA, 19 nt, Artificial Sequence
  Description of Artificial Sequence: Synthetic oligonucleotide
  Sense strand starting at position 3321 of SEQ ID NO: 1242712
guggcuacuugcucaggua

SEQ ID NO: 1367409 - RNA, 19 nt, Artificial Sequence
  Description of Artificial Sequence: Synthetic oligonucleotide
  Antisense strand to SEQ ID NO: 1367408
uaccugagcaaguagccac

SEQ ID NO: 1367410 - RNA, 19 nt, Artificial Sequence
  Description of Artificial Sequence: Synthetic oligonucleotide
  Sense strand starting at position 3333 of SEQ ID NO: 1242712
ucagguacuuccuuuguua

SEQ ID NO: 1367411 - RNA, 19 nt, Artificial Sequence
  Description of Artificial Sequence: Synthetic oligonucleotide
  Antisense strand to SEQ ID NO: 1367410
uaacaaaggaaguaccuga

SEQ ID NO: 1367412 - RNA, 19 nt, Artificial Sequence
  Description of Artificial Sequence: Synthetic oligonucleotide
  Sense strand starting at position 3335 of SEQ ID NO: 1242712
agguacuuccuuuguuaca

SEQ ID NO: 1367413 - RNA, 19 nt, Artificial Sequence
  Description of Artificial Sequence: Synthetic oligonucleotide
  Antisense strand to SEQ ID NO: 1367412
uguaacaaaggaaguaccu

SEQ ID NO: 1367414 - RNA, 19 nt, Artificial Sequence
  Description of Artificial Sequence: Synthetic oligonucleotide
  Sense strand starting at position 3337 of SEQ ID NO: 1242712
guacuuccuuuguuacaga

SEQ ID NO: 1367415 - RNA, 19 nt, Artificial Sequence
  Description of Artificial Sequence: Synthetic oligonucleotide
  Antisense strand to SEQ ID NO: 1367414
ucuguaacaaaggaaguac

SEQ ID NO: 1367416 - RNA, 19 nt, Artificial Sequence
  Description of Artificial Sequence: Synthetic oligonucleotide
  Sense strand starting at position 3437 of SEQ ID NO: 1242712
cuagacagguugguuagaa

SEQ ID NO: 1367417 - RNA, 19 nt, Artificial Sequence
  Description of Artificial Sequence: Synthetic oligonucleotide
  Antisense strand to SEQ ID NO: 1367416
uucuaaccaaccugucuag

SEQ ID NO: 1367418 - RNA, 19 nt, Artificial Sequence
  Description of Artificial Sequence: Synthetic oligonucleotide
  Sense strand starting at position 3438 of SEQ ID NO: 1242712
uagacagguugguuagaaa

SEQ ID NO: 1367419 - RNA, 19 nt, Artificial Sequence
  Description of Artificial Sequence: Synthetic oligonucleotide
  Antisense strand to SEQ ID NO: 1367418
uuucuaaccaaccugucua

SEQ ID NO: 1367420 - RNA, 19 nt, Artificial Sequence
  Description of Artificial Sequence: Synthetic oligonucleotide
  Sense strand starting at position 3536 of SEQ ID NO: 1242712
gagggauugccuuggguga

SEQ ID NO: 1367421 - RNA, 19 nt, Artificial Sequence
  Description of Artificial Sequence: Synthetic oligonucleotide
  Antisense strand to SEQ ID NO: 1367420
ucacccaaggcaaucccuc

SEQ ID NO: 1367422 - RNA, 19 nt, Artificial Sequence
  Description of Artificial Sequence: Synthetic oligonucleotide
  Sense strand starting at position 3540 of SEQ ID NO: 1242712
gauugccuugggugagaga

SEQ ID NO: 1367423 - RNA, 19 nt, Artificial Sequence
  Description of Artificial Sequence: Synthetic oligonucleotide
  Antisense strand to SEQ ID NO: 1367422
ucucucacccaaggcaauc

SEQ ID NO: 1367424 - RNA, 19 nt, Artificial Sequence
  Description of Artificial Sequence: Synthetic oligonucleotide
  Sense strand starting at position 3551 of SEQ ID NO: 1242712
gugagagagucagaaaggu

SEQ ID NO: 1367425 - RNA, 19 nt, Artificial Sequence
  Description of Artificial Sequence: Synthetic oligonucleotide
  Antisense strand to SEQ ID NO: 1367424
accuuucugacucucucac

SEQ ID NO: 1367426 - RNA, 19 nt, Artificial Sequence
  Description of Artificial Sequence: Synthetic oligonucleotide
  Sense strand starting at position 3598 of SEQ ID NO: 1242712
aagucauguugagauuugu

SEQ ID NO: 1367427 - RNA, 19 nt, Artificial Sequence
  Description of Artificial Sequence: Synthetic oligonucleotide
  Antisense strand to SEQ ID NO: 1367426
acaaaucucaacaugacuu

SEQ ID NO: 1367428 - RNA, 19 nt, Artificial Sequence
  Description of Artificial Sequence: Synthetic oligonucleotide
  Sense strand starting at position 3604 of SEQ ID NO: 1242712
uguugagauuuguagguca

SEQ ID NO: 1367429 - RNA, 19 nt, Artificial Sequence
  Description of Artificial Sequence: Synthetic oligonucleotide
  Antisense strand to SEQ ID NO: 1367428
ugaccuacaaaucucaaca

SEQ ID NO: 1367430 - RNA, 19 nt, Artificial Sequence
  Description of Artificial Sequence: Synthetic oligonucleotide
  Sense strand starting at position 3951 of SEQ ID NO: 1242712
gagauaggaucuugaucag

SEQ ID NO: 1367431 - RNA, 19 nt, Artificial Sequence
  Description of Artificial Sequence: Synthetic oligonucleotide
  Antisense strand to SEQ ID NO: 1367430
cugaucaagauccuaucuc

SEQ ID NO: 1367432 - RNA, 19 nt, Artificial Sequence
  Description of Artificial Sequence: Synthetic oligonucleotide
  Sense strand starting at position 3954 of SEQ ID NO: 1242712
auaggaucuugaucaggca

SEQ ID NO: 1367433 - RNA, 19 nt, Artificial Sequence
  Description of Artificial Sequence: Synthetic oligonucleotide
  Antisense strand to SEQ ID NO: 1367432
ugccugaucaagauccuau

SEQ ID NO: 1367434 - RNA, 19 nt, Artificial Sequence
  Description of Artificial Sequence: Synthetic oligonucleotide
  Sense strand starting at position 25 of SEQ ID NO: 1242713
gcccauauuugguuuauca

SEQ ID NO: 1367435 - RNA, 19 nt, Artificial Sequence
  Description of Artificial Sequence: Synthetic oligonucleotide
  Antisense strand to SEQ ID NO: 1367434
ugauaaaccaaauaugggc

SEQ ID NO: 1367436 - RNA, 19 nt, Artificial Sequence
  Description of Artificial Sequence: Synthetic oligonucleotide
  Sense strand starting at position 35 of SEQ ID NO: 1242713
gguuuaucacucugacgca

SEQ ID NO: 1367437 - RNA, 19 nt, Artificial Sequence
  Description of Artificial Sequence: Synthetic oligonucleotide
  Antisense strand to SEQ ID NO: 1367436
ugcgucagagugauaaacc

SEQ ID NO: 1367438 - RNA, 19 nt, Artificial Sequence
  Description of Artificial Sequence: Synthetic oligonucleotide
  Sense strand starting at position 120 of SEQ ID NO: 1242713
gugugaggucagugggcaa

SEQ ID NO: 1367439 - RNA, 19 nt, Artificial Sequence
  Description of Artificial Sequence: Synthetic oligonucleotide
  Antisense strand to SEQ ID NO: 1367438
uugcccacugaccucacac

SEQ ID NO: 1367440 - RNA, 19 nt, Artificial Sequence
  Description of Artificial Sequence: Synthetic oligonucleotide
  Sense strand starting at position 157 of SEQ ID NO: 1242713
cugagaaaggcaugagagu

SEQ ID NO: 1367441 - RNA, 19 nt, Artificial Sequence
  Description of Artificial Sequence: Synthetic oligonucleotide
  Antisense strand to SEQ ID NO: 1367440
acucucaugccuuucucag

SEQ ID NO: 1367442 - RNA, 19 nt, Artificial Sequence
  Description of Artificial Sequence: Synthetic oligonucleotide
  Sense strand starting at position 197 of SEQ ID NO: 1242713
gaggaaagcuaugucugca

SEQ ID NO: 1367443 - RNA, 19 nt, Artificial Sequence
  Description of Artificial Sequence: Synthetic oligonucleotide
  Antisense strand to SEQ ID NO: 1367442
ugcagacauagcuuuccuc

SEQ ID NO: 1367444 - RNA, 19 nt, Artificial Sequence
  Description of Artificial Sequence: Synthetic oligonucleotide
  Sense strand starting at position 200 of SEQ ID NO: 1242713
gaaagcuaugucugcaacu

SEQ ID NO: 1367445 - RNA, 19 nt, Artificial Sequence
  Description of Artificial Sequence: Synthetic oligonucleotide
  Antisense strand to SEQ ID NO: 1367444
aguugcagacauagcuuuc

SEQ ID NO: 1367446 - RNA, 19 nt, Artificial Sequence
  Description of Artificial Sequence: Synthetic oligonucleotide
  Sense strand starting at position 280 of SEQ ID NO: 1242713
uacaguugggucuggagaa

SEQ ID NO: 1367447 - RNA, 19 nt, Artificial Sequence
  Description of Artificial Sequence: Synthetic oligonucleotide
  Antisense strand to SEQ ID NO: 1367446
uucuccagacccaacugua

SEQ ID NO: 1367448 - RNA, 19 nt, Artificial Sequence
  Description of Artificial Sequence: Synthetic oligonucleotide
  Sense strand starting at position 400 of SEQ ID NO: 1242713
acaguaggccuccaguaaa

SEQ ID NO: 1367449 - RNA, 19 nt, Artificial Sequence
  Description of Artificial Sequence: Synthetic oligonucleotide
  Antisense strand to SEQ ID NO: 1367448
uuuacuggaggccuacugu

SEQ ID NO: 1367450 - RNA, 19 nt, Artificial Sequence
  Description of Artificial Sequence: Synthetic oligonucleotide
  Sense strand starting at position 414 of SEQ ID NO: 1242713
guaaacaccuguugaauac

SEQ ID NO: 1367451 - RNA, 19 nt, Artificial Sequence
  Description of Artificial Sequence: Synthetic oligonucleotide
  Antisense strand to SEQ ID NO: 1367450
guauucaacagguguuuac

SEQ ID NO: 1367452 - RNA, 19 nt, Artificial Sequence
  Description of Artificial Sequence: Synthetic oligonucleotide
  Sense strand starting at position 819 of SEQ ID NO: 1242713
agcagugaguucucaagag

SEQ ID NO: 1367453 - RNA, 19 nt, Artificial Sequence
  Description of Artificial Sequence: Synthetic oligonucleotide
  Antisense strand to SEQ ID NO: 1367452
cucuugagaacucacugcu

SEQ ID NO: 1367454 - RNA, 19 nt, Artificial Sequence
  Description of Artificial Sequence: Synthetic oligonucleotide
  Sense strand starting at position 823 of SEQ ID NO: 1242713
gugaguucucaagagcuag

SEQ ID NO: 1367455 - RNA, 19 nt, Artificial Sequence
  Description of Artificial Sequence: Synthetic oligonucleotide
  Antisense strand to SEQ ID NO: 1367454
cuagcucuugagaacucac

SEQ ID NO: 1367456 - RNA, 19 nt, Artificial Sequence
  Description of Artificial Sequence: Synthetic oligonucleotide
  Sense strand starting at position 935 of SEQ ID NO: 1242713
gaccaaucugggcgacacu

SEQ ID NO: 1367457 - RNA, 19 nt, Artificial Sequence
  Description of Artificial Sequence: Synthetic oligonucleotide
  Antisense strand to SEQ ID NO: 1367456
agugucgcccagauugguc

SEQ ID NO: 1367458 - RNA, 19 nt, Artificial Sequence
  Description of Artificial Sequence: Synthetic oligonucleotide
  Sense strand starting at position 1285 of SEQ ID NO: 1242713
gggugucugucaccuugau

SEQ ID NO: 1367459 - RNA, 19 nt, Artificial Sequence
  Description of Artificial Sequence: Synthetic oligonucleotide
  Antisense strand to SEQ ID NO: 1367458
aucaaggugacagacaccc

SEQ ID NO: 1367460 - RNA, 19 nt, Artificial Sequence
  Description of Artificial Sequence: Synthetic oligonucleotide
  Sense strand starting at position 1289 of SEQ ID NO: 1242713
gucugucaccuugauuaag

SEQ ID NO: 1367461 - RNA, 19 nt, Artificial Sequence
  Description of Artificial Sequence: Synthetic oligonucleotide
  Antisense strand to SEQ ID NO: 1367460
cuuaaucaaggugacagac

SEQ ID NO: 1367462 - RNA, 19 nt, Artificial Sequence
  Description of Artificial Sequence: Synthetic oligonucleotide
  Sense strand starting at position 1291 of SEQ ID NO: 1242713
cugucaccuugauuaagag

SEQ ID NO: 1367463 - RNA, 19 nt, Artificial Sequence
  Description of Artificial Sequence: Synthetic oligonucleotide
  Antisense strand to SEQ ID NO: 1367462
cucuuaaucaaggugacag

SEQ ID NO: 1367464 - RNA, 19 nt, Artificial Sequence
  Description of Artificial Sequence: Synthetic oligonucleotide
  Sense strand starting at position 1318 of SEQ ID NO: 1242713
gcguguccaucgaaagcgu

SEQ ID NO: 1367465 - RNA, 19 nt, Artificial Sequence
  Description of Artificial Sequence: Synthetic oligonucleotide
  Antisense strand to SEQ ID NO: 1367464
acgcuuucgauggacacgc

SEQ ID NO: 1367466 - RNA, 19 nt, Artificial Sequence
  Description of Artificial Sequence: Synthetic oligonucleotide
  Sense strand starting at position 1413 of SEQ ID NO: 1242713
gaagacaauccgggcauaa

SEQ ID NO: 1367467 - RNA, 19 nt, Artificial Sequence
  Description of Artificial Sequence: Synthetic oligonucleotide
  Antisense strand to SEQ ID NO: 1367466
uuaugcccggauugucuuc

SEQ ID NO: 1367468 - RNA, 19 nt, Artificial Sequence
  Description of Artificial Sequence: Synthetic oligonucleotide
  Sense strand starting at position 2005 of SEQ ID NO: 1242713
ucccuuggcucguaccaaa

SEQ ID NO: 1367469 - RNA, 19 nt, Artificial Sequence
  Description of Artificial Sequence: Synthetic oligonucleotide
  Antisense strand to SEQ ID NO: 1367468
uuugguacgagccaaggga

SEQ ID NO: 1367470 - RNA, 19 nt, Artificial Sequence
  Description of Artificial Sequence: Synthetic oligonucleotide
  Sense strand starting at position 2138 of SEQ ID NO: 1242713
guaugacuuccuggaggca

SEQ ID NO: 1367471 - RNA, 19 nt, Artificial Sequence
  Description of Artificial Sequence: Synthetic oligonucleotide
  Antisense strand to SEQ ID NO: 1367470
ugccuccaggaagucauac

SEQ ID NO: 1367472 - RNA, 19 nt, Artificial Sequence
  Description of Artificial Sequence: Synthetic oligonucleotide
  Sense strand starting at position 2217 of SEQ ID NO: 1242713
uggugcaguccucacuuua

SEQ ID NO: 1367473 - RNA, 19 nt, Artificial Sequence
  Description of Artificial Sequence: Synthetic oligonucleotide
  Antisense strand to SEQ ID NO: 1367472
uaaagugaggacugcacca

SEQ ID NO: 1367474 - RNA, 19 nt, Artificial Sequence
  Description of Artificial Sequence: Synthetic oligonucleotide
  Sense strand starting at position 2373 of SEQ ID NO: 1242713
acgucauccucccaagcuu

SEQ ID NO: 1367475 - RNA, 19 nt, Artificial Sequence
  Description of Artificial Sequence: Synthetic oligonucleotide
  Antisense strand to SEQ ID NO: 1367474
aagcuugggaggaugacgu

SEQ ID NO: 1367476 - RNA, 19 nt, Artificial Sequence
  Description of Artificial Sequence: Synthetic oligonucleotide
  Sense strand starting at position 2481 of SEQ ID NO: 1242713
aggaaauuccucugucuuu

SEQ ID NO: 1367477 - RNA, 19 nt, Artificial Sequence
  Description of Artificial Sequence: Synthetic oligonucleotide
  Antisense strand to SEQ ID NO: 1367476
aaagacagaggaauuuccu

SEQ ID NO: 1367478 - RNA, 19 nt, Artificial Sequence
  Description of Artificial Sequence: Synthetic oligonucleotide
  Sense strand starting at position 2482 of SEQ ID NO: 1242713
ggaaauuccucugucuuua

SEQ ID NO: 1367479 - RNA, 19 nt, Artificial Sequence
  Description of Artificial Sequence: Synthetic oligonucleotide
  Antisense strand to SEQ ID NO: 1367478
uaaagacagaggaauuucc

SEQ ID NO: 1367480 - RNA, 19 nt, Artificial Sequence
  Description of Artificial Sequence: Synthetic oligonucleotide
  Sense strand starting at position 2490 of SEQ ID NO: 1242713
cucugucuuuaguucuaga

SEQ ID NO: 1367481 - RNA, 19 nt, Artificial Sequence
  Description of Artificial Sequence: Synthetic oligonucleotide
  Antisense strand to SEQ ID NO: 1367480
ucuagaacuaaagacagag

SEQ ID NO: 1367482 - RNA, 19 nt, Artificial Sequence
  Description of Artificial Sequence: Synthetic oligonucleotide
  Sense strand starting at position 2826 of SEQ ID NO: 1242713
ccucucacucccgaagaua

SEQ ID NO: 1367483 - RNA, 19 nt, Artificial Sequence
  Description of Artificial Sequence: Synthetic oligonucleotide
  Antisense strand to SEQ ID NO: 1367482
uaucuucgggagugagagg

SEQ ID NO: 1367484 - RNA, 19 nt, Artificial Sequence
  Description of Artificial Sequence: Synthetic oligonucleotide
  Sense strand starting at position 2898 of SEQ ID NO: 1242713
gcgggauguuuccucuaaa

SEQ ID NO: 1367485 - RNA, 19 nt, Artificial Sequence
  Description of Artificial Sequence: Synthetic oligonucleotide
  Antisense strand to SEQ ID NO: 1367484
uuuagaggaaacaucccgc

SEQ ID NO: 1367486 - RNA, 19 nt, Artificial Sequence
  Description of Artificial Sequence: Synthetic oligonucleotide
  Sense strand starting at position 2899 of SEQ ID NO: 1242713
cgggauguuuccucuaaag

SEQ ID NO: 1367487 - RNA, 19 nt, Artificial Sequence
  Description of Artificial Sequence: Synthetic oligonucleotide
  Antisense strand to SEQ ID NO: 1367486
cuuuagaggaaacaucccg

SEQ ID NO: 1367488 - RNA, 19 nt, Artificial Sequence
  Description of Artificial Sequence: Synthetic oligonucleotide
  Sense strand starting at position 2901 of SEQ ID NO: 1242713
ggauguuuccucuaaaggc

SEQ ID NO: 1367489 - RNA, 19 nt, Artificial Sequence
  Description of Artificial Sequence: Synthetic oligonucleotide
  Antisense strand to SEQ ID NO: 1367488
gccuuuagaggaaacaucc

SEQ ID NO: 1367490 - RNA, 19 nt, Artificial Sequence
  Description of Artificial Sequence: Synthetic oligonucleotide
  Sense strand starting at position 2910 of SEQ ID NO: 1242713
cucuaaaggccuuguuuaa

SEQ ID NO: 1367491 - RNA, 19 nt, Artificial Sequence
  Description of Artificial Sequence: Synthetic oligonucleotide
  Antisense strand to SEQ ID NO: 1367490
uuaaacaaggccuuuagag

SEQ ID NO: 1367492 - RNA, 19 nt, Artificial Sequence
  Description of Artificial Sequence: Synthetic oligonucleotide
  Sense strand starting at position 2976 of SEQ ID NO: 1242713
gcugguuucucaggucaac

SEQ ID NO: 1367493 - RNA, 19 nt, Artificial Sequence
  Description of Artificial Sequence: Synthetic oligonucleotide
  Antisense strand to SEQ ID NO: 1367492
guugaccugagaaaccagc

SEQ ID NO: 1367494 - RNA, 19 nt, Artificial Sequence
  Description of Artificial Sequence: Synthetic oligonucleotide
  Sense strand starting at position 3129 of SEQ ID NO: 1242713
gugggaauguaaugaagug

SEQ ID NO: 1367495 - RNA, 19 nt, Artificial Sequence
  Description of Artificial Sequence: Synthetic oligonucleotide
  Antisense strand to SEQ ID NO: 1367494
cacuucauuacauucccac

SEQ ID NO: 1367496 - RNA, 19 nt, Artificial Sequence
  Description of Artificial Sequence: Synthetic oligonucleotide
  Sense strand starting at position 3298 of SEQ ID NO: 1242713
agagcuuucuagcuaaauc

SEQ ID NO: 1367497 - RNA, 19 nt, Artificial Sequence
  Description of Artificial Sequence: Synthetic oligonucleotide
  Antisense strand to SEQ ID NO: 1367496
gauuuagcuagaaagcucu

SEQ ID NO: 1367498 - RNA, 19 nt, Artificial Sequence
  Description of Artificial Sequence: Synthetic oligonucleotide
  Sense strand starting at position 3632 of SEQ ID NO: 1242713
cccacuaugccugguuaca

SEQ ID NO: 1367499 - RNA, 19 nt, Artificial Sequence
  Description of Artificial Sequence: Synthetic oligonucleotide
  Antisense strand to SEQ ID NO: 1367498
uguaaccaggcauaguggg

SEQ ID NO: 1367500 - RNA, 19 nt, Artificial Sequence
  Description of Artificial Sequence: Synthetic oligonucleotide
  Sense strand starting at position 3634 of SEQ ID NO: 1242713
cacuaugccugguuacagu

SEQ ID NO: 1367501 - RNA, 19 nt, Artificial Sequence
  Description of Artificial Sequence: Synthetic oligonucleotide
  Antisense strand to SEQ ID NO: 1367500
acuguaaccaggcauagug

SEQ ID NO: 1367502 - RNA, 19 nt, Artificial Sequence
  Description of Artificial Sequence: Synthetic oligonucleotide
  Sense strand starting at position 3673 of SEQ ID NO: 1242713
agcugaacucuccaggagu

SEQ ID NO: 1367503 - RNA, 19 nt, Artificial Sequence
  Description of Artificial Sequence: Synthetic oligonucleotide
  Antisense strand to SEQ ID NO: 1367502
acuccuggagaguucagcu

SEQ ID NO: 1367504 - RNA, 19 nt, Artificial Sequence
  Description of Artificial Sequence: Synthetic oligonucleotide
  Sense strand starting at position 3720 of SEQ ID NO: 1242713
agcccuaggaccugugaaa

SEQ ID NO: 1367505 - RNA, 19 nt, Artificial Sequence
  Description of Artificial Sequence: Synthetic oligonucleotide
  Antisense strand to SEQ ID NO: 1367504
uuucacagguccuagggcu

SEQ ID NO: 1367506 - RNA, 19 nt, Artificial Sequence
  Description of Artificial Sequence: Synthetic oligonucleotide
  Sense strand starting at position 3772 of SEQ ID NO: 1242713
cucacugcuggccgagaau

SEQ ID NO: 1367507 - RNA, 19 nt, Artificial Sequence
  Description of Artificial Sequence: Synthetic oligonucleotide
  Antisense strand to SEQ ID NO: 1367506
auucucggccagcagugag

SEQ ID NO: 1367508 - RNA, 19 nt, Artificial Sequence
  Description of Artificial Sequence: Synthetic oligonucleotide
  Sense strand starting at position 3837 of SEQ ID NO: 1242713
auaguccuuucucugacua

SEQ ID NO: 1367509 - RNA, 19 nt, Artificial Sequence
  Description of Artificial Sequence: Synthetic oligonucleotide
  Antisense strand to SEQ ID NO: 1367508
uagucagagaaaggacuau

SEQ ID NO: 1367510 - RNA, 19 nt, Artificial Sequence
  Description of Artificial Sequence: Synthetic oligonucleotide
  Sense strand starting at position 3849 of SEQ ID NO: 1242713
cugacuagguccucuacuu

SEQ ID NO: 1367511 - RNA, 19 nt, Artificial Sequence
  Description of Artificial Sequence: Synthetic oligonucleotide
  Antisense strand to SEQ ID NO: 1367510
aaguagaggaccuagucag

SEQ ID NO: 1367512 - RNA, 19 nt, Artificial Sequence
  Description of Artificial Sequence: Synthetic oligonucleotide
  Sense strand starting at position 69 of SEQ ID NO: 1242714
gugugacuuccaggugaaa

SEQ ID NO: 1367513 - RNA, 19 nt, Artificial Sequence
  Description of Artificial Sequence: Synthetic oligonucleotide
  Antisense strand to SEQ ID NO: 1367512
uuucaccuggaagucacac

SEQ ID NO: 1367514 - RNA, 19 nt, Artificial Sequence
  Description of Artificial Sequence: Synthetic oligonucleotide
  Sense strand starting at position 71 of SEQ ID NO: 1242714
gugacuuccaggugaaagg

SEQ ID NO: 1367515 - RNA, 19 nt, Artificial Sequence
  Description of Artificial Sequence: Synthetic oligonucleotide
  Antisense strand to SEQ ID NO: 1367514
ccuuucaccuggaagucac

SEQ ID NO: 1367516 - RNA, 19 nt, Artificial Sequence
  Description of Artificial Sequence: Synthetic oligonucleotide
  Sense strand starting at position 166 of SEQ ID NO: 1242714
acugcuucucuccagaaug

SEQ ID NO: 1367517 - RNA, 19 nt, Artificial Sequence
  Description of Artificial Sequence: Synthetic oligonucleotide
  Antisense strand to SEQ ID NO: 1367516
cauucuggagagaagcagu

SEQ ID NO: 1367518 - RNA, 19 nt, Artificial Sequence
  Description of Artificial Sequence: Synthetic oligonucleotide
  Sense strand starting at position 168 of SEQ ID NO: 1242714
ugcuucucuccagaauguu

SEQ ID NO: 1367519 - RNA, 19 nt, Artificial Sequence
  Description of Artificial Sequence: Synthetic oligonucleotide
  Antisense strand to SEQ ID NO: 1367518
aacauucuggagagaagca

SEQ ID NO: 1367520 - RNA, 19 nt, Artificial Sequence
  Description of Artificial Sequence: Synthetic oligonucleotide
  Sense strand starting at position 231 of SEQ ID NO: 1242714
gggucucugaacuaguaga

SEQ ID NO: 1367521 - RNA, 19 nt, Artificial Sequence
  Description of Artificial Sequence: Synthetic oligonucleotide
  Antisense strand to SEQ ID NO: 1367520
ucuacuaguucagagaccc

SEQ ID NO: 1367522 - RNA, 19 nt, Artificial Sequence
  Description of Artificial Sequence: Synthetic oligonucleotide
  Sense strand starting at position 657 of SEQ ID NO: 1242714
guaucaaaccugggcucaa

SEQ ID NO: 1367523 - RNA, 19 nt, Artificial Sequence
  Description of Artificial Sequence: Synthetic oligonucleotide
  Antisense strand to SEQ ID NO: 1367522
uugagcccagguuugauac

SEQ ID NO: 1367524 - RNA, 19 nt, Artificial Sequence
  Description of Artificial Sequence: Synthetic oligonucleotide
  Sense strand starting at position 732 of SEQ ID NO: 1242714
ccgcauuuguccucagucu

SEQ ID NO: 1367525 - RNA, 19 nt, Artificial Sequence
  Description of Artificial Sequence: Synthetic oligonucleotide
  Antisense strand to SEQ ID NO: 1367524
agacugaggacaaaugcgg

SEQ ID NO: 1367526 - RNA, 19 nt, Artificial Sequence
  Description of Artificial Sequence: Synthetic oligonucleotide
  Sense strand starting at position 861 of SEQ ID NO: 1242714
gcuugugcucuucucgaca

SEQ ID NO: 1367527 - RNA, 19 nt, Artificial Sequence
  Description of Artificial Sequence: Synthetic oligonucleotide
  Antisense strand to SEQ ID NO: 1367526
ugucgagaagagcacaagc

SEQ ID NO: 1367528 - RNA, 19 nt, Artificial Sequence
  Description of Artificial Sequence: Synthetic oligonucleotide
  Sense strand starting at position 881 of SEQ ID NO: 1242714
gcuuauuucugggugucca

SEQ ID NO: 1367529 - RNA, 19 nt, Artificial Sequence
  Description of Artificial Sequence: Synthetic oligonucleotide
  Antisense strand to SEQ ID NO: 1367528
uggacacccagaaauaagc

SEQ ID NO: 1367530 - RNA, 19 nt, Artificial Sequence
  Description of Artificial Sequence: Synthetic oligonucleotide
  Sense strand starting at position 894 of SEQ ID NO: 1242714
uguccaaauccuugucaca

SEQ ID NO: 1367531 - RNA, 19 nt, Artificial Sequence
  Description of Artificial Sequence: Synthetic oligonucleotide
  Antisense strand to SEQ ID NO: 1367530
ugugacaaggauuuggaca

SEQ ID NO: 1367532 - RNA, 19 nt, Artificial Sequence
  Description of Artificial Sequence: Synthetic oligonucleotide
  Sense strand starting at position 1169 of SEQ ID NO: 1242714
gcugcacgucuggaugagu

SEQ ID NO: 1367533 - RNA, 19 nt, Artificial Sequence
  Description of Artificial Sequence: Synthetic oligonucleotide
  Antisense strand to SEQ ID NO: 1367532
acucauccagacgugcagc

SEQ ID NO: 1367534 - RNA, 19 nt, Artificial Sequence
  Description of Artificial Sequence: Synthetic oligonucleotide
  Sense strand starting at position 1172 of SEQ ID NO: 1242714
gcacgucuggaugaguaaa

SEQ ID NO: 1367535 - RNA, 19 nt, Artificial Sequence
  Description of Artificial Sequence: Synthetic oligonucleotide
  Antisense strand to SEQ ID NO: 1367534
uuuacucauccagacgugc

SEQ ID NO: 1367536 - RNA, 19 nt, Artificial Sequence
  Description of Artificial Sequence: Synthetic oligonucleotide
  Sense strand starting at position 1174 of SEQ ID NO: 1242714
acgucuggaugaguaaagu

SEQ ID NO: 1367537 - RNA, 19 nt, Artificial Sequence
  Description of Artificial Sequence: Synthetic oligonucleotide
  Antisense strand to SEQ ID NO: 1367536
acuuuacucauccagacgu

SEQ ID NO: 1367538 - RNA, 19 nt, Artificial Sequence
  Description of Artificial Sequence: Synthetic oligonucleotide
  Sense strand starting at position 1222 of SEQ ID NO: 1242714
uguuaaugauucuuacuga

SEQ ID NO: 1367539 - RNA, 19 nt, Artificial Sequence
  Description of Artificial Sequence: Synthetic oligonucleotide
  Antisense strand to SEQ ID NO: 1367538
ucaguaagaaucauuaaca

SEQ ID NO: 1367540 - RNA, 19 nt, Artificial Sequence
  Description of Artificial Sequence: Synthetic oligonucleotide
  Sense strand starting at position 1223 of SEQ ID NO: 1242714
guuaaugauucuuacugaa

SEQ ID NO: 1367541 - RNA, 19 nt, Artificial Sequence
  Description of Artificial Sequence: Synthetic oligonucleotide
  Antisense strand to SEQ ID NO: 1367540
uucaguaagaaucauuaac

SEQ ID NO: 1367542 - RNA, 19 nt, Artificial Sequence
  Description of Artificial Sequence: Synthetic oligonucleotide
  Sense strand starting at position 1494 of SEQ ID NO: 1242714
gaacucgucgcggguguaa

SEQ ID NO: 1367543 - RNA, 19 nt, Artificial Sequence
  Description of Artificial Sequence: Synthetic oligonucleotide
  Antisense strand to SEQ ID NO: 1367542
uuacacccgcgacgaguuc

SEQ ID NO: 1367544 - RNA, 19 nt, Artificial Sequence
  Description of Artificial Sequence: Synthetic oligonucleotide
  Sense strand starting at position 1496 of SEQ ID NO: 1242714
acucgucgcggguguaaau

SEQ ID NO: 1367545 - RNA, 19 nt, Artificial Sequence
  Description of Artificial Sequence: Synthetic oligonucleotide
  Antisense strand to SEQ ID NO: 1367544
auuuacacccgcgacgagu

SEQ ID NO: 1367546 - RNA, 19 nt, Artificial Sequence
  Description of Artificial Sequence: Synthetic oligonucleotide
  Sense strand starting at position 2040 of SEQ ID NO: 1242714
ggcuuccucuccuuagcaa

SEQ ID NO: 1367547 - RNA, 19 nt, Artificial Sequence
  Description of Artificial Sequence: Synthetic oligonucleotide
  Antisense strand to SEQ ID NO: 1367546
uugcuaaggagaggaagcc

SEQ ID NO: 1367548 - RNA, 19 nt, Artificial Sequence
  Description of Artificial Sequence: Synthetic oligonucleotide
  Sense strand starting at position 2195 of SEQ ID NO: 1242714
ggcgauuacccaggugaag

SEQ ID NO: 1367549 - RNA, 19 nt, Artificial Sequence
  Description of Artificial Sequence: Synthetic oligonucleotide
  Antisense strand to SEQ ID NO: 1367548
cuucaccuggguaaucgcc

SEQ ID NO: 1367550 - RNA, 19 nt, Artificial Sequence
  Description of Artificial Sequence: Synthetic oligonucleotide
  Sense strand starting at position 2197 of SEQ ID NO: 1242714
cgauuacccaggugaaggu

SEQ ID NO: 1367551 - RNA, 19 nt, Artificial Sequence
  Description of Artificial Sequence: Synthetic oligonucleotide
  Antisense strand to SEQ ID NO: 1367550
accuucaccuggguaaucg

SEQ ID NO: 1367552 - RNA, 19 nt, Artificial Sequence
  Description of Artificial Sequence: Synthetic oligonucleotide
  Sense strand starting at position 2206 of SEQ ID NO: 1242714
aggugaaggucuuccaggu

SEQ ID NO: 1367553 - RNA, 19 nt, Artificial Sequence
  Description of Artificial Sequence: Synthetic oligonucleotide
  Antisense strand to SEQ ID NO: 1367552
accuggaagaccuucaccu

SEQ ID NO: 1367554 - RNA, 19 nt, Artificial Sequence
  Description of Artificial Sequence: Synthetic oligonucleotide
  Sense strand starting at position 2242 of SEQ ID NO: 1242714
guaagaagguccuccaggu

SEQ ID NO: 1367555 - RNA, 19 nt, Artificial Sequence
  Description of Artificial Sequence: Synthetic oligonucleotide
  Antisense strand to SEQ ID NO: 1367554
accuggaggaccuucuuac

SEQ ID NO: 1367556 - RNA, 19 nt, Artificial Sequence
  Description of Artificial Sequence: Synthetic oligonucleotide
  Sense strand starting at position 2329 of SEQ ID NO: 1242714
guaagaggauccucuaggu

SEQ ID NO: 1367557 - RNA, 19 nt, Artificial Sequence
  Description of Artificial Sequence: Synthetic oligonucleotide
  Antisense strand to SEQ ID NO: 1367556
accuagaggauccucuuac

SEQ ID NO: 1367558 - RNA, 19 nt, Artificial Sequence
  Description of Artificial Sequence: Synthetic oligonucleotide
  Sense strand starting at position 2491 of SEQ ID NO: 1242714
gaggguccuccaggugaga

SEQ ID NO: 1367559 - RNA, 19 nt, Artificial Sequence
  Description of Artificial Sequence: Synthetic oligonucleotide
  Antisense strand to SEQ ID NO: 1367558
ucucaccuggaggacccuc

SEQ ID NO: 1367560 - RNA, 19 nt, Artificial Sequence
  Description of Artificial Sequence: Synthetic oligonucleotide
  Sense strand starting at position 2538 of SEQ ID NO: 1242714
guaagaggguccuccaguu

SEQ ID NO: 1367561 - RNA, 19 nt, Artificial Sequence
  Description of Artificial Sequence: Synthetic oligonucleotide
  Antisense strand to SEQ ID NO: 1367560
aacuggaggacccucuuac

SEQ ID NO: 1367562 - RNA, 19 nt, Artificial Sequence
  Description of Artificial Sequence: Synthetic oligonucleotide
  Sense strand starting at position 2576 of SEQ ID NO: 1242714
ugguccuccaggugagaga

SEQ ID NO: 1367563 - RNA, 19 nt, Artificial Sequence
  Description of Artificial Sequence: Synthetic oligonucleotide
  Antisense strand to SEQ ID NO: 1367562
ucucucaccuggaggacca

SEQ ID NO: 1367564 - RNA, 19 nt, Artificial Sequence
  Description of Artificial Sequence: Synthetic oligonucleotide
  Sense strand starting at position 2587 of SEQ ID NO: 1242714
gugagagagucuuccaggu

SEQ ID NO: 1367565 - RNA, 19 nt, Artificial Sequence
  Description of Artificial Sequence: Synthetic oligonucleotide
  Antisense strand to SEQ ID NO: 1367564
accuggaagacucucucac

SEQ ID NO: 1367566 - RNA, 19 nt, Artificial Sequence
  Description of Artificial Sequence: Synthetic oligonucleotide
  Sense strand starting at position 2591 of SEQ ID NO: 1242714
gagagucuuccaggugaga

SEQ ID NO: 1367567 - RNA, 19 nt, Artificial Sequence
  Description of Artificial Sequence: Synthetic oligonucleotide
  Antisense strand to SEQ ID NO: 1367566
ucucaccuggaagacucuc

SEQ ID NO: 1367568 - RNA, 19 nt, Artificial Sequence
  Description of Artificial Sequence: Synthetic oligonucleotide
  Sense strand starting at position 2593 of SEQ ID NO: 1242714
gagucuuccaggugagagg

SEQ ID NO: 1367569 - RNA, 19 nt, Artificial Sequence
  Description of Artificial Sequence: Synthetic oligonucleotide
  Antisense strand to SEQ ID NO: 1367568
ccucucaccuggaagacuc

SEQ ID NO: 1367570 - RNA, 19 nt, Artificial Sequence
  Description of Artificial Sequence: Synthetic oligonucleotide
  Sense strand starting at position 2659 of SEQ ID NO: 1242714
ggucacuugguccagggau

SEQ ID NO: 1367571 - RNA, 19 nt, Artificial Sequence
  Description of Artificial Sequence: Synthetic oligonucleotide
  Antisense strand to SEQ ID NO: 1367570
aucccuggaccaagugacc

SEQ ID NO: 1367572 - RNA, 19 nt, Artificial Sequence
  Description of Artificial Sequence: Synthetic oligonucleotide
  Sense strand starting at position 2661 of SEQ ID NO: 1242714
ucacuugguccagggaugu

SEQ ID NO: 1367573 - RNA, 19 nt, Artificial Sequence
  Description of Artificial Sequence: Synthetic oligonucleotide
  Antisense strand to SEQ ID NO: 1367572
acaucccuggaccaaguga

SEQ ID NO: 1367574 - RNA, 19 nt, Artificial Sequence
  Description of Artificial Sequence: Synthetic oligonucleotide
  Sense strand starting at position 2873 of SEQ ID NO: 1242714
gucagcauucccuaacaag

SEQ ID NO: 1367575 - RNA, 19 nt, Artificial Sequence
  Description of Artificial Sequence: Synthetic oligonucleotide
  Antisense strand to SEQ ID NO: 1367574
cuuguuagggaaugcugac

SEQ ID NO: 1367576 - RNA, 19 nt, Artificial Sequence
  Description of Artificial Sequence: Synthetic oligonucleotide
  Sense strand starting at position 2946 of SEQ ID NO: 1242714
gguagaagcuucucucaca

SEQ ID NO: 1367577 - RNA, 19 nt, Artificial Sequence
  Description of Artificial Sequence: Synthetic oligonucleotide
  Antisense strand to SEQ ID NO: 1367576
ugugagagaagcuucuacc

SEQ ID NO: 1367578 - RNA, 19 nt, Artificial Sequence
  Description of Artificial Sequence: Synthetic oligonucleotide
  Sense strand starting at position 3075 of SEQ ID NO: 1242714
gccagcauguccucuaauc

SEQ ID NO: 1367579 - RNA, 19 nt, Artificial Sequence
  Description of Artificial Sequence: Synthetic oligonucleotide
  Antisense strand to SEQ ID NO: 1367578
gauuagaggacaugcuggc

SEQ ID NO: 1367580 - RNA, 19 nt, Artificial Sequence
  Description of Artificial Sequence: Synthetic oligonucleotide
  Sense strand starting at position 3105 of SEQ ID NO: 1242714
uugaaauccagucgagcaa

SEQ ID NO: 1367581 - RNA, 19 nt, Artificial Sequence
  Description of Artificial Sequence: Synthetic oligonucleotide
  Antisense strand to SEQ ID NO: 1367580
uugcucgacuggauuucaa

SEQ ID NO: 1367582 - RNA, 19 nt, Artificial Sequence
  Description of Artificial Sequence: Synthetic oligonucleotide
  Sense strand starting at position 3492 of SEQ ID NO: 1242714
aagcacuucuuacgggaaa

SEQ ID NO: 1367583 - RNA, 19 nt, Artificial Sequence
  Description of Artificial Sequence: Synthetic oligonucleotide
  Antisense strand to SEQ ID NO: 1367582
uuucccguaagaagugcuu

SEQ ID NO: 1367584 - RNA, 19 nt, Artificial Sequence
  Description of Artificial Sequence: Synthetic oligonucleotide
  Sense strand starting at position 3494 of SEQ ID NO: 1242714
gcacuucuuacgggaaaua

SEQ ID NO: 1367585 - RNA, 19 nt, Artificial Sequence
  Description of Artificial Sequence: Synthetic oligonucleotide
  Antisense strand to SEQ ID NO: 1367584
uauuucccguaagaagugc

SEQ ID NO: 1367586 - RNA, 19 nt, Artificial Sequence
  Description of Artificial Sequence: Synthetic oligonucleotide
  Sense strand starting at position 3642 of SEQ ID NO: 1242714
cccucauuccaguguggga

SEQ ID NO: 1367587 - RNA, 19 nt, Artificial Sequence
  Description of Artificial Sequence: Synthetic oligonucleotide
  Antisense strand to SEQ ID NO: 1367586
ucccacacuggaaugaggg

SEQ ID NO: 1367588 - RNA, 19 nt, Artificial Sequence
  Description of Artificial Sequence: Synthetic oligonucleotide
  Sense strand starting at position 3818 of SEQ ID NO: 1242714
gggaguugagugugguaua

SEQ ID NO: 1367589 - RNA, 19 nt, Artificial Sequence
  Description of Artificial Sequence: Synthetic oligonucleotide
  Antisense strand to SEQ ID NO: 1367588
uauaccacacucaacuccc

SEQ ID NO: 1367590 - RNA, 19 nt, Artificial Sequence
  Description of Artificial Sequence: Synthetic oligonucleotide
  Sense strand starting at position 3821 of SEQ ID NO: 1242714
aguugagugugguauacaa

SEQ ID NO: 1367591 - RNA, 19 nt, Artificial Sequence
  Description of Artificial Sequence: Synthetic oligonucleotide
  Antisense strand to SEQ ID NO: 1367590
uuguauaccacacucaacu

SEQ ID NO: 1367592 - RNA, 19 nt, Artificial Sequence
  Description of Artificial Sequence: Synthetic oligonucleotide
  Sense strand starting at position 59 of SEQ ID NO: 1242715
auuugucucuuggacauaa

SEQ ID NO: 1367593 - RNA, 19 nt, Artificial Sequence
  Description of Artificial Sequence: Synthetic oligonucleotide
  Antisense strand to SEQ ID NO: 1367592
uuauguccaagagacaaau

SEQ ID NO: 1367594 - RNA, 19 nt, Artificial Sequence
  Description of Artificial Sequence: Synthetic oligonucleotide
  Sense strand starting at position 120 of SEQ ID NO: 1242715
uggacucuguaaguguaau

SEQ ID NO: 1367595 - RNA, 19 nt, Artificial Sequence
  Description of Artificial Sequence: Synthetic oligonucleotide
  Antisense strand to SEQ ID NO: 1367594
auuacacuuacagagucca

SEQ ID NO: 1367596 - RNA, 19 nt, Artificial Sequence
  Description of Artificial Sequence: Synthetic oligonucleotide
  Sense strand starting at position 121 of SEQ ID NO: 1242715
ggacucuguaaguguaaua

SEQ ID NO: 1367597 - RNA, 19 nt, Artificial Sequence
  Description of Artificial Sequence: Synthetic oligonucleotide
  Antisense strand to SEQ ID NO: 1367596
uauuacacuuacagagucc

SEQ ID NO: 1367598 - RNA, 19 nt, Artificial Sequence
  Description of Artificial Sequence: Synthetic oligonucleotide
  Sense strand starting at position 132 of SEQ ID NO: 1242715
guguaauaaaggugaauua

SEQ ID NO: 1367599 - RNA, 19 nt, Artificial Sequence
  Description of Artificial Sequence: Synthetic oligonucleotide
  Antisense strand to SEQ ID NO: 1367598
uaauucaccuuuauuacac

SEQ ID NO: 1367600 - RNA, 19 nt, Artificial Sequence
  Description of Artificial Sequence: Synthetic oligonucleotide
  Sense strand starting at position 142 of SEQ ID NO: 1242715
ggugaauuacuuugguuaa

SEQ ID NO: 1367601 - RNA, 19 nt, Artificial Sequence
  Description of Artificial Sequence: Synthetic oligonucleotide
  Antisense strand to SEQ ID NO: 1367600
uuaaccaaaguaauucacc

SEQ ID NO: 1367602 - RNA, 19 nt, Artificial Sequence
  Description of Artificial Sequence: Synthetic oligonucleotide
  Sense strand starting at position 144 of SEQ ID NO: 1242715
ugaauuacuuugguuaaag

SEQ ID NO: 1367603 - RNA, 19 nt, Artificial Sequence
  Description of Artificial Sequence: Synthetic oligonucleotide
  Antisense strand to SEQ ID NO: 1367602
cuuuaaccaaaguaauuca

SEQ ID NO: 1367604 - RNA, 19 nt, Artificial Sequence
  Description of Artificial Sequence: Synthetic oligonucleotide
  Sense strand starting at position 145 of SEQ ID NO: 1242715
gaauuacuuugguuaaagu

SEQ ID NO: 1367605 - RNA, 19 nt, Artificial Sequence
  Description of Artificial Sequence: Synthetic oligonucleotide
  Antisense strand to SEQ ID NO: 1367604
acuuuaaccaaaguaauuc

SEQ ID NO: 1367606 - RNA, 19 nt, Artificial Sequence
  Description of Artificial Sequence: Synthetic oligonucleotide
  Sense strand starting at position 154 of SEQ ID NO: 1242715
ugguuaaagugauugcaug

SEQ ID NO: 1367607 - RNA, 19 nt, Artificial Sequence
  Description of Artificial Sequence: Synthetic oligonucleotide
  Antisense strand to SEQ ID NO: 1367606
caugcaaucacuuuaacca

SEQ ID NO: 1367608 - RNA, 19 nt, Artificial Sequence
  Description of Artificial Sequence: Synthetic oligonucleotide
  Sense strand starting at position 416 of SEQ ID NO: 1242715
caguauagcgguuaagaac

SEQ ID NO: 1367609 - RNA, 19 nt, Artificial Sequence
  Description of Artificial Sequence: Synthetic oligonucleotide
  Antisense strand to SEQ ID NO: 1367608
guucuuaaccgcuauacug

SEQ ID NO: 1367610 - RNA, 19 nt, Artificial Sequence
  Description of Artificial Sequence: Synthetic oligonucleotide
  Sense strand starting at position 488 of SEQ ID NO: 1242715
uauuguguuacugggagaa

SEQ ID NO: 1367611 - RNA, 19 nt, Artificial Sequence
  Description of Artificial Sequence: Synthetic oligonucleotide
  Antisense strand to SEQ ID NO: 1367610
uucucccaguaacacaaua

SEQ ID NO: 1367612 - RNA, 19 nt, Artificial Sequence
  Description of Artificial Sequence: Synthetic oligonucleotide
  Sense strand starting at position 577 of SEQ ID NO: 1242715
cugcuauuaguauaagaaa

SEQ ID NO: 1367613 - RNA, 19 nt, Artificial Sequence
  Description of Artificial Sequence: Synthetic oligonucleotide
  Antisense strand to SEQ ID NO: 1367612
uuucuuauacuaauagcag

SEQ ID NO: 1367614 - RNA, 19 nt, Artificial Sequence
  Description of Artificial Sequence: Synthetic oligonucleotide
  Sense strand starting at position 616 of SEQ ID NO: 1242715
caaagagugggcuacucua

SEQ ID NO: 1367615 - RNA, 19 nt, Artificial Sequence
  Description of Artificial Sequence: Synthetic oligonucleotide
  Antisense strand to SEQ ID NO: 1367614
uagaguagcccacucuuug

SEQ ID NO: 1367616 - RNA, 19 nt, Artificial Sequence
  Description of Artificial Sequence: Synthetic oligonucleotide
  Sense strand starting at position 632 of SEQ ID NO: 1242715
cuacgauuguucucuggag

SEQ ID NO: 1367617 - RNA, 19 nt, Artificial Sequence
  Description of Artificial Sequence: Synthetic oligonucleotide
  Antisense strand to SEQ ID NO: 1367616
cuccagagaacaaucguag

SEQ ID NO: 1367618 - RNA, 19 nt, Artificial Sequence
  Description of Artificial Sequence: Synthetic oligonucleotide
  Sense strand starting at position 633 of SEQ ID NO: 1242715
uacgauuguucucuggaga

SEQ ID NO: 1367619 - RNA, 19 nt, Artificial Sequence
  Description of Artificial Sequence: Synthetic oligonucleotide
  Antisense strand to SEQ ID NO: 1367618
ucuccagagaacaaucgua

SEQ ID NO: 1367620 - RNA, 19 nt, Artificial Sequence
  Description of Artificial Sequence: Synthetic oligonucleotide
  Sense strand starting at position 634 of SEQ ID NO: 1242715
acgauuguucucuggagac

SEQ ID NO: 1367621 - RNA, 19 nt, Artificial Sequence
  Description of Artificial Sequence: Synthetic oligonucleotide
  Antisense strand to SEQ ID NO: 1367620
gucuccagagaacaaucgu

SEQ ID NO: 1367622 - RNA, 19 nt, Artificial Sequence
  Description of Artificial Sequence: Synthetic oligonucleotide
  Sense strand starting at position 664 of SEQ ID NO: 1242715
gccuguuucuaagugaaag

SEQ ID NO: 1367623 - RNA, 19 nt, Artificial Sequence
  Description of Artificial Sequence: Synthetic oligonucleotide
  Antisense strand to SEQ ID NO: 1367622
cuuucacuuagaaacaggc

SEQ ID NO: 1367624 - RNA, 19 nt, Artificial Sequence
  Description of Artificial Sequence: Synthetic oligonucleotide
  Sense strand starting at position 740 of SEQ ID NO: 1242715
ucaauuggcaucuggugaa

SEQ ID NO: 1367625 - RNA, 19 nt, Artificial Sequence
  Description of Artificial Sequence: Synthetic oligonucleotide
  Antisense strand to SEQ ID NO: 1367624
uucaccagaugccaauuga

SEQ ID NO: 1367626 - RNA, 19 nt, Artificial Sequence
  Description of Artificial Sequence: Synthetic oligonucleotide
  Sense strand starting at position 744 of SEQ ID NO: 1242715
uuggcaucuggugaacuau

SEQ ID NO: 1367627 - RNA, 19 nt, Artificial Sequence
  Description of Artificial Sequence: Synthetic oligonucleotide
  Antisense strand to SEQ ID NO: 1367626
auaguucaccagaugccaa

SEQ ID NO: 1367628 - RNA, 19 nt, Artificial Sequence
  Description of Artificial Sequence: Synthetic oligonucleotide
  Sense strand starting at position 750 of SEQ ID NO: 1242715
ucuggugaacuaugccuaa

SEQ ID NO: 1367629 - RNA, 19 nt, Artificial Sequence
  Description of Artificial Sequence: Synthetic oligonucleotide
  Antisense strand to SEQ ID NO: 1367628
uuaggcauaguucaccaga

SEQ ID NO: 1367630 - RNA, 19 nt, Artificial Sequence
  Description of Artificial Sequence: Synthetic oligonucleotide
  Sense strand starting at position 971 of SEQ ID NO: 1242715
uuguuuguaccucaaugga

SEQ ID NO: 1367631 - RNA, 19 nt, Artificial Sequence
  Description of Artificial Sequence: Synthetic oligonucleotide
  Antisense strand to SEQ ID NO: 1367630
uccauugagguacaaacaa

SEQ ID NO: 1367632 - RNA, 19 nt, Artificial Sequence
  Description of Artificial Sequence: Synthetic oligonucleotide
  Sense strand starting at position 974 of SEQ ID NO: 1242715
uuuguaccucaauggauaa

SEQ ID NO: 1367633 - RNA, 19 nt, Artificial Sequence
  Description of Artificial Sequence: Synthetic oligonucleotide
  Antisense strand to SEQ ID NO: 1367632
uuauccauugagguacaaa

SEQ ID NO: 1367634 - RNA, 19 nt, Artificial Sequence
  Description of Artificial Sequence: Synthetic oligonucleotide
  Sense strand starting at position 2152 of SEQ ID NO: 1242715
guggguccggaauaaacaa

SEQ ID NO: 1367635 - RNA, 19 nt, Artificial Sequence
  Description of Artificial Sequence: Synthetic oligonucleotide
  Antisense strand to SEQ ID NO: 1367634
uuguuuauuccggacccac

SEQ ID NO: 1367636 - RNA, 19 nt, Artificial Sequence
  Description of Artificial Sequence: Synthetic oligonucleotide
  Sense strand starting at position 2461 of SEQ ID NO: 1242715
gcaucuugacucugagauu

SEQ ID NO: 1367637 - RNA, 19 nt, Artificial Sequence
  Description of Artificial Sequence: Synthetic oligonucleotide
  Antisense strand to SEQ ID NO: 1367636
aaucucagagucaagaugc

SEQ ID NO: 1367638 - RNA, 19 nt, Artificial Sequence
  Description of Artificial Sequence: Synthetic oligonucleotide
  Sense strand starting at position 2513 of SEQ ID NO: 1242715
ucgggaguuuggguugaga

SEQ ID NO: 1367639 - RNA, 19 nt, Artificial Sequence
  Description of Artificial Sequence: Synthetic oligonucleotide
  Antisense strand to SEQ ID NO: 1367638
ucucaacccaaacucccga

SEQ ID NO: 1367640 - RNA, 19 nt, Artificial Sequence
  Description of Artificial Sequence: Synthetic oligonucleotide
  Sense strand starting at position 2515 of SEQ ID NO: 1242715
gggaguuuggguugagaaa

SEQ ID NO: 1367641 - RNA, 19 nt, Artificial Sequence
  Description of Artificial Sequence: Synthetic oligonucleotide
  Antisense strand to SEQ ID NO: 1367640
uuucucaacccaaacuccc

SEQ ID NO: 1367642 - RNA, 19 nt, Artificial Sequence
  Description of Artificial Sequence: Synthetic oligonucleotide
  Sense strand starting at position 2566 of SEQ ID NO: 1242715
acaucugagcccugggaau

SEQ ID NO: 1367643 - RNA, 19 nt, Artificial Sequence
  Description of Artificial Sequence: Synthetic oligonucleotide
  Antisense strand to SEQ ID NO: 1367642
auucccagggcucagaugu

SEQ ID NO: 1367644 - RNA, 19 nt, Artificial Sequence
  Description of Artificial Sequence: Synthetic oligonucleotide
  Sense strand starting at position 2885 of SEQ ID NO: 1242715
ggaaacucuuaagcaggau

SEQ ID NO: 1367645 - RNA, 19 nt, Artificial Sequence
  Description of Artificial Sequence: Synthetic oligonucleotide
  Antisense strand to SEQ ID NO: 1367644
auccugcuuaagaguuucc

SEQ ID NO: 1367646 - RNA, 19 nt, Artificial Sequence
  Description of Artificial Sequence: Synthetic oligonucleotide
  Sense strand starting at position 2913 of SEQ ID NO: 1242715
gaaggucaauguucucaac

SEQ ID NO: 1367647 - RNA, 19 nt, Artificial Sequence
  Description of Artificial Sequence: Synthetic oligonucleotide
  Antisense strand to SEQ ID NO: 1367646
guugagaacauugaccuuc

SEQ ID NO: 1367648 - RNA, 19 nt, Artificial Sequence
  Description of Artificial Sequence: Synthetic oligonucleotide
  Sense strand starting at position 2915 of SEQ ID NO: 1242715
aggucaauguucucaaccu

SEQ ID NO: 1367649 - RNA, 19 nt, Artificial Sequence
  Description of Artificial Sequence: Synthetic oligonucleotide
  Antisense strand to SEQ ID NO: 1367648
agguugagaacauugaccu

SEQ ID NO: 1367650 - RNA, 19 nt, Artificial Sequence
  Description of Artificial Sequence: Synthetic oligonucleotide
  Sense strand starting at position 2923 of SEQ ID NO: 1242715
guucucaaccuugacguaa

SEQ ID NO: 1367651 - RNA, 19 nt, Artificial Sequence
  Description of Artificial Sequence: Synthetic oligonucleotide
  Antisense strand to SEQ ID NO: 1367650
uuacgucaagguugagaac

SEQ ID NO: 1367652 - RNA, 19 nt, Artificial Sequence
  Description of Artificial Sequence: Synthetic oligonucleotide
  Sense strand starting at position 2985 of SEQ ID NO: 1242715
acuaacuuugagcaacgaa

SEQ ID NO: 1367653 - RNA, 19 nt, Artificial Sequence
  Description of Artificial Sequence: Synthetic oligonucleotide
  Antisense strand to SEQ ID NO: 1367652
uucguugcucaaaguuagu

SEQ ID NO: 1367654 - RNA, 19 nt, Artificial Sequence
  Description of Artificial Sequence: Synthetic oligonucleotide
  Sense strand starting at position 3095 of SEQ ID NO: 1242715
gguggagaggaguguuaaa

SEQ ID NO: 1367655 - RNA, 19 nt, Artificial Sequence
  Description of Artificial Sequence: Synthetic oligonucleotide
  Antisense strand to SEQ ID NO: 1367654
uuuaacacuccucuccacc

SEQ ID NO: 1367656 - RNA, 19 nt, Artificial Sequence
  Description of Artificial Sequence: Synthetic oligonucleotide
  Sense strand starting at position 3106 of SEQ ID NO: 1242715
guguuaaauccugaucuau

SEQ ID NO: 1367657 - RNA, 19 nt, Artificial Sequence
  Description of Artificial Sequence: Synthetic oligonucleotide
  Antisense strand to SEQ ID NO: 1367656
auagaucaggauuuaacac

SEQ ID NO: 1367658 - RNA, 19 nt, Artificial Sequence
  Description of Artificial Sequence: Synthetic oligonucleotide
  Sense strand starting at position 3126 of SEQ ID NO: 1242715
uuagaagugagucgacaga

SEQ ID NO: 1367659 - RNA, 19 nt, Artificial Sequence
  Description of Artificial Sequence: Synthetic oligonucleotide
  Antisense strand to SEQ ID NO: 1367658
ucugucgacucacuucuaa

SEQ ID NO: 1367660 - RNA, 19 nt, Artificial Sequence
  Description of Artificial Sequence: Synthetic oligonucleotide
  Sense strand starting at position 3739 of SEQ ID NO: 1242715
auaauucuuguggguaaua

SEQ ID NO: 1367661 - RNA, 19 nt, Artificial Sequence
  Description of Artificial Sequence: Synthetic oligonucleotide
  Antisense strand to SEQ ID NO: 1367660
uauuacccacaagaauuau

SEQ ID NO: 1367662 - RNA, 19 nt, Artificial Sequence
  Description of Artificial Sequence: Synthetic oligonucleotide
  Sense strand starting at position 3740 of SEQ ID NO: 1242715
uaauucuuguggguaauaa

SEQ ID NO: 1367663 - RNA, 19 nt, Artificial Sequence
  Description of Artificial Sequence: Synthetic oligonucleotide
  Antisense strand to SEQ ID NO: 1367662
uuauuacccacaagaauua

SEQ ID NO: 1367664 - RNA, 19 nt, Artificial Sequence
  Description of Artificial Sequence: Synthetic oligonucleotide
  Sense strand starting at position 3871 of SEQ ID NO: 1242715
uaggcuacucuggagaagu

SEQ ID NO: 1367665 - RNA, 19 nt, Artificial Sequence
  Description of Artificial Sequence: Synthetic oligonucleotide
  Antisense strand to SEQ ID NO: 1367664
acuucuccagaguagccua

SEQ ID NO: 1367666 - RNA, 19 nt, Artificial Sequence
  Description of Artificial Sequence: Synthetic oligonucleotide
  Sense strand starting at position 3882 of SEQ ID NO: 1242715
ggagaagucuugccaagga

SEQ ID NO: 1367667 - RNA, 19 nt, Artificial Sequence
  Description of Artificial Sequence: Synthetic oligonucleotide
  Antisense strand to SEQ ID NO: 1367666
uccuuggcaagacuucucc

SEQ ID NO: 1367668 - RNA, 19 nt, Artificial Sequence
  Description of Artificial Sequence: Synthetic oligonucleotide
  Sense strand starting at position 3916 of SEQ ID NO: 1242715
uggaguuguuaccugaagu

SEQ ID NO: 1367669 - RNA, 19 nt, Artificial Sequence
  Description of Artificial Sequence: Synthetic oligonucleotide
  Antisense strand to SEQ ID NO: 1367668
acuucagguaacaacucca

SEQ ID NO: 1367670 - RNA, 19 nt, Artificial Sequence
  Description of Artificial Sequence: Synthetic oligonucleotide
  Sense strand starting at position 3917 of SEQ ID NO: 1242715
ggaguuguuaccugaaguu

SEQ ID NO: 1367671 - RNA, 19 nt, Artificial Sequence
  Description of Artificial Sequence: Synthetic oligonucleotide
  Antisense strand to SEQ ID NO: 1367670
aacuucagguaacaacucc

SEQ ID NO: 1367672 - RNA, 19 nt, Artificial Sequence
  Description of Artificial Sequence: Synthetic oligonucleotide
  Sense strand starting at position 351 of SEQ ID NO: 1242716
ggaggagccucaugagaag

SEQ ID NO: 1367673 - RNA, 19 nt, Artificial Sequence
  Description of Artificial Sequence: Synthetic oligonucleotide
  Antisense strand to SEQ ID NO: 1367672
cuucucaugaggcuccucc

SEQ ID NO: 1367674 - RNA, 19 nt, Artificial Sequence
  Description of Artificial Sequence: Synthetic oligonucleotide
  Sense strand starting at position 590 of SEQ ID NO: 1242716
gcaguuucgucagcucuca

SEQ ID NO: 1367675 - RNA, 19 nt, Artificial Sequence
  Description of Artificial Sequence: Synthetic oligonucleotide
  Antisense strand to SEQ ID NO: 1367674
ugagagcugacgaaacugc

SEQ ID NO: 1367676 - RNA, 19 nt, Artificial Sequence
  Description of Artificial Sequence: Synthetic oligonucleotide
  Sense strand starting at position 1311 of SEQ ID NO: 1242716
agaagccgcucugaguuaa

SEQ ID NO: 1367677 - RNA, 19 nt, Artificial Sequence
  Description of Artificial Sequence: Synthetic oligonucleotide
  Antisense strand to SEQ ID NO: 1367676
uuaacucagagcggcuucu

SEQ ID NO: 1367678 - RNA, 19 nt, Artificial Sequence
  Description of Artificial Sequence: Synthetic oligonucleotide
  Sense strand starting at position 1369 of SEQ ID NO: 1242716
gaugguggucugugcuaag

SEQ ID NO: 1367679 - RNA, 19 nt, Artificial Sequence
  Description of Artificial Sequence: Synthetic oligonucleotide
  Antisense strand to SEQ ID NO: 1367678
cuuagcacagaccaccauc

SEQ ID NO: 1367680 - RNA, 19 nt, Artificial Sequence
  Description of Artificial Sequence: Synthetic oligonucleotide
  Sense strand starting at position 2002 of SEQ ID NO: 1242716
cgcgguucccgccaaauuu

SEQ ID NO: 1367681 - RNA, 19 nt, Artificial Sequence
  Description of Artificial Sequence: Synthetic oligonucleotide
  Antisense strand to SEQ ID NO: 1367680
aaauuuggcgggaaccgcg

SEQ ID NO: 1367682 - RNA, 19 nt, Artificial Sequence
  Description of Artificial Sequence: Synthetic oligonucleotide
  Sense strand starting at position 2364 of SEQ ID NO: 1242716
gcaggcucgagcugguaaa

SEQ ID NO: 1367683 - RNA, 19 nt, Artificial Sequence
  Description of Artificial Sequence: Synthetic oligonucleotide
  Antisense strand to SEQ ID NO: 1367682
uuuaccagcucgagccugc

SEQ ID NO: 1367684 - RNA, 19 nt, Artificial Sequence
  Description of Artificial Sequence: Synthetic oligonucleotide
  Sense strand starting at position 2736 of SEQ ID NO: 1242716
uuucuaucgaggcggagau

SEQ ID NO: 1367685 - RNA, 19 nt, Artificial Sequence
  Description of Artificial Sequence: Synthetic oligonucleotide
  Antisense strand to SEQ ID NO: 1367684
aucuccgccucgauagaaa

SEQ ID NO: 1367686 - RNA, 19 nt, Artificial Sequence
  Description of Artificial Sequence: Synthetic oligonucleotide
  Sense strand starting at position 2789 of SEQ ID NO: 1242716
gugauccgcucucuuggaa

SEQ ID NO: 1367687 - RNA, 19 nt, Artificial Sequence
  Description of Artificial Sequence: Synthetic oligonucleotide
  Antisense strand to SEQ ID NO: 1367686
uuccaagagagcggaucac

SEQ ID NO: 1367688 - RNA, 19 nt, Artificial Sequence
  Description of Artificial Sequence: Synthetic oligonucleotide
  Sense strand starting at position 3253 of SEQ ID NO: 1242716
auggcugagggcugagauu

SEQ ID NO: 1367689 - RNA, 19 nt, Artificial Sequence
  Description of Artificial Sequence: Synthetic oligonucleotide
  Antisense strand to SEQ ID NO: 1367688
aaucucagcccucagccau

SEQ ID NO: 1367690 - RNA, 19 nt, Artificial Sequence
  Description of Artificial Sequence: Synthetic oligonucleotide
  Sense strand starting at position 3298 of SEQ ID NO: 1242716
agcgcuccuaucugggaaa

SEQ ID NO: 1367691 - RNA, 19 nt, Artificial Sequence
  Description of Artificial Sequence: Synthetic oligonucleotide
  Antisense strand to SEQ ID NO: 1367690
uuucccagauaggagcgcu

SEQ ID NO: 1367692 - RNA, 19 nt, Artificial Sequence
  Description of Artificial Sequence: Synthetic oligonucleotide
  Sense strand starting at position 3318 of SEQ ID NO: 1242716
ggccuagagcgcgguuuau

SEQ ID NO: 1367693 - RNA, 19 nt, Artificial Sequence
  Description of Artificial Sequence: Synthetic oligonucleotide
  Antisense strand to SEQ ID NO: 1367692
auaaaccgcgcucuaggcc

SEQ ID NO: 1367694 - RNA, 19 nt, Artificial Sequence
  Description of Artificial Sequence: Synthetic oligonucleotide
  Sense strand starting at position 3531 of SEQ ID NO: 1242716
aagcgugaauugugccuau

SEQ ID NO: 1367695 - RNA, 19 nt, Artificial Sequence
  Description of Artificial Sequence: Synthetic oligonucleotide
  Antisense strand to SEQ ID NO: 1367694
auaggcacaauucacgcuu

SEQ ID NO: 1367696 - RNA, 19 nt, Artificial Sequence
  Description of Artificial Sequence: Synthetic oligonucleotide
  Sense strand starting at position 3566 of SEQ ID NO: 1242716
ggaauagaaaccgguuuga

SEQ ID NO: 1367697 - RNA, 19 nt, Artificial Sequence
  Description of Artificial Sequence: Synthetic oligonucleotide
  Antisense strand to SEQ ID NO: 1367696
ucaaaccgguuucuauucc

SEQ ID NO: 1367698 - RNA, 19 nt, Artificial Sequence
  Description of Artificial Sequence: Synthetic oligonucleotide
  Sense strand starting at position 3570 of SEQ ID NO: 1242716
uagaaaccgguuugaugau

SEQ ID NO: 1367699 - RNA, 19 nt, Artificial Sequence
  Description of Artificial Sequence: Synthetic oligonucleotide
  Antisense strand to SEQ ID NO: 1367698
aucaucaaaccgguuucua

SEQ ID NO: 1367700 - RNA, 19 nt, Artificial Sequence
  Description of Artificial Sequence: Synthetic oligonucleotide
  Sense strand starting at position 3576 of SEQ ID NO: 1242716
ccgguuugaugaugcaacu

SEQ ID NO: 1367701 - RNA, 19 nt, Artificial Sequence
  Description of Artificial Sequence: Synthetic oligonucleotide
  Antisense strand to SEQ ID NO: 1367700
aguugcaucaucaaaccgg

SEQ ID NO: 1367702 - RNA, 19 nt, Artificial Sequence
  Description of Artificial Sequence: Synthetic oligonucleotide
  Sense strand starting at position 3924 of SEQ ID NO: 1242716
aucuguauauaagggauca

SEQ ID NO: 1367703 - RNA, 19 nt, Artificial Sequence
  Description of Artificial Sequence: Synthetic oligonucleotide
  Antisense strand to SEQ ID NO: 1367702
ugaucccuuauauacagau

SEQ ID NO: 1367704 - RNA, 19 nt, Artificial Sequence
  Description of Artificial Sequence: Synthetic oligonucleotide
  Sense strand starting at position 220 of SEQ ID NO: 1242717
gggugauccauuggccaca

SEQ ID NO: 1367705 - RNA, 19 nt, Artificial Sequence
  Description of Artificial Sequence: Synthetic oligonucleotide
  Antisense strand to SEQ ID NO: 1367704
uguggccaauggaucaccc

SEQ ID NO: 1367706 - RNA, 19 nt, Artificial Sequence
  Description of Artificial Sequence: Synthetic oligonucleotide
  Sense strand starting at position 222 of SEQ ID NO: 1242717
gugauccauuggccacauu

SEQ ID NO: 1367707 - RNA, 19 nt, Artificial Sequence
  Description of Artificial Sequence: Synthetic oligonucleotide
  Antisense strand to SEQ ID NO: 1367706
aauguggccaauggaucac

SEQ ID NO: 1367708 - RNA, 19 nt, Artificial Sequence
  Description of Artificial Sequence: Synthetic oligonucleotide
  Sense strand starting at position 277 of SEQ ID NO: 1242717
ccuugucucuuagcauaga

SEQ ID NO: 1367709 - RNA, 19 nt, Artificial Sequence
  Description of Artificial Sequence: Synthetic oligonucleotide
  Antisense strand to SEQ ID NO: 1367708
ucuaugcuaagagacaagg

SEQ ID NO: 1367710 - RNA, 19 nt, Artificial Sequence
  Description of Artificial Sequence: Synthetic oligonucleotide
  Sense strand starting at position 280 of SEQ ID NO: 1242717
ugucucuuagcauagagau

SEQ ID NO: 1367711 - RNA, 19 nt, Artificial Sequence
  Description of Artificial Sequence: Synthetic oligonucleotide
  Antisense strand to SEQ ID NO: 1367710
aucucuaugcuaagagaca

SEQ ID NO: 1367712 - RNA, 19 nt, Artificial Sequence
  Description of Artificial Sequence: Synthetic oligonucleotide
  Sense strand starting at position 671 of SEQ ID NO: 1242717
accagauggcguuaaccaa

SEQ ID NO: 1367713 - RNA, 19 nt, Artificial Sequence
  Description of Artificial Sequence: Synthetic oligonucleotide
  Antisense strand to SEQ ID NO: 1367712
uugguuaacgccaucuggu

SEQ ID NO: 1367714 - RNA, 19 nt, Artificial Sequence
  Description of Artificial Sequence: Synthetic oligonucleotide
  Sense strand starting at position 752 of SEQ ID NO: 1242717
aggcccucugguugaagau

SEQ ID NO: 1367715 - RNA, 19 nt, Artificial Sequence
  Description of Artificial Sequence: Synthetic oligonucleotide
  Antisense strand to SEQ ID NO: 1367714
aucuucaaccagagggccu

SEQ ID NO: 1367716 - RNA, 19 nt, Artificial Sequence
  Description of Artificial Sequence: Synthetic oligonucleotide
  Sense strand starting at position 765 of SEQ ID NO: 1242717
gaagauggcuggucucuua

SEQ ID NO: 1367717 - RNA, 19 nt, Artificial Sequence
  Description of Artificial Sequence: Synthetic oligonucleotide
  Antisense strand to SEQ ID NO: 1367716
uaagagaccagccaucuuc

SEQ ID NO: 1367718 - RNA, 19 nt, Artificial Sequence
  Description of Artificial Sequence: Synthetic oligonucleotide
  Sense strand starting at position 768 of SEQ ID NO: 1242717
gauggcuggucucuuaacu

SEQ ID NO: 1367719 - RNA, 19 nt, Artificial Sequence
  Description of Artificial Sequence: Synthetic oligonucleotide
  Antisense strand to SEQ ID NO: 1367718
aguuaagagaccagccauc

SEQ ID NO: 1367720 - RNA, 19 nt, Artificial Sequence
  Description of Artificial Sequence: Synthetic oligonucleotide
  Sense strand starting at position 894 of SEQ ID NO: 1242717
aguaacaguuguguuccua

SEQ ID NO: 1367721 - RNA, 19 nt, Artificial Sequence
  Description of Artificial Sequence: Synthetic oligonucleotide
  Antisense strand to SEQ ID NO: 1367720
uaggaacacaacuguuacu

SEQ ID NO: 1367722 - RNA, 19 nt, Artificial Sequence
  Description of Artificial Sequence: Synthetic oligonucleotide
  Sense strand starting at position 940 of SEQ ID NO: 1242717
guuccuccauuguuugaaa

SEQ ID NO: 1367723 - RNA, 19 nt, Artificial Sequence
  Description of Artificial Sequence: Synthetic oligonucleotide
  Antisense strand to SEQ ID NO: 1367722
uuucaaacaauggaggaac

SEQ ID NO: 1367724 - RNA, 19 nt, Artificial Sequence
  Description of Artificial Sequence: Synthetic oligonucleotide
  Sense strand starting at position 942 of SEQ ID NO: 1242717
uccuccauuguuugaaaga

SEQ ID NO: 1367725 - RNA, 19 nt, Artificial Sequence
  Description of Artificial Sequence: Synthetic oligonucleotide
  Antisense strand to SEQ ID NO: 1367724
ucuuucaaacaauggagga

SEQ ID NO: 1367726 - RNA, 19 nt, Artificial Sequence
  Description of Artificial Sequence: Synthetic oligonucleotide
  Sense strand starting at position 949 of SEQ ID NO: 1242717
uuguuugaaagaugccaga

SEQ ID NO: 1367727 - RNA, 19 nt, Artificial Sequence
  Description of Artificial Sequence: Synthetic oligonucleotide
  Antisense strand to SEQ ID NO: 1367726
ucuggcaucuuucaaacaa

SEQ ID NO: 1367728 - RNA, 19 nt, Artificial Sequence
  Description of Artificial Sequence: Synthetic oligonucleotide
  Sense strand starting at position 1043 of SEQ ID NO: 1242717
ccagguauccacugagggu

SEQ ID NO: 1367729 - RNA, 19 nt, Artificial Sequence
  Description of Artificial Sequence: Synthetic oligonucleotide
  Antisense strand to SEQ ID NO: 1367728
acccucaguggauaccugg

SEQ ID NO: 1367730 - RNA, 19 nt, Artificial Sequence
  Description of Artificial Sequence: Synthetic oligonucleotide
  Sense strand starting at position 2009 of SEQ ID NO: 1242717
gugugugguguguugagua

SEQ ID NO: 1367731 - RNA, 19 nt, Artificial Sequence
  Description of Artificial Sequence: Synthetic oligonucleotide
  Antisense strand to SEQ ID NO: 1367730
uacucaacacaccacacac

SEQ ID NO: 1367732 - RNA, 19 nt, Artificial Sequence
  Description of Artificial Sequence: Synthetic oligonucleotide
  Sense strand starting at position 2011 of SEQ ID NO: 1242717
gugugguguguugaguaaa

SEQ ID NO: 1367733 - RNA, 19 nt, Artificial Sequence
  Description of Artificial Sequence: Synthetic oligonucleotide
  Antisense strand to SEQ ID NO: 1367732
uuuacucaacacaccacac

SEQ ID NO: 1367734 - RNA, 19 nt, Artificial Sequence
  Description of Artificial Sequence: Synthetic oligonucleotide
  Sense strand starting at position 2014 of SEQ ID NO: 1242717
ugguguguugaguaaacug

SEQ ID NO: 1367735 - RNA, 19 nt, Artificial Sequence
  Description of Artificial Sequence: Synthetic oligonucleotide
  Antisense strand to SEQ ID NO: 1367734
caguuuacucaacacacca

SEQ ID NO: 1367736 - RNA, 19 nt, Artificial Sequence
  Description of Artificial Sequence: Synthetic oligonucleotide
  Sense strand starting at position 2789 of SEQ ID NO: 1242717
cccauaaacccuggaaagu

SEQ ID NO: 1367737 - RNA, 19 nt, Artificial Sequence
  Description of Artificial Sequence: Synthetic oligonucleotide
  Antisense strand to SEQ ID NO: 1367736
acuuuccaggguuuauggg

SEQ ID NO: 1367738 - RNA, 19 nt, Artificial Sequence
  Description of Artificial Sequence: Synthetic oligonucleotide
  Sense strand starting at position 2958 of SEQ ID NO: 1242717
gcaagugaggaguguaaug

SEQ ID NO: 1367739 - RNA, 19 nt, Artificial Sequence
  Description of Artificial Sequence: Synthetic oligonucleotide
  Antisense strand to SEQ ID NO: 1367738
cauuacacuccucacuugc

SEQ ID NO: 1367740 - RNA, 19 nt, Artificial Sequence
  Description of Artificial Sequence: Synthetic oligonucleotide
  Sense strand starting at position 2976 of SEQ ID NO: 1242717
ggagcacucaguuguucua

SEQ ID NO: 1367741 - RNA, 19 nt, Artificial Sequence
  Description of Artificial Sequence: Synthetic oligonucleotide
  Antisense strand to SEQ ID NO: 1367740
uagaacaacugagugcucc

SEQ ID NO: 1367742 - RNA, 19 nt, Artificial Sequence
  Description of Artificial Sequence: Synthetic oligonucleotide
  Sense strand starting at position 2978 of SEQ ID NO: 1242717
agcacucaguuguucuaaa

SEQ ID NO: 1367743 - RNA, 19 nt, Artificial Sequence
  Description of Artificial Sequence: Synthetic oligonucleotide
  Antisense strand to SEQ ID NO: 1367742
uuuagaacaacugagugcu

SEQ ID NO: 1367744 - RNA, 19 nt, Artificial Sequence
  Description of Artificial Sequence: Synthetic oligonucleotide
  Sense strand starting at position 3072 of SEQ ID NO: 1242717
gccaucucucauggauaaa

SEQ ID NO: 1367745 - RNA, 19 nt, Artificial Sequence
  Description of Artificial Sequence: Synthetic oligonucleotide
  Antisense strand to SEQ ID NO: 1367744
uuuauccaugagagauggc

SEQ ID NO: 1367746 - RNA, 19 nt, Artificial Sequence
  Description of Artificial Sequence: Synthetic oligonucleotide
  Sense strand starting at position 3217 of SEQ ID NO: 1242717
uggcuccagaugugaugua

SEQ ID NO: 1367747 - RNA, 19 nt, Artificial Sequence
  Description of Artificial Sequence: Synthetic oligonucleotide
  Antisense strand to SEQ ID NO: 1367746
uacaucacaucuggagcca

SEQ ID NO: 1367748 - RNA, 19 nt, Artificial Sequence
  Description of Artificial Sequence: Synthetic oligonucleotide
  Sense strand starting at position 3227 of SEQ ID NO: 1242717
ugugauguaucauuaacuc

SEQ ID NO: 1367749 - RNA, 19 nt, Artificial Sequence
  Description of Artificial Sequence: Synthetic oligonucleotide
  Antisense strand to SEQ ID NO: 1367748
gaguuaaugauacaucaca

SEQ ID NO: 1367750 - RNA, 19 nt, Artificial Sequence
  Description of Artificial Sequence: Synthetic oligonucleotide
  Sense strand starting at position 3246 of SEQ ID NO: 1242717
acaugcucccuggaucauu

SEQ ID NO: 1367751 - RNA, 19 nt, Artificial Sequence
  Description of Artificial Sequence: Synthetic oligonucleotide
  Antisense strand to SEQ ID NO: 1367750
aaugauccagggagcaugu

SEQ ID NO: 1367752 - RNA, 19 nt, Artificial Sequence
  Description of Artificial Sequence: Synthetic oligonucleotide
  Sense strand starting at position 3311 of SEQ ID NO: 1242717
uggugauagucaccuaagu

SEQ ID NO: 1367753 - RNA, 19 nt, Artificial Sequence
  Description of Artificial Sequence: Synthetic oligonucleotide
  Antisense strand to SEQ ID NO: 1367752
acuuaggugacuaucacca

SEQ ID NO: 1367754 - RNA, 19 nt, Artificial Sequence
  Description of Artificial Sequence: Synthetic oligonucleotide
  Sense strand starting at position 3313 of SEQ ID NO: 1242717
gugauagucaccuaaguga

SEQ ID NO: 1367755 - RNA, 19 nt, Artificial Sequence
  Description of Artificial Sequence: Synthetic oligonucleotide
  Antisense strand to SEQ ID NO: 1367754
ucacuuaggugacuaucac

SEQ ID NO: 1367756 - RNA, 19 nt, Artificial Sequence
  Description of Artificial Sequence: Synthetic oligonucleotide
  Sense strand starting at position 3356 of SEQ ID NO: 1242717
cuacguauacaugaaguga

SEQ ID NO: 1367757 - RNA, 19 nt, Artificial Sequence
  Description of Artificial Sequence: Synthetic oligonucleotide
  Antisense strand to SEQ ID NO: 1367756
ucacuucauguauacguag

SEQ ID NO: 1367758 - RNA, 19 nt, Artificial Sequence
  Description of Artificial Sequence: Synthetic oligonucleotide
  Sense strand starting at position 3400 of SEQ ID NO: 1242717
aaaggugauuuguaucuga

SEQ ID NO: 1367759 - RNA, 19 nt, Artificial Sequence
  Description of Artificial Sequence: Synthetic oligonucleotide
  Antisense strand to SEQ ID NO: 1367758
ucagauacaaaucaccuuu

SEQ ID NO: 1367760 - RNA, 19 nt, Artificial Sequence
  Description of Artificial Sequence: Synthetic oligonucleotide
  Sense strand starting at position 3403 of SEQ ID NO: 1242717
ggugauuuguaucugaguc

SEQ ID NO: 1367761 - RNA, 19 nt, Artificial Sequence
  Description of Artificial Sequence: Synthetic oligonucleotide
  Antisense strand to SEQ ID NO: 1367760
gacucagauacaaaucacc

SEQ ID NO: 1367762 - RNA, 19 nt, Artificial Sequence
  Description of Artificial Sequence: Synthetic oligonucleotide
  Sense strand starting at position 3404 of SEQ ID NO: 1242717
gugauuuguaucugagucu

SEQ ID NO: 1367763 - RNA, 19 nt, Artificial Sequence
  Description of Artificial Sequence: Synthetic oligonucleotide
  Antisense strand to SEQ ID NO: 1367762
agacucagauacaaaucac

SEQ ID NO: 1367764 - RNA, 19 nt, Artificial Sequence
  Description of Artificial Sequence: Synthetic oligonucleotide
  Sense strand starting at position 3464 of SEQ ID NO: 1242717
cucgauaaauuguuuaauc

SEQ ID NO: 1367765 - RNA, 19 nt, Artificial Sequence
  Description of Artificial Sequence: Synthetic oligonucleotide
  Antisense strand to SEQ ID NO: 1367764
gauuaaacaauuuaucgag

SEQ ID NO: 1367766 - RNA, 19 nt, Artificial Sequence
  Description of Artificial Sequence: Synthetic oligonucleotide
  Sense strand starting at position 3466 of SEQ ID NO: 1242717
cgauaaauuguuuaauccu

SEQ ID NO: 1367767 - RNA, 19 nt, Artificial Sequence
  Description of Artificial Sequence: Synthetic oligonucleotide
  Antisense strand to SEQ ID NO: 1367766
aggauuaaacaauuuaucg

SEQ ID NO: 1367768 - RNA, 19 nt, Artificial Sequence
  Description of Artificial Sequence: Synthetic oligonucleotide
  Sense strand starting at position 3473 of SEQ ID NO: 1242717
uuguuuaauccugagguug

SEQ ID NO: 1367769 - RNA, 19 nt, Artificial Sequence
  Description of Artificial Sequence: Synthetic oligonucleotide
  Antisense strand to SEQ ID NO: 1367768
caaccucaggauuaaacaa

SEQ ID NO: 1367770 - RNA, 19 nt, Artificial Sequence
  Description of Artificial Sequence: Synthetic oligonucleotide
  Sense strand starting at position 3478 of SEQ ID NO: 1242717
uaauccugagguugucaaa

SEQ ID NO: 1367771 - RNA, 19 nt, Artificial Sequence
  Description of Artificial Sequence: Synthetic oligonucleotide
  Antisense strand to SEQ ID NO: 1367770
uuugacaaccucaggauua

SEQ ID NO: 1367772 - RNA, 19 nt, Artificial Sequence
  Description of Artificial Sequence: Synthetic oligonucleotide
  Sense strand starting at position 3573 of SEQ ID NO: 1242717
uggcucauuccaggacaca

SEQ ID NO: 1367773 - RNA, 19 nt, Artificial Sequence
  Description of Artificial Sequence: Synthetic oligonucleotide
  Antisense strand to SEQ ID NO: 1367772
uguguccuggaaugagcca

SEQ ID NO: 1367774 - RNA, 19 nt, Artificial Sequence
  Description of Artificial Sequence: Synthetic oligonucleotide
  Sense strand starting at position 3574 of SEQ ID NO: 1242717
ggcucauuccaggacacau

SEQ ID NO: 1367775 - RNA, 19 nt, Artificial Sequence
  Description of Artificial Sequence: Synthetic oligonucleotide
  Antisense strand to SEQ ID NO: 1367774
auguguccuggaaugagcc

SEQ ID NO: 1367776 - RNA, 19 nt, Artificial Sequence
  Description of Artificial Sequence: Synthetic oligonucleotide
  Sense strand starting at position 3721 of SEQ ID NO: 1242717
agaguagguacacagugau

SEQ ID NO: 1367777 - RNA, 19 nt, Artificial Sequence
  Description of Artificial Sequence: Synthetic oligonucleotide
  Antisense strand to SEQ ID NO: 1367776
aucacuguguaccuacucu

SEQ ID NO: 1367778 - RNA, 19 nt, Artificial Sequence
  Description of Artificial Sequence: Synthetic oligonucleotide
  Sense strand starting at position 3724 of SEQ ID NO: 1242717
guagguacacagugauugu

SEQ ID NO: 1367779 - RNA, 19 nt, Artificial Sequence
  Description of Artificial Sequence: Synthetic oligonucleotide
  Antisense strand to SEQ ID NO: 1367778
acaaucacuguguaccuac

SEQ ID NO: 1367780 - RNA, 19 nt, Artificial Sequence
  Description of Artificial Sequence: Synthetic oligonucleotide
  Sense strand starting at position 3855 of SEQ ID NO: 1242717
uggcuuagaaacuguugaa

SEQ ID NO: 1367781 - RNA, 19 nt, Artificial Sequence
  Description of Artificial Sequence: Synthetic oligonucleotide
  Antisense strand to SEQ ID NO: 1367780
uucaacaguuucuaagcca

SEQ ID NO: 1367782 - RNA, 19 nt, Artificial Sequence
  Description of Artificial Sequence: Synthetic oligonucleotide
  Sense strand starting at position 3951 of SEQ ID NO: 1242717
aguucucuaucuguaggua

SEQ ID NO: 1367783 - RNA, 19 nt, Artificial Sequence
  Description of Artificial Sequence: Synthetic oligonucleotide
  Antisense strand to SEQ ID NO: 1367782
uaccuacagauagagaacu

SEQ ID NO: 1367784 - RNA, 19 nt, Artificial Sequence
  Description of Artificial Sequence: Synthetic oligonucleotide
  Sense strand starting at position 500 of SEQ ID NO: 1242718
ccaggaaagugucacuaug

SEQ ID NO: 1367785 - RNA, 19 nt, Artificial Sequence
  Description of Artificial Sequence: Synthetic oligonucleotide
  Antisense strand to SEQ ID NO: 1367784
cauagugacacuuuccugg

SEQ ID NO: 1367786 - RNA, 19 nt, Artificial Sequence
  Description of Artificial Sequence: Synthetic oligonucleotide
  Sense strand starting at position 631 of SEQ ID NO: 1242718
guuugcuuucugcuccuga

SEQ ID NO: 1367787 - RNA, 19 nt, Artificial Sequence
  Description of Artificial Sequence: Synthetic oligonucleotide
  Antisense strand to SEQ ID NO: 1367786
ucaggagcagaaagcaaac

SEQ ID NO: 1367788 - RNA, 19 nt, Artificial Sequence
  Description of Artificial Sequence: Synthetic oligonucleotide
  Sense strand starting at position 633 of SEQ ID NO: 1242718
uugcuuucugcuccugagu

SEQ ID NO: 1367789 - RNA, 19 nt, Artificial Sequence
  Description of Artificial Sequence: Synthetic oligonucleotide
  Antisense strand to SEQ ID NO: 1367788
acucaggagcagaaagcaa

SEQ ID NO: 1367790 - RNA, 19 nt, Artificial Sequence
  Description of Artificial Sequence: Synthetic oligonucleotide
  Sense strand starting at position 634 of SEQ ID NO: 1242718
ugcuuucugcuccugaguu

SEQ ID NO: 1367791 - RNA, 19 nt, Artificial Sequence
  Description of Artificial Sequence: Synthetic oligonucleotide
  Antisense strand to SEQ ID NO: 1367790
aacucaggagcagaaagca

SEQ ID NO: 1367792 - RNA, 19 nt, Artificial Sequence
  Description of Artificial Sequence: Synthetic oligonucleotide
  Sense strand starting at position 635 of SEQ ID NO: 1242718
gcuuucugcuccugaguug

SEQ ID NO: 1367793 - RNA, 19 nt, Artificial Sequence
  Description of Artificial Sequence: Synthetic oligonucleotide
  Antisense strand to SEQ ID NO: 1367792
caacucaggagcagaaagc

SEQ ID NO: 1367794 - RNA, 19 nt, Artificial Sequence
  Description of Artificial Sequence: Synthetic oligonucleotide
  Sense strand starting at position 1591 of SEQ ID NO: 1242718
guucucagccgauguguua

SEQ ID NO: 1367795 - RNA, 19 nt, Artificial Sequence
  Description of Artificial Sequence: Synthetic oligonucleotide
  Antisense strand to SEQ ID NO: 1367794
uaacacaucggcugagaac

SEQ ID NO: 1367796 - RNA, 19 nt, Artificial Sequence
  Description of Artificial Sequence: Synthetic oligonucleotide
  Sense strand starting at position 1597 of SEQ ID NO: 1242718
agccgauguguuagagguu

SEQ ID NO: 1367797 - RNA, 19 nt, Artificial Sequence
  Description of Artificial Sequence: Synthetic oligonucleotide
  Antisense strand to SEQ ID NO: 1367796
aaccucuaacacaucggcu

SEQ ID NO: 1367798 - RNA, 19 nt, Artificial Sequence
  Description of Artificial Sequence: Synthetic oligonucleotide
  Sense strand starting at position 1600 of SEQ ID NO: 1242718
cgauguguuagagguugag

SEQ ID NO: 1367799 - RNA, 19 nt, Artificial Sequence
  Description of Artificial Sequence: Synthetic oligonucleotide
  Antisense strand to SEQ ID NO: 1367798
cucaaccucuaacacaucg

SEQ ID NO: 1367800 - RNA, 19 nt, Artificial Sequence
  Description of Artificial Sequence: Synthetic oligonucleotide
  Sense strand starting at position 1603 of SEQ ID NO: 1242718
uguguuagagguugagcau

SEQ ID NO: 1367801 - RNA, 19 nt, Artificial Sequence
  Description of Artificial Sequence: Synthetic oligonucleotide
  Antisense strand to SEQ ID NO: 1367800
augcucaaccucuaacaca

SEQ ID NO: 1367802 - RNA, 19 nt, Artificial Sequence
  Description of Artificial Sequence: Synthetic oligonucleotide
  Sense strand starting at position 1638 of SEQ ID NO: 1242718
gcuggcugucagugcuuga

SEQ ID NO: 1367803 - RNA, 19 nt, Artificial Sequence
  Description of Artificial Sequence: Synthetic oligonucleotide
  Antisense strand to SEQ ID NO: 1367802
ucaagcacugacagccagc

SEQ ID NO: 1367804 - RNA, 19 nt, Artificial Sequence
  Description of Artificial Sequence: Synthetic oligonucleotide
  Sense strand starting at position 1641 of SEQ ID NO: 1242718
ggcugucagugcuugaugu

SEQ ID NO: 1367805 - RNA, 19 nt, Artificial Sequence
  Description of Artificial Sequence: Synthetic oligonucleotide
  Antisense strand to SEQ ID NO: 1367804
acaucaagcacugacagcc

SEQ ID NO: 1367806 - RNA, 19 nt, Artificial Sequence
  Description of Artificial Sequence: Synthetic oligonucleotide
  Sense strand starting at position 1824 of SEQ ID NO: 1242718
cagagaugguugguccaca

SEQ ID NO: 1367807 - RNA, 19 nt, Artificial Sequence
  Description of Artificial Sequence: Synthetic oligonucleotide
  Antisense strand to SEQ ID NO: 1367806
uguggaccaaccaucucug

SEQ ID NO: 1367808 - RNA, 19 nt, Artificial Sequence
  Description of Artificial Sequence: Synthetic oligonucleotide
  Sense strand starting at position 2011 of SEQ ID NO: 1242718
cugagcaguucugugacau

SEQ ID NO: 1367809 - RNA, 19 nt, Artificial Sequence
  Description of Artificial Sequence: Synthetic oligonucleotide
  Antisense strand to SEQ ID NO: 1367808
augucacagaacugcucag

SEQ ID NO: 1367810 - RNA, 19 nt, Artificial Sequence
  Description of Artificial Sequence: Synthetic oligonucleotide
  Sense strand starting at position 2012 of SEQ ID NO: 1242718
ugagcaguucugugacaug

SEQ ID NO: 1367811 - RNA, 19 nt, Artificial Sequence
  Description of Artificial Sequence: Synthetic oligonucleotide
  Antisense strand to SEQ ID NO: 1367810
caugucacagaacugcuca

SEQ ID NO: 1367812 - RNA, 19 nt, Artificial Sequence
  Description of Artificial Sequence: Synthetic oligonucleotide
  Sense strand starting at position 2015 of SEQ ID NO: 1242718
gcaguucugugacaugaag

SEQ ID NO: 1367813 - RNA, 19 nt, Artificial Sequence
  Description of Artificial Sequence: Synthetic oligonucleotide
  Antisense strand to SEQ ID NO: 1367812
cuucaugucacagaacugc

SEQ ID NO: 1367814 - RNA, 19 nt, Artificial Sequence
  Description of Artificial Sequence: Synthetic oligonucleotide
  Sense strand starting at position 2017 of SEQ ID NO: 1242718
aguucugugacaugaagug

SEQ ID NO: 1367815 - RNA, 19 nt, Artificial Sequence
  Description of Artificial Sequence: Synthetic oligonucleotide
  Antisense strand to SEQ ID NO: 1367814
cacuucaugucacagaacu

SEQ ID NO: 1367816 - RNA, 19 nt, Artificial Sequence
  Description of Artificial Sequence: Synthetic oligonucleotide
  Sense strand starting at position 2225 of SEQ ID NO: 1242718
ccaggugucugccugaguu

SEQ ID NO: 1367817 - RNA, 19 nt, Artificial Sequence
  Description of Artificial Sequence: Synthetic oligonucleotide
  Antisense strand to SEQ ID NO: 1367816
aacucaggcagacaccugg

SEQ ID NO: 1367818 - RNA, 19 nt, Artificial Sequence
  Description of Artificial Sequence: Synthetic oligonucleotide
  Sense strand starting at position 2283 of SEQ ID NO: 1242718
ggaggugcaugcucucaga

SEQ ID NO: 1367819 - RNA, 19 nt, Artificial Sequence
  Description of Artificial Sequence: Synthetic oligonucleotide
  Antisense strand to SEQ ID NO: 1367818
ucugagagcaugcaccucc

SEQ ID NO: 1367820 - RNA, 19 nt, Artificial Sequence
  Description of Artificial Sequence: Synthetic oligonucleotide
  Sense strand starting at position 2286 of SEQ ID NO: 1242718
ggugcaugcucucagagcu

SEQ ID NO: 1367821 - RNA, 19 nt, Artificial Sequence
  Description of Artificial Sequence: Synthetic oligonucleotide
  Antisense strand to SEQ ID NO: 1367820
agcucugagagcaugcacc

SEQ ID NO: 1367822 - RNA, 19 nt, Artificial Sequence
  Description of Artificial Sequence: Synthetic oligonucleotide
  Sense strand starting at position 2318 of SEQ ID NO: 1242718
cguuucgucccguguguga

SEQ ID NO: 1367823 - RNA, 19 nt, Artificial Sequence
  Description of Artificial Sequence: Synthetic oligonucleotide
  Antisense strand to SEQ ID NO: 1367822
ucacacacgggacgaaacg

SEQ ID NO: 1367824 - RNA, 19 nt, Artificial Sequence
  Description of Artificial Sequence: Synthetic oligonucleotide
  Sense strand starting at position 2319 of SEQ ID NO: 1242718
guuucgucccgugugugaa

SEQ ID NO: 1367825 - RNA, 19 nt, Artificial Sequence
  Description of Artificial Sequence: Synthetic oligonucleotide
  Antisense strand to SEQ ID NO: 1367824
uucacacacgggacgaaac

SEQ ID NO: 1367826 - RNA, 19 nt, Artificial Sequence
  Description of Artificial Sequence: Synthetic oligonucleotide
  Sense strand starting at position 2327 of SEQ ID NO: 1242718
ccgugugugaacuggagau

SEQ ID NO: 1367827 - RNA, 19 nt, Artificial Sequence
  Description of Artificial Sequence: Synthetic oligonucleotide
  Antisense strand to SEQ ID NO: 1367826
aucuccaguucacacacgg

SEQ ID NO: 1367828 - RNA, 19 nt, Artificial Sequence
  Description of Artificial Sequence: Synthetic oligonucleotide
  Sense strand starting at position 2432 of SEQ ID NO: 1242718
cgguuuaagacccagaucu

SEQ ID NO: 1367829 - RNA, 19 nt, Artificial Sequence
  Description of Artificial Sequence: Synthetic oligonucleotide
  Antisense strand to SEQ ID NO: 1367828
agaucugggucuuaaaccg

SEQ ID NO: 1367830 - RNA, 19 nt, Artificial Sequence
  Description of Artificial Sequence: Synthetic oligonucleotide
  Sense strand starting at position 2690 of SEQ ID NO: 1242718
gggcuucugucgggccaau

SEQ ID NO: 1367831 - RNA, 19 nt, Artificial Sequence
  Description of Artificial Sequence: Synthetic oligonucleotide
  Antisense strand to SEQ ID NO: 1367830
auuggcccgacagaagccc

SEQ ID NO: 1367832 - RNA, 19 nt, Artificial Sequence
  Description of Artificial Sequence: Synthetic oligonucleotide
  Sense strand starting at position 2758 of SEQ ID NO: 1242718
gcgucaccuucucuaguua

SEQ ID NO: 1367833 - RNA, 19 nt, Artificial Sequence
  Description of Artificial Sequence: Synthetic oligonucleotide
  Antisense strand to SEQ ID NO: 1367832
uaacuagagaaggugacgc

SEQ ID NO: 1367834 - RNA, 19 nt, Artificial Sequence
  Description of Artificial Sequence: Synthetic oligonucleotide
  Sense strand starting at position 2759 of SEQ ID NO: 1242718
cgucaccuucucuaguuaa

SEQ ID NO: 1367835 - RNA, 19 nt, Artificial Sequence
  Description of Artificial Sequence: Synthetic oligonucleotide
  Antisense strand to SEQ ID NO: 1367834
uuaacuagagaaggugacg

SEQ ID NO: 1367836 - RNA, 19 nt, Artificial Sequence
  Description of Artificial Sequence: Synthetic oligonucleotide
  Sense strand starting at position 3099 of SEQ ID NO: 1242718
uaguuuguuucgucccagu

SEQ ID NO: 1367837 - RNA, 19 nt, Artificial Sequence
  Description of Artificial Sequence: Synthetic oligonucleotide
  Antisense strand to SEQ ID NO: 1367836
acugggacgaaacaaacua

SEQ ID NO: 1367838 - RNA, 19 nt, Artificial Sequence
  Description of Artificial Sequence: Synthetic oligonucleotide
  Sense strand starting at position 3162 of SEQ ID NO: 1242718
ucgccucucccuucuguua

SEQ ID NO: 1367839 - RNA, 19 nt, Artificial Sequence
  Description of Artificial Sequence: Synthetic oligonucleotide
  Antisense strand to SEQ ID NO: 1367838
uaacagaagggagaggcga

SEQ ID NO: 1367840 - RNA, 19 nt, Artificial Sequence
  Description of Artificial Sequence: Synthetic oligonucleotide
  Sense strand starting at position 3173 of SEQ ID NO: 1242718
uucuguuacguaucacgca

SEQ ID NO: 1367841 - RNA, 19 nt, Artificial Sequence
  Description of Artificial Sequence: Synthetic oligonucleotide
  Antisense strand to SEQ ID NO: 1367840
ugcgugauacguaacagaa

SEQ ID NO: 1367842 - RNA, 19 nt, Artificial Sequence
  Description of Artificial Sequence: Synthetic oligonucleotide
  Sense strand starting at position 3259 of SEQ ID NO: 1242718
cccucacugucuugggaaa

SEQ ID NO: 1367843 - RNA, 19 nt, Artificial Sequence
  Description of Artificial Sequence: Synthetic oligonucleotide
  Antisense strand to SEQ ID NO: 1367842
uuucccaagacagugaggg

SEQ ID NO: 1367844 - RNA, 19 nt, Artificial Sequence
  Description of Artificial Sequence: Synthetic oligonucleotide
  Sense strand starting at position 3260 of SEQ ID NO: 1242718
ccucacugucuugggaaau

SEQ ID NO: 1367845 - RNA, 19 nt, Artificial Sequence
  Description of Artificial Sequence: Synthetic oligonucleotide
  Antisense strand to SEQ ID NO: 1367844
auuucccaagacagugagg

SEQ ID NO: 1367846 - RNA, 19 nt, Artificial Sequence
  Description of Artificial Sequence: Synthetic oligonucleotide
  Sense strand starting at position 3261 of SEQ ID NO: 1242718
cucacugucuugggaaaug

SEQ ID NO: 1367847 - RNA, 19 nt, Artificial Sequence
  Description of Artificial Sequence: Synthetic oligonucleotide
  Antisense strand to SEQ ID NO: 1367846
cauuucccaagacagugag

SEQ ID NO: 1367848 - RNA, 19 nt, Artificial Sequence
  Description of Artificial Sequence: Synthetic oligonucleotide
  Sense strand starting at position 3510 of SEQ ID NO: 1242718
acauuuaugucacacacgu

SEQ ID NO: 1367849 - RNA, 19 nt, Artificial Sequence
  Description of Artificial Sequence: Synthetic oligonucleotide
  Antisense strand to SEQ ID NO: 1367848
acgugugugacauaaaugu

SEQ ID NO: 1367850 - RNA, 19 nt, Artificial Sequence
  Description of Artificial Sequence: Synthetic oligonucleotide
  Sense strand starting at position 3552 of SEQ ID NO: 1242718
uugcuauuacuuugcaguu

SEQ ID NO: 1367851 - RNA, 19 nt, Artificial Sequence
  Description of Artificial Sequence: Synthetic oligonucleotide
  Antisense strand to SEQ ID NO: 1367850
aacugcaaaguaauagcaa

SEQ ID NO: 1367852 - RNA, 19 nt, Artificial Sequence
  Description of Artificial Sequence: Synthetic oligonucleotide
  Sense strand starting at position 145 of SEQ ID NO: 1242719
ucagaaaggucgcucaaau

SEQ ID NO: 1367853 - RNA, 19 nt, Artificial Sequence
  Description of Artificial Sequence: Synthetic oligonucleotide
  Antisense strand to SEQ ID NO: 1367852
auuugagcgaccuuucuga

SEQ ID NO: 1367854 - RNA, 19 nt, Artificial Sequence
  Description of Artificial Sequence: Synthetic oligonucleotide
  Sense strand starting at position 191 of SEQ ID NO: 1242719
guaugagcagugcuuuguu

SEQ ID NO: 1367855 - RNA, 19 nt, Artificial Sequence
  Description of Artificial Sequence: Synthetic oligonucleotide
  Antisense strand to SEQ ID NO: 1367854
aacaaagcacugcucauac

SEQ ID NO: 1367856 - RNA, 19 nt, Artificial Sequence
  Description of Artificial Sequence: Synthetic oligonucleotide
  Sense strand starting at position 428 of SEQ ID NO: 1242719
ucaagcgaucuuuggauga

SEQ ID NO: 1367857 - RNA, 19 nt, Artificial Sequence
  Description of Artificial Sequence: Synthetic oligonucleotide
  Antisense strand to SEQ ID NO: 1367856
ucauccaaagaucgcuuga

SEQ ID NO: 1367858 - RNA, 19 nt, Artificial Sequence
  Description of Artificial Sequence: Synthetic oligonucleotide
  Sense strand starting at position 444 of SEQ ID NO: 1242719
ugacuuaaacccuggcuca

SEQ ID NO: 1367859 - RNA, 19 nt, Artificial Sequence
  Description of Artificial Sequence: Synthetic oligonucleotide
  Antisense strand to SEQ ID NO: 1367858
ugagccaggguuuaaguca

SEQ ID NO: 1367860 - RNA, 19 nt, Artificial Sequence
  Description of Artificial Sequence: Synthetic oligonucleotide
  Sense strand starting at position 465 of SEQ ID NO: 1242719
auucucuuccucggaaaua

SEQ ID NO: 1367861 - RNA, 19 nt, Artificial Sequence
  Description of Artificial Sequence: Synthetic oligonucleotide
  Antisense strand to SEQ ID NO: 1367860
uauuuccgaggaagagaau

SEQ ID NO: 1367862 - RNA, 19 nt, Artificial Sequence
  Description of Artificial Sequence: Synthetic oligonucleotide
  Sense strand starting at position 577 of SEQ ID NO: 1242719
ucagcauuucuguguacau

SEQ ID NO: 1367863 - RNA, 19 nt, Artificial Sequence
  Description of Artificial Sequence: Synthetic oligonucleotide
  Antisense strand to SEQ ID NO: 1367862
auguacacagaaaugcuga

SEQ ID NO: 1367864 - RNA, 19 nt, Artificial Sequence
  Description of Artificial Sequence: Synthetic oligonucleotide
  Sense strand starting at position 709 of SEQ ID NO: 1242719
cgccauguucacgcuguaa

SEQ ID NO: 1367865 - RNA, 19 nt, Artificial Sequence
  Description of Artificial Sequence: Synthetic oligonucleotide
  Antisense strand to SEQ ID NO: 1367864
uuacagcgugaacauggcg

SEQ ID NO: 1367866 - RNA, 19 nt, Artificial Sequence
  Description of Artificial Sequence: Synthetic oligonucleotide
  Sense strand starting at position 721 of SEQ ID NO: 1242719
gcuguaagucaucaaacuc

SEQ ID NO: 1367867 - RNA, 19 nt, Artificial Sequence
  Description of Artificial Sequence: Synthetic oligonucleotide
  Antisense strand to SEQ ID NO: 1367866
gaguuugaugacuuacagc

SEQ ID NO: 1367868 - RNA, 19 nt, Artificial Sequence
  Description of Artificial Sequence: Synthetic oligonucleotide
  Sense strand starting at position 865 of SEQ ID NO: 1242719
cucucagaggaguagcuau

SEQ ID NO: 1367869 - RNA, 19 nt, Artificial Sequence
  Description of Artificial Sequence: Synthetic oligonucleotide
  Antisense strand to SEQ ID NO: 1367868
auagcuacuccucugagag

SEQ ID NO: 1367870 - RNA, 19 nt, Artificial Sequence
  Description of Artificial Sequence: Synthetic oligonucleotide
  Sense strand starting at position 907 of SEQ ID NO: 1242719
cuuuacuaucucgaauggu

SEQ ID NO: 1367871 - RNA, 19 nt, Artificial Sequence
  Description of Artificial Sequence: Synthetic oligonucleotide
  Antisense strand to SEQ ID NO: 1367870
accauucgagauaguaaag

SEQ ID NO: 1367872 - RNA, 19 nt, Artificial Sequence
  Description of Artificial Sequence: Synthetic oligonucleotide
  Sense strand starting at position 1020 of SEQ ID NO: 1242719
aggguaaucgcuuuccguu

SEQ ID NO: 1367873 - RNA, 19 nt, Artificial Sequence
  Description of Artificial Sequence: Synthetic oligonucleotide
  Antisense strand to SEQ ID NO: 1367872
aacggaaagcgauuacccu

SEQ ID NO: 1367874 - RNA, 19 nt, Artificial Sequence
  Description of Artificial Sequence: Synthetic oligonucleotide
  Sense strand starting at position 1021 of SEQ ID NO: 1242719
ggguaaucgcuuuccguuc

SEQ ID NO: 1367875 - RNA, 19 nt, Artificial Sequence
  Description of Artificial Sequence: Synthetic oligonucleotide
  Antisense strand to SEQ ID NO: 1367874
gaacggaaagcgauuaccc

SEQ ID NO: 1367876 - RNA, 19 nt, Artificial Sequence
  Description of Artificial Sequence: Synthetic oligonucleotide
  Sense strand starting at position 1164 of SEQ ID NO: 1242719
gcagaacucggucaacaga

SEQ ID NO: 1367877 - RNA, 19 nt, Artificial Sequence
  Description of Artificial Sequence: Synthetic oligonucleotide
  Antisense strand to SEQ ID NO: 1367876
ucuguugaccgaguucugc

SEQ ID NO: 1367878 - RNA, 19 nt, Artificial Sequence
  Description of Artificial Sequence: Synthetic oligonucleotide
  Sense strand starting at position 2157 of SEQ ID NO: 1242719
ugcggaauucccgcuguuu

SEQ ID NO: 1367879 - RNA, 19 nt, Artificial Sequence
  Description of Artificial Sequence: Synthetic oligonucleotide
  Antisense strand to SEQ ID NO: 1367878
aaacagcgggaauuccgca

SEQ ID NO: 1367880 - RNA, 19 nt, Artificial Sequence
  Description of Artificial Sequence: Synthetic oligonucleotide
  Sense strand starting at position 2158 of SEQ ID NO: 1242719
gcggaauucccgcuguuua

SEQ ID NO: 1367881 - RNA, 19 nt, Artificial Sequence
  Description of Artificial Sequence: Synthetic oligonucleotide
  Antisense strand to SEQ ID NO: 1367880
uaaacagcgggaauuccgc

SEQ ID NO: 1367882 - RNA, 19 nt, Artificial Sequence
  Description of Artificial Sequence: Synthetic oligonucleotide
  Sense strand starting at position 2223 of SEQ ID NO: 1242719
ccuugcucggcuuuguaaa

SEQ ID NO: 1367883 - RNA, 19 nt, Artificial Sequence
  Description of Artificial Sequence: Synthetic oligonucleotide
  Antisense strand to SEQ ID NO: 1367882
uuuacaaagccgagcaagg

SEQ ID NO: 1367884 - RNA, 19 nt, Artificial Sequence
  Description of Artificial Sequence: Synthetic oligonucleotide
  Sense strand starting at position 2335 of SEQ ID NO: 1242719
cggcguucggcuuuaucca

SEQ ID NO: 1367885 - RNA, 19 nt, Artificial Sequence
  Description of Artificial Sequence: Synthetic oligonucleotide
  Antisense strand to SEQ ID NO: 1367884
uggauaaagccgaacgccg

SEQ ID NO: 1367886 - RNA, 19 nt, Artificial Sequence
  Description of Artificial Sequence: Synthetic oligonucleotide
  Sense strand starting at position 2342 of SEQ ID NO: 1242719
cggcuuuauccaccucgca

SEQ ID NO: 1367887 - RNA, 19 nt, Artificial Sequence
  Description of Artificial Sequence: Synthetic oligonucleotide
  Antisense strand to SEQ ID NO: 1367886
ugcgagguggauaaagccg

SEQ ID NO: 1367888 - RNA, 19 nt, Artificial Sequence
  Description of Artificial Sequence: Synthetic oligonucleotide
  Sense strand starting at position 2379 of SEQ ID NO: 1242719
cacgauaagaggcgugaaa

SEQ ID NO: 1367889 - RNA, 19 nt, Artificial Sequence
  Description of Artificial Sequence: Synthetic oligonucleotide
  Antisense strand to SEQ ID NO: 1367888
uuucacgccucuuaucgug

SEQ ID NO: 1367890 - RNA, 19 nt, Artificial Sequence
  Description of Artificial Sequence: Synthetic oligonucleotide
  Sense strand starting at position 2475 of SEQ ID NO: 1242719
cggauuaucuaagucuuau

SEQ ID NO: 1367891 - RNA, 19 nt, Artificial Sequence
  Description of Artificial Sequence: Synthetic oligonucleotide
  Antisense strand to SEQ ID NO: 1367890
auaagacuuagauaauccg

SEQ ID NO: 1367892 - RNA, 19 nt, Artificial Sequence
  Description of Artificial Sequence: Synthetic oligonucleotide
  Sense strand starting at position 2496 of SEQ ID NO: 1242719
ccgcccuauagguagauau

SEQ ID NO: 1367893 - RNA, 19 nt, Artificial Sequence
  Description of Artificial Sequence: Synthetic oligonucleotide
  Antisense strand to SEQ ID NO: 1367892
auaucuaccuauagggcgg

SEQ ID NO: 1367894 - RNA, 19 nt, Artificial Sequence
  Description of Artificial Sequence: Synthetic oligonucleotide
  Sense strand starting at position 2506 of SEQ ID NO: 1242719
gguagauaucgcuauaacc

SEQ ID NO: 1367895 - RNA, 19 nt, Artificial Sequence
  Description of Artificial Sequence: Synthetic oligonucleotide
  Antisense strand to SEQ ID NO: 1367894
gguuauagcgauaucuacc

SEQ ID NO: 1367896 - RNA, 19 nt, Artificial Sequence
  Description of Artificial Sequence: Synthetic oligonucleotide
  Sense strand starting at position 2628 of SEQ ID NO: 1242719
uuucucaaccucuggagua

SEQ ID NO: 1367897 - RNA, 19 nt, Artificial Sequence
  Description of Artificial Sequence: Synthetic oligonucleotide
  Antisense strand to SEQ ID NO: 1367896
uacuccagagguugagaaa

SEQ ID NO: 1367898 - RNA, 19 nt, Artificial Sequence
  Description of Artificial Sequence: Synthetic oligonucleotide
  Sense strand starting at position 2756 of SEQ ID NO: 1242719
gauacaucccagugagcag

SEQ ID NO: 1367899 - RNA, 19 nt, Artificial Sequence
  Description of Artificial Sequence: Synthetic oligonucleotide
  Antisense strand to SEQ ID NO: 1367898
cugcucacugggauguauc

SEQ ID NO: 1367900 - RNA, 19 nt, Artificial Sequence
  Description of Artificial Sequence: Synthetic oligonucleotide
  Sense strand starting at position 2875 of SEQ ID NO: 1242719
augaguauuucuguccugu

SEQ ID NO: 1367901 - RNA, 19 nt, Artificial Sequence
  Description of Artificial Sequence: Synthetic oligonucleotide
  Antisense strand to SEQ ID NO: 1367900
acaggacagaaauacucau

SEQ ID NO: 1367902 - RNA, 19 nt, Artificial Sequence
  Description of Artificial Sequence: Synthetic oligonucleotide
  Sense strand starting at position 2877 of SEQ ID NO: 1242719
gaguauuucuguccugucu

SEQ ID NO: 1367903 - RNA, 19 nt, Artificial Sequence
  Description of Artificial Sequence: Synthetic oligonucleotide
  Antisense strand to SEQ ID NO: 1367902
agacaggacagaaauacuc

SEQ ID NO: 1367904 - RNA, 19 nt, Artificial Sequence
  Description of Artificial Sequence: Synthetic oligonucleotide
  Sense strand starting at position 2938 of SEQ ID NO: 1242719
ugggaaaguguaugauggu

SEQ ID NO: 1367905 - RNA, 19 nt, Artificial Sequence
  Description of Artificial Sequence: Synthetic oligonucleotide
  Antisense strand to SEQ ID NO: 1367904
accaucauacacuuuccca

SEQ ID NO: 1367906 - RNA, 19 nt, Artificial Sequence
  Description of Artificial Sequence: Synthetic oligonucleotide
  Sense strand starting at position 2964 of SEQ ID NO: 1242719
cuagcaauaugagugaaag

SEQ ID NO: 1367907 - RNA, 19 nt, Artificial Sequence
  Description of Artificial Sequence: Synthetic oligonucleotide
  Antisense strand to SEQ ID NO: 1367906
cuuucacucauauugcuag

SEQ ID NO: 1367908 - RNA, 19 nt, Artificial Sequence
  Description of Artificial Sequence: Synthetic oligonucleotide
  Sense strand starting at position 2966 of SEQ ID NO: 1242719
agcaauaugagugaaagca

SEQ ID NO: 1367909 - RNA, 19 nt, Artificial Sequence
  Description of Artificial Sequence: Synthetic oligonucleotide
  Antisense strand to SEQ ID NO: 1367908
ugcuuucacucauauugcu

SEQ ID NO: 1367910 - RNA, 19 nt, Artificial Sequence
  Description of Artificial Sequence: Synthetic oligonucleotide
  Sense strand starting at position 3046 of SEQ ID NO: 1242719
auugaaagucagcgauaug

SEQ ID NO: 1367911 - RNA, 19 nt, Artificial Sequence
  Description of Artificial Sequence: Synthetic oligonucleotide
  Antisense strand to SEQ ID NO: 1367910
cauaucgcugacuuucaau

SEQ ID NO: 1367912 - RNA, 19 nt, Artificial Sequence
  Description of Artificial Sequence: Synthetic oligonucleotide
  Sense strand starting at position 3049 of SEQ ID NO: 1242719
gaaagucagcgauaugcaa

SEQ ID NO: 1367913 - RNA, 19 nt, Artificial Sequence
  Description of Artificial Sequence: Synthetic oligonucleotide
  Antisense strand to SEQ ID NO: 1367912
uugcauaucgcugacuuuc

SEQ ID NO: 1367914 - RNA, 19 nt, Artificial Sequence
  Description of Artificial Sequence: Synthetic oligonucleotide
  Sense strand starting at position 3085 of SEQ ID NO: 1242719
uaauauagcccaggagagu

SEQ ID NO: 1367915 - RNA, 19 nt, Artificial Sequence
  Description of Artificial Sequence: Synthetic oligonucleotide
  Antisense strand to SEQ ID NO: 1367914
acucuccugggcuauauua

SEQ ID NO: 1367916 - RNA, 19 nt, Artificial Sequence
  Description of Artificial Sequence: Synthetic oligonucleotide
  Sense strand starting at position 3149 of SEQ ID NO: 1242719
gacguugaaugaucuuuga

SEQ ID NO: 1367917 - RNA, 19 nt, Artificial Sequence
  Description of Artificial Sequence: Synthetic oligonucleotide
  Antisense strand to SEQ ID NO: 1367916
ucaaagaucauucaacguc

SEQ ID NO: 1367918 - RNA, 19 nt, Artificial Sequence
  Description of Artificial Sequence: Synthetic oligonucleotide
  Sense strand starting at position 3152 of SEQ ID NO: 1242719
guugaaugaucuuugaguu

SEQ ID NO: 1367919 - RNA, 19 nt, Artificial Sequence
  Description of Artificial Sequence: Synthetic oligonucleotide
  Antisense strand to SEQ ID NO: 1367918
aacucaaagaucauucaac

SEQ ID NO: 1367920 - RNA, 19 nt, Artificial Sequence
  Description of Artificial Sequence: Synthetic oligonucleotide
  Sense strand starting at position 3199 of SEQ ID NO: 1242719
ucucauuuauuagagauag

SEQ ID NO: 1367921 - RNA, 19 nt, Artificial Sequence
  Description of Artificial Sequence: Synthetic oligonucleotide
  Antisense strand to SEQ ID NO: 1367920
cuaucucuaauaaaugaga

SEQ ID NO: 1367922 - RNA, 19 nt, Artificial Sequence
  Description of Artificial Sequence: Synthetic oligonucleotide
  Sense strand starting at position 3210 of SEQ ID NO: 1242719
agagauagaucuguuaauc

SEQ ID NO: 1367923 - RNA, 19 nt, Artificial Sequence
  Description of Artificial Sequence: Synthetic oligonucleotide
  Antisense strand to SEQ ID NO: 1367922
gauuaacagaucuaucucu

SEQ ID NO: 1367924 - RNA, 19 nt, Artificial Sequence
  Description of Artificial Sequence: Synthetic oligonucleotide
  Sense strand starting at position 3223 of SEQ ID NO: 1242719
uuaaucauuuaccagggaa

SEQ ID NO: 1367925 - RNA, 19 nt, Artificial Sequence
  Description of Artificial Sequence: Synthetic oligonucleotide
  Antisense strand to SEQ ID NO: 1367924
uucccugguaaaugauuaa

SEQ ID NO: 1367926 - RNA, 19 nt, Artificial Sequence
  Description of Artificial Sequence: Synthetic oligonucleotide
  Sense strand starting at position 3633 of SEQ ID NO: 1242719
gccugacugauguggagaa

SEQ ID NO: 1367927 - RNA, 19 nt, Artificial Sequence
  Description of Artificial Sequence: Synthetic oligonucleotide
  Antisense strand to SEQ ID NO: 1367926
uucuccacaucagucaggc

SEQ ID NO: 1367928 - RNA, 19 nt, Artificial Sequence
  Description of Artificial Sequence: Synthetic oligonucleotide
  Sense strand starting at position 3934 of SEQ ID NO: 1242719
guccuuguucucguagagu

SEQ ID NO: 1367929 - RNA, 19 nt, Artificial Sequence
  Description of Artificial Sequence: Synthetic oligonucleotide
  Antisense strand to SEQ ID NO: 1367928
acucuacgagaacaaggac

SEQ ID NO: 1367930 - RNA, 19 nt, Artificial Sequence
  Description of Artificial Sequence: Synthetic oligonucleotide
  Sense strand starting at position 3948 of SEQ ID NO: 1242719
agaguuuacgugcugugca

SEQ ID NO: 1367931 - RNA, 19 nt, Artificial Sequence
  Description of Artificial Sequence: Synthetic oligonucleotide
  Antisense strand to SEQ ID NO: 1367930
ugcacagcacguaaacucu

SEQ ID NO: 1367932 - RNA, 19 nt, Artificial Sequence
  Description of Artificial Sequence: Synthetic oligonucleotide
  Sense strand starting at position 163 of SEQ ID NO: 1242720
gaagauuccugggcccuau

SEQ ID NO: 1367933 - RNA, 19 nt, Artificial Sequence
  Description of Artificial Sequence: Synthetic oligonucleotide
  Antisense strand to SEQ ID NO: 1367932
auagggcccaggaaucuuc

SEQ ID NO: 1367934 - RNA, 19 nt, Artificial Sequence
  Description of Artificial Sequence: Synthetic oligonucleotide
  Sense strand starting at position 167 of SEQ ID NO: 1242720
auuccugggcccuaucaaa

SEQ ID NO: 1367935 - RNA, 19 nt, Artificial Sequence
  Description of Artificial Sequence: Synthetic oligonucleotide
  Antisense strand to SEQ ID NO: 1367934
uuugauagggcccaggaau

SEQ ID NO: 1367936 - RNA, 19 nt, Artificial Sequence
  Description of Artificial Sequence: Synthetic oligonucleotide
  Sense strand starting at position 213 of SEQ ID NO: 1242720
gcuugagauuuagcaucuu

SEQ ID NO: 1367937 - RNA, 19 nt, Artificial Sequence
  Description of Artificial Sequence: Synthetic oligonucleotide
  Antisense strand to SEQ ID NO: 1367936
aagaugcuaaaucucaagc

SEQ ID NO: 1367938 - RNA, 19 nt, Artificial Sequence
  Description of Artificial Sequence: Synthetic oligonucleotide
  Sense strand starting at position 258 of SEQ ID NO: 1242720
ccggguaaaguuugcagaa

SEQ ID NO: 1367939 - RNA, 19 nt, Artificial Sequence
  Description of Artificial Sequence: Synthetic oligonucleotide
  Antisense strand to SEQ ID NO: 1367938
uucugcaaacuuuacccgg

SEQ ID NO: 1367940 - RNA, 19 nt, Artificial Sequence
  Description of Artificial Sequence: Synthetic oligonucleotide
  Sense strand starting at position 327 of SEQ ID NO: 1242720
cggaaaucccuuuaguaaa

SEQ ID NO: 1367941 - RNA, 19 nt, Artificial Sequence
  Description of Artificial Sequence: Synthetic oligonucleotide
  Antisense strand to SEQ ID NO: 1367940
uuuacuaaagggauuuccg

SEQ ID NO: 1367942 - RNA, 19 nt, Artificial Sequence
  Description of Artificial Sequence: Synthetic oligonucleotide
  Sense strand starting at position 712 of SEQ ID NO: 1242720
gugucugacauacaguaga

SEQ ID NO: 1367943 - RNA, 19 nt, Artificial Sequence
  Description of Artificial Sequence: Synthetic oligonucleotide
  Antisense strand to SEQ ID NO: 1367942
ucuacuguaugucagacac

SEQ ID NO: 1367944 - RNA, 19 nt, Artificial Sequence
  Description of Artificial Sequence: Synthetic oligonucleotide
  Sense strand starting at position 722 of SEQ ID NO: 1242720
uacaguagaugcucaagau

SEQ ID NO: 1367945 - RNA, 19 nt, Artificial Sequence
  Description of Artificial Sequence: Synthetic oligonucleotide
  Antisense strand to SEQ ID NO: 1367944
aucuugagcaucuacugua

SEQ ID NO: 1367946 - RNA, 19 nt, Artificial Sequence
  Description of Artificial Sequence: Synthetic oligonucleotide
  Sense strand starting at position 723 of SEQ ID NO: 1242720
acaguagaugcucaagauc

SEQ ID NO: 1367947 - RNA, 19 nt, Artificial Sequence
  Description of Artificial Sequence: Synthetic oligonucleotide
  Antisense strand to SEQ ID NO: 1367946
gaucuugagcaucuacugu

SEQ ID NO: 1367948 - RNA, 19 nt, Artificial Sequence
  Description of Artificial Sequence: Synthetic oligonucleotide
  Sense strand starting at position 730 of SEQ ID NO: 1242720
augcucaagaucuguggaa

SEQ ID NO: 1367949 - RNA, 19 nt, Artificial Sequence
  Description of Artificial Sequence: Synthetic oligonucleotide
  Antisense strand to SEQ ID NO: 1367948
uuccacagaucuugagcau

SEQ ID NO: 1367950 - RNA, 19 nt, Artificial Sequence
  Description of Artificial Sequence: Synthetic oligonucleotide
  Sense strand starting at position 734 of SEQ ID NO: 1242720
ucaagaucuguggaacgca

SEQ ID NO: 1367951 - RNA, 19 nt, Artificial Sequence
  Description of Artificial Sequence: Synthetic oligonucleotide
  Antisense strand to SEQ ID NO: 1367950
ugcguuccacagaucuuga

SEQ ID NO: 1367952 - RNA, 19 nt, Artificial Sequence
  Description of Artificial Sequence: Synthetic oligonucleotide
  Sense strand starting at position 742 of SEQ ID NO: 1242720
uguggaacgcaugaucaaa

SEQ ID NO: 1367953 - RNA, 19 nt, Artificial Sequence
  Description of Artificial Sequence: Synthetic oligonucleotide
  Antisense strand to SEQ ID NO: 1367952
uuugaucaugcguuccaca

SEQ ID NO: 1367954 - RNA, 19 nt, Artificial Sequence
  Description of Artificial Sequence: Synthetic oligonucleotide
  Sense strand starting at position 2428 of SEQ ID NO: 1242720
uucgauggcaaaggaauua

SEQ ID NO: 1367955 - RNA, 19 nt, Artificial Sequence
  Description of Artificial Sequence: Synthetic oligonucleotide
  Antisense strand to SEQ ID NO: 1367954
uaauuccuuugccaucgaa

SEQ ID NO: 1367956 - RNA, 19 nt, Artificial Sequence
  Description of Artificial Sequence: Synthetic oligonucleotide
  Sense strand starting at position 2494 of SEQ ID NO: 1242720
gcacuuguuuaguugauuu

SEQ ID NO: 1367957 - RNA, 19 nt, Artificial Sequence
  Description of Artificial Sequence: Synthetic oligonucleotide
  Antisense strand to SEQ ID NO: 1367956
aaaucaacuaaacaagugc

SEQ ID NO: 1367958 - RNA, 19 nt, Artificial Sequence
  Description of Artificial Sequence: Synthetic oligonucleotide
  Sense strand starting at position 2574 of SEQ ID NO: 1242720
cugacauuccgcgaacauc

SEQ ID NO: 1367959 - RNA, 19 nt, Artificial Sequence
  Description of Artificial Sequence: Synthetic oligonucleotide
  Antisense strand to SEQ ID NO: 1367958
gauguucgcggaaugucag

SEQ ID NO: 1367960 - RNA, 19 nt, Artificial Sequence
  Description of Artificial Sequence: Synthetic oligonucleotide
  Sense strand starting at position 2585 of SEQ ID NO: 1242720
cgaacaucgauugggcauu

SEQ ID NO: 1367961 - RNA, 19 nt, Artificial Sequence
  Description of Artificial Sequence: Synthetic oligonucleotide
  Antisense strand to SEQ ID NO: 1367960
aaugcccaaucgauguucg

SEQ ID NO: 1367962 - RNA, 19 nt, Artificial Sequence
  Description of Artificial Sequence: Synthetic oligonucleotide
  Sense strand starting at position 2597 of SEQ ID NO: 1242720
gggcauuuaccaugugcau

SEQ ID NO: 1367963 - RNA, 19 nt, Artificial Sequence
  Description of Artificial Sequence: Synthetic oligonucleotide
  Antisense strand to SEQ ID NO: 1367962
augcacaugguaaaugccc

SEQ ID NO: 1367964 - RNA, 19 nt, Artificial Sequence
  Description of Artificial Sequence: Synthetic oligonucleotide
  Sense strand starting at position 2606 of SEQ ID NO: 1242720
ccaugugcauuggcaagaa

SEQ ID NO: 1367965 - RNA, 19 nt, Artificial Sequence
  Description of Artificial Sequence: Synthetic oligonucleotide
  Antisense strand to SEQ ID NO: 1367964
uucuugccaaugcacaugg

SEQ ID NO: 1367966 - RNA, 19 nt, Artificial Sequence
  Description of Artificial Sequence: Synthetic oligonucleotide
  Sense strand starting at position 2610 of SEQ ID NO: 1242720
gugcauuggcaagaaugcu

SEQ ID NO: 1367967 - RNA, 19 nt, Artificial Sequence
  Description of Artificial Sequence: Synthetic oligonucleotide
  Antisense strand to SEQ ID NO: 1367966
agcauucuugccaaugcac

SEQ ID NO: 1367968 - RNA, 19 nt, Artificial Sequence
  Description of Artificial Sequence: Synthetic oligonucleotide
  Sense strand starting at position 2647 of SEQ ID NO: 1242720
uuccuugagaugugugaac

SEQ ID NO: 1367969 - RNA, 19 nt, Artificial Sequence
  Description of Artificial Sequence: Synthetic oligonucleotide
  Antisense strand to SEQ ID NO: 1367968
guucacacaucucaaggaa

SEQ ID NO: 1367970 - RNA, 19 nt, Artificial Sequence
  Description of Artificial Sequence: Synthetic oligonucleotide
  Sense strand starting at position 2649 of SEQ ID NO: 1242720
ccuugagaugugugaacga

SEQ ID NO: 1367971 - RNA, 19 nt, Artificial Sequence
  Description of Artificial Sequence: Synthetic oligonucleotide
  Antisense strand to SEQ ID NO: 1367970
ucguucacacaucucaagg

SEQ ID NO: 1367972 - RNA, 19 nt, Artificial Sequence
  Description of Artificial Sequence: Synthetic oligonucleotide
  Sense strand starting at position 2654 of SEQ ID NO: 1242720
agaugugugaacgaguauu

SEQ ID NO: 1367973 - RNA, 19 nt, Artificial Sequence
  Description of Artificial Sequence: Synthetic oligonucleotide
  Antisense strand to SEQ ID NO: 1367972
aauacucguucacacaucu

SEQ ID NO: 1367974 - RNA, 19 nt, Artificial Sequence
  Description of Artificial Sequence: Synthetic oligonucleotide
  Sense strand starting at position 2714 of SEQ ID NO: 1242720
cuuguaaguccugguaaug

SEQ ID NO: 1367975 - RNA, 19 nt, Artificial Sequence
  Description of Artificial Sequence: Synthetic oligonucleotide
  Antisense strand to SEQ ID NO: 1367974
cauuaccaggacuuacaag

SEQ ID NO: 1367976 - RNA, 19 nt, Artificial Sequence
  Description of Artificial Sequence: Synthetic oligonucleotide
  Sense strand starting at position 2726 of SEQ ID NO: 1242720
gguaauguuuauucaggga

SEQ ID NO: 1367977 - RNA, 19 nt, Artificial Sequence
  Description of Artificial Sequence: Synthetic oligonucleotide
  Antisense strand to SEQ ID NO: 1367976
ucccugaauaaacauuacc

SEQ ID NO: 1367978 - RNA, 19 nt, Artificial Sequence
  Description of Artificial Sequence: Synthetic oligonucleotide
  Sense strand starting at position 2754 of SEQ ID NO: 1242720
gggcgcauucucugagaaa

SEQ ID NO: 1367979 - RNA, 19 nt, Artificial Sequence
  Description of Artificial Sequence: Synthetic oligonucleotide
  Antisense strand to SEQ ID NO: 1367978
uuucucagagaaugcgccc

SEQ ID NO: 1367980 - RNA, 19 nt, Artificial Sequence
  Description of Artificial Sequence: Synthetic oligonucleotide
  Sense strand starting at position 2766 of SEQ ID NO: 1242720
ugagaaacucuucggugga

SEQ ID NO: 1367981 - RNA, 19 nt, Artificial Sequence
  Description of Artificial Sequence: Synthetic oligonucleotide
  Antisense strand to SEQ ID NO: 1367980
uccaccgaagaguuucuca

SEQ ID NO: 1367982 - RNA, 19 nt, Artificial Sequence
  Description of Artificial Sequence: Synthetic oligonucleotide
  Sense strand starting at position 2769 of SEQ ID NO: 1242720
gaaacucuucgguggaagu

SEQ ID NO: 1367983 - RNA, 19 nt, Artificial Sequence
  Description of Artificial Sequence: Synthetic oligonucleotide
  Antisense strand to SEQ ID NO: 1367982
acuuccaccgaagaguuuc

SEQ ID NO: 1367984 - RNA, 19 nt, Artificial Sequence
  Description of Artificial Sequence: Synthetic oligonucleotide
  Sense strand starting at position 2886 of SEQ ID NO: 1242720
gugguaucgguuuagaacu

SEQ ID NO: 1367985 - RNA, 19 nt, Artificial Sequence
  Description of Artificial Sequence: Synthetic oligonucleotide
  Antisense strand to SEQ ID NO: 1367984
aguucuaaaccgauaccac

SEQ ID NO: 1367986 - RNA, 19 nt, Artificial Sequence
  Description of Artificial Sequence: Synthetic oligonucleotide
  Sense strand starting at position 2907 of SEQ ID NO: 1242720
uccugugauaaguggaagu

SEQ ID NO: 1367987 - RNA, 19 nt, Artificial Sequence
  Description of Artificial Sequence: Synthetic oligonucleotide
  Antisense strand to SEQ ID NO: 1367986
acuuccacuuaucacagga

SEQ ID NO: 1367988 - RNA, 19 nt, Artificial Sequence
  Description of Artificial Sequence: Synthetic oligonucleotide
  Sense strand starting at position 3488 of SEQ ID NO: 1242720
aguguaaauuuccugugca

SEQ ID NO: 1367989 - RNA, 19 nt, Artificial Sequence
  Description of Artificial Sequence: Synthetic oligonucleotide
  Antisense strand to SEQ ID NO: 1367988
ugcacaggaaauuuacacu

SEQ ID NO: 1367990 - RNA, 19 nt, Artificial Sequence
  Description of Artificial Sequence: Synthetic oligonucleotide
  Sense strand starting at position 3558 of SEQ ID NO: 1242720
caggguucuuccuugugau

SEQ ID NO: 1367991 - RNA, 19 nt, Artificial Sequence
  Description of Artificial Sequence: Synthetic oligonucleotide
  Antisense strand to SEQ ID NO: 1367990
aucacaaggaagaacccug

SEQ ID NO: 1367992 - RNA, 19 nt, Artificial Sequence
  Description of Artificial Sequence: Synthetic oligonucleotide
  Sense strand starting at position 3564 of SEQ ID NO: 1242720
ucuuccuugugauuauaga

SEQ ID NO: 1367993 - RNA, 19 nt, Artificial Sequence
  Description of Artificial Sequence: Synthetic oligonucleotide
  Antisense strand to SEQ ID NO: 1367992
ucuauaaucacaaggaaga

SEQ ID NO: 1367994 - RNA, 19 nt, Artificial Sequence
  Description of Artificial Sequence: Synthetic oligonucleotide
  Sense strand starting at position 3565 of SEQ ID NO: 1242720
cuuccuugugauuauagau

SEQ ID NO: 1367995 - RNA, 19 nt, Artificial Sequence
  Description of Artificial Sequence: Synthetic oligonucleotide
  Antisense strand to SEQ ID NO: 1367994
aucuauaaucacaaggaag

SEQ ID NO: 1367996 - RNA, 19 nt, Artificial Sequence
  Description of Artificial Sequence: Synthetic oligonucleotide
  Sense strand starting at position 3586 of SEQ ID NO: 1242720
gcugaagugaguuauuaga

SEQ ID NO: 1367997 - RNA, 19 nt, Artificial Sequence
  Description of Artificial Sequence: Synthetic oligonucleotide
  Antisense strand to SEQ ID NO: 1367996
ucuaauaacucacuucagc

SEQ ID NO: 1367998 - RNA, 19 nt, Artificial Sequence
  Description of Artificial Sequence: Synthetic oligonucleotide
  Sense strand starting at position 3588 of SEQ ID NO: 1242720
ugaagugaguuauuagaau

SEQ ID NO: 1367999 - RNA, 19 nt, Artificial Sequence
  Description of Artificial Sequence: Synthetic oligonucleotide
  Antisense strand to SEQ ID NO: 1367998
auucuaauaacucacuuca

SEQ ID NO: 1368000 - RNA, 19 nt, Artificial Sequence
  Description of Artificial Sequence: Synthetic oligonucleotide
  Sense strand starting at position 3594 of SEQ ID NO: 1242720
gaguuauuagaaugcuuac

SEQ ID NO: 1368001 - RNA, 19 nt, Artificial Sequence
  Description of Artificial Sequence: Synthetic oligonucleotide
  Antisense strand to SEQ ID NO: 1368000
guaagcauucuaauaacuc

SEQ ID NO: 1368002 - RNA, 19 nt, Artificial Sequence
  Description of Artificial Sequence: Synthetic oligonucleotide
  Sense strand starting at position 3643 of SEQ ID NO: 1242720
gcuggcucuugguuuauuu

SEQ ID NO: 1368003 - RNA, 19 nt, Artificial Sequence
  Description of Artificial Sequence: Synthetic oligonucleotide
  Antisense strand to SEQ ID NO: 1368002
aaauaaaccaagagccagc

SEQ ID NO: 1368004 - RNA, 19 nt, Artificial Sequence
  Description of Artificial Sequence: Synthetic oligonucleotide
  Sense strand starting at position 3673 of SEQ ID NO: 1242720
gccaccuggugguugaaau

SEQ ID NO: 1368005 - RNA, 19 nt, Artificial Sequence
  Description of Artificial Sequence: Synthetic oligonucleotide
  Antisense strand to SEQ ID NO: 1368004
auuucaaccaccagguggc

SEQ ID NO: 1368006 - RNA, 19 nt, Artificial Sequence
  Description of Artificial Sequence: Synthetic oligonucleotide
  Sense strand starting at position 3681 of SEQ ID NO: 1242720
gugguugaaaucugucuua

SEQ ID NO: 1368007 - RNA, 19 nt, Artificial Sequence
  Description of Artificial Sequence: Synthetic oligonucleotide
  Antisense strand to SEQ ID NO: 1368006
uaagacagauuucaaccac

SEQ ID NO: 1368008 - RNA, 19 nt, Artificial Sequence
  Description of Artificial Sequence: Synthetic oligonucleotide
  Sense strand starting at position 3684 of SEQ ID NO: 1242720
guugaaaucugucuuagac

SEQ ID NO: 1368009 - RNA, 19 nt, Artificial Sequence
  Description of Artificial Sequence: Synthetic oligonucleotide
  Antisense strand to SEQ ID NO: 1368008
gucuaagacagauuucaac

SEQ ID NO: 1368010 - RNA, 19 nt, Artificial Sequence
  Description of Artificial Sequence: Synthetic oligonucleotide
  Sense strand starting at position 3694 of SEQ ID NO: 1242720
gucuuagacuacucuugag

SEQ ID NO: 1368011 - RNA, 19 nt, Artificial Sequence
  Description of Artificial Sequence: Synthetic oligonucleotide
  Antisense strand to SEQ ID NO: 1368010
cucaagaguagucuaagac

SEQ ID NO: 1368012 - RNA, 19 nt, Artificial Sequence
  Description of Artificial Sequence: Synthetic oligonucleotide
  Sense strand starting at position 3 of SEQ ID NO: 1242721
guuagaucuggcugguaau

SEQ ID NO: 1368013 - RNA, 19 nt, Artificial Sequence
  Description of Artificial Sequence: Synthetic oligonucleotide
  Antisense strand to SEQ ID NO: 1368012
auuaccagccagaucuaac

SEQ ID NO: 1368014 - RNA, 19 nt, Artificial Sequence
  Description of Artificial Sequence: Synthetic oligonucleotide
  Sense strand starting at position 4 of SEQ ID NO: 1242721
uuagaucuggcugguaauc

SEQ ID NO: 1368015 - RNA, 19 nt, Artificial Sequence
  Description of Artificial Sequence: Synthetic oligonucleotide
  Antisense strand to SEQ ID NO: 1368014
gauuaccagccagaucuaa

SEQ ID NO: 1368016 - RNA, 19 nt, Artificial Sequence
  Description of Artificial Sequence: Synthetic oligonucleotide
  Sense strand starting at position 14 of SEQ ID NO: 1242721
cugguaaucagguggugga

SEQ ID NO: 1368017 - RNA, 19 nt, Artificial Sequence
  Description of Artificial Sequence: Synthetic oligonucleotide
  Antisense strand to SEQ ID NO: 1368016
uccaccaccugauuaccag

SEQ ID NO: 1368018 - RNA, 19 nt, Artificial Sequence
  Description of Artificial Sequence: Synthetic oligonucleotide
  Sense strand starting at position 15 of SEQ ID NO: 1242721
ugguaaucaggugguggaa

SEQ ID NO: 1368019 - RNA, 19 nt, Artificial Sequence
  Description of Artificial Sequence: Synthetic oligonucleotide
  Antisense strand to SEQ ID NO: 1368018
uuccaccaccugauuacca

SEQ ID NO: 1368020 - RNA, 19 nt, Artificial Sequence
  Description of Artificial Sequence: Synthetic oligonucleotide
  Sense strand starting at position 226 of SEQ ID NO: 1242721
ggagguuaugggcaguguu

SEQ ID NO: 1368021 - RNA, 19 nt, Artificial Sequence
  Description of Artificial Sequence: Synthetic oligonucleotide
  Antisense strand to SEQ ID NO: 1368020
aacacugcccauaaccucc

SEQ ID NO: 1368022 - RNA, 19 nt, Artificial Sequence
  Description of Artificial Sequence: Synthetic oligonucleotide
  Sense strand starting at position 284 of SEQ ID NO: 1242721
ggagaucccagaugcagau

SEQ ID NO: 1368023 - RNA, 19 nt, Artificial Sequence
  Description of Artificial Sequence: Synthetic oligonucleotide
  Antisense strand to SEQ ID NO: 1368022
aucugcaucugggaucucc

SEQ ID NO: 1368024 - RNA, 19 nt, Artificial Sequence
  Description of Artificial Sequence: Synthetic oligonucleotide
  Sense strand starting at position 288 of SEQ ID NO: 1242721
aucccagaugcagauguau

SEQ ID NO: 1368025 - RNA, 19 nt, Artificial Sequence
  Description of Artificial Sequence: Synthetic oligonucleotide
  Antisense strand to SEQ ID NO: 1368024
auacaucugcaucugggau

SEQ ID NO: 1368026 - RNA, 19 nt, Artificial Sequence
  Description of Artificial Sequence: Synthetic oligonucleotide
  Sense strand starting at position 320 of SEQ ID NO: 1242721
cagaguucucacuagcuga

SEQ ID NO: 1368027 - RNA, 19 nt, Artificial Sequence
  Description of Artificial Sequence: Synthetic oligonucleotide
  Antisense strand to SEQ ID NO: 1368026
ucagcuagugagaacucug

SEQ ID NO: 1368028 - RNA, 19 nt, Artificial Sequence
  Description of Artificial Sequence: Synthetic oligonucleotide
  Sense strand starting at position 323 of SEQ ID NO: 1242721
aguucucacuagcugagua

SEQ ID NO: 1368029 - RNA, 19 nt, Artificial Sequence
  Description of Artificial Sequence: Synthetic oligonucleotide
  Antisense strand to SEQ ID NO: 1368028
uacucagcuagugagaacu

SEQ ID NO: 1368030 - RNA, 19 nt, Artificial Sequence
  Description of Artificial Sequence: Synthetic oligonucleotide
  Sense strand starting at position 325 of SEQ ID NO: 1242721
uucucacuagcugaguaau

SEQ ID NO: 1368031 - RNA, 19 nt, Artificial Sequence
  Description of Artificial Sequence: Synthetic oligonucleotide
  Antisense strand to SEQ ID NO: 1368030
auuacucagcuagugagaa

SEQ ID NO: 1368032 - RNA, 19 nt, Artificial Sequence
  Description of Artificial Sequence: Synthetic oligonucleotide
  Sense strand starting at position 327 of SEQ ID NO: 1242721
cucacuagcugaguaauaa

SEQ ID NO: 1368033 - RNA, 19 nt, Artificial Sequence
  Description of Artificial Sequence: Synthetic oligonucleotide
  Antisense strand to SEQ ID NO: 1368032
uuauuacucagcuagugag

SEQ ID NO: 1368034 - RNA, 19 nt, Artificial Sequence
  Description of Artificial Sequence: Synthetic oligonucleotide
  Sense strand starting at position 328 of SEQ ID NO: 1242721
ucacuagcugaguaauaag

SEQ ID NO: 1368035 - RNA, 19 nt, Artificial Sequence
  Description of Artificial Sequence: Synthetic oligonucleotide
  Antisense strand to SEQ ID NO: 1368034
cuuauuacucagcuaguga

SEQ ID NO: 1368036 - RNA, 19 nt, Artificial Sequence
  Description of Artificial Sequence: Synthetic oligonucleotide
  Sense strand starting at position 369 of SEQ ID NO: 1242721
uguugacagaccugagauu

SEQ ID NO: 1368037 - RNA, 19 nt, Artificial Sequence
  Description of Artificial Sequence: Synthetic oligonucleotide
  Antisense strand to SEQ ID NO: 1368036
aaucucaggucugucaaca

SEQ ID NO: 1368038 - RNA, 19 nt, Artificial Sequence
  Description of Artificial Sequence: Synthetic oligonucleotide
  Sense strand starting at position 621 of SEQ ID NO: 1242721
accacaaauguuuguguua

SEQ ID NO: 1368039 - RNA, 19 nt, Artificial Sequence
  Description of Artificial Sequence: Synthetic oligonucleotide
  Antisense strand to SEQ ID NO: 1368038
uaacacaaacauuuguggu

SEQ ID NO: 1368040 - RNA, 19 nt, Artificial Sequence
  Description of Artificial Sequence: Synthetic oligonucleotide
  Sense strand starting at position 622 of SEQ ID NO: 1242721
ccacaaauguuuguguuac

SEQ ID NO: 1368041 - RNA, 19 nt, Artificial Sequence
  Description of Artificial Sequence: Synthetic oligonucleotide
  Antisense strand to SEQ ID NO: 1368040
guaacacaaacauuugugg

SEQ ID NO: 1368042 - RNA, 19 nt, Artificial Sequence
  Description of Artificial Sequence: Synthetic oligonucleotide
  Sense strand starting at position 624 of SEQ ID NO: 1242721
acaaauguuuguguuacca

SEQ ID NO: 1368043 - RNA, 19 nt, Artificial Sequence
  Description of Artificial Sequence: Synthetic oligonucleotide
  Antisense strand to SEQ ID NO: 1368042
ugguaacacaaacauuugu

SEQ ID NO: 1368044 - RNA, 19 nt, Artificial Sequence
  Description of Artificial Sequence: Synthetic oligonucleotide
  Sense strand starting at position 628 of SEQ ID NO: 1242721
auguuuguguuaccaagaa

SEQ ID NO: 1368045 - RNA, 19 nt, Artificial Sequence
  Description of Artificial Sequence: Synthetic oligonucleotide
  Antisense strand to SEQ ID NO: 1368044
uucuugguaacacaaacau

SEQ ID NO: 1368046 - RNA, 19 nt, Artificial Sequence
  Description of Artificial Sequence: Synthetic oligonucleotide
  Sense strand starting at position 709 of SEQ ID NO: 1242721
cuuaaaucacagcgaaauu

SEQ ID NO: 1368047 - RNA, 19 nt, Artificial Sequence
  Description of Artificial Sequence: Synthetic oligonucleotide
  Antisense strand to SEQ ID NO: 1368046
aauuucgcugugauuuaag

SEQ ID NO: 1368048 - RNA, 19 nt, Artificial Sequence
  Description of Artificial Sequence: Synthetic oligonucleotide
  Sense strand starting at position 846 of SEQ ID NO: 1242721
aggguaaccucuccaacca

SEQ ID NO: 1368049 - RNA, 19 nt, Artificial Sequence
  Description of Artificial Sequence: Synthetic oligonucleotide
  Antisense strand to SEQ ID NO: 1368048
ugguuggagagguuacccu

SEQ ID NO: 1368050 - RNA, 19 nt, Artificial Sequence
  Description of Artificial Sequence: Synthetic oligonucleotide
  Sense strand starting at position 886 of SEQ ID NO: 1242721
gagucuccggcccaagaau

SEQ ID NO: 1368051 - RNA, 19 nt, Artificial Sequence
  Description of Artificial Sequence: Synthetic oligonucleotide
  Antisense strand to SEQ ID NO: 1368050
auucuugggccggagacuc

SEQ ID NO: 1368052 - RNA, 19 nt, Artificial Sequence
  Description of Artificial Sequence: Synthetic oligonucleotide
  Sense strand starting at position 960 of SEQ ID NO: 1242721
gaauguugggauugcagga

SEQ ID NO: 1368053 - RNA, 19 nt, Artificial Sequence
  Description of Artificial Sequence: Synthetic oligonucleotide
  Antisense strand to SEQ ID NO: 1368052
uccugcaaucccaacauuc

SEQ ID NO: 1368054 - RNA, 19 nt, Artificial Sequence
  Description of Artificial Sequence: Synthetic oligonucleotide
  Sense strand starting at position 1234 of SEQ ID NO: 1242721
ucuaguguuccagaggcuu

SEQ ID NO: 1368055 - RNA, 19 nt, Artificial Sequence
  Description of Artificial Sequence: Synthetic oligonucleotide
  Antisense strand to SEQ ID NO: 1368054
aagccucuggaacacuaga

SEQ ID NO: 1368056 - RNA, 19 nt, Artificial Sequence
  Description of Artificial Sequence: Synthetic oligonucleotide
  Sense strand starting at position 1245 of SEQ ID NO: 1242721
agaggcuuccgcuagacca

SEQ ID NO: 1368057 - RNA, 19 nt, Artificial Sequence
  Description of Artificial Sequence: Synthetic oligonucleotide
  Antisense strand to SEQ ID NO: 1368056
uggucuagcggaagccucu

SEQ ID NO: 1368058 - RNA, 19 nt, Artificial Sequence
  Description of Artificial Sequence: Synthetic oligonucleotide
  Sense strand starting at position 2211 of SEQ ID NO: 1242721
aucccugucuugucuuaga

SEQ ID NO: 1368059 - RNA, 19 nt, Artificial Sequence
  Description of Artificial Sequence: Synthetic oligonucleotide
  Antisense strand to SEQ ID NO: 1368058
ucuaagacaagacagggau

SEQ ID NO: 1368060 - RNA, 19 nt, Artificial Sequence
  Description of Artificial Sequence: Synthetic oligonucleotide
  Sense strand starting at position 2359 of SEQ ID NO: 1242721
gauguuaaggugggacuua

SEQ ID NO: 1368061 - RNA, 19 nt, Artificial Sequence
  Description of Artificial Sequence: Synthetic oligonucleotide
  Antisense strand to SEQ ID NO: 1368060
uaagucccaccuuaacauc

SEQ ID NO: 1368062 - RNA, 19 nt, Artificial Sequence
  Description of Artificial Sequence: Synthetic oligonucleotide
  Sense strand starting at position 2372 of SEQ ID NO: 1242721
gacuuaaugcacgggaagu

SEQ ID NO: 1368063 - RNA, 19 nt, Artificial Sequence
  Description of Artificial Sequence: Synthetic oligonucleotide
  Antisense strand to SEQ ID NO: 1368062
acuucccgugcauuaaguc

SEQ ID NO: 1368064 - RNA, 19 nt, Artificial Sequence
  Description of Artificial Sequence: Synthetic oligonucleotide
  Sense strand starting at position 2373 of SEQ ID NO: 1242721
acuuaaugcacgggaagua

SEQ ID NO: 1368065 - RNA, 19 nt, Artificial Sequence
  Description of Artificial Sequence: Synthetic oligonucleotide
  Antisense strand to SEQ ID NO: 1368064
uacuucccgugcauuaagu

SEQ ID NO: 1368066 - RNA, 19 nt, Artificial Sequence
  Description of Artificial Sequence: Synthetic oligonucleotide
  Sense strand starting at position 2391 of SEQ ID NO: 1242721
agaauucaggccugagguu

SEQ ID NO: 1368067 - RNA, 19 nt, Artificial Sequence
  Description of Artificial Sequence: Synthetic oligonucleotide
  Antisense strand to SEQ ID NO: 1368066
aaccucaggccugaauucu

SEQ ID NO: 1368068 - RNA, 19 nt, Artificial Sequence
  Description of Artificial Sequence: Synthetic oligonucleotide
  Sense strand starting at position 2600 of SEQ ID NO: 1242721
gaaccugguugcuuuauga

SEQ ID NO: 1368069 - RNA, 19 nt, Artificial Sequence
  Description of Artificial Sequence: Synthetic oligonucleotide
  Antisense strand to SEQ ID NO: 1368068
ucauaaagcaaccagguuc

SEQ ID NO: 1368070 - RNA, 19 nt, Artificial Sequence
  Description of Artificial Sequence: Synthetic oligonucleotide
  Sense strand starting at position 2616 of SEQ ID NO: 1242721
ugaaauugcccuuacugau

SEQ ID NO: 1368071 - RNA, 19 nt, Artificial Sequence
  Description of Artificial Sequence: Synthetic oligonucleotide
  Antisense strand to SEQ ID NO: 1368070
aucaguaagggcaauuuca

SEQ ID NO: 1368072 - RNA, 19 nt, Artificial Sequence
  Description of Artificial Sequence: Synthetic oligonucleotide
  Sense strand starting at position 2694 of SEQ ID NO: 1242721
ccugauauccuuuguaaag

SEQ ID NO: 1368073 - RNA, 19 nt, Artificial Sequence
  Description of Artificial Sequence: Synthetic oligonucleotide
  Antisense strand to SEQ ID NO: 1368072
cuuuacaaaggauaucagg

SEQ ID NO: 1368074 - RNA, 19 nt, Artificial Sequence
  Description of Artificial Sequence: Synthetic oligonucleotide
  Sense strand starting at position 2695 of SEQ ID NO: 1242721
cugauauccuuuguaaagg

SEQ ID NO: 1368075 - RNA, 19 nt, Artificial Sequence
  Description of Artificial Sequence: Synthetic oligonucleotide
  Antisense strand to SEQ ID NO: 1368074
ccuuuacaaaggauaucag

SEQ ID NO: 1368076 - RNA, 19 nt, Artificial Sequence
  Description of Artificial Sequence: Synthetic oligonucleotide
  Sense strand starting at position 2713 of SEQ ID NO: 1242721
gcgcuucugauugagagau

SEQ ID NO: 1368077 - RNA, 19 nt, Artificial Sequence
  Description of Artificial Sequence: Synthetic oligonucleotide
  Antisense strand to SEQ ID NO: 1368076
aucucucaaucagaagcgc

SEQ ID NO: 1368078 - RNA, 19 nt, Artificial Sequence
  Description of Artificial Sequence: Synthetic oligonucleotide
  Sense strand starting at position 2784 of SEQ ID NO: 1242721
cauguaaagcguugauuuc

SEQ ID NO: 1368079 - RNA, 19 nt, Artificial Sequence
  Description of Artificial Sequence: Synthetic oligonucleotide
  Antisense strand to SEQ ID NO: 1368078
gaaaucaacgcuuuacaug

SEQ ID NO: 1368080 - RNA, 19 nt, Artificial Sequence
  Description of Artificial Sequence: Synthetic oligonucleotide
  Sense strand starting at position 3475 of SEQ ID NO: 1242721
cuggucacuucuuccaagu

SEQ ID NO: 1368081 - RNA, 19 nt, Artificial Sequence
  Description of Artificial Sequence: Synthetic oligonucleotide
  Antisense strand to SEQ ID NO: 1368080
acuuggaagaagugaccag

SEQ ID NO: 1368082 - RNA, 19 nt, Artificial Sequence
  Description of Artificial Sequence: Synthetic oligonucleotide
  Sense strand starting at position 3494 of SEQ ID NO: 1242721
acucuugaccuagaaguuu

SEQ ID NO: 1368083 - RNA, 19 nt, Artificial Sequence
  Description of Artificial Sequence: Synthetic oligonucleotide
  Antisense strand to SEQ ID NO: 1368082
aaacuucuaggucaagagu

SEQ ID NO: 1368084 - RNA, 19 nt, Artificial Sequence
  Description of Artificial Sequence: Synthetic oligonucleotide
  Sense strand starting at position 3540 of SEQ ID NO: 1242721
uauucucccuggucaggaa

SEQ ID NO: 1368085 - RNA, 19 nt, Artificial Sequence
  Description of Artificial Sequence: Synthetic oligonucleotide
  Antisense strand to SEQ ID NO: 1368084
uuccugaccagggagaaua

SEQ ID NO: 1368086 - RNA, 19 nt, Artificial Sequence
  Description of Artificial Sequence: Synthetic oligonucleotide
  Sense strand starting at position 3597 of SEQ ID NO: 1242721
gccuucucucuggauguaa

SEQ ID NO: 1368087 - RNA, 19 nt, Artificial Sequence
  Description of Artificial Sequence: Synthetic oligonucleotide
  Antisense strand to SEQ ID NO: 1368086
uuacauccagagagaaggc

SEQ ID NO: 1368088 - RNA, 19 nt, Artificial Sequence
  Description of Artificial Sequence: Synthetic oligonucleotide
  Sense strand starting at position 3608 of SEQ ID NO: 1242721
ggauguaacuuuccuaguc

SEQ ID NO: 1368089 - RNA, 19 nt, Artificial Sequence
  Description of Artificial Sequence: Synthetic oligonucleotide
  Antisense strand to SEQ ID NO: 1368088
gacuaggaaaguuacaucc

SEQ ID NO: 1368090 - RNA, 19 nt, Artificial Sequence
  Description of Artificial Sequence: Synthetic oligonucleotide
  Sense strand starting at position 3868 of SEQ ID NO: 1242721
gugacuugaccaggagagu

SEQ ID NO: 1368091 - RNA, 19 nt, Artificial Sequence
  Description of Artificial Sequence: Synthetic oligonucleotide
  Antisense strand to SEQ ID NO: 1368090
acucuccuggucaagucac

SEQ ID NO: 1368092 - RNA, 19 nt, Artificial Sequence
  Description of Artificial Sequence: Synthetic oligonucleotide
  Sense strand starting at position 103 of SEQ ID NO: 1242722
cgaggaaccagcuaagagu

SEQ ID NO: 1368093 - RNA, 19 nt, Artificial Sequence
  Description of Artificial Sequence: Synthetic oligonucleotide
  Antisense strand to SEQ ID NO: 1368092
acucuuagcugguuccucg

SEQ ID NO: 1368094 - RNA, 19 nt, Artificial Sequence
  Description of Artificial Sequence: Synthetic oligonucleotide
  Sense strand starting at position 142 of SEQ ID NO: 1242722
ggaggagagucaagucaga

SEQ ID NO: 1368095 - RNA, 19 nt, Artificial Sequence
  Description of Artificial Sequence: Synthetic oligonucleotide
  Antisense strand to SEQ ID NO: 1368094
ucugacuugacucuccucc

SEQ ID NO: 1368096 - RNA, 19 nt, Artificial Sequence
  Description of Artificial Sequence: Synthetic oligonucleotide
  Sense strand starting at position 228 of SEQ ID NO: 1242722
ccagauugccaagggugaa

SEQ ID NO: 1368097 - RNA, 19 nt, Artificial Sequence
  Description of Artificial Sequence: Synthetic oligonucleotide
  Antisense strand to SEQ ID NO: 1368096
uucacccuuggcaaucugg

SEQ ID NO: 1368098 - RNA, 19 nt, Artificial Sequence
  Description of Artificial Sequence: Synthetic oligonucleotide
  Sense strand starting at position 267 of SEQ ID NO: 1242722
ggcagaaacaagugugaga

SEQ ID NO: 1368099 - RNA, 19 nt, Artificial Sequence
  Description of Artificial Sequence: Synthetic oligonucleotide
  Antisense strand to SEQ ID NO: 1368098
ucucacacuuguuucugcc

SEQ ID NO: 1368100 - RNA, 19 nt, Artificial Sequence
  Description of Artificial Sequence: Synthetic oligonucleotide
  Sense strand starting at position 481 of SEQ ID NO: 1242722
auggcauugccaggaguaa

SEQ ID NO: 1368101 - RNA, 19 nt, Artificial Sequence
  Description of Artificial Sequence: Synthetic oligonucleotide
  Antisense strand to SEQ ID NO: 1368100
uuacuccuggcaaugccau

SEQ ID NO: 1368102 - RNA, 19 nt, Artificial Sequence
  Description of Artificial Sequence: Synthetic oligonucleotide
  Sense strand starting at position 482 of SEQ ID NO: 1242722
uggcauugccaggaguaac

SEQ ID NO: 1368103 - RNA, 19 nt, Artificial Sequence
  Description of Artificial Sequence: Synthetic oligonucleotide
  Antisense strand to SEQ ID NO: 1368102
guuacuccuggcaaugcca

SEQ ID NO: 1368104 - RNA, 19 nt, Artificial Sequence
  Description of Artificial Sequence: Synthetic oligonucleotide
  Sense strand starting at position 644 of SEQ ID NO: 1242722
gacagaccuaggcgugauu

SEQ ID NO: 1368105 - RNA, 19 nt, Artificial Sequence
  Description of Artificial Sequence: Synthetic oligonucleotide
  Antisense strand to SEQ ID NO: 1368104
aaucacgccuaggucuguc

SEQ ID NO: 1368106 - RNA, 19 nt, Artificial Sequence
  Description of Artificial Sequence: Synthetic oligonucleotide
  Sense strand starting at position 682 of SEQ ID NO: 1242722
aguacauuucccuguguga

SEQ ID NO: 1368107 - RNA, 19 nt, Artificial Sequence
  Description of Artificial Sequence: Synthetic oligonucleotide
  Antisense strand to SEQ ID NO: 1368106
ucacacagggaaauguacu

SEQ ID NO: 1368108 - RNA, 19 nt, Artificial Sequence
  Description of Artificial Sequence: Synthetic oligonucleotide
  Sense strand starting at position 684 of SEQ ID NO: 1242722
uacauuucccugugugagu

SEQ ID NO: 1368109 - RNA, 19 nt, Artificial Sequence
  Description of Artificial Sequence: Synthetic oligonucleotide
  Antisense strand to SEQ ID NO: 1368108
acucacacagggaaaugua

SEQ ID NO: 1368110 - RNA, 19 nt, Artificial Sequence
  Description of Artificial Sequence: Synthetic oligonucleotide
  Sense strand starting at position 814 of SEQ ID NO: 1242722
ccuuguugaccuuggagaa

SEQ ID NO: 1368111 - RNA, 19 nt, Artificial Sequence
  Description of Artificial Sequence: Synthetic oligonucleotide
  Antisense strand to SEQ ID NO: 1368110
uucuccaaggucaacaagg

SEQ ID NO: 1368112 - RNA, 19 nt, Artificial Sequence
  Description of Artificial Sequence: Synthetic oligonucleotide
  Sense strand starting at position 815 of SEQ ID NO: 1242722
cuuguugaccuuggagaaa

SEQ ID NO: 1368113 - RNA, 19 nt, Artificial Sequence
  Description of Artificial Sequence: Synthetic oligonucleotide
  Antisense strand to SEQ ID NO: 1368112
uuucuccaaggucaacaag

SEQ ID NO: 1368114 - RNA, 19 nt, Artificial Sequence
  Description of Artificial Sequence: Synthetic oligonucleotide
  Sense strand starting at position 1137 of SEQ ID NO: 1242722
uccuguugagaacaugagu

SEQ ID NO: 1368115 - RNA, 19 nt, Artificial Sequence
  Description of Artificial Sequence: Synthetic oligonucleotide
  Antisense strand to SEQ ID NO: 1368114
acucauguucucaacagga

SEQ ID NO: 1368116 - RNA, 19 nt, Artificial Sequence
  Description of Artificial Sequence: Synthetic oligonucleotide
  Sense strand starting at position 1184 of SEQ ID NO: 1242722
uccugauauaguggccuga

SEQ ID NO: 1368117 - RNA, 19 nt, Artificial Sequence
  Description of Artificial Sequence: Synthetic oligonucleotide
  Antisense strand to SEQ ID NO: 1368116
ucaggccacuauaucagga

SEQ ID NO: 1368118 - RNA, 19 nt, Artificial Sequence
  Description of Artificial Sequence: Synthetic oligonucleotide
  Sense strand starting at position 1296 of SEQ ID NO: 1242722
ccaagagugcuuuagaaac

SEQ ID NO: 1368119 - RNA, 19 nt, Artificial Sequence
  Description of Artificial Sequence: Synthetic oligonucleotide
  Antisense strand to SEQ ID NO: 1368118
guuucuaaagcacucuugg

SEQ ID NO: 1368120 - RNA, 19 nt, Artificial Sequence
  Description of Artificial Sequence: Synthetic oligonucleotide
  Sense strand starting at position 1511 of SEQ ID NO: 1242722
cuccgugauccagccguaa

SEQ ID NO: 1368121 - RNA, 19 nt, Artificial Sequence
  Description of Artificial Sequence: Synthetic oligonucleotide
  Antisense strand to SEQ ID NO: 1368120
uuacggcuggaucacggag

SEQ ID NO: 1368122 - RNA, 19 nt, Artificial Sequence
  Description of Artificial Sequence: Synthetic oligonucleotide
  Sense strand starting at position 1629 of SEQ ID NO: 1242722
gggcgaucucaggauguuc

SEQ ID NO: 1368123 - RNA, 19 nt, Artificial Sequence
  Description of Artificial Sequence: Synthetic oligonucleotide
  Antisense strand to SEQ ID NO: 1368122
gaacauccugagaucgccc

SEQ ID NO: 1368124 - RNA, 19 nt, Artificial Sequence
  Description of Artificial Sequence: Synthetic oligonucleotide
  Sense strand starting at position 2146 of SEQ ID NO: 1242722
uacagagagcuguaaacuu

SEQ ID NO: 1368125 - RNA, 19 nt, Artificial Sequence
  Description of Artificial Sequence: Synthetic oligonucleotide
  Antisense strand to SEQ ID NO: 1368124
aaguuuacagcucucugua

SEQ ID NO: 1368126 - RNA, 19 nt, Artificial Sequence
  Description of Artificial Sequence: Synthetic oligonucleotide
  Sense strand starting at position 2334 of SEQ ID NO: 1242722
agcucagcuggguaaguua

SEQ ID NO: 1368127 - RNA, 19 nt, Artificial Sequence
  Description of Artificial Sequence: Synthetic oligonucleotide
  Antisense strand to SEQ ID NO: 1368126
uaacuuacccagcugagcu

SEQ ID NO: 1368128 - RNA, 19 nt, Artificial Sequence
  Description of Artificial Sequence: Synthetic oligonucleotide
  Sense strand starting at position 2353 of SEQ ID NO: 1242722
ggacauaucucagcuccca

SEQ ID NO: 1368129 - RNA, 19 nt, Artificial Sequence
  Description of Artificial Sequence: Synthetic oligonucleotide
  Antisense strand to SEQ ID NO: 1368128
ugggagcugagauaugucc

SEQ ID NO: 1368130 - RNA, 19 nt, Artificial Sequence
  Description of Artificial Sequence: Synthetic oligonucleotide
  Sense strand starting at position 2439 of SEQ ID NO: 1242722
cuuucugaggccugaauua

SEQ ID NO: 1368131 - RNA, 19 nt, Artificial Sequence
  Description of Artificial Sequence: Synthetic oligonucleotide
  Antisense strand to SEQ ID NO: 1368130
uaauucaggccucagaaag

SEQ ID NO: 1368132 - RNA, 19 nt, Artificial Sequence
  Description of Artificial Sequence: Synthetic oligonucleotide
  Sense strand starting at position 2503 of SEQ ID NO: 1242722
aucggugucagagaacuca

SEQ ID NO: 1368133 - RNA, 19 nt, Artificial Sequence
  Description of Artificial Sequence: Synthetic oligonucleotide
  Antisense strand to SEQ ID NO: 1368132
ugaguucucugacaccgau

SEQ ID NO: 1368134 - RNA, 19 nt, Artificial Sequence
  Description of Artificial Sequence: Synthetic oligonucleotide
  Sense strand starting at position 2754 of SEQ ID NO: 1242722
gggugaugucaaggcaaug

SEQ ID NO: 1368135 - RNA, 19 nt, Artificial Sequence
  Description of Artificial Sequence: Synthetic oligonucleotide
  Antisense strand to SEQ ID NO: 1368134
cauugccuugacaucaccc

SEQ ID NO: 1368136 - RNA, 19 nt, Artificial Sequence
  Description of Artificial Sequence: Synthetic oligonucleotide
  Sense strand starting at position 2759 of SEQ ID NO: 1242722
augucaaggcaaugugaaa

SEQ ID NO: 1368137 - RNA, 19 nt, Artificial Sequence
  Description of Artificial Sequence: Synthetic oligonucleotide
  Antisense strand to SEQ ID NO: 1368136
uuucacauugccuugacau

SEQ ID NO: 1368138 - RNA, 19 nt, Artificial Sequence
  Description of Artificial Sequence: Synthetic oligonucleotide
  Sense strand starting at position 2937 of SEQ ID NO: 1242722
aaggaaauacgauguauuc

SEQ ID NO: 1368139 - RNA, 19 nt, Artificial Sequence
  Description of Artificial Sequence: Synthetic oligonucleotide
  Antisense strand to SEQ ID NO: 1368138
gaauacaucguauuuccuu

SEQ ID NO: 1368140 - RNA, 19 nt, Artificial Sequence
  Description of Artificial Sequence: Synthetic oligonucleotide
  Sense strand starting at position 2971 of SEQ ID NO: 1242722
gugcacagcuauuuauuaa

SEQ ID NO: 1368141 - RNA, 19 nt, Artificial Sequence
  Description of Artificial Sequence: Synthetic oligonucleotide
  Antisense strand to SEQ ID NO: 1368140
uuaauaaauagcugugcac

SEQ ID NO: 1368142 - RNA, 19 nt, Artificial Sequence
  Description of Artificial Sequence: Synthetic oligonucleotide
  Sense strand starting at position 3004 of SEQ ID NO: 1242722
ugcguugugaaaggagaaa

SEQ ID NO: 1368143 - RNA, 19 nt, Artificial Sequence
  Description of Artificial Sequence: Synthetic oligonucleotide
  Antisense strand to SEQ ID NO: 1368142
uuucuccuuucacaacgca

SEQ ID NO: 1368144 - RNA, 19 nt, Artificial Sequence
  Description of Artificial Sequence: Synthetic oligonucleotide
  Sense strand starting at position 3106 of SEQ ID NO: 1242722
cuccuaggugucuaccgaa

SEQ ID NO: 1368145 - RNA, 19 nt, Artificial Sequence
  Description of Artificial Sequence: Synthetic oligonucleotide
  Antisense strand to SEQ ID NO: 1368144
uucgguagacaccuaggag

SEQ ID NO: 1368146 - RNA, 19 nt, Artificial Sequence
  Description of Artificial Sequence: Synthetic oligonucleotide
  Sense strand starting at position 3113 of SEQ ID NO: 1242722
gugucuaccgaagagaacu

SEQ ID NO: 1368147 - RNA, 19 nt, Artificial Sequence
  Description of Artificial Sequence: Synthetic oligonucleotide
  Antisense strand to SEQ ID NO: 1368146
aguucucuucgguagacac

SEQ ID NO: 1368148 - RNA, 19 nt, Artificial Sequence
  Description of Artificial Sequence: Synthetic oligonucleotide
  Sense strand starting at position 3159 of SEQ ID NO: 1242722
cacaaagagcagugucauu

SEQ ID NO: 1368149 - RNA, 19 nt, Artificial Sequence
  Description of Artificial Sequence: Synthetic oligonucleotide
  Antisense strand to SEQ ID NO: 1368148
aaugacacugcucuuugug

SEQ ID NO: 1368150 - RNA, 19 nt, Artificial Sequence
  Description of Artificial Sequence: Synthetic oligonucleotide
  Sense strand starting at position 3215 of SEQ ID NO: 1242722
ugaccugaugaauguguaa

SEQ ID NO: 1368151 - RNA, 19 nt, Artificial Sequence
  Description of Artificial Sequence: Synthetic oligonucleotide
  Antisense strand to SEQ ID NO: 1368150
uuacacauucaucagguca

SEQ ID NO: 1368152 - RNA, 19 nt, Artificial Sequence
  Description of Artificial Sequence: Synthetic oligonucleotide
  Sense strand starting at position 3218 of SEQ ID NO: 1242722
ccugaugaauguguaaaug

SEQ ID NO: 1368153 - RNA, 19 nt, Artificial Sequence
  Description of Artificial Sequence: Synthetic oligonucleotide
  Antisense strand to SEQ ID NO: 1368152
cauuuacacauucaucagg

SEQ ID NO: 1368154 - RNA, 19 nt, Artificial Sequence
  Description of Artificial Sequence: Synthetic oligonucleotide
  Sense strand starting at position 3224 of SEQ ID NO: 1242722
gaauguguaaaugaagugu

SEQ ID NO: 1368155 - RNA, 19 nt, Artificial Sequence
  Description of Artificial Sequence: Synthetic oligonucleotide
  Antisense strand to SEQ ID NO: 1368154
acacuucauuuacacauuc

SEQ ID NO: 1368156 - RNA, 19 nt, Artificial Sequence
  Description of Artificial Sequence: Synthetic oligonucleotide
  Sense strand starting at position 3246 of SEQ ID NO: 1242722
guaugcgugcagaggcaua

SEQ ID NO: 1368157 - RNA, 19 nt, Artificial Sequence
  Description of Artificial Sequence: Synthetic oligonucleotide
  Antisense strand to SEQ ID NO: 1368156
uaugccucugcacgcauac

SEQ ID NO: 1368158 - RNA, 19 nt, Artificial Sequence
  Description of Artificial Sequence: Synthetic oligonucleotide
  Sense strand starting at position 3402 of SEQ ID NO: 1242722
ggagacagaaaguguuuga

SEQ ID NO: 1368159 - RNA, 19 nt, Artificial Sequence
  Description of Artificial Sequence: Synthetic oligonucleotide
  Antisense strand to SEQ ID NO: 1368158
ucaaacacuuucugucucc

SEQ ID NO: 1368160 - RNA, 19 nt, Artificial Sequence
  Description of Artificial Sequence: Synthetic oligonucleotide
  Sense strand starting at position 3405 of SEQ ID NO: 1242722
gacagaaaguguuugacag

SEQ ID NO: 1368161 - RNA, 19 nt, Artificial Sequence
  Description of Artificial Sequence: Synthetic oligonucleotide
  Antisense strand to SEQ ID NO: 1368160
cugucaaacacuuucuguc

SEQ ID NO: 1368162 - RNA, 19 nt, Artificial Sequence
  Description of Artificial Sequence: Synthetic oligonucleotide
  Sense strand starting at position 3669 of SEQ ID NO: 1242722
guaguaacauaugucuuua

SEQ ID NO: 1368163 - RNA, 19 nt, Artificial Sequence
  Description of Artificial Sequence: Synthetic oligonucleotide
  Antisense strand to SEQ ID NO: 1368162
uaaagacauauguuacuac

SEQ ID NO: 1368164 - RNA, 19 nt, Artificial Sequence
  Description of Artificial Sequence: Synthetic oligonucleotide
  Sense strand starting at position 3736 of SEQ ID NO: 1242722
cagccauuuccuggcugua

SEQ ID NO: 1368165 - RNA, 19 nt, Artificial Sequence
  Description of Artificial Sequence: Synthetic oligonucleotide
  Antisense strand to SEQ ID NO: 1368164
uacagccaggaaauggcug

SEQ ID NO: 1368166 - RNA, 19 nt, Artificial Sequence
  Description of Artificial Sequence: Synthetic oligonucleotide
  Sense strand starting at position 3738 of SEQ ID NO: 1242722
gccauuuccuggcuguaau

SEQ ID NO: 1368167 - RNA, 19 nt, Artificial Sequence
  Description of Artificial Sequence: Synthetic oligonucleotide
  Antisense strand to SEQ ID NO: 1368166
auuacagccaggaaauggc

SEQ ID NO: 1368168 - RNA, 19 nt, Artificial Sequence
  Description of Artificial Sequence: Synthetic oligonucleotide
  Sense strand starting at position 3739 of SEQ ID NO: 1242722
ccauuuccuggcuguaauc

SEQ ID NO: 1368169 - RNA, 19 nt, Artificial Sequence
  Description of Artificial Sequence: Synthetic oligonucleotide
  Antisense strand to SEQ ID NO: 1368168
gauuacagccaggaaaugg

SEQ ID NO: 1368170 - RNA, 19 nt, Artificial Sequence
  Description of Artificial Sequence: Synthetic oligonucleotide
  Sense strand starting at position 3845 of SEQ ID NO: 1242722
aaacacuaugccgagaguu

SEQ ID NO: 1368171 - RNA, 19 nt, Artificial Sequence
  Description of Artificial Sequence: Synthetic oligonucleotide
  Antisense strand to SEQ ID NO: 1368170
aacucucggcauaguguuu

SEQ ID NO: 1368172 - RNA, 19 nt, Artificial Sequence
  Description of Artificial Sequence: Synthetic oligonucleotide
  Sense strand starting at position 91 of SEQ ID NO: 1242723
cuccgagucucacuauguu

SEQ ID NO: 1368173 - RNA, 19 nt, Artificial Sequence
  Description of Artificial Sequence: Synthetic oligonucleotide
  Antisense strand to SEQ ID NO: 1368172
aacauagugagacucggag

SEQ ID NO: 1368174 - RNA, 19 nt, Artificial Sequence
  Description of Artificial Sequence: Synthetic oligonucleotide
  Sense strand starting at position 161 of SEQ ID NO: 1242723
ucuaaaguggugggauuaa

SEQ ID NO: 1368175 - RNA, 19 nt, Artificial Sequence
  Description of Artificial Sequence: Synthetic oligonucleotide
  Antisense strand to SEQ ID NO: 1368174
uuaaucccaccacuuuaga

SEQ ID NO: 1368176 - RNA, 19 nt, Artificial Sequence
  Description of Artificial Sequence: Synthetic oligonucleotide
  Sense strand starting at position 394 of SEQ ID NO: 1242723
ccacaaucauaagagggaa

SEQ ID NO: 1368177 - RNA, 19 nt, Artificial Sequence
  Description of Artificial Sequence: Synthetic oligonucleotide
  Antisense strand to SEQ ID NO: 1368176
uucccucuuaugauugugg

SEQ ID NO: 1368178 - RNA, 19 nt, Artificial Sequence
  Description of Artificial Sequence: Synthetic oligonucleotide
  Sense strand starting at position 2068 of SEQ ID NO: 1242723
uggugguuccgcgauggua

SEQ ID NO: 1368179 - RNA, 19 nt, Artificial Sequence
  Description of Artificial Sequence: Synthetic oligonucleotide
  Antisense strand to SEQ ID NO: 1368178
uaccaucgcggaaccacca

SEQ ID NO: 1368180 - RNA, 19 nt, Artificial Sequence
  Description of Artificial Sequence: Synthetic oligonucleotide
  Sense strand starting at position 2209 of SEQ ID NO: 1242723
acgcgagaucuucgauauc

SEQ ID NO: 1368181 - RNA, 19 nt, Artificial Sequence
  Description of Artificial Sequence: Synthetic oligonucleotide
  Antisense strand to SEQ ID NO: 1368180
gauaucgaagaucucgcgu

SEQ ID NO: 1368182 - RNA, 19 nt, Artificial Sequence
  Description of Artificial Sequence: Synthetic oligonucleotide
  Sense strand starting at position 2328 of SEQ ID NO: 1242723
gaggguucuaagugggcaa

SEQ ID NO: 1368183 - RNA, 19 nt, Artificial Sequence
  Description of Artificial Sequence: Synthetic oligonucleotide
  Antisense strand to SEQ ID NO: 1368182
uugcccacuuagaacccuc

SEQ ID NO: 1368184 - RNA, 19 nt, Artificial Sequence
  Description of Artificial Sequence: Synthetic oligonucleotide
  Sense strand starting at position 2392 of SEQ ID NO: 1242723
caucaaugacccggagcau

SEQ ID NO: 1368185 - RNA, 19 nt, Artificial Sequence
  Description of Artificial Sequence: Synthetic oligonucleotide
  Antisense strand to SEQ ID NO: 1368184
augcuccgggucauugaug

SEQ ID NO: 1368186 - RNA, 19 nt, Artificial Sequence
  Description of Artificial Sequence: Synthetic oligonucleotide
  Sense strand starting at position 2419 of SEQ ID NO: 1242723
gcuagaggaguugaacgua

SEQ ID NO: 1368187 - RNA, 19 nt, Artificial Sequence
  Description of Artificial Sequence: Synthetic oligonucleotide
  Antisense strand to SEQ ID NO: 1368186
uacguucaacuccucuagc

SEQ ID NO: 1368188 - RNA, 19 nt, Artificial Sequence
  Description of Artificial Sequence: Synthetic oligonucleotide
  Sense strand starting at position 2422 of SEQ ID NO: 1242723
agaggaguugaacguagua

SEQ ID NO: 1368189 - RNA, 19 nt, Artificial Sequence
  Description of Artificial Sequence: Synthetic oligonucleotide
  Antisense strand to SEQ ID NO: 1368188
uacuacguucaacuccucu

SEQ ID NO: 1368190 - RNA, 19 nt, Artificial Sequence
  Description of Artificial Sequence: Synthetic oligonucleotide
  Sense strand starting at position 2424 of SEQ ID NO: 1242723
aggaguugaacguaguaga

SEQ ID NO: 1368191 - RNA, 19 nt, Artificial Sequence
  Description of Artificial Sequence: Synthetic oligonucleotide
  Antisense strand to SEQ ID NO: 1368190
ucuacuacguucaacuccu

SEQ ID NO: 1368192 - RNA, 19 nt, Artificial Sequence
  Description of Artificial Sequence: Synthetic oligonucleotide
  Sense strand starting at position 2475 of SEQ ID NO: 1242723
gggagcgaguuguuccaga

SEQ ID NO: 1368193 - RNA, 19 nt, Artificial Sequence
  Description of Artificial Sequence: Synthetic oligonucleotide
  Antisense strand to SEQ ID NO: 1368192
ucuggaacaacucgcuccc

SEQ ID NO: 1368194 - RNA, 19 nt, Artificial Sequence
  Description of Artificial Sequence: Synthetic oligonucleotide
  Sense strand starting at position 2480 of SEQ ID NO: 1242723
cgaguuguuccagagaguc

SEQ ID NO: 1368195 - RNA, 19 nt, Artificial Sequence
  Description of Artificial Sequence: Synthetic oligonucleotide
  Antisense strand to SEQ ID NO: 1368194
gacucucuggaacaacucg

SEQ ID NO: 1368196 - RNA, 19 nt, Artificial Sequence
  Description of Artificial Sequence: Synthetic oligonucleotide
  Sense strand starting at position 2497 of SEQ ID NO: 1242723
ucagaaagguuucugugca

SEQ ID NO: 1368197 - RNA, 19 nt, Artificial Sequence
  Description of Artificial Sequence: Synthetic oligonucleotide
  Antisense strand to SEQ ID NO: 1368196
ugcacagaaaccuuucuga

SEQ ID NO: 1368198 - RNA, 19 nt, Artificial Sequence
  Description of Artificial Sequence: Synthetic oligonucleotide
  Sense strand starting at position 2569 of SEQ ID NO: 1242723
ggagauuguugugccuauu

SEQ ID NO: 1368199 - RNA, 19 nt, Artificial Sequence
  Description of Artificial Sequence: Synthetic oligonucleotide
  Antisense strand to SEQ ID NO: 1368198
aauaggcacaacaaucucc

SEQ ID NO: 1368200 - RNA, 19 nt, Artificial Sequence
  Description of Artificial Sequence: Synthetic oligonucleotide
  Sense strand starting at position 2608 of SEQ ID NO: 1242723
gcccauagaaguuggauga

SEQ ID NO: 1368201 - RNA, 19 nt, Artificial Sequence
  Description of Artificial Sequence: Synthetic oligonucleotide
  Antisense strand to SEQ ID NO: 1368200
ucauccaacuucuaugggc

SEQ ID NO: 1368202 - RNA, 19 nt, Artificial Sequence
  Description of Artificial Sequence: Synthetic oligonucleotide
  Sense strand starting at position 2609 of SEQ ID NO: 1242723
cccauagaaguuggaugau

SEQ ID NO: 1368203 - RNA, 19 nt, Artificial Sequence
  Description of Artificial Sequence: Synthetic oligonucleotide
  Antisense strand to SEQ ID NO: 1368202
aucauccaacuucuauggg

SEQ ID NO: 1368204 - RNA, 19 nt, Artificial Sequence
  Description of Artificial Sequence: Synthetic oligonucleotide
  Sense strand starting at position 2773 of SEQ ID NO: 1242723
cccuuauuggucuguccau

SEQ ID NO: 1368205 - RNA, 19 nt, Artificial Sequence
  Description of Artificial Sequence: Synthetic oligonucleotide
  Antisense strand to SEQ ID NO: 1368204
auggacagaccaauaaggg

SEQ ID NO: 1368206 - RNA, 19 nt, Artificial Sequence
  Description of Artificial Sequence: Synthetic oligonucleotide
  Sense strand starting at position 2969 of SEQ ID NO: 1242723
ggaggaagcuuuccaaguc

SEQ ID NO: 1368207 - RNA, 19 nt, Artificial Sequence
  Description of Artificial Sequence: Synthetic oligonucleotide
  Antisense strand to SEQ ID NO: 1368206
gacuuggaaagcuuccucc

SEQ ID NO: 1368208 - RNA, 19 nt, Artificial Sequence
  Description of Artificial Sequence: Synthetic oligonucleotide
  Sense strand starting at position 2978 of SEQ ID NO: 1242723
uuuccaagucgaugugaca

SEQ ID NO: 1368209 - RNA, 19 nt, Artificial Sequence
  Description of Artificial Sequence: Synthetic oligonucleotide
  Antisense strand to SEQ ID NO: 1368208
ugucacaucgacuuggaaa

SEQ ID NO: 1368210 - RNA, 19 nt, Artificial Sequence
  Description of Artificial Sequence: Synthetic oligonucleotide
  Sense strand starting at position 2981 of SEQ ID NO: 1242723
ccaagucgaugugacaaga

SEQ ID NO: 1368211 - RNA, 19 nt, Artificial Sequence
  Description of Artificial Sequence: Synthetic oligonucleotide
  Antisense strand to SEQ ID NO: 1368210
ucuugucacaucgacuugg

SEQ ID NO: 1368212 - RNA, 19 nt, Artificial Sequence
  Description of Artificial Sequence: Synthetic oligonucleotide
  Sense strand starting at position 3003 of SEQ ID NO: 1242723
aagaucugagcuggaaagu

SEQ ID NO: 1368213 - RNA, 19 nt, Artificial Sequence
  Description of Artificial Sequence: Synthetic oligonucleotide
  Antisense strand to SEQ ID NO: 1368212
acuuuccagcucagaucuu

SEQ ID NO: 1368214 - RNA, 19 nt, Artificial Sequence
  Description of Artificial Sequence: Synthetic oligonucleotide
  Sense strand starting at position 3104 of SEQ ID NO: 1242723
ccuuuaaaucaacaguagu

SEQ ID NO: 1368215 - RNA, 19 nt, Artificial Sequence
  Description of Artificial Sequence: Synthetic oligonucleotide
  Antisense strand to SEQ ID NO: 1368214
acuacuguugauuuaaagg

SEQ ID NO: 1368216 - RNA, 19 nt, Artificial Sequence
  Description of Artificial Sequence: Synthetic oligonucleotide
  Sense strand starting at position 3122 of SEQ ID NO: 1242723
ugggccaguucuuuggaua

SEQ ID NO: 1368217 - RNA, 19 nt, Artificial Sequence
  Description of Artificial Sequence: Synthetic oligonucleotide
  Antisense strand to SEQ ID NO: 1368216
uauccaaagaacuggccca

SEQ ID NO: 1368218 - RNA, 19 nt, Artificial Sequence
  Description of Artificial Sequence: Synthetic oligonucleotide
  Sense strand starting at position 3123 of SEQ ID NO: 1242723
gggccaguucuuuggauag

SEQ ID NO: 1368219 - RNA, 19 nt, Artificial Sequence
  Description of Artificial Sequence: Synthetic oligonucleotide
  Antisense strand to SEQ ID NO: 1368218
cuauccaaagaacuggccc

SEQ ID NO: 1368220 - RNA, 19 nt, Artificial Sequence
  Description of Artificial Sequence: Synthetic oligonucleotide
  Sense strand starting at position 3506 of SEQ ID NO: 1242723
aaggcaugauuaggaggaa

SEQ ID NO: 1368221 - RNA, 19 nt, Artificial Sequence
  Description of Artificial Sequence: Synthetic oligonucleotide
  Antisense strand to SEQ ID NO: 1368220
uuccuccuaaucaugccuu

SEQ ID NO: 1368222 - RNA, 19 nt, Artificial Sequence
  Description of Artificial Sequence: Synthetic oligonucleotide
  Sense strand starting at position 3590 of SEQ ID NO: 1242723
guguucaggcccugguuau

SEQ ID NO: 1368223 - RNA, 19 nt, Artificial Sequence
  Description of Artificial Sequence: Synthetic oligonucleotide
  Antisense strand to SEQ ID NO: 1368222
auaaccagggccugaacac

SEQ ID NO: 1368224 - RNA, 19 nt, Artificial Sequence
  Description of Artificial Sequence: Synthetic oligonucleotide
  Sense strand starting at position 3738 of SEQ ID NO: 1242723
ggagucuaugggcaagacu

SEQ ID NO: 1368225 - RNA, 19 nt, Artificial Sequence
  Description of Artificial Sequence: Synthetic oligonucleotide
  Antisense strand to SEQ ID NO: 1368224
agucuugcccauagacucc

SEQ ID NO: 1368226 - RNA, 19 nt, Artificial Sequence
  Description of Artificial Sequence: Synthetic oligonucleotide
  Sense strand starting at position 3765 of SEQ ID NO: 1242723
guaacugugugagugaaau

SEQ ID NO: 1368227 - RNA, 19 nt, Artificial Sequence
  Description of Artificial Sequence: Synthetic oligonucleotide
  Antisense strand to SEQ ID NO: 1368226
auuucacucacacaguuac

SEQ ID NO: 1368228 - RNA, 19 nt, Artificial Sequence
  Description of Artificial Sequence: Synthetic oligonucleotide
  Sense strand starting at position 3767 of SEQ ID NO: 1242723
aacugugugagugaaauug

SEQ ID NO: 1368229 - RNA, 19 nt, Artificial Sequence
  Description of Artificial Sequence: Synthetic oligonucleotide
  Antisense strand to SEQ ID NO: 1368228
caauuucacucacacaguu

SEQ ID NO: 1368230 - RNA, 19 nt, Artificial Sequence
  Description of Artificial Sequence: Synthetic oligonucleotide
  Sense strand starting at position 3775 of SEQ ID NO: 1242723
gagugaaauugccagagac

SEQ ID NO: 1368231 - RNA, 19 nt, Artificial Sequence
  Description of Artificial Sequence: Synthetic oligonucleotide
  Antisense strand to SEQ ID NO: 1368230
gucucuggcaauuucacuc

SEQ ID NO: 1368232 - RNA, 19 nt, Artificial Sequence
  Description of Artificial Sequence: Synthetic oligonucleotide
  Sense strand starting at position 3777 of SEQ ID NO: 1242723
gugaaauugccagagacuc

SEQ ID NO: 1368233 - RNA, 19 nt, Artificial Sequence
  Description of Artificial Sequence: Synthetic oligonucleotide
  Antisense strand to SEQ ID NO: 1368232
gagucucuggcaauuucac

SEQ ID NO: 1368234 - RNA, 19 nt, Artificial Sequence
  Description of Artificial Sequence: Synthetic oligonucleotide
  Sense strand starting at position 3785 of SEQ ID NO: 1242723
gccagagacuccucaguau

SEQ ID NO: 1368235 - RNA, 19 nt, Artificial Sequence
  Description of Artificial Sequence: Synthetic oligonucleotide
  Antisense strand to SEQ ID NO: 1368234
auacugaggagucucuggc

SEQ ID NO: 1368236 - RNA, 19 nt, Artificial Sequence
  Description of Artificial Sequence: Synthetic oligonucleotide
  Sense strand starting at position 3791 of SEQ ID NO: 1242723
gacuccucaguauggguua

SEQ ID NO: 1368237 - RNA, 19 nt, Artificial Sequence
  Description of Artificial Sequence: Synthetic oligonucleotide
  Antisense strand to SEQ ID NO: 1368236
uaacccauacugaggaguc

SEQ ID NO: 1368238 - RNA, 19 nt, Artificial Sequence
  Description of Artificial Sequence: Synthetic oligonucleotide
  Sense strand starting at position 3805 of SEQ ID NO: 1242723
gguuauagccuagaccgaa

SEQ ID NO: 1368239 - RNA, 19 nt, Artificial Sequence
  Description of Artificial Sequence: Synthetic oligonucleotide
  Antisense strand to SEQ ID NO: 1368238
uucggucuaggcuauaacc

SEQ ID NO: 1368240 - RNA, 19 nt, Artificial Sequence
  Description of Artificial Sequence: Synthetic oligonucleotide
  Sense strand starting at position 3820 of SEQ ID NO: 1242723
cgaagcuggccugagaaga

SEQ ID NO: 1368241 - RNA, 19 nt, Artificial Sequence
  Description of Artificial Sequence: Synthetic oligonucleotide
  Antisense strand to SEQ ID NO: 1368240
ucuucucaggccagcuucg

SEQ ID NO: 1368242 - RNA, 19 nt, Artificial Sequence
  Description of Artificial Sequence: Synthetic oligonucleotide
  Sense strand starting at position 3833 of SEQ ID NO: 1242723
agaagacucuccuuugcuu

SEQ ID NO: 1368243 - RNA, 19 nt, Artificial Sequence
  Description of Artificial Sequence: Synthetic oligonucleotide
  Antisense strand to SEQ ID NO: 1368242
aagcaaaggagagucuucu

SEQ ID NO: 1368244 - RNA, 19 nt, Artificial Sequence
  Description of Artificial Sequence: Synthetic oligonucleotide
  Sense strand starting at position 3940 of SEQ ID NO: 1242723
gagggauccuaagaaggca

SEQ ID NO: 1368245 - RNA, 19 nt, Artificial Sequence
  Description of Artificial Sequence: Synthetic oligonucleotide
  Antisense strand to SEQ ID NO: 1368244
ugccuucuuaggaucccuc

SEQ ID NO: 1368246 - RNA, 19 nt, Artificial Sequence
  Description of Artificial Sequence: Synthetic oligonucleotide
  Sense strand starting at position 3968 of SEQ ID NO: 1242723
ggcucaggugguugaagua

SEQ ID NO: 1368247 - RNA, 19 nt, Artificial Sequence
  Description of Artificial Sequence: Synthetic oligonucleotide
  Antisense strand to SEQ ID NO: 1368246
uacuucaaccaccugagcc

SEQ ID NO: 1368248 - RNA, 19 nt, Artificial Sequence
  Description of Artificial Sequence: Synthetic oligonucleotide
  Sense strand starting at position 3978 of SEQ ID NO: 1242723
guugaaguagccugaucaa

SEQ ID NO: 1368249 - RNA, 19 nt, Artificial Sequence
  Description of Artificial Sequence: Synthetic oligonucleotide
  Antisense strand to SEQ ID NO: 1368248
uugaucaggcuacuucaac

SEQ ID NO: 1368250 - RNA, 19 nt, Artificial Sequence
  Description of Artificial Sequence: Synthetic oligonucleotide
  Sense strand starting at position 3981 of SEQ ID NO: 1242723
gaaguagccugaucaauau

SEQ ID NO: 1368251 - RNA, 19 nt, Artificial Sequence
  Description of Artificial Sequence: Synthetic oligonucleotide
  Antisense strand to SEQ ID NO: 1368250
auauugaucaggcuacuuc

SEQ ID NO: 1368252 - RNA, 19 nt, Artificial Sequence
  Description of Artificial Sequence: Synthetic oligonucleotide
  Sense strand starting at position 840 of SEQ ID NO: 1242724
cggcuuaagcuuugucuuu

SEQ ID NO: 1368253 - RNA, 19 nt, Artificial Sequence
  Description of Artificial Sequence: Synthetic oligonucleotide
  Antisense strand to SEQ ID NO: 1368252
aaagacaaagcuuaagccg

SEQ ID NO: 1368254 - RNA, 19 nt, Artificial Sequence
  Description of Artificial Sequence: Synthetic oligonucleotide
  Sense strand starting at position 842 of SEQ ID NO: 1242724
gcuuaagcuuugucuuuga

SEQ ID NO: 1368255 - RNA, 19 nt, Artificial Sequence
  Description of Artificial Sequence: Synthetic oligonucleotide
  Antisense strand to SEQ ID NO: 1368254
ucaaagacaaagcuuaagc

SEQ ID NO: 1368256 - RNA, 19 nt, Artificial Sequence
  Description of Artificial Sequence: Synthetic oligonucleotide
  Sense strand starting at position 845 of SEQ ID NO: 1242724
uaagcuuugucuuugaaug

SEQ ID NO: 1368257 - RNA, 19 nt, Artificial Sequence
  Description of Artificial Sequence: Synthetic oligonucleotide
  Antisense strand to SEQ ID NO: 1368256
cauucaaagacaaagcuua

SEQ ID NO: 1368258 - RNA, 19 nt, Artificial Sequence
  Description of Artificial Sequence: Synthetic oligonucleotide
  Sense strand starting at position 846 of SEQ ID NO: 1242724
aagcuuugucuuugaaugu

SEQ ID NO: 1368259 - RNA, 19 nt, Artificial Sequence
  Description of Artificial Sequence: Synthetic oligonucleotide
  Antisense strand to SEQ ID NO: 1368258
acauucaaagacaaagcuu

SEQ ID NO: 1368260 - RNA, 19 nt, Artificial Sequence
  Description of Artificial Sequence: Synthetic oligonucleotide
  Sense strand starting at position 856 of SEQ ID NO: 1242724
uuugaaugucaagauugca

SEQ ID NO: 1368261 - RNA, 19 nt, Artificial Sequence
  Description of Artificial Sequence: Synthetic oligonucleotide
  Antisense strand to SEQ ID NO: 1368260
ugcaaucuugacauucaaa

SEQ ID NO: 1368262 - RNA, 19 nt, Artificial Sequence
  Description of Artificial Sequence: Synthetic oligonucleotide
  Sense strand starting at position 859 of SEQ ID NO: 1242724
gaaugucaagauugcauga

SEQ ID NO: 1368263 - RNA, 19 nt, Artificial Sequence
  Description of Artificial Sequence: Synthetic oligonucleotide
  Antisense strand to SEQ ID NO: 1368262
ucaugcaaucuugacauuc

SEQ ID NO: 1368264 - RNA, 19 nt, Artificial Sequence
  Description of Artificial Sequence: Synthetic oligonucleotide
  Sense strand starting at position 928 of SEQ ID NO: 1242724
ggcuaagucagaggacaaa

SEQ ID NO: 1368265 - RNA, 19 nt, Artificial Sequence
  Description of Artificial Sequence: Synthetic oligonucleotide
  Antisense strand to SEQ ID NO: 1368264
uuuguccucugacuuagcc

SEQ ID NO: 1368266 - RNA, 19 nt, Artificial Sequence
  Description of Artificial Sequence: Synthetic oligonucleotide
  Sense strand starting at position 975 of SEQ ID NO: 1242724
cuauuagccucagugguaa

SEQ ID NO: 1368267 - RNA, 19 nt, Artificial Sequence
  Description of Artificial Sequence: Synthetic oligonucleotide
  Antisense strand to SEQ ID NO: 1368266
uuaccacugaggcuaauag

SEQ ID NO: 1368268 - RNA, 19 nt, Artificial Sequence
  Description of Artificial Sequence: Synthetic oligonucleotide
  Sense strand starting at position 1374 of SEQ ID NO: 1242724
acgcuccauuuguggaaga

SEQ ID NO: 1368269 - RNA, 19 nt, Artificial Sequence
  Description of Artificial Sequence: Synthetic oligonucleotide
  Antisense strand to SEQ ID NO: 1368268
ucuuccacaaauggagcgu

SEQ ID NO: 1368270 - RNA, 19 nt, Artificial Sequence
  Description of Artificial Sequence: Synthetic oligonucleotide
  Sense strand starting at position 1375 of SEQ ID NO: 1242724
cgcuccauuuguggaagau

SEQ ID NO: 1368271 - RNA, 19 nt, Artificial Sequence
  Description of Artificial Sequence: Synthetic oligonucleotide
  Antisense strand to SEQ ID NO: 1368270
aucuuccacaaauggagcg

SEQ ID NO: 1368272 - RNA, 19 nt, Artificial Sequence
  Description of Artificial Sequence: Synthetic oligonucleotide
  Sense strand starting at position 1385 of SEQ ID NO: 1242724
guggaagauuugcagccau

SEQ ID NO: 1368273 - RNA, 19 nt, Artificial Sequence
  Description of Artificial Sequence: Synthetic oligonucleotide
  Antisense strand to SEQ ID NO: 1368272
auggcugcaaaucuuccac

SEQ ID NO: 1368274 - RNA, 19 nt, Artificial Sequence
  Description of Artificial Sequence: Synthetic oligonucleotide
  Sense strand starting at position 2009 of SEQ ID NO: 1242724
ucucauagagccugaugua

SEQ ID NO: 1368275 - RNA, 19 nt, Artificial Sequence
  Description of Artificial Sequence: Synthetic oligonucleotide
  Antisense strand to SEQ ID NO: 1368274
uacaucaggcucuaugaga

SEQ ID NO: 1368276 - RNA, 19 nt, Artificial Sequence
  Description of Artificial Sequence: Synthetic oligonucleotide
  Sense strand starting at position 2010 of SEQ ID NO: 1242724
cucauagagccugauguau

SEQ ID NO: 1368277 - RNA, 19 nt, Artificial Sequence
  Description of Artificial Sequence: Synthetic oligonucleotide
  Antisense strand to SEQ ID NO: 1368276
auacaucaggcucuaugag

SEQ ID NO: 1368278 - RNA, 19 nt, Artificial Sequence
  Description of Artificial Sequence: Synthetic oligonucleotide
  Sense strand starting at position 2012 of SEQ ID NO: 1242724
cauagagccugauguauaa

SEQ ID NO: 1368279 - RNA, 19 nt, Artificial Sequence
  Description of Artificial Sequence: Synthetic oligonucleotide
  Antisense strand to SEQ ID NO: 1368278
uuauacaucaggcucuaug

SEQ ID NO: 1368280 - RNA, 19 nt, Artificial Sequence
  Description of Artificial Sequence: Synthetic oligonucleotide
  Sense strand starting at position 2016 of SEQ ID NO: 1242724
gagccugauguauaaacca

SEQ ID NO: 1368281 - RNA, 19 nt, Artificial Sequence
  Description of Artificial Sequence: Synthetic oligonucleotide
  Antisense strand to SEQ ID NO: 1368280
ugguuuauacaucaggcuc

SEQ ID NO: 1368282 - RNA, 19 nt, Artificial Sequence
  Description of Artificial Sequence: Synthetic oligonucleotide
  Sense strand starting at position 2047 of SEQ ID NO: 1242724
ggaauaugcugcccagauc

SEQ ID NO: 1368283 - RNA, 19 nt, Artificial Sequence
  Description of Artificial Sequence: Synthetic oligonucleotide
  Antisense strand to SEQ ID NO: 1368282
gaucugggcagcauauucc

SEQ ID NO: 1368284 - RNA, 19 nt, Artificial Sequence
  Description of Artificial Sequence: Synthetic oligonucleotide
  Sense strand starting at position 2769 of SEQ ID NO: 1242724
gcaggaggcucccaaguua

SEQ ID NO: 1368285 - RNA, 19 nt, Artificial Sequence
  Description of Artificial Sequence: Synthetic oligonucleotide
  Antisense strand to SEQ ID NO: 1368284
uaacuugggagccuccugc

SEQ ID NO: 1368286 - RNA, 19 nt, Artificial Sequence
  Description of Artificial Sequence: Synthetic oligonucleotide
  Sense strand starting at position 2925 of SEQ ID NO: 1242724
gcguccaguuucuuuccua

SEQ ID NO: 1368287 - RNA, 19 nt, Artificial Sequence
  Description of Artificial Sequence: Synthetic oligonucleotide
  Antisense strand to SEQ ID NO: 1368286
uaggaaagaaacuggacgc

SEQ ID NO: 1368288 - RNA, 19 nt, Artificial Sequence
  Description of Artificial Sequence: Synthetic oligonucleotide
  Sense strand starting at position 2929 of SEQ ID NO: 1242724
ccaguuucuuuccuagaag

SEQ ID NO: 1368289 - RNA, 19 nt, Artificial Sequence
  Description of Artificial Sequence: Synthetic oligonucleotide
  Antisense strand to SEQ ID NO: 1368288
cuucuaggaaagaaacugg

SEQ ID NO: 1368290 - RNA, 19 nt, Artificial Sequence
  Description of Artificial Sequence: Synthetic oligonucleotide
  Sense strand starting at position 2932 of SEQ ID NO: 1242724
guuucuuuccuagaagaca

SEQ ID NO: 1368291 - RNA, 19 nt, Artificial Sequence
  Description of Artificial Sequence: Synthetic oligonucleotide
  Antisense strand to SEQ ID NO: 1368290
ugucuucuaggaaagaaac

SEQ ID NO: 1368292 - RNA, 19 nt, Artificial Sequence
  Description of Artificial Sequence: Synthetic oligonucleotide
  Sense strand starting at position 3352 of SEQ ID NO: 1242724
ccucgagacuggucacaga

SEQ ID NO: 1368293 - RNA, 19 nt, Artificial Sequence
  Description of Artificial Sequence: Synthetic oligonucleotide
  Antisense strand to SEQ ID NO: 1368292
ucugugaccagucucgagg

SEQ ID NO: 1368294 - RNA, 19 nt, Artificial Sequence
  Description of Artificial Sequence: Synthetic oligonucleotide
  Sense strand starting at position 3355 of SEQ ID NO: 1242724
cgagacuggucacagacuu

SEQ ID NO: 1368295 - RNA, 19 nt, Artificial Sequence
  Description of Artificial Sequence: Synthetic oligonucleotide
  Antisense strand to SEQ ID NO: 1368294
aagucugugaccagucucg

SEQ ID NO: 1368296 - RNA, 19 nt, Artificial Sequence
  Description of Artificial Sequence: Synthetic oligonucleotide
  Sense strand starting at position 3497 of SEQ ID NO: 1242724
cucuaagaauagugucauu

SEQ ID NO: 1368297 - RNA, 19 nt, Artificial Sequence
  Description of Artificial Sequence: Synthetic oligonucleotide
  Antisense strand to SEQ ID NO: 1368296
aaugacacuauucuuagag

SEQ ID NO: 1368298 - RNA, 19 nt, Artificial Sequence
  Description of Artificial Sequence: Synthetic oligonucleotide
  Sense strand starting at position 3502 of SEQ ID NO: 1242724
agaauagugucauuaucuu

SEQ ID NO: 1368299 - RNA, 19 nt, Artificial Sequence
  Description of Artificial Sequence: Synthetic oligonucleotide
  Antisense strand to SEQ ID NO: 1368298
aagauaaugacacuauucu

SEQ ID NO: 1368300 - RNA, 19 nt, Artificial Sequence
  Description of Artificial Sequence: Synthetic oligonucleotide
  Sense strand starting at position 3816 of SEQ ID NO: 1242724
accucaagucugugguuga

SEQ ID NO: 1368301 - RNA, 19 nt, Artificial Sequence
  Description of Artificial Sequence: Synthetic oligonucleotide
  Antisense strand to SEQ ID NO: 1368300
ucaaccacagacuugaggu

SEQ ID NO: 1368302 - RNA, 19 nt, Artificial Sequence
  Description of Artificial Sequence: Synthetic oligonucleotide
  Sense strand starting at position 3819 of SEQ ID NO: 1242724
ucaagucugugguugagaa

SEQ ID NO: 1368303 - RNA, 19 nt, Artificial Sequence
  Description of Artificial Sequence: Synthetic oligonucleotide
  Antisense strand to SEQ ID NO: 1368302
uucucaaccacagacuuga

SEQ ID NO: 1368304 - RNA, 19 nt, Artificial Sequence
  Description of Artificial Sequence: Synthetic oligonucleotide
  Sense strand starting at position 3820 of SEQ ID NO: 1242724
caagucugugguugagaaa

SEQ ID NO: 1368305 - RNA, 19 nt, Artificial Sequence
  Description of Artificial Sequence: Synthetic oligonucleotide
  Antisense strand to SEQ ID NO: 1368304
uuucucaaccacagacuug

SEQ ID NO: 1368306 - RNA, 19 nt, Artificial Sequence
  Description of Artificial Sequence: Synthetic oligonucleotide
  Sense strand starting at position 3883 of SEQ ID NO: 1242724
ggaggaugcuguuguccau

SEQ ID NO: 1368307 - RNA, 19 nt, Artificial Sequence
  Description of Artificial Sequence: Synthetic oligonucleotide
  Antisense strand to SEQ ID NO: 1368306
auggacaacagcauccucc

SEQ ID NO: 1368308 - RNA, 19 nt, Artificial Sequence
  Description of Artificial Sequence: Synthetic oligonucleotide
  Sense strand starting at position 3886 of SEQ ID NO: 1242724
ggaugcuguuguccauaca

SEQ ID NO: 1368309 - RNA, 19 nt, Artificial Sequence
  Description of Artificial Sequence: Synthetic oligonucleotide
  Antisense strand to SEQ ID NO: 1368308
uguauggacaacagcaucc

SEQ ID NO: 1368310 - RNA, 19 nt, Artificial Sequence
  Description of Artificial Sequence: Synthetic oligonucleotide
  Sense strand starting at position 3887 of SEQ ID NO: 1242724
gaugcuguuguccauacaa

SEQ ID NO: 1368311 - RNA, 19 nt, Artificial Sequence
  Description of Artificial Sequence: Synthetic oligonucleotide
  Antisense strand to SEQ ID NO: 1368310
uuguauggacaacagcauc

SEQ ID NO: 1368312 - RNA, 19 nt, Artificial Sequence
  Description of Artificial Sequence: Synthetic oligonucleotide
  Sense strand starting at position 3889 of SEQ ID NO: 1242724
ugcuguuguccauacaaga

SEQ ID NO: 1368313 - RNA, 19 nt, Artificial Sequence
  Description of Artificial Sequence: Synthetic oligonucleotide
  Antisense strand to SEQ ID NO: 1368312
ucuuguauggacaacagca

SEQ ID NO: 1368314 - RNA, 19 nt, Artificial Sequence
  Description of Artificial Sequence: Synthetic oligonucleotide
  Sense strand starting at position 3933 of SEQ ID NO: 1242724
agaaucaucuuguacacag

SEQ ID NO: 1368315 - RNA, 19 nt, Artificial Sequence
  Description of Artificial Sequence: Synthetic oligonucleotide
  Antisense strand to SEQ ID NO: 1368314
cuguguacaagaugauucu

SEQ ID NO: 1368316 - RNA, 19 nt, Artificial Sequence
  Description of Artificial Sequence: Synthetic oligonucleotide
  Sense strand starting at position 3941 of SEQ ID NO: 1242724
cuuguacacagugguuaaa

SEQ ID NO: 1368317 - RNA, 19 nt, Artificial Sequence
  Description of Artificial Sequence: Synthetic oligonucleotide
  Antisense strand to SEQ ID NO: 1368316
uuuaaccacuguguacaag

SEQ ID NO: 1368318 - RNA, 19 nt, Artificial Sequence
  Description of Artificial Sequence: Synthetic oligonucleotide
  Sense strand starting at position 127 of SEQ ID NO: 1242725
ggcuguucucaguacuuac

SEQ ID NO: 1368319 - RNA, 19 nt, Artificial Sequence
  Description of Artificial Sequence: Synthetic oligonucleotide
  Antisense strand to SEQ ID NO: 1368318
guaaguacugagaacagcc

SEQ ID NO: 1368320 - RNA, 19 nt, Artificial Sequence
  Description of Artificial Sequence: Synthetic oligonucleotide
  Sense strand starting at position 176 of SEQ ID NO: 1242725
gccggugagccuggucuua

SEQ ID NO: 1368321 - RNA, 19 nt, Artificial Sequence
  Description of Artificial Sequence: Synthetic oligonucleotide
  Antisense strand to SEQ ID NO: 1368320
uaagaccaggcucaccggc

SEQ ID NO: 1368322 - RNA, 19 nt, Artificial Sequence
  Description of Artificial Sequence: Synthetic oligonucleotide
  Sense strand starting at position 328 of SEQ ID NO: 1242725
guguuugagacagggucua

SEQ ID NO: 1368323 - RNA, 19 nt, Artificial Sequence
  Description of Artificial Sequence: Synthetic oligonucleotide
  Antisense strand to SEQ ID NO: 1368322
uagacccugucucaaacac

SEQ ID NO: 1368324 - RNA, 19 nt, Artificial Sequence
  Description of Artificial Sequence: Synthetic oligonucleotide
  Sense strand starting at position 778 of SEQ ID NO: 1242725
gcagaacuguggccuaacu

SEQ ID NO: 1368325 - RNA, 19 nt, Artificial Sequence
  Description of Artificial Sequence: Synthetic oligonucleotide
  Antisense strand to SEQ ID NO: 1368324
aguuaggccacaguucugc

SEQ ID NO: 1368326 - RNA, 19 nt, Artificial Sequence
  Description of Artificial Sequence: Synthetic oligonucleotide
  Sense strand starting at position 780 of SEQ ID NO: 1242725
agaacuguggccuaacuaa

SEQ ID NO: 1368327 - RNA, 19 nt, Artificial Sequence
  Description of Artificial Sequence: Synthetic oligonucleotide
  Antisense strand to SEQ ID NO: 1368326
uuaguuaggccacaguucu

SEQ ID NO: 1368328 - RNA, 19 nt, Artificial Sequence
  Description of Artificial Sequence: Synthetic oligonucleotide
  Sense strand starting at position 820 of SEQ ID NO: 1242725
cccagcuuccuguauucuu

SEQ ID NO: 1368329 - RNA, 19 nt, Artificial Sequence
  Description of Artificial Sequence: Synthetic oligonucleotide
  Antisense strand to SEQ ID NO: 1368328
aagaauacaggaagcuggg

SEQ ID NO: 1368330 - RNA, 19 nt, Artificial Sequence
  Description of Artificial Sequence: Synthetic oligonucleotide
  Sense strand starting at position 885 of SEQ ID NO: 1242725
gcuagacaauuccuagaga

SEQ ID NO: 1368331 - RNA, 19 nt, Artificial Sequence
  Description of Artificial Sequence: Synthetic oligonucleotide
  Antisense strand to SEQ ID NO: 1368330
ucucuaggaauugucuagc

SEQ ID NO: 1368332 - RNA, 19 nt, Artificial Sequence
  Description of Artificial Sequence: Synthetic oligonucleotide
  Sense strand starting at position 886 of SEQ ID NO: 1242725
cuagacaauuccuagagau

SEQ ID NO: 1368333 - RNA, 19 nt, Artificial Sequence
  Description of Artificial Sequence: Synthetic oligonucleotide
  Antisense strand to SEQ ID NO: 1368332
aucucuaggaauugucuag

SEQ ID NO: 1368334 - RNA, 19 nt, Artificial Sequence
  Description of Artificial Sequence: Synthetic oligonucleotide
  Sense strand starting at position 935 of SEQ ID NO: 1242725
gcaggcaucucucuaggga

SEQ ID NO: 1368335 - RNA, 19 nt, Artificial Sequence
  Description of Artificial Sequence: Synthetic oligonucleotide
  Antisense strand to SEQ ID NO: 1368334
ucccuagagagaugccugc

SEQ ID NO: 1368336 - RNA, 19 nt, Artificial Sequence
  Description of Artificial Sequence: Synthetic oligonucleotide
  Sense strand starting at position 939 of SEQ ID NO: 1242725
gcaucucucuagggagcaa

SEQ ID NO: 1368337 - RNA, 19 nt, Artificial Sequence
  Description of Artificial Sequence: Synthetic oligonucleotide
  Antisense strand to SEQ ID NO: 1368336
uugcucccuagagagaugc

SEQ ID NO: 1368338 - RNA, 19 nt, Artificial Sequence
  Description of Artificial Sequence: Synthetic oligonucleotide
  Sense strand starting at position 1091 of SEQ ID NO: 1242725
gccugcugccaaucguaaa

SEQ ID NO: 1368339 - RNA, 19 nt, Artificial Sequence
  Description of Artificial Sequence: Synthetic oligonucleotide
  Antisense strand to SEQ ID NO: 1368338
uuuacgauuggcagcaggc

SEQ ID NO: 1368340 - RNA, 19 nt, Artificial Sequence
  Description of Artificial Sequence: Synthetic oligonucleotide
  Sense strand starting at position 1103 of SEQ ID NO: 1242725
ucguaaaccucuuuagccu

SEQ ID NO: 1368341 - RNA, 19 nt, Artificial Sequence
  Description of Artificial Sequence: Synthetic oligonucleotide
  Antisense strand to SEQ ID NO: 1368340
aggcuaaagagguuuacga

SEQ ID NO: 1368342 - RNA, 19 nt, Artificial Sequence
  Description of Artificial Sequence: Synthetic oligonucleotide
  Sense strand starting at position 1277 of SEQ ID NO: 1242725
cuccuucccucaugauagu

SEQ ID NO: 1368343 - RNA, 19 nt, Artificial Sequence
  Description of Artificial Sequence: Synthetic oligonucleotide
  Antisense strand to SEQ ID NO: 1368342
acuaucaugagggaaggag

SEQ ID NO: 1368344 - RNA, 19 nt, Artificial Sequence
  Description of Artificial Sequence: Synthetic oligonucleotide
  Sense strand starting at position 1299 of SEQ ID NO: 1242725
uugcauaucugcuugucuu

SEQ ID NO: 1368345 - RNA, 19 nt, Artificial Sequence
  Description of Artificial Sequence: Synthetic oligonucleotide
  Antisense strand to SEQ ID NO: 1368344
aagacaagcagauaugcaa

SEQ ID NO: 1368346 - RNA, 19 nt, Artificial Sequence
  Description of Artificial Sequence: Synthetic oligonucleotide
  Sense strand starting at position 1300 of SEQ ID NO: 1242725
ugcauaucugcuugucuua

SEQ ID NO: 1368347 - RNA, 19 nt, Artificial Sequence
  Description of Artificial Sequence: Synthetic oligonucleotide
  Antisense strand to SEQ ID NO: 1368346
uaagacaagcagauaugca

SEQ ID NO: 1368348 - RNA, 19 nt, Artificial Sequence
  Description of Artificial Sequence: Synthetic oligonucleotide
  Sense strand starting at position 1303 of SEQ ID NO: 1242725
auaucugcuugucuuacua

SEQ ID NO: 1368349 - RNA, 19 nt, Artificial Sequence
  Description of Artificial Sequence: Synthetic oligonucleotide
  Antisense strand to SEQ ID NO: 1368348
uaguaagacaagcagauau

SEQ ID NO: 1368350 - RNA, 19 nt, Artificial Sequence
  Description of Artificial Sequence: Synthetic oligonucleotide
  Sense strand starting at position 1305 of SEQ ID NO: 1242725
aucugcuugucuuacuaua

SEQ ID NO: 1368351 - RNA, 19 nt, Artificial Sequence
  Description of Artificial Sequence: Synthetic oligonucleotide
  Antisense strand to SEQ ID NO: 1368350
uauaguaagacaagcagau

SEQ ID NO: 1368352 - RNA, 19 nt, Artificial Sequence
  Description of Artificial Sequence: Synthetic oligonucleotide
  Sense strand starting at position 1307 of SEQ ID NO: 1242725
cugcuugucuuacuauacu

SEQ ID NO: 1368353 - RNA, 19 nt, Artificial Sequence
  Description of Artificial Sequence: Synthetic oligonucleotide
  Antisense strand to SEQ ID NO: 1368352
aguauaguaagacaagcag

SEQ ID NO: 1368354 - RNA, 19 nt, Artificial Sequence
  Description of Artificial Sequence: Synthetic oligonucleotide
  Sense strand starting at position 1826 of SEQ ID NO: 1242725
gcaggugugucuuaccagu

SEQ ID NO: 1368355 - RNA, 19 nt, Artificial Sequence
  Description of Artificial Sequence: Synthetic oligonucleotide
  Antisense strand to SEQ ID NO: 1368354
acugguaagacacaccugc

SEQ ID NO: 1368356 - RNA, 19 nt, Artificial Sequence
  Description of Artificial Sequence: Synthetic oligonucleotide
  Sense strand starting at position 1992 of SEQ ID NO: 1242725
ucucuaaagggcugugaua

SEQ ID NO: 1368357 - RNA, 19 nt, Artificial Sequence
  Description of Artificial Sequence: Synthetic oligonucleotide
  Antisense strand to SEQ ID NO: 1368356
uaucacagcccuuuagaga

SEQ ID NO: 1368358 - RNA, 19 nt, Artificial Sequence
  Description of Artificial Sequence: Synthetic oligonucleotide
  Sense strand starting at position 1994 of SEQ ID NO: 1242725
ucuaaagggcugugauaua

SEQ ID NO: 1368359 - RNA, 19 nt, Artificial Sequence
  Description of Artificial Sequence: Synthetic oligonucleotide
  Antisense strand to SEQ ID NO: 1368358
uauaucacagcccuuuaga

SEQ ID NO: 1368360 - RNA, 19 nt, Artificial Sequence
  Description of Artificial Sequence: Synthetic oligonucleotide
  Sense strand starting at position 2082 of SEQ ID NO: 1242725
agaugagugcccugcagag

SEQ ID NO: 1368361 - RNA, 19 nt, Artificial Sequence
  Description of Artificial Sequence: Synthetic oligonucleotide
  Antisense strand to SEQ ID NO: 1368360
cucugcagggcacucaucu

SEQ ID NO: 1368362 - RNA, 19 nt, Artificial Sequence
  Description of Artificial Sequence: Synthetic oligonucleotide
  Sense strand starting at position 2099 of SEQ ID NO: 1242725
aggccugguugauaugaca

SEQ ID NO: 1368363 - RNA, 19 nt, Artificial Sequence
  Description of Artificial Sequence: Synthetic oligonucleotide
  Antisense strand to SEQ ID NO: 1368362
ugucauaucaaccaggccu

SEQ ID NO: 1368364 - RNA, 19 nt, Artificial Sequence
  Description of Artificial Sequence: Synthetic oligonucleotide
  Sense strand starting at position 2155 of SEQ ID NO: 1242725
cugacuuggugaucuccau

SEQ ID NO: 1368365 - RNA, 19 nt, Artificial Sequence
  Description of Artificial Sequence: Synthetic oligonucleotide
  Antisense strand to SEQ ID NO: 1368364
auggagaucaccaagucag

SEQ ID NO: 1368366 - RNA, 19 nt, Artificial Sequence
  Description of Artificial Sequence: Synthetic oligonucleotide
  Sense strand starting at position 2161 of SEQ ID NO: 1242725
uggugaucuccaugaaauc

SEQ ID NO: 1368367 - RNA, 19 nt, Artificial Sequence
  Description of Artificial Sequence: Synthetic oligonucleotide
  Antisense strand to SEQ ID NO: 1368366
gauuucauggagaucacca

SEQ ID NO: 1368368 - RNA, 19 nt, Artificial Sequence
  Description of Artificial Sequence: Synthetic oligonucleotide
  Sense strand starting at position 2171 of SEQ ID NO: 1242725
caugaaauccugugcguuc

SEQ ID NO: 1368369 - RNA, 19 nt, Artificial Sequence
  Description of Artificial Sequence: Synthetic oligonucleotide
  Antisense strand to SEQ ID NO: 1368368
gaacgcacaggauuucaug

SEQ ID NO: 1368370 - RNA, 19 nt, Artificial Sequence
  Description of Artificial Sequence: Synthetic oligonucleotide
  Sense strand starting at position 2375 of SEQ ID NO: 1242725
cauugaagugaggguacau

SEQ ID NO: 1368371 - RNA, 19 nt, Artificial Sequence
  Description of Artificial Sequence: Synthetic oligonucleotide
  Antisense strand to SEQ ID NO: 1368370
auguacccucacuucaaug

SEQ ID NO: 1368372 - RNA, 19 nt, Artificial Sequence
  Description of Artificial Sequence: Synthetic oligonucleotide
  Sense strand starting at position 2541 of SEQ ID NO: 1242725
ggagacacgucucuagaaa

SEQ ID NO: 1368373 - RNA, 19 nt, Artificial Sequence
  Description of Artificial Sequence: Synthetic oligonucleotide
  Antisense strand to SEQ ID NO: 1368372
uuucuagagacgugucucc

SEQ ID NO: 1368374 - RNA, 19 nt, Artificial Sequence
  Description of Artificial Sequence: Synthetic oligonucleotide
  Sense strand starting at position 3111 of SEQ ID NO: 1242725
auagauauuugcuggccca

SEQ ID NO: 1368375 - RNA, 19 nt, Artificial Sequence
  Description of Artificial Sequence: Synthetic oligonucleotide
  Antisense strand to SEQ ID NO: 1368374
ugggccagcaaauaucuau

SEQ ID NO: 1368376 - RNA, 19 nt, Artificial Sequence
  Description of Artificial Sequence: Synthetic oligonucleotide
  Sense strand starting at position 3140 of SEQ ID NO: 1242725
gagugaggguugugccuaa

SEQ ID NO: 1368377 - RNA, 19 nt, Artificial Sequence
  Description of Artificial Sequence: Synthetic oligonucleotide
  Antisense strand to SEQ ID NO: 1368376
uuaggcacaacccucacuc

SEQ ID NO: 1368378 - RNA, 19 nt, Artificial Sequence
  Description of Artificial Sequence: Synthetic oligonucleotide
  Sense strand starting at position 3144 of SEQ ID NO: 1242725
gaggguugugccuaaacac

SEQ ID NO: 1368379 - RNA, 19 nt, Artificial Sequence
  Description of Artificial Sequence: Synthetic oligonucleotide
  Antisense strand to SEQ ID NO: 1368378
guguuuaggcacaacccuc

SEQ ID NO: 1368380 - RNA, 19 nt, Artificial Sequence
  Description of Artificial Sequence: Synthetic oligonucleotide
  Sense strand starting at position 3203 of SEQ ID NO: 1242725
gcugaagagacaggcuuua

SEQ ID NO: 1368381 - RNA, 19 nt, Artificial Sequence
  Description of Artificial Sequence: Synthetic oligonucleotide
  Antisense strand to SEQ ID NO: 1368380
uaaagccugucucuucagc

SEQ ID NO: 1368382 - RNA, 19 nt, Artificial Sequence
  Description of Artificial Sequence: Synthetic oligonucleotide
  Sense strand starting at position 3213 of SEQ ID NO: 1242725
caggcuuuaggaugaaacu

SEQ ID NO: 1368383 - RNA, 19 nt, Artificial Sequence
  Description of Artificial Sequence: Synthetic oligonucleotide
  Antisense strand to SEQ ID NO: 1368382
aguuucauccuaaagccug

SEQ ID NO: 1368384 - RNA, 19 nt, Artificial Sequence
  Description of Artificial Sequence: Synthetic oligonucleotide
  Sense strand starting at position 3222 of SEQ ID NO: 1242725
ggaugaaacuucccuucug

SEQ ID NO: 1368385 - RNA, 19 nt, Artificial Sequence
  Description of Artificial Sequence: Synthetic oligonucleotide
  Antisense strand to SEQ ID NO: 1368384
cagaagggaaguuucaucc

SEQ ID NO: 1368386 - RNA, 19 nt, Artificial Sequence
  Description of Artificial Sequence: Synthetic oligonucleotide
  Sense strand starting at position 3536 of SEQ ID NO: 1242725
uugaucauuugcugaagau

SEQ ID NO: 1368387 - RNA, 19 nt, Artificial Sequence
  Description of Artificial Sequence: Synthetic oligonucleotide
  Antisense strand to SEQ ID NO: 1368386
aucuucagcaaaugaucaa

SEQ ID NO: 1368388 - RNA, 19 nt, Artificial Sequence
  Description of Artificial Sequence: Synthetic oligonucleotide
  Sense strand starting at position 3636 of SEQ ID NO: 1242725
ccuuccaucuucggguaua

SEQ ID NO: 1368389 - RNA, 19 nt, Artificial Sequence
  Description of Artificial Sequence: Synthetic oligonucleotide
  Antisense strand to SEQ ID NO: 1368388
uauacccgaagauggaagg

SEQ ID NO: 1368390 - RNA, 19 nt, Artificial Sequence
  Description of Artificial Sequence: Synthetic oligonucleotide
  Sense strand starting at position 3639 of SEQ ID NO: 1242725
uccaucuucggguauagau

SEQ ID NO: 1368391 - RNA, 19 nt, Artificial Sequence
  Description of Artificial Sequence: Synthetic oligonucleotide
  Antisense strand to SEQ ID NO: 1368390
aucuauacccgaagaugga

SEQ ID NO: 1368392 - RNA, 19 nt, Artificial Sequence
  Description of Artificial Sequence: Synthetic oligonucleotide
  Sense strand starting at position 3651 of SEQ ID NO: 1242725
uauagaugcugccaggaga

SEQ ID NO: 1368393 - RNA, 19 nt, Artificial Sequence
  Description of Artificial Sequence: Synthetic oligonucleotide
  Antisense strand to SEQ ID NO: 1368392
ucuccuggcagcaucuaua

SEQ ID NO: 1368394 - RNA, 19 nt, Artificial Sequence
  Description of Artificial Sequence: Synthetic oligonucleotide
  Sense strand starting at position 3842 of SEQ ID NO: 1242725
agggucggcaccugagaau

SEQ ID NO: 1368395 - RNA, 19 nt, Artificial Sequence
  Description of Artificial Sequence: Synthetic oligonucleotide
  Antisense strand to SEQ ID NO: 1368394
auucucaggugccgacccu

SEQ ID NO: 1368396 - RNA, 19 nt, Artificial Sequence
  Description of Artificial Sequence: Synthetic oligonucleotide
  Sense strand starting at position 3959 of SEQ ID NO: 1242725
ggcugucucuuugguagca

SEQ ID NO: 1368397 - RNA, 19 nt, Artificial Sequence
  Description of Artificial Sequence: Synthetic oligonucleotide
  Antisense strand to SEQ ID NO: 1368396
ugcuaccaaagagacagcc

SEQ ID NO: 1368398 - RNA, 19 nt, Artificial Sequence
  Description of Artificial Sequence: Synthetic oligonucleotide
  Sense strand starting at position 7 of SEQ ID NO: 1242726
ccuggaucacucugagcca

SEQ ID NO: 1368399 - RNA, 19 nt, Artificial Sequence
  Description of Artificial Sequence: Synthetic oligonucleotide
  Antisense strand to SEQ ID NO: 1368398
uggcucagagugauccagg

SEQ ID NO: 1368400 - RNA, 19 nt, Artificial Sequence
  Description of Artificial Sequence: Synthetic oligonucleotide
  Sense strand starting at position 8 of SEQ ID NO: 1242726
cuggaucacucugagccau

SEQ ID NO: 1368401 - RNA, 19 nt, Artificial Sequence
  Description of Artificial Sequence: Synthetic oligonucleotide
  Antisense strand to SEQ ID NO: 1368400
auggcucagagugauccag

SEQ ID NO: 1368402 - RNA, 19 nt, Artificial Sequence
  Description of Artificial Sequence: Synthetic oligonucleotide
  Sense strand starting at position 72 of SEQ ID NO: 1242726
ugaucucuccuaggauaua

SEQ ID NO: 1368403 - RNA, 19 nt, Artificial Sequence
  Description of Artificial Sequence: Synthetic oligonucleotide
  Antisense strand to SEQ ID NO: 1368402
uauauccuaggagagauca

SEQ ID NO: 1368404 - RNA, 19 nt, Artificial Sequence
  Description of Artificial Sequence: Synthetic oligonucleotide
  Sense strand starting at position 173 of SEQ ID NO: 1242726
ugagccaucucucuaaaug

SEQ ID NO: 1368405 - RNA, 19 nt, Artificial Sequence
  Description of Artificial Sequence: Synthetic oligonucleotide
  Antisense strand to SEQ ID NO: 1368404
cauuuagagagauggcuca

SEQ ID NO: 1368406 - RNA, 19 nt, Artificial Sequence
  Description of Artificial Sequence: Synthetic oligonucleotide
  Sense strand starting at position 263 of SEQ ID NO: 1242726
ggagguaauggugagcuga

SEQ ID NO: 1368407 - RNA, 19 nt, Artificial Sequence
  Description of Artificial Sequence: Synthetic oligonucleotide
  Antisense strand to SEQ ID NO: 1368406
ucagcucaccauuaccucc

SEQ ID NO: 1368408 - RNA, 19 nt, Artificial Sequence
  Description of Artificial Sequence: Synthetic oligonucleotide
  Sense strand starting at position 373 of SEQ ID NO: 1242726
uggauaaaguugcuuaauu

SEQ ID NO: 1368409 - RNA, 19 nt, Artificial Sequence
  Description of Artificial Sequence: Synthetic oligonucleotide
  Antisense strand to SEQ ID NO: 1368408
aauuaagcaacuuuaucca

SEQ ID NO: 1368410 - RNA, 19 nt, Artificial Sequence
  Description of Artificial Sequence: Synthetic oligonucleotide
  Sense strand starting at position 374 of SEQ ID NO: 1242726
ggauaaaguugcuuaauuc

SEQ ID NO: 1368411 - RNA, 19 nt, Artificial Sequence
  Description of Artificial Sequence: Synthetic oligonucleotide
  Antisense strand to SEQ ID NO: 1368410
gaauuaagcaacuuuaucc

SEQ ID NO: 1368412 - RNA, 19 nt, Artificial Sequence
  Description of Artificial Sequence: Synthetic oligonucleotide
  Sense strand starting at position 402 of SEQ ID NO: 1242726
ucguuucuuuaucuguaga

SEQ ID NO: 1368413 - RNA, 19 nt, Artificial Sequence
  Description of Artificial Sequence: Synthetic oligonucleotide
  Antisense strand to SEQ ID NO: 1368412
ucuacagauaaagaaacga

SEQ ID NO: 1368414 - RNA, 19 nt, Artificial Sequence
  Description of Artificial Sequence: Synthetic oligonucleotide
  Sense strand starting at position 516 of SEQ ID NO: 1242726
ugcucagcuguugaguauu

SEQ ID NO: 1368415 - RNA, 19 nt, Artificial Sequence
  Description of Artificial Sequence: Synthetic oligonucleotide
  Antisense strand to SEQ ID NO: 1368414
aauacucaacagcugagca

SEQ ID NO: 1368416 - RNA, 19 nt, Artificial Sequence
  Description of Artificial Sequence: Synthetic oligonucleotide
  Sense strand starting at position 518 of SEQ ID NO: 1242726
cucagcuguugaguauuau

SEQ ID NO: 1368417 - RNA, 19 nt, Artificial Sequence
  Description of Artificial Sequence: Synthetic oligonucleotide
  Antisense strand to SEQ ID NO: 1368416
auaauacucaacagcugag

SEQ ID NO: 1368418 - RNA, 19 nt, Artificial Sequence
  Description of Artificial Sequence: Synthetic oligonucleotide
  Sense strand starting at position 519 of SEQ ID NO: 1242726
ucagcuguugaguauuauu

SEQ ID NO: 1368419 - RNA, 19 nt, Artificial Sequence
  Description of Artificial Sequence: Synthetic oligonucleotide
  Antisense strand to SEQ ID NO: 1368418
aauaauacucaacagcuga

SEQ ID NO: 1368420 - RNA, 19 nt, Artificial Sequence
  Description of Artificial Sequence: Synthetic oligonucleotide
  Sense strand starting at position 524 of SEQ ID NO: 1242726
uguugaguauuauuaugac

SEQ ID NO: 1368421 - RNA, 19 nt, Artificial Sequence
  Description of Artificial Sequence: Synthetic oligonucleotide
  Antisense strand to SEQ ID NO: 1368420
gucauaauaauacucaaca

SEQ ID NO: 1368422 - RNA, 19 nt, Artificial Sequence
  Description of Artificial Sequence: Synthetic oligonucleotide
  Sense strand starting at position 550 of SEQ ID NO: 1242726
agcaauguccugugugaug

SEQ ID NO: 1368423 - RNA, 19 nt, Artificial Sequence
  Description of Artificial Sequence: Synthetic oligonucleotide
  Antisense strand to SEQ ID NO: 1368422
caucacacaggacauugcu

SEQ ID NO: 1368424 - RNA, 19 nt, Artificial Sequence
  Description of Artificial Sequence: Synthetic oligonucleotide
  Sense strand starting at position 863 of SEQ ID NO: 1242726
agugcuaucccucaacaga

SEQ ID NO: 1368425 - RNA, 19 nt, Artificial Sequence
  Description of Artificial Sequence: Synthetic oligonucleotide
  Antisense strand to SEQ ID NO: 1368424
ucuguugagggauagcacu

SEQ ID NO: 1368426 - RNA, 19 nt, Artificial Sequence
  Description of Artificial Sequence: Synthetic oligonucleotide
  Sense strand starting at position 881 of SEQ ID NO: 1242726
aggagacauccuuggcuau

SEQ ID NO: 1368427 - RNA, 19 nt, Artificial Sequence
  Description of Artificial Sequence: Synthetic oligonucleotide
  Antisense strand to SEQ ID NO: 1368426
auagccaaggaugucuccu

SEQ ID NO: 1368428 - RNA, 19 nt, Artificial Sequence
  Description of Artificial Sequence: Synthetic oligonucleotide
  Sense strand starting at position 882 of SEQ ID NO: 1242726
ggagacauccuuggcuaug

SEQ ID NO: 1368429 - RNA, 19 nt, Artificial Sequence
  Description of Artificial Sequence: Synthetic oligonucleotide
  Antisense strand to SEQ ID NO: 1368428
cauagccaaggaugucucc

SEQ ID NO: 1368430 - RNA, 19 nt, Artificial Sequence
  Description of Artificial Sequence: Synthetic oligonucleotide
  Sense strand starting at position 883 of SEQ ID NO: 1242726
gagacauccuuggcuauga

SEQ ID NO: 1368431 - RNA, 19 nt, Artificial Sequence
  Description of Artificial Sequence: Synthetic oligonucleotide
  Antisense strand to SEQ ID NO: 1368430
ucauagccaaggaugucuc

SEQ ID NO: 1368432 - RNA, 19 nt, Artificial Sequence
  Description of Artificial Sequence: Synthetic oligonucleotide
  Sense strand starting at position 991 of SEQ ID NO: 1242726
auacauuugugggaacgca

SEQ ID NO: 1368433 - RNA, 19 nt, Artificial Sequence
  Description of Artificial Sequence: Synthetic oligonucleotide
  Antisense strand to SEQ ID NO: 1368432
ugcguucccacaaauguau

SEQ ID NO: 1368434 - RNA, 19 nt, Artificial Sequence
  Description of Artificial Sequence: Synthetic oligonucleotide
  Sense strand starting at position 2098 of SEQ ID NO: 1242726
gccucaguccguggagaga

SEQ ID NO: 1368435 - RNA, 19 nt, Artificial Sequence
  Description of Artificial Sequence: Synthetic oligonucleotide
  Antisense strand to SEQ ID NO: 1368434
ucucuccacggacugaggc

SEQ ID NO: 1368436 - RNA, 19 nt, Artificial Sequence
  Description of Artificial Sequence: Synthetic oligonucleotide
  Sense strand starting at position 2112 of SEQ ID NO: 1242726
agagauuccugcuccuguu

SEQ ID NO: 1368437 - RNA, 19 nt, Artificial Sequence
  Description of Artificial Sequence: Synthetic oligonucleotide
  Antisense strand to SEQ ID NO: 1368436
aacaggagcaggaaucucu

SEQ ID NO: 1368438 - RNA, 19 nt, Artificial Sequence
  Description of Artificial Sequence: Synthetic oligonucleotide
  Sense strand starting at position 2215 of SEQ ID NO: 1242726
cccaaacagcucuggaaua

SEQ ID NO: 1368439 - RNA, 19 nt, Artificial Sequence
  Description of Artificial Sequence: Synthetic oligonucleotide
  Antisense strand to SEQ ID NO: 1368438
uauuccagagcuguuuggg

SEQ ID NO: 1368440 - RNA, 19 nt, Artificial Sequence
  Description of Artificial Sequence: Synthetic oligonucleotide
  Sense strand starting at position 2284 of SEQ ID NO: 1242726
gucucuggucuggacagua

SEQ ID NO: 1368441 - RNA, 19 nt, Artificial Sequence
  Description of Artificial Sequence: Synthetic oligonucleotide
  Antisense strand to SEQ ID NO: 1368440
uacuguccagaccagagac

SEQ ID NO: 1368442 - RNA, 19 nt, Artificial Sequence
  Description of Artificial Sequence: Synthetic oligonucleotide
  Sense strand starting at position 2463 of SEQ ID NO: 1242726
aguuaagauacgcggagua

SEQ ID NO: 1368443 - RNA, 19 nt, Artificial Sequence
  Description of Artificial Sequence: Synthetic oligonucleotide
  Antisense strand to SEQ ID NO: 1368442
uacuccgcguaucuuaacu

SEQ ID NO: 1368444 - RNA, 19 nt, Artificial Sequence
  Description of Artificial Sequence: Synthetic oligonucleotide
  Sense strand starting at position 2500 of SEQ ID NO: 1242726
uccagucaucucuguccca

SEQ ID NO: 1368445 - RNA, 19 nt, Artificial Sequence
  Description of Artificial Sequence: Synthetic oligonucleotide
  Antisense strand to SEQ ID NO: 1368444
ugggacagagaugacugga

SEQ ID NO: 1368446 - RNA, 19 nt, Artificial Sequence
  Description of Artificial Sequence: Synthetic oligonucleotide
  Sense strand starting at position 2523 of SEQ ID NO: 1242726
cccuuugcuguagauacau

SEQ ID NO: 1368447 - RNA, 19 nt, Artificial Sequence
  Description of Artificial Sequence: Synthetic oligonucleotide
  Antisense strand to SEQ ID NO: 1368446
auguaucuacagcaaaggg

SEQ ID NO: 1368448 - RNA, 19 nt, Artificial Sequence
  Description of Artificial Sequence: Synthetic oligonucleotide
  Sense strand starting at position 2614 of SEQ ID NO: 1242726
gcaaacuccuauucguguu

SEQ ID NO: 1368449 - RNA, 19 nt, Artificial Sequence
  Description of Artificial Sequence: Synthetic oligonucleotide
  Antisense strand to SEQ ID NO: 1368448
aacacgaauaggaguuugc

SEQ ID NO: 1368450 - RNA, 19 nt, Artificial Sequence
  Description of Artificial Sequence: Synthetic oligonucleotide
  Sense strand starting at position 2628 of SEQ ID NO: 1242726
guguuuaaggcccagcuua

SEQ ID NO: 1368451 - RNA, 19 nt, Artificial Sequence
  Description of Artificial Sequence: Synthetic oligonucleotide
  Antisense strand to SEQ ID NO: 1368450
uaagcugggccuuaaacac

SEQ ID NO: 1368452 - RNA, 19 nt, Artificial Sequence
  Description of Artificial Sequence: Synthetic oligonucleotide
  Sense strand starting at position 2688 of SEQ ID NO: 1242726
ccgacauccuguccacuua

SEQ ID NO: 1368453 - RNA, 19 nt, Artificial Sequence
  Description of Artificial Sequence: Synthetic oligonucleotide
  Antisense strand to SEQ ID NO: 1368452
uaaguggacaggaugucgg

SEQ ID NO: 1368454 - RNA, 19 nt, Artificial Sequence
  Description of Artificial Sequence: Synthetic oligonucleotide
  Sense strand starting at position 2689 of SEQ ID NO: 1242726
cgacauccuguccacuuau

SEQ ID NO: 1368455 - RNA, 19 nt, Artificial Sequence
  Description of Artificial Sequence: Synthetic oligonucleotide
  Antisense strand to SEQ ID NO: 1368454
auaaguggacaggaugucg

SEQ ID NO: 1368456 - RNA, 19 nt, Artificial Sequence
  Description of Artificial Sequence: Synthetic oligonucleotide
  Sense strand starting at position 3008 of SEQ ID NO: 1242726
ugaccauguccugguugga

SEQ ID NO: 1368457 - RNA, 19 nt, Artificial Sequence
  Description of Artificial Sequence: Synthetic oligonucleotide
  Antisense strand to SEQ ID NO: 1368456
uccaaccaggacaugguca

SEQ ID NO: 1368458 - RNA, 19 nt, Artificial Sequence
  Description of Artificial Sequence: Synthetic oligonucleotide
  Sense strand starting at position 3123 of SEQ ID NO: 1242726
ugccuuauacuguguggau

SEQ ID NO: 1368459 - RNA, 19 nt, Artificial Sequence
  Description of Artificial Sequence: Synthetic oligonucleotide
  Antisense strand to SEQ ID NO: 1368458
auccacacaguauaaggca

SEQ ID NO: 1368460 - RNA, 19 nt, Artificial Sequence
  Description of Artificial Sequence: Synthetic oligonucleotide
  Sense strand starting at position 3124 of SEQ ID NO: 1242726
gccuuauacuguguggaua

SEQ ID NO: 1368461 - RNA, 19 nt, Artificial Sequence
  Description of Artificial Sequence: Synthetic oligonucleotide
  Antisense strand to SEQ ID NO: 1368460
uauccacacaguauaaggc

SEQ ID NO: 1368462 - RNA, 19 nt, Artificial Sequence
  Description of Artificial Sequence: Synthetic oligonucleotide
  Sense strand starting at position 3125 of SEQ ID NO: 1242726
ccuuauacuguguggauau

SEQ ID NO: 1368463 - RNA, 19 nt, Artificial Sequence
  Description of Artificial Sequence: Synthetic oligonucleotide
  Antisense strand to SEQ ID NO: 1368462
auauccacacaguauaagg

SEQ ID NO: 1368464 - RNA, 19 nt, Artificial Sequence
  Description of Artificial Sequence: Synthetic oligonucleotide
  Sense strand starting at position 3208 of SEQ ID NO: 1242726
cuagguggcuauucucaua

SEQ ID NO: 1368465 - RNA, 19 nt, Artificial Sequence
  Description of Artificial Sequence: Synthetic oligonucleotide
  Antisense strand to SEQ ID NO: 1368464
uaugagaauagccaccuag

SEQ ID NO: 1368466 - RNA, 19 nt, Artificial Sequence
  Description of Artificial Sequence: Synthetic oligonucleotide
  Sense strand starting at position 3402 of SEQ ID NO: 1242726
uuagaaugcugucuaguaa

SEQ ID NO: 1368467 - RNA, 19 nt, Artificial Sequence
  Description of Artificial Sequence: Synthetic oligonucleotide
  Antisense strand to SEQ ID NO: 1368466
uuacuagacagcauucuaa

SEQ ID NO: 1368468 - RNA, 19 nt, Artificial Sequence
  Description of Artificial Sequence: Synthetic oligonucleotide
  Sense strand starting at position 3403 of SEQ ID NO: 1242726
uagaaugcugucuaguaaa

SEQ ID NO: 1368469 - RNA, 19 nt, Artificial Sequence
  Description of Artificial Sequence: Synthetic oligonucleotide
  Antisense strand to SEQ ID NO: 1368468
uuuacuagacagcauucua

SEQ ID NO: 1368470 - RNA, 19 nt, Artificial Sequence
  Description of Artificial Sequence: Synthetic oligonucleotide
  Sense strand starting at position 3527 of SEQ ID NO: 1242726
cauggucaccagugacauc

SEQ ID NO: 1368471 - RNA, 19 nt, Artificial Sequence
  Description of Artificial Sequence: Synthetic oligonucleotide
  Antisense strand to SEQ ID NO: 1368470
gaugucacuggugaccaug

SEQ ID NO: 1368472 - RNA, 19 nt, Artificial Sequence
  Description of Artificial Sequence: Synthetic oligonucleotide
  Sense strand starting at position 3728 of SEQ ID NO: 1242726
uggguucaggugggagaua

SEQ ID NO: 1368473 - RNA, 19 nt, Artificial Sequence
  Description of Artificial Sequence: Synthetic oligonucleotide
  Antisense strand to SEQ ID NO: 1368472
uaucucccaccugaaccca

SEQ ID NO: 1368474 - RNA, 19 nt, Artificial Sequence
  Description of Artificial Sequence: Synthetic oligonucleotide
  Sense strand starting at position 3729 of SEQ ID NO: 1242726
ggguucaggugggagauau

SEQ ID NO: 1368475 - RNA, 19 nt, Artificial Sequence
  Description of Artificial Sequence: Synthetic oligonucleotide
  Antisense strand to SEQ ID NO: 1368474
auaucucccaccugaaccc

SEQ ID NO: 1368476 - RNA, 19 nt, Artificial Sequence
  Description of Artificial Sequence: Synthetic oligonucleotide
  Sense strand starting at position 3960 of SEQ ID NO: 1242726
gcagcaaugcagugacaug

SEQ ID NO: 1368477 - RNA, 19 nt, Artificial Sequence
  Description of Artificial Sequence: Synthetic oligonucleotide
  Antisense strand to SEQ ID NO: 1368476
caugucacugcauugcugc

SEQ ID NO: 1368478 - RNA, 19 nt, Artificial Sequence
  Description of Artificial Sequence: Synthetic oligonucleotide
  Sense strand starting at position 59 of SEQ ID NO: 1242727
ucagaugggcucuaguuau

SEQ ID NO: 1368479 - RNA, 19 nt, Artificial Sequence
  Description of Artificial Sequence: Synthetic oligonucleotide
  Antisense strand to SEQ ID NO: 1368478
auaacuagagcccaucuga

SEQ ID NO: 1368480 - RNA, 19 nt, Artificial Sequence
  Description of Artificial Sequence: Synthetic oligonucleotide
  Sense strand starting at position 184 of SEQ ID NO: 1242727
uguacauucuaauaguaca

SEQ ID NO: 1368481 - RNA, 19 nt, Artificial Sequence
  Description of Artificial Sequence: Synthetic oligonucleotide
  Antisense strand to SEQ ID NO: 1368480
uguacuauuagaauguaca

SEQ ID NO: 1368482 - RNA, 19 nt, Artificial Sequence
  Description of Artificial Sequence: Synthetic oligonucleotide
  Sense strand starting at position 294 of SEQ ID NO: 1242727
uggaucaucucaggucaga

SEQ ID NO: 1368483 - RNA, 19 nt, Artificial Sequence
  Description of Artificial Sequence: Synthetic oligonucleotide
  Antisense strand to SEQ ID NO: 1368482
ucugaccugagaugaucca

SEQ ID NO: 1368484 - RNA, 19 nt, Artificial Sequence
  Description of Artificial Sequence: Synthetic oligonucleotide
  Sense strand starting at position 657 of SEQ ID NO: 1242727
ucagacuagugguaacuuu

SEQ ID NO: 1368485 - RNA, 19 nt, Artificial Sequence
  Description of Artificial Sequence: Synthetic oligonucleotide
  Antisense strand to SEQ ID NO: 1368484
aaaguuaccacuagucuga

SEQ ID NO: 1368486 - RNA, 19 nt, Artificial Sequence
  Description of Artificial Sequence: Synthetic oligonucleotide
  Sense strand starting at position 666 of SEQ ID NO: 1242727
ugguaacuuugaguauuga

SEQ ID NO: 1368487 - RNA, 19 nt, Artificial Sequence
  Description of Artificial Sequence: Synthetic oligonucleotide
  Antisense strand to SEQ ID NO: 1368486
ucaauacucaaaguuacca

SEQ ID NO: 1368488 - RNA, 19 nt, Artificial Sequence
  Description of Artificial Sequence: Synthetic oligonucleotide
  Sense strand starting at position 667 of SEQ ID NO: 1242727
gguaacuuugaguauugac

SEQ ID NO: 1368489 - RNA, 19 nt, Artificial Sequence
  Description of Artificial Sequence: Synthetic oligonucleotide
  Antisense strand to SEQ ID NO: 1368488
gucaauacucaaaguuacc

SEQ ID NO: 1368490 - RNA, 19 nt, Artificial Sequence
  Description of Artificial Sequence: Synthetic oligonucleotide
  Sense strand starting at position 670 of SEQ ID NO: 1242727
aacuuugaguauugacuga

SEQ ID NO: 1368491 - RNA, 19 nt, Artificial Sequence
  Description of Artificial Sequence: Synthetic oligonucleotide
  Antisense strand to SEQ ID NO: 1368490
ucagucaauacucaaaguu

SEQ ID NO: 1368492 - RNA, 19 nt, Artificial Sequence
  Description of Artificial Sequence: Synthetic oligonucleotide
  Sense strand starting at position 910 of SEQ ID NO: 1242727
uaauaauauugguuaggcu

SEQ ID NO: 1368493 - RNA, 19 nt, Artificial Sequence
  Description of Artificial Sequence: Synthetic oligonucleotide
  Antisense strand to SEQ ID NO: 1368492
agccuaaccaauauuauua

SEQ ID NO: 1368494 - RNA, 19 nt, Artificial Sequence
  Description of Artificial Sequence: Synthetic oligonucleotide
  Sense strand starting at position 984 of SEQ ID NO: 1242727
ggauuacagguguauccuu

SEQ ID NO: 1368495 - RNA, 19 nt, Artificial Sequence
  Description of Artificial Sequence: Synthetic oligonucleotide
  Antisense strand to SEQ ID NO: 1368494
aaggauacaccuguaaucc

SEQ ID NO: 1368496 - RNA, 19 nt, Artificial Sequence
  Description of Artificial Sequence: Synthetic oligonucleotide
  Sense strand starting at position 989 of SEQ ID NO: 1242727
acagguguauccuuguaag

SEQ ID NO: 1368497 - RNA, 19 nt, Artificial Sequence
  Description of Artificial Sequence: Synthetic oligonucleotide
  Antisense strand to SEQ ID NO: 1368496
cuuacaaggauacaccugu

SEQ ID NO: 1368498 - RNA, 19 nt, Artificial Sequence
  Description of Artificial Sequence: Synthetic oligonucleotide
  Sense strand starting at position 1169 of SEQ ID NO: 1242727
ugccuaacccacuggaaau

SEQ ID NO: 1368499 - RNA, 19 nt, Artificial Sequence
  Description of Artificial Sequence: Synthetic oligonucleotide
  Antisense strand to SEQ ID NO: 1368498
auuuccaguggguuaggca

SEQ ID NO: 1368500 - RNA, 19 nt, Artificial Sequence
  Description of Artificial Sequence: Synthetic oligonucleotide
  Sense strand starting at position 1180 of SEQ ID NO: 1242727
cuggaaauguucuagaugu

SEQ ID NO: 1368501 - RNA, 19 nt, Artificial Sequence
  Description of Artificial Sequence: Synthetic oligonucleotide
  Antisense strand to SEQ ID NO: 1368500
acaucuagaacauuuccag

SEQ ID NO: 1368502 - RNA, 19 nt, Artificial Sequence
  Description of Artificial Sequence: Synthetic oligonucleotide
  Sense strand starting at position 1190 of SEQ ID NO: 1242727
ucuagauguugaucuggau

SEQ ID NO: 1368503 - RNA, 19 nt, Artificial Sequence
  Description of Artificial Sequence: Synthetic oligonucleotide
  Antisense strand to SEQ ID NO: 1368502
auccagaucaacaucuaga

SEQ ID NO: 1368504 - RNA, 19 nt, Artificial Sequence
  Description of Artificial Sequence: Synthetic oligonucleotide
  Sense strand starting at position 1193 of SEQ ID NO: 1242727
agauguugaucuggauaau

SEQ ID NO: 1368505 - RNA, 19 nt, Artificial Sequence
  Description of Artificial Sequence: Synthetic oligonucleotide
  Antisense strand to SEQ ID NO: 1368504
auuauccagaucaacaucu

SEQ ID NO: 1368506 - RNA, 19 nt, Artificial Sequence
  Description of Artificial Sequence: Synthetic oligonucleotide
  Sense strand starting at position 1196 of SEQ ID NO: 1242727
uguugaucuggauaauggu

SEQ ID NO: 1368507 - RNA, 19 nt, Artificial Sequence
  Description of Artificial Sequence: Synthetic oligonucleotide
  Antisense strand to SEQ ID NO: 1368506
accauuauccagaucaaca

SEQ ID NO: 1368508 - RNA, 19 nt, Artificial Sequence
  Description of Artificial Sequence: Synthetic oligonucleotide
  Sense strand starting at position 1202 of SEQ ID NO: 1242727
ucuggauaaugguuaccau

SEQ ID NO: 1368509 - RNA, 19 nt, Artificial Sequence
  Description of Artificial Sequence: Synthetic oligonucleotide
  Antisense strand to SEQ ID NO: 1368508
augguaaccauuauccaga

SEQ ID NO: 1368510 - RNA, 19 nt, Artificial Sequence
  Description of Artificial Sequence: Synthetic oligonucleotide
  Sense strand starting at position 1205 of SEQ ID NO: 1242727
ggauaaugguuaccauaua

SEQ ID NO: 1368511 - RNA, 19 nt, Artificial Sequence
  Description of Artificial Sequence: Synthetic oligonucleotide
  Antisense strand to SEQ ID NO: 1368510
uauaugguaaccauuaucc

SEQ ID NO: 1368512 - RNA, 19 nt, Artificial Sequence
  Description of Artificial Sequence: Synthetic oligonucleotide
  Sense strand starting at position 1271 of SEQ ID NO: 1242727
gugugcaccuugcuguaua

SEQ ID NO: 1368513 - RNA, 19 nt, Artificial Sequence
  Description of Artificial Sequence: Synthetic oligonucleotide
  Antisense strand to SEQ ID NO: 1368512
uauacagcaaggugcacac

SEQ ID NO: 1368514 - RNA, 19 nt, Artificial Sequence
  Description of Artificial Sequence: Synthetic oligonucleotide
  Sense strand starting at position 1274 of SEQ ID NO: 1242727
ugcaccuugcuguauacau

SEQ ID NO: 1368515 - RNA, 19 nt, Artificial Sequence
  Description of Artificial Sequence: Synthetic oligonucleotide
  Antisense strand to SEQ ID NO: 1368514
auguauacagcaaggugca

SEQ ID NO: 1368516 - RNA, 19 nt, Artificial Sequence
  Description of Artificial Sequence: Synthetic oligonucleotide
  Sense strand starting at position 1395 of SEQ ID NO: 1242727
gguaaagagguucauguag

SEQ ID NO: 1368517 - RNA, 19 nt, Artificial Sequence
  Description of Artificial Sequence: Synthetic oligonucleotide
  Antisense strand to SEQ ID NO: 1368516
cuacaugaaccucuuuacc

SEQ ID NO: 1368518 - RNA, 19 nt, Artificial Sequence
  Description of Artificial Sequence: Synthetic oligonucleotide
  Sense strand starting at position 1717 of SEQ ID NO: 1242727
gcccgucuugccugacacu

SEQ ID NO: 1368519 - RNA, 19 nt, Artificial Sequence
  Description of Artificial Sequence: Synthetic oligonucleotide
  Antisense strand to SEQ ID NO: 1368518
agugucaggcaagacgggc

SEQ ID NO: 1368520 - RNA, 19 nt, Artificial Sequence
  Description of Artificial Sequence: Synthetic oligonucleotide
  Sense strand starting at position 2087 of SEQ ID NO: 1242727
guggcuuaaagcugaacau

SEQ ID NO: 1368521 - RNA, 19 nt, Artificial Sequence
  Description of Artificial Sequence: Synthetic oligonucleotide
  Antisense strand to SEQ ID NO: 1368520
auguucagcuuuaagccac

SEQ ID NO: 1368522 - RNA, 19 nt, Artificial Sequence
  Description of Artificial Sequence: Synthetic oligonucleotide
  Sense strand starting at position 2097 of SEQ ID NO: 1242727
gcugaacaugugugaguca

SEQ ID NO: 1368523 - RNA, 19 nt, Artificial Sequence
  Description of Artificial Sequence: Synthetic oligonucleotide
  Antisense strand to SEQ ID NO: 1368522
ugacucacacauguucagc

SEQ ID NO: 1368524 - RNA, 19 nt, Artificial Sequence
  Description of Artificial Sequence: Synthetic oligonucleotide
  Sense strand starting at position 2109 of SEQ ID NO: 1242727
ugagucaaggucuaagcau

SEQ ID NO: 1368525 - RNA, 19 nt, Artificial Sequence
  Description of Artificial Sequence: Synthetic oligonucleotide
  Antisense strand to SEQ ID NO: 1368524
augcuuagaccuugacuca

SEQ ID NO: 1368526 - RNA, 19 nt, Artificial Sequence
  Description of Artificial Sequence: Synthetic oligonucleotide
  Sense strand starting at position 2133 of SEQ ID NO: 1242727
gggugccaagauugaagua

SEQ ID NO: 1368527 - RNA, 19 nt, Artificial Sequence
  Description of Artificial Sequence: Synthetic oligonucleotide
  Antisense strand to SEQ ID NO: 1368526
uacuucaaucuuggcaccc

SEQ ID NO: 1368528 - RNA, 19 nt, Artificial Sequence
  Description of Artificial Sequence: Synthetic oligonucleotide
  Sense strand starting at position 2148 of SEQ ID NO: 1242727
aguagaacaccugguuacu

SEQ ID NO: 1368529 - RNA, 19 nt, Artificial Sequence
  Description of Artificial Sequence: Synthetic oligonucleotide
  Antisense strand to SEQ ID NO: 1368528
aguaaccagguguucuacu

SEQ ID NO: 1368530 - RNA, 19 nt, Artificial Sequence
  Description of Artificial Sequence: Synthetic oligonucleotide
  Sense strand starting at position 2183 of SEQ ID NO: 1242727
gcuuccugucuguggauuu

SEQ ID NO: 1368531 - RNA, 19 nt, Artificial Sequence
  Description of Artificial Sequence: Synthetic oligonucleotide
  Antisense strand to SEQ ID NO: 1368530
aaauccacagacaggaagc

SEQ ID NO: 1368532 - RNA, 19 nt, Artificial Sequence
  Description of Artificial Sequence: Synthetic oligonucleotide
  Sense strand starting at position 2184 of SEQ ID NO: 1242727
cuuccugucuguggauuua

SEQ ID NO: 1368533 - RNA, 19 nt, Artificial Sequence
  Description of Artificial Sequence: Synthetic oligonucleotide
  Antisense strand to SEQ ID NO: 1368532
uaaauccacagacaggaag

SEQ ID NO: 1368534 - RNA, 19 nt, Artificial Sequence
  Description of Artificial Sequence: Synthetic oligonucleotide
  Sense strand starting at position 2378 of SEQ ID NO: 1242727
ggguggugggaaugaagau

SEQ ID NO: 1368535 - RNA, 19 nt, Artificial Sequence
  Description of Artificial Sequence: Synthetic oligonucleotide
  Antisense strand to SEQ ID NO: 1368534
aucuucauucccaccaccc

SEQ ID NO: 1368536 - RNA, 19 nt, Artificial Sequence
  Description of Artificial Sequence: Synthetic oligonucleotide
  Sense strand starting at position 2451 of SEQ ID NO: 1242727
aaagaaagauccuguuuga

SEQ ID NO: 1368537 - RNA, 19 nt, Artificial Sequence
  Description of Artificial Sequence: Synthetic oligonucleotide
  Antisense strand to SEQ ID NO: 1368536
ucaaacaggaucuuucuuu

SEQ ID NO: 1368538 - RNA, 19 nt, Artificial Sequence
  Description of Artificial Sequence: Synthetic oligonucleotide
  Sense strand starting at position 2454 of SEQ ID NO: 1242727
gaaagauccuguuugaagu

SEQ ID NO: 1368539 - RNA, 19 nt, Artificial Sequence
  Description of Artificial Sequence: Synthetic oligonucleotide
  Antisense strand to SEQ ID NO: 1368538
acuucaaacaggaucuuuc

SEQ ID NO: 1368540 - RNA, 19 nt, Artificial Sequence
  Description of Artificial Sequence: Synthetic oligonucleotide
  Sense strand starting at position 2455 of SEQ ID NO: 1242727
aaagauccuguuugaaguu

SEQ ID NO: 1368541 - RNA, 19 nt, Artificial Sequence
  Description of Artificial Sequence: Synthetic oligonucleotide
  Antisense strand to SEQ ID NO: 1368540
aacuucaaacaggaucuuu

SEQ ID NO: 1368542 - RNA, 19 nt, Artificial Sequence
  Description of Artificial Sequence: Synthetic oligonucleotide
  Sense strand starting at position 3141 of SEQ ID NO: 1242727
auguuuccucucucgugua

SEQ ID NO: 1368543 - RNA, 19 nt, Artificial Sequence
  Description of Artificial Sequence: Synthetic oligonucleotide
  Antisense strand to SEQ ID NO: 1368542
uacacgagagaggaaacau

SEQ ID NO: 1368544 - RNA, 19 nt, Artificial Sequence
  Description of Artificial Sequence: Synthetic oligonucleotide
  Sense strand starting at position 3178 of SEQ ID NO: 1242727
cuggcccaucuuugugaaa

SEQ ID NO: 1368545 - RNA, 19 nt, Artificial Sequence
  Description of Artificial Sequence: Synthetic oligonucleotide
  Antisense strand to SEQ ID NO: 1368544
uuucacaaagaugggccag

SEQ ID NO: 1368546 - RNA, 19 nt, Artificial Sequence
  Description of Artificial Sequence: Synthetic oligonucleotide
  Sense strand starting at position 3277 of SEQ ID NO: 1242727
gcucuauaggccugacaga

SEQ ID NO: 1368547 - RNA, 19 nt, Artificial Sequence
  Description of Artificial Sequence: Synthetic oligonucleotide
  Antisense strand to SEQ ID NO: 1368546
ucugucaggccuauagagc

SEQ ID NO: 1368548 - RNA, 19 nt, Artificial Sequence
  Description of Artificial Sequence: Synthetic oligonucleotide
  Sense strand starting at position 3278 of SEQ ID NO: 1242727
cucuauaggccugacagau

SEQ ID NO: 1368549 - RNA, 19 nt, Artificial Sequence
  Description of Artificial Sequence: Synthetic oligonucleotide
  Antisense strand to SEQ ID NO: 1368548
aucugucaggccuauagag

SEQ ID NO: 1368550 - RNA, 19 nt, Artificial Sequence
  Description of Artificial Sequence: Synthetic oligonucleotide
  Sense strand starting at position 3284 of SEQ ID NO: 1242727
aggccugacagaugguuaa

SEQ ID NO: 1368551 - RNA, 19 nt, Artificial Sequence
  Description of Artificial Sequence: Synthetic oligonucleotide
  Antisense strand to SEQ ID NO: 1368550
uuaaccaucugucaggccu

SEQ ID NO: 1368552 - RNA, 19 nt, Artificial Sequence
  Description of Artificial Sequence: Synthetic oligonucleotide
  Sense strand starting at position 3326 of SEQ ID NO: 1242727
uucugaguucuucggagau

SEQ ID NO: 1368553 - RNA, 19 nt, Artificial Sequence
  Description of Artificial Sequence: Synthetic oligonucleotide
  Antisense strand to SEQ ID NO: 1368552
aucuccgaagaacucagaa

SEQ ID NO: 1368554 - RNA, 19 nt, Artificial Sequence
  Description of Artificial Sequence: Synthetic oligonucleotide
  Sense strand starting at position 3723 of SEQ ID NO: 1242727
gguaacaggucucuacaaa

SEQ ID NO: 1368555 - RNA, 19 nt, Artificial Sequence
  Description of Artificial Sequence: Synthetic oligonucleotide
  Antisense strand to SEQ ID NO: 1368554
uuuguagagaccuguuacc

SEQ ID NO: 1368556 - RNA, 19 nt, Artificial Sequence
  Description of Artificial Sequence: Synthetic oligonucleotide
  Sense strand starting at position 3914 of SEQ ID NO: 1242727
gccagaugugcugguacau

SEQ ID NO: 1368557 - RNA, 19 nt, Artificial Sequence
  Description of Artificial Sequence: Synthetic oligonucleotide
  Antisense strand to SEQ ID NO: 1368556
auguaccagcacaucuggc

SEQ ID NO: 1368558 - RNA, 19 nt, Artificial Sequence
  Description of Artificial Sequence: Synthetic oligonucleotide
  Sense strand starting at position 200 of SEQ ID NO: 1242728
ggcucagcucgggauauuc

SEQ ID NO: 1368559 - RNA, 19 nt, Artificial Sequence
  Description of Artificial Sequence: Synthetic oligonucleotide
  Antisense strand to SEQ ID NO: 1368558
gaauaucccgagcugagcc

SEQ ID NO: 1368560 - RNA, 19 nt, Artificial Sequence
  Description of Artificial Sequence: Synthetic oligonucleotide
  Sense strand starting at position 243 of SEQ ID NO: 1242728
cuuggagaaucuguauauu

SEQ ID NO: 1368561 - RNA, 19 nt, Artificial Sequence
  Description of Artificial Sequence: Synthetic oligonucleotide
  Antisense strand to SEQ ID NO: 1368560
aauauacagauucuccaag

SEQ ID NO: 1368562 - RNA, 19 nt, Artificial Sequence
  Description of Artificial Sequence: Synthetic oligonucleotide
  Sense strand starting at position 490 of SEQ ID NO: 1242728
aaguuaucccagggcgaug

SEQ ID NO: 1368563 - RNA, 19 nt, Artificial Sequence
  Description of Artificial Sequence: Synthetic oligonucleotide
  Antisense strand to SEQ ID NO: 1368562
caucgcccugggauaacuu

SEQ ID NO: 1368564 - RNA, 19 nt, Artificial Sequence
  Description of Artificial Sequence: Synthetic oligonucleotide
  Sense strand starting at position 794 of SEQ ID NO: 1242728
agguucccucuccaugaau

SEQ ID NO: 1368565 - RNA, 19 nt, Artificial Sequence
  Description of Artificial Sequence: Synthetic oligonucleotide
  Antisense strand to SEQ ID NO: 1368564
auucauggagagggaaccu

SEQ ID NO: 1368566 - RNA, 19 nt, Artificial Sequence
  Description of Artificial Sequence: Synthetic oligonucleotide
  Sense strand starting at position 828 of SEQ ID NO: 1242728
uuuccaagauugcuguaga

SEQ ID NO: 1368567 - RNA, 19 nt, Artificial Sequence
  Description of Artificial Sequence: Synthetic oligonucleotide
  Antisense strand to SEQ ID NO: 1368566
ucuacagcaaucuuggaaa

SEQ ID NO: 1368568 - RNA, 19 nt, Artificial Sequence
  Description of Artificial Sequence: Synthetic oligonucleotide
  Sense strand starting at position 833 of SEQ ID NO: 1242728
aagauugcuguagaaguca

SEQ ID NO: 1368569 - RNA, 19 nt, Artificial Sequence
  Description of Artificial Sequence: Synthetic oligonucleotide
  Antisense strand to SEQ ID NO: 1368568
ugacuucuacagcaaucuu

SEQ ID NO: 1368570 - RNA, 19 nt, Artificial Sequence
  Description of Artificial Sequence: Synthetic oligonucleotide
  Sense strand starting at position 868 of SEQ ID NO: 1242728
gacuuaguuucuccuagga

SEQ ID NO: 1368571 - RNA, 19 nt, Artificial Sequence
  Description of Artificial Sequence: Synthetic oligonucleotide
  Antisense strand to SEQ ID NO: 1368570
uccuaggagaaacuaaguc

SEQ ID NO: 1368572 - RNA, 19 nt, Artificial Sequence
  Description of Artificial Sequence: Synthetic oligonucleotide
  Sense strand starting at position 946 of SEQ ID NO: 1242728
ugcugagagcgcuuucuuu

SEQ ID NO: 1368573 - RNA, 19 nt, Artificial Sequence
  Description of Artificial Sequence: Synthetic oligonucleotide
  Antisense strand to SEQ ID NO: 1368572
aaagaaagcgcucucagca

SEQ ID NO: 1368574 - RNA, 19 nt, Artificial Sequence
  Description of Artificial Sequence: Synthetic oligonucleotide
  Sense strand starting at position 956 of SEQ ID NO: 1242728
gcuuucuuucuacaggauu

SEQ ID NO: 1368575 - RNA, 19 nt, Artificial Sequence
  Description of Artificial Sequence: Synthetic oligonucleotide
  Antisense strand to SEQ ID NO: 1368574
aauccuguagaaagaaagc

SEQ ID NO: 1368576 - RNA, 19 nt, Artificial Sequence
  Description of Artificial Sequence: Synthetic oligonucleotide
  Sense strand starting at position 962 of SEQ ID NO: 1242728
uuucuacaggauugacaua

SEQ ID NO: 1368577 - RNA, 19 nt, Artificial Sequence
  Description of Artificial Sequence: Synthetic oligonucleotide
  Antisense strand to SEQ ID NO: 1368576
uaugucaauccuguagaaa

SEQ ID NO: 1368578 - RNA, 19 nt, Artificial Sequence
  Description of Artificial Sequence: Synthetic oligonucleotide
  Sense strand starting at position 1205 of SEQ ID NO: 1242728
gugaguuagguauaugcuu

SEQ ID NO: 1368579 - RNA, 19 nt, Artificial Sequence
  Description of Artificial Sequence: Synthetic oligonucleotide
  Antisense strand to SEQ ID NO: 1368578
aagcauauaccuaacucac

SEQ ID NO: 1368580 - RNA, 19 nt, Artificial Sequence
  Description of Artificial Sequence: Synthetic oligonucleotide
  Sense strand starting at position 1268 of SEQ ID NO: 1242728
ugcagauacuuccugaaau

SEQ ID NO: 1368581 - RNA, 19 nt, Artificial Sequence
  Description of Artificial Sequence: Synthetic oligonucleotide
  Antisense strand to SEQ ID NO: 1368580
auuucaggaaguaucugca

SEQ ID NO: 1368582 - RNA, 19 nt, Artificial Sequence
  Description of Artificial Sequence: Synthetic oligonucleotide
  Sense strand starting at position 1293 of SEQ ID NO: 1242728
gucuacuuccaggagcaua

SEQ ID NO: 1368583 - RNA, 19 nt, Artificial Sequence
  Description of Artificial Sequence: Synthetic oligonucleotide
  Antisense strand to SEQ ID NO: 1368582
uaugcuccuggaaguagac

SEQ ID NO: 1368584 - RNA, 19 nt, Artificial Sequence
  Description of Artificial Sequence: Synthetic oligonucleotide
  Sense strand starting at position 2037 of SEQ ID NO: 1242728
uguucugauuuacauaaga

SEQ ID NO: 1368585 - RNA, 19 nt, Artificial Sequence
  Description of Artificial Sequence: Synthetic oligonucleotide
  Antisense strand to SEQ ID NO: 1368584
ucuuauguaaaucagaaca

SEQ ID NO: 1368586 - RNA, 19 nt, Artificial Sequence
  Description of Artificial Sequence: Synthetic oligonucleotide
  Sense strand starting at position 2057 of SEQ ID NO: 1242728
gcugaugauuaacuauuga

SEQ ID NO: 1368587 - RNA, 19 nt, Artificial Sequence
  Description of Artificial Sequence: Synthetic oligonucleotide
  Antisense strand to SEQ ID NO: 1368586
ucaauaguuaaucaucagc

SEQ ID NO: 1368588 - RNA, 19 nt, Artificial Sequence
  Description of Artificial Sequence: Synthetic oligonucleotide
  Sense strand starting at position 2091 of SEQ ID NO: 1242728
uuugauaggcuuuggacuu

SEQ ID NO: 1368589 - RNA, 19 nt, Artificial Sequence
  Description of Artificial Sequence: Synthetic oligonucleotide
  Antisense strand to SEQ ID NO: 1368588
aaguccaaagccuaucaaa

SEQ ID NO: 1368590 - RNA, 19 nt, Artificial Sequence
  Description of Artificial Sequence: Synthetic oligonucleotide
  Sense strand starting at position 2157 of SEQ ID NO: 1242728
uuaagauuaugaguucuag

SEQ ID NO: 1368591 - RNA, 19 nt, Artificial Sequence
  Description of Artificial Sequence: Synthetic oligonucleotide
  Antisense strand to SEQ ID NO: 1368590
cuagaacucauaaucuuaa

SEQ ID NO: 1368592 - RNA, 19 nt, Artificial Sequence
  Description of Artificial Sequence: Synthetic oligonucleotide
  Sense strand starting at position 2402 of SEQ ID NO: 1242728
ggcuucuucgauuauauua

SEQ ID NO: 1368593 - RNA, 19 nt, Artificial Sequence
  Description of Artificial Sequence: Synthetic oligonucleotide
  Antisense strand to SEQ ID NO: 1368592
uaauauaaucgaagaagcc

SEQ ID NO: 1368594 - RNA, 19 nt, Artificial Sequence
  Description of Artificial Sequence: Synthetic oligonucleotide
  Sense strand starting at position 2744 of SEQ ID NO: 1242728
ggaguacaccuaggacuuu

SEQ ID NO: 1368595 - RNA, 19 nt, Artificial Sequence
  Description of Artificial Sequence: Synthetic oligonucleotide
  Antisense strand to SEQ ID NO: 1368594
aaaguccuagguguacucc

SEQ ID NO: 1368596 - RNA, 19 nt, Artificial Sequence
  Description of Artificial Sequence: Synthetic oligonucleotide
  Sense strand starting at position 2973 of SEQ ID NO: 1242728
agagcaagccaauauaugu

SEQ ID NO: 1368597 - RNA, 19 nt, Artificial Sequence
  Description of Artificial Sequence: Synthetic oligonucleotide
  Antisense strand to SEQ ID NO: 1368596
acauauauuggcuugcucu

SEQ ID NO: 1368598 - RNA, 19 nt, Artificial Sequence
  Description of Artificial Sequence: Synthetic oligonucleotide
  Sense strand starting at position 3039 of SEQ ID NO: 1242728
caacgaaagggugguguau

SEQ ID NO: 1368599 - RNA, 19 nt, Artificial Sequence
  Description of Artificial Sequence: Synthetic oligonucleotide
  Antisense strand to SEQ ID NO: 1368598
auacaccacccuuucguug

SEQ ID NO: 1368600 - RNA, 19 nt, Artificial Sequence
  Description of Artificial Sequence: Synthetic oligonucleotide
  Sense strand starting at position 3050 of SEQ ID NO: 1242728
ugguguaugguggagaaga

SEQ ID NO: 1368601 - RNA, 19 nt, Artificial Sequence
  Description of Artificial Sequence: Synthetic oligonucleotide
  Antisense strand to SEQ ID NO: 1368600
ucuucuccaccauacacca

SEQ ID NO: 1368602 - RNA, 19 nt, Artificial Sequence
  Description of Artificial Sequence: Synthetic oligonucleotide
  Sense strand starting at position 3144 of SEQ ID NO: 1242728
agggaaagcaugugugaug

SEQ ID NO: 1368603 - RNA, 19 nt, Artificial Sequence
  Description of Artificial Sequence: Synthetic oligonucleotide
  Antisense strand to SEQ ID NO: 1368602
caucacacaugcuuucccu

SEQ ID NO: 1368604 - RNA, 19 nt, Artificial Sequence
  Description of Artificial Sequence: Synthetic oligonucleotide
  Sense strand starting at position 3203 of SEQ ID NO: 1242728
gggauacagcgaugaggua

SEQ ID NO: 1368605 - RNA, 19 nt, Artificial Sequence
  Description of Artificial Sequence: Synthetic oligonucleotide
  Antisense strand to SEQ ID NO: 1368604
uaccucaucgcuguauccc

SEQ ID NO: 1368606 - RNA, 19 nt, Artificial Sequence
  Description of Artificial Sequence: Synthetic oligonucleotide
  Sense strand starting at position 3268 of SEQ ID NO: 1242728
aagugugcuaaguagugaa

SEQ ID NO: 1368607 - RNA, 19 nt, Artificial Sequence
  Description of Artificial Sequence: Synthetic oligonucleotide
  Antisense strand to SEQ ID NO: 1368606
uucacuacuuagcacacuu

SEQ ID NO: 1368608 - RNA, 19 nt, Artificial Sequence
  Description of Artificial Sequence: Synthetic oligonucleotide
  Sense strand starting at position 3285 of SEQ ID NO: 1242728
aaggguucuccaggaggau

SEQ ID NO: 1368609 - RNA, 19 nt, Artificial Sequence
  Description of Artificial Sequence: Synthetic oligonucleotide
  Antisense strand to SEQ ID NO: 1368608
auccuccuggagaacccuu

SEQ ID NO: 1368610 - RNA, 19 nt, Artificial Sequence
  Description of Artificial Sequence: Synthetic oligonucleotide
  Sense strand starting at position 3356 of SEQ ID NO: 1242728
agaagugguugggcuaaga

SEQ ID NO: 1368611 - RNA, 19 nt, Artificial Sequence
  Description of Artificial Sequence: Synthetic oligonucleotide
  Antisense strand to SEQ ID NO: 1368610
ucuuagcccaaccacuucu

SEQ ID NO: 1368612 - RNA, 19 nt, Artificial Sequence
  Description of Artificial Sequence: Synthetic oligonucleotide
  Sense strand starting at position 3625 of SEQ ID NO: 1242728
gggaaucagugggcuuuga

SEQ ID NO: 1368613 - RNA, 19 nt, Artificial Sequence
  Description of Artificial Sequence: Synthetic oligonucleotide
  Antisense strand to SEQ ID NO: 1368612
ucaaagcccacugauuccc

SEQ ID NO: 1368614 - RNA, 19 nt, Artificial Sequence
  Description of Artificial Sequence: Synthetic oligonucleotide
  Sense strand starting at position 3629 of SEQ ID NO: 1242728
aucagugggcuuugaucaa

SEQ ID NO: 1368615 - RNA, 19 nt, Artificial Sequence
  Description of Artificial Sequence: Synthetic oligonucleotide
  Antisense strand to SEQ ID NO: 1368614
uugaucaaagcccacugau

SEQ ID NO: 1368616 - RNA, 19 nt, Artificial Sequence
  Description of Artificial Sequence: Synthetic oligonucleotide
  Sense strand starting at position 3633 of SEQ ID NO: 1242728
gugggcuuugaucaagaug

SEQ ID NO: 1368617 - RNA, 19 nt, Artificial Sequence
  Description of Artificial Sequence: Synthetic oligonucleotide
  Antisense strand to SEQ ID NO: 1368616
caucuugaucaaagcccac

SEQ ID NO: 1368618 - RNA, 19 nt, Artificial Sequence
  Description of Artificial Sequence: Synthetic oligonucleotide
  Sense strand starting at position 3713 of SEQ ID NO: 1242728
gggacauugcuguggagac

SEQ ID NO: 1368619 - RNA, 19 nt, Artificial Sequence
  Description of Artificial Sequence: Synthetic oligonucleotide
  Antisense strand to SEQ ID NO: 1368618
gucuccacagcaauguccc

SEQ ID NO: 1368620 - RNA, 19 nt, Artificial Sequence
  Description of Artificial Sequence: Synthetic oligonucleotide
  Sense strand starting at position 3862 of SEQ ID NO: 1242728
gcaaauaugagaggcuaug

SEQ ID NO: 1368621 - RNA, 19 nt, Artificial Sequence
  Description of Artificial Sequence: Synthetic oligonucleotide
  Antisense strand to SEQ ID NO: 1368620
cauagccucucauauuugc

SEQ ID NO: 1368622 - RNA, 19 nt, Artificial Sequence
  Description of Artificial Sequence: Synthetic oligonucleotide
  Sense strand starting at position 3868 of SEQ ID NO: 1242728
augagaggcuauggauuua

SEQ ID NO: 1368623 - RNA, 19 nt, Artificial Sequence
  Description of Artificial Sequence: Synthetic oligonucleotide
  Antisense strand to SEQ ID NO: 1368622
uaaauccauagccucucau

SEQ ID NO: 1368624 - RNA, 19 nt, Artificial Sequence
  Description of Artificial Sequence: Synthetic oligonucleotide
  Sense strand starting at position 3889 of SEQ ID NO: 1242728
ugaagugauuaugcuaucu

SEQ ID NO: 1368625 - RNA, 19 nt, Artificial Sequence
  Description of Artificial Sequence: Synthetic oligonucleotide
  Antisense strand to SEQ ID NO: 1368624
agauagcauaaucacuuca

SEQ ID NO: 1368626 - RNA, 19 nt, Artificial Sequence
  Description of Artificial Sequence: Synthetic oligonucleotide
  Sense strand starting at position 3894 of SEQ ID NO: 1242728
ugauuaugcuaucuaaaga

SEQ ID NO: 1368627 - RNA, 19 nt, Artificial Sequence
  Description of Artificial Sequence: Synthetic oligonucleotide
  Antisense strand to SEQ ID NO: 1368626
ucuuuagauagcauaauca

SEQ ID NO: 1368628 - RNA, 19 nt, Artificial Sequence
  Description of Artificial Sequence: Synthetic oligonucleotide
  Sense strand starting at position 3936 of SEQ ID NO: 1242728
acuuuaccagauugaguua

SEQ ID NO: 1368629 - RNA, 19 nt, Artificial Sequence
  Description of Artificial Sequence: Synthetic oligonucleotide
  Antisense strand to SEQ ID NO: 1368628
uaacucaaucugguaaagu

SEQ ID NO: 1368630 - RNA, 19 nt, Artificial Sequence
  Description of Artificial Sequence: Synthetic oligonucleotide
  Sense strand starting at position 3939 of SEQ ID NO: 1242728
uuaccagauugaguuagau

SEQ ID NO: 1368631 - RNA, 19 nt, Artificial Sequence
  Description of Artificial Sequence: Synthetic oligonucleotide
  Antisense strand to SEQ ID NO: 1368630
aucuaacucaaucugguaa

SEQ ID NO: 1368632 - RNA, 19 nt, Artificial Sequence
  Description of Artificial Sequence: Synthetic oligonucleotide
  Sense strand starting at position 3947 of SEQ ID NO: 1242728
uugaguuagauguaauugu

SEQ ID NO: 1368633 - RNA, 19 nt, Artificial Sequence
  Description of Artificial Sequence: Synthetic oligonucleotide
  Antisense strand to SEQ ID NO: 1368632
acaauuacaucuaacucaa

SEQ ID NO: 1368634 - RNA, 19 nt, Artificial Sequence
  Description of Artificial Sequence: Synthetic oligonucleotide
  Sense strand starting at position 3954 of SEQ ID NO: 1242728
agauguaauugucuaucau

SEQ ID NO: 1368635 - RNA, 19 nt, Artificial Sequence
  Description of Artificial Sequence: Synthetic oligonucleotide
  Antisense strand to SEQ ID NO: 1368634
augauagacaauuacaucu

SEQ ID NO: 1368636 - RNA, 19 nt, Artificial Sequence
  Description of Artificial Sequence: Synthetic oligonucleotide
  Sense strand starting at position 3964 of SEQ ID NO: 1242728
gucuaucauuaaccagaga

SEQ ID NO: 1368637 - RNA, 19 nt, Artificial Sequence
  Description of Artificial Sequence: Synthetic oligonucleotide
  Antisense strand to SEQ ID NO: 1368636
ucucugguuaaugauagac

SEQ ID NO: 1368638 - RNA, 19 nt, Artificial Sequence
  Description of Artificial Sequence: Synthetic oligonucleotide
  Sense strand starting at position 802 of SEQ ID NO: 1242729
guucuuauauccuccagac

SEQ ID NO: 1368639 - RNA, 19 nt, Artificial Sequence
  Description of Artificial Sequence: Synthetic oligonucleotide
  Antisense strand to SEQ ID NO: 1368638
gucuggaggauauaagaac

SEQ ID NO: 1368640 - RNA, 19 nt, Artificial Sequence
  Description of Artificial Sequence: Synthetic oligonucleotide
  Sense strand starting at position 840 of SEQ ID NO: 1242729
uucccauugcauggagaga

SEQ ID NO: 1368641 - RNA, 19 nt, Artificial Sequence
  Description of Artificial Sequence: Synthetic oligonucleotide
  Antisense strand to SEQ ID NO: 1368640
ucucuccaugcaaugggaa

SEQ ID NO: 1368642 - RNA, 19 nt, Artificial Sequence
  Description of Artificial Sequence: Synthetic oligonucleotide
  Sense strand starting at position 851 of SEQ ID NO: 1242729
uggagagagcaauggcaaa

SEQ ID NO: 1368643 - RNA, 19 nt, Artificial Sequence
  Description of Artificial Sequence: Synthetic oligonucleotide
  Antisense strand to SEQ ID NO: 1368642
uuugccauugcucucucca

SEQ ID NO: 1368644 - RNA, 19 nt, Artificial Sequence
  Description of Artificial Sequence: Synthetic oligonucleotide
  Sense strand starting at position 897 of SEQ ID NO: 1242729
accuguggauucuuggaaa

SEQ ID NO: 1368645 - RNA, 19 nt, Artificial Sequence
  Description of Artificial Sequence: Synthetic oligonucleotide
  Antisense strand to SEQ ID NO: 1368644
uuuccaagaauccacaggu

SEQ ID NO: 1368646 - RNA, 19 nt, Artificial Sequence
  Description of Artificial Sequence: Synthetic oligonucleotide
  Sense strand starting at position 966 of SEQ ID NO: 1242729
guccaaauguccuccaaag

SEQ ID NO: 1368647 - RNA, 19 nt, Artificial Sequence
  Description of Artificial Sequence: Synthetic oligonucleotide
  Antisense strand to SEQ ID NO: 1368646
cuuuggaggacauuuggac

SEQ ID NO: 1368648 - RNA, 19 nt, Artificial Sequence
  Description of Artificial Sequence: Synthetic oligonucleotide
  Sense strand starting at position 994 of SEQ ID NO: 1242729
acucuaaagcucugaugca

SEQ ID NO: 1368649 - RNA, 19 nt, Artificial Sequence
  Description of Artificial Sequence: Synthetic oligonucleotide
  Antisense strand to SEQ ID NO: 1368648
ugcaucagagcuuuagagu

SEQ ID NO: 1368650 - RNA, 19 nt, Artificial Sequence
  Description of Artificial Sequence: Synthetic oligonucleotide
  Sense strand starting at position 1004 of SEQ ID NO: 1242729
ucugaugcauugucuaaua

SEQ ID NO: 1368651 - RNA, 19 nt, Artificial Sequence
  Description of Artificial Sequence: Synthetic oligonucleotide
  Antisense strand to SEQ ID NO: 1368650
uauuagacaaugcaucaga

SEQ ID NO: 1368652 - RNA, 19 nt, Artificial Sequence
  Description of Artificial Sequence: Synthetic oligonucleotide
  Sense strand starting at position 1026 of SEQ ID NO: 1242729
guuagacaucccugauccu

SEQ ID NO: 1368653 - RNA, 19 nt, Artificial Sequence
  Description of Artificial Sequence: Synthetic oligonucleotide
  Antisense strand to SEQ ID NO: 1368652
aggaucagggaugucuaac

SEQ ID NO: 1368654 - RNA, 19 nt, Artificial Sequence
  Description of Artificial Sequence: Synthetic oligonucleotide
  Sense strand starting at position 1100 of SEQ ID NO: 1242729
gggagagcucaguguacac

SEQ ID NO: 1368655 - RNA, 19 nt, Artificial Sequence
  Description of Artificial Sequence: Synthetic oligonucleotide
  Antisense strand to SEQ ID NO: 1368654
guguacacugagcucuccc

SEQ ID NO: 1368656 - RNA, 19 nt, Artificial Sequence
  Description of Artificial Sequence: Synthetic oligonucleotide
  Sense strand starting at position 1239 of SEQ ID NO: 1242729
uaguuuccuguugagucaa

SEQ ID NO: 1368657 - RNA, 19 nt, Artificial Sequence
  Description of Artificial Sequence: Synthetic oligonucleotide
  Antisense strand to SEQ ID NO: 1368656
uugacucaacaggaaacua

SEQ ID NO: 1368658 - RNA, 19 nt, Artificial Sequence
  Description of Artificial Sequence: Synthetic oligonucleotide
  Sense strand starting at position 1403 of SEQ ID NO: 1242729
acaguaauauucucuugga

SEQ ID NO: 1368659 - RNA, 19 nt, Artificial Sequence
  Description of Artificial Sequence: Synthetic oligonucleotide
  Antisense strand to SEQ ID NO: 1368658
uccaagagaauauuacugu

SEQ ID NO: 1368660 - RNA, 19 nt, Artificial Sequence
  Description of Artificial Sequence: Synthetic oligonucleotide
  Sense strand starting at position 1404 of SEQ ID NO: 1242729
caguaauauucucuuggag

SEQ ID NO: 1368661 - RNA, 19 nt, Artificial Sequence
  Description of Artificial Sequence: Synthetic oligonucleotide
  Antisense strand to SEQ ID NO: 1368660
cuccaagagaauauuacug

SEQ ID NO: 1368662 - RNA, 19 nt, Artificial Sequence
  Description of Artificial Sequence: Synthetic oligonucleotide
  Sense strand starting at position 1410 of SEQ ID NO: 1242729
uauucucuuggaggcauau

SEQ ID NO: 1368663 - RNA, 19 nt, Artificial Sequence
  Description of Artificial Sequence: Synthetic oligonucleotide
  Antisense strand to SEQ ID NO: 1368662
auaugccuccaagagaaua

SEQ ID NO: 1368664 - RNA, 19 nt, Artificial Sequence
  Description of Artificial Sequence: Synthetic oligonucleotide
  Sense strand starting at position 1419 of SEQ ID NO: 1242729
ggaggcauaugcuugacuu

SEQ ID NO: 1368665 - RNA, 19 nt, Artificial Sequence
  Description of Artificial Sequence: Synthetic oligonucleotide
  Antisense strand to SEQ ID NO: 1368664
aagucaagcauaugccucc

SEQ ID NO: 1368666 - RNA, 19 nt, Artificial Sequence
  Description of Artificial Sequence: Synthetic oligonucleotide
  Sense strand starting at position 1420 of SEQ ID NO: 1242729
gaggcauaugcuugacuua

SEQ ID NO: 1368667 - RNA, 19 nt, Artificial Sequence
  Description of Artificial Sequence: Synthetic oligonucleotide
  Antisense strand to SEQ ID NO: 1368666
uaagucaagcauaugccuc

SEQ ID NO: 1368668 - RNA, 19 nt, Artificial Sequence
  Description of Artificial Sequence: Synthetic oligonucleotide
  Sense strand starting at position 1421 of SEQ ID NO: 1242729
aggcauaugcuugacuuau

SEQ ID NO: 1368669 - RNA, 19 nt, Artificial Sequence
  Description of Artificial Sequence: Synthetic oligonucleotide
  Antisense strand to SEQ ID NO: 1368668
auaagucaagcauaugccu

SEQ ID NO: 1368670 - RNA, 19 nt, Artificial Sequence
  Description of Artificial Sequence: Synthetic oligonucleotide
  Sense strand starting at position 1423 of SEQ ID NO: 1242729
gcauaugcuugacuuauuu

SEQ ID NO: 1368671 - RNA, 19 nt, Artificial Sequence
  Description of Artificial Sequence: Synthetic oligonucleotide
  Antisense strand to SEQ ID NO: 1368670
aaauaagucaagcauaugc

SEQ ID NO: 1368672 - RNA, 19 nt, Artificial Sequence
  Description of Artificial Sequence: Synthetic oligonucleotide
  Sense strand starting at position 1706 of SEQ ID NO: 1242729
gacaaaguuggguggguaa

SEQ ID NO: 1368673 - RNA, 19 nt, Artificial Sequence
  Description of Artificial Sequence: Synthetic oligonucleotide
  Antisense strand to SEQ ID NO: 1368672
uuacccacccaacuuuguc

SEQ ID NO: 1368674 - RNA, 19 nt, Artificial Sequence
  Description of Artificial Sequence: Synthetic oligonucleotide
  Sense strand starting at position 1708 of SEQ ID NO: 1242729
caaaguuggguggguaaau

SEQ ID NO: 1368675 - RNA, 19 nt, Artificial Sequence
  Description of Artificial Sequence: Synthetic oligonucleotide
  Antisense strand to SEQ ID NO: 1368674
auuuacccacccaacuuug

SEQ ID NO: 1368676 - RNA, 19 nt, Artificial Sequence
  Description of Artificial Sequence: Synthetic oligonucleotide
  Sense strand starting at position 1709 of SEQ ID NO: 1242729
aaaguuggguggguaaauu

SEQ ID NO: 1368677 - RNA, 19 nt, Artificial Sequence
  Description of Artificial Sequence: Synthetic oligonucleotide
  Antisense strand to SEQ ID NO: 1368676
aauuuacccacccaacuuu

SEQ ID NO: 1368678 - RNA, 19 nt, Artificial Sequence
  Description of Artificial Sequence: Synthetic oligonucleotide
  Sense strand starting at position 1800 of SEQ ID NO: 1242729
ggcuaauacucaccuuuag

SEQ ID NO: 1368679 - RNA, 19 nt, Artificial Sequence
  Description of Artificial Sequence: Synthetic oligonucleotide
  Antisense strand to SEQ ID NO: 1368678
cuaaaggugaguauuagcc

SEQ ID NO: 1368680 - RNA, 19 nt, Artificial Sequence
  Description of Artificial Sequence: Synthetic oligonucleotide
  Sense strand starting at position 2813 of SEQ ID NO: 1242729
aacuauaggccaugaggau

SEQ ID NO: 1368681 - RNA, 19 nt, Artificial Sequence
  Description of Artificial Sequence: Synthetic oligonucleotide
  Antisense strand to SEQ ID NO: 1368680
auccucauggccuauaguu

SEQ ID NO: 1368682 - RNA, 19 nt, Artificial Sequence
  Description of Artificial Sequence: Synthetic oligonucleotide
  Sense strand starting at position 2923 of SEQ ID NO: 1242729
ugagaaggauugcugcaua

SEQ ID NO: 1368683 - RNA, 19 nt, Artificial Sequence
  Description of Artificial Sequence: Synthetic oligonucleotide
  Antisense strand to SEQ ID NO: 1368682
uaugcagcaauccuucuca

SEQ ID NO: 1368684 - RNA, 19 nt, Artificial Sequence
  Description of Artificial Sequence: Synthetic oligonucleotide
  Sense strand starting at position 3026 of SEQ ID NO: 1242729
guuacuggugcccaaggaa

SEQ ID NO: 1368685 - RNA, 19 nt, Artificial Sequence
  Description of Artificial Sequence: Synthetic oligonucleotide
  Antisense strand to SEQ ID NO: 1368684
uuccuugggcaccaguaac

SEQ ID NO: 1368686 - RNA, 19 nt, Artificial Sequence
  Description of Artificial Sequence: Synthetic oligonucleotide
  Sense strand starting at position 3047 of SEQ ID NO: 1242729
augccaugcccuggaaaua

SEQ ID NO: 1368687 - RNA, 19 nt, Artificial Sequence
  Description of Artificial Sequence: Synthetic oligonucleotide
  Antisense strand to SEQ ID NO: 1368686
uauuuccagggcauggcau

SEQ ID NO: 1368688 - RNA, 19 nt, Artificial Sequence
  Description of Artificial Sequence: Synthetic oligonucleotide
  Sense strand starting at position 3048 of SEQ ID NO: 1242729
ugccaugcccuggaaauaa

SEQ ID NO: 1368689 - RNA, 19 nt, Artificial Sequence
  Description of Artificial Sequence: Synthetic oligonucleotide
  Antisense strand to SEQ ID NO: 1368688
uuauuuccagggcauggca

SEQ ID NO: 1368690 - RNA, 19 nt, Artificial Sequence
  Description of Artificial Sequence: Synthetic oligonucleotide
  Sense strand starting at position 3176 of SEQ ID NO: 1242729
uuggaaucccaguguccaa

SEQ ID NO: 1368691 - RNA, 19 nt, Artificial Sequence
  Description of Artificial Sequence: Synthetic oligonucleotide
  Antisense strand to SEQ ID NO: 1368690
uuggacacugggauuccaa

SEQ ID NO: 1368692 - RNA, 19 nt, Artificial Sequence
  Description of Artificial Sequence: Synthetic oligonucleotide
  Sense strand starting at position 3236 of SEQ ID NO: 1242729
uaguuaggucauggaaaug

SEQ ID NO: 1368693 - RNA, 19 nt, Artificial Sequence
  Description of Artificial Sequence: Synthetic oligonucleotide
  Antisense strand to SEQ ID NO: 1368692
cauuuccaugaccuaacua

SEQ ID NO: 1368694 - RNA, 19 nt, Artificial Sequence
  Description of Artificial Sequence: Synthetic oligonucleotide
  Sense strand starting at position 3261 of SEQ ID NO: 1242729
cuuugucaucuggaccuua

SEQ ID NO: 1368695 - RNA, 19 nt, Artificial Sequence
  Description of Artificial Sequence: Synthetic oligonucleotide
  Antisense strand to SEQ ID NO: 1368694
uaagguccagaugacaaag

SEQ ID NO: 1368696 - RNA, 19 nt, Artificial Sequence
  Description of Artificial Sequence: Synthetic oligonucleotide
  Sense strand starting at position 3318 of SEQ ID NO: 1242729
gguagauccugcccagauu

SEQ ID NO: 1368697 - RNA, 19 nt, Artificial Sequence
  Description of Artificial Sequence: Synthetic oligonucleotide
  Antisense strand to SEQ ID NO: 1368696
aaucugggcaggaucuacc

SEQ ID NO: 1368698 - RNA, 19 nt, Artificial Sequence
  Description of Artificial Sequence: Synthetic oligonucleotide
  Sense strand starting at position 3321 of SEQ ID NO: 1242729
agauccugcccagauugua

SEQ ID NO: 1368699 - RNA, 19 nt, Artificial Sequence
  Description of Artificial Sequence: Synthetic oligonucleotide
  Antisense strand to SEQ ID NO: 1368698
uacaaucugggcaggaucu

SEQ ID NO: 1368700 - RNA, 19 nt, Artificial Sequence
  Description of Artificial Sequence: Synthetic oligonucleotide
  Sense strand starting at position 3382 of SEQ ID NO: 1242729
uuggauugggcugaacagu

SEQ ID NO: 1368701 - RNA, 19 nt, Artificial Sequence
  Description of Artificial Sequence: Synthetic oligonucleotide
  Antisense strand to SEQ ID NO: 1368700
acuguucagcccaauccaa

SEQ ID NO: 1368702 - RNA, 19 nt, Artificial Sequence
  Description of Artificial Sequence: Synthetic oligonucleotide
  Sense strand starting at position 3502 of SEQ ID NO: 1242729
gggugucauuuggauuaaa

SEQ ID NO: 1368703 - RNA, 19 nt, Artificial Sequence
  Description of Artificial Sequence: Synthetic oligonucleotide
  Antisense strand to SEQ ID NO: 1368702
uuuaauccaaaugacaccc

SEQ ID NO: 1368704 - RNA, 19 nt, Artificial Sequence
  Description of Artificial Sequence: Synthetic oligonucleotide
  Sense strand starting at position 3882 of SEQ ID NO: 1242729
cuuugcaaucagcaaggua

SEQ ID NO: 1368705 - RNA, 19 nt, Artificial Sequence
  Description of Artificial Sequence: Synthetic oligonucleotide
  Antisense strand to SEQ ID NO: 1368704
uaccuugcugauugcaaag

SEQ ID NO: 1368706 - RNA, 19 nt, Artificial Sequence
  Description of Artificial Sequence: Synthetic oligonucleotide
  Sense strand starting at position 3885 of SEQ ID NO: 1242729
ugcaaucagcaagguaaau

SEQ ID NO: 1368707 - RNA, 19 nt, Artificial Sequence
  Description of Artificial Sequence: Synthetic oligonucleotide
  Antisense strand to SEQ ID NO: 1368706
auuuaccuugcugauugca

SEQ ID NO: 1368708 - RNA, 19 nt, Artificial Sequence
  Description of Artificial Sequence: Synthetic oligonucleotide
  Sense strand starting at position 3908 of SEQ ID NO: 1242729
ggaguccuauuccugguaa

SEQ ID NO: 1368709 - RNA, 19 nt, Artificial Sequence
  Description of Artificial Sequence: Synthetic oligonucleotide
  Antisense strand to SEQ ID NO: 1368708
uuaccaggaauaggacucc

SEQ ID NO: 1368710 - RNA, 19 nt, Artificial Sequence
  Description of Artificial Sequence: Synthetic oligonucleotide
  Sense strand starting at position 3910 of SEQ ID NO: 1242729
aguccuauuccugguaaug

SEQ ID NO: 1368711 - RNA, 19 nt, Artificial Sequence
  Description of Artificial Sequence: Synthetic oligonucleotide
  Antisense strand to SEQ ID NO: 1368710
cauuaccaggaauaggacu

SEQ ID NO: 1368712 - RNA, 19 nt, Artificial Sequence
  Description of Artificial Sequence: Synthetic oligonucleotide
  Sense strand starting at position 3920 of SEQ ID NO: 1242729
cugguaaugguugggacuu

SEQ ID NO: 1368713 - RNA, 19 nt, Artificial Sequence
  Description of Artificial Sequence: Synthetic oligonucleotide
  Antisense strand to SEQ ID NO: 1368712
aagucccaaccauuaccag

SEQ ID NO: 1368714 - RNA, 19 nt, Artificial Sequence
  Description of Artificial Sequence: Synthetic oligonucleotide
  Sense strand starting at position 3976 of SEQ ID NO: 1242729
cauuguagugaggauugca

SEQ ID NO: 1368715 - RNA, 19 nt, Artificial Sequence
  Description of Artificial Sequence: Synthetic oligonucleotide
  Antisense strand to SEQ ID NO: 1368714
ugcaauccucacuacaaug

SEQ ID NO: 1368716 - RNA, 19 nt, Artificial Sequence
  Description of Artificial Sequence: Synthetic oligonucleotide
  Sense strand starting at position 3979 of SEQ ID NO: 1242729
uguagugaggauugcaaag

SEQ ID NO: 1368717 - RNA, 19 nt, Artificial Sequence
  Description of Artificial Sequence: Synthetic oligonucleotide
  Antisense strand to SEQ ID NO: 1368716
cuuugcaauccucacuaca

SEQ ID NO: 1368718 - RNA, 19 nt, Artificial Sequence
  Description of Artificial Sequence: Synthetic oligonucleotide
  Sense strand starting at position 278 of SEQ ID NO: 1242730
ugaggauguuguuuguaaa

SEQ ID NO: 1368719 - RNA, 19 nt, Artificial Sequence
  Description of Artificial Sequence: Synthetic oligonucleotide
  Antisense strand to SEQ ID NO: 1368718
uuuacaaacaacauccuca

SEQ ID NO: 1368720 - RNA, 19 nt, Artificial Sequence
  Description of Artificial Sequence: Synthetic oligonucleotide
  Sense strand starting at position 318 of SEQ ID NO: 1242730
ccuugacuguuaccaucau

SEQ ID NO: 1368721 - RNA, 19 nt, Artificial Sequence
  Description of Artificial Sequence: Synthetic oligonucleotide
  Antisense strand to SEQ ID NO: 1368720
augaugguaacagucaagg

SEQ ID NO: 1368722 - RNA, 19 nt, Artificial Sequence
  Description of Artificial Sequence: Synthetic oligonucleotide
  Sense strand starting at position 421 of SEQ ID NO: 1242730
gcaagaccugucuguacua

SEQ ID NO: 1368723 - RNA, 19 nt, Artificial Sequence
  Description of Artificial Sequence: Synthetic oligonucleotide
  Antisense strand to SEQ ID NO: 1368722
uaguacagacaggucuugc

SEQ ID NO: 1368724 - RNA, 19 nt, Artificial Sequence
  Description of Artificial Sequence: Synthetic oligonucleotide
  Sense strand starting at position 428 of SEQ ID NO: 1242730
cugucuguacuauaagaaa

SEQ ID NO: 1368725 - RNA, 19 nt, Artificial Sequence
  Description of Artificial Sequence: Synthetic oligonucleotide
  Antisense strand to SEQ ID NO: 1368724
uuucuuauaguacagacag

SEQ ID NO: 1368726 - RNA, 19 nt, Artificial Sequence
  Description of Artificial Sequence: Synthetic oligonucleotide
  Sense strand starting at position 583 of SEQ ID NO: 1242730
ggcuguuggagagguugau

SEQ ID NO: 1368727 - RNA, 19 nt, Artificial Sequence
  Description of Artificial Sequence: Synthetic oligonucleotide
  Antisense strand to SEQ ID NO: 1368726
aucaaccucuccaacagcc

SEQ ID NO: 1368728 - RNA, 19 nt, Artificial Sequence
  Description of Artificial Sequence: Synthetic oligonucleotide
  Sense strand starting at position 1063 of SEQ ID NO: 1242730
ggguuuaagguugauggca

SEQ ID NO: 1368729 - RNA, 19 nt, Artificial Sequence
  Description of Artificial Sequence: Synthetic oligonucleotide
  Antisense strand to SEQ ID NO: 1368728
ugccaucaaccuuaaaccc

SEQ ID NO: 1368730 - RNA, 19 nt, Artificial Sequence
  Description of Artificial Sequence: Synthetic oligonucleotide
  Sense strand starting at position 1283 of SEQ ID NO: 1242730
ugaacuuggcgauacucua

SEQ ID NO: 1368731 - RNA, 19 nt, Artificial Sequence
  Description of Artificial Sequence: Synthetic oligonucleotide
  Antisense strand to SEQ ID NO: 1368730
uagaguaucgccaaguuca

SEQ ID NO: 1368732 - RNA, 19 nt, Artificial Sequence
  Description of Artificial Sequence: Synthetic oligonucleotide
  Sense strand starting at position 1337 of SEQ ID NO: 1242730
uuauuauauugagcaagag

SEQ ID NO: 1368733 - RNA, 19 nt, Artificial Sequence
  Description of Artificial Sequence: Synthetic oligonucleotide
  Antisense strand to SEQ ID NO: 1368732
cucuugcucaauauaauaa

SEQ ID NO: 1368734 - RNA, 19 nt, Artificial Sequence
  Description of Artificial Sequence: Synthetic oligonucleotide
  Sense strand starting at position 1441 of SEQ ID NO: 1242730
cccugacuuuggccauaga

SEQ ID NO: 1368735 - RNA, 19 nt, Artificial Sequence
  Description of Artificial Sequence: Synthetic oligonucleotide
  Antisense strand to SEQ ID NO: 1368734
ucuauggccaaagucaggg

SEQ ID NO: 1368736 - RNA, 19 nt, Artificial Sequence
  Description of Artificial Sequence: Synthetic oligonucleotide
  Sense strand starting at position 1444 of SEQ ID NO: 1242730
ugacuuuggccauagagug

SEQ ID NO: 1368737 - RNA, 19 nt, Artificial Sequence
  Description of Artificial Sequence: Synthetic oligonucleotide
  Antisense strand to SEQ ID NO: 1368736
cacucuauggccaaaguca

SEQ ID NO: 1368738 - RNA, 19 nt, Artificial Sequence
  Description of Artificial Sequence: Synthetic oligonucleotide
  Sense strand starting at position 1555 of SEQ ID NO: 1242730
cagugauucugggucucag

SEQ ID NO: 1368739 - RNA, 19 nt, Artificial Sequence
  Description of Artificial Sequence: Synthetic oligonucleotide
  Antisense strand to SEQ ID NO: 1368738
cugagacccagaaucacug

SEQ ID NO: 1368740 - RNA, 19 nt, Artificial Sequence
  Description of Artificial Sequence: Synthetic oligonucleotide
  Sense strand starting at position 1769 of SEQ ID NO: 1242730
cauaguggguguccaugaa

SEQ ID NO: 1368741 - RNA, 19 nt, Artificial Sequence
  Description of Artificial Sequence: Synthetic oligonucleotide
  Antisense strand to SEQ ID NO: 1368740
uucauggacacccacuaug

SEQ ID NO: 1368742 - RNA, 19 nt, Artificial Sequence
  Description of Artificial Sequence: Synthetic oligonucleotide
  Sense strand starting at position 2179 of SEQ ID NO: 1242730
uuugccaucccuuauguua

SEQ ID NO: 1368743 - RNA, 19 nt, Artificial Sequence
  Description of Artificial Sequence: Synthetic oligonucleotide
  Antisense strand to SEQ ID NO: 1368742
uaacauaagggauggcaaa

SEQ ID NO: 1368744 - RNA, 19 nt, Artificial Sequence
  Description of Artificial Sequence: Synthetic oligonucleotide
  Sense strand starting at position 2186 of SEQ ID NO: 1242730
ucccuuauguuaucuggau

SEQ ID NO: 1368745 - RNA, 19 nt, Artificial Sequence
  Description of Artificial Sequence: Synthetic oligonucleotide
  Antisense strand to SEQ ID NO: 1368744
auccagauaacauaaggga

SEQ ID NO: 1368746 - RNA, 19 nt, Artificial Sequence
  Description of Artificial Sequence: Synthetic oligonucleotide
  Sense strand starting at position 2187 of SEQ ID NO: 1242730
cccuuauguuaucuggaua

SEQ ID NO: 1368747 - RNA, 19 nt, Artificial Sequence
  Description of Artificial Sequence: Synthetic oligonucleotide
  Antisense strand to SEQ ID NO: 1368746
uauccagauaacauaaggg

SEQ ID NO: 1368748 - RNA, 19 nt, Artificial Sequence
  Description of Artificial Sequence: Synthetic oligonucleotide
  Sense strand starting at position 2198 of SEQ ID NO: 1242730
ucuggauaauugcuuaaua

SEQ ID NO: 1368749 - RNA, 19 nt, Artificial Sequence
  Description of Artificial Sequence: Synthetic oligonucleotide
  Antisense strand to SEQ ID NO: 1368748
uauuaagcaauuauccaga

SEQ ID NO: 1368750 - RNA, 19 nt, Artificial Sequence
  Description of Artificial Sequence: Synthetic oligonucleotide
  Sense strand starting at position 2199 of SEQ ID NO: 1242730
cuggauaauugcuuaauau

SEQ ID NO: 1368751 - RNA, 19 nt, Artificial Sequence
  Description of Artificial Sequence: Synthetic oligonucleotide
  Antisense strand to SEQ ID NO: 1368750
auauuaagcaauuauccag

SEQ ID NO: 1368752 - RNA, 19 nt, Artificial Sequence
  Description of Artificial Sequence: Synthetic oligonucleotide
  Sense strand starting at position 2251 of SEQ ID NO: 1242730
acauauaucuaggaauaag

SEQ ID NO: 1368753 - RNA, 19 nt, Artificial Sequence
  Description of Artificial Sequence: Synthetic oligonucleotide
  Antisense strand to SEQ ID NO: 1368752
cuuauuccuagauauaugu

SEQ ID NO: 1368754 - RNA, 19 nt, Artificial Sequence
  Description of Artificial Sequence: Synthetic oligonucleotide
  Sense strand starting at position 2332 of SEQ ID NO: 1242730
auugaauucuugccagaua

SEQ ID NO: 1368755 - RNA, 19 nt, Artificial Sequence
  Description of Artificial Sequence: Synthetic oligonucleotide
  Antisense strand to SEQ ID NO: 1368754
uaucuggcaagaauucaau

SEQ ID NO: 1368756 - RNA, 19 nt, Artificial Sequence
  Description of Artificial Sequence: Synthetic oligonucleotide
  Sense strand starting at position 2346 of SEQ ID NO: 1242730
agauacuguugcccgacaa

SEQ ID NO: 1368757 - RNA, 19 nt, Artificial Sequence
  Description of Artificial Sequence: Synthetic oligonucleotide
  Antisense strand to SEQ ID NO: 1368756
uugucgggcaacaguaucu

SEQ ID NO: 1368758 - RNA, 19 nt, Artificial Sequence
  Description of Artificial Sequence: Synthetic oligonucleotide
  Sense strand starting at position 2347 of SEQ ID NO: 1242730
gauacuguugcccgacaau

SEQ ID NO: 1368759 - RNA, 19 nt, Artificial Sequence
  Description of Artificial Sequence: Synthetic oligonucleotide
  Antisense strand to SEQ ID NO: 1368758
auugucgggcaacaguauc

SEQ ID NO: 1368760 - RNA, 19 nt, Artificial Sequence
  Description of Artificial Sequence: Synthetic oligonucleotide
  Sense strand starting at position 2384 of SEQ ID NO: 1242730
ugcuguugccuguaaagua

SEQ ID NO: 1368761 - RNA, 19 nt, Artificial Sequence
  Description of Artificial Sequence: Synthetic oligonucleotide
  Antisense strand to SEQ ID NO: 1368760
uacuuuacaggcaacagca

SEQ ID NO: 1368762 - RNA, 19 nt, Artificial Sequence
  Description of Artificial Sequence: Synthetic oligonucleotide
  Sense strand starting at position 2425 of SEQ ID NO: 1242730
gggcuucaugggugcuaga

SEQ ID NO: 1368763 - RNA, 19 nt, Artificial Sequence
  Description of Artificial Sequence: Synthetic oligonucleotide
  Antisense strand to SEQ ID NO: 1368762
ucuagcacccaugaagccc

SEQ ID NO: 1368764 - RNA, 19 nt, Artificial Sequence
  Description of Artificial Sequence: Synthetic oligonucleotide
  Sense strand starting at position 2463 of SEQ ID NO: 1242730
uucccuugcucugauuuga

SEQ ID NO: 1368765 - RNA, 19 nt, Artificial Sequence
  Description of Artificial Sequence: Synthetic oligonucleotide
  Antisense strand to SEQ ID NO: 1368764
ucaaaucagagcaagggaa

SEQ ID NO: 1368766 - RNA, 19 nt, Artificial Sequence
  Description of Artificial Sequence: Synthetic oligonucleotide
  Sense strand starting at position 2491 of SEQ ID NO: 1242730
aggauaauguccucacugu

SEQ ID NO: 1368767 - RNA, 19 nt, Artificial Sequence
  Description of Artificial Sequence: Synthetic oligonucleotide
  Antisense strand to SEQ ID NO: 1368766
acagugaggacauuauccu

SEQ ID NO: 1368768 - RNA, 19 nt, Artificial Sequence
  Description of Artificial Sequence: Synthetic oligonucleotide
  Sense strand starting at position 2492 of SEQ ID NO: 1242730
ggauaauguccucacugua

SEQ ID NO: 1368769 - RNA, 19 nt, Artificial Sequence
  Description of Artificial Sequence: Synthetic oligonucleotide
  Antisense strand to SEQ ID NO: 1368768
uacagugaggacauuaucc

SEQ ID NO: 1368770 - RNA, 19 nt, Artificial Sequence
  Description of Artificial Sequence: Synthetic oligonucleotide
  Sense strand starting at position 2497 of SEQ ID NO: 1242730
auguccucacuguaguauu

SEQ ID NO: 1368771 - RNA, 19 nt, Artificial Sequence
  Description of Artificial Sequence: Synthetic oligonucleotide
  Antisense strand to SEQ ID NO: 1368770
aauacuacagugaggacau

SEQ ID NO: 1368772 - RNA, 19 nt, Artificial Sequence
  Description of Artificial Sequence: Synthetic oligonucleotide
  Sense strand starting at position 2507 of SEQ ID NO: 1242730
uguaguauuccauggcauu

SEQ ID NO: 1368773 - RNA, 19 nt, Artificial Sequence
  Description of Artificial Sequence: Synthetic oligonucleotide
  Antisense strand to SEQ ID NO: 1368772
aaugccauggaauacuaca

SEQ ID NO: 1368774 - RNA, 19 nt, Artificial Sequence
  Description of Artificial Sequence: Synthetic oligonucleotide
  Sense strand starting at position 2549 of SEQ ID NO: 1242730
gaaacaguccucuauguag

SEQ ID NO: 1368775 - RNA, 19 nt, Artificial Sequence
  Description of Artificial Sequence: Synthetic oligonucleotide
  Antisense strand to SEQ ID NO: 1368774
cuacauagaggacuguuuc

SEQ ID NO: 1368776 - RNA, 19 nt, Artificial Sequence
  Description of Artificial Sequence: Synthetic oligonucleotide
  Sense strand starting at position 2563 of SEQ ID NO: 1242730
uguagacuuuccuugauau

SEQ ID NO: 1368777 - RNA, 19 nt, Artificial Sequence
  Description of Artificial Sequence: Synthetic oligonucleotide
  Antisense strand to SEQ ID NO: 1368776
auaucaaggaaagucuaca

SEQ ID NO: 1368778 - RNA, 19 nt, Artificial Sequence
  Description of Artificial Sequence: Synthetic oligonucleotide
  Sense strand starting at position 2564 of SEQ ID NO: 1242730
guagacuuuccuugauaug

SEQ ID NO: 1368779 - RNA, 19 nt, Artificial Sequence
  Description of Artificial Sequence: Synthetic oligonucleotide
  Antisense strand to SEQ ID NO: 1368778
cauaucaaggaaagucuac

SEQ ID NO: 1368780 - RNA, 19 nt, Artificial Sequence
  Description of Artificial Sequence: Synthetic oligonucleotide
  Sense strand starting at position 2603 of SEQ ID NO: 1242730
guauacagccucugagauc

SEQ ID NO: 1368781 - RNA, 19 nt, Artificial Sequence
  Description of Artificial Sequence: Synthetic oligonucleotide
  Antisense strand to SEQ ID NO: 1368780
gaucucagaggcuguauac

SEQ ID NO: 1368782 - RNA, 19 nt, Artificial Sequence
  Description of Artificial Sequence: Synthetic oligonucleotide
  Sense strand starting at position 2692 of SEQ ID NO: 1242730
ucaauucugaguuguguga

SEQ ID NO: 1368783 - RNA, 19 nt, Artificial Sequence
  Description of Artificial Sequence: Synthetic oligonucleotide
  Antisense strand to SEQ ID NO: 1368782
ucacacaacucagaauuga

SEQ ID NO: 1368784 - RNA, 19 nt, Artificial Sequence
  Description of Artificial Sequence: Synthetic oligonucleotide
  Sense strand starting at position 2698 of SEQ ID NO: 1242730
cugaguugugugaacgugu

SEQ ID NO: 1368785 - RNA, 19 nt, Artificial Sequence
  Description of Artificial Sequence: Synthetic oligonucleotide
  Antisense strand to SEQ ID NO: 1368784
acacguucacacaacucag

SEQ ID NO: 1368786 - RNA, 19 nt, Artificial Sequence
  Description of Artificial Sequence: Synthetic oligonucleotide
  Sense strand starting at position 2699 of SEQ ID NO: 1242730
ugaguugugugaacguguu

SEQ ID NO: 1368787 - RNA, 19 nt, Artificial Sequence
  Description of Artificial Sequence: Synthetic oligonucleotide
  Antisense strand to SEQ ID NO: 1368786
aacacguucacacaacuca

SEQ ID NO: 1368788 - RNA, 19 nt, Artificial Sequence
  Description of Artificial Sequence: Synthetic oligonucleotide
  Sense strand starting at position 2945 of SEQ ID NO: 1242730
guuugcaccugcuccaaua

SEQ ID NO: 1368789 - RNA, 19 nt, Artificial Sequence
  Description of Artificial Sequence: Synthetic oligonucleotide
  Antisense strand to SEQ ID NO: 1368788
uauuggagcaggugcaaac

SEQ ID NO: 1368790 - RNA, 19 nt, Artificial Sequence
  Description of Artificial Sequence: Synthetic oligonucleotide
  Sense strand starting at position 3058 of SEQ ID NO: 1242730
uuggguucguacccacaga

SEQ ID NO: 1368791 - RNA, 19 nt, Artificial Sequence
  Description of Artificial Sequence: Synthetic oligonucleotide
  Antisense strand to SEQ ID NO: 1368790
ucuguggguacgaacccaa

SEQ ID NO: 1368792 - RNA, 19 nt, Artificial Sequence
  Description of Artificial Sequence: Synthetic oligonucleotide
  Sense strand starting at position 3696 of SEQ ID NO: 1242730
guauguucacaguguuaug

SEQ ID NO: 1368793 - RNA, 19 nt, Artificial Sequence
  Description of Artificial Sequence: Synthetic oligonucleotide
  Antisense strand to SEQ ID NO: 1368792
cauaacacugugaacauac

SEQ ID NO: 1368794 - RNA, 19 nt, Artificial Sequence
  Description of Artificial Sequence: Synthetic oligonucleotide
  Sense strand starting at position 3707 of SEQ ID NO: 1242730
guguuaugcagccaugaau

SEQ ID NO: 1368795 - RNA, 19 nt, Artificial Sequence
  Description of Artificial Sequence: Synthetic oligonucleotide
  Antisense strand to SEQ ID NO: 1368794
auucauggcugcauaacac

SEQ ID NO: 1368796 - RNA, 19 nt, Artificial Sequence
  Description of Artificial Sequence: Synthetic oligonucleotide
  Sense strand starting at position 3817 of SEQ ID NO: 1242730
ccauaaaugugcuuucugu

SEQ ID NO: 1368797 - RNA, 19 nt, Artificial Sequence
  Description of Artificial Sequence: Synthetic oligonucleotide
  Antisense strand to SEQ ID NO: 1368796
acagaaagcacauuuaugg

SEQ ID NO: 1368798 - RNA, 19 nt, Artificial Sequence
  Description of Artificial Sequence: Synthetic oligonucleotide
  Sense strand starting at position 92 of SEQ ID NO: 1242731
gcccauaacugagucaagu

SEQ ID NO: 1368799 - RNA, 19 nt, Artificial Sequence
  Description of Artificial Sequence: Synthetic oligonucleotide
  Antisense strand to SEQ ID NO: 1368798
acuugacucaguuaugggc

SEQ ID NO: 1368800 - RNA, 19 nt, Artificial Sequence
  Description of Artificial Sequence: Synthetic oligonucleotide
  Sense strand starting at position 154 of SEQ ID NO: 1242731
ugggcucucuuuguacaga

SEQ ID NO: 1368801 - RNA, 19 nt, Artificial Sequence
  Description of Artificial Sequence: Synthetic oligonucleotide
  Antisense strand to SEQ ID NO: 1368800
ucuguacaaagagagccca

SEQ ID NO: 1368802 - RNA, 19 nt, Artificial Sequence
  Description of Artificial Sequence: Synthetic oligonucleotide
  Sense strand starting at position 170 of SEQ ID NO: 1242731
agaugcaauuuacaguuua

SEQ ID NO: 1368803 - RNA, 19 nt, Artificial Sequence
  Description of Artificial Sequence: Synthetic oligonucleotide
  Antisense strand to SEQ ID NO: 1368802
uaaacuguaaauugcaucu

SEQ ID NO: 1368804 - RNA, 19 nt, Artificial Sequence
  Description of Artificial Sequence: Synthetic oligonucleotide
  Sense strand starting at position 193 of SEQ ID NO: 1242731
gcuuuauuccauugugaaa

SEQ ID NO: 1368805 - RNA, 19 nt, Artificial Sequence
  Description of Artificial Sequence: Synthetic oligonucleotide
  Antisense strand to SEQ ID NO: 1368804
uuucacaauggaauaaagc

SEQ ID NO: 1368806 - RNA, 19 nt, Artificial Sequence
  Description of Artificial Sequence: Synthetic oligonucleotide
  Sense strand starting at position 285 of SEQ ID NO: 1242731
cuagcuuguggauagaauc

SEQ ID NO: 1368807 - RNA, 19 nt, Artificial Sequence
  Description of Artificial Sequence: Synthetic oligonucleotide
  Antisense strand to SEQ ID NO: 1368806
gauucuauccacaagcuag

SEQ ID NO: 1368808 - RNA, 19 nt, Artificial Sequence
  Description of Artificial Sequence: Synthetic oligonucleotide
  Sense strand starting at position 296 of SEQ ID NO: 1242731
auagaaucaucugaaagag

SEQ ID NO: 1368809 - RNA, 19 nt, Artificial Sequence
  Description of Artificial Sequence: Synthetic oligonucleotide
  Antisense strand to SEQ ID NO: 1368808
cucuuucagaugauucuau

SEQ ID NO: 1368810 - RNA, 19 nt, Artificial Sequence
  Description of Artificial Sequence: Synthetic oligonucleotide
  Sense strand starting at position 483 of SEQ ID NO: 1242731
uuauguggcccucauaaag

SEQ ID NO: 1368811 - RNA, 19 nt, Artificial Sequence
  Description of Artificial Sequence: Synthetic oligonucleotide
  Antisense strand to SEQ ID NO: 1368810
cuuuaugagggccacauaa

SEQ ID NO: 1368812 - RNA, 19 nt, Artificial Sequence
  Description of Artificial Sequence: Synthetic oligonucleotide
  Sense strand starting at position 501 of SEQ ID NO: 1242731
gagcucucauguguggaua

SEQ ID NO: 1368813 - RNA, 19 nt, Artificial Sequence
  Description of Artificial Sequence: Synthetic oligonucleotide
  Antisense strand to SEQ ID NO: 1368812
uauccacacaugagagcuc

SEQ ID NO: 1368814 - RNA, 19 nt, Artificial Sequence
  Description of Artificial Sequence: Synthetic oligonucleotide
  Sense strand starting at position 502 of SEQ ID NO: 1242731
agcucucauguguggauaa

SEQ ID NO: 1368815 - RNA, 19 nt, Artificial Sequence
  Description of Artificial Sequence: Synthetic oligonucleotide
  Antisense strand to SEQ ID NO: 1368814
uuauccacacaugagagcu

SEQ ID NO: 1368816 - RNA, 19 nt, Artificial Sequence
  Description of Artificial Sequence: Synthetic oligonucleotide
  Sense strand starting at position 642 of SEQ ID NO: 1242731
gccauucucccagagagca

SEQ ID NO: 1368817 - RNA, 19 nt, Artificial Sequence
  Description of Artificial Sequence: Synthetic oligonucleotide
  Antisense strand to SEQ ID NO: 1368816
ugcucucugggagaauggc

SEQ ID NO: 1368818 - RNA, 19 nt, Artificial Sequence
  Description of Artificial Sequence: Synthetic oligonucleotide
  Sense strand starting at position 728 of SEQ ID NO: 1242731
agcugauugccugggaauu

SEQ ID NO: 1368819 - RNA, 19 nt, Artificial Sequence
  Description of Artificial Sequence: Synthetic oligonucleotide
  Antisense strand to SEQ ID NO: 1368818
aauucccaggcaaucagcu

SEQ ID NO: 1368820 - RNA, 19 nt, Artificial Sequence
  Description of Artificial Sequence: Synthetic oligonucleotide
  Sense strand starting at position 729 of SEQ ID NO: 1242731
gcugauugccugggaauuu

SEQ ID NO: 1368821 - RNA, 19 nt, Artificial Sequence
  Description of Artificial Sequence: Synthetic oligonucleotide
  Antisense strand to SEQ ID NO: 1368820
aaauucccaggcaaucagc

SEQ ID NO: 1368822 - RNA, 19 nt, Artificial Sequence
  Description of Artificial Sequence: Synthetic oligonucleotide
  Sense strand starting at position 746 of SEQ ID NO: 1242731
uugcaugaagaacgaaaua

SEQ ID NO: 1368823 - RNA, 19 nt, Artificial Sequence
  Description of Artificial Sequence: Synthetic oligonucleotide
  Antisense strand to SEQ ID NO: 1368822
uauuucguucuucaugcaa

SEQ ID NO: 1368824 - RNA, 19 nt, Artificial Sequence
  Description of Artificial Sequence: Synthetic oligonucleotide
  Sense strand starting at position 863 of SEQ ID NO: 1242731
ucuaguggaugccugaaua

SEQ ID NO: 1368825 - RNA, 19 nt, Artificial Sequence
  Description of Artificial Sequence: Synthetic oligonucleotide
  Antisense strand to SEQ ID NO: 1368824
uauucaggcauccacuaga

SEQ ID NO: 1368826 - RNA, 19 nt, Artificial Sequence
  Description of Artificial Sequence: Synthetic oligonucleotide
  Sense strand starting at position 899 of SEQ ID NO: 1242731
uggcucugaguuuauuaau

SEQ ID NO: 1368827 - RNA, 19 nt, Artificial Sequence
  Description of Artificial Sequence: Synthetic oligonucleotide
  Antisense strand to SEQ ID NO: 1368826
auuaauaaacucagagcca

SEQ ID NO: 1368828 - RNA, 19 nt, Artificial Sequence
  Description of Artificial Sequence: Synthetic oligonucleotide
  Sense strand starting at position 1036 of SEQ ID NO: 1242731
ucugacuuauuugggauca

SEQ ID NO: 1368829 - RNA, 19 nt, Artificial Sequence
  Description of Artificial Sequence: Synthetic oligonucleotide
  Antisense strand to SEQ ID NO: 1368828
ugaucccaaauaagucaga

SEQ ID NO: 1368830 - RNA, 19 nt, Artificial Sequence
  Description of Artificial Sequence: Synthetic oligonucleotide
  Sense strand starting at position 1038 of SEQ ID NO: 1242731
ugacuuauuugggaucagu

SEQ ID NO: 1368831 - RNA, 19 nt, Artificial Sequence
  Description of Artificial Sequence: Synthetic oligonucleotide
  Antisense strand to SEQ ID NO: 1368830
acugaucccaaauaaguca

SEQ ID NO: 1368832 - RNA, 19 nt, Artificial Sequence
  Description of Artificial Sequence: Synthetic oligonucleotide
  Sense strand starting at position 1066 of SEQ ID NO: 1242731
ggagcaaaugaaugcaauu

SEQ ID NO: 1368833 - RNA, 19 nt, Artificial Sequence
  Description of Artificial Sequence: Synthetic oligonucleotide
  Antisense strand to SEQ ID NO: 1368832
aauugcauucauuugcucc

SEQ ID NO: 1368834 - RNA, 19 nt, Artificial Sequence
  Description of Artificial Sequence: Synthetic oligonucleotide
  Sense strand starting at position 1095 of SEQ ID NO: 1242731
uggcuuggccggagucuuu

SEQ ID NO: 1368835 - RNA, 19 nt, Artificial Sequence
  Description of Artificial Sequence: Synthetic oligonucleotide
  Antisense strand to SEQ ID NO: 1368834
aaagacuccggccaagcca

SEQ ID NO: 1368836 - RNA, 19 nt, Artificial Sequence
  Description of Artificial Sequence: Synthetic oligonucleotide
  Sense strand starting at position 1140 of SEQ ID NO: 1242731
gaacaaaggcucugugucu

SEQ ID NO: 1368837 - RNA, 19 nt, Artificial Sequence
  Description of Artificial Sequence: Synthetic oligonucleotide
  Antisense strand to SEQ ID NO: 1368836
agacacagagccuuuguuc

SEQ ID NO: 1368838 - RNA, 19 nt, Artificial Sequence
  Description of Artificial Sequence: Synthetic oligonucleotide
  Sense strand starting at position 1204 of SEQ ID NO: 1242731
uuuggaauucgugaauagc

SEQ ID NO: 1368839 - RNA, 19 nt, Artificial Sequence
  Description of Artificial Sequence: Synthetic oligonucleotide
  Antisense strand to SEQ ID NO: 1368838
gcuauucacgaauuccaaa

SEQ ID NO: 1368840 - RNA, 19 nt, Artificial Sequence
  Description of Artificial Sequence: Synthetic oligonucleotide
  Sense strand starting at position 2093 of SEQ ID NO: 1242731
cguuucguuccgccuguaa

SEQ ID NO: 1368841 - RNA, 19 nt, Artificial Sequence
  Description of Artificial Sequence: Synthetic oligonucleotide
  Antisense strand to SEQ ID NO: 1368840
uuacaggcggaacgaaacg

SEQ ID NO: 1368842 - RNA, 19 nt, Artificial Sequence
  Description of Artificial Sequence: Synthetic oligonucleotide
  Sense strand starting at position 2141 of SEQ ID NO: 1242731
agagcucaguugucaagga

SEQ ID NO: 1368843 - RNA, 19 nt, Artificial Sequence
  Description of Artificial Sequence: Synthetic oligonucleotide
  Antisense strand to SEQ ID NO: 1368842
uccuugacaacugagcucu

SEQ ID NO: 1368844 - RNA, 19 nt, Artificial Sequence
  Description of Artificial Sequence: Synthetic oligonucleotide
  Sense strand starting at position 2145 of SEQ ID NO: 1242731
cucaguugucaaggaacua

SEQ ID NO: 1368845 - RNA, 19 nt, Artificial Sequence
  Description of Artificial Sequence: Synthetic oligonucleotide
  Antisense strand to SEQ ID NO: 1368844
uaguuccuugacaacugag

SEQ ID NO: 1368846 - RNA, 19 nt, Artificial Sequence
  Description of Artificial Sequence: Synthetic oligonucleotide
  Sense strand starting at position 2171 of SEQ ID NO: 1242731
ugccgucgucccagagaug

SEQ ID NO: 1368847 - RNA, 19 nt, Artificial Sequence
  Description of Artificial Sequence: Synthetic oligonucleotide
  Antisense strand to SEQ ID NO: 1368846
caucucugggacgacggca

SEQ ID NO: 1368848 - RNA, 19 nt, Artificial Sequence
  Description of Artificial Sequence: Synthetic oligonucleotide
  Sense strand starting at position 2394 of SEQ ID NO: 1242731
caugcuugucggccaagua

SEQ ID NO: 1368849 - RNA, 19 nt, Artificial Sequence
  Description of Artificial Sequence: Synthetic oligonucleotide
  Antisense strand to SEQ ID NO: 1368848
uacuuggccgacaagcaug

SEQ ID NO: 1368850 - RNA, 19 nt, Artificial Sequence
  Description of Artificial Sequence: Synthetic oligonucleotide
  Sense strand starting at position 2445 of SEQ ID NO: 1242731
cagcacuaacugugauaag

SEQ ID NO: 1368851 - RNA, 19 nt, Artificial Sequence
  Description of Artificial Sequence: Synthetic oligonucleotide
  Antisense strand to SEQ ID NO: 1368850
cuuaucacaguuagugcug

SEQ ID NO: 1368852 - RNA, 19 nt, Artificial Sequence
  Description of Artificial Sequence: Synthetic oligonucleotide
  Sense strand starting at position 2456 of SEQ ID NO: 1242731
gugauaagcgccuaauaua

SEQ ID NO: 1368853 - RNA, 19 nt, Artificial Sequence
  Description of Artificial Sequence: Synthetic oligonucleotide
  Antisense strand to SEQ ID NO: 1368852
uauauuaggcgcuuaucac

SEQ ID NO: 1368854 - RNA, 19 nt, Artificial Sequence
  Description of Artificial Sequence: Synthetic oligonucleotide
  Sense strand starting at position 2689 of SEQ ID NO: 1242731
cgagacccuuccucuacaa

SEQ ID NO: 1368855 - RNA, 19 nt, Artificial Sequence
  Description of Artificial Sequence: Synthetic oligonucleotide
  Antisense strand to SEQ ID NO: 1368854
uuguagaggaagggucucg

SEQ ID NO: 1368856 - RNA, 19 nt, Artificial Sequence
  Description of Artificial Sequence: Synthetic oligonucleotide
  Sense strand starting at position 3628 of SEQ ID NO: 1242731
uugacauagucacugagca

SEQ ID NO: 1368857 - RNA, 19 nt, Artificial Sequence
  Description of Artificial Sequence: Synthetic oligonucleotide
  Antisense strand to SEQ ID NO: 1368856
ugcucagugacuaugucaa

SEQ ID NO: 1368858 - RNA, 19 nt, Artificial Sequence
  Description of Artificial Sequence: Synthetic oligonucleotide
  Sense strand starting at position 3629 of SEQ ID NO: 1242731
ugacauagucacugagcau

SEQ ID NO: 1368859 - RNA, 19 nt, Artificial Sequence
  Description of Artificial Sequence: Synthetic oligonucleotide
  Antisense strand to SEQ ID NO: 1368858
augcucagugacuauguca

SEQ ID NO: 1368860 - RNA, 19 nt, Artificial Sequence
  Description of Artificial Sequence: Synthetic oligonucleotide
  Sense strand starting at position 3685 of SEQ ID NO: 1242731
gggugguauggcugauaga

SEQ ID NO: 1368861 - RNA, 19 nt, Artificial Sequence
  Description of Artificial Sequence: Synthetic oligonucleotide
  Antisense strand to SEQ ID NO: 1368860
ucuaucagccauaccaccc

SEQ ID NO: 1368862 - RNA, 19 nt, Artificial Sequence
  Description of Artificial Sequence: Synthetic oligonucleotide
  Sense strand starting at position 3686 of SEQ ID NO: 1242731
ggugguauggcugauagaa

SEQ ID NO: 1368863 - RNA, 19 nt, Artificial Sequence
  Description of Artificial Sequence: Synthetic oligonucleotide
  Antisense strand to SEQ ID NO: 1368862
uucuaucagccauaccacc

SEQ ID NO: 1368864 - RNA, 19 nt, Artificial Sequence
  Description of Artificial Sequence: Synthetic oligonucleotide
  Sense strand starting at position 3706 of SEQ ID NO: 1242731
aggagucuguagcuaauau

SEQ ID NO: 1368865 - RNA, 19 nt, Artificial Sequence
  Description of Artificial Sequence: Synthetic oligonucleotide
  Antisense strand to SEQ ID NO: 1368864
auauuagcuacagacuccu

SEQ ID NO: 1368866 - RNA, 19 nt, Artificial Sequence
  Description of Artificial Sequence: Synthetic oligonucleotide
  Sense strand starting at position 3707 of SEQ ID NO: 1242731
ggagucuguagcuaauauc

SEQ ID NO: 1368867 - RNA, 19 nt, Artificial Sequence
  Description of Artificial Sequence: Synthetic oligonucleotide
  Antisense strand to SEQ ID NO: 1368866
gauauuagcuacagacucc

SEQ ID NO: 1368868 - RNA, 19 nt, Artificial Sequence
  Description of Artificial Sequence: Synthetic oligonucleotide
  Sense strand starting at position 3724 of SEQ ID NO: 1242731
ucaucauuauuagcaguuu

SEQ ID NO: 1368869 - RNA, 19 nt, Artificial Sequence
  Description of Artificial Sequence: Synthetic oligonucleotide
  Antisense strand to SEQ ID NO: 1368868
aaacugcuaauaaugauga

SEQ ID NO: 1368870 - RNA, 19 nt, Artificial Sequence
  Description of Artificial Sequence: Synthetic oligonucleotide
  Sense strand starting at position 3747 of SEQ ID NO: 1242731
ccauuauagcaguaaguug

SEQ ID NO: 1368871 - RNA, 19 nt, Artificial Sequence
  Description of Artificial Sequence: Synthetic oligonucleotide
  Antisense strand to SEQ ID NO: 1368870
caacuuacugcuauaaugg

SEQ ID NO: 1368872 - RNA, 19 nt, Artificial Sequence
  Description of Artificial Sequence: Synthetic oligonucleotide
  Sense strand starting at position 3886 of SEQ ID NO: 1242731
ugaaucuuauuacuguaga

SEQ ID NO: 1368873 - RNA, 19 nt, Artificial Sequence
  Description of Artificial Sequence: Synthetic oligonucleotide
  Antisense strand to SEQ ID NO: 1368872
ucuacaguaauaagauuca

SEQ ID NO: 1368874 - RNA, 19 nt, Artificial Sequence
  Description of Artificial Sequence: Synthetic oligonucleotide
  Sense strand starting at position 3938 of SEQ ID NO: 1242731
uuggaugauuucuggagag

SEQ ID NO: 1368875 - RNA, 19 nt, Artificial Sequence
  Description of Artificial Sequence: Synthetic oligonucleotide
  Antisense strand to SEQ ID NO: 1368874
cucuccagaaaucauccaa

SEQ ID NO: 1368876 - RNA, 19 nt, Artificial Sequence
  Description of Artificial Sequence: Synthetic oligonucleotide
  Sense strand starting at position 3974 of SEQ ID NO: 1242731
ugaacaauguauccuuuga

SEQ ID NO: 1368877 - RNA, 19 nt, Artificial Sequence
  Description of Artificial Sequence: Synthetic oligonucleotide
  Antisense strand to SEQ ID NO: 1368876
ucaaaggauacauuguuca

SEQ ID NO: 1368878 - RNA, 19 nt, Artificial Sequence
  Description of Artificial Sequence: Synthetic oligonucleotide
  Sense strand starting at position 300 of SEQ ID NO: 1242732
ccuacuauacauggguuaa

SEQ ID NO: 1368879 - RNA, 19 nt, Artificial Sequence
  Description of Artificial Sequence: Synthetic oligonucleotide
  Antisense strand to SEQ ID NO: 1368878
uuaacccauguauaguagg

SEQ ID NO: 1368880 - RNA, 19 nt, Artificial Sequence
  Description of Artificial Sequence: Synthetic oligonucleotide
  Sense strand starting at position 360 of SEQ ID NO: 1242732
gaaagaaguuucuccugag

SEQ ID NO: 1368881 - RNA, 19 nt, Artificial Sequence
  Description of Artificial Sequence: Synthetic oligonucleotide
  Antisense strand to SEQ ID NO: 1368880
cucaggagaaacuucuuuc

SEQ ID NO: 1368882 - RNA, 19 nt, Artificial Sequence
  Description of Artificial Sequence: Synthetic oligonucleotide
  Sense strand starting at position 367 of SEQ ID NO: 1242732
guuucuccugaggaauauu

SEQ ID NO: 1368883 - RNA, 19 nt, Artificial Sequence
  Description of Artificial Sequence: Synthetic oligonucleotide
  Antisense strand to SEQ ID NO: 1368882
aauauuccucaggagaaac

SEQ ID NO: 1368884 - RNA, 19 nt, Artificial Sequence
  Description of Artificial Sequence: Synthetic oligonucleotide
  Sense strand starting at position 403 of SEQ ID NO: 1242732
gggugaugggacuggcuaa

SEQ ID NO: 1368885 - RNA, 19 nt, Artificial Sequence
  Description of Artificial Sequence: Synthetic oligonucleotide
  Antisense strand to SEQ ID NO: 1368884
uuagccagucccaucaccc

SEQ ID NO: 1368886 - RNA, 19 nt, Artificial Sequence
  Description of Artificial Sequence: Synthetic oligonucleotide
  Sense strand starting at position 1288 of SEQ ID NO: 1242732
aaagaaaguucugagagga

SEQ ID NO: 1368887 - RNA, 19 nt, Artificial Sequence
  Description of Artificial Sequence: Synthetic oligonucleotide
  Antisense strand to SEQ ID NO: 1368886
uccucucagaacuuucuuu

SEQ ID NO: 1368888 - RNA, 19 nt, Artificial Sequence
  Description of Artificial Sequence: Synthetic oligonucleotide
  Sense strand starting at position 1833 of SEQ ID NO: 1242732
uagagaagucuucggaguc

SEQ ID NO: 1368889 - RNA, 19 nt, Artificial Sequence
  Description of Artificial Sequence: Synthetic oligonucleotide
  Antisense strand to SEQ ID NO: 1368888
gacuccgaagacuucucua

SEQ ID NO: 1368890 - RNA, 19 nt, Artificial Sequence
  Description of Artificial Sequence: Synthetic oligonucleotide
  Sense strand starting at position 1849 of SEQ ID NO: 1242732
gucgaauuccuccauguug

SEQ ID NO: 1368891 - RNA, 19 nt, Artificial Sequence
  Description of Artificial Sequence: Synthetic oligonucleotide
  Antisense strand to SEQ ID NO: 1368890
caacauggaggaauucgac

SEQ ID NO: 1368892 - RNA, 19 nt, Artificial Sequence
  Description of Artificial Sequence: Synthetic oligonucleotide
  Sense strand starting at position 2002 of SEQ ID NO: 1242732
cagagaguacuacgugguu

SEQ ID NO: 1368893 - RNA, 19 nt, Artificial Sequence
  Description of Artificial Sequence: Synthetic oligonucleotide
  Antisense strand to SEQ ID NO: 1368892
aaccacguaguacucucug

SEQ ID NO: 1368894 - RNA, 19 nt, Artificial Sequence
  Description of Artificial Sequence: Synthetic oligonucleotide
  Sense strand starting at position 2130 of SEQ ID NO: 1242732
cugccucgccgccuuaaua

SEQ ID NO: 1368895 - RNA, 19 nt, Artificial Sequence
  Description of Artificial Sequence: Synthetic oligonucleotide
  Antisense strand to SEQ ID NO: 1368894
uauuaaggcggcgaggcag

SEQ ID NO: 1368896 - RNA, 19 nt, Artificial Sequence
  Description of Artificial Sequence: Synthetic oligonucleotide
  Sense strand starting at position 2131 of SEQ ID NO: 1242732
ugccucgccgccuuaauau

SEQ ID NO: 1368897 - RNA, 19 nt, Artificial Sequence
  Description of Artificial Sequence: Synthetic oligonucleotide
  Antisense strand to SEQ ID NO: 1368896
auauuaaggcggcgaggca

SEQ ID NO: 1368898 - RNA, 19 nt, Artificial Sequence
  Description of Artificial Sequence: Synthetic oligonucleotide
  Sense strand starting at position 2510 of SEQ ID NO: 1242732
caguguuccuaagcgaaag

SEQ ID NO: 1368899 - RNA, 19 nt, Artificial Sequence
  Description of Artificial Sequence: Synthetic oligonucleotide
  Antisense strand to SEQ ID NO: 1368898
cuuucgcuuaggaacacug

SEQ ID NO: 1368900 - RNA, 19 nt, Artificial Sequence
  Description of Artificial Sequence: Synthetic oligonucleotide
  Sense strand starting at position 2511 of SEQ ID NO: 1242732
aguguuccuaagcgaaaga

SEQ ID NO: 1368901 - RNA, 19 nt, Artificial Sequence
  Description of Artificial Sequence: Synthetic oligonucleotide
  Antisense strand to SEQ ID NO: 1368900
ucuuucgcuuaggaacacu

SEQ ID NO: 1368902 - RNA, 19 nt, Artificial Sequence
  Description of Artificial Sequence: Synthetic oligonucleotide
  Sense strand starting at position 2512 of SEQ ID NO: 1242732
guguuccuaagcgaaagaa

SEQ ID NO: 1368903 - RNA, 19 nt, Artificial Sequence
  Description of Artificial Sequence: Synthetic oligonucleotide
  Antisense strand to SEQ ID NO: 1368902
uucuuucgcuuaggaacac

SEQ ID NO: 1368904 - RNA, 19 nt, Artificial Sequence
  Description of Artificial Sequence: Synthetic oligonucleotide
  Sense strand starting at position 2524 of SEQ ID NO: 1242732
gaaagaagaccgugaugug

SEQ ID NO: 1368905 - RNA, 19 nt, Artificial Sequence
  Description of Artificial Sequence: Synthetic oligonucleotide
  Antisense strand to SEQ ID NO: 1368904
cacaucacggucuucuuuc

SEQ ID NO: 1368906 - RNA, 19 nt, Artificial Sequence
  Description of Artificial Sequence: Synthetic oligonucleotide
  Sense strand starting at position 2552 of SEQ ID NO: 1242732
gaaaguccgcguguuggau

SEQ ID NO: 1368907 - RNA, 19 nt, Artificial Sequence
  Description of Artificial Sequence: Synthetic oligonucleotide
  Antisense strand to SEQ ID NO: 1368906
auccaacacgcggacuuuc

SEQ ID NO: 1368908 - RNA, 19 nt, Artificial Sequence
  Description of Artificial Sequence: Synthetic oligonucleotide
  Sense strand starting at position 2573 of SEQ ID NO: 1242732
gcuccaaucaggcaugagu

SEQ ID NO: 1368909 - RNA, 19 nt, Artificial Sequence
  Description of Artificial Sequence: Synthetic oligonucleotide
  Antisense strand to SEQ ID NO: 1368908
acucaugccugauuggagc

SEQ ID NO: 1368910 - RNA, 19 nt, Artificial Sequence
  Description of Artificial Sequence: Synthetic oligonucleotide
  Sense strand starting at position 2575 of SEQ ID NO: 1242732
uccaaucaggcaugaguua

SEQ ID NO: 1368911 - RNA, 19 nt, Artificial Sequence
  Description of Artificial Sequence: Synthetic oligonucleotide
  Antisense strand to SEQ ID NO: 1368910
uaacucaugccugauugga

SEQ ID NO: 1368912 - RNA, 19 nt, Artificial Sequence
  Description of Artificial Sequence: Synthetic oligonucleotide
  Sense strand starting at position 2606 of SEQ ID NO: 1242732
ccaugagcucaauguuaac

SEQ ID NO: 1368913 - RNA, 19 nt, Artificial Sequence
  Description of Artificial Sequence: Synthetic oligonucleotide
  Antisense strand to SEQ ID NO: 1368912
guuaacauugagcucaugg

SEQ ID NO: 1368914 - RNA, 19 nt, Artificial Sequence
  Description of Artificial Sequence: Synthetic oligonucleotide
  Sense strand starting at position 2617 of SEQ ID NO: 1242732
auguuaacgagucgacaau

SEQ ID NO: 1368915 - RNA, 19 nt, Artificial Sequence
  Description of Artificial Sequence: Synthetic oligonucleotide
  Antisense strand to SEQ ID NO: 1368914
auugucgacucguuaacau

SEQ ID NO: 1368916 - RNA, 19 nt, Artificial Sequence
  Description of Artificial Sequence: Synthetic oligonucleotide
  Sense strand starting at position 2628 of SEQ ID NO: 1242732
ucgacaauccgguacauca

SEQ ID NO: 1368917 - RNA, 19 nt, Artificial Sequence
  Description of Artificial Sequence: Synthetic oligonucleotide
  Antisense strand to SEQ ID NO: 1368916
ugauguaccggauugucga

SEQ ID NO: 1368918 - RNA, 19 nt, Artificial Sequence
  Description of Artificial Sequence: Synthetic oligonucleotide
  Sense strand starting at position 2691 of SEQ ID NO: 1242732
ccggauagugcugaaguga

SEQ ID NO: 1368919 - RNA, 19 nt, Artificial Sequence
  Description of Artificial Sequence: Synthetic oligonucleotide
  Antisense strand to SEQ ID NO: 1368918
ucacuucagcacuauccgg

SEQ ID NO: 1368920 - RNA, 19 nt, Artificial Sequence
  Description of Artificial Sequence: Synthetic oligonucleotide
  Sense strand starting at position 2720 of SEQ ID NO: 1242732
gcgugaugaagcuaugaca

SEQ ID NO: 1368921 - RNA, 19 nt, Artificial Sequence
  Description of Artificial Sequence: Synthetic oligonucleotide
  Antisense strand to SEQ ID NO: 1368920
ugucauagcuucaucacgc

SEQ ID NO: 1368922 - RNA, 19 nt, Artificial Sequence
  Description of Artificial Sequence: Synthetic oligonucleotide
  Sense strand starting at position 2759 of SEQ ID NO: 1242732
gcggcuaaauuuguggauu

SEQ ID NO: 1368923 - RNA, 19 nt, Artificial Sequence
  Description of Artificial Sequence: Synthetic oligonucleotide
  Antisense strand to SEQ ID NO: 1368922
aauccacaaauuuagccgc

SEQ ID NO: 1368924 - RNA, 19 nt, Artificial Sequence
  Description of Artificial Sequence: Synthetic oligonucleotide
  Sense strand starting at position 2780 of SEQ ID NO: 1242732
ugagaugucaaucgauuaa

SEQ ID NO: 1368925 - RNA, 19 nt, Artificial Sequence
  Description of Artificial Sequence: Synthetic oligonucleotide
  Antisense strand to SEQ ID NO: 1368924
uuaaucgauugacaucuca

SEQ ID NO: 1368926 - RNA, 19 nt, Artificial Sequence
  Description of Artificial Sequence: Synthetic oligonucleotide
  Sense strand starting at position 2836 of SEQ ID NO: 1242732
gccaaagauaucugugguc

SEQ ID NO: 1368927 - RNA, 19 nt, Artificial Sequence
  Description of Artificial Sequence: Synthetic oligonucleotide
  Antisense strand to SEQ ID NO: 1368926
gaccacagauaucuuuggc

SEQ ID NO: 1368928 - RNA, 19 nt, Artificial Sequence
  Description of Artificial Sequence: Synthetic oligonucleotide
  Sense strand starting at position 2838 of SEQ ID NO: 1242732
caaagauaucuguggucac

SEQ ID NO: 1368929 - RNA, 19 nt, Artificial Sequence
  Description of Artificial Sequence: Synthetic oligonucleotide
  Antisense strand to SEQ ID NO: 1368928
gugaccacagauaucuuug

SEQ ID NO: 1368930 - RNA, 19 nt, Artificial Sequence
  Description of Artificial Sequence: Synthetic oligonucleotide
  Sense strand starting at position 2842 of SEQ ID NO: 1242732
gauaucuguggucacguua

SEQ ID NO: 1368931 - RNA, 19 nt, Artificial Sequence
  Description of Artificial Sequence: Synthetic oligonucleotide
  Antisense strand to SEQ ID NO: 1368930
uaacgugaccacagauauc

SEQ ID NO: 1368932 - RNA, 19 nt, Artificial Sequence
  Description of Artificial Sequence: Synthetic oligonucleotide
  Sense strand starting at position 2853 of SEQ ID NO: 1242732
ucacguuacccagagucaa

SEQ ID NO: 1368933 - RNA, 19 nt, Artificial Sequence
  Description of Artificial Sequence: Synthetic oligonucleotide
  Antisense strand to SEQ ID NO: 1368932
uugacucuggguaacguga

SEQ ID NO: 1368934 - RNA, 19 nt, Artificial Sequence
  Description of Artificial Sequence: Synthetic oligonucleotide
  Sense strand starting at position 3058 of SEQ ID NO: 1242732
gcggaugagacuggcuuau

SEQ ID NO: 1368935 - RNA, 19 nt, Artificial Sequence
  Description of Artificial Sequence: Synthetic oligonucleotide
  Antisense strand to SEQ ID NO: 1368934
auaagccagucucauccgc

SEQ ID NO: 1368936 - RNA, 19 nt, Artificial Sequence
  Description of Artificial Sequence: Synthetic oligonucleotide
  Sense strand starting at position 3244 of SEQ ID NO: 1242732
acgggaaauacgugaacca

SEQ ID NO: 1368937 - RNA, 19 nt, Artificial Sequence
  Description of Artificial Sequence: Synthetic oligonucleotide
  Antisense strand to SEQ ID NO: 1368936
ugguucacguauuucccgu

SEQ ID NO: 1368938 - RNA, 19 nt, Artificial Sequence
  Description of Artificial Sequence: Synthetic oligonucleotide
  Sense strand starting at position 3245 of SEQ ID NO: 1242732
cgggaaauacgugaaccau

SEQ ID NO: 1368939 - RNA, 19 nt, Artificial Sequence
  Description of Artificial Sequence: Synthetic oligonucleotide
  Antisense strand to SEQ ID NO: 1368938
augguucacguauuucccg

SEQ ID NO: 1368940 - RNA, 19 nt, Artificial Sequence
  Description of Artificial Sequence: Synthetic oligonucleotide
  Sense strand starting at position 3268 of SEQ ID NO: 1242732
cagucuauuggagguggaa

SEQ ID NO: 1368941 - RNA, 19 nt, Artificial Sequence
  Description of Artificial Sequence: Synthetic oligonucleotide
  Antisense strand to SEQ ID NO: 1368940
uuccaccuccaauagacug

SEQ ID NO: 1368942 - RNA, 19 nt, Artificial Sequence
  Description of Artificial Sequence: Synthetic oligonucleotide
  Sense strand starting at position 3270 of SEQ ID NO: 1242732
gucuauuggagguggaaca

SEQ ID NO: 1368943 - RNA, 19 nt, Artificial Sequence
  Description of Artificial Sequence: Synthetic oligonucleotide
  Antisense strand to SEQ ID NO: 1368942
uguuccaccuccaauagac

SEQ ID NO: 1368944 - RNA, 19 nt, Artificial Sequence
  Description of Artificial Sequence: Synthetic oligonucleotide
  Sense strand starting at position 3295 of SEQ ID NO: 1242732
uguggaugaugucugauug

SEQ ID NO: 1368945 - RNA, 19 nt, Artificial Sequence
  Description of Artificial Sequence: Synthetic oligonucleotide
  Antisense strand to SEQ ID NO: 1368944
caaucagacaucauccaca

SEQ ID NO: 1368946 - RNA, 19 nt, Artificial Sequence
  Description of Artificial Sequence: Synthetic oligonucleotide
  Sense strand starting at position 3299 of SEQ ID NO: 1242732
gaugaugucugauugguuc

SEQ ID NO: 1368947 - RNA, 19 nt, Artificial Sequence
  Description of Artificial Sequence: Synthetic oligonucleotide
  Antisense strand to SEQ ID NO: 1368946
gaaccaaucagacaucauc

SEQ ID NO: 1368948 - RNA, 19 nt, Artificial Sequence
  Description of Artificial Sequence: Synthetic oligonucleotide
  Sense strand starting at position 3301 of SEQ ID NO: 1242732
ugaugucugauugguucca

SEQ ID NO: 1368949 - RNA, 19 nt, Artificial Sequence
  Description of Artificial Sequence: Synthetic oligonucleotide
  Antisense strand to SEQ ID NO: 1368948
uggaaccaaucagacauca

SEQ ID NO: 1368950 - RNA, 19 nt, Artificial Sequence
  Description of Artificial Sequence: Synthetic oligonucleotide
  Sense strand starting at position 3303 of SEQ ID NO: 1242732
augucugauugguuccaca

SEQ ID NO: 1368951 - RNA, 19 nt, Artificial Sequence
  Description of Artificial Sequence: Synthetic oligonucleotide
  Antisense strand to SEQ ID NO: 1368950
uguggaaccaaucagacau

SEQ ID NO: 1368952 - RNA, 19 nt, Artificial Sequence
  Description of Artificial Sequence: Synthetic oligonucleotide
  Sense strand starting at position 3970 of SEQ ID NO: 1242732
caugcaacguuauugauua

SEQ ID NO: 1368953 - RNA, 19 nt, Artificial Sequence
  Description of Artificial Sequence: Synthetic oligonucleotide
  Antisense strand to SEQ ID NO: 1368952
uaaucaauaacguugcaug

SEQ ID NO: 1368954 - RNA, 19 nt, Artificial Sequence
  Description of Artificial Sequence: Synthetic oligonucleotide
  Sense strand starting at position 3975 of SEQ ID NO: 1242732
aacguuauugauuauguca

SEQ ID NO: 1368955 - RNA, 19 nt, Artificial Sequence
  Description of Artificial Sequence: Synthetic oligonucleotide
  Antisense strand to SEQ ID NO: 1368954
ugacauaaucaauaacguu

SEQ ID NO: 1368956 - RNA, 19 nt, Artificial Sequence
  Description of Artificial Sequence: Synthetic oligonucleotide
  Sense strand starting at position 3978 of SEQ ID NO: 1242732
guuauugauuaugucagua

SEQ ID NO: 1368957 - RNA, 19 nt, Artificial Sequence
  Description of Artificial Sequence: Synthetic oligonucleotide
  Antisense strand to SEQ ID NO: 1368956
uacugacauaaucaauaac

SEQ ID NO: 1368958 - RNA, 19 nt, Artificial Sequence
  Description of Artificial Sequence: Synthetic oligonucleotide
  Sense strand starting at position 73 of SEQ ID NO: 1242733
ugcacaggcugaucugaaa

SEQ ID NO: 1368959 - RNA, 19 nt, Artificial Sequence
  Description of Artificial Sequence: Synthetic oligonucleotide
  Antisense strand to SEQ ID NO: 1368958
uuucagaucagccugugca

SEQ ID NO: 1368960 - RNA, 19 nt, Artificial Sequence
  Description of Artificial Sequence: Synthetic oligonucleotide
  Sense strand starting at position 284 of SEQ ID NO: 1242733
guaggcucucaauaauaaa

SEQ ID NO: 1368961 - RNA, 19 nt, Artificial Sequence
  Description of Artificial Sequence: Synthetic oligonucleotide
  Antisense strand to SEQ ID NO: 1368960
uuuauuauugagagccuac

SEQ ID NO: 1368962 - RNA, 19 nt, Artificial Sequence
  Description of Artificial Sequence: Synthetic oligonucleotide
  Sense strand starting at position 487 of SEQ ID NO: 1242733
gggacaugcuucuuauuaa

SEQ ID NO: 1368963 - RNA, 19 nt, Artificial Sequence
  Description of Artificial Sequence: Synthetic oligonucleotide
  Antisense strand to SEQ ID NO: 1368962
uuaauaagaagcauguccc

SEQ ID NO: 1368964 - RNA, 19 nt, Artificial Sequence
  Description of Artificial Sequence: Synthetic oligonucleotide
  Sense strand starting at position 509 of SEQ ID NO: 1242733
auuauauaacuucgagcaa

SEQ ID NO: 1368965 - RNA, 19 nt, Artificial Sequence
  Description of Artificial Sequence: Synthetic oligonucleotide
  Antisense strand to SEQ ID NO: 1368964
uugcucgaaguuauauaau

SEQ ID NO: 1368966 - RNA, 19 nt, Artificial Sequence
  Description of Artificial Sequence: Synthetic oligonucleotide
  Sense strand starting at position 551 of SEQ ID NO: 1242733
aguuuccuuggcuaucaaa

SEQ ID NO: 1368967 - RNA, 19 nt, Artificial Sequence
  Description of Artificial Sequence: Synthetic oligonucleotide
  Antisense strand to SEQ ID NO: 1368966
uuugauagccaaggaaacu

SEQ ID NO: 1368968 - RNA, 19 nt, Artificial Sequence
  Description of Artificial Sequence: Synthetic oligonucleotide
  Sense strand starting at position 582 of SEQ ID NO: 1242733
aguucuaccguggaaguua

SEQ ID NO: 1368969 - RNA, 19 nt, Artificial Sequence
  Description of Artificial Sequence: Synthetic oligonucleotide
  Antisense strand to SEQ ID NO: 1368968
uaacuuccacgguagaacu

SEQ ID NO: 1368970 - RNA, 19 nt, Artificial Sequence
  Description of Artificial Sequence: Synthetic oligonucleotide
  Sense strand starting at position 593 of SEQ ID NO: 1242733
ggaaguuauggucaggagu

SEQ ID NO: 1368971 - RNA, 19 nt, Artificial Sequence
  Description of Artificial Sequence: Synthetic oligonucleotide
  Antisense strand to SEQ ID NO: 1368970
acuccugaccauaacuucc

SEQ ID NO: 1368972 - RNA, 19 nt, Artificial Sequence
  Description of Artificial Sequence: Synthetic oligonucleotide
  Sense strand starting at position 596 of SEQ ID NO: 1242733
aguuauggucaggagucua

SEQ ID NO: 1368973 - RNA, 19 nt, Artificial Sequence
  Description of Artificial Sequence: Synthetic oligonucleotide
  Antisense strand to SEQ ID NO: 1368972
uagacuccugaccauaacu

SEQ ID NO: 1368974 - RNA, 19 nt, Artificial Sequence
  Description of Artificial Sequence: Synthetic oligonucleotide
  Sense strand starting at position 627 of SEQ ID NO: 1242733
acagaaagccucuagcaua

SEQ ID NO: 1368975 - RNA, 19 nt, Artificial Sequence
  Description of Artificial Sequence: Synthetic oligonucleotide
  Antisense strand to SEQ ID NO: 1368974
uaugcuagaggcuuucugu

SEQ ID NO: 1368976 - RNA, 19 nt, Artificial Sequence
  Description of Artificial Sequence: Synthetic oligonucleotide
  Sense strand starting at position 647 of SEQ ID NO: 1242733
ggugaacccuuaguaaaca

SEQ ID NO: 1368977 - RNA, 19 nt, Artificial Sequence
  Description of Artificial Sequence: Synthetic oligonucleotide
  Antisense strand to SEQ ID NO: 1368976
uguuuacuaaggguucacc

SEQ ID NO: 1368978 - RNA, 19 nt, Artificial Sequence
  Description of Artificial Sequence: Synthetic oligonucleotide
  Sense strand starting at position 740 of SEQ ID NO: 1242733
gaggaugguucagugaguu

SEQ ID NO: 1368979 - RNA, 19 nt, Artificial Sequence
  Description of Artificial Sequence: Synthetic oligonucleotide
  Antisense strand to SEQ ID NO: 1368978
aacucacugaaccauccuc

SEQ ID NO: 1368980 - RNA, 19 nt, Artificial Sequence
  Description of Artificial Sequence: Synthetic oligonucleotide
  Sense strand starting at position 792 of SEQ ID NO: 1242733
gggaaucuaugcccauguu

SEQ ID NO: 1368981 - RNA, 19 nt, Artificial Sequence
  Description of Artificial Sequence: Synthetic oligonucleotide
  Antisense strand to SEQ ID NO: 1368980
aacaugggcauagauuccc

SEQ ID NO: 1368982 - RNA, 19 nt, Artificial Sequence
  Description of Artificial Sequence: Synthetic oligonucleotide
  Sense strand starting at position 793 of SEQ ID NO: 1242733
ggaaucuaugcccauguua

SEQ ID NO: 1368983 - RNA, 19 nt, Artificial Sequence
  Description of Artificial Sequence: Synthetic oligonucleotide
  Antisense strand to SEQ ID NO: 1368982
uaacaugggcauagauucc

SEQ ID NO: 1368984 - RNA, 19 nt, Artificial Sequence
  Description of Artificial Sequence: Synthetic oligonucleotide
  Sense strand starting at position 1102 of SEQ ID NO: 1242733
uccugaucuucucugggau

SEQ ID NO: 1368985 - RNA, 19 nt, Artificial Sequence
  Description of Artificial Sequence: Synthetic oligonucleotide
  Antisense strand to SEQ ID NO: 1368984
aucccagagaagaucagga

SEQ ID NO: 1368986 - RNA, 19 nt, Artificial Sequence
  Description of Artificial Sequence: Synthetic oligonucleotide
  Sense strand starting at position 1103 of SEQ ID NO: 1242733
ccugaucuucucugggauc

SEQ ID NO: 1368987 - RNA, 19 nt, Artificial Sequence
  Description of Artificial Sequence: Synthetic oligonucleotide
  Antisense strand to SEQ ID NO: 1368986
gaucccagagaagaucagg

SEQ ID NO: 1368988 - RNA, 19 nt, Artificial Sequence
  Description of Artificial Sequence: Synthetic oligonucleotide
  Sense strand starting at position 1366 of SEQ ID NO: 1242733
agggaaucaucagcauucu

SEQ ID NO: 1368989 - RNA, 19 nt, Artificial Sequence
  Description of Artificial Sequence: Synthetic oligonucleotide
  Antisense strand to SEQ ID NO: 1368988
agaaugcugaugauucccu

SEQ ID NO: 1368990 - RNA, 19 nt, Artificial Sequence
  Description of Artificial Sequence: Synthetic oligonucleotide
  Sense strand starting at position 1374 of SEQ ID NO: 1242733
aucagcauucuggguuaga

SEQ ID NO: 1368991 - RNA, 19 nt, Artificial Sequence
  Description of Artificial Sequence: Synthetic oligonucleotide
  Antisense strand to SEQ ID NO: 1368990
ucuaacccagaaugcugau

SEQ ID NO: 1368992 - RNA, 19 nt, Artificial Sequence
  Description of Artificial Sequence: Synthetic oligonucleotide
  Sense strand starting at position 1375 of SEQ ID NO: 1242733
ucagcauucuggguuagaa

SEQ ID NO: 1368993 - RNA, 19 nt, Artificial Sequence
  Description of Artificial Sequence: Synthetic oligonucleotide
  Antisense strand to SEQ ID NO: 1368992
uucuaacccagaaugcuga

SEQ ID NO: 1368994 - RNA, 19 nt, Artificial Sequence
  Description of Artificial Sequence: Synthetic oligonucleotide
  Sense strand starting at position 1377 of SEQ ID NO: 1242733
agcauucuggguuagaaca

SEQ ID NO: 1368995 - RNA, 19 nt, Artificial Sequence
  Description of Artificial Sequence: Synthetic oligonucleotide
  Antisense strand to SEQ ID NO: 1368994
uguucuaacccagaaugcu

SEQ ID NO: 1368996 - RNA, 19 nt, Artificial Sequence
  Description of Artificial Sequence: Synthetic oligonucleotide
  Sense strand starting at position 1429 of SEQ ID NO: 1242733
gaucaaggguccucaaauu

SEQ ID NO: 1368997 - RNA, 19 nt, Artificial Sequence
  Description of Artificial Sequence: Synthetic oligonucleotide
  Antisense strand to SEQ ID NO: 1368996
aauuugaggacccuugauc

SEQ ID NO: 1368998 - RNA, 19 nt, Artificial Sequence
  Description of Artificial Sequence: Synthetic oligonucleotide
  Sense strand starting at position 1676 of SEQ ID NO: 1242733
cugcuuuccgcuucgagga

SEQ ID NO: 1368999 - RNA, 19 nt, Artificial Sequence
  Description of Artificial Sequence: Synthetic oligonucleotide
  Antisense strand to SEQ ID NO: 1368998
uccucgaagcggaaagcag

SEQ ID NO: 1369000 - RNA, 19 nt, Artificial Sequence
  Description of Artificial Sequence: Synthetic oligonucleotide
  Sense strand starting at position 1984 of SEQ ID NO: 1242733
cccggaauccugggacuca

SEQ ID NO: 1369001 - RNA, 19 nt, Artificial Sequence
  Description of Artificial Sequence: Synthetic oligonucleotide
  Antisense strand to SEQ ID NO: 1369000
ugagucccaggauuccggg

SEQ ID NO: 1369002 - RNA, 19 nt, Artificial Sequence
  Description of Artificial Sequence: Synthetic oligonucleotide
  Sense strand starting at position 2238 of SEQ ID NO: 1242733
ggaucuaaacuuggugaac

SEQ ID NO: 1369003 - RNA, 19 nt, Artificial Sequence
  Description of Artificial Sequence: Synthetic oligonucleotide
  Antisense strand to SEQ ID NO: 1369002
guucaccaaguuuagaucc

SEQ ID NO: 1369004 - RNA, 19 nt, Artificial Sequence
  Description of Artificial Sequence: Synthetic oligonucleotide
  Sense strand starting at position 2239 of SEQ ID NO: 1242733
gaucuaaacuuggugaacu

SEQ ID NO: 1369005 - RNA, 19 nt, Artificial Sequence
  Description of Artificial Sequence: Synthetic oligonucleotide
  Antisense strand to SEQ ID NO: 1369004
aguucaccaaguuuagauc

SEQ ID NO: 1369006 - RNA, 19 nt, Artificial Sequence
  Description of Artificial Sequence: Synthetic oligonucleotide
  Sense strand starting at position 2241 of SEQ ID NO: 1242733
ucuaaacuuggugaacuuu

SEQ ID NO: 1369007 - RNA, 19 nt, Artificial Sequence
  Description of Artificial Sequence: Synthetic oligonucleotide
  Antisense strand to SEQ ID NO: 1369006
aaaguucaccaaguuuaga

SEQ ID NO: 1369008 - RNA, 19 nt, Artificial Sequence
  Description of Artificial Sequence: Synthetic oligonucleotide
  Sense strand starting at position 2384 of SEQ ID NO: 1242733
uuaaaugugcugggaccau

SEQ ID NO: 1369009 - RNA, 19 nt, Artificial Sequence
  Description of Artificial Sequence: Synthetic oligonucleotide
  Antisense strand to SEQ ID NO: 1369008
auggucccagcacauuuaa

SEQ ID NO: 1369010 - RNA, 19 nt, Artificial Sequence
  Description of Artificial Sequence: Synthetic oligonucleotide
  Sense strand starting at position 2473 of SEQ ID NO: 1242733
cuaaaccgucccugaauga

SEQ ID NO: 1369011 - RNA, 19 nt, Artificial Sequence
  Description of Artificial Sequence: Synthetic oligonucleotide
  Antisense strand to SEQ ID NO: 1369010
ucauucagggacgguuuag

SEQ ID NO: 1369012 - RNA, 19 nt, Artificial Sequence
  Description of Artificial Sequence: Synthetic oligonucleotide
  Sense strand starting at position 2826 of SEQ ID NO: 1242733
uacaaauaugguggacauu

SEQ ID NO: 1369013 - RNA, 19 nt, Artificial Sequence
  Description of Artificial Sequence: Synthetic oligonucleotide
  Antisense strand to SEQ ID NO: 1369012
aauguccaccauauuugua

SEQ ID NO: 1369014 - RNA, 19 nt, Artificial Sequence
  Description of Artificial Sequence: Synthetic oligonucleotide
  Sense strand starting at position 2881 of SEQ ID NO: 1242733
acgauuaacugagcaccua

SEQ ID NO: 1369015 - RNA, 19 nt, Artificial Sequence
  Description of Artificial Sequence: Synthetic oligonucleotide
  Antisense strand to SEQ ID NO: 1369014
uaggugcucaguuaaucgu

SEQ ID NO: 1369016 - RNA, 19 nt, Artificial Sequence
  Description of Artificial Sequence: Synthetic oligonucleotide
  Sense strand starting at position 3025 of SEQ ID NO: 1242733
aagcgauugagcucguugu

SEQ ID NO: 1369017 - RNA, 19 nt, Artificial Sequence
  Description of Artificial Sequence: Synthetic oligonucleotide
  Antisense strand to SEQ ID NO: 1369016
acaacgagcucaaucgcuu

SEQ ID NO: 1369018 - RNA, 19 nt, Artificial Sequence
  Description of Artificial Sequence: Synthetic oligonucleotide
  Sense strand starting at position 3027 of SEQ ID NO: 1242733
gcgauugagcucguuguga

SEQ ID NO: 1369019 - RNA, 19 nt, Artificial Sequence
  Description of Artificial Sequence: Synthetic oligonucleotide
  Antisense strand to SEQ ID NO: 1369018
ucacaacgagcucaaucgc

SEQ ID NO: 1369020 - RNA, 19 nt, Artificial Sequence
  Description of Artificial Sequence: Synthetic oligonucleotide
  Sense strand starting at position 3036 of SEQ ID NO: 1242733
cucguugugagauaaguag

SEQ ID NO: 1369021 - RNA, 19 nt, Artificial Sequence
  Description of Artificial Sequence: Synthetic oligonucleotide
  Antisense strand to SEQ ID NO: 1369020
cuacuuaucucacaacgag

SEQ ID NO: 1369022 - RNA, 19 nt, Artificial Sequence
  Description of Artificial Sequence: Synthetic oligonucleotide
  Sense strand starting at position 3419 of SEQ ID NO: 1242733
auuccuggugauggauaua

SEQ ID NO: 1369023 - RNA, 19 nt, Artificial Sequence
  Description of Artificial Sequence: Synthetic oligonucleotide
  Antisense strand to SEQ ID NO: 1369022
uauauccaucaccaggaau

SEQ ID NO: 1369024 - RNA, 19 nt, Artificial Sequence
  Description of Artificial Sequence: Synthetic oligonucleotide
  Sense strand starting at position 3443 of SEQ ID NO: 1242733
uacagaguucuaugggaac

SEQ ID NO: 1369025 - RNA, 19 nt, Artificial Sequence
  Description of Artificial Sequence: Synthetic oligonucleotide
  Antisense strand to SEQ ID NO: 1369024
guucccauagaacucugua

SEQ ID NO: 1369026 - RNA, 19 nt, Artificial Sequence
  Description of Artificial Sequence: Synthetic oligonucleotide
  Sense strand starting at position 3445 of SEQ ID NO: 1242733
cagaguucuaugggaacgu

SEQ ID NO: 1369027 - RNA, 19 nt, Artificial Sequence
  Description of Artificial Sequence: Synthetic oligonucleotide
  Antisense strand to SEQ ID NO: 1369026
acguucccauagaacucug

SEQ ID NO: 1369028 - RNA, 19 nt, Artificial Sequence
  Description of Artificial Sequence: Synthetic oligonucleotide
  Sense strand starting at position 3501 of SEQ ID NO: 1242733
uggcaacauuuggagauaa

SEQ ID NO: 1369029 - RNA, 19 nt, Artificial Sequence
  Description of Artificial Sequence: Synthetic oligonucleotide
  Antisense strand to SEQ ID NO: 1369028
uuaucuccaaauguugcca

SEQ ID NO: 1369030 - RNA, 19 nt, Artificial Sequence
  Description of Artificial Sequence: Synthetic oligonucleotide
  Sense strand starting at position 3649 of SEQ ID NO: 1242733
gugagugugugccuauuua

SEQ ID NO: 1369031 - RNA, 19 nt, Artificial Sequence
  Description of Artificial Sequence: Synthetic oligonucleotide
  Antisense strand to SEQ ID NO: 1369030
uaaauaggcacacacucac

SEQ ID NO: 1369032 - RNA, 19 nt, Artificial Sequence
  Description of Artificial Sequence: Synthetic oligonucleotide
  Sense strand starting at position 3653 of SEQ ID NO: 1242733
gugugugccuauuuaaccu

SEQ ID NO: 1369033 - RNA, 19 nt, Artificial Sequence
  Description of Artificial Sequence: Synthetic oligonucleotide
  Antisense strand to SEQ ID NO: 1369032
agguuaaauaggcacacac

SEQ ID NO: 1369034 - RNA, 19 nt, Artificial Sequence
  Description of Artificial Sequence: Synthetic oligonucleotide
  Sense strand starting at position 3689 of SEQ ID NO: 1242733
guguaaucuggucaaagug

SEQ ID NO: 1369035 - RNA, 19 nt, Artificial Sequence
  Description of Artificial Sequence: Synthetic oligonucleotide
  Antisense strand to SEQ ID NO: 1369034
cacuuugaccagauuacac

SEQ ID NO: 1369036 - RNA, 19 nt, Artificial Sequence
  Description of Artificial Sequence: Synthetic oligonucleotide
  Sense strand starting at position 3704 of SEQ ID NO: 1242733
agugaauaucaagggcaga

SEQ ID NO: 1369037 - RNA, 19 nt, Artificial Sequence
  Description of Artificial Sequence: Synthetic oligonucleotide
  Antisense strand to SEQ ID NO: 1369036
ucugcccuugauauucacu

SEQ ID NO: 1369038 - RNA, 19 nt, Artificial Sequence
  Description of Artificial Sequence: Synthetic oligonucleotide
  Sense strand starting at position 249 of SEQ ID NO: 1242734
gcgggagguagauguuauc

SEQ ID NO: 1369039 - RNA, 19 nt, Artificial Sequence
  Description of Artificial Sequence: Synthetic oligonucleotide
  Antisense strand to SEQ ID NO: 1369038
gauaacaucuaccucccgc

SEQ ID NO: 1369040 - RNA, 19 nt, Artificial Sequence
  Description of Artificial Sequence: Synthetic oligonucleotide
  Sense strand starting at position 252 of SEQ ID NO: 1242734
ggagguagauguuaucuuu

SEQ ID NO: 1369041 - RNA, 19 nt, Artificial Sequence
  Description of Artificial Sequence: Synthetic oligonucleotide
  Antisense strand to SEQ ID NO: 1369040
aaagauaacaucuaccucc

SEQ ID NO: 1369042 - RNA, 19 nt, Artificial Sequence
  Description of Artificial Sequence: Synthetic oligonucleotide
  Sense strand starting at position 725 of SEQ ID NO: 1242734
uugccagauucuuccuguu

SEQ ID NO: 1369043 - RNA, 19 nt, Artificial Sequence
  Description of Artificial Sequence: Synthetic oligonucleotide
  Antisense strand to SEQ ID NO: 1369042
aacaggaagaaucuggcaa

SEQ ID NO: 1369044 - RNA, 19 nt, Artificial Sequence
  Description of Artificial Sequence: Synthetic oligonucleotide
  Sense strand starting at position 727 of SEQ ID NO: 1242734
gccagauucuuccuguucu

SEQ ID NO: 1369045 - RNA, 19 nt, Artificial Sequence
  Description of Artificial Sequence: Synthetic oligonucleotide
  Antisense strand to SEQ ID NO: 1369044
agaacaggaagaaucuggc

SEQ ID NO: 1369046 - RNA, 19 nt, Artificial Sequence
  Description of Artificial Sequence: Synthetic oligonucleotide
  Sense strand starting at position 728 of SEQ ID NO: 1242734
ccagauucuuccuguucuu

SEQ ID NO: 1369047 - RNA, 19 nt, Artificial Sequence
  Description of Artificial Sequence: Synthetic oligonucleotide
  Antisense strand to SEQ ID NO: 1369046
aagaacaggaagaaucugg

SEQ ID NO: 1369048 - RNA, 19 nt, Artificial Sequence
  Description of Artificial Sequence: Synthetic oligonucleotide
  Sense strand starting at position 745 of SEQ ID NO: 1242734
uuugguaucccugagcaca

SEQ ID NO: 1369049 - RNA, 19 nt, Artificial Sequence
  Description of Artificial Sequence: Synthetic oligonucleotide
  Antisense strand to SEQ ID NO: 1369048
ugugcucagggauaccaaa

SEQ ID NO: 1369050 - RNA, 19 nt, Artificial Sequence
  Description of Artificial Sequence: Synthetic oligonucleotide
  Sense strand starting at position 909 of SEQ ID NO: 1242734
gggagcgcuuucugucuga

SEQ ID NO: 1369051 - RNA, 19 nt, Artificial Sequence
  Description of Artificial Sequence: Synthetic oligonucleotide
  Antisense strand to SEQ ID NO: 1369050
ucagacagaaagcgcuccc

SEQ ID NO: 1369052 - RNA, 19 nt, Artificial Sequence
  Description of Artificial Sequence: Synthetic oligonucleotide
  Sense strand starting at position 911 of SEQ ID NO: 1242734
gagcgcuuucugucugagu

SEQ ID NO: 1369053 - RNA, 19 nt, Artificial Sequence
  Description of Artificial Sequence: Synthetic oligonucleotide
  Antisense strand to SEQ ID NO: 1369052
acucagacagaaagcgcuc

SEQ ID NO: 1369054 - RNA, 19 nt, Artificial Sequence
  Description of Artificial Sequence: Synthetic oligonucleotide
  Sense strand starting at position 920 of SEQ ID NO: 1242734
cugucugaguccuucugau

SEQ ID NO: 1369055 - RNA, 19 nt, Artificial Sequence
  Description of Artificial Sequence: Synthetic oligonucleotide
  Antisense strand to SEQ ID NO: 1369054
aucagaaggacucagacag

SEQ ID NO: 1369056 - RNA, 19 nt, Artificial Sequence
  Description of Artificial Sequence: Synthetic oligonucleotide
  Sense strand starting at position 930 of SEQ ID NO: 1242734
ccuucugauuugcagugau

SEQ ID NO: 1369057 - RNA, 19 nt, Artificial Sequence
  Description of Artificial Sequence: Synthetic oligonucleotide
  Antisense strand to SEQ ID NO: 1369056
aucacugcaaaucagaagg

SEQ ID NO: 1369058 - RNA, 19 nt, Artificial Sequence
  Description of Artificial Sequence: Synthetic oligonucleotide
  Sense strand starting at position 933 of SEQ ID NO: 1242734
ucugauuugcagugaugcu

SEQ ID NO: 1369059 - RNA, 19 nt, Artificial Sequence
  Description of Artificial Sequence: Synthetic oligonucleotide
  Antisense strand to SEQ ID NO: 1369058
agcaucacugcaaaucaga

SEQ ID NO: 1369060 - RNA, 19 nt, Artificial Sequence
  Description of Artificial Sequence: Synthetic oligonucleotide
  Sense strand starting at position 1212 of SEQ ID NO: 1242734
ggcauaccggguugagauu

SEQ ID NO: 1369061 - RNA, 19 nt, Artificial Sequence
  Description of Artificial Sequence: Synthetic oligonucleotide
  Antisense strand to SEQ ID NO: 1369060
aaucucaacccgguaugcc

SEQ ID NO: 1369062 - RNA, 19 nt, Artificial Sequence
  Description of Artificial Sequence: Synthetic oligonucleotide
  Sense strand starting at position 1941 of SEQ ID NO: 1242734
acgggaugcucucgcgaga

SEQ ID NO: 1369063 - RNA, 19 nt, Artificial Sequence
  Description of Artificial Sequence: Synthetic oligonucleotide
  Antisense strand to SEQ ID NO: 1369062
ucucgcgagagcaucccgu

SEQ ID NO: 1369064 - RNA, 19 nt, Artificial Sequence
  Description of Artificial Sequence: Synthetic oligonucleotide
  Sense strand starting at position 1944 of SEQ ID NO: 1242734
ggaugcucucgcgagagga

SEQ ID NO: 1369065 - RNA, 19 nt, Artificial Sequence
  Description of Artificial Sequence: Synthetic oligonucleotide
  Antisense strand to SEQ ID NO: 1369064
uccucucgcgagagcaucc

SEQ ID NO: 1369066 - RNA, 19 nt, Artificial Sequence
  Description of Artificial Sequence: Synthetic oligonucleotide
  Sense strand starting at position 2621 of SEQ ID NO: 1242734
gcagcuucgcuggaaggua

SEQ ID NO: 1369067 - RNA, 19 nt, Artificial Sequence
  Description of Artificial Sequence: Synthetic oligonucleotide
  Antisense strand to SEQ ID NO: 1369066
uaccuuccagcgaagcugc

SEQ ID NO: 1369068 - RNA, 19 nt, Artificial Sequence
  Description of Artificial Sequence: Synthetic oligonucleotide
  Sense strand starting at position 2694 of SEQ ID NO: 1242734
gggugaggagccuacugua

SEQ ID NO: 1369069 - RNA, 19 nt, Artificial Sequence
  Description of Artificial Sequence: Synthetic oligonucleotide
  Antisense strand to SEQ ID NO: 1369068
uacaguaggcuccucaccc

SEQ ID NO: 1369070 - RNA, 19 nt, Artificial Sequence
  Description of Artificial Sequence: Synthetic oligonucleotide
  Sense strand starting at position 2697 of SEQ ID NO: 1242734
ugaggagccuacuguaaga

SEQ ID NO: 1369071 - RNA, 19 nt, Artificial Sequence
  Description of Artificial Sequence: Synthetic oligonucleotide
  Antisense strand to SEQ ID NO: 1369070
ucuuacaguaggcuccuca

SEQ ID NO: 1369072 - RNA, 19 nt, Artificial Sequence
  Description of Artificial Sequence: Synthetic oligonucleotide
  Sense strand starting at position 2755 of SEQ ID NO: 1242734
agaugaaacugguuuguuu

SEQ ID NO: 1369073 - RNA, 19 nt, Artificial Sequence
  Description of Artificial Sequence: Synthetic oligonucleotide
  Antisense strand to SEQ ID NO: 1369072
aaacaaaccaguuucaucu

SEQ ID NO: 1369074 - RNA, 19 nt, Artificial Sequence
  Description of Artificial Sequence: Synthetic oligonucleotide
  Sense strand starting at position 2773 of SEQ ID NO: 1242734
uugggaacuuuauguagga

SEQ ID NO: 1369075 - RNA, 19 nt, Artificial Sequence
  Description of Artificial Sequence: Synthetic oligonucleotide
  Antisense strand to SEQ ID NO: 1369074
uccuacauaaaguucccaa

SEQ ID NO: 1369076 - RNA, 19 nt, Artificial Sequence
  Description of Artificial Sequence: Synthetic oligonucleotide
  Sense strand starting at position 2777 of SEQ ID NO: 1242734
gaacuuuauguaggaggua

SEQ ID NO: 1369077 - RNA, 19 nt, Artificial Sequence
  Description of Artificial Sequence: Synthetic oligonucleotide
  Antisense strand to SEQ ID NO: 1369076
uaccuccuacauaaaguuc

SEQ ID NO: 1369078 - RNA, 19 nt, Artificial Sequence
  Description of Artificial Sequence: Synthetic oligonucleotide
  Sense strand starting at position 2778 of SEQ ID NO: 1242734
aacuuuauguaggagguaa

SEQ ID NO: 1369079 - RNA, 19 nt, Artificial Sequence
  Description of Artificial Sequence: Synthetic oligonucleotide
  Antisense strand to SEQ ID NO: 1369078
uuaccuccuacauaaaguu

SEQ ID NO: 1369080 - RNA, 19 nt, Artificial Sequence
  Description of Artificial Sequence: Synthetic oligonucleotide
  Sense strand starting at position 2840 of SEQ ID NO: 1242734
uaggucaguucccgaguga

SEQ ID NO: 1369081 - RNA, 19 nt, Artificial Sequence
  Description of Artificial Sequence: Synthetic oligonucleotide
  Antisense strand to SEQ ID NO: 1369080
ucacucgggaacugaccua

SEQ ID NO: 1369082 - RNA, 19 nt, Artificial Sequence
  Description of Artificial Sequence: Synthetic oligonucleotide
  Sense strand starting at position 2841 of SEQ ID NO: 1242734
aggucaguucccgagugau

SEQ ID NO: 1369083 - RNA, 19 nt, Artificial Sequence
  Description of Artificial Sequence: Synthetic oligonucleotide
  Antisense strand to SEQ ID NO: 1369082
aucacucgggaacugaccu

SEQ ID NO: 1369084 - RNA, 19 nt, Artificial Sequence
  Description of Artificial Sequence: Synthetic oligonucleotide
  Sense strand starting at position 2844 of SEQ ID NO: 1242734
ucaguucccgagugauaag

SEQ ID NO: 1369085 - RNA, 19 nt, Artificial Sequence
  Description of Artificial Sequence: Synthetic oligonucleotide
  Antisense strand to SEQ ID NO: 1369084
cuuaucacucgggaacuga

SEQ ID NO: 1369086 - RNA, 19 nt, Artificial Sequence
  Description of Artificial Sequence: Synthetic oligonucleotide
  Sense strand starting at position 2845 of SEQ ID NO: 1242734
caguucccgagugauaagu

SEQ ID NO: 1369087 - RNA, 19 nt, Artificial Sequence
  Description of Artificial Sequence: Synthetic oligonucleotide
  Antisense strand to SEQ ID NO: 1369086
acuuaucacucgggaacug

SEQ ID NO: 1369088 - RNA, 19 nt, Artificial Sequence
  Description of Artificial Sequence: Synthetic oligonucleotide
  Sense strand starting at position 2853 of SEQ ID NO: 1242734
gagugauaagugcguacca

SEQ ID NO: 1369089 - RNA, 19 nt, Artificial Sequence
  Description of Artificial Sequence: Synthetic oligonucleotide
  Antisense strand to SEQ ID NO: 1369088
ugguacgcacuuaucacuc

SEQ ID NO: 1369090 - RNA, 19 nt, Artificial Sequence
  Description of Artificial Sequence: Synthetic oligonucleotide
  Sense strand starting at position 2899 of SEQ ID NO: 1242734
gugugucucaccugagguu

SEQ ID NO: 1369091 - RNA, 19 nt, Artificial Sequence
  Description of Artificial Sequence: Synthetic oligonucleotide
  Antisense strand to SEQ ID NO: 1369090
aaccucaggugagacacac

SEQ ID NO: 1369092 - RNA, 19 nt, Artificial Sequence
  Description of Artificial Sequence: Synthetic oligonucleotide
  Sense strand starting at position 2930 of SEQ ID NO: 1242734
uggguaucuuggugccacu

SEQ ID NO: 1369093 - RNA, 19 nt, Artificial Sequence
  Description of Artificial Sequence: Synthetic oligonucleotide
  Antisense strand to SEQ ID NO: 1369092
aguggcaccaagauaccca

SEQ ID NO: 1369094 - RNA, 19 nt, Artificial Sequence
  Description of Artificial Sequence: Synthetic oligonucleotide
  Sense strand starting at position 3073 of SEQ ID NO: 1242734
gugcgacaaaggugucuuu

SEQ ID NO: 1369095 - RNA, 19 nt, Artificial Sequence
  Description of Artificial Sequence: Synthetic oligonucleotide
  Antisense strand to SEQ ID NO: 1369094
aaagacaccuuugucgcac

SEQ ID NO: 1369096 - RNA, 19 nt, Artificial Sequence
  Description of Artificial Sequence: Synthetic oligonucleotide
  Sense strand starting at position 3196 of SEQ ID NO: 1242734
uggagcuggaagcguuaaa

SEQ ID NO: 1369097 - RNA, 19 nt, Artificial Sequence
  Description of Artificial Sequence: Synthetic oligonucleotide
  Antisense strand to SEQ ID NO: 1369096
uuuaacgcuuccagcucca

SEQ ID NO: 1369098 - RNA, 19 nt, Artificial Sequence
  Description of Artificial Sequence: Synthetic oligonucleotide
  Sense strand starting at position 3267 of SEQ ID NO: 1242734
caguuauuuggccgaggca

SEQ ID NO: 1369099 - RNA, 19 nt, Artificial Sequence
  Description of Artificial Sequence: Synthetic oligonucleotide
  Antisense strand to SEQ ID NO: 1369098
ugccucggccaaauaacug

SEQ ID NO: 1369100 - RNA, 19 nt, Artificial Sequence
  Description of Artificial Sequence: Synthetic oligonucleotide
  Sense strand starting at position 3392 of SEQ ID NO: 1242734
ugaggucugugccuaccaa

SEQ ID NO: 1369101 - RNA, 19 nt, Artificial Sequence
  Description of Artificial Sequence: Synthetic oligonucleotide
  Antisense strand to SEQ ID NO: 1369100
uugguaggcacagaccuca

SEQ ID NO: 1369102 - RNA, 19 nt, Artificial Sequence
  Description of Artificial Sequence: Synthetic oligonucleotide
  Sense strand starting at position 3481 of SEQ ID NO: 1242734
aaggccuugcaguaggaau

SEQ ID NO: 1369103 - RNA, 19 nt, Artificial Sequence
  Description of Artificial Sequence: Synthetic oligonucleotide
  Antisense strand to SEQ ID NO: 1369102
auuccuacugcaaggccuu

SEQ ID NO: 1369104 - RNA, 19 nt, Artificial Sequence
  Description of Artificial Sequence: Synthetic oligonucleotide
  Sense strand starting at position 3488 of SEQ ID NO: 1242734
ugcaguaggaauugcagaa

SEQ ID NO: 1369105 - RNA, 19 nt, Artificial Sequence
  Description of Artificial Sequence: Synthetic oligonucleotide
  Antisense strand to SEQ ID NO: 1369104
uucugcaauuccuacugca

SEQ ID NO: 1369106 - RNA, 19 nt, Artificial Sequence
  Description of Artificial Sequence: Synthetic oligonucleotide
  Sense strand starting at position 3492 of SEQ ID NO: 1242734
guaggaauugcagaagggu

SEQ ID NO: 1369107 - RNA, 19 nt, Artificial Sequence
  Description of Artificial Sequence: Synthetic oligonucleotide
  Antisense strand to SEQ ID NO: 1369106
acccuucugcaauuccuac

SEQ ID NO: 1369108 - RNA, 19 nt, Artificial Sequence
  Description of Artificial Sequence: Synthetic oligonucleotide
  Sense strand starting at position 411 of SEQ ID NO: 1242735
uugugcagguccucacaaa

SEQ ID NO: 1369109 - RNA, 19 nt, Artificial Sequence
  Description of Artificial Sequence: Synthetic oligonucleotide
  Antisense strand to SEQ ID NO: 1369108
uuugugaggaccugcacaa

SEQ ID NO: 1369110 - RNA, 19 nt, Artificial Sequence
  Description of Artificial Sequence: Synthetic oligonucleotide
  Sense strand starting at position 425 of SEQ ID NO: 1242735
acaaacucacagugaaguu

SEQ ID NO: 1369111 - RNA, 19 nt, Artificial Sequence
  Description of Artificial Sequence: Synthetic oligonucleotide
  Antisense strand to SEQ ID NO: 1369110
aacuucacugugaguuugu

SEQ ID NO: 1369112 - RNA, 19 nt, Artificial Sequence
  Description of Artificial Sequence: Synthetic oligonucleotide
  Sense strand starting at position 1140 of SEQ ID NO: 1242735
cgcgaagauccagguucaa

SEQ ID NO: 1369113 - RNA, 19 nt, Artificial Sequence
  Description of Artificial Sequence: Synthetic oligonucleotide
  Antisense strand to SEQ ID NO: 1369112
uugaaccuggaucuucgcg

SEQ ID NO: 1369114 - RNA, 19 nt, Artificial Sequence
  Description of Artificial Sequence: Synthetic oligonucleotide
  Sense strand starting at position 1999 of SEQ ID NO: 1242735
cugaccuccucuguagaga

SEQ ID NO: 1369115 - RNA, 19 nt, Artificial Sequence
  Description of Artificial Sequence: Synthetic oligonucleotide
  Antisense strand to SEQ ID NO: 1369114
ucucuacagaggaggucag

SEQ ID NO: 1369116 - RNA, 19 nt, Artificial Sequence
  Description of Artificial Sequence: Synthetic oligonucleotide
  Sense strand starting at position 2124 of SEQ ID NO: 1242735
agaugaagggugugcguua

SEQ ID NO: 1369117 - RNA, 19 nt, Artificial Sequence
  Description of Artificial Sequence: Synthetic oligonucleotide
  Antisense strand to SEQ ID NO: 1369116
uaacgcacacccuucaucu

SEQ ID NO: 1369118 - RNA, 19 nt, Artificial Sequence
  Description of Artificial Sequence: Synthetic oligonucleotide
  Sense strand starting at position 2129 of SEQ ID NO: 1242735
aagggugugcguuagguua

SEQ ID NO: 1369119 - RNA, 19 nt, Artificial Sequence
  Description of Artificial Sequence: Synthetic oligonucleotide
  Antisense strand to SEQ ID NO: 1369118
uaaccuaacgcacacccuu

SEQ ID NO: 1369120 - RNA, 19 nt, Artificial Sequence
  Description of Artificial Sequence: Synthetic oligonucleotide
  Sense strand starting at position 2136 of SEQ ID NO: 1242735
ugcguuagguuaaguggaa

SEQ ID NO: 1369121 - RNA, 19 nt, Artificial Sequence
  Description of Artificial Sequence: Synthetic oligonucleotide
  Antisense strand to SEQ ID NO: 1369120
uuccacuuaaccuaacgca

SEQ ID NO: 1369122 - RNA, 19 nt, Artificial Sequence
  Description of Artificial Sequence: Synthetic oligonucleotide
  Sense strand starting at position 2137 of SEQ ID NO: 1242735
gcguuagguuaaguggaaa

SEQ ID NO: 1369123 - RNA, 19 nt, Artificial Sequence
  Description of Artificial Sequence: Synthetic oligonucleotide
  Antisense strand to SEQ ID NO: 1369122
uuuccacuuaaccuaacgc

SEQ ID NO: 1369124 - RNA, 19 nt, Artificial Sequence
  Description of Artificial Sequence: Synthetic oligonucleotide
  Sense strand starting at position 2168 of SEQ ID NO: 1242735
gggaguccuuguuggaauc

SEQ ID NO: 1369125 - RNA, 19 nt, Artificial Sequence
  Description of Artificial Sequence: Synthetic oligonucleotide
  Antisense strand to SEQ ID NO: 1369124
gauuccaacaaggacuccc

SEQ ID NO: 1369126 - RNA, 19 nt, Artificial Sequence
  Description of Artificial Sequence: Synthetic oligonucleotide
  Sense strand starting at position 2195 of SEQ ID NO: 1242735
gcccgugacucugggaaag

SEQ ID NO: 1369127 - RNA, 19 nt, Artificial Sequence
  Description of Artificial Sequence: Synthetic oligonucleotide
  Antisense strand to SEQ ID NO: 1369126
cuuucccagagucacgggc

SEQ ID NO: 1369128 - RNA, 19 nt, Artificial Sequence
  Description of Artificial Sequence: Synthetic oligonucleotide
  Sense strand starting at position 2197 of SEQ ID NO: 1242735
ccgugacucugggaaaguc

SEQ ID NO: 1369129 - RNA, 19 nt, Artificial Sequence
  Description of Artificial Sequence: Synthetic oligonucleotide
  Antisense strand to SEQ ID NO: 1369128
gacuuucccagagucacgg

SEQ ID NO: 1369130 - RNA, 19 nt, Artificial Sequence
  Description of Artificial Sequence: Synthetic oligonucleotide
  Sense strand starting at position 2213 of SEQ ID NO: 1242735
gucaguaaaucuugguuuc

SEQ ID NO: 1369131 - RNA, 19 nt, Artificial Sequence
  Description of Artificial Sequence: Synthetic oligonucleotide
  Antisense strand to SEQ ID NO: 1369130
gaaaccaagauuuacugac

SEQ ID NO: 1369132 - RNA, 19 nt, Artificial Sequence
  Description of Artificial Sequence: Synthetic oligonucleotide
  Sense strand starting at position 2253 of SEQ ID NO: 1242735
uugccuuauuguuguuuaa

SEQ ID NO: 1369133 - RNA, 19 nt, Artificial Sequence
  Description of Artificial Sequence: Synthetic oligonucleotide
  Antisense strand to SEQ ID NO: 1369132
uuaaacaacaauaaggcaa

SEQ ID NO: 1369134 - RNA, 19 nt, Artificial Sequence
  Description of Artificial Sequence: Synthetic oligonucleotide
  Sense strand starting at position 2255 of SEQ ID NO: 1242735
gccuuauuguuguuuaauu

SEQ ID NO: 1369135 - RNA, 19 nt, Artificial Sequence
  Description of Artificial Sequence: Synthetic oligonucleotide
  Antisense strand to SEQ ID NO: 1369134
aauuaaacaacaauaaggc

SEQ ID NO: 1369136 - RNA, 19 nt, Artificial Sequence
  Description of Artificial Sequence: Synthetic oligonucleotide
  Sense strand starting at position 2367 of SEQ ID NO: 1242735
gcugucuucuggccacagu

SEQ ID NO: 1369137 - RNA, 19 nt, Artificial Sequence
  Description of Artificial Sequence: Synthetic oligonucleotide
  Antisense strand to SEQ ID NO: 1369136
acuguggccagaagacagc

SEQ ID NO: 1369138 - RNA, 19 nt, Artificial Sequence
  Description of Artificial Sequence: Synthetic oligonucleotide
  Sense strand starting at position 2447 of SEQ ID NO: 1242735
augacuuaguccucugaac

SEQ ID NO: 1369139 - RNA, 19 nt, Artificial Sequence
  Description of Artificial Sequence: Synthetic oligonucleotide
  Antisense strand to SEQ ID NO: 1369138
guucagaggacuaagucau

SEQ ID NO: 1369140 - RNA, 19 nt, Artificial Sequence
  Description of Artificial Sequence: Synthetic oligonucleotide
  Sense strand starting at position 2449 of SEQ ID NO: 1242735
gacuuaguccucugaacag

SEQ ID NO: 1369141 - RNA, 19 nt, Artificial Sequence
  Description of Artificial Sequence: Synthetic oligonucleotide
  Antisense strand to SEQ ID NO: 1369140
cuguucagaggacuaaguc

SEQ ID NO: 1369142 - RNA, 19 nt, Artificial Sequence
  Description of Artificial Sequence: Synthetic oligonucleotide
  Sense strand starting at position 2482 of SEQ ID NO: 1242735
gggacuccuuggcccaaga

SEQ ID NO: 1369143 - RNA, 19 nt, Artificial Sequence
  Description of Artificial Sequence: Synthetic oligonucleotide
  Antisense strand to SEQ ID NO: 1369142
ucuugggccaaggaguccc

SEQ ID NO: 1369144 - RNA, 19 nt, Artificial Sequence
  Description of Artificial Sequence: Synthetic oligonucleotide
  Sense strand starting at position 2671 of SEQ ID NO: 1242735
gugaacuaauuauguaaag

SEQ ID NO: 1369145 - RNA, 19 nt, Artificial Sequence
  Description of Artificial Sequence: Synthetic oligonucleotide
  Antisense strand to SEQ ID NO: 1369144
cuuuacauaauuaguucac

SEQ ID NO: 1369146 - RNA, 19 nt, Artificial Sequence
  Description of Artificial Sequence: Synthetic oligonucleotide
  Sense strand starting at position 2696 of SEQ ID NO: 1242735
uucucagugcggucucuau

SEQ ID NO: 1369147 - RNA, 19 nt, Artificial Sequence
  Description of Artificial Sequence: Synthetic oligonucleotide
  Antisense strand to SEQ ID NO: 1369146
auagagaccgcacugagaa

SEQ ID NO: 1369148 - RNA, 19 nt, Artificial Sequence
  Description of Artificial Sequence: Synthetic oligonucleotide
  Sense strand starting at position 2793 of SEQ ID NO: 1242735
acaguauagcugugauauu

SEQ ID NO: 1369149 - RNA, 19 nt, Artificial Sequence
  Description of Artificial Sequence: Synthetic oligonucleotide
  Antisense strand to SEQ ID NO: 1369148
aauaucacagcuauacugu

SEQ ID NO: 1369150 - RNA, 19 nt, Artificial Sequence
  Description of Artificial Sequence: Synthetic oligonucleotide
  Sense strand starting at position 2794 of SEQ ID NO: 1242735
caguauagcugugauauug

SEQ ID NO: 1369151 - RNA, 19 nt, Artificial Sequence
  Description of Artificial Sequence: Synthetic oligonucleotide
  Antisense strand to SEQ ID NO: 1369150
caauaucacagcuauacug

SEQ ID NO: 1369152 - RNA, 19 nt, Artificial Sequence
  Description of Artificial Sequence: Synthetic oligonucleotide
  Sense strand starting at position 3388 of SEQ ID NO: 1242735
gaucgaaacuuggucucaa

SEQ ID NO: 1369153 - RNA, 19 nt, Artificial Sequence
  Description of Artificial Sequence: Synthetic oligonucleotide
  Antisense strand to SEQ ID NO: 1369152
uugagaccaaguuucgauc

SEQ ID NO: 1369154 - RNA, 19 nt, Artificial Sequence
  Description of Artificial Sequence: Synthetic oligonucleotide
  Sense strand starting at position 3389 of SEQ ID NO: 1242735
aucgaaacuuggucucaaa

SEQ ID NO: 1369155 - RNA, 19 nt, Artificial Sequence
  Description of Artificial Sequence: Synthetic oligonucleotide
  Antisense strand to SEQ ID NO: 1369154
uuugagaccaaguuucgau

SEQ ID NO: 1369156 - RNA, 19 nt, Artificial Sequence
  Description of Artificial Sequence: Synthetic oligonucleotide
  Sense strand starting at position 3510 of SEQ ID NO: 1242735
aaacucauuugucaaggga

SEQ ID NO: 1369157 - RNA, 19 nt, Artificial Sequence
  Description of Artificial Sequence: Synthetic oligonucleotide
  Antisense strand to SEQ ID NO: 1369156
ucccuugacaaaugaguuu

SEQ ID NO: 1369158 - RNA, 19 nt, Artificial Sequence
  Description of Artificial Sequence: Synthetic oligonucleotide
  Sense strand starting at position 3711 of SEQ ID NO: 1242735
agaggccugcaucagauaa

SEQ ID NO: 1369159 - RNA, 19 nt, Artificial Sequence
  Description of Artificial Sequence: Synthetic oligonucleotide
  Antisense strand to SEQ ID NO: 1369158
uuaucugaugcaggccucu

SEQ ID NO: 1369160 - RNA, 19 nt, Artificial Sequence
  Description of Artificial Sequence: Synthetic oligonucleotide
  Sense strand starting at position 3713 of SEQ ID NO: 1242735
aggccugcaucagauaagu

SEQ ID NO: 1369161 - RNA, 19 nt, Artificial Sequence
  Description of Artificial Sequence: Synthetic oligonucleotide
  Antisense strand to SEQ ID NO: 1369160
acuuaucugaugcaggccu

SEQ ID NO: 1369162 - RNA, 19 nt, Artificial Sequence
  Description of Artificial Sequence: Synthetic oligonucleotide
  Sense strand starting at position 3747 of SEQ ID NO: 1242735
cuaagaagugcuugcuucu

SEQ ID NO: 1369163 - RNA, 19 nt, Artificial Sequence
  Description of Artificial Sequence: Synthetic oligonucleotide
  Antisense strand to SEQ ID NO: 1369162
agaagcaagcacuucuuag

SEQ ID NO: 1369164 - RNA, 19 nt, Artificial Sequence
  Description of Artificial Sequence: Synthetic oligonucleotide
  Sense strand starting at position 3800 of SEQ ID NO: 1242735
aggaaugcuugauucucuu

SEQ ID NO: 1369165 - RNA, 19 nt, Artificial Sequence
  Description of Artificial Sequence: Synthetic oligonucleotide
  Antisense strand to SEQ ID NO: 1369164
aagagaaucaagcauuccu

SEQ ID NO: 1369166 - RNA, 19 nt, Artificial Sequence
  Description of Artificial Sequence: Synthetic oligonucleotide
  Sense strand starting at position 3834 of SEQ ID NO: 1242735
agacuaagcaugcgggaaa

SEQ ID NO: 1369167 - RNA, 19 nt, Artificial Sequence
  Description of Artificial Sequence: Synthetic oligonucleotide
  Antisense strand to SEQ ID NO: 1369166
uuucccgcaugcuuagucu

SEQ ID NO: 1369168 - RNA, 19 nt, Artificial Sequence
  Description of Artificial Sequence: Synthetic oligonucleotide
  Sense strand starting at position 3957 of SEQ ID NO: 1242735
gcccuaagaagcugugaua

SEQ ID NO: 1369169 - RNA, 19 nt, Artificial Sequence
  Description of Artificial Sequence: Synthetic oligonucleotide
  Antisense strand to SEQ ID NO: 1369168
uaucacagcuucuuagggc

SEQ ID NO: 1369170 - RNA, 19 nt, Artificial Sequence
  Description of Artificial Sequence: Synthetic oligonucleotide
  Sense strand starting at position 1055 of SEQ ID NO: 1242736
gcaagauagacguaucuuc

SEQ ID NO: 1369171 - RNA, 19 nt, Artificial Sequence
  Description of Artificial Sequence: Synthetic oligonucleotide
  Antisense strand to SEQ ID NO: 1369170
gaagauacgucuaucuugc

SEQ ID NO: 1369172 - RNA, 19 nt, Artificial Sequence
  Description of Artificial Sequence: Synthetic oligonucleotide
  Sense strand starting at position 1085 of SEQ ID NO: 1242736
auauguuggcaccauaacu

SEQ ID NO: 1369173 - RNA, 19 nt, Artificial Sequence
  Description of Artificial Sequence: Synthetic oligonucleotide
  Antisense strand to SEQ ID NO: 1369172
aguuauggugccaacauau

SEQ ID NO: 1369174 - RNA, 19 nt, Artificial Sequence
  Description of Artificial Sequence: Synthetic oligonucleotide
  Sense strand starting at position 1120 of SEQ ID NO: 1242736
gugcgugguguuccacauu

SEQ ID NO: 1369175 - RNA, 19 nt, Artificial Sequence
  Description of Artificial Sequence: Synthetic oligonucleotide
  Antisense strand to SEQ ID NO: 1369174
aauguggaacaccacgcac

SEQ ID NO: 1369176 - RNA, 19 nt, Artificial Sequence
  Description of Artificial Sequence: Synthetic oligonucleotide
  Sense strand starting at position 1161 of SEQ ID NO: 1242736
uuaugauacugaucgguua

SEQ ID NO: 1369177 - RNA, 19 nt, Artificial Sequence
  Description of Artificial Sequence: Synthetic oligonucleotide
  Antisense strand to SEQ ID NO: 1369176
uaaccgaucaguaucauaa

SEQ ID NO: 1369178 - RNA, 19 nt, Artificial Sequence
  Description of Artificial Sequence: Synthetic oligonucleotide
  Sense strand starting at position 1163 of SEQ ID NO: 1242736
augauacugaucgguuaga

SEQ ID NO: 1369179 - RNA, 19 nt, Artificial Sequence
  Description of Artificial Sequence: Synthetic oligonucleotide
  Antisense strand to SEQ ID NO: 1369178
ucuaaccgaucaguaucau

SEQ ID NO: 1369180 - RNA, 19 nt, Artificial Sequence
  Description of Artificial Sequence: Synthetic oligonucleotide
  Sense strand starting at position 1164 of SEQ ID NO: 1242736
ugauacugaucgguuagau

SEQ ID NO: 1369181 - RNA, 19 nt, Artificial Sequence
  Description of Artificial Sequence: Synthetic oligonucleotide
  Antisense strand to SEQ ID NO: 1369180
aucuaaccgaucaguauca

SEQ ID NO: 1369182 - RNA, 19 nt, Artificial Sequence
  Description of Artificial Sequence: Synthetic oligonucleotide
  Sense strand starting at position 1234 of SEQ ID NO: 1242736
acuuuaauugacuggcuca

SEQ ID NO: 1369183 - RNA, 19 nt, Artificial Sequence
  Description of Artificial Sequence: Synthetic oligonucleotide
  Antisense strand to SEQ ID NO: 1369182
ugagccagucaauuaaagu

SEQ ID NO: 1369184 - RNA, 19 nt, Artificial Sequence
  Description of Artificial Sequence: Synthetic oligonucleotide
  Sense strand starting at position 1246 of SEQ ID NO: 1242736
uggcucauccgguauaaau

SEQ ID NO: 1369185 - RNA, 19 nt, Artificial Sequence
  Description of Artificial Sequence: Synthetic oligonucleotide
  Antisense strand to SEQ ID NO: 1369184
auuuauaccggaugagcca

SEQ ID NO: 1369186 - RNA, 19 nt, Artificial Sequence
  Description of Artificial Sequence: Synthetic oligonucleotide
  Sense strand starting at position 1248 of SEQ ID NO: 1242736
gcucauccgguauaaauag

SEQ ID NO: 1369187 - RNA, 19 nt, Artificial Sequence
  Description of Artificial Sequence: Synthetic oligonucleotide
  Antisense strand to SEQ ID NO: 1369186
cuauuuauaccggaugagc

SEQ ID NO: 1369188 - RNA, 19 nt, Artificial Sequence
  Description of Artificial Sequence: Synthetic oligonucleotide
  Sense strand starting at position 1443 of SEQ ID NO: 1242736
ccaggaucugaacgaguca

SEQ ID NO: 1369189 - RNA, 19 nt, Artificial Sequence
  Description of Artificial Sequence: Synthetic oligonucleotide
  Antisense strand to SEQ ID NO: 1369188
ugacucguucagauccugg

SEQ ID NO: 1369190 - RNA, 19 nt, Artificial Sequence
  Description of Artificial Sequence: Synthetic oligonucleotide
  Sense strand starting at position 1529 of SEQ ID NO: 1242736
ggacccauuuagggauaga

SEQ ID NO: 1369191 - RNA, 19 nt, Artificial Sequence
  Description of Artificial Sequence: Synthetic oligonucleotide
  Antisense strand to SEQ ID NO: 1369190
ucuaucccuaaaugggucc

SEQ ID NO: 1369192 - RNA, 19 nt, Artificial Sequence
  Description of Artificial Sequence: Synthetic oligonucleotide
  Sense strand starting at position 1641 of SEQ ID NO: 1242736
ccgccuucgccacuguaau

SEQ ID NO: 1369193 - RNA, 19 nt, Artificial Sequence
  Description of Artificial Sequence: Synthetic oligonucleotide
  Antisense strand to SEQ ID NO: 1369192
auuacaguggcgaaggcgg

SEQ ID NO: 1369194 - RNA, 19 nt, Artificial Sequence
  Description of Artificial Sequence: Synthetic oligonucleotide
  Sense strand starting at position 1673 of SEQ ID NO: 1242736
gccagagguuaucugauac

SEQ ID NO: 1369195 - RNA, 19 nt, Artificial Sequence
  Description of Artificial Sequence: Synthetic oligonucleotide
  Antisense strand to SEQ ID NO: 1369194
guaucagauaaccucuggc

SEQ ID NO: 1369196 - RNA, 19 nt, Artificial Sequence
  Description of Artificial Sequence: Synthetic oligonucleotide
  Sense strand starting at position 1725 of SEQ ID NO: 1242736
auuggagucguacacagaa

SEQ ID NO: 1369197 - RNA, 19 nt, Artificial Sequence
  Description of Artificial Sequence: Synthetic oligonucleotide
  Antisense strand to SEQ ID NO: 1369196
uucuguguacgacuccaau

SEQ ID NO: 1369198 - RNA, 19 nt, Artificial Sequence
  Description of Artificial Sequence: Synthetic oligonucleotide
  Sense strand starting at position 1727 of SEQ ID NO: 1242736
uggagucguacacagaaau

SEQ ID NO: 1369199 - RNA, 19 nt, Artificial Sequence
  Description of Artificial Sequence: Synthetic oligonucleotide
  Antisense strand to SEQ ID NO: 1369198
auuucuguguacgacucca

SEQ ID NO: 1369200 - RNA, 19 nt, Artificial Sequence
  Description of Artificial Sequence: Synthetic oligonucleotide
  Sense strand starting at position 2273 of SEQ ID NO: 1242736
uuguucuuaucuccaagga

SEQ ID NO: 1369201 - RNA, 19 nt, Artificial Sequence
  Description of Artificial Sequence: Synthetic oligonucleotide
  Antisense strand to SEQ ID NO: 1369200
uccuuggagauaagaacaa

SEQ ID NO: 1369202 - RNA, 19 nt, Artificial Sequence
  Description of Artificial Sequence: Synthetic oligonucleotide
  Sense strand starting at position 2578 of SEQ ID NO: 1242736
uugucaugagucugaaaca

SEQ ID NO: 1369203 - RNA, 19 nt, Artificial Sequence
  Description of Artificial Sequence: Synthetic oligonucleotide
  Antisense strand to SEQ ID NO: 1369202
uguuucagacucaugacaa

SEQ ID NO: 1369204 - RNA, 19 nt, Artificial Sequence
  Description of Artificial Sequence: Synthetic oligonucleotide
  Sense strand starting at position 2596 of SEQ ID NO: 1242736
aauggaugcccgugaauaa

SEQ ID NO: 1369205 - RNA, 19 nt, Artificial Sequence
  Description of Artificial Sequence: Synthetic oligonucleotide
  Antisense strand to SEQ ID NO: 1369204
uuauucacgggcauccauu

SEQ ID NO: 1369206 - RNA, 19 nt, Artificial Sequence
  Description of Artificial Sequence: Synthetic oligonucleotide
  Sense strand starting at position 2597 of SEQ ID NO: 1242736
auggaugcccgugaauaaa

SEQ ID NO: 1369207 - RNA, 19 nt, Artificial Sequence
  Description of Artificial Sequence: Synthetic oligonucleotide
  Antisense strand to SEQ ID NO: 1369206
uuuauucacgggcauccau

SEQ ID NO: 1369208 - RNA, 19 nt, Artificial Sequence
  Description of Artificial Sequence: Synthetic oligonucleotide
  Sense strand starting at position 2606 of SEQ ID NO: 1242736
cgugaauaaacguaaauug

SEQ ID NO: 1369209 - RNA, 19 nt, Artificial Sequence
  Description of Artificial Sequence: Synthetic oligonucleotide
  Antisense strand to SEQ ID NO: 1369208
caauuuacguuuauucacg

SEQ ID NO: 1369210 - RNA, 19 nt, Artificial Sequence
  Description of Artificial Sequence: Synthetic oligonucleotide
  Sense strand starting at position 2688 of SEQ ID NO: 1242736
cuuugagcccuagaauauc

SEQ ID NO: 1369211 - RNA, 19 nt, Artificial Sequence
  Description of Artificial Sequence: Synthetic oligonucleotide
  Antisense strand to SEQ ID NO: 1369210
gauauucuagggcucaaag

SEQ ID NO: 1369212 - RNA, 19 nt, Artificial Sequence
  Description of Artificial Sequence: Synthetic oligonucleotide
  Sense strand starting at position 2699 of SEQ ID NO: 1242736
agaauaucaucgguguuaa

SEQ ID NO: 1369213 - RNA, 19 nt, Artificial Sequence
  Description of Artificial Sequence: Synthetic oligonucleotide
  Antisense strand to SEQ ID NO: 1369212
uuaacaccgaugauauucu

SEQ ID NO: 1369214 - RNA, 19 nt, Artificial Sequence
  Description of Artificial Sequence: Synthetic oligonucleotide
  Sense strand starting at position 2700 of SEQ ID NO: 1242736
gaauaucaucgguguuaaa

SEQ ID NO: 1369215 - RNA, 19 nt, Artificial Sequence
  Description of Artificial Sequence: Synthetic oligonucleotide
  Antisense strand to SEQ ID NO: 1369214
uuuaacaccgaugauauuc

SEQ ID NO: 1369216 - RNA, 19 nt, Artificial Sequence
  Description of Artificial Sequence: Synthetic oligonucleotide
  Sense strand starting at position 2711 of SEQ ID NO: 1242736
guguuaaauaaggguaaca

SEQ ID NO: 1369217 - RNA, 19 nt, Artificial Sequence
  Description of Artificial Sequence: Synthetic oligonucleotide
  Antisense strand to SEQ ID NO: 1369216
uguuacccuuauuuaacac

SEQ ID NO: 1369218 - RNA, 19 nt, Artificial Sequence
  Description of Artificial Sequence: Synthetic oligonucleotide
  Sense strand starting at position 2760 of SEQ ID NO: 1242736
uaggauuaaugcguaugaa

SEQ ID NO: 1369219 - RNA, 19 nt, Artificial Sequence
  Description of Artificial Sequence: Synthetic oligonucleotide
  Antisense strand to SEQ ID NO: 1369218
uucauacgcauuaauccua

SEQ ID NO: 1369220 - RNA, 19 nt, Artificial Sequence
  Description of Artificial Sequence: Synthetic oligonucleotide
  Sense strand starting at position 2922 of SEQ ID NO: 1242736
ugagcuuugggaugaucuu

SEQ ID NO: 1369221 - RNA, 19 nt, Artificial Sequence
  Description of Artificial Sequence: Synthetic oligonucleotide
  Antisense strand to SEQ ID NO: 1369220
aagaucaucccaaagcuca

SEQ ID NO: 1369222 - RNA, 19 nt, Artificial Sequence
  Description of Artificial Sequence: Synthetic oligonucleotide
  Sense strand starting at position 2923 of SEQ ID NO: 1242736
gagcuuugggaugaucuuu

SEQ ID NO: 1369223 - RNA, 19 nt, Artificial Sequence
  Description of Artificial Sequence: Synthetic oligonucleotide
  Antisense strand to SEQ ID NO: 1369222
aaagaucaucccaaagcuc

SEQ ID NO: 1369224 - RNA, 19 nt, Artificial Sequence
  Description of Artificial Sequence: Synthetic oligonucleotide
  Sense strand starting at position 2944 of SEQ ID NO: 1242736
cgauuuccaucagcuaagu

SEQ ID NO: 1369225 - RNA, 19 nt, Artificial Sequence
  Description of Artificial Sequence: Synthetic oligonucleotide
  Antisense strand to SEQ ID NO: 1369224
acuuagcugauggaaaucg

SEQ ID NO: 1369226 - RNA, 19 nt, Artificial Sequence
  Description of Artificial Sequence: Synthetic oligonucleotide
  Sense strand starting at position 3070 of SEQ ID NO: 1242736
cucuuccuccagugaagga

SEQ ID NO: 1369227 - RNA, 19 nt, Artificial Sequence
  Description of Artificial Sequence: Synthetic oligonucleotide
  Antisense strand to SEQ ID NO: 1369226
uccuucacuggaggaagag

SEQ ID NO: 1369228 - RNA, 19 nt, Artificial Sequence
  Description of Artificial Sequence: Synthetic oligonucleotide
  Sense strand starting at position 3213 of SEQ ID NO: 1242736
cucagaauaguauguaaua

SEQ ID NO: 1369229 - RNA, 19 nt, Artificial Sequence
  Description of Artificial Sequence: Synthetic oligonucleotide
  Antisense strand to SEQ ID NO: 1369228
uauuacauacuauucugag

SEQ ID NO: 1369230 - RNA, 19 nt, Artificial Sequence
  Description of Artificial Sequence: Synthetic oligonucleotide
  Sense strand starting at position 3279 of SEQ ID NO: 1242736
gugguugaugaugaguagu

SEQ ID NO: 1369231 - RNA, 19 nt, Artificial Sequence
  Description of Artificial Sequence: Synthetic oligonucleotide
  Antisense strand to SEQ ID NO: 1369230
acuacucaucaucaaccac

SEQ ID NO: 1369232 - RNA, 19 nt, Artificial Sequence
  Description of Artificial Sequence: Synthetic oligonucleotide
  Sense strand starting at position 3281 of SEQ ID NO: 1242736
gguugaugaugaguaguua

SEQ ID NO: 1369233 - RNA, 19 nt, Artificial Sequence
  Description of Artificial Sequence: Synthetic oligonucleotide
  Antisense strand to SEQ ID NO: 1369232
uaacuacucaucaucaacc

SEQ ID NO: 1369234 - RNA, 19 nt, Artificial Sequence
  Description of Artificial Sequence: Synthetic oligonucleotide
  Sense strand starting at position 3282 of SEQ ID NO: 1242736
guugaugaugaguaguuaa

SEQ ID NO: 1369235 - RNA, 19 nt, Artificial Sequence
  Description of Artificial Sequence: Synthetic oligonucleotide
  Antisense strand to SEQ ID NO: 1369234
uuaacuacucaucaucaac

SEQ ID NO: 1369236 - RNA, 19 nt, Artificial Sequence
  Description of Artificial Sequence: Synthetic oligonucleotide
  Sense strand starting at position 3509 of SEQ ID NO: 1242736
uccucuggucacuaguaua

SEQ ID NO: 1369237 - RNA, 19 nt, Artificial Sequence
  Description of Artificial Sequence: Synthetic oligonucleotide
  Antisense strand to SEQ ID NO: 1369236
uauacuagugaccagagga

SEQ ID NO: 1369238 - RNA, 19 nt, Artificial Sequence
  Description of Artificial Sequence: Synthetic oligonucleotide
  Sense strand starting at position 3663 of SEQ ID NO: 1242736
agcacuguccaauaacagu

SEQ ID NO: 1369239 - RNA, 19 nt, Artificial Sequence
  Description of Artificial Sequence: Synthetic oligonucleotide
  Antisense strand to SEQ ID NO: 1369238
acuguuauuggacagugcu

SEQ ID NO: 1369240 - RNA, 19 nt, Artificial Sequence
  Description of Artificial Sequence: Synthetic oligonucleotide
  Sense strand starting at position 3674 of SEQ ID NO: 1242736
auaacagucucugugauga

SEQ ID NO: 1369241 - RNA, 19 nt, Artificial Sequence
  Description of Artificial Sequence: Synthetic oligonucleotide
  Antisense strand to SEQ ID NO: 1369240
ucaucacagagacuguuau

SEQ ID NO: 1369242 - RNA, 19 nt, Artificial Sequence
  Description of Artificial Sequence: Synthetic oligonucleotide
  Sense strand starting at position 3694 of SEQ ID NO: 1242736
ggaaauguuccauaucugc

SEQ ID NO: 1369243 - RNA, 19 nt, Artificial Sequence
  Description of Artificial Sequence: Synthetic oligonucleotide
  Antisense strand to SEQ ID NO: 1369242
gcagauauggaacauuucc

SEQ ID NO: 1369244 - RNA, 19 nt, Artificial Sequence
  Description of Artificial Sequence: Synthetic oligonucleotide
  Sense strand starting at position 3700 of SEQ ID NO: 1242736
guuccauaucugcacuaua

SEQ ID NO: 1369245 - RNA, 19 nt, Artificial Sequence
  Description of Artificial Sequence: Synthetic oligonucleotide
  Antisense strand to SEQ ID NO: 1369244
uauagugcagauauggaac

SEQ ID NO: 1369246 - RNA, 19 nt, Artificial Sequence
  Description of Artificial Sequence: Synthetic oligonucleotide
  Sense strand starting at position 3825 of SEQ ID NO: 1242736
gauauagaccucuguagaa

SEQ ID NO: 1369247 - RNA, 19 nt, Artificial Sequence
  Description of Artificial Sequence: Synthetic oligonucleotide
  Antisense strand to SEQ ID NO: 1369246
uucuacagaggucuauauc

SEQ ID NO: 1369248 - RNA, 19 nt, Artificial Sequence
  Description of Artificial Sequence: Synthetic oligonucleotide
  Sense strand starting at position 3934 of SEQ ID NO: 1242736
ugaagugauuuagacaauu

SEQ ID NO: 1369249 - RNA, 19 nt, Artificial Sequence
  Description of Artificial Sequence: Synthetic oligonucleotide
  Antisense strand to SEQ ID NO: 1369248
aauugucuaaaucacuuca

SEQ ID NO: 1369250 - RNA, 19 nt, Artificial Sequence
  Description of Artificial Sequence: Synthetic oligonucleotide
  Sense strand starting at position 924 of SEQ ID NO: 1242737
gcaagauagacguaucuuc

SEQ ID NO: 1369251 - RNA, 19 nt, Artificial Sequence
  Description of Artificial Sequence: Synthetic oligonucleotide
  Antisense strand to SEQ ID NO: 1369250
gaagauacgucuaucuugc

SEQ ID NO: 1369252 - RNA, 19 nt, Artificial Sequence
  Description of Artificial Sequence: Synthetic oligonucleotide
  Sense strand starting at position 954 of SEQ ID NO: 1242737
auauguuggcaccauaacu

SEQ ID NO: 1369253 - RNA, 19 nt, Artificial Sequence
  Description of Artificial Sequence: Synthetic oligonucleotide
  Antisense strand to SEQ ID NO: 1369252
aguuauggugccaacauau

SEQ ID NO: 1369254 - RNA, 19 nt, Artificial Sequence
  Description of Artificial Sequence: Synthetic oligonucleotide
  Sense strand starting at position 989 of SEQ ID NO: 1242737
gugcgugguguuccacauu

SEQ ID NO: 1369255 - RNA, 19 nt, Artificial Sequence
  Description of Artificial Sequence: Synthetic oligonucleotide
  Antisense strand to SEQ ID NO: 1369254
aauguggaacaccacgcac

SEQ ID NO: 1369256 - RNA, 19 nt, Artificial Sequence
  Description of Artificial Sequence: Synthetic oligonucleotide
  Sense strand starting at position 1030 of SEQ ID NO: 1242737
uuaugauacugaucgguua

SEQ ID NO: 1369257 - RNA, 19 nt, Artificial Sequence
  Description of Artificial Sequence: Synthetic oligonucleotide
  Antisense strand to SEQ ID NO: 1369256
uaaccgaucaguaucauaa

SEQ ID NO: 1369258 - RNA, 19 nt, Artificial Sequence
  Description of Artificial Sequence: Synthetic oligonucleotide
  Sense strand starting at position 1032 of SEQ ID NO: 1242737
augauacugaucgguuaga

SEQ ID NO: 1369259 - RNA, 19 nt, Artificial Sequence
  Description of Artificial Sequence: Synthetic oligonucleotide
  Antisense strand to SEQ ID NO: 1369258
ucuaaccgaucaguaucau

SEQ ID NO: 1369260 - RNA, 19 nt, Artificial Sequence
  Description of Artificial Sequence: Synthetic oligonucleotide
  Sense strand starting at position 1033 of SEQ ID NO: 1242737
ugauacugaucgguuagau

SEQ ID NO: 1369261 - RNA, 19 nt, Artificial Sequence
  Description of Artificial Sequence: Synthetic oligonucleotide
  Antisense strand to SEQ ID NO: 1369260
aucuaaccgaucaguauca

SEQ ID NO: 1369262 - RNA, 19 nt, Artificial Sequence
  Description of Artificial Sequence: Synthetic oligonucleotide
  Sense strand starting at position 1103 of SEQ ID NO: 1242737
acuuuaauugacuggcuca

SEQ ID NO: 1369263 - RNA, 19 nt, Artificial Sequence
  Description of Artificial Sequence: Synthetic oligonucleotide
  Antisense strand to SEQ ID NO: 1369262
ugagccagucaauuaaagu

SEQ ID NO: 1369264 - RNA, 19 nt, Artificial Sequence
  Description of Artificial Sequence: Synthetic oligonucleotide
  Sense strand starting at position 1115 of SEQ ID NO: 1242737
uggcucauccgguauaaau

SEQ ID NO: 1369265 - RNA, 19 nt, Artificial Sequence
  Description of Artificial Sequence: Synthetic oligonucleotide
  Antisense strand to SEQ ID NO: 1369264
auuuauaccggaugagcca

SEQ ID NO: 1369266 - RNA, 19 nt, Artificial Sequence
  Description of Artificial Sequence: Synthetic oligonucleotide
  Sense strand starting at position 1117 of SEQ ID NO: 1242737
gcucauccgguauaaauag

SEQ ID NO: 1369267 - RNA, 19 nt, Artificial Sequence
  Description of Artificial Sequence: Synthetic oligonucleotide
  Antisense strand to SEQ ID NO: 1369266
cuauuuauaccggaugagc

SEQ ID NO: 1369268 - RNA, 19 nt, Artificial Sequence
  Description of Artificial Sequence: Synthetic oligonucleotide
  Sense strand starting at position 1312 of SEQ ID NO: 1242737
ccaggaucugaacgaguca

SEQ ID NO: 1369269 - RNA, 19 nt, Artificial Sequence
  Description of Artificial Sequence: Synthetic oligonucleotide
  Antisense strand to SEQ ID NO: 1369268
ugacucguucagauccugg

SEQ ID NO: 1369270 - RNA, 19 nt, Artificial Sequence
  Description of Artificial Sequence: Synthetic oligonucleotide
  Sense strand starting at position 1398 of SEQ ID NO: 1242737
ggacccauuuagggauaga

SEQ ID NO: 1369271 - RNA, 19 nt, Artificial Sequence
  Description of Artificial Sequence: Synthetic oligonucleotide
  Antisense strand to SEQ ID NO: 1369270
ucuaucccuaaaugggucc

SEQ ID NO: 1369272 - RNA, 19 nt, Artificial Sequence
  Description of Artificial Sequence: Synthetic oligonucleotide
  Sense strand starting at position 1510 of SEQ ID NO: 1242737
ccgccuucgccacuguaau

SEQ ID NO: 1369273 - RNA, 19 nt, Artificial Sequence
  Description of Artificial Sequence: Synthetic oligonucleotide
  Antisense strand to SEQ ID NO: 1369272
auuacaguggcgaaggcgg

SEQ ID NO: 1369274 - RNA, 19 nt, Artificial Sequence
  Description of Artificial Sequence: Synthetic oligonucleotide
  Sense strand starting at position 1542 of SEQ ID NO: 1242737
gccagagguuaucugauac

SEQ ID NO: 1369275 - RNA, 19 nt, Artificial Sequence
  Description of Artificial Sequence: Synthetic oligonucleotide
  Antisense strand to SEQ ID NO: 1369274
guaucagauaaccucuggc

SEQ ID NO: 1369276 - RNA, 19 nt, Artificial Sequence
  Description of Artificial Sequence: Synthetic oligonucleotide
  Sense strand starting at position 1594 of SEQ ID NO: 1242737
auuggagucguacacagaa

SEQ ID NO: 1369277 - RNA, 19 nt, Artificial Sequence
  Description of Artificial Sequence: Synthetic oligonucleotide
  Antisense strand to SEQ ID NO: 1369276
uucuguguacgacuccaau

SEQ ID NO: 1369278 - RNA, 19 nt, Artificial Sequence
  Description of Artificial Sequence: Synthetic oligonucleotide
  Sense strand starting at position 1596 of SEQ ID NO: 1242737
uggagucguacacagaaau

SEQ ID NO: 1369279 - RNA, 19 nt, Artificial Sequence
  Description of Artificial Sequence: Synthetic oligonucleotide
  Antisense strand to SEQ ID NO: 1369278
auuucuguguacgacucca

SEQ ID NO: 1369280 - RNA, 19 nt, Artificial Sequence
  Description of Artificial Sequence: Synthetic oligonucleotide
  Sense strand starting at position 2142 of SEQ ID NO: 1242737
uuguucuuaucuccaagga

SEQ ID NO: 1369281 - RNA, 19 nt, Artificial Sequence
  Description of Artificial Sequence: Synthetic oligonucleotide
  Antisense strand to SEQ ID NO: 1369280
uccuuggagauaagaacaa

SEQ ID NO: 1369282 - RNA, 19 nt, Artificial Sequence
  Description of Artificial Sequence: Synthetic oligonucleotide
  Sense strand starting at position 2447 of SEQ ID NO: 1242737
uugucaugagucugaaaca

SEQ ID NO: 1369283 - RNA, 19 nt, Artificial Sequence
  Description of Artificial Sequence: Synthetic oligonucleotide
  Antisense strand to SEQ ID NO: 1369282
uguuucagacucaugacaa

SEQ ID NO: 1369284 - RNA, 19 nt, Artificial Sequence
  Description of Artificial Sequence: Synthetic oligonucleotide
  Sense strand starting at position 2465 of SEQ ID NO: 1242737
aauggaugcccgugaauaa

SEQ ID NO: 1369285 - RNA, 19 nt, Artificial Sequence
  Description of Artificial Sequence: Synthetic oligonucleotide
  Antisense strand to SEQ ID NO: 1369284
uuauucacgggcauccauu

SEQ ID NO: 1369286 - RNA, 19 nt, Artificial Sequence
  Description of Artificial Sequence: Synthetic oligonucleotide
  Sense strand starting at position 2466 of SEQ ID NO: 1242737
auggaugcccgugaauaaa

SEQ ID NO: 1369287 - RNA, 19 nt, Artificial Sequence
  Description of Artificial Sequence: Synthetic oligonucleotide
  Antisense strand to SEQ ID NO: 1369286
uuuauucacgggcauccau

SEQ ID NO: 1369288 - RNA, 19 nt, Artificial Sequence
  Description of Artificial Sequence: Synthetic oligonucleotide
  Sense strand starting at position 2475 of SEQ ID NO: 1242737
cgugaauaaacguaaauug

SEQ ID NO: 1369289 - RNA, 19 nt, Artificial Sequence
  Description of Artificial Sequence: Synthetic oligonucleotide
  Antisense strand to SEQ ID NO: 1369288
caauuuacguuuauucacg

SEQ ID NO: 1369290 - RNA, 19 nt, Artificial Sequence
  Description of Artificial Sequence: Synthetic oligonucleotide
  Sense strand starting at position 2557 of SEQ ID NO: 1242737
cuuugagcccuagaauauc

SEQ ID NO: 1369291 - RNA, 19 nt, Artificial Sequence
  Description of Artificial Sequence: Synthetic oligonucleotide
  Antisense strand to SEQ ID NO: 1369290
gauauucuagggcucaaag

SEQ ID NO: 1369292 - RNA, 19 nt, Artificial Sequence
  Description of Artificial Sequence: Synthetic oligonucleotide
  Sense strand starting at position 2568 of SEQ ID NO: 1242737
agaauaucaucgguguuaa

SEQ ID NO: 1369293 - RNA, 19 nt, Artificial Sequence
  Description of Artificial Sequence: Synthetic oligonucleotide
  Antisense strand to SEQ ID NO: 1369292
uuaacaccgaugauauucu

SEQ ID NO: 1369294 - RNA, 19 nt, Artificial Sequence
  Description of Artificial Sequence: Synthetic oligonucleotide
  Sense strand starting at position 2569 of SEQ ID NO: 1242737
gaauaucaucgguguuaaa

SEQ ID NO: 1369295 - RNA, 19 nt, Artificial Sequence
  Description of Artificial Sequence: Synthetic oligonucleotide
  Antisense strand to SEQ ID NO: 1369294
uuuaacaccgaugauauuc

SEQ ID NO: 1369296 - RNA, 19 nt, Artificial Sequence
  Description of Artificial Sequence: Synthetic oligonucleotide
  Sense strand starting at position 2580 of SEQ ID NO: 1242737
guguuaaauaaggguaaca

SEQ ID NO: 1369297 - RNA, 19 nt, Artificial Sequence
  Description of Artificial Sequence: Synthetic oligonucleotide
  Antisense strand to SEQ ID NO: 1369296
uguuacccuuauuuaacac

SEQ ID NO: 1369298 - RNA, 19 nt, Artificial Sequence
  Description of Artificial Sequence: Synthetic oligonucleotide
  Sense strand starting at position 2629 of SEQ ID NO: 1242737
uaggauuaaugcguaugaa

SEQ ID NO: 1369299 - RNA, 19 nt, Artificial Sequence
  Description of Artificial Sequence: Synthetic oligonucleotide
  Antisense strand to SEQ ID NO: 1369298
uucauacgcauuaauccua

SEQ ID NO: 1369300 - RNA, 19 nt, Artificial Sequence
  Description of Artificial Sequence: Synthetic oligonucleotide
  Sense strand starting at position 2791 of SEQ ID NO: 1242737
ugagcuuugggaugaucuu

SEQ ID NO: 1369301 - RNA, 19 nt, Artificial Sequence
  Description of Artificial Sequence: Synthetic oligonucleotide
  Antisense strand to SEQ ID NO: 1369300
aagaucaucccaaagcuca

SEQ ID NO: 1369302 - RNA, 19 nt, Artificial Sequence
  Description of Artificial Sequence: Synthetic oligonucleotide
  Sense strand starting at position 2792 of SEQ ID NO: 1242737
gagcuuugggaugaucuuu

SEQ ID NO: 1369303 - RNA, 19 nt, Artificial Sequence
  Description of Artificial Sequence: Synthetic oligonucleotide
  Antisense strand to SEQ ID NO: 1369302
aaagaucaucccaaagcuc

SEQ ID NO: 1369304 - RNA, 19 nt, Artificial Sequence
  Description of Artificial Sequence: Synthetic oligonucleotide
  Sense strand starting at position 2813 of SEQ ID NO: 1242737
cgauuuccaucagcuaagu

SEQ ID NO: 1369305 - RNA, 19 nt, Artificial Sequence
  Description of Artificial Sequence: Synthetic oligonucleotide
  Antisense strand to SEQ ID NO: 1369304
acuuagcugauggaaaucg

SEQ ID NO: 1369306 - RNA, 19 nt, Artificial Sequence
  Description of Artificial Sequence: Synthetic oligonucleotide
  Sense strand starting at position 2939 of SEQ ID NO: 1242737
cucuuccuccagugaagga

SEQ ID NO: 1369307 - RNA, 19 nt, Artificial Sequence
  Description of Artificial Sequence: Synthetic oligonucleotide
  Antisense strand to SEQ ID NO: 1369306
uccuucacuggaggaagag

SEQ ID NO: 1369308 - RNA, 19 nt, Artificial Sequence
  Description of Artificial Sequence: Synthetic oligonucleotide
  Sense strand starting at position 3082 of SEQ ID NO: 1242737
cucagaauaguauguaaua

SEQ ID NO: 1369309 - RNA, 19 nt, Artificial Sequence
  Description of Artificial Sequence: Synthetic oligonucleotide
  Antisense strand to SEQ ID NO: 1369308
uauuacauacuauucugag

SEQ ID NO: 1369310 - RNA, 19 nt, Artificial Sequence
  Description of Artificial Sequence: Synthetic oligonucleotide
  Sense strand starting at position 3148 of SEQ ID NO: 1242737
gugguugaugaugaguagu

SEQ ID NO: 1369311 - RNA, 19 nt, Artificial Sequence
  Description of Artificial Sequence: Synthetic oligonucleotide
  Antisense strand to SEQ ID NO: 1369310
acuacucaucaucaaccac

SEQ ID NO: 1369312 - RNA, 19 nt, Artificial Sequence
  Description of Artificial Sequence: Synthetic oligonucleotide
  Sense strand starting at position 3150 of SEQ ID NO: 1242737
gguugaugaugaguaguua

SEQ ID NO: 1369313 - RNA, 19 nt, Artificial Sequence
  Description of Artificial Sequence: Synthetic oligonucleotide
  Antisense strand to SEQ ID NO: 1369312
uaacuacucaucaucaacc

SEQ ID NO: 1369314 - RNA, 19 nt, Artificial Sequence
  Description of Artificial Sequence: Synthetic oligonucleotide
  Sense strand starting at position 3151 of SEQ ID NO: 1242737
guugaugaugaguaguuaa

SEQ ID NO: 1369315 - RNA, 19 nt, Artificial Sequence
  Description of Artificial Sequence: Synthetic oligonucleotide
  Antisense strand to SEQ ID NO: 1369314
uuaacuacucaucaucaac

SEQ ID NO: 1369316 - RNA, 19 nt, Artificial Sequence
  Description of Artificial Sequence: Synthetic oligonucleotide
  Sense strand starting at position 3378 of SEQ ID NO: 1242737
uccucuggucacuaguaua

SEQ ID NO: 1369317 - RNA, 19 nt, Artificial Sequence
  Description of Artificial Sequence: Synthetic oligonucleotide
  Antisense strand to SEQ ID NO: 1369316
uauacuagugaccagagga

SEQ ID NO: 1369318 - RNA, 19 nt, Artificial Sequence
  Description of Artificial Sequence: Synthetic oligonucleotide
  Sense strand starting at position 3532 of SEQ ID NO: 1242737
agcacuguccaauaacagu

SEQ ID NO: 1369319 - RNA, 19 nt, Artificial Sequence
  Description of Artificial Sequence: Synthetic oligonucleotide
  Antisense strand to SEQ ID NO: 1369318
acuguuauuggacagugcu

SEQ ID NO: 1369320 - RNA, 19 nt, Artificial Sequence
  Description of Artificial Sequence: Synthetic oligonucleotide
  Sense strand starting at position 3543 of SEQ ID NO: 1242737
auaacagucucugugauga

SEQ ID NO: 1369321 - RNA, 19 nt, Artificial Sequence
  Description of Artificial Sequence: Synthetic oligonucleotide
  Antisense strand to SEQ ID NO: 1369320
ucaucacagagacuguuau

SEQ ID NO: 1369322 - RNA, 19 nt, Artificial Sequence
  Description of Artificial Sequence: Synthetic oligonucleotide
  Sense strand starting at position 3563 of SEQ ID NO: 1242737
ggaaauguuccauaucugc

SEQ ID NO: 1369323 - RNA, 19 nt, Artificial Sequence
  Description of Artificial Sequence: Synthetic oligonucleotide
  Antisense strand to SEQ ID NO: 1369322
gcagauauggaacauuucc

SEQ ID NO: 1369324 - RNA, 19 nt, Artificial Sequence
  Description of Artificial Sequence: Synthetic oligonucleotide
  Sense strand starting at position 3569 of SEQ ID NO: 1242737
guuccauaucugcacuaua

SEQ ID NO: 1369325 - RNA, 19 nt, Artificial Sequence
  Description of Artificial Sequence: Synthetic oligonucleotide
  Antisense strand to SEQ ID NO: 1369324
uauagugcagauauggaac

SEQ ID NO: 1369326 - RNA, 19 nt, Artificial Sequence
  Description of Artificial Sequence: Synthetic oligonucleotide
  Sense strand starting at position 3694 of SEQ ID NO: 1242737
gauauagaccucuguagaa

SEQ ID NO: 1369327 - RNA, 19 nt, Artificial Sequence
  Description of Artificial Sequence: Synthetic oligonucleotide
  Antisense strand to SEQ ID NO: 1369326
uucuacagaggucuauauc

SEQ ID NO: 1369328 - RNA, 19 nt, Artificial Sequence
  Description of Artificial Sequence: Synthetic oligonucleotide
  Sense strand starting at position 3803 of SEQ ID NO: 1242737
ugaagugauuuagacaauu

SEQ ID NO: 1369329 - RNA, 19 nt, Artificial Sequence
  Description of Artificial Sequence: Synthetic oligonucleotide
  Antisense strand to SEQ ID NO: 1369328
aauugucuaaaucacuuca

SEQ ID NO: 1369330 - RNA, 19 nt, Artificial Sequence
  Description of Artificial Sequence: Synthetic oligonucleotide
  Sense strand starting at position 3 of SEQ ID NO: 1242738
cugggagcuuucugauaag

SEQ ID NO: 1369331 - RNA, 19 nt, Artificial Sequence
  Description of Artificial Sequence: Synthetic oligonucleotide
  Antisense strand to SEQ ID NO: 1369330
cuuaucagaaagcucccag

SEQ ID NO: 1369332 - RNA, 19 nt, Artificial Sequence
  Description of Artificial Sequence: Synthetic oligonucleotide
  Sense strand starting at position 6 of SEQ ID NO: 1242738
ggagcuuucugauaaggag

SEQ ID NO: 1369333 - RNA, 19 nt, Artificial Sequence
  Description of Artificial Sequence: Synthetic oligonucleotide
  Antisense strand to SEQ ID NO: 1369332
cuccuuaucagaaagcucc

SEQ ID NO: 1369334 - RNA, 19 nt, Artificial Sequence
  Description of Artificial Sequence: Synthetic oligonucleotide
  Sense strand starting at position 9 of SEQ ID NO: 1242738
gcuuucugauaaggagacu

SEQ ID NO: 1369335 - RNA, 19 nt, Artificial Sequence
  Description of Artificial Sequence: Synthetic oligonucleotide
  Antisense strand to SEQ ID NO: 1369334
agucuccuuaucagaaagc

SEQ ID NO: 1369336 - RNA, 19 nt, Artificial Sequence
  Description of Artificial Sequence: Synthetic oligonucleotide
  Sense strand starting at position 88 of SEQ ID NO: 1242738
ggcccugugauaugcacuu

SEQ ID NO: 1369337 - RNA, 19 nt, Artificial Sequence
  Description of Artificial Sequence: Synthetic oligonucleotide
  Antisense strand to SEQ ID NO: 1369336
aagugcauaucacagggcc

SEQ ID NO: 1369338 - RNA, 19 nt, Artificial Sequence
  Description of Artificial Sequence: Synthetic oligonucleotide
  Sense strand starting at position 138 of SEQ ID NO: 1242738
gucccuuggagguagaaau

SEQ ID NO: 1369339 - RNA, 19 nt, Artificial Sequence
  Description of Artificial Sequence: Synthetic oligonucleotide
  Antisense strand to SEQ ID NO: 1369338
auuucuaccuccaagggac

SEQ ID NO: 1369340 - RNA, 19 nt, Artificial Sequence
  Description of Artificial Sequence: Synthetic oligonucleotide
  Sense strand starting at position 289 of SEQ ID NO: 1242738
uaagccuuuguccagugaa

SEQ ID NO: 1369341 - RNA, 19 nt, Artificial Sequence
  Description of Artificial Sequence: Synthetic oligonucleotide
  Antisense strand to SEQ ID NO: 1369340
uucacuggacaaaggcuua

SEQ ID NO: 1369342 - RNA, 19 nt, Artificial Sequence
  Description of Artificial Sequence: Synthetic oligonucleotide
  Sense strand starting at position 292 of SEQ ID NO: 1242738
gccuuuguccagugaacuc

SEQ ID NO: 1369343 - RNA, 19 nt, Artificial Sequence
  Description of Artificial Sequence: Synthetic oligonucleotide
  Antisense strand to SEQ ID NO: 1369342
gaguucacuggacaaaggc

SEQ ID NO: 1369344 - RNA, 19 nt, Artificial Sequence
  Description of Artificial Sequence: Synthetic oligonucleotide
  Sense strand starting at position 376 of SEQ ID NO: 1242738
gcacauauuuauuacaugu

SEQ ID NO: 1369345 - RNA, 19 nt, Artificial Sequence
  Description of Artificial Sequence: Synthetic oligonucleotide
  Antisense strand to SEQ ID NO: 1369344
acauguaauaaauaugugc

SEQ ID NO: 1369346 - RNA, 19 nt, Artificial Sequence
  Description of Artificial Sequence: Synthetic oligonucleotide
  Sense strand starting at position 531 of SEQ ID NO: 1242738
cugccuugccucuguguaa

SEQ ID NO: 1369347 - RNA, 19 nt, Artificial Sequence
  Description of Artificial Sequence: Synthetic oligonucleotide
  Antisense strand to SEQ ID NO: 1369346
uuacacagaggcaaggcag

SEQ ID NO: 1369348 - RNA, 19 nt, Artificial Sequence
  Description of Artificial Sequence: Synthetic oligonucleotide
  Sense strand starting at position 532 of SEQ ID NO: 1242738
ugccuugccucuguguaaa

SEQ ID NO: 1369349 - RNA, 19 nt, Artificial Sequence
  Description of Artificial Sequence: Synthetic oligonucleotide
  Antisense strand to SEQ ID NO: 1369348
uuuacacagaggcaaggca

SEQ ID NO: 1369350 - RNA, 19 nt, Artificial Sequence
  Description of Artificial Sequence: Synthetic oligonucleotide
  Sense strand starting at position 804 of SEQ ID NO: 1242738
gguuacaguggccgagauu

SEQ ID NO: 1369351 - RNA, 19 nt, Artificial Sequence
  Description of Artificial Sequence: Synthetic oligonucleotide
  Antisense strand to SEQ ID NO: 1369350
aaucucggccacuguaacc

SEQ ID NO: 1369352 - RNA, 19 nt, Artificial Sequence
  Description of Artificial Sequence: Synthetic oligonucleotide
  Sense strand starting at position 1598 of SEQ ID NO: 1242738
cccugagucugguugcaaa

SEQ ID NO: 1369353 - RNA, 19 nt, Artificial Sequence
  Description of Artificial Sequence: Synthetic oligonucleotide
  Antisense strand to SEQ ID NO: 1369352
uuugcaaccagacucaggg

SEQ ID NO: 1369354 - RNA, 19 nt, Artificial Sequence
  Description of Artificial Sequence: Synthetic oligonucleotide
  Sense strand starting at position 1601 of SEQ ID NO: 1242738
ugagucugguugcaaauua

SEQ ID NO: 1369355 - RNA, 19 nt, Artificial Sequence
  Description of Artificial Sequence: Synthetic oligonucleotide
  Antisense strand to SEQ ID NO: 1369354
uaauuugcaaccagacuca

SEQ ID NO: 1369356 - RNA, 19 nt, Artificial Sequence
  Description of Artificial Sequence: Synthetic oligonucleotide
  Sense strand starting at position 1730 of SEQ ID NO: 1242738
gugaggauucccgcgugca

SEQ ID NO: 1369357 - RNA, 19 nt, Artificial Sequence
  Description of Artificial Sequence: Synthetic oligonucleotide
  Antisense strand to SEQ ID NO: 1369356
ugcacgcgggaauccucac

SEQ ID NO: 1369358 - RNA, 19 nt, Artificial Sequence
  Description of Artificial Sequence: Synthetic oligonucleotide
  Sense strand starting at position 1731 of SEQ ID NO: 1242738
ugaggauucccgcgugcag

SEQ ID NO: 1369359 - RNA, 19 nt, Artificial Sequence
  Description of Artificial Sequence: Synthetic oligonucleotide
  Antisense strand to SEQ ID NO: 1369358
cugcacgcgggaauccuca

SEQ ID NO: 1369360 - RNA, 19 nt, Artificial Sequence
  Description of Artificial Sequence: Synthetic oligonucleotide
  Sense strand starting at position 1923 of SEQ ID NO: 1242738
gacaccuccgguggagaau

SEQ ID NO: 1369361 - RNA, 19 nt, Artificial Sequence
  Description of Artificial Sequence: Synthetic oligonucleotide
  Antisense strand to SEQ ID NO: 1369360
auucuccaccggagguguc

SEQ ID NO: 1369362 - RNA, 19 nt, Artificial Sequence
  Description of Artificial Sequence: Synthetic oligonucleotide
  Sense strand starting at position 2122 of SEQ ID NO: 1242738
ucccaagacuauuaaggga

SEQ ID NO: 1369363 - RNA, 19 nt, Artificial Sequence
  Description of Artificial Sequence: Synthetic oligonucleotide
  Antisense strand to SEQ ID NO: 1369362
ucccuuaauagucuuggga

SEQ ID NO: 1369364 - RNA, 19 nt, Artificial Sequence
  Description of Artificial Sequence: Synthetic oligonucleotide
  Sense strand starting at position 2996 of SEQ ID NO: 1242738
uugauaacauguuccaaug

SEQ ID NO: 1369365 - RNA, 19 nt, Artificial Sequence
  Description of Artificial Sequence: Synthetic oligonucleotide
  Antisense strand to SEQ ID NO: 1369364
cauuggaacauguuaucaa

SEQ ID NO: 1369366 - RNA, 19 nt, Artificial Sequence
  Description of Artificial Sequence: Synthetic oligonucleotide
  Sense strand starting at position 3375 of SEQ ID NO: 1242738
ggcagaguccaguaaucug

SEQ ID NO: 1369367 - RNA, 19 nt, Artificial Sequence
  Description of Artificial Sequence: Synthetic oligonucleotide
  Antisense strand to SEQ ID NO: 1369366
cagauuacuggacucugcc

SEQ ID NO: 1369368 - RNA, 19 nt, Artificial Sequence
  Description of Artificial Sequence: Synthetic oligonucleotide
  Sense strand starting at position 3378 of SEQ ID NO: 1242738
agaguccaguaaucugaaa

SEQ ID NO: 1369369 - RNA, 19 nt, Artificial Sequence
  Description of Artificial Sequence: Synthetic oligonucleotide
  Antisense strand to SEQ ID NO: 1369368
uuucagauuacuggacucu

SEQ ID NO: 1369370 - RNA, 19 nt, Artificial Sequence
  Description of Artificial Sequence: Synthetic oligonucleotide
  Sense strand starting at position 3416 of SEQ ID NO: 1242738
uccuuuaauccaugguggu

SEQ ID NO: 1369371 - RNA, 19 nt, Artificial Sequence
  Description of Artificial Sequence: Synthetic oligonucleotide
  Antisense strand to SEQ ID NO: 1369370
accaccauggauuaaagga

SEQ ID NO: 1369372 - RNA, 19 nt, Artificial Sequence
  Description of Artificial Sequence: Synthetic oligonucleotide
  Sense strand starting at position 3417 of SEQ ID NO: 1242738
ccuuuaauccaugguggua

SEQ ID NO: 1369373 - RNA, 19 nt, Artificial Sequence
  Description of Artificial Sequence: Synthetic oligonucleotide
  Antisense strand to SEQ ID NO: 1369372
uaccaccauggauuaaagg

SEQ ID NO: 1369374 - RNA, 19 nt, Artificial Sequence
  Description of Artificial Sequence: Synthetic oligonucleotide
  Sense strand starting at position 3422 of SEQ ID NO: 1242738
aauccauggugguaucuga

SEQ ID NO: 1369375 - RNA, 19 nt, Artificial Sequence
  Description of Artificial Sequence: Synthetic oligonucleotide
  Antisense strand to SEQ ID NO: 1369374
ucagauaccaccauggauu

SEQ ID NO: 1369376 - RNA, 19 nt, Artificial Sequence
  Description of Artificial Sequence: Synthetic oligonucleotide
  Sense strand starting at position 3454 of SEQ ID NO: 1242738
ugcugcugggaguagaaau

SEQ ID NO: 1369377 - RNA, 19 nt, Artificial Sequence
  Description of Artificial Sequence: Synthetic oligonucleotide
  Antisense strand to SEQ ID NO: 1369376
auuucuacucccagcagca

SEQ ID NO: 1369378 - RNA, 19 nt, Artificial Sequence
  Description of Artificial Sequence: Synthetic oligonucleotide
  Sense strand starting at position 3464 of SEQ ID NO: 1242738
aguagaaauuagcagucuu

SEQ ID NO: 1369379 - RNA, 19 nt, Artificial Sequence
  Description of Artificial Sequence: Synthetic oligonucleotide
  Antisense strand to SEQ ID NO: 1369378
aagacugcuaauuucuacu

SEQ ID NO: 1369380 - RNA, 19 nt, Artificial Sequence
  Description of Artificial Sequence: Synthetic oligonucleotide
  Sense strand starting at position 3485 of SEQ ID NO: 1242738
cuggcugugguuuggcaau

SEQ ID NO: 1369381 - RNA, 19 nt, Artificial Sequence
  Description of Artificial Sequence: Synthetic oligonucleotide
  Antisense strand to SEQ ID NO: 1369380
auugccaaaccacagccag

SEQ ID NO: 1369382 - RNA, 19 nt, Artificial Sequence
  Description of Artificial Sequence: Synthetic oligonucleotide
  Sense strand starting at position 3491 of SEQ ID NO: 1242738
gugguuuggcaaugaauua

SEQ ID NO: 1369383 - RNA, 19 nt, Artificial Sequence
  Description of Artificial Sequence: Synthetic oligonucleotide
  Antisense strand to SEQ ID NO: 1369382
uaauucauugccaaaccac

SEQ ID NO: 1369384 - RNA, 19 nt, Artificial Sequence
  Description of Artificial Sequence: Synthetic oligonucleotide
  Sense strand starting at position 3492 of SEQ ID NO: 1242738
ugguuuggcaaugaauuaa

SEQ ID NO: 1369385 - RNA, 19 nt, Artificial Sequence
  Description of Artificial Sequence: Synthetic oligonucleotide
  Antisense strand to SEQ ID NO: 1369384
uuaauucauugccaaacca

SEQ ID NO: 1369386 - RNA, 19 nt, Artificial Sequence
  Description of Artificial Sequence: Synthetic oligonucleotide
  Sense strand starting at position 3514 of SEQ ID NO: 1242738
ccuuaacaauggucauaag

SEQ ID NO: 1369387 - RNA, 19 nt, Artificial Sequence
  Description of Artificial Sequence: Synthetic oligonucleotide
  Antisense strand to SEQ ID NO: 1369386
cuuaugaccauuguuaagg

SEQ ID NO: 1369388 - RNA, 19 nt, Artificial Sequence
  Description of Artificial Sequence: Synthetic oligonucleotide
  Sense strand starting at position 3515 of SEQ ID NO: 1242738
cuuaacaauggucauaagu

SEQ ID NO: 1369389 - RNA, 19 nt, Artificial Sequence
  Description of Artificial Sequence: Synthetic oligonucleotide
  Antisense strand to SEQ ID NO: 1369388
acuuaugaccauuguuaag

SEQ ID NO: 1369390 - RNA, 19 nt, Artificial Sequence
  Description of Artificial Sequence: Synthetic oligonucleotide
  Sense strand starting at position 3537 of SEQ ID NO: 1242738
cugaauguaucuuaaggaa

SEQ ID NO: 1369391 - RNA, 19 nt, Artificial Sequence
  Description of Artificial Sequence: Synthetic oligonucleotide
  Antisense strand to SEQ ID NO: 1369390
uuccuuaagauacauucag

SEQ ID NO: 1369392 - RNA, 19 nt, Artificial Sequence
  Description of Artificial Sequence: Synthetic oligonucleotide
  Sense strand starting at position 3594 of SEQ ID NO: 1242738
aaguguuguuugugauacu

SEQ ID NO: 1369393 - RNA, 19 nt, Artificial Sequence
  Description of Artificial Sequence: Synthetic oligonucleotide
  Antisense strand to SEQ ID NO: 1369392
aguaucacaaacaacacuu

SEQ ID NO: 1369394 - RNA, 19 nt, Artificial Sequence
  Description of Artificial Sequence: Synthetic oligonucleotide
  Sense strand starting at position 3595 of SEQ ID NO: 1242738
aguguuguuugugauacua

SEQ ID NO: 1369395 - RNA, 19 nt, Artificial Sequence
  Description of Artificial Sequence: Synthetic oligonucleotide
  Antisense strand to SEQ ID NO: 1369394
uaguaucacaaacaacacu

SEQ ID NO: 1369396 - RNA, 19 nt, Artificial Sequence
  Description of Artificial Sequence: Synthetic oligonucleotide
  Sense strand starting at position 3597 of SEQ ID NO: 1242738
uguuguuugugauacuaaa

SEQ ID NO: 1369397 - RNA, 19 nt, Artificial Sequence
  Description of Artificial Sequence: Synthetic oligonucleotide
  Antisense strand to SEQ ID NO: 1369396
uuuaguaucacaaacaaca

SEQ ID NO: 1369398 - RNA, 19 nt, Artificial Sequence
  Description of Artificial Sequence: Synthetic oligonucleotide
  Sense strand starting at position 3643 of SEQ ID NO: 1242738
aaagaugugugccagaaug

SEQ ID NO: 1369399 - RNA, 19 nt, Artificial Sequence
  Description of Artificial Sequence: Synthetic oligonucleotide
  Antisense strand to SEQ ID NO: 1369398
cauucuggcacacaucuuu

SEQ ID NO: 1369400 - RNA, 19 nt, Artificial Sequence
  Description of Artificial Sequence: Synthetic oligonucleotide
  Sense strand starting at position 3681 of SEQ ID NO: 1242738
ugaucaaacugcugugauc

SEQ ID NO: 1369401 - RNA, 19 nt, Artificial Sequence
  Description of Artificial Sequence: Synthetic oligonucleotide
  Antisense strand to SEQ ID NO: 1369400
gaucacagcaguuugauca

SEQ ID NO: 1369402 - RNA, 19 nt, Artificial Sequence
  Description of Artificial Sequence: Synthetic oligonucleotide
  Sense strand starting at position 19 of SEQ ID NO: 1242739
ucauguauuucuggaccca

SEQ ID NO: 1369403 - RNA, 19 nt, Artificial Sequence
  Description of Artificial Sequence: Synthetic oligonucleotide
  Antisense strand to SEQ ID NO: 1369402
uggguccagaaauacauga

SEQ ID NO: 1369404 - RNA, 19 nt, Artificial Sequence
  Description of Artificial Sequence: Synthetic oligonucleotide
  Sense strand starting at position 62 of SEQ ID NO: 1242739
cagaauggugucugucuca

SEQ ID NO: 1369405 - RNA, 19 nt, Artificial Sequence
  Description of Artificial Sequence: Synthetic oligonucleotide
  Antisense strand to SEQ ID NO: 1369404
ugagacagacaccauucug

SEQ ID NO: 1369406 - RNA, 19 nt, Artificial Sequence
  Description of Artificial Sequence: Synthetic oligonucleotide
  Sense strand starting at position 69 of SEQ ID NO: 1242739
gugucugucucauuaaaga

SEQ ID NO: 1369407 - RNA, 19 nt, Artificial Sequence
  Description of Artificial Sequence: Synthetic oligonucleotide
  Antisense strand to SEQ ID NO: 1369406
ucuuuaaugagacagacac

SEQ ID NO: 1369408 - RNA, 19 nt, Artificial Sequence
  Description of Artificial Sequence: Synthetic oligonucleotide
  Sense strand starting at position 93 of SEQ ID NO: 1242739
gguauagagcacugagguu

SEQ ID NO: 1369409 - RNA, 19 nt, Artificial Sequence
  Description of Artificial Sequence: Synthetic oligonucleotide
  Antisense strand to SEQ ID NO: 1369408
aaccucagugcucuauacc

SEQ ID NO: 1369410 - RNA, 19 nt, Artificial Sequence
  Description of Artificial Sequence: Synthetic oligonucleotide
  Sense strand starting at position 99 of SEQ ID NO: 1242739
gagcacugagguuaagagu

SEQ ID NO: 1369411 - RNA, 19 nt, Artificial Sequence
  Description of Artificial Sequence: Synthetic oligonucleotide
  Antisense strand to SEQ ID NO: 1369410
acucuuaaccucagugcuc

SEQ ID NO: 1369412 - RNA, 19 nt, Artificial Sequence
  Description of Artificial Sequence: Synthetic oligonucleotide
  Sense strand starting at position 105 of SEQ ID NO: 1242739
ugagguuaagagugugaau

SEQ ID NO: 1369413 - RNA, 19 nt, Artificial Sequence
  Description of Artificial Sequence: Synthetic oligonucleotide
  Antisense strand to SEQ ID NO: 1369412
auucacacucuuaaccuca

SEQ ID NO: 1369414 - RNA, 19 nt, Artificial Sequence
  Description of Artificial Sequence: Synthetic oligonucleotide
  Sense strand starting at position 133 of SEQ ID NO: 1242739
ccauuuacugagcgaucuu

SEQ ID NO: 1369415 - RNA, 19 nt, Artificial Sequence
  Description of Artificial Sequence: Synthetic oligonucleotide
  Antisense strand to SEQ ID NO: 1369414
aagaucgcucaguaaaugg

SEQ ID NO: 1369416 - RNA, 19 nt, Artificial Sequence
  Description of Artificial Sequence: Synthetic oligonucleotide
  Sense strand starting at position 142 of SEQ ID NO: 1242739
gagcgaucuugugcaaguu

SEQ ID NO: 1369417 - RNA, 19 nt, Artificial Sequence
  Description of Artificial Sequence: Synthetic oligonucleotide
  Antisense strand to SEQ ID NO: 1369416
aacuugcacaagaucgcuc

SEQ ID NO: 1369418 - RNA, 19 nt, Artificial Sequence
  Description of Artificial Sequence: Synthetic oligonucleotide
  Sense strand starting at position 143 of SEQ ID NO: 1242739
agcgaucuugugcaaguua

SEQ ID NO: 1369419 - RNA, 19 nt, Artificial Sequence
  Description of Artificial Sequence: Synthetic oligonucleotide
  Antisense strand to SEQ ID NO: 1369418
uaacuugcacaagaucgcu

SEQ ID NO: 1369420 - RNA, 19 nt, Artificial Sequence
  Description of Artificial Sequence: Synthetic oligonucleotide
  Sense strand starting at position 154 of SEQ ID NO: 1242739
gcaaguuacuuccuucugu

SEQ ID NO: 1369421 - RNA, 19 nt, Artificial Sequence
  Description of Artificial Sequence: Synthetic oligonucleotide
  Antisense strand to SEQ ID NO: 1369420
acagaaggaaguaacuugc

SEQ ID NO: 1369422 - RNA, 19 nt, Artificial Sequence
  Description of Artificial Sequence: Synthetic oligonucleotide
  Sense strand starting at position 535 of SEQ ID NO: 1242739
aacucaugggcuugauuga

SEQ ID NO: 1369423 - RNA, 19 nt, Artificial Sequence
  Description of Artificial Sequence: Synthetic oligonucleotide
  Antisense strand to SEQ ID NO: 1369422
ucaaucaagcccaugaguu

SEQ ID NO: 1369424 - RNA, 19 nt, Artificial Sequence
  Description of Artificial Sequence: Synthetic oligonucleotide
  Sense strand starting at position 542 of SEQ ID NO: 1242739
gggcuugauugaaagagug

SEQ ID NO: 1369425 - RNA, 19 nt, Artificial Sequence
  Description of Artificial Sequence: Synthetic oligonucleotide
  Antisense strand to SEQ ID NO: 1369424
cacucuuucaaucaagccc

SEQ ID NO: 1369426 - RNA, 19 nt, Artificial Sequence
  Description of Artificial Sequence: Synthetic oligonucleotide
  Sense strand starting at position 554 of SEQ ID NO: 1242739
aagagugagugaguggaua

SEQ ID NO: 1369427 - RNA, 19 nt, Artificial Sequence
  Description of Artificial Sequence: Synthetic oligonucleotide
  Antisense strand to SEQ ID NO: 1369426
uauccacucacucacucuu

SEQ ID NO: 1369428 - RNA, 19 nt, Artificial Sequence
  Description of Artificial Sequence: Synthetic oligonucleotide
  Sense strand starting at position 556 of SEQ ID NO: 1242739
gagugagugaguggauauu

SEQ ID NO: 1369429 - RNA, 19 nt, Artificial Sequence
  Description of Artificial Sequence: Synthetic oligonucleotide
  Antisense strand to SEQ ID NO: 1369428
aauauccacucacucacuc

SEQ ID NO: 1369430 - RNA, 19 nt, Artificial Sequence
  Description of Artificial Sequence: Synthetic oligonucleotide
  Sense strand starting at position 565 of SEQ ID NO: 1242739
aguggauauuuguaaagca

SEQ ID NO: 1369431 - RNA, 19 nt, Artificial Sequence
  Description of Artificial Sequence: Synthetic oligonucleotide
  Antisense strand to SEQ ID NO: 1369430
ugcuuuacaaauauccacu

SEQ ID NO: 1369432 - RNA, 19 nt, Artificial Sequence
  Description of Artificial Sequence: Synthetic oligonucleotide
  Sense strand starting at position 596 of SEQ ID NO: 1242739
gcgcauagugcacuuauga

SEQ ID NO: 1369433 - RNA, 19 nt, Artificial Sequence
  Description of Artificial Sequence: Synthetic oligonucleotide
  Antisense strand to SEQ ID NO: 1369432
ucauaagugcacuaugcgc

SEQ ID NO: 1369434 - RNA, 19 nt, Artificial Sequence
  Description of Artificial Sequence: Synthetic oligonucleotide
  Sense strand starting at position 611 of SEQ ID NO: 1242739
augaguauuugcuuagcaa

SEQ ID NO: 1369435 - RNA, 19 nt, Artificial Sequence
  Description of Artificial Sequence: Synthetic oligonucleotide
  Antisense strand to SEQ ID NO: 1369434
uugcuaagcaaauacucau

SEQ ID NO: 1369436 - RNA, 19 nt, Artificial Sequence
  Description of Artificial Sequence: Synthetic oligonucleotide
  Sense strand starting at position 614 of SEQ ID NO: 1242739
aguauuugcuuagcaaucu

SEQ ID NO: 1369437 - RNA, 19 nt, Artificial Sequence
  Description of Artificial Sequence: Synthetic oligonucleotide
  Antisense strand to SEQ ID NO: 1369436
agauugcuaagcaaauacu

SEQ ID NO: 1369438 - RNA, 19 nt, Artificial Sequence
  Description of Artificial Sequence: Synthetic oligonucleotide
  Sense strand starting at position 797 of SEQ ID NO: 1242739
cuggaaagucauggcuaga

SEQ ID NO: 1369439 - RNA, 19 nt, Artificial Sequence
  Description of Artificial Sequence: Synthetic oligonucleotide
  Antisense strand to SEQ ID NO: 1369438
ucuagccaugacuuuccag

SEQ ID NO: 1369440 - RNA, 19 nt, Artificial Sequence
  Description of Artificial Sequence: Synthetic oligonucleotide
  Sense strand starting at position 1217 of SEQ ID NO: 1242739
ccaguugacucuguuugua

SEQ ID NO: 1369441 - RNA, 19 nt, Artificial Sequence
  Description of Artificial Sequence: Synthetic oligonucleotide
  Antisense strand to SEQ ID NO: 1369440
uacaaacagagucaacugg

SEQ ID NO: 1369442 - RNA, 19 nt, Artificial Sequence
  Description of Artificial Sequence: Synthetic oligonucleotide
  Sense strand starting at position 1219 of SEQ ID NO: 1242739
aguugacucuguuuguaga

SEQ ID NO: 1369443 - RNA, 19 nt, Artificial Sequence
  Description of Artificial Sequence: Synthetic oligonucleotide
  Antisense strand to SEQ ID NO: 1369442
ucuacaaacagagucaacu

SEQ ID NO: 1369444 - RNA, 19 nt, Artificial Sequence
  Description of Artificial Sequence: Synthetic oligonucleotide
  Sense strand starting at position 1220 of SEQ ID NO: 1242739
guugacucuguuuguagaa

SEQ ID NO: 1369445 - RNA, 19 nt, Artificial Sequence
  Description of Artificial Sequence: Synthetic oligonucleotide
  Antisense strand to SEQ ID NO: 1369444
uucuacaaacagagucaac

SEQ ID NO: 1369446 - RNA, 19 nt, Artificial Sequence
  Description of Artificial Sequence: Synthetic oligonucleotide
  Sense strand starting at position 1343 of SEQ ID NO: 1242739
guggguuuaagucagccaa

SEQ ID NO: 1369447 - RNA, 19 nt, Artificial Sequence
  Description of Artificial Sequence: Synthetic oligonucleotide
  Antisense strand to SEQ ID NO: 1369446
uuggcugacuuaaacccac

SEQ ID NO: 1369448 - RNA, 19 nt, Artificial Sequence
  Description of Artificial Sequence: Synthetic oligonucleotide
  Sense strand starting at position 1345 of SEQ ID NO: 1242739
ggguuuaagucagccaacu

SEQ ID NO: 1369449 - RNA, 19 nt, Artificial Sequence
  Description of Artificial Sequence: Synthetic oligonucleotide
  Antisense strand to SEQ ID NO: 1369448
aguuggcugacuuaaaccc

SEQ ID NO: 1369450 - RNA, 19 nt, Artificial Sequence
  Description of Artificial Sequence: Synthetic oligonucleotide
  Sense strand starting at position 1417 of SEQ ID NO: 1242739
cugccuugccucugugaaa

SEQ ID NO: 1369451 - RNA, 19 nt, Artificial Sequence
  Description of Artificial Sequence: Synthetic oligonucleotide
  Antisense strand to SEQ ID NO: 1369450
uuucacagaggcaaggcag

SEQ ID NO: 1369452 - RNA, 19 nt, Artificial Sequence
  Description of Artificial Sequence: Synthetic oligonucleotide
  Sense strand starting at position 1506 of SEQ ID NO: 1242739
ccaagaugaagccgucaga

SEQ ID NO: 1369453 - RNA, 19 nt, Artificial Sequence
  Description of Artificial Sequence: Synthetic oligonucleotide
  Antisense strand to SEQ ID NO: 1369452
ucugacggcuucaucuugg

SEQ ID NO: 1369454 - RNA, 19 nt, Artificial Sequence
  Description of Artificial Sequence: Synthetic oligonucleotide
  Sense strand starting at position 1631 of SEQ ID NO: 1242739
agucauguccuuugaaacu

SEQ ID NO: 1369455 - RNA, 19 nt, Artificial Sequence
  Description of Artificial Sequence: Synthetic oligonucleotide
  Antisense strand to SEQ ID NO: 1369454
aguuucaaaggacaugacu

SEQ ID NO: 1369456 - RNA, 19 nt, Artificial Sequence
  Description of Artificial Sequence: Synthetic oligonucleotide
  Sense strand starting at position 1992 of SEQ ID NO: 1242739
aacgucgucucuuccaaau

SEQ ID NO: 1369457 - RNA, 19 nt, Artificial Sequence
  Description of Artificial Sequence: Synthetic oligonucleotide
  Antisense strand to SEQ ID NO: 1369456
auuuggaagagacgacguu

SEQ ID NO: 1369458 - RNA, 19 nt, Artificial Sequence
  Description of Artificial Sequence: Synthetic oligonucleotide
  Sense strand starting at position 2137 of SEQ ID NO: 1242739
gagaguuggcggugaccaa

SEQ ID NO: 1369459 - RNA, 19 nt, Artificial Sequence
  Description of Artificial Sequence: Synthetic oligonucleotide
  Antisense strand to SEQ ID NO: 1369458
uuggucaccgccaacucuc

SEQ ID NO: 1369460 - RNA, 19 nt, Artificial Sequence
  Description of Artificial Sequence: Synthetic oligonucleotide
  Sense strand starting at position 2169 of SEQ ID NO: 1242739
ccuggagacucgagguaga

SEQ ID NO: 1369461 - RNA, 19 nt, Artificial Sequence
  Description of Artificial Sequence: Synthetic oligonucleotide
  Antisense strand to SEQ ID NO: 1369460
ucuaccucgagucuccagg

SEQ ID NO: 1369462 - RNA, 19 nt, Artificial Sequence
  Description of Artificial Sequence: Synthetic oligonucleotide
  Sense strand starting at position 2539 of SEQ ID NO: 1242739
cucugagaggcucaacuuu

SEQ ID NO: 1369463 - RNA, 19 nt, Artificial Sequence
  Description of Artificial Sequence: Synthetic oligonucleotide
  Antisense strand to SEQ ID NO: 1369462
aaaguugagccucucagag

SEQ ID NO: 1369464 - RNA, 19 nt, Artificial Sequence
  Description of Artificial Sequence: Synthetic oligonucleotide
  Sense strand starting at position 2688 of SEQ ID NO: 1242739
gucgaaucuuaaucuugac

SEQ ID NO: 1369465 - RNA, 19 nt, Artificial Sequence
  Description of Artificial Sequence: Synthetic oligonucleotide
  Antisense strand to SEQ ID NO: 1369464
gucaagauuaagauucgac

SEQ ID NO: 1369466 - RNA, 19 nt, Artificial Sequence
  Description of Artificial Sequence: Synthetic oligonucleotide
  Sense strand starting at position 3625 of SEQ ID NO: 1242739
auuucuaggucuugucaaa

SEQ ID NO: 1369467 - RNA, 19 nt, Artificial Sequence
  Description of Artificial Sequence: Synthetic oligonucleotide
  Antisense strand to SEQ ID NO: 1369466
uuugacaagaccuagaaau

SEQ ID NO: 1369468 - RNA, 19 nt, Artificial Sequence
  Description of Artificial Sequence: Synthetic oligonucleotide
  Sense strand starting at position 3640 of SEQ ID NO: 1242739
caaauuagugaugggaucu

SEQ ID NO: 1369469 - RNA, 19 nt, Artificial Sequence
  Description of Artificial Sequence: Synthetic oligonucleotide
  Antisense strand to SEQ ID NO: 1369468
agaucccaucacuaauuug

SEQ ID NO: 1369470 - RNA, 19 nt, Artificial Sequence
  Description of Artificial Sequence: Synthetic oligonucleotide
  Sense strand starting at position 3707 of SEQ ID NO: 1242739
gguugugguuuggcaagau

SEQ ID NO: 1369471 - RNA, 19 nt, Artificial Sequence
  Description of Artificial Sequence: Synthetic oligonucleotide
  Antisense strand to SEQ ID NO: 1369470
aucuugccaaaccacaacc

SEQ ID NO: 1369472 - RNA, 19 nt, Artificial Sequence
  Description of Artificial Sequence: Synthetic oligonucleotide
  Sense strand starting at position 3711 of SEQ ID NO: 1242739
gugguuuggcaagaugaau

SEQ ID NO: 1369473 - RNA, 19 nt, Artificial Sequence
  Description of Artificial Sequence: Synthetic oligonucleotide
  Antisense strand to SEQ ID NO: 1369472
auucaucuugccaaaccac

SEQ ID NO: 1369474 - RNA, 19 nt, Artificial Sequence
  Description of Artificial Sequence: Synthetic oligonucleotide
  Sense strand starting at position 3730 of SEQ ID NO: 1242739
uaagauucuugacaauggu

SEQ ID NO: 1369475 - RNA, 19 nt, Artificial Sequence
  Description of Artificial Sequence: Synthetic oligonucleotide
  Antisense strand to SEQ ID NO: 1369474
accauugucaagaaucuua

SEQ ID NO: 1369476 - RNA, 19 nt, Artificial Sequence
  Description of Artificial Sequence: Synthetic oligonucleotide
  Sense strand starting at position 3734 of SEQ ID NO: 1242739
auucuugacaauggucgua

SEQ ID NO: 1369477 - RNA, 19 nt, Artificial Sequence
  Description of Artificial Sequence: Synthetic oligonucleotide
  Antisense strand to SEQ ID NO: 1369476
uacgaccauugucaagaau

SEQ ID NO: 1369478 - RNA, 19 nt, Artificial Sequence
  Description of Artificial Sequence: Synthetic oligonucleotide
  Sense strand starting at position 3763 of SEQ ID NO: 1242739
auugguaauuccuuucuag

SEQ ID NO: 1369479 - RNA, 19 nt, Artificial Sequence
  Description of Artificial Sequence: Synthetic oligonucleotide
  Antisense strand to SEQ ID NO: 1369478
cuagaaaggaauuaccaau

SEQ ID NO: 1369480 - RNA, 19 nt, Artificial Sequence
  Description of Artificial Sequence: Synthetic oligonucleotide
  Sense strand starting at position 3766 of SEQ ID NO: 1242739
gguaauuccuuucuaggag

SEQ ID NO: 1369481 - RNA, 19 nt, Artificial Sequence
  Description of Artificial Sequence: Synthetic oligonucleotide
  Antisense strand to SEQ ID NO: 1369480
cuccuagaaaggaauuacc

SEQ ID NO: 1369482 - RNA, 19 nt, Artificial Sequence
  Description of Artificial Sequence: Synthetic oligonucleotide
  Sense strand starting at position 480 of SEQ ID NO: 1242740
ccuccuaggucacaggauu

SEQ ID NO: 1369483 - RNA, 19 nt, Artificial Sequence
  Description of Artificial Sequence: Synthetic oligonucleotide
  Antisense strand to SEQ ID NO: 1369482
aauccugugaccuaggagg

SEQ ID NO: 1369484 - RNA, 19 nt, Artificial Sequence
  Description of Artificial Sequence: Synthetic oligonucleotide
  Sense strand starting at position 740 of SEQ ID NO: 1242740
gaggcuguguccucuaagu

SEQ ID NO: 1369485 - RNA, 19 nt, Artificial Sequence
  Description of Artificial Sequence: Synthetic oligonucleotide
  Antisense strand to SEQ ID NO: 1369484
acuuagaggacacagccuc

SEQ ID NO: 1369486 - RNA, 19 nt, Artificial Sequence
  Description of Artificial Sequence: Synthetic oligonucleotide
  Sense strand starting at position 742 of SEQ ID NO: 1242740
ggcuguguccucuaagucu

SEQ ID NO: 1369487 - RNA, 19 nt, Artificial Sequence
  Description of Artificial Sequence: Synthetic oligonucleotide
  Antisense strand to SEQ ID NO: 1369486
agacuuagaggacacagcc

SEQ ID NO: 1369488 - RNA, 19 nt, Artificial Sequence
  Description of Artificial Sequence: Synthetic oligonucleotide
  Sense strand starting at position 1067 of SEQ ID NO: 1242740
uucugagacucuggagaga

SEQ ID NO: 1369489 - RNA, 19 nt, Artificial Sequence
  Description of Artificial Sequence: Synthetic oligonucleotide
  Antisense strand to SEQ ID NO: 1369488
ucucuccagagucucagaa

SEQ ID NO: 1369490 - RNA, 19 nt, Artificial Sequence
  Description of Artificial Sequence: Synthetic oligonucleotide
  Sense strand starting at position 1126 of SEQ ID NO: 1242740
cuuggauauggguguccga

SEQ ID NO: 1369491 - RNA, 19 nt, Artificial Sequence
  Description of Artificial Sequence: Synthetic oligonucleotide
  Antisense strand to SEQ ID NO: 1369490
ucggacacccauauccaag

SEQ ID NO: 1369492 - RNA, 19 nt, Artificial Sequence
  Description of Artificial Sequence: Synthetic oligonucleotide
  Sense strand starting at position 1142 of SEQ ID NO: 1242740
cgagacugcucucagccau

SEQ ID NO: 1369493 - RNA, 19 nt, Artificial Sequence
  Description of Artificial Sequence: Synthetic oligonucleotide
  Antisense strand to SEQ ID NO: 1369492
auggcugagagcagucucg

SEQ ID NO: 1369494 - RNA, 19 nt, Artificial Sequence
  Description of Artificial Sequence: Synthetic oligonucleotide
  Sense strand starting at position 2932 of SEQ ID NO: 1242740
gcgacuuccugguggucaa

SEQ ID NO: 1369495 - RNA, 19 nt, Artificial Sequence
  Description of Artificial Sequence: Synthetic oligonucleotide
  Antisense strand to SEQ ID NO: 1369494
uugaccaccaggaagucgc

SEQ ID NO: 1369496 - RNA, 19 nt, Artificial Sequence
  Description of Artificial Sequence: Synthetic oligonucleotide
  Sense strand starting at position 2992 of SEQ ID NO: 1242740
agacucugacccugcagaa

SEQ ID NO: 1369497 - RNA, 19 nt, Artificial Sequence
  Description of Artificial Sequence: Synthetic oligonucleotide
  Antisense strand to SEQ ID NO: 1369496
uucugcagggucagagucu

SEQ ID NO: 1369498 - RNA, 19 nt, Artificial Sequence
  Description of Artificial Sequence: Synthetic oligonucleotide
  Sense strand starting at position 3257 of SEQ ID NO: 1242740
uuaccuggcauugguaaga

SEQ ID NO: 1369499 - RNA, 19 nt, Artificial Sequence
  Description of Artificial Sequence: Synthetic oligonucleotide
  Antisense strand to SEQ ID NO: 1369498
ucuuaccaaugccagguaa

SEQ ID NO: 1369500 - RNA, 19 nt, Artificial Sequence
  Description of Artificial Sequence: Synthetic oligonucleotide
  Sense strand starting at position 3267 of SEQ ID NO: 1242740
uugguaagaccuggucagu

SEQ ID NO: 1369501 - RNA, 19 nt, Artificial Sequence
  Description of Artificial Sequence: Synthetic oligonucleotide
  Antisense strand to SEQ ID NO: 1369500
acugaccaggucuuaccaa

SEQ ID NO: 1369502 - RNA, 19 nt, Artificial Sequence
  Description of Artificial Sequence: Synthetic oligonucleotide
  Sense strand starting at position 3410 of SEQ ID NO: 1242740
ccgugaacugcgugcgauu

SEQ ID NO: 1369503 - RNA, 19 nt, Artificial Sequence
  Description of Artificial Sequence: Synthetic oligonucleotide
  Antisense strand to SEQ ID NO: 1369502
aaucgcacgcaguucacgg

SEQ ID NO: 1369504 - RNA, 19 nt, Artificial Sequence
  Description of Artificial Sequence: Synthetic oligonucleotide
  Sense strand starting at position 3758 of SEQ ID NO: 1242740
gcgauccugucuccaaagu

SEQ ID NO: 1369505 - RNA, 19 nt, Artificial Sequence
  Description of Artificial Sequence: Synthetic oligonucleotide
  Antisense strand to SEQ ID NO: 1369504
acuuuggagacaggaucgc

SEQ ID NO: 1369506 - RNA, 19 nt, Artificial Sequence
  Description of Artificial Sequence: Synthetic oligonucleotide
  Sense strand starting at position 44 of SEQ ID NO: 1242741
uguugcaagaacgaguaau

SEQ ID NO: 1369507 - RNA, 19 nt, Artificial Sequence
  Description of Artificial Sequence: Synthetic oligonucleotide
  Antisense strand to SEQ ID NO: 1369506
auuacucguucuugcaaca

SEQ ID NO: 1369508 - RNA, 19 nt, Artificial Sequence
  Description of Artificial Sequence: Synthetic oligonucleotide
  Sense strand starting at position 54 of SEQ ID NO: 1242741
acgaguaaugaauguaaag

SEQ ID NO: 1369509 - RNA, 19 nt, Artificial Sequence
  Description of Artificial Sequence: Synthetic oligonucleotide
  Antisense strand to SEQ ID NO: 1369508
cuuuacauucauuacucgu

SEQ ID NO: 1369510 - RNA, 19 nt, Artificial Sequence
  Description of Artificial Sequence: Synthetic oligonucleotide
  Sense strand starting at position 84 of SEQ ID NO: 1242741
uugucugacacaugguaag

SEQ ID NO: 1369511 - RNA, 19 nt, Artificial Sequence
  Description of Artificial Sequence: Synthetic oligonucleotide
  Antisense strand to SEQ ID NO: 1369510
cuuaccaugugucagacaa

SEQ ID NO: 1369512 - RNA, 19 nt, Artificial Sequence
  Description of Artificial Sequence: Synthetic oligonucleotide
  Sense strand starting at position 232 of SEQ ID NO: 1242741
gcagcaggucaucagaaua

SEQ ID NO: 1369513 - RNA, 19 nt, Artificial Sequence
  Description of Artificial Sequence: Synthetic oligonucleotide
  Antisense strand to SEQ ID NO: 1369512
uauucugaugaccugcugc

SEQ ID NO: 1369514 - RNA, 19 nt, Artificial Sequence
  Description of Artificial Sequence: Synthetic oligonucleotide
  Sense strand starting at position 318 of SEQ ID NO: 1242741
uaaguucuggaagguaauu

SEQ ID NO: 1369515 - RNA, 19 nt, Artificial Sequence
  Description of Artificial Sequence: Synthetic oligonucleotide
  Antisense strand to SEQ ID NO: 1369514
aauuaccuuccagaacuua

SEQ ID NO: 1369516 - RNA, 19 nt, Artificial Sequence
  Description of Artificial Sequence: Synthetic oligonucleotide
  Sense strand starting at position 344 of SEQ ID NO: 1242741
auaugaugacuaugucucu

SEQ ID NO: 1369517 - RNA, 19 nt, Artificial Sequence
  Description of Artificial Sequence: Synthetic oligonucleotide
  Antisense strand to SEQ ID NO: 1369516
agagacauagucaucauau

SEQ ID NO: 1369518 - RNA, 19 nt, Artificial Sequence
  Description of Artificial Sequence: Synthetic oligonucleotide
  Sense strand starting at position 431 of SEQ ID NO: 1242741
uguaguguuaucgugguuu

SEQ ID NO: 1369519 - RNA, 19 nt, Artificial Sequence
  Description of Artificial Sequence: Synthetic oligonucleotide
  Antisense strand to SEQ ID NO: 1369518
aaaccacgauaacacuaca

SEQ ID NO: 1369520 - RNA, 19 nt, Artificial Sequence
  Description of Artificial Sequence: Synthetic oligonucleotide
  Sense strand starting at position 484 of SEQ ID NO: 1242741
gggaucuugucucuugaaa

SEQ ID NO: 1369521 - RNA, 19 nt, Artificial Sequence
  Description of Artificial Sequence: Synthetic oligonucleotide
  Antisense strand to SEQ ID NO: 1369520
uuucaagagacaagauccc

SEQ ID NO: 1369522 - RNA, 19 nt, Artificial Sequence
  Description of Artificial Sequence: Synthetic oligonucleotide
  Sense strand starting at position 495 of SEQ ID NO: 1242741
ucuugaaaggcuuauguua

SEQ ID NO: 1369523 - RNA, 19 nt, Artificial Sequence
  Description of Artificial Sequence: Synthetic oligonucleotide
  Antisense strand to SEQ ID NO: 1369522
uaacauaagccuuucaaga

SEQ ID NO: 1369524 - RNA, 19 nt, Artificial Sequence
  Description of Artificial Sequence: Synthetic oligonucleotide
  Sense strand starting at position 645 of SEQ ID NO: 1242741
augcauacacgugauacuu

SEQ ID NO: 1369525 - RNA, 19 nt, Artificial Sequence
  Description of Artificial Sequence: Synthetic oligonucleotide
  Antisense strand to SEQ ID NO: 1369524
aaguaucacguguaugcau

SEQ ID NO: 1369526 - RNA, 19 nt, Artificial Sequence
  Description of Artificial Sequence: Synthetic oligonucleotide
  Sense strand starting at position 694 of SEQ ID NO: 1242741
gggaaucaauuacugguau

SEQ ID NO: 1369527 - RNA, 19 nt, Artificial Sequence
  Description of Artificial Sequence: Synthetic oligonucleotide
  Antisense strand to SEQ ID NO: 1369526
auaccaguaauugauuccc

SEQ ID NO: 1369528 - RNA, 19 nt, Artificial Sequence
  Description of Artificial Sequence: Synthetic oligonucleotide
  Sense strand starting at position 1335 of SEQ ID NO: 1242741
uuacaaauguuaccuggaa

SEQ ID NO: 1369529 - RNA, 19 nt, Artificial Sequence
  Description of Artificial Sequence: Synthetic oligonucleotide
  Antisense strand to SEQ ID NO: 1369528
uuccagguaacauuuguaa

SEQ ID NO: 1369530 - RNA, 19 nt, Artificial Sequence
  Description of Artificial Sequence: Synthetic oligonucleotide
  Sense strand starting at position 2324 of SEQ ID NO: 1242741
guuccuaaccuugaagcua

SEQ ID NO: 1369531 - RNA, 19 nt, Artificial Sequence
  Description of Artificial Sequence: Synthetic oligonucleotide
  Antisense strand to SEQ ID NO: 1369530
uagcuucaagguuaggaac

SEQ ID NO: 1369532 - RNA, 19 nt, Artificial Sequence
  Description of Artificial Sequence: Synthetic oligonucleotide
  Sense strand starting at position 2519 of SEQ ID NO: 1242741
cugucacuaccucaguuua

SEQ ID NO: 1369533 - RNA, 19 nt, Artificial Sequence
  Description of Artificial Sequence: Synthetic oligonucleotide
  Antisense strand to SEQ ID NO: 1369532
uaaacugagguagugacag

SEQ ID NO: 1369534 - RNA, 19 nt, Artificial Sequence
  Description of Artificial Sequence: Synthetic oligonucleotide
  Sense strand starting at position 2571 of SEQ ID NO: 1242741
aggagagaugcuugcuaaa

SEQ ID NO: 1369535 - RNA, 19 nt, Artificial Sequence
  Description of Artificial Sequence: Synthetic oligonucleotide
  Antisense strand to SEQ ID NO: 1369534
uuuagcaagcaucucuccu

SEQ ID NO: 1369536 - RNA, 19 nt, Artificial Sequence
  Description of Artificial Sequence: Synthetic oligonucleotide
  Sense strand starting at position 2694 of SEQ ID NO: 1242741
uuugaagauugaguaauuc

SEQ ID NO: 1369537 - RNA, 19 nt, Artificial Sequence
  Description of Artificial Sequence: Synthetic oligonucleotide
  Antisense strand to SEQ ID NO: 1369536
gaauuacucaaucuucaaa

SEQ ID NO: 1369538 - RNA, 19 nt, Artificial Sequence
  Description of Artificial Sequence: Synthetic oligonucleotide
  Sense strand starting at position 2698 of SEQ ID NO: 1242741
aagauugaguaauucuugu

SEQ ID NO: 1369539 - RNA, 19 nt, Artificial Sequence
  Description of Artificial Sequence: Synthetic oligonucleotide
  Antisense strand to SEQ ID NO: 1369538
acaagaauuacucaaucuu

SEQ ID NO: 1369540 - RNA, 19 nt, Artificial Sequence
  Description of Artificial Sequence: Synthetic oligonucleotide
  Sense strand starting at position 2777 of SEQ ID NO: 1242741
cagccagaacagugauauu

SEQ ID NO: 1369541 - RNA, 19 nt, Artificial Sequence
  Description of Artificial Sequence: Synthetic oligonucleotide
  Antisense strand to SEQ ID NO: 1369540
aauaucacuguucuggcug

SEQ ID NO: 1369542 - RNA, 19 nt, Artificial Sequence
  Description of Artificial Sequence: Synthetic oligonucleotide
  Sense strand starting at position 2803 of SEQ ID NO: 1242741
ugaauacuauaugugacau

SEQ ID NO: 1369543 - RNA, 19 nt, Artificial Sequence
  Description of Artificial Sequence: Synthetic oligonucleotide
  Antisense strand to SEQ ID NO: 1369542
augucacauauaguauuca

SEQ ID NO: 1369544 - RNA, 19 nt, Artificial Sequence
  Description of Artificial Sequence: Synthetic oligonucleotide
  Sense strand starting at position 2814 of SEQ ID NO: 1242741
ugugacauacugcaguuaa

SEQ ID NO: 1369545 - RNA, 19 nt, Artificial Sequence
  Description of Artificial Sequence: Synthetic oligonucleotide
  Antisense strand to SEQ ID NO: 1369544
uuaacugcaguaugucaca

SEQ ID NO: 1369546 - RNA, 19 nt, Artificial Sequence
  Description of Artificial Sequence: Synthetic oligonucleotide
  Sense strand starting at position 3109 of SEQ ID NO: 1242741
caaacugauugagugacuu

SEQ ID NO: 1369547 - RNA, 19 nt, Artificial Sequence
  Description of Artificial Sequence: Synthetic oligonucleotide
  Antisense strand to SEQ ID NO: 1369546
aagucacucaaucaguuug

SEQ ID NO: 1369548 - RNA, 19 nt, Artificial Sequence
  Description of Artificial Sequence: Synthetic oligonucleotide
  Sense strand starting at position 3113 of SEQ ID NO: 1242741
cugauugagugacuuccua

SEQ ID NO: 1369549 - RNA, 19 nt, Artificial Sequence
  Description of Artificial Sequence: Synthetic oligonucleotide
  Antisense strand to SEQ ID NO: 1369548
uaggaagucacucaaucag

SEQ ID NO: 1369550 - RNA, 19 nt, Artificial Sequence
  Description of Artificial Sequence: Synthetic oligonucleotide
  Sense strand starting at position 3137 of SEQ ID NO: 1242741
ucugaaguugcuuagaacu

SEQ ID NO: 1369551 - RNA, 19 nt, Artificial Sequence
  Description of Artificial Sequence: Synthetic oligonucleotide
  Antisense strand to SEQ ID NO: 1369550
aguucuaagcaacuucaga

SEQ ID NO: 1369552 - RNA, 19 nt, Artificial Sequence
  Description of Artificial Sequence: Synthetic oligonucleotide
  Sense strand starting at position 3204 of SEQ ID NO: 1242741
cuguguaauguugauuaga

SEQ ID NO: 1369553 - RNA, 19 nt, Artificial Sequence
  Description of Artificial Sequence: Synthetic oligonucleotide
  Antisense strand to SEQ ID NO: 1369552
ucuaaucaacauuacacag

SEQ ID NO: 1369554 - RNA, 19 nt, Artificial Sequence
  Description of Artificial Sequence: Synthetic oligonucleotide
  Sense strand starting at position 3206 of SEQ ID NO: 1242741
guguaauguugauuagaag

SEQ ID NO: 1369555 - RNA, 19 nt, Artificial Sequence
  Description of Artificial Sequence: Synthetic oligonucleotide
  Antisense strand to SEQ ID NO: 1369554
cuucuaaucaacauuacac

SEQ ID NO: 1369556 - RNA, 19 nt, Artificial Sequence
  Description of Artificial Sequence: Synthetic oligonucleotide
  Sense strand starting at position 3213 of SEQ ID NO: 1242741
guugauuagaaggguccua

SEQ ID NO: 1369557 - RNA, 19 nt, Artificial Sequence
  Description of Artificial Sequence: Synthetic oligonucleotide
  Antisense strand to SEQ ID NO: 1369556
uaggacccuucuaaucaac

SEQ ID NO: 1369558 - RNA, 19 nt, Artificial Sequence
  Description of Artificial Sequence: Synthetic oligonucleotide
  Sense strand starting at position 3224 of SEQ ID NO: 1242741
ggguccuaccuagaaaugu

SEQ ID NO: 1369559 - RNA, 19 nt, Artificial Sequence
  Description of Artificial Sequence: Synthetic oligonucleotide
  Antisense strand to SEQ ID NO: 1369558
acauuucuagguaggaccc

SEQ ID NO: 1369560 - RNA, 19 nt, Artificial Sequence
  Description of Artificial Sequence: Synthetic oligonucleotide
  Sense strand starting at position 3300 of SEQ ID NO: 1242741
agggaaauuguugguauau

SEQ ID NO: 1369561 - RNA, 19 nt, Artificial Sequence
  Description of Artificial Sequence: Synthetic oligonucleotide
  Antisense strand to SEQ ID NO: 1369560
auauaccaacaauuucccu

SEQ ID NO: 1369562 - RNA, 19 nt, Artificial Sequence
  Description of Artificial Sequence: Synthetic oligonucleotide
  Sense strand starting at position 3301 of SEQ ID NO: 1242741
gggaaauuguugguauauc

SEQ ID NO: 1369563 - RNA, 19 nt, Artificial Sequence
  Description of Artificial Sequence: Synthetic oligonucleotide
  Antisense strand to SEQ ID NO: 1369562
gauauaccaacaauuuccc

SEQ ID NO: 1369564 - RNA, 19 nt, Artificial Sequence
  Description of Artificial Sequence: Synthetic oligonucleotide
  Sense strand starting at position 3430 of SEQ ID NO: 1242741
uuuggugaugugggaagau

SEQ ID NO: 1369565 - RNA, 19 nt, Artificial Sequence
  Description of Artificial Sequence: Synthetic oligonucleotide
  Antisense strand to SEQ ID NO: 1369564
aucuucccacaucaccaaa

SEQ ID NO: 1369566 - RNA, 19 nt, Artificial Sequence
  Description of Artificial Sequence: Synthetic oligonucleotide
  Sense strand starting at position 3481 of SEQ ID NO: 1242741
agaccuacaugucuacauu

SEQ ID NO: 1369567 - RNA, 19 nt, Artificial Sequence
  Description of Artificial Sequence: Synthetic oligonucleotide
  Antisense strand to SEQ ID NO: 1369566
aauguagacauguaggucu

SEQ ID NO: 1369568 - RNA, 19 nt, Artificial Sequence
  Description of Artificial Sequence: Synthetic oligonucleotide
  Sense strand starting at position 3545 of SEQ ID NO: 1242741
uaugcagaggucuauuagu

SEQ ID NO: 1369569 - RNA, 19 nt, Artificial Sequence
  Description of Artificial Sequence: Synthetic oligonucleotide
  Antisense strand to SEQ ID NO: 1369568
acuaauagaccucugcaua

SEQ ID NO: 1369570 - RNA, 19 nt, Artificial Sequence
  Description of Artificial Sequence: Synthetic oligonucleotide
  Sense strand starting at position 3627 of SEQ ID NO: 1242741
cauguugaaugacuguuau

SEQ ID NO: 1369571 - RNA, 19 nt, Artificial Sequence
  Description of Artificial Sequence: Synthetic oligonucleotide
  Antisense strand to SEQ ID NO: 1369570
auaacagucauucaacaug

SEQ ID NO: 1369572 - RNA, 19 nt, Artificial Sequence
  Description of Artificial Sequence: Synthetic oligonucleotide
  Sense strand starting at position 3652 of SEQ ID NO: 1242741
ggugcugugauauaaauga

SEQ ID NO: 1369573 - RNA, 19 nt, Artificial Sequence
  Description of Artificial Sequence: Synthetic oligonucleotide
  Antisense strand to SEQ ID NO: 1369572
ucauuuauaucacagcacc

SEQ ID NO: 1369574 - RNA, 19 nt, Artificial Sequence
  Description of Artificial Sequence: Synthetic oligonucleotide
  Sense strand starting at position 3656 of SEQ ID NO: 1242741
cugugauauaaaugaguag

SEQ ID NO: 1369575 - RNA, 19 nt, Artificial Sequence
  Description of Artificial Sequence: Synthetic oligonucleotide
  Antisense strand to SEQ ID NO: 1369574
cuacucauuuauaucacag

SEQ ID NO: 1369576 - RNA, 19 nt, Artificial Sequence
  Description of Artificial Sequence: Synthetic oligonucleotide
  Sense strand starting at position 3737 of SEQ ID NO: 1242741
auguuucucggugaaugag

SEQ ID NO: 1369577 - RNA, 19 nt, Artificial Sequence
  Description of Artificial Sequence: Synthetic oligonucleotide
  Antisense strand to SEQ ID NO: 1369576
cucauucaccgagaaacau

SEQ ID NO: 1369578 - RNA, 19 nt, Artificial Sequence
  Description of Artificial Sequence: Synthetic oligonucleotide
  Sense strand starting at position 3757 of SEQ ID NO: 1242741
ggcaaauacugggcacuaa

SEQ ID NO: 1369579 - RNA, 19 nt, Artificial Sequence
  Description of Artificial Sequence: Synthetic oligonucleotide
  Antisense strand to SEQ ID NO: 1369578
uuagugcccaguauuugcc

SEQ ID NO: 1369580 - RNA, 19 nt, Artificial Sequence
  Description of Artificial Sequence: Synthetic oligonucleotide
  Sense strand starting at position 3924 of SEQ ID NO: 1242741
agaauugccuucccugaga

SEQ ID NO: 1369581 - RNA, 19 nt, Artificial Sequence
  Description of Artificial Sequence: Synthetic oligonucleotide
  Antisense strand to SEQ ID NO: 1369580
ucucagggaaggcaauucu

SEQ ID NO: 1369582 - RNA, 19 nt, Artificial Sequence
  Description of Artificial Sequence: Synthetic oligonucleotide
  Sense strand starting at position 3940 of SEQ ID NO: 1242741
agagguggguuuaggaaau

SEQ ID NO: 1369583 - RNA, 19 nt, Artificial Sequence
  Description of Artificial Sequence: Synthetic oligonucleotide
  Antisense strand to SEQ ID NO: 1369582
auuuccuaaacccaccucu

SEQ ID NO: 1369584 - RNA, 19 nt, Artificial Sequence
  Description of Artificial Sequence: Synthetic oligonucleotide
  Sense strand starting at position 3946 of SEQ ID NO: 1242741
ggguuuaggaaauguggaa

SEQ ID NO: 1369585 - RNA, 19 nt, Artificial Sequence
  Description of Artificial Sequence: Synthetic oligonucleotide
  Antisense strand to SEQ ID NO: 1369584
uuccacauuuccuaaaccc

SEQ ID NO: 1369586 - RNA, 19 nt, Artificial Sequence
  Description of Artificial Sequence: Synthetic oligonucleotide
  Sense strand starting at position 21 of SEQ ID NO: 1242742
ugugauauguauccaauua

SEQ ID NO: 1369587 - RNA, 19 nt, Artificial Sequence
  Description of Artificial Sequence: Synthetic oligonucleotide
  Antisense strand to SEQ ID NO: 1369586
uaauuggauacauaucaca

SEQ ID NO: 1369588 - RNA, 19 nt, Artificial Sequence
  Description of Artificial Sequence: Synthetic oligonucleotide
  Sense strand starting at position 68 of SEQ ID NO: 1242742
gaggcuuugacucaacggu

SEQ ID NO: 1369589 - RNA, 19 nt, Artificial Sequence
  Description of Artificial Sequence: Synthetic oligonucleotide
  Antisense strand to SEQ ID NO: 1369588
accguugagucaaagccuc

SEQ ID NO: 1369590 - RNA, 19 nt, Artificial Sequence
  Description of Artificial Sequence: Synthetic oligonucleotide
  Sense strand starting at position 82 of SEQ ID NO: 1242742
acgguuuaaccucaauaca

SEQ ID NO: 1369591 - RNA, 19 nt, Artificial Sequence
  Description of Artificial Sequence: Synthetic oligonucleotide
  Antisense strand to SEQ ID NO: 1369590
uguauugagguuaaaccgu

SEQ ID NO: 1369592 - RNA, 19 nt, Artificial Sequence
  Description of Artificial Sequence: Synthetic oligonucleotide
  Sense strand starting at position 312 of SEQ ID NO: 1242742
uggauacuuuguuuacgaa

SEQ ID NO: 1369593 - RNA, 19 nt, Artificial Sequence
  Description of Artificial Sequence: Synthetic oligonucleotide
  Antisense strand to SEQ ID NO: 1369592
uucguaaacaaaguaucca

SEQ ID NO: 1369594 - RNA, 19 nt, Artificial Sequence
  Description of Artificial Sequence: Synthetic oligonucleotide
  Sense strand starting at position 313 of SEQ ID NO: 1242742
ggauacuuuguuuacgaau

SEQ ID NO: 1369595 - RNA, 19 nt, Artificial Sequence
  Description of Artificial Sequence: Synthetic oligonucleotide
  Antisense strand to SEQ ID NO: 1369594
auucguaaacaaaguaucc

SEQ ID NO: 1369596 - RNA, 19 nt, Artificial Sequence
  Description of Artificial Sequence: Synthetic oligonucleotide
  Sense strand starting at position 321 of SEQ ID NO: 1242742
uguuuacgaauauagugaa

SEQ ID NO: 1369597 - RNA, 19 nt, Artificial Sequence
  Description of Artificial Sequence: Synthetic oligonucleotide
  Antisense strand to SEQ ID NO: 1369596
uucacuauauucguaaaca

SEQ ID NO: 1369598 - RNA, 19 nt, Artificial Sequence
  Description of Artificial Sequence: Synthetic oligonucleotide
  Sense strand starting at position 379 of SEQ ID NO: 1242742
ccaccuaucccauauguga

SEQ ID NO: 1369599 - RNA, 19 nt, Artificial Sequence
  Description of Artificial Sequence: Synthetic oligonucleotide
  Antisense strand to SEQ ID NO: 1369598
ucacauaugggauaggugg

SEQ ID NO: 1369600 - RNA, 19 nt, Artificial Sequence
  Description of Artificial Sequence: Synthetic oligonucleotide
  Sense strand starting at position 466 of SEQ ID NO: 1242742
uguugcaagaacgaguaau

SEQ ID NO: 1369601 - RNA, 19 nt, Artificial Sequence
  Description of Artificial Sequence: Synthetic oligonucleotide
  Antisense strand to SEQ ID NO: 1369600
auuacucguucuugcaaca

SEQ ID NO: 1369602 - RNA, 19 nt, Artificial Sequence
  Description of Artificial Sequence: Synthetic oligonucleotide
  Sense strand starting at position 476 of SEQ ID NO: 1242742
acgaguaaugaauguaaag

SEQ ID NO: 1369603 - RNA, 19 nt, Artificial Sequence
  Description of Artificial Sequence: Synthetic oligonucleotide
  Antisense strand to SEQ ID NO: 1369602
cuuuacauucauuacucgu

SEQ ID NO: 1369604 - RNA, 19 nt, Artificial Sequence
  Description of Artificial Sequence: Synthetic oligonucleotide
  Sense strand starting at position 506 of SEQ ID NO: 1242742
uugucugacacaugguaag

SEQ ID NO: 1369605 - RNA, 19 nt, Artificial Sequence
  Description of Artificial Sequence: Synthetic oligonucleotide
  Antisense strand to SEQ ID NO: 1369604
cuuaccaugugucagacaa

SEQ ID NO: 1369606 - RNA, 19 nt, Artificial Sequence
  Description of Artificial Sequence: Synthetic oligonucleotide
  Sense strand starting at position 654 of SEQ ID NO: 1242742
gcagcaggucaucagaaua

SEQ ID NO: 1369607 - RNA, 19 nt, Artificial Sequence
  Description of Artificial Sequence: Synthetic oligonucleotide
  Antisense strand to SEQ ID NO: 1369606
uauucugaugaccugcugc

SEQ ID NO: 1369608 - RNA, 19 nt, Artificial Sequence
  Description of Artificial Sequence: Synthetic oligonucleotide
  Sense strand starting at position 740 of SEQ ID NO: 1242742
uaaguucuggaagguaauu

SEQ ID NO: 1369609 - RNA, 19 nt, Artificial Sequence
  Description of Artificial Sequence: Synthetic oligonucleotide
  Antisense strand to SEQ ID NO: 1369608
aauuaccuuccagaacuua

SEQ ID NO: 1369610 - RNA, 19 nt, Artificial Sequence
  Description of Artificial Sequence: Synthetic oligonucleotide
  Sense strand starting at position 766 of SEQ ID NO: 1242742
auaugaugacuaugucucu

SEQ ID NO: 1369611 - RNA, 19 nt, Artificial Sequence
  Description of Artificial Sequence: Synthetic oligonucleotide
  Antisense strand to SEQ ID NO: 1369610
agagacauagucaucauau

SEQ ID NO: 1369612 - RNA, 19 nt, Artificial Sequence
  Description of Artificial Sequence: Synthetic oligonucleotide
  Sense strand starting at position 853 of SEQ ID NO: 1242742
uguaguguuaucgugguuu

SEQ ID NO: 1369613 - RNA, 19 nt, Artificial Sequence
  Description of Artificial Sequence: Synthetic oligonucleotide
  Antisense strand to SEQ ID NO: 1369612
aaaccacgauaacacuaca

SEQ ID NO: 1369614 - RNA, 19 nt, Artificial Sequence
  Description of Artificial Sequence: Synthetic oligonucleotide
  Sense strand starting at position 906 of SEQ ID NO: 1242742
gggaucuugucucuugaaa

SEQ ID NO: 1369615 - RNA, 19 nt, Artificial Sequence
  Description of Artificial Sequence: Synthetic oligonucleotide
  Antisense strand to SEQ ID NO: 1369614
uuucaagagacaagauccc

SEQ ID NO: 1369616 - RNA, 19 nt, Artificial Sequence
  Description of Artificial Sequence: Synthetic oligonucleotide
  Sense strand starting at position 917 of SEQ ID NO: 1242742
ucuugaaaggcuuauguua

SEQ ID NO: 1369617 - RNA, 19 nt, Artificial Sequence
  Description of Artificial Sequence: Synthetic oligonucleotide
  Antisense strand to SEQ ID NO: 1369616
uaacauaagccuuucaaga

SEQ ID NO: 1369618 - RNA, 19 nt, Artificial Sequence
  Description of Artificial Sequence: Synthetic oligonucleotide
  Sense strand starting at position 1067 of SEQ ID NO: 1242742
augcauacacgugauacuu

SEQ ID NO: 1369619 - RNA, 19 nt, Artificial Sequence
  Description of Artificial Sequence: Synthetic oligonucleotide
  Antisense strand to SEQ ID NO: 1369618
aaguaucacguguaugcau

SEQ ID NO: 1369620 - RNA, 19 nt, Artificial Sequence
  Description of Artificial Sequence: Synthetic oligonucleotide
  Sense strand starting at position 1116 of SEQ ID NO: 1242742
gggaaucaauuacugguau

SEQ ID NO: 1369621 - RNA, 19 nt, Artificial Sequence
  Description of Artificial Sequence: Synthetic oligonucleotide
  Antisense strand to SEQ ID NO: 1369620
auaccaguaauugauuccc

SEQ ID NO: 1369622 - RNA, 19 nt, Artificial Sequence
  Description of Artificial Sequence: Synthetic oligonucleotide
  Sense strand starting at position 1757 of SEQ ID NO: 1242742
uuacaaauguuaccuggaa

SEQ ID NO: 1369623 - RNA, 19 nt, Artificial Sequence
  Description of Artificial Sequence: Synthetic oligonucleotide
  Antisense strand to SEQ ID NO: 1369622
uuccagguaacauuuguaa

SEQ ID NO: 1369624 - RNA, 19 nt, Artificial Sequence
  Description of Artificial Sequence: Synthetic oligonucleotide
  Sense strand starting at position 2746 of SEQ ID NO: 1242742
guuccuaaccuugaagcua

SEQ ID NO: 1369625 - RNA, 19 nt, Artificial Sequence
  Description of Artificial Sequence: Synthetic oligonucleotide
  Antisense strand to SEQ ID NO: 1369624
uagcuucaagguuaggaac

SEQ ID NO: 1369626 - RNA, 19 nt, Artificial Sequence
  Description of Artificial Sequence: Synthetic oligonucleotide
  Sense strand starting at position 2941 of SEQ ID NO: 1242742
cugucacuaccucaguuua

SEQ ID NO: 1369627 - RNA, 19 nt, Artificial Sequence
  Description of Artificial Sequence: Synthetic oligonucleotide
  Antisense strand to SEQ ID NO: 1369626
uaaacugagguagugacag

SEQ ID NO: 1369628 - RNA, 19 nt, Artificial Sequence
  Description of Artificial Sequence: Synthetic oligonucleotide
  Sense strand starting at position 2993 of SEQ ID NO: 1242742
aggagagaugcuugcuaaa

SEQ ID NO: 1369629 - RNA, 19 nt, Artificial Sequence
  Description of Artificial Sequence: Synthetic oligonucleotide
  Antisense strand to SEQ ID NO: 1369628
uuuagcaagcaucucuccu

SEQ ID NO: 1369630 - RNA, 19 nt, Artificial Sequence
  Description of Artificial Sequence: Synthetic oligonucleotide
  Sense strand starting at position 3116 of SEQ ID NO: 1242742
uuugaagauugaguaauuc

SEQ ID NO: 1369631 - RNA, 19 nt, Artificial Sequence
  Description of Artificial Sequence: Synthetic oligonucleotide
  Antisense strand to SEQ ID NO: 1369630
gaauuacucaaucuucaaa

SEQ ID NO: 1369632 - RNA, 19 nt, Artificial Sequence
  Description of Artificial Sequence: Synthetic oligonucleotide
  Sense strand starting at position 3120 of SEQ ID NO: 1242742
aagauugaguaauucuugu

SEQ ID NO: 1369633 - RNA, 19 nt, Artificial Sequence
  Description of Artificial Sequence: Synthetic oligonucleotide
  Antisense strand to SEQ ID NO: 1369632
acaagaauuacucaaucuu

SEQ ID NO: 1369634 - RNA, 19 nt, Artificial Sequence
  Description of Artificial Sequence: Synthetic oligonucleotide
  Sense strand starting at position 3199 of SEQ ID NO: 1242742
cagccagaacagugauauu

SEQ ID NO: 1369635 - RNA, 19 nt, Artificial Sequence
  Description of Artificial Sequence: Synthetic oligonucleotide
  Antisense strand to SEQ ID NO: 1369634
aauaucacuguucuggcug

SEQ ID NO: 1369636 - RNA, 19 nt, Artificial Sequence
  Description of Artificial Sequence: Synthetic oligonucleotide
  Sense strand starting at position 3225 of SEQ ID NO: 1242742
ugaauacuauaugugacau

SEQ ID NO: 1369637 - RNA, 19 nt, Artificial Sequence
  Description of Artificial Sequence: Synthetic oligonucleotide
  Antisense strand to SEQ ID NO: 1369636
augucacauauaguauuca

SEQ ID NO: 1369638 - RNA, 19 nt, Artificial Sequence
  Description of Artificial Sequence: Synthetic oligonucleotide
  Sense strand starting at position 3236 of SEQ ID NO: 1242742
ugugacauacugcaguuaa

SEQ ID NO: 1369639 - RNA, 19 nt, Artificial Sequence
  Description of Artificial Sequence: Synthetic oligonucleotide
  Antisense strand to SEQ ID NO: 1369638
uuaacugcaguaugucaca

SEQ ID NO: 1369640 - RNA, 19 nt, Artificial Sequence
  Description of Artificial Sequence: Synthetic oligonucleotide
  Sense strand starting at position 3531 of SEQ ID NO: 1242742
caaacugauugagugacuu

SEQ ID NO: 1369641 - RNA, 19 nt, Artificial Sequence
  Description of Artificial Sequence: Synthetic oligonucleotide
  Antisense strand to SEQ ID NO: 1369640
aagucacucaaucaguuug

SEQ ID NO: 1369642 - RNA, 19 nt, Artificial Sequence
  Description of Artificial Sequence: Synthetic oligonucleotide
  Sense strand starting at position 3535 of SEQ ID NO: 1242742
cugauugagugacuuccua

SEQ ID NO: 1369643 - RNA, 19 nt, Artificial Sequence
  Description of Artificial Sequence: Synthetic oligonucleotide
  Antisense strand to SEQ ID NO: 1369642
uaggaagucacucaaucag

SEQ ID NO: 1369644 - RNA, 19 nt, Artificial Sequence
  Description of Artificial Sequence: Synthetic oligonucleotide
  Sense strand starting at position 3559 of SEQ ID NO: 1242742
ucugaaguugcuuagaacu

SEQ ID NO: 1369645 - RNA, 19 nt, Artificial Sequence
  Description of Artificial Sequence: Synthetic oligonucleotide
  Antisense strand to SEQ ID NO: 1369644
aguucuaagcaacuucaga

SEQ ID NO: 1369646 - RNA, 19 nt, Artificial Sequence
  Description of Artificial Sequence: Synthetic oligonucleotide
  Sense strand starting at position 3626 of SEQ ID NO: 1242742
cuguguaauguugauuaga

SEQ ID NO: 1369647 - RNA, 19 nt, Artificial Sequence
  Description of Artificial Sequence: Synthetic oligonucleotide
  Antisense strand to SEQ ID NO: 1369646
ucuaaucaacauuacacag

SEQ ID NO: 1369648 - RNA, 19 nt, Artificial Sequence
  Description of Artificial Sequence: Synthetic oligonucleotide
  Sense strand starting at position 3628 of SEQ ID NO: 1242742
guguaauguugauuagaag

SEQ ID NO: 1369649 - RNA, 19 nt, Artificial Sequence
  Description of Artificial Sequence: Synthetic oligonucleotide
  Antisense strand to SEQ ID NO: 1369648
cuucuaaucaacauuacac

SEQ ID NO: 1369650 - RNA, 19 nt, Artificial Sequence
  Description of Artificial Sequence: Synthetic oligonucleotide
  Sense strand starting at position 3635 of SEQ ID NO: 1242742
guugauuagaaggguccua

SEQ ID NO: 1369651 - RNA, 19 nt, Artificial Sequence
  Description of Artificial Sequence: Synthetic oligonucleotide
  Antisense strand to SEQ ID NO: 1369650
uaggacccuucuaaucaac

SEQ ID NO: 1369652 - RNA, 19 nt, Artificial Sequence
  Description of Artificial Sequence: Synthetic oligonucleotide
  Sense strand starting at position 3646 of SEQ ID NO: 1242742
ggguccuaccuagaaaugu

SEQ ID NO: 1369653 - RNA, 19 nt, Artificial Sequence
  Description of Artificial Sequence: Synthetic oligonucleotide
  Antisense strand to SEQ ID NO: 1369652
acauuucuagguaggaccc

SEQ ID NO: 1369654 - RNA, 19 nt, Artificial Sequence
  Description of Artificial Sequence: Synthetic oligonucleotide
  Sense strand starting at position 3692 of SEQ ID NO: 1242742
ugagguuugcuggaucuuu

SEQ ID NO: 1369655 - RNA, 19 nt, Artificial Sequence
  Description of Artificial Sequence: Synthetic oligonucleotide
  Antisense strand to SEQ ID NO: 1369654
aaagauccagcaaaccuca

SEQ ID NO: 1369656 - RNA, 19 nt, Artificial Sequence
  Description of Artificial Sequence: Synthetic oligonucleotide
  Sense strand starting at position 3722 of SEQ ID NO: 1242742
agggaaauuguugguauau

SEQ ID NO: 1369657 - RNA, 19 nt, Artificial Sequence
  Description of Artificial Sequence: Synthetic oligonucleotide
  Antisense strand to SEQ ID NO: 1369656
auauaccaacaauuucccu

SEQ ID NO: 1369658 - RNA, 19 nt, Artificial Sequence
  Description of Artificial Sequence: Synthetic oligonucleotide
  Sense strand starting at position 3723 of SEQ ID NO: 1242742
gggaaauuguugguauauc

SEQ ID NO: 1369659 - RNA, 19 nt, Artificial Sequence
  Description of Artificial Sequence: Synthetic oligonucleotide
  Antisense strand to SEQ ID NO: 1369658
gauauaccaacaauuuccc

SEQ ID NO: 1369660 - RNA, 19 nt, Artificial Sequence
  Description of Artificial Sequence: Synthetic oligonucleotide
  Sense strand starting at position 3852 of SEQ ID NO: 1242742
uuuggugaugugggaagau

SEQ ID NO: 1369661 - RNA, 19 nt, Artificial Sequence
  Description of Artificial Sequence: Synthetic oligonucleotide
  Antisense strand to SEQ ID NO: 1369660
aucuucccacaucaccaaa

SEQ ID NO: 1369662 - RNA, 19 nt, Artificial Sequence
  Description of Artificial Sequence: Synthetic oligonucleotide
  Sense strand starting at position 3903 of SEQ ID NO: 1242742
agaccuacaugucuacauu

SEQ ID NO: 1369663 - RNA, 19 nt, Artificial Sequence
  Description of Artificial Sequence: Synthetic oligonucleotide
  Antisense strand to SEQ ID NO: 1369662
aauguagacauguaggucu

SEQ ID NO: 1369664 - RNA, 19 nt, Artificial Sequence
  Description of Artificial Sequence: Synthetic oligonucleotide
  Sense strand starting at position 3967 of SEQ ID NO: 1242742
uaugcagaggucuauuagu

SEQ ID NO: 1369665 - RNA, 19 nt, Artificial Sequence
  Description of Artificial Sequence: Synthetic oligonucleotide
  Antisense strand to SEQ ID NO: 1369664
acuaauagaccucugcaua

SEQ ID NO: 1369666 - RNA, 19 nt, Artificial Sequence
  Description of Artificial Sequence: Synthetic oligonucleotide
  Sense strand starting at position 96 of SEQ ID NO: 1242743
agcucuugugcacauacau

SEQ ID NO: 1369667 - RNA, 19 nt, Artificial Sequence
  Description of Artificial Sequence: Synthetic oligonucleotide
  Antisense strand to SEQ ID NO: 1369666
auguaugugcacaagagcu

SEQ ID NO: 1369668 - RNA, 19 nt, Artificial Sequence
  Description of Artificial Sequence: Synthetic oligonucleotide
  Sense strand starting at position 216 of SEQ ID NO: 1242743
ccagcuuuagcagaauggu

SEQ ID NO: 1369669 - RNA, 19 nt, Artificial Sequence
  Description of Artificial Sequence: Synthetic oligonucleotide
  Antisense strand to SEQ ID NO: 1369668
accauucugcuaaagcugg

SEQ ID NO: 1369670 - RNA, 19 nt, Artificial Sequence
  Description of Artificial Sequence: Synthetic oligonucleotide
  Sense strand starting at position 322 of SEQ ID NO: 1242743
guucccugcccucaagaga

SEQ ID NO: 1369671 - RNA, 19 nt, Artificial Sequence
  Description of Artificial Sequence: Synthetic oligonucleotide
  Antisense strand to SEQ ID NO: 1369670
ucucuugagggcagggaac

SEQ ID NO: 1369672 - RNA, 19 nt, Artificial Sequence
  Description of Artificial Sequence: Synthetic oligonucleotide
  Sense strand starting at position 335 of SEQ ID NO: 1242743
aagagaacgcucugucuag

SEQ ID NO: 1369673 - RNA, 19 nt, Artificial Sequence
  Description of Artificial Sequence: Synthetic oligonucleotide
  Antisense strand to SEQ ID NO: 1369672
cuagacagagcguucucuu

SEQ ID NO: 1369674 - RNA, 19 nt, Artificial Sequence
  Description of Artificial Sequence: Synthetic oligonucleotide
  Sense strand starting at position 336 of SEQ ID NO: 1242743
agagaacgcucugucuaga

SEQ ID NO: 1369675 - RNA, 19 nt, Artificial Sequence
  Description of Artificial Sequence: Synthetic oligonucleotide
  Antisense strand to SEQ ID NO: 1369674
ucuagacagagcguucucu

SEQ ID NO: 1369676 - RNA, 19 nt, Artificial Sequence
  Description of Artificial Sequence: Synthetic oligonucleotide
  Sense strand starting at position 739 of SEQ ID NO: 1242743
ggcgugugucaggaauuag

SEQ ID NO: 1369677 - RNA, 19 nt, Artificial Sequence
  Description of Artificial Sequence: Synthetic oligonucleotide
  Antisense strand to SEQ ID NO: 1369676
cuaauuccugacacacgcc

SEQ ID NO: 1369678 - RNA, 19 nt, Artificial Sequence
  Description of Artificial Sequence: Synthetic oligonucleotide
  Sense strand starting at position 945 of SEQ ID NO: 1242743
ggagccggauauucugaaa

SEQ ID NO: 1369679 - RNA, 19 nt, Artificial Sequence
  Description of Artificial Sequence: Synthetic oligonucleotide
  Antisense strand to SEQ ID NO: 1369678
uuucagaauauccggcucc

SEQ ID NO: 1369680 - RNA, 19 nt, Artificial Sequence
  Description of Artificial Sequence: Synthetic oligonucleotide
  Sense strand starting at position 1237 of SEQ ID NO: 1242743
cuacaaaucacccgaggga

SEQ ID NO: 1369681 - RNA, 19 nt, Artificial Sequence
  Description of Artificial Sequence: Synthetic oligonucleotide
  Antisense strand to SEQ ID NO: 1369680
ucccucgggugauuuguag

SEQ ID NO: 1369682 - RNA, 19 nt, Artificial Sequence
  Description of Artificial Sequence: Synthetic oligonucleotide
  Sense strand starting at position 1246 of SEQ ID NO: 1242743
acccgagggagugguuaaa

SEQ ID NO: 1369683 - RNA, 19 nt, Artificial Sequence
  Description of Artificial Sequence: Synthetic oligonucleotide
  Antisense strand to SEQ ID NO: 1369682
uuuaaccacucccucgggu

SEQ ID NO: 1369684 - RNA, 19 nt, Artificial Sequence
  Description of Artificial Sequence: Synthetic oligonucleotide
  Sense strand starting at position 1349 of SEQ ID NO: 1242743
uuccgaucuggauacuuaa

SEQ ID NO: 1369685 - RNA, 19 nt, Artificial Sequence
  Description of Artificial Sequence: Synthetic oligonucleotide
  Antisense strand to SEQ ID NO: 1369684
uuaaguauccagaucggaa

SEQ ID NO: 1369686 - RNA, 19 nt, Artificial Sequence
  Description of Artificial Sequence: Synthetic oligonucleotide
  Sense strand starting at position 1352 of SEQ ID NO: 1242743
cgaucuggauacuuaauua

SEQ ID NO: 1369687 - RNA, 19 nt, Artificial Sequence
  Description of Artificial Sequence: Synthetic oligonucleotide
  Antisense strand to SEQ ID NO: 1369686
uaauuaaguauccagaucg

SEQ ID NO: 1369688 - RNA, 19 nt, Artificial Sequence
  Description of Artificial Sequence: Synthetic oligonucleotide
  Sense strand starting at position 1458 of SEQ ID NO: 1242743
cgugcuuugcugccaggaa

SEQ ID NO: 1369689 - RNA, 19 nt, Artificial Sequence
  Description of Artificial Sequence: Synthetic oligonucleotide
  Antisense strand to SEQ ID NO: 1369688
uuccuggcagcaaagcacg

SEQ ID NO: 1369690 - RNA, 19 nt, Artificial Sequence
  Description of Artificial Sequence: Synthetic oligonucleotide
  Sense strand starting at position 2400 of SEQ ID NO: 1242743
ugagccuguugguuacaga

SEQ ID NO: 1369691 - RNA, 19 nt, Artificial Sequence
  Description of Artificial Sequence: Synthetic oligonucleotide
  Antisense strand to SEQ ID NO: 1369690
ucuguaaccaacaggcuca

SEQ ID NO: 1369692 - RNA, 19 nt, Artificial Sequence
  Description of Artificial Sequence: Synthetic oligonucleotide
  Sense strand starting at position 2401 of SEQ ID NO: 1242743
gagccuguugguuacagaa

SEQ ID NO: 1369693 - RNA, 19 nt, Artificial Sequence
  Description of Artificial Sequence: Synthetic oligonucleotide
  Antisense strand to SEQ ID NO: 1369692
uucuguaaccaacaggcuc

SEQ ID NO: 1369694 - RNA, 19 nt, Artificial Sequence
  Description of Artificial Sequence: Synthetic oligonucleotide
  Sense strand starting at position 2497 of SEQ ID NO: 1242743
aguccauuguuucccgaaa

SEQ ID NO: 1369695 - RNA, 19 nt, Artificial Sequence
  Description of Artificial Sequence: Synthetic oligonucleotide
  Antisense strand to SEQ ID NO: 1369694
uuucgggaaacaauggacu

SEQ ID NO: 1369696 - RNA, 19 nt, Artificial Sequence
  Description of Artificial Sequence: Synthetic oligonucleotide
  Sense strand starting at position 2498 of SEQ ID NO: 1242743
guccauuguuucccgaaag

SEQ ID NO: 1369697 - RNA, 19 nt, Artificial Sequence
  Description of Artificial Sequence: Synthetic oligonucleotide
  Antisense strand to SEQ ID NO: 1369696
cuuucgggaaacaauggac

SEQ ID NO: 1369698 - RNA, 19 nt, Artificial Sequence
  Description of Artificial Sequence: Synthetic oligonucleotide
  Sense strand starting at position 2537 of SEQ ID NO: 1242743
ucacgaauucugugauacu

SEQ ID NO: 1369699 - RNA, 19 nt, Artificial Sequence
  Description of Artificial Sequence: Synthetic oligonucleotide
  Antisense strand to SEQ ID NO: 1369698
aguaucacagaauucguga

SEQ ID NO: 1369700 - RNA, 19 nt, Artificial Sequence
  Description of Artificial Sequence: Synthetic oligonucleotide
  Sense strand starting at position 2546 of SEQ ID NO: 1242743
cugugauacucucuuacca

SEQ ID NO: 1369701 - RNA, 19 nt, Artificial Sequence
  Description of Artificial Sequence: Synthetic oligonucleotide
  Antisense strand to SEQ ID NO: 1369700
ugguaagagaguaucacag

SEQ ID NO: 1369702 - RNA, 19 nt, Artificial Sequence
  Description of Artificial Sequence: Synthetic oligonucleotide
  Sense strand starting at position 2668 of SEQ ID NO: 1242743
auuagaacguaugcauuaa

SEQ ID NO: 1369703 - RNA, 19 nt, Artificial Sequence
  Description of Artificial Sequence: Synthetic oligonucleotide
  Antisense strand to SEQ ID NO: 1369702
uuaaugcauacguucuaau

SEQ ID NO: 1369704 - RNA, 19 nt, Artificial Sequence
  Description of Artificial Sequence: Synthetic oligonucleotide
  Sense strand starting at position 2672 of SEQ ID NO: 1242743
gaacguaugcauuaacacu

SEQ ID NO: 1369705 - RNA, 19 nt, Artificial Sequence
  Description of Artificial Sequence: Synthetic oligonucleotide
  Antisense strand to SEQ ID NO: 1369704
aguguuaaugcauacguuc

SEQ ID NO: 1369706 - RNA, 19 nt, Artificial Sequence
  Description of Artificial Sequence: Synthetic oligonucleotide
  Sense strand starting at position 2811 of SEQ ID NO: 1242743
auauuugugccguaucuuu

SEQ ID NO: 1369707 - RNA, 19 nt, Artificial Sequence
  Description of Artificial Sequence: Synthetic oligonucleotide
  Antisense strand to SEQ ID NO: 1369706
aaagauacggcacaaauau

SEQ ID NO: 1369708 - RNA, 19 nt, Artificial Sequence
  Description of Artificial Sequence: Synthetic oligonucleotide
  Sense strand starting at position 2859 of SEQ ID NO: 1242743
ggcacauacuauucuguuu

SEQ ID NO: 1369709 - RNA, 19 nt, Artificial Sequence
  Description of Artificial Sequence: Synthetic oligonucleotide
  Antisense strand to SEQ ID NO: 1369708
aaacagaauaguaugugcc

SEQ ID NO: 1369710 - RNA, 19 nt, Artificial Sequence
  Description of Artificial Sequence: Synthetic oligonucleotide
  Sense strand starting at position 3283 of SEQ ID NO: 1242743
aacuaaagauguguaguaa

SEQ ID NO: 1369711 - RNA, 19 nt, Artificial Sequence
  Description of Artificial Sequence: Synthetic oligonucleotide
  Antisense strand to SEQ ID NO: 1369710
uuacuacacaucuuuaguu

SEQ ID NO: 1369712 - RNA, 19 nt, Artificial Sequence
  Description of Artificial Sequence: Synthetic oligonucleotide
  Sense strand starting at position 3337 of SEQ ID NO: 1242743
aaaugaagguaugugucua

SEQ ID NO: 1369713 - RNA, 19 nt, Artificial Sequence
  Description of Artificial Sequence: Synthetic oligonucleotide
  Antisense strand to SEQ ID NO: 1369712
uagacacauaccuucauuu

SEQ ID NO: 1369714 - RNA, 19 nt, Artificial Sequence
  Description of Artificial Sequence: Synthetic oligonucleotide
  Sense strand starting at position 3341 of SEQ ID NO: 1242743
gaagguaugugucuacaaa

SEQ ID NO: 1369715 - RNA, 19 nt, Artificial Sequence
  Description of Artificial Sequence: Synthetic oligonucleotide
  Antisense strand to SEQ ID NO: 1369714
uuuguagacacauaccuuc

SEQ ID NO: 1369716 - RNA, 19 nt, Artificial Sequence
  Description of Artificial Sequence: Synthetic oligonucleotide
  Sense strand starting at position 3423 of SEQ ID NO: 1242743
guugucuagcaacagaaua

SEQ ID NO: 1369717 - RNA, 19 nt, Artificial Sequence
  Description of Artificial Sequence: Synthetic oligonucleotide
  Antisense strand to SEQ ID NO: 1369716
uauucuguugcuagacaac

SEQ ID NO: 1369718 - RNA, 19 nt, Artificial Sequence
  Description of Artificial Sequence: Synthetic oligonucleotide
  Sense strand starting at position 3428 of SEQ ID NO: 1242743
cuagcaacagaauaguauu

SEQ ID NO: 1369719 - RNA, 19 nt, Artificial Sequence
  Description of Artificial Sequence: Synthetic oligonucleotide
  Antisense strand to SEQ ID NO: 1369718
aauacuauucuguugcuag

SEQ ID NO: 1369720 - RNA, 19 nt, Artificial Sequence
  Description of Artificial Sequence: Synthetic oligonucleotide
  Sense strand starting at position 3577 of SEQ ID NO: 1242743
gagcccaaccuugaguuua

SEQ ID NO: 1369721 - RNA, 19 nt, Artificial Sequence
  Description of Artificial Sequence: Synthetic oligonucleotide
  Antisense strand to SEQ ID NO: 1369720
uaaacucaagguugggcuc

SEQ ID NO: 1369722 - RNA, 19 nt, Artificial Sequence
  Description of Artificial Sequence: Synthetic oligonucleotide
  Sense strand starting at position 3579 of SEQ ID NO: 1242743
gcccaaccuugaguuuaga

SEQ ID NO: 1369723 - RNA, 19 nt, Artificial Sequence
  Description of Artificial Sequence: Synthetic oligonucleotide
  Antisense strand to SEQ ID NO: 1369722
ucuaaacucaagguugggc

SEQ ID NO: 1369724 - RNA, 19 nt, Artificial Sequence
  Description of Artificial Sequence: Synthetic oligonucleotide
  Sense strand starting at position 3589 of SEQ ID NO: 1242743
gaguuuagagcaugcagaa

SEQ ID NO: 1369725 - RNA, 19 nt, Artificial Sequence
  Description of Artificial Sequence: Synthetic oligonucleotide
  Antisense strand to SEQ ID NO: 1369724
uucugcaugcucuaaacuc

SEQ ID NO: 1369726 - RNA, 19 nt, Artificial Sequence
  Description of Artificial Sequence: Synthetic oligonucleotide
  Sense strand starting at position 3693 of SEQ ID NO: 1242743
aaauaagauuggucugcua

SEQ ID NO: 1369727 - RNA, 19 nt, Artificial Sequence
  Description of Artificial Sequence: Synthetic oligonucleotide
  Antisense strand to SEQ ID NO: 1369726
uagcagaccaaucuuauuu

SEQ ID NO: 1369728 - RNA, 19 nt, Artificial Sequence
  Description of Artificial Sequence: Synthetic oligonucleotide
  Sense strand starting at position 3751 of SEQ ID NO: 1242743
ggagacaagcccuauccuu

SEQ ID NO: 1369729 - RNA, 19 nt, Artificial Sequence
  Description of Artificial Sequence: Synthetic oligonucleotide
  Antisense strand to SEQ ID NO: 1369728
aaggauagggcuugucucc

SEQ ID NO: 1369730 - RNA, 19 nt, Artificial Sequence
  Description of Artificial Sequence: Synthetic oligonucleotide
  Sense strand starting at position 3769 of SEQ ID NO: 1242743
ucuuaaguguuagccugaa

SEQ ID NO: 1369731 - RNA, 19 nt, Artificial Sequence
  Description of Artificial Sequence: Synthetic oligonucleotide
  Antisense strand to SEQ ID NO: 1369730
uucaggcuaacacuuaaga

SEQ ID NO: 1369732 - RNA, 19 nt, Artificial Sequence
  Description of Artificial Sequence: Synthetic oligonucleotide
  Sense strand starting at position 3773 of SEQ ID NO: 1242743
aaguguuagccugaacaaa

SEQ ID NO: 1369733 - RNA, 19 nt, Artificial Sequence
  Description of Artificial Sequence: Synthetic oligonucleotide
  Antisense strand to SEQ ID NO: 1369732
uuuguucaggcuaacacuu

SEQ ID NO: 1369734 - RNA, 19 nt, Artificial Sequence
  Description of Artificial Sequence: Synthetic oligonucleotide
  Sense strand starting at position 3874 of SEQ ID NO: 1242743
cugagugaugcuuauguua

SEQ ID NO: 1369735 - RNA, 19 nt, Artificial Sequence
  Description of Artificial Sequence: Synthetic oligonucleotide
  Antisense strand to SEQ ID NO: 1369734
uaacauaagcaucacucag

SEQ ID NO: 1369736 - RNA, 19 nt, Artificial Sequence
  Description of Artificial Sequence: Synthetic oligonucleotide
  Sense strand starting at position 3956 of SEQ ID NO: 1242743
cugguuagagccugaucaa

SEQ ID NO: 1369737 - RNA, 19 nt, Artificial Sequence
  Description of Artificial Sequence: Synthetic oligonucleotide
  Antisense strand to SEQ ID NO: 1369736
uugaucaggcucuaaccag

SEQ ID NO: 1369738 - RNA, 19 nt, Artificial Sequence
  Description of Artificial Sequence: Synthetic oligonucleotide
  Sense strand starting at position 3957 of SEQ ID NO: 1242743
ugguuagagccugaucaag

SEQ ID NO: 1369739 - RNA, 19 nt, Artificial Sequence
  Description of Artificial Sequence: Synthetic oligonucleotide
  Antisense strand to SEQ ID NO: 1369738
cuugaucaggcucuaacca

SEQ ID NO: 1369740 - RNA, 19 nt, Artificial Sequence
  Description of Artificial Sequence: Synthetic oligonucleotide
  Sense strand starting at position 3959 of SEQ ID NO: 1242743
guuagagccugaucaagga

SEQ ID NO: 1369741 - RNA, 19 nt, Artificial Sequence
  Description of Artificial Sequence: Synthetic oligonucleotide
  Antisense strand to SEQ ID NO: 1369740
uccuugaucaggcucuaac

SEQ ID NO: 1369742 - RNA, 19 nt, Artificial Sequence
  Description of Artificial Sequence: Synthetic oligonucleotide
  Sense strand starting at position 3976 of SEQ ID NO: 1242743
gagagaaucuuugccagau

SEQ ID NO: 1369743 - RNA, 19 nt, Artificial Sequence
  Description of Artificial Sequence: Synthetic oligonucleotide
  Antisense strand to SEQ ID NO: 1369742
aucuggcaaagauucucuc

SEQ ID NO: 1369744 - RNA, 19 nt, Artificial Sequence
  Description of Artificial Sequence: Synthetic oligonucleotide
  Sense strand starting at position 3977 of SEQ ID NO: 1242743
agagaaucuuugccagaua

SEQ ID NO: 1369745 - RNA, 19 nt, Artificial Sequence
  Description of Artificial Sequence: Synthetic oligonucleotide
  Antisense strand to SEQ ID NO: 1369744
uaucuggcaaagauucucu

SEQ ID NO: 1369746 - RNA, 19 nt, Artificial Sequence
  Description of Artificial Sequence: Synthetic oligonucleotide
  Sense strand starting at position 137 of SEQ ID NO: 1242744
aggagacuuuggucaccua

SEQ ID NO: 1369747 - RNA, 19 nt, Artificial Sequence
  Description of Artificial Sequence: Synthetic oligonucleotide
  Antisense strand to SEQ ID NO: 1369746
uaggugaccaaagucuccu

SEQ ID NO: 1369748 - RNA, 19 nt, Artificial Sequence
  Description of Artificial Sequence: Synthetic oligonucleotide
  Sense strand starting at position 354 of SEQ ID NO: 1242744
caccacgugcuuuaucaga

SEQ ID NO: 1369749 - RNA, 19 nt, Artificial Sequence
  Description of Artificial Sequence: Synthetic oligonucleotide
  Antisense strand to SEQ ID NO: 1369748
ucugauaaagcacguggug

SEQ ID NO: 1369750 - RNA, 19 nt, Artificial Sequence
  Description of Artificial Sequence: Synthetic oligonucleotide
  Sense strand starting at position 356 of SEQ ID NO: 1242744
ccacgugcuuuaucagaag

SEQ ID NO: 1369751 - RNA, 19 nt, Artificial Sequence
  Description of Artificial Sequence: Synthetic oligonucleotide
  Antisense strand to SEQ ID NO: 1369750
cuucugauaaagcacgugg

SEQ ID NO: 1369752 - RNA, 19 nt, Artificial Sequence
  Description of Artificial Sequence: Synthetic oligonucleotide
  Sense strand starting at position 498 of SEQ ID NO: 1242744
uugggcaagugaucugcaa

SEQ ID NO: 1369753 - RNA, 19 nt, Artificial Sequence
  Description of Artificial Sequence: Synthetic oligonucleotide
  Antisense strand to SEQ ID NO: 1369752
uugcagaucacuugcccaa

SEQ ID NO: 1369754 - RNA, 19 nt, Artificial Sequence
  Description of Artificial Sequence: Synthetic oligonucleotide
  Sense strand starting at position 500 of SEQ ID NO: 1242744
gggcaagugaucugcaagu

SEQ ID NO: 1369755 - RNA, 19 nt, Artificial Sequence
  Description of Artificial Sequence: Synthetic oligonucleotide
  Antisense strand to SEQ ID NO: 1369754
acuugcagaucacuugccc

SEQ ID NO: 1369756 - RNA, 19 nt, Artificial Sequence
  Description of Artificial Sequence: Synthetic oligonucleotide
  Sense strand starting at position 555 of SEQ ID NO: 1242744
ggucucuguuucucuccaa

SEQ ID NO: 1369757 - RNA, 19 nt, Artificial Sequence
  Description of Artificial Sequence: Synthetic oligonucleotide
  Antisense strand to SEQ ID NO: 1369756
uuggagagaaacagagacc

SEQ ID NO: 1369758 - RNA, 19 nt, Artificial Sequence
  Description of Artificial Sequence: Synthetic oligonucleotide
  Sense strand starting at position 575 of SEQ ID NO: 1242744
ucaguccaaccgugaaagu

SEQ ID NO: 1369759 - RNA, 19 nt, Artificial Sequence
  Description of Artificial Sequence: Synthetic oligonucleotide
  Antisense strand to SEQ ID NO: 1369758
acuuucacgguuggacuga

SEQ ID NO: 1369760 - RNA, 19 nt, Artificial Sequence
  Description of Artificial Sequence: Synthetic oligonucleotide
  Sense strand starting at position 714 of SEQ ID NO: 1242744
cuguguuaccaugaccaca

SEQ ID NO: 1369761 - RNA, 19 nt, Artificial Sequence
  Description of Artificial Sequence: Synthetic oligonucleotide
  Antisense strand to SEQ ID NO: 1369760
uguggucaugguaacacag

SEQ ID NO: 1369762 - RNA, 19 nt, Artificial Sequence
  Description of Artificial Sequence: Synthetic oligonucleotide
  Sense strand starting at position 1558 of SEQ ID NO: 1242744
ccgaaagucugacuucuag

SEQ ID NO: 1369763 - RNA, 19 nt, Artificial Sequence
  Description of Artificial Sequence: Synthetic oligonucleotide
  Antisense strand to SEQ ID NO: 1369762
cuagaagucagacuuucgg

SEQ ID NO: 1369764 - RNA, 19 nt, Artificial Sequence
  Description of Artificial Sequence: Synthetic oligonucleotide
  Sense strand starting at position 1564 of SEQ ID NO: 1242744
gucugacuucuagaaccuu

SEQ ID NO: 1369765 - RNA, 19 nt, Artificial Sequence
  Description of Artificial Sequence: Synthetic oligonucleotide
  Antisense strand to SEQ ID NO: 1369764
aagguucuagaagucagac

SEQ ID NO: 1369766 - RNA, 19 nt, Artificial Sequence
  Description of Artificial Sequence: Synthetic oligonucleotide
  Sense strand starting at position 1575 of SEQ ID NO: 1242744
agaaccuuucggugcugau

SEQ ID NO: 1369767 - RNA, 19 nt, Artificial Sequence
  Description of Artificial Sequence: Synthetic oligonucleotide
  Antisense strand to SEQ ID NO: 1369766
aucagcaccgaaagguucu

SEQ ID NO: 1369768 - RNA, 19 nt, Artificial Sequence
  Description of Artificial Sequence: Synthetic oligonucleotide
  Sense strand starting at position 1733 of SEQ ID NO: 1242744
ucagaaugguuucucuguu

SEQ ID NO: 1369769 - RNA, 19 nt, Artificial Sequence
  Description of Artificial Sequence: Synthetic oligonucleotide
  Antisense strand to SEQ ID NO: 1369768
aacagagaaaccauucuga

SEQ ID NO: 1369770 - RNA, 19 nt, Artificial Sequence
  Description of Artificial Sequence: Synthetic oligonucleotide
  Sense strand starting at position 1734 of SEQ ID NO: 1242744
cagaaugguuucucuguuu

SEQ ID NO: 1369771 - RNA, 19 nt, Artificial Sequence
  Description of Artificial Sequence: Synthetic oligonucleotide
  Antisense strand to SEQ ID NO: 1369770
aaacagagaaaccauucug

SEQ ID NO: 1369772 - RNA, 19 nt, Artificial Sequence
  Description of Artificial Sequence: Synthetic oligonucleotide
  Sense strand starting at position 1743 of SEQ ID NO: 1242744
uucucuguuuaucuggaau

SEQ ID NO: 1369773 - RNA, 19 nt, Artificial Sequence
  Description of Artificial Sequence: Synthetic oligonucleotide
  Antisense strand to SEQ ID NO: 1369772
auuccagauaaacagagaa

SEQ ID NO: 1369774 - RNA, 19 nt, Artificial Sequence
  Description of Artificial Sequence: Synthetic oligonucleotide
  Sense strand starting at position 1775 of SEQ ID NO: 1242744
gagacugcacgcuaaauua

SEQ ID NO: 1369775 - RNA, 19 nt, Artificial Sequence
  Description of Artificial Sequence: Synthetic oligonucleotide
  Antisense strand to SEQ ID NO: 1369774
uaauuuagcgugcagucuc

SEQ ID NO: 1369776 - RNA, 19 nt, Artificial Sequence
  Description of Artificial Sequence: Synthetic oligonucleotide
  Sense strand starting at position 2189 of SEQ ID NO: 1242744
gacugaauuuggugaagac

SEQ ID NO: 1369777 - RNA, 19 nt, Artificial Sequence
  Description of Artificial Sequence: Synthetic oligonucleotide
  Antisense strand to SEQ ID NO: 1369776
gucuucaccaaauucaguc

SEQ ID NO: 1369778 - RNA, 19 nt, Artificial Sequence
  Description of Artificial Sequence: Synthetic oligonucleotide
  Sense strand starting at position 2205 of SEQ ID NO: 1242744
gacagaaaguugcacagaa

SEQ ID NO: 1369779 - RNA, 19 nt, Artificial Sequence
  Description of Artificial Sequence: Synthetic oligonucleotide
  Antisense strand to SEQ ID NO: 1369778
uucugugcaacuuucuguc

SEQ ID NO: 1369780 - RNA, 19 nt, Artificial Sequence
  Description of Artificial Sequence: Synthetic oligonucleotide
  Sense strand starting at position 2439 of SEQ ID NO: 1242744
cugaauuucucuggagauc

SEQ ID NO: 1369781 - RNA, 19 nt, Artificial Sequence
  Description of Artificial Sequence: Synthetic oligonucleotide
  Antisense strand to SEQ ID NO: 1369780
gaucuccagagaaauucag

SEQ ID NO: 1369782 - RNA, 19 nt, Artificial Sequence
  Description of Artificial Sequence: Synthetic oligonucleotide
  Sense strand starting at position 2540 of SEQ ID NO: 1242744
guacccuuguagucagaug

SEQ ID NO: 1369783 - RNA, 19 nt, Artificial Sequence
  Description of Artificial Sequence: Synthetic oligonucleotide
  Antisense strand to SEQ ID NO: 1369782
caucugacuacaaggguac

SEQ ID NO: 1369784 - RNA, 19 nt, Artificial Sequence
  Description of Artificial Sequence: Synthetic oligonucleotide
  Sense strand starting at position 2545 of SEQ ID NO: 1242744
cuuguagucagaugguuug

SEQ ID NO: 1369785 - RNA, 19 nt, Artificial Sequence
  Description of Artificial Sequence: Synthetic oligonucleotide
  Antisense strand to SEQ ID NO: 1369784
caaaccaucugacuacaag

SEQ ID NO: 1369786 - RNA, 19 nt, Artificial Sequence
  Description of Artificial Sequence: Synthetic oligonucleotide
  Sense strand starting at position 2607 of SEQ ID NO: 1242744
gggagaaaguuagugucuu

SEQ ID NO: 1369787 - RNA, 19 nt, Artificial Sequence
  Description of Artificial Sequence: Synthetic oligonucleotide
  Antisense strand to SEQ ID NO: 1369786
aagacacuaacuuucuccc

SEQ ID NO: 1369788 - RNA, 19 nt, Artificial Sequence
  Description of Artificial Sequence: Synthetic oligonucleotide
  Sense strand starting at position 2661 of SEQ ID NO: 1242744
gaggaagucucagcuuggu

SEQ ID NO: 1369789 - RNA, 19 nt, Artificial Sequence
  Description of Artificial Sequence: Synthetic oligonucleotide
  Antisense strand to SEQ ID NO: 1369788
accaagcugagacuuccuc

SEQ ID NO: 1369790 - RNA, 19 nt, Artificial Sequence
  Description of Artificial Sequence: Synthetic oligonucleotide
  Sense strand starting at position 2666 of SEQ ID NO: 1242744
agucucagcuuggugugaa

SEQ ID NO: 1369791 - RNA, 19 nt, Artificial Sequence
  Description of Artificial Sequence: Synthetic oligonucleotide
  Antisense strand to SEQ ID NO: 1369790
uucacaccaagcugagacu

SEQ ID NO: 1369792 - RNA, 19 nt, Artificial Sequence
  Description of Artificial Sequence: Synthetic oligonucleotide
  Sense strand starting at position 2669 of SEQ ID NO: 1242744
cucagcuuggugugaacau

SEQ ID NO: 1369793 - RNA, 19 nt, Artificial Sequence
  Description of Artificial Sequence: Synthetic oligonucleotide
  Antisense strand to SEQ ID NO: 1369792
auguucacaccaagcugag

SEQ ID NO: 1369794 - RNA, 19 nt, Artificial Sequence
  Description of Artificial Sequence: Synthetic oligonucleotide
  Sense strand starting at position 2678 of SEQ ID NO: 1242744
gugugaacaugucuuuaac

SEQ ID NO: 1369795 - RNA, 19 nt, Artificial Sequence
  Description of Artificial Sequence: Synthetic oligonucleotide
  Antisense strand to SEQ ID NO: 1369794
guuaaagacauguucacac

SEQ ID NO: 1369796 - RNA, 19 nt, Artificial Sequence
  Description of Artificial Sequence: Synthetic oligonucleotide
  Sense strand starting at position 2680 of SEQ ID NO: 1242744
gugaacaugucuuuaacac

SEQ ID NO: 1369797 - RNA, 19 nt, Artificial Sequence
  Description of Artificial Sequence: Synthetic oligonucleotide
  Antisense strand to SEQ ID NO: 1369796
guguuaaagacauguucac

SEQ ID NO: 1369798 - RNA, 19 nt, Artificial Sequence
  Description of Artificial Sequence: Synthetic oligonucleotide
  Sense strand starting at position 2791 of SEQ ID NO: 1242744
ucacucugcuuucuuguua

SEQ ID NO: 1369799 - RNA, 19 nt, Artificial Sequence
  Description of Artificial Sequence: Synthetic oligonucleotide
  Antisense strand to SEQ ID NO: 1369798
uaacaagaaagcagaguga

SEQ ID NO: 1369800 - RNA, 19 nt, Artificial Sequence
  Description of Artificial Sequence: Synthetic oligonucleotide
  Sense strand starting at position 2795 of SEQ ID NO: 1242744
ucugcuuucuuguuaaaug

SEQ ID NO: 1369801 - RNA, 19 nt, Artificial Sequence
  Description of Artificial Sequence: Synthetic oligonucleotide
  Antisense strand to SEQ ID NO: 1369800
cauuuaacaagaaagcaga

SEQ ID NO: 1369802 - RNA, 19 nt, Artificial Sequence
  Description of Artificial Sequence: Synthetic oligonucleotide
  Sense strand starting at position 2840 of SEQ ID NO: 1242744
cccuuuauaaugggacgua

SEQ ID NO: 1369803 - RNA, 19 nt, Artificial Sequence
  Description of Artificial Sequence: Synthetic oligonucleotide
  Antisense strand to SEQ ID NO: 1369802
uacgucccauuauaaaggg

SEQ ID NO: 1369804 - RNA, 19 nt, Artificial Sequence
  Description of Artificial Sequence: Synthetic oligonucleotide
  Sense strand starting at position 2843 of SEQ ID NO: 1242744
uuuauaaugggacguaaag

SEQ ID NO: 1369805 - RNA, 19 nt, Artificial Sequence
  Description of Artificial Sequence: Synthetic oligonucleotide
  Antisense strand to SEQ ID NO: 1369804
cuuuacgucccauuauaaa

SEQ ID NO: 1369806 - RNA, 19 nt, Artificial Sequence
  Description of Artificial Sequence: Synthetic oligonucleotide
  Sense strand starting at position 3424 of SEQ ID NO: 1242744
ucgagugugcccaggaguu

SEQ ID NO: 1369807 - RNA, 19 nt, Artificial Sequence
  Description of Artificial Sequence: Synthetic oligonucleotide
  Antisense strand to SEQ ID NO: 1369806
aacuccugggcacacucga

SEQ ID NO: 1369808 - RNA, 19 nt, Artificial Sequence
  Description of Artificial Sequence: Synthetic oligonucleotide
  Sense strand starting at position 3626 of SEQ ID NO: 1242744
aaaugaagguuuggaaaca

SEQ ID NO: 1369809 - RNA, 19 nt, Artificial Sequence
  Description of Artificial Sequence: Synthetic oligonucleotide
  Antisense strand to SEQ ID NO: 1369808
uguuuccaaaccuucauuu

SEQ ID NO: 1369810 - RNA, 19 nt, Artificial Sequence
  Description of Artificial Sequence: Synthetic oligonucleotide
  Sense strand starting at position 3627 of SEQ ID NO: 1242744
aaugaagguuuggaaacau

SEQ ID NO: 1369811 - RNA, 19 nt, Artificial Sequence
  Description of Artificial Sequence: Synthetic oligonucleotide
  Antisense strand to SEQ ID NO: 1369810
auguuuccaaaccuucauu

SEQ ID NO: 1369812 - RNA, 19 nt, Artificial Sequence
  Description of Artificial Sequence: Synthetic oligonucleotide
  Sense strand starting at position 3642 of SEQ ID NO: 1242744
acaugacuugugugccuca

SEQ ID NO: 1369813 - RNA, 19 nt, Artificial Sequence
  Description of Artificial Sequence: Synthetic oligonucleotide
  Antisense strand to SEQ ID NO: 1369812
ugaggcacacaagucaugu

SEQ ID NO: 1369814 - RNA, 19 nt, Artificial Sequence
  Description of Artificial Sequence: Synthetic oligonucleotide
  Sense strand starting at position 3647 of SEQ ID NO: 1242744
acuugugugccucaugcau

SEQ ID NO: 1369815 - RNA, 19 nt, Artificial Sequence
  Description of Artificial Sequence: Synthetic oligonucleotide
  Antisense strand to SEQ ID NO: 1369814
augcaugaggcacacaagu

SEQ ID NO: 1369816 - RNA, 19 nt, Artificial Sequence
  Description of Artificial Sequence: Synthetic oligonucleotide
  Sense strand starting at position 3753 of SEQ ID NO: 1242744
ccaugugugaaaugaggau

SEQ ID NO: 1369817 - RNA, 19 nt, Artificial Sequence
  Description of Artificial Sequence: Synthetic oligonucleotide
  Antisense strand to SEQ ID NO: 1369816
auccucauuucacacaugg

SEQ ID NO: 1369818 - RNA, 19 nt, Artificial Sequence
  Description of Artificial Sequence: Synthetic oligonucleotide
  Sense strand starting at position 3782 of SEQ ID NO: 1242744
uuuguaaggugauuacuuu

SEQ ID NO: 1369819 - RNA, 19 nt, Artificial Sequence
  Description of Artificial Sequence: Synthetic oligonucleotide
  Antisense strand to SEQ ID NO: 1369818
aaaguaaucaccuuacaaa

SEQ ID NO: 1369820 - RNA, 19 nt, Artificial Sequence
  Description of Artificial Sequence: Synthetic oligonucleotide
  Sense strand starting at position 3786 of SEQ ID NO: 1242744
uaaggugauuacuuugaag

SEQ ID NO: 1369821 - RNA, 19 nt, Artificial Sequence
  Description of Artificial Sequence: Synthetic oligonucleotide
  Antisense strand to SEQ ID NO: 1369820
cuucaaaguaaucaccuua

SEQ ID NO: 1369822 - RNA, 19 nt, Artificial Sequence
  Description of Artificial Sequence: Synthetic oligonucleotide
  Sense strand starting at position 3842 of SEQ ID NO: 1242744
gguagaaauugacaaauaa

SEQ ID NO: 1369823 - RNA, 19 nt, Artificial Sequence
  Description of Artificial Sequence: Synthetic oligonucleotide
  Antisense strand to SEQ ID NO: 1369822
uuauuugucaauuucuacc

SEQ ID NO: 1369824 - RNA, 19 nt, Artificial Sequence
  Description of Artificial Sequence: Synthetic oligonucleotide
  Sense strand starting at position 3910 of SEQ ID NO: 1242744
ggauauggugaaugucaga

SEQ ID NO: 1369825 - RNA, 19 nt, Artificial Sequence
  Description of Artificial Sequence: Synthetic oligonucleotide
  Antisense strand to SEQ ID NO: 1369824
ucugacauucaccauaucc

SEQ ID NO: 1369826 - RNA, 19 nt, Artificial Sequence
  Description of Artificial Sequence: Synthetic oligonucleotide
  Sense strand starting at position 19 of SEQ ID NO: 1242745
gggugagcucaguaaauca

SEQ ID NO: 1369827 - RNA, 19 nt, Artificial Sequence
  Description of Artificial Sequence: Synthetic oligonucleotide
  Antisense strand to SEQ ID NO: 1369826
ugauuuacugagcucaccc

SEQ ID NO: 1369828 - RNA, 19 nt, Artificial Sequence
  Description of Artificial Sequence: Synthetic oligonucleotide
  Sense strand starting at position 218 of SEQ ID NO: 1242745
cucugacauuugucuuagu

SEQ ID NO: 1369829 - RNA, 19 nt, Artificial Sequence
  Description of Artificial Sequence: Synthetic oligonucleotide
  Antisense strand to SEQ ID NO: 1369828
acuaagacaaaugucagag

SEQ ID NO: 1369830 - RNA, 19 nt, Artificial Sequence
  Description of Artificial Sequence: Synthetic oligonucleotide
  Sense strand starting at position 280 of SEQ ID NO: 1242745
gccuaaauuccagguacca

SEQ ID NO: 1369831 - RNA, 19 nt, Artificial Sequence
  Description of Artificial Sequence: Synthetic oligonucleotide
  Antisense strand to SEQ ID NO: 1369830
ugguaccuggaauuuaggc

SEQ ID NO: 1369832 - RNA, 19 nt, Artificial Sequence
  Description of Artificial Sequence: Synthetic oligonucleotide
  Sense strand starting at position 386 of SEQ ID NO: 1242745
agauguugcacccgaagaa

SEQ ID NO: 1369833 - RNA, 19 nt, Artificial Sequence
  Description of Artificial Sequence: Synthetic oligonucleotide
  Antisense strand to SEQ ID NO: 1369832
uucuucgggugcaacaucu

SEQ ID NO: 1369834 - RNA, 19 nt, Artificial Sequence
  Description of Artificial Sequence: Synthetic oligonucleotide
  Sense strand starting at position 387 of SEQ ID NO: 1242745
gauguugcacccgaagaaa

SEQ ID NO: 1369835 - RNA, 19 nt, Artificial Sequence
  Description of Artificial Sequence: Synthetic oligonucleotide
  Antisense strand to SEQ ID NO: 1369834
uuucuucgggugcaacauc

SEQ ID NO: 1369836 - RNA, 19 nt, Artificial Sequence
  Description of Artificial Sequence: Synthetic oligonucleotide
  Sense strand starting at position 521 of SEQ ID NO: 1242745
aggucuacauucucucaga

SEQ ID NO: 1369837 - RNA, 19 nt, Artificial Sequence
  Description of Artificial Sequence: Synthetic oligonucleotide
  Antisense strand to SEQ ID NO: 1369836
ucugagagaauguagaccu

SEQ ID NO: 1369838 - RNA, 19 nt, Artificial Sequence
  Description of Artificial Sequence: Synthetic oligonucleotide
  Sense strand starting at position 541 of SEQ ID NO: 1242745
agaugaacuuuggaaucca

SEQ ID NO: 1369839 - RNA, 19 nt, Artificial Sequence
  Description of Artificial Sequence: Synthetic oligonucleotide
  Antisense strand to SEQ ID NO: 1369838
uggauuccaaaguucaucu

SEQ ID NO: 1369840 - RNA, 19 nt, Artificial Sequence
  Description of Artificial Sequence: Synthetic oligonucleotide
  Sense strand starting at position 633 of SEQ ID NO: 1242745
acugauacucccugcagga

SEQ ID NO: 1369841 - RNA, 19 nt, Artificial Sequence
  Description of Artificial Sequence: Synthetic oligonucleotide
  Antisense strand to SEQ ID NO: 1369840
uccugcagggaguaucagu

SEQ ID NO: 1369842 - RNA, 19 nt, Artificial Sequence
  Description of Artificial Sequence: Synthetic oligonucleotide
  Sense strand starting at position 675 of SEQ ID NO: 1242745
ugguguugagacugauaua

SEQ ID NO: 1369843 - RNA, 19 nt, Artificial Sequence
  Description of Artificial Sequence: Synthetic oligonucleotide
  Antisense strand to SEQ ID NO: 1369842
uauaucagucucaacacca

SEQ ID NO: 1369844 - RNA, 19 nt, Artificial Sequence
  Description of Artificial Sequence: Synthetic oligonucleotide
  Sense strand starting at position 676 of SEQ ID NO: 1242745
gguguugagacugauauac

SEQ ID NO: 1369845 - RNA, 19 nt, Artificial Sequence
  Description of Artificial Sequence: Synthetic oligonucleotide
  Antisense strand to SEQ ID NO: 1369844
guauaucagucucaacacc

SEQ ID NO: 1369846 - RNA, 19 nt, Artificial Sequence
  Description of Artificial Sequence: Synthetic oligonucleotide
  Sense strand starting at position 816 of SEQ ID NO: 1242745
cuucucuuaucaguuagga

SEQ ID NO: 1369847 - RNA, 19 nt, Artificial Sequence
  Description of Artificial Sequence: Synthetic oligonucleotide
  Antisense strand to SEQ ID NO: 1369846
uccuaacugauaagagaag

SEQ ID NO: 1369848 - RNA, 19 nt, Artificial Sequence
  Description of Artificial Sequence: Synthetic oligonucleotide
  Sense strand starting at position 836 of SEQ ID NO: 1242745
aucucagaaguuugguagu

SEQ ID NO: 1369849 - RNA, 19 nt, Artificial Sequence
  Description of Artificial Sequence: Synthetic oligonucleotide
  Antisense strand to SEQ ID NO: 1369848
acuaccaaacuucugagau

SEQ ID NO: 1369850 - RNA, 19 nt, Artificial Sequence
  Description of Artificial Sequence: Synthetic oligonucleotide
  Sense strand starting at position 842 of SEQ ID NO: 1242745
gaaguuugguaguucuaag

SEQ ID NO: 1369851 - RNA, 19 nt, Artificial Sequence
  Description of Artificial Sequence: Synthetic oligonucleotide
  Antisense strand to SEQ ID NO: 1369850
cuuagaacuaccaaacuuc

SEQ ID NO: 1369852 - RNA, 19 nt, Artificial Sequence
  Description of Artificial Sequence: Synthetic oligonucleotide
  Sense strand starting at position 882 of SEQ ID NO: 1242745
gucacucaaucaguuugau

SEQ ID NO: 1369853 - RNA, 19 nt, Artificial Sequence
  Description of Artificial Sequence: Synthetic oligonucleotide
  Antisense strand to SEQ ID NO: 1369852
aucaaacugauugagugac

SEQ ID NO: 1369854 - RNA, 19 nt, Artificial Sequence
  Description of Artificial Sequence: Synthetic oligonucleotide
  Sense strand starting at position 1156 of SEQ ID NO: 1242745
gagucauuauugcuauaug

SEQ ID NO: 1369855 - RNA, 19 nt, Artificial Sequence
  Description of Artificial Sequence: Synthetic oligonucleotide
  Antisense strand to SEQ ID NO: 1369854
cauauagcaauaaugacuc

SEQ ID NO: 1369856 - RNA, 19 nt, Artificial Sequence
  Description of Artificial Sequence: Synthetic oligonucleotide
  Sense strand starting at position 1314 of SEQ ID NO: 1242745
agcucagaauggcuugaau

SEQ ID NO: 1369857 - RNA, 19 nt, Artificial Sequence
  Description of Artificial Sequence: Synthetic oligonucleotide
  Antisense strand to SEQ ID NO: 1369856
auucaagccauucugagcu

SEQ ID NO: 1369858 - RNA, 19 nt, Artificial Sequence
  Description of Artificial Sequence: Synthetic oligonucleotide
  Sense strand starting at position 1316 of SEQ ID NO: 1242745
cucagaauggcuugaauaa

SEQ ID NO: 1369859 - RNA, 19 nt, Artificial Sequence
  Description of Artificial Sequence: Synthetic oligonucleotide
  Antisense strand to SEQ ID NO: 1369858
uuauucaagccauucugag

SEQ ID NO: 1369860 - RNA, 19 nt, Artificial Sequence
  Description of Artificial Sequence: Synthetic oligonucleotide
  Sense strand starting at position 1370 of SEQ ID NO: 1242745
acuccauagcuccagaguu

SEQ ID NO: 1369861 - RNA, 19 nt, Artificial Sequence
  Description of Artificial Sequence: Synthetic oligonucleotide
  Antisense strand to SEQ ID NO: 1369860
aacucuggagcuauggagu

SEQ ID NO: 1369862 - RNA, 19 nt, Artificial Sequence
  Description of Artificial Sequence: Synthetic oligonucleotide
  Sense strand starting at position 1444 of SEQ ID NO: 1242745
auugcuaaguuugcaaaca

SEQ ID NO: 1369863 - RNA, 19 nt, Artificial Sequence
  Description of Artificial Sequence: Synthetic oligonucleotide
  Antisense strand to SEQ ID NO: 1369862
uguuugcaaacuuagcaau

SEQ ID NO: 1369864 - RNA, 19 nt, Artificial Sequence
  Description of Artificial Sequence: Synthetic oligonucleotide
  Sense strand starting at position 1614 of SEQ ID NO: 1242745
auauauacuggccgagagu

SEQ ID NO: 1369865 - RNA, 19 nt, Artificial Sequence
  Description of Artificial Sequence: Synthetic oligonucleotide
  Antisense strand to SEQ ID NO: 1369864
acucucggccaguauauau

SEQ ID NO: 1369866 - RNA, 19 nt, Artificial Sequence
  Description of Artificial Sequence: Synthetic oligonucleotide
  Sense strand starting at position 1615 of SEQ ID NO: 1242745
uauauacuggccgagagua

SEQ ID NO: 1369867 - RNA, 19 nt, Artificial Sequence
  Description of Artificial Sequence: Synthetic oligonucleotide
  Antisense strand to SEQ ID NO: 1369866
uacucucggccaguauaua

SEQ ID NO: 1369868 - RNA, 19 nt, Artificial Sequence
  Description of Artificial Sequence: Synthetic oligonucleotide
  Sense strand starting at position 2632 of SEQ ID NO: 1242745
ggguuaggaccgugagguu

SEQ ID NO: 1369869 - RNA, 19 nt, Artificial Sequence
  Description of Artificial Sequence: Synthetic oligonucleotide
  Antisense strand to SEQ ID NO: 1369868
aaccucacgguccuaaccc

SEQ ID NO: 1369870 - RNA, 19 nt, Artificial Sequence
  Description of Artificial Sequence: Synthetic oligonucleotide
  Sense strand starting at position 2688 of SEQ ID NO: 1242745
gcuucugggagagguaauu

SEQ ID NO: 1369871 - RNA, 19 nt, Artificial Sequence
  Description of Artificial Sequence: Synthetic oligonucleotide
  Antisense strand to SEQ ID NO: 1369870
aauuaccucucccagaagc

SEQ ID NO: 1369872 - RNA, 19 nt, Artificial Sequence
  Description of Artificial Sequence: Synthetic oligonucleotide
  Sense strand starting at position 2721 of SEQ ID NO: 1242745
agagucauuccagguucuu

SEQ ID NO: 1369873 - RNA, 19 nt, Artificial Sequence
  Description of Artificial Sequence: Synthetic oligonucleotide
  Antisense strand to SEQ ID NO: 1369872
aagaaccuggaaugacucu

SEQ ID NO: 1369874 - RNA, 19 nt, Artificial Sequence
  Description of Artificial Sequence: Synthetic oligonucleotide
  Sense strand starting at position 2840 of SEQ ID NO: 1242745
acguuuaaagaguaaucuu

SEQ ID NO: 1369875 - RNA, 19 nt, Artificial Sequence
  Description of Artificial Sequence: Synthetic oligonucleotide
  Antisense strand to SEQ ID NO: 1369874
aagauuacucuuuaaacgu

SEQ ID NO: 1369876 - RNA, 19 nt, Artificial Sequence
  Description of Artificial Sequence: Synthetic oligonucleotide
  Sense strand starting at position 2867 of SEQ ID NO: 1242745
gggugaacgguuuggaaga

SEQ ID NO: 1369877 - RNA, 19 nt, Artificial Sequence
  Description of Artificial Sequence: Synthetic oligonucleotide
  Antisense strand to SEQ ID NO: 1369876
ucuuccaaaccguucaccc

SEQ ID NO: 1369878 - RNA, 19 nt, Artificial Sequence
  Description of Artificial Sequence: Synthetic oligonucleotide
  Sense strand starting at position 2921 of SEQ ID NO: 1242745
aagaauaguuucccuggga

SEQ ID NO: 1369879 - RNA, 19 nt, Artificial Sequence
  Description of Artificial Sequence: Synthetic oligonucleotide
  Antisense strand to SEQ ID NO: 1369878
ucccagggaaacuauucuu

SEQ ID NO: 1369880 - RNA, 19 nt, Artificial Sequence
  Description of Artificial Sequence: Synthetic oligonucleotide
  Sense strand starting at position 2922 of SEQ ID NO: 1242745
agaauaguuucccugggag

SEQ ID NO: 1369881 - RNA, 19 nt, Artificial Sequence
  Description of Artificial Sequence: Synthetic oligonucleotide
  Antisense strand to SEQ ID NO: 1369880
cucccagggaaacuauucu

SEQ ID NO: 1369882 - RNA, 19 nt, Artificial Sequence
  Description of Artificial Sequence: Synthetic oligonucleotide
  Sense strand starting at position 2925 of SEQ ID NO: 1242745
auaguuucccugggaggca

SEQ ID NO: 1369883 - RNA, 19 nt, Artificial Sequence
  Description of Artificial Sequence: Synthetic oligonucleotide
  Antisense strand to SEQ ID NO: 1369882
ugccucccagggaaacuau

SEQ ID NO: 1369884 - RNA, 19 nt, Artificial Sequence
  Description of Artificial Sequence: Synthetic oligonucleotide
  Sense strand starting at position 3033 of SEQ ID NO: 1242745
agaaauaggaaguguuugu

SEQ ID NO: 1369885 - RNA, 19 nt, Artificial Sequence
  Description of Artificial Sequence: Synthetic oligonucleotide
  Antisense strand to SEQ ID NO: 1369884
acaaacacuuccuauuucu

SEQ ID NO: 1369886 - RNA, 19 nt, Artificial Sequence
  Description of Artificial Sequence: Synthetic oligonucleotide
  Sense strand starting at position 3043 of SEQ ID NO: 1242745
aguguuuguagcucuagca

SEQ ID NO: 1369887 - RNA, 19 nt, Artificial Sequence
  Description of Artificial Sequence: Synthetic oligonucleotide
  Antisense strand to SEQ ID NO: 1369886
ugcuagagcuacaaacacu

SEQ ID NO: 1369888 - RNA, 19 nt, Artificial Sequence
  Description of Artificial Sequence: Synthetic oligonucleotide
  Sense strand starting at position 3712 of SEQ ID NO: 1242745
ccacaacugccauguuuga

SEQ ID NO: 1369889 - RNA, 19 nt, Artificial Sequence
  Description of Artificial Sequence: Synthetic oligonucleotide
  Antisense strand to SEQ ID NO: 1369888
ucaaacauggcaguugugg

SEQ ID NO: 1369890 - RNA, 19 nt, Artificial Sequence
  Description of Artificial Sequence: Synthetic oligonucleotide
  Sense strand starting at position 3787 of SEQ ID NO: 1242745
gcuuuaguccguuauaaac

SEQ ID NO: 1369891 - RNA, 19 nt, Artificial Sequence
  Description of Artificial Sequence: Synthetic oligonucleotide
  Antisense strand to SEQ ID NO: 1369890
guuuauaacggacuaaagc

SEQ ID NO: 1369892 - RNA, 19 nt, Artificial Sequence
  Description of Artificial Sequence: Synthetic oligonucleotide
  Sense strand starting at position 3812 of SEQ ID NO: 1242745
augcuaacacaguguagua

SEQ ID NO: 1369893 - RNA, 19 nt, Artificial Sequence
  Description of Artificial Sequence: Synthetic oligonucleotide
  Antisense strand to SEQ ID NO: 1369892
uacuacacuguguuagcau

SEQ ID NO: 1369894 - RNA, 19 nt, Artificial Sequence
  Description of Artificial Sequence: Synthetic oligonucleotide
  Sense strand starting at position 3865 of SEQ ID NO: 1242745
gccaccuuucucugggaaa

SEQ ID NO: 1369895 - RNA, 19 nt, Artificial Sequence
  Description of Artificial Sequence: Synthetic oligonucleotide
  Antisense strand to SEQ ID NO: 1369894
uuucccagagaaagguggc

SEQ ID NO: 1369896 - RNA, 19 nt, Artificial Sequence
  Description of Artificial Sequence: Synthetic oligonucleotide
  Sense strand starting at position 3876 of SEQ ID NO: 1242745
cugggaaaucgauagcuug

SEQ ID NO: 1369897 - RNA, 19 nt, Artificial Sequence
  Description of Artificial Sequence: Synthetic oligonucleotide
  Antisense strand to SEQ ID NO: 1369896
caagcuaucgauuucccag

SEQ ID NO: 1369898 - RNA, 19 nt, Artificial Sequence
  Description of Artificial Sequence: Synthetic oligonucleotide
  Sense strand starting at position 3884 of SEQ ID NO: 1242745
ucgauagcuugacccugaa

SEQ ID NO: 1369899 - RNA, 19 nt, Artificial Sequence
  Description of Artificial Sequence: Synthetic oligonucleotide
  Antisense strand to SEQ ID NO: 1369898
uucagggucaagcuaucga

SEQ ID NO: 1369900 - RNA, 19 nt, Artificial Sequence
  Description of Artificial Sequence: Synthetic oligonucleotide
  Sense strand starting at position 3900 of SEQ ID NO: 1242745
gaaggcuuaccauguguca

SEQ ID NO: 1369901 - RNA, 19 nt, Artificial Sequence
  Description of Artificial Sequence: Synthetic oligonucleotide
  Antisense strand to SEQ ID NO: 1369900
ugacacaugguaagccuuc

SEQ ID NO: 1369902 - RNA, 19 nt, Artificial Sequence
  Description of Artificial Sequence: Synthetic oligonucleotide
  Sense strand starting at position 3902 of SEQ ID NO: 1242745
aggcuuaccaugugucaga

SEQ ID NO: 1369903 - RNA, 19 nt, Artificial Sequence
  Description of Artificial Sequence: Synthetic oligonucleotide
  Antisense strand to SEQ ID NO: 1369902
ucugacacaugguaagccu

SEQ ID NO: 1369904 - RNA, 19 nt, Artificial Sequence
  Description of Artificial Sequence: Synthetic oligonucleotide
  Sense strand starting at position 3909 of SEQ ID NO: 1242745
ccaugugucagacaaugug

SEQ ID NO: 1369905 - RNA, 19 nt, Artificial Sequence
  Description of Artificial Sequence: Synthetic oligonucleotide
  Antisense strand to SEQ ID NO: 1369904
cacauugucugacacaugg

SEQ ID NO: 1369906 - RNA, 19 nt, Artificial Sequence
  Description of Artificial Sequence: Synthetic oligonucleotide
  Sense strand starting at position 208 of SEQ ID NO: 1242746
acccuagauugcucuagga

SEQ ID NO: 1369907 - RNA, 19 nt, Artificial Sequence
  Description of Artificial Sequence: Synthetic oligonucleotide
  Antisense strand to SEQ ID NO: 1369906
uccuagagcaaucuagggu

SEQ ID NO: 1369908 - RNA, 19 nt, Artificial Sequence
  Description of Artificial Sequence: Synthetic oligonucleotide
  Sense strand starting at position 212 of SEQ ID NO: 1242746
uagauugcucuaggaagag

SEQ ID NO: 1369909 - RNA, 19 nt, Artificial Sequence
  Description of Artificial Sequence: Synthetic oligonucleotide
  Antisense strand to SEQ ID NO: 1369908
cucuuccuagagcaaucua

SEQ ID NO: 1369910 - RNA, 19 nt, Artificial Sequence
  Description of Artificial Sequence: Synthetic oligonucleotide
  Sense strand starting at position 239 of SEQ ID NO: 1242746
ugacaccucuccuugguua

SEQ ID NO: 1369911 - RNA, 19 nt, Artificial Sequence
  Description of Artificial Sequence: Synthetic oligonucleotide
  Antisense strand to SEQ ID NO: 1369910
uaaccaaggagagguguca

SEQ ID NO: 1369912 - RNA, 19 nt, Artificial Sequence
  Description of Artificial Sequence: Synthetic oligonucleotide
  Sense strand starting at position 241 of SEQ ID NO: 1242746
acaccucuccuugguuaga

SEQ ID NO: 1369913 - RNA, 19 nt, Artificial Sequence
  Description of Artificial Sequence: Synthetic oligonucleotide
  Antisense strand to SEQ ID NO: 1369912
ucuaaccaaggagaggugu

SEQ ID NO: 1369914 - RNA, 19 nt, Artificial Sequence
  Description of Artificial Sequence: Synthetic oligonucleotide
  Sense strand starting at position 272 of SEQ ID NO: 1242746
guguucuaucuccaucuua

SEQ ID NO: 1369915 - RNA, 19 nt, Artificial Sequence
  Description of Artificial Sequence: Synthetic oligonucleotide
  Antisense strand to SEQ ID NO: 1369914
uaagauggagauagaacac

SEQ ID NO: 1369916 - RNA, 19 nt, Artificial Sequence
  Description of Artificial Sequence: Synthetic oligonucleotide
  Sense strand starting at position 337 of SEQ ID NO: 1242746
ugaagaacuccaugaguca

SEQ ID NO: 1369917 - RNA, 19 nt, Artificial Sequence
  Description of Artificial Sequence: Synthetic oligonucleotide
  Antisense strand to SEQ ID NO: 1369916
ugacucauggaguucuuca

SEQ ID NO: 1369918 - RNA, 19 nt, Artificial Sequence
  Description of Artificial Sequence: Synthetic oligonucleotide
  Sense strand starting at position 424 of SEQ ID NO: 1242746
ucaaaugguuuguugagag

SEQ ID NO: 1369919 - RNA, 19 nt, Artificial Sequence
  Description of Artificial Sequence: Synthetic oligonucleotide
  Antisense strand to SEQ ID NO: 1369918
cucucaacaaaccauuuga

SEQ ID NO: 1369920 - RNA, 19 nt, Artificial Sequence
  Description of Artificial Sequence: Synthetic oligonucleotide
  Sense strand starting at position 606 of SEQ ID NO: 1242746
acuccagagugguuucuaa

SEQ ID NO: 1369921 - RNA, 19 nt, Artificial Sequence
  Description of Artificial Sequence: Synthetic oligonucleotide
  Antisense strand to SEQ ID NO: 1369920
uuagaaaccacucuggagu

SEQ ID NO: 1369922 - RNA, 19 nt, Artificial Sequence
  Description of Artificial Sequence: Synthetic oligonucleotide
  Sense strand starting at position 963 of SEQ ID NO: 1242746
uaagguuucucugugaauu

SEQ ID NO: 1369923 - RNA, 19 nt, Artificial Sequence
  Description of Artificial Sequence: Synthetic oligonucleotide
  Antisense strand to SEQ ID NO: 1369922
aauucacagagaaaccuua

SEQ ID NO: 1369924 - RNA, 19 nt, Artificial Sequence
  Description of Artificial Sequence: Synthetic oligonucleotide
  Sense strand starting at position 974 of SEQ ID NO: 1242746
ugugaauuccuccaaugau

SEQ ID NO: 1369925 - RNA, 19 nt, Artificial Sequence
  Description of Artificial Sequence: Synthetic oligonucleotide
  Antisense strand to SEQ ID NO: 1369924
aucauuggaggaauucaca

SEQ ID NO: 1369926 - RNA, 19 nt, Artificial Sequence
  Description of Artificial Sequence: Synthetic oligonucleotide
  Sense strand starting at position 983 of SEQ ID NO: 1242746
cuccaaugaugaguuucua

SEQ ID NO: 1369927 - RNA, 19 nt, Artificial Sequence
  Description of Artificial Sequence: Synthetic oligonucleotide
  Antisense strand to SEQ ID NO: 1369926
uagaaacucaucauuggag

SEQ ID NO: 1369928 - RNA, 19 nt, Artificial Sequence
  Description of Artificial Sequence: Synthetic oligonucleotide
  Sense strand starting at position 987 of SEQ ID NO: 1242746
aaugaugaguuucuagaau

SEQ ID NO: 1369929 - RNA, 19 nt, Artificial Sequence
  Description of Artificial Sequence: Synthetic oligonucleotide
  Antisense strand to SEQ ID NO: 1369928
auucuagaaacucaucauu

SEQ ID NO: 1369930 - RNA, 19 nt, Artificial Sequence
  Description of Artificial Sequence: Synthetic oligonucleotide
  Sense strand starting at position 1049 of SEQ ID NO: 1242746
ggucacuucucuccaaaug

SEQ ID NO: 1369931 - RNA, 19 nt, Artificial Sequence
  Description of Artificial Sequence: Synthetic oligonucleotide
  Antisense strand to SEQ ID NO: 1369930
cauuuggagagaagugacc

SEQ ID NO: 1369932 - RNA, 19 nt, Artificial Sequence
  Description of Artificial Sequence: Synthetic oligonucleotide
  Sense strand starting at position 1135 of SEQ ID NO: 1242746
cgagcaguucucuccuugu

SEQ ID NO: 1369933 - RNA, 19 nt, Artificial Sequence
  Description of Artificial Sequence: Synthetic oligonucleotide
  Antisense strand to SEQ ID NO: 1369932
acaaggagagaacugcucg

SEQ ID NO: 1369934 - RNA, 19 nt, Artificial Sequence
  Description of Artificial Sequence: Synthetic oligonucleotide
  Sense strand starting at position 1271 of SEQ ID NO: 1242746
gggcuucugagagguauaa

SEQ ID NO: 1369935 - RNA, 19 nt, Artificial Sequence
  Description of Artificial Sequence: Synthetic oligonucleotide
  Antisense strand to SEQ ID NO: 1369934
uuauaccucucagaagccc

SEQ ID NO: 1369936 - RNA, 19 nt, Artificial Sequence
  Description of Artificial Sequence: Synthetic oligonucleotide
  Sense strand starting at position 1273 of SEQ ID NO: 1242746
gcuucugagagguauaacu

SEQ ID NO: 1369937 - RNA, 19 nt, Artificial Sequence
  Description of Artificial Sequence: Synthetic oligonucleotide
  Antisense strand to SEQ ID NO: 1369936
aguuauaccucucagaagc

SEQ ID NO: 1369938 - RNA, 19 nt, Artificial Sequence
  Description of Artificial Sequence: Synthetic oligonucleotide
  Sense strand starting at position 1281 of SEQ ID NO: 1242746
gagguauaacugcaguugu

SEQ ID NO: 1369939 - RNA, 19 nt, Artificial Sequence
  Description of Artificial Sequence: Synthetic oligonucleotide
  Antisense strand to SEQ ID NO: 1369938
acaacugcaguuauaccuc

SEQ ID NO: 1369940 - RNA, 19 nt, Artificial Sequence
  Description of Artificial Sequence: Synthetic oligonucleotide
  Sense strand starting at position 1331 of SEQ ID NO: 1242746
gguccaaauguagaccauu

SEQ ID NO: 1369941 - RNA, 19 nt, Artificial Sequence
  Description of Artificial Sequence: Synthetic oligonucleotide
  Antisense strand to SEQ ID NO: 1369940
aauggucuacauuuggacc

SEQ ID NO: 1369942 - RNA, 19 nt, Artificial Sequence
  Description of Artificial Sequence: Synthetic oligonucleotide
  Sense strand starting at position 1440 of SEQ ID NO: 1242746
gcaguggugcgaucaacgu

SEQ ID NO: 1369943 - RNA, 19 nt, Artificial Sequence
  Description of Artificial Sequence: Synthetic oligonucleotide
  Antisense strand to SEQ ID NO: 1369942
acguugaucgcaccacugc

SEQ ID NO: 1369944 - RNA, 19 nt, Artificial Sequence
  Description of Artificial Sequence: Synthetic oligonucleotide
  Sense strand starting at position 1565 of SEQ ID NO: 1242746
augaaugagugugucccua

SEQ ID NO: 1369945 - RNA, 19 nt, Artificial Sequence
  Description of Artificial Sequence: Synthetic oligonucleotide
  Antisense strand to SEQ ID NO: 1369944
uagggacacacucauucau

SEQ ID NO: 1369946 - RNA, 19 nt, Artificial Sequence
  Description of Artificial Sequence: Synthetic oligonucleotide
  Sense strand starting at position 1567 of SEQ ID NO: 1242746
gaaugagugugucccuaaa

SEQ ID NO: 1369947 - RNA, 19 nt, Artificial Sequence
  Description of Artificial Sequence: Synthetic oligonucleotide
  Antisense strand to SEQ ID NO: 1369946
uuuagggacacacucauuc

SEQ ID NO: 1369948 - RNA, 19 nt, Artificial Sequence
  Description of Artificial Sequence: Synthetic oligonucleotide
  Sense strand starting at position 1659 of SEQ ID NO: 1242746
ugaucaaagcgagguugaa

SEQ ID NO: 1369949 - RNA, 19 nt, Artificial Sequence
  Description of Artificial Sequence: Synthetic oligonucleotide
  Antisense strand to SEQ ID NO: 1369948
uucaaccucgcuuugauca

SEQ ID NO: 1369950 - RNA, 19 nt, Artificial Sequence
  Description of Artificial Sequence: Synthetic oligonucleotide
  Sense strand starting at position 2079 of SEQ ID NO: 1242746
uucaguuaucgcguagcac

SEQ ID NO: 1369951 - RNA, 19 nt, Artificial Sequence
  Description of Artificial Sequence: Synthetic oligonucleotide
  Antisense strand to SEQ ID NO: 1369950
gugcuacgcgauaacugaa

SEQ ID NO: 1369952 - RNA, 19 nt, Artificial Sequence
  Description of Artificial Sequence: Synthetic oligonucleotide
  Sense strand starting at position 2082 of SEQ ID NO: 1242746
aguuaucgcguagcacauu

SEQ ID NO: 1369953 - RNA, 19 nt, Artificial Sequence
  Description of Artificial Sequence: Synthetic oligonucleotide
  Antisense strand to SEQ ID NO: 1369952
aaugugcuacgcgauaacu

SEQ ID NO: 1369954 - RNA, 19 nt, Artificial Sequence
  Description of Artificial Sequence: Synthetic oligonucleotide
  Sense strand starting at position 2109 of SEQ ID NO: 1242746
uagagcugggcacauauua

SEQ ID NO: 1369955 - RNA, 19 nt, Artificial Sequence
  Description of Artificial Sequence: Synthetic oligonucleotide
  Antisense strand to SEQ ID NO: 1369954
uaauaugugcccagcucua

SEQ ID NO: 1369956 - RNA, 19 nt, Artificial Sequence
  Description of Artificial Sequence: Synthetic oligonucleotide
  Sense strand starting at position 2206 of SEQ ID NO: 1242746
uccagcucuccugaggagu

SEQ ID NO: 1369957 - RNA, 19 nt, Artificial Sequence
  Description of Artificial Sequence: Synthetic oligonucleotide
  Antisense strand to SEQ ID NO: 1369956
acuccucaggagagcugga

SEQ ID NO: 1369958 - RNA, 19 nt, Artificial Sequence
  Description of Artificial Sequence: Synthetic oligonucleotide
  Sense strand starting at position 2304 of SEQ ID NO: 1242746
caacuugggcauugugaau

SEQ ID NO: 1369959 - RNA, 19 nt, Artificial Sequence
  Description of Artificial Sequence: Synthetic oligonucleotide
  Antisense strand to SEQ ID NO: 1369958
auucacaaugcccaaguug

SEQ ID NO: 1369960 - RNA, 19 nt, Artificial Sequence
  Description of Artificial Sequence: Synthetic oligonucleotide
  Sense strand starting at position 2469 of SEQ ID NO: 1242746
cagguucuggcacauaguu

SEQ ID NO: 1369961 - RNA, 19 nt, Artificial Sequence
  Description of Artificial Sequence: Synthetic oligonucleotide
  Antisense strand to SEQ ID NO: 1369960
aacuaugugccagaaccug

SEQ ID NO: 1369962 - RNA, 19 nt, Artificial Sequence
  Description of Artificial Sequence: Synthetic oligonucleotide
  Sense strand starting at position 2815 of SEQ ID NO: 1242746
uuuaaaucugaucgacagu

SEQ ID NO: 1369963 - RNA, 19 nt, Artificial Sequence
  Description of Artificial Sequence: Synthetic oligonucleotide
  Antisense strand to SEQ ID NO: 1369962
acugucgaucagauuuaaa

SEQ ID NO: 1369964 - RNA, 19 nt, Artificial Sequence
  Description of Artificial Sequence: Synthetic oligonucleotide
  Sense strand starting at position 2872 of SEQ ID NO: 1242746
ggccuuaauccugaaguuu

SEQ ID NO: 1369965 - RNA, 19 nt, Artificial Sequence
  Description of Artificial Sequence: Synthetic oligonucleotide
  Antisense strand to SEQ ID NO: 1369964
aaacuucaggauuaaggcc

SEQ ID NO: 1369966 - RNA, 19 nt, Artificial Sequence
  Description of Artificial Sequence: Synthetic oligonucleotide
  Sense strand starting at position 2913 of SEQ ID NO: 1242746
agguguguggcagauauac

SEQ ID NO: 1369967 - RNA, 19 nt, Artificial Sequence
  Description of Artificial Sequence: Synthetic oligonucleotide
  Antisense strand to SEQ ID NO: 1369966
guauaucugccacacaccu

SEQ ID NO: 1369968 - RNA, 19 nt, Artificial Sequence
  Description of Artificial Sequence: Synthetic oligonucleotide
  Sense strand starting at position 2921 of SEQ ID NO: 1242746
ggcagauauacaggaagca

SEQ ID NO: 1369969 - RNA, 19 nt, Artificial Sequence
  Description of Artificial Sequence: Synthetic oligonucleotide
  Antisense strand to SEQ ID NO: 1369968
ugcuuccuguauaucugcc

SEQ ID NO: 1369970 - RNA, 19 nt, Artificial Sequence
  Description of Artificial Sequence: Synthetic oligonucleotide
  Sense strand starting at position 2951 of SEQ ID NO: 1242746
agcagaucuagaggcaaau

SEQ ID NO: 1369971 - RNA, 19 nt, Artificial Sequence
  Description of Artificial Sequence: Synthetic oligonucleotide
  Antisense strand to SEQ ID NO: 1369970
auuugccucuagaucugcu

SEQ ID NO: 1369972 - RNA, 19 nt, Artificial Sequence
  Description of Artificial Sequence: Synthetic oligonucleotide
  Sense strand starting at position 3090 of SEQ ID NO: 1242746
uggacuugggccuguugaa

SEQ ID NO: 1369973 - RNA, 19 nt, Artificial Sequence
  Description of Artificial Sequence: Synthetic oligonucleotide
  Antisense strand to SEQ ID NO: 1369972
uucaacaggcccaagucca

SEQ ID NO: 1369974 - RNA, 19 nt, Artificial Sequence
  Description of Artificial Sequence: Synthetic oligonucleotide
  Sense strand starting at position 3125 of SEQ ID NO: 1242746
cuccacaucugggcugaau

SEQ ID NO: 1369975 - RNA, 19 nt, Artificial Sequence
  Description of Artificial Sequence: Synthetic oligonucleotide
  Antisense strand to SEQ ID NO: 1369974
auucagcccagauguggag

SEQ ID NO: 1369976 - RNA, 19 nt, Artificial Sequence
  Description of Artificial Sequence: Synthetic oligonucleotide
  Sense strand starting at position 3230 of SEQ ID NO: 1242746
gggaucuaguacguuuaga

SEQ ID NO: 1369977 - RNA, 19 nt, Artificial Sequence
  Description of Artificial Sequence: Synthetic oligonucleotide
  Antisense strand to SEQ ID NO: 1369976
ucuaaacguacuagauccc

SEQ ID NO: 1369978 - RNA, 19 nt, Artificial Sequence
  Description of Artificial Sequence: Synthetic oligonucleotide
  Sense strand starting at position 3253 of SEQ ID NO: 1242746
agacgcuggaacugucaaa

SEQ ID NO: 1369979 - RNA, 19 nt, Artificial Sequence
  Description of Artificial Sequence: Synthetic oligonucleotide
  Antisense strand to SEQ ID NO: 1369978
uuugacaguuccagcgucu

SEQ ID NO: 1369980 - RNA, 19 nt, Artificial Sequence
  Description of Artificial Sequence: Synthetic oligonucleotide
  Sense strand starting at position 3292 of SEQ ID NO: 1242746
gcugcaaagcaagagaaau

SEQ ID NO: 1369981 - RNA, 19 nt, Artificial Sequence
  Description of Artificial Sequence: Synthetic oligonucleotide
  Antisense strand to SEQ ID NO: 1369980
auuucucuugcuuugcagc

SEQ ID NO: 1369982 - RNA, 19 nt, Artificial Sequence
  Description of Artificial Sequence: Synthetic oligonucleotide
  Sense strand starting at position 3304 of SEQ ID NO: 1242746
gagaaaugggcuggaauuc

SEQ ID NO: 1369983 - RNA, 19 nt, Artificial Sequence
  Description of Artificial Sequence: Synthetic oligonucleotide
  Antisense strand to SEQ ID NO: 1369982
gaauuccagcccauuucuc

SEQ ID NO: 1369984 - RNA, 19 nt, Artificial Sequence
  Description of Artificial Sequence: Synthetic oligonucleotide
  Sense strand starting at position 3334 of SEQ ID NO: 1242746
cuuaaugaaugcuucugau

SEQ ID NO: 1369985 - RNA, 19 nt, Artificial Sequence
  Description of Artificial Sequence: Synthetic oligonucleotide
  Antisense strand to SEQ ID NO: 1369984
aucagaagcauucauuaag

SEQ ID NO: 1369986 - RNA, 19 nt, Artificial Sequence
  Description of Artificial Sequence: Synthetic oligonucleotide
  Sense strand starting at position 208 of SEQ ID NO: 1242747
acccuagauugcucuagga

SEQ ID NO: 1369987 - RNA, 19 nt, Artificial Sequence
  Description of Artificial Sequence: Synthetic oligonucleotide
  Antisense strand to SEQ ID NO: 1369986
uccuagagcaaucuagggu

SEQ ID NO: 1369988 - RNA, 19 nt, Artificial Sequence
  Description of Artificial Sequence: Synthetic oligonucleotide
  Sense strand starting at position 212 of SEQ ID NO: 1242747
uagauugcucuaggaagag

SEQ ID NO: 1369989 - RNA, 19 nt, Artificial Sequence
  Description of Artificial Sequence: Synthetic oligonucleotide
  Antisense strand to SEQ ID NO: 1369988
cucuuccuagagcaaucua

SEQ ID NO: 1369990 - RNA, 19 nt, Artificial Sequence
  Description of Artificial Sequence: Synthetic oligonucleotide
  Sense strand starting at position 239 of SEQ ID NO: 1242747
ugacaccucuccuugguua

SEQ ID NO: 1369991 - RNA, 19 nt, Artificial Sequence
  Description of Artificial Sequence: Synthetic oligonucleotide
  Antisense strand to SEQ ID NO: 1369990
uaaccaaggagagguguca

SEQ ID NO: 1369992 - RNA, 19 nt, Artificial Sequence
  Description of Artificial Sequence: Synthetic oligonucleotide
  Sense strand starting at position 241 of SEQ ID NO: 1242747
acaccucuccuugguuaga

SEQ ID NO: 1369993 - RNA, 19 nt, Artificial Sequence
  Description of Artificial Sequence: Synthetic oligonucleotide
  Antisense strand to SEQ ID NO: 1369992
ucuaaccaaggagaggugu

SEQ ID NO: 1369994 - RNA, 19 nt, Artificial Sequence
  Description of Artificial Sequence: Synthetic oligonucleotide
  Sense strand starting at position 272 of SEQ ID NO: 1242747
guguucuaucuccaucuua

SEQ ID NO: 1369995 - RNA, 19 nt, Artificial Sequence
  Description of Artificial Sequence: Synthetic oligonucleotide
  Antisense strand to SEQ ID NO: 1369994
uaagauggagauagaacac

SEQ ID NO: 1369996 - RNA, 19 nt, Artificial Sequence
  Description of Artificial Sequence: Synthetic oligonucleotide
  Sense strand starting at position 337 of SEQ ID NO: 1242747
ugaagaacuccaugaguca

SEQ ID NO: 1369997 - RNA, 19 nt, Artificial Sequence
  Description of Artificial Sequence: Synthetic oligonucleotide
  Antisense strand to SEQ ID NO: 1369996
ugacucauggaguucuuca

SEQ ID NO: 1369998 - RNA, 19 nt, Artificial Sequence
  Description of Artificial Sequence: Synthetic oligonucleotide
  Sense strand starting at position 424 of SEQ ID NO: 1242747
ucaaaugguuuguugagag

SEQ ID NO: 1369999 - RNA, 19 nt, Artificial Sequence
  Description of Artificial Sequence: Synthetic oligonucleotide
  Antisense strand to SEQ ID NO: 1369998
cucucaacaaaccauuuga

SEQ ID NO: 1370000 - RNA, 19 nt, Artificial Sequence
  Description of Artificial Sequence: Synthetic oligonucleotide
  Sense strand starting at position 606 of SEQ ID NO: 1242747
acuccagagugguuucuaa

SEQ ID NO: 1370001 - RNA, 19 nt, Artificial Sequence
  Description of Artificial Sequence: Synthetic oligonucleotide
  Antisense strand to SEQ ID NO: 1370000
uuagaaaccacucuggagu

SEQ ID NO: 1370002 - RNA, 19 nt, Artificial Sequence
  Description of Artificial Sequence: Synthetic oligonucleotide
  Sense strand starting at position 963 of SEQ ID NO: 1242747
uaagguuucucugugaauu

SEQ ID NO: 1370003 - RNA, 19 nt, Artificial Sequence
  Description of Artificial Sequence: Synthetic oligonucleotide
  Antisense strand to SEQ ID NO: 1370002
aauucacagagaaaccuua

SEQ ID NO: 1370004 - RNA, 19 nt, Artificial Sequence
  Description of Artificial Sequence: Synthetic oligonucleotide
  Sense strand starting at position 974 of SEQ ID NO: 1242747
ugugaauuccuccaaugau

SEQ ID NO: 1370005 - RNA, 19 nt, Artificial Sequence
  Description of Artificial Sequence: Synthetic oligonucleotide
  Antisense strand to SEQ ID NO: 1370004
aucauuggaggaauucaca

SEQ ID NO: 1370006 - RNA, 19 nt, Artificial Sequence
  Description of Artificial Sequence: Synthetic oligonucleotide
  Sense strand starting at position 983 of SEQ ID NO: 1242747
cuccaaugaugaguuucua

SEQ ID NO: 1370007 - RNA, 19 nt, Artificial Sequence
  Description of Artificial Sequence: Synthetic oligonucleotide
  Antisense strand to SEQ ID NO: 1370006
uagaaacucaucauuggag

SEQ ID NO: 1370008 - RNA, 19 nt, Artificial Sequence
  Description of Artificial Sequence: Synthetic oligonucleotide
  Sense strand starting at position 987 of SEQ ID NO: 1242747
aaugaugaguuucuagaau

SEQ ID NO: 1370009 - RNA, 19 nt, Artificial Sequence
  Description of Artificial Sequence: Synthetic oligonucleotide
  Antisense strand to SEQ ID NO: 1370008
auucuagaaacucaucauu

SEQ ID NO: 1370010 - RNA, 19 nt, Artificial Sequence
  Description of Artificial Sequence: Synthetic oligonucleotide
  Sense strand starting at position 1049 of SEQ ID NO: 1242747
ggucacuucucuccaaaug

SEQ ID NO: 1370011 - RNA, 19 nt, Artificial Sequence
  Description of Artificial Sequence: Synthetic oligonucleotide
  Antisense strand to SEQ ID NO: 1370010
cauuuggagagaagugacc

SEQ ID NO: 1370012 - RNA, 19 nt, Artificial Sequence
  Description of Artificial Sequence: Synthetic oligonucleotide
  Sense strand starting at position 1135 of SEQ ID NO: 1242747
cgagcaguucucuccuugu

SEQ ID NO: 1370013 - RNA, 19 nt, Artificial Sequence
  Description of Artificial Sequence: Synthetic oligonucleotide
  Antisense strand to SEQ ID NO: 1370012
acaaggagagaacugcucg

SEQ ID NO: 1370014 - RNA, 19 nt, Artificial Sequence
  Description of Artificial Sequence: Synthetic oligonucleotide
  Sense strand starting at position 1271 of SEQ ID NO: 1242747
gggcuucugagagguauaa

SEQ ID NO: 1370015 - RNA, 19 nt, Artificial Sequence
  Description of Artificial Sequence: Synthetic oligonucleotide
  Antisense strand to SEQ ID NO: 1370014
uuauaccucucagaagccc

SEQ ID NO: 1370016 - RNA, 19 nt, Artificial Sequence
  Description of Artificial Sequence: Synthetic oligonucleotide
  Sense strand starting at position 1273 of SEQ ID NO: 1242747
gcuucugagagguauaacu

SEQ ID NO: 1370017 - RNA, 19 nt, Artificial Sequence
  Description of Artificial Sequence: Synthetic oligonucleotide
  Antisense strand to SEQ ID NO: 1370016
aguuauaccucucagaagc

SEQ ID NO: 1370018 - RNA, 19 nt, Artificial Sequence
  Description of Artificial Sequence: Synthetic oligonucleotide
  Sense strand starting at position 1281 of SEQ ID NO: 1242747
gagguauaacugcaguugu

SEQ ID NO: 1370019 - RNA, 19 nt, Artificial Sequence
  Description of Artificial Sequence: Synthetic oligonucleotide
  Antisense strand to SEQ ID NO: 1370018
acaacugcaguuauaccuc

SEQ ID NO: 1370020 - RNA, 19 nt, Artificial Sequence
  Description of Artificial Sequence: Synthetic oligonucleotide
  Sense strand starting at position 1331 of SEQ ID NO: 1242747
gguccaaauguagaccauu

SEQ ID NO: 1370021 - RNA, 19 nt, Artificial Sequence
  Description of Artificial Sequence: Synthetic oligonucleotide
  Antisense strand to SEQ ID NO: 1370020
aauggucuacauuuggacc

SEQ ID NO: 1370022 - RNA, 19 nt, Artificial Sequence
  Description of Artificial Sequence: Synthetic oligonucleotide
  Sense strand starting at position 1440 of SEQ ID NO: 1242747
gcaguggugcgaucaacgu

SEQ ID NO: 1370023 - RNA, 19 nt, Artificial Sequence
  Description of Artificial Sequence: Synthetic oligonucleotide
  Antisense strand to SEQ ID NO: 1370022
acguugaucgcaccacugc

SEQ ID NO: 1370024 - RNA, 19 nt, Artificial Sequence
  Description of Artificial Sequence: Synthetic oligonucleotide
  Sense strand starting at position 1565 of SEQ ID NO: 1242747
augaaugagugugucccua

SEQ ID NO: 1370025 - RNA, 19 nt, Artificial Sequence
  Description of Artificial Sequence: Synthetic oligonucleotide
  Antisense strand to SEQ ID NO: 1370024
uagggacacacucauucau

SEQ ID NO: 1370026 - RNA, 19 nt, Artificial Sequence
  Description of Artificial Sequence: Synthetic oligonucleotide
  Sense strand starting at position 1567 of SEQ ID NO: 1242747
gaaugagugugucccuaaa

SEQ ID NO: 1370027 - RNA, 19 nt, Artificial Sequence
  Description of Artificial Sequence: Synthetic oligonucleotide
  Antisense strand to SEQ ID NO: 1370026
uuuagggacacacucauuc

SEQ ID NO: 1370028 - RNA, 19 nt, Artificial Sequence
  Description of Artificial Sequence: Synthetic oligonucleotide
  Sense strand starting at position 1659 of SEQ ID NO: 1242747
ugaucaaagcgagguugaa

SEQ ID NO: 1370029 - RNA, 19 nt, Artificial Sequence
  Description of Artificial Sequence: Synthetic oligonucleotide
  Antisense strand to SEQ ID NO: 1370028
uucaaccucgcuuugauca

SEQ ID NO: 1370030 - RNA, 19 nt, Artificial Sequence
  Description of Artificial Sequence: Synthetic oligonucleotide
  Sense strand starting at position 2079 of SEQ ID NO: 1242747
uucaguuaucgcguagcac

SEQ ID NO: 1370031 - RNA, 19 nt, Artificial Sequence
  Description of Artificial Sequence: Synthetic oligonucleotide
  Antisense strand to SEQ ID NO: 1370030
gugcuacgcgauaacugaa

SEQ ID NO: 1370032 - RNA, 19 nt, Artificial Sequence
  Description of Artificial Sequence: Synthetic oligonucleotide
  Sense strand starting at position 2082 of SEQ ID NO: 1242747
aguuaucgcguagcacauu

SEQ ID NO: 1370033 - RNA, 19 nt, Artificial Sequence
  Description of Artificial Sequence: Synthetic oligonucleotide
  Antisense strand to SEQ ID NO: 1370032
aaugugcuacgcgauaacu

SEQ ID NO: 1370034 - RNA, 19 nt, Artificial Sequence
  Description of Artificial Sequence: Synthetic oligonucleotide
  Sense strand starting at position 2109 of SEQ ID NO: 1242747
uagagcugggcacauauua

SEQ ID NO: 1370035 - RNA, 19 nt, Artificial Sequence
  Description of Artificial Sequence: Synthetic oligonucleotide
  Antisense strand to SEQ ID NO: 1370034
uaauaugugcccagcucua

SEQ ID NO: 1370036 - RNA, 19 nt, Artificial Sequence
  Description of Artificial Sequence: Synthetic oligonucleotide
  Sense strand starting at position 2206 of SEQ ID NO: 1242747
uccagcucuccugaggagu

SEQ ID NO: 1370037 - RNA, 19 nt, Artificial Sequence
  Description of Artificial Sequence: Synthetic oligonucleotide
  Antisense strand to SEQ ID NO: 1370036
acuccucaggagagcugga

SEQ ID NO: 1370038 - RNA, 19 nt, Artificial Sequence
  Description of Artificial Sequence: Synthetic oligonucleotide
  Sense strand starting at position 2304 of SEQ ID NO: 1242747
caacuugggcauugugaau

SEQ ID NO: 1370039 - RNA, 19 nt, Artificial Sequence
  Description of Artificial Sequence: Synthetic oligonucleotide
  Antisense strand to SEQ ID NO: 1370038
auucacaaugcccaaguug

SEQ ID NO: 1370040 - RNA, 19 nt, Artificial Sequence
  Description of Artificial Sequence: Synthetic oligonucleotide
  Sense strand starting at position 2469 of SEQ ID NO: 1242747
cagguucuggcacauaguu

SEQ ID NO: 1370041 - RNA, 19 nt, Artificial Sequence
  Description of Artificial Sequence: Synthetic oligonucleotide
  Antisense strand to SEQ ID NO: 1370040
aacuaugugccagaaccug

SEQ ID NO: 1370042 - RNA, 19 nt, Artificial Sequence
  Description of Artificial Sequence: Synthetic oligonucleotide
  Sense strand starting at position 2815 of SEQ ID NO: 1242747
uuuaaaucugaucgacagu

SEQ ID NO: 1370043 - RNA, 19 nt, Artificial Sequence
  Description of Artificial Sequence: Synthetic oligonucleotide
  Antisense strand to SEQ ID NO: 1370042
acugucgaucagauuuaaa

SEQ ID NO: 1370044 - RNA, 19 nt, Artificial Sequence
  Description of Artificial Sequence: Synthetic oligonucleotide
  Sense strand starting at position 2872 of SEQ ID NO: 1242747
ggccuuaauccugaaguuu

SEQ ID NO: 1370045 - RNA, 19 nt, Artificial Sequence
  Description of Artificial Sequence: Synthetic oligonucleotide
  Antisense strand to SEQ ID NO: 1370044
aaacuucaggauuaaggcc

SEQ ID NO: 1370046 - RNA, 19 nt, Artificial Sequence
  Description of Artificial Sequence: Synthetic oligonucleotide
  Sense strand starting at position 2913 of SEQ ID NO: 1242747
agguguguggcagauauac

SEQ ID NO: 1370047 - RNA, 19 nt, Artificial Sequence
  Description of Artificial Sequence: Synthetic oligonucleotide
  Antisense strand to SEQ ID NO: 1370046
guauaucugccacacaccu

SEQ ID NO: 1370048 - RNA, 19 nt, Artificial Sequence
  Description of Artificial Sequence: Synthetic oligonucleotide
  Sense strand starting at position 2921 of SEQ ID NO: 1242747
ggcagauauacaggaagca

SEQ ID NO: 1370049 - RNA, 19 nt, Artificial Sequence
  Description of Artificial Sequence: Synthetic oligonucleotide
  Antisense strand to SEQ ID NO: 1370048
ugcuuccuguauaucugcc

SEQ ID NO: 1370050 - RNA, 19 nt, Artificial Sequence
  Description of Artificial Sequence: Synthetic oligonucleotide
  Sense strand starting at position 2951 of SEQ ID NO: 1242747
agcagaucuagaggcaaau

SEQ ID NO: 1370051 - RNA, 19 nt, Artificial Sequence
  Description of Artificial Sequence: Synthetic oligonucleotide
  Antisense strand to SEQ ID NO: 1370050
auuugccucuagaucugcu

SEQ ID NO: 1370052 - RNA, 19 nt, Artificial Sequence
  Description of Artificial Sequence: Synthetic oligonucleotide
  Sense strand starting at position 3090 of SEQ ID NO: 1242747
uggacuugggccuguugaa

SEQ ID NO: 1370053 - RNA, 19 nt, Artificial Sequence
  Description of Artificial Sequence: Synthetic oligonucleotide
  Antisense strand to SEQ ID NO: 1370052
uucaacaggcccaagucca

SEQ ID NO: 1370054 - RNA, 19 nt, Artificial Sequence
  Description of Artificial Sequence: Synthetic oligonucleotide
  Sense strand starting at position 3125 of SEQ ID NO: 1242747
cuccacaucugggcugaau

SEQ ID NO: 1370055 - RNA, 19 nt, Artificial Sequence
  Description of Artificial Sequence: Synthetic oligonucleotide
  Antisense strand to SEQ ID NO: 1370054
auucagcccagauguggag

SEQ ID NO: 1370056 - RNA, 19 nt, Artificial Sequence
  Description of Artificial Sequence: Synthetic oligonucleotide
  Sense strand starting at position 3230 of SEQ ID NO: 1242747
gggaucuaguacguuuaga

SEQ ID NO: 1370057 - RNA, 19 nt, Artificial Sequence
  Description of Artificial Sequence: Synthetic oligonucleotide
  Antisense strand to SEQ ID NO: 1370056
ucuaaacguacuagauccc

SEQ ID NO: 1370058 - RNA, 19 nt, Artificial Sequence
  Description of Artificial Sequence: Synthetic oligonucleotide
  Sense strand starting at position 3253 of SEQ ID NO: 1242747
agacgcuggaacugucaaa

SEQ ID NO: 1370059 - RNA, 19 nt, Artificial Sequence
  Description of Artificial Sequence: Synthetic oligonucleotide
  Antisense strand to SEQ ID NO: 1370058
uuugacaguuccagcgucu

SEQ ID NO: 1370060 - RNA, 19 nt, Artificial Sequence
  Description of Artificial Sequence: Synthetic oligonucleotide
  Sense strand starting at position 3292 of SEQ ID NO: 1242747
gcugcaaagcaagagaaau

SEQ ID NO: 1370061 - RNA, 19 nt, Artificial Sequence
  Description of Artificial Sequence: Synthetic oligonucleotide
  Antisense strand to SEQ ID NO: 1370060
auuucucuugcuuugcagc

SEQ ID NO: 1370062 - RNA, 19 nt, Artificial Sequence
  Description of Artificial Sequence: Synthetic oligonucleotide
  Sense strand starting at position 3304 of SEQ ID NO: 1242747
gagaaaugggcuggaauuc

SEQ ID NO: 1370063 - RNA, 19 nt, Artificial Sequence
  Description of Artificial Sequence: Synthetic oligonucleotide
  Antisense strand to SEQ ID NO: 1370062
gaauuccagcccauuucuc

SEQ ID NO: 1370064 - RNA, 19 nt, Artificial Sequence
  Description of Artificial Sequence: Synthetic oligonucleotide
  Sense strand starting at position 3334 of SEQ ID NO: 1242747
cuuaaugaaugcuucugau

SEQ ID NO: 1370065 - RNA, 19 nt, Artificial Sequence
  Description of Artificial Sequence: Synthetic oligonucleotide
  Antisense strand to SEQ ID NO: 1370064
aucagaagcauucauuaag

SEQ ID NO: 1370066 - RNA, 19 nt, Artificial Sequence
  Description of Artificial Sequence: Synthetic oligonucleotide
  Sense strand starting at position 165 of SEQ ID NO: 1242748
ugcugcuucuuaucagcaa

SEQ ID NO: 1370067 - RNA, 19 nt, Artificial Sequence
  Description of Artificial Sequence: Synthetic oligonucleotide
  Antisense strand to SEQ ID NO: 1370066
uugcugauaagaagcagca

SEQ ID NO: 1370068 - RNA, 19 nt, Artificial Sequence
  Description of Artificial Sequence: Synthetic oligonucleotide
  Sense strand starting at position 166 of SEQ ID NO: 1242748
gcugcuucuuaucagcaaa

SEQ ID NO: 1370069 - RNA, 19 nt, Artificial Sequence
  Description of Artificial Sequence: Synthetic oligonucleotide
  Antisense strand to SEQ ID NO: 1370068
uuugcugauaagaagcagc

SEQ ID NO: 1370070 - RNA, 19 nt, Artificial Sequence
  Description of Artificial Sequence: Synthetic oligonucleotide
  Sense strand starting at position 204 of SEQ ID NO: 1242748
uugucuggugcguuucuaa

SEQ ID NO: 1370071 - RNA, 19 nt, Artificial Sequence
  Description of Artificial Sequence: Synthetic oligonucleotide
  Antisense strand to SEQ ID NO: 1370070
uuagaaacgcaccagacaa

SEQ ID NO: 1370072 - RNA, 19 nt, Artificial Sequence
  Description of Artificial Sequence: Synthetic oligonucleotide
  Sense strand starting at position 211 of SEQ ID NO: 1242748
gugcguuucuaaggaauug

SEQ ID NO: 1370073 - RNA, 19 nt, Artificial Sequence
  Description of Artificial Sequence: Synthetic oligonucleotide
  Antisense strand to SEQ ID NO: 1370072
caauuccuuagaaacgcac

SEQ ID NO: 1370074 - RNA, 19 nt, Artificial Sequence
  Description of Artificial Sequence: Synthetic oligonucleotide
  Sense strand starting at position 235 of SEQ ID NO: 1242748
accuaaauguagguucuau

SEQ ID NO: 1370075 - RNA, 19 nt, Artificial Sequence
  Description of Artificial Sequence: Synthetic oligonucleotide
  Antisense strand to SEQ ID NO: 1370074
auagaaccuacauuuaggu

SEQ ID NO: 1370076 - RNA, 19 nt, Artificial Sequence
  Description of Artificial Sequence: Synthetic oligonucleotide
  Sense strand starting at position 239 of SEQ ID NO: 1242748
aaauguagguucuauggaa

SEQ ID NO: 1370077 - RNA, 19 nt, Artificial Sequence
  Description of Artificial Sequence: Synthetic oligonucleotide
  Antisense strand to SEQ ID NO: 1370076
uuccauagaaccuacauuu

SEQ ID NO: 1370078 - RNA, 19 nt, Artificial Sequence
  Description of Artificial Sequence: Synthetic oligonucleotide
  Sense strand starting at position 270 of SEQ ID NO: 1242748
ucguguccuuccuaaacuu

SEQ ID NO: 1370079 - RNA, 19 nt, Artificial Sequence
  Description of Artificial Sequence: Synthetic oligonucleotide
  Antisense strand to SEQ ID NO: 1370078
aaguuuaggaaggacacga

SEQ ID NO: 1370080 - RNA, 19 nt, Artificial Sequence
  Description of Artificial Sequence: Synthetic oligonucleotide
  Sense strand starting at position 1054 of SEQ ID NO: 1242748
aacgguucuccagaccuua

SEQ ID NO: 1370081 - RNA, 19 nt, Artificial Sequence
  Description of Artificial Sequence: Synthetic oligonucleotide
  Antisense strand to SEQ ID NO: 1370080
uaaggucuggagaaccguu

SEQ ID NO: 1370082 - RNA, 19 nt, Artificial Sequence
  Description of Artificial Sequence: Synthetic oligonucleotide
  Sense strand starting at position 1137 of SEQ ID NO: 1242748
uauuguguuugccugcaca

SEQ ID NO: 1370083 - RNA, 19 nt, Artificial Sequence
  Description of Artificial Sequence: Synthetic oligonucleotide
  Antisense strand to SEQ ID NO: 1370082
ugugcaggcaaacacaaua

SEQ ID NO: 1370084 - RNA, 19 nt, Artificial Sequence
  Description of Artificial Sequence: Synthetic oligonucleotide
  Sense strand starting at position 1139 of SEQ ID NO: 1242748
uuguguuugccugcacauu

SEQ ID NO: 1370085 - RNA, 19 nt, Artificial Sequence
  Description of Artificial Sequence: Synthetic oligonucleotide
  Antisense strand to SEQ ID NO: 1370084
aaugugcaggcaaacacaa

SEQ ID NO: 1370086 - RNA, 19 nt, Artificial Sequence
  Description of Artificial Sequence: Synthetic oligonucleotide
  Sense strand starting at position 1217 of SEQ ID NO: 1242748
ccugaaagucgggacugau

SEQ ID NO: 1370087 - RNA, 19 nt, Artificial Sequence
  Description of Artificial Sequence: Synthetic oligonucleotide
  Antisense strand to SEQ ID NO: 1370086
aucagucccgacuuucagg

SEQ ID NO: 1370088 - RNA, 19 nt, Artificial Sequence
  Description of Artificial Sequence: Synthetic oligonucleotide
  Sense strand starting at position 1242 of SEQ ID NO: 1242748
acagaaagauggcagauaa

SEQ ID NO: 1370089 - RNA, 19 nt, Artificial Sequence
  Description of Artificial Sequence: Synthetic oligonucleotide
  Antisense strand to SEQ ID NO: 1370088
uuaucugccaucuuucugu

SEQ ID NO: 1370090 - RNA, 19 nt, Artificial Sequence
  Description of Artificial Sequence: Synthetic oligonucleotide
  Sense strand starting at position 1256 of SEQ ID NO: 1242748
gauaaaggcgcucagucau

SEQ ID NO: 1370091 - RNA, 19 nt, Artificial Sequence
  Description of Artificial Sequence: Synthetic oligonucleotide
  Antisense strand to SEQ ID NO: 1370090
augacugagcgccuuuauc

SEQ ID NO: 1370092 - RNA, 19 nt, Artificial Sequence
  Description of Artificial Sequence: Synthetic oligonucleotide
  Sense strand starting at position 1263 of SEQ ID NO: 1242748
gcgcucagucauucucacu

SEQ ID NO: 1370093 - RNA, 19 nt, Artificial Sequence
  Description of Artificial Sequence: Synthetic oligonucleotide
  Antisense strand to SEQ ID NO: 1370092
agugagaaugacugagcgc

SEQ ID NO: 1370094 - RNA, 19 nt, Artificial Sequence
  Description of Artificial Sequence: Synthetic oligonucleotide
  Sense strand starting at position 1269 of SEQ ID NO: 1242748
agucauucucacugaaaga

SEQ ID NO: 1370095 - RNA, 19 nt, Artificial Sequence
  Description of Artificial Sequence: Synthetic oligonucleotide
  Antisense strand to SEQ ID NO: 1370094
ucuuucagugagaaugacu

SEQ ID NO: 1370096 - RNA, 19 nt, Artificial Sequence
  Description of Artificial Sequence: Synthetic oligonucleotide
  Sense strand starting at position 1347 of SEQ ID NO: 1242748
aaauuaguugcucguguag

SEQ ID NO: 1370097 - RNA, 19 nt, Artificial Sequence
  Description of Artificial Sequence: Synthetic oligonucleotide
  Antisense strand to SEQ ID NO: 1370096
cuacacgagcaacuaauuu

SEQ ID NO: 1370098 - RNA, 19 nt, Artificial Sequence
  Description of Artificial Sequence: Synthetic oligonucleotide
  Sense strand starting at position 1349 of SEQ ID NO: 1242748
auuaguugcucguguagga

SEQ ID NO: 1370099 - RNA, 19 nt, Artificial Sequence
  Description of Artificial Sequence: Synthetic oligonucleotide
  Antisense strand to SEQ ID NO: 1370098
uccuacacgagcaacuaau

SEQ ID NO: 1370100 - RNA, 19 nt, Artificial Sequence
  Description of Artificial Sequence: Synthetic oligonucleotide
  Sense strand starting at position 1356 of SEQ ID NO: 1242748
gcucguguaggaugacaau

SEQ ID NO: 1370101 - RNA, 19 nt, Artificial Sequence
  Description of Artificial Sequence: Synthetic oligonucleotide
  Antisense strand to SEQ ID NO: 1370100
auugucauccuacacgagc

SEQ ID NO: 1370102 - RNA, 19 nt, Artificial Sequence
  Description of Artificial Sequence: Synthetic oligonucleotide
  Sense strand starting at position 2171 of SEQ ID NO: 1242748
gagugcuugggaggcgaau

SEQ ID NO: 1370103 - RNA, 19 nt, Artificial Sequence
  Description of Artificial Sequence: Synthetic oligonucleotide
  Antisense strand to SEQ ID NO: 1370102
auucgccucccaagcacuc

SEQ ID NO: 1370104 - RNA, 19 nt, Artificial Sequence
  Description of Artificial Sequence: Synthetic oligonucleotide
  Sense strand starting at position 2372 of SEQ ID NO: 1242748
ggcuaaagacgugaaggau

SEQ ID NO: 1370105 - RNA, 19 nt, Artificial Sequence
  Description of Artificial Sequence: Synthetic oligonucleotide
  Antisense strand to SEQ ID NO: 1370104
auccuucacgucuuuagcc

SEQ ID NO: 1370106 - RNA, 19 nt, Artificial Sequence
  Description of Artificial Sequence: Synthetic oligonucleotide
  Sense strand starting at position 2394 of SEQ ID NO: 1242748
auuagaagucccgaagcau

SEQ ID NO: 1370107 - RNA, 19 nt, Artificial Sequence
  Description of Artificial Sequence: Synthetic oligonucleotide
  Antisense strand to SEQ ID NO: 1370106
augcuucgggacuucuaau

SEQ ID NO: 1370108 - RNA, 19 nt, Artificial Sequence
  Description of Artificial Sequence: Synthetic oligonucleotide
  Sense strand starting at position 2513 of SEQ ID NO: 1242748
gcgaguccucuucaacgau

SEQ ID NO: 1370109 - RNA, 19 nt, Artificial Sequence
  Description of Artificial Sequence: Synthetic oligonucleotide
  Antisense strand to SEQ ID NO: 1370108
aucguugaagaggacucgc

SEQ ID NO: 1370110 - RNA, 19 nt, Artificial Sequence
  Description of Artificial Sequence: Synthetic oligonucleotide
  Sense strand starting at position 2584 of SEQ ID NO: 1242748
cgcagauagcugugaauua

SEQ ID NO: 1370111 - RNA, 19 nt, Artificial Sequence
  Description of Artificial Sequence: Synthetic oligonucleotide
  Antisense strand to SEQ ID NO: 1370110
uaauucacagcuaucugcg

SEQ ID NO: 1370112 - RNA, 19 nt, Artificial Sequence
  Description of Artificial Sequence: Synthetic oligonucleotide
  Sense strand starting at position 2585 of SEQ ID NO: 1242748
gcagauagcugugaauuag

SEQ ID NO: 1370113 - RNA, 19 nt, Artificial Sequence
  Description of Artificial Sequence: Synthetic oligonucleotide
  Antisense strand to SEQ ID NO: 1370112
cuaauucacagcuaucugc

SEQ ID NO: 1370114 - RNA, 19 nt, Artificial Sequence
  Description of Artificial Sequence: Synthetic oligonucleotide
  Sense strand starting at position 2591 of SEQ ID NO: 1242748
agcugugaauuagccaaau

SEQ ID NO: 1370115 - RNA, 19 nt, Artificial Sequence
  Description of Artificial Sequence: Synthetic oligonucleotide
  Antisense strand to SEQ ID NO: 1370114
auuuggcuaauucacagcu

SEQ ID NO: 1370116 - RNA, 19 nt, Artificial Sequence
  Description of Artificial Sequence: Synthetic oligonucleotide
  Sense strand starting at position 2638 of SEQ ID NO: 1242748
ggcacagcccaucacuaau

SEQ ID NO: 1370117 - RNA, 19 nt, Artificial Sequence
  Description of Artificial Sequence: Synthetic oligonucleotide
  Antisense strand to SEQ ID NO: 1370116
auuagugaugggcugugcc

SEQ ID NO: 1370118 - RNA, 19 nt, Artificial Sequence
  Description of Artificial Sequence: Synthetic oligonucleotide
  Sense strand starting at position 2968 of SEQ ID NO: 1242748
cacguuagccucuagagua

SEQ ID NO: 1370119 - RNA, 19 nt, Artificial Sequence
  Description of Artificial Sequence: Synthetic oligonucleotide
  Antisense strand to SEQ ID NO: 1370118
uacucuagaggcuaacgug

SEQ ID NO: 1370120 - RNA, 19 nt, Artificial Sequence
  Description of Artificial Sequence: Synthetic oligonucleotide
  Sense strand starting at position 3455 of SEQ ID NO: 1242748
cuaggacucuucguaugag

SEQ ID NO: 1370121 - RNA, 19 nt, Artificial Sequence
  Description of Artificial Sequence: Synthetic oligonucleotide
  Antisense strand to SEQ ID NO: 1370120
cucauacgaagaguccuag

SEQ ID NO: 1370122 - RNA, 19 nt, Artificial Sequence
  Description of Artificial Sequence: Synthetic oligonucleotide
  Sense strand starting at position 103 of SEQ ID NO: 1242749
ccuggcuauccugaaugca

SEQ ID NO: 1370123 - RNA, 19 nt, Artificial Sequence
  Description of Artificial Sequence: Synthetic oligonucleotide
  Antisense strand to SEQ ID NO: 1370122
ugcauucaggauagccagg

SEQ ID NO: 1370124 - RNA, 19 nt, Artificial Sequence
  Description of Artificial Sequence: Synthetic oligonucleotide
  Sense strand starting at position 106 of SEQ ID NO: 1242749
ggcuauccugaaugcaaau

SEQ ID NO: 1370125 - RNA, 19 nt, Artificial Sequence
  Description of Artificial Sequence: Synthetic oligonucleotide
  Antisense strand to SEQ ID NO: 1370124
auuugcauucaggauagcc

SEQ ID NO: 1370126 - RNA, 19 nt, Artificial Sequence
  Description of Artificial Sequence: Synthetic oligonucleotide
  Sense strand starting at position 227 of SEQ ID NO: 1242749
caagcaguuuccguguaga

SEQ ID NO: 1370127 - RNA, 19 nt, Artificial Sequence
  Description of Artificial Sequence: Synthetic oligonucleotide
  Antisense strand to SEQ ID NO: 1370126
ucuacacggaaacugcuug

SEQ ID NO: 1370128 - RNA, 19 nt, Artificial Sequence
  Description of Artificial Sequence: Synthetic oligonucleotide
  Sense strand starting at position 230 of SEQ ID NO: 1242749
gcaguuuccguguagaaug

SEQ ID NO: 1370129 - RNA, 19 nt, Artificial Sequence
  Description of Artificial Sequence: Synthetic oligonucleotide
  Antisense strand to SEQ ID NO: 1370128
cauucuacacggaaacugc

SEQ ID NO: 1370130 - RNA, 19 nt, Artificial Sequence
  Description of Artificial Sequence: Synthetic oligonucleotide
  Sense strand starting at position 233 of SEQ ID NO: 1242749
guuuccguguagaaugguu

SEQ ID NO: 1370131 - RNA, 19 nt, Artificial Sequence
  Description of Artificial Sequence: Synthetic oligonucleotide
  Antisense strand to SEQ ID NO: 1370130
aaccauucuacacggaaac

SEQ ID NO: 1370132 - RNA, 19 nt, Artificial Sequence
  Description of Artificial Sequence: Synthetic oligonucleotide
  Sense strand starting at position 238 of SEQ ID NO: 1242749
cguguagaaugguucaauu

SEQ ID NO: 1370133 - RNA, 19 nt, Artificial Sequence
  Description of Artificial Sequence: Synthetic oligonucleotide
  Antisense strand to SEQ ID NO: 1370132
aauugaaccauucuacacg

SEQ ID NO: 1370134 - RNA, 19 nt, Artificial Sequence
  Description of Artificial Sequence: Synthetic oligonucleotide
  Sense strand starting at position 302 of SEQ ID NO: 1242749
guuuguuugagacgaggag

SEQ ID NO: 1370135 - RNA, 19 nt, Artificial Sequence
  Description of Artificial Sequence: Synthetic oligonucleotide
  Antisense strand to SEQ ID NO: 1370134
cuccucgucucaaacaaac

SEQ ID NO: 1370136 - RNA, 19 nt, Artificial Sequence
  Description of Artificial Sequence: Synthetic oligonucleotide
  Sense strand starting at position 303 of SEQ ID NO: 1242749
uuuguuugagacgaggagu

SEQ ID NO: 1370137 - RNA, 19 nt, Artificial Sequence
  Description of Artificial Sequence: Synthetic oligonucleotide
  Antisense strand to SEQ ID NO: 1370136
acuccucgucucaaacaaa

SEQ ID NO: 1370138 - RNA, 19 nt, Artificial Sequence
  Description of Artificial Sequence: Synthetic oligonucleotide
  Sense strand starting at position 1144 of SEQ ID NO: 1242749
uccuaugaauucuagacga

SEQ ID NO: 1370139 - RNA, 19 nt, Artificial Sequence
  Description of Artificial Sequence: Synthetic oligonucleotide
  Antisense strand to SEQ ID NO: 1370138
ucgucuagaauucauagga

SEQ ID NO: 1370140 - RNA, 19 nt, Artificial Sequence
  Description of Artificial Sequence: Synthetic oligonucleotide
  Sense strand starting at position 1250 of SEQ ID NO: 1242749
gggaaucacuucugacuag

SEQ ID NO: 1370141 - RNA, 19 nt, Artificial Sequence
  Description of Artificial Sequence: Synthetic oligonucleotide
  Antisense strand to SEQ ID NO: 1370140
cuagucagaagugauuccc

SEQ ID NO: 1370142 - RNA, 19 nt, Artificial Sequence
  Description of Artificial Sequence: Synthetic oligonucleotide
  Sense strand starting at position 1311 of SEQ ID NO: 1242749
acggcuuggaccuaaacuu

SEQ ID NO: 1370143 - RNA, 19 nt, Artificial Sequence
  Description of Artificial Sequence: Synthetic oligonucleotide
  Antisense strand to SEQ ID NO: 1370142
aaguuuagguccaagccgu

SEQ ID NO: 1370144 - RNA, 19 nt, Artificial Sequence
  Description of Artificial Sequence: Synthetic oligonucleotide
  Sense strand starting at position 1977 of SEQ ID NO: 1242749
gggaaauuccuaggccgag

SEQ ID NO: 1370145 - RNA, 19 nt, Artificial Sequence
  Description of Artificial Sequence: Synthetic oligonucleotide
  Antisense strand to SEQ ID NO: 1370144
cucggccuaggaauuuccc

SEQ ID NO: 1370146 - RNA, 19 nt, Artificial Sequence
  Description of Artificial Sequence: Synthetic oligonucleotide
  Sense strand starting at position 1978 of SEQ ID NO: 1242749
ggaaauuccuaggccgagu

SEQ ID NO: 1370147 - RNA, 19 nt, Artificial Sequence
  Description of Artificial Sequence: Synthetic oligonucleotide
  Antisense strand to SEQ ID NO: 1370146
acucggccuaggaauuucc

SEQ ID NO: 1370148 - RNA, 19 nt, Artificial Sequence
  Description of Artificial Sequence: Synthetic oligonucleotide
  Sense strand starting at position 2098 of SEQ ID NO: 1242749
gugcgaaucccaggcuugu

SEQ ID NO: 1370149 - RNA, 19 nt, Artificial Sequence
  Description of Artificial Sequence: Synthetic oligonucleotide
  Antisense strand to SEQ ID NO: 1370148
acaagccugggauucgcac

SEQ ID NO: 1370150 - RNA, 19 nt, Artificial Sequence
  Description of Artificial Sequence: Synthetic oligonucleotide
  Sense strand starting at position 2102 of SEQ ID NO: 1242749
gaaucccaggcuugucaga

SEQ ID NO: 1370151 - RNA, 19 nt, Artificial Sequence
  Description of Artificial Sequence: Synthetic oligonucleotide
  Antisense strand to SEQ ID NO: 1370150
ucugacaagccugggauuc

SEQ ID NO: 1370152 - RNA, 19 nt, Artificial Sequence
  Description of Artificial Sequence: Synthetic oligonucleotide
  Sense strand starting at position 2285 of SEQ ID NO: 1242749
uucguuuccuacucugcaa

SEQ ID NO: 1370153 - RNA, 19 nt, Artificial Sequence
  Description of Artificial Sequence: Synthetic oligonucleotide
  Antisense strand to SEQ ID NO: 1370152
uugcagaguaggaaacgaa

SEQ ID NO: 1370154 - RNA, 19 nt, Artificial Sequence
  Description of Artificial Sequence: Synthetic oligonucleotide
  Sense strand starting at position 2330 of SEQ ID NO: 1242749
uuauguaacuacguccuaa

SEQ ID NO: 1370155 - RNA, 19 nt, Artificial Sequence
  Description of Artificial Sequence: Synthetic oligonucleotide
  Antisense strand to SEQ ID NO: 1370154
uuaggacguaguuacauaa

SEQ ID NO: 1370156 - RNA, 19 nt, Artificial Sequence
  Description of Artificial Sequence: Synthetic oligonucleotide
  Sense strand starting at position 2341 of SEQ ID NO: 1242749
cguccuaagguacaaauua

SEQ ID NO: 1370157 - RNA, 19 nt, Artificial Sequence
  Description of Artificial Sequence: Synthetic oligonucleotide
  Antisense strand to SEQ ID NO: 1370156
uaauuuguaccuuaggacg

SEQ ID NO: 1370158 - RNA, 19 nt, Artificial Sequence
  Description of Artificial Sequence: Synthetic oligonucleotide
  Sense strand starting at position 2362 of SEQ ID NO: 1242749
gggcauacuauugguauua

SEQ ID NO: 1370159 - RNA, 19 nt, Artificial Sequence
  Description of Artificial Sequence: Synthetic oligonucleotide
  Antisense strand to SEQ ID NO: 1370158
uaauaccaauaguaugccc

SEQ ID NO: 1370160 - RNA, 19 nt, Artificial Sequence
  Description of Artificial Sequence: Synthetic oligonucleotide
  Sense strand starting at position 2363 of SEQ ID NO: 1242749
ggcauacuauugguauuau

SEQ ID NO: 1370161 - RNA, 19 nt, Artificial Sequence
  Description of Artificial Sequence: Synthetic oligonucleotide
  Antisense strand to SEQ ID NO: 1370160
auaauaccaauaguaugcc

SEQ ID NO: 1370162 - RNA, 19 nt, Artificial Sequence
  Description of Artificial Sequence: Synthetic oligonucleotide
  Sense strand starting at position 2364 of SEQ ID NO: 1242749
gcauacuauugguauuauu

SEQ ID NO: 1370163 - RNA, 19 nt, Artificial Sequence
  Description of Artificial Sequence: Synthetic oligonucleotide
  Antisense strand to SEQ ID NO: 1370162
aauaauaccaauaguaugc

SEQ ID NO: 1370164 - RNA, 19 nt, Artificial Sequence
  Description of Artificial Sequence: Synthetic oligonucleotide
  Sense strand starting at position 3502 of SEQ ID NO: 1242749
gcugcagugaucucugcau

SEQ ID NO: 1370165 - RNA, 19 nt, Artificial Sequence
  Description of Artificial Sequence: Synthetic oligonucleotide
  Antisense strand to SEQ ID NO: 1370164
augcagagaucacugcagc

SEQ ID NO: 1370166 - RNA, 19 nt, Artificial Sequence
  Description of Artificial Sequence: Synthetic oligonucleotide
  Sense strand starting at position 3506 of SEQ ID NO: 1242749
cagugaucucugcauggau

SEQ ID NO: 1370167 - RNA, 19 nt, Artificial Sequence
  Description of Artificial Sequence: Synthetic oligonucleotide
  Antisense strand to SEQ ID NO: 1370166
auccaugcagagaucacug

SEQ ID NO: 1370168 - RNA, 19 nt, Artificial Sequence
  Description of Artificial Sequence: Synthetic oligonucleotide
  Sense strand starting at position 3508 of SEQ ID NO: 1242749
gugaucucugcauggauug

SEQ ID NO: 1370169 - RNA, 19 nt, Artificial Sequence
  Description of Artificial Sequence: Synthetic oligonucleotide
  Antisense strand to SEQ ID NO: 1370168
caauccaugcagagaucac

SEQ ID NO: 1370170 - RNA, 19 nt, Artificial Sequence
  Description of Artificial Sequence: Synthetic oligonucleotide
  Sense strand starting at position 3517 of SEQ ID NO: 1242749
gcauggauuggucgugugu

SEQ ID NO: 1370171 - RNA, 19 nt, Artificial Sequence
  Description of Artificial Sequence: Synthetic oligonucleotide
  Antisense strand to SEQ ID NO: 1370170
acacacgaccaauccaugc

SEQ ID NO: 1370172 - RNA, 19 nt, Artificial Sequence
  Description of Artificial Sequence: Synthetic oligonucleotide
  Sense strand starting at position 3521 of SEQ ID NO: 1242749
ggauuggucgugugucuga

SEQ ID NO: 1370173 - RNA, 19 nt, Artificial Sequence
  Description of Artificial Sequence: Synthetic oligonucleotide
  Antisense strand to SEQ ID NO: 1370172
ucagacacacgaccaaucc

SEQ ID NO: 1370174 - RNA, 19 nt, Artificial Sequence
  Description of Artificial Sequence: Synthetic oligonucleotide
  Sense strand starting at position 3523 of SEQ ID NO: 1242749
auuggucgugugucugauu

SEQ ID NO: 1370175 - RNA, 19 nt, Artificial Sequence
  Description of Artificial Sequence: Synthetic oligonucleotide
  Antisense strand to SEQ ID NO: 1370174
aaucagacacacgaccaau

SEQ ID NO: 1370176 - RNA, 19 nt, Artificial Sequence
  Description of Artificial Sequence: Synthetic oligonucleotide
  Sense strand starting at position 3524 of SEQ ID NO: 1242749
uuggucgugugucugauuu

SEQ ID NO: 1370177 - RNA, 19 nt, Artificial Sequence
  Description of Artificial Sequence: Synthetic oligonucleotide
  Antisense strand to SEQ ID NO: 1370176
aaaucagacacacgaccaa

SEQ ID NO: 1370178 - RNA, 19 nt, Artificial Sequence
  Description of Artificial Sequence: Synthetic oligonucleotide
  Sense strand starting at position 3526 of SEQ ID NO: 1242749
ggucgugugucugauuucu

SEQ ID NO: 1370179 - RNA, 19 nt, Artificial Sequence
  Description of Artificial Sequence: Synthetic oligonucleotide
  Antisense strand to SEQ ID NO: 1370178
agaaaucagacacacgacc

SEQ ID NO: 1370180 - RNA, 19 nt, Artificial Sequence
  Description of Artificial Sequence: Synthetic oligonucleotide
  Sense strand starting at position 3528 of SEQ ID NO: 1242749
ucgugugucugauuucuuu

SEQ ID NO: 1370181 - RNA, 19 nt, Artificial Sequence
  Description of Artificial Sequence: Synthetic oligonucleotide
  Antisense strand to SEQ ID NO: 1370180
aaagaaaucagacacacga

SEQ ID NO: 1370182 - RNA, 19 nt, Artificial Sequence
  Description of Artificial Sequence: Synthetic oligonucleotide
  Sense strand starting at position 3838 of SEQ ID NO: 1242749
ccaaacugaugggauuaaa

SEQ ID NO: 1370183 - RNA, 19 nt, Artificial Sequence
  Description of Artificial Sequence: Synthetic oligonucleotide
  Antisense strand to SEQ ID NO: 1370182
uuuaaucccaucaguuugg

SEQ ID NO: 1370184 - RNA, 19 nt, Artificial Sequence
  Description of Artificial Sequence: Synthetic oligonucleotide
  Sense strand starting at position 3875 of SEQ ID NO: 1242749
cggccguucgugucugauu

SEQ ID NO: 1370185 - RNA, 19 nt, Artificial Sequence
  Description of Artificial Sequence: Synthetic oligonucleotide
  Antisense strand to SEQ ID NO: 1370184
aaucagacacgaacggccg

SEQ ID NO: 1370186 - RNA, 19 nt, Artificial Sequence
  Description of Artificial Sequence: Synthetic oligonucleotide
  Sense strand starting at position 3876 of SEQ ID NO: 1242749
ggccguucgugucugauuu

SEQ ID NO: 1370187 - RNA, 19 nt, Artificial Sequence
  Description of Artificial Sequence: Synthetic oligonucleotide
  Antisense strand to SEQ ID NO: 1370186
aaaucagacacgaacggcc

SEQ ID NO: 1370188 - RNA, 19 nt, Artificial Sequence
  Description of Artificial Sequence: Synthetic oligonucleotide
  Sense strand starting at position 3880 of SEQ ID NO: 1242749
guucgugucugauuucuau

SEQ ID NO: 1370189 - RNA, 19 nt, Artificial Sequence
  Description of Artificial Sequence: Synthetic oligonucleotide
  Antisense strand to SEQ ID NO: 1370188
auagaaaucagacacgaac

SEQ ID NO: 1370190 - RNA, 19 nt, Artificial Sequence
  Description of Artificial Sequence: Synthetic oligonucleotide
  Sense strand starting at position 3883 of SEQ ID NO: 1242749
cgugucugauuucuauaug

SEQ ID NO: 1370191 - RNA, 19 nt, Artificial Sequence
  Description of Artificial Sequence: Synthetic oligonucleotide
  Antisense strand to SEQ ID NO: 1370190
cauauagaaaucagacacg

SEQ ID NO: 1370192 - RNA, 19 nt, Artificial Sequence
  Description of Artificial Sequence: Synthetic oligonucleotide
  Sense strand starting at position 3884 of SEQ ID NO: 1242749
gugucugauuucuauaugu

SEQ ID NO: 1370193 - RNA, 19 nt, Artificial Sequence
  Description of Artificial Sequence: Synthetic oligonucleotide
  Antisense strand to SEQ ID NO: 1370192
acauauagaaaucagacac

SEQ ID NO: 1370194 - RNA, 19 nt, Artificial Sequence
  Description of Artificial Sequence: Synthetic oligonucleotide
  Sense strand starting at position 3910 of SEQ ID NO: 1242749
aagcgagcacucgugucua

SEQ ID NO: 1370195 - RNA, 19 nt, Artificial Sequence
  Description of Artificial Sequence: Synthetic oligonucleotide
  Antisense strand to SEQ ID NO: 1370194
uagacacgagugcucgcuu

SEQ ID NO: 1370196 - RNA, 19 nt, Artificial Sequence
  Description of Artificial Sequence: Synthetic oligonucleotide
  Sense strand starting at position 3912 of SEQ ID NO: 1242749
gcgagcacucgugucuaau

SEQ ID NO: 1370197 - RNA, 19 nt, Artificial Sequence
  Description of Artificial Sequence: Synthetic oligonucleotide
  Antisense strand to SEQ ID NO: 1370196
auuagacacgagugcucgc

SEQ ID NO: 1370198 - RNA, 19 nt, Artificial Sequence
  Description of Artificial Sequence: Synthetic oligonucleotide
  Sense strand starting at position 3913 of SEQ ID NO: 1242749
cgagcacucgugucuaauu

SEQ ID NO: 1370199 - RNA, 19 nt, Artificial Sequence
  Description of Artificial Sequence: Synthetic oligonucleotide
  Antisense strand to SEQ ID NO: 1370198
aauuagacacgagugcucg

SEQ ID NO: 1370200 - RNA, 19 nt, Artificial Sequence
  Description of Artificial Sequence: Synthetic oligonucleotide
  Sense strand starting at position 3914 of SEQ ID NO: 1242749
gagcacucgugucuaauuu

SEQ ID NO: 1370201 - RNA, 19 nt, Artificial Sequence
  Description of Artificial Sequence: Synthetic oligonucleotide
  Antisense strand to SEQ ID NO: 1370200
aaauuagacacgagugcuc

SEQ ID NO: 1370202 - RNA, 19 nt, Artificial Sequence
  Description of Artificial Sequence: Synthetic oligonucleotide
  Sense strand starting at position 2196 of SEQ ID NO: 1242750
agcugagcugccuaagauc

SEQ ID NO: 1370203 - RNA, 19 nt, Artificial Sequence
  Description of Artificial Sequence: Synthetic oligonucleotide
  Antisense strand to SEQ ID NO: 1370202
gaucuuaggcagcucagcu

SEQ ID NO: 1370204 - RNA, 19 nt, Artificial Sequence
  Description of Artificial Sequence: Synthetic oligonucleotide
  Sense strand starting at position 2327 of SEQ ID NO: 1242750
ccgguuauguuccaugggu

SEQ ID NO: 1370205 - RNA, 19 nt, Artificial Sequence
  Description of Artificial Sequence: Synthetic oligonucleotide
  Antisense strand to SEQ ID NO: 1370204
acccauggaacauaaccgg

SEQ ID NO: 1370206 - RNA, 19 nt, Artificial Sequence
  Description of Artificial Sequence: Synthetic oligonucleotide
  Sense strand starting at position 2328 of SEQ ID NO: 1242750
cgguuauguuccaugggug

SEQ ID NO: 1370207 - RNA, 19 nt, Artificial Sequence
  Description of Artificial Sequence: Synthetic oligonucleotide
  Antisense strand to SEQ ID NO: 1370206
cacccauggaacauaaccg

SEQ ID NO: 1370208 - RNA, 19 nt, Artificial Sequence
  Description of Artificial Sequence: Synthetic oligonucleotide
  Sense strand starting at position 2405 of SEQ ID NO: 1242750
gguuaaguccagggacuca

SEQ ID NO: 1370209 - RNA, 19 nt, Artificial Sequence
  Description of Artificial Sequence: Synthetic oligonucleotide
  Antisense strand to SEQ ID NO: 1370208
ugagucccuggacuuaacc

SEQ ID NO: 1370210 - RNA, 19 nt, Artificial Sequence
  Description of Artificial Sequence: Synthetic oligonucleotide
  Sense strand starting at position 2711 of SEQ ID NO: 1242750
cuaagaaccucugaggauu

SEQ ID NO: 1370211 - RNA, 19 nt, Artificial Sequence
  Description of Artificial Sequence: Synthetic oligonucleotide
  Antisense strand to SEQ ID NO: 1370210
aauccucagagguucuuag

SEQ ID NO: 1370212 - RNA, 19 nt, Artificial Sequence
  Description of Artificial Sequence: Synthetic oligonucleotide
  Sense strand starting at position 2722 of SEQ ID NO: 1242750
ugaggauuguugucugaaa

SEQ ID NO: 1370213 - RNA, 19 nt, Artificial Sequence
  Description of Artificial Sequence: Synthetic oligonucleotide
  Antisense strand to SEQ ID NO: 1370212
uuucagacaacaauccuca

SEQ ID NO: 1370214 - RNA, 19 nt, Artificial Sequence
  Description of Artificial Sequence: Synthetic oligonucleotide
  Sense strand starting at position 2915 of SEQ ID NO: 1242750
gcagguaaaucggaagguu

SEQ ID NO: 1370215 - RNA, 19 nt, Artificial Sequence
  Description of Artificial Sequence: Synthetic oligonucleotide
  Antisense strand to SEQ ID NO: 1370214
aaccuuccgauuuaccugc

SEQ ID NO: 1370216 - RNA, 19 nt, Artificial Sequence
  Description of Artificial Sequence: Synthetic oligonucleotide
  Sense strand starting at position 2918 of SEQ ID NO: 1242750
gguaaaucggaagguuaag

SEQ ID NO: 1370217 - RNA, 19 nt, Artificial Sequence
  Description of Artificial Sequence: Synthetic oligonucleotide
  Antisense strand to SEQ ID NO: 1370216
cuuaaccuuccgauuuacc
